United States Patent Application Publication US 2005/0136395 A1 - sequence listing, part 3

SEQ ID NO: 79488 - DNA, 25 bp, SARS Virus
ctttcatctgccataataagttgtc

SEQ ID NO: 79489 - DNA, 25 bp, SARS Virus
tttcatctgccgaaataagttgtca

SEQ ID NO: 79490 - DNA, 25 bp, SARS Virus
ttcatctgccgtaataagttgtcaa

SEQ ID NO: 79491 - DNA, 25 bp, SARS Virus
tcatctgccgtaataagttgtcaac

SEQ ID NO: 79492 - DNA, 25 bp, SARS Virus
catctgccgtaaaaagttgtcaacg

SEQ ID NO: 79493 - DNA, 25 bp, SARS Virus
atctgccgtaataagttgtcaacgg

SEQ ID NO: 79494 - DNA, 25 bp, SARS Virus
tctgccgtaataagttgtcaacgga

SEQ ID NO: 79495 - DNA, 25 bp, SARS Virus
ctgccgtaataaattgtcaacggac

SEQ ID NO: 79496 - DNA, 25 bp, SARS Virus
tgccgtaataagatgtcaacggact

SEQ ID NO: 79497 - DNA, 25 bp, SARS Virus
gccgtaataagtagtcaacggactt

SEQ ID NO: 79498 - DNA, 25 bp, SARS Virus
ccgtaataagttatcaacggacttt

SEQ ID NO: 79499 - DNA, 25 bp, SARS Virus
cgtaataagttgacaacggactttg

SEQ ID NO: 79500 - DNA, 25 bp, SARS Virus
gtaataagttgtaaacggactttgg

SEQ ID NO: 79501 - DNA, 25 bp, SARS Virus
taataagttgtcaacggactttgga

SEQ ID NO: 79502 - DNA, 25 bp, SARS Virus
aataagttgtcaacggactttggat

SEQ ID NO: 79503 - DNA, 25 bp, SARS Virus
ataagttgtcaaaggactttggatg

SEQ ID NO: 79504 - DNA, 25 bp, SARS Virus
taagttgtcaacagactttggatga

SEQ ID NO: 79505 - DNA, 25 bp, SARS Virus
aagttgtcaacgaactttggatgaa

SEQ ID NO: 79506 - DNA, 25 bp, SARS Virus
agttgtcaacggactttggatgaaa

SEQ ID NO: 79507 - DNA, 25 bp, SARS Virus
gttgtcaacggaatttggatgaaat

SEQ ID NO: 79508 - DNA, 25 bp, SARS Virus
ttgtcaacggacattggatgaaatg

SEQ ID NO: 79509 - DNA, 25 bp, SARS Virus
tgtcaacggactatggatgaaatga

SEQ ID NO: 79510 - DNA, 25 bp, SARS Virus
gtcaacggacttaggatgaaatgag

SEQ ID NO: 79511 - DNA, 25 bp, SARS Virus
tcaacggactttagatgaaatgagt

SEQ ID NO: 79512 - DNA, 25 bp, SARS Virus
caacggactttgaatgaaatgagtc

SEQ ID NO: 79513 - DNA, 25 bp, SARS Virus
aacggactttggatgaaatgagtct

SEQ ID NO: 79514 - DNA, 25 bp, SARS Virus
acggactttggaagaaatgagtctc

SEQ ID NO: 79515 - DNA, 25 bp, SARS Virus
cggactttggataaaatgagtctcg

SEQ ID NO: 79516 - DNA, 25 bp, SARS Virus
ggactttggatgaaatgagtctcgt

SEQ ID NO: 79517 - DNA, 25 bp, SARS Virus
gactttggatgaaatgagtctcgtc

SEQ ID NO: 79518 - DNA, 25 bp, SARS Virus
actttggatgaaatgagtctcgtct

SEQ ID NO: 79519 - DNA, 25 bp, SARS Virus
ctttggatgaaaagagtctcgtctc

SEQ ID NO: 79520 - DNA, 25 bp, SARS Virus
tttggatgaaataagtctcgtctct

SEQ ID NO: 79521 - DNA, 25 bp, SARS Virus
ttggatgaaatgagtctcgtctctg

SEQ ID NO: 79522 - DNA, 25 bp, SARS Virus
tggatgaaatgaatctcgtctctga

SEQ ID NO: 79523 - DNA, 25 bp, SARS Virus
ggatgaaatgagactcgtctctgaa

SEQ ID NO: 79524 - DNA, 25 bp, SARS Virus
gatgaaatgagtatcgtctctgaat

SEQ ID NO: 79525 - DNA, 25 bp, SARS Virus
atgaaatgagtcacgtctctgaatc

SEQ ID NO: 79526 - DNA, 25 bp, SARS Virus
tgaaatgagtctagtctctgaatct

SEQ ID NO: 79527 - DNA, 25 bp, SARS Virus
gaaatgagtctcatctctgaatctc

SEQ ID NO: 79528 - DNA, 25 bp, SARS Virus
aaatgagtctcgactctgaatctcc

SEQ ID NO: 79529 - DNA, 25 bp, SARS Virus
aatgagtctcgtatctgaatctcct

SEQ ID NO: 79530 - DNA, 25 bp, SARS Virus
atgagtctcgtcactgaatctccta

SEQ ID NO: 79531 - DNA, 25 bp, SARS Virus
tgagtctcgtctatgaatctcctaa

SEQ ID NO: 79532 - DNA, 25 bp, SARS Virus
gagtctcgtctcagaatctcctaaa

SEQ ID NO: 79533 - DNA, 25 bp, SARS Virus
agtctcgtctctaaatctcctaaaa

SEQ ID NO: 79534 - DNA, 25 bp, SARS Virus
gtctcgtctctgaatctcctaaaat

SEQ ID NO: 79535 - DNA, 25 bp, SARS Virus
tctcgtctctgaatctcctaaaatt

SEQ ID NO: 79536 - DNA, 25 bp, SARS Virus
ctcgtctctgaaactcctaaaattc

SEQ ID NO: 79537 - DNA, 25 bp, SARS Virus
tcgtctctgaatatcctaaaattcg

SEQ ID NO: 79538 - DNA, 25 bp, SARS Virus
cgtctctgaatcacctaaaattcgg

SEQ ID NO: 79539 - DNA, 25 bp, SARS Virus
gtctctgaatctactaaaattcggg

SEQ ID NO: 79540 - DNA, 25 bp, SARS Virus
tctctgaatctcataaaattcgggt

SEQ ID NO: 79541 - DNA, 25 bp, SARS Virus
ctctgaatctccaaaaattcgggtc

SEQ ID NO: 79542 - DNA, 25 bp, SARS Virus
tctgaatctcctaaaattcgggtct

SEQ ID NO: 79543 - DNA, 25 bp, SARS Virus
ctgaatctcctaaaattcgggtcta

SEQ ID NO: 79544 - DNA, 25 bp, SARS Virus
tgaatctcctaaaattcgggtctag

SEQ ID NO: 79545 - DNA, 25 bp, SARS Virus
gaatctcctaaaattcgggtctagt

SEQ ID NO: 79546 - DNA, 25 bp, SARS Virus
aatctcctaaaaatcgggtctagtg

SEQ ID NO: 79547 - DNA, 25 bp, SARS Virus
atctcctaaaatacgggtctagtgt

SEQ ID NO: 79548 - DNA, 25 bp, SARS Virus
tctcctaaaattagggtctagtgtt

SEQ ID NO: 79549 - DNA, 25 bp, SARS Virus
ctcctaaaattcaggtctagtgttt

SEQ ID NO: 79550 - DNA, 25 bp, SARS Virus
tcctaaaattcgagtctagtgttta

SEQ ID NO: 79551 - DNA, 25 bp, SARS Virus
cctaaaattcggatctagtgtttac

SEQ ID NO: 79552 - DNA, 25 bp, SARS Virus
ctaaaattcgggactagtgtttacc

SEQ ID NO: 79553 - DNA, 25 bp, SARS Virus
taaaattcgggtatagtgtttacct

SEQ ID NO: 79554 - DNA, 25 bp, SARS Virus
aaaattcgggtcaagtgtttacctt

SEQ ID NO: 79555 - DNA, 25 bp, SARS Virus
aaattcgggtctagtgtttaccttt

SEQ ID NO: 79556 - DNA, 25 bp, SARS Virus
aattcgggtctaatgtttacctttg

SEQ ID NO: 79557 - DNA, 25 bp, SARS Virus
attcgggtctagagtttacctttga

SEQ ID NO: 79558 - DNA, 25 bp, SARS Virus
ttcgggtctagtatttacctttgac

SEQ ID NO: 79559 - DNA, 25 bp, SARS Virus
tcgggtctagtgattacctttgact

SEQ ID NO: 79560 - DNA, 25 bp, SARS Virus
cgggtctagtgtatacctttgactg

SEQ ID NO: 79561 - DNA, 25 bp, SARS Virus
gggtctagtgttaacctttgactga

SEQ ID NO: 79562 - DNA, 25 bp, SARS Virus
ggtctagtgtttacctttgactgaa

SEQ ID NO: 79563 - DNA, 25 bp, SARS Virus
gtctagtgtttaactttgactgaaa

SEQ ID NO: 79564 - DNA, 25 bp, SARS Virus
tctagtgtttacatttgactgaaag

SEQ ID NO: 79565 - DNA, 25 bp, SARS Virus
ctagtgtttaccattgactgaaaga

SEQ ID NO: 79566 - DNA, 25 bp, SARS Virus
tagtgtttacctatgactgaaagag

SEQ ID NO: 79567 - DNA, 25 bp, SARS Virus
agtgtttaccttagactgaaagagc

SEQ ID NO: 79568 - DNA, 25 bp, SARS Virus
gtgtttacctttaactgaaagagct

SEQ ID NO: 79569 - DNA, 25 bp, SARS Virus
tgtttacctttgactgaaagagctc

SEQ ID NO: 79570 - DNA, 25 bp, SARS Virus
gtttacctttgaatgaaagagctcg

SEQ ID NO: 79571 - DNA, 25 bp, SARS Virus
tttacctttgacagaaagagctcga

SEQ ID NO: 79572 - DNA, 25 bp, SARS Virus
ttacctttgactaaaagagctcgag

SEQ ID NO: 79573 - DNA, 25 bp, SARS Virus
tacctttgactgaaagagctcgagc

SEQ ID NO: 79574 - DNA, 25 bp, SARS Virus
acctttgactgaaagagctcgagcg

SEQ ID NO: 79575 - DNA, 25 bp, SARS Virus
cctttgactgaaagagctcgagcga

SEQ ID NO: 79576 - DNA, 25 bp, SARS Virus
ctttgactgaaaaagctcgagcgat

SEQ ID NO: 79577 - DNA, 25 bp, SARS Virus
tttgactgaaagagctcgagcgata

SEQ ID NO: 79578 - DNA, 25 bp, SARS Virus
ttgactgaaagaactcgagcgatac

SEQ ID NO: 79579 - DNA, 25 bp, SARS Virus
tgactgaaagagatcgagcgatacc

SEQ ID NO: 79580 - DNA, 25 bp, SARS Virus
gactgaaagagcacgagcgatacct

SEQ ID NO: 79581 - DNA, 25 bp, SARS Virus
actgaaagagctagagcgataccta

SEQ ID NO: 79582 - DNA, 25 bp, SARS Virus
ctgaaagagctcaagcgatacctac

SEQ ID NO: 79583 - DNA, 25 bp, SARS Virus
tgaaagagctcgagcgatacctact

SEQ ID NO: 79584 - DNA, 25 bp, SARS Virus
gaaagagctcgaacgatacctactt

SEQ ID NO: 79585 - DNA, 25 bp, SARS Virus
aaagagctcgagagatacctactta

SEQ ID NO: 79586 - DNA, 25 bp, SARS Virus
aagagctcgagcaatacctacttaa

SEQ ID NO: 79587 - DNA, 25 bp, SARS Virus
agagctcgagcgatacctacttaag

SEQ ID NO: 79588 - DNA, 25 bp, SARS Virus
gagctcgagcgaaacctacttaagt

SEQ ID NO: 79589 - DNA, 25 bp, SARS Virus
agctcgagcgatacctacttaagta

SEQ ID NO: 79590 - DNA, 25 bp, SARS Virus
gctcgagcgataactacttaagtat

SEQ ID NO: 79591 - DNA, 25 bp, SARS Virus
ctcgagcgatacatacttaagtatg

SEQ ID NO: 79592 - DNA, 25 bp, SARS Virus
tcgagcgataccaacttaagtatgt

SEQ ID NO: 79593 - DNA, 25 bp, SARS Virus
cgagcgatacctacttaagtatgtc

SEQ ID NO: 79594 - DNA, 25 bp, SARS Virus
gagcgatacctaattaagtatgtcg

SEQ ID NO: 79595 - DNA, 25 bp, SARS Virus
agcgatacctacataagtatgtcgc

SEQ ID NO: 79596 - DNA, 25 bp, SARS Virus
gcgatacctactaaagtatgtcgct

SEQ ID NO: 79597 - DNA, 25 bp, SARS Virus
cgatacctacttaagtatgtcgcta

SEQ ID NO: 79598 - DNA, 25 bp, SARS Virus
gatacctacttaagtatgtcgctat

SEQ ID NO: 79599 - DNA, 25 bp, SARS Virus
atacctacttaaatatgtcgctata

SEQ ID NO: 79600 - DNA, 25 bp, SARS Virus
tacctacttaagaatgtcgctatat

SEQ ID NO: 79601 - DNA, 25 bp, SARS Virus
acctacttaagtatgtcgctatatt

SEQ ID NO: 79602 - DNA, 25 bp, SARS Virus
cctacttaagtaagtcgctatattc

SEQ ID NO: 79603 - DNA, 25 bp, SARS Virus
ctacttaagtatatcgctatattcg

SEQ ID NO: 79604 - DNA, 25 bp, SARS Virus
tacttaagtatgacgctatattcga

SEQ ID NO: 79605 - DNA, 25 bp, SARS Virus
acttaagtatgtagctatattcgag

SEQ ID NO: 79606 - DNA, 25 bp, SARS Virus
cttaagtatgtcactatattcgagc

SEQ ID NO: 79607 - DNA, 25 bp, SARS Virus
ttaagtatgtcgatatattcgagct

SEQ ID NO: 79608 - DNA, 25 bp, SARS Virus
taagtatgtcgcaatattcgagctc

SEQ ID NO: 79609 - DNA, 25 bp, SARS Virus
aagtatgtcgctatattcgagctcc

SEQ ID NO: 79610 - DNA, 25 bp, SARS Virus
agtatgtcgctaaattcgagctccc

SEQ ID NO: 79611 - DNA, 25 bp, SARS Virus
gtatgtcgctatattcgagctcccg

SEQ ID NO: 79612 - DNA, 25 bp, SARS Virus
tatgtcgctataatcgagctcccga

SEQ ID NO: 79613 - DNA, 25 bp, SARS Virus
atgtcgctatatacgagctcccgat

SEQ ID NO: 79614 - DNA, 25 bp, SARS Virus
tgtcgctatattagagctcccgata

SEQ ID NO: 79615 - DNA, 25 bp, SARS Virus
gtcgctatattcaagctcccgatac

SEQ ID NO: 79616 - DNA, 25 bp, SARS Virus
tcgctatattcgagctcccgatacg

SEQ ID NO: 79617 - DNA, 25 bp, SARS Virus
cgctatattcgaactcccgatacgg

SEQ ID NO: 79618 - DNA, 25 bp, SARS Virus
gctatattcgagatcccgatacgga

SEQ ID NO: 79619 - DNA, 25 bp, SARS Virus
ctatattcgagcacccgatacggaa

SEQ ID NO: 79620 - DNA, 25 bp, SARS Virus
tatattcgagctaccgatacggaag

SEQ ID NO: 79621 - DNA, 25 bp, SARS Virus
atattcgagctcacgatacggaagc

SEQ ID NO: 79622 - DNA, 25 bp, SARS Virus
tattcgagctccagatacggaagct

SEQ ID NO: 79623 - DNA, 25 bp, SARS Virus
attcgagctcccaatacggaagctt

SEQ ID NO: 79624 - DNA, 25 bp, SARS Virus
ttcgagctcccgatacggaagcttg

SEQ ID NO: 79625 - DNA, 25 bp, SARS Virus
tcgagctcccgaaacggaagcttgt

SEQ ID NO: 79626 - DNA, 25 bp, SARS Virus
cgagctcccgatacggaagcttgtg

SEQ ID NO: 79627 - DNA, 25 bp, SARS Virus
gagctcccgataaggaagcttgtgt

SEQ ID NO: 79628 - DNA, 25 bp, SARS Virus
agctcccgatacagaagcttgtgta

SEQ ID NO: 79629 - DNA, 25 bp, SARS Virus
gctcccgatacgaaagcttgtgtag

SEQ ID NO: 79630 - DNA, 25 bp, SARS Virus
ctcccgatacggaagcttgtgtagc

SEQ ID NO: 79631 - DNA, 25 bp, SARS Virus
tcccgatacggaagcttgtgtagca

SEQ ID NO: 79632 - DNA, 25 bp, SARS Virus
cccgatacggaaacttgtgtagcaa

SEQ ID NO: 79633 - DNA, 25 bp, SARS Virus
ccgatacggaagattgtgtagcaaa

SEQ ID NO: 79634 - DNA, 25 bp, SARS Virus
cgatacggaagcatgtgtagcaaat

SEQ ID NO: 79635 - DNA, 25 bp, SARS Virus
gatacggaagctagtgtagcaaata

SEQ ID NO: 79636 - DNA, 25 bp, SARS Virus
atacggaagcttatgtagcaaatac

SEQ ID NO: 79637 - DNA, 25 bp, SARS Virus
tacggaagcttgagtagcaaatacc

SEQ ID NO: 79638 - DNA, 25 bp, SARS Virus
acggaagcttgtatagcaaatacct

SEQ ID NO: 79639 - DNA, 25 bp, SARS Virus
cggaagcttgtgaagcaaatacctc

SEQ ID NO: 79640 - DNA, 25 bp, SARS Virus
ggaagcttgtgtagcaaatacctct

SEQ ID NO: 79641 - DNA, 25 bp, SARS Virus
gaagcttgtgtaacaaatacctcta

SEQ ID NO: 79642 - DNA, 25 bp, SARS Virus
aagcttgtgtagaaaatacctctaa

SEQ ID NO: 79643 - DNA, 25 bp, SARS Virus
agcttgtgtagcaaatacctctaaa

SEQ ID NO: 79644 - DNA, 25 bp, SARS Virus
gcttgtgtagcaaatacctctaaag

SEQ ID NO: 79645 - DNA, 25 bp, SARS Virus
cttgtgtagcaaatacctctaaagt

SEQ ID NO: 79646 - DNA, 25 bp, SARS Virus
ttgtgtagcaaaaacctctaaagtc

SEQ ID NO: 79647 - DNA, 25 bp, SARS Virus
tgtgtagcaaatacctctaaagtca

SEQ ID NO: 79648 - DNA, 25 bp, SARS Virus
gtgtagcaaataactctaaagtcag

SEQ ID NO: 79649 - DNA, 25 bp, SARS Virus
tgtagcaaatacatctaaagtcagt

SEQ ID NO: 79650 - DNA, 25 bp, SARS Virus
gtagcaaataccactaaagtcagta

SEQ ID NO: 79651 - DNA, 25 bp, SARS Virus
tagcaaatacctataaagtcagtac

SEQ ID NO: 79652 - DNA, 25 bp, SARS Virus
agcaaatacctcaaaagtcagtacc

SEQ ID NO: 79653 - DNA, 25 bp, SARS Virus
gcaaatacctctaaagtcagtacct

SEQ ID NO: 79654 - DNA, 25 bp, SARS Virus
caaatacctctaaagtcagtacctg

SEQ ID NO: 79655 - DNA, 25 bp, SARS Virus
aaatacctctaaagtcagtacctgt

SEQ ID NO: 79656 - DNA, 25 bp, SARS Virus
aatacctctaaaatcagtacctgtt

SEQ ID NO: 79657 - DNA, 25 bp, SARS Virus
atacctctaaagacagtacctgttg

SEQ ID NO: 79658 - DNA, 25 bp, SARS Virus
tacctctaaagtaagtacctgttga

SEQ ID NO: 79659 - DNA, 25 bp, SARS Virus
acctctaaagtcagtacctgttgaa

SEQ ID NO: 79660 - DNA, 25 bp, SARS Virus
cctctaaagtcaatacctgttgaac

SEQ ID NO: 79661 - DNA, 25 bp, SARS Virus
ctctaaagtcagaacctgttgaacc

SEQ ID NO: 79662 - DNA, 25 bp, SARS Virus
tctaaagtcagtacctgttgaaccg

SEQ ID NO: 79663 - DNA, 25 bp, SARS Virus
ctaaagtcagtaactgttgaaccgc

SEQ ID NO: 79664 - DNA, 25 bp, SARS Virus
taaagtcagtacatgttgaaccgcc

SEQ ID NO: 79665 - DNA, 25 bp, SARS Virus
aaagtcagtaccagttgaaccgcca

SEQ ID NO: 79666 - DNA, 25 bp, SARS Virus
aagtcagtacctattgaaccgccag

SEQ ID NO: 79667 - DNA, 25 bp, SARS Virus
agtcagtacctgatgaaccgccaga

SEQ ID NO: 79668 - DNA, 25 bp, SARS Virus
gtcagtacctgtagaaccgccagaa

SEQ ID NO: 79669 - DNA, 25 bp, SARS Virus
tcagtacctgttaaaccgccagaag

SEQ ID NO: 79670 - DNA, 25 bp, SARS Virus
cagtacctgttgaaccgccagaagt

SEQ ID NO: 79671 - DNA, 25 bp, SARS Virus
agtacctgttgaaccgccagaagta

SEQ ID NO: 79672 - DNA, 25 bp, SARS Virus
gtacctgttgaaacgccagaagtaa

SEQ ID NO: 79673 - DNA, 25 bp, SARS Virus
gcgacgattatgccattagaccctg

SEQ ID NO: 79674 - DNA, 25 bp, SARS Virus
cgacgattatgacattagaccctga

SEQ ID NO: 79675 - DNA, 25 bp, SARS Virus
gacgattatgaccttagaccctgat

SEQ ID NO: 79676 - DNA, 25 bp, SARS Virus
acgattatgacactagaccctgatg

SEQ ID NO: 79677 - DNA, 25 bp, SARS Virus
cgattatgacatcagaccctgatgt

SEQ ID NO: 79678 - DNA, 25 bp, SARS Virus
gattatgacattcgaccctgatgtt

SEQ ID NO: 79679 - DNA, 25 bp, SARS Virus
attatgacattacaccctgatgttt

SEQ ID NO: 79680 - DNA, 25 bp, SARS Virus
ttatgacattagcccctgatgtttt

SEQ ID NO: 79681 - DNA, 25 bp, SARS Virus
tatgacattagaccctgatgttttc

SEQ ID NO: 79682 - DNA, 25 bp, SARS Virus
atgacattagaccctgatgttttct

SEQ ID NO: 79683 - DNA, 25 bp, SARS Virus
tgacattagaccctgatgttttctc

SEQ ID NO: 79684 - DNA, 25 bp, SARS Virus
gacattagaccccgatgttttctct

SEQ ID NO: 79685 - DNA, 25 bp, SARS Virus
acattagaccctcatgttttctctt

SEQ ID NO: 79686 - DNA, 25 bp, SARS Virus
cattagaccctgctgttttctcttc

SEQ ID NO: 79687 - DNA, 25 bp, SARS Virus
attagaccctgacgttttctcttcg

SEQ ID NO: 79688 - DNA, 25 bp, SARS Virus
ttagaccctgatcttttctcttcgg

SEQ ID NO: 79689 - DNA, 25 bp, SARS Virus
tagaccctgatgctttctcttcggg

SEQ ID NO: 79690 - DNA, 25 bp, SARS Virus
agaccctgatgtcttctcttcgggg

SEQ ID NO: 79691 - DNA, 25 bp, SARS Virus
gaccctgatgttctctcttcggggt

SEQ ID NO: 79692 - DNA, 25 bp, SARS Virus
accctgatgtttcctcttcggggtc

SEQ ID NO: 79693 - DNA, 25 bp, SARS Virus
ccctgatgttttctcttcggggtcg

SEQ ID NO: 79694 - DNA, 25 bp, SARS Virus
cctgatgttttcccttcggggtcgt

SEQ ID NO: 79695 - DNA, 25 bp, SARS Virus
ctgatgttttctcttcggggtcgtg

SEQ ID NO: 79696 - DNA, 25 bp, SARS Virus
tgatgttttctcctcggggtcgtgt

SEQ ID NO: 79697 - DNA, 25 bp, SARS Virus
gatgttttctctccggggtcgtgta

SEQ ID NO: 79698 - DNA, 25 bp, SARS Virus
atgttttctcttcggggtcgtgtac

SEQ ID NO: 79699 - DNA, 25 bp, SARS Virus
tgttttctcttccgggtcgtgtaca

SEQ ID NO: 79700 - DNA, 25 bp, SARS Virus
gttttctcttcgcggtcgtgtacat

SEQ ID NO: 79701 - DNA, 25 bp, SARS Virus
ttttctcttcggcgtcgtgtacata

SEQ ID NO: 79702 - DNA, 25 bp, SARS Virus
tttctcttcgggctcgtgtacatag

SEQ ID NO: 79703 - DNA, 25 bp, SARS Virus
ttctcttcggggccgtgtacataga

SEQ ID NO: 79704 - DNA, 25 bp, SARS Virus
tctcttcggggtcgtgtacatagat

SEQ ID NO: 79705 - DNA, 25 bp, SARS Virus
ctcttcggggtcctgtacatagatg

SEQ ID NO: 79706 - DNA, 25 bp, SARS Virus
tcttcggggtcgcgtacatagatgt

SEQ ID NO: 79707 - DNA, 25 bp, SARS Virus
cttcggggtcgtctacatagatgtt

SEQ ID NO: 79708 - DNA, 25 bp, SARS Virus
ttcggggtcgtgcacatagatgtta

SEQ ID NO: 79709 - DNA, 25 bp, SARS Virus
tcggggtcgtgtccatagatgttat

SEQ ID NO: 79710 - DNA, 25 bp, SARS Virus
cggggtcgtgtacatagatgttatc

SEQ ID NO: 79711 - DNA, 25 bp, SARS Virus
ggggtcgtgtacctagatgttatcc

SEQ ID NO: 79712 - DNA, 25 bp, SARS Virus
gggtcgtgtacacagatgttatcca

SEQ ID NO: 79713 - DNA, 25 bp, SARS Virus
ggtcgtgtacatcgatgttatccac

SEQ ID NO: 79714 - DNA, 25 bp, SARS Virus
gtcgtgtacatacatgttatccaca

SEQ ID NO: 79715 - DNA, 25 bp, SARS Virus
tcgtgtacatagctgttatccacag

SEQ ID NO: 79716 - DNA, 25 bp, SARS Virus
cgtgtacatagacgttatccacaga

SEQ ID NO: 79717 - DNA, 25 bp, SARS Virus
gtgtacatagatcttatccacagac

SEQ ID NO: 79718 - DNA, 25 bp, SARS Virus
tgtacatagatgctatccacagacg

SEQ ID NO: 79719 - DNA, 25 bp, SARS Virus
gtacatagatgtcatccacagacgt

SEQ ID NO: 79720 - DNA, 25 bp, SARS Virus
tacatagatgttctccacagacgtg

SEQ ID NO: 79721 - DNA, 25 bp, SARS Virus
acatagatgttacccacagacgtgt

SEQ ID NO: 79722 - DNA, 25 bp, SARS Virus
catagatgttatccacagacgtgtt

SEQ ID NO: 79723 - DNA, 25 bp, SARS Virus
atagatgttatccacagacgtgtta

SEQ ID NO: 79724 - DNA, 25 bp, SARS Virus
tagatgttatccccagacgtgttac

SEQ ID NO: 79725 - DNA, 25 bp, SARS Virus
agatgttatccacagacgtgttact

SEQ ID NO: 79726 - DNA, 25 bp, SARS Virus
gatgttatccaccgacgtgttactg

SEQ ID NO: 79727 - DNA, 25 bp, SARS Virus
atgttatccacacacgtgttactga

SEQ ID NO: 79728 - DNA, 25 bp, SARS Virus
tgttatccacagccgtgttactgac

SEQ ID NO: 79729 - DNA, 25 bp, SARS Virus
gttatccacagacgtgttactgact

SEQ ID NO: 79730 - DNA, 25 bp, SARS Virus
ttatccacagacctgttactgactg

SEQ ID NO: 79731 - DNA, 25 bp, SARS Virus
tatccacagacgcgttactgactgt

SEQ ID NO: 79732 - DNA, 25 bp, SARS Virus
atccacagacgtcttactgactgta

SEQ ID NO: 79733 - DNA, 25 bp, SARS Virus
tccacagacgtgctactgactgtaa

SEQ ID NO: 79734 - DNA, 25 bp, SARS Virus
ccacagacgtgtcactgactgtaac

SEQ ID NO: 79735 - DNA, 25 bp, SARS Virus
cacagacgtgttcctgactgtaacg

SEQ ID NO: 79736 - DNA, 25 bp, SARS Virus
acagacgtgttactgactgtaacgg

SEQ ID NO: 79737 - DNA, 25 bp, SARS Virus
cagacgtgttaccgactgtaacggt

SEQ ID NO: 79738 - DNA, 25 bp, SARS Virus
agacgtgttactcactgtaacggtt

SEQ ID NO: 79739 - DNA, 25 bp, SARS Virus
gacgtgttactgcctgtaacggttc

SEQ ID NO: 79740 - DNA, 25 bp, SARS Virus
acgtgttactgactgtaacggttct

SEQ ID NO: 79741 - DNA, 25 bp, SARS Virus
cgtgttactgaccgtaacggttctt

SEQ ID NO: 79742 - DNA, 25 bp, SARS Virus
gtgttactgactctaacggttcttt

SEQ ID NO: 79743 - DNA, 25 bp, SARS Virus
tgttactgactgcaacggttctttg

SEQ ID NO: 79744 - DNA, 25 bp, SARS Virus
gttactgactgtcacggttctttgg

SEQ ID NO: 79745 - DNA, 25 bp, SARS Virus
ttactgactgtaccggttctttgga

SEQ ID NO: 79746 - DNA, 25 bp, SARS Virus
tactgactgtaacggttctttggat

SEQ ID NO: 79747 - DNA, 25 bp, SARS Virus
actgactgtaaccgttctttggatg

SEQ ID NO: 79748 - DNA, 25 bp, SARS Virus
ctgactgtaacgcttctttggatga

SEQ ID NO: 79749 - DNA, 25 bp, SARS Virus
tgactgtaacggctctttggatgac

SEQ ID NO: 79750 - DNA, 25 bp, SARS Virus
gactgtaacggtcctttggatgact

SEQ ID NO: 79751 - DNA, 25 bp, SARS Virus
actgtaacggttctttggatgactc

SEQ ID NO: 79752 - DNA, 25 bp, SARS Virus
ctgtaacggttccttggatgactct

SEQ ID NO: 79753 - DNA, 25 bp, SARS Virus
tgtaacggttctctggatgactctc

SEQ ID NO: 79754 - DNA, 25 bp, SARS Virus
gtaacggttcttcggatgactctca

SEQ ID NO: 79755 - DNA, 25 bp, SARS Virus
taacggttctttcgatgactctcac

SEQ ID NO: 79756 - DNA, 25 bp, SARS Virus
aacggttctttgcatgactctcacg

SEQ ID NO: 79757 - DNA, 25 bp, SARS Virus
acggttctttggctgactctcacga

SEQ ID NO: 79758 - DNA, 25 bp, SARS Virus
cggttctttggacgactctcacgaa

SEQ ID NO: 79759 - DNA, 25 bp, SARS Virus
ggttctttggatcactctcacgaac

SEQ ID NO: 79760 - DNA, 25 bp, SARS Virus
gttctttggatgcctctcacgaaca

SEQ ID NO: 79761 - DNA, 25 bp, SARS Virus
ttctttggatgactctcacgaacaa

SEQ ID NO: 79762 - DNA, 25 bp, SARS Virus
tctttggatgaccctcacgaacaag

SEQ ID NO: 79763 - DNA, 25 bp, SARS Virus
ctttggatgactctcacgaacaaga

SEQ ID NO: 79764 - DNA, 25 bp, SARS Virus
tttggatgactcccacgaacaagaa

SEQ ID NO: 79765 - DNA, 25 bp, SARS Virus
ttggatgactctcacgaacaagaag

SEQ ID NO: 79766 - DNA, 25 bp, SARS Virus
tggatgactctcccgaacaagaagt

SEQ ID NO: 79767 - DNA, 25 bp, SARS Virus
ggatgactctcacgaacaagaagtg

SEQ ID NO: 79768 - DNA, 25 bp, SARS Virus
gatgactctcaccaacaagaagtga

SEQ ID NO: 79769 - DNA, 25 bp, SARS Virus
atgactctcacgcacaagaagtgaa

SEQ ID NO: 79770 - DNA, 25 bp, SARS Virus
tgactctcacgaccaagaagtgaat

SEQ ID NO: 79771 - DNA, 25 bp, SARS Virus
gactctcacgaacaagaagtgaatg

SEQ ID NO: 79772 - DNA, 25 bp, SARS Virus
actctcacgaaccagaagtgaatga

SEQ ID NO: 79773 - DNA, 25 bp, SARS Virus
ctctcacgaacacgaagtgaatgac

SEQ ID NO: 79774 - DNA, 25 bp, SARS Virus
tctcacgaacaacaagtgaatgaca

SEQ ID NO: 79775 - DNA, 25 bp, SARS Virus
ctcacgaacaagcagtgaatgacag

SEQ ID NO: 79776 - DNA, 25 bp, SARS Virus
tcacgaacaagacgtgaatgacaga

SEQ ID NO: 79777 - DNA, 25 bp, SARS Virus
cacgaacaagaactgaatgacagaa

SEQ ID NO: 79778 - DNA, 25 bp, SARS Virus
acgaacaagaagcgaatgacagaac

SEQ ID NO: 79779 - DNA, 25 bp, SARS Virus
cgaacaagaagtcaatgacagaaca

SEQ ID NO: 79780 - DNA, 25 bp, SARS Virus
gaacaagaagtgcatgacagaacaa

SEQ ID NO: 79781 - DNA, 25 bp, SARS Virus
aacaagaagtgactgacagaacaaa

SEQ ID NO: 79782 - DNA, 25 bp, SARS Virus
acaagaagtgaacgacagaacaaac

SEQ ID NO: 79783 - DNA, 25 bp, SARS Virus
caagaagtgaatcacagaacaaact

SEQ ID NO: 79784 - DNA, 25 bp, SARS Virus
aagaagtgaatgccagaacaaacta

SEQ ID NO: 79785 - DNA, 25 bp, SARS Virus
agaagtgaatgacagaacaaactac

SEQ ID NO: 79786 - DNA, 25 bp, SARS Virus
gaagtgaatgaccgaacaaactacc

SEQ ID NO: 79787 - DNA, 25 bp, SARS Virus
aagtgaatgacacaacaaactacca

SEQ ID NO: 79788 - DNA, 25 bp, SARS Virus
agtgaatgacagcacaaactaccat

SEQ ID NO: 79789 - DNA, 25 bp, SARS Virus
gtgaatgacagaccaaactaccatc

SEQ ID NO: 79790 - DNA, 25 bp, SARS Virus
tgaatgacagaacaaactaccatct

SEQ ID NO: 79791 - DNA, 25 bp, SARS Virus
gaatgacagaaccaactaccatctc

SEQ ID NO: 79792 - DNA, 25 bp, SARS Virus
aatgacagaacacactaccatctca

SEQ ID NO: 79793 - DNA, 25 bp, SARS Virus
atgacagaacaacctaccatctcac

SEQ ID NO: 79794 - DNA, 25 bp, SARS Virus
tgacagaacaaactaccatctcacc

SEQ ID NO: 79795 - DNA, 25 bp, SARS Virus
gacagaacaaaccaccatctcacct

SEQ ID NO: 79796 - DNA, 25 bp, SARS Virus
acagaacaaactcccatctcacctt

SEQ ID NO: 79797 - DNA, 25 bp, SARS Virus
cagaacaaactaccatctcaccttc

SEQ ID NO: 79798 - DNA, 25 bp, SARS Virus
agaacaaactaccatctcaccttcc

SEQ ID NO: 79799 - DNA, 25 bp, SARS Virus
gaacaaactaccctctcaccttcct

SEQ ID NO: 79800 - DNA, 25 bp, SARS Virus
aacaaactaccacctcaccttcctg

SEQ ID NO: 79801 - DNA, 25 bp, SARS Virus
acaaactaccatctcaccttcctgt

SEQ ID NO: 79802 - DNA, 25 bp, SARS Virus
caaactaccatcccaccttcctgtc

SEQ ID NO: 79803 - DNA, 25 bp, SARS Virus
aaactaccatctcaccttcctgtcc

SEQ ID NO: 79804 - DNA, 25 bp, SARS Virus
aactaccatctccccttcctgtcca

SEQ ID NO: 79805 - DNA, 25 bp, SARS Virus
actaccatctcaccttcctgtccat

SEQ ID NO: 79806 - DNA, 25 bp, SARS Virus
ctaccatctcaccttcctgtccatc

SEQ ID NO: 79807 - DNA, 25 bp, SARS Virus
taccatctcaccctcctgtccatct

SEQ ID NO: 79808 - DNA, 25 bp, SARS Virus
accatctcacctccctgtccatctg

SEQ ID NO: 79809 - DNA, 25 bp, SARS Virus
ccatctcaccttcctgtccatctgg

SEQ ID NO: 79810 - DNA, 25 bp, SARS Virus
catctcaccttcctgtccatctgga

SEQ ID NO: 79811 - DNA, 25 bp, SARS Virus
atctcaccttcccgtccatctggaa

SEQ ID NO: 79812 - DNA, 25 bp, SARS Virus
tctcaccttcctctccatctggaaa

SEQ ID NO: 79813 - DNA, 25 bp, SARS Virus
ctcaccttcctgcccatctggaaaa

SEQ ID NO: 79814 - DNA, 25 bp, SARS Virus
tcaccttcctgtccatctggaaaaa

SEQ ID NO: 79815 - DNA, 25 bp, SARS Virus
caccttcctgtccatctggaaaaat

SEQ ID NO: 79816 - DNA, 25 bp, SARS Virus
accttcctgtccctctggaaaaatc

SEQ ID NO: 79817 - DNA, 25 bp, SARS Virus
ccttcctgtccacctggaaaaatct

SEQ ID NO: 79818 - DNA, 25 bp, SARS Virus
cttcctgtccatctggaaaaatctt

SEQ ID NO: 79819 - DNA, 25 bp, SARS Virus
ttcctgtccatccggaaaaatcttt

SEQ ID NO: 79820 - DNA, 25 bp, SARS Virus
tcctgtccatctcgaaaaatctttg

SEQ ID NO: 79821 - DNA, 25 bp, SARS Virus
cctgtccatctgcaaaaatctttgc

SEQ ID NO: 79822 - DNA, 25 bp, SARS Virus
ctgtccatctggcaaaatctttgcg

SEQ ID NO: 79823 - DNA, 25 bp, SARS Virus
tgtccatctggacaaatctttgcgg

SEQ ID NO: 79824 - DNA, 25 bp, SARS Virus
gtccatctggaacaatctttgcggg

SEQ ID NO: 79825 - DNA, 25 bp, SARS Virus
tccatctggaaacatctttgcgggc

SEQ ID NO: 79826 - DNA, 25 bp, SARS Virus
ccatctggaaaactctttgcgggca

SEQ ID NO: 79827 - DNA, 25 bp, SARS Virus
catctggaaaaacctttgcgggcat

SEQ ID NO: 79828 - DNA, 25 bp, SARS Virus
atctggaaaaatctttgcgggcatt

SEQ ID NO: 79829 - DNA, 25 bp, SARS Virus
tctggaaaaatccttgcgggcatta

SEQ ID NO: 79830 - DNA, 25 bp, SARS Virus
ctggaaaaatctctgcgggcattac

SEQ ID NO: 79831 - DNA, 25 bp, SARS Virus
tggaaaaatcttcgcgggcattacc

SEQ ID NO: 79832 - DNA, 25 bp, SARS Virus
ggaaaaatctttccgggcattacca

SEQ ID NO: 79833 - DNA, 25 bp, SARS Virus
gaaaaatctttgcgggcattaccac

SEQ ID NO: 79834 - DNA, 25 bp, SARS Virus
aaaaatctttgccggcattaccaca

SEQ ID NO: 79835 - DNA, 25 bp, SARS Virus
aaaatctttgcgcgcattaccacaa

SEQ ID NO: 79836 - DNA, 25 bp, SARS Virus
aaatctttgcggccattaccacaaa

SEQ ID NO: 79837 - DNA, 25 bp, SARS Virus
aatctttgcgggcattaccacaaaa

SEQ ID NO: 79838 - DNA, 25 bp, SARS Virus
atctttgcgggccttaccacaaaat

SEQ ID NO: 79839 - DNA, 25 bp, SARS Virus
tctttgcgggcactaccacaaaatt

SEQ ID NO: 79840 - DNA, 25 bp, SARS Virus
ctttgcgggcatcaccacaaaatta

SEQ ID NO: 79841 - DNA, 25 bp, SARS Virus
tttgcgggcattcccacaaaattat

SEQ ID NO: 79842 - DNA, 25 bp, SARS Virus
ttgcgggcattaccacaaaattatt

SEQ ID NO: 79843 - DNA, 25 bp, SARS Virus
tgcgggcattaccacaaaattattg

SEQ ID NO: 79844 - DNA, 25 bp, SARS Virus
gcgggcattaccccaaaattattgt

SEQ ID NO: 79845 - DNA, 25 bp, SARS Virus
cgggcattaccacaaaattattgtc

SEQ ID NO: 79846 - DNA, 25 bp, SARS Virus
gggcattaccaccaaattattgtct

SEQ ID NO: 79847 - DNA, 25 bp, SARS Virus
ggcattaccacacaattattgtctt

SEQ ID NO: 79848 - DNA, 25 bp, SARS Virus
gcattaccacaacattattgtcttc

SEQ ID NO: 79849 - DNA, 25 bp, SARS Virus
cattaccacaaacttattgtcttcc

SEQ ID NO: 79850 - DNA, 25 bp, SARS Virus
attaccacaaaactattgtcttcca

SEQ ID NO: 79851 - DNA, 25 bp, SARS Virus
ttaccacaaaatcattgtcttccaa

SEQ ID NO: 79852 - DNA, 25 bp, SARS Virus
taccacaaaattcttgtcttccaag

SEQ ID NO: 79853 - DNA, 25 bp, SARS Virus
accacaaaattactgtcttccaagt

SEQ ID NO: 79854 - DNA, 25 bp, SARS Virus
ccacaaaattatcgtcttccaagtc

SEQ ID NO: 79855 - DNA, 25 bp, SARS Virus
cacaaaattattctcttccaagtca

SEQ ID NO: 79856 - DNA, 25 bp, SARS Virus
acaaaattattgccttccaagtcag

SEQ ID NO: 79857 - DNA, 25 bp, SARS Virus
caaaattattgtcttccaagtcagt

SEQ ID NO: 79858 - DNA, 25 bp, SARS Virus
aaaattattgtcctccaagtcagtt

SEQ ID NO: 79859 - DNA, 25 bp, SARS Virus
aaattattgtctcccaagtcagttt

SEQ ID NO: 79860 - DNA, 25 bp, SARS Virus
aattattgtcttccaagtcagtttc

SEQ ID NO: 79861 - DNA, 25 bp, SARS Virus
attattgtcttccaagtcagtttcc

SEQ ID NO: 79862 - DNA, 25 bp, SARS Virus
ttattgtcttcccagtcagtttcca

SEQ ID NO: 79863 - DNA, 25 bp, SARS Virus
tattgtcttccacgtcagtttccag

SEQ ID NO: 79864 - DNA, 25 bp, SARS Virus
attgtcttccaactcagtttccaga

SEQ ID NO: 79865 - DNA, 25 bp, SARS Virus
ttgtcttccaagccagtttccagat

SEQ ID NO: 79866 - DNA, 25 bp, SARS Virus
tgtcttccaagtcagtttccagatt

SEQ ID NO: 79867 - DNA, 25 bp, SARS Virus
gtcttccaagtccgtttccagattg

SEQ ID NO: 79868 - DNA, 25 bp, SARS Virus
tcttccaagtcactttccagattgt

SEQ ID NO: 79869 - DNA, 25 bp, SARS Virus
cttccaagtcagcttccagattgtg

SEQ ID NO: 79870 - DNA, 25 bp, SARS Virus
ttccaagtcagtctccagattgtgg

SEQ ID NO: 79871 - DNA, 25 bp, SARS Virus
tccaagtcagttcccagattgtgga

SEQ ID NO: 79872 - DNA, 25 bp, SARS Virus
ccaagtcagtttccagattgtggaa

SEQ ID NO: 79873 - DNA, 25 bp, SARS Virus
caagtcagtttccagattgtggaag

SEQ ID NO: 79874 - DNA, 25 bp, SARS Virus
aagtcagtttcccgattgtggaagt

SEQ ID NO: 79875 - DNA, 25 bp, SARS Virus
agtcagtttccacattgtggaagtt

SEQ ID NO: 79876 - DNA, 25 bp, SARS Virus
gtcagtttccagcttgtggaagttt

SEQ ID NO: 79877 - DNA, 25 bp, SARS Virus
tcagtttccagactgtggaagtttc

SEQ ID NO: 79878 - DNA, 25 bp, SARS Virus
cagtttccagatcgtggaagtttcc

SEQ ID NO: 79879 - DNA, 25 bp, SARS Virus
agtttccagattctggaagtttccc

SEQ ID NO: 79880 - DNA, 25 bp, SARS Virus
gtttccagattgcggaagtttccct

SEQ ID NO: 79881 - DNA, 25 bp, SARS Virus
tttccagattgtcgaagtttccctg

SEQ ID NO: 79882 - DNA, 25 bp, SARS Virus
ttccagattgtgcaagtttccctgg

SEQ ID NO: 79883 - DNA, 25 bp, SARS Virus
tccagattgtggcagtttccctggt

SEQ ID NO: 79884 - DNA, 25 bp, SARS Virus
ccagattgtggacgtttccctggtc

SEQ ID NO: 79885 - DNA, 25 bp, SARS Virus
cagattgtggaactttccctggtcg

SEQ ID NO: 79886 - DNA, 25 bp, SARS Virus
agattgtggaagcttccctggtcgt

SEQ ID NO: 79887 - DNA, 25 bp, SARS Virus
gattgtggaagtctccctggtcgtg

SEQ ID NO: 79888 - DNA, 25 bp, SARS Virus
attgtggaagttcccctggtcgtgt

SEQ ID NO: 79889 - DNA, 25 bp, SARS Virus
ttgtggaagtttccctggtcgtgtt

SEQ ID NO: 79890 - DNA, 25 bp, SARS Virus
tgtggaagtttccctggtcgtgttc

SEQ ID NO: 79891 - DNA, 25 bp, SARS Virus
gtggaagtttccctggtcgtgttcg

SEQ ID NO: 79892 - DNA, 25 bp, SARS Virus
tggaagtttccccggtcgtgttcga

SEQ ID NO: 79893 - DNA, 25 bp, SARS Virus
ggaagtttccctcgtcgtgttcgat

SEQ ID NO: 79894 - DNA, 25 bp, SARS Virus
gaagtttccctgctcgtgttcgatc

SEQ ID NO: 79895 - DNA, 25 bp, SARS Virus
aagtttccctggccgtgttcgatcg

SEQ ID NO: 79896 - DNA, 25 bp, SARS Virus
agtttccctggtcgtgttcgatcgc

SEQ ID NO: 79897 - DNA, 25 bp, SARS Virus
gtttccctggtcctgttcgatcgca

SEQ ID NO: 79898 - DNA, 25 bp, SARS Virus
tttccctggtcgcgttcgatcgcag

SEQ ID NO: 79899 - DNA, 25 bp, SARS Virus
ttccctggtcgtcttcgatcgcagt

SEQ ID NO: 79900 - DNA, 25 bp, SARS Virus
tccctggtcgtgctcgatcgcagtt

SEQ ID NO: 79901 - DNA, 25 bp, SARS Virus
ccctggtcgtgtccgatcgcagtta

SEQ ID NO: 79902 - DNA, 25 bp, SARS Virus
cctggtcgtgttcgatcgcagttac

SEQ ID NO: 79903 - DNA, 25 bp, SARS Virus
ctggtcgtgttccatcgcagttacc

SEQ ID NO: 79904 - DNA, 25 bp, SARS Virus
tggtcgtgttcgctcgcagttacct

SEQ ID NO: 79905 - DNA, 25 bp, SARS Virus
ggtcgtgttcgaccgcagttacctc

SEQ ID NO: 79906 - DNA, 25 bp, SARS Virus
gtcgtgttcgatcgcagttacctca

SEQ ID NO: 79907 - DNA, 25 bp, SARS Virus
tcgtgttcgatcccagttacctcag

SEQ ID NO: 79908 - DNA, 25 bp, SARS Virus
cgtgttcgatcgcagttacctcagt

SEQ ID NO: 79909 - DNA, 25 bp, SARS Virus
gtgttcgatcgccgttacctcagtg

SEQ ID NO: 79910 - DNA, 25 bp, SARS Virus
tgttcgatcgcacttacctcagtgt

SEQ ID NO: 79911 - DNA, 25 bp, SARS Virus
gttcgatcgcagctacctcagtgta

SEQ ID NO: 79912 - DNA, 25 bp, SARS Virus
ttcgatcgcagtcacctcagtgtaa

SEQ ID NO: 79913 - DNA, 25 bp, SARS Virus
tcgatcgcagttccctcagtgtaat

SEQ ID NO: 79914 - DNA, 25 bp, SARS Virus
cgatcgcagttacctcagtgtaatt

SEQ ID NO: 79915 - DNA, 25 bp, SARS Virus
gatcgcagttacctcagtgtaatta

SEQ ID NO: 79916 - DNA, 25 bp, SARS Virus
atcgcagttaccccagtgtaattaa

SEQ ID NO: 79917 - DNA, 25 bp, SARS Virus
tcgcagttacctcagtgtaattaac

SEQ ID NO: 79918 - DNA, 25 bp, SARS Virus
cgcagttacctccgtgtaattaacc

SEQ ID NO: 79919 - DNA, 25 bp, SARS Virus
gcagttacctcactgtaattaacct

SEQ ID NO: 79920 - DNA, 25 bp, SARS Virus
cagttacctcagcgtaattaacctc

SEQ ID NO: 79921 - DNA, 25 bp, SARS Virus
agttacctcagtctaattaacctct

SEQ ID NO: 79922 - DNA, 25 bp, SARS Virus
gttacctcagtgcaattaacctctt

SEQ ID NO: 79923 - DNA, 25 bp, SARS Virus
ttacctcagtgtcattaacctctta

SEQ ID NO: 79924 - DNA, 25 bp, SARS Virus
tacctcagtgtacttaacctcttag

SEQ ID NO: 79925 - DNA, 25 bp, SARS Virus
acctcagtgtaactaacctcttagt

SEQ ID NO: 79926 - DNA, 25 bp, SARS Virus
cctcagtgtaatcaacctcttagtc

SEQ ID NO: 79927 - DNA, 25 bp, SARS Virus
ctcagtgtaattcacctcttagtca

SEQ ID NO: 79928 - DNA, 25 bp, SARS Virus
tcagtgtaattaccctcttagtcat

SEQ ID NO: 79929 - DNA, 25 bp, SARS Virus
cagtgtaattaacctcttagtcatt

SEQ ID NO: 79930 - DNA, 25 bp, SARS Virus
agtgtaattaacctcttagtcattt

SEQ ID NO: 79931 - DNA, 25 bp, SARS Virus
gtgtaattaaccccttagtcatttt

SEQ ID NO: 79932 - DNA, 25 bp, SARS Virus
tgtaattaacctcttagtcattttt

SEQ ID NO: 79933 - DNA, 25 bp, SARS Virus
gtaattaacctcctagtcatttttg

SEQ ID NO: 79934 - DNA, 25 bp, SARS Virus
taattaacctctcagtcatttttgt

SEQ ID NO: 79935 - DNA, 25 bp, SARS Virus
aattaacctcttcgtcatttttgtg

SEQ ID NO: 79936 - DNA, 25 bp, SARS Virus
attaacctcttactcatttttgtgt

SEQ ID NO: 79937 - DNA, 25 bp, SARS Virus
ttaacctcttagccatttttgtgtc

SEQ ID NO: 79938 - DNA, 25 bp, SARS Virus
taacctcttagtcatttttgtgtca

SEQ ID NO: 79939 - DNA, 25 bp, SARS Virus
aacctcttagtcctttttgtgtcaa

SEQ ID NO: 79940 - DNA, 25 bp, SARS Virus
acctcttagtcacttttgtgtcaaa

SEQ ID NO: 79941 - DNA, 25 bp, SARS Virus
cctcttagtcatctttgtgtcaaat

SEQ ID NO: 79942 - DNA, 25 bp, SARS Virus
ctcttagtcattcttgtgtcaaatt

SEQ ID NO: 79943 - DNA, 25 bp, SARS Virus
tcttagtcatttctgtgtcaaattg

SEQ ID NO: 79944 - DNA, 25 bp, SARS Virus
cttagtcattttcgtgtcaaattga

SEQ ID NO: 79945 - DNA, 25 bp, SARS Virus
ttagtcatttttctgtcaaattgat

SEQ ID NO: 79946 - DNA, 25 bp, SARS Virus
tagtcatttttgcgtcaaattgatg

SEQ ID NO: 79947 - DNA, 25 bp, SARS Virus
agtcatttttgtctcaaattgatga

SEQ ID NO: 79948 - DNA, 25 bp, SARS Virus
gtcatttttgtgccaaattgatgaa

SEQ ID NO: 79949 - DNA, 25 bp, SARS Virus
tcatttttgtgtcaaattgatgaaa

SEQ ID NO: 79950 - DNA, 25 bp, SARS Virus
catttttgtgtccaattgatgaaat

SEQ ID NO: 79951 - DNA, 25 bp, SARS Virus
atttttgtgtcacattgatgaaatt

SEQ ID NO: 79952 - DNA, 25 bp, SARS Virus
tttttgtgtcaacttgatgaaattc

SEQ ID NO: 79953 - DNA, 25 bp, SARS Virus
ttttgtgtcaaactgatgaaattct

SEQ ID NO: 79954 - DNA, 25 bp, SARS Virus
tttgtgtcaaatcgatgaaattctt

SEQ ID NO: 79955 - DNA, 25 bp, SARS Virus
ttgtgtcaaattcatgaaattcttt

SEQ ID NO: 79956 - DNA, 25 bp, SARS Virus
tgtgtcaaattgctgaaattctttc

SEQ ID NO: 79957 - DNA, 25 bp, SARS Virus
gtgtcaaattgacgaaattctttca

SEQ ID NO: 79958 - DNA, 25 bp, SARS Virus
tgtcaaattgatcaaattctttcat

SEQ ID NO: 79959 - DNA, 25 bp, SARS Virus
gtcaaattgatgcaattctttcatc

SEQ ID NO: 79960 - DNA, 25 bp, SARS Virus
tcaaattgatgacattctttcatct

SEQ ID NO: 79961 - DNA, 25 bp, SARS Virus
caaattgatgaacttctttcatctg

SEQ ID NO: 79962 - DNA, 25 bp, SARS Virus
aaattgatgaaactctttcatctgc

SEQ ID NO: 79963 - DNA, 25 bp, SARS Virus
aattgatgaaatcctttcatctgcc

SEQ ID NO: 79964 - DNA, 25 bp, SARS Virus
attgatgaaattctttcatctgccg

SEQ ID NO: 79965 - DNA, 25 bp, SARS Virus
ttgatgaaattccttcatctgccgt

SEQ ID NO: 79966 - DNA, 25 bp, SARS Virus
tgatgaaattctctcatctgccgta

SEQ ID NO: 79967 - DNA, 25 bp, SARS Virus
gatgaaattcttccatctgccgtaa

SEQ ID NO: 79968 - DNA, 25 bp, SARS Virus
atgaaattctttcatctgccgtaat

SEQ ID NO: 79969 - DNA, 25 bp, SARS Virus
tgaaattctttcctctgccgtaata

SEQ ID NO: 79970 - DNA, 25 bp, SARS Virus
gaaattctttcacctgccgtaataa

SEQ ID NO: 79971 - DNA, 25 bp, SARS Virus
aaattctttcatctgccgtaataag

SEQ ID NO: 79972 - DNA, 25 bp, SARS Virus
aattctttcatccgccgtaataagt

SEQ ID NO: 79973 - DNA, 25 bp, SARS Virus
attctttcatctcccgtaataagtt

SEQ ID NO: 79974 - DNA, 25 bp, SARS Virus
ttctttcatctgccgtaataagttg

SEQ ID NO: 79975 - DNA, 25 bp, SARS Virus
tctttcatctgccgtaataagttgt

SEQ ID NO: 79976 - DNA, 25 bp, SARS Virus
ctttcatctgccctaataagttgtc

SEQ ID NO: 79977 - DNA, 25 bp, SARS Virus
tttcatctgccgcaataagttgtca

SEQ ID NO: 79978 - DNA, 25 bp, SARS Virus
ttcatctgccgtcataagttgtcaa

SEQ ID NO: 79979 - DNA, 25 bp, SARS Virus
tcatctgccgtactaagttgtcaac

SEQ ID NO: 79980 - DNA, 25 bp, SARS Virus
catctgccgtaacaagttgtcaacg

SEQ ID NO: 79981 - DNA, 25 bp, SARS Virus
atctgccgtaatcagttgtcaacgg

SEQ ID NO: 79982 - DNA, 25 bp, SARS Virus
tctgccgtaatacgttgtcaacgga

SEQ ID NO: 79983 - DNA, 25 bp, SARS Virus
ctgccgtaataacttgtcaacggac

SEQ ID NO: 79984 - DNA, 25 bp, SARS Virus
tgccgtaataagctgtcaacggact

SEQ ID NO: 79985 - DNA, 25 bp, SARS Virus
gccgtaataagtcgtcaacggactt

SEQ ID NO: 79986 - DNA, 25 bp, SARS Virus
ccgtaataagttctcaacggacttt

SEQ ID NO: 79987 - DNA, 25 bp, SARS Virus
cgtaataagttgccaacggactttg

SEQ ID NO: 79988 - DNA, 25 bp, SARS Virus
gtaataagttgtcaacggactttgg

SEQ ID NO: 79989 - DNA, 25 bp, SARS Virus
taataagttgtccacggactttgga

SEQ ID NO: 79990 - DNA, 25 bp, SARS Virus
aataagttgtcaccggactttggat

SEQ ID NO: 79991 - DNA, 25 bp, SARS Virus
ataagttgtcaacggactttggatg

SEQ ID NO: 79992 - DNA, 25 bp, SARS Virus
taagttgtcaaccgactttggatga

SEQ ID NO: 79993 - DNA, 25 bp, SARS Virus
aagttgtcaacgcactttggatgaa

SEQ ID NO: 79994 - DNA, 25 bp, SARS Virus
agttgtcaacggcctttggatgaaa

SEQ ID NO: 79995 - DNA, 25 bp, SARS Virus
gttgtcaacggactttggatgaaat

SEQ ID NO: 79996 - DNA, 25 bp, SARS Virus
ttgtcaacggaccttggatgaaatg

SEQ ID NO: 79997 - DNA, 25 bp, SARS Virus
tgtcaacggactctggatgaaatga

SEQ ID NO: 79998 - DNA, 25 bp, SARS Virus
gtcaacggacttcggatgaaatgag

SEQ ID NO: 79999 - DNA, 25 bp, SARS Virus
tcaacggactttcgatgaaatgagt

SEQ ID NO: 80000 - DNA, 25 bp, SARS Virus
caacggactttgcatgaaatgagtc

SEQ ID NO: 80001 - DNA, 25 bp, SARS Virus
aacggactttggctgaaatgagtct

SEQ ID NO: 80002 - DNA, 25 bp, SARS Virus
acggactttggacgaaatgagtctc

SEQ ID NO: 80003 - DNA, 25 bp, SARS Virus
cggactttggatcaaatgagtctcg

SEQ ID NO: 80004 - DNA, 25 bp, SARS Virus
ggactttggatgcaatgagtctcgt

SEQ ID NO: 80005 - DNA, 25 bp, SARS Virus
gactttggatgacatgagtctcgtc

SEQ ID NO: 80006 - DNA, 25 bp, SARS Virus
actttggatgaactgagtctcgtct

SEQ ID NO: 80007 - DNA, 25 bp, SARS Virus
ctttggatgaaacgagtctcgtctc

SEQ ID NO: 80008 - DNA, 25 bp, SARS Virus
tttggatgaaatcagtctcgtctct

SEQ ID NO: 80009 - DNA, 25 bp, SARS Virus
ttggatgaaatgcgtctcgtctctg

SEQ ID NO: 80010 - DNA, 25 bp, SARS Virus
tggatgaaatgactctcgtctctga

SEQ ID NO: 80011 - DNA, 25 bp, SARS Virus
ggatgaaatgagcctcgtctctgaa

SEQ ID NO: 80012 - DNA, 25 bp, SARS Virus
gatgaaatgagtctcgtctctgaat

SEQ ID NO: 80013 - DNA, 25 bp, SARS Virus
atgaaatgagtcccgtctctgaatc

SEQ ID NO: 80014 - DNA, 25 bp, SARS Virus
tgaaatgagtctcgtctctgaatct

SEQ ID NO: 80015 - DNA, 25 bp, SARS Virus
gaaatgagtctcctctctgaatctc

SEQ ID NO: 80016 - DNA, 25 bp, SARS Virus
aaatgagtctcgcctctgaatctcc

SEQ ID NO: 80017 - DNA, 25 bp, SARS Virus
aatgagtctcgtctctgaatctcct

SEQ ID NO: 80018 - DNA, 25 bp, SARS Virus
atgagtctcgtccctgaatctccta

SEQ ID NO: 80019 - DNA, 25 bp, SARS Virus
tgagtctcgtctctgaatctcctaa

SEQ ID NO: 80020 - DNA, 25 bp, SARS Virus
gagtctcgtctccgaatctcctaaa

SEQ ID NO: 80021 - DNA, 25 bp, SARS Virus
agtctcgtctctcaatctcctaaaa

SEQ ID NO: 80022 - DNA, 25 bp, SARS Virus
gtctcgtctctgcatctcctaaaat

SEQ ID NO: 80023 - DNA, 25 bp, SARS Virus
tctcgtctctgactctcctaaaatt

SEQ ID NO: 80024 - DNA, 25 bp, SARS Virus
ctcgtctctgaacctcctaaaattc

SEQ ID NO: 80025 - DNA, 25 bp, SARS Virus
tcgtctctgaatctcctaaaattcg

SEQ ID NO: 80026 - DNA, 25 bp, SARS Virus
cgtctctgaatcccctaaaattcgg

SEQ ID NO: 80027 - DNA, 25 bp, SARS Virus
gtctctgaatctcctaaaattcggg

SEQ ID NO: 80028 - DNA, 25 bp, SARS Virus
tctctgaatctcctaaaattcgggt

SEQ ID NO: 80029 - DNA, 25 bp, SARS Virus
ctctgaatctcccaaaattcgggtc

SEQ ID NO: 80030 - DNA, 25 bp, SARS Virus
tctgaatctcctcaaattcgggtct

SEQ ID NO: 80031 - DNA, 25 bp, SARS Virus
ctgaatctcctacaattcgggtcta

SEQ ID NO: 80032 - DNA, 25 bp, SARS Virus
tgaatctcctaacattcgggtctag

SEQ ID NO: 80033 - DNA, 25 bp, SARS Virus
gaatctcctaaacttcgggtctagt

SEQ ID NO: 80034 - DNA, 25 bp, SARS Virus
aatctcctaaaactcgggtctagtg

SEQ ID NO: 80035 - DNA, 25 bp, SARS Virus
atctcctaaaatccgggtctagtgt

SEQ ID NO: 80036 - DNA, 25 bp, SARS Virus
tctcctaaaattcgggtctagtgtt

SEQ ID NO: 80037 - DNA, 25 bp, SARS Virus
ctcctaaaattccggtctagtgttt

SEQ ID NO: 80038 - DNA, 25 bp, SARS Virus
tcctaaaattcgcgtctagtgttta

SEQ ID NO: 80039 - DNA, 25 bp, SARS Virus
cctaaaattcggctctagtgtttac

SEQ ID NO: 80040 - DNA, 25 bp, SARS Virus
ctaaaattcgggcctagtgtttacc

SEQ ID NO: 80041 - DNA, 25 bp, SARS Virus
taaaattcgggtctagtgtttacct

SEQ ID NO: 80042 - DNA, 25 bp, SARS Virus
aaaattcgggtccagtgtttacctt

SEQ ID NO: 80043 - DNA, 25 bp, SARS Virus
aaattcgggtctcgtgtttaccttt

SEQ ID NO: 80044 - DNA, 25 bp, SARS Virus
aattcgggtctactgtttacctttg

SEQ ID NO: 80045 - DNA, 25 bp, SARS Virus
attcgggtctagcgtttacctttga

SEQ ID NO: 80046 - DNA, 25 bp, SARS Virus
ttcgggtctagtctttacctttgac

SEQ ID NO: 80047 - DNA, 25 bp, SARS Virus
tcgggtctagtgcttacctttgact

SEQ ID NO: 80048 - DNA, 25 bp, SARS Virus
cgggtctagtgtctacctttgactg

SEQ ID NO: 80049 - DNA, 25 bp, SARS Virus
gggtctagtgttcacctttgactga

SEQ ID NO: 80050 - DNA, 25 bp, SARS Virus
ggtctagtgtttccctttgactgaa

SEQ ID NO: 80051 - DNA, 25 bp, SARS Virus
gtctagtgtttacctttgactgaaa

SEQ ID NO: 80052 - DNA, 25 bp, SARS Virus
tctagtgtttacctttgactgaaag

SEQ ID NO: 80053 - DNA, 25 bp, SARS Virus
ctagtgtttacccttgactgaaaga

SEQ ID NO: 80054 - DNA, 25 bp, SARS Virus
tagtgtttacctctgactgaaagag

SEQ ID NO: 80055 - DNA, 25 bp, SARS Virus
agtgtttaccttcgactgaaagagc

SEQ ID NO: 80056 - DNA, 25 bp, SARS Virus
gtgtttacctttcactgaaagagct

SEQ ID NO: 80057 - DNA, 25 bp, SARS Virus
tgtttacctttgcctgaaagagctc

SEQ ID NO: 80058 - DNA, 25 bp, SARS Virus
gtttacctttgactgaaagagctcg

SEQ ID NO: 80059 - DNA, 25 bp, SARS Virus
tttacctttgaccgaaagagctcga

SEQ ID NO: 80060 - DNA, 25 bp, SARS Virus
ttacctttgactcaaagagctcgag

SEQ ID NO: 80061 - DNA, 25 bp, SARS Virus
tacctttgactgcaagagctcgagc

SEQ ID NO: 80062 - DNA, 25 bp, SARS Virus
acctttgactgacagagctcgagcg

SEQ ID NO: 80063 - DNA, 25 bp, SARS Virus
cctttgactgaacgagctcgagcga

SEQ ID NO: 80064 - DNA, 25 bp, SARS Virus
ctttgactgaaacagctcgagcgat

SEQ ID NO: 80065 - DNA, 25 bp, SARS Virus
tttgactgaaagcgctcgagcgata

SEQ ID NO: 80066 - DNA, 25 bp, SARS Virus
ttgactgaaagacctcgagcgatac

SEQ ID NO: 80067 - DNA, 25 bp, SARS Virus
tgactgaaagagctcgagcgatacc

SEQ ID NO: 80068 - DNA, 25 bp, SARS Virus
gactgaaagagcccgagcgatacct

SEQ ID NO: 80069 - DNA, 25 bp, SARS Virus
actgaaagagctcgagcgataccta

SEQ ID NO: 80070 - DNA, 25 bp, SARS Virus
ctgaaagagctccagcgatacctac

SEQ ID NO: 80071 - DNA, 25 bp, SARS Virus
tgaaagagctcgcgcgatacctact

SEQ ID NO: 80072 - DNA, 25 bp, SARS Virus
gaaagagctcgaccgatacctactt

SEQ ID NO: 80073 - DNA, 25 bp, SARS Virus
aaagagctcgagcgatacctactta

SEQ ID NO: 80074 - DNA, 25 bp, SARS Virus
aagagctcgagccatacctacttaa

SEQ ID NO: 80075 - DNA, 25 bp, SARS Virus
agagctcgagcgctacctacttaag

SEQ ID NO: 80076 - DNA, 25 bp, SARS Virus
gagctcgagcgacacctacttaagt

SEQ ID NO: 80077 - DNA, 25 bp, SARS Virus
agctcgagcgatccctacttaagta

SEQ ID NO: 80078 - DNA, 25 bp, SARS Virus
gctcgagcgatacctacttaagtat

SEQ ID NO: 80079 - DNA, 25 bp, SARS Virus
ctcgagcgatacctacttaagtatg

SEQ ID NO: 80080 - DNA, 25 bp, SARS Virus
tcgagcgatacccacttaagtatgt

SEQ ID NO: 80081 - DNA, 25 bp, SARS Virus
cgagcgatacctccttaagtatgtc

SEQ ID NO: 80082 - DNA, 25 bp, SARS Virus
gagcgatacctacttaagtatgtcg

SEQ ID NO: 80083 - DNA, 25 bp, SARS Virus
agcgatacctacctaagtatgtcgc

SEQ ID NO: 80084 - DNA, 25 bp, SARS Virus
gcgatacctactcaagtatgtcgct

SEQ ID NO: 80085 - DNA, 25 bp, SARS Virus
cgatacctacttcagtatgtcgcta

SEQ ID NO: 80086 - DNA, 25 bp, SARS Virus
gatacctacttacgtatgtcgctat

SEQ ID NO: 80087 - DNA, 25 bp, SARS Virus
atacctacttaactatgtcgctata

SEQ ID NO: 80088 - DNA, 25 bp, SARS Virus
tacctacttaagcatgtcgctatat

SEQ ID NO: 80089 - DNA, 25 bp, SARS Virus
acctacttaagtctgtcgctatatt

SEQ ID NO: 80090 - DNA, 25 bp, SARS Virus
cctacttaagtacgtcgctatattc

SEQ ID NO: 80091 - DNA, 25 bp, SARS Virus
ctacttaagtatctcgctatattcg

SEQ ID NO: 80092 - DNA, 25 bp, SARS Virus
tacttaagtatgccgctatattcga

SEQ ID NO: 80093 - DNA, 25 bp, SARS Virus
acttaagtatgtcgctatattcgag

SEQ ID NO: 80094 - DNA, 25 bp, SARS Virus
cttaagtatgtccctatattcgagc

SEQ ID NO: 80095 - DNA, 25 bp, SARS Virus
ttaagtatgtcgctatattcgagct

SEQ ID NO: 80096 - DNA, 25 bp, SARS Virus
taagtatgtcgccatattcgagctc

SEQ ID NO: 80097 - DNA, 25 bp, SARS Virus
aagtatgtcgctctattcgagctcc

SEQ ID NO: 80098 - DNA, 25 bp, SARS Virus
agtatgtcgctacattcgagctccc

SEQ ID NO: 80099 - DNA, 25 bp, SARS Virus
gtatgtcgctatcttcgagctcccg

SEQ ID NO: 80100 - DNA, 25 bp, SARS Virus
tatgtcgctatactcgagctcccga

SEQ ID NO: 80101 - DNA, 25 bp, SARS Virus
atgtcgctatatccgagctcccgat

SEQ ID NO: 80102 - DNA, 25 bp, SARS Virus
tgtcgctatattcgagctcccgata

SEQ ID NO: 80103 - DNA, 25 bp, SARS Virus
gtcgctatattccagctcccgatac

SEQ ID NO: 80104 - DNA, 25 bp, SARS Virus
tcgctatattcgcgctcccgatacg

SEQ ID NO: 80105 - DNA, 25 bp, SARS Virus
cgctatattcgacctcccgatacgg

SEQ ID NO: 80106 - DNA, 25 bp, SARS Virus
gctatattcgagctcccgatacgga

SEQ ID NO: 80107 - DNA, 25 bp, SARS Virus
ctatattcgagcccccgatacggaa

SEQ ID NO: 80108 - DNA, 25 bp, SARS Virus
tatattcgagctcccgatacggaag

SEQ ID NO: 80109 - DNA, 25 bp, SARS Virus
atattcgagctcccgatacggaagc

SEQ ID NO: 80110 - DNA, 25 bp, SARS Virus
tattcgagctcccgatacggaagct

SEQ ID NO: 80111 - DNA, 25 bp, SARS Virus
attcgagctccccatacggaagctt

SEQ ID NO: 80112 - DNA, 25 bp, SARS Virus
ttcgagctcccgctacggaagcttg

SEQ ID NO: 80113 - DNA, 25 bp, SARS Virus
tcgagctcccgacacggaagcttgt

SEQ ID NO: 80114 - DNA, 25 bp, SARS Virus
cgagctcccgatccggaagcttgtg

SEQ ID NO: 80115 - DNA, 25 bp, SARS Virus
gagctcccgatacggaagcttgtgt

SEQ ID NO: 80116 - DNA, 25 bp, SARS Virus
agctcccgataccgaagcttgtgta

SEQ ID NO: 80117 - DNA, 25 bp, SARS Virus
gctcccgatacgcaagcttgtgtag

SEQ ID NO: 80118 - DNA, 25 bp, SARS Virus
ctcccgatacggcagcttgtgtagc

SEQ ID NO: 80119 - DNA, 25 bp, SARS Virus
tcccgatacggacgcttgtgtagca

SEQ ID NO: 80120 - DNA, 25 bp, SARS Virus
cccgatacggaaccttgtgtagcaa

SEQ ID NO: 80121 - DNA, 25 bp, SARS Virus
ccgatacggaagcttgtgtagcaaa

SEQ ID NO: 80122 - DNA, 25 bp, SARS Virus
cgatacggaagcctgtgtagcaaat

SEQ ID NO: 80123 - DNA, 25 bp, SARS Virus
gatacggaagctcgtgtagcaaata

SEQ ID NO: 80124 - DNA, 25 bp, SARS Virus
atacggaagcttctgtagcaaatac

SEQ ID NO: 80125 - DNA, 25 bp, SARS Virus
tacggaagcttgcgtagcaaatacc

SEQ ID NO: 80126 - DNA, 25 bp, SARS Virus
acggaagcttgtctagcaaatacct

SEQ ID NO: 80127 - DNA, 25 bp, SARS Virus
cggaagcttgtgcagcaaatacctc

SEQ ID NO: 80128 - DNA, 25 bp, SARS Virus
ggaagcttgtgtcgcaaatacctct

SEQ ID NO: 80129 - DNA, 25 bp, SARS Virus
gaagcttgtgtaccaaatacctcta

SEQ ID NO: 80130 - DNA, 25 bp, SARS Virus
aagcttgtgtagcaaatacctctaa

SEQ ID NO: 80131 - DNA, 25 bp, SARS Virus
agcttgtgtagccaatacctctaaa

SEQ ID NO: 80132 - DNA, 25 bp, SARS Virus
gcttgtgtagcacatacctctaaag

SEQ ID NO: 80133 - DNA, 25 bp, SARS Virus
cttgtgtagcaactacctctaaagt

SEQ ID NO: 80134 - DNA, 25 bp, SARS Virus
ttgtgtagcaaacacctctaaagtc

SEQ ID NO: 80135 - DNA, 25 bp, SARS Virus
tgtgtagcaaatccctctaaagtca

SEQ ID NO: 80136 - DNA, 25 bp, SARS Virus
gtgtagcaaatacctctaaagtcag

SEQ ID NO: 80137 - DNA, 25 bp, SARS Virus
tgtagcaaatacctctaaagtcagt

SEQ ID NO: 80138 - DNA, 25 bp, SARS Virus
gtagcaaatacccctaaagtcagta

SEQ ID NO: 80139 - DNA, 25 bp, SARS Virus
tagcaaatacctctaaagtcagtac

SEQ ID NO: 80140 - DNA, 25 bp, SARS Virus
agcaaatacctccaaagtcagtacc

SEQ ID NO: 80141 - DNA, 25 bp, SARS Virus
gcaaatacctctcaagtcagtacct

SEQ ID NO: 80142 - DNA, 25 bp, SARS Virus
caaatacctctacagtcagtacctg

SEQ ID NO: 80143 - DNA, 25 bp, SARS Virus
aaatacctctaacgtcagtacctgt

SEQ ID NO: 80144 - DNA, 25 bp, SARS Virus
aatacctctaaactcagtacctgtt

SEQ ID NO: 80145 - DNA, 25 bp, SARS Virus
atacctctaaagccagtacctgttg

SEQ ID NO: 80146 - DNA, 25 bp, SARS Virus
tacctctaaagtcagtacctgttga

SEQ ID NO: 80147 - DNA, 25 bp, SARS Virus
acctctaaagtccgtacctgttgaa

SEQ ID NO: 80148 - DNA, 25 bp, SARS Virus
cctctaaagtcactacctgttgaac

SEQ ID NO: 80149 - DNA, 25 bp, SARS Virus
ctctaaagtcagcacctgttgaacc

SEQ ID NO: 80150 - DNA, 25 bp, SARS Virus
tctaaagtcagtccctgttgaaccg

SEQ ID NO: 80151 - DNA, 25 bp, SARS Virus
ctaaagtcagtacctgttgaaccgc

SEQ ID NO: 80152 - DNA, 25 bp, SARS Virus
taaagtcagtacctgttgaaccgcc

SEQ ID NO: 80153 - DNA, 25 bp, SARS Virus
aaagtcagtacccgttgaaccgcca

SEQ ID NO: 80154 - DNA, 25 bp, SARS Virus
aagtcagtacctcttgaaccgccag

SEQ ID NO: 80155 - DNA, 25 bp, SARS Virus
agtcagtacctgctgaaccgccaga

SEQ ID NO: 80156 - DNA, 25 bp, SARS Virus
gtcagtacctgtcgaaccgccagaa

SEQ ID NO: 80157 - DNA, 25 bp, SARS Virus
tcagtacctgttcaaccgccagaag

SEQ ID NO: 80158 - DNA, 25 bp, SARS Virus
cagtacctgttgcaccgccagaagt

SEQ ID NO: 80159 - DNA, 25 bp, SARS Virus
agtacctgttgacccgccagaagta

SEQ ID NO: 80160 - DNA, 25 bp, SARS Virus
gtacctgttgaaccgccagaagtaa

SEQ ID NO: 80161 - DNA, 25 bp, SARS Virus
gcgacgattatggcattagaccctg

SEQ ID NO: 80162 - DNA, 25 bp, SARS Virus
cgacgattatgagattagaccctga

SEQ ID NO: 80163 - DNA, 25 bp, SARS Virus
gacgattatgacgttagaccctgat

SEQ ID NO: 80164 - DNA, 25 bp, SARS Virus
acgattatgacagtagaccctgatg

SEQ ID NO: 80165 - DNA, 25 bp, SARS Virus
cgattatgacatgagaccctgatgt

SEQ ID NO: 80166 - DNA, 25 bp, SARS Virus
gattatgacattggaccctgatgtt

SEQ ID NO: 80167 - DNA, 25 bp, SARS Virus
attatgacattagaccctgatgttt

SEQ ID NO: 80168 - DNA, 25 bp, SARS Virus
ttatgacattaggccctgatgtttt

SEQ ID NO: 80169 - DNA, 25 bp, SARS Virus
tatgacattagagcctgatgttttc

SEQ ID NO: 80170 - DNA, 25 bp, SARS Virus
atgacattagacgctgatgttttct

SEQ ID NO: 80171 - DNA, 25 bp, SARS Virus
tgacattagaccgtgatgttttctc

SEQ ID NO: 80172 - DNA, 25 bp, SARS Virus
gacattagacccggatgttttctct

SEQ ID NO: 80173 - DNA, 25 bp, SARS Virus
acattagaccctgatgttttctctt

SEQ ID NO: 80174 - DNA, 25 bp, SARS Virus
cattagaccctggtgttttctcttc

SEQ ID NO: 80175 - DNA, 25 bp, SARS Virus
attagaccctgaggttttctcttcg

SEQ ID NO: 80176 - DNA, 25 bp, SARS Virus
ttagaccctgatgttttctcttcgg

SEQ ID NO: 80177 - DNA, 25 bp, SARS Virus
tagaccctgatggtttctcttcggg

SEQ ID NO: 80178 - DNA, 25 bp, SARS Virus
agaccctgatgtgttctcttcgggg

SEQ ID NO: 80179 - DNA, 25 bp, SARS Virus
gaccctgatgttgtctcttcggggt

SEQ ID NO: 80180 - DNA, 25 bp, SARS Virus
accctgatgtttgctcttcggggtc

SEQ ID NO: 80181 - DNA, 25 bp, SARS Virus
ccctgatgttttgtcttcggggtcg

SEQ ID NO: 80182 - DNA, 25 bp, SARS Virus
cctgatgttttcgcttcggggtcgt

SEQ ID NO: 80183 - DNA, 25 bp, SARS Virus
ctgatgttttctgttcggggtcgtg

SEQ ID NO: 80184 - DNA, 25 bp, SARS Virus
tgatgttttctcgtcggggtcgtgt

SEQ ID NO: 80185 - DNA, 25 bp, SARS Virus
gatgttttctctgcggggtcgtgta

SEQ ID NO: 80186 - DNA, 25 bp, SARS Virus
atgttttctcttgggggtcgtgtac

SEQ ID NO: 80187 - DNA, 25 bp, SARS Virus
tgttttctcttcggggtcgtgtaca

SEQ ID NO: 80188 - DNA, 25 bp, SARS Virus
gttttctcttcggggtcgtgtacat

SEQ ID NO: 80189 - DNA, 25 bp, SARS Virus
ttttctcttcggggtcgtgtacata

SEQ ID NO: 80190 - DNA, 25 bp, SARS Virus
tttctcttcggggtcgtgtacatag

SEQ ID NO: 80191 - DNA, 25 bp, SARS Virus
ttctcttcgggggcgtgtacataga

SEQ ID NO: 80192 - DNA, 25 bp, SARS Virus
tctcttcggggtggtgtacatagat

SEQ ID NO: 80193 - DNA, 25 bp, SARS Virus
ctcttcggggtcgtgtacatagatg

SEQ ID NO: 80194 - DNA, 25 bp, SARS Virus
tcttcggggtcgggtacatagatgt

SEQ ID NO: 80195 - DNA, 25 bp, SARS Virus
cttcggggtcgtgtacatagatgtt

SEQ ID NO: 80196 - DNA, 25 bp, SARS Virus
ttcggggtcgtggacatagatgtta

SEQ ID NO: 80197 - DNA, 25 bp, SARS Virus
tcggggtcgtgtgcatagatgttat

SEQ ID NO: 80198 - DNA, 25 bp, SARS Virus
cggggtcgtgtagatagatgttatc

SEQ ID NO: 80199 - DNA, 25 bp, SARS Virus
ggggtcgtgtacgtagatgttatcc

SEQ ID NO: 80200 - DNA, 25 bp, SARS Virus
gggtcgtgtacagagatgttatcca

SEQ ID NO: 80201 - DNA, 25 bp, SARS Virus
ggtcgtgtacatggatgttatccac

SEQ ID NO: 80202 - DNA, 25 bp, SARS Virus
gtcgtgtacatagatgttatccaca

SEQ ID NO: 80203 - DNA, 25 bp, SARS Virus
tcgtgtacataggtgttatccacag

SEQ ID NO: 80204 - DNA, 25 bp, SARS Virus
cgtgtacatagaggttatccacaga

SEQ ID NO: 80205 - DNA, 25 bp, SARS Virus
gtgtacatagatgttatccacagac

SEQ ID NO: 80206 - DNA, 25 bp, SARS Virus
tgtacatagatggtatccacagacg

SEQ ID NO: 80207 - DNA, 25 bp, SARS Virus
gtacatagatgtgatccacagacgt

SEQ ID NO: 80208 - DNA, 25 bp, SARS Virus
tacatagatgttgtccacagacgtg

SEQ ID NO: 80209 - DNA, 25 bp, SARS Virus
acatagatgttagccacagacgtgt

SEQ ID NO: 80210 - DNA, 25 bp, SARS Virus
catagatgttatgcacagacgtgtt

SEQ ID NO: 80211 - DNA, 25 bp, SARS Virus
atagatgttatcgacagacgtgtta

SEQ ID NO: 80212 - DNA, 25 bp, SARS Virus
tagatgttatccgcagacgtgttac

SEQ ID NO: 80213 - DNA, 25 bp, SARS Virus
agatgttatccagagacgtgttact

SEQ ID NO: 80214 - DNA, 25 bp, SARS Virus
gatgttatccacggacgtgttactg

SEQ ID NO: 80215 - DNA, 25 bp, SARS Virus
atgttatccacagacgtgttactga

SEQ ID NO: 80216 - DNA, 25 bp, SARS Virus
tgttatccacaggcgtgttactgac

SEQ ID NO: 80217 - DNA, 25 bp, SARS Virus
gttatccacagaggtgttactgact

SEQ ID NO: 80218 - DNA, 25 bp, SARS Virus
ttatccacagacgtgttactgactg

SEQ ID NO: 80219 - DNA, 25 bp, SARS Virus
tatccacagacgggttactgactgt

SEQ ID NO: 80220 - DNA, 25 bp, SARS Virus
atccacagacgtgttactgactgta

SEQ ID NO: 80221 - DNA, 25 bp, SARS Virus
tccacagacgtggtactgactgtaa

SEQ ID NO: 80222 - DNA, 25 bp, SARS Virus
ccacagacgtgtgactgactgtaac

SEQ ID NO: 80223 - DNA, 25 bp, SARS Virus
cacagacgtgttgctgactgtaacg

SEQ ID NO: 80224 - DNA, 25 bp, SARS Virus
acagacgtgttagtgactgtaacgg

SEQ ID NO: 80225 - DNA, 25 bp, SARS Virus
cagacgtgttacggactgtaacggt

SEQ ID NO: 80226 - DNA, 25 bp, SARS Virus
agacgtgttactgactgtaacggtt

SEQ ID NO: 80227 - DNA, 25 bp, SARS Virus
gacgtgttactggctgtaacggttc

SEQ ID NO: 80228 - DNA, 25 bp, SARS Virus
acgtgttactgagtgtaacggttct

SEQ ID NO: 80229 - DNA, 25 bp, SARS Virus
cgtgttactgacggtaacggttctt

SEQ ID NO: 80230 - DNA, 25 bp, SARS Virus
gtgttactgactgtaacggttcttt

SEQ ID NO: 80231 - DNA, 25 bp, SARS Virus
tgttactgactggaacggttctttg

SEQ ID NO: 80232 - DNA, 25 bp, SARS Virus
gttactgactgtgacggttctttgg

SEQ ID NO: 80233 - DNA, 25 bp, SARS Virus
ttactgactgtagcggttctttgga

SEQ ID NO: 80234 - DNA, 25 bp, SARS Virus
tactgactgtaagggttctttggat

SEQ ID NO: 80235 - DNA, 25 bp, SARS Virus
actgactgtaacggttctttggatg

SEQ ID NO: 80236 - DNA, 25 bp, SARS Virus
ctgactgtaacggttctttggatga

SEQ ID NO: 80237 - DNA, 25 bp, SARS Virus
tgactgtaacgggtctttggatgac

SEQ ID NO: 80238 - DNA, 25 bp, SARS Virus
gactgtaacggtgctttggatgact

SEQ ID NO: 80239 - DNA, 25 bp, SARS Virus
actgtaacggttgtttggatgactc

SEQ ID NO: 80240 - DNA, 25 bp, SARS Virus
ctgtaacggttcgttggatgactct

SEQ ID NO: 80241 - DNA, 25 bp, SARS Virus
tgtaacggttctgtggatgactctc

SEQ ID NO: 80242 - DNA, 25 bp, SARS Virus
gtaacggttcttgggatgactctca

SEQ ID NO: 80243 - DNA, 25 bp, SARS Virus
taacggttctttggatgactctcac

SEQ ID NO: 80244 - DNA, 25 bp, SARS Virus
aacggttctttggatgactctcacg

SEQ ID NO: 80245 - DNA, 25 bp, SARS Virus
acggttctttgggtgactctcacga

SEQ ID NO: 80246 - DNA, 25 bp, SARS Virus
cggttctttggaggactctcacgaa

SEQ ID NO: 80247 - DNA, 25 bp, SARS Virus
ggttctttggatgactctcacgaac

SEQ ID NO: 80248 - DNA, 25 bp, SARS Virus
gttctttggatggctctcacgaaca

SEQ ID NO: 80249 - DNA, 25 bp, SARS Virus
ttctttggatgagtctcacgaacaa

SEQ ID NO: 80250 - DNA, 25 bp, SARS Virus
tctttggatgacgctcacgaacaag

SEQ ID NO: 80251 - DNA, 25 bp, SARS Virus
ctttggatgactgtcacgaacaaga

SEQ ID NO: 80252 - DNA, 25 bp, SARS Virus
tttggatgactcgcacgaacaagaa

SEQ ID NO: 80253 - DNA, 25 bp, SARS Virus
ttggatgactctgacgaacaagaag

SEQ ID NO: 80254 - DNA, 25 bp, SARS Virus
tggatgactctcgcgaacaagaagt

SEQ ID NO: 80255 - DNA, 25 bp, SARS Virus
ggatgactctcaggaacaagaagtg

SEQ ID NO: 80256 - DNA, 25 bp, SARS Virus
gatgactctcacgaacaagaagtga

SEQ ID NO: 80257 - DNA, 25 bp, SARS Virus
atgactctcacggacaagaagtgaa

SEQ ID NO: 80258 - DNA, 25 bp, SARS Virus
tgactctcacgagcaagaagtgaat

SEQ ID NO: 80259 - DNA, 25 bp, SARS Virus
gactctcacgaagaagaagtgaatg

SEQ ID NO: 80260 - DNA, 25 bp, SARS Virus
actctcacgaacgagaagtgaatga

SEQ ID NO: 80261 - DNA, 25 bp, SARS Virus
ctctcacgaacaggaagtgaatgac

SEQ ID NO: 80262 - DNA, 25 bp, SARS Virus
tctcacgaacaagaagtgaatgaca

SEQ ID NO: 80263 - DNA, 25 bp, SARS Virus
ctcacgaacaaggagtgaatgacag

SEQ ID NO: 80264 - DNA, 25 bp, SARS Virus
tcacgaacaagaggtgaatgacaga

SEQ ID NO: 80265 - DNA, 25 bp, SARS Virus
cacgaacaagaagtgaatgacagaa

SEQ ID NO: 80266 - DNA, 25 bp, SARS Virus
acgaacaagaagggaatgacagaac

SEQ ID NO: 80267 - DNA, 25 bp, SARS Virus
cgaacaagaagtgaatgacagaaca

SEQ ID NO: 80268 - DNA, 25 bp, SARS Virus
gaacaagaagtggatgacagaacaa

SEQ ID NO: 80269 - DNA, 25 bp, SARS Virus
aacaagaagtgagtgacagaacaaa

SEQ ID NO: 80270 - DNA, 25 bp, SARS Virus
acaagaagtgaaggacagaacaaac

SEQ ID NO: 80271 - DNA, 25 bp, SARS Virus
caagaagtgaatgacagaacaaact

SEQ ID NO: 80272 - DNA, 25 bp, SARS Virus
aagaagtgaatggcagaacaaacta

SEQ ID NO: 80273 - DNA, 25 bp, SARS Virus
agaagtgaatgagagaacaaactac

SEQ ID NO: 80274 - DNA, 25 bp, SARS Virus
gaagtgaatgacggaacaaactacc

SEQ ID NO: 80275 - DNA, 25 bp, SARS Virus
aagtgaatgacagaacaaactacca

SEQ ID NO: 80276 - DNA, 25 bp, SARS Virus
agtgaatgacaggacaaactaccat

SEQ ID NO: 80277 - DNA, 25 bp, SARS Virus
gtgaatgacagagcaaactaccatc

SEQ ID NO: 80278 - DNA, 25 bp, SARS Virus
tgaatgacagaagaaactaccatct

SEQ ID NO: 80279 - DNA, 25 bp, SARS Virus
gaatgacagaacgaactaccatctc

SEQ ID NO: 80280 - DNA, 25 bp, SARS Virus
aatgacagaacagactaccatctca

SEQ ID NO: 80281 - DNA, 25 bp, SARS Virus
atgacagaacaagctaccatctcac

SEQ ID NO: 80282 - DNA, 25 bp, SARS Virus
tgacagaacaaagtaccatctcacc

SEQ ID NO: 80283 - DNA, 25 bp, SARS Virus
gacagaacaaacgaccatctcacct

SEQ ID NO: 80284 - DNA, 25 bp, SARS Virus
acagaacaaactgccatctcacctt

SEQ ID NO: 80285 - DNA, 25 bp, SARS Virus
cagaacaaactagcatctcaccttc

SEQ ID NO: 80286 - DNA, 25 bp, SARS Virus
agaacaaactacgatctcaccttcc

SEQ ID NO: 80287 - DNA, 25 bp, SARS Virus
gaacaaactaccgtctcaccttcct

SEQ ID NO: 80288 - DNA, 25 bp, SARS Virus
aacaaactaccagctcaccttcctg

SEQ ID NO: 80289 - DNA, 25 bp, SARS Virus
acaaactaccatgtcaccttcctgt

SEQ ID NO: 80290 - DNA, 25 bp, SARS Virus
caaactaccatcgcaccttcctgtc

SEQ ID NO: 80291 - DNA, 25 bp, SARS Virus
aaactaccatctgaccttcctgtcc

SEQ ID NO: 80292 - DNA, 25 bp, SARS Virus
aactaccatctcgccttcctgtcca

SEQ ID NO: 80293 - DNA, 25 bp, SARS Virus
actaccatctcagcttcctgtccat

SEQ ID NO: 80294 - DNA, 25 bp, SARS Virus
ctaccatctcacgttcctgtccatc

SEQ ID NO: 80295 - DNA, 25 bp, SARS Virus
taccatctcaccgtcctgtccatct

SEQ ID NO: 80296 - DNA, 25 bp, SARS Virus
accatctcacctgcctgtccatctg

SEQ ID NO: 80297 - DNA, 25 bp, SARS Virus
ccatctcaccttgctgtccatctgg

SEQ ID NO: 80298 - DNA, 25 bp, SARS Virus
catctcaccttcgtgtccatctgga

SEQ ID NO: 80299 - DNA, 25 bp, SARS Virus
atctcaccttccggtccatctggaa

SEQ ID NO: 80300 - DNA, 25 bp, SARS Virus
tctcaccttcctgtccatctggaaa

SEQ ID NO: 80301 - DNA, 25 bp, SARS Virus
ctcaccttcctggccatctggaaaa

SEQ ID NO: 80302 - DNA, 25 bp, SARS Virus
tcaccttcctgtgcatctggaaaaa

SEQ ID NO: 80303 - DNA, 25 bp, SARS Virus
caccttcctgtcgatctggaaaaat

SEQ ID NO: 80304 - DNA, 25 bp, SARS Virus
accttcctgtccgtctggaaaaatc

SEQ ID NO: 80305 - DNA, 25 bp, SARS Virus
ccttcctgtccagctggaaaaatct

SEQ ID NO: 80306 - DNA, 25 bp, SARS Virus
cttcctgtccatgtggaaaaatctt

SEQ ID NO: 80307 - DNA, 25 bp, SARS Virus
ttcctgtccatcgggaaaaatcttt

SEQ ID NO: 80308 - DNA, 25 bp, SARS Virus
tcctgtccatctggaaaaatctttg

SEQ ID NO: 80309 - DNA, 25 bp, SARS Virus
cctgtccatctggaaaaatctttgc

SEQ ID NO: 80310 - DNA, 25 bp, SARS Virus
ctgtccatctgggaaaatctttgcg

SEQ ID NO: 80311 - DNA, 25 bp, SARS Virus
tgtccatctggagaaatctttgcgg

SEQ ID NO: 80312 - DNA, 25 bp, SARS Virus
gtccatctggaagaatctttgcggg

SEQ ID NO: 80313 - DNA, 25 bp, SARS Virus
tccatctggaaagatctttgcgggc

SEQ ID NO: 80314 - DNA, 25 bp, SARS Virus
ccatctggaaaagtctttgcgggca

SEQ ID NO: 80315 - DNA, 25 bp, SARS Virus
catctggaaaaagctttgcgggcat

SEQ ID NO: 80316 - DNA, 25 bp, SARS Virus
atctggaaaaatgtttgcgggcatt

SEQ ID NO: 80317 - DNA, 25 bp, SARS Virus
tctggaaaaatcgttgcgggcatta

SEQ ID NO: 80318 - DNA, 25 bp, SARS Virus
ctggaaaaatctgtgcgggcattac

SEQ ID NO: 80319 - DNA, 25 bp, SARS Virus
tggaaaaatcttggcgggcattacc

SEQ ID NO: 80320 - DNA, 25 bp, SARS Virus
ggaaaaatctttgcgggcattacca

SEQ ID NO: 80321 - DNA, 25 bp, SARS Virus
gaaaaatctttgggggcattaccac

SEQ ID NO: 80322 - DNA, 25 bp, SARS Virus
aaaaatctttgcgggcattaccaca

SEQ ID NO: 80323 - DNA, 25 bp, SARS Virus
aaaatctttgcgggcattaccacaa

SEQ ID NO: 80324 - DNA, 25 bp, SARS Virus
aaatctttgcgggcattaccacaaa

SEQ ID NO: 80325 - DNA, 25 bp, SARS Virus
aatctttgcggggattaccacaaaa

SEQ ID NO: 80326 - DNA, 25 bp, SARS Virus
atctttgcgggcgttaccacaaaat

SEQ ID NO: 80327 - DNA, 25 bp, SARS Virus
tctttgcgggcagtaccacaaaatt

SEQ ID NO: 80328 - DNA, 25 bp, SARS Virus
ctttgcgggcatgaccacaaaatta

SEQ ID NO: 80329 - DNA, 25 bp, SARS Virus
tttgcgggcattgccacaaaattat

SEQ ID NO: 80330 - DNA, 25 bp, SARS Virus
ttgcgggcattagcacaaaattatt

SEQ ID NO: 80331 - DNA, 25 bp, SARS Virus
tgcgggcattacgacaaaattattg

SEQ ID NO: 80332 - DNA, 25 bp, SARS Virus
gcgggcattaccgcaaaattattgt

SEQ ID NO: 80333 - DNA, 25 bp, SARS Virus
cgggcattaccagaaaattattgtc

SEQ ID NO: 80334 - DNA, 25 bp, SARS Virus
gggcattaccacgaaattattgtct

SEQ ID NO: 80335 - DNA, 25 bp, SARS Virus
ggcattaccacagaattattgtctt

SEQ ID NO: 80336 - DNA, 25 bp, SARS Virus
gcattaccacaagattattgtcttc

SEQ ID NO: 80337 - DNA, 25 bp, SARS Virus
cattaccacaaagttattgtcttcc

SEQ ID NO: 80338 - DNA, 25 bp, SARS Virus
attaccacaaaagtattgtcttcca

SEQ ID NO: 80339 - DNA, 25 bp, SARS Virus
ttaccacaaaatgattgtcttccaa

SEQ ID NO: 80340 - DNA, 25 bp, SARS Virus
taccacaaaattgttgtcttccaag

SEQ ID NO: 80341 - DNA, 25 bp, SARS Virus
accacaaaattagtgtcttccaagt

SEQ ID NO: 80342 - DNA, 25 bp, SARS Virus
ccacaaaattatggtcttccaagtc

SEQ ID NO: 80343 - DNA, 25 bp, SARS Virus
cacaaaattattgtcttccaagtca

SEQ ID NO: 80344 - DNA, 25 bp, SARS Virus
acaaaattattggcttccaagtcag

SEQ ID NO: 80345 - DNA, 25 bp, SARS Virus
caaaattattgtgttccaagtcagt

SEQ ID NO: 80346 - DNA, 25 bp, SARS Virus
aaaattattgtcgtccaagtcagtt

SEQ ID NO: 80347 - DNA, 25 bp, SARS Virus
aaattattgtctgccaagtcagttt

SEQ ID NO: 80348 - DNA, 25 bp, SARS Virus
aattattgtcttgcaagtcagtttc

SEQ ID NO: 80349 - DNA, 25 bp, SARS Virus
attattgtcttcgaagtcagtttcc

SEQ ID NO: 80350 - DNA, 25 bp, SARS Virus
ttattgtcttccgagtcagtttcca

SEQ ID NO: 80351 - DNA, 25 bp, SARS Virus
tattgtcttccaggtcagtttccag

SEQ ID NO: 80352 - DNA, 25 bp, SARS Virus
attgtcttccaagtcagtttccaga

SEQ ID NO: 80353 - DNA, 25 bp, SARS Virus
ttgtcttccaaggcagtttccagat

SEQ ID NO: 80354 - DNA, 25 bp, SARS Virus
tgtcttccaagtgagtttccagatt

SEQ ID NO: 80355 - DNA, 25 bp, SARS Virus
gtcttccaagtcggtttccagattg

SEQ ID NO: 80356 - DNA, 25 bp, SARS Virus
tcttccaagtcagtttccagattgt

SEQ ID NO: 80357 - DNA, 25 bp, SARS Virus
cttccaagtcaggttccagattgtg

SEQ ID NO: 80358 - DNA, 25 bp, SARS Virus
ttccaagtcagtgtccagattgtgg

SEQ ID NO: 80359 - DNA, 25 bp, SARS Virus
tccaagtcagttgccagattgtgga

SEQ ID NO: 80360 - DNA, 25 bp, SARS Virus
ccaagtcagtttgcagattgtggaa

SEQ ID NO: 80361 - DNA, 25 bp, SARS Virus
caagtcagtttcgagattgtggaag

SEQ ID NO: 80362 - DNA, 25 bp, SARS Virus
aagtcagtttccggattgtggaagt

SEQ ID NO: 80363 - DNA, 25 bp, SARS Virus
agtcagtttccagattgtggaagtt

SEQ ID NO: 80364 - DNA, 25 bp, SARS Virus
gtcagtttccaggttgtggaagttt

SEQ ID NO: 80365 - DNA, 25 bp, SARS Virus
tcagtttccagagtgtggaagtttc

SEQ ID NO: 80366 - DNA, 25 bp, SARS Virus
cagtttccagatggtggaagtttcc

SEQ ID NO: 80367 - DNA, 25 bp, SARS Virus
agtttccagattgtggaagtttccc

SEQ ID NO: 80368 - DNA, 25 bp, SARS Virus
gtttccagattggggaagtttccct

SEQ ID NO: 80369 - DNA, 25 bp, SARS Virus
tttccagattgtggaagtttccctg

SEQ ID NO: 80370 - DNA, 25 bp, SARS Virus
ttccagattgtggaagtttccctgg

SEQ ID NO: 80371 - DNA, 25 bp, SARS Virus
tccagattgtgggagtttccctggt

SEQ ID NO: 80372 - DNA, 25 bp, SARS Virus
ccagattgtggaggtttccctggtc

SEQ ID NO: 80373 - DNA, 25 bp, SARS Virus
cagattgtggaagtttccctggtcg

SEQ ID NO: 80374 - DNA, 25 bp, SARS Virus
agattgtggaaggttccctggtcgt

SEQ ID NO: 80375 - DNA, 25 bp, SARS Virus
gattgtggaagtgtccctggtcgtg

SEQ ID NO: 80376 - DNA, 25 bp, SARS Virus
attgtggaagttgccctggtcgtgt

SEQ ID NO: 80377 - DNA, 25 bp, SARS Virus
ttgtggaagtttgcctggtcgtgtt

SEQ ID NO: 80378 - DNA, 25 bp, SARS Virus
tgtggaagtttcgctggtcgtgttc

SEQ ID NO: 80379 - DNA, 25 bp, SARS Virus
gtggaagtttccgtggtcgtgttcg

SEQ ID NO: 80380 - DNA, 25 bp, SARS Virus
tggaagtttcccgggtcgtgttcga

SEQ ID NO: 80381 - DNA, 25 bp, SARS Virus
ggaagtttccctggtcgtgttcgat

SEQ ID NO: 80382 - DNA, 25 bp, SARS Virus
gaagtttccctggtcgtgttcgatc

SEQ ID NO: 80383 - DNA, 25 bp, SARS Virus
aagtttccctgggcgtgttcgatcg

SEQ ID NO: 80384 - DNA, 25 bp, SARS Virus
agtttccctggtggtgttcgatcgc

SEQ ID NO: 80385 - DNA, 25 bp, SARS Virus
gtttccctggtcgtgttcgatcgca

SEQ ID NO: 80386 - DNA, 25 bp, SARS Virus
tttccctggtcgggttcgatcgcag

SEQ ID NO: 80387 - DNA, 25 bp, SARS Virus
ttccctggtcgtgttcgatcgcagt

SEQ ID NO: 80388 - DNA, 25 bp, SARS Virus
tccctggtcgtggtcgatcgcagtt

SEQ ID NO: 80389 - DNA, 25 bp, SARS Virus
ccctggtcgtgtgcgatcgcagtta

SEQ ID NO: 80390 - DNA, 25 bp, SARS Virus
cctggtcgtgttggatcgcagttac

SEQ ID NO: 80391 - DNA, 25 bp, SARS Virus
ctggtcgtgttcgatcgcagttacc

SEQ ID NO: 80392 - DNA, 25 bp, SARS Virus
tggtcgtgttcggtcgcagttacct

SEQ ID NO: 80393 - DNA, 25 bp, SARS Virus
ggtcgtgttcgagcgcagttacctc

SEQ ID NO: 80394 - DNA, 25 bp, SARS Virus
gtcgtgttcgatggcagttacctca

SEQ ID NO: 80395 - DNA, 25 bp, SARS Virus
tcgtgttcgatcgcagttacctcag

SEQ ID NO: 80396 - DNA, 25 bp, SARS Virus
cgtgttcgatcggagttacctcagt

SEQ ID NO: 80397 - DNA, 25 bp, SARS Virus
gtgttcgatcgcggttacctcagtg

SEQ ID NO: 80398 - DNA, 25 bp, SARS Virus
tgttcgatcgcagttacctcagtgt

SEQ ID NO: 80399 - DNA, 25 bp, SARS Virus
gttcgatcgcaggtacctcagtgta

SEQ ID NO: 80400 - DNA, 25 bp, SARS Virus
ttcgatcgcagtgacctcagtgtaa

SEQ ID NO: 80401 - DNA, 25 bp, SARS Virus
tcgatcgcagttgcctcagtgtaat

SEQ ID NO: 80402 - DNA, 25 bp, SARS Virus
cgatcgcagttagctcagtgtaatt

SEQ ID NO: 80403 - DNA, 25 bp, SARS Virus
gatcgcagttacgtcagtgtaatta

SEQ ID NO: 80404 - DNA, 25 bp, SARS Virus
atcgcagttaccgcagtgtaattaa

SEQ ID NO: 80405 - DNA, 25 bp, SARS Virus
tcgcagttacctgagtgtaattaac

SEQ ID NO: 80406 - DNA, 25 bp, SARS Virus
cgcagttacctcggtgtaattaacc

SEQ ID NO: 80407 - DNA, 25 bp, SARS Virus
gcagttacctcagtgtaattaacct

SEQ ID NO: 80408 - DNA, 25 bp, SARS Virus
cagttacctcagggtaattaacctc

SEQ ID NO: 80409 - DNA, 25 bp, SARS Virus
agttacctcagtgtaattaacctct

SEQ ID NO: 80410 - DNA, 25 bp, SARS Virus
gttacctcagtggaattaacctctt

SEQ ID NO: 80411 - DNA, 25 bp, SARS Virus
ttacctcagtgtgattaacctctta

SEQ ID NO: 80412 - DNA, 25 bp, SARS Virus
tacctcagtgtagttaacctcttag

SEQ ID NO: 80413 - DNA, 25 bp, SARS Virus
acctcagtgtaagtaacctcttagt

SEQ ID NO: 80414 - DNA, 25 bp, SARS Virus
cctcagtgtaatgaacctcttagtc

SEQ ID NO: 80415 - DNA, 25 bp, SARS Virus
ctcagtgtaattgacctcttagtca

SEQ ID NO: 80416 - DNA, 25 bp, SARS Virus
tcagtgtaattagcctcttagtcat

SEQ ID NO: 80417 - DNA, 25 bp, SARS Virus
cagtgtaattaagctcttagtcatt

SEQ ID NO: 80418 - DNA, 25 bp, SARS Virus
agtgtaattaacgtcttagtcattt

SEQ ID NO: 80419 - DNA, 25 bp, SARS Virus
gtgtaattaaccgcttagtcatttt

SEQ ID NO: 80420 - DNA, 25 bp, SARS Virus
tgtaattaacctgttagtcattttt

SEQ ID NO: 80421 - DNA, 25 bp, SARS Virus
gtaattaacctcgtagtcatttttg

SEQ ID NO: 80422 - DNA, 25 bp, SARS Virus
taattaacctctgagtcatttttgt

SEQ ID NO: 80423 - DNA, 25 bp, SARS Virus
aattaacctcttggtcatttttgtg

SEQ ID NO: 80424 - DNA, 25 bp, SARS Virus
attaacctcttagtcatttttgtgt

SEQ ID NO: 80425 - DNA, 25 bp, SARS Virus
ttaacctcttaggcatttttgtgtc

SEQ ID NO: 80426 - DNA, 25 bp, SARS Virus
taacctcttagtgatttttgtgtca

SEQ ID NO: 80427 - DNA, 25 bp, SARS Virus
aacctcttagtcgtttttgtgtcaa

SEQ ID NO: 80428 - DNA, 25 bp, SARS Virus
acctcttagtcagttttgtgtcaaa

SEQ ID NO: 80429 - DNA, 25 bp, SARS Virus
cctcttagtcatgtttgtgtcaaat

SEQ ID NO: 80430 - DNA, 25 bp, SARS Virus
ctcttagtcattgttgtgtcaaatt

SEQ ID NO: 80431 - DNA, 25 bp, SARS Virus
tcttagtcatttgtgtgtcaaattg

SEQ ID NO: 80432 - DNA, 25 bp, SARS Virus
cttagtcattttggtgtcaaattga

SEQ ID NO: 80433 - DNA, 25 bp, SARS Virus
ttagtcatttttgtgtcaaattgat

SEQ ID NO: 80434 - DNA, 25 bp, SARS Virus
tagtcatttttgggtcaaattgatg

SEQ ID NO: 80435 - DNA, 25 bp, SARS Virus
agtcatttttgtgtcaaattgatga

SEQ ID NO: 80436 - DNA, 25 bp, SARS Virus
gtcatttttgtggcaaattgatgaa

SEQ ID NO: 80437 - DNA, 25 bp, SARS Virus
tcatttttgtgtgaaattgatgaaa

SEQ ID NO: 80438 - DNA, 25 bp, SARS Virus
catttttgtgtcgaattgatgaaat

SEQ ID NO: 80439 - DNA, 25 bp, SARS Virus
atttttgtgtcagattgatgaaatt

SEQ ID NO: 80440 - DNA, 25 bp, SARS Virus
tttttgtgtcaagttgatgaaattc

SEQ ID NO: 80441 - DNA, 25 bp, SARS Virus
ttttgtgtcaaagtgatgaaattct

SEQ ID NO: 80442 - DNA, 25 bp, SARS Virus
tttgtgtcaaatggatgaaattctt

SEQ ID NO: 80443 - DNA, 25 bp, SARS Virus
ttgtgtcaaattgatgaaattcttt

SEQ ID NO: 80444 - DNA, 25 bp, SARS Virus
tgtgtcaaattggtgaaattctttc

SEQ ID NO: 80445 - DNA, 25 bp, SARS Virus
gtgtcaaattgaggaaattctttca

SEQ ID NO: 80446 - DNA, 25 bp, SARS Virus
tgtcaaattgatgaaattctttcat

SEQ ID NO: 80447 - DNA, 25 bp, SARS Virus
gtcaaattgatggaattctttcatc

SEQ ID NO: 80448 - DNA, 25 bp, SARS Virus
tcaaattgatgagattctttcatct

SEQ ID NO: 80449 - DNA, 25 bp, SARS Virus
caaattgatgaagttctttcatctg

SEQ ID NO: 80450 - DNA, 25 bp, SARS Virus
aaattgatgaaagtctttcatctgc

SEQ ID NO: 80451 - DNA, 25 bp, SARS Virus
aattgatgaaatgctttcatctgcc

SEQ ID NO: 80452 - DNA, 25 bp, SARS Virus
attgatgaaattgtttcatctgccg

SEQ ID NO: 80453 - DNA, 25 bp, SARS Virus
ttgatgaaattcgttcatctgccgt

SEQ ID NO: 80454 - DNA, 25 bp, SARS Virus
tgatgaaattctgtcatctgccgta

SEQ ID NO: 80455 - DNA, 25 bp, SARS Virus
gatgaaattcttgcatctgccgtaa

SEQ ID NO: 80456 - DNA, 25 bp, SARS Virus
atgaaattctttgatctgccgtaat

SEQ ID NO: 80457 - DNA, 25 bp, SARS Virus
tgaaattctttcgtctgccgtaata

SEQ ID NO: 80458 - DNA, 25 bp, SARS Virus
gaaattctttcagctgccgtaataa

SEQ ID NO: 80459 - DNA, 25 bp, SARS Virus
aaattctttcatgtgccgtaataag

SEQ ID NO: 80460 - DNA, 25 bp, SARS Virus
aattctttcatcggccgtaataagt

SEQ ID NO: 80461 - DNA, 25 bp, SARS Virus
attctttcatctgccgtaataagtt

SEQ ID NO: 80462 - DNA, 25 bp, SARS Virus
ttctttcatctggcgtaataagttg

SEQ ID NO: 80463 - DNA, 25 bp, SARS Virus
tctttcatctgcggtaataagttgt

SEQ ID NO: 80464 - DNA, 25 bp, SARS Virus
ctttcatctgccgtaataagttgtc

SEQ ID NO: 80465 - DNA, 25 bp, SARS Virus
tttcatctgccggaataagttgtca

SEQ ID NO: 80466 - DNA, 25 bp, SARS Virus
ttcatctgccgtgataagttgtcaa

SEQ ID NO: 80467 - DNA, 25 bp, SARS Virus
tcatctgccgtagtaagttgtcaac

SEQ ID NO: 80468 - DNA, 25 bp, SARS Virus
catctgccgtaagaagttgtcaacg

SEQ ID NO: 80469 - DNA, 25 bp, SARS Virus
atctgccgtaatgagttgtcaacgg

SEQ ID NO: 80470 - DNA, 25 bp, SARS Virus
tctgccgtaataggttgtcaacgga

SEQ ID NO: 80471 - DNA, 25 bp, SARS Virus
ctgccgtaataagttgtcaacggac

SEQ ID NO: 80472 - DNA, 25 bp, SARS Virus
tgccgtaataaggtgtcaacggact

SEQ ID NO: 80473 - DNA, 25 bp, SARS Virus
gccgtaataagtggtcaacggactt

SEQ ID NO: 80474 - DNA, 25 bp, SARS Virus
ccgtaataagttgtcaacggacttt

SEQ ID NO: 80475 - DNA, 25 bp, SARS Virus
cgtaataagttggcaacggactttg

SEQ ID NO: 80476 - DNA, 25 bp, SARS Virus
gtaataagttgtgaacggactttgg

SEQ ID NO: 80477 - DNA, 25 bp, SARS Virus
taataagttgtcgacggactttgga

SEQ ID NO: 80478 - DNA, 25 bp, SARS Virus
aataagttgtcagcggactttggat

SEQ ID NO: 80479 - DNA, 25 bp, SARS Virus
ataagttgtcaagggactttggatg

SEQ ID NO: 80480 - DNA, 25 bp, SARS Virus
taagttgtcaacggactttggatga

SEQ ID NO: 80481 - DNA, 25 bp, SARS Virus
aagttgtcaacggactttggatgaa

SEQ ID NO: 80482 - DNA, 25 bp, SARS Virus
agttgtcaacgggctttggatgaaa

SEQ ID NO: 80483 - DNA, 25 bp, SARS Virus
gttgtcaacggagtttggatgaaat

SEQ ID NO: 80484 - DNA, 25 bp, SARS Virus
ttgtcaacggacgttggatgaaatg

SEQ ID NO: 80485 - DNA, 25 bp, SARS Virus
tgtcaacggactgtggatgaaatga

SEQ ID NO: 80486 - DNA, 25 bp, SARS Virus
gtcaacggacttgggatgaaatgag

SEQ ID NO: 80487 - DNA, 25 bp, SARS Virus
tcaacggactttggatgaaatgagt

SEQ ID NO: 80488 - DNA, 25 bp, SARS Virus
caacggactttggatgaaatgagtc

SEQ ID NO: 80489 - DNA, 25 bp, SARS Virus
aacggactttgggtgaaatgagtct

SEQ ID NO: 80490 - DNA, 25 bp, SARS Virus
acggactttggaggaaatgagtctc

SEQ ID NO: 80491 - DNA, 25 bp, SARS Virus
cggactttggatgaaatgagtctcg

SEQ ID NO: 80492 - DNA, 25 bp, SARS Virus
ggactttggatggaatgagtctcgt

SEQ ID NO: 80493 - DNA, 25 bp, SARS Virus
gactttggatgagatgagtctcgtc

SEQ ID NO: 80494 - DNA, 25 bp, SARS Virus
actttggatgaagtgagtctcgtct

SEQ ID NO: 80495 - DNA, 25 bp, SARS Virus
ctttggatgaaaggagtctcgtctc

SEQ ID NO: 80496 - DNA, 25 bp, SARS Virus
tttggatgaaatgagtctcgtctct

SEQ ID NO: 80497 - DNA, 25 bp, SARS Virus
ttggatgaaatgggtctcgtctctg

SEQ ID NO: 80498 - DNA, 25 bp, SARS Virus
tggatgaaatgagtctcgtctctga

SEQ ID NO: 80499 - DNA, 25 bp, SARS Virus
ggatgaaatgaggctcgtctctgaa

SEQ ID NO: 80500 - DNA, 25 bp, SARS Virus
gatgaaatgagtgtcgtctctgaat

SEQ ID NO: 80501 - DNA, 25 bp, SARS Virus
atgaaatgagtcgcgtctctgaatc

SEQ ID NO: 80502 - DNA, 25 bp, SARS Virus
tgaaatgagtctggtctctgaatct

SEQ ID NO: 80503 - DNA, 25 bp, SARS Virus
gaaatgagtctcgtctctgaatctc

SEQ ID NO: 80504 - DNA, 25 bp, SARS Virus
aaatgagtctcggctctgaatctcc

SEQ ID NO: 80505 - DNA, 25 bp, SARS Virus
aatgagtctcgtgtctgaatctcct

SEQ ID NO: 80506 - DNA, 25 bp, SARS Virus
atgagtctcgtcgctgaatctccta

SEQ ID NO: 80507 - DNA, 25 bp, SARS Virus
tgagtctcgtctgtgaatctcctaa

SEQ ID NO: 80508 - DNA, 25 bp, SARS Virus
gagtctcgtctcggaatctcctaaa

SEQ ID NO: 80509 - DNA, 25 bp, SARS Virus
agtctcgtctctgaatctcctaaaa

SEQ ID NO: 80510 - DNA, 25 bp, SARS Virus
gtctcgtctctggatctcctaaaat

SEQ ID NO: 80511 - DNA, 25 bp, SARS Virus
tctcgtctctgagtctcctaaaatt

SEQ ID NO: 80512 - DNA, 25 bp, SARS Virus
ctcgtctctgaagctcctaaaattc

SEQ ID NO: 80513 - DNA, 25 bp, SARS Virus
tcgtctctgaatgtcctaaaattcg

SEQ ID NO: 80514 - DNA, 25 bp, SARS Virus
cgtctctgaatcgcctaaaattcgg

SEQ ID NO: 80515 - DNA, 25 bp, SARS Virus
gtctctgaatctgctaaaattcggg

SEQ ID NO: 80516 - DNA, 25 bp, SARS Virus
tctctgaatctcgtaaaattcgggt

SEQ ID NO: 80517 - DNA, 25 bp, SARS Virus
ctctgaatctccgaaaattcgggtc

SEQ ID NO: 80518 - DNA, 25 bp, SARS Virus
tctgaatctcctgaaattcgggtct

SEQ ID NO: 80519 - DNA, 25 bp, SARS Virus
ctgaatctcctagaattcgggtcta

SEQ ID NO: 80520 - DNA, 25 bp, SARS Virus
tgaatctcctaagattcgggtctag

SEQ ID NO: 80521 - DNA, 25 bp, SARS Virus
gaatctcctaaagttcgggtctagt

SEQ ID NO: 80522 - DNA, 25 bp, SARS Virus
aatctcctaaaagtcgggtctagtg

SEQ ID NO: 80523 - DNA, 25 bp, SARS Virus
atctcctaaaatgcgggtctagtgt

SEQ ID NO: 80524 - DNA, 25 bp, SARS Virus
tctcctaaaattggggtctagtgtt

SEQ ID NO: 80525 - DNA, 25 bp, SARS Virus
ctcctaaaattcgggtctagtgttt

SEQ ID NO: 80526 - DNA, 25 bp, SARS Virus
tcctaaaattcgggtctagtgttta

SEQ ID NO: 80527 - DNA, 25 bp, SARS Virus
cctaaaattcgggtctagtgtttac

SEQ ID NO: 80528 - DNA, 25 bp, SARS Virus
ctaaaattcggggctagtgtttacc

SEQ ID NO: 80529 - DNA, 25 bp, SARS Virus
taaaattcgggtgtagtgtttacct

SEQ ID NO: 80530 - DNA, 25 bp, SARS Virus
aaaattcgggtcgagtgtttacctt

SEQ ID NO: 80531 - DNA, 25 bp, SARS Virus
aaattcgggtctggtgtttaccttt

SEQ ID NO: 80532 - DNA, 25 bp, SARS Virus
aattcgggtctagtgtttacctttg

SEQ ID NO: 80533 - DNA, 25 bp, SARS Virus
attcgggtctagggtttacctttga

SEQ ID NO: 80534 - DNA, 25 bp, SARS Virus
ttcgggtctagtgtttacctttgac

SEQ ID NO: 80535 - DNA, 25 bp, SARS Virus
tcgggtctagtggttacctttgact

SEQ ID NO: 80536 - DNA, 25 bp, SARS Virus
cgggtctagtgtgtacctttgactg

SEQ ID NO: 80537 - DNA, 25 bp, SARS Virus
gggtctagtgttgacctttgactga

SEQ ID NO: 80538 - DNA, 25 bp, SARS Virus
ggtctagtgtttgcctttgactgaa

SEQ ID NO: 80539 - DNA, 25 bp, SARS Virus
gtctagtgtttagctttgactgaaa

SEQ ID NO: 80540 - DNA, 25 bp, SARS Virus
tctagtgtttacgtttgactgaaag

SEQ ID NO: 80541 - DNA, 25 bp, SARS Virus
ctagtgtttaccgttgactgaaaga

SEQ ID NO: 80542 - DNA, 25 bp, SARS Virus
tagtgtttacctgtgactgaaagag

SEQ ID NO: 80543 - DNA, 25 bp, SARS Virus
agtgtttaccttggactgaaagagc

SEQ ID NO: 80544 - DNA, 25 bp, SARS Virus
gtgtttacctttgactgaaagagct

SEQ ID NO: 80545 - DNA, 25 bp, SARS Virus
tgtttacctttggctgaaagagctc

SEQ ID NO: 80546 - DNA, 25 bp, SARS Virus
gtttacctttgagtgaaagagctcg

SEQ ID NO: 80547 - DNA, 25 bp, SARS Virus
tttacctttgacggaaagagctcga

SEQ ID NO: 80548 - DNA, 25 bp, SARS Virus
ttacctttgactgaaagagctcgag

SEQ ID NO: 80549 - DNA, 25 bp, SARS Virus
tacctttgactggaagagctcgagc

SEQ ID NO: 80550 - DNA, 25 bp, SARS Virus
acctttgactgagagagctcgagcg

SEQ ID NO: 80551 - DNA, 25 bp, SARS Virus
cctttgactgaaggagctcgagcga

SEQ ID NO: 80552 - DNA, 25 bp, SARS Virus
ctttgactgaaagagctcgagcgat

SEQ ID NO: 80553 - DNA, 25 bp, SARS Virus
tttgactgaaagggctcgagcgata

SEQ ID NO: 80554 - DNA, 25 bp, SARS Virus
ttgactgaaagagctcgagcgatac

SEQ ID NO: 80555 - DNA, 25 bp, SARS Virus
tgactgaaagaggtcgagcgatacc

SEQ ID NO: 80556 - DNA, 25 bp, SARS Virus
gactgaaagagcgcgagcgatacct

SEQ ID NO: 80557 - DNA, 25 bp, SARS Virus
actgaaagagctggagcgataccta

SEQ ID NO: 80558 - DNA, 25 bp, SARS Virus
ctgaaagagctcgagcgatacctac

SEQ ID NO: 80559 - DNA, 25 bp, SARS Virus
tgaaagagctcgggcgatacctact

SEQ ID NO: 80560 - DNA, 25 bp, SARS Virus
gaaagagctcgagcgatacctactt

SEQ ID NO: 80561 - DNA, 25 bp, SARS Virus
aaagagctcgagggatacctactta

SEQ ID NO: 80562 - DNA, 25 bp, SARS Virus
aagagctcgagcgatacctacttaa

SEQ ID NO: 80563 - DNA, 25 bp, SARS Virus
agagctcgagcggtacctacttaag

SEQ ID NO: 80564 - DNA, 25 bp, SARS Virus
gagctcgagcgagacctacttaagt

SEQ ID NO: 80565 - DNA, 25 bp, SARS Virus
agctcgagcgatgcctacttaagta

SEQ ID NO: 80566 - DNA, 25 bp, SARS Virus
gctcgagcgatagctacttaagtat

SEQ ID NO: 80567 - DNA, 25 bp, SARS Virus
ctcgagcgatacgtacttaagtatg

SEQ ID NO: 80568 - DNA, 25 bp, SARS Virus
tcgagcgataccgacttaagtatgt

SEQ ID NO: 80569 - DNA, 25 bp, SARS Virus
cgagcgatacctgcttaagtatgtc

SEQ ID NO: 80570 - DNA, 25 bp, SARS Virus
gagcgatacctagttaagtatgtcg

SEQ ID NO: 80571 - DNA, 25 bp, SARS Virus
agcgatacctacgtaagtatgtcgc

SEQ ID NO: 80572 - DNA, 25 bp, SARS Virus
gcgatacctactgaagtatgtcgct

SEQ ID NO: 80573 - DNA, 25 bp, SARS Virus
cgatacctacttgagtatgtcgcta

SEQ ID NO: 80574 - DNA, 25 bp, SARS Virus
gatacctacttaggtatgtcgctat

SEQ ID NO: 80575 - DNA, 25 bp, SARS Virus
atacctacttaagtatgtcgctata

SEQ ID NO: 80576 - DNA, 25 bp, SARS Virus
tacctacttaaggatgtcgctatat

SEQ ID NO: 80577 - DNA, 25 bp, SARS Virus
acctacttaagtgtgtcgctatatt

SEQ ID NO: 80578 - DNA, 25 bp, SARS Virus
cctacttaagtaggtcgctatattc

SEQ ID NO: 80579 - DNA, 25 bp, SARS Virus
ctacttaagtatgtcgctatattcg

SEQ ID NO: 80580 - DNA, 25 bp, SARS Virus
tacttaagtatggcgctatattcga

SEQ ID NO: 80581 - DNA, 25 bp, SARS Virus
acttaagtatgtggctatattcgag

SEQ ID NO: 80582 - DNA, 25 bp, SARS Virus
cttaagtatgtcgctatattcgagc

SEQ ID NO: 80583 - DNA, 25 bp, SARS Virus
ttaagtatgtcggtatattcgagct

SEQ ID NO: 80584 - DNA, 25 bp, SARS Virus
taagtatgtcgcgatattcgagctc

SEQ ID NO: 80585 - DNA, 25 bp, SARS Virus
aagtatgtcgctgtattcgagctcc

SEQ ID NO: 80586 - DNA, 25 bp, SARS Virus
agtatgtcgctagattcgagctccc

SEQ ID NO: 80587 - DNA, 25 bp, SARS Virus
gtatgtcgctatgttcgagctcccg

SEQ ID NO: 80588 - DNA, 25 bp, SARS Virus
tatgtcgctatagtcgagctcccga

SEQ ID NO: 80589 - DNA, 25 bp, SARS Virus
atgtcgctatatgcgagctcccgat

SEQ ID NO: 80590 - DNA, 25 bp, SARS Virus
tgtcgctatattggagctcccgata

SEQ ID NO: 80591 - DNA, 25 bp, SARS Virus
gtcgctatattcgagctcccgatac

SEQ ID NO: 80592 - DNA, 25 bp, SARS Virus
tcgctatattcgggctcccgatacg

SEQ ID NO: 80593 - DNA, 25 bp, SARS Virus
cgctatattcgagctcccgatacgg

SEQ ID NO: 80594 - DNA, 25 bp, SARS Virus
gctatattcgaggtcccgatacgga

SEQ ID NO: 80595 - DNA, 25 bp, SARS Virus
ctatattcgagcgcccgatacggaa

SEQ ID NO: 80596 - DNA, 25 bp, SARS Virus
tatattcgagctgccgatacggaag

SEQ ID NO: 80597 - DNA, 25 bp, SARS Virus
atattcgagctcgcgatacggaagc

SEQ ID NO: 80598 - DNA, 25 bp, SARS Virus
tattcgagctccggatacggaagct

SEQ ID NO: 80599 - DNA, 25 bp, SARS Virus
attcgagctcccgatacggaagctt

SEQ ID NO: 80600 - DNA, 25 bp, SARS Virus
ttcgagctcccggtacggaagcttg

SEQ ID NO: 80601 - DNA, 25 bp, SARS Virus
tcgagctcccgagacggaagcttgt

SEQ ID NO: 80602 - DNA, 25 bp, SARS Virus
cgagctcccgatgcggaagcttgtg

SEQ ID NO: 80603 - DNA, 25 bp, SARS Virus
gagctcccgatagggaagcttgtgt

SEQ ID NO: 80604 - DNA, 25 bp, SARS Virus
agctcccgatacggaagcttgtgta

SEQ ID NO: 80605 - DNA, 25 bp, SARS Virus
gctcccgatacggaagcttgtgtag

SEQ ID NO: 80606 - DNA, 25 bp, SARS Virus
ctcccgatacgggagcttgtgtagc

SEQ ID NO: 80607 - DNA, 25 bp, SARS Virus
tcccgatacggaggcttgtgtagca

SEQ ID NO: 80608 - DNA, 25 bp, SARS Virus
cccgatacggaagcttgtgtagcaa

SEQ ID NO: 80609 - DNA, 25 bp, SARS Virus
ccgatacggaaggttgtgtagcaaa

SEQ ID NO: 80610 - DNA, 25 bp, SARS Virus
cgatacggaagcgtgtgtagcaaat

SEQ ID NO: 80611 - DNA, 25 bp, SARS Virus
gatacggaagctggtgtagcaaata

SEQ ID NO: 80612 - DNA, 25 bp, SARS Virus
atacggaagcttgtgtagcaaatac

SEQ ID NO: 80613 - DNA, 25 bp, SARS Virus
tacggaagcttgggtagcaaatacc

SEQ ID NO: 80614 - DNA, 25 bp, SARS Virus
acggaagcttgtgtagcaaatacct

SEQ ID NO: 80615 - DNA, 25 bp, SARS Virus
cggaagcttgtggagcaaatacctc

SEQ ID NO: 80616 - DNA, 25 bp, SARS Virus
ggaagcttgtgtggcaaatacctct

SEQ ID NO: 80617 - DNA, 25 bp, SARS Virus
gaagcttgtgtagcaaatacctcta

SEQ ID NO: 80618 - DNA, 25 bp, SARS Virus
aagcttgtgtaggaaatacctctaa

SEQ ID NO: 80619 - DNA, 25 bp, SARS Virus
agcttgtgtagcgaatacctctaaa

SEQ ID NO: 80620 - DNA, 25 bp, SARS Virus
gcttgtgtagcagatacctctaaag

SEQ ID NO: 80621 - DNA, 25 bp, SARS Virus
cttgtgtagcaagtacctctaaagt

SEQ ID NO: 80622 - DNA, 25 bp, SARS Virus
ttgtgtagcaaagacctctaaagtc

SEQ ID NO: 80623 - DNA, 25 bp, SARS Virus
tgtgtagcaaatgcctctaaagtca

SEQ ID NO: 80624 - DNA, 25 bp, SARS Virus
gtgtagcaaatagctctaaagtcag

SEQ ID NO: 80625 - DNA, 25 bp, SARS Virus
tgtagcaaatacgtctaaagtcagt

SEQ ID NO: 80626 - DNA, 25 bp, SARS Virus
gtagcaaataccgctaaagtcagta

SEQ ID NO: 80627 - DNA, 25 bp, SARS Virus
tagcaaatacctgtaaagtcagtac

SEQ ID NO: 80628 - DNA, 25 bp, SARS Virus
agcaaatacctcgaaagtcagtacc

SEQ ID NO: 80629 - DNA, 25 bp, SARS Virus
gcaaatacctctgaagtcagtacct

SEQ ID NO: 80630 - DNA, 25 bp, SARS Virus
caaatacctctagagtcagtacctg

SEQ ID NO: 80631 - DNA, 25 bp, SARS Virus
aaatacctctaaggtcagtacctgt

SEQ ID NO: 80632 - DNA, 25 bp, SARS Virus
aatacctctaaagtcagtacctgtt

SEQ ID NO: 80633 - DNA, 25 bp, SARS Virus
atacctctaaaggcagtacctgttg

SEQ ID NO: 80634 - DNA, 25 bp, SARS Virus
tacctctaaagtgagtacctgttga

SEQ ID NO: 80635 - DNA, 25 bp, SARS Virus
acctctaaagtcggtacctgttgaa

SEQ ID NO: 80636 - DNA, 25 bp, SARS Virus
cctctaaagtcagtacctgttgaac

SEQ ID NO: 80637 - DNA, 25 bp, SARS Virus
ctctaaagtcaggacctgttgaacc

SEQ ID NO: 80638 - DNA, 25 bp, SARS Virus
tctaaagtcagtgcctgttgaaccg

SEQ ID NO: 80639 - DNA, 25 bp, SARS Virus
ctaaagtcagtagctgttgaaccgc

SEQ ID NO: 80640 - DNA, 25 bp, SARS Virus
taaagtcagtacgtgttgaaccgcc

SEQ ID NO: 80641 - DNA, 25 bp, SARS Virus
aaagtcagtaccggttgaaccgcca

SEQ ID NO: 80642 - DNA, 25 bp, SARS Virus
aagtcagtacctgttgaaccgccag

SEQ ID NO: 80643 - DNA, 25 bp, SARS Virus
agtcagtacctggtgaaccgccaga

SEQ ID NO: 80644 - DNA, 25 bp, SARS Virus
gtcagtacctgtggaaccgccagaa

SEQ ID NO: 80645 - DNA, 25 bp, SARS Virus
tcagtacctgttgaaccgccagaag

SEQ ID NO: 80646 - DNA, 25 bp, SARS Virus
cagtacctgttggaccgccagaagt

SEQ ID NO: 80647 - DNA, 25 bp, SARS Virus
agtacctgttgagccgccagaagta

SEQ ID NO: 80648 - DNA, 25 bp, SARS Virus
gtacctgttgaagcgccagaagtaa

SEQ ID NO: 80649 - DNA, 25 bp, SARS Virus
gcgacgattatgtcattagaccctg

SEQ ID NO: 80650 - DNA, 25 bp, SARS Virus
cgacgattatgatattagaccctga

SEQ ID NO: 80651 - DNA, 25 bp, SARS Virus
gacgattatgactttagaccctgat

SEQ ID NO: 80652 - DNA, 25 bp, SARS Virus
acgattatgacattagaccctgatg

SEQ ID NO: 80653 - DNA, 25 bp, SARS Virus
cgattatgacattagaccctgatgt

SEQ ID NO: 80654 - DNA, 25 bp, SARS Virus
gattatgacatttgaccctgatgtt

SEQ ID NO: 80655 - DNA, 25 bp, SARS Virus
attatgacattataccctgatgttt

SEQ ID NO: 80656 - DNA, 25 bp, SARS Virus
ttatgacattagtccctgatgtttt

SEQ ID NO: 80657 - DNA, 25 bp, SARS Virus
tatgacattagatcctgatgttttc

SEQ ID NO: 80658 - DNA, 25 bp, SARS Virus
atgacattagactctgatgttttct

SEQ ID NO: 80659 - DNA, 25 bp, SARS Virus
tgacattagaccttgatgttttctc

SEQ ID NO: 80660 - DNA, 25 bp, SARS Virus
gacattagaccctgatgttttctct

SEQ ID NO: 80661 - DNA, 25 bp, SARS Virus
acattagacccttatgttttctctt

SEQ ID NO: 80662 - DNA, 25 bp, SARS Virus
cattagaccctgttgttttctcttc

SEQ ID NO: 80663 - DNA, 25 bp, SARS Virus
attagaccctgatgttttctcttcg

SEQ ID NO: 80664 - DNA, 25 bp, SARS Virus
ttagaccctgattttttctcttcgg

SEQ ID NO: 80665 - DNA, 25 bp, SARS Virus
tagaccctgatgttttctcttcggg

SEQ ID NO: 80666 - DNA, 25 bp, SARS Virus
agaccctgatgttttctcttcgggg

SEQ ID NO: 80667 - DNA, 25 bp, SARS Virus
gaccctgatgttttctcttcggggt

SEQ ID NO: 80668 - DNA, 25 bp, SARS Virus
accctgatgttttctcttcggggtc

SEQ ID NO: 80669 - DNA, 25 bp, SARS Virus
ccctgatgttttttcttcggggtcg

SEQ ID NO: 80670 - DNA, 25 bp, SARS Virus
cctgatgttttctcttcggggtcgt

SEQ ID NO: 80671 - DNA, 25 bp, SARS Virus
ctgatgttttcttttcggggtcgtg

SEQ ID NO: 80672 - DNA, 25 bp, SARS Virus
tgatgttttctcttcggggtcgtgt

SEQ ID NO: 80673 - DNA, 25 bp, SARS Virus
gatgttttctcttcggggtcgtgta

SEQ ID NO: 80674 - DNA, 25 bp, SARS Virus
atgttttctctttggggtcgtgtac

SEQ ID NO: 80675 - DNA, 25 bp, SARS Virus
tgttttctcttctgggtcgtgtaca

SEQ ID NO: 80676 - DNA, 25 bp, SARS Virus
gttttctcttcgtggtcgtgtacat

SEQ ID NO: 80677 - DNA, 25 bp, SARS Virus
ttttctcttcggtgtcgtgtacata

SEQ ID NO: 80678 - DNA, 25 bp, SARS Virus
tttctcttcgggttcgtgtacatag

SEQ ID NO: 80679 - DNA, 25 bp, SARS Virus
ttctcttcggggtcgtgtacataga

SEQ ID NO: 80680 - DNA, 25 bp, SARS Virus
tctcttcggggttgtgtacatagat

SEQ ID NO: 80681 - DNA, 25 bp, SARS Virus
ctcttcggggtcttgtacatagatg

SEQ ID NO: 80682 - DNA, 25 bp, SARS Virus
tcttcggggtcgtgtacatagatgt

SEQ ID NO: 80683 - DNA, 25 bp, SARS Virus
cttcggggtcgtttacatagatgtt

SEQ ID NO: 80684 - DNA, 25 bp, SARS Virus
ttcggggtcgtgtacatagatgtta

SEQ ID NO: 80685 - DNA, 25 bp, SARS Virus
tcggggtcgtgttcatagatgttat

SEQ ID NO: 80686 - DNA, 25 bp, SARS Virus
cggggtcgtgtatatagatgttatc

SEQ ID NO: 80687 - DNA, 25 bp, SARS Virus
ggggtcgtgtacttagatgttatcc

SEQ ID NO: 80688 - DNA, 25 bp, SARS Virus
gggtcgtgtacatagatgttatcca

SEQ ID NO: 80689 - DNA, 25 bp, SARS Virus
ggtcgtgtacattgatgttatccac

SEQ ID NO: 80690 - DNA, 25 bp, SARS Virus
gtcgtgtacatatatgttatccaca

SEQ ID NO: 80691 - DNA, 25 bp, SARS Virus
tcgtgtacatagttgttatccacag

SEQ ID NO: 80692 - DNA, 25 bp, SARS Virus
cgtgtacatagatgttatccacaga

SEQ ID NO: 80693 - DNA, 25 bp, SARS Virus
gtgtacatagattttatccacagac

SEQ ID NO: 80694 - DNA, 25 bp, SARS Virus
tgtacatagatgttatccacagacg

SEQ ID NO: 80695 - DNA, 25 bp, SARS Virus
gtacatagatgttatccacagacgt

SEQ ID NO: 80696 - DNA, 25 bp, SARS Virus
tacatagatgttttccacagacgtg

SEQ ID NO: 80697 - DNA, 25 bp, SARS Virus
acatagatgttatccacagacgtgt

SEQ ID NO: 80698 - DNA, 25 bp, SARS Virus
catagatgttattcacagacgtgtt

SEQ ID NO: 80699 - DNA, 25 bp, SARS Virus
atagatgttatctacagacgtgtta

SEQ ID NO: 80700 - DNA, 25 bp, SARS Virus
tagatgttatcctcagacgtgttac

SEQ ID NO: 80701 - DNA, 25 bp, SARS Virus
agatgttatccatagacgtgttact

SEQ ID NO: 80702 - DNA, 25 bp, SARS Virus
gatgttatccactgacgtgttactg

SEQ ID NO: 80703 - DNA, 25 bp, SARS Virus
atgttatccacatacgtgttactga

SEQ ID NO: 80704 - DNA, 25 bp, SARS Virus
tgttatccacagtcgtgttactgac

SEQ ID NO: 80705 - DNA, 25 bp, SARS Virus
gttatccacagatgtgttactgact

SEQ ID NO: 80706 - DNA, 25 bp, SARS Virus
ttatccacagacttgttactgactg

SEQ ID NO: 80707 - DNA, 25 bp, SARS Virus
tatccacagacgtgttactgactgt

SEQ ID NO: 80708 - DNA, 25 bp, SARS Virus
atccacagacgttttactgactgta

SEQ ID NO: 80709 - DNA, 25 bp, SARS Virus
tccacagacgtgttactgactgtaa

SEQ ID NO: 80710 - DNA, 25 bp, SARS Virus
ccacagacgtgttactgactgtaac

SEQ ID NO: 80711 - DNA, 25 bp, SARS Virus
cacagacgtgtttctgactgtaacg

SEQ ID NO: 80712 - DNA, 25 bp, SARS Virus
acagacgtgttattgactgtaacgg

SEQ ID NO: 80713 - DNA, 25 bp, SARS Virus
cagacgtgttactgactgtaacggt

SEQ ID NO: 80714 - DNA, 25 bp, SARS Virus
agacgtgttacttactgtaacggtt

SEQ ID NO: 80715 - DNA, 25 bp, SARS Virus
gacgtgttactgtctgtaacggttc

SEQ ID NO: 80716 - DNA, 25 bp, SARS Virus
acgtgttactgattgtaacggttct

SEQ ID NO: 80717 - DNA, 25 bp, SARS Virus
cgtgttactgactgtaacggttctt

SEQ ID NO: 80718 - DNA, 25 bp, SARS Virus
gtgttactgactttaacggttcttt

SEQ ID NO: 80719 - DNA, 25 bp, SARS Virus
tgttactgactgtaacggttctttg

SEQ ID NO: 80720 - DNA, 25 bp, SARS Virus
gttactgactgttacggttctttgg

SEQ ID NO: 80721 - DNA, 25 bp, SARS Virus
ttactgactgtatcggttctttgga

SEQ ID NO: 80722 - DNA, 25 bp, SARS Virus
tactgactgtaatggttctttggat

SEQ ID NO: 80723 - DNA, 25 bp, SARS Virus
actgactgtaactgttctttggatg

SEQ ID NO: 80724 - DNA, 25 bp, SARS Virus
ctgactgtaacgtttctttggatga

SEQ ID NO: 80725 - DNA, 25 bp, SARS Virus
tgactgtaacggttctttggatgac

SEQ ID NO: 80726 - DNA, 25 bp, SARS Virus
gactgtaacggttctttggatgact

SEQ ID NO: 80727 - DNA, 25 bp, SARS Virus
actgtaacggttttttggatgactc

SEQ ID NO: 80728 - DNA, 25 bp, SARS Virus
ctgtaacggttctttggatgactct

SEQ ID NO: 80729 - DNA, 25 bp, SARS Virus
tgtaacggttctttggatgactctc

SEQ ID NO: 80730 - DNA, 25 bp, SARS Virus
gtaacggttctttggatgactctca

SEQ ID NO: 80731 - DNA, 25 bp, SARS Virus
taacggttcttttgatgactctcac

SEQ ID NO: 80732 - DNA, 25 bp, SARS Virus
aacggttctttgtatgactctcacg

SEQ ID NO: 80733 - DNA, 25 bp, SARS Virus
acggttctttggttgactctcacga

SEQ ID NO: 80734 - DNA, 25 bp, SARS Virus
cggttctttggatgactctcacgaa

SEQ ID NO: 80735 - DNA, 25 bp, SARS Virus
ggttctttggattactctcacgaac

SEQ ID NO: 80736 - DNA, 25 bp, SARS Virus
gttctttggatgtctctcacgaaca

SEQ ID NO: 80737 - DNA, 25 bp, SARS Virus
ttctttggatgattctcacgaacaa

SEQ ID NO: 80738 - DNA, 25 bp, SARS Virus
tctttggatgactctcacgaacaag

SEQ ID NO: 80739 - DNA, 25 bp, SARS Virus
ctttggatgactttcacgaacaaga

SEQ ID NO: 80740 - DNA, 25 bp, SARS Virus
tttggatgactctcacgaacaagaa

SEQ ID NO: 80741 - DNA, 25 bp, SARS Virus
ttggatgactcttacgaacaagaag

SEQ ID NO: 80742 - DNA, 25 bp, SARS Virus
tggatgactctctcgaacaagaagt

SEQ ID NO: 80743 - DNA, 25 bp, SARS Virus
ggatgactctcatgaacaagaagtg

SEQ ID NO: 80744 - DNA, 25 bp, SARS Virus
gatgactctcactaacaagaagtga

SEQ ID NO: 80745 - DNA, 25 bp, SARS Virus
atgactctcacgtacaagaagtgaa

SEQ ID NO: 80746 - DNA, 25 bp, SARS Virus
tgactctcacgatcaagaagtgaat

SEQ ID NO: 80747 - DNA, 25 bp, SARS Virus
gactctcacgaataagaagtgaatg

SEQ ID NO: 80748 - DNA, 25 bp, SARS Virus
actctcacgaactagaagtgaatga

SEQ ID NO: 80749 - DNA, 25 bp, SARS Virus
ctctcacgaacatgaagtgaatgac

SEQ ID NO: 80750 - DNA, 25 bp, SARS Virus
tctcacgaacaataagtgaatgaca

SEQ ID NO: 80751 - DNA, 25 bp, SARS Virus
ctcacgaacaagtagtgaatgacag

SEQ ID NO: 80752 - DNA, 25 bp, SARS Virus
tcacgaacaagatgtgaatgacaga

SEQ ID NO: 80753 - DNA, 25 bp, SARS Virus
cacgaacaagaattgaatgacagaa

SEQ ID NO: 80754 - DNA, 25 bp, SARS Virus
acgaacaagaagtgaatgacagaac

SEQ ID NO: 80755 - DNA, 25 bp, SARS Virus
cgaacaagaagttaatgacagaaca

SEQ ID NO: 80756 - DNA, 25 bp, SARS Virus
gaacaagaagtgtatgacagaacaa

SEQ ID NO: 80757 - DNA, 25 bp, SARS Virus
aacaagaagtgattgacagaacaaa

SEQ ID NO: 80758 - DNA, 25 bp, SARS Virus
acaagaagtgaatgacagaacaaac

SEQ ID NO: 80759 - DNA, 25 bp, SARS Virus
caagaagtgaattacagaacaaact

SEQ ID NO: 80760 - DNA, 25 bp, SARS Virus
aagaagtgaatgtcagaacaaacta

SEQ ID NO: 80761 - DNA, 25 bp, SARS Virus
agaagtgaatgatagaacaaactac

SEQ ID NO: 80762 - DNA, 25 bp, SARS Virus
gaagtgaatgactgaacaaactacc

SEQ ID NO: 80763 - DNA, 25 bp, SARS Virus
aagtgaatgacataacaaactacca

SEQ ID NO: 80764 - DNA, 25 bp, SARS Virus
agtgaatgacagtacaaactaccat

SEQ ID NO: 80765 - DNA, 25 bp, SARS Virus
gtgaatgacagatcaaactaccatc

SEQ ID NO: 80766 - DNA, 25 bp, SARS Virus
tgaatgacagaataaactaccatct

SEQ ID NO: 80767 - DNA, 25 bp, SARS Virus
gaatgacagaactaactaccatctc

SEQ ID NO: 80768 - DNA, 25 bp, SARS Virus
aatgacagaacatactaccatctca

SEQ ID NO: 80769 - DNA, 25 bp, SARS Virus
atgacagaacaatctaccatctcac

SEQ ID NO: 80770 - DNA, 25 bp, SARS Virus
tgacagaacaaattaccatctcacc

SEQ ID NO: 80771 - DNA, 25 bp, SARS Virus
gacagaacaaactaccatctcacct

SEQ ID NO: 80772 - DNA, 25 bp, SARS Virus
acagaacaaacttccatctcacctt

SEQ ID NO: 80773 - DNA, 25 bp, SARS Virus
cagaacaaactatcatctcaccttc

SEQ ID NO: 80774 - DNA, 25 bp, SARS Virus
agaacaaactactatctcaccttcc

SEQ ID NO: 80775 - DNA, 25 bp, SARS Virus
gaacaaactaccttctcaccttcct

SEQ ID NO: 80776 - DNA, 25 bp, SARS Virus
aacaaactaccatctcaccttcctg

SEQ ID NO: 80777 - DNA, 25 bp, SARS Virus
acaaactaccatttcaccttcctgt

SEQ ID NO: 80778 - DNA, 25 bp, SARS Virus
caaactaccatctcaccttcctgtc

SEQ ID NO: 80779 - DNA, 25 bp, SARS Virus
aaactaccatcttaccttcctgtcc

SEQ ID NO: 80780 - DNA, 25 bp, SARS Virus
aactaccatctctccttcctgtcca

SEQ ID NO: 80781 - DNA, 25 bp, SARS Virus
actaccatctcatcttcctgtccat

SEQ ID NO: 80782 - DNA, 25 bp, SARS Virus
ctaccatctcactttcctgtccatc

SEQ ID NO: 80783 - DNA, 25 bp, SARS Virus
taccatctcaccttcctgtccatct

SEQ ID NO: 80784 - DNA, 25 bp, SARS Virus
accatctcaccttcctgtccatctg

SEQ ID NO: 80785 - DNA, 25 bp, SARS Virus
ccatctcacctttctgtccatctgg

SEQ ID NO: 80786 - DNA, 25 bp, SARS Virus
catctcaccttcttgtccatctgga

SEQ ID NO: 80787 - DNA, 25 bp, SARS Virus
atctcaccttcctgtccatctggaa

SEQ ID NO: 80788 - DNA, 25 bp, SARS Virus
tctcaccttcctttccatctggaaa

SEQ ID NO: 80789 - DNA, 25 bp, SARS Virus
ctcaccttcctgtccatctggaaaa

SEQ ID NO: 80790 - DNA, 25 bp, SARS Virus
tcaccttcctgttcatctggaaaaa

SEQ ID NO: 80791 - DNA, 25 bp, SARS Virus
caccttcctgtctatctggaaaaat

SEQ ID NO: 80792 - DNA, 25 bp, SARS Virus
accttcctgtccttctggaaaaatc

SEQ ID NO: 80793 - DNA, 25 bp, SARS Virus
ccttcctgtccatctggaaaaatct

SEQ ID NO: 80794 - DNA, 25 bp, SARS Virus
cttcctgtccatttggaaaaatctt

SEQ ID NO: 80795 - DNA, 25 bp, SARS Virus
ttcctgtccatctggaaaaatcttt

SEQ ID NO: 80796 - DNA, 25 bp, SARS Virus
tcctgtccatcttgaaaaatctttg

SEQ ID NO: 80797 - DNA, 25 bp, SARS Virus
cctgtccatctgtaaaaatctttgc

SEQ ID NO: 80798 - DNA, 25 bp, SARS Virus
ctgtccatctggtaaaatctttgcg

SEQ ID NO: 80799 - DNA, 25 bp, SARS Virus
tgtccatctggataaatctttgcgg

SEQ ID NO: 80800 - DNA, 25 bp, SARS Virus
gtccatctggaataatctttgcggg

SEQ ID NO: 80801 - DNA, 25 bp, SARS Virus
tccatctggaaatatctttgcgggc

SEQ ID NO: 80802 - DNA, 25 bp, SARS Virus
ccatctggaaaattctttgcgggca

SEQ ID NO: 80803 - DNA, 25 bp, SARS Virus
catctggaaaaatctttgcgggcat

SEQ ID NO: 80804 - DNA, 25 bp, SARS Virus
atctggaaaaatttttgcgggcatt

SEQ ID NO: 80805 - DNA, 25 bp, SARS Virus
tctggaaaaatctttgcgggcatta

SEQ ID NO: 80806 - DNA, 25 bp, SARS Virus
ctggaaaaatctttgcgggcattac

SEQ ID NO: 80807 - DNA, 25 bp, SARS Virus
tggaaaaatctttgcgggcattacc

SEQ ID NO: 80808 - DNA, 25 bp, SARS Virus
ggaaaaatcttttcgggcattacca

SEQ ID NO: 80809 - DNA, 25 bp, SARS Virus
gaaaaatctttgtgggcattaccac

SEQ ID NO: 80810 - DNA, 25 bp, SARS Virus
aaaaatctttgctggcattaccaca

SEQ ID NO: 80811 - DNA, 25 bp, SARS Virus
aaaatctttgcgtgcattaccacaa

SEQ ID NO: 80812 - DNA, 25 bp, SARS Virus
aaatctttgcggtcattaccacaaa

SEQ ID NO: 80813 - DNA, 25 bp, SARS Virus
aatctttgcgggtattaccacaaaa

SEQ ID NO: 80814 - DNA, 25 bp, SARS Virus
atctttgcgggctttaccacaaaat

SEQ ID NO: 80815 - DNA, 25 bp, SARS Virus
tctttgcgggcattaccacaaaatt

SEQ ID NO: 80816 - DNA, 25 bp, SARS Virus
ctttgcgggcattaccacaaaatta

SEQ ID NO: 80817 - DNA, 25 bp, SARS Virus
tttgcgggcatttccacaaaattat

SEQ ID NO: 80818 - DNA, 25 bp, SARS Virus
ttgcgggcattatcacaaaattatt

SEQ ID NO: 80819 - DNA, 25 bp, SARS Virus
tgcgggcattactacaaaattattg

SEQ ID NO: 80820 - DNA, 25 bp, SARS Virus
gcgggcattacctcaaaattattgt

SEQ ID NO: 80821 - DNA, 25 bp, SARS Virus
cgggcattaccataaaattattgtc

SEQ ID NO: 80822 - DNA, 25 bp, SARS Virus
gggcattaccactaaattattgtct

SEQ ID NO: 80823 - DNA, 25 bp, SARS Virus
ggcattaccacataattattgtctt

SEQ ID NO: 80824 - DNA, 25 bp, SARS Virus
gcattaccacaatattattgtcttc

SEQ ID NO: 80825 - DNA, 25 bp, SARS Virus
cattaccacaaatttattgtcttcc

SEQ ID NO: 80826 - DNA, 25 bp, SARS Virus
attaccacaaaattattgtcttcca

SEQ ID NO: 80827 - DNA, 25 bp, SARS Virus
ttaccacaaaattattgtcttccaa

SEQ ID NO: 80828 - DNA, 25 bp, SARS Virus
taccacaaaatttttgtcttccaag

SEQ ID NO: 80829 - DNA, 25 bp, SARS Virus
accacaaaattattgtcttccaagt

SEQ ID NO: 80830 - DNA, 25 bp, SARS Virus
ccacaaaattattgtcttccaagtc

SEQ ID NO: 80831 - DNA, 25 bp, SARS Virus
cacaaaattattttcttccaagtca

SEQ ID NO: 80832 - DNA, 25 bp, SARS Virus
acaaaattattgtcttccaagtcag

SEQ ID NO: 80833 - DNA, 25 bp, SARS Virus
caaaattattgttttccaagtcagt

SEQ ID NO: 80834 - DNA, 25 bp, SARS Virus
aaaattattgtcttccaagtcagtt

SEQ ID NO: 80835 - DNA, 25 bp, SARS Virus
aaattattgtcttccaagtcagttt

SEQ ID NO: 80836 - DNA, 25 bp, SARS Virus
aattattgtctttcaagtcagtttc

SEQ ID NO: 80837 - DNA, 25 bp, SARS Virus
attattgtcttctaagtcagtttcc

SEQ ID NO: 80838 - DNA, 25 bp, SARS Virus
ttattgtcttcctagtcagtttcca

SEQ ID NO: 80839 - DNA, 25 bp, SARS Virus
tattgtcttccatgtcagtttccag

SEQ ID NO: 80840 - DNA, 25 bp, SARS Virus
attgtcttccaattcagtttccaga

SEQ ID NO: 80841 - DNA, 25 bp, SARS Virus
ttgtcttccaagtcagtttccagat

SEQ ID NO: 80842 - DNA, 25 bp, SARS Virus
tgtcttccaagttagtttccagatt

SEQ ID NO: 80843 - DNA, 25 bp, SARS Virus
gtcttccaagtctgtttccagattg

SEQ ID NO: 80844 - DNA, 25 bp, SARS Virus
tcttccaagtcattttccagattgt

SEQ ID NO: 80845 - DNA, 25 bp, SARS Virus
cttccaagtcagtttccagattgtg

SEQ ID NO: 80846 - DNA, 25 bp, SARS Virus
ttccaagtcagtttccagattgtgg

SEQ ID NO: 80847 - DNA, 25 bp, SARS Virus
tccaagtcagtttccagattgtgga

SEQ ID NO: 80848 - DNA, 25 bp, SARS Virus
ccaagtcagttttcagattgtggaa

SEQ ID NO: 80849 - DNA, 25 bp, SARS Virus
caagtcagtttctagattgtggaag

SEQ ID NO: 80850 - DNA, 25 bp, SARS Virus
aagtcagtttcctgattgtggaagt

SEQ ID NO: 80851 - DNA, 25 bp, SARS Virus
agtcagtttccatattgtggaagtt

SEQ ID NO: 80852 - DNA, 25 bp, SARS Virus
gtcagtttccagtttgtggaagttt

SEQ ID NO: 80853 - DNA, 25 bp, SARS Virus
tcagtttccagattgtggaagtttc

SEQ ID NO: 80854 - DNA, 25 bp, SARS Virus
cagtttccagattgtggaagtttcc

SEQ ID NO: 80855 - DNA, 25 bp, SARS Virus
agtttccagattttggaagtttccc

SEQ ID NO: 80856 - DNA, 25 bp, SARS Virus
gtttccagattgtggaagtttccct

SEQ ID NO: 80857 - DNA, 25 bp, SARS Virus
tttccagattgttgaagtttccctg

SEQ ID NO: 80858 - DNA, 25 bp, SARS Virus
ttccagattgtgtaagtttccctgg

SEQ ID NO: 80859 - DNA, 25 bp, SARS Virus
tccagattgtggtagtttccctggt

SEQ ID NO: 80860 - DNA, 25 bp, SARS Virus
ccagattgtggatgtttccctggtc

SEQ ID NO: 80861 - DNA, 25 bp, SARS Virus
cagattgtggaattttccctggtcg

SEQ ID NO: 80862 - DNA, 25 bp, SARS Virus
agattgtggaagtttccctggtcgt

SEQ ID NO: 80863 - DNA, 25 bp, SARS Virus
gattgtggaagtttccctggtcgtg

SEQ ID NO: 80864 - DNA, 25 bp, SARS Virus
attgtggaagtttccctggtcgtgt

SEQ ID NO: 80865 - DNA, 25 bp, SARS Virus
ttgtggaagttttcctggtcgtgtt

SEQ ID NO: 80866 - DNA, 25 bp, SARS Virus
tgtggaagtttctctggtcgtgttc

SEQ ID NO: 80867 - DNA, 25 bp, SARS Virus
gtggaagtttccttggtcgtgttcg

SEQ ID NO: 80868 - DNA, 25 bp, SARS Virus
tggaagtttccctggtcgtgttcga

SEQ ID NO: 80869 - DNA, 25 bp, SARS Virus
ggaagtttcccttgtcgtgttcgat

SEQ ID NO: 80870 - DNA, 25 bp, SARS Virus
gaagtttccctgttcgtgttcgatc

SEQ ID NO: 80871 - DNA, 25 bp, SARS Virus
aagtttccctggtcgtgttcgatcg

SEQ ID NO: 80872 - DNA, 25 bp, SARS Virus
agtttccctggttgtgttcgatcgc

SEQ ID NO: 80873 - DNA, 25 bp, SARS Virus
gtttccctggtcttgttcgatcgca

SEQ ID NO: 80874 - DNA, 25 bp, SARS Virus
tttccctggtcgtgttcgatcgcag

SEQ ID NO: 80875 - DNA, 25 bp, SARS Virus
ttccctggtcgttttcgatcgcagt

SEQ ID NO: 80876 - DNA, 25 bp, SARS Virus
tccctggtcgtgttcgatcgcagtt

SEQ ID NO: 80877 - DNA, 25 bp, SARS Virus
ccctggtcgtgttcgatcgcagtta

SEQ ID NO: 80878 - DNA, 25 bp, SARS Virus
cctggtcgtgtttgatcgcagttac

SEQ ID NO: 80879 - DNA, 25 bp, SARS Virus
ctggtcgtgttctatcgcagttacc

SEQ ID NO: 80880 - DNA, 25 bp, SARS Virus
tggtcgtgttcgttcgcagttacct

SEQ ID NO: 80881 - DNA, 25 bp, SARS Virus
ggtcgtgttcgatcgcagttacctc

SEQ ID NO: 80882 - DNA, 25 bp, SARS Virus
gtcgtgttcgattgcagttacctca

SEQ ID NO: 80883 - DNA, 25 bp, SARS Virus
tcgtgttcgatctcagttacctcag

SEQ ID NO: 80884 - DNA, 25 bp, SARS Virus
cgtgttcgatcgtagttacctcagt

SEQ ID NO: 80885 - DNA, 25 bp, SARS Virus
gtgttcgatcgctgttacctcagtg

SEQ ID NO: 80886 - DNA, 25 bp, SARS Virus
tgttcgatcgcatttacctcagtgt

SEQ ID NO: 80887 - DNA, 25 bp, SARS Virus
gttcgatcgcagttacctcagtgta

SEQ ID NO: 80888 - DNA, 25 bp, SARS Virus
ttcgatcgcagttacctcagtgtaa

SEQ ID NO: 80889 - DNA, 25 bp, SARS Virus
tcgatcgcagtttcctcagtgtaat

SEQ ID NO: 80890 - DNA, 25 bp, SARS Virus
cgatcgcagttatctcagtgtaatt

SEQ ID NO: 80891 - DNA, 25 bp, SARS Virus
gatcgcagttacttcagtgtaatta

SEQ ID NO: 80892 - DNA, 25 bp, SARS Virus
atcgcagttacctcagtgtaattaa

SEQ ID NO: 80893 - DNA, 25 bp, SARS Virus
tcgcagttaccttagtgtaattaac

SEQ ID NO: 80894 - DNA, 25 bp, SARS Virus
cgcagttacctctgtgtaattaacc

SEQ ID NO: 80895 - DNA, 25 bp, SARS Virus
gcagttacctcattgtaattaacct

SEQ ID NO: 80896 - DNA, 25 bp, SARS Virus
cagttacctcagtgtaattaacctc

SEQ ID NO: 80897 - DNA, 25 bp, SARS Virus
agttacctcagtttaattaacctct

SEQ ID NO: 80898 - DNA, 25 bp, SARS Virus
gttacctcagtgtaattaacctctt

SEQ ID NO: 80899 - DNA, 25 bp, SARS Virus
ttacctcagtgttattaacctctta

SEQ ID NO: 80900 - DNA, 25 bp, SARS Virus
tacctcagtgtatttaacctcttag

SEQ ID NO: 80901 - DNA, 25 bp, SARS Virus
acctcagtgtaattaacctcttagt

SEQ ID NO: 80902 - DNA, 25 bp, SARS Virus
cctcagtgtaattaacctcttagtc

SEQ ID NO: 80903 - DNA, 25 bp, SARS Virus
ctcagtgtaatttacctcttagtca

SEQ ID NO: 80904 - DNA, 25 bp, SARS Virus
tcagtgtaattatcctcttagtcat

SEQ ID NO: 80905 - DNA, 25 bp, SARS Virus
cagtgtaattaatctcttagtcatt

SEQ ID NO: 80906 - DNA, 25 bp, SARS Virus
agtgtaattaacttcttagtcattt

SEQ ID NO: 80907 - DNA, 25 bp, SARS Virus
gtgtaattaacctcttagtcatttt

SEQ ID NO: 80908 - DNA, 25 bp, SARS Virus
tgtaattaaccttttagtcattttt

SEQ ID NO: 80909 - DNA, 25 bp, SARS Virus
gtaattaacctcttagtcatttttg

SEQ ID NO: 80910 - DNA, 25 bp, SARS Virus
taattaacctcttagtcatttttgt

SEQ ID NO: 80911 - DNA, 25 bp, SARS Virus
aattaacctctttgtcatttttgtg

SEQ ID NO: 80912 - DNA, 25 bp, SARS Virus
attaacctcttattcatttttgtgt

SEQ ID NO: 80913 - DNA, 25 bp, SARS Virus
ttaacctcttagtcatttttgtgtc

SEQ ID NO: 80914 - DNA, 25 bp, SARS Virus
taacctcttagttatttttgtgtca

SEQ ID NO: 80915 - DNA, 25 bp, SARS Virus
aacctcttagtcttttttgtgtcaa

SEQ ID NO: 80916 - DNA, 25 bp, SARS Virus
acctcttagtcatttttgtgtcaaa

SEQ ID NO: 80917 - DNA, 25 bp, SARS Virus
cctcttagtcatttttgtgtcaaat

SEQ ID NO: 80918 - DNA, 25 bp, SARS Virus
ctcttagtcatttttgtgtcaaatt

SEQ ID NO: 80919 - DNA, 25 bp, SARS Virus
tcttagtcatttttgtgtcaaattg

SEQ ID NO: 80920 - DNA, 25 bp, SARS Virus
cttagtcatttttgtgtcaaattga

SEQ ID NO: 80921 - DNA, 25 bp, SARS Virus
ttagtcatttttttgtcaaattgat

SEQ ID NO: 80922 - DNA, 25 bp, SARS Virus
tagtcatttttgtgtcaaattgatg

SEQ ID NO: 80923 - DNA, 25 bp, SARS Virus
agtcatttttgtttcaaattgatga

SEQ ID NO: 80924 - DNA, 25 bp, SARS Virus
gtcatttttgtgtcaaattgatgaa

SEQ ID NO: 80925 - DNA, 25 bp, SARS Virus
tcatttttgtgttaaattgatgaaa

SEQ ID NO: 80926 - DNA, 25 bp, SARS Virus
catttttgtgtctaattgatgaaat

SEQ ID NO: 80927 - DNA, 25 bp, SARS Virus
atttttgtgtcatattgatgaaatt

SEQ ID NO: 80928 - DNA, 25 bp, SARS Virus
tttttgtgtcaatttgatgaaattc

SEQ ID NO: 80929 - DNA, 25 bp, SARS Virus
ttttgtgtcaaattgatgaaattct

SEQ ID NO: 80930 - DNA, 25 bp, SARS Virus
tttgtgtcaaattgatgaaattctt

SEQ ID NO: 80931 - DNA, 25 bp, SARS Virus
ttgtgtcaaatttatgaaattcttt

SEQ ID NO: 80932 - DNA, 25 bp, SARS Virus
tgtgtcaaattgttgaaattctttc

SEQ ID NO: 80933 - DNA, 25 bp, SARS Virus
gtgtcaaattgatgaaattctttca

SEQ ID NO: 80934 - DNA, 25 bp, SARS Virus
tgtcaaattgattaaattctttcat

SEQ ID NO: 80935 - DNA, 25 bp, SARS Virus
gtcaaattgatgtaattctttcatc

SEQ ID NO: 80936 - DNA, 25 bp, SARS Virus
tcaaattgatgatattctttcatct

SEQ ID NO: 80937 - DNA, 25 bp, SARS Virus
caaattgatgaatttctttcatctg

SEQ ID NO: 80938 - DNA, 25 bp, SARS Virus
aaattgatgaaattctttcatctgc

SEQ ID NO: 80939 - DNA, 25 bp, SARS Virus
aattgatgaaattctttcatctgcc

SEQ ID NO: 80940 - DNA, 25 bp, SARS Virus
attgatgaaattttttcatctgccg

SEQ ID NO: 80941 - DNA, 25 bp, SARS Virus
ttgatgaaattctttcatctgccgt

SEQ ID NO: 80942 - DNA, 25 bp, SARS Virus
tgatgaaattctttcatctgccgta

SEQ ID NO: 80943 - DNA, 25 bp, SARS Virus
gatgaaattctttcatctgccgtaa

SEQ ID NO: 80944 - DNA, 25 bp, SARS Virus
atgaaattcttttatctgccgtaat

SEQ ID NO: 80945 - DNA, 25 bp, SARS Virus
tgaaattctttcttctgccgtaata

SEQ ID NO: 80946 - DNA, 25 bp, SARS Virus
gaaattctttcatctgccgtaataa

SEQ ID NO: 80947 - DNA, 25 bp, SARS Virus
aaattctttcatttgccgtaataag

SEQ ID NO: 80948 - DNA, 25 bp, SARS Virus
aattctttcatctgccgtaataagt

SEQ ID NO: 80949 - DNA, 25 bp, SARS Virus
attctttcatcttccgtaataagtt

SEQ ID NO: 80950 - DNA, 25 bp, SARS Virus
ttctttcatctgtcgtaataagttg

SEQ ID NO: 80951 - DNA, 25 bp, SARS Virus
tctttcatctgctgtaataagttgt

SEQ ID NO: 80952 - DNA, 25 bp, SARS Virus
ctttcatctgccttaataagttgtc

SEQ ID NO: 80953 - DNA, 25 bp, SARS Virus
tttcatctgccgtaataagttgtca

SEQ ID NO: 80954 - DNA, 25 bp, SARS Virus
ttcatctgccgttataagttgtcaa

SEQ ID NO: 80955 - DNA, 25 bp, SARS Virus
tcatctgccgtattaagttgtcaac

SEQ ID NO: 80956 - DNA, 25 bp, SARS Virus
catctgccgtaataagttgtcaacg

SEQ ID NO: 80957 - DNA, 25 bp, SARS Virus
atctgccgtaattagttgtcaacgg

SEQ ID NO: 80958 - DNA, 25 bp, SARS Virus
tctgccgtaatatgttgtcaacgga

SEQ ID NO: 80959 - DNA, 25 bp, SARS Virus
ctgccgtaataatttgtcaacggac

SEQ ID NO: 80960 - DNA, 25 bp, SARS Virus
tgccgtaataagttgtcaacggact

SEQ ID NO: 80961 - DNA, 25 bp, SARS Virus
gccgtaataagttgtcaacggactt

SEQ ID NO: 80962 - DNA, 25 bp, SARS Virus
ccgtaataagttttcaacggacttt

SEQ ID NO: 80963 - DNA, 25 bp, SARS Virus
cgtaataagttgtcaacggactttg

SEQ ID NO: 80964 - DNA, 25 bp, SARS Virus
gtaataagttgttaacggactttgg

SEQ ID NO: 80965 - DNA, 25 bp, SARS Virus
taataagttgtctacggactttgga

SEQ ID NO: 80966 - DNA, 25 bp, SARS Virus
aataagttgtcatcggactttggat

SEQ ID NO: 80967 - DNA, 25 bp, SARS Virus
ataagttgtcaatggactttggatg

SEQ ID NO: 80968 - DNA, 25 bp, SARS Virus
taagttgtcaactgactttggatga

SEQ ID NO: 80969 - DNA, 25 bp, SARS Virus
aagttgtcaacgtactttggatgaa

SEQ ID NO: 80970 - DNA, 25 bp, SARS Virus
agttgtcaacggtctttggatgaaa

SEQ ID NO: 80971 - DNA, 25 bp, SARS Virus
gttgtcaacggattttggatgaaat

SEQ ID NO: 80972 - DNA, 25 bp, SARS Virus
ttgtcaacggactttggatgaaatg

SEQ ID NO: 80973 - DNA, 25 bp, SARS Virus
tgtcaacggactttggatgaaatga

SEQ ID NO: 80974 - DNA, 25 bp, SARS Virus
gtcaacggactttggatgaaatgag

SEQ ID NO: 80975 - DNA, 25 bp, SARS Virus
tcaacggacttttgatgaaatgagt

SEQ ID NO: 80976 - DNA, 25 bp, SARS Virus
caacggactttgtatgaaatgagtc

SEQ ID NO: 80977 - DNA, 25 bp, SARS Virus
aacggactttggttgaaatgagtct

SEQ ID NO: 80978 - DNA, 25 bp, SARS Virus
acggactttggatgaaatgagtctc

SEQ ID NO: 80979 - DNA, 25 bp, SARS Virus
cggactttggattaaatgagtctcg

SEQ ID NO: 80980 - DNA, 25 bp, SARS Virus
ggactttggatgtaatgagtctcgt

SEQ ID NO: 80981 - DNA, 25 bp, SARS Virus
gactttggatgatatgagtctcgtc

SEQ ID NO: 80982 - DNA, 25 bp, SARS Virus
actttggatgaattgagtctcgtct

SEQ ID NO: 80983 - DNA, 25 bp, SARS Virus
ctttggatgaaatgagtctcgtctc

SEQ ID NO: 80984 - DNA, 25 bp, SARS Virus
tttggatgaaattagtctcgtctct

SEQ ID NO: 80985 - DNA, 25 bp, SARS Virus
ttggatgaaatgtgtctcgtctctg

SEQ ID NO: 80986 - DNA, 25 bp, SARS Virus
tggatgaaatgattctcgtctctga

SEQ ID NO: 80987 - DNA, 25 bp, SARS Virus
ggatgaaatgagtctcgtctctgaa

SEQ ID NO: 80988 - DNA, 25 bp, SARS Virus
gatgaaatgagtttcgtctctgaat

SEQ ID NO: 80989 - DNA, 25 bp, SARS Virus
atgaaatgagtctcgtctctgaatc

SEQ ID NO: 80990 - DNA, 25 bp, SARS Virus
tgaaatgagtcttgtctctgaatct

SEQ ID NO: 80991 - DNA, 25 bp, SARS Virus
gaaatgagtctcttctctgaatctc

SEQ ID NO: 80992 - DNA, 25 bp, SARS Virus
aaatgagtctcgtctctgaatctcc

SEQ ID NO: 80993 - DNA, 25 bp, SARS Virus
aatgagtctcgtttctgaatctcct

SEQ ID NO: 80994 - DNA, 25 bp, SARS Virus
atgagtctcgtctctgaatctccta

SEQ ID NO: 80995 - DNA, 25 bp, SARS Virus
tgagtctcgtctttgaatctcctaa

SEQ ID NO: 80996 - DNA, 25 bp, SARS Virus
gagtctcgtctctgaatctcctaaa

SEQ ID NO: 80997 - DNA, 25 bp, SARS Virus
agtctcgtctcttaatctcctaaaa

SEQ ID NO: 80998 - DNA, 25 bp, SARS Virus
gtctcgtctctgtatctcctaaaat

SEQ ID NO: 80999 - DNA, 25 bp, SARS Virus
tctcgtctctgattctcctaaaatt

SEQ ID NO: 81000 - DNA, 25 bp, SARS Virus
ctcgtctctgaatctcctaaaattc

SEQ ID NO: 81001 - DNA, 25 bp, SARS Virus
tcgtctctgaatttcctaaaattcg

SEQ ID NO: 81002 - DNA, 25 bp, SARS Virus
cgtctctgaatctcctaaaattcgg

SEQ ID NO: 81003 - DNA, 25 bp, SARS Virus
gtctctgaatcttctaaaattcggg

SEQ ID NO: 81004 - DNA, 25 bp, SARS Virus
tctctgaatctcttaaaattcgggt

SEQ ID NO: 81005 - DNA, 25 bp, SARS Virus
ctctgaatctcctaaaattcgggtc

SEQ ID NO: 81006 - DNA, 25 bp, SARS Virus
tctgaatctccttaaattcgggtct

SEQ ID NO: 81007 - DNA, 25 bp, SARS Virus
ctgaatctcctataattcgggtcta

SEQ ID NO: 81008 - DNA, 25 bp, SARS Virus
tgaatctcctaatattcgggtctag

SEQ ID NO: 81009 - DNA, 25 bp, SARS Virus
gaatctcctaaatttcgggtctagt

SEQ ID NO: 81010 - DNA, 25 bp, SARS Virus
aatctcctaaaattcgggtctagtg

SEQ ID NO: 81011 - DNA, 25 bp, SARS Virus
atctcctaaaattcgggtctagtgt

SEQ ID NO: 81012 - DNA, 25 bp, SARS Virus
tctcctaaaatttgggtctagtgtt

SEQ ID NO: 81013 - DNA, 25 bp, SARS Virus
ctcctaaaattctggtctagtgttt

SEQ ID NO: 81014 - DNA, 25 bp, SARS Virus
tcctaaaattcgtgtctagtgttta

SEQ ID NO: 81015 - DNA, 25 bp, SARS Virus
cctaaaattcggttctagtgtttac

SEQ ID NO: 81016 - DNA, 25 bp, SARS Virus
ctaaaattcgggtctagtgtttacc

SEQ ID NO: 81017 - DNA, 25 bp, SARS Virus
taaaattcgggtttagtgtttacct

SEQ ID NO: 81018 - DNA, 25 bp, SARS Virus
aaaattcgggtctagtgtttacctt

SEQ ID NO: 81019 - DNA, 25 bp, SARS Virus
aaattcgggtcttgtgtttaccttt

SEQ ID NO: 81020 - DNA, 25 bp, SARS Virus
aattcgggtctattgtttacctttg

SEQ ID NO: 81021 - DNA, 25 bp, SARS Virus
attcgggtctagtgtttacctttga

SEQ ID NO: 81022 - DNA, 25 bp, SARS Virus
ttcgggtctagtttttacctttgac

SEQ ID NO: 81023 - DNA, 25 bp, SARS Virus
tcgggtctagtgtttacctttgact

SEQ ID NO: 81024 - DNA, 25 bp, SARS Virus
cgggtctagtgtttacctttgactg

SEQ ID NO: 81025 - DNA, 25 bp, SARS Virus
gggtctagtgtttacctttgactga

SEQ ID NO: 81026 - DNA, 25 bp, SARS Virus
ggtctagtgttttcctttgactgaa

SEQ ID NO: 81027 - DNA, 25 bp, SARS Virus
gtctagtgtttatctttgactgaaa

SEQ ID NO: 81028 - DNA, 25 bp, SARS Virus
tctagtgtttacttttgactgaaag

SEQ ID NO: 81029 - DNA, 25 bp, SARS Virus
ctagtgtttacctttgactgaaaga

SEQ ID NO: 81030 - DNA, 25 bp, SARS Virus
tagtgtttacctttgactgaaagag

SEQ ID NO: 81031 - DNA, 25 bp, SARS Virus
agtgtttacctttgactgaaagagc

SEQ ID NO: 81032 - DNA, 25 bp, SARS Virus
gtgtttaccttttactgaaagagct

SEQ ID NO: 81033 - DNA, 25 bp, SARS Virus
tgtttacctttgtctgaaagagctc

SEQ ID NO: 81034 - DNA, 25 bp, SARS Virus
gtttacctttgattgaaagagctcg

SEQ ID NO: 81035 - DNA, 25 bp, SARS Virus
tttacctttgactgaaagagctcga

SEQ ID NO: 81036 - DNA, 25 bp, SARS Virus
ttacctttgacttaaagagctcgag

SEQ ID NO: 81037 - DNA, 25 bp, SARS Virus
tacctttgactgtaagagctcgagc

SEQ ID NO: 81038 - DNA, 25 bp, SARS Virus
acctttgactgatagagctcgagcg

SEQ ID NO: 81039 - DNA, 25 bp, SARS Virus
cctttgactgaatgagctcgagcga

SEQ ID NO: 81040 - DNA, 25 bp, SARS Virus
ctttgactgaaatagctcgagcgat

SEQ ID NO: 81041 - DNA, 25 bp, SARS Virus
tttgactgaaagtgctcgagcgata

SEQ ID NO: 81042 - DNA, 25 bp, SARS Virus
ttgactgaaagatctcgagcgatac

SEQ ID NO: 81043 - DNA, 25 bp, SARS Virus
tgactgaaagagttcgagcgatacc

SEQ ID NO: 81044 - DNA, 25 bp, SARS Virus
gactgaaagagctcgagcgatacct

SEQ ID NO: 81045 - DNA, 25 bp, SARS Virus
actgaaagagcttgagcgataccta

SEQ ID NO: 81046 - DNA, 25 bp, SARS Virus
ctgaaagagctctagcgatacctac

SEQ ID NO: 81047 - DNA, 25 bp, SARS Virus
tgaaagagctcgtgcgatacctact

SEQ ID NO: 81048 - DNA, 25 bp, SARS Virus
gaaagagctcgatcgatacctactt

SEQ ID NO: 81049 - DNA, 25 bp, SARS Virus
aaagagctcgagtgatacctactta

SEQ ID NO: 81050 - DNA, 25 bp, SARS Virus
aagagctcgagctatacctacttaa

SEQ ID NO: 81051 - DNA, 25 bp, SARS Virus
agagctcgagcgttacctacttaag

SEQ ID NO: 81052 - DNA, 25 bp, SARS Virus
gagctcgagcgatacctacttaagt

SEQ ID NO: 81053 - DNA, 25 bp, SARS Virus
agctcgagcgattcctacttaagta

SEQ ID NO: 81054 - DNA, 25 bp, SARS Virus
gctcgagcgatatctacttaagtat

SEQ ID NO: 81055 - DNA, 25 bp, SARS Virus
ctcgagcgatacttacttaagtatg

SEQ ID NO: 81056 - DNA, 25 bp, SARS Virus
tcgagcgatacctacttaagtatgt

SEQ ID NO: 81057 - DNA, 25 bp, SARS Virus
cgagcgataccttcttaagtatgtc

SEQ ID NO: 81058 - DNA, 25 bp, SARS Virus
gagcgatacctatttaagtatgtcg

SEQ ID NO: 81059 - DNA, 25 bp, SARS Virus
agcgatacctacttaagtatgtcgc

SEQ ID NO: 81060 - DNA, 25 bp, SARS Virus
gcgatacctacttaagtatgtcgct

SEQ ID NO: 81061 - DNA, 25 bp, SARS Virus
cgatacctactttagtatgtcgcta

SEQ ID NO: 81062 - DNA, 25 bp, SARS Virus
gatacctacttatgtatgtcgctat

SEQ ID NO: 81063 - DNA, 25 bp, SARS Virus
atacctacttaattatgtcgctata

SEQ ID NO: 81064 - DNA, 25 bp, SARS Virus
tacctacttaagtatgtcgctatat

SEQ ID NO: 81065 - DNA, 25 bp, SARS Virus
acctacttaagtttgtcgctatatt

SEQ ID NO: 81066 - DNA, 25 bp, SARS Virus
cctacttaagtatgtcgctatattc

SEQ ID NO: 81067 - DNA, 25 bp, SARS Virus
ctacttaagtatttcgctatattcg

SEQ ID NO: 81068 - DNA, 25 bp, SARS Virus
tacttaagtatgtcgctatattcga

SEQ ID NO: 81069 - DNA, 25 bp, SARS Virus
acttaagtatgttgctatattcgag

SEQ ID NO: 81070 - DNA, 25 bp, SARS Virus
cttaagtatgtctctatattcgagc

SEQ ID NO: 81071 - DNA, 25 bp, SARS Virus
ttaagtatgtcgttatattcgagct

SEQ ID NO: 81072 - DNA, 25 bp, SARS Virus
taagtatgtcgctatattcgagctc

SEQ ID NO: 81073 - DNA, 25 bp, SARS Virus
aagtatgtcgctttattcgagctcc

SEQ ID NO: 81074 - DNA, 25 bp, SARS Virus
agtatgtcgctatattcgagctccc

SEQ ID NO: 81075 - DNA, 25 bp, SARS Virus
gtatgtcgctattttcgagctcccg

SEQ ID NO: 81076 - DNA, 25 bp, SARS Virus
tatgtcgctatattcgagctcccga

SEQ ID NO: 81077 - DNA, 25 bp, SARS Virus
atgtcgctatattcgagctcccgat

SEQ ID NO: 81078 - DNA, 25 bp, SARS Virus
tgtcgctatatttgagctcccgata

SEQ ID NO: 81079 - DNA, 25 bp, SARS Virus
gtcgctatattctagctcccgatac

SEQ ID NO: 81080 - DNA, 25 bp, SARS Virus
tcgctatattcgtgctcccgatacg

SEQ ID NO: 81081 - DNA, 25 bp, SARS Virus
cgctatattcgatctcccgatacgg

SEQ ID NO: 81082 - DNA, 25 bp, SARS Virus
gctatattcgagttcccgatacgga

SEQ ID NO: 81083 - DNA, 25 bp, SARS Virus
ctatattcgagctcccgatacggaa

SEQ ID NO: 81084 - DNA, 25 bp, SARS Virus
tatattcgagcttccgatacggaag

SEQ ID NO: 81085 - DNA, 25 bp, SARS Virus
atattcgagctctcgatacggaagc

SEQ ID NO: 81086 - DNA, 25 bp, SARS Virus
tattcgagctcctgatacggaagct

SEQ ID NO: 81087 - DNA, 25 bp, SARS Virus
attcgagctccctatacggaagctt

SEQ ID NO: 81088 - DNA, 25 bp, SARS Virus
ttcgagctcccgttacggaagcttg

SEQ ID NO: 81089 - DNA, 25 bp, SARS Virus
tcgagctcccgatacggaagcttgt

SEQ ID NO: 81090 - DNA, 25 bp, SARS Virus
cgagctcccgattcggaagcttgtg

SEQ ID NO: 81091 - DNA, 25 bp, SARS Virus
gagctcccgatatggaagcttgtgt

SEQ ID NO: 81092 - DNA, 25 bp, SARS Virus
agctcccgatactgaagcttgtgta

SEQ ID NO: 81093 - DNA, 25 bp, SARS Virus
gctcccgatacgtaagcttgtgtag

SEQ ID NO: 81094 - DNA, 25 bp, SARS Virus
ctcccgatacggtagcttgtgtagc

SEQ ID NO: 81095 - DNA, 25 bp, SARS Virus
tcccgatacggatgcttgtgtagca

SEQ ID NO: 81096 - DNA, 25 bp, SARS Virus
cccgatacggaatcttgtgtagcaa

SEQ ID NO: 81097 - DNA, 25 bp, SARS Virus
ccgatacggaagtttgtgtagcaaa

SEQ ID NO: 81098 - DNA, 25 bp, SARS Virus
cgatacggaagcttgtgtagcaaat

SEQ ID NO: 81099 - DNA, 25 bp, SARS Virus
gatacggaagcttgtgtagcaaata

SEQ ID NO: 81100 - DNA, 25 bp, SARS Virus
atacggaagcttttgtagcaaatac

SEQ ID NO: 81101 - DNA, 25 bp, SARS Virus
tacggaagcttgtgtagcaaatacc

SEQ ID NO: 81102 - DNA, 25 bp, SARS Virus
acggaagcttgtttagcaaatacct

SEQ ID NO: 81103 - DNA, 25 bp, SARS Virus
cggaagcttgtgtagcaaatacctc

SEQ ID NO: 81104 - DNA, 25 bp, SARS Virus
ggaagcttgtgttgcaaatacctct

SEQ ID NO: 81105 - DNA, 25 bp, SARS Virus
gaagcttgtgtatcaaatacctcta

SEQ ID NO: 81106 - DNA, 25 bp, SARS Virus
aagcttgtgtagtaaatacctctaa

SEQ ID NO: 81107 - DNA, 25 bp, SARS Virus
agcttgtgtagctaatacctctaaa

SEQ ID NO: 81108 - DNA, 25 bp, SARS Virus
gcttgtgtagcatatacctctaaag

SEQ ID NO: 81109 - DNA, 25 bp, SARS Virus
cttgtgtagcaattacctctaaagt

SEQ ID NO: 81110 - DNA, 25 bp, SARS Virus
ttgtgtagcaaatacctctaaagtc

SEQ ID NO: 81111 - DNA, 25 bp, SARS Virus
tgtgtagcaaattcctctaaagtca

SEQ ID NO: 81112 - DNA, 25 bp, SARS Virus
gtgtagcaaatatctctaaagtcag

SEQ ID NO: 81113 - DNA, 25 bp, SARS Virus
tgtagcaaatacttctaaagtcagt

SEQ ID NO: 81114 - DNA, 25 bp, SARS Virus
gtagcaaatacctctaaagtcagta

SEQ ID NO: 81115 - DNA, 25 bp, SARS Virus
tagcaaatacctttaaagtcagtac

SEQ ID NO: 81116 - DNA, 25 bp, SARS Virus
agcaaatacctctaaagtcagtacc

SEQ ID NO: 81117 - DNA, 25 bp, SARS Virus
gcaaatacctcttaagtcagtacct

SEQ ID NO: 81118 - DNA, 25 bp, SARS Virus
caaatacctctatagtcagtacctg

SEQ ID NO: 81119 - DNA, 25 bp, SARS Virus
aaatacctctaatgtcagtacctgt

SEQ ID NO: 81120 - DNA, 25 bp, SARS Virus
aatacctctaaattcagtacctgtt

SEQ ID NO: 81121 - DNA, 25 bp, SARS Virus
atacctctaaagtcagtacctgttg

SEQ ID NO: 81122 - DNA, 25 bp, SARS Virus
tacctctaaagttagtacctgttga

SEQ ID NO: 81123 - DNA, 25 bp, SARS Virus
acctctaaagtctgtacctgttgaa

SEQ ID NO: 81124 - DNA, 25 bp, SARS Virus
cctctaaagtcattacctgttgaac

SEQ ID NO: 81125 - DNA, 25 bp, SARS Virus
ctctaaagtcagtacctgttgaacc

SEQ ID NO: 81126 - DNA, 25 bp, SARS Virus
tctaaagtcagttcctgttgaaccg

SEQ ID NO: 81127 - DNA, 25 bp, SARS Virus
ctaaagtcagtatctgttgaaccgc

SEQ ID NO: 81128 - DNA, 25 bp, SARS Virus
taaagtcagtacttgttgaaccgcc

SEQ ID NO: 81129 - DNA, 25 bp, SARS Virus
aaagtcagtacctgttgaaccgcca

SEQ ID NO: 81130 - DNA, 25 bp, SARS Virus
aagtcagtaccttttgaaccgccag

SEQ ID NO: 81131 - DNA, 25 bp, SARS Virus
agtcagtacctgttgaaccgccaga

SEQ ID NO: 81132 - DNA, 25 bp, SARS Virus
gtcagtacctgttgaaccgccagaa

SEQ ID NO: 81133 - DNA, 25 bp, SARS Virus
tcagtacctgtttaaccgccagaag

SEQ ID NO: 81134 - DNA, 25 bp, SARS Virus
cagtacctgttgtaccgccagaagt

SEQ ID NO: 81135 - DNA, 25 bp, SARS Virus
agtacctgttgatccgccagaagta

SEQ ID NO: 81136 - DNA, 25 bp, SARS Virus
gtacctgttgaatcgccagaagtaa

SEQ ID NO: 81137 - DNA, 25 bp, SARS Virus
tacctgttgaacagccagaagtaaa

SEQ ID NO: 81138 - DNA, 25 bp, SARS Virus
acctgttgaaccaccagaagtaaat

SEQ ID NO: 81139 - DNA, 25 bp, SARS Virus
cctgttgaaccgacagaagtaaatt

SEQ ID NO: 81140 - DNA, 25 bp, SARS Virus
ctgttgaaccgcaagaagtaaatta

SEQ ID NO: 81141 - DNA, 25 bp, SARS Virus
tgttgaaccgccagaagtaaattac

SEQ ID NO: 81142 - DNA, 25 bp, SARS Virus
gttgaaccgccaaaagtaaattact

SEQ ID NO: 81143 - DNA, 25 bp, SARS Virus
ttgaaccgccagaagtaaattacta

SEQ ID NO: 81144 - DNA, 25 bp, SARS Virus
tgaaccgccagaagtaaattactat

SEQ ID NO: 81145 - DNA, 25 bp, SARS Virus
gaaccgccagaaataaattactatc

SEQ ID NO: 81146 - DNA, 25 bp, SARS Virus
aaccgccagaagaaaattactatcc

SEQ ID NO: 81147 - DNA, 25 bp, SARS Virus
accgccagaagtaaattactatccg

SEQ ID NO: 81148 - DNA, 25 bp, SARS Virus
ccgccagaagtaaattactatccga

SEQ ID NO: 81149 - DNA, 25 bp, SARS Virus
cgccagaagtaaattactatccgaa

SEQ ID NO: 81150 - DNA, 25 bp, SARS Virus
gccagaagtaaaatactatccgaat

SEQ ID NO: 81151 - DNA, 25 bp, SARS Virus
ccagaagtaaataactatccgaatc

SEQ ID NO: 81152 - DNA, 25 bp, SARS Virus
cagaagtaaattactatccgaatcg

SEQ ID NO: 81153 - DNA, 25 bp, SARS Virus
agaagtaaattaatatccgaatcgg

SEQ ID NO: 81154 - DNA, 25 bp, SARS Virus
gaagtaaattacaatccgaatcggt

SEQ ID NO: 81155 - DNA, 25 bp, SARS Virus
aagtaaattactatccgaatcggtt

SEQ ID NO: 81156 - DNA, 25 bp, SARS Virus
agtaaattactaaccgaatcggttc

SEQ ID NO: 81157 - DNA, 25 bp, SARS Virus
gtaaattactatacgaatcggttcg

SEQ ID NO: 81158 - DNA, 25 bp, SARS Virus
taaattactatcagaatcggttcgc

SEQ ID NO: 81159 - DNA, 25 bp, SARS Virus
aaattactatccaaatcggttcgcg

SEQ ID NO: 81160 - DNA, 25 bp, SARS Virus
aattactatccgaatcggttcgcga

SEQ ID NO: 81161 - DNA, 25 bp, SARS Virus
attactatccgaatcggttcgcgag

SEQ ID NO: 81162 - DNA, 25 bp, SARS Virus
ttactatccgaaacggttcgcgagt

SEQ ID NO: 81163 - DNA, 25 bp, SARS Virus
tactatccgaataggttcgcgagtg

SEQ ID NO: 81164 - DNA, 25 bp, SARS Virus
actatccgaatcagttcgcgagtgt

SEQ ID NO: 81165 - DNA, 25 bp, SARS Virus
ctatccgaatcgattcgcgagtgtt

SEQ ID NO: 81166 - DNA, 25 bp, SARS Virus
tatccgaatcggatcgcgagtgttc

SEQ ID NO: 81167 - DNA, 25 bp, SARS Virus
atccgaatcggtacgcgagtgttct

SEQ ID NO: 81168 - DNA, 25 bp, SARS Virus
tccgaatcggttagcgagtgttcta

SEQ ID NO: 81169 - DNA, 25 bp, SARS Virus
ccgaatcggttcacgagtgttctaa

SEQ ID NO: 81170 - DNA, 25 bp, SARS Virus
cgaatcggttcgagagtgttctaag

SEQ ID NO: 81171 - DNA, 25 bp, SARS Virus
gaatcggttcgcaagtgttctaagt

SEQ ID NO: 81172 - DNA, 25 bp, SARS Virus
aatcggttcgcgagtgttctaagtg

SEQ ID NO: 81173 - DNA, 25 bp, SARS Virus
atcggttcgcgaatgttctaagtgg

SEQ ID NO: 81174 - DNA, 25 bp, SARS Virus
tcggttcgcgagagttctaagtggt

SEQ ID NO: 81175 - DNA, 25 bp, SARS Virus
cggttcgcgagtattctaagtggtg

SEQ ID NO: 81176 - DNA, 25 bp, SARS Virus
ggttcgcgagtgatctaagtggtga

SEQ ID NO: 81177 - DNA, 25 bp, SARS Virus
gttcgcgagtgtactaagtggtgaa

SEQ ID NO: 81178 - DNA, 25 bp, SARS Virus
ttcgcgagtgttataagtggtgaat

SEQ ID NO: 81179 - DNA, 25 bp, SARS Virus
tcgcgagtgttcaaagtggtgaatt

SEQ ID NO: 81180 - DNA, 25 bp, SARS Virus
cgcgagtgttctaagtggtgaattt

SEQ ID NO: 81181 - DNA, 25 bp, SARS Virus
gcgagtgttctaagtggtgaattta

SEQ ID NO: 81182 - DNA, 25 bp, SARS Virus
cgagtgttctaaatggtgaatttaa

SEQ ID NO: 81183 - DNA, 25 bp, SARS Virus
gagtgttctaagaggtgaatttaat

SEQ ID NO: 81184 - DNA, 25 bp, SARS Virus
agtgttctaagtagtgaatttaatc

SEQ ID NO: 81185 - DNA, 25 bp, SARS Virus
gtgttctaagtgatgaatttaatct

SEQ ID NO: 81186 - DNA, 25 bp, SARS Virus
tgttctaagtggagaatttaatctc

SEQ ID NO: 81187 - DNA, 25 bp, SARS Virus
gttctaagtggtaaatttaatctcc

SEQ ID NO: 81188 - DNA, 25 bp, SARS Virus
ttctaagtggtgaatttaatctcct

SEQ ID NO: 81189 - DNA, 25 bp, SARS Virus
tctaagtggtgaatttaatctccta

SEQ ID NO: 81190 - DNA, 25 bp, SARS Virus
ctaagtggtgaaattaatctcctaa

SEQ ID NO: 81191 - DNA, 25 bp, SARS Virus
taagtggtgaatataatctcctaaa

SEQ ID NO: 81192 - DNA, 25 bp, SARS Virus
aagtggtgaattaaatctcctaaaa

SEQ ID NO: 81193 - DNA, 25 bp, SARS Virus
agtggtgaatttaatctcctaaaat

SEQ ID NO: 81194 - DNA, 25 bp, SARS Virus
gtggtgaatttaatctcctaaaata

SEQ ID NO: 81195 - DNA, 25 bp, SARS Virus
tggtgaatttaaactcctaaaatag

SEQ ID NO: 81196 - DNA, 25 bp, SARS Virus
ggtgaatttaatatcctaaaatagg

SEQ ID NO: 81197 - DNA, 25 bp, SARS Virus
gtgaatttaatcacctaaaataggg

SEQ ID NO: 81198 - DNA, 25 bp, SARS Virus
tgaatttaatctactaaaataggga

SEQ ID NO: 81199 - DNA, 25 bp, SARS Virus
gaatttaatctcataaaatagggat

SEQ ID NO: 81200 - DNA, 25 bp, SARS Virus
aatttaatctccaaaaatagggata

SEQ ID NO: 81201 - DNA, 25 bp, SARS Virus
atttaatctcctaaaatagggatac

SEQ ID NO: 81202 - DNA, 25 bp, SARS Virus
tttaatctcctaaaatagggatacc

SEQ ID NO: 81203 - DNA, 25 bp, SARS Virus
ttaatctcctaaaatagggatacct

SEQ ID NO: 81204 - DNA, 25 bp, SARS Virus
taatctcctaaaatagggatacctg

SEQ ID NO: 81205 - DNA, 25 bp, SARS Virus
aatctcctaaaaaagggatacctgt

SEQ ID NO: 81206 - DNA, 25 bp, SARS Virus
atctcctaaaatagggatacctgtc

SEQ ID NO: 81207 - DNA, 25 bp, SARS Virus
tctcctaaaataaggatacctgtcg

SEQ ID NO: 81208 - DNA, 25 bp, SARS Virus
ctcctaaaatagagatacctgtcgt

SEQ ID NO: 81209 - DNA, 25 bp, SARS Virus
tcctaaaataggaatacctgtcgtg

SEQ ID NO: 81210 - DNA, 25 bp, SARS Virus
cctaaaatagggatacctgtcgtgt

SEQ ID NO: 81211 - DNA, 25 bp, SARS Virus
ctaaaatagggaaacctgtcgtgtc

SEQ ID NO: 81212 - DNA, 25 bp, SARS Virus
taaaatagggatacctgtcgtgtca

SEQ ID NO: 81213 - DNA, 25 bp, SARS Virus
aaaatagggataactgtcgtgtcac

SEQ ID NO: 81214 - DNA, 25 bp, SARS Virus
aaatagggatacatgtcgtgtcact

SEQ ID NO: 81215 - DNA, 25 bp, SARS Virus
aatagggataccagtcgtgtcactt

SEQ ID NO: 81216 - DNA, 25 bp, SARS Virus
atagggatacctatcgtgtcacttt

SEQ ID NO: 81217 - DNA, 25 bp, SARS Virus
tagggatacctgacgtgtcactttt

SEQ ID NO: 81218 - DNA, 25 bp, SARS Virus
agggatacctgtagtgtcacttttt

SEQ ID NO: 81219 - DNA, 25 bp, SARS Virus
gggatacctgtcatgtcacttttta

SEQ ID NO: 81220 - DNA, 25 bp, SARS Virus
ggatacctgtcgagtcactttttaa

SEQ ID NO: 81221 - DNA, 25 bp, SARS Virus
gatacctgtcgtatcactttttaat

SEQ ID NO: 81222 - DNA, 25 bp, SARS Virus
atacctgtcgtgacactttttaatg

SEQ ID NO: 81223 - DNA, 25 bp, SARS Virus
tacctgtcgtgtaactttttaatga

SEQ ID NO: 81224 - DNA, 25 bp, SARS Virus
acctgtcgtgtcactttttaatgaa

SEQ ID NO: 81225 - DNA, 25 bp, SARS Virus
cctgtcgtgtcaatttttaatgaag

SEQ ID NO: 81226 - DNA, 25 bp, SARS Virus
ctgtcgtgtcacattttaatgaagt

SEQ ID NO: 81227 - DNA, 25 bp, SARS Virus
tgtcgtgtcactatttaatgaagta

SEQ ID NO: 81228 - DNA, 25 bp, SARS Virus
gtcgtgtcacttattaatgaagtat

SEQ ID NO: 81229 - DNA, 25 bp, SARS Virus
tcgtgtcactttataatgaagtatt

SEQ ID NO: 81230 - DNA, 25 bp, SARS Virus
cgtgtcacttttaaatgaagtattg

SEQ ID NO: 81231 - DNA, 25 bp, SARS Virus
gtgtcactttttaatgaagtattgt

SEQ ID NO: 81232 - DNA, 25 bp, SARS Virus
tgtcactttttaatgaagtattgtc

SEQ ID NO: 81233 - DNA, 25 bp, SARS Virus
gtcactttttaaagaagtattgtct

SEQ ID NO: 81234 - DNA, 25 bp, SARS Virus
tcactttttaataaagtattgtcta

SEQ ID NO: 81235 - DNA, 25 bp, SARS Virus
cactttttaatgaagtattgtctac

SEQ ID NO: 81236 - DNA, 25 bp, SARS Virus
actttttaatgaagtattgtctacg

SEQ ID NO: 81237 - DNA, 25 bp, SARS Virus
ctttttaatgaaatattgtctacgc

SEQ ID NO: 81238 - DNA, 25 bp, SARS Virus
tttttaatgaagaattgtctacgcg

SEQ ID NO: 81239 - DNA, 25 bp, SARS Virus
ttttaatgaagtattgtctacgcgt

SEQ ID NO: 81240 - DNA, 25 bp, SARS Virus
tttaatgaagtaatgtctacgcgtt

SEQ ID NO: 81241 - DNA, 25 bp, SARS Virus
ttaatgaagtatagtctacgcgttt

SEQ ID NO: 81242 - DNA, 25 bp, SARS Virus
taatgaagtattatctacgcgtttg

SEQ ID NO: 81243 - DNA, 25 bp, SARS Virus
aatgaagtattgactacgcgtttgt

SEQ ID NO: 81244 - DNA, 25 bp, SARS Virus
atgaagtattgtatacgcgtttgtc

SEQ ID NO: 81245 - DNA, 25 bp, SARS Virus
tgaagtattgtcaacgcgtttgtcc

SEQ ID NO: 81246 - DNA, 25 bp, SARS Virus
gaagtattgtctacgcgtttgtcca

SEQ ID NO: 81247 - DNA, 25 bp, SARS Virus
aagtattgtctaagcgtttgtccaa

SEQ ID NO: 81248 - DNA, 25 bp, SARS Virus
agtattgtctacacgtttgtccaag

SEQ ID NO: 81249 - DNA, 25 bp, SARS Virus
gtattgtctacgagtttgtccaagt

SEQ ID NO: 81250 - DNA, 25 bp, SARS Virus
tattgtctacgcatttgtccaagta

SEQ ID NO: 81251 - DNA, 25 bp, SARS Virus
attgtctacgcgattgtccaagtag

SEQ ID NO: 81252 - DNA, 25 bp, SARS Virus
ttgtctacgcgtatgtccaagtagt

SEQ ID NO: 81253 - DNA, 25 bp, SARS Virus
tgtctacgcgttagtccaagtagtt

SEQ ID NO: 81254 - DNA, 25 bp, SARS Virus
gtctacgcgtttatccaagtagttt

SEQ ID NO: 81255 - DNA, 25 bp, SARS Virus
tctacgcgtttgaccaagtagtttt

SEQ ID NO: 81256 - DNA, 25 bp, SARS Virus
ctacgcgtttgtacaagtagtttta

SEQ ID NO: 81257 - DNA, 25 bp, SARS Virus
tacgcgtttgtcaaagtagttttac

SEQ ID NO: 81258 - DNA, 25 bp, SARS Virus
acgcgtttgtccaagtagttttaca

SEQ ID NO: 81259 - DNA, 25 bp, SARS Virus
cgcgtttgtccaagtagttttacac

SEQ ID NO: 81260 - DNA, 25 bp, SARS Virus
gcgtttgtccaaatagttttacaca

SEQ ID NO: 81261 - DNA, 25 bp, SARS Virus
cgtttgtccaagaagttttacacac

SEQ ID NO: 81262 - DNA, 25 bp, SARS Virus
gtttgtccaagtagttttacacaca

SEQ ID NO: 81263 - DNA, 25 bp, SARS Virus
tttgtccaagtaattttacacacac

SEQ ID NO: 81264 - DNA, 25 bp, SARS Virus
ttgtccaagtagatttacacacaca

SEQ ID NO: 81265 - DNA, 25 bp, SARS Virus
tgtccaagtagtattacacacacaa

SEQ ID NO: 81266 - DNA, 25 bp, SARS Virus
gtccaagtagttatacacacacaag

SEQ ID NO: 81267 - DNA, 25 bp, SARS Virus
tccaagtagtttaacacacacaaga

SEQ ID NO: 81268 - DNA, 25 bp, SARS Virus
ccaagtagttttacacacacaagac

SEQ ID NO: 81269 - DNA, 25 bp, SARS Virus
caagtagttttaaacacacaagaca

SEQ ID NO: 81270 - DNA, 25 bp, SARS Virus
aagtagttttacacacacaagacac

SEQ ID NO: 81271 - DNA, 25 bp, SARS Virus
agtagttttacaaacacaagacact

SEQ ID NO: 81272 - DNA, 25 bp, SARS Virus
gtagttttacacacacaagacacta

SEQ ID NO: 81273 - DNA, 25 bp, SARS Virus
tagttttacacaaacaagacactaa

SEQ ID NO: 81274 - DNA, 25 bp, SARS Virus
agttttacacacacaagacactaac

SEQ ID NO: 81275 - DNA, 25 bp, SARS Virus
gttttacacacaaaagacactaact

SEQ ID NO: 81276 - DNA, 25 bp, SARS Virus
ttttacacacacaagacactaacta

SEQ ID NO: 81277 - DNA, 25 bp, SARS Virus
tttacacacacaagacactaactag

SEQ ID NO: 81278 - DNA, 25 bp, SARS Virus
ttacacacacaaaacactaactaga

SEQ ID NO: 81279 - DNA, 25 bp, SARS Virus
tacacacacaagacactaactagaa

SEQ ID NO: 81280 - DNA, 25 bp, SARS Virus
acacacacaagaaactaactagaaa

SEQ ID NO: 81281 - DNA, 25 bp, SARS Virus
cacacacaagacactaactagaaaa

SEQ ID NO: 81282 - DNA, 25 bp, SARS Virus
acacacaagacaataactagaaaat

SEQ ID NO: 81283 - DNA, 25 bp, SARS Virus
cacacaagacacaaactagaaaatg

SEQ ID NO: 81284 - DNA, 25 bp, SARS Virus
acacaagacactaactagaaaatga

SEQ ID NO: 81285 - DNA, 25 bp, SARS Virus
cacaagacactaactagaaaatgaa

SEQ ID NO: 81286 - DNA, 25 bp, SARS Virus
acaagacactaaatagaaaatgaac

SEQ ID NO: 81287 - DNA, 25 bp, SARS Virus
caagacactaacaagaaaatgaact

SEQ ID NO: 81288 - DNA, 25 bp, SARS Virus
aagacactaactagaaaatgaacta

SEQ ID NO: 81289 - DNA, 25 bp, SARS Virus
agacactaactaaaaaatgaactac

SEQ ID NO: 81290 - DNA, 25 bp, SARS Virus
gacactaactagaaaatgaactact

SEQ ID NO: 81291 - DNA, 25 bp, SARS Virus
acactaactagaaaatgaactactg

SEQ ID NO: 81292 - DNA, 25 bp, SARS Virus
cactaactagaaaatgaactactga

SEQ ID NO: 81293 - DNA, 25 bp, SARS Virus
actaactagaaaatgaactactgaa

SEQ ID NO: 81294 - DNA, 25 bp, SARS Virus
ctaactagaaaaagaactactgaaa

SEQ ID NO: 81295 - DNA, 25 bp, SARS Virus
taactagaaaataaactactgaaac

SEQ ID NO: 81296 - DNA, 25 bp, SARS Virus
aactagaaaatgaactactgaaaca

SEQ ID NO: 81297 - DNA, 25 bp, SARS Virus
actagaaaatgaactactgaaacag

SEQ ID NO: 81298 - DNA, 25 bp, SARS Virus
ctagaaaatgaaatactgaaacagc

SEQ ID NO: 81299 - DNA, 25 bp, SARS Virus
tagaaaatgaacaactgaaacagct

SEQ ID NO: 81300 - DNA, 25 bp, SARS Virus
agaaaatgaactactgaaacagctc

SEQ ID NO: 81301 - DNA, 25 bp, SARS Virus
gaaaatgaactaatgaaacagctct

SEQ ID NO: 81302 - DNA, 25 bp, SARS Virus
aaaatgaactacagaaacagctcta

SEQ ID NO: 81303 - DNA, 25 bp, SARS Virus
aaatgaactactaaaacagctctat

SEQ ID NO: 81304 - DNA, 25 bp, SARS Virus
aatgaactactgaaacagctctatt

SEQ ID NO: 81305 - DNA, 25 bp, SARS Virus
atgaactactgaaacagctctatta

SEQ ID NO: 81306 - DNA, 25 bp, SARS Virus
tgaactactgaaacagctctattat

SEQ ID NO: 81307 - DNA, 25 bp, SARS Virus
gaactactgaaaaagctctattatt

SEQ ID NO: 81308 - DNA, 25 bp, SARS Virus
aactactgaaacagctctattattt

SEQ ID NO: 81309 - DNA, 25 bp, SARS Virus
actactgaaacaactctattatttc

SEQ ID NO: 81310 - DNA, 25 bp, SARS Virus
ctactgaaacagatctattatttca

SEQ ID NO: 81311 - DNA, 25 bp, SARS Virus
tactgaaacagcactattatttcag

SEQ ID NO: 81312 - DNA, 25 bp, SARS Virus
actgaaacagctatattatttcagt

SEQ ID NO: 81313 - DNA, 25 bp, SARS Virus
ctgaaacagctcaattatttcagtg

SEQ ID NO: 81314 - DNA, 25 bp, SARS Virus
tgaaacagctctattatttcagtgt

SEQ ID NO: 81315 - DNA, 25 bp, SARS Virus
gaaacagctctaatatttcagtgtt

SEQ ID NO: 81316 - DNA, 25 bp, SARS Virus
aaacagctctataatttcagtgttc

SEQ ID NO: 81317 - DNA, 25 bp, SARS Virus
aacagctctattatttcagtgttct

SEQ ID NO: 81318 - DNA, 25 bp, SARS Virus
acagctctattaattcagtgttcta

SEQ ID NO: 81319 - DNA, 25 bp, SARS Virus
cagctctattatatcagtgttctaa

SEQ ID NO: 81320 - DNA, 25 bp, SARS Virus
agctctattattacagtgttctaaa

SEQ ID NO: 81321 - DNA, 25 bp, SARS Virus
gctctattatttaagtgttctaaac

SEQ ID NO: 81322 - DNA, 25 bp, SARS Virus
ctctattatttcagtgttctaaaca

SEQ ID NO: 81323 - DNA, 25 bp, SARS Virus
tctattatttcaatgttctaaacag

SEQ ID NO: 81324 - DNA, 25 bp, SARS Virus
ctattatttcagagttctaaacagt

SEQ ID NO: 81325 - DNA, 25 bp, SARS Virus
tattatttcagtattctaaacagtc

SEQ ID NO: 81326 - DNA, 25 bp, SARS Virus
attatttcagtgatctaaacagtca

SEQ ID NO: 81327 - DNA, 25 bp, SARS Virus
ttatttcagtgtactaaacagtcac

SEQ ID NO: 81328 - DNA, 25 bp, SARS Virus
tatttcagtgttataaacagtcact

SEQ ID NO: 81329 - DNA, 25 bp, SARS Virus
atttcagtgttcaaaacagtcacta

SEQ ID NO: 81330 - DNA, 25 bp, SARS Virus
tttcagtgttctaaacagtcactaa

SEQ ID NO: 81331 - DNA, 25 bp, SARS Virus
ttcagtgttctaaacagtcactaaa

SEQ ID NO: 81332 - DNA, 25 bp, SARS Virus
tcagtgttctaaacagtcactaaag

SEQ ID NO: 81333 - DNA, 25 bp, SARS Virus
cagtgttctaaaaagtcactaaagt

SEQ ID NO: 81334 - DNA, 25 bp, SARS Virus
agtgttctaaacagtcactaaagtt

SEQ ID NO: 81335 - DNA, 25 bp, SARS Virus
gtgttctaaacaatcactaaagttt

SEQ ID NO: 81336 - DNA, 25 bp, SARS Virus
tgttctaaacagacactaaagtttt

SEQ ID NO: 81337 - DNA, 25 bp, SARS Virus
gttctaaacagtaactaaagttttc

SEQ ID NO: 81338 - DNA, 25 bp, SARS Virus
ttctaaacagtcactaaagttttca

SEQ ID NO: 81339 - DNA, 25 bp, SARS Virus
tctaaacagtcaataaagttttcac

SEQ ID NO: 81340 - DNA, 25 bp, SARS Virus
ctaaacagtcacaaaagttttcacc

SEQ ID NO: 81341 - DNA, 25 bp, SARS Virus
taaacagtcactaaagttttcacca

SEQ ID NO: 81342 - DNA, 25 bp, SARS Virus
aaacagtcactaaagttttcaccag

SEQ ID NO: 81343 - DNA, 25 bp, SARS Virus
aacagtcactaaagttttcaccagt

SEQ ID NO: 81344 - DNA, 25 bp, SARS Virus
acagtcactaaaattttcaccagtt

SEQ ID NO: 81345 - DNA, 25 bp, SARS Virus
cagtcactaaagatttcaccagttc

SEQ ID NO: 81346 - DNA, 25 bp, SARS Virus
agtcactaaagtattcaccagttcc

SEQ ID NO: 81347 - DNA, 25 bp, SARS Virus
gtcactaaagttatcaccagttcca

SEQ ID NO: 81348 - DNA, 25 bp, SARS Virus
tcactaaagtttacaccagttccaa

SEQ ID NO: 81349 - DNA, 25 bp, SARS Virus
cactaaagttttaaccagttccaat

SEQ ID NO: 81350 - DNA, 25 bp, SARS Virus
actaaagttttcaccagttccaatg

SEQ ID NO: 81351 - DNA, 25 bp, SARS Virus
ctaaagttttcaacagttccaatgt

SEQ ID NO: 81352 - DNA, 25 bp, SARS Virus
taaagttttcacaagttccaatgtt

SEQ ID NO: 81353 - DNA, 25 bp, SARS Virus
aaagttttcaccagttccaatgtta

SEQ ID NO: 81354 - DNA, 25 bp, SARS Virus
aagttttcaccaattccaatgttaa

SEQ ID NO: 81355 - DNA, 25 bp, SARS Virus
agttttcaccagatccaatgttaac

SEQ ID NO: 81356 - DNA, 25 bp, SARS Virus
gttttcaccagtaccaatgttaact

SEQ ID NO: 81357 - DNA, 25 bp, SARS Virus
ttttcaccagttacaatgttaactg

SEQ ID NO: 81358 - DNA, 25 bp, SARS Virus
tttcaccagttcaaatgttaactga

SEQ ID NO: 81359 - DNA, 25 bp, SARS Virus
ttcaccagttccaatgttaactgat

SEQ ID NO: 81360 - DNA, 25 bp, SARS Virus
tcaccagttccaatgttaactgata

SEQ ID NO: 81361 - DNA, 25 bp, SARS Virus
caccagttccaaagttaactgatac

SEQ ID NO: 81362 - DNA, 25 bp, SARS Virus
accagttccaatattaactgatacg

SEQ ID NO: 81363 - DNA, 25 bp, SARS Virus
ccagttccaatgataactgatacga

SEQ ID NO: 81364 - DNA, 25 bp, SARS Virus
cagttccaatgtaaactgatacgac

SEQ ID NO: 81365 - DNA, 25 bp, SARS Virus
agttccaatgttaactgatacgact

SEQ ID NO: 81366 - DNA, 25 bp, SARS Virus
gttccaatgttaactgatacgactt

SEQ ID NO: 81367 - DNA, 25 bp, SARS Virus
ttccaatgttaaatgatacgacttt

SEQ ID NO: 81368 - DNA, 25 bp, SARS Virus
tccaatgttaacagatacgacttta

SEQ ID NO: 81369 - DNA, 25 bp, SARS Virus
ccaatgttaactaatacgactttaa

SEQ ID NO: 81370 - DNA, 25 bp, SARS Virus
caatgttaactgatacgactttaaa

SEQ ID NO: 81371 - DNA, 25 bp, SARS Virus
aatgttaactgaaacgactttaaag

SEQ ID NO: 81372 - DNA, 25 bp, SARS Virus
atgttaactgatacgactttaaagt

SEQ ID NO: 81373 - DNA, 25 bp, SARS Virus
tgttaactgataagactttaaagta

SEQ ID NO: 81374 - DNA, 25 bp, SARS Virus
gttaactgatacaactttaaagtaa

SEQ ID NO: 81375 - DNA, 25 bp, SARS Virus
ttaactgatacgactttaaagtaag

SEQ ID NO: 81376 - DNA, 25 bp, SARS Virus
taactgatacgaatttaaagtaagt

SEQ ID NO: 81377 - DNA, 25 bp, SARS Virus
aactgatacgacattaaagtaagta

SEQ ID NO: 81378 - DNA, 25 bp, SARS Virus
actgatacgactataaagtaagtac

SEQ ID NO: 81379 - DNA, 25 bp, SARS Virus
ctgatacgacttaaaagtaagtacg

SEQ ID NO: 81380 - DNA, 25 bp, SARS Virus
tgatacgactttaaagtaagtacga

SEQ ID NO: 81381 - DNA, 25 bp, SARS Virus
gatacgactttaaagtaagtacgaa

SEQ ID NO: 81382 - DNA, 25 bp, SARS Virus
atacgactttaaagtaagtacgaaa

SEQ ID NO: 81383 - DNA, 25 bp, SARS Virus
tacgactttaaaataagtacgaaac

SEQ ID NO: 81384 - DNA, 25 bp, SARS Virus
acgactttaaagaaagtacgaaacc

SEQ ID NO: 81385 - DNA, 25 bp, SARS Virus
cgactttaaagtaagtacgaaacca

SEQ ID NO: 81386 - DNA, 25 bp, SARS Virus
gactttaaagtaagtacgaaaccac

SEQ ID NO: 81387 - DNA, 25 bp, SARS Virus
actttaaagtaaatacgaaaccaca

SEQ ID NO: 81388 - DNA, 25 bp, SARS Virus
ctttaaagtaagaacgaaaccacat

SEQ ID NO: 81389 - DNA, 25 bp, SARS Virus
tttaaagtaagtacgaaaccacatt

SEQ ID NO: 81390 - DNA, 25 bp, SARS Virus
ttaaagtaagtaagaaaccacattc

SEQ ID NO: 81391 - DNA, 25 bp, SARS Virus
taaagtaagtacaaaaccacattcc

SEQ ID NO: 81392 - DNA, 25 bp, SARS Virus
aaagtaagtacgaaaccacattcct

SEQ ID NO: 81393 - DNA, 25 bp, SARS Virus
aagtaagtacgaaaccacattccta

SEQ ID NO: 81394 - DNA, 25 bp, SARS Virus
agtaagtacgaaaccacattcctac

SEQ ID NO: 81395 - DNA, 25 bp, SARS Virus
gtaagtacgaaaacacattcctacc

SEQ ID NO: 81396 - DNA, 25 bp, SARS Virus
taagtacgaaacaacattcctacct

SEQ ID NO: 81397 - DNA, 25 bp, SARS Virus
aagtacgaaaccacattcctacctg

SEQ ID NO: 81398 - DNA, 25 bp, SARS Virus
agtacgaaaccaaattcctacctgt

SEQ ID NO: 81399 - DNA, 25 bp, SARS Virus
gtacgaaaccacattcctacctgta

SEQ ID NO: 81400 - DNA, 25 bp, SARS Virus
tacgaaaccacaatcctacctgtac

SEQ ID NO: 81401 - DNA, 25 bp, SARS Virus
acgaaaccacatacctacctgtaca

SEQ ID NO: 81402 - DNA, 25 bp, SARS Virus
cgaaaccacattactacctgtacaa

SEQ ID NO: 81403 - DNA, 25 bp, SARS Virus
gaaaccacattcatacctgtacaac

SEQ ID NO: 81404 - DNA, 25 bp, SARS Virus
aaaccacattccaacctgtacaact

SEQ ID NO: 81405 - DNA, 25 bp, SARS Virus
aaccacattcctacctgtacaactt

SEQ ID NO: 81406 - DNA, 25 bp, SARS Virus
accacattcctaactgtacaacttt

SEQ ID NO: 81407 - DNA, 25 bp, SARS Virus
ccacattcctacatgtacaactttg

SEQ ID NO: 81408 - DNA, 25 bp, SARS Virus
cacattcctaccagtacaactttgg

SEQ ID NO: 81409 - DNA, 25 bp, SARS Virus
acattcctacctatacaactttgga

SEQ ID NO: 81410 - DNA, 25 bp, SARS Virus
cattcctacctgaacaactttggaa

SEQ ID NO: 81411 - DNA, 25 bp, SARS Virus
attcctacctgtacaactttggaag

SEQ ID NO: 81412 - DNA, 25 bp, SARS Virus
ttcctacctgtaaaactttggaaga

SEQ ID NO: 81413 - DNA, 25 bp, SARS Virus
tcctacctgtacaactttggaagat

SEQ ID NO: 81414 - DNA, 25 bp, SARS Virus
cctacctgtacaactttggaagatg

SEQ ID NO: 81415 - DNA, 25 bp, SARS Virus
ctacctgtacaaatttggaagatgg

SEQ ID NO: 81416 - DNA, 25 bp, SARS Virus
tacctgtacaacattggaagatggg

SEQ ID NO: 81417 - DNA, 25 bp, SARS Virus
acctgtacaactatggaagatgggt

SEQ ID NO: 81418 - DNA, 25 bp, SARS Virus
cctgtacaacttaggaagatgggtt

SEQ ID NO: 81419 - DNA, 25 bp, SARS Virus
ctgtacaactttagaagatgggttt

SEQ ID NO: 81420 - DNA, 25 bp, SARS Virus
tgtacaactttgaaagatgggtttt

SEQ ID NO: 81421 - DNA, 25 bp, SARS Virus
gtacaactttggaagatgggttttg

SEQ ID NO: 81422 - DNA, 25 bp, SARS Virus
tacaactttggaagatgggttttga

SEQ ID NO: 81423 - DNA, 25 bp, SARS Virus
acaactttggaaaatgggttttgat

SEQ ID NO: 81424 - DNA, 25 bp, SARS Virus
caactttggaagatgggttttgatg

SEQ ID NO: 81425 - DNA, 25 bp, SARS Virus
aactttggaagaagggttttgatgt

SEQ ID NO: 81426 - DNA, 25 bp, SARS Virus
actttggaagataggttttgatgtt

SEQ ID NO: 81427 - DNA, 25 bp, SARS Virus
ctttggaagatgagttttgatgttc

SEQ ID NO: 81428 - DNA, 25 bp, SARS Virus
tttggaagatggattttgatgttcg

SEQ ID NO: 81429 - DNA, 25 bp, SARS Virus
ttggaagatgggatttgatgttcgt

SEQ ID NO: 81430 - DNA, 25 bp, SARS Virus
tggaagatgggtattgatgttcgtt

SEQ ID NO: 81431 - DNA, 25 bp, SARS Virus
ggaagatgggttatgatgttcgttc

SEQ ID NO: 81432 - DNA, 25 bp, SARS Virus
gaagatgggtttagatgttcgttca

SEQ ID NO: 81433 - DNA, 25 bp, SARS Virus
aagatgggttttaatgttcgttcag

SEQ ID NO: 81434 - DNA, 25 bp, SARS Virus
agatgggttttgatgttcgttcagt

SEQ ID NO: 81435 - DNA, 25 bp, SARS Virus
gatgggttttgaagttcgttcagtt

SEQ ID NO: 81436 - DNA, 25 bp, SARS Virus
atgggttttgatattcgttcagttc

SEQ ID NO: 81437 - DNA, 25 bp, SARS Virus
tgggttttgatgatcgttcagttcg

SEQ ID NO: 81438 - DNA, 25 bp, SARS Virus
gggttttgatgtacgttcagttcgc

SEQ ID NO: 81439 - DNA, 25 bp, SARS Virus
ggttttgatgttagttcagttcgca

SEQ ID NO: 81440 - DNA, 25 bp, SARS Virus
gttttgatgttcattcagttcgcac

SEQ ID NO: 81441 - DNA, 25 bp, SARS Virus
ttttgatgttcgatcagttcgcacc

SEQ ID NO: 81442 - DNA, 25 bp, SARS Virus
tttgatgttcgtacagttcgcaccg

SEQ ID NO: 81443 - DNA, 25 bp, SARS Virus
ttgatgttcgttaagttcgcaccgt

SEQ ID NO: 81444 - DNA, 25 bp, SARS Virus
tgatgttcgttcagttcgcaccgtt

SEQ ID NO: 81445 - DNA, 25 bp, SARS Virus
gatgttcgttcaattcgcaccgttg

SEQ ID NO: 81446 - DNA, 25 bp, SARS Virus
atgttcgttcagatcgcaccgttgg

SEQ ID NO: 81447 - DNA, 25 bp, SARS Virus
tgttcgttcagtacgcaccgttggt

SEQ ID NO: 81448 - DNA, 25 bp, SARS Virus
gttcgttcagttagcaccgttggtc

SEQ ID NO: 81449 - DNA, 25 bp, SARS Virus
ttcgttcagttcacaccgttggtcc

SEQ ID NO: 81450 - DNA, 25 bp, SARS Virus
tcgttcagttcgaaccgttggtcca

SEQ ID NO: 81451 - DNA, 25 bp, SARS Virus
cgttcagttcgcaccgttggtccac

SEQ ID NO: 81452 - DNA, 25 bp, SARS Virus
gttcagttcgcaacgttggtccaca

SEQ ID NO: 81453 - DNA, 25 bp, SARS Virus
ttcagttcgcacagttggtccacaa

SEQ ID NO: 81454 - DNA, 25 bp, SARS Virus
tcagttcgcaccattggtccacaac

SEQ ID NO: 81455 - DNA, 25 bp, SARS Virus
cagttcgcaccgatggtccacaacg

SEQ ID NO: 81456 - DNA, 25 bp, SARS Virus
agttcgcaccgtaggtccacaacgc

SEQ ID NO: 81457 - DNA, 25 bp, SARS Virus
gttcgcaccgttagtccacaacgct

SEQ ID NO: 81458 - DNA, 25 bp, SARS Virus
ttcgcaccgttgatccacaacgcta

SEQ ID NO: 81459 - DNA, 25 bp, SARS Virus
tcgcaccgttggaccacaacgctac

SEQ ID NO: 81460 - DNA, 25 bp, SARS Virus
cgcaccgttggtacacaacgctacg

SEQ ID NO: 81461 - DNA, 25 bp, SARS Virus
gcaccgttggtcaacaacgctacgg

SEQ ID NO: 81462 - DNA, 25 bp, SARS Virus
caccgttggtccacaacgctacgga

SEQ ID NO: 81463 - DNA, 25 bp, SARS Virus
accgttggtccaaaacgctacggat

SEQ ID NO: 81464 - DNA, 25 bp, SARS Virus
ccgttggtccacaacgctacggatt

SEQ ID NO: 81465 - DNA, 25 bp, SARS Virus
cgttggtccacaacgctacggattg

SEQ ID NO: 81466 - DNA, 25 bp, SARS Virus
gttggtccacaaagctacggattga

SEQ ID NO: 81467 - DNA, 25 bp, SARS Virus
ttggtccacaacactacggattgaa

SEQ ID NO: 81468 - DNA, 25 bp, SARS Virus
tggtccacaacgatacggattgaac

SEQ ID NO: 81469 - DNA, 25 bp, SARS Virus
ggtccacaacgcaacggattgaaca

SEQ ID NO: 81470 - DNA, 25 bp, SARS Virus
gtccacaacgctacggattgaacat

SEQ ID NO: 81471 - DNA, 25 bp, SARS Virus
tccacaacgctaaggattgaacatg

SEQ ID NO: 81472 - DNA, 25 bp, SARS Virus
ccacaacgctacagattgaacatgt

SEQ ID NO: 81473 - DNA, 25 bp, SARS Virus
cacaacgctacgaattgaacatgtt

SEQ ID NO: 81474 - DNA, 25 bp, SARS Virus
acaacgctacggattgaacatgttc

SEQ ID NO: 81475 - DNA, 25 bp, SARS Virus
caacgctacggaatgaacatgttct

SEQ ID NO: 81476 - DNA, 25 bp, SARS Virus
aacgctacggatagaacatgttcta

SEQ ID NO: 81477 - DNA, 25 bp, SARS Virus
acgctacggattaaacatgttctac

SEQ ID NO: 81478 - DNA, 25 bp, SARS Virus
cgctacggattgaacatgttctacg

SEQ ID NO: 81479 - DNA, 25 bp, SARS Virus
gctacggattgaacatgttctacgt

SEQ ID NO: 81480 - DNA, 25 bp, SARS Virus
ctacggattgaaaatgttctacgtt

SEQ ID NO: 81481 - DNA, 25 bp, SARS Virus
tacggattgaacatgttctacgttt

SEQ ID NO: 81482 - DNA, 25 bp, SARS Virus
acggattgaacaagttctacgtttc

SEQ ID NO: 81483 - DNA, 25 bp, SARS Virus
cggattgaacatattctacgtttct

SEQ ID NO: 81484 - DNA, 25 bp, SARS Virus
ggattgaacatgatctacgtttctt

SEQ ID NO: 81485 - DNA, 25 bp, SARS Virus
gattgaacatgtactacgtttctta

SEQ ID NO: 81486 - DNA, 25 bp, SARS Virus
attgaacatgttatacgtttcttac

SEQ ID NO: 81487 - DNA, 25 bp, SARS Virus
ttgaacatgttcaacgtttcttacg

SEQ ID NO: 81488 - DNA, 25 bp, SARS Virus
tgaacatgttctacgtttcttacga

SEQ ID NO: 81489 - DNA, 25 bp, SARS Virus
gaacatgttctaagtttcttacgaa

SEQ ID NO: 81490 - DNA, 25 bp, SARS Virus
aacatgttctacatttcttacgaag

SEQ ID NO: 81491 - DNA, 25 bp, SARS Virus
acatgttctacgattcttacgaaga

SEQ ID NO: 81492 - DNA, 25 bp, SARS Virus
catgttctacgtatcttacgaagaa

SEQ ID NO: 81493 - DNA, 25 bp, SARS Virus
atgttctacgttacttacgaagaac

SEQ ID NO: 81494 - DNA, 25 bp, SARS Virus
tgttctacgtttattacgaagaact

SEQ ID NO: 81495 - DNA, 25 bp, SARS Virus
gttctacgtttcatacgaagaactt

SEQ ID NO: 81496 - DNA, 25 bp, SARS Virus
ttctacgtttctaacgaagaacttt

SEQ ID NO: 81497 - DNA, 25 bp, SARS Virus
tctacgtttcttacgaagaactttt

SEQ ID NO: 81498 - DNA, 25 bp, SARS Virus
ctacgtttcttaagaagaacttttc

SEQ ID NO: 81499 - DNA, 25 bp, SARS Virus
tacgtttcttacaaagaacttttca

SEQ ID NO: 81500 - DNA, 25 bp, SARS Virus
acgtttcttacgaagaacttttcac

SEQ ID NO: 81501 - DNA, 25 bp, SARS Virus
cgtttcttacgaagaacttttcaca

SEQ ID NO: 81502 - DNA, 25 bp, SARS Virus
gtttcttacgaaaaacttttcacac

SEQ ID NO: 81503 - DNA, 25 bp, SARS Virus
tttcttacgaagaacttttcacact

SEQ ID NO: 81504 - DNA, 25 bp, SARS Virus
ttcttacgaagaacttttcacactg

SEQ ID NO: 81505 - DNA, 25 bp, SARS Virus
tcttacgaagaaattttcacactgg

SEQ ID NO: 81506 - DNA, 25 bp, SARS Virus
cttacgaagaacatttcacactgga

SEQ ID NO: 81507 - DNA, 25 bp, SARS Virus
ttacgaagaactattcacactggaa

SEQ ID NO: 81508 - DNA, 25 bp, SARS Virus
tacgaagaacttatcacactggaag

SEQ ID NO: 81509 - DNA, 25 bp, SARS Virus
acgaagaactttacacactggaagt

SEQ ID NO: 81510 - DNA, 25 bp, SARS Virus
cgaagaacttttaacactggaagtc

SEQ ID NO: 81511 - DNA, 25 bp, SARS Virus
gaagaacttttcacactggaagtct

SEQ ID NO: 81512 - DNA, 25 bp, SARS Virus
aagaacttttcaaactggaagtctt

SEQ ID NO: 81513 - DNA, 25 bp, SARS Virus
agaacttttcacactggaagtctta

SEQ ID NO: 81514 - DNA, 25 bp, SARS Virus
gaacttttcacaatggaagtcttaa

SEQ ID NO: 81515 - DNA, 25 bp, SARS Virus
aacttttcacacaggaagtcttaat

SEQ ID NO: 81516 - DNA, 25 bp, SARS Virus
acttttcacactagaagtcttaata

SEQ ID NO: 81517 - DNA, 25 bp, SARS Virus
cttttcacactgaaagtcttaatac

SEQ ID NO: 81518 - DNA, 25 bp, SARS Virus
ttttcacactggaagtcttaatacc

SEQ ID NO: 81519 - DNA, 25 bp, SARS Virus
tttcacactggaagtcttaatacca

SEQ ID NO: 81520 - DNA, 25 bp, SARS Virus
ttcacactggaaatcttaataccac

SEQ ID NO: 81521 - DNA, 25 bp, SARS Virus
tcacactggaagacttaataccact

SEQ ID NO: 81522 - DNA, 25 bp, SARS Virus
cacactggaagtattaataccactt

SEQ ID NO: 81523 - DNA, 25 bp, SARS Virus
acactggaagtcataataccacttt

SEQ ID NO: 81524 - DNA, 25 bp, SARS Virus
cactggaagtctaaataccactttt

SEQ ID NO: 81525 - DNA, 25 bp, SARS Virus
actggaagtcttaataccactttta

SEQ ID NO: 81526 - DNA, 25 bp, SARS Virus
ctggaagtcttaataccacttttac

SEQ ID NO: 81527 - DNA, 25 bp, SARS Virus
tggaagtcttaaaaccacttttacg

SEQ ID NO: 81528 - DNA, 25 bp, SARS Virus
ggaagtcttaataccacttttacga

SEQ ID NO: 81529 - DNA, 25 bp, SARS Virus
gaagtcttaataacacttttacgac

SEQ ID NO: 81530 - DNA, 25 bp, SARS Virus
aagtcttaatacaacttttacgaca

SEQ ID NO: 81531 - DNA, 25 bp, SARS Virus
agtcttaataccacttttacgacaa

SEQ ID NO: 81532 - DNA, 25 bp, SARS Virus
gtcttaataccaattttacgacaat

SEQ ID NO: 81533 - DNA, 25 bp, SARS Virus
tcttaataccacatttacgacaata

SEQ ID NO: 81534 - DNA, 25 bp, SARS Virus
cttaataccactattacgacaatat

SEQ ID NO: 81535 - DNA, 25 bp, SARS Virus
ttaataccacttatacgacaatatg

SEQ ID NO: 81536 - DNA, 25 bp, SARS Virus
taataccactttaacgacaatatgg

SEQ ID NO: 81537 - DNA, 25 bp, SARS Virus
aataccacttttacgacaatatggt

SEQ ID NO: 81538 - DNA, 25 bp, SARS Virus
ataccacttttaagacaatatggtt

SEQ ID NO: 81539 - DNA, 25 bp, SARS Virus
taccacttttacaacaatatggttt

SEQ ID NO: 81540 - DNA, 25 bp, SARS Virus
accacttttacgacaatatggtttt

SEQ ID NO: 81541 - DNA, 25 bp, SARS Virus
ccacttttacgaaaatatggttttc

SEQ ID NO: 81542 - DNA, 25 bp, SARS Virus
cacttttacgacaatatggttttcc

SEQ ID NO: 81543 - DNA, 25 bp, SARS Virus
acttttacgacaatatggttttcct

SEQ ID NO: 81544 - DNA, 25 bp, SARS Virus
cttttacgacaaaatggttttcctt

SEQ ID NO: 81545 - DNA, 25 bp, SARS Virus
ttttacgacaatatggttttcctta

SEQ ID NO: 81546 - DNA, 25 bp, SARS Virus
tttacgacaataaggttttccttat

SEQ ID NO: 81547 - DNA, 25 bp, SARS Virus
ttacgacaatatagttttccttatt

SEQ ID NO: 81548 - DNA, 25 bp, SARS Virus
tacgacaatatgattttccttatta

SEQ ID NO: 81549 - DNA, 25 bp, SARS Virus
acgacaatatggatttccttattac

SEQ ID NO: 81550 - DNA, 25 bp, SARS Virus
cgacaatatggtattccttattact

SEQ ID NO: 81551 - DNA, 25 bp, SARS Virus
gacaatatggttatccttattacta

SEQ ID NO: 81552 - DNA, 25 bp, SARS Virus
acaatatggtttaccttattactac

SEQ ID NO: 81553 - DNA, 25 bp, SARS Virus
caatatggttttacttattactact

SEQ ID NO: 81554 - DNA, 25 bp, SARS Virus
aatatggttttcattattactactt

SEQ ID NO: 81555 - DNA, 25 bp, SARS Virus
atatggttttccatattactactta

SEQ ID NO: 81556 - DNA, 25 bp, SARS Virus
tatggttttcctaattactacttac

SEQ ID NO: 81557 - DNA, 25 bp, SARS Virus
atggttttccttattactacttaca

SEQ ID NO: 81558 - DNA, 25 bp, SARS Virus
tggttttccttaatactacttacag

SEQ ID NO: 81559 - DNA, 25 bp, SARS Virus
ggttttccttataactacttacagc

SEQ ID NO: 81560 - DNA, 25 bp, SARS Virus
gttttccttattactacttacagcg

SEQ ID NO: 81561 - DNA, 25 bp, SARS Virus
ttttccttattaatacttacagcgt

SEQ ID NO: 81562 - DNA, 25 bp, SARS Virus
tttccttattacaacttacagcgtt

SEQ ID NO: 81563 - DNA, 25 bp, SARS Virus
ttccttattactacttacagcgttt

SEQ ID NO: 81564 - DNA, 25 bp, SARS Virus
tccttattactaattacagcgtttc

SEQ ID NO: 81565 - DNA, 25 bp, SARS Virus
ccttattactacatacagcgtttca

SEQ ID NO: 81566 - DNA, 25 bp, SARS Virus
cttattactactaacagcgtttcat

SEQ ID NO: 81567 - DNA, 25 bp, SARS Virus
ttattactacttacagcgtttcata

SEQ ID NO: 81568 - DNA, 25 bp, SARS Virus
tattactacttaaagcgtttcatat

SEQ ID NO: 81569 - DNA, 25 bp, SARS Virus
attactacttacagcgtttcatatg

SEQ ID NO: 81570 - DNA, 25 bp, SARS Virus
ttactacttacaacgtttcatatga

SEQ ID NO: 81571 - DNA, 25 bp, SARS Virus
tactacttacagagtttcatatgag

SEQ ID NO: 81572 - DNA, 25 bp, SARS Virus
actacttacagcatttcatatgagt

SEQ ID NO: 81573 - DNA, 25 bp, SARS Virus
ctacttacagcgattcatatgagtt

SEQ ID NO: 81574 - DNA, 25 bp, SARS Virus
tacttacagcgtatcatatgagttg

SEQ ID NO: 81575 - DNA, 25 bp, SARS Virus
acttacagcgttacatatgagttga

SEQ ID NO: 81576 - DNA, 25 bp, SARS Virus
cttacagcgtttaatatgagttgac

SEQ ID NO: 81577 - DNA, 25 bp, SARS Virus
ttacagcgtttcatatgagttgaca

SEQ ID NO: 81578 - DNA, 25 bp, SARS Virus
tacagcgtttcaaatgagttgacac

SEQ ID NO: 81579 - DNA, 25 bp, SARS Virus
acagcgtttcatatgagttgacaca

SEQ ID NO: 81580 - DNA, 25 bp, SARS Virus
cagcgtttcataagagttgacacag

SEQ ID NO: 81581 - DNA, 25 bp, SARS Virus
agcgtttcatataagttgacacagt

SEQ ID NO: 81582 - DNA, 25 bp, SARS Virus
gcgtttcatatgagttgacacagtt

SEQ ID NO: 81583 - DNA, 25 bp, SARS Virus
cgtttcatatgaattgacacagtta

SEQ ID NO: 81584 - DNA, 25 bp, SARS Virus
gtttcatatgagatgacacagttat

SEQ ID NO: 81585 - DNA, 25 bp, SARS Virus
tttcatatgagtagacacagttatg

SEQ ID NO: 81586 - DNA, 25 bp, SARS Virus
ttcatatgagttaacacagttatga

SEQ ID NO: 81587 - DNA, 25 bp, SARS Virus
tcatatgagttgacacagttatgaa

SEQ ID NO: 81588 - DNA, 25 bp, SARS Virus
catatgagttgaaacagttatgaat

SEQ ID NO: 81589 - DNA, 25 bp, SARS Virus
atatgagttgacacagttatgaatt

SEQ ID NO: 81590 - DNA, 25 bp, SARS Virus
tatgagttgacaaagttatgaattt

SEQ ID NO: 81591 - DNA, 25 bp, SARS Virus
atgagttgacacagttatgaattta

SEQ ID NO: 81592 - DNA, 25 bp, SARS Virus
tgagttgacacaattatgaatttat

SEQ ID NO: 81593 - DNA, 25 bp, SARS Virus
gagttgacacagatatgaatttatg

SEQ ID NO: 81594 - DNA, 25 bp, SARS Virus
agttgacacagtaatgaatttatgt

SEQ ID NO: 81595 - DNA, 25 bp, SARS Virus
gttgacacagttatgaatttatgtg

SEQ ID NO: 81596 - DNA, 25 bp, SARS Virus
ttgacacagttaagaatttatgtga

SEQ ID NO: 81597 - DNA, 25 bp, SARS Virus
tgacacagttataaatttatgtgaa

SEQ ID NO: 81598 - DNA, 25 bp, SARS Virus
gacacagttatgaatttatgtgaat

SEQ ID NO: 81599 - DNA, 25 bp, SARS Virus
acacagttatgaatttatgtgaatg

SEQ ID NO: 81600 - DNA, 25 bp, SARS Virus
cacagttatgaaattatgtgaatga

SEQ ID NO: 81601 - DNA, 25 bp, SARS Virus
acagttatgaatatatgtgaatgaa

SEQ ID NO: 81602 - DNA, 25 bp, SARS Virus
cagttatgaattaatgtgaatgaaa

SEQ ID NO: 81603 - DNA, 25 bp, SARS Virus
agttatgaatttatgtgaatgaaat

SEQ ID NO: 81604 - DNA, 25 bp, SARS Virus
gttatgaatttaagtgaatgaaatc

SEQ ID NO: 81605 - DNA, 25 bp, SARS Virus
ttatgaatttatatgaatgaaatcg

SEQ ID NO: 81606 - DNA, 25 bp, SARS Virus
tatgaatttatgagaatgaaatcga

SEQ ID NO: 81607 - DNA, 25 bp, SARS Virus
atgaatttatgtaaatgaaatcgac

SEQ ID NO: 81608 - DNA, 25 bp, SARS Virus
tgaatttatgtgaatgaaatcgaca

SEQ ID NO: 81609 - DNA, 25 bp, SARS Virus
gaatttatgtgaatgaaatcgacat

SEQ ID NO: 81610 - DNA, 25 bp, SARS Virus
aatttatgtgaaagaaatcgacatg

SEQ ID NO: 81611 - DNA, 25 bp, SARS Virus
atttatgtgaataaaatcgacatgg

SEQ ID NO: 81612 - DNA, 25 bp, SARS Virus
tttatgtgaatgaaatcgacatggg

SEQ ID NO: 81613 - DNA, 25 bp, SARS Virus
ttatgtgaatgaaatcgacatggga

SEQ ID NO: 81614 - DNA, 25 bp, SARS Virus
tatgtgaatgaaatcgacatgggat

SEQ ID NO: 81615 - DNA, 25 bp, SARS Virus
atgtgaatgaaaacgacatgggatg

SEQ ID NO: 81616 - DNA, 25 bp, SARS Virus
tgtgaatgaaatagacatgggatgt

SEQ ID NO: 81617 - DNA, 25 bp, SARS Virus
gtgaatgaaatcaacatgggatgtt

SEQ ID NO: 81618 - DNA, 25 bp, SARS Virus
tgaatgaaatcgacatgggatgttg

SEQ ID NO: 81619 - DNA, 25 bp, SARS Virus
gaatgaaatcgaaatgggatgttgt

SEQ ID NO: 81620 - DNA, 25 bp, SARS Virus
aatgaaatcgacatgggatgttgta

SEQ ID NO: 81621 - DNA, 25 bp, SARS Virus
atgaaatcgacaagggatgttgtac

SEQ ID NO: 81622 - DNA, 25 bp, SARS Virus
tgaaatcgacataggatgttgtact

SEQ ID NO: 81623 - DNA, 25 bp, SARS Virus
gaaatcgacatgagatgttgtactc

SEQ ID NO: 81624 - DNA, 25 bp, SARS Virus
aaatcgacatggaatgttgtactct

SEQ ID NO: 81625 - DNA, 25 bp, SARS Virus
tacctgttgaaccgccagaagtaaa

SEQ ID NO: 81626 - DNA, 25 bp, SARS Virus
acctgttgaacccccagaagtaaat

SEQ ID NO: 81627 - DNA, 25 bp, SARS Virus
cctgttgaaccgccagaagtaaatt

SEQ ID NO: 81628 - DNA, 25 bp, SARS Virus
ctgttgaaccgccagaagtaaatta

SEQ ID NO: 81629 - DNA, 25 bp, SARS Virus
tgttgaaccgcccgaagtaaattac

SEQ ID NO: 81630 - DNA, 25 bp, SARS Virus
gttgaaccgccacaagtaaattact

SEQ ID NO: 81631 - DNA, 25 bp, SARS Virus
ttgaaccgccagcagtaaattacta

SEQ ID NO: 81632 - DNA, 25 bp, SARS Virus
tgaaccgccagacgtaaattactat

SEQ ID NO: 81633 - DNA, 25 bp, SARS Virus
gaaccgccagaactaaattactatc

SEQ ID NO: 81634 - DNA, 25 bp, SARS Virus
aaccgccagaagcaaattactatcc

SEQ ID NO: 81635 - DNA, 25 bp, SARS Virus
accgccagaagtcaattactatccg

SEQ ID NO: 81636 - DNA, 25 bp, SARS Virus
ccgccagaagtacattactatccga

SEQ ID NO: 81637 - DNA, 25 bp, SARS Virus
cgccagaagtaacttactatccgaa

SEQ ID NO: 81638 - DNA, 25 bp, SARS Virus
gccagaagtaaactactatccgaat

SEQ ID NO: 81639 - DNA, 25 bp, SARS Virus
ccagaagtaaatcactatccgaatc

SEQ ID NO: 81640 - DNA, 25 bp, SARS Virus
cagaagtaaattcctatccgaatcg

SEQ ID NO: 81641 - DNA, 25 bp, SARS Virus
agaagtaaattactatccgaatcgg

SEQ ID NO: 81642 - DNA, 25 bp, SARS Virus
gaagtaaattaccatccgaatcggt

SEQ ID NO: 81643 - DNA, 25 bp, SARS Virus
aagtaaattactctccgaatcggtt

SEQ ID NO: 81644 - DNA, 25 bp, SARS Virus
agtaaattactacccgaatcggttc

SEQ ID NO: 81645 - DNA, 25 bp, SARS Virus
gtaaattactatccgaatcggttcg

SEQ ID NO: 81646 - DNA, 25 bp, SARS Virus
taaattactatccgaatcggttcgc

SEQ ID NO: 81647 - DNA, 25 bp, SARS Virus
aaattactatcccaatcggttcgcg

SEQ ID NO: 81648 - DNA, 25 bp, SARS Virus
aattactatccgcatcggttcgcga

SEQ ID NO: 81649 - DNA, 25 bp, SARS Virus
attactatccgactcggttcgcgag

SEQ ID NO: 81650 - DNA, 25 bp, SARS Virus
ttactatccgaaccggttcgcgagt

SEQ ID NO: 81651 - DNA, 25 bp, SARS Virus
tactatccgaatcggttcgcgagtg

SEQ ID NO: 81652 - DNA, 25 bp, SARS Virus
actatccgaatccgttcgcgagtgt

SEQ ID NO: 81653 - DNA, 25 bp, SARS Virus
ctatccgaatcgcttcgcgagtgtt

SEQ ID NO: 81654 - DNA, 25 bp, SARS Virus
tatccgaatcggctcgcgagtgttc

SEQ ID NO: 81655 - DNA, 25 bp, SARS Virus
atccgaatcggtccgcgagtgttct

SEQ ID NO: 81656 - DNA, 25 bp, SARS Virus
tccgaatcggttcgcgagtgttcta

SEQ ID NO: 81657 - DNA, 25 bp, SARS Virus
ccgaatcggttcccgagtgttctaa

SEQ ID NO: 81658 - DNA, 25 bp, SARS Virus
cgaatcggttcgcgagtgttctaag

SEQ ID NO: 81659 - DNA, 25 bp, SARS Virus
gaatcggttcgccagtgttctaagt

SEQ ID NO: 81660 - DNA, 25 bp, SARS Virus
aatcggttcgcgcgtgttctaagtg

SEQ ID NO: 81661 - DNA, 25 bp, SARS Virus
atcggttcgcgactgttctaagtgg

SEQ ID NO: 81662 - DNA, 25 bp, SARS Virus
tcggttcgcgagcgttctaagtggt

SEQ ID NO: 81663 - DNA, 25 bp, SARS Virus
cggttcgcgagtcttctaagtggtg

SEQ ID NO: 81664 - DNA, 25 bp, SARS Virus
ggttcgcgagtgctctaagtggtga

SEQ ID NO: 81665 - DNA, 25 bp, SARS Virus
gttcgcgagtgtcctaagtggtgaa

SEQ ID NO: 81666 - DNA, 25 bp, SARS Virus
ttcgcgagtgttctaagtggtgaat

SEQ ID NO: 81667 - DNA, 25 bp, SARS Virus
tcgcgagtgttccaagtggtgaatt

SEQ ID NO: 81668 - DNA, 25 bp, SARS Virus
cgcgagtgttctcagtggtgaattt

SEQ ID NO: 81669 - DNA, 25 bp, SARS Virus
gcgagtgttctacgtggtgaattta

SEQ ID NO: 81670 - DNA, 25 bp, SARS Virus
cgagtgttctaactggtgaatttaa

SEQ ID NO: 81671 - DNA, 25 bp, SARS Virus
gagtgttctaagcggtgaatttaat

SEQ ID NO: 81672 - DNA, 25 bp, SARS Virus
agtgttctaagtcgtgaatttaatc

SEQ ID NO: 81673 - DNA, 25 bp, SARS Virus
gtgttctaagtgctgaatttaatct

SEQ ID NO: 81674 - DNA, 25 bp, SARS Virus
tgttctaagtggcgaatttaatctc

SEQ ID NO: 81675 - DNA, 25 bp, SARS Virus
gttctaagtggtcaatttaatctcc

SEQ ID NO: 81676 - DNA, 25 bp, SARS Virus
ttctaagtggtgcatttaatctcct

SEQ ID NO: 81677 - DNA, 25 bp, SARS Virus
tctaagtggtgactttaatctccta

SEQ ID NO: 81678 - DNA, 25 bp, SARS Virus
ctaagtggtgaacttaatctcctaa

SEQ ID NO: 81679 - DNA, 25 bp, SARS Virus
taagtggtgaatctaatctcctaaa

SEQ ID NO: 81680 - DNA, 25 bp, SARS Virus
aagtggtgaattcaatctcctaaaa

SEQ ID NO: 81681 - DNA, 25 bp, SARS Virus
agtggtgaatttcatctcctaaaat

SEQ ID NO: 81682 - DNA, 25 bp, SARS Virus
gtggtgaatttactctcctaaaata

SEQ ID NO: 81683 - DNA, 25 bp, SARS Virus
tggtgaatttaacctcctaaaatag

SEQ ID NO: 81684 - DNA, 25 bp, SARS Virus
ggtgaatttaatctcctaaaatagg

SEQ ID NO: 81685 - DNA, 25 bp, SARS Virus
gtgaatttaatcccctaaaataggg

SEQ ID NO: 81686 - DNA, 25 bp, SARS Virus
tgaatttaatctcctaaaataggga

SEQ ID NO: 81687 - DNA, 25 bp, SARS Virus
gaatttaatctcctaaaatagggat

SEQ ID NO: 81688 - DNA, 25 bp, SARS Virus
aatttaatctcccaaaatagggata

SEQ ID NO: 81689 - DNA, 25 bp, SARS Virus
atttaatctcctcaaatagggatac

SEQ ID NO: 81690 - DNA, 25 bp, SARS Virus
tttaatctcctacaatagggatacc

SEQ ID NO: 81691 - DNA, 25 bp, SARS Virus
ttaatctcctaacatagggatacct

SEQ ID NO: 81692 - DNA, 25 bp, SARS Virus
taatctcctaaactagggatacctg

SEQ ID NO: 81693 - DNA, 25 bp, SARS Virus
aatctcctaaaacagggatacctgt

SEQ ID NO: 81694 - DNA, 25 bp, SARS Virus
atctcctaaaatcgggatacctgtc

SEQ ID NO: 81695 - DNA, 25 bp, SARS Virus
tctcctaaaatacggatacctgtcg

SEQ ID NO: 81696 - DNA, 25 bp, SARS Virus
ctcctaaaatagcgatacctgtcgt

SEQ ID NO: 81697 - DNA, 25 bp, SARS Virus
tcctaaaataggcatacctgtcgtg

SEQ ID NO: 81698 - DNA, 25 bp, SARS Virus
cctaaaatagggctacctgtcgtgt

SEQ ID NO: 81699 - DNA, 25 bp, SARS Virus
ctaaaatagggacacctgtcgtgtc

SEQ ID NO: 81700 - DNA, 25 bp, SARS Virus
taaaatagggatccctgtcgtgtca

SEQ ID NO: 81701 - DNA, 25 bp, SARS Virus
aaaatagggatacctgtcgtgtcac

SEQ ID NO: 81702 - DNA, 25 bp, SARS Virus
aaatagggatacctgtcgtgtcact

SEQ ID NO: 81703 - DNA, 25 bp, SARS Virus
aatagggatacccgtcgtgtcactt

SEQ ID NO: 81704 - DNA, 25 bp, SARS Virus
atagggatacctctcgtgtcacttt

SEQ ID NO: 81705 - DNA, 25 bp, SARS Virus
tagggatacctgccgtgtcactttt

SEQ ID NO: 81706 - DNA, 25 bp, SARS Virus
agggatacctgtcgtgtcacttttt

SEQ ID NO: 81707 - DNA, 25 bp, SARS Virus
gggatacctgtcctgtcacttttta

SEQ ID NO: 81708 - DNA, 25 bp, SARS Virus
ggatacctgtcgcgtcactttttaa

SEQ ID NO: 81709 - DNA, 25 bp, SARS Virus
gatacctgtcgtctcactttttaat

SEQ ID NO: 81710 - DNA, 25 bp, SARS Virus
atacctgtcgtgccactttttaatg

SEQ ID NO: 81711 - DNA, 25 bp, SARS Virus
tacctgtcgtgtcactttttaatga

SEQ ID NO: 81712 - DNA, 25 bp, SARS Virus
acctgtcgtgtccctttttaatgaa

SEQ ID NO: 81713 - DNA, 25 bp, SARS Virus
cctgtcgtgtcactttttaatgaag

SEQ ID NO: 81714 - DNA, 25 bp, SARS Virus
ctgtcgtgtcaccttttaatgaagt

SEQ ID NO: 81715 - DNA, 25 bp, SARS Virus
tgtcgtgtcactctttaatgaagta

SEQ ID NO: 81716 - DNA, 25 bp, SARS Virus
gtcgtgtcacttcttaatgaagtat

SEQ ID NO: 81717 - DNA, 25 bp, SARS Virus
tcgtgtcactttctaatgaagtatt

SEQ ID NO: 81718 - DNA, 25 bp, SARS Virus
cgtgtcacttttcaatgaagtattg

SEQ ID NO: 81719 - DNA, 25 bp, SARS Virus
gtgtcactttttcatgaagtattgt

SEQ ID NO: 81720 - DNA, 25 bp, SARS Virus
tgtcactttttactgaagtattgtc

SEQ ID NO: 81721 - DNA, 25 bp, SARS Virus
gtcactttttaacgaagtattgtct

SEQ ID NO: 81722 - DNA, 25 bp, SARS Virus
tcactttttaatcaagtattgtcta

SEQ ID NO: 81723 - DNA, 25 bp, SARS Virus
cactttttaatgcagtattgtctac

SEQ ID NO: 81724 - DNA, 25 bp, SARS Virus
actttttaatgacgtattgtctacg

SEQ ID NO: 81725 - DNA, 25 bp, SARS Virus
ctttttaatgaactattgtctacgc

SEQ ID NO: 81726 - DNA, 25 bp, SARS Virus
tttttaatgaagcattgtctacgcg

SEQ ID NO: 81727 - DNA, 25 bp, SARS Virus
ttttaatgaagtcttgtctacgcgt

SEQ ID NO: 81728 - DNA, 25 bp, SARS Virus
tttaatgaagtactgtctacgcgtt

SEQ ID NO: 81729 - DNA, 25 bp, SARS Virus
ttaatgaagtatcgtctacgcgttt

SEQ ID NO: 81730 - DNA, 25 bp, SARS Virus
taatgaagtattctctacgcgtttg

SEQ ID NO: 81731 - DNA, 25 bp, SARS Virus
aatgaagtattgcctacgcgtttgt

SEQ ID NO: 81732 - DNA, 25 bp, SARS Virus
atgaagtattgtctacgcgtttgtc

SEQ ID NO: 81733 - DNA, 25 bp, SARS Virus
tgaagtattgtccacgcgtttgtcc

SEQ ID NO: 81734 - DNA, 25 bp, SARS Virus
gaagtattgtctccgcgtttgtcca

SEQ ID NO: 81735 - DNA, 25 bp, SARS Virus
aagtattgtctacgcgtttgtccaa

SEQ ID NO: 81736 - DNA, 25 bp, SARS Virus
agtattgtctacccgtttgtccaag

SEQ ID NO: 81737 - DNA, 25 bp, SARS Virus
gtattgtctacgcgtttgtccaagt

SEQ ID NO: 81738 - DNA, 25 bp, SARS Virus
tattgtctacgcctttgtccaagta

SEQ ID NO: 81739 - DNA, 25 bp, SARS Virus
attgtctacgcgcttgtccaagtag

SEQ ID NO: 81740 - DNA, 25 bp, SARS Virus
ttgtctacgcgtctgtccaagtagt

SEQ ID NO: 81741 - DNA, 25 bp, SARS Virus
tgtctacgcgttcgtccaagtagtt

SEQ ID NO: 81742 - DNA, 25 bp, SARS Virus
gtctacgcgtttctccaagtagttt

SEQ ID NO: 81743 - DNA, 25 bp, SARS Virus
tctacgcgtttgcccaagtagtttt

SEQ ID NO: 81744 - DNA, 25 bp, SARS Virus
ctacgcgtttgtccaagtagtttta

SEQ ID NO: 81745 - DNA, 25 bp, SARS Virus
tacgcgtttgtccaagtagttttac

SEQ ID NO: 81746 - DNA, 25 bp, SARS Virus
acgcgtttgtcccagtagttttaca

SEQ ID NO: 81747 - DNA, 25 bp, SARS Virus
cgcgtttgtccacgtagttttacac

SEQ ID NO: 81748 - DNA, 25 bp, SARS Virus
gcgtttgtccaactagttttacaca

SEQ ID NO: 81749 - DNA, 25 bp, SARS Virus
cgtttgtccaagcagttttacacac

SEQ ID NO: 81750 - DNA, 25 bp, SARS Virus
gtttgtccaagtcgttttacacaca

SEQ ID NO: 81751 - DNA, 25 bp, SARS Virus
tttgtccaagtacttttacacacac

SEQ ID NO: 81752 - DNA, 25 bp, SARS Virus
ttgtccaagtagctttacacacaca

SEQ ID NO: 81753 - DNA, 25 bp, SARS Virus
tgtccaagtagtcttacacacacaa

SEQ ID NO: 81754 - DNA, 25 bp, SARS Virus
gtccaagtagttctacacacacaag

SEQ ID NO: 81755 - DNA, 25 bp, SARS Virus
tccaagtagtttcacacacacaaga

SEQ ID NO: 81756 - DNA, 25 bp, SARS Virus
ccaagtagttttccacacacaagac

SEQ ID NO: 81757 - DNA, 25 bp, SARS Virus
caagtagttttacacacacaagaca

SEQ ID NO: 81758 - DNA, 25 bp, SARS Virus
aagtagttttacccacacaagacac

SEQ ID NO: 81759 - DNA, 25 bp, SARS Virus
agtagttttacacacacaagacact

SEQ ID NO: 81760 - DNA, 25 bp, SARS Virus
gtagttttacacccacaagacacta

SEQ ID NO: 81761 - DNA, 25 bp, SARS Virus
tagttttacacacacaagacactaa

SEQ ID NO: 81762 - DNA, 25 bp, SARS Virus
agttttacacacccaagacactaac

SEQ ID NO: 81763 - DNA, 25 bp, SARS Virus
gttttacacacacaagacactaact

SEQ ID NO: 81764 - DNA, 25 bp, SARS Virus
ttttacacacaccagacactaacta

SEQ ID NO: 81765 - DNA, 25 bp, SARS Virus
tttacacacacacgacactaactag

SEQ ID NO: 81766 - DNA, 25 bp, SARS Virus
ttacacacacaacacactaactaga

SEQ ID NO: 81767 - DNA, 25 bp, SARS Virus
tacacacacaagccactaactagaa

SEQ ID NO: 81768 - DNA, 25 bp, SARS Virus
acacacacaagacactaactagaaa

SEQ ID NO: 81769 - DNA, 25 bp, SARS Virus
cacacacaagaccctaactagaaaa

SEQ ID NO: 81770 - DNA, 25 bp, SARS Virus
acacacaagacactaactagaaaat

SEQ ID NO: 81771 - DNA, 25 bp, SARS Virus
cacacaagacaccaactagaaaatg

SEQ ID NO: 81772 - DNA, 25 bp, SARS Virus
acacaagacactcactagaaaatga

SEQ ID NO: 81773 - DNA, 25 bp, SARS Virus
cacaagacactacctagaaaatgaa

SEQ ID NO: 81774 - DNA, 25 bp, SARS Virus
acaagacactaactagaaaatgaac

SEQ ID NO: 81775 - DNA, 25 bp, SARS Virus
caagacactaaccagaaaatgaact

SEQ ID NO: 81776 - DNA, 25 bp, SARS Virus
aagacactaactcgaaaatgaacta

SEQ ID NO: 81777 - DNA, 25 bp, SARS Virus
agacactaactacaaaatgaactac

SEQ ID NO: 81778 - DNA, 25 bp, SARS Virus
gacactaactagcaaatgaactact

SEQ ID NO: 81779 - DNA, 25 bp, SARS Virus
acactaactagacaatgaactactg

SEQ ID NO: 81780 - DNA, 25 bp, SARS Virus
cactaactagaacatgaactactga

SEQ ID NO: 81781 - DNA, 25 bp, SARS Virus
actaactagaaactgaactactgaa

SEQ ID NO: 81782 - DNA, 25 bp, SARS Virus
ctaactagaaaacgaactactgaaa

SEQ ID NO: 81783 - DNA, 25 bp, SARS Virus
taactagaaaatcaactactgaaac

SEQ ID NO: 81784 - DNA, 25 bp, SARS Virus
aactagaaaatgcactactgaaaca

SEQ ID NO: 81785 - DNA, 25 bp, SARS Virus
actagaaaatgacctactgaaacag

SEQ ID NO: 81786 - DNA, 25 bp, SARS Virus
ctagaaaatgaactactgaaacagc

SEQ ID NO: 81787 - DNA, 25 bp, SARS Virus
tagaaaatgaaccactgaaacagct

SEQ ID NO: 81788 - DNA, 25 bp, SARS Virus
agaaaatgaactcctgaaacagctc

SEQ ID NO: 81789 - DNA, 25 bp, SARS Virus
gaaaatgaactactgaaacagctct

SEQ ID NO: 81790 - DNA, 25 bp, SARS Virus
aaaatgaactaccgaaacagctcta

SEQ ID NO: 81791 - DNA, 25 bp, SARS Virus
aaatgaactactcaaacagctctat

SEQ ID NO: 81792 - DNA, 25 bp, SARS Virus
aatgaactactgcaacagctctatt

SEQ ID NO: 81793 - DNA, 25 bp, SARS Virus
atgaactactgacacagctctatta

SEQ ID NO: 81794 - DNA, 25 bp, SARS Virus
tgaactactgaaccagctctattat

SEQ ID NO: 81795 - DNA, 25 bp, SARS Virus
gaactactgaaacagctctattatt

SEQ ID NO: 81796 - DNA, 25 bp, SARS Virus
aactactgaaaccgctctattattt

SEQ ID NO: 81797 - DNA, 25 bp, SARS Virus
actactgaaacacctctattatttc

SEQ ID NO: 81798 - DNA, 25 bp, SARS Virus
ctactgaaacagctctattatttca

SEQ ID NO: 81799 - DNA, 25 bp, SARS Virus
tactgaaacagccctattatttcag

SEQ ID NO: 81800 - DNA, 25 bp, SARS Virus
actgaaacagctctattatttcagt

SEQ ID NO: 81801 - DNA, 25 bp, SARS Virus
ctgaaacagctccattatttcagtg

SEQ ID NO: 81802 - DNA, 25 bp, SARS Virus
tgaaacagctctcttatttcagtgt

SEQ ID NO: 81803 - DNA, 25 bp, SARS Virus
gaaacagctctactatttcagtgtt

SEQ ID NO: 81804 - DNA, 25 bp, SARS Virus
aaacagctctatcatttcagtgttc

SEQ ID NO: 81805 - DNA, 25 bp, SARS Virus
aacagctctattctttcagtgttct

SEQ ID NO: 81806 - DNA, 25 bp, SARS Virus
acagctctattacttcagtgttcta

SEQ ID NO: 81807 - DNA, 25 bp, SARS Virus
cagctctattatctcagtgttctaa

SEQ ID NO: 81808 - DNA, 25 bp, SARS Virus
agctctattattccagtgttctaaa

SEQ ID NO: 81809 - DNA, 25 bp, SARS Virus
gctctattatttcagtgttctaaac

SEQ ID NO: 81810 - DNA, 25 bp, SARS Virus
ctctattatttccgtgttctaaaca

SEQ ID NO: 81811 - DNA, 25 bp, SARS Virus
tctattatttcactgttctaaacag

SEQ ID NO: 81812 - DNA, 25 bp, SARS Virus
ctattatttcagcgttctaaacagt

SEQ ID NO: 81813 - DNA, 25 bp, SARS Virus
tattatttcagtcttctaaacagtc

SEQ ID NO: 81814 - DNA, 25 bp, SARS Virus
attatttcagtgctctaaacagtca

SEQ ID NO: 81815 - DNA, 25 bp, SARS Virus
ttatttcagtgtcctaaacagtcac

SEQ ID NO: 81816 - DNA, 25 bp, SARS Virus
tatttcagtgttctaaacagtcact

SEQ ID NO: 81817 - DNA, 25 bp, SARS Virus
atttcagtgttccaaacagtcacta

SEQ ID NO: 81818 - DNA, 25 bp, SARS Virus
tttcagtgttctcaacagtcactaa

SEQ ID NO: 81819 - DNA, 25 bp, SARS Virus
ttcagtgttctacacagtcactaaa

SEQ ID NO: 81820 - DNA, 25 bp, SARS Virus
tcagtgttctaaccagtcactaaag

SEQ ID NO: 81821 - DNA, 25 bp, SARS Virus
cagtgttctaaacagtcactaaagt

SEQ ID NO: 81822 - DNA, 25 bp, SARS Virus
agtgttctaaaccgtcactaaagtt

SEQ ID NO: 81823 - DNA, 25 bp, SARS Virus
gtgttctaaacactcactaaagttt

SEQ ID NO: 81824 - DNA, 25 bp, SARS Virus
tgttctaaacagccactaaagtttt

SEQ ID NO: 81825 - DNA, 25 bp, SARS Virus
gttctaaacagtcactaaagttttc

SEQ ID NO: 81826 - DNA, 25 bp, SARS Virus
ttctaaacagtccctaaagttttca

SEQ ID NO: 81827 - DNA, 25 bp, SARS Virus
tctaaacagtcactaaagttttcac

SEQ ID NO: 81828 - DNA, 25 bp, SARS Virus
ctaaacagtcaccaaagttttcacc

SEQ ID NO: 81829 - DNA, 25 bp, SARS Virus
taaacagtcactcaagttttcacca

SEQ ID NO: 81830 - DNA, 25 bp, SARS Virus
aaacagtcactacagttttcaccag

SEQ ID NO: 81831 - DNA, 25 bp, SARS Virus
aacagtcactaacgttttcaccagt

SEQ ID NO: 81832 - DNA, 25 bp, SARS Virus
acagtcactaaacttttcaccagtt

SEQ ID NO: 81833 - DNA, 25 bp, SARS Virus
cagtcactaaagctttcaccagttc

SEQ ID NO: 81834 - DNA, 25 bp, SARS Virus
agtcactaaagtcttcaccagttcc

SEQ ID NO: 81835 - DNA, 25 bp, SARS Virus
gtcactaaagttctcaccagttcca

SEQ ID NO: 81836 - DNA, 25 bp, SARS Virus
tcactaaagtttccaccagttccaa

SEQ ID NO: 81837 - DNA, 25 bp, SARS Virus
cactaaagttttcaccagttccaat

SEQ ID NO: 81838 - DNA, 25 bp, SARS Virus
actaaagttttccccagttccaatg

SEQ ID NO: 81839 - DNA, 25 bp, SARS Virus
ctaaagttttcaccagttccaatgt

SEQ ID NO: 81840 - DNA, 25 bp, SARS Virus
taaagttttcaccagttccaatgtt

SEQ ID NO: 81841 - DNA, 25 bp, SARS Virus
aaagttttcacccgttccaatgtta

SEQ ID NO: 81842 - DNA, 25 bp, SARS Virus
aagttttcaccacttccaatgttaa

SEQ ID NO: 81843 - DNA, 25 bp, SARS Virus
agttttcaccagctccaatgttaac

SEQ ID NO: 81844 - DNA, 25 bp, SARS Virus
gttttcaccagtcccaatgttaact

SEQ ID NO: 81845 - DNA, 25 bp, SARS Virus
ttttcaccagttccaatgttaactg

SEQ ID NO: 81846 - DNA, 25 bp, SARS Virus
tttcaccagttccaatgttaactga

SEQ ID NO: 81847 - DNA, 25 bp, SARS Virus
ttcaccagttcccatgttaactgat

SEQ ID NO: 81848 - DNA, 25 bp, SARS Virus
tcaccagttccactgttaactgata

SEQ ID NO: 81849 - DNA, 25 bp, SARS Virus
caccagttccaacgttaactgatac

SEQ ID NO: 81850 - DNA, 25 bp, SARS Virus
accagttccaatcttaactgatacg

SEQ ID NO: 81851 - DNA, 25 bp, SARS Virus
ccagttccaatgctaactgatacga

SEQ ID NO: 81852 - DNA, 25 bp, SARS Virus
cagttccaatgtcaactgatacgac

SEQ ID NO: 81853 - DNA, 25 bp, SARS Virus
agttccaatgttcactgatacgact

SEQ ID NO: 81854 - DNA, 25 bp, SARS Virus
gttccaatgttacctgatacgactt

SEQ ID NO: 81855 - DNA, 25 bp, SARS Virus
ttccaatgttaactgatacgacttt

SEQ ID NO: 81856 - DNA, 25 bp, SARS Virus
tccaatgttaaccgatacgacttta

SEQ ID NO: 81857 - DNA, 25 bp, SARS Virus
ccaatgttaactcatacgactttaa

SEQ ID NO: 81858 - DNA, 25 bp, SARS Virus
caatgttaactgctacgactttaaa

SEQ ID NO: 81859 - DNA, 25 bp, SARS Virus
aatgttaactgacacgactttaaag

SEQ ID NO: 81860 - DNA, 25 bp, SARS Virus
atgttaactgatccgactttaaagt

SEQ ID NO: 81861 - DNA, 25 bp, SARS Virus
tgttaactgatacgactttaaagta

SEQ ID NO: 81862 - DNA, 25 bp, SARS Virus
gttaactgataccactttaaagtaa

SEQ ID NO: 81863 - DNA, 25 bp, SARS Virus
ttaactgatacgcctttaaagtaag

SEQ ID NO: 81864 - DNA, 25 bp, SARS Virus
taactgatacgactttaaagtaagt

SEQ ID NO: 81865 - DNA, 25 bp, SARS Virus
aactgatacgaccttaaagtaagta

SEQ ID NO: 81866 - DNA, 25 bp, SARS Virus
actgatacgactctaaagtaagtac

SEQ ID NO: 81867 - DNA, 25 bp, SARS Virus
ctgatacgacttcaaagtaagtacg

SEQ ID NO: 81868 - DNA, 25 bp, SARS Virus
tgatacgactttcaagtaagtacga

SEQ ID NO: 81869 - DNA, 25 bp, SARS Virus
gatacgactttacagtaagtacgaa

SEQ ID NO: 81870 - DNA, 25 bp, SARS Virus
atacgactttaacgtaagtacgaaa

SEQ ID NO: 81871 - DNA, 25 bp, SARS Virus
tacgactttaaactaagtacgaaac

SEQ ID NO: 81872 - DNA, 25 bp, SARS Virus
acgactttaaagcaagtacgaaacc

SEQ ID NO: 81873 - DNA, 25 bp, SARS Virus
cgactttaaagtcagtacgaaacca

SEQ ID NO: 81874 - DNA, 25 bp, SARS Virus
gactttaaagtacgtacgaaaccac

SEQ ID NO: 81875 - DNA, 25 bp, SARS Virus
actttaaagtaactacgaaaccaca

SEQ ID NO: 81876 - DNA, 25 bp, SARS Virus
ctttaaagtaagcacgaaaccacat

SEQ ID NO: 81877 - DNA, 25 bp, SARS Virus
tttaaagtaagtccgaaaccacatt

SEQ ID NO: 81878 - DNA, 25 bp, SARS Virus
ttaaagtaagtacgaaaccacattc

SEQ ID NO: 81879 - DNA, 25 bp, SARS Virus
taaagtaagtaccaaaccacattcc

SEQ ID NO: 81880 - DNA, 25 bp, SARS Virus
aaagtaagtacgcaaccacattcct

SEQ ID NO: 81881 - DNA, 25 bp, SARS Virus
aagtaagtacgacaccacattccta

SEQ ID NO: 81882 - DNA, 25 bp, SARS Virus
agtaagtacgaacccacattcctac

SEQ ID NO: 81883 - DNA, 25 bp, SARS Virus
gtaagtacgaaaccacattcctacc

SEQ ID NO: 81884 - DNA, 25 bp, SARS Virus
taagtacgaaaccacattcctacct

SEQ ID NO: 81885 - DNA, 25 bp, SARS Virus
aagtacgaaaccccattcctacctg

SEQ ID NO: 81886 - DNA, 25 bp, SARS Virus
agtacgaaaccacattcctacctgt

SEQ ID NO: 81887 - DNA, 25 bp, SARS Virus
gtacgaaaccaccttcctacctgta

SEQ ID NO: 81888 - DNA, 25 bp, SARS Virus
tacgaaaccacactcctacctgtac

SEQ ID NO: 81889 - DNA, 25 bp, SARS Virus
acgaaaccacatccctacctgtaca

SEQ ID NO: 81890 - DNA, 25 bp, SARS Virus
cgaaaccacattcctacctgtacaa

SEQ ID NO: 81891 - DNA, 25 bp, SARS Virus
gaaaccacattcctacctgtacaac

SEQ ID NO: 81892 - DNA, 25 bp, SARS Virus
aaaccacattcccacctgtacaact

SEQ ID NO: 81893 - DNA, 25 bp, SARS Virus
aaccacattcctccctgtacaactt

SEQ ID NO: 81894 - DNA, 25 bp, SARS Virus
accacattcctacctgtacaacttt

SEQ ID NO: 81895 - DNA, 25 bp, SARS Virus
ccacattcctacctgtacaactttg

SEQ ID NO: 81896 - DNA, 25 bp, SARS Virus
cacattcctacccgtacaactttgg

SEQ ID NO: 81897 - DNA, 25 bp, SARS Virus
acattcctacctctacaactttgga

SEQ ID NO: 81898 - DNA, 25 bp, SARS Virus
cattcctacctgcacaactttggaa

SEQ ID NO: 81899 - DNA, 25 bp, SARS Virus
attcctacctgtccaactttggaag

SEQ ID NO: 81900 - DNA, 25 bp, SARS Virus
ttcctacctgtacaactttggaaga

SEQ ID NO: 81901 - DNA, 25 bp, SARS Virus
tcctacctgtaccactttggaagat

SEQ ID NO: 81902 - DNA, 25 bp, SARS Virus
cctacctgtacacctttggaagatg

SEQ ID NO: 81903 - DNA, 25 bp, SARS Virus
ctacctgtacaactttggaagatgg

SEQ ID NO: 81904 - DNA, 25 bp, SARS Virus
tacctgtacaaccttggaagatggg

SEQ ID NO: 81905 - DNA, 25 bp, SARS Virus
acctgtacaactctggaagatgggt

SEQ ID NO: 81906 - DNA, 25 bp, SARS Virus
cctgtacaacttcggaagatgggtt

SEQ ID NO: 81907 - DNA, 25 bp, SARS Virus
ctgtacaactttcgaagatgggttt

SEQ ID NO: 81908 - DNA, 25 bp, SARS Virus
tgtacaactttgcaagatgggtttt

SEQ ID NO: 81909 - DNA, 25 bp, SARS Virus
gtacaactttggcagatgggttttg

SEQ ID NO: 81910 - DNA, 25 bp, SARS Virus
tacaactttggacgatgggttttga

SEQ ID NO: 81911 - DNA, 25 bp, SARS Virus
acaactttggaacatgggttttgat

SEQ ID NO: 81912 - DNA, 25 bp, SARS Virus
caactttggaagctgggttttgatg

SEQ ID NO: 81913 - DNA, 25 bp, SARS Virus
aactttggaagacgggttttgatgt

SEQ ID NO: 81914 - DNA, 25 bp, SARS Virus
actttggaagatcggttttgatgtt

SEQ ID NO: 81915 - DNA, 25 bp, SARS Virus
ctttggaagatgcgttttgatgttc

SEQ ID NO: 81916 - DNA, 25 bp, SARS Virus
tttggaagatggcttttgatgttcg

SEQ ID NO: 81917 - DNA, 25 bp, SARS Virus
ttggaagatgggctttgatgttcgt

SEQ ID NO: 81918 - DNA, 25 bp, SARS Virus
tggaagatgggtcttgatgttcgtt

SEQ ID NO: 81919 - DNA, 25 bp, SARS Virus
ggaagatgggttctgatgttcgttc

SEQ ID NO: 81920 - DNA, 25 bp, SARS Virus
gaagatgggtttcgatgttcgttca

SEQ ID NO: 81921 - DNA, 25 bp, SARS Virus
aagatgggttttcatgttcgttcag

SEQ ID NO: 81922 - DNA, 25 bp, SARS Virus
agatgggttttgctgttcgttcagt

SEQ ID NO: 81923 - DNA, 25 bp, SARS Virus
gatgggttttgacgttcgttcagtt

SEQ ID NO: 81924 - DNA, 25 bp, SARS Virus
atgggttttgatcttcgttcagttc

SEQ ID NO: 81925 - DNA, 25 bp, SARS Virus
tgggttttgatgctcgttcagttcg

SEQ ID NO: 81926 - DNA, 25 bp, SARS Virus
gggttttgatgtccgttcagttcgc

SEQ ID NO: 81927 - DNA, 25 bp, SARS Virus
ggttttgatgttcgttcagttcgca

SEQ ID NO: 81928 - DNA, 25 bp, SARS Virus
gttttgatgttccttcagttcgcac

SEQ ID NO: 81929 - DNA, 25 bp, SARS Virus
ttttgatgttcgctcagttcgcacc

SEQ ID NO: 81930 - DNA, 25 bp, SARS Virus
tttgatgttcgtccagttcgcaccg

SEQ ID NO: 81931 - DNA, 25 bp, SARS Virus
ttgatgttcgttcagttcgcaccgt

SEQ ID NO: 81932 - DNA, 25 bp, SARS Virus
tgatgttcgttccgttcgcaccgtt

SEQ ID NO: 81933 - DNA, 25 bp, SARS Virus
gatgttcgttcacttcgcaccgttg

SEQ ID NO: 81934 - DNA, 25 bp, SARS Virus
atgttcgttcagctcgcaccgttgg

SEQ ID NO: 81935 - DNA, 25 bp, SARS Virus
tgttcgttcagtccgcaccgttggt

SEQ ID NO: 81936 - DNA, 25 bp, SARS Virus
gttcgttcagttcgcaccgttggtc

SEQ ID NO: 81937 - DNA, 25 bp, SARS Virus
ttcgttcagttcccaccgttggtcc

SEQ ID NO: 81938 - DNA, 25 bp, SARS Virus
tcgttcagttcgcaccgttggtcca

SEQ ID NO: 81939 - DNA, 25 bp, SARS Virus
cgttcagttcgccccgttggtccac

SEQ ID NO: 81940 - DNA, 25 bp, SARS Virus
gttcagttcgcaccgttggtccaca

SEQ ID NO: 81941 - DNA, 25 bp, SARS Virus
ttcagttcgcaccgttggtccacaa

SEQ ID NO: 81942 - DNA, 25 bp, SARS Virus
tcagttcgcacccttggtccacaac

SEQ ID NO: 81943 - DNA, 25 bp, SARS Virus
cagttcgcaccgctggtccacaacg

SEQ ID NO: 81944 - DNA, 25 bp, SARS Virus
agttcgcaccgtcggtccacaacgc

SEQ ID NO: 81945 - DNA, 25 bp, SARS Virus
gttcgcaccgttcgtccacaacgct

SEQ ID NO: 81946 - DNA, 25 bp, SARS Virus
ttcgcaccgttgctccacaacgcta

SEQ ID NO: 81947 - DNA, 25 bp, SARS Virus
tcgcaccgttggcccacaacgctac

SEQ ID NO: 81948 - DNA, 25 bp, SARS Virus
cgcaccgttggtccacaacgctacg

SEQ ID NO: 81949 - DNA, 25 bp, SARS Virus
gcaccgttggtccacaacgctacgg

SEQ ID NO: 81950 - DNA, 25 bp, SARS Virus
caccgttggtccccaacgctacgga

SEQ ID NO: 81951 - DNA, 25 bp, SARS Virus
accgttggtccacaacgctacggat

SEQ ID NO: 81952 - DNA, 25 bp, SARS Virus
ccgttggtccaccacgctacggatt

SEQ ID NO: 81953 - DNA, 25 bp, SARS Virus
cgttggtccacaccgctacggattg

SEQ ID NO: 81954 - DNA, 25 bp, SARS Virus
gttggtccacaacgctacggattga

SEQ ID NO: 81955 - DNA, 25 bp, SARS Virus
ttggtccacaaccctacggattgaa

SEQ ID NO: 81956 - DNA, 25 bp, SARS Virus
tggtccacaacgctacggattgaac

SEQ ID NO: 81957 - DNA, 25 bp, SARS Virus
ggtccacaacgccacggattgaaca

SEQ ID NO: 81958 - DNA, 25 bp, SARS Virus
gtccacaacgctccggattgaacat

SEQ ID NO: 81959 - DNA, 25 bp, SARS Virus
tccacaacgctacggattgaacatg

SEQ ID NO: 81960 - DNA, 25 bp, SARS Virus
ccacaacgctaccgattgaacatgt

SEQ ID NO: 81961 - DNA, 25 bp, SARS Virus
cacaacgctacgcattgaacatgtt

SEQ ID NO: 81962 - DNA, 25 bp, SARS Virus
acaacgctacggcttgaacatgttc

SEQ ID NO: 81963 - DNA, 25 bp, SARS Virus
caacgctacggactgaacatgttct

SEQ ID NO: 81964 - DNA, 25 bp, SARS Virus
aacgctacggatcgaacatgttcta

SEQ ID NO: 81965 - DNA, 25 bp, SARS Virus
acgctacggattcaacatgttctac

SEQ ID NO: 81966 - DNA, 25 bp, SARS Virus
cgctacggattgcacatgttctacg

SEQ ID NO: 81967 - DNA, 25 bp, SARS Virus
gctacggattgaccatgttctacgt

SEQ ID NO: 81968 - DNA, 25 bp, SARS Virus
ctacggattgaacatgttctacgtt

SEQ ID NO: 81969 - DNA, 25 bp, SARS Virus
tacggattgaacctgttctacgttt

SEQ ID NO: 81970 - DNA, 25 bp, SARS Virus
acggattgaacacgttctacgtttc

SEQ ID NO: 81971 - DNA, 25 bp, SARS Virus
cggattgaacatcttctacgtttct

SEQ ID NO: 81972 - DNA, 25 bp, SARS Virus
ggattgaacatgctctacgtttctt

SEQ ID NO: 81973 - DNA, 25 bp, SARS Virus
gattgaacatgtcctacgtttctta

SEQ ID NO: 81974 - DNA, 25 bp, SARS Virus
attgaacatgttctacgtttcttac

SEQ ID NO: 81975 - DNA, 25 bp, SARS Virus
ttgaacatgttccacgtttcttacg

SEQ ID NO: 81976 - DNA, 25 bp, SARS Virus
tgaacatgttctccgtttcttacga

SEQ ID NO: 81977 - DNA, 25 bp, SARS Virus
gaacatgttctacgtttcttacgaa

SEQ ID NO: 81978 - DNA, 25 bp, SARS Virus
aacatgttctacctttcttacgaag

SEQ ID NO: 81979 - DNA, 25 bp, SARS Virus
acatgttctacgcttcttacgaaga

SEQ ID NO: 81980 - DNA, 25 bp, SARS Virus
catgttctacgtctcttacgaagaa

SEQ ID NO: 81981 - DNA, 25 bp, SARS Virus
atgttctacgttccttacgaagaac

SEQ ID NO: 81982 - DNA, 25 bp, SARS Virus
tgttctacgtttcttacgaagaact

SEQ ID NO: 81983 - DNA, 25 bp, SARS Virus
gttctacgtttcctacgaagaactt

SEQ ID NO: 81984 - DNA, 25 bp, SARS Virus
ttctacgtttctcacgaagaacttt

SEQ ID NO: 81985 - DNA, 25 bp, SARS Virus
tctacgtttcttccgaagaactttt

SEQ ID NO: 81986 - DNA, 25 bp, SARS Virus
ctacgtttcttacgaagaacttttc

SEQ ID NO: 81987 - DNA, 25 bp, SARS Virus
tacgtttcttaccaagaacttttca

SEQ ID NO: 81988 - DNA, 25 bp, SARS Virus
acgtttcttacgcagaacttttcac

SEQ ID NO: 81989 - DNA, 25 bp, SARS Virus
cgtttcttacgacgaacttttcaca

SEQ ID NO: 81990 - DNA, 25 bp, SARS Virus
gtttcttacgaacaacttttcacac

SEQ ID NO: 81991 - DNA, 25 bp, SARS Virus
tttcttacgaagcacttttcacact

SEQ ID NO: 81992 - DNA, 25 bp, SARS Virus
ttcttacgaagaccttttcacactg

SEQ ID NO: 81993 - DNA, 25 bp, SARS Virus
tcttacgaagaacttttcacactgg

SEQ ID NO: 81994 - DNA, 25 bp, SARS Virus
cttacgaagaacctttcacactgga

SEQ ID NO: 81995 - DNA, 25 bp, SARS Virus
ttacgaagaactcttcacactggaa

SEQ ID NO: 81996 - DNA, 25 bp, SARS Virus
tacgaagaacttctcacactggaag

SEQ ID NO: 81997 - DNA, 25 bp, SARS Virus
acgaagaactttccacactggaagt

SEQ ID NO: 81998 - DNA, 25 bp, SARS Virus
cgaagaacttttcacactggaagtc

SEQ ID NO: 81999 - DNA, 25 bp, SARS Virus
gaagaacttttcccactggaagtct

SEQ ID NO: 82000 - DNA, 25 bp, SARS Virus
aagaacttttcacactggaagtctt

SEQ ID NO: 82001 - DNA, 25 bp, SARS Virus
agaacttttcaccctggaagtctta

SEQ ID NO: 82002 - DNA, 25 bp, SARS Virus
gaacttttcacactggaagtcttaa

SEQ ID NO: 82003 - DNA, 25 bp, SARS Virus
aacttttcacaccggaagtcttaat

SEQ ID NO: 82004 - DNA, 25 bp, SARS Virus
acttttcacactcgaagtcttaata

SEQ ID NO: 82005 - DNA, 25 bp, SARS Virus
cttttcacactgcaagtcttaatac

SEQ ID NO: 82006 - DNA, 25 bp, SARS Virus
ttttcacactggcagtcttaatacc

SEQ ID NO: 82007 - DNA, 25 bp, SARS Virus
tttcacactggacgtcttaatacca

SEQ ID NO: 82008 - DNA, 25 bp, SARS Virus
ttcacactggaactcttaataccac

SEQ ID NO: 82009 - DNA, 25 bp, SARS Virus
tcacactggaagccttaataccact

SEQ ID NO: 82010 - DNA, 25 bp, SARS Virus
cacactggaagtcttaataccactt

SEQ ID NO: 82011 - DNA, 25 bp, SARS Virus
acactggaagtcctaataccacttt

SEQ ID NO: 82012 - DNA, 25 bp, SARS Virus
cactggaagtctcaataccactttt

SEQ ID NO: 82013 - DNA, 25 bp, SARS Virus
actggaagtcttcataccactttta

SEQ ID NO: 82014 - DNA, 25 bp, SARS Virus
ctggaagtcttactaccacttttac

SEQ ID NO: 82015 - DNA, 25 bp, SARS Virus
tggaagtcttaacaccacttttacg

SEQ ID NO: 82016 - DNA, 25 bp, SARS Virus
ggaagtcttaatcccacttttacga

SEQ ID NO: 82017 - DNA, 25 bp, SARS Virus
gaagtcttaataccacttttacgac

SEQ ID NO: 82018 - DNA, 25 bp, SARS Virus
aagtcttaataccacttttacgaca

SEQ ID NO: 82019 - DNA, 25 bp, SARS Virus
agtcttaataccccttttacgacaa

SEQ ID NO: 82020 - DNA, 25 bp, SARS Virus
gtcttaataccacttttacgacaat

SEQ ID NO: 82021 - DNA, 25 bp, SARS Virus
tcttaataccacctttacgacaata

SEQ ID NO: 82022 - DNA, 25 bp, SARS Virus
cttaataccactcttacgacaatat

SEQ ID NO: 82023 - DNA, 25 bp, SARS Virus
ttaataccacttctacgacaatatg

SEQ ID NO: 82024 - DNA, 25 bp, SARS Virus
taataccactttcacgacaatatgg

SEQ ID NO: 82025 - DNA, 25 bp, SARS Virus
aataccacttttccgacaatatggt

SEQ ID NO: 82026 - DNA, 25 bp, SARS Virus
ataccacttttacgacaatatggtt

SEQ ID NO: 82027 - DNA, 25 bp, SARS Virus
taccacttttaccacaatatggttt

SEQ ID NO: 82028 - DNA, 25 bp, SARS Virus
accacttttacgccaatatggtttt

SEQ ID NO: 82029 - DNA, 25 bp, SARS Virus
ccacttttacgacaatatggttttc

SEQ ID NO: 82030 - DNA, 25 bp, SARS Virus
cacttttacgaccatatggttttcc

SEQ ID NO: 82031 - DNA, 25 bp, SARS Virus
acttttacgacactatggttttcct

SEQ ID NO: 82032 - DNA, 25 bp, SARS Virus
cttttacgacaacatggttttcctt

SEQ ID NO: 82033 - DNA, 25 bp, SARS Virus
ttttacgacaatctggttttcctta

SEQ ID NO: 82034 - DNA, 25 bp, SARS Virus
tttacgacaatacggttttccttat

SEQ ID NO: 82035 - DNA, 25 bp, SARS Virus
ttacgacaatatcgttttccttatt

SEQ ID NO: 82036 - DNA, 25 bp, SARS Virus
tacgacaatatgcttttccttatta

SEQ ID NO: 82037 - DNA, 25 bp, SARS Virus
acgacaatatggctttccttattac

SEQ ID NO: 82038 - DNA, 25 bp, SARS Virus
cgacaatatggtcttccttattact

SEQ ID NO: 82039 - DNA, 25 bp, SARS Virus
gacaatatggttctccttattacta

SEQ ID NO: 82040 - DNA, 25 bp, SARS Virus
acaatatggtttcccttattactac

SEQ ID NO: 82041 - DNA, 25 bp, SARS Virus
caatatggttttccttattactact

SEQ ID NO: 82042 - DNA, 25 bp, SARS Virus
aatatggttttccttattactactt

SEQ ID NO: 82043 - DNA, 25 bp, SARS Virus
atatggttttccctattactactta

SEQ ID NO: 82044 - DNA, 25 bp, SARS Virus
tatggttttcctcattactacttac

SEQ ID NO: 82045 - DNA, 25 bp, SARS Virus
atggttttccttcttactacttaca

SEQ ID NO: 82046 - DNA, 25 bp, SARS Virus
tggttttccttactactacttacag

SEQ ID NO: 82047 - DNA, 25 bp, SARS Virus
ggttttccttatcactacttacagc

SEQ ID NO: 82048 - DNA, 25 bp, SARS Virus
gttttccttattcctacttacagcg

SEQ ID NO: 82049 - DNA, 25 bp, SARS Virus
ttttccttattactacttacagcgt

SEQ ID NO: 82050 - DNA, 25 bp, SARS Virus
tttccttattaccacttacagcgtt

SEQ ID NO: 82051 - DNA, 25 bp, SARS Virus
ttccttattactccttacagcgttt

SEQ ID NO: 82052 - DNA, 25 bp, SARS Virus
tccttattactacttacagcgtttc

SEQ ID NO: 82053 - DNA, 25 bp, SARS Virus
ccttattactacctacagcgtttca

SEQ ID NO: 82054 - DNA, 25 bp, SARS Virus
cttattactactcacagcgtttcat

SEQ ID NO: 82055 - DNA, 25 bp, SARS Virus
ttattactacttccagcgtttcata

SEQ ID NO: 82056 - DNA, 25 bp, SARS Virus
tattactacttacagcgtttcatat

SEQ ID NO: 82057 - DNA, 25 bp, SARS Virus
attactacttaccgcgtttcatatg

SEQ ID NO: 82058 - DNA, 25 bp, SARS Virus
ttactacttacaccgtttcatatga

SEQ ID NO: 82059 - DNA, 25 bp, SARS Virus
tactacttacagcgtttcatatgag

SEQ ID NO: 82060 - DNA, 25 bp, SARS Virus
actacttacagcctttcatatgagt

SEQ ID NO: 82061 - DNA, 25 bp, SARS Virus
ctacttacagcgcttcatatgagtt

SEQ ID NO: 82062 - DNA, 25 bp, SARS Virus
tacttacagcgtctcatatgagttg

SEQ ID NO: 82063 - DNA, 25 bp, SARS Virus
acttacagcgttccatatgagttga

SEQ ID NO: 82064 - DNA, 25 bp, SARS Virus
cttacagcgtttcatatgagttgac

SEQ ID NO: 82065 - DNA, 25 bp, SARS Virus
ttacagcgtttcctatgagttgaca

SEQ ID NO: 82066 - DNA, 25 bp, SARS Virus
tacagcgtttcacatgagttgacac

SEQ ID NO: 82067 - DNA, 25 bp, SARS Virus
acagcgtttcatctgagttgacaca

SEQ ID NO: 82068 - DNA, 25 bp, SARS Virus
cagcgtttcatacgagttgacacag

SEQ ID NO: 82069 - DNA, 25 bp, SARS Virus
agcgtttcatatcagttgacacagt

SEQ ID NO: 82070 - DNA, 25 bp, SARS Virus
gcgtttcatatgcgttgacacagtt

SEQ ID NO: 82071 - DNA, 25 bp, SARS Virus
cgtttcatatgacttgacacagtta

SEQ ID NO: 82072 - DNA, 25 bp, SARS Virus
gtttcatatgagctgacacagttat

SEQ ID NO: 82073 - DNA, 25 bp, SARS Virus
tttcatatgagtcgacacagttatg

SEQ ID NO: 82074 - DNA, 25 bp, SARS Virus
ttcatatgagttcacacagttatga

SEQ ID NO: 82075 - DNA, 25 bp, SARS Virus
tcatatgagttgccacagttatgaa

SEQ ID NO: 82076 - DNA, 25 bp, SARS Virus
catatgagttgacacagttatgaat

SEQ ID NO: 82077 - DNA, 25 bp, SARS Virus
atatgagttgacccagttatgaatt

SEQ ID NO: 82078 - DNA, 25 bp, SARS Virus
tatgagttgacacagttatgaattt

SEQ ID NO: 82079 - DNA, 25 bp, SARS Virus
atgagttgacaccgttatgaattta

SEQ ID NO: 82080 - DNA, 25 bp, SARS Virus
tgagttgacacacttatgaatttat

SEQ ID NO: 82081 - DNA, 25 bp, SARS Virus
gagttgacacagctatgaatttatg

SEQ ID NO: 82082 - DNA, 25 bp, SARS Virus
agttgacacagtcatgaatttatgt

SEQ ID NO: 82083 - DNA, 25 bp, SARS Virus
gttgacacagttctgaatttatgtg

SEQ ID NO: 82084 - DNA, 25 bp, SARS Virus
ttgacacagttacgaatttatgtga

SEQ ID NO: 82085 - DNA, 25 bp, SARS Virus
tgacacagttatcaatttatgtgaa

SEQ ID NO: 82086 - DNA, 25 bp, SARS Virus
gacacagttatgcatttatgtgaat

SEQ ID NO: 82087 - DNA, 25 bp, SARS Virus
acacagttatgactttatgtgaatg

SEQ ID NO: 82088 - DNA, 25 bp, SARS Virus
cacagttatgaacttatgtgaatga

SEQ ID NO: 82089 - DNA, 25 bp, SARS Virus
acagttatgaatctatgtgaatgaa

SEQ ID NO: 82090 - DNA, 25 bp, SARS Virus
cagttatgaattcatgtgaatgaaa

SEQ ID NO: 82091 - DNA, 25 bp, SARS Virus
agttatgaatttctgtgaatgaaat

SEQ ID NO: 82092 - DNA, 25 bp, SARS Virus
gttatgaatttacgtgaatgaaatc

SEQ ID NO: 82093 - DNA, 25 bp, SARS Virus
ttatgaatttatctgaatgaaatcg

SEQ ID NO: 82094 - DNA, 25 bp, SARS Virus
tatgaatttatgcgaatgaaatcga

SEQ ID NO: 82095 - DNA, 25 bp, SARS Virus
atgaatttatgtcaatgaaatcgac

SEQ ID NO: 82096 - DNA, 25 bp, SARS Virus
tgaatttatgtgcatgaaatcgaca

SEQ ID NO: 82097 - DNA, 25 bp, SARS Virus
gaatttatgtgactgaaatcgacat

SEQ ID NO: 82098 - DNA, 25 bp, SARS Virus
aatttatgtgaacgaaatcgacatg

SEQ ID NO: 82099 - DNA, 25 bp, SARS Virus
atttatgtgaatcaaatcgacatgg

SEQ ID NO: 82100 - DNA, 25 bp, SARS Virus
tttatgtgaatgcaatcgacatggg

SEQ ID NO: 82101 - DNA, 25 bp, SARS Virus
ttatgtgaatgacatcgacatggga

SEQ ID NO: 82102 - DNA, 25 bp, SARS Virus
tatgtgaatgaactcgacatgggat

SEQ ID NO: 82103 - DNA, 25 bp, SARS Virus
atgtgaatgaaaccgacatgggatg

SEQ ID NO: 82104 - DNA, 25 bp, SARS Virus
tgtgaatgaaatcgacatgggatgt

SEQ ID NO: 82105 - DNA, 25 bp, SARS Virus
gtgaatgaaatccacatgggatgtt

SEQ ID NO: 82106 - DNA, 25 bp, SARS Virus
tgaatgaaatcgccatgggatgttg

SEQ ID NO: 82107 - DNA, 25 bp, SARS Virus
gaatgaaatcgacatgggatgttgt

SEQ ID NO: 82108 - DNA, 25 bp, SARS Virus
aatgaaatcgacctgggatgttgta

SEQ ID NO: 82109 - DNA, 25 bp, SARS Virus
atgaaatcgacacgggatgttgtac

SEQ ID NO: 82110 - DNA, 25 bp, SARS Virus
tgaaatcgacatcggatgttgtact

SEQ ID NO: 82111 - DNA, 25 bp, SARS Virus
gaaatcgacatgcgatgttgtactc

SEQ ID NO: 82112 - DNA, 25 bp, SARS Virus
aaatcgacatggcatgttgtactct

SEQ ID NO: 82113 - DNA, 25 bp, SARS Virus
tacctgttgaacggccagaagtaaa

SEQ ID NO: 82114 - DNA, 25 bp, SARS Virus
acctgttgaaccgccagaagtaaat

SEQ ID NO: 82115 - DNA, 25 bp, SARS Virus
cctgttgaaccggcagaagtaaatt

SEQ ID NO: 82116 - DNA, 25 bp, SARS Virus
ctgttgaaccgcgagaagtaaatta

SEQ ID NO: 82117 - DNA, 25 bp, SARS Virus
tgttgaaccgccggaagtaaattac

SEQ ID NO: 82118 - DNA, 25 bp, SARS Virus
gttgaaccgccagaagtaaattact

SEQ ID NO: 82119 - DNA, 25 bp, SARS Virus
ttgaaccgccaggagtaaattacta

SEQ ID NO: 82120 - DNA, 25 bp, SARS Virus
tgaaccgccagaggtaaattactat

SEQ ID NO: 82121 - DNA, 25 bp, SARS Virus
gaaccgccagaagtaaattactatc

SEQ ID NO: 82122 - DNA, 25 bp, SARS Virus
aaccgccagaaggaaattactatcc

SEQ ID NO: 82123 - DNA, 25 bp, SARS Virus
accgccagaagtgaattactatccg

SEQ ID NO: 82124 - DNA, 25 bp, SARS Virus
ccgccagaagtagattactatccga

SEQ ID NO: 82125 - DNA, 25 bp, SARS Virus
cgccagaagtaagttactatccgaa

SEQ ID NO: 82126 - DNA, 25 bp, SARS Virus
gccagaagtaaagtactatccgaat

SEQ ID NO: 82127 - DNA, 25 bp, SARS Virus
ccagaagtaaatgactatccgaatc

SEQ ID NO: 82128 - DNA, 25 bp, SARS Virus
cagaagtaaattgctatccgaatcg

SEQ ID NO: 82129 - DNA, 25 bp, SARS Virus
agaagtaaattagtatccgaatcgg

SEQ ID NO: 82130 - DNA, 25 bp, SARS Virus
gaagtaaattacgatccgaatcggt

SEQ ID NO: 82131 - DNA, 25 bp, SARS Virus
aagtaaattactgtccgaatcggtt

SEQ ID NO: 82132 - DNA, 25 bp, SARS Virus
agtaaattactagccgaatcggttc

SEQ ID NO: 82133 - DNA, 25 bp, SARS Virus
gtaaattactatgcgaatcggttcg

SEQ ID NO: 82134 - DNA, 25 bp, SARS Virus
taaattactatcggaatcggttcgc

SEQ ID NO: 82135 - DNA, 25 bp, SARS Virus
aaattactatccgaatcggttcgcg

SEQ ID NO: 82136 - DNA, 25 bp, SARS Virus
aattactatccggatcggttcgcga

SEQ ID NO: 82137 - DNA, 25 bp, SARS Virus
attactatccgagtcggttcgcgag

SEQ ID NO: 82138 - DNA, 25 bp, SARS Virus
ttactatccgaagcggttcgcgagt

SEQ ID NO: 82139 - DNA, 25 bp, SARS Virus
tactatccgaatgggttcgcgagtg

SEQ ID NO: 82140 - DNA, 25 bp, SARS Virus
actatccgaatcggttcgcgagtgt

SEQ ID NO: 82141 - DNA, 25 bp, SARS Virus
ctatccgaatcggttcgcgagtgtt

SEQ ID NO: 82142 - DNA, 25 bp, SARS Virus
tatccgaatcgggtcgcgagtgttc

SEQ ID NO: 82143 - DNA, 25 bp, SARS Virus
atccgaatcggtgcgcgagtgttct

SEQ ID NO: 82144 - DNA, 25 bp, SARS Virus
tccgaatcggttggcgagtgttcta

SEQ ID NO: 82145 - DNA, 25 bp, SARS Virus
ccgaatcggttcgcgagtgttctaa

SEQ ID NO: 82146 - DNA, 25 bp, SARS Virus
cgaatcggttcgggagtgttctaag

SEQ ID NO: 82147 - DNA, 25 bp, SARS Virus
gaatcggttcgcgagtgttctaagt

SEQ ID NO: 82148 - DNA, 25 bp, SARS Virus
aatcggttcgcgggtgttctaagtg

SEQ ID NO: 82149 - DNA, 25 bp, SARS Virus
atcggttcgcgagtgttctaagtgg

SEQ ID NO: 82150 - DNA, 25 bp, SARS Virus
tcggttcgcgagggttctaagtggt

SEQ ID NO: 82151 - DNA, 25 bp, SARS Virus
cggttcgcgagtgttctaagtggtg

SEQ ID NO: 82152 - DNA, 25 bp, SARS Virus
ggttcgcgagtggtctaagtggtga

SEQ ID NO: 82153 - DNA, 25 bp, SARS Virus
gttcgcgagtgtgctaagtggtgaa

SEQ ID NO: 82154 - DNA, 25 bp, SARS Virus
ttcgcgagtgttgtaagtggtgaat

SEQ ID NO: 82155 - DNA, 25 bp, SARS Virus
tcgcgagtgttcgaagtggtgaatt

SEQ ID NO: 82156 - DNA, 25 bp, SARS Virus
cgcgagtgttctgagtggtgaattt

SEQ ID NO: 82157 - DNA, 25 bp, SARS Virus
gcgagtgttctaggtggtgaattta

SEQ ID NO: 82158 - DNA, 25 bp, SARS Virus
cgagtgttctaagtggtgaatttaa

SEQ ID NO: 82159 - DNA, 25 bp, SARS Virus
gagtgttctaaggggtgaatttaat

SEQ ID NO: 82160 - DNA, 25 bp, SARS Virus
agtgttctaagtggtgaatttaatc

SEQ ID NO: 82161 - DNA, 25 bp, SARS Virus
gtgttctaagtggtgaatttaatct

SEQ ID NO: 82162 - DNA, 25 bp, SARS Virus
tgttctaagtggggaatttaatctc

SEQ ID NO: 82163 - DNA, 25 bp, SARS Virus
gttctaagtggtgaatttaatctcc

SEQ ID NO: 82164 - DNA, 25 bp, SARS Virus
ttctaagtggtggatttaatctcct

SEQ ID NO: 82165 - DNA, 25 bp, SARS Virus
tctaagtggtgagtttaatctccta

SEQ ID NO: 82166 - DNA, 25 bp, SARS Virus
ctaagtggtgaagttaatctcctaa

SEQ ID NO: 82167 - DNA, 25 bp, SARS Virus
taagtggtgaatgtaatctcctaaa

SEQ ID NO: 82168 - DNA, 25 bp, SARS Virus
aagtggtgaattgaatctcctaaaa

SEQ ID NO: 82169 - DNA, 25 bp, SARS Virus
agtggtgaatttgatctcctaaaat

SEQ ID NO: 82170 - DNA, 25 bp, SARS Virus
gtggtgaatttagtctcctaaaata

SEQ ID NO: 82171 - DNA, 25 bp, SARS Virus
tggtgaatttaagctcctaaaatag

SEQ ID NO: 82172 - DNA, 25 bp, SARS Virus
ggtgaatttaatgtcctaaaatagg

SEQ ID NO: 82173 - DNA, 25 bp, SARS Virus
gtgaatttaatcgcctaaaataggg

SEQ ID NO: 82174 - DNA, 25 bp, SARS Virus
tgaatttaatctgctaaaataggga

SEQ ID NO: 82175 - DNA, 25 bp, SARS Virus
gaatttaatctcgtaaaatagggat

SEQ ID NO: 82176 - DNA, 25 bp, SARS Virus
aatttaatctccgaaaatagggata

SEQ ID NO: 82177 - DNA, 25 bp, SARS Virus
atttaatctcctgaaatagggatac

SEQ ID NO: 82178 - DNA, 25 bp, SARS Virus
tttaatctcctagaatagggatacc

SEQ ID NO: 82179 - DNA, 25 bp, SARS Virus
ttaatctcctaagatagggatacct

SEQ ID NO: 82180 - DNA, 25 bp, SARS Virus
taatctcctaaagtagggatacctg

SEQ ID NO: 82181 - DNA, 25 bp, SARS Virus
aatctcctaaaagagggatacctgt

SEQ ID NO: 82182 - DNA, 25 bp, SARS Virus
atctcctaaaatggggatacctgtc

SEQ ID NO: 82183 - DNA, 25 bp, SARS Virus
tctcctaaaatagggatacctgtcg

SEQ ID NO: 82184 - DNA, 25 bp, SARS Virus
ctcctaaaatagggatacctgtcgt

SEQ ID NO: 82185 - DNA, 25 bp, SARS Virus
tcctaaaatagggatacctgtcgtg

SEQ ID NO: 82186 - DNA, 25 bp, SARS Virus
cctaaaataggggtacctgtcgtgt

SEQ ID NO: 82187 - DNA, 25 bp, SARS Virus
ctaaaatagggagacctgtcgtgtc

SEQ ID NO: 82188 - DNA, 25 bp, SARS Virus
taaaatagggatgcctgtcgtgtca

SEQ ID NO: 82189 - DNA, 25 bp, SARS Virus
aaaatagggatagctgtcgtgtcac

SEQ ID NO: 82190 - DNA, 25 bp, SARS Virus
aaatagggatacgtgtcgtgtcact

SEQ ID NO: 82191 - DNA, 25 bp, SARS Virus
aatagggataccggtcgtgtcactt

SEQ ID NO: 82192 - DNA, 25 bp, SARS Virus
atagggatacctgtcgtgtcacttt

SEQ ID NO: 82193 - DNA, 25 bp, SARS Virus
tagggatacctggcgtgtcactttt

SEQ ID NO: 82194 - DNA, 25 bp, SARS Virus
agggatacctgtggtgtcacttttt

SEQ ID NO: 82195 - DNA, 25 bp, SARS Virus
gggatacctgtcgtgtcacttttta

SEQ ID NO: 82196 - DNA, 25 bp, SARS Virus
ggatacctgtcgggtcactttttaa

SEQ ID NO: 82197 - DNA, 25 bp, SARS Virus
gatacctgtcgtgtcactttttaat

SEQ ID NO: 82198 - DNA, 25 bp, SARS Virus
atacctgtcgtggcactttttaatg

SEQ ID NO: 82199 - DNA, 25 bp, SARS Virus
tacctgtcgtgtgactttttaatga

SEQ ID NO: 82200 - DNA, 25 bp, SARS Virus
acctgtcgtgtcgctttttaatgaa

SEQ ID NO: 82201 - DNA, 25 bp, SARS Virus
cctgtcgtgtcagtttttaatgaag

SEQ ID NO: 82202 - DNA, 25 bp, SARS Virus
ctgtcgtgtcacgttttaatgaagt

SEQ ID NO: 82203 - DNA, 25 bp, SARS Virus
tgtcgtgtcactgtttaatgaagta

SEQ ID NO: 82204 - DNA, 25 bp, SARS Virus
gtcgtgtcacttgttaatgaagtat

SEQ ID NO: 82205 - DNA, 25 bp, SARS Virus
tcgtgtcactttgtaatgaagtatt

SEQ ID NO: 82206 - DNA, 25 bp, SARS Virus
cgtgtcacttttgaatgaagtattg

SEQ ID NO: 82207 - DNA, 25 bp, SARS Virus
gtgtcactttttgatgaagtattgt

SEQ ID NO: 82208 - DNA, 25 bp, SARS Virus
tgtcactttttagtgaagtattgtc

SEQ ID NO: 82209 - DNA, 25 bp, SARS Virus
gtcactttttaaggaagtattgtct

SEQ ID NO: 82210 - DNA, 25 bp, SARS Virus
tcactttttaatgaagtattgtcta

SEQ ID NO: 82211 - DNA, 25 bp, SARS Virus
cactttttaatggagtattgtctac

SEQ ID NO: 82212 - DNA, 25 bp, SARS Virus
actttttaatgaggtattgtctacg

SEQ ID NO: 82213 - DNA, 25 bp, SARS Virus
ctttttaatgaagtattgtctacgc

SEQ ID NO: 82214 - DNA, 25 bp, SARS Virus
tttttaatgaaggattgtctacgcg

SEQ ID NO: 82215 - DNA, 25 bp, SARS Virus
ttttaatgaagtgttgtctacgcgt

SEQ ID NO: 82216 - DNA, 25 bp, SARS Virus
tttaatgaagtagtgtctacgcgtt

SEQ ID NO: 82217 - DNA, 25 bp, SARS Virus
ttaatgaagtatggtctacgcgttt

SEQ ID NO: 82218 - DNA, 25 bp, SARS Virus
taatgaagtattgtctacgcgtttg

SEQ ID NO: 82219 - DNA, 25 bp, SARS Virus
aatgaagtattggctacgcgtttgt

SEQ ID NO: 82220 - DNA, 25 bp, SARS Virus
atgaagtattgtgtacgcgtttgtc

SEQ ID NO: 82221 - DNA, 25 bp, SARS Virus
tgaagtattgtcgacgcgtttgtcc

SEQ ID NO: 82222 - DNA, 25 bp, SARS Virus
gaagtattgtctgcgcgtttgtcca

SEQ ID NO: 82223 - DNA, 25 bp, SARS Virus
aagtattgtctaggcgtttgtccaa

SEQ ID NO: 82224 - DNA, 25 bp, SARS Virus
agtattgtctacgcgtttgtccaag

SEQ ID NO: 82225 - DNA, 25 bp, SARS Virus
gtattgtctacgggtttgtccaagt

SEQ ID NO: 82226 - DNA, 25 bp, SARS Virus
tattgtctacgcgtttgtccaagta

SEQ ID NO: 82227 - DNA, 25 bp, SARS Virus
attgtctacgcggttgtccaagtag

SEQ ID NO: 82228 - DNA, 25 bp, SARS Virus
ttgtctacgcgtgtgtccaagtagt

SEQ ID NO: 82229 - DNA, 25 bp, SARS Virus
tgtctacgcgttggtccaagtagtt

SEQ ID NO: 82230 - DNA, 25 bp, SARS Virus
gtctacgcgtttgtccaagtagttt

SEQ ID NO: 82231 - DNA, 25 bp, SARS Virus
tctacgcgtttggccaagtagtttt

SEQ ID NO: 82232 - DNA, 25 bp, SARS Virus
ctacgcgtttgtgcaagtagtttta

SEQ ID NO: 82233 - DNA, 25 bp, SARS Virus
tacgcgtttgtcgaagtagttttac

SEQ ID NO: 82234 - DNA, 25 bp, SARS Virus
acgcgtttgtccgagtagttttaca

SEQ ID NO: 82235 - DNA, 25 bp, SARS Virus
cgcgtttgtccaggtagttttacac

SEQ ID NO: 82236 - DNA, 25 bp, SARS Virus
gcgtttgtccaagtagttttacaca

SEQ ID NO: 82237 - DNA, 25 bp, SARS Virus
cgtttgtccaaggagttttacacac

SEQ ID NO: 82238 - DNA, 25 bp, SARS Virus
gtttgtccaagtggttttacacaca

SEQ ID NO: 82239 - DNA, 25 bp, SARS Virus
tttgtccaagtagttttacacacac

SEQ ID NO: 82240 - DNA, 25 bp, SARS Virus
ttgtccaagtaggtttacacacaca

SEQ ID NO: 82241 - DNA, 25 bp, SARS Virus
tgtccaagtagtgttacacacacaa

SEQ ID NO: 82242 - DNA, 25 bp, SARS Virus
gtccaagtagttgtacacacacaag

SEQ ID NO: 82243 - DNA, 25 bp, SARS Virus
tccaagtagtttgacacacacaaga

SEQ ID NO: 82244 - DNA, 25 bp, SARS Virus
ccaagtagttttgcacacacaagac

SEQ ID NO: 82245 - DNA, 25 bp, SARS Virus
caagtagttttagacacacaagaca

SEQ ID NO: 82246 - DNA, 25 bp, SARS Virus
aagtagttttacgcacacaagacac

SEQ ID NO: 82247 - DNA, 25 bp, SARS Virus
agtagttttacagacacaagacact

SEQ ID NO: 82248 - DNA, 25 bp, SARS Virus
gtagttttacacgcacaagacacta

SEQ ID NO: 82249 - DNA, 25 bp, SARS Virus
tagttttacacagacaagacactaa

SEQ ID NO: 82250 - DNA, 25 bp, SARS Virus
agttttacacacgcaagacactaac

SEQ ID NO: 82251 - DNA, 25 bp, SARS Virus
gttttacacacagaagacactaact

SEQ ID NO: 82252 - DNA, 25 bp, SARS Virus
ttttacacacacgagacactaacta

SEQ ID NO: 82253 - DNA, 25 bp, SARS Virus
tttacacacacaggacactaactag

SEQ ID NO: 82254 - DNA, 25 bp, SARS Virus
ttacacacacaagacactaactaga

SEQ ID NO: 82255 - DNA, 25 bp, SARS Virus
tacacacacaaggcactaactagaa

SEQ ID NO: 82256 - DNA, 25 bp, SARS Virus
acacacacaagagactaactagaaa

SEQ ID NO: 82257 - DNA, 25 bp, SARS Virus
cacacacaagacgctaactagaaaa

SEQ ID NO: 82258 - DNA, 25 bp, SARS Virus
acacacaagacagtaactagaaaat

SEQ ID NO: 82259 - DNA, 25 bp, SARS Virus
cacacaagacacgaactagaaaatg

SEQ ID NO: 82260 - DNA, 25 bp, SARS Virus
acacaagacactgactagaaaatga

SEQ ID NO: 82261 - DNA, 25 bp, SARS Virus
cacaagacactagctagaaaatgaa

SEQ ID NO: 82262 - DNA, 25 bp, SARS Virus
acaagacactaagtagaaaatgaac

SEQ ID NO: 82263 - DNA, 25 bp, SARS Virus
caagacactaacgagaaaatgaact

SEQ ID NO: 82264 - DNA, 25 bp, SARS Virus
aagacactaactggaaaatgaacta

SEQ ID NO: 82265 - DNA, 25 bp, SARS Virus
agacactaactagaaaatgaactac

SEQ ID NO: 82266 - DNA, 25 bp, SARS Virus
gacactaactaggaaatgaactact

SEQ ID NO: 82267 - DNA, 25 bp, SARS Virus
acactaactagagaatgaactactg

SEQ ID NO: 82268 - DNA, 25 bp, SARS Virus
cactaactagaagatgaactactga

SEQ ID NO: 82269 - DNA, 25 bp, SARS Virus
actaactagaaagtgaactactgaa

SEQ ID NO: 82270 - DNA, 25 bp, SARS Virus
ctaactagaaaaggaactactgaaa

SEQ ID NO: 82271 - DNA, 25 bp, SARS Virus
taactagaaaatgaactactgaaac

SEQ ID NO: 82272 - DNA, 25 bp, SARS Virus
aactagaaaatggactactgaaaca

SEQ ID NO: 82273 - DNA, 25 bp, SARS Virus
actagaaaatgagctactgaaacag

SEQ ID NO: 82274 - DNA, 25 bp, SARS Virus
ctagaaaatgaagtactgaaacagc

SEQ ID NO: 82275 - DNA, 25 bp, SARS Virus
tagaaaatgaacgactgaaacagct

SEQ ID NO: 82276 - DNA, 25 bp, SARS Virus
agaaaatgaactgctgaaacagctc

SEQ ID NO: 82277 - DNA, 25 bp, SARS Virus
gaaaatgaactagtgaaacagctct

SEQ ID NO: 82278 - DNA, 25 bp, SARS Virus
aaaatgaactacggaaacagctcta

SEQ ID NO: 82279 - DNA, 25 bp, SARS Virus
aaatgaactactgaaacagctctat

SEQ ID NO: 82280 - DNA, 25 bp, SARS Virus
aatgaactactggaacagctctatt

SEQ ID NO: 82281 - DNA, 25 bp, SARS Virus
atgaactactgagacagctctatta

SEQ ID NO: 82282 - DNA, 25 bp, SARS Virus
tgaactactgaagcagctctattat

SEQ ID NO: 82283 - DNA, 25 bp, SARS Virus
gaactactgaaagagctctattatt

SEQ ID NO: 82284 - DNA, 25 bp, SARS Virus
aactactgaaacggctctattattt

SEQ ID NO: 82285 - DNA, 25 bp, SARS Virus
actactgaaacagctctattatttc

SEQ ID NO: 82286 - DNA, 25 bp, SARS Virus
ctactgaaacaggtctattatttca

SEQ ID NO: 82287 - DNA, 25 bp, SARS Virus
tactgaaacagcgctattatttcag

SEQ ID NO: 82288 - DNA, 25 bp, SARS Virus
actgaaacagctgtattatttcagt

SEQ ID NO: 82289 - DNA, 25 bp, SARS Virus
ctgaaacagctcgattatttcagtg

SEQ ID NO: 82290 - DNA, 25 bp, SARS Virus
tgaaacagctctgttatttcagtgt

SEQ ID NO: 82291 - DNA, 25 bp, SARS Virus
gaaacagctctagtatttcagtgtt

SEQ ID NO: 82292 - DNA, 25 bp, SARS Virus
aaacagctctatgatttcagtgttc

SEQ ID NO: 82293 - DNA, 25 bp, SARS Virus
aacagctctattgtttcagtgttct

SEQ ID NO: 82294 - DNA, 25 bp, SARS Virus
acagctctattagttcagtgttcta

SEQ ID NO: 82295 - DNA, 25 bp, SARS Virus
cagctctattatgtcagtgttctaa

SEQ ID NO: 82296 - DNA, 25 bp, SARS Virus
agctctattattgcagtgttctaaa

SEQ ID NO: 82297 - DNA, 25 bp, SARS Virus
gctctattatttgagtgttctaaac

SEQ ID NO: 82298 - DNA, 25 bp, SARS Virus
ctctattatttcggtgttctaaaca

SEQ ID NO: 82299 - DNA, 25 bp, SARS Virus
tctattatttcagtgttctaaacag

SEQ ID NO: 82300 - DNA, 25 bp, SARS Virus
ctattatttcagggttctaaacagt

SEQ ID NO: 82301 - DNA, 25 bp, SARS Virus
tattatttcagtgttctaaacagtc

SEQ ID NO: 82302 - DNA, 25 bp, SARS Virus
attatttcagtggtctaaacagtca

SEQ ID NO: 82303 - DNA, 25 bp, SARS Virus
ttatttcagtgtgctaaacagtcac

SEQ ID NO: 82304 - DNA, 25 bp, SARS Virus
tatttcagtgttgtaaacagtcact

SEQ ID NO: 82305 - DNA, 25 bp, SARS Virus
atttcagtgttcgaaacagtcacta

SEQ ID NO: 82306 - DNA, 25 bp, SARS Virus
tttcagtgttctgaacagtcactaa

SEQ ID NO: 82307 - DNA, 25 bp, SARS Virus
ttcagtgttctagacagtcactaaa

SEQ ID NO: 82308 - DNA, 25 bp, SARS Virus
tcagtgttctaagcagtcactaaag

SEQ ID NO: 82309 - DNA, 25 bp, SARS Virus
cagtgttctaaagagtcactaaagt

SEQ ID NO: 82310 - DNA, 25 bp, SARS Virus
agtgttctaaacggtcactaaagtt

SEQ ID NO: 82311 - DNA, 25 bp, SARS Virus
gtgttctaaacagtcactaaagttt

SEQ ID NO: 82312 - DNA, 25 bp, SARS Virus
tgttctaaacaggcactaaagtttt

SEQ ID NO: 82313 - DNA, 25 bp, SARS Virus
gttctaaacagtgactaaagttttc

SEQ ID NO: 82314 - DNA, 25 bp, SARS Virus
ttctaaacagtcgctaaagttttca

SEQ ID NO: 82315 - DNA, 25 bp, SARS Virus
tctaaacagtcagtaaagttttcac

SEQ ID NO: 82316 - DNA, 25 bp, SARS Virus
ctaaacagtcacgaaagttttcacc

SEQ ID NO: 82317 - DNA, 25 bp, SARS Virus
taaacagtcactgaagttttcacca

SEQ ID NO: 82318 - DNA, 25 bp, SARS Virus
aaacagtcactagagttttcaccag

SEQ ID NO: 82319 - DNA, 25 bp, SARS Virus
aacagtcactaaggttttcaccagt

SEQ ID NO: 82320 - DNA, 25 bp, SARS Virus
acagtcactaaagttttcaccagtt

SEQ ID NO: 82321 - DNA, 25 bp, SARS Virus
cagtcactaaaggtttcaccagttc

SEQ ID NO: 82322 - DNA, 25 bp, SARS Virus
agtcactaaagtgttcaccagttcc

SEQ ID NO: 82323 - DNA, 25 bp, SARS Virus
gtcactaaagttgtcaccagttcca

SEQ ID NO: 82324 - DNA, 25 bp, SARS Virus
tcactaaagtttgcaccagttccaa

SEQ ID NO: 82325 - DNA, 25 bp, SARS Virus
cactaaagttttgaccagttccaat

SEQ ID NO: 82326 - DNA, 25 bp, SARS Virus
actaaagttttcgccagttccaatg

SEQ ID NO: 82327 - DNA, 25 bp, SARS Virus
ctaaagttttcagcagttccaatgt

SEQ ID NO: 82328 - DNA, 25 bp, SARS Virus
taaagttttcacgagttccaatgtt

SEQ ID NO: 82329 - DNA, 25 bp, SARS Virus
aaagttttcaccggttccaatgtta

SEQ ID NO: 82330 - DNA, 25 bp, SARS Virus
aagttttcaccagttccaatgttaa

SEQ ID NO: 82331 - DNA, 25 bp, SARS Virus
agttttcaccaggtccaatgttaac

SEQ ID NO: 82332 - DNA, 25 bp, SARS Virus
gttttcaccagtgccaatgttaact

SEQ ID NO: 82333 - DNA, 25 bp, SARS Virus
ttttcaccagttgcaatgttaactg

SEQ ID NO: 82334 - DNA, 25 bp, SARS Virus
tttcaccagttcgaatgttaactga

SEQ ID NO: 82335 - DNA, 25 bp, SARS Virus
ttcaccagttccgatgttaactgat

SEQ ID NO: 82336 - DNA, 25 bp, SARS Virus
tcaccagttccagtgttaactgata

SEQ ID NO: 82337 - DNA, 25 bp, SARS Virus
caccagttccaaggttaactgatac

SEQ ID NO: 82338 - DNA, 25 bp, SARS Virus
accagttccaatgttaactgatacg

SEQ ID NO: 82339 - DNA, 25 bp, SARS Virus
ccagttccaatggtaactgatacga

SEQ ID NO: 82340 - DNA, 25 bp, SARS Virus
cagttccaatgtgaactgatacgac

SEQ ID NO: 82341 - DNA, 25 bp, SARS Virus
agttccaatgttgactgatacgact

SEQ ID NO: 82342 - DNA, 25 bp, SARS Virus
gttccaatgttagctgatacgactt

SEQ ID NO: 82343 - DNA, 25 bp, SARS Virus
ttccaatgttaagtgatacgacttt

SEQ ID NO: 82344 - DNA, 25 bp, SARS Virus
tccaatgttaacggatacgacttta

SEQ ID NO: 82345 - DNA, 25 bp, SARS Virus
ccaatgttaactgatacgactttaa

SEQ ID NO: 82346 - DNA, 25 bp, SARS Virus
caatgttaactggtacgactttaaa

SEQ ID NO: 82347 - DNA, 25 bp, SARS Virus
aatgttaactgagacgactttaaag

SEQ ID NO: 82348 - DNA, 25 bp, SARS Virus
atgttaactgatgcgactttaaagt

SEQ ID NO: 82349 - DNA, 25 bp, SARS Virus
tgttaactgataggactttaaagta

SEQ ID NO: 82350 - DNA, 25 bp, SARS Virus
gttaactgatacgactttaaagtaa

SEQ ID NO: 82351 - DNA, 25 bp, SARS Virus
ttaactgatacggctttaaagtaag

SEQ ID NO: 82352 - DNA, 25 bp, SARS Virus
taactgatacgagtttaaagtaagt

SEQ ID NO: 82353 - DNA, 25 bp, SARS Virus
aactgatacgacgttaaagtaagta

SEQ ID NO: 82354 - DNA, 25 bp, SARS Virus
actgatacgactgtaaagtaagtac

SEQ ID NO: 82355 - DNA, 25 bp, SARS Virus
ctgatacgacttgaaagtaagtacg

SEQ ID NO: 82356 - DNA, 25 bp, SARS Virus
tgatacgactttgaagtaagtacga

SEQ ID NO: 82357 - DNA, 25 bp, SARS Virus
gatacgactttagagtaagtacgaa

SEQ ID NO: 82358 - DNA, 25 bp, SARS Virus
atacgactttaaggtaagtacgaaa

SEQ ID NO: 82359 - DNA, 25 bp, SARS Virus
tacgactttaaagtaagtacgaaac

SEQ ID NO: 82360 - DNA, 25 bp, SARS Virus
acgactttaaaggaagtacgaaacc

SEQ ID NO: 82361 - DNA, 25 bp, SARS Virus
cgactttaaagtgagtacgaaacca

SEQ ID NO: 82362 - DNA, 25 bp, SARS Virus
gactttaaagtaggtacgaaaccac

SEQ ID NO: 82363 - DNA, 25 bp, SARS Virus
actttaaagtaagtacgaaaccaca

SEQ ID NO: 82364 - DNA, 25 bp, SARS Virus
ctttaaagtaaggacgaaaccacat

SEQ ID NO: 82365 - DNA, 25 bp, SARS Virus
tttaaagtaagtgcgaaaccacatt

SEQ ID NO: 82366 - DNA, 25 bp, SARS Virus
ttaaagtaagtaggaaaccacattc

SEQ ID NO: 82367 - DNA, 25 bp, SARS Virus
taaagtaagtacgaaaccacattcc

SEQ ID NO: 82368 - DNA, 25 bp, SARS Virus
aaagtaagtacggaaccacattcct

SEQ ID NO: 82369 - DNA, 25 bp, SARS Virus
aagtaagtacgagaccacattccta

SEQ ID NO: 82370 - DNA, 25 bp, SARS Virus
agtaagtacgaagccacattcctac

SEQ ID NO: 82371 - DNA, 25 bp, SARS Virus
gtaagtacgaaagcacattcctacc

SEQ ID NO: 82372 - DNA, 25 bp, SARS Virus
taagtacgaaacgacattcctacct

SEQ ID NO: 82373 - DNA, 25 bp, SARS Virus
aagtacgaaaccgcattcctacctg

SEQ ID NO: 82374 - DNA, 25 bp, SARS Virus
agtacgaaaccagattcctacctgt

SEQ ID NO: 82375 - DNA, 25 bp, SARS Virus
gtacgaaaccacgttcctacctgta

SEQ ID NO: 82376 - DNA, 25 bp, SARS Virus
tacgaaaccacagtcctacctgtac

SEQ ID NO: 82377 - DNA, 25 bp, SARS Virus
acgaaaccacatgcctacctgtaca

SEQ ID NO: 82378 - DNA, 25 bp, SARS Virus
cgaaaccacattgctacctgtacaa

SEQ ID NO: 82379 - DNA, 25 bp, SARS Virus
gaaaccacattcgtacctgtacaac

SEQ ID NO: 82380 - DNA, 25 bp, SARS Virus
aaaccacattccgacctgtacaact

SEQ ID NO: 82381 - DNA, 25 bp, SARS Virus
aaccacattcctgcctgtacaactt

SEQ ID NO: 82382 - DNA, 25 bp, SARS Virus
accacattcctagctgtacaacttt

SEQ ID NO: 82383 - DNA, 25 bp, SARS Virus
ccacattcctacgtgtacaactttg

SEQ ID NO: 82384 - DNA, 25 bp, SARS Virus
cacattcctaccggtacaactttgg

SEQ ID NO: 82385 - DNA, 25 bp, SARS Virus
acattcctacctgtacaactttgga

SEQ ID NO: 82386 - DNA, 25 bp, SARS Virus
cattcctacctggacaactttggaa

SEQ ID NO: 82387 - DNA, 25 bp, SARS Virus
attcctacctgtgcaactttggaag

SEQ ID NO: 82388 - DNA, 25 bp, SARS Virus
ttcctacctgtagaactttggaaga

SEQ ID NO: 82389 - DNA, 25 bp, SARS Virus
tcctacctgtacgactttggaagat

SEQ ID NO: 82390 - DNA, 25 bp, SARS Virus
cctacctgtacagctttggaagatg

SEQ ID NO: 82391 - DNA, 25 bp, SARS Virus
ctacctgtacaagtttggaagatgg

SEQ ID NO: 82392 - DNA, 25 bp, SARS Virus
tacctgtacaacgttggaagatggg

SEQ ID NO: 82393 - DNA, 25 bp, SARS Virus
acctgtacaactgtggaagatgggt

SEQ ID NO: 82394 - DNA, 25 bp, SARS Virus
cctgtacaacttgggaagatgggtt

SEQ ID NO: 82395 - DNA, 25 bp, SARS Virus
ctgtacaactttggaagatgggttt

SEQ ID NO: 82396 - DNA, 25 bp, SARS Virus
tgtacaactttggaagatgggtttt

SEQ ID NO: 82397 - DNA, 25 bp, SARS Virus
gtacaactttgggagatgggttttg

SEQ ID NO: 82398 - DNA, 25 bp, SARS Virus
tacaactttggaggatgggttttga

SEQ ID NO: 82399 - DNA, 25 bp, SARS Virus
acaactttggaagatgggttttgat

SEQ ID NO: 82400 - DNA, 25 bp, SARS Virus
caactttggaaggtgggttttgatg

SEQ ID NO: 82401 - DNA, 25 bp, SARS Virus
aactttggaagaggggttttgatgt

SEQ ID NO: 82402 - DNA, 25 bp, SARS Virus
actttggaagatgggttttgatgtt

SEQ ID NO: 82403 - DNA, 25 bp, SARS Virus
ctttggaagatgggttttgatgttc

SEQ ID NO: 82404 - DNA, 25 bp, SARS Virus
tttggaagatgggttttgatgttcg

SEQ ID NO: 82405 - DNA, 25 bp, SARS Virus
ttggaagatggggtttgatgttcgt

SEQ ID NO: 82406 - DNA, 25 bp, SARS Virus
tggaagatgggtgttgatgttcgtt

SEQ ID NO: 82407 - DNA, 25 bp, SARS Virus
ggaagatgggttgtgatgttcgttc

SEQ ID NO: 82408 - DNA, 25 bp, SARS Virus
gaagatgggtttggatgttcgttca

SEQ ID NO: 82409 - DNA, 25 bp, SARS Virus
aagatgggttttgatgttcgttcag

SEQ ID NO: 82410 - DNA, 25 bp, SARS Virus
agatgggttttggtgttcgttcagt

SEQ ID NO: 82411 - DNA, 25 bp, SARS Virus
gatgggttttgaggttcgttcagtt

SEQ ID NO: 82412 - DNA, 25 bp, SARS Virus
atgggttttgatgttcgttcagttc

SEQ ID NO: 82413 - DNA, 25 bp, SARS Virus
tgggttttgatggtcgttcagttcg

SEQ ID NO: 82414 - DNA, 25 bp, SARS Virus
gggttttgatgtgcgttcagttcgc

SEQ ID NO: 82415 - DNA, 25 bp, SARS Virus
ggttttgatgttggttcagttcgca

SEQ ID NO: 82416 - DNA, 25 bp, SARS Virus
gttttgatgttcgttcagttcgcac

SEQ ID NO: 82417 - DNA, 25 bp, SARS Virus
ttttgatgttcggtcagttcgcacc

SEQ ID NO: 82418 - DNA, 25 bp, SARS Virus
tttgatgttcgtgcagttcgcaccg

SEQ ID NO: 82419 - DNA, 25 bp, SARS Virus
ttgatgttcgttgagttcgcaccgt

SEQ ID NO: 82420 - DNA, 25 bp, SARS Virus
tgatgttcgttcggttcgcaccgtt

SEQ ID NO: 82421 - DNA, 25 bp, SARS Virus
gatgttcgttcagttcgcaccgttg

SEQ ID NO: 82422 - DNA, 25 bp, SARS Virus
atgttcgttcaggtcgcaccgttgg

SEQ ID NO: 82423 - DNA, 25 bp, SARS Virus
tgttcgttcagtgcgcaccgttggt

SEQ ID NO: 82424 - DNA, 25 bp, SARS Virus
gttcgttcagttggcaccgttggtc

SEQ ID NO: 82425 - DNA, 25 bp, SARS Virus
ttcgttcagttcgcaccgttggtcc

SEQ ID NO: 82426 - DNA, 25 bp, SARS Virus
tcgttcagttcggaccgttggtcca

SEQ ID NO: 82427 - DNA, 25 bp, SARS Virus
cgttcagttcgcgccgttggtccac

SEQ ID NO: 82428 - DNA, 25 bp, SARS Virus
gttcagttcgcagcgttggtccaca

SEQ ID NO: 82429 - DNA, 25 bp, SARS Virus
ttcagttcgcacggttggtccacaa

SEQ ID NO: 82430 - DNA, 25 bp, SARS Virus
tcagttcgcaccgttggtccacaac

SEQ ID NO: 82431 - DNA, 25 bp, SARS Virus
cagttcgcaccggtggtccacaacg

SEQ ID NO: 82432 - DNA, 25 bp, SARS Virus
agttcgcaccgtgggtccacaacgc

SEQ ID NO: 82433 - DNA, 25 bp, SARS Virus
gttcgcaccgttggtccacaacgct

SEQ ID NO: 82434 - DNA, 25 bp, SARS Virus
ttcgcaccgttggtccacaacgcta

SEQ ID NO: 82435 - DNA, 25 bp, SARS Virus
tcgcaccgttgggccacaacgctac

SEQ ID NO: 82436 - DNA, 25 bp, SARS Virus
cgcaccgttggtgcacaacgctacg

SEQ ID NO: 82437 - DNA, 25 bp, SARS Virus
gcaccgttggtcgacaacgctacgg

SEQ ID NO: 82438 - DNA, 25 bp, SARS Virus
caccgttggtccgcaacgctacgga

SEQ ID NO: 82439 - DNA, 25 bp, SARS Virus
accgttggtccagaacgctacggat

SEQ ID NO: 82440 - DNA, 25 bp, SARS Virus
ccgttggtccacgacgctacggatt

SEQ ID NO: 82441 - DNA, 25 bp, SARS Virus
cgttggtccacagcgctacggattg

SEQ ID NO: 82442 - DNA, 25 bp, SARS Virus
gttggtccacaaggctacggattga

SEQ ID NO: 82443 - DNA, 25 bp, SARS Virus
ttggtccacaacgctacggattgaa

SEQ ID NO: 82444 - DNA, 25 bp, SARS Virus
tggtccacaacggtacggattgaac

SEQ ID NO: 82445 - DNA, 25 bp, SARS Virus
ggtccacaacgcgacggattgaaca

SEQ ID NO: 82446 - DNA, 25 bp, SARS Virus
gtccacaacgctgcggattgaacat

SEQ ID NO: 82447 - DNA, 25 bp, SARS Virus
tccacaacgctagggattgaacatg

SEQ ID NO: 82448 - DNA, 25 bp, SARS Virus
ccacaacgctacggattgaacatgt

SEQ ID NO: 82449 - DNA, 25 bp, SARS Virus
cacaacgctacggattgaacatgtt

SEQ ID NO: 82450 - DNA, 25 bp, SARS Virus
acaacgctacgggttgaacatgttc

SEQ ID NO: 82451 - DNA, 25 bp, SARS Virus
caacgctacggagtgaacatgttct

SEQ ID NO: 82452 - DNA, 25 bp, SARS Virus
aacgctacggatggaacatgttcta

SEQ ID NO: 82453 - DNA, 25 bp, SARS Virus
acgctacggattgaacatgttctac

SEQ ID NO: 82454 - DNA, 25 bp, SARS Virus
cgctacggattggacatgttctacg

SEQ ID NO: 82455 - DNA, 25 bp, SARS Virus
gctacggattgagcatgttctacgt

SEQ ID NO: 82456 - DNA, 25 bp, SARS Virus
ctacggattgaagatgttctacgtt

SEQ ID NO: 82457 - DNA, 25 bp, SARS Virus
tacggattgaacgtgttctacgttt

SEQ ID NO: 82458 - DNA, 25 bp, SARS Virus
acggattgaacaggttctacgtttc

SEQ ID NO: 82459 - DNA, 25 bp, SARS Virus
cggattgaacatgttctacgtttct

SEQ ID NO: 82460 - DNA, 25 bp, SARS Virus
ggattgaacatggtctacgtttctt

SEQ ID NO: 82461 - DNA, 25 bp, SARS Virus
gattgaacatgtgctacgtttctta

SEQ ID NO: 82462 - DNA, 25 bp, SARS Virus
attgaacatgttgtacgtttcttac

SEQ ID NO: 82463 - DNA, 25 bp, SARS Virus
ttgaacatgttcgacgtttcttacg

SEQ ID NO: 82464 - DNA, 25 bp, SARS Virus
tgaacatgttctgcgtttcttacga

SEQ ID NO: 82465 - DNA, 25 bp, SARS Virus
gaacatgttctaggtttcttacgaa

SEQ ID NO: 82466 - DNA, 25 bp, SARS Virus
aacatgttctacgtttcttacgaag

SEQ ID NO: 82467 - DNA, 25 bp, SARS Virus
acatgttctacggttcttacgaaga

SEQ ID NO: 82468 - DNA, 25 bp, SARS Virus
catgttctacgtgtcttacgaagaa

SEQ ID NO: 82469 - DNA, 25 bp, SARS Virus
atgttctacgttgcttacgaagaac

SEQ ID NO: 82470 - DNA, 25 bp, SARS Virus
tgttctacgtttgttacgaagaact

SEQ ID NO: 82471 - DNA, 25 bp, SARS Virus
gttctacgtttcgtacgaagaactt

SEQ ID NO: 82472 - DNA, 25 bp, SARS Virus
ttctacgtttctgacgaagaacttt

SEQ ID NO: 82473 - DNA, 25 bp, SARS Virus
tctacgtttcttgcgaagaactttt

SEQ ID NO: 82474 - DNA, 25 bp, SARS Virus
ctacgtttcttaggaagaacttttc

SEQ ID NO: 82475 - DNA, 25 bp, SARS Virus
tacgtttcttacgaagaacttttca

SEQ ID NO: 82476 - DNA, 25 bp, SARS Virus
acgtttcttacggagaacttttcac

SEQ ID NO: 82477 - DNA, 25 bp, SARS Virus
cgtttcttacgaggaacttttcaca

SEQ ID NO: 82478 - DNA, 25 bp, SARS Virus
gtttcttacgaagaacttttcacac

SEQ ID NO: 82479 - DNA, 25 bp, SARS Virus
tttcttacgaaggacttttcacact

SEQ ID NO: 82480 - DNA, 25 bp, SARS Virus
ttcttacgaagagcttttcacactg

SEQ ID NO: 82481 - DNA, 25 bp, SARS Virus
tcttacgaagaagttttcacactgg

SEQ ID NO: 82482 - DNA, 25 bp, SARS Virus
cttacgaagaacgtttcacactgga

SEQ ID NO: 82483 - DNA, 25 bp, SARS Virus
ttacgaagaactgttcacactggaa

SEQ ID NO: 82484 - DNA, 25 bp, SARS Virus
tacgaagaacttgtcacactggaag

SEQ ID NO: 82485 - DNA, 25 bp, SARS Virus
acgaagaactttgcacactggaagt

SEQ ID NO: 82486 - DNA, 25 bp, SARS Virus
cgaagaacttttgacactggaagtc

SEQ ID NO: 82487 - DNA, 25 bp, SARS Virus
gaagaacttttcgcactggaagtct

SEQ ID NO: 82488 - DNA, 25 bp, SARS Virus
aagaacttttcagactggaagtctt

SEQ ID NO: 82489 - DNA, 25 bp, SARS Virus
agaacttttcacgctggaagtctta

SEQ ID NO: 82490 - DNA, 25 bp, SARS Virus
gaacttttcacagtggaagtcttaa

SEQ ID NO: 82491 - DNA, 25 bp, SARS Virus
aacttttcacacgggaagtcttaat

SEQ ID NO: 82492 - DNA, 25 bp, SARS Virus
acttttcacactggaagtcttaata

SEQ ID NO: 82493 - DNA, 25 bp, SARS Virus
cttttcacactggaagtcttaatac

SEQ ID NO: 82494 - DNA, 25 bp, SARS Virus
ttttcacactgggagtcttaatacc

SEQ ID NO: 82495 - DNA, 25 bp, SARS Virus
tttcacactggaggtcttaatacca

SEQ ID NO: 82496 - DNA, 25 bp, SARS Virus
ttcacactggaagtcttaataccac

SEQ ID NO: 82497 - DNA, 25 bp, SARS Virus
tcacactggaaggcttaataccact

SEQ ID NO: 82498 - DNA, 25 bp, SARS Virus
cacactggaagtgttaataccactt

SEQ ID NO: 82499 - DNA, 25 bp, SARS Virus
acactggaagtcgtaataccacttt

SEQ ID NO: 82500 - DNA, 25 bp, SARS Virus
cactggaagtctgaataccactttt

SEQ ID NO: 82501 - DNA, 25 bp, SARS Virus
actggaagtcttgataccactttta

SEQ ID NO: 82502 - DNA, 25 bp, SARS Virus
ctggaagtcttagtaccacttttac

SEQ ID NO: 82503 - DNA, 25 bp, SARS Virus
tggaagtcttaagaccacttttacg

SEQ ID NO: 82504 - DNA, 25 bp, SARS Virus
ggaagtcttaatgccacttttacga

SEQ ID NO: 82505 - DNA, 25 bp, SARS Virus
gaagtcttaatagcacttttacgac

SEQ ID NO: 82506 - DNA, 25 bp, SARS Virus
aagtcttaatacgacttttacgaca

SEQ ID NO: 82507 - DNA, 25 bp, SARS Virus
agtcttaataccgcttttacgacaa

SEQ ID NO: 82508 - DNA, 25 bp, SARS Virus
gtcttaataccagttttacgacaat

SEQ ID NO: 82509 - DNA, 25 bp, SARS Virus
tcttaataccacgtttacgacaata

SEQ ID NO: 82510 - DNA, 25 bp, SARS Virus
cttaataccactgttacgacaatat

SEQ ID NO: 82511 - DNA, 25 bp, SARS Virus
ttaataccacttgtacgacaatatg

SEQ ID NO: 82512 - DNA, 25 bp, SARS Virus
taataccactttgacgacaatatgg

SEQ ID NO: 82513 - DNA, 25 bp, SARS Virus
aataccacttttgcgacaatatggt

SEQ ID NO: 82514 - DNA, 25 bp, SARS Virus
ataccacttttaggacaatatggtt

SEQ ID NO: 82515 - DNA, 25 bp, SARS Virus
taccacttttacgacaatatggttt

SEQ ID NO: 82516 - DNA, 25 bp, SARS Virus
accacttttacggcaatatggtttt

SEQ ID NO: 82517 - DNA, 25 bp, SARS Virus
ccacttttacgagaatatggttttc

SEQ ID NO: 82518 - DNA, 25 bp, SARS Virus
cacttttacgacgatatggttttcc

SEQ ID NO: 82519 - DNA, 25 bp, SARS Virus
acttttacgacagtatggttttcct

SEQ ID NO: 82520 - DNA, 25 bp, SARS Virus
cttttacgacaagatggttttcctt

SEQ ID NO: 82521 - DNA, 25 bp, SARS Virus
ttttacgacaatgtggttttcctta

SEQ ID NO: 82522 - DNA, 25 bp, SARS Virus
tttacgacaatagggttttccttat

SEQ ID NO: 82523 - DNA, 25 bp, SARS Virus
ttacgacaatatggttttccttatt

SEQ ID NO: 82524 - DNA, 25 bp, SARS Virus
tacgacaatatggttttccttatta

SEQ ID NO: 82525 - DNA, 25 bp, SARS Virus
acgacaatatgggtttccttattac

SEQ ID NO: 82526 - DNA, 25 bp, SARS Virus
cgacaatatggtgttccttattact

SEQ ID NO: 82527 - DNA, 25 bp, SARS Virus
gacaatatggttgtccttattacta

SEQ ID NO: 82528 - DNA, 25 bp, SARS Virus
acaatatggtttgccttattactac

SEQ ID NO: 82529 - DNA, 25 bp, SARS Virus
caatatggttttgcttattactact

SEQ ID NO: 82530 - DNA, 25 bp, SARS Virus
aatatggttttcgttattactactt

SEQ ID NO: 82531 - DNA, 25 bp, SARS Virus
atatggttttccgtattactactta

SEQ ID NO: 82532 - DNA, 25 bp, SARS Virus
tatggttttcctgattactacttac

SEQ ID NO: 82533 - DNA, 25 bp, SARS Virus
atggttttccttgttactacttaca

SEQ ID NO: 82534 - DNA, 25 bp, SARS Virus
tggttttccttagtactacttacag

SEQ ID NO: 82535 - DNA, 25 bp, SARS Virus
ggttttccttatgactacttacagc

SEQ ID NO: 82536 - DNA, 25 bp, SARS Virus
gttttccttattgctacttacagcg

SEQ ID NO: 82537 - DNA, 25 bp, SARS Virus
ttttccttattagtacttacagcgt

SEQ ID NO: 82538 - DNA, 25 bp, SARS Virus
tttccttattacgacttacagcgtt

SEQ ID NO: 82539 - DNA, 25 bp, SARS Virus
ttccttattactgcttacagcgttt

SEQ ID NO: 82540 - DNA, 25 bp, SARS Virus
tccttattactagttacagcgtttc

SEQ ID NO: 82541 - DNA, 25 bp, SARS Virus
ccttattactacgtacagcgtttca

SEQ ID NO: 82542 - DNA, 25 bp, SARS Virus
cttattactactgacagcgtttcat

SEQ ID NO: 82543 - DNA, 25 bp, SARS Virus
ttattactacttgcagcgtttcata

SEQ ID NO: 82544 - DNA, 25 bp, SARS Virus
tattactacttagagcgtttcatat

SEQ ID NO: 82545 - DNA, 25 bp, SARS Virus
attactacttacggcgtttcatatg

SEQ ID NO: 82546 - DNA, 25 bp, SARS Virus
ttactacttacagcgtttcatatga

SEQ ID NO: 82547 - DNA, 25 bp, SARS Virus
tactacttacagggtttcatatgag

SEQ ID NO: 82548 - DNA, 25 bp, SARS Virus
actacttacagcgtttcatatgagt

SEQ ID NO: 82549 - DNA, 25 bp, SARS Virus
ctacttacagcggttcatatgagtt

SEQ ID NO: 82550 - DNA, 25 bp, SARS Virus
tacttacagcgtgtcatatgagttg

SEQ ID NO: 82551 - DNA, 25 bp, SARS Virus
acttacagcgttgcatatgagttga

SEQ ID NO: 82552 - DNA, 25 bp, SARS Virus
cttacagcgtttgatatgagttgac

SEQ ID NO: 82553 - DNA, 25 bp, SARS Virus
ttacagcgtttcgtatgagttgaca

SEQ ID NO: 82554 - DNA, 25 bp, SARS Virus
tacagcgtttcagatgagttgacac

SEQ ID NO: 82555 - DNA, 25 bp, SARS Virus
acagcgtttcatgtgagttgacaca

SEQ ID NO: 82556 - DNA, 25 bp, SARS Virus
cagcgtttcataggagttgacacag

SEQ ID NO: 82557 - DNA, 25 bp, SARS Virus
agcgtttcatatgagttgacacagt

SEQ ID NO: 82558 - DNA, 25 bp, SARS Virus
gcgtttcatatgggttgacacagtt

SEQ ID NO: 82559 - DNA, 25 bp, SARS Virus
cgtttcatatgagttgacacagtta

SEQ ID NO: 82560 - DNA, 25 bp, SARS Virus
gtttcatatgaggtgacacagttat

SEQ ID NO: 82561 - DNA, 25 bp, SARS Virus
tttcatatgagtggacacagttatg

SEQ ID NO: 82562 - DNA, 25 bp, SARS Virus
ttcatatgagttgacacagttatga

SEQ ID NO: 82563 - DNA, 25 bp, SARS Virus
tcatatgagttggcacagttatgaa

SEQ ID NO: 82564 - DNA, 25 bp, SARS Virus
catatgagttgagacagttatgaat

SEQ ID NO: 82565 - DNA, 25 bp, SARS Virus
atatgagttgacgcagttatgaatt

SEQ ID NO: 82566 - DNA, 25 bp, SARS Virus
tatgagttgacagagttatgaattt

SEQ ID NO: 82567 - DNA, 25 bp, SARS Virus
atgagttgacacggttatgaattta

SEQ ID NO: 82568 - DNA, 25 bp, SARS Virus
tgagttgacacagttatgaatttat

SEQ ID NO: 82569 - DNA, 25 bp, SARS Virus
gagttgacacaggtatgaatttatg

SEQ ID NO: 82570 - DNA, 25 bp, SARS Virus
agttgacacagtgatgaatttatgt

SEQ ID NO: 82571 - DNA, 25 bp, SARS Virus
gttgacacagttgtgaatttatgtg

SEQ ID NO: 82572 - DNA, 25 bp, SARS Virus
ttgacacagttaggaatttatgtga

SEQ ID NO: 82573 - DNA, 25 bp, SARS Virus
tgacacagttatgaatttatgtgaa

SEQ ID NO: 82574 - DNA, 25 bp, SARS Virus
gacacagttatggatttatgtgaat

SEQ ID NO: 82575 - DNA, 25 bp, SARS Virus
acacagttatgagtttatgtgaatg

SEQ ID NO: 82576 - DNA, 25 bp, SARS Virus
cacagttatgaagttatgtgaatga

SEQ ID NO: 82577 - DNA, 25 bp, SARS Virus
acagttatgaatgtatgtgaatgaa

SEQ ID NO: 82578 - DNA, 25 bp, SARS Virus
cagttatgaattgatgtgaatgaaa

SEQ ID NO: 82579 - DNA, 25 bp, SARS Virus
agttatgaatttgtgtgaatgaaat

SEQ ID NO: 82580 - DNA, 25 bp, SARS Virus
gttatgaatttaggtgaatgaaatc

SEQ ID NO: 82581 - DNA, 25 bp, SARS Virus
ttatgaatttatgtgaatgaaatcg

SEQ ID NO: 82582 - DNA, 25 bp, SARS Virus
tatgaatttatgggaatgaaatcga

SEQ ID NO: 82583 - DNA, 25 bp, SARS Virus
atgaatttatgtgaatgaaatcgac

SEQ ID NO: 82584 - DNA, 25 bp, SARS Virus
tgaatttatgtggatgaaatcgaca

SEQ ID NO: 82585 - DNA, 25 bp, SARS Virus
gaatttatgtgagtgaaatcgacat

SEQ ID NO: 82586 - DNA, 25 bp, SARS Virus
aatttatgtgaaggaaatcgacatg

SEQ ID NO: 82587 - DNA, 25 bp, SARS Virus
atttatgtgaatgaaatcgacatgg

SEQ ID NO: 82588 - DNA, 25 bp, SARS Virus
tttatgtgaatggaatcgacatggg

SEQ ID NO: 82589 - DNA, 25 bp, SARS Virus
ttatgtgaatgagatcgacatggga

SEQ ID NO: 82590 - DNA, 25 bp, SARS Virus
tatgtgaatgaagtcgacatgggat

SEQ ID NO: 82591 - DNA, 25 bp, SARS Virus
atgtgaatgaaagcgacatgggatg

SEQ ID NO: 82592 - DNA, 25 bp, SARS Virus
tgtgaatgaaatggacatgggatgt

SEQ ID NO: 82593 - DNA, 25 bp, SARS Virus
gtgaatgaaatcgacatgggatgtt

SEQ ID NO: 82594 - DNA, 25 bp, SARS Virus
tgaatgaaatcggcatgggatgttg

SEQ ID NO: 82595 - DNA, 25 bp, SARS Virus
gaatgaaatcgagatgggatgttgt

SEQ ID NO: 82596 - DNA, 25 bp, SARS Virus
aatgaaatcgacgtgggatgttgta

SEQ ID NO: 82597 - DNA, 25 bp, SARS Virus
atgaaatcgacaggggatgttgtac

SEQ ID NO: 82598 - DNA, 25 bp, SARS Virus
tgaaatcgacatgggatgttgtact

SEQ ID NO: 82599 - DNA, 25 bp, SARS Virus
gaaatcgacatgggatgttgtactc

SEQ ID NO: 82600 - DNA, 25 bp, SARS Virus
aaatcgacatgggatgttgtactct

SEQ ID NO: 82601 - DNA, 25 bp, SARS Virus
tacctgttgaactgccagaagtaaa

SEQ ID NO: 82602 - DNA, 25 bp, SARS Virus
acctgttgaacctccagaagtaaat

SEQ ID NO: 82603 - DNA, 25 bp, SARS Virus
cctgttgaaccgtcagaagtaaatt

SEQ ID NO: 82604 - DNA, 25 bp, SARS Virus
ctgttgaaccgctagaagtaaatta

SEQ ID NO: 82605 - DNA, 25 bp, SARS Virus
tgttgaaccgcctgaagtaaattac

SEQ ID NO: 82606 - DNA, 25 bp, SARS Virus
gttgaaccgccataagtaaattact

SEQ ID NO: 82607 - DNA, 25 bp, SARS Virus
ttgaaccgccagtagtaaattacta

SEQ ID NO: 82608 - DNA, 25 bp, SARS Virus
tgaaccgccagatgtaaattactat

SEQ ID NO: 82609 - DNA, 25 bp, SARS Virus
gaaccgccagaattaaattactatc

SEQ ID NO: 82610 - DNA, 25 bp, SARS Virus
aaccgccagaagtaaattactatcc

SEQ ID NO: 82611 - DNA, 25 bp, SARS Virus
accgccagaagttaattactatccg

SEQ ID NO: 82612 - DNA, 25 bp, SARS Virus
ccgccagaagtatattactatccga

SEQ ID NO: 82613 - DNA, 25 bp, SARS Virus
cgccagaagtaatttactatccgaa

SEQ ID NO: 82614 - DNA, 25 bp, SARS Virus
gccagaagtaaattactatccgaat

SEQ ID NO: 82615 - DNA, 25 bp, SARS Virus
ccagaagtaaattactatccgaatc

SEQ ID NO: 82616 - DNA, 25 bp, SARS Virus
cagaagtaaatttctatccgaatcg

SEQ ID NO: 82617 - DNA, 25 bp, SARS Virus
agaagtaaattattatccgaatcgg

SEQ ID NO: 82618 - DNA, 25 bp, SARS Virus
gaagtaaattactatccgaatcggt

SEQ ID NO: 82619 - DNA, 25 bp, SARS Virus
aagtaaattactttccgaatcggtt

SEQ ID NO: 82620 - DNA, 25 bp, SARS Virus
agtaaattactatccgaatcggttc

SEQ ID NO: 82621 - DNA, 25 bp, SARS Virus
gtaaattactattcgaatcggttcg

SEQ ID NO: 82622 - DNA, 25 bp, SARS Virus
taaattactatctgaatcggttcgc

SEQ ID NO: 82623 - DNA, 25 bp, SARS Virus
aaattactatcctaatcggttcgcg

SEQ ID NO: 82624 - DNA, 25 bp, SARS Virus
aattactatccgtatcggttcgcga

SEQ ID NO: 82625 - DNA, 25 bp, SARS Virus
attactatccgattcggttcgcgag

SEQ ID NO: 82626 - DNA, 25 bp, SARS Virus
ttactatccgaatcggttcgcgagt

SEQ ID NO: 82627 - DNA, 25 bp, SARS Virus
tactatccgaattggttcgcgagtg

SEQ ID NO: 82628 - DNA, 25 bp, SARS Virus
actatccgaatctgttcgcgagtgt

SEQ ID NO: 82629 - DNA, 25 bp, SARS Virus
ctatccgaatcgtttcgcgagtgtt

SEQ ID NO: 82630 - DNA, 25 bp, SARS Virus
tatccgaatcggttcgcgagtgttc

SEQ ID NO: 82631 - DNA, 25 bp, SARS Virus
atccgaatcggttcgcgagtgttct

SEQ ID NO: 82632 - DNA, 25 bp, SARS Virus
tccgaatcggtttgcgagtgttcta

SEQ ID NO: 82633 - DNA, 25 bp, SARS Virus
ccgaatcggttctcgagtgttctaa

SEQ ID NO: 82634 - DNA, 25 bp, SARS Virus
cgaatcggttcgtgagtgttctaag

SEQ ID NO: 82635 - DNA, 25 bp, SARS Virus
gaatcggttcgctagtgttctaagt

SEQ ID NO: 82636 - DNA, 25 bp, SARS Virus
aatcggttcgcgtgtgttctaagtg

SEQ ID NO: 82637 - DNA, 25 bp, SARS Virus
atcggttcgcgattgttctaagtgg

SEQ ID NO: 82638 - DNA, 25 bp, SARS Virus
tcggttcgcgagtgttctaagtggt

SEQ ID NO: 82639 - DNA, 25 bp, SARS Virus
cggttcgcgagttttctaagtggtg

SEQ ID NO: 82640 - DNA, 25 bp, SARS Virus
ggttcgcgagtgttctaagtggtga

SEQ ID NO: 82641 - DNA, 25 bp, SARS Virus
gttcgcgagtgttctaagtggtgaa

SEQ ID NO: 82642 - DNA, 25 bp, SARS Virus
ttcgcgagtgttttaagtggtgaat

SEQ ID NO: 82643 - DNA, 25 bp, SARS Virus
tcgcgagtgttctaagtggtgaatt

SEQ ID NO: 82644 - DNA, 25 bp, SARS Virus
cgcgagtgttcttagtggtgaattt

SEQ ID NO: 82645 - DNA, 25 bp, SARS Virus
gcgagtgttctatgtggtgaattta

SEQ ID NO: 82646 - DNA, 25 bp, SARS Virus
cgagtgttctaattggtgaatttaa

SEQ ID NO: 82647 - DNA, 25 bp, SARS Virus
gagtgttctaagtggtgaatttaat

SEQ ID NO: 82648 - DNA, 25 bp, SARS Virus
agtgttctaagttgtgaatttaatc

SEQ ID NO: 82649 - DNA, 25 bp, SARS Virus
gtgttctaagtgttgaatttaatct

SEQ ID NO: 82650 - DNA, 25 bp, SARS Virus
tgttctaagtggtgaatttaatctc

SEQ ID NO: 82651 - DNA, 25 bp, SARS Virus
gttctaagtggttaatttaatctcc

SEQ ID NO: 82652 - DNA, 25 bp, SARS Virus
ttctaagtggtgtatttaatctcct

SEQ ID NO: 82653 - DNA, 25 bp, SARS Virus
tctaagtggtgattttaatctccta

SEQ ID NO: 82654 - DNA, 25 bp, SARS Virus
ctaagtggtgaatttaatctcctaa

SEQ ID NO: 82655 - DNA, 25 bp, SARS Virus
taagtggtgaatttaatctcctaaa

SEQ ID NO: 82656 - DNA, 25 bp, SARS Virus
aagtggtgaatttaatctcctaaaa

SEQ ID NO: 82657 - DNA, 25 bp, SARS Virus
agtggtgaattttatctcctaaaat

SEQ ID NO: 82658 - DNA, 25 bp, SARS Virus
gtggtgaatttattctcctaaaata

SEQ ID NO: 82659 - DNA, 25 bp, SARS Virus
tggtgaatttaatctcctaaaatag

SEQ ID NO: 82660 - DNA, 25 bp, SARS Virus
ggtgaatttaatttcctaaaatagg

SEQ ID NO: 82661 - DNA, 25 bp, SARS Virus
gtgaatttaatctcctaaaataggg

SEQ ID NO: 82662 - DNA, 25 bp, SARS Virus
tgaatttaatcttctaaaataggga

SEQ ID NO: 82663 - DNA, 25 bp, SARS Virus
gaatttaatctcttaaaatagggat

SEQ ID NO: 82664 - DNA, 25 bp, SARS Virus
aatttaatctcctaaaatagggata

SEQ ID NO: 82665 - DNA, 25 bp, SARS Virus
atttaatctccttaaatagggatac

SEQ ID NO: 82666 - DNA, 25 bp, SARS Virus
tttaatctcctataatagggatacc

SEQ ID NO: 82667 - DNA, 25 bp, SARS Virus
ttaatctcctaatatagggatacct

SEQ ID NO: 82668 - DNA, 25 bp, SARS Virus
taatctcctaaattagggatacctg

SEQ ID NO: 82669 - DNA, 25 bp, SARS Virus
aatctcctaaaatagggatacctgt

SEQ ID NO: 82670 - DNA, 25 bp, SARS Virus
atctcctaaaattgggatacctgtc

SEQ ID NO: 82671 - DNA, 25 bp, SARS Virus
tctcctaaaatatggatacctgtcg

SEQ ID NO: 82672 - DNA, 25 bp, SARS Virus
ctcctaaaatagtgatacctgtcgt

SEQ ID NO: 82673 - DNA, 25 bp, SARS Virus
tcctaaaataggtatacctgtcgtg

SEQ ID NO: 82674 - DNA, 25 bp, SARS Virus
cctaaaatagggttacctgtcgtgt

SEQ ID NO: 82675 - DNA, 25 bp, SARS Virus
ctaaaatagggatacctgtcgtgtc

SEQ ID NO: 82676 - DNA, 25 bp, SARS Virus
taaaatagggattcctgtcgtgtca

SEQ ID NO: 82677 - DNA, 25 bp, SARS Virus
aaaatagggatatctgtcgtgtcac

SEQ ID NO: 82678 - DNA, 25 bp, SARS Virus
aaatagggatacttgtcgtgtcact

SEQ ID NO: 82679 - DNA, 25 bp, SARS Virus
aatagggatacctgtcgtgtcactt

SEQ ID NO: 82680 - DNA, 25 bp, SARS Virus
atagggatacctttcgtgtcacttt

SEQ ID NO: 82681 - DNA, 25 bp, SARS Virus
tagggatacctgtcgtgtcactttt

SEQ ID NO: 82682 - DNA, 25 bp, SARS Virus
agggatacctgttgtgtcacttttt

SEQ ID NO: 82683 - DNA, 25 bp, SARS Virus
gggatacctgtcttgtcacttttta

SEQ ID NO: 82684 - DNA, 25 bp, SARS Virus
ggatacctgtcgtgtcactttttaa

SEQ ID NO: 82685 - DNA, 25 bp, SARS Virus
gatacctgtcgtttcactttttaat

SEQ ID NO: 82686 - DNA, 25 bp, SARS Virus
atacctgtcgtgtcactttttaatg

SEQ ID NO: 82687 - DNA, 25 bp, SARS Virus
tacctgtcgtgttactttttaatga

SEQ ID NO: 82688 - DNA, 25 bp, SARS Virus
acctgtcgtgtctctttttaatgaa

SEQ ID NO: 82689 - DNA, 25 bp, SARS Virus
cctgtcgtgtcattttttaatgaag

SEQ ID NO: 82690 - DNA, 25 bp, SARS Virus
ctgtcgtgtcactttttaatgaagt

SEQ ID NO: 82691 - DNA, 25 bp, SARS Virus
tgtcgtgtcactttttaatgaagta

SEQ ID NO: 82692 - DNA, 25 bp, SARS Virus
gtcgtgtcactttttaatgaagtat

SEQ ID NO: 82693 - DNA, 25 bp, SARS Virus
tcgtgtcactttttaatgaagtatt

SEQ ID NO: 82694 - DNA, 25 bp, SARS Virus
cgtgtcactttttaatgaagtattg

SEQ ID NO: 82695 - DNA, 25 bp, SARS Virus
gtgtcacttttttatgaagtattgt

SEQ ID NO: 82696 - DNA, 25 bp, SARS Virus
tgtcactttttattgaagtattgtc

SEQ ID NO: 82697 - DNA, 25 bp, SARS Virus
gtcactttttaatgaagtattgtct

SEQ ID NO: 82698 - DNA, 25 bp, SARS Virus
tcactttttaattaagtattgtcta

SEQ ID NO: 82699 - DNA, 25 bp, SARS Virus
cactttttaatgtagtattgtctac

SEQ ID NO: 82700 - DNA, 25 bp, SARS Virus
actttttaatgatgtattgtctacg

SEQ ID NO: 82701 - DNA, 25 bp, SARS Virus
ctttttaatgaattattgtctacgc

SEQ ID NO: 82702 - DNA, 25 bp, SARS Virus
tttttaatgaagtattgtctacgcg

SEQ ID NO: 82703 - DNA, 25 bp, SARS Virus
ttttaatgaagttttgtctacgcgt

SEQ ID NO: 82704 - DNA, 25 bp, SARS Virus
tttaatgaagtattgtctacgcgtt

SEQ ID NO: 82705 - DNA, 25 bp, SARS Virus
ttaatgaagtattgtctacgcgttt

SEQ ID NO: 82706 - DNA, 25 bp, SARS Virus
taatgaagtattttctacgcgtttg

SEQ ID NO: 82707 - DNA, 25 bp, SARS Virus
aatgaagtattgtctacgcgtttgt

SEQ ID NO: 82708 - DNA, 25 bp, SARS Virus
atgaagtattgtttacgcgtttgtc

SEQ ID NO: 82709 - DNA, 25 bp, SARS Virus
tgaagtattgtctacgcgtttgtcc

SEQ ID NO: 82710 - DNA, 25 bp, SARS Virus
gaagtattgtcttcgcgtttgtcca

SEQ ID NO: 82711 - DNA, 25 bp, SARS Virus
aagtattgtctatgcgtttgtccaa

SEQ ID NO: 82712 - DNA, 25 bp, SARS Virus
agtattgtctactcgtttgtccaag

SEQ ID NO: 82713 - DNA, 25 bp, SARS Virus
gtattgtctacgtgtttgtccaagt

SEQ ID NO: 82714 - DNA, 25 bp, SARS Virus
tattgtctacgcttttgtccaagta

SEQ ID NO: 82715 - DNA, 25 bp, SARS Virus
attgtctacgcgtttgtccaagtag

SEQ ID NO: 82716 - DNA, 25 bp, SARS Virus
ttgtctacgcgtttgtccaagtagt

SEQ ID NO: 82717 - DNA, 25 bp, SARS Virus
tgtctacgcgtttgtccaagtagtt

SEQ ID NO: 82718 - DNA, 25 bp, SARS Virus
gtctacgcgtttttccaagtagttt

SEQ ID NO: 82719 - DNA, 25 bp, SARS Virus
tctacgcgtttgtccaagtagtttt

SEQ ID NO: 82720 - DNA, 25 bp, SARS Virus
ctacgcgtttgttcaagtagtttta

SEQ ID NO: 82721 - DNA, 25 bp, SARS Virus
tacgcgtttgtctaagtagttttac

SEQ ID NO: 82722 - DNA, 25 bp, SARS Virus
acgcgtttgtcctagtagttttaca

SEQ ID NO: 82723 - DNA, 25 bp, SARS Virus
cgcgtttgtccatgtagttttacac

SEQ ID NO: 82724 - DNA, 25 bp, SARS Virus
gcgtttgtccaattagttttacaca

SEQ ID NO: 82725 - DNA, 25 bp, SARS Virus
cgtttgtccaagtagttttacacac

SEQ ID NO: 82726 - DNA, 25 bp, SARS Virus
gtttgtccaagttgttttacacaca

SEQ ID NO: 82727 - DNA, 25 bp, SARS Virus
tttgtccaagtatttttacacacac

SEQ ID NO: 82728 - DNA, 25 bp, SARS Virus
ttgtccaagtagttttacacacaca

SEQ ID NO: 82729 - DNA, 25 bp, SARS Virus
tgtccaagtagttttacacacacaa

SEQ ID NO: 82730 - DNA, 25 bp, SARS Virus
gtccaagtagttttacacacacaag

SEQ ID NO: 82731 - DNA, 25 bp, SARS Virus
tccaagtagttttacacacacaaga

SEQ ID NO: 82732 - DNA, 25 bp, SARS Virus
ccaagtagtttttcacacacaagac

SEQ ID NO: 82733 - DNA, 25 bp, SARS Virus
caagtagttttatacacacaagaca

SEQ ID NO: 82734 - DNA, 25 bp, SARS Virus
aagtagttttactcacacaagacac

SEQ ID NO: 82735 - DNA, 25 bp, SARS Virus
agtagttttacatacacaagacact

SEQ ID NO: 82736 - DNA, 25 bp, SARS Virus
gtagttttacactcacaagacacta

SEQ ID NO: 82737 - DNA, 25 bp, SARS Virus
tagttttacacatacaagacactaa

SEQ ID NO: 82738 - DNA, 25 bp, SARS Virus
agttttacacactcaagacactaac

SEQ ID NO: 82739 - DNA, 25 bp, SARS Virus
gttttacacacataagacactaact

SEQ ID NO: 82740 - DNA, 25 bp, SARS Virus
ttttacacacactagacactaacta

SEQ ID NO: 82741 - DNA, 25 bp, SARS Virus
tttacacacacatgacactaactag

SEQ ID NO: 82742 - DNA, 25 bp, SARS Virus
ttacacacacaatacactaactaga

SEQ ID NO: 82743 - DNA, 25 bp, SARS Virus
tacacacacaagtcactaactagaa

SEQ ID NO: 82744 - DNA, 25 bp, SARS Virus
acacacacaagatactaactagaaa

SEQ ID NO: 82745 - DNA, 25 bp, SARS Virus
cacacacaagactctaactagaaaa

SEQ ID NO: 82746 - DNA, 25 bp, SARS Virus
acacacaagacattaactagaaaat

SEQ ID NO: 82747 - DNA, 25 bp, SARS Virus
cacacaagacactaactagaaaatg

SEQ ID NO: 82748 - DNA, 25 bp, SARS Virus
acacaagacacttactagaaaatga

SEQ ID NO: 82749 - DNA, 25 bp, SARS Virus
cacaagacactatctagaaaatgaa

SEQ ID NO: 82750 - DNA, 25 bp, SARS Virus
acaagacactaattagaaaatgaac

SEQ ID NO: 82751 - DNA, 25 bp, SARS Virus
caagacactaactagaaaatgaact

SEQ ID NO: 82752 - DNA, 25 bp, SARS Virus
aagacactaacttgaaaatgaacta

SEQ ID NO: 82753 - DNA, 25 bp, SARS Virus
agacactaactataaaatgaactac

SEQ ID NO: 82754 - DNA, 25 bp, SARS Virus
gacactaactagtaaatgaactact

SEQ ID NO: 82755 - DNA, 25 bp, SARS Virus
acactaactagataatgaactactg

SEQ ID NO: 82756 - DNA, 25 bp, SARS Virus
cactaactagaatatgaactactga

SEQ ID NO: 82757 - DNA, 25 bp, SARS Virus
actaactagaaattgaactactgaa

SEQ ID NO: 82758 - DNA, 25 bp, SARS Virus
ctaactagaaaatgaactactgaaa

SEQ ID NO: 82759 - DNA, 25 bp, SARS Virus
taactagaaaattaactactgaaac

SEQ ID NO: 82760 - DNA, 25 bp, SARS Virus
aactagaaaatgtactactgaaaca

SEQ ID NO: 82761 - DNA, 25 bp, SARS Virus
actagaaaatgatctactgaaacag

SEQ ID NO: 82762 - DNA, 25 bp, SARS Virus
ctagaaaatgaattactgaaacagc

SEQ ID NO: 82763 - DNA, 25 bp, SARS Virus
tagaaaatgaactactgaaacagct

SEQ ID NO: 82764 - DNA, 25 bp, SARS Virus
agaaaatgaacttctgaaacagctc

SEQ ID NO: 82765 - DNA, 25 bp, SARS Virus
gaaaatgaactattgaaacagctct

SEQ ID NO: 82766 - DNA, 25 bp, SARS Virus
aaaatgaactactgaaacagctcta

SEQ ID NO: 82767 - DNA, 25 bp, SARS Virus
aaatgaactacttaaacagctctat

SEQ ID NO: 82768 - DNA, 25 bp, SARS Virus
aatgaactactgtaacagctctatt

SEQ ID NO: 82769 - DNA, 25 bp, SARS Virus
atgaactactgatacagctctatta

SEQ ID NO: 82770 - DNA, 25 bp, SARS Virus
tgaactactgaatcagctctattat

SEQ ID NO: 82771 - DNA, 25 bp, SARS Virus
gaactactgaaatagctctattatt

SEQ ID NO: 82772 - DNA, 25 bp, SARS Virus
aactactgaaactgctctattattt

SEQ ID NO: 82773 - DNA, 25 bp, SARS Virus
actactgaaacatctctattatttc

SEQ ID NO: 82774 - DNA, 25 bp, SARS Virus
ctactgaaacagttctattatttca

SEQ ID NO: 82775 - DNA, 25 bp, SARS Virus
tactgaaacagctctattatttcag

SEQ ID NO: 82776 - DNA, 25 bp, SARS Virus
actgaaacagctttattatttcagt

SEQ ID NO: 82777 - DNA, 25 bp, SARS Virus
ctgaaacagctctattatttcagtg

SEQ ID NO: 82778 - DNA, 25 bp, SARS Virus
tgaaacagctcttttatttcagtgt

SEQ ID NO: 82779 - DNA, 25 bp, SARS Virus
gaaacagctctattatttcagtgtt

SEQ ID NO: 82780 - DNA, 25 bp, SARS Virus
aaacagctctattatttcagtgttc

SEQ ID NO: 82781 - DNA, 25 bp, SARS Virus
aacagctctattttttcagtgttct

SEQ ID NO: 82782 - DNA, 25 bp, SARS Virus
acagctctattatttcagtgttcta

SEQ ID NO: 82783 - DNA, 25 bp, SARS Virus
cagctctattatttcagtgttctaa

SEQ ID NO: 82784 - DNA, 25 bp, SARS Virus
agctctattatttcagtgttctaaa

SEQ ID NO: 82785 - DNA, 25 bp, SARS Virus
gctctattattttagtgttctaaac

SEQ ID NO: 82786 - DNA, 25 bp, SARS Virus
ctctattatttctgtgttctaaaca

SEQ ID NO: 82787 - DNA, 25 bp, SARS Virus
tctattatttcattgttctaaacag

SEQ ID NO: 82788 - DNA, 25 bp, SARS Virus
ctattatttcagtgttctaaacagt

SEQ ID NO: 82789 - DNA, 25 bp, SARS Virus
tattatttcagttttctaaacagtc

SEQ ID NO: 82790 - DNA, 25 bp, SARS Virus
attatttcagtgttctaaacagtca

SEQ ID NO: 82791 - DNA, 25 bp, SARS Virus
ttatttcagtgttctaaacagtcac

SEQ ID NO: 82792 - DNA, 25 bp, SARS Virus
tatttcagtgttttaaacagtcact

SEQ ID NO: 82793 - DNA, 25 bp, SARS Virus
atttcagtgttctaaacagtcacta

SEQ ID NO: 82794 - DNA, 25 bp, SARS Virus
tttcagtgttcttaacagtcactaa

SEQ ID NO: 82795 - DNA, 25 bp, SARS Virus
ttcagtgttctatacagtcactaaa

SEQ ID NO: 82796 - DNA, 25 bp, SARS Virus
tcagtgttctaatcagtcactaaag

SEQ ID NO: 82797 - DNA, 25 bp, SARS Virus
cagtgttctaaatagtcactaaagt

SEQ ID NO: 82798 - DNA, 25 bp, SARS Virus
agtgttctaaactgtcactaaagtt

SEQ ID NO: 82799 - DNA, 25 bp, SARS Virus
gtgttctaaacattcactaaagttt

SEQ ID NO: 82800 - DNA, 25 bp, SARS Virus
tgttctaaacagtcactaaagtttt

SEQ ID NO: 82801 - DNA, 25 bp, SARS Virus
gttctaaacagttactaaagttttc

SEQ ID NO: 82802 - DNA, 25 bp, SARS Virus
ttctaaacagtctctaaagttttca

SEQ ID NO: 82803 - DNA, 25 bp, SARS Virus
tctaaacagtcattaaagttttcac

SEQ ID NO: 82804 - DNA, 25 bp, SARS Virus
ctaaacagtcactaaagttttcacc

SEQ ID NO: 82805 - DNA, 25 bp, SARS Virus
taaacagtcacttaagttttcacca

SEQ ID NO: 82806 - DNA, 25 bp, SARS Virus
aaacagtcactatagttttcaccag

SEQ ID NO: 82807 - DNA, 25 bp, SARS Virus
aacagtcactaatgttttcaccagt

SEQ ID NO: 82808 - DNA, 25 bp, SARS Virus
acagtcactaaatttttcaccagtt

SEQ ID NO: 82809 - DNA, 25 bp, SARS Virus
cagtcactaaagttttcaccagttc

SEQ ID NO: 82810 - DNA, 25 bp, SARS Virus
agtcactaaagttttcaccagttcc

SEQ ID NO: 82811 - DNA, 25 bp, SARS Virus
gtcactaaagttttcaccagttcca

SEQ ID NO: 82812 - DNA, 25 bp, SARS Virus
tcactaaagttttcaccagttccaa

SEQ ID NO: 82813 - DNA, 25 bp, SARS Virus
cactaaagtttttaccagttccaat

SEQ ID NO: 82814 - DNA, 25 bp, SARS Virus
actaaagttttctccagttccaatg

SEQ ID NO: 82815 - DNA, 25 bp, SARS Virus
ctaaagttttcatcagttccaatgt

SEQ ID NO: 82816 - DNA, 25 bp, SARS Virus
taaagttttcactagttccaatgtt

SEQ ID NO: 82817 - DNA, 25 bp, SARS Virus
aaagttttcacctgttccaatgtta

SEQ ID NO: 82818 - DNA, 25 bp, SARS Virus
aagttttcaccatttccaatgttaa

SEQ ID NO: 82819 - DNA, 25 bp, SARS Virus
agttttcaccagttccaatgttaac

SEQ ID NO: 82820 - DNA, 25 bp, SARS Virus
gttttcaccagttccaatgttaact

SEQ ID NO: 82821 - DNA, 25 bp, SARS Virus
ttttcaccagtttcaatgttaactg

SEQ ID NO: 82822 - DNA, 25 bp, SARS Virus
tttcaccagttctaatgttaactga

SEQ ID NO: 82823 - DNA, 25 bp, SARS Virus
ttcaccagttcctatgttaactgat

SEQ ID NO: 82824 - DNA, 25 bp, SARS Virus
tcaccagttccattgttaactgata

SEQ ID NO: 82825 - DNA, 25 bp, SARS Virus
caccagttccaatgttaactgatac

SEQ ID NO: 82826 - DNA, 25 bp, SARS Virus
accagttccaattttaactgatacg

SEQ ID NO: 82827 - DNA, 25 bp, SARS Virus
ccagttccaatgttaactgatacga

SEQ ID NO: 82828 - DNA, 25 bp, SARS Virus
cagttccaatgttaactgatacgac

SEQ ID NO: 82829 - DNA, 25 bp, SARS Virus
agttccaatgtttactgatacgact

SEQ ID NO: 82830 - DNA, 25 bp, SARS Virus
gttccaatgttatctgatacgactt

SEQ ID NO: 82831 - DNA, 25 bp, SARS Virus
ttccaatgttaattgatacgacttt

SEQ ID NO: 82832 - DNA, 25 bp, SARS Virus
tccaatgttaactgatacgacttta

SEQ ID NO: 82833 - DNA, 25 bp, SARS Virus
ccaatgttaacttatacgactttaa

SEQ ID NO: 82834 - DNA, 25 bp, SARS Virus
caatgttaactgttacgactttaaa

SEQ ID NO: 82835 - DNA, 25 bp, SARS Virus
aatgttaactgatacgactttaaag

SEQ ID NO: 82836 - DNA, 25 bp, SARS Virus
atgttaactgattcgactttaaagt

SEQ ID NO: 82837 - DNA, 25 bp, SARS Virus
tgttaactgatatgactttaaagta

SEQ ID NO: 82838 - DNA, 25 bp, SARS Virus
gttaactgatactactttaaagtaa

SEQ ID NO: 82839 - DNA, 25 bp, SARS Virus
ttaactgatacgtctttaaagtaag

SEQ ID NO: 82840 - DNA, 25 bp, SARS Virus
taactgatacgattttaaagtaagt

SEQ ID NO: 82841 - DNA, 25 bp, SARS Virus
aactgatacgactttaaagtaagta

SEQ ID NO: 82842 - DNA, 25 bp, SARS Virus
actgatacgactttaaagtaagtac

SEQ ID NO: 82843 - DNA, 25 bp, SARS Virus
ctgatacgactttaaagtaagtacg

SEQ ID NO: 82844 - DNA, 25 bp, SARS Virus
tgatacgacttttaagtaagtacga

SEQ ID NO: 82845 - DNA, 25 bp, SARS Virus
gatacgactttatagtaagtacgaa

SEQ ID NO: 82846 - DNA, 25 bp, SARS Virus
atacgactttaatgtaagtacgaaa

SEQ ID NO: 82847 - DNA, 25 bp, SARS Virus
tacgactttaaattaagtacgaaac

SEQ ID NO: 82848 - DNA, 25 bp, SARS Virus
acgactttaaagtaagtacgaaacc

SEQ ID NO: 82849 - DNA, 25 bp, SARS Virus
cgactttaaagttagtacgaaacca

SEQ ID NO: 82850 - DNA, 25 bp, SARS Virus
gactttaaagtatgtacgaaaccac

SEQ ID NO: 82851 - DNA, 25 bp, SARS Virus
actttaaagtaattacgaaaccaca

SEQ ID NO: 82852 - DNA, 25 bp, SARS Virus
ctttaaagtaagtacgaaaccacat

SEQ ID NO: 82853 - DNA, 25 bp, SARS Virus
tttaaagtaagttcgaaaccacatt

SEQ ID NO: 82854 - DNA, 25 bp, SARS Virus
ttaaagtaagtatgaaaccacattc

SEQ ID NO: 82855 - DNA, 25 bp, SARS Virus
taaagtaagtactaaaccacattcc

SEQ ID NO: 82856 - DNA, 25 bp, SARS Virus
aaagtaagtacgtaaccacattcct

SEQ ID NO: 82857 - DNA, 25 bp, SARS Virus
aagtaagtacgataccacattccta

SEQ ID NO: 82858 - DNA, 25 bp, SARS Virus
agtaagtacgaatccacattcctac

SEQ ID NO: 82859 - DNA, 25 bp, SARS Virus
gtaagtacgaaatcacattcctacc

SEQ ID NO: 82860 - DNA, 25 bp, SARS Virus
taagtacgaaactacattcctacct

SEQ ID NO: 82861 - DNA, 25 bp, SARS Virus
aagtacgaaacctcattcctacctg

SEQ ID NO: 82862 - DNA, 25 bp, SARS Virus
agtacgaaaccatattcctacctgt

SEQ ID NO: 82863 - DNA, 25 bp, SARS Virus
gtacgaaaccactttcctacctgta

SEQ ID NO: 82864 - DNA, 25 bp, SARS Virus
tacgaaaccacattcctacctgtac

SEQ ID NO: 82865 - DNA, 25 bp, SARS Virus
acgaaaccacattcctacctgtaca

SEQ ID NO: 82866 - DNA, 25 bp, SARS Virus
cgaaaccacatttctacctgtacaa

SEQ ID NO: 82867 - DNA, 25 bp, SARS Virus
gaaaccacattcttacctgtacaac

SEQ ID NO: 82868 - DNA, 25 bp, SARS Virus
aaaccacattcctacctgtacaact

SEQ ID NO: 82869 - DNA, 25 bp, SARS Virus
aaccacattccttcctgtacaactt

SEQ ID NO: 82870 - DNA, 25 bp, SARS Virus
accacattcctatctgtacaacttt

SEQ ID NO: 82871 - DNA, 25 bp, SARS Virus
ccacattcctacttgtacaactttg

SEQ ID NO: 82872 - DNA, 25 bp, SARS Virus
cacattcctacctgtacaactttgg

SEQ ID NO: 82873 - DNA, 25 bp, SARS Virus
acattcctacctttacaactttgga

SEQ ID NO: 82874 - DNA, 25 bp, SARS Virus
cattcctacctgtacaactttggaa

SEQ ID NO: 82875 - DNA, 25 bp, SARS Virus
attcctacctgttcaactttggaag

SEQ ID NO: 82876 - DNA, 25 bp, SARS Virus
ttcctacctgtataactttggaaga

SEQ ID NO: 82877 - DNA, 25 bp, SARS Virus
tcctacctgtactactttggaagat

SEQ ID NO: 82878 - DNA, 25 bp, SARS Virus
cctacctgtacatctttggaagatg

SEQ ID NO: 82879 - DNA, 25 bp, SARS Virus
ctacctgtacaattttggaagatgg

SEQ ID NO: 82880 - DNA, 25 bp, SARS Virus
tacctgtacaactttggaagatggg

SEQ ID NO: 82881 - DNA, 25 bp, SARS Virus
acctgtacaactttggaagatgggt

SEQ ID NO: 82882 - DNA, 25 bp, SARS Virus
cctgtacaactttggaagatgggtt

SEQ ID NO: 82883 - DNA, 25 bp, SARS Virus
ctgtacaacttttgaagatgggttt

SEQ ID NO: 82884 - DNA, 25 bp, SARS Virus
tgtacaactttgtaagatgggtttt

SEQ ID NO: 82885 - DNA, 25 bp, SARS Virus
gtacaactttggtagatgggttttg

SEQ ID NO: 82886 - DNA, 25 bp, SARS Virus
tacaactttggatgatgggttttga

SEQ ID NO: 82887 - DNA, 25 bp, SARS Virus
acaactttggaatatgggttttgat

SEQ ID NO: 82888 - DNA, 25 bp, SARS Virus
caactttggaagttgggttttgatg

SEQ ID NO: 82889 - DNA, 25 bp, SARS Virus
aactttggaagatgggttttgatgt

SEQ ID NO: 82890 - DNA, 25 bp, SARS Virus
actttggaagattggttttgatgtt

SEQ ID NO: 82891 - DNA, 25 bp, SARS Virus
ctttggaagatgtgttttgatgttc

SEQ ID NO: 82892 - DNA, 25 bp, SARS Virus
tttggaagatggtttttgatgttcg

SEQ ID NO: 82893 - DNA, 25 bp, SARS Virus
ttggaagatgggttttgatgttcgt

SEQ ID NO: 82894 - DNA, 25 bp, SARS Virus
tggaagatgggttttgatgttcgtt

SEQ ID NO: 82895 - DNA, 25 bp, SARS Virus
ggaagatgggttttgatgttcgttc

SEQ ID NO: 82896 - DNA, 25 bp, SARS Virus
gaagatgggttttgatgttcgttca

SEQ ID NO: 82897 - DNA, 25 bp, SARS Virus
aagatgggtttttatgttcgttcag

SEQ ID NO: 82898 - DNA, 25 bp, SARS Virus
agatgggttttgttgttcgttcagt

SEQ ID NO: 82899 - DNA, 25 bp, SARS Virus
gatgggttttgatgttcgttcagtt

SEQ ID NO: 82900 - DNA, 25 bp, SARS Virus
atgggttttgattttcgttcagttc

SEQ ID NO: 82901 - DNA, 25 bp, SARS Virus
tgggttttgatgttcgttcagttcg

SEQ ID NO: 82902 - DNA, 25 bp, SARS Virus
gggttttgatgttcgttcagttcgc

SEQ ID NO: 82903 - DNA, 25 bp, SARS Virus
ggttttgatgtttgttcagttcgca

SEQ ID NO: 82904 - DNA, 25 bp, SARS Virus
gttttgatgttctttcagttcgcac

SEQ ID NO: 82905 - DNA, 25 bp, SARS Virus
ttttgatgttcgttcagttcgcacc

SEQ ID NO: 82906 - DNA, 25 bp, SARS Virus
tttgatgttcgttcagttcgcaccg

SEQ ID NO: 82907 - DNA, 25 bp, SARS Virus
ttgatgttcgtttagttcgcaccgt

SEQ ID NO: 82908 - DNA, 25 bp, SARS Virus
tgatgttcgttctgttcgcaccgtt

SEQ ID NO: 82909 - DNA, 25 bp, SARS Virus
gatgttcgttcatttcgcaccgttg

SEQ ID NO: 82910 - DNA, 25 bp, SARS Virus
atgttcgttcagttcgcaccgttgg

SEQ ID NO: 82911 - DNA, 25 bp, SARS Virus
tgttcgttcagttcgcaccgttggt

SEQ ID NO: 82912 - DNA, 25 bp, SARS Virus
gttcgttcagtttgcaccgttggtc

SEQ ID NO: 82913 - DNA, 25 bp, SARS Virus
ttcgttcagttctcaccgttggtcc

SEQ ID NO: 82914 - DNA, 25 bp, SARS Virus
tcgttcagttcgtaccgttggtcca

SEQ ID NO: 82915 - DNA, 25 bp, SARS Virus
cgttcagttcgctccgttggtccac

SEQ ID NO: 82916 - DNA, 25 bp, SARS Virus
gttcagttcgcatcgttggtccaca

SEQ ID NO: 82917 - DNA, 25 bp, SARS Virus
ttcagttcgcactgttggtccacaa

SEQ ID NO: 82918 - DNA, 25 bp, SARS Virus
tcagttcgcacctttggtccacaac

SEQ ID NO: 82919 - DNA, 25 bp, SARS Virus
cagttcgcaccgttggtccacaacg

SEQ ID NO: 82920 - DNA, 25 bp, SARS Virus
agttcgcaccgttggtccacaacgc

SEQ ID NO: 82921 - DNA, 25 bp, SARS Virus
gttcgcaccgtttgtccacaacgct

SEQ ID NO: 82922 - DNA, 25 bp, SARS Virus
ttcgcaccgttgttccacaacgcta

SEQ ID NO: 82923 - DNA, 25 bp, SARS Virus
tcgcaccgttggtccacaacgctac

SEQ ID NO: 82924 - DNA, 25 bp, SARS Virus
cgcaccgttggttcacaacgctacg

SEQ ID NO: 82925 - DNA, 25 bp, SARS Virus
gcaccgttggtctacaacgctacgg

SEQ ID NO: 82926 - DNA, 25 bp, SARS Virus
caccgttggtcctcaacgctacgga

SEQ ID NO: 82927 - DNA, 25 bp, SARS Virus
accgttggtccataacgctacggat

SEQ ID NO: 82928 - DNA, 25 bp, SARS Virus
ccgttggtccactacgctacggatt

SEQ ID NO: 82929 - DNA, 25 bp, SARS Virus
cgttggtccacatcgctacggattg

SEQ ID NO: 82930 - DNA, 25 bp, SARS Virus
gttggtccacaatgctacggattga

SEQ ID NO: 82931 - DNA, 25 bp, SARS Virus
ttggtccacaactctacggattgaa

SEQ ID NO: 82932 - DNA, 25 bp, SARS Virus
tggtccacaacgttacggattgaac

SEQ ID NO: 82933 - DNA, 25 bp, SARS Virus
ggtccacaacgctacggattgaaca

SEQ ID NO: 82934 - DNA, 25 bp, SARS Virus
gtccacaacgcttcggattgaacat

SEQ ID NO: 82935 - DNA, 25 bp, SARS Virus
tccacaacgctatggattgaacatg

SEQ ID NO: 82936 - DNA, 25 bp, SARS Virus
ccacaacgctactgattgaacatgt

SEQ ID NO: 82937 - DNA, 25 bp, SARS Virus
cacaacgctacgtattgaacatgtt

SEQ ID NO: 82938 - DNA, 25 bp, SARS Virus
acaacgctacggtttgaacatgttc

SEQ ID NO: 82939 - DNA, 25 bp, SARS Virus
caacgctacggattgaacatgttct

SEQ ID NO: 82940 - DNA, 25 bp, SARS Virus
aacgctacggattgaacatgttcta

SEQ ID NO: 82941 - DNA, 25 bp, SARS Virus
acgctacggatttaacatgttctac

SEQ ID NO: 82942 - DNA, 25 bp, SARS Virus
cgctacggattgtacatgttctacg

SEQ ID NO: 82943 - DNA, 25 bp, SARS Virus
gctacggattgatcatgttctacgt

SEQ ID NO: 82944 - DNA, 25 bp, SARS Virus
ctacggattgaatatgttctacgtt

SEQ ID NO: 82945 - DNA, 25 bp, SARS Virus
tacggattgaacttgttctacgttt

SEQ ID NO: 82946 - DNA, 25 bp, SARS Virus
acggattgaacatgttctacgtttc

SEQ ID NO: 82947 - DNA, 25 bp, SARS Virus
cggattgaacattttctacgtttct

SEQ ID NO: 82948 - DNA, 25 bp, SARS Virus
ggattgaacatgttctacgtttctt

SEQ ID NO: 82949 - DNA, 25 bp, SARS Virus
gattgaacatgttctacgtttctta

SEQ ID NO: 82950 - DNA, 25 bp, SARS Virus
attgaacatgttttacgtttcttac

SEQ ID NO: 82951 - DNA, 25 bp, SARS Virus
ttgaacatgttctacgtttcttacg

SEQ ID NO: 82952 - DNA, 25 bp, SARS Virus
tgaacatgttcttcgtttcttacga

SEQ ID NO: 82953 - DNA, 25 bp, SARS Virus
gaacatgttctatgtttcttacgaa

SEQ ID NO: 82954 - DNA, 25 bp, SARS Virus
aacatgttctacttttcttacgaag

SEQ ID NO: 82955 - DNA, 25 bp, SARS Virus
acatgttctacgtttcttacgaaga

SEQ ID NO: 82956 - DNA, 25 bp, SARS Virus
catgttctacgtttcttacgaagaa

SEQ ID NO: 82957 - DNA, 25 bp, SARS Virus
atgttctacgtttcttacgaagaac

SEQ ID NO: 82958 - DNA, 25 bp, SARS Virus
tgttctacgttttttacgaagaact

SEQ ID NO: 82959 - DNA, 25 bp, SARS Virus
gttctacgtttcttacgaagaactt

SEQ ID NO: 82960 - DNA, 25 bp, SARS Virus
ttctacgtttcttacgaagaacttt

SEQ ID NO: 82961 - DNA, 25 bp, SARS Virus
tctacgtttctttcgaagaactttt

SEQ ID NO: 82962 - DNA, 25 bp, SARS Virus
ctacgtttcttatgaagaacttttc

SEQ ID NO: 82963 - DNA, 25 bp, SARS Virus
tacgtttcttactaagaacttttca

SEQ ID NO: 82964 - DNA, 25 bp, SARS Virus
acgtttcttacgtagaacttttcac

SEQ ID NO: 82965 - DNA, 25 bp, SARS Virus
cgtttcttacgatgaacttttcaca

SEQ ID NO: 82966 - DNA, 25 bp, SARS Virus
gtttcttacgaataacttttcacac

SEQ ID NO: 82967 - DNA, 25 bp, SARS Virus
tttcttacgaagtacttttcacact

SEQ ID NO: 82968 - DNA, 25 bp, SARS Virus
ttcttacgaagatcttttcacactg

SEQ ID NO: 82969 - DNA, 25 bp, SARS Virus
tcttacgaagaatttttcacactgg

SEQ ID NO: 82970 - DNA, 25 bp, SARS Virus
cttacgaagaacttttcacactgga

SEQ ID NO: 82971 - DNA, 25 bp, SARS Virus
ttacgaagaacttttcacactggaa

SEQ ID NO: 82972 - DNA, 25 bp, SARS Virus
tacgaagaacttttcacactggaag

SEQ ID NO: 82973 - DNA, 25 bp, SARS Virus
acgaagaacttttcacactggaagt

SEQ ID NO: 82974 - DNA, 25 bp, SARS Virus
cgaagaactttttacactggaagtc

SEQ ID NO: 82975 - DNA, 25 bp, SARS Virus
gaagaacttttctcactggaagtct

SEQ ID NO: 82976 - DNA, 25 bp, SARS Virus
aagaacttttcatactggaagtctt

SEQ ID NO: 82977 - DNA, 25 bp, SARS Virus
agaacttttcactctggaagtctta

SEQ ID NO: 82978 - DNA, 25 bp, SARS Virus
gaacttttcacattggaagtcttaa

SEQ ID NO: 82979 - DNA, 25 bp, SARS Virus
aacttttcacactggaagtcttaat

SEQ ID NO: 82980 - DNA, 25 bp, SARS Virus
acttttcacacttgaagtcttaata

SEQ ID NO: 82981 - DNA, 25 bp, SARS Virus
cttttcacactgtaagtcttaatac

SEQ ID NO: 82982 - DNA, 25 bp, SARS Virus
ttttcacactggtagtcttaatacc

SEQ ID NO: 82983 - DNA, 25 bp, SARS Virus
tttcacactggatgtcttaatacca

SEQ ID NO: 82984 - DNA, 25 bp, SARS Virus
ttcacactggaattcttaataccac

SEQ ID NO: 82985 - DNA, 25 bp, SARS Virus
tcacactggaagtcttaataccact

SEQ ID NO: 82986 - DNA, 25 bp, SARS Virus
cacactggaagttttaataccactt

SEQ ID NO: 82987 - DNA, 25 bp, SARS Virus
acactggaagtcttaataccacttt

SEQ ID NO: 82988 - DNA, 25 bp, SARS Virus
cactggaagtcttaataccactttt

SEQ ID NO: 82989 - DNA, 25 bp, SARS Virus
actggaagtctttataccactttta

SEQ ID NO: 82990 - DNA, 25 bp, SARS Virus
ctggaagtcttattaccacttttac

SEQ ID NO: 82991 - DNA, 25 bp, SARS Virus
tggaagtcttaataccacttttacg

SEQ ID NO: 82992 - DNA, 25 bp, SARS Virus
ggaagtcttaattccacttttacga

SEQ ID NO: 82993 - DNA, 25 bp, SARS Virus
gaagtcttaatatcacttttacgac

SEQ ID NO: 82994 - DNA, 25 bp, SARS Virus
aagtcttaatactacttttacgaca

SEQ ID NO: 82995 - DNA, 25 bp, SARS Virus
agtcttaatacctcttttacgacaa

SEQ ID NO: 82996 - DNA, 25 bp, SARS Virus
gtcttaataccatttttacgacaat

SEQ ID NO: 82997 - DNA, 25 bp, SARS Virus
tcttaataccacttttacgacaata

SEQ ID NO: 82998 - DNA, 25 bp, SARS Virus
cttaataccacttttacgacaatat

SEQ ID NO: 82999 - DNA, 25 bp, SARS Virus
ttaataccacttttacgacaatatg

SEQ ID NO: 83000 - DNA, 25 bp, SARS Virus
taataccacttttacgacaatatgg

SEQ ID NO: 83001 - DNA, 25 bp, SARS Virus
aataccactttttcgacaatatggt

SEQ ID NO: 83002 - DNA, 25 bp, SARS Virus
ataccacttttatgacaatatggtt

SEQ ID NO: 83003 - DNA, 25 bp, SARS Virus
taccacttttactacaatatggttt

SEQ ID NO: 83004 - DNA, 25 bp, SARS Virus
accacttttacgtcaatatggtttt

SEQ ID NO: 83005 - DNA, 25 bp, SARS Virus
ccacttttacgataatatggttttc

SEQ ID NO: 83006 - DNA, 25 bp, SARS Virus
cacttttacgactatatggttttcc

SEQ ID NO: 83007 - DNA, 25 bp, SARS Virus
acttttacgacattatggttttcct

SEQ ID NO: 83008 - DNA, 25 bp, SARS Virus
cttttacgacaatatggttttcctt

SEQ ID NO: 83009 - DNA, 25 bp, SARS Virus
ttttacgacaatttggttttcctta

SEQ ID NO: 83010 - DNA, 25 bp, SARS Virus
tttacgacaatatggttttccttat

SEQ ID NO: 83011 - DNA, 25 bp, SARS Virus
ttacgacaatattgttttccttatt

SEQ ID NO: 83012 - DNA, 25 bp, SARS Virus
tacgacaatatgtttttccttatta

SEQ ID NO: 83013 - DNA, 25 bp, SARS Virus
acgacaatatggttttccttattac

SEQ ID NO: 83014 - DNA, 25 bp, SARS Virus
cgacaatatggttttccttattact

SEQ ID NO: 83015 - DNA, 25 bp, SARS Virus
gacaatatggttttccttattacta

SEQ ID NO: 83016 - DNA, 25 bp, SARS Virus
acaatatggttttccttattactac

SEQ ID NO: 83017 - DNA, 25 bp, SARS Virus
caatatggtttttcttattactact

SEQ ID NO: 83018 - DNA, 25 bp, SARS Virus
aatatggttttctttattactactt

SEQ ID NO: 83019 - DNA, 25 bp, SARS Virus
atatggttttccttattactactta

SEQ ID NO: 83020 - DNA, 25 bp, SARS Virus
tatggttttccttattactacttac

SEQ ID NO: 83021 - DNA, 25 bp, SARS Virus
atggttttcctttttactacttaca

SEQ ID NO: 83022 - DNA, 25 bp, SARS Virus
tggttttccttattactacttacag

SEQ ID NO: 83023 - DNA, 25 bp, SARS Virus
ggttttccttattactacttacagc

SEQ ID NO: 83024 - DNA, 25 bp, SARS Virus
gttttccttatttctacttacagcg

SEQ ID NO: 83025 - DNA, 25 bp, SARS Virus
ttttccttattattacttacagcgt

SEQ ID NO: 83026 - DNA, 25 bp, SARS Virus
tttccttattactacttacagcgtt

SEQ ID NO: 83027 - DNA, 25 bp, SARS Virus
ttccttattacttcttacagcgttt

SEQ ID NO: 83028 - DNA, 25 bp, SARS Virus
tccttattactatttacagcgtttc

SEQ ID NO: 83029 - DNA, 25 bp, SARS Virus
ccttattactacttacagcgtttca

SEQ ID NO: 83030 - DNA, 25 bp, SARS Virus
cttattactacttacagcgtttcat

SEQ ID NO: 83031 - DNA, 25 bp, SARS Virus
ttattactactttcagcgtttcata

SEQ ID NO: 83032 - DNA, 25 bp, SARS Virus
tattactacttatagcgtttcatat

SEQ ID NO: 83033 - DNA, 25 bp, SARS Virus
attactacttactgcgtttcatatg

SEQ ID NO: 83034 - DNA, 25 bp, SARS Virus
ttactacttacatcgtttcatatga

SEQ ID NO: 83035 - DNA, 25 bp, SARS Virus
tactacttacagtgtttcatatgag

SEQ ID NO: 83036 - DNA, 25 bp, SARS Virus
actacttacagcttttcatatgagt

SEQ ID NO: 83037 - DNA, 25 bp, SARS Virus
ctacttacagcgtttcatatgagtt

SEQ ID NO: 83038 - DNA, 25 bp, SARS Virus
tacttacagcgtttcatatgagttg

SEQ ID NO: 83039 - DNA, 25 bp, SARS Virus
acttacagcgtttcatatgagttga

SEQ ID NO: 83040 - DNA, 25 bp, SARS Virus
cttacagcgttttatatgagttgac

SEQ ID NO: 83041 - DNA, 25 bp, SARS Virus
ttacagcgtttcttatgagttgaca

SEQ ID NO: 83042 - DNA, 25 bp, SARS Virus
tacagcgtttcatatgagttgacac

SEQ ID NO: 83043 - DNA, 25 bp, SARS Virus
acagcgtttcatttgagttgacaca

SEQ ID NO: 83044 - DNA, 25 bp, SARS Virus
cagcgtttcatatgagttgacacag

SEQ ID NO: 83045 - DNA, 25 bp, SARS Virus
agcgtttcatattagttgacacagt

SEQ ID NO: 83046 - DNA, 25 bp, SARS Virus
gcgtttcatatgtgttgacacagtt

SEQ ID NO: 83047 - DNA, 25 bp, SARS Virus
cgtttcatatgatttgacacagtta

SEQ ID NO: 83048 - DNA, 25 bp, SARS Virus
gtttcatatgagttgacacagttat

SEQ ID NO: 83049 - DNA, 25 bp, SARS Virus
tttcatatgagttgacacagttatg

SEQ ID NO: 83050 - DNA, 25 bp, SARS Virus
ttcatatgagtttacacagttatga

SEQ ID NO: 83051 - DNA, 25 bp, SARS Virus
tcatatgagttgtcacagttatgaa

SEQ ID NO: 83052 - DNA, 25 bp, SARS Virus
catatgagttgatacagttatgaat

SEQ ID NO: 83053 - DNA, 25 bp, SARS Virus
atatgagttgactcagttatgaatt

SEQ ID NO: 83054 - DNA, 25 bp, SARS Virus
tatgagttgacatagttatgaattt

SEQ ID NO: 83055 - DNA, 25 bp, SARS Virus
atgagttgacactgttatgaattta

SEQ ID NO: 83056 - DNA, 25 bp, SARS Virus
tgagttgacacatttatgaatttat

SEQ ID NO: 83057 - DNA, 25 bp, SARS Virus
gagttgacacagttatgaatttatg

SEQ ID NO: 83058 - DNA, 25 bp, SARS Virus
agttgacacagttatgaatttatgt

SEQ ID NO: 83059 - DNA, 25 bp, SARS Virus
gttgacacagttttgaatttatgtg

SEQ ID NO: 83060 - DNA, 25 bp, SARS Virus
ttgacacagttatgaatttatgtga

SEQ ID NO: 83061 - DNA, 25 bp, SARS Virus
tgacacagttattaatttatgtgaa

SEQ ID NO: 83062 - DNA, 25 bp, SARS Virus
gacacagttatgtatttatgtgaat

SEQ ID NO: 83063 - DNA, 25 bp, SARS Virus
acacagttatgattttatgtgaatg

SEQ ID NO: 83064 - DNA, 25 bp, SARS Virus
cacagttatgaatttatgtgaatga

SEQ ID NO: 83065 - DNA, 25 bp, SARS Virus
acagttatgaatttatgtgaatgaa

SEQ ID NO: 83066 - DNA, 25 bp, SARS Virus
cagttatgaatttatgtgaatgaaa

SEQ ID NO: 83067 - DNA, 25 bp, SARS Virus
agttatgaatttttgtgaatgaaat

SEQ ID NO: 83068 - DNA, 25 bp, SARS Virus
gttatgaatttatgtgaatgaaatc

SEQ ID NO: 83069 - DNA, 25 bp, SARS Virus
ttatgaatttatttgaatgaaatcg

SEQ ID NO: 83070 - DNA, 25 bp, SARS Virus
tatgaatttatgtgaatgaaatcga

SEQ ID NO: 83071 - DNA, 25 bp, SARS Virus
atgaatttatgttaatgaaatcgac

SEQ ID NO: 83072 - DNA, 25 bp, SARS Virus
tgaatttatgtgtatgaaatcgaca

SEQ ID NO: 83073 - DNA, 25 bp, SARS Virus
gaatttatgtgattgaaatcgacat

SEQ ID NO: 83074 - DNA, 25 bp, SARS Virus
aatttatgtgaatgaaatcgacatg

SEQ ID NO: 83075 - DNA, 25 bp, SARS Virus
atttatgtgaattaaatcgacatgg

SEQ ID NO: 83076 - DNA, 25 bp, SARS Virus
tttatgtgaatgtaatcgacatggg

SEQ ID NO: 83077 - DNA, 25 bp, SARS Virus
ttatgtgaatgatatcgacatggga

SEQ ID NO: 83078 - DNA, 25 bp, SARS Virus
tatgtgaatgaattcgacatgggat

SEQ ID NO: 83079 - DNA, 25 bp, SARS Virus
atgtgaatgaaatcgacatgggatg

SEQ ID NO: 83080 - DNA, 25 bp, SARS Virus
tgtgaatgaaattgacatgggatgt

SEQ ID NO: 83081 - DNA, 25 bp, SARS Virus
gtgaatgaaatctacatgggatgtt

SEQ ID NO: 83082 - DNA, 25 bp, SARS Virus
tgaatgaaatcgtcatgggatgttg

SEQ ID NO: 83083 - DNA, 25 bp, SARS Virus
gaatgaaatcgatatgggatgttgt

SEQ ID NO: 83084 - DNA, 25 bp, SARS Virus
aatgaaatcgacttgggatgttgta

SEQ ID NO: 83085 - DNA, 25 bp, SARS Virus
atgaaatcgacatgggatgttgtac

SEQ ID NO: 83086 - DNA, 25 bp, SARS Virus
tgaaatcgacattggatgttgtact

SEQ ID NO: 83087 - DNA, 25 bp, SARS Virus
gaaatcgacatgtgatgttgtactc

SEQ ID NO: 83088 - DNA, 25 bp, SARS Virus
aaatcgacatggtatgttgtactct

SEQ ID NO: 83089 - DNA, 25 bp, SARS Virus
aatcgacatgggatgttgtactctc

SEQ ID NO: 83090 - DNA, 25 bp, SARS Virus
atcgacatgggaagttgtactctca

SEQ ID NO: 83091 - DNA, 25 bp, SARS Virus
tcgacatgggatattgtactctcaa

SEQ ID NO: 83092 - DNA, 25 bp, SARS Virus
cgacatgggatgatgtactctcaat

SEQ ID NO: 83093 - DNA, 25 bp, SARS Virus
gacatgggatgtagtactctcaata

SEQ ID NO: 83094 - DNA, 25 bp, SARS Virus
acatgggatgttatactctcaataa

SEQ ID NO: 83095 - DNA, 25 bp, SARS Virus
catgggatgttgaactctcaataag

SEQ ID NO: 83096 - DNA, 25 bp, SARS Virus
atgggatgttgtactctcaataagt

SEQ ID NO: 83097 - DNA, 25 bp, SARS Virus
tgggatgttgtaatctcaataagtg

SEQ ID NO: 83098 - DNA, 25 bp, SARS Virus
gggatgttgtacactcaataagtga

SEQ ID NO: 83099 - DNA, 25 bp, SARS Virus
ggatgttgtactatcaataagtgaa

SEQ ID NO: 83100 - DNA, 25 bp, SARS Virus
gatgttgtactcacaataagtgaaa

SEQ ID NO: 83101 - DNA, 25 bp, SARS Virus
atgttgtactctaaataagtgaaac

SEQ ID NO: 83102 - DNA, 25 bp, SARS Virus
tgttgtactctcaataagtgaaacc

SEQ ID NO: 83103 - DNA, 25 bp, SARS Virus
gttgtactctcaataagtgaaacca

SEQ ID NO: 83104 - DNA, 25 bp, SARS Virus
ttgtactctcaaaaagtgaaaccac

SEQ ID NO: 83105 - DNA, 25 bp, SARS Virus
tgtactctcaataagtgaaaccacg

SEQ ID NO: 83106 - DNA, 25 bp, SARS Virus
gtactctcaataagtgaaaccacga

SEQ ID NO: 83107 - DNA, 25 bp, SARS Virus
tactctcaataaatgaaaccacgac

SEQ ID NO: 83108 - DNA, 25 bp, SARS Virus
actctcaataagagaaaccacgacc

SEQ ID NO: 83109 - DNA, 25 bp, SARS Virus
ctctcaataagtaaaaccacgaccg

SEQ ID NO: 83110 - DNA, 25 bp, SARS Virus
tctcaataagtgaaaccacgaccga

SEQ ID NO: 83111 - DNA, 25 bp, SARS Virus
ctcaataagtgaaaccacgaccgag

SEQ ID NO: 83112 - DNA, 25 bp, SARS Virus
tcaataagtgaaaccacgaccgaga

SEQ ID NO: 83113 - DNA, 25 bp, SARS Virus
caataagtgaaaacacgaccgagac

SEQ ID NO: 83114 - DNA, 25 bp, SARS Virus
aataagtgaaacaacgaccgagact

SEQ ID NO: 83115 - DNA, 25 bp, SARS Virus
ataagtgaaaccacgaccgagacta

SEQ ID NO: 83116 - DNA, 25 bp, SARS Virus
taagtgaaaccaagaccgagactat

SEQ ID NO: 83117 - DNA, 25 bp, SARS Virus
aagtgaaaccacaaccgagactatt

SEQ ID NO: 83118 - DNA, 25 bp, SARS Virus
agtgaaaccacgaccgagactattt

SEQ ID NO: 83119 - DNA, 25 bp, SARS Virus
gtgaaaccacgaacgagactatttc

SEQ ID NO: 83120 - DNA, 25 bp, SARS Virus
tgaaaccacgacagagactatttcc

SEQ ID NO: 83121 - DNA, 25 bp, SARS Virus
gaaaccacgaccaagactatttcct

SEQ ID NO: 83122 - DNA, 25 bp, SARS Virus
aaaccacgaccgagactatttcctc

SEQ ID NO: 83123 - DNA, 25 bp, SARS Virus
aaccacgaccgaaactatttcctca

SEQ ID NO: 83124 - DNA, 25 bp, SARS Virus
accacgaccgagactatttcctcaa

SEQ ID NO: 83125 - DNA, 25 bp, SARS Virus
ccacgaccgagaatatttcctcaac

SEQ ID NO: 83126 - DNA, 25 bp, SARS Virus
cacgaccgagacaatttcctcaacg

SEQ ID NO: 83127 - DNA, 25 bp, SARS Virus
acgaccgagactatttcctcaacgt

SEQ ID NO: 83128 - DNA, 25 bp, SARS Virus
cgaccgagactaattcctcaacgtg

SEQ ID NO: 83129 - DNA, 25 bp, SARS Virus
gaccgagactatatcctcaacgtgg

SEQ ID NO: 83130 - DNA, 25 bp, SARS Virus
accgagactattacctcaacgtggt

SEQ ID NO: 83131 - DNA, 25 bp, SARS Virus
ccgagactatttactcaacgtggtc

SEQ ID NO: 83132 - DNA, 25 bp, SARS Virus
cgagactatttcatcaacgtggtcc

SEQ ID NO: 83133 - DNA, 25 bp, SARS Virus
gagactatttccacaacgtggtcca

SEQ ID NO: 83134 - DNA, 25 bp, SARS Virus
agactatttcctaaacgtggtccat

SEQ ID NO: 83135 - DNA, 25 bp, SARS Virus
gactatttcctcaacgtggtccatg

SEQ ID NO: 83136 - DNA, 25 bp, SARS Virus
actatttcctcaacgtggtccatgt

SEQ ID NO: 83137 - DNA, 25 bp, SARS Virus
ctatttcctcaaagtggtccatgtc

SEQ ID NO: 83138 - DNA, 25 bp, SARS Virus
tatttcctcaacatggtccatgtcg

SEQ ID NO: 83139 - DNA, 25 bp, SARS Virus
atttcctcaacgaggtccatgtcga

SEQ ID NO: 83140 - DNA, 25 bp, SARS Virus
tttcctcaacgtagtccatgtcgac

SEQ ID NO: 83141 - DNA, 25 bp, SARS Virus
ttcctcaacgtgatccatgtcgaca

SEQ ID NO: 83142 - DNA, 25 bp, SARS Virus
tcctcaacgtggaccatgtcgacac

SEQ ID NO: 83143 - DNA, 25 bp, SARS Virus
cctcaacgtggtacatgtcgacacg

SEQ ID NO: 83144 - DNA, 25 bp, SARS Virus
ctcaacgtggtcaatgtcgacacga

SEQ ID NO: 83145 - DNA, 25 bp, SARS Virus
tcaacgtggtccatgtcgacacgag

SEQ ID NO: 83146 - DNA, 25 bp, SARS Virus
caacgtggtccaagtcgacacgagt

SEQ ID NO: 83147 - DNA, 25 bp, SARS Virus
aacgtggtccatatcgacacgagtc

SEQ ID NO: 83148 - DNA, 25 bp, SARS Virus
acgtggtccatgacgacacgagtct

SEQ ID NO: 83149 - DNA, 25 bp, SARS Virus
cgtggtccatgtagacacgagtctg

SEQ ID NO: 83150 - DNA, 25 bp, SARS Virus
gtggtccatgtcaacacgagtctgt

SEQ ID NO: 83151 - DNA, 25 bp, SARS Virus
tggtccatgtcgacacgagtctgtt

SEQ ID NO: 83152 - DNA, 25 bp, SARS Virus
ggtccatgtcgaaacgagtctgtta

SEQ ID NO: 83153 - DNA, 25 bp, SARS Virus
gtccatgtcgacacgagtctgttac

SEQ ID NO: 83154 - DNA, 25 bp, SARS Virus
tccatgtcgacaagagtctgttacc

SEQ ID NO: 83155 - DNA, 25 bp, SARS Virus
ccatgtcgacacaagtctgttacca

SEQ ID NO: 83156 - DNA, 25 bp, SARS Virus
catgtcgacacgagtctgttaccaa

SEQ ID NO: 83157 - DNA, 25 bp, SARS Virus
atgtcgacacgaatctgttaccaac

SEQ ID NO: 83158 - DNA, 25 bp, SARS Virus
tgtcgacacgagactgttaccaacg

SEQ ID NO: 83159 - DNA, 25 bp, SARS Virus
gtcgacacgagtatgttaccaacgg

SEQ ID NO: 83160 - DNA, 25 bp, SARS Virus
tcgacacgagtcagttaccaacggt

SEQ ID NO: 83161 - DNA, 25 bp, SARS Virus
cgacacgagtctattaccaacggtt

SEQ ID NO: 83162 - DNA, 25 bp, SARS Virus
gacacgagtctgataccaacggttg

SEQ ID NO: 83163 - DNA, 25 bp, SARS Virus
acacgagtctgtaaccaacggttga

SEQ ID NO: 83164 - DNA, 25 bp, SARS Virus
cacgagtctgttaccaacggttgac

SEQ ID NO: 83165 - DNA, 25 bp, SARS Virus
acgagtctgttaacaacggttgacc

SEQ ID NO: 83166 - DNA, 25 bp, SARS Virus
cgagtctgttacaaacggttgaccg

SEQ ID NO: 83167 - DNA, 25 bp, SARS Virus
gagtctgttaccaacggttgaccgt

SEQ ID NO: 83168 - DNA, 25 bp, SARS Virus
agtctgttaccaacggttgaccgtg

SEQ ID NO: 83169 - DNA, 25 bp, SARS Virus
gtctgttaccaaaggttgaccgtgt

SEQ ID NO: 83170 - DNA, 25 bp, SARS Virus
tctgttaccaacagttgaccgtgtg

SEQ ID NO: 83171 - DNA, 25 bp, SARS Virus
ctgttaccaacgattgaccgtgtga

SEQ ID NO: 83172 - DNA, 25 bp, SARS Virus
tgttaccaacggatgaccgtgtgat

SEQ ID NO: 83173 - DNA, 25 bp, SARS Virus
gttaccaacggtagaccgtgtgatg

SEQ ID NO: 83174 - DNA, 25 bp, SARS Virus
ttaccaacggttaaccgtgtgatga

SEQ ID NO: 83175 - DNA, 25 bp, SARS Virus
taccaacggttgaccgtgtgatgaa

SEQ ID NO: 83176 - DNA, 25 bp, SARS Virus
accaacggttgaacgtgtgatgaac

SEQ ID NO: 83177 - DNA, 25 bp, SARS Virus
ccaacggttgacagtgtgatgaaca

SEQ ID NO: 83178 - DNA, 25 bp, SARS Virus
caacggttgaccatgtgatgaacag

SEQ ID NO: 83179 - DNA, 25 bp, SARS Virus
aacggttgaccgagtgatgaacagc

SEQ ID NO: 83180 - DNA, 25 bp, SARS Virus
acggttgaccgtatgatgaacagct

SEQ ID NO: 83181 - DNA, 25 bp, SARS Virus
cggttgaccgtgagatgaacagcta

SEQ ID NO: 83182 - DNA, 25 bp, SARS Virus
ggttgaccgtgtaatgaacagctaa

SEQ ID NO: 83183 - DNA, 25 bp, SARS Virus
gttgaccgtgtgatgaacagctaag

SEQ ID NO: 83184 - DNA, 25 bp, SARS Virus
ttgaccgtgtgaagaacagctaagt

SEQ ID NO: 83185 - DNA, 25 bp, SARS Virus
tgaccgtgtgataaacagctaagtc

SEQ ID NO: 83186 - DNA, 25 bp, SARS Virus
gaccgtgtgatgaacagctaagtct

SEQ ID NO: 83187 - DNA, 25 bp, SARS Virus
accgtgtgatgaacagctaagtcta

SEQ ID NO: 83188 - DNA, 25 bp, SARS Virus
ccgtgtgatgaaaagctaagtctag

SEQ ID NO: 83189 - DNA, 25 bp, SARS Virus
cgtgtgatgaacagctaagtctaga

SEQ ID NO: 83190 - DNA, 25 bp, SARS Virus
gtgtgatgaacaactaagtctagaa

SEQ ID NO: 83191 - DNA, 25 bp, SARS Virus
tgtgatgaacagataagtctagaat

SEQ ID NO: 83192 - DNA, 25 bp, SARS Virus
gtgatgaacagcaaagtctagaatt

SEQ ID NO: 83193 - DNA, 25 bp, SARS Virus
tgatgaacagctaagtctagaatta

SEQ ID NO: 83194 - DNA, 25 bp, SARS Virus
gatgaacagctaagtctagaattac

SEQ ID NO: 83195 - DNA, 25 bp, SARS Virus
atgaacagctaaatctagaattact

SEQ ID NO: 83196 - DNA, 25 bp, SARS Virus
tgaacagctaagactagaattactg

SEQ ID NO: 83197 - DNA, 25 bp, SARS Virus
gaacagctaagtatagaattactga

SEQ ID NO: 83198 - DNA, 25 bp, SARS Virus
aacagctaagtcaagaattactgaa

SEQ ID NO: 83199 - DNA, 25 bp, SARS Virus
acagctaagtctagaattactgaag

SEQ ID NO: 83200 - DNA, 25 bp, SARS Virus
cagctaagtctaaaattactgaagc

SEQ ID NO: 83201 - DNA, 25 bp, SARS Virus
agctaagtctagaattactgaagca

SEQ ID NO: 83202 - DNA, 25 bp, SARS Virus
gctaagtctagaattactgaagcag

SEQ ID NO: 83203 - DNA, 25 bp, SARS Virus
ctaagtctagaaatactgaagcaga

SEQ ID NO: 83204 - DNA, 25 bp, SARS Virus
taagtctagaataactgaagcagag

SEQ ID NO: 83205 - DNA, 25 bp, SARS Virus
aagtctagaattactgaagcagagg

SEQ ID NO: 83206 - DNA, 25 bp, SARS Virus
agtctagaattaatgaagcagaggc

SEQ ID NO: 83207 - DNA, 25 bp, SARS Virus
gtctagaattacagaagcagaggct

SEQ ID NO: 83208 - DNA, 25 bp, SARS Virus
tctagaattactaaagcagaggctg

SEQ ID NO: 83209 - DNA, 25 bp, SARS Virus
ctagaattactgaagcagaggctgc

SEQ ID NO: 83210 - DNA, 25 bp, SARS Virus
tagaattactgaagcagaggctgcg

SEQ ID NO: 83211 - DNA, 25 bp, SARS Virus
agaattactgaaacagaggctgcgt

SEQ ID NO: 83212 - DNA, 25 bp, SARS Virus
gaattactgaagaagaggctgcgtc

SEQ ID NO: 83213 - DNA, 25 bp, SARS Virus
aattactgaagcagaggctgcgtct

SEQ ID NO: 83214 - DNA, 25 bp, SARS Virus
attactgaagcaaaggctgcgtcta

SEQ ID NO: 83215 - DNA, 25 bp, SARS Virus
ttactgaagcagaggctgcgtctaa

SEQ ID NO: 83216 - DNA, 25 bp, SARS Virus
tactgaagcagaagctgcgtctaag

SEQ ID NO: 83217 - DNA, 25 bp, SARS Virus
actgaagcagagactgcgtctaaga

SEQ ID NO: 83218 - DNA, 25 bp, SARS Virus
ctgaagcagaggatgcgtctaagat

SEQ ID NO: 83219 - DNA, 25 bp, SARS Virus
tgaagcagaggcagcgtctaagatg

SEQ ID NO: 83220 - DNA, 25 bp, SARS Virus
gaagcagaggctacgtctaagatga

SEQ ID NO: 83221 - DNA, 25 bp, SARS Virus
aagcagaggctgagtctaagatgaa

SEQ ID NO: 83222 - DNA, 25 bp, SARS Virus
agcagaggctgcatctaagatgaaa

SEQ ID NO: 83223 - DNA, 25 bp, SARS Virus
gcagaggctgcgactaagatgaaat

SEQ ID NO: 83224 - DNA, 25 bp, SARS Virus
cagaggctgcgtataagatgaaatt

SEQ ID NO: 83225 - DNA, 25 bp, SARS Virus
agaggctgcgtcaaagatgaaatta

SEQ ID NO: 83226 - DNA, 25 bp, SARS Virus
gaggctgcgtctaagatgaaattaa

SEQ ID NO: 83227 - DNA, 25 bp, SARS Virus
aggctgcgtctaagatgaaattaac

SEQ ID NO: 83228 - DNA, 25 bp, SARS Virus
ggctgcgtctaaaatgaaattaacc

SEQ ID NO: 83229 - DNA, 25 bp, SARS Virus
gctgcgtctaagatgaaattaacct

SEQ ID NO: 83230 - DNA, 25 bp, SARS Virus
ctgcgtctaagaagaaattaacctc

SEQ ID NO: 83231 - DNA, 25 bp, SARS Virus
tgcgtctaagataaaattaacctct

SEQ ID NO: 83232 - DNA, 25 bp, SARS Virus
gcgtctaagatgaaattaacctctg

SEQ ID NO: 83233 - DNA, 25 bp, SARS Virus
cgtctaagatgaaattaacctctga

SEQ ID NO: 83234 - DNA, 25 bp, SARS Virus
gtctaagatgaaattaacctctgac

SEQ ID NO: 83235 - DNA, 25 bp, SARS Virus
tctaagatgaaaataacctctgaca

SEQ ID NO: 83236 - DNA, 25 bp, SARS Virus
ctaagatgaaataaacctctgacac

SEQ ID NO: 83237 - DNA, 25 bp, SARS Virus
taagatgaaattaacctctgacacg

SEQ ID NO: 83238 - DNA, 25 bp, SARS Virus
aagatgaaattaacctctgacacgt

SEQ ID NO: 83239 - DNA, 25 bp, SARS Virus
agatgaaattaaactctgacacgtt

SEQ ID NO: 83240 - DNA, 25 bp, SARS Virus
gatgaaattaacatctgacacgttg

SEQ ID NO: 83241 - DNA, 25 bp, SARS Virus
atgaaattaaccactgacacgttgt

SEQ ID NO: 83242 - DNA, 25 bp, SARS Virus
tgaaattaacctatgacacgttgtc

SEQ ID NO: 83243 - DNA, 25 bp, SARS Virus
gaaattaacctcagacacgttgtca

SEQ ID NO: 83244 - DNA, 25 bp, SARS Virus
aaattaacctctaacacgttgtcat

SEQ ID NO: 83245 - DNA, 25 bp, SARS Virus
aattaacctctgacacgttgtcatg

SEQ ID NO: 83246 - DNA, 25 bp, SARS Virus
attaacctctgaaacgttgtcatgt

SEQ ID NO: 83247 - DNA, 25 bp, SARS Virus
ttaacctctgacacgttgtcatgta

SEQ ID NO: 83248 - DNA, 25 bp, SARS Virus
taacctctgacaagttgtcatgtat

SEQ ID NO: 83249 - DNA, 25 bp, SARS Virus
aacctctgacacattgtcatgtatg

SEQ ID NO: 83250 - DNA, 25 bp, SARS Virus
acctctgacacgatgtcatgtatgc

SEQ ID NO: 83251 - DNA, 25 bp, SARS Virus
cctctgacacgtagtcatgtatgcc

SEQ ID NO: 83252 - DNA, 25 bp, SARS Virus
ctctgacacgttatcatgtatgccg

SEQ ID NO: 83253 - DNA, 25 bp, SARS Virus
tctgacacgttgacatgtatgccga

SEQ ID NO: 83254 - DNA, 25 bp, SARS Virus
ctgacacgttgtaatgtatgccgat

SEQ ID NO: 83255 - DNA, 25 bp, SARS Virus
tgacacgttgtcatgtatgccgatt

SEQ ID NO: 83256 - DNA, 25 bp, SARS Virus
gacacgttgtcaagtatgccgatta

SEQ ID NO: 83257 - DNA, 25 bp, SARS Virus
acacgttgtcatatatgccgattat

SEQ ID NO: 83258 - DNA, 25 bp, SARS Virus
cacgttgtcatgaatgccgattatt

SEQ ID NO: 83259 - DNA, 25 bp, SARS Virus
acgttgtcatgtatgccgattattt

SEQ ID NO: 83260 - DNA, 25 bp, SARS Virus
cgttgtcatgtaagccgattattta

SEQ ID NO: 83261 - DNA, 25 bp, SARS Virus
gttgtcatgtataccgattatttac

SEQ ID NO: 83262 - DNA, 25 bp, SARS Virus
ttgtcatgtatgacgattatttacc

SEQ ID NO: 83263 - DNA, 25 bp, SARS Virus
tgtcatgtatgcagattatttaccc

SEQ ID NO: 83264 - DNA, 25 bp, SARS Virus
gtcatgtatgccaattatttaccct

SEQ ID NO: 83265 - DNA, 25 bp, SARS Virus
tcatgtatgccgattatttaccctg

SEQ ID NO: 83266 - DNA, 25 bp, SARS Virus
catgtatgccgaatatttaccctgg

SEQ ID NO: 83267 - DNA, 25 bp, SARS Virus
atgtatgccgataatttaccctgga

SEQ ID NO: 83268 - DNA, 25 bp, SARS Virus
tgtatgccgattatttaccctggaa

SEQ ID NO: 83269 - DNA, 25 bp, SARS Virus
gtatgccgattaattaccctggaat

SEQ ID NO: 83270 - DNA, 25 bp, SARS Virus
tatgccgattatataccctggaata

SEQ ID NO: 83271 - DNA, 25 bp, SARS Virus
atgccgattattaaccctggaataa

SEQ ID NO: 83272 - DNA, 25 bp, SARS Virus
tgccgattatttaccctggaataat

SEQ ID NO: 83273 - DNA, 25 bp, SARS Virus
gccgattatttaacctggaataata

SEQ ID NO: 83274 - DNA, 25 bp, SARS Virus
ccgattatttacactggaataataa

SEQ ID NO: 83275 - DNA, 25 bp, SARS Virus
cgattatttaccatggaataataat

SEQ ID NO: 83276 - DNA, 25 bp, SARS Virus
gattatttacccaggaataataatc

SEQ ID NO: 83277 - DNA, 25 bp, SARS Virus
attatttaccctagaataataatcg

SEQ ID NO: 83278 - DNA, 25 bp, SARS Virus
ttatttaccctgaaataataatcgc

SEQ ID NO: 83279 - DNA, 25 bp, SARS Virus
tatttaccctggaataataatcgct

SEQ ID NO: 83280 - DNA, 25 bp, SARS Virus
atttaccctggaataataatcgcta

SEQ ID NO: 83281 - DNA, 25 bp, SARS Virus
tttaccctggaaaaataatcgctat

SEQ ID NO: 83282 - DNA, 25 bp, SARS Virus
ttaccctggaataataatcgctata

SEQ ID NO: 83283 - DNA, 25 bp, SARS Virus
taccctggaataataatcgctatac

SEQ ID NO: 83284 - DNA, 25 bp, SARS Virus
accctggaataaaaatcgctataca

SEQ ID NO: 83285 - DNA, 25 bp, SARS Virus
ccctggaataataatcgctatacat

SEQ ID NO: 83286 - DNA, 25 bp, SARS Virus
cctggaataataatcgctatacata

SEQ ID NO: 83287 - DNA, 25 bp, SARS Virus
ctggaataataaacgctatacatac

SEQ ID NO: 83288 - DNA, 25 bp, SARS Virus
tggaataataatagctatacatact

SEQ ID NO: 83289 - DNA, 25 bp, SARS Virus
ggaataataatcactatacatactg

SEQ ID NO: 83290 - DNA, 25 bp, SARS Virus
gaataataatcgatatacatactgg

SEQ ID NO: 83291 - DNA, 25 bp, SARS Virus
aataataatcgcaatacatactggg

SEQ ID NO: 83292 - DNA, 25 bp, SARS Virus
ataataatcgctatacatactggga

SEQ ID NO: 83293 - DNA, 25 bp, SARS Virus
taataatcgctaaacatactgggat

SEQ ID NO: 83294 - DNA, 25 bp, SARS Virus
aataatcgctatacatactgggatc

SEQ ID NO: 83295 - DNA, 25 bp, SARS Virus
ataatcgctataaatactgggatcc

SEQ ID NO: 83296 - DNA, 25 bp, SARS Virus
taatcgctatacatactgggatcct

SEQ ID NO: 83297 - DNA, 25 bp, SARS Virus
aatcgctatacaaactgggatcctg

SEQ ID NO: 83298 - DNA, 25 bp, SARS Virus
atcgctatacatactgggatcctgg

SEQ ID NO: 83299 - DNA, 25 bp, SARS Virus
tcgctatacataatgggatcctggt

SEQ ID NO: 83300 - DNA, 25 bp, SARS Virus
cgctatacatacagggatcctggtt

SEQ ID NO: 83301 - DNA, 25 bp, SARS Virus
gctatacatactaggatcctggttt

SEQ ID NO: 83302 - DNA, 25 bp, SARS Virus
ctatacatactgagatcctggtttg

SEQ ID NO: 83303 - DNA, 25 bp, SARS Virus
tatacatactggaatcctggtttgt

SEQ ID NO: 83304 - DNA, 25 bp, SARS Virus
atacatactgggatcctggtttgta

SEQ ID NO: 83305 - DNA, 25 bp, SARS Virus
tacatactgggaacctggtttgtac

SEQ ID NO: 83306 - DNA, 25 bp, SARS Virus
acatactgggatactggtttgtaca

SEQ ID NO: 83307 - DNA, 25 bp, SARS Virus
catactgggatcatggtttgtacac

SEQ ID NO: 83308 - DNA, 25 bp, SARS Virus
atactgggatccaggtttgtacact

SEQ ID NO: 83309 - DNA, 25 bp, SARS Virus
tactgggatcctagtttgtacactg

SEQ ID NO: 83310 - DNA, 25 bp, SARS Virus
actgggatcctgatttgtacactgt

SEQ ID NO: 83311 - DNA, 25 bp, SARS Virus
ctgggatcctggattgtacactgtt

SEQ ID NO: 83312 - DNA, 25 bp, SARS Virus
tgggatcctggtatgtacactgttt

SEQ ID NO: 83313 - DNA, 25 bp, SARS Virus
gggatcctggttagtacactgtttt

SEQ ID NO: 83314 - DNA, 25 bp, SARS Virus
ggatcctggtttatacactgttttc

SEQ ID NO: 83315 - DNA, 25 bp, SARS Virus
gatcctggtttgaacactgttttct

SEQ ID NO: 83316 - DNA, 25 bp, SARS Virus
atcctggtttgtacactgttttctc

SEQ ID NO: 83317 - DNA, 25 bp, SARS Virus
tcctggtttgtaaactgttttctct

SEQ ID NO: 83318 - DNA, 25 bp, SARS Virus
cctggtttgtacactgttttctctt

SEQ ID NO: 83319 - DNA, 25 bp, SARS Virus
ctggtttgtacaatgttttctctta

SEQ ID NO: 83320 - DNA, 25 bp, SARS Virus
tggtttgtacacagttttctcttac

SEQ ID NO: 83321 - DNA, 25 bp, SARS Virus
ggtttgtacactattttctcttact

SEQ ID NO: 83322 - DNA, 25 bp, SARS Virus
gtttgtacactgatttctcttactg

SEQ ID NO: 83323 - DNA, 25 bp, SARS Virus
tttgtacactgtattctcttactga

SEQ ID NO: 83324 - DNA, 25 bp, SARS Virus
ttgtacactgttatctcttactgag

SEQ ID NO: 83325 - DNA, 25 bp, SARS Virus
tgtacactgtttactcttactgaga

SEQ ID NO: 83326 - DNA, 25 bp, SARS Virus
gtacactgttttatcttactgagat

SEQ ID NO: 83327 - DNA, 25 bp, SARS Virus
tacactgttttcacttactgagatt

SEQ ID NO: 83328 - DNA, 25 bp, SARS Virus
acactgttttctattactgagattt

SEQ ID NO: 83329 - DNA, 25 bp, SARS Virus
cactgttttctcatactgagatttc

SEQ ID NO: 83330 - DNA, 25 bp, SARS Virus
actgttttctctaactgagatttct

SEQ ID NO: 83331 - DNA, 25 bp, SARS Virus
ctgttttctcttactgagatttctt

SEQ ID NO: 83332 - DNA, 25 bp, SARS Virus
tgttttctcttaatgagatttcttc

SEQ ID NO: 83333 - DNA, 25 bp, SARS Virus
gttttctcttacagagatttcttcc

SEQ ID NO: 83334 - DNA, 25 bp, SARS Virus
ttttctcttactaagatttcttccc

SEQ ID NO: 83335 - DNA, 25 bp, SARS Virus
tttctcttactgagatttcttccca

SEQ ID NO: 83336 - DNA, 25 bp, SARS Virus
ttctcttactgaaatttcttcccaa

SEQ ID NO: 83337 - DNA, 25 bp, SARS Virus
tctcttactgagatttcttcccaaa

SEQ ID NO: 83338 - DNA, 25 bp, SARS Virus
ctcttactgagaattcttcccaaaa

SEQ ID NO: 83339 - DNA, 25 bp, SARS Virus
tcttactgagatatcttcccaaaaa

SEQ ID NO: 83340 - DNA, 25 bp, SARS Virus
cttactgagattacttcccaaaaag

SEQ ID NO: 83341 - DNA, 25 bp, SARS Virus
ttactgagatttattcccaaaaagt

SEQ ID NO: 83342 - DNA, 25 bp, SARS Virus
tactgagatttcatcccaaaaagtg

SEQ ID NO: 83343 - DNA, 25 bp, SARS Virus
actgagatttctacccaaaaagtga

SEQ ID NO: 83344 - DNA, 25 bp, SARS Virus
ctgagatttcttaccaaaaagtgaa

SEQ ID NO: 83345 - DNA, 25 bp, SARS Virus
tgagatttcttcacaaaaagtgaat

SEQ ID NO: 83346 - DNA, 25 bp, SARS Virus
gagatttcttccaaaaaagtgaata

SEQ ID NO: 83347 - DNA, 25 bp, SARS Virus
agatttcttcccaaaaagtgaatag

SEQ ID NO: 83348 - DNA, 25 bp, SARS Virus
gatttcttcccaaaaagtgaataga

SEQ ID NO: 83349 - DNA, 25 bp, SARS Virus
atttcttcccaaaaagtgaatagac

SEQ ID NO: 83350 - DNA, 25 bp, SARS Virus
tttcttcccaaaaagtgaatagaca

SEQ ID NO: 83351 - DNA, 25 bp, SARS Virus
ttcttcccaaaaagtgaatagacac

SEQ ID NO: 83352 - DNA, 25 bp, SARS Virus
tcttcccaaaaaatgaatagacaca

SEQ ID NO: 83353 - DNA, 25 bp, SARS Virus
cttcccaaaaagagaatagacacac

SEQ ID NO: 83354 - DNA, 25 bp, SARS Virus
ttcccaaaaagtaaatagacacacc

SEQ ID NO: 83355 - DNA, 25 bp, SARS Virus
tcccaaaaagtgaatagacacacct

SEQ ID NO: 83356 - DNA, 25 bp, SARS Virus
cccaaaaagtgaatagacacaccta

SEQ ID NO: 83357 - DNA, 25 bp, SARS Virus
ccaaaaagtgaaaagacacacctaa

SEQ ID NO: 83358 - DNA, 25 bp, SARS Virus
caaaaagtgaatagacacacctaaa

SEQ ID NO: 83359 - DNA, 25 bp, SARS Virus
aaaaagtgaataaacacacctaaat

SEQ ID NO: 83360 - DNA, 25 bp, SARS Virus
aaaagtgaatagacacacctaaata

SEQ ID NO: 83361 - DNA, 25 bp, SARS Virus
aaagtgaatagaaacacctaaatat

SEQ ID NO: 83362 - DNA, 25 bp, SARS Virus
aagtgaatagacacacctaaatatt

SEQ ID NO: 83363 - DNA, 25 bp, SARS Virus
agtgaatagacaaacctaaatattt

SEQ ID NO: 83364 - DNA, 25 bp, SARS Virus
gtgaatagacacacctaaatatttc

SEQ ID NO: 83365 - DNA, 25 bp, SARS Virus
tgaatagacacaactaaatatttcg

SEQ ID NO: 83366 - DNA, 25 bp, SARS Virus
gaatagacacacataaatatttcgt

SEQ ID NO: 83367 - DNA, 25 bp, SARS Virus
aatagacacaccaaaatatttcgtt

SEQ ID NO: 83368 - DNA, 25 bp, SARS Virus
atagacacacctaaatatttcgttt

SEQ ID NO: 83369 - DNA, 25 bp, SARS Virus
tagacacacctaaatatttcgtttt

SEQ ID NO: 83370 - DNA, 25 bp, SARS Virus
agacacacctaaatatttcgttttt

SEQ ID NO: 83371 - DNA, 25 bp, SARS Virus
gacacacctaaaaatttcgtttttg

SEQ ID NO: 83372 - DNA, 25 bp, SARS Virus
acacacctaaatatttcgtttttga

SEQ ID NO: 83373 - DNA, 25 bp, SARS Virus
cacacctaaataattcgtttttgat

SEQ ID NO: 83374 - DNA, 25 bp, SARS Virus
acacctaaatatatcgtttttgatc

SEQ ID NO: 83375 - DNA, 25 bp, SARS Virus
cacctaaatattacgtttttgatcg

SEQ ID NO: 83376 - DNA, 25 bp, SARS Virus
acctaaatatttagtttttgatcgg

SEQ ID NO: 83377 - DNA, 25 bp, SARS Virus
cctaaatatttcatttttgatcggg

SEQ ID NO: 83378 - DNA, 25 bp, SARS Virus
ctaaatatttcgattttgatcggga

SEQ ID NO: 83379 - DNA, 25 bp, SARS Virus
taaatatttcgtatttgatcgggac

SEQ ID NO: 83380 - DNA, 25 bp, SARS Virus
aaatatttcgttattgatcgggacc

SEQ ID NO: 83381 - DNA, 25 bp, SARS Virus
aatatttcgtttatgatcgggaccc

SEQ ID NO: 83382 - DNA, 25 bp, SARS Virus
atatttcgttttagatcgggaccca

SEQ ID NO: 83383 - DNA, 25 bp, SARS Virus
tatttcgtttttaatcgggacccac

SEQ ID NO: 83384 - DNA, 25 bp, SARS Virus
atttcgtttttgatcgggacccacc

SEQ ID NO: 83385 - DNA, 25 bp, SARS Virus
tttcgtttttgaacgggacccacca

SEQ ID NO: 83386 - DNA, 25 bp, SARS Virus
ttcgtttttgatagggacccaccaa

SEQ ID NO: 83387 - DNA, 25 bp, SARS Virus
tcgtttttgatcaggacccaccaag

SEQ ID NO: 83388 - DNA, 25 bp, SARS Virus
cgtttttgatcgagacccaccaaga

SEQ ID NO: 83389 - DNA, 25 bp, SARS Virus
gtttttgatcggaacccaccaagat

SEQ ID NO: 83390 - DNA, 25 bp, SARS Virus
tttttgatcgggacccaccaagata

SEQ ID NO: 83391 - DNA, 25 bp, SARS Virus
ttttgatcgggaaccaccaagatat

SEQ ID NO: 83392 - DNA, 25 bp, SARS Virus
tttgatcgggacacaccaagatatc

SEQ ID NO: 83393 - DNA, 25 bp, SARS Virus
ttgatcgggaccaaccaagatatcg

SEQ ID NO: 83394 - DNA, 25 bp, SARS Virus
tgatcgggacccaccaagatatcga

SEQ ID NO: 83395 - DNA, 25 bp, SARS Virus
gatcgggacccaacaagatatcgac

SEQ ID NO: 83396 - DNA, 25 bp, SARS Virus
atcgggacccacaaagatatcgaca

SEQ ID NO: 83397 - DNA, 25 bp, SARS Virus
tcgggacccaccaagatatcgacat

SEQ ID NO: 83398 - DNA, 25 bp, SARS Virus
cgggacccaccaagatatcgacatt

SEQ ID NO: 83399 - DNA, 25 bp, SARS Virus
gggacccaccaaaatatcgacattt

SEQ ID NO: 83400 - DNA, 25 bp, SARS Virus
ggacccaccaagatatcgacatttc

SEQ ID NO: 83401 - DNA, 25 bp, SARS Virus
gacccaccaagaaatcgacatttct

SEQ ID NO: 83402 - DNA, 25 bp, SARS Virus
acccaccaagatatcgacatttcta

SEQ ID NO: 83403 - DNA, 25 bp, SARS Virus
cccaccaagataacgacatttctat

SEQ ID NO: 83404 - DNA, 25 bp, SARS Virus
ccaccaagatatagacatttctatt

SEQ ID NO: 83405 - DNA, 25 bp, SARS Virus
caccaagatatcaacatttctattg

SEQ ID NO: 83406 - DNA, 25 bp, SARS Virus
accaagatatcgacatttctattgt

SEQ ID NO: 83407 - DNA, 25 bp, SARS Virus
ccaagatatcgaaatttctattgtc

SEQ ID NO: 83408 - DNA, 25 bp, SARS Virus
caagatatcgacatttctattgtct

SEQ ID NO: 83409 - DNA, 25 bp, SARS Virus
aagatatcgacaattctattgtctc

SEQ ID NO: 83410 - DNA, 25 bp, SARS Virus
agatatcgacatatctattgtctcg

SEQ ID NO: 83411 - DNA, 25 bp, SARS Virus
gatatcgacattactattgtctcgt

SEQ ID NO: 83412 - DNA, 25 bp, SARS Virus
atatcgacatttatattgtctcgta

SEQ ID NO: 83413 - DNA, 25 bp, SARS Virus
tatcgacatttcaattgtctcgtaa

SEQ ID NO: 83414 - DNA, 25 bp, SARS Virus
atcgacatttctattgtctcgtaag

SEQ ID NO: 83415 - DNA, 25 bp, SARS Virus
tcgacatttctaatgtctcgtaaga

SEQ ID NO: 83416 - DNA, 25 bp, SARS Virus
cgacatttctatagtctcgtaagaa

SEQ ID NO: 83417 - DNA, 25 bp, SARS Virus
gacatttctattatctcgtaagaac

SEQ ID NO: 83418 - DNA, 25 bp, SARS Virus
acatttctattgactcgtaagaacc

SEQ ID NO: 83419 - DNA, 25 bp, SARS Virus
catttctattgtatcgtaagaacct

SEQ ID NO: 83420 - DNA, 25 bp, SARS Virus
atttctattgtcacgtaagaacctt

SEQ ID NO: 83421 - DNA, 25 bp, SARS Virus
tttctattgtctagtaagaacctta

SEQ ID NO: 83422 - DNA, 25 bp, SARS Virus
ttctattgtctcataagaaccttac

SEQ ID NO: 83423 - DNA, 25 bp, SARS Virus
tctattgtctcgaaagaaccttacg

SEQ ID NO: 83424 - DNA, 25 bp, SARS Virus
ctattgtctcgtaagaaccttacga

SEQ ID NO: 83425 - DNA, 25 bp, SARS Virus
tattgtctcgtaagaaccttacgac

SEQ ID NO: 83426 - DNA, 25 bp, SARS Virus
attgtctcgtaaaaaccttacgact

SEQ ID NO: 83427 - DNA, 25 bp, SARS Virus
ttgtctcgtaagaaccttacgactg

SEQ ID NO: 83428 - DNA, 25 bp, SARS Virus
tgtctcgtaagaaccttacgactgg

SEQ ID NO: 83429 - DNA, 25 bp, SARS Virus
gtctcgtaagaaacttacgactgga

SEQ ID NO: 83430 - DNA, 25 bp, SARS Virus
tctcgtaagaacattacgactggaa

SEQ ID NO: 83431 - DNA, 25 bp, SARS Virus
ctcgtaagaaccatacgactggaaa

SEQ ID NO: 83432 - DNA, 25 bp, SARS Virus
tcgtaagaacctaacgactggaaat

SEQ ID NO: 83433 - DNA, 25 bp, SARS Virus
cgtaagaaccttacgactggaaatg

SEQ ID NO: 83434 - DNA, 25 bp, SARS Virus
gtaagaaccttaagactggaaatgt

SEQ ID NO: 83435 - DNA, 25 bp, SARS Virus
taagaaccttacaactggaaatgtt

SEQ ID NO: 83436 - DNA, 25 bp, SARS Virus
aagaaccttacgactggaaatgttc

SEQ ID NO: 83437 - DNA, 25 bp, SARS Virus
agaaccttacgaatggaaatgttcg

SEQ ID NO: 83438 - DNA, 25 bp, SARS Virus
gaaccttacgacaggaaatgttcga

SEQ ID NO: 83439 - DNA, 25 bp, SARS Virus
aaccttacgactagaaatgttcgaa

SEQ ID NO: 83440 - DNA, 25 bp, SARS Virus
accttacgactgaaaatgttcgaat

SEQ ID NO: 83441 - DNA, 25 bp, SARS Virus
ccttacgactggaaatgttcgaata

SEQ ID NO: 83442 - DNA, 25 bp, SARS Virus
cttacgactggaaatgttcgaatac

SEQ ID NO: 83443 - DNA, 25 bp, SARS Virus
ttacgactggaaatgttcgaatacc

SEQ ID NO: 83444 - DNA, 25 bp, SARS Virus
tacgactggaaaagttcgaataccc

SEQ ID NO: 83445 - DNA, 25 bp, SARS Virus
acgactggaaatattcgaatacccg

SEQ ID NO: 83446 - DNA, 25 bp, SARS Virus
cgactggaaatgatcgaatacccgg

SEQ ID NO: 83447 - DNA, 25 bp, SARS Virus
gactggaaatgtacgaatacccggt

SEQ ID NO: 83448 - DNA, 25 bp, SARS Virus
actggaaatgttagaatacccggta

SEQ ID NO: 83449 - DNA, 25 bp, SARS Virus
ctggaaatgttcaaatacccggtaa

SEQ ID NO: 83450 - DNA, 25 bp, SARS Virus
tggaaatgttcgaatacccggtaaa

SEQ ID NO: 83451 - DNA, 25 bp, SARS Virus
ggaaatgttcgaatacccggtaaag

SEQ ID NO: 83452 - DNA, 25 bp, SARS Virus
gaaatgttcgaaaacccggtaaaga

SEQ ID NO: 83453 - DNA, 25 bp, SARS Virus
aaatgttcgaatacccggtaaagag

SEQ ID NO: 83454 - DNA, 25 bp, SARS Virus
aatgttcgaataaccggtaaagagt

SEQ ID NO: 83455 - DNA, 25 bp, SARS Virus
atgttcgaatacacggtaaagagta

SEQ ID NO: 83456 - DNA, 25 bp, SARS Virus
tgttcgaataccaggtaaagagtac

SEQ ID NO: 83457 - DNA, 25 bp, SARS Virus
gttcgaatacccagtaaagagtacc

SEQ ID NO: 83458 - DNA, 25 bp, SARS Virus
ttcgaatacccgataaagagtacca

SEQ ID NO: 83459 - DNA, 25 bp, SARS Virus
tcgaatacccggaaaagagtaccac

SEQ ID NO: 83460 - DNA, 25 bp, SARS Virus
cgaatacccggtaaagagtaccacc

SEQ ID NO: 83461 - DNA, 25 bp, SARS Virus
gaatacccggtaaagagtaccacct

SEQ ID NO: 83462 - DNA, 25 bp, SARS Virus
aatacccggtaaagagtaccacctg

SEQ ID NO: 83463 - DNA, 25 bp, SARS Virus
atacccggtaaaaagtaccacctgt

SEQ ID NO: 83464 - DNA, 25 bp, SARS Virus
tacccggtaaagagtaccacctgtc

SEQ ID NO: 83465 - DNA, 25 bp, SARS Virus
acccggtaaagaataccacctgtcg

SEQ ID NO: 83466 - DNA, 25 bp, SARS Virus
cccggtaaagagaaccacctgtcga

SEQ ID NO: 83467 - DNA, 25 bp, SARS Virus
ccggtaaagagtaccacctgtcgaa

SEQ ID NO: 83468 - DNA, 25 bp, SARS Virus
cggtaaagagtaacacctgtcgaaa

SEQ ID NO: 83469 - DNA, 25 bp, SARS Virus
ggtaaagagtacaacctgtcgaaaa

SEQ ID NO: 83470 - DNA, 25 bp, SARS Virus
gtaaagagtaccacctgtcgaaaac

SEQ ID NO: 83471 - DNA, 25 bp, SARS Virus
taaagagtaccaactgtcgaaaaca

SEQ ID NO: 83472 - DNA, 25 bp, SARS Virus
aaagagtaccacatgtcgaaaacaa

SEQ ID NO: 83473 - DNA, 25 bp, SARS Virus
aagagtaccaccagtcgaaaacaat

SEQ ID NO: 83474 - DNA, 25 bp, SARS Virus
agagtaccacctatcgaaaacaatg

SEQ ID NO: 83475 - DNA, 25 bp, SARS Virus
gagtaccacctgacgaaaacaatgt

SEQ ID NO: 83476 - DNA, 25 bp, SARS Virus
agtaccacctgtagaaaacaatgtt

SEQ ID NO: 83477 - DNA, 25 bp, SARS Virus
gtaccacctgtcaaaaacaatgttt

SEQ ID NO: 83478 - DNA, 25 bp, SARS Virus
taccacctgtcgaaaacaatgttta

SEQ ID NO: 83479 - DNA, 25 bp, SARS Virus
accacctgtcgaaaacaatgtttac

SEQ ID NO: 83480 - DNA, 25 bp, SARS Virus
ccacctgtcgaaaacaatgtttaca

SEQ ID NO: 83481 - DNA, 25 bp, SARS Virus
cacctgtcgaaaacaatgtttacat

SEQ ID NO: 83482 - DNA, 25 bp, SARS Virus
acctgtcgaaaaaaatgtttacatt

SEQ ID NO: 83483 - DNA, 25 bp, SARS Virus
cctgtcgaaaacaatgtttacattt

SEQ ID NO: 83484 - DNA, 25 bp, SARS Virus
ctgtcgaaaacaatgtttacattta

SEQ ID NO: 83485 - DNA, 25 bp, SARS Virus
tgtcgaaaacaaagtttacatttac

SEQ ID NO: 83486 - DNA, 25 bp, SARS Virus
gtcgaaaacaatatttacatttacg

SEQ ID NO: 83487 - DNA, 25 bp, SARS Virus
tcgaaaacaatgattacatttacgt

SEQ ID NO: 83488 - DNA, 25 bp, SARS Virus
cgaaaacaatgtatacatttacgta

SEQ ID NO: 83489 - DNA, 25 bp, SARS Virus
gaaaacaatgttaacatttacgtag

SEQ ID NO: 83490 - DNA, 25 bp, SARS Virus
aaaacaatgtttacatttacgtagt

SEQ ID NO: 83491 - DNA, 25 bp, SARS Virus
aaacaatgtttaaatttacgtagta

SEQ ID NO: 83492 - DNA, 25 bp, SARS Virus
aacaatgtttacatttacgtagtag

SEQ ID NO: 83493 - DNA, 25 bp, SARS Virus
acaatgtttacaattacgtagtagt

SEQ ID NO: 83494 - DNA, 25 bp, SARS Virus
caatgtttacatatacgtagtagta

SEQ ID NO: 83495 - DNA, 25 bp, SARS Virus
aatgtttacattaacgtagtagtag

SEQ ID NO: 83496 - DNA, 25 bp, SARS Virus
atgtttacatttacgtagtagtagc

SEQ ID NO: 83497 - DNA, 25 bp, SARS Virus
tgtttacatttaagtagtagtagcc

SEQ ID NO: 83498 - DNA, 25 bp, SARS Virus
gtttacatttacatagtagtagcct

SEQ ID NO: 83499 - DNA, 25 bp, SARS Virus
tttacatttacgaagtagtagcctt

SEQ ID NO: 83500 - DNA, 25 bp, SARS Virus
ttacatttacgtagtagtagccttc

SEQ ID NO: 83501 - DNA, 25 bp, SARS Virus
tacatttacgtaatagtagccttcg

SEQ ID NO: 83502 - DNA, 25 bp, SARS Virus
acatttacgtagaagtagccttcgt

SEQ ID NO: 83503 - DNA, 25 bp, SARS Virus
catttacgtagtagtagccttcgta

SEQ ID NO: 83504 - DNA, 25 bp, SARS Virus
atttacgtagtaatagccttcgtaa

SEQ ID NO: 83505 - DNA, 25 bp, SARS Virus
tttacgtagtagaagccttcgtaaa

SEQ ID NO: 83506 - DNA, 25 bp, SARS Virus
ttacgtagtagtagccttcgtaaaa

SEQ ID NO: 83507 - DNA, 25 bp, SARS Virus
tacgtagtagtaaccttcgtaaaaa

SEQ ID NO: 83508 - DNA, 25 bp, SARS Virus
acgtagtagtagacttcgtaaaaat

SEQ ID NO: 83509 - DNA, 25 bp, SARS Virus
cgtagtagtagcattcgtaaaaatt

SEQ ID NO: 83510 - DNA, 25 bp, SARS Virus
gtagtagtagccatcgtaaaaatta

SEQ ID NO: 83511 - DNA, 25 bp, SARS Virus
tagtagtagcctacgtaaaaattaa

SEQ ID NO: 83512 - DNA, 25 bp, SARS Virus
agtagtagccttagtaaaaattaac

SEQ ID NO: 83513 - DNA, 25 bp, SARS Virus
gtagtagccttcataaaaattaacc

SEQ ID NO: 83514 - DNA, 25 bp, SARS Virus
tagtagccttcgaaaaaattaaccc

SEQ ID NO: 83515 - DNA, 25 bp, SARS Virus
agtagccttcgtaaaaattaacccc

SEQ ID NO: 83516 - DNA, 25 bp, SARS Virus
gtagccttcgtaaaaattaaccccg

SEQ ID NO: 83517 - DNA, 25 bp, SARS Virus
tagccttcgtaaaaattaaccccga

SEQ ID NO: 83518 - DNA, 25 bp, SARS Virus
agccttcgtaaaaattaaccccgat

SEQ ID NO: 83519 - DNA, 25 bp, SARS Virus
gccttcgtaaaaattaaccccgatt

SEQ ID NO: 83520 - DNA, 25 bp, SARS Virus
ccttcgtaaaaaataaccccgattg

SEQ ID NO: 83521 - DNA, 25 bp, SARS Virus
cttcgtaaaaataaaccccgattga

SEQ ID NO: 83522 - DNA, 25 bp, SARS Virus
ttcgtaaaaattaaccccgattgat

SEQ ID NO: 83523 - DNA, 25 bp, SARS Virus
tcgtaaaaattaaccccgattgata

SEQ ID NO: 83524 - DNA, 25 bp, SARS Virus
cgtaaaaattaaacccgattgatag

SEQ ID NO: 83525 - DNA, 25 bp, SARS Virus
gtaaaaattaacaccgattgataga

SEQ ID NO: 83526 - DNA, 25 bp, SARS Virus
taaaaattaaccacgattgatagaa

SEQ ID NO: 83527 - DNA, 25 bp, SARS Virus
aaaaattaacccagattgatagaac

SEQ ID NO: 83528 - DNA, 25 bp, SARS Virus
aaaattaaccccaattgatagaacc

SEQ ID NO: 83529 - DNA, 25 bp, SARS Virus
aaattaaccccgattgatagaaccg

SEQ ID NO: 83530 - DNA, 25 bp, SARS Virus
aattaaccccgaatgatagaaccgt

SEQ ID NO: 83531 - DNA, 25 bp, SARS Virus
attaaccccgatagatagaaccgtt

SEQ ID NO: 83532 - DNA, 25 bp, SARS Virus
ttaaccccgattaatagaaccgttc

SEQ ID NO: 83533 - DNA, 25 bp, SARS Virus
taaccccgattgatagaaccgttcg

SEQ ID NO: 83534 - DNA, 25 bp, SARS Virus
aaccccgattgaaagaaccgttcgg

SEQ ID NO: 83535 - DNA, 25 bp, SARS Virus
accccgattgatagaaccgttcggc

SEQ ID NO: 83536 - DNA, 25 bp, SARS Virus
ccccgattgataaaaccgttcggct

SEQ ID NO: 83537 - DNA, 25 bp, SARS Virus
cccgattgatagaaccgttcggctt

SEQ ID NO: 83538 - DNA, 25 bp, SARS Virus
ccgattgatagaaccgttcggcttc

SEQ ID NO: 83539 - DNA, 25 bp, SARS Virus
cgattgatagaaacgttcggcttcc

SEQ ID NO: 83540 - DNA, 25 bp, SARS Virus
gattgatagaacagttcggcttcct

SEQ ID NO: 83541 - DNA, 25 bp, SARS Virus
attgatagaaccattcggcttcctt

SEQ ID NO: 83542 - DNA, 25 bp, SARS Virus
ttgatagaaccgatcggcttccttg

SEQ ID NO: 83543 - DNA, 25 bp, SARS Virus
tgatagaaccgtacggcttccttgt

SEQ ID NO: 83544 - DNA, 25 bp, SARS Virus
gatagaaccgttaggcttccttgtt

SEQ ID NO: 83545 - DNA, 25 bp, SARS Virus
atagaaccgttcagcttccttgttt

SEQ ID NO: 83546 - DNA, 25 bp, SARS Virus
tagaaccgttcgacttccttgttta

SEQ ID NO: 83547 - DNA, 25 bp, SARS Virus
agaaccgttcggattccttgtttaa

SEQ ID NO: 83548 - DNA, 25 bp, SARS Virus
gaaccgttcggcatccttgtttaac

SEQ ID NO: 83549 - DNA, 25 bp, SARS Virus
aaccgttcggctaccttgtttaact

SEQ ID NO: 83550 - DNA, 25 bp, SARS Virus
accgttcggcttacttgtttaacta

SEQ ID NO: 83551 - DNA, 25 bp, SARS Virus
ccgttcggcttcattgtttaactac

SEQ ID NO: 83552 - DNA, 25 bp, SARS Virus
cgttcggcttccatgtttaactacc

SEQ ID NO: 83553 - DNA, 25 bp, SARS Virus
gttcggcttcctagtttaactaccg

SEQ ID NO: 83554 - DNA, 25 bp, SARS Virus
ttcggcttccttatttaactaccga

SEQ ID NO: 83555 - DNA, 25 bp, SARS Virus
tcggcttccttgattaactaccgat

SEQ ID NO: 83556 - DNA, 25 bp, SARS Virus
cggcttccttgtataactaccgata

SEQ ID NO: 83557 - DNA, 25 bp, SARS Virus
ggcttccttgttaaactaccgatat

SEQ ID NO: 83558 - DNA, 25 bp, SARS Virus
gcttccttgtttaactaccgatatg

SEQ ID NO: 83559 - DNA, 25 bp, SARS Virus
cttccttgtttaactaccgatatgg

SEQ ID NO: 83560 - DNA, 25 bp, SARS Virus
ttccttgtttaaataccgatatggt

SEQ ID NO: 83561 - DNA, 25 bp, SARS Virus
tccttgtttaacaaccgatatggta

SEQ ID NO: 83562 - DNA, 25 bp, SARS Virus
ccttgtttaactaccgatatggtac

SEQ ID NO: 83563 - DNA, 25 bp, SARS Virus
cttgtttaactaacgatatggtacg

SEQ ID NO: 83564 - DNA, 25 bp, SARS Virus
ttgtttaactacagatatggtacgt

SEQ ID NO: 83565 - DNA, 25 bp, SARS Virus
tgtttaactaccaatatggtacgta

SEQ ID NO: 83566 - DNA, 25 bp, SARS Virus
gtttaactaccgatatggtacgtac

SEQ ID NO: 83567 - DNA, 25 bp, SARS Virus
tttaactaccgaaatggtacgtacg

SEQ ID NO: 83568 - DNA, 25 bp, SARS Virus
ttaactaccgatatggtacgtacga

SEQ ID NO: 83569 - DNA, 25 bp, SARS Virus
taactaccgataaggtacgtacgat

SEQ ID NO: 83570 - DNA, 25 bp, SARS Virus
aactaccgatatagtacgtacgatt

SEQ ID NO: 83571 - DNA, 25 bp, SARS Virus
actaccgatatgatacgtacgattg

SEQ ID NO: 83572 - DNA, 25 bp, SARS Virus
ctaccgatatggaacgtacgattga

SEQ ID NO: 83573 - DNA, 25 bp, SARS Virus
taccgatatggtacgtacgattgat

SEQ ID NO: 83574 - DNA, 25 bp, SARS Virus
accgatatggtaagtacgattgatg

SEQ ID NO: 83575 - DNA, 25 bp, SARS Virus
ccgatatggtacatacgattgatgt

SEQ ID NO: 83576 - DNA, 25 bp, SARS Virus
cgatatggtacgaacgattgatgta

SEQ ID NO: 83577 - DNA, 25 bp, SARS Virus
aatcgacatgggctgttgtactctc

SEQ ID NO: 83578 - DNA, 25 bp, SARS Virus
atcgacatgggacgttgtactctca

SEQ ID NO: 83579 - DNA, 25 bp, SARS Virus
tcgacatgggatcttgtactctcaa

SEQ ID NO: 83580 - DNA, 25 bp, SARS Virus
cgacatgggatgctgtactctcaat

SEQ ID NO: 83581 - DNA, 25 bp, SARS Virus
gacatgggatgtcgtactctcaata

SEQ ID NO: 83582 - DNA, 25 bp, SARS Virus
acatgggatgttctactctcaataa

SEQ ID NO: 83583 - DNA, 25 bp, SARS Virus
catgggatgttgcactctcaataag

SEQ ID NO: 83584 - DNA, 25 bp, SARS Virus
atgggatgttgtcctctcaataagt

SEQ ID NO: 83585 - DNA, 25 bp, SARS Virus
tgggatgttgtactctcaataagtg

SEQ ID NO: 83586 - DNA, 25 bp, SARS Virus
gggatgttgtaccctcaataagtga

SEQ ID NO: 83587 - DNA, 25 bp, SARS Virus
ggatgttgtactctcaataagtgaa

SEQ ID NO: 83588 - DNA, 25 bp, SARS Virus
gatgttgtactcccaataagtgaaa

SEQ ID NO: 83589 - DNA, 25 bp, SARS Virus
atgttgtactctcaataagtgaaac

SEQ ID NO: 83590 - DNA, 25 bp, SARS Virus
tgttgtactctccataagtgaaacc

SEQ ID NO: 83591 - DNA, 25 bp, SARS Virus
gttgtactctcactaagtgaaacca

SEQ ID NO: 83592 - DNA, 25 bp, SARS Virus
ttgtactctcaacaagtgaaaccac

SEQ ID NO: 83593 - DNA, 25 bp, SARS Virus
tgtactctcaatcagtgaaaccacg

SEQ ID NO: 83594 - DNA, 25 bp, SARS Virus
gtactctcaatacgtgaaaccacga

SEQ ID NO: 83595 - DNA, 25 bp, SARS Virus
tactctcaataactgaaaccacgac

SEQ ID NO: 83596 - DNA, 25 bp, SARS Virus
actctcaataagcgaaaccacgacc

SEQ ID NO: 83597 - DNA, 25 bp, SARS Virus
ctctcaataagtcaaaccacgaccg

SEQ ID NO: 83598 - DNA, 25 bp, SARS Virus
tctcaataagtgcaaccacgaccga

SEQ ID NO: 83599 - DNA, 25 bp, SARS Virus
ctcaataagtgacaccacgaccgag

SEQ ID NO: 83600 - DNA, 25 bp, SARS Virus
tcaataagtgaacccacgaccgaga

SEQ ID NO: 83601 - DNA, 25 bp, SARS Virus
caataagtgaaaccacgaccgagac

SEQ ID NO: 83602 - DNA, 25 bp, SARS Virus
aataagtgaaaccacgaccgagact

SEQ ID NO: 83603 - DNA, 25 bp, SARS Virus
ataagtgaaaccccgaccgagacta

SEQ ID NO: 83604 - DNA, 25 bp, SARS Virus
taagtgaaaccacgaccgagactat

SEQ ID NO: 83605 - DNA, 25 bp, SARS Virus
aagtgaaaccaccaccgagactatt

SEQ ID NO: 83606 - DNA, 25 bp, SARS Virus
agtgaaaccacgcccgagactattt

SEQ ID NO: 83607 - DNA, 25 bp, SARS Virus
gtgaaaccacgaccgagactatttc

SEQ ID NO: 83608 - DNA, 25 bp, SARS Virus
tgaaaccacgaccgagactatttcc

SEQ ID NO: 83609 - DNA, 25 bp, SARS Virus
gaaaccacgacccagactatttcct

SEQ ID NO: 83610 - DNA, 25 bp, SARS Virus
aaaccacgaccgcgactatttcctc

SEQ ID NO: 83611 - DNA, 25 bp, SARS Virus
aaccacgaccgacactatttcctca

SEQ ID NO: 83612 - DNA, 25 bp, SARS Virus
accacgaccgagcctatttcctcaa

SEQ ID NO: 83613 - DNA, 25 bp, SARS Virus
ccacgaccgagactatttcctcaac

SEQ ID NO: 83614 - DNA, 25 bp, SARS Virus
cacgaccgagaccatttcctcaacg

SEQ ID NO: 83615 - DNA, 25 bp, SARS Virus
acgaccgagactctttcctcaacgt

SEQ ID NO: 83616 - DNA, 25 bp, SARS Virus
cgaccgagactacttcctcaacgtg

SEQ ID NO: 83617 - DNA, 25 bp, SARS Virus
gaccgagactatctcctcaacgtgg

SEQ ID NO: 83618 - DNA, 25 bp, SARS Virus
accgagactattccctcaacgtggt

SEQ ID NO: 83619 - DNA, 25 bp, SARS Virus
ccgagactatttcctcaacgtggtc

SEQ ID NO: 83620 - DNA, 25 bp, SARS Virus
cgagactatttcctcaacgtggtcc

SEQ ID NO: 83621 - DNA, 25 bp, SARS Virus
gagactatttccccaacgtggtcca

SEQ ID NO: 83622 - DNA, 25 bp, SARS Virus
agactatttcctcaacgtggtccat

SEQ ID NO: 83623 - DNA, 25 bp, SARS Virus
gactatttcctccacgtggtccatg

SEQ ID NO: 83624 - DNA, 25 bp, SARS Virus
actatttcctcaccgtggtccatgt

SEQ ID NO: 83625 - DNA, 25 bp, SARS Virus
ctatttcctcaacgtggtccatgtc

SEQ ID NO: 83626 - DNA, 25 bp, SARS Virus
tatttcctcaacctggtccatgtcg

SEQ ID NO: 83627 - DNA, 25 bp, SARS Virus
atttcctcaacgcggtccatgtcga

SEQ ID NO: 83628 - DNA, 25 bp, SARS Virus
tttcctcaacgtcgtccatgtcgac

SEQ ID NO: 83629 - DNA, 25 bp, SARS Virus
ttcctcaacgtgctccatgtcgaca

SEQ ID NO: 83630 - DNA, 25 bp, SARS Virus
tcctcaacgtggcccatgtcgacac

SEQ ID NO: 83631 - DNA, 25 bp, SARS Virus
cctcaacgtggtccatgtcgacacg

SEQ ID NO: 83632 - DNA, 25 bp, SARS Virus
ctcaacgtggtccatgtcgacacga

SEQ ID NO: 83633 - DNA, 25 bp, SARS Virus
tcaacgtggtccctgtcgacacgag

SEQ ID NO: 83634 - DNA, 25 bp, SARS Virus
caacgtggtccacgtcgacacgagt

SEQ ID NO: 83635 - DNA, 25 bp, SARS Virus
aacgtggtccatctcgacacgagtc

SEQ ID NO: 83636 - DNA, 25 bp, SARS Virus
acgtggtccatgccgacacgagtct

SEQ ID NO: 83637 - DNA, 25 bp, SARS Virus
cgtggtccatgtcgacacgagtctg

SEQ ID NO: 83638 - DNA, 25 bp, SARS Virus
gtggtccatgtccacacgagtctgt

SEQ ID NO: 83639 - DNA, 25 bp, SARS Virus
tggtccatgtcgccacgagtctgtt

SEQ ID NO: 83640 - DNA, 25 bp, SARS Virus
ggtccatgtcgacacgagtctgtta

SEQ ID NO: 83641 - DNA, 25 bp, SARS Virus
gtccatgtcgacccgagtctgttac

SEQ ID NO: 83642 - DNA, 25 bp, SARS Virus
tccatgtcgacacgagtctgttacc

SEQ ID NO: 83643 - DNA, 25 bp, SARS Virus
ccatgtcgacaccagtctgttacca

SEQ ID NO: 83644 - DNA, 25 bp, SARS Virus
catgtcgacacgcgtctgttaccaa

SEQ ID NO: 83645 - DNA, 25 bp, SARS Virus
atgtcgacacgactctgttaccaac

SEQ ID NO: 83646 - DNA, 25 bp, SARS Virus
tgtcgacacgagcctgttaccaacg

SEQ ID NO: 83647 - DNA, 25 bp, SARS Virus
gtcgacacgagtctgttaccaacgg

SEQ ID NO: 83648 - DNA, 25 bp, SARS Virus
tcgacacgagtccgttaccaacggt

SEQ ID NO: 83649 - DNA, 25 bp, SARS Virus
cgacacgagtctcttaccaacggtt

SEQ ID NO: 83650 - DNA, 25 bp, SARS Virus
gacacgagtctgctaccaacggttg

SEQ ID NO: 83651 - DNA, 25 bp, SARS Virus
acacgagtctgtcaccaacggttga

SEQ ID NO: 83652 - DNA, 25 bp, SARS Virus
cacgagtctgttcccaacggttgac

SEQ ID NO: 83653 - DNA, 25 bp, SARS Virus
acgagtctgttaccaacggttgacc

SEQ ID NO: 83654 - DNA, 25 bp, SARS Virus
cgagtctgttaccaacggttgaccg

SEQ ID NO: 83655 - DNA, 25 bp, SARS Virus
gagtctgttacccacggttgaccgt

SEQ ID NO: 83656 - DNA, 25 bp, SARS Virus
agtctgttaccaccggttgaccgtg

SEQ ID NO: 83657 - DNA, 25 bp, SARS Virus
gtctgttaccaacggttgaccgtgt

SEQ ID NO: 83658 - DNA, 25 bp, SARS Virus
tctgttaccaaccgttgaccgtgtg

SEQ ID NO: 83659 - DNA, 25 bp, SARS Virus
ctgttaccaacgcttgaccgtgtga

SEQ ID NO: 83660 - DNA, 25 bp, SARS Virus
tgttaccaacggctgaccgtgtgat

SEQ ID NO: 83661 - DNA, 25 bp, SARS Virus
gttaccaacggtcgaccgtgtgatg

SEQ ID NO: 83662 - DNA, 25 bp, SARS Virus
ttaccaacggttcaccgtgtgatga

SEQ ID NO: 83663 - DNA, 25 bp, SARS Virus
taccaacggttgcccgtgtgatgaa

SEQ ID NO: 83664 - DNA, 25 bp, SARS Virus
accaacggttgaccgtgtgatgaac

SEQ ID NO: 83665 - DNA, 25 bp, SARS Virus
ccaacggttgaccgtgtgatgaaca

SEQ ID NO: 83666 - DNA, 25 bp, SARS Virus
caacggttgaccctgtgatgaacag

SEQ ID NO: 83667 - DNA, 25 bp, SARS Virus
aacggttgaccgcgtgatgaacagc

SEQ ID NO: 83668 - DNA, 25 bp, SARS Virus
acggttgaccgtctgatgaacagct

SEQ ID NO: 83669 - DNA, 25 bp, SARS Virus
cggttgaccgtgcgatgaacagcta

SEQ ID NO: 83670 - DNA, 25 bp, SARS Virus
ggttgaccgtgtcatgaacagctaa

SEQ ID NO: 83671 - DNA, 25 bp, SARS Virus
gttgaccgtgtgctgaacagctaag

SEQ ID NO: 83672 - DNA, 25 bp, SARS Virus
ttgaccgtgtgacgaacagctaagt

SEQ ID NO: 83673 - DNA, 25 bp, SARS Virus
tgaccgtgtgatcaacagctaagtc

SEQ ID NO: 83674 - DNA, 25 bp, SARS Virus
gaccgtgtgatgcacagctaagtct

SEQ ID NO: 83675 - DNA, 25 bp, SARS Virus
accgtgtgatgaccagctaagtcta

SEQ ID NO: 83676 - DNA, 25 bp, SARS Virus
ccgtgtgatgaacagctaagtctag

SEQ ID NO: 83677 - DNA, 25 bp, SARS Virus
cgtgtgatgaaccgctaagtctaga

SEQ ID NO: 83678 - DNA, 25 bp, SARS Virus
gtgtgatgaacacctaagtctagaa

SEQ ID NO: 83679 - DNA, 25 bp, SARS Virus
tgtgatgaacagctaagtctagaat

SEQ ID NO: 83680 - DNA, 25 bp, SARS Virus
gtgatgaacagccaagtctagaatt

SEQ ID NO: 83681 - DNA, 25 bp, SARS Virus
tgatgaacagctcagtctagaatta

SEQ ID NO: 83682 - DNA, 25 bp, SARS Virus
gatgaacagctacgtctagaattac

SEQ ID NO: 83683 - DNA, 25 bp, SARS Virus
atgaacagctaactctagaattact

SEQ ID NO: 83684 - DNA, 25 bp, SARS Virus
tgaacagctaagcctagaattactg

SEQ ID NO: 83685 - DNA, 25 bp, SARS Virus
gaacagctaagtctagaattactga

SEQ ID NO: 83686 - DNA, 25 bp, SARS Virus
aacagctaagtccagaattactgaa

SEQ ID NO: 83687 - DNA, 25 bp, SARS Virus
acagctaagtctcgaattactgaag

SEQ ID NO: 83688 - DNA, 25 bp, SARS Virus
cagctaagtctacaattactgaagc

SEQ ID NO: 83689 - DNA, 25 bp, SARS Virus
agctaagtctagcattactgaagca

SEQ ID NO: 83690 - DNA, 25 bp, SARS Virus
gctaagtctagacttactgaagcag

SEQ ID NO: 83691 - DNA, 25 bp, SARS Virus
ctaagtctagaactactgaagcaga

SEQ ID NO: 83692 - DNA, 25 bp, SARS Virus
taagtctagaatcactgaagcagag

SEQ ID NO: 83693 - DNA, 25 bp, SARS Virus
aagtctagaattcctgaagcagagg

SEQ ID NO: 83694 - DNA, 25 bp, SARS Virus
agtctagaattactgaagcagaggc

SEQ ID NO: 83695 - DNA, 25 bp, SARS Virus
gtctagaattaccgaagcagaggct

SEQ ID NO: 83696 - DNA, 25 bp, SARS Virus
tctagaattactcaagcagaggctg

SEQ ID NO: 83697 - DNA, 25 bp, SARS Virus
ctagaattactgcagcagaggctgc

SEQ ID NO: 83698 - DNA, 25 bp, SARS Virus
tagaattactgacgcagaggctgcg

SEQ ID NO: 83699 - DNA, 25 bp, SARS Virus
agaattactgaaccagaggctgcgt

SEQ ID NO: 83700 - DNA, 25 bp, SARS Virus
gaattactgaagcagaggctgcgtc

SEQ ID NO: 83701 - DNA, 25 bp, SARS Virus
aattactgaagccgaggctgcgtct

SEQ ID NO: 83702 - DNA, 25 bp, SARS Virus
attactgaagcacaggctgcgtcta

SEQ ID NO: 83703 - DNA, 25 bp, SARS Virus
ttactgaagcagcggctgcgtctaa

SEQ ID NO: 83704 - DNA, 25 bp, SARS Virus
tactgaagcagacgctgcgtctaag

SEQ ID NO: 83705 - DNA, 25 bp, SARS Virus
actgaagcagagcctgcgtctaaga

SEQ ID NO: 83706 - DNA, 25 bp, SARS Virus
ctgaagcagaggctgcgtctaagat

SEQ ID NO: 83707 - DNA, 25 bp, SARS Virus
tgaagcagaggccgcgtctaagatg

SEQ ID NO: 83708 - DNA, 25 bp, SARS Virus
gaagcagaggctccgtctaagatga

SEQ ID NO: 83709 - DNA, 25 bp, SARS Virus
aagcagaggctgcgtctaagatgaa

SEQ ID NO: 83710 - DNA, 25 bp, SARS Virus
agcagaggctgcctctaagatgaaa

SEQ ID NO: 83711 - DNA, 25 bp, SARS Virus
gcagaggctgcgcctaagatgaaat

SEQ ID NO: 83712 - DNA, 25 bp, SARS Virus
cagaggctgcgtctaagatgaaatt

SEQ ID NO: 83713 - DNA, 25 bp, SARS Virus
agaggctgcgtccaagatgaaatta

SEQ ID NO: 83714 - DNA, 25 bp, SARS Virus
gaggctgcgtctcagatgaaattaa

SEQ ID NO: 83715 - DNA, 25 bp, SARS Virus
aggctgcgtctacgatgaaattaac

SEQ ID NO: 83716 - DNA, 25 bp, SARS Virus
ggctgcgtctaacatgaaattaacc

SEQ ID NO: 83717 - DNA, 25 bp, SARS Virus
gctgcgtctaagctgaaattaacct

SEQ ID NO: 83718 - DNA, 25 bp, SARS Virus
ctgcgtctaagacgaaattaacctc

SEQ ID NO: 83719 - DNA, 25 bp, SARS Virus
tgcgtctaagatcaaattaacctct

SEQ ID NO: 83720 - DNA, 25 bp, SARS Virus
gcgtctaagatgcaattaacctctg

SEQ ID NO: 83721 - DNA, 25 bp, SARS Virus
cgtctaagatgacattaacctctga

SEQ ID NO: 83722 - DNA, 25 bp, SARS Virus
gtctaagatgaacttaacctctgac

SEQ ID NO: 83723 - DNA, 25 bp, SARS Virus
tctaagatgaaactaacctctgaca

SEQ ID NO: 83724 - DNA, 25 bp, SARS Virus
ctaagatgaaatcaacctctgacac

SEQ ID NO: 83725 - DNA, 25 bp, SARS Virus
taagatgaaattcacctctgacacg

SEQ ID NO: 83726 - DNA, 25 bp, SARS Virus
aagatgaaattaccctctgacacgt

SEQ ID NO: 83727 - DNA, 25 bp, SARS Virus
agatgaaattaacctctgacacgtt

SEQ ID NO: 83728 - DNA, 25 bp, SARS Virus
gatgaaattaacctctgacacgttg

SEQ ID NO: 83729 - DNA, 25 bp, SARS Virus
atgaaattaacccctgacacgttgt

SEQ ID NO: 83730 - DNA, 25 bp, SARS Virus
tgaaattaacctctgacacgttgtc

SEQ ID NO: 83731 - DNA, 25 bp, SARS Virus
gaaattaacctccgacacgttgtca

SEQ ID NO: 83732 - DNA, 25 bp, SARS Virus
aaattaacctctcacacgttgtcat

SEQ ID NO: 83733 - DNA, 25 bp, SARS Virus
aattaacctctgccacgttgtcatg

SEQ ID NO: 83734 - DNA, 25 bp, SARS Virus
attaacctctgacacgttgtcatgt

SEQ ID NO: 83735 - DNA, 25 bp, SARS Virus
ttaacctctgacccgttgtcatgta

SEQ ID NO: 83736 - DNA, 25 bp, SARS Virus
taacctctgacacgttgtcatgtat

SEQ ID NO: 83737 - DNA, 25 bp, SARS Virus
aacctctgacaccttgtcatgtatg

SEQ ID NO: 83738 - DNA, 25 bp, SARS Virus
acctctgacacgctgtcatgtatgc

SEQ ID NO: 83739 - DNA, 25 bp, SARS Virus
cctctgacacgtcgtcatgtatgcc

SEQ ID NO: 83740 - DNA, 25 bp, SARS Virus
ctctgacacgttctcatgtatgccg

SEQ ID NO: 83741 - DNA, 25 bp, SARS Virus
tctgacacgttgccatgtatgccga

SEQ ID NO: 83742 - DNA, 25 bp, SARS Virus
ctgacacgttgtcatgtatgccgat

SEQ ID NO: 83743 - DNA, 25 bp, SARS Virus
tgacacgttgtcctgtatgccgatt

SEQ ID NO: 83744 - DNA, 25 bp, SARS Virus
gacacgttgtcacgtatgccgatta

SEQ ID NO: 83745 - DNA, 25 bp, SARS Virus
acacgttgtcatctatgccgattat

SEQ ID NO: 83746 - DNA, 25 bp, SARS Virus
cacgttgtcatgcatgccgattatt

SEQ ID NO: 83747 - DNA, 25 bp, SARS Virus
acgttgtcatgtctgccgattattt

SEQ ID NO: 83748 - DNA, 25 bp, SARS Virus
cgttgtcatgtacgccgattattta

SEQ ID NO: 83749 - DNA, 25 bp, SARS Virus
gttgtcatgtatcccgattatttac

SEQ ID NO: 83750 - DNA, 25 bp, SARS Virus
ttgtcatgtatgccgattatttacc

SEQ ID NO: 83751 - DNA, 25 bp, SARS Virus
tgtcatgtatgccgattatttaccc

SEQ ID NO: 83752 - DNA, 25 bp, SARS Virus
gtcatgtatgcccattatttaccct

SEQ ID NO: 83753 - DNA, 25 bp, SARS Virus
tcatgtatgccgcttatttaccctg

SEQ ID NO: 83754 - DNA, 25 bp, SARS Virus
catgtatgccgactatttaccctgg

SEQ ID NO: 83755 - DNA, 25 bp, SARS Virus
atgtatgccgatcatttaccctgga

SEQ ID NO: 83756 - DNA, 25 bp, SARS Virus
tgtatgccgattctttaccctggaa

SEQ ID NO: 83757 - DNA, 25 bp, SARS Virus
gtatgccgattacttaccctggaat

SEQ ID NO: 83758 - DNA, 25 bp, SARS Virus
tatgccgattatctaccctggaata

SEQ ID NO: 83759 - DNA, 25 bp, SARS Virus
atgccgattattcaccctggaataa

SEQ ID NO: 83760 - DNA, 25 bp, SARS Virus
tgccgattatttcccctggaataat

SEQ ID NO: 83761 - DNA, 25 bp, SARS Virus
gccgattatttaccctggaataata

SEQ ID NO: 83762 - DNA, 25 bp, SARS Virus
ccgattatttaccctggaataataa

SEQ ID NO: 83763 - DNA, 25 bp, SARS Virus
cgattatttaccctggaataataat

SEQ ID NO: 83764 - DNA, 25 bp, SARS Virus
gattatttaccccggaataataatc

SEQ ID NO: 83765 - DNA, 25 bp, SARS Virus
attatttaccctcgaataataatcg

SEQ ID NO: 83766 - DNA, 25 bp, SARS Virus
ttatttaccctgcaataataatcgc

SEQ ID NO: 83767 - DNA, 25 bp, SARS Virus
tatttaccctggcataataatcgct

SEQ ID NO: 83768 - DNA, 25 bp, SARS Virus
atttaccctggactaataatcgcta

SEQ ID NO: 83769 - DNA, 25 bp, SARS Virus
tttaccctggaacaataatcgctat

SEQ ID NO: 83770 - DNA, 25 bp, SARS Virus
ttaccctggaatcataatcgctata

SEQ ID NO: 83771 - DNA, 25 bp, SARS Virus
taccctggaatactaatcgctatac

SEQ ID NO: 83772 - DNA, 25 bp, SARS Virus
accctggaataacaatcgctataca

SEQ ID NO: 83773 - DNA, 25 bp, SARS Virus
ccctggaataatcatcgctatacat

SEQ ID NO: 83774 - DNA, 25 bp, SARS Virus
cctggaataatactcgctatacata

SEQ ID NO: 83775 - DNA, 25 bp, SARS Virus
ctggaataataaccgctatacatac

SEQ ID NO: 83776 - DNA, 25 bp, SARS Virus
tggaataataatcgctatacatact

SEQ ID NO: 83777 - DNA, 25 bp, SARS Virus
ggaataataatccctatacatactg

SEQ ID NO: 83778 - DNA, 25 bp, SARS Virus
gaataataatcgctatacatactgg

SEQ ID NO: 83779 - DNA, 25 bp, SARS Virus
aataataatcgccatacatactggg

SEQ ID NO: 83780 - DNA, 25 bp, SARS Virus
ataataatcgctctacatactggga

SEQ ID NO: 83781 - DNA, 25 bp, SARS Virus
taataatcgctacacatactgggat

SEQ ID NO: 83782 - DNA, 25 bp, SARS Virus
aataatcgctatccatactgggatc

SEQ ID NO: 83783 - DNA, 25 bp, SARS Virus
ataatcgctatacatactgggatcc

SEQ ID NO: 83784 - DNA, 25 bp, SARS Virus
taatcgctatacctactgggatcct

SEQ ID NO: 83785 - DNA, 25 bp, SARS Virus
aatcgctatacacactgggatcctg

SEQ ID NO: 83786 - DNA, 25 bp, SARS Virus
atcgctatacatcctgggatcctgg

SEQ ID NO: 83787 - DNA, 25 bp, SARS Virus
tcgctatacatactgggatcctggt

SEQ ID NO: 83788 - DNA, 25 bp, SARS Virus
cgctatacataccgggatcctggtt

SEQ ID NO: 83789 - DNA, 25 bp, SARS Virus
gctatacatactcggatcctggttt

SEQ ID NO: 83790 - DNA, 25 bp, SARS Virus
ctatacatactgcgatcctggtttg

SEQ ID NO: 83791 - DNA, 25 bp, SARS Virus
tatacatactggcatcctggtttgt

SEQ ID NO: 83792 - DNA, 25 bp, SARS Virus
atacatactgggctcctggtttgta

SEQ ID NO: 83793 - DNA, 25 bp, SARS Virus
tacatactgggaccctggtttgtac

SEQ ID NO: 83794 - DNA, 25 bp, SARS Virus
acatactgggatcctggtttgtaca

SEQ ID NO: 83795 - DNA, 25 bp, SARS Virus
catactgggatcctggtttgtacac

SEQ ID NO: 83796 - DNA, 25 bp, SARS Virus
atactgggatcccggtttgtacact

SEQ ID NO: 83797 - DNA, 25 bp, SARS Virus
tactgggatcctcgtttgtacactg

SEQ ID NO: 83798 - DNA, 25 bp, SARS Virus
actgggatcctgctttgtacactgt

SEQ ID NO: 83799 - DNA, 25 bp, SARS Virus
ctgggatcctggcttgtacactgtt

SEQ ID NO: 83800 - DNA, 25 bp, SARS Virus
tgggatcctggtctgtacactgttt

SEQ ID NO: 83801 - DNA, 25 bp, SARS Virus
gggatcctggttcgtacactgtttt

SEQ ID NO: 83802 - DNA, 25 bp, SARS Virus
ggatcctggtttctacactgttttc

SEQ ID NO: 83803 - DNA, 25 bp, SARS Virus
gatcctggtttgcacactgttttct

SEQ ID NO: 83804 - DNA, 25 bp, SARS Virus
atcctggtttgtccactgttttctc

SEQ ID NO: 83805 - DNA, 25 bp, SARS Virus
tcctggtttgtacactgttttctct

SEQ ID NO: 83806 - DNA, 25 bp, SARS Virus
cctggtttgtaccctgttttctctt

SEQ ID NO: 83807 - DNA, 25 bp, SARS Virus
ctggtttgtacactgttttctctta

SEQ ID NO: 83808 - DNA, 25 bp, SARS Virus
tggtttgtacaccgttttctcttac

SEQ ID NO: 83809 - DNA, 25 bp, SARS Virus
ggtttgtacactcttttctcttact

SEQ ID NO: 83810 - DNA, 25 bp, SARS Virus
gtttgtacactgctttctcttactg

SEQ ID NO: 83811 - DNA, 25 bp, SARS Virus
tttgtacactgtcttctcttactga

SEQ ID NO: 83812 - DNA, 25 bp, SARS Virus
ttgtacactgttctctcttactgag

SEQ ID NO: 83813 - DNA, 25 bp, SARS Virus
tgtacactgtttcctcttactgaga

SEQ ID NO: 83814 - DNA, 25 bp, SARS Virus
gtacactgttttctcttactgagat

SEQ ID NO: 83815 - DNA, 25 bp, SARS Virus
tacactgttttcccttactgagatt

SEQ ID NO: 83816 - DNA, 25 bp, SARS Virus
acactgttttctcttactgagattt

SEQ ID NO: 83817 - DNA, 25 bp, SARS Virus
cactgttttctcctactgagatttc

SEQ ID NO: 83818 - DNA, 25 bp, SARS Virus
actgttttctctcactgagatttct

SEQ ID NO: 83819 - DNA, 25 bp, SARS Virus
ctgttttctcttcctgagatttctt

SEQ ID NO: 83820 - DNA, 25 bp, SARS Virus
tgttttctcttactgagatttcttc

SEQ ID NO: 83821 - DNA, 25 bp, SARS Virus
gttttctcttaccgagatttcttcc

SEQ ID NO: 83822 - DNA, 25 bp, SARS Virus
ttttctcttactcagatttcttccc

SEQ ID NO: 83823 - DNA, 25 bp, SARS Virus
tttctcttactgcgatttcttccca

SEQ ID NO: 83824 - DNA, 25 bp, SARS Virus
ttctcttactgacatttcttcccaa

SEQ ID NO: 83825 - DNA, 25 bp, SARS Virus
tctcttactgagctttcttcccaaa

SEQ ID NO: 83826 - DNA, 25 bp, SARS Virus
ctcttactgagacttcttcccaaaa

SEQ ID NO: 83827 - DNA, 25 bp, SARS Virus
tcttactgagatctcttcccaaaaa

SEQ ID NO: 83828 - DNA, 25 bp, SARS Virus
cttactgagattccttcccaaaaag

SEQ ID NO: 83829 - DNA, 25 bp, SARS Virus
ttactgagatttcttcccaaaaagt

SEQ ID NO: 83830 - DNA, 25 bp, SARS Virus
tactgagatttcctcccaaaaagtg

SEQ ID NO: 83831 - DNA, 25 bp, SARS Virus
actgagatttctccccaaaaagtga

SEQ ID NO: 83832 - DNA, 25 bp, SARS Virus
ctgagatttcttcccaaaaagtgaa

SEQ ID NO: 83833 - DNA, 25 bp, SARS Virus
tgagatttcttcccaaaaagtgaat

SEQ ID NO: 83834 - DNA, 25 bp, SARS Virus
gagatttcttcccaaaaagtgaata

SEQ ID NO: 83835 - DNA, 25 bp, SARS Virus
agatttcttccccaaaagtgaatag

SEQ ID NO: 83836 - DNA, 25 bp, SARS Virus
gatttcttcccacaaagtgaataga

SEQ ID NO: 83837 - DNA, 25 bp, SARS Virus
atttcttcccaacaagtgaatagac

SEQ ID NO: 83838 - DNA, 25 bp, SARS Virus
tttcttcccaaacagtgaatagaca

SEQ ID NO: 83839 - DNA, 25 bp, SARS Virus
ttcttcccaaaacgtgaatagacac

SEQ ID NO: 83840 - DNA, 25 bp, SARS Virus
tcttcccaaaaactgaatagacaca

SEQ ID NO: 83841 - DNA, 25 bp, SARS Virus
cttcccaaaaagcgaatagacacac

SEQ ID NO: 83842 - DNA, 25 bp, SARS Virus
ttcccaaaaagtcaatagacacacc

SEQ ID NO: 83843 - DNA, 25 bp, SARS Virus
tcccaaaaagtgcatagacacacct

SEQ ID NO: 83844 - DNA, 25 bp, SARS Virus
cccaaaaagtgactagacacaccta

SEQ ID NO: 83845 - DNA, 25 bp, SARS Virus
ccaaaaagtgaacagacacacctaa

SEQ ID NO: 83846 - DNA, 25 bp, SARS Virus
caaaaagtgaatcgacacacctaaa

SEQ ID NO: 83847 - DNA, 25 bp, SARS Virus
aaaaagtgaatacacacacctaaat

SEQ ID NO: 83848 - DNA, 25 bp, SARS Virus
aaaagtgaatagccacacctaaata

SEQ ID NO: 83849 - DNA, 25 bp, SARS Virus
aaagtgaatagacacacctaaatat

SEQ ID NO: 83850 - DNA, 25 bp, SARS Virus
aagtgaatagacccacctaaatatt

SEQ ID NO: 83851 - DNA, 25 bp, SARS Virus
agtgaatagacacacctaaatattt

SEQ ID NO: 83852 - DNA, 25 bp, SARS Virus
gtgaatagacacccctaaatatttc

SEQ ID NO: 83853 - DNA, 25 bp, SARS Virus
tgaatagacacacctaaatatttcg

SEQ ID NO: 83854 - DNA, 25 bp, SARS Virus
gaatagacacacctaaatatttcgt

SEQ ID NO: 83855 - DNA, 25 bp, SARS Virus
aatagacacacccaaatatttcgtt

SEQ ID NO: 83856 - DNA, 25 bp, SARS Virus
atagacacacctcaatatttcgttt

SEQ ID NO: 83857 - DNA, 25 bp, SARS Virus
tagacacacctacatatttcgtttt

SEQ ID NO: 83858 - DNA, 25 bp, SARS Virus
agacacacctaactatttcgttttt

SEQ ID NO: 83859 - DNA, 25 bp, SARS Virus
gacacacctaaacatttcgtttttg

SEQ ID NO: 83860 - DNA, 25 bp, SARS Virus
acacacctaaatctttcgtttttga

SEQ ID NO: 83861 - DNA, 25 bp, SARS Virus
cacacctaaatacttcgtttttgat

SEQ ID NO: 83862 - DNA, 25 bp, SARS Virus
acacctaaatatctcgtttttgatc

SEQ ID NO: 83863 - DNA, 25 bp, SARS Virus
cacctaaatattccgtttttgatcg

SEQ ID NO: 83864 - DNA, 25 bp, SARS Virus
acctaaatatttcgtttttgatcgg

SEQ ID NO: 83865 - DNA, 25 bp, SARS Virus
cctaaatatttcctttttgatcggg

SEQ ID NO: 83866 - DNA, 25 bp, SARS Virus
ctaaatatttcgcttttgatcggga

SEQ ID NO: 83867 - DNA, 25 bp, SARS Virus
taaatatttcgtctttgatcgggac

SEQ ID NO: 83868 - DNA, 25 bp, SARS Virus
aaatatttcgttcttgatcgggacc

SEQ ID NO: 83869 - DNA, 25 bp, SARS Virus
aatatttcgtttctgatcgggaccc

SEQ ID NO: 83870 - DNA, 25 bp, SARS Virus
atatttcgttttcgatcgggaccca

SEQ ID NO: 83871 - DNA, 25 bp, SARS Virus
tatttcgtttttcatcgggacccac

SEQ ID NO: 83872 - DNA, 25 bp, SARS Virus
atttcgtttttgctcgggacccacc

SEQ ID NO: 83873 - DNA, 25 bp, SARS Virus
tttcgtttttgaccgggacccacca

SEQ ID NO: 83874 - DNA, 25 bp, SARS Virus
ttcgtttttgatcgggacccaccaa

SEQ ID NO: 83875 - DNA, 25 bp, SARS Virus
tcgtttttgatccggacccaccaag

SEQ ID NO: 83876 - DNA, 25 bp, SARS Virus
cgtttttgatcgcgacccaccaaga

SEQ ID NO: 83877 - DNA, 25 bp, SARS Virus
gtttttgatcggcacccaccaagat

SEQ ID NO: 83878 - DNA, 25 bp, SARS Virus
tttttgatcgggccccaccaagata

SEQ ID NO: 83879 - DNA, 25 bp, SARS Virus
ttttgatcgggacccaccaagatat

SEQ ID NO: 83880 - DNA, 25 bp, SARS Virus
tttgatcgggacccaccaagatatc

SEQ ID NO: 83881 - DNA, 25 bp, SARS Virus
ttgatcgggacccaccaagatatcg

SEQ ID NO: 83882 - DNA, 25 bp, SARS Virus
tgatcgggaccccccaagatatcga

SEQ ID NO: 83883 - DNA, 25 bp, SARS Virus
gatcgggacccaccaagatatcgac

SEQ ID NO: 83884 - DNA, 25 bp, SARS Virus
atcgggacccaccaagatatcgaca

SEQ ID NO: 83885 - DNA, 25 bp, SARS Virus
tcgggacccacccagatatcgacat

SEQ ID NO: 83886 - DNA, 25 bp, SARS Virus
cgggacccaccacgatatcgacatt

SEQ ID NO: 83887 - DNA, 25 bp, SARS Virus
gggacccaccaacatatcgacattt

SEQ ID NO: 83888 - DNA, 25 bp, SARS Virus
ggacccaccaagctatcgacatttc

SEQ ID NO: 83889 - DNA, 25 bp, SARS Virus
gacccaccaagacatcgacatttct

SEQ ID NO: 83890 - DNA, 25 bp, SARS Virus
acccaccaagatctcgacatttcta

SEQ ID NO: 83891 - DNA, 25 bp, SARS Virus
cccaccaagataccgacatttctat

SEQ ID NO: 83892 - DNA, 25 bp, SARS Virus
ccaccaagatatcgacatttctatt

SEQ ID NO: 83893 - DNA, 25 bp, SARS Virus
caccaagatatccacatttctattg

SEQ ID NO: 83894 - DNA, 25 bp, SARS Virus
accaagatatcgccatttctattgt

SEQ ID NO: 83895 - DNA, 25 bp, SARS Virus
ccaagatatcgacatttctattgtc

SEQ ID NO: 83896 - DNA, 25 bp, SARS Virus
caagatatcgacctttctattgtct

SEQ ID NO: 83897 - DNA, 25 bp, SARS Virus
aagatatcgacacttctattgtctc

SEQ ID NO: 83898 - DNA, 25 bp, SARS Virus
agatatcgacatctctattgtctcg

SEQ ID NO: 83899 - DNA, 25 bp, SARS Virus
gatatcgacattcctattgtctcgt

SEQ ID NO: 83900 - DNA, 25 bp, SARS Virus
atatcgacatttctattgtctcgta

SEQ ID NO: 83901 - DNA, 25 bp, SARS Virus
tatcgacatttccattgtctcgtaa

SEQ ID NO: 83902 - DNA, 25 bp, SARS Virus
atcgacatttctcttgtctcgtaag

SEQ ID NO: 83903 - DNA, 25 bp, SARS Virus
tcgacatttctactgtctcgtaaga

SEQ ID NO: 83904 - DNA, 25 bp, SARS Virus
cgacatttctatcgtctcgtaagaa

SEQ ID NO: 83905 - DNA, 25 bp, SARS Virus
gacatttctattctctcgtaagaac

SEQ ID NO: 83906 - DNA, 25 bp, SARS Virus
acatttctattgcctcgtaagaacc

SEQ ID NO: 83907 - DNA, 25 bp, SARS Virus
catttctattgtctcgtaagaacct

SEQ ID NO: 83908 - DNA, 25 bp, SARS Virus
atttctattgtcccgtaagaacctt

SEQ ID NO: 83909 - DNA, 25 bp, SARS Virus
tttctattgtctcgtaagaacctta

SEQ ID NO: 83910 - DNA, 25 bp, SARS Virus
ttctattgtctcctaagaaccttac

SEQ ID NO: 83911 - DNA, 25 bp, SARS Virus
tctattgtctcgcaagaaccttacg

SEQ ID NO: 83912 - DNA, 25 bp, SARS Virus
ctattgtctcgtcagaaccttacga

SEQ ID NO: 83913 - DNA, 25 bp, SARS Virus
tattgtctcgtacgaaccttacgac

SEQ ID NO: 83914 - DNA, 25 bp, SARS Virus
attgtctcgtaacaaccttacgact

SEQ ID NO: 83915 - DNA, 25 bp, SARS Virus
ttgtctcgtaagcaccttacgactg

SEQ ID NO: 83916 - DNA, 25 bp, SARS Virus
tgtctcgtaagacccttacgactgg

SEQ ID NO: 83917 - DNA, 25 bp, SARS Virus
gtctcgtaagaaccttacgactgga

SEQ ID NO: 83918 - DNA, 25 bp, SARS Virus
tctcgtaagaaccttacgactggaa

SEQ ID NO: 83919 - DNA, 25 bp, SARS Virus
ctcgtaagaaccctacgactggaaa

SEQ ID NO: 83920 - DNA, 25 bp, SARS Virus
tcgtaagaacctcacgactggaaat

SEQ ID NO: 83921 - DNA, 25 bp, SARS Virus
cgtaagaaccttccgactggaaatg

SEQ ID NO: 83922 - DNA, 25 bp, SARS Virus
gtaagaaccttacgactggaaatgt

SEQ ID NO: 83923 - DNA, 25 bp, SARS Virus
taagaaccttaccactggaaatgtt

SEQ ID NO: 83924 - DNA, 25 bp, SARS Virus
aagaaccttacgcctggaaatgttc

SEQ ID NO: 83925 - DNA, 25 bp, SARS Virus
agaaccttacgactggaaatgttcg

SEQ ID NO: 83926 - DNA, 25 bp, SARS Virus
gaaccttacgaccggaaatgttcga

SEQ ID NO: 83927 - DNA, 25 bp, SARS Virus
aaccttacgactcgaaatgttcgaa

SEQ ID NO: 83928 - DNA, 25 bp, SARS Virus
accttacgactgcaaatgttcgaat

SEQ ID NO: 83929 - DNA, 25 bp, SARS Virus
ccttacgactggcaatgttcgaata

SEQ ID NO: 83930 - DNA, 25 bp, SARS Virus
cttacgactggacatgttcgaatac

SEQ ID NO: 83931 - DNA, 25 bp, SARS Virus
ttacgactggaactgttcgaatacc

SEQ ID NO: 83932 - DNA, 25 bp, SARS Virus
tacgactggaaacgttcgaataccc

SEQ ID NO: 83933 - DNA, 25 bp, SARS Virus
acgactggaaatcttcgaatacccg

SEQ ID NO: 83934 - DNA, 25 bp, SARS Virus
cgactggaaatgctcgaatacccgg

SEQ ID NO: 83935 - DNA, 25 bp, SARS Virus
gactggaaatgtccgaatacccggt

SEQ ID NO: 83936 - DNA, 25 bp, SARS Virus
actggaaatgttcgaatacccggta

SEQ ID NO: 83937 - DNA, 25 bp, SARS Virus
ctggaaatgttccaatacccggtaa

SEQ ID NO: 83938 - DNA, 25 bp, SARS Virus
tggaaatgttcgcatacccggtaaa

SEQ ID NO: 83939 - DNA, 25 bp, SARS Virus
ggaaatgttcgactacccggtaaag

SEQ ID NO: 83940 - DNA, 25 bp, SARS Virus
gaaatgttcgaacacccggtaaaga

SEQ ID NO: 83941 - DNA, 25 bp, SARS Virus
aaatgttcgaatccccggtaaagag

SEQ ID NO: 83942 - DNA, 25 bp, SARS Virus
aatgttcgaatacccggtaaagagt

SEQ ID NO: 83943 - DNA, 25 bp, SARS Virus
atgttcgaatacccggtaaagagta

SEQ ID NO: 83944 - DNA, 25 bp, SARS Virus
tgttcgaatacccggtaaagagtac

SEQ ID NO: 83945 - DNA, 25 bp, SARS Virus
gttcgaataccccgtaaagagtacc

SEQ ID NO: 83946 - DNA, 25 bp, SARS Virus
ttcgaatacccgctaaagagtacca

SEQ ID NO: 83947 - DNA, 25 bp, SARS Virus
tcgaatacccggcaaagagtaccac

SEQ ID NO: 83948 - DNA, 25 bp, SARS Virus
cgaatacccggtcaagagtaccacc

SEQ ID NO: 83949 - DNA, 25 bp, SARS Virus
gaatacccggtacagagtaccacct

SEQ ID NO: 83950 - DNA, 25 bp, SARS Virus
aatacccggtaacgagtaccacctg

SEQ ID NO: 83951 - DNA, 25 bp, SARS Virus
atacccggtaaacagtaccacctgt

SEQ ID NO: 83952 - DNA, 25 bp, SARS Virus
tacccggtaaagcgtaccacctgtc

SEQ ID NO: 83953 - DNA, 25 bp, SARS Virus
acccggtaaagactaccacctgtcg

SEQ ID NO: 83954 - DNA, 25 bp, SARS Virus
cccggtaaagagcaccacctgtcga

SEQ ID NO: 83955 - DNA, 25 bp, SARS Virus
ccggtaaagagtcccacctgtcgaa

SEQ ID NO: 83956 - DNA, 25 bp, SARS Virus
cggtaaagagtaccacctgtcgaaa

SEQ ID NO: 83957 - DNA, 25 bp, SARS Virus
ggtaaagagtaccacctgtcgaaaa

SEQ ID NO: 83958 - DNA, 25 bp, SARS Virus
gtaaagagtaccccctgtcgaaaac

SEQ ID NO: 83959 - DNA, 25 bp, SARS Virus
taaagagtaccacctgtcgaaaaca

SEQ ID NO: 83960 - DNA, 25 bp, SARS Virus
aaagagtaccacctgtcgaaaacaa

SEQ ID NO: 83961 - DNA, 25 bp, SARS Virus
aagagtaccacccgtcgaaaacaat

SEQ ID NO: 83962 - DNA, 25 bp, SARS Virus
agagtaccacctctcgaaaacaatg

SEQ ID NO: 83963 - DNA, 25 bp, SARS Virus
gagtaccacctgccgaaaacaatgt

SEQ ID NO: 83964 - DNA, 25 bp, SARS Virus
agtaccacctgtcgaaaacaatgtt

SEQ ID NO: 83965 - DNA, 25 bp, SARS Virus
gtaccacctgtccaaaacaatgttt

SEQ ID NO: 83966 - DNA, 25 bp, SARS Virus
taccacctgtcgcaaacaatgttta

SEQ ID NO: 83967 - DNA, 25 bp, SARS Virus
accacctgtcgacaacaatgtttac

SEQ ID NO: 83968 - DNA, 25 bp, SARS Virus
ccacctgtcgaacacaatgtttaca

SEQ ID NO: 83969 - DNA, 25 bp, SARS Virus
cacctgtcgaaaccaatgtttacat

SEQ ID NO: 83970 - DNA, 25 bp, SARS Virus
acctgtcgaaaacaatgtttacatt

SEQ ID NO: 83971 - DNA, 25 bp, SARS Virus
cctgtcgaaaaccatgtttacattt

SEQ ID NO: 83972 - DNA, 25 bp, SARS Virus
ctgtcgaaaacactgtttacattta

SEQ ID NO: 83973 - DNA, 25 bp, SARS Virus
tgtcgaaaacaacgtttacatttac

SEQ ID NO: 83974 - DNA, 25 bp, SARS Virus
gtcgaaaacaatctttacatttacg

SEQ ID NO: 83975 - DNA, 25 bp, SARS Virus
tcgaaaacaatgcttacatttacgt

SEQ ID NO: 83976 - DNA, 25 bp, SARS Virus
cgaaaacaatgtctacatttacgta

SEQ ID NO: 83977 - DNA, 25 bp, SARS Virus
gaaaacaatgttcacatttacgtag

SEQ ID NO: 83978 - DNA, 25 bp, SARS Virus
aaaacaatgtttccatttacgtagt

SEQ ID NO: 83979 - DNA, 25 bp, SARS Virus
aaacaatgtttacatttacgtagta

SEQ ID NO: 83980 - DNA, 25 bp, SARS Virus
aacaatgtttacctttacgtagtag

SEQ ID NO: 83981 - DNA, 25 bp, SARS Virus
acaatgtttacacttacgtagtagt

SEQ ID NO: 83982 - DNA, 25 bp, SARS Virus
caatgtttacatctacgtagtagta

SEQ ID NO: 83983 - DNA, 25 bp, SARS Virus
aatgtttacattcacgtagtagtag

SEQ ID NO: 83984 - DNA, 25 bp, SARS Virus
atgtttacatttccgtagtagtagc

SEQ ID NO: 83985 - DNA, 25 bp, SARS Virus
tgtttacatttacgtagtagtagcc

SEQ ID NO: 83986 - DNA, 25 bp, SARS Virus
gtttacatttacctagtagtagcct

SEQ ID NO: 83987 - DNA, 25 bp, SARS Virus
tttacatttacgcagtagtagcctt

SEQ ID NO: 83988 - DNA, 25 bp, SARS Virus
ttacatttacgtcgtagtagccttc

SEQ ID NO: 83989 - DNA, 25 bp, SARS Virus
tacatttacgtactagtagccttcg

SEQ ID NO: 83990 - DNA, 25 bp, SARS Virus
acatttacgtagcagtagccttcgt

SEQ ID NO: 83991 - DNA, 25 bp, SARS Virus
catttacgtagtcgtagccttcgta

SEQ ID NO: 83992 - DNA, 25 bp, SARS Virus
atttacgtagtactagccttcgtaa

SEQ ID NO: 83993 - DNA, 25 bp, SARS Virus
tttacgtagtagcagccttcgtaaa

SEQ ID NO: 83994 - DNA, 25 bp, SARS Virus
ttacgtagtagtcgccttcgtaaaa

SEQ ID NO: 83995 - DNA, 25 bp, SARS Virus
tacgtagtagtacccttcgtaaaaa

SEQ ID NO: 83996 - DNA, 25 bp, SARS Virus
acgtagtagtagccttcgtaaaaat

SEQ ID NO: 83997 - DNA, 25 bp, SARS Virus
cgtagtagtagccttcgtaaaaatt

SEQ ID NO: 83998 - DNA, 25 bp, SARS Virus
gtagtagtagccctcgtaaaaatta

SEQ ID NO: 83999 - DNA, 25 bp, SARS Virus
tagtagtagcctccgtaaaaattaa

SEQ ID NO: 84000 - DNA, 25 bp, SARS Virus
agtagtagccttcgtaaaaattaac

SEQ ID NO: 84001 - DNA, 25 bp, SARS Virus
gtagtagccttcctaaaaattaacc

SEQ ID NO: 84002 - DNA, 25 bp, SARS Virus
tagtagccttcgcaaaaattaaccc

SEQ ID NO: 84003 - DNA, 25 bp, SARS Virus
agtagccttcgtcaaaattaacccc

SEQ ID NO: 84004 - DNA, 25 bp, SARS Virus
gtagccttcgtacaaattaaccccg

SEQ ID NO: 84005 - DNA, 25 bp, SARS Virus
tagccttcgtaacaattaaccccga

SEQ ID NO: 84006 - DNA, 25 bp, SARS Virus
agccttcgtaaacattaaccccgat

SEQ ID NO: 84007 - DNA, 25 bp, SARS Virus
gccttcgtaaaacttaaccccgatt

SEQ ID NO: 84008 - DNA, 25 bp, SARS Virus
ccttcgtaaaaactaaccccgattg

SEQ ID NO: 84009 - DNA, 25 bp, SARS Virus
cttcgtaaaaatcaaccccgattga

SEQ ID NO: 84010 - DNA, 25 bp, SARS Virus
ttcgtaaaaattcaccccgattgat

SEQ ID NO: 84011 - DNA, 25 bp, SARS Virus
tcgtaaaaattacccccgattgata

SEQ ID NO: 84012 - DNA, 25 bp, SARS Virus
cgtaaaaattaaccccgattgatag

SEQ ID NO: 84013 - DNA, 25 bp, SARS Virus
gtaaaaattaaccccgattgataga

SEQ ID NO: 84014 - DNA, 25 bp, SARS Virus
taaaaattaaccccgattgatagaa

SEQ ID NO: 84015 - DNA, 25 bp, SARS Virus
aaaaattaaccccgattgatagaac

SEQ ID NO: 84016 - DNA, 25 bp, SARS Virus
aaaattaacccccattgatagaacc

SEQ ID NO: 84017 - DNA, 25 bp, SARS Virus
aaattaaccccgcttgatagaaccg

SEQ ID NO: 84018 - DNA, 25 bp, SARS Virus
aattaaccccgactgatagaaccgt

SEQ ID NO: 84019 - DNA, 25 bp, SARS Virus
attaaccccgatcgatagaaccgtt

SEQ ID NO: 84020 - DNA, 25 bp, SARS Virus
ttaaccccgattcatagaaccgttc

SEQ ID NO: 84021 - DNA, 25 bp, SARS Virus
taaccccgattgctagaaccgttcg

SEQ ID NO: 84022 - DNA, 25 bp, SARS Virus
aaccccgattgacagaaccgttcgg

SEQ ID NO: 84023 - DNA, 25 bp, SARS Virus
accccgattgatcgaaccgttcggc

SEQ ID NO: 84024 - DNA, 25 bp, SARS Virus
ccccgattgatacaaccgttcggct

SEQ ID NO: 84025 - DNA, 25 bp, SARS Virus
cccgattgatagcaccgttcggctt

SEQ ID NO: 84026 - DNA, 25 bp, SARS Virus
ccgattgatagacccgttcggcttc

SEQ ID NO: 84027 - DNA, 25 bp, SARS Virus
cgattgatagaaccgttcggcttcc

SEQ ID NO: 84028 - DNA, 25 bp, SARS Virus
gattgatagaaccgttcggcttcct

SEQ ID NO: 84029 - DNA, 25 bp, SARS Virus
attgatagaacccttcggcttcctt

SEQ ID NO: 84030 - DNA, 25 bp, SARS Virus
ttgatagaaccgctcggcttccttg

SEQ ID NO: 84031 - DNA, 25 bp, SARS Virus
tgatagaaccgtccggcttccttgt

SEQ ID NO: 84032 - DNA, 25 bp, SARS Virus
gatagaaccgttcggcttccttgtt

SEQ ID NO: 84033 - DNA, 25 bp, SARS Virus
atagaaccgttccgcttccttgttt

SEQ ID NO: 84034 - DNA, 25 bp, SARS Virus
tagaaccgttcgccttccttgttta

SEQ ID NO: 84035 - DNA, 25 bp, SARS Virus
agaaccgttcggcttccttgtttaa

SEQ ID NO: 84036 - DNA, 25 bp, SARS Virus
gaaccgttcggcctccttgtttaac

SEQ ID NO: 84037 - DNA, 25 bp, SARS Virus
aaccgttcggctcccttgtttaact

SEQ ID NO: 84038 - DNA, 25 bp, SARS Virus
accgttcggcttccttgtttaacta

SEQ ID NO: 84039 - DNA, 25 bp, SARS Virus
ccgttcggcttccttgtttaactac

SEQ ID NO: 84040 - DNA, 25 bp, SARS Virus
cgttcggcttccctgtttaactacc

SEQ ID NO: 84041 - DNA, 25 bp, SARS Virus
gttcggcttcctcgtttaactaccg

SEQ ID NO: 84042 - DNA, 25 bp, SARS Virus
ttcggcttccttctttaactaccga

SEQ ID NO: 84043 - DNA, 25 bp, SARS Virus
tcggcttccttgcttaactaccgat

SEQ ID NO: 84044 - DNA, 25 bp, SARS Virus
cggcttccttgtctaactaccgata

SEQ ID NO: 84045 - DNA, 25 bp, SARS Virus
ggcttccttgttcaactaccgatat

SEQ ID NO: 84046 - DNA, 25 bp, SARS Virus
gcttccttgtttcactaccgatatg

SEQ ID NO: 84047 - DNA, 25 bp, SARS Virus
cttccttgtttacctaccgatatgg

SEQ ID NO: 84048 - DNA, 25 bp, SARS Virus
ttccttgtttaactaccgatatggt

SEQ ID NO: 84049 - DNA, 25 bp, SARS Virus
tccttgtttaaccaccgatatggta

SEQ ID NO: 84050 - DNA, 25 bp, SARS Virus
ccttgtttaactcccgatatggtac

SEQ ID NO: 84051 - DNA, 25 bp, SARS Virus
cttgtttaactaccgatatggtacg

SEQ ID NO: 84052 - DNA, 25 bp, SARS Virus
ttgtttaactaccgatatggtacgt

SEQ ID NO: 84053 - DNA, 25 bp, SARS Virus
tgtttaactacccatatggtacgta

SEQ ID NO: 84054 - DNA, 25 bp, SARS Virus
gtttaactaccgctatggtacgtac

SEQ ID NO: 84055 - DNA, 25 bp, SARS Virus
tttaactaccgacatggtacgtacg

SEQ ID NO: 84056 - DNA, 25 bp, SARS Virus
ttaactaccgatctggtacgtacga

SEQ ID NO: 84057 - DNA, 25 bp, SARS Virus
taactaccgatacggtacgtacgat

SEQ ID NO: 84058 - DNA, 25 bp, SARS Virus
aactaccgatatcgtacgtacgatt

SEQ ID NO: 84059 - DNA, 25 bp, SARS Virus
actaccgatatgctacgtacgattg

SEQ ID NO: 84060 - DNA, 25 bp, SARS Virus
ctaccgatatggcacgtacgattga

SEQ ID NO: 84061 - DNA, 25 bp, SARS Virus
taccgatatggtccgtacgattgat

SEQ ID NO: 84062 - DNA, 25 bp, SARS Virus
accgatatggtacgtacgattgatg

SEQ ID NO: 84063 - DNA, 25 bp, SARS Virus
ccgatatggtacctacgattgatgt

SEQ ID NO: 84064 - DNA, 25 bp, SARS Virus
cgatatggtacgcacgattgatgta

SEQ ID NO: 84065 - DNA, 25 bp, SARS Virus
aatcgacatggggtgttgtactctc

SEQ ID NO: 84066 - DNA, 25 bp, SARS Virus
atcgacatgggaggttgtactctca

SEQ ID NO: 84067 - DNA, 25 bp, SARS Virus
tcgacatgggatgttgtactctcaa

SEQ ID NO: 84068 - DNA, 25 bp, SARS Virus
cgacatgggatggtgtactctcaat

SEQ ID NO: 84069 - DNA, 25 bp, SARS Virus
gacatgggatgtggtactctcaata

SEQ ID NO: 84070 - DNA, 25 bp, SARS Virus
acatgggatgttgtactctcaataa

SEQ ID NO: 84071 - DNA, 25 bp, SARS Virus
catgggatgttggactctcaataag

SEQ ID NO: 84072 - DNA, 25 bp, SARS Virus
atgggatgttgtgctctcaataagt

SEQ ID NO: 84073 - DNA, 25 bp, SARS Virus
tgggatgttgtagtctcaataagtg

SEQ ID NO: 84074 - DNA, 25 bp, SARS Virus
gggatgttgtacgctcaataagtga

SEQ ID NO: 84075 - DNA, 25 bp, SARS Virus
ggatgttgtactgtcaataagtgaa

SEQ ID NO: 84076 - DNA, 25 bp, SARS Virus
gatgttgtactcgcaataagtgaaa

SEQ ID NO: 84077 - DNA, 25 bp, SARS Virus
atgttgtactctgaataagtgaaac

SEQ ID NO: 84078 - DNA, 25 bp, SARS Virus
tgttgtactctcgataagtgaaacc

SEQ ID NO: 84079 - DNA, 25 bp, SARS Virus
gttgtactctcagtaagtgaaacca

SEQ ID NO: 84080 - DNA, 25 bp, SARS Virus
ttgtactctcaagaagtgaaaccac

SEQ ID NO: 84081 - DNA, 25 bp, SARS Virus
tgtactctcaatgagtgaaaccacg

SEQ ID NO: 84082 - DNA, 25 bp, SARS Virus
gtactctcaataggtgaaaccacga

SEQ ID NO: 84083 - DNA, 25 bp, SARS Virus
tactctcaataagtgaaaccacgac

SEQ ID NO: 84084 - DNA, 25 bp, SARS Virus
actctcaataagggaaaccacgacc

SEQ ID NO: 84085 - DNA, 25 bp, SARS Virus
ctctcaataagtgaaaccacgaccg

SEQ ID NO: 84086 - DNA, 25 bp, SARS Virus
tctcaataagtggaaccacgaccga

SEQ ID NO: 84087 - DNA, 25 bp, SARS Virus
ctcaataagtgagaccacgaccgag

SEQ ID NO: 84088 - DNA, 25 bp, SARS Virus
tcaataagtgaagccacgaccgaga

SEQ ID NO: 84089 - DNA, 25 bp, SARS Virus
caataagtgaaagcacgaccgagac

SEQ ID NO: 84090 - DNA, 25 bp, SARS Virus
aataagtgaaacgacgaccgagact

SEQ ID NO: 84091 - DNA, 25 bp, SARS Virus
ataagtgaaaccgcgaccgagacta

SEQ ID NO: 84092 - DNA, 25 bp, SARS Virus
taagtgaaaccaggaccgagactat

SEQ ID NO: 84093 - DNA, 25 bp, SARS Virus
aagtgaaaccacgaccgagactatt

SEQ ID NO: 84094 - DNA, 25 bp, SARS Virus
agtgaaaccacggccgagactattt

SEQ ID NO: 84095 - DNA, 25 bp, SARS Virus
gtgaaaccacgagcgagactatttc

SEQ ID NO: 84096 - DNA, 25 bp, SARS Virus
tgaaaccacgacggagactatttcc

SEQ ID NO: 84097 - DNA, 25 bp, SARS Virus
gaaaccacgaccgagactatttcct

SEQ ID NO: 84098 - DNA, 25 bp, SARS Virus
aaaccacgaccgggactatttcctc

SEQ ID NO: 84099 - DNA, 25 bp, SARS Virus
aaccacgaccgagactatttcctca

SEQ ID NO: 84100 - DNA, 25 bp, SARS Virus
accacgaccgaggctatttcctcaa

SEQ ID NO: 84101 - DNA, 25 bp, SARS Virus
ccacgaccgagagtatttcctcaac

SEQ ID NO: 84102 - DNA, 25 bp, SARS Virus
cacgaccgagacgatttcctcaacg

SEQ ID NO: 84103 - DNA, 25 bp, SARS Virus
acgaccgagactgtttcctcaacgt

SEQ ID NO: 84104 - DNA, 25 bp, SARS Virus
cgaccgagactagttcctcaacgtg

SEQ ID NO: 84105 - DNA, 25 bp, SARS Virus
gaccgagactatgtcctcaacgtgg

SEQ ID NO: 84106 - DNA, 25 bp, SARS Virus
accgagactattgcctcaacgtggt

SEQ ID NO: 84107 - DNA, 25 bp, SARS Virus
ccgagactatttgctcaacgtggtc

SEQ ID NO: 84108 - DNA, 25 bp, SARS Virus
cgagactatttcgtcaacgtggtcc

SEQ ID NO: 84109 - DNA, 25 bp, SARS Virus
gagactatttccgcaacgtggtcca

SEQ ID NO: 84110 - DNA, 25 bp, SARS Virus
agactatttcctgaacgtggtccat

SEQ ID NO: 84111 - DNA, 25 bp, SARS Virus
gactatttcctcgacgtggtccatg

SEQ ID NO: 84112 - DNA, 25 bp, SARS Virus
actatttcctcagcgtggtccatgt

SEQ ID NO: 84113 - DNA, 25 bp, SARS Virus
ctatttcctcaaggtggtccatgtc

SEQ ID NO: 84114 - DNA, 25 bp, SARS Virus
tatttcctcaacgtggtccatgtcg

SEQ ID NO: 84115 - DNA, 25 bp, SARS Virus
atttcctcaacggggtccatgtcga

SEQ ID NO: 84116 - DNA, 25 bp, SARS Virus
tttcctcaacgtggtccatgtcgac

SEQ ID NO: 84117 - DNA, 25 bp, SARS Virus
ttcctcaacgtggtccatgtcgaca

SEQ ID NO: 84118 - DNA, 25 bp, SARS Virus
tcctcaacgtgggccatgtcgacac

SEQ ID NO: 84119 - DNA, 25 bp, SARS Virus
cctcaacgtggtgcatgtcgacacg

SEQ ID NO: 84120 - DNA, 25 bp, SARS Virus
ctcaacgtggtcgatgtcgacacga

SEQ ID NO: 84121 - DNA, 25 bp, SARS Virus
tcaacgtggtccgtgtcgacacgag

SEQ ID NO: 84122 - DNA, 25 bp, SARS Virus
caacgtggtccaggtcgacacgagt

SEQ ID NO: 84123 - DNA, 25 bp, SARS Virus
aacgtggtccatgtcgacacgagtc

SEQ ID NO: 84124 - DNA, 25 bp, SARS Virus
acgtggtccatggcgacacgagtct

SEQ ID NO: 84125 - DNA, 25 bp, SARS Virus
cgtggtccatgtggacacgagtctg

SEQ ID NO: 84126 - DNA, 25 bp, SARS Virus
gtggtccatgtcgacacgagtctgt

SEQ ID NO: 84127 - DNA, 25 bp, SARS Virus
tggtccatgtcggcacgagtctgtt

SEQ ID NO: 84128 - DNA, 25 bp, SARS Virus
ggtccatgtcgagacgagtctgtta

SEQ ID NO: 84129 - DNA, 25 bp, SARS Virus
gtccatgtcgacgcgagtctgttac

SEQ ID NO: 84130 - DNA, 25 bp, SARS Virus
tccatgtcgacaggagtctgttacc

SEQ ID NO: 84131 - DNA, 25 bp, SARS Virus
ccatgtcgacacgagtctgttacca

SEQ ID NO: 84132 - DNA, 25 bp, SARS Virus
catgtcgacacgggtctgttaccaa

SEQ ID NO: 84133 - DNA, 25 bp, SARS Virus
atgtcgacacgagtctgttaccaac

SEQ ID NO: 84134 - DNA, 25 bp, SARS Virus
tgtcgacacgaggctgttaccaacg

SEQ ID NO: 84135 - DNA, 25 bp, SARS Virus
gtcgacacgagtgtgttaccaacgg

SEQ ID NO: 84136 - DNA, 25 bp, SARS Virus
tcgacacgagtcggttaccaacggt

SEQ ID NO: 84137 - DNA, 25 bp, SARS Virus
cgacacgagtctgttaccaacggtt

SEQ ID NO: 84138 - DNA, 25 bp, SARS Virus
gacacgagtctggtaccaacggttg

SEQ ID NO: 84139 - DNA, 25 bp, SARS Virus
acacgagtctgtgaccaacggttga

SEQ ID NO: 84140 - DNA, 25 bp, SARS Virus
cacgagtctgttgccaacggttgac

SEQ ID NO: 84141 - DNA, 25 bp, SARS Virus
acgagtctgttagcaacggttgacc

SEQ ID NO: 84142 - DNA, 25 bp, SARS Virus
cgagtctgttacgaacggttgaccg

SEQ ID NO: 84143 - DNA, 25 bp, SARS Virus
gagtctgttaccgacggttgaccgt

SEQ ID NO: 84144 - DNA, 25 bp, SARS Virus
agtctgttaccagcggttgaccgtg

SEQ ID NO: 84145 - DNA, 25 bp, SARS Virus
gtctgttaccaagggttgaccgtgt

SEQ ID NO: 84146 - DNA, 25 bp, SARS Virus
tctgttaccaacggttgaccgtgtg

SEQ ID NO: 84147 - DNA, 25 bp, SARS Virus
ctgttaccaacggttgaccgtgtga

SEQ ID NO: 84148 - DNA, 25 bp, SARS Virus
tgttaccaacgggtgaccgtgtgat

SEQ ID NO: 84149 - DNA, 25 bp, SARS Virus
gttaccaacggtggaccgtgtgatg

SEQ ID NO: 84150 - DNA, 25 bp, SARS Virus
ttaccaacggttgaccgtgtgatga

SEQ ID NO: 84151 - DNA, 25 bp, SARS Virus
taccaacggttggccgtgtgatgaa

SEQ ID NO: 84152 - DNA, 25 bp, SARS Virus
accaacggttgagcgtgtgatgaac

SEQ ID NO: 84153 - DNA, 25 bp, SARS Virus
ccaacggttgacggtgtgatgaaca

SEQ ID NO: 84154 - DNA, 25 bp, SARS Virus
caacggttgaccgtgtgatgaacag

SEQ ID NO: 84155 - DNA, 25 bp, SARS Virus
aacggttgaccgggtgatgaacagc

SEQ ID NO: 84156 - DNA, 25 bp, SARS Virus
acggttgaccgtgtgatgaacagct

SEQ ID NO: 84157 - DNA, 25 bp, SARS Virus
cggttgaccgtgggatgaacagcta

SEQ ID NO: 84158 - DNA, 25 bp, SARS Virus
ggttgaccgtgtgatgaacagctaa

SEQ ID NO: 84159 - DNA, 25 bp, SARS Virus
gttgaccgtgtggtgaacagctaag

SEQ ID NO: 84160 - DNA, 25 bp, SARS Virus
ttgaccgtgtgaggaacagctaagt

SEQ ID NO: 84161 - DNA, 25 bp, SARS Virus
tgaccgtgtgatgaacagctaagtc

SEQ ID NO: 84162 - DNA, 25 bp, SARS Virus
gaccgtgtgatggacagctaagtct

SEQ ID NO: 84163 - DNA, 25 bp, SARS Virus
accgtgtgatgagcagctaagtcta

SEQ ID NO: 84164 - DNA, 25 bp, SARS Virus
ccgtgtgatgaagagctaagtctag

SEQ ID NO: 84165 - DNA, 25 bp, SARS Virus
cgtgtgatgaacggctaagtctaga

SEQ ID NO: 84166 - DNA, 25 bp, SARS Virus
gtgtgatgaacagctaagtctagaa

SEQ ID NO: 84167 - DNA, 25 bp, SARS Virus
tgtgatgaacaggtaagtctagaat

SEQ ID NO: 84168 - DNA, 25 bp, SARS Virus
gtgatgaacagcgaagtctagaatt

SEQ ID NO: 84169 - DNA, 25 bp, SARS Virus
tgatgaacagctgagtctagaatta

SEQ ID NO: 84170 - DNA, 25 bp, SARS Virus
gatgaacagctaggtctagaattac

SEQ ID NO: 84171 - DNA, 25 bp, SARS Virus
atgaacagctaagtctagaattact

SEQ ID NO: 84172 - DNA, 25 bp, SARS Virus
tgaacagctaaggctagaattactg

SEQ ID NO: 84173 - DNA, 25 bp, SARS Virus
gaacagctaagtgtagaattactga

SEQ ID NO: 84174 - DNA, 25 bp, SARS Virus
aacagctaagtcgagaattactgaa

SEQ ID NO: 84175 - DNA, 25 bp, SARS Virus
acagctaagtctggaattactgaag

SEQ ID NO: 84176 - DNA, 25 bp, SARS Virus
cagctaagtctagaattactgaagc

SEQ ID NO: 84177 - DNA, 25 bp, SARS Virus
agctaagtctaggattactgaagca

SEQ ID NO: 84178 - DNA, 25 bp, SARS Virus
gctaagtctagagttactgaagcag

SEQ ID NO: 84179 - DNA, 25 bp, SARS Virus
ctaagtctagaagtactgaagcaga

SEQ ID NO: 84180 - DNA, 25 bp, SARS Virus
taagtctagaatgactgaagcagag

SEQ ID NO: 84181 - DNA, 25 bp, SARS Virus
aagtctagaattgctgaagcagagg

SEQ ID NO: 84182 - DNA, 25 bp, SARS Virus
agtctagaattagtgaagcagaggc

SEQ ID NO: 84183 - DNA, 25 bp, SARS Virus
gtctagaattacggaagcagaggct

SEQ ID NO: 84184 - DNA, 25 bp, SARS Virus
tctagaattactgaagcagaggctg

SEQ ID NO: 84185 - DNA, 25 bp, SARS Virus
ctagaattactggagcagaggctgc

SEQ ID NO: 84186 - DNA, 25 bp, SARS Virus
tagaattactgaggcagaggctgcg

SEQ ID NO: 84187 - DNA, 25 bp, SARS Virus
agaattactgaagcagaggctgcgt

SEQ ID NO: 84188 - DNA, 25 bp, SARS Virus
gaattactgaaggagaggctgcgtc

SEQ ID NO: 84189 - DNA, 25 bp, SARS Virus
aattactgaagcggaggctgcgtct

SEQ ID NO: 84190 - DNA, 25 bp, SARS Virus
attactgaagcagaggctgcgtcta

SEQ ID NO: 84191 - DNA, 25 bp, SARS Virus
ttactgaagcaggggctgcgtctaa

SEQ ID NO: 84192 - DNA, 25 bp, SARS Virus
tactgaagcagaggctgcgtctaag

SEQ ID NO: 84193 - DNA, 25 bp, SARS Virus
actgaagcagaggctgcgtctaaga

SEQ ID NO: 84194 - DNA, 25 bp, SARS Virus
ctgaagcagagggtgcgtctaagat

SEQ ID NO: 84195 - DNA, 25 bp, SARS Virus
tgaagcagaggcggcgtctaagatg

SEQ ID NO: 84196 - DNA, 25 bp, SARS Virus
gaagcagaggctgcgtctaagatga

SEQ ID NO: 84197 - DNA, 25 bp, SARS Virus
aagcagaggctgggtctaagatgaa

SEQ ID NO: 84198 - DNA, 25 bp, SARS Virus
agcagaggctgcgtctaagatgaaa

SEQ ID NO: 84199 - DNA, 25 bp, SARS Virus
gcagaggctgcggctaagatgaaat

SEQ ID NO: 84200 - DNA, 25 bp, SARS Virus
cagaggctgcgtgtaagatgaaatt

SEQ ID NO: 84201 - DNA, 25 bp, SARS Virus
agaggctgcgtcgaagatgaaatta

SEQ ID NO: 84202 - DNA, 25 bp, SARS Virus
gaggctgcgtctgagatgaaattaa

SEQ ID NO: 84203 - DNA, 25 bp, SARS Virus
aggctgcgtctaggatgaaattaac

SEQ ID NO: 84204 - DNA, 25 bp, SARS Virus
ggctgcgtctaagatgaaattaacc

SEQ ID NO: 84205 - DNA, 25 bp, SARS Virus
gctgcgtctaaggtgaaattaacct

SEQ ID NO: 84206 - DNA, 25 bp, SARS Virus
ctgcgtctaagaggaaattaacctc

SEQ ID NO: 84207 - DNA, 25 bp, SARS Virus
tgcgtctaagatgaaattaacctct

SEQ ID NO: 84208 - DNA, 25 bp, SARS Virus
gcgtctaagatggaattaacctctg

SEQ ID NO: 84209 - DNA, 25 bp, SARS Virus
cgtctaagatgagattaacctctga

SEQ ID NO: 84210 - DNA, 25 bp, SARS Virus
gtctaagatgaagttaacctctgac

SEQ ID NO: 84211 - DNA, 25 bp, SARS Virus
tctaagatgaaagtaacctctgaca

SEQ ID NO: 84212 - DNA, 25 bp, SARS Virus
ctaagatgaaatgaacctctgacac

SEQ ID NO: 84213 - DNA, 25 bp, SARS Virus
taagatgaaattgacctctgacacg

SEQ ID NO: 84214 - DNA, 25 bp, SARS Virus
aagatgaaattagcctctgacacgt

SEQ ID NO: 84215 - DNA, 25 bp, SARS Virus
agatgaaattaagctctgacacgtt

SEQ ID NO: 84216 - DNA, 25 bp, SARS Virus
gatgaaattaacgtctgacacgttg

SEQ ID NO: 84217 - DNA, 25 bp, SARS Virus
atgaaattaaccgctgacacgttgt

SEQ ID NO: 84218 - DNA, 25 bp, SARS Virus
tgaaattaacctgtgacacgttgtc

SEQ ID NO: 84219 - DNA, 25 bp, SARS Virus
gaaattaacctcggacacgttgtca

SEQ ID NO: 84220 - DNA, 25 bp, SARS Virus
aaattaacctctgacacgttgtcat

SEQ ID NO: 84221 - DNA, 25 bp, SARS Virus
aattaacctctggcacgttgtcatg

SEQ ID NO: 84222 - DNA, 25 bp, SARS Virus
attaacctctgagacgttgtcatgt

SEQ ID NO: 84223 - DNA, 25 bp, SARS Virus
ttaacctctgacgcgttgtcatgta

SEQ ID NO: 84224 - DNA, 25 bp, SARS Virus
taacctctgacaggttgtcatgtat

SEQ ID NO: 84225 - DNA, 25 bp, SARS Virus
aacctctgacacgttgtcatgtatg

SEQ ID NO: 84226 - DNA, 25 bp, SARS Virus
acctctgacacggtgtcatgtatgc

SEQ ID NO: 84227 - DNA, 25 bp, SARS Virus
cctctgacacgtggtcatgtatgcc

SEQ ID NO: 84228 - DNA, 25 bp, SARS Virus
ctctgacacgttgtcatgtatgccg

SEQ ID NO: 84229 - DNA, 25 bp, SARS Virus
tctgacacgttggcatgtatgccga

SEQ ID NO: 84230 - DNA, 25 bp, SARS Virus
ctgacacgttgtgatgtatgccgat

SEQ ID NO: 84231 - DNA, 25 bp, SARS Virus
tgacacgttgtcgtgtatgccgatt

SEQ ID NO: 84232 - DNA, 25 bp, SARS Virus
gacacgttgtcaggtatgccgatta

SEQ ID NO: 84233 - DNA, 25 bp, SARS Virus
acacgttgtcatgtatgccgattat

SEQ ID NO: 84234 - DNA, 25 bp, SARS Virus
cacgttgtcatggatgccgattatt

SEQ ID NO: 84235 - DNA, 25 bp, SARS Virus
acgttgtcatgtgtgccgattattt

SEQ ID NO: 84236 - DNA, 25 bp, SARS Virus
cgttgtcatgtaggccgattattta

SEQ ID NO: 84237 - DNA, 25 bp, SARS Virus
gttgtcatgtatgccgattatttac

SEQ ID NO: 84238 - DNA, 25 bp, SARS Virus
ttgtcatgtatggcgattatttacc

SEQ ID NO: 84239 - DNA, 25 bp, SARS Virus
tgtcatgtatgcggattatttaccc

SEQ ID NO: 84240 - DNA, 25 bp, SARS Virus
gtcatgtatgccgattatttaccct

SEQ ID NO: 84241 - DNA, 25 bp, SARS Virus
tcatgtatgccggttatttaccctg

SEQ ID NO: 84242 - DNA, 25 bp, SARS Virus
catgtatgccgagtatttaccctgg

SEQ ID NO: 84243 - DNA, 25 bp, SARS Virus
atgtatgccgatgatttaccctgga

SEQ ID NO: 84244 - DNA, 25 bp, SARS Virus
tgtatgccgattgtttaccctggaa

SEQ ID NO: 84245 - DNA, 25 bp, SARS Virus
gtatgccgattagttaccctggaat

SEQ ID NO: 84246 - DNA, 25 bp, SARS Virus
tatgccgattatgtaccctggaata

SEQ ID NO: 84247 - DNA, 25 bp, SARS Virus
atgccgattattgaccctggaataa

SEQ ID NO: 84248 - DNA, 25 bp, SARS Virus
tgccgattatttgccctggaataat

SEQ ID NO: 84249 - DNA, 25 bp, SARS Virus
gccgattatttagcctggaataata

SEQ ID NO: 84250 - DNA, 25 bp, SARS Virus
ccgattatttacgctggaataataa

SEQ ID NO: 84251 - DNA, 25 bp, SARS Virus
cgattatttaccgtggaataataat

SEQ ID NO: 84252 - DNA, 25 bp, SARS Virus
gattatttacccgggaataataatc

SEQ ID NO: 84253 - DNA, 25 bp, SARS Virus
attatttaccctggaataataatcg

SEQ ID NO: 84254 - DNA, 25 bp, SARS Virus
ttatttaccctggaataataatcgc

SEQ ID NO: 84255 - DNA, 25 bp, SARS Virus
tatttaccctgggataataatcgct

SEQ ID NO: 84256 - DNA, 25 bp, SARS Virus
atttaccctggagtaataatcgcta

SEQ ID NO: 84257 - DNA, 25 bp, SARS Virus
tttaccctggaagaataatcgctat

SEQ ID NO: 84258 - DNA, 25 bp, SARS Virus
ttaccctggaatgataatcgctata

SEQ ID NO: 84259 - DNA, 25 bp, SARS Virus
taccctggaatagtaatcgctatac

SEQ ID NO: 84260 - DNA, 25 bp, SARS Virus
accctggaataagaatcgctataca

SEQ ID NO: 84261 - DNA, 25 bp, SARS Virus
ccctggaataatgatcgctatacat

SEQ ID NO: 84262 - DNA, 25 bp, SARS Virus
cctggaataatagtcgctatacata

SEQ ID NO: 84263 - DNA, 25 bp, SARS Virus
ctggaataataagcgctatacatac

SEQ ID NO: 84264 - DNA, 25 bp, SARS Virus
tggaataataatggctatacatact

SEQ ID NO: 84265 - DNA, 25 bp, SARS Virus
ggaataataatcgctatacatactg

SEQ ID NO: 84266 - DNA, 25 bp, SARS Virus
gaataataatcggtatacatactgg

SEQ ID NO: 84267 - DNA, 25 bp, SARS Virus
aataataatcgcgatacatactggg

SEQ ID NO: 84268 - DNA, 25 bp, SARS Virus
ataataatcgctgtacatactggga

SEQ ID NO: 84269 - DNA, 25 bp, SARS Virus
taataatcgctagacatactgggat

SEQ ID NO: 84270 - DNA, 25 bp, SARS Virus
aataatcgctatgcatactgggatc

SEQ ID NO: 84271 - DNA, 25 bp, SARS Virus
ataatcgctatagatactgggatcc

SEQ ID NO: 84272 - DNA, 25 bp, SARS Virus
taatcgctatacgtactgggatcct

SEQ ID NO: 84273 - DNA, 25 bp, SARS Virus
aatcgctatacagactgggatcctg

SEQ ID NO: 84274 - DNA, 25 bp, SARS Virus
atcgctatacatgctgggatcctgg

SEQ ID NO: 84275 - DNA, 25 bp, SARS Virus
tcgctatacatagtgggatcctggt

SEQ ID NO: 84276 - DNA, 25 bp, SARS Virus
cgctatacatacggggatcctggtt

SEQ ID NO: 84277 - DNA, 25 bp, SARS Virus
gctatacatactgggatcctggttt

SEQ ID NO: 84278 - DNA, 25 bp, SARS Virus
ctatacatactgggatcctggtttg

SEQ ID NO: 84279 - DNA, 25 bp, SARS Virus
tatacatactgggatcctggtttgt

SEQ ID NO: 84280 - DNA, 25 bp, SARS Virus
atacatactggggtcctggtttgta

SEQ ID NO: 84281 - DNA, 25 bp, SARS Virus
tacatactgggagcctggtttgtac

SEQ ID NO: 84282 - DNA, 25 bp, SARS Virus
acatactgggatgctggtttgtaca

SEQ ID NO: 84283 - DNA, 25 bp, SARS Virus
catactgggatcgtggtttgtacac

SEQ ID NO: 84284 - DNA, 25 bp, SARS Virus
atactgggatccgggtttgtacact

SEQ ID NO: 84285 - DNA, 25 bp, SARS Virus
tactgggatcctggtttgtacactg

SEQ ID NO: 84286 - DNA, 25 bp, SARS Virus
actgggatcctggtttgtacactgt

SEQ ID NO: 84287 - DNA, 25 bp, SARS Virus
ctgggatcctgggttgtacactgtt

SEQ ID NO: 84288 - DNA, 25 bp, SARS Virus
tgggatcctggtgtgtacactgttt

SEQ ID NO: 84289 - DNA, 25 bp, SARS Virus
gggatcctggttggtacactgtttt

SEQ ID NO: 84290 - DNA, 25 bp, SARS Virus
ggatcctggtttgtacactgttttc

SEQ ID NO: 84291 - DNA, 25 bp, SARS Virus
gatcctggtttggacactgttttct

SEQ ID NO: 84292 - DNA, 25 bp, SARS Virus
atcctggtttgtgcactgttttctc

SEQ ID NO: 84293 - DNA, 25 bp, SARS Virus
tcctggtttgtagactgttttctct

SEQ ID NO: 84294 - DNA, 25 bp, SARS Virus
cctggtttgtacgctgttttctctt

SEQ ID NO: 84295 - DNA, 25 bp, SARS Virus
ctggtttgtacagtgttttctctta

SEQ ID NO: 84296 - DNA, 25 bp, SARS Virus
tggtttgtacacggttttctcttac

SEQ ID NO: 84297 - DNA, 25 bp, SARS Virus
ggtttgtacactgttttctcttact

SEQ ID NO: 84298 - DNA, 25 bp, SARS Virus
gtttgtacactggtttctcttactg

SEQ ID NO: 84299 - DNA, 25 bp, SARS Virus
tttgtacactgtgttctcttactga

SEQ ID NO: 84300 - DNA, 25 bp, SARS Virus
ttgtacactgttgtctcttactgag

SEQ ID NO: 84301 - DNA, 25 bp, SARS Virus
tgtacactgtttgctcttactgaga

SEQ ID NO: 84302 - DNA, 25 bp, SARS Virus
gtacactgttttgtcttactgagat

SEQ ID NO: 84303 - DNA, 25 bp, SARS Virus
tacactgttttcgcttactgagatt

SEQ ID NO: 84304 - DNA, 25 bp, SARS Virus
acactgttttctgttactgagattt

SEQ ID NO: 84305 - DNA, 25 bp, SARS Virus
cactgttttctcgtactgagatttc

SEQ ID NO: 84306 - DNA, 25 bp, SARS Virus
actgttttctctgactgagatttct

SEQ ID NO: 84307 - DNA, 25 bp, SARS Virus
ctgttttctcttgctgagatttctt

SEQ ID NO: 84308 - DNA, 25 bp, SARS Virus
tgttttctcttagtgagatttcttc

SEQ ID NO: 84309 - DNA, 25 bp, SARS Virus
gttttctcttacggagatttcttcc

SEQ ID NO: 84310 - DNA, 25 bp, SARS Virus
ttttctcttactgagatttcttccc

SEQ ID NO: 84311 - DNA, 25 bp, SARS Virus
tttctcttactgggatttcttccca

SEQ ID NO: 84312 - DNA, 25 bp, SARS Virus
ttctcttactgagatttcttcccaa

SEQ ID NO: 84313 - DNA, 25 bp, SARS Virus
tctcttactgaggtttcttcccaaa

SEQ ID NO: 84314 - DNA, 25 bp, SARS Virus
ctcttactgagagttcttcccaaaa

SEQ ID NO: 84315 - DNA, 25 bp, SARS Virus
tcttactgagatgtcttcccaaaaa

SEQ ID NO: 84316 - DNA, 25 bp, SARS Virus
cttactgagattgcttcccaaaaag

SEQ ID NO: 84317 - DNA, 25 bp, SARS Virus
ttactgagatttgttcccaaaaagt

SEQ ID NO: 84318 - DNA, 25 bp, SARS Virus
tactgagatttcgtcccaaaaagtg

SEQ ID NO: 84319 - DNA, 25 bp, SARS Virus
actgagatttctgcccaaaaagtga

SEQ ID NO: 84320 - DNA, 25 bp, SARS Virus
ctgagatttcttgccaaaaagtgaa

SEQ ID NO: 84321 - DNA, 25 bp, SARS Virus
tgagatttcttcgcaaaaagtgaat

SEQ ID NO: 84322 - DNA, 25 bp, SARS Virus
gagatttcttccgaaaaagtgaata

SEQ ID NO: 84323 - DNA, 25 bp, SARS Virus
agatttcttcccgaaaagtgaatag

SEQ ID NO: 84324 - DNA, 25 bp, SARS Virus
gatttcttcccagaaagtgaataga

SEQ ID NO: 84325 - DNA, 25 bp, SARS Virus
atttcttcccaagaagtgaatagac

SEQ ID NO: 84326 - DNA, 25 bp, SARS Virus
tttcttcccaaagagtgaatagaca

SEQ ID NO: 84327 - DNA, 25 bp, SARS Virus
ttcttcccaaaaggtgaatagacac

SEQ ID NO: 84328 - DNA, 25 bp, SARS Virus
tcttcccaaaaagtgaatagacaca

SEQ ID NO: 84329 - DNA, 25 bp, SARS Virus
cttcccaaaaagggaatagacacac

SEQ ID NO: 84330 - DNA, 25 bp, SARS Virus
ttcccaaaaagtgaatagacacacc

SEQ ID NO: 84331 - DNA, 25 bp, SARS Virus
tcccaaaaagtggatagacacacct

SEQ ID NO: 84332 - DNA, 25 bp, SARS Virus
cccaaaaagtgagtagacacaccta

SEQ ID NO: 84333 - DNA, 25 bp, SARS Virus
ccaaaaagtgaagagacacacctaa

SEQ ID NO: 84334 - DNA, 25 bp, SARS Virus
caaaaagtgaatggacacacctaaa

SEQ ID NO: 84335 - DNA, 25 bp, SARS Virus
aaaaagtgaatagacacacctaaat

SEQ ID NO: 84336 - DNA, 25 bp, SARS Virus
aaaagtgaataggcacacctaaata

SEQ ID NO: 84337 - DNA, 25 bp, SARS Virus
aaagtgaatagagacacctaaatat

SEQ ID NO: 84338 - DNA, 25 bp, SARS Virus
aagtgaatagacgcacctaaatatt

SEQ ID NO: 84339 - DNA, 25 bp, SARS Virus
agtgaatagacagacctaaatattt

SEQ ID NO: 84340 - DNA, 25 bp, SARS Virus
gtgaatagacacgcctaaatatttc

SEQ ID NO: 84341 - DNA, 25 bp, SARS Virus
tgaatagacacagctaaatatttcg

SEQ ID NO: 84342 - DNA, 25 bp, SARS Virus
gaatagacacacgtaaatatttcgt

SEQ ID NO: 84343 - DNA, 25 bp, SARS Virus
aatagacacaccgaaatatttcgtt

SEQ ID NO: 84344 - DNA, 25 bp, SARS Virus
atagacacacctgaatatttcgttt

SEQ ID NO: 84345 - DNA, 25 bp, SARS Virus
tagacacacctagatatttcgtttt

SEQ ID NO: 84346 - DNA, 25 bp, SARS Virus
agacacacctaagtatttcgttttt

SEQ ID NO: 84347 - DNA, 25 bp, SARS Virus
gacacacctaaagatttcgtttttg

SEQ ID NO: 84348 - DNA, 25 bp, SARS Virus
acacacctaaatgtttcgtttttga

SEQ ID NO: 84349 - DNA, 25 bp, SARS Virus
cacacctaaatagttcgtttttgat

SEQ ID NO: 84350 - DNA, 25 bp, SARS Virus
acacctaaatatgtcgtttttgatc

SEQ ID NO: 84351 - DNA, 25 bp, SARS Virus
cacctaaatattgcgtttttgatcg

SEQ ID NO: 84352 - DNA, 25 bp, SARS Virus
acctaaatatttggtttttgatcgg

SEQ ID NO: 84353 - DNA, 25 bp, SARS Virus
cctaaatatttcgtttttgatcggg

SEQ ID NO: 84354 - DNA, 25 bp, SARS Virus
ctaaatatttcggttttgatcggga

SEQ ID NO: 84355 - DNA, 25 bp, SARS Virus
taaatatttcgtgtttgatcgggac

SEQ ID NO: 84356 - DNA, 25 bp, SARS Virus
aaatatttcgttgttgatcgggacc

SEQ ID NO: 84357 - DNA, 25 bp, SARS Virus
aatatttcgtttgtgatcgggaccc

SEQ ID NO: 84358 - DNA, 25 bp, SARS Virus
atatttcgttttggatcgggaccca

SEQ ID NO: 84359 - DNA, 25 bp, SARS Virus
tatttcgtttttgatcgggacccac

SEQ ID NO: 84360 - DNA, 25 bp, SARS Virus
atttcgtttttggtcgggacccacc

SEQ ID NO: 84361 - DNA, 25 bp, SARS Virus
tttcgtttttgagcgggacccacca

SEQ ID NO: 84362 - DNA, 25 bp, SARS Virus
ttcgtttttgatggggacccaccaa

SEQ ID NO: 84363 - DNA, 25 bp, SARS Virus
tcgtttttgatcgggacccaccaag

SEQ ID NO: 84364 - DNA, 25 bp, SARS Virus
cgtttttgatcgggacccaccaaga

SEQ ID NO: 84365 - DNA, 25 bp, SARS Virus
gtttttgatcgggacccaccaagat

SEQ ID NO: 84366 - DNA, 25 bp, SARS Virus
tttttgatcggggcccaccaagata

SEQ ID NO: 84367 - DNA, 25 bp, SARS Virus
ttttgatcgggagccaccaagatat

SEQ ID NO: 84368 - DNA, 25 bp, SARS Virus
tttgatcgggacgcaccaagatatc

SEQ ID NO: 84369 - DNA, 25 bp, SARS Virus
ttgatcgggaccgaccaagatatcg

SEQ ID NO: 84370 - DNA, 25 bp, SARS Virus
tgatcgggacccgccaagatatcga

SEQ ID NO: 84371 - DNA, 25 bp, SARS Virus
gatcgggacccagcaagatatcgac

SEQ ID NO: 84372 - DNA, 25 bp, SARS Virus
atcgggacccacgaagatatcgaca

SEQ ID NO: 84373 - DNA, 25 bp, SARS Virus
tcgggacccaccgagatatcgacat

SEQ ID NO: 84374 - DNA, 25 bp, SARS Virus
cgggacccaccaggatatcgacatt

SEQ ID NO: 84375 - DNA, 25 bp, SARS Virus
gggacccaccaagatatcgacattt

SEQ ID NO: 84376 - DNA, 25 bp, SARS Virus
ggacccaccaaggtatcgacatttc

SEQ ID NO: 84377 - DNA, 25 bp, SARS Virus
gacccaccaagagatcgacatttct

SEQ ID NO: 84378 - DNA, 25 bp, SARS Virus
acccaccaagatgtcgacatttcta

SEQ ID NO: 84379 - DNA, 25 bp, SARS Virus
cccaccaagatagcgacatttctat

SEQ ID NO: 84380 - DNA, 25 bp, SARS Virus
ccaccaagatatggacatttctatt

SEQ ID NO: 84381 - DNA, 25 bp, SARS Virus
caccaagatatcgacatttctattg

SEQ ID NO: 84382 - DNA, 25 bp, SARS Virus
accaagatatcggcatttctattgt

SEQ ID NO: 84383 - DNA, 25 bp, SARS Virus
ccaagatatcgagatttctattgtc

SEQ ID NO: 84384 - DNA, 25 bp, SARS Virus
caagatatcgacgtttctattgtct

SEQ ID NO: 84385 - DNA, 25 bp, SARS Virus
aagatatcgacagttctattgtctc

SEQ ID NO: 84386 - DNA, 25 bp, SARS Virus
agatatcgacatgtctattgtctcg

SEQ ID NO: 84387 - DNA, 25 bp, SARS Virus
gatatcgacattgctattgtctcgt

SEQ ID NO: 84388 - DNA, 25 bp, SARS Virus
atatcgacatttgtattgtctcgta

SEQ ID NO: 84389 - DNA, 25 bp, SARS Virus
tatcgacatttcgattgtctcgtaa

SEQ ID NO: 84390 - DNA, 25 bp, SARS Virus
atcgacatttctgttgtctcgtaag

SEQ ID NO: 84391 - DNA, 25 bp, SARS Virus
tcgacatttctagtgtctcgtaaga

SEQ ID NO: 84392 - DNA, 25 bp, SARS Virus
cgacatttctatggtctcgtaagaa

SEQ ID NO: 84393 - DNA, 25 bp, SARS Virus
gacatttctattgtctcgtaagaac

SEQ ID NO: 84394 - DNA, 25 bp, SARS Virus
acatttctattggctcgtaagaacc

SEQ ID NO: 84395 - DNA, 25 bp, SARS Virus
catttctattgtgtcgtaagaacct

SEQ ID NO: 84396 - DNA, 25 bp, SARS Virus
atttctattgtcgcgtaagaacctt

SEQ ID NO: 84397 - DNA, 25 bp, SARS Virus
tttctattgtctggtaagaacctta

SEQ ID NO: 84398 - DNA, 25 bp, SARS Virus
ttctattgtctcgtaagaaccttac

SEQ ID NO: 84399 - DNA, 25 bp, SARS Virus
tctattgtctcggaagaaccttacg

SEQ ID NO: 84400 - DNA, 25 bp, SARS Virus
ctattgtctcgtgagaaccttacga

SEQ ID NO: 84401 - DNA, 25 bp, SARS Virus
tattgtctcgtaggaaccttacgac

SEQ ID NO: 84402 - DNA, 25 bp, SARS Virus
attgtctcgtaagaaccttacgact

SEQ ID NO: 84403 - DNA, 25 bp, SARS Virus
ttgtctcgtaaggaccttacgactg

SEQ ID NO: 84404 - DNA, 25 bp, SARS Virus
tgtctcgtaagagccttacgactgg

SEQ ID NO: 84405 - DNA, 25 bp, SARS Virus
gtctcgtaagaagcttacgactgga

SEQ ID NO: 84406 - DNA, 25 bp, SARS Virus
tctcgtaagaacgttacgactggaa

SEQ ID NO: 84407 - DNA, 25 bp, SARS Virus
ctcgtaagaaccgtacgactggaaa

SEQ ID NO: 84408 - DNA, 25 bp, SARS Virus
tcgtaagaacctgacgactggaaat

SEQ ID NO: 84409 - DNA, 25 bp, SARS Virus
cgtaagaaccttgcgactggaaatg

SEQ ID NO: 84410 - DNA, 25 bp, SARS Virus
gtaagaaccttaggactggaaatgt

SEQ ID NO: 84411 - DNA, 25 bp, SARS Virus
taagaaccttacgactggaaatgtt

SEQ ID NO: 84412 - DNA, 25 bp, SARS Virus
aagaaccttacggctggaaatgttc

SEQ ID NO: 84413 - DNA, 25 bp, SARS Virus
agaaccttacgagtggaaatgttcg

SEQ ID NO: 84414 - DNA, 25 bp, SARS Virus
gaaccttacgacgggaaatgttcga

SEQ ID NO: 84415 - DNA, 25 bp, SARS Virus
aaccttacgactggaaatgttcgaa

SEQ ID NO: 84416 - DNA, 25 bp, SARS Virus
accttacgactggaaatgttcgaat

SEQ ID NO: 84417 - DNA, 25 bp, SARS Virus
ccttacgactgggaatgttcgaata

SEQ ID NO: 84418 - DNA, 25 bp, SARS Virus
cttacgactggagatgttcgaatac

SEQ ID NO: 84419 - DNA, 25 bp, SARS Virus
ttacgactggaagtgttcgaatacc

SEQ ID NO: 84420 - DNA, 25 bp, SARS Virus
tacgactggaaaggttcgaataccc

SEQ ID NO: 84421 - DNA, 25 bp, SARS Virus
acgactggaaatgttcgaatacccg

SEQ ID NO: 84422 - DNA, 25 bp, SARS Virus
cgactggaaatggtcgaatacccgg

SEQ ID NO: 84423 - DNA, 25 bp, SARS Virus
gactggaaatgtgcgaatacccggt

SEQ ID NO: 84424 - DNA, 25 bp, SARS Virus
actggaaatgttggaatacccggta

SEQ ID NO: 84425 - DNA, 25 bp, SARS Virus
ctggaaatgttcgaatacccggtaa

SEQ ID NO: 84426 - DNA, 25 bp, SARS Virus
tggaaatgttcggatacccggtaaa

SEQ ID NO: 84427 - DNA, 25 bp, SARS Virus
ggaaatgttcgagtacccggtaaag

SEQ ID NO: 84428 - DNA, 25 bp, SARS Virus
gaaatgttcgaagacccggtaaaga

SEQ ID NO: 84429 - DNA, 25 bp, SARS Virus
aaatgttcgaatgcccggtaaagag

SEQ ID NO: 84430 - DNA, 25 bp, SARS Virus
aatgttcgaatagccggtaaagagt

SEQ ID NO: 84431 - DNA, 25 bp, SARS Virus
atgttcgaatacgcggtaaagagta

SEQ ID NO: 84432 - DNA, 25 bp, SARS Virus
tgttcgaataccgggtaaagagtac

SEQ ID NO: 84433 - DNA, 25 bp, SARS Virus
gttcgaatacccggtaaagagtacc

SEQ ID NO: 84434 - DNA, 25 bp, SARS Virus
ttcgaatacccggtaaagagtacca

SEQ ID NO: 84435 - DNA, 25 bp, SARS Virus
tcgaatacccgggaaagagtaccac

SEQ ID NO: 84436 - DNA, 25 bp, SARS Virus
cgaatacccggtgaagagtaccacc

SEQ ID NO: 84437 - DNA, 25 bp, SARS Virus
gaatacccggtagagagtaccacct

SEQ ID NO: 84438 - DNA, 25 bp, SARS Virus
aatacccggtaaggagtaccacctg

SEQ ID NO: 84439 - DNA, 25 bp, SARS Virus
atacccggtaaagagtaccacctgt

SEQ ID NO: 84440 - DNA, 25 bp, SARS Virus
tacccggtaaagggtaccacctgtc

SEQ ID NO: 84441 - DNA, 25 bp, SARS Virus
acccggtaaagagtaccacctgtcg

SEQ ID NO: 84442 - DNA, 25 bp, SARS Virus
cccggtaaagaggaccacctgtcga

SEQ ID NO: 84443 - DNA, 25 bp, SARS Virus
ccggtaaagagtgccacctgtcgaa

SEQ ID NO: 84444 - DNA, 25 bp, SARS Virus
cggtaaagagtagcacctgtcgaaa

SEQ ID NO: 84445 - DNA, 25 bp, SARS Virus
ggtaaagagtacgacctgtcgaaaa

SEQ ID NO: 84446 - DNA, 25 bp, SARS Virus
gtaaagagtaccgcctgtcgaaaac

SEQ ID NO: 84447 - DNA, 25 bp, SARS Virus
taaagagtaccagctgtcgaaaaca

SEQ ID NO: 84448 - DNA, 25 bp, SARS Virus
aaagagtaccacgtgtcgaaaacaa

SEQ ID NO: 84449 - DNA, 25 bp, SARS Virus
aagagtaccaccggtcgaaaacaat

SEQ ID NO: 84450 - DNA, 25 bp, SARS Virus
agagtaccacctgtcgaaaacaatg

SEQ ID NO: 84451 - DNA, 25 bp, SARS Virus
gagtaccacctggcgaaaacaatgt

SEQ ID NO: 84452 - DNA, 25 bp, SARS Virus
agtaccacctgtggaaaacaatgtt

SEQ ID NO: 84453 - DNA, 25 bp, SARS Virus
gtaccacctgtcgaaaacaatgttt

SEQ ID NO: 84454 - DNA, 25 bp, SARS Virus
taccacctgtcggaaacaatgttta

SEQ ID NO: 84455 - DNA, 25 bp, SARS Virus
accacctgtcgagaacaatgtttac

SEQ ID NO: 84456 - DNA, 25 bp, SARS Virus
ccacctgtcgaagacaatgtttaca

SEQ ID NO: 84457 - DNA, 25 bp, SARS Virus
cacctgtcgaaagcaatgtttacat

SEQ ID NO: 84458 - DNA, 25 bp, SARS Virus
acctgtcgaaaagaatgtttacatt

SEQ ID NO: 84459 - DNA, 25 bp, SARS Virus
cctgtcgaaaacgatgtttacattt

SEQ ID NO: 84460 - DNA, 25 bp, SARS Virus
ctgtcgaaaacagtgtttacattta

SEQ ID NO: 84461 - DNA, 25 bp, SARS Virus
tgtcgaaaacaaggtttacatttac

SEQ ID NO: 84462 - DNA, 25 bp, SARS Virus
gtcgaaaacaatgtttacatttacg

SEQ ID NO: 84463 - DNA, 25 bp, SARS Virus
tcgaaaacaatggttacatttacgt

SEQ ID NO: 84464 - DNA, 25 bp, SARS Virus
cgaaaacaatgtgtacatttacgta

SEQ ID NO: 84465 - DNA, 25 bp, SARS Virus
gaaaacaatgttgacatttacgtag

SEQ ID NO: 84466 - DNA, 25 bp, SARS Virus
aaaacaatgtttgcatttacgtagt

SEQ ID NO: 84467 - DNA, 25 bp, SARS Virus
aaacaatgtttagatttacgtagta

SEQ ID NO: 84468 - DNA, 25 bp, SARS Virus
aacaatgtttacgtttacgtagtag

SEQ ID NO: 84469 - DNA, 25 bp, SARS Virus
acaatgtttacagttacgtagtagt

SEQ ID NO: 84470 - DNA, 25 bp, SARS Virus
caatgtttacatgtacgtagtagta

SEQ ID NO: 84471 - DNA, 25 bp, SARS Virus
aatgtttacattgacgtagtagtag

SEQ ID NO: 84472 - DNA, 25 bp, SARS Virus
atgtttacatttgcgtagtagtagc

SEQ ID NO: 84473 - DNA, 25 bp, SARS Virus
tgtttacatttaggtagtagtagcc

SEQ ID NO: 84474 - DNA, 25 bp, SARS Virus
gtttacatttacgtagtagtagcct

SEQ ID NO: 84475 - DNA, 25 bp, SARS Virus
tttacatttacggagtagtagcctt

SEQ ID NO: 84476 - DNA, 25 bp, SARS Virus
ttacatttacgtggtagtagccttc

SEQ ID NO: 84477 - DNA, 25 bp, SARS Virus
tacatttacgtagtagtagccttcg

SEQ ID NO: 84478 - DNA, 25 bp, SARS Virus
acatttacgtaggagtagccttcgt

SEQ ID NO: 84479 - DNA, 25 bp, SARS Virus
catttacgtagtggtagccttcgta

SEQ ID NO: 84480 - DNA, 25 bp, SARS Virus
atttacgtagtagtagccttcgtaa

SEQ ID NO: 84481 - DNA, 25 bp, SARS Virus
tttacgtagtaggagccttcgtaaa

SEQ ID NO: 84482 - DNA, 25 bp, SARS Virus
ttacgtagtagtggccttcgtaaaa

SEQ ID NO: 84483 - DNA, 25 bp, SARS Virus
tacgtagtagtagccttcgtaaaaa

SEQ ID NO: 84484 - DNA, 25 bp, SARS Virus
acgtagtagtaggcttcgtaaaaat

SEQ ID NO: 84485 - DNA, 25 bp, SARS Virus
cgtagtagtagcgttcgtaaaaatt

SEQ ID NO: 84486 - DNA, 25 bp, SARS Virus
gtagtagtagccgtcgtaaaaatta

SEQ ID NO: 84487 - DNA, 25 bp, SARS Virus
tagtagtagcctgcgtaaaaattaa

SEQ ID NO: 84488 - DNA, 25 bp, SARS Virus
agtagtagccttggtaaaaattaac

SEQ ID NO: 84489 - DNA, 25 bp, SARS Virus
gtagtagccttcgtaaaaattaacc

SEQ ID NO: 84490 - DNA, 25 bp, SARS Virus
tagtagccttcggaaaaattaaccc

SEQ ID NO: 84491 - DNA, 25 bp, SARS Virus
agtagccttcgtgaaaattaacccc

SEQ ID NO: 84492 - DNA, 25 bp, SARS Virus
gtagccttcgtagaaattaaccccg

SEQ ID NO: 84493 - DNA, 25 bp, SARS Virus
tagccttcgtaagaattaaccccga

SEQ ID NO: 84494 - DNA, 25 bp, SARS Virus
agccttcgtaaagattaaccccgat

SEQ ID NO: 84495 - DNA, 25 bp, SARS Virus
gccttcgtaaaagttaaccccgatt

SEQ ID NO: 84496 - DNA, 25 bp, SARS Virus
ccttcgtaaaaagtaaccccgattg

SEQ ID NO: 84497 - DNA, 25 bp, SARS Virus
cttcgtaaaaatgaaccccgattga

SEQ ID NO: 84498 - DNA, 25 bp, SARS Virus
ttcgtaaaaattgaccccgattgat

SEQ ID NO: 84499 - DNA, 25 bp, SARS Virus
tcgtaaaaattagccccgattgata

SEQ ID NO: 84500 - DNA, 25 bp, SARS Virus
cgtaaaaattaagcccgattgatag

SEQ ID NO: 84501 - DNA, 25 bp, SARS Virus
gtaaaaattaacgccgattgataga

SEQ ID NO: 84502 - DNA, 25 bp, SARS Virus
taaaaattaaccgcgattgatagaa

SEQ ID NO: 84503 - DNA, 25 bp, SARS Virus
aaaaattaacccggattgatagaac

SEQ ID NO: 84504 - DNA, 25 bp, SARS Virus
aaaattaaccccgattgatagaacc

SEQ ID NO: 84505 - DNA, 25 bp, SARS Virus
aaattaaccccggttgatagaaccg

SEQ ID NO: 84506 - DNA, 25 bp, SARS Virus
aattaaccccgagtgatagaaccgt

SEQ ID NO: 84507 - DNA, 25 bp, SARS Virus
attaaccccgatggatagaaccgtt

SEQ ID NO: 84508 - DNA, 25 bp, SARS Virus
ttaaccccgattgatagaaccgttc

SEQ ID NO: 84509 - DNA, 25 bp, SARS Virus
taaccccgattggtagaaccgttcg

SEQ ID NO: 84510 - DNA, 25 bp, SARS Virus
aaccccgattgagagaaccgttcgg

SEQ ID NO: 84511 - DNA, 25 bp, SARS Virus
accccgattgatggaaccgttcggc

SEQ ID NO: 84512 - DNA, 25 bp, SARS Virus
ccccgattgatagaaccgttcggct

SEQ ID NO: 84513 - DNA, 25 bp, SARS Virus
cccgattgataggaccgttcggctt

SEQ ID NO: 84514 - DNA, 25 bp, SARS Virus
ccgattgatagagccgttcggcttc

SEQ ID NO: 84515 - DNA, 25 bp, SARS Virus
cgattgatagaagcgttcggcttcc

SEQ ID NO: 84516 - DNA, 25 bp, SARS Virus
gattgatagaacggttcggcttcct

SEQ ID NO: 84517 - DNA, 25 bp, SARS Virus
attgatagaaccgttcggcttcctt

SEQ ID NO: 84518 - DNA, 25 bp, SARS Virus
ttgatagaaccggtcggcttccttg

SEQ ID NO: 84519 - DNA, 25 bp, SARS Virus
tgatagaaccgtgcggcttccttgt

SEQ ID NO: 84520 - DNA, 25 bp, SARS Virus
gatagaaccgttgggcttccttgtt

SEQ ID NO: 84521 - DNA, 25 bp, SARS Virus
atagaaccgttcggcttccttgttt

SEQ ID NO: 84522 - DNA, 25 bp, SARS Virus
tagaaccgttcggcttccttgttta

SEQ ID NO: 84523 - DNA, 25 bp, SARS Virus
agaaccgttcgggttccttgtttaa

SEQ ID NO: 84524 - DNA, 25 bp, SARS Virus
gaaccgttcggcgtccttgtttaac

SEQ ID NO: 84525 - DNA, 25 bp, SARS Virus
aaccgttcggctgccttgtttaact

SEQ ID NO: 84526 - DNA, 25 bp, SARS Virus
accgttcggcttgcttgtttaacta

SEQ ID NO: 84527 - DNA, 25 bp, SARS Virus
ccgttcggcttcgttgtttaactac

SEQ ID NO: 84528 - DNA, 25 bp, SARS Virus
cgttcggcttccgtgtttaactacc

SEQ ID NO: 84529 - DNA, 25 bp, SARS Virus
gttcggcttcctggtttaactaccg

SEQ ID NO: 84530 - DNA, 25 bp, SARS Virus
ttcggcttccttgtttaactaccga

SEQ ID NO: 84531 - DNA, 25 bp, SARS Virus
tcggcttccttggttaactaccgat

SEQ ID NO: 84532 - DNA, 25 bp, SARS Virus
cggcttccttgtgtaactaccgata

SEQ ID NO: 84533 - DNA, 25 bp, SARS Virus
ggcttccttgttgaactaccgatat

SEQ ID NO: 84534 - DNA, 25 bp, SARS Virus
gcttccttgtttgactaccgatatg

SEQ ID NO: 84535 - DNA, 25 bp, SARS Virus
cttccttgtttagctaccgatatgg

SEQ ID NO: 84536 - DNA, 25 bp, SARS Virus
ttccttgtttaagtaccgatatggt

SEQ ID NO: 84537 - DNA, 25 bp, SARS Virus
tccttgtttaacgaccgatatggta

SEQ ID NO: 84538 - DNA, 25 bp, SARS Virus
ccttgtttaactgccgatatggtac

SEQ ID NO: 84539 - DNA, 25 bp, SARS Virus
cttgtttaactagcgatatggtacg

SEQ ID NO: 84540 - DNA, 25 bp, SARS Virus
ttgtttaactacggatatggtacgt

SEQ ID NO: 84541 - DNA, 25 bp, SARS Virus
tgtttaactaccgatatggtacgta

SEQ ID NO: 84542 - DNA, 25 bp, SARS Virus
gtttaactaccggtatggtacgtac

SEQ ID NO: 84543 - DNA, 25 bp, SARS Virus
tttaactaccgagatggtacgtacg

SEQ ID NO: 84544 - DNA, 25 bp, SARS Virus
ttaactaccgatgtggtacgtacga

SEQ ID NO: 84545 - DNA, 25 bp, SARS Virus
taactaccgatagggtacgtacgat

SEQ ID NO: 84546 - DNA, 25 bp, SARS Virus
aactaccgatatggtacgtacgatt

SEQ ID NO: 84547 - DNA, 25 bp, SARS Virus
actaccgatatggtacgtacgattg

SEQ ID NO: 84548 - DNA, 25 bp, SARS Virus
ctaccgatatgggacgtacgattga

SEQ ID NO: 84549 - DNA, 25 bp, SARS Virus
taccgatatggtgcgtacgattgat

SEQ ID NO: 84550 - DNA, 25 bp, SARS Virus
accgatatggtaggtacgattgatg

SEQ ID NO: 84551 - DNA, 25 bp, SARS Virus
ccgatatggtacgtacgattgatgt

SEQ ID NO: 84552 - DNA, 25 bp, SARS Virus
cgatatggtacggacgattgatgta

SEQ ID NO: 84553 - DNA, 25 bp, SARS Virus
aatcgacatgggttgttgtactctc

SEQ ID NO: 84554 - DNA, 25 bp, SARS Virus
atcgacatgggatgttgtactctca

SEQ ID NO: 84555 - DNA, 25 bp, SARS Virus
tcgacatgggattttgtactctcaa

SEQ ID NO: 84556 - DNA, 25 bp, SARS Virus
cgacatgggatgttgtactctcaat

SEQ ID NO: 84557 - DNA, 25 bp, SARS Virus
gacatgggatgttgtactctcaata

SEQ ID NO: 84558 - DNA, 25 bp, SARS Virus
acatgggatgttttactctcaataa

SEQ ID NO: 84559 - DNA, 25 bp, SARS Virus
catgggatgttgtactctcaataag

SEQ ID NO: 84560 - DNA, 25 bp, SARS Virus
atgggatgttgttctctcaataagt

SEQ ID NO: 84561 - DNA, 25 bp, SARS Virus
tgggatgttgtattctcaataagtg

SEQ ID NO: 84562 - DNA, 25 bp, SARS Virus
gggatgttgtactctcaataagtga

SEQ ID NO: 84563 - DNA, 25 bp, SARS Virus
ggatgttgtactttcaataagtgaa

SEQ ID NO: 84564 - DNA, 25 bp, SARS Virus
gatgttgtactctcaataagtgaaa

SEQ ID NO: 84565 - DNA, 25 bp, SARS Virus
atgttgtactcttaataagtgaaac

SEQ ID NO: 84566 - DNA, 25 bp, SARS Virus
tgttgtactctctataagtgaaacc

SEQ ID NO: 84567 - DNA, 25 bp, SARS Virus
gttgtactctcattaagtgaaacca

SEQ ID NO: 84568 - DNA, 25 bp, SARS Virus
ttgtactctcaataagtgaaaccac

SEQ ID NO: 84569 - DNA, 25 bp, SARS Virus
tgtactctcaattagtgaaaccacg

SEQ ID NO: 84570 - DNA, 25 bp, SARS Virus
gtactctcaatatgtgaaaccacga

SEQ ID NO: 84571 - DNA, 25 bp, SARS Virus
tactctcaataattgaaaccacgac

SEQ ID NO: 84572 - DNA, 25 bp, SARS Virus
actctcaataagtgaaaccacgacc

SEQ ID NO: 84573 - DNA, 25 bp, SARS Virus
ctctcaataagttaaaccacgaccg

SEQ ID NO: 84574 - DNA, 25 bp, SARS Virus
tctcaataagtgtaaccacgaccga

SEQ ID NO: 84575 - DNA, 25 bp, SARS Virus
ctcaataagtgataccacgaccgag

SEQ ID NO: 84576 - DNA, 25 bp, SARS Virus
tcaataagtgaatccacgaccgaga

SEQ ID NO: 84577 - DNA, 25 bp, SARS Virus
caataagtgaaatcacgaccgagac

SEQ ID NO: 84578 - DNA, 25 bp, SARS Virus
aataagtgaaactacgaccgagact

SEQ ID NO: 84579 - DNA, 25 bp, SARS Virus
ataagtgaaacctcgaccgagacta

SEQ ID NO: 84580 - DNA, 25 bp, SARS Virus
taagtgaaaccatgaccgagactat

SEQ ID NO: 84581 - DNA, 25 bp, SARS Virus
aagtgaaaccactaccgagactatt

SEQ ID NO: 84582 - DNA, 25 bp, SARS Virus
agtgaaaccacgtccgagactattt

SEQ ID NO: 84583 - DNA, 25 bp, SARS Virus
gtgaaaccacgatcgagactatttc

SEQ ID NO: 84584 - DNA, 25 bp, SARS Virus
tgaaaccacgactgagactatttcc

SEQ ID NO: 84585 - DNA, 25 bp, SARS Virus
gaaaccacgacctagactatttcct

SEQ ID NO: 84586 - DNA, 25 bp, SARS Virus
aaaccacgaccgtgactatttcctc

SEQ ID NO: 84587 - DNA, 25 bp, SARS Virus
aaccacgaccgatactatttcctca

SEQ ID NO: 84588 - DNA, 25 bp, SARS Virus
accacgaccgagtctatttcctcaa

SEQ ID NO: 84589 - DNA, 25 bp, SARS Virus
ccacgaccgagattatttcctcaac

SEQ ID NO: 84590 - DNA, 25 bp, SARS Virus
cacgaccgagactatttcctcaacg

SEQ ID NO: 84591 - DNA, 25 bp, SARS Virus
acgaccgagactttttcctcaacgt

SEQ ID NO: 84592 - DNA, 25 bp, SARS Virus
cgaccgagactatttcctcaacgtg

SEQ ID NO: 84593 - DNA, 25 bp, SARS Virus
gaccgagactatttcctcaacgtgg

SEQ ID NO: 84594 - DNA, 25 bp, SARS Virus
accgagactatttcctcaacgtggt

SEQ ID NO: 84595 - DNA, 25 bp, SARS Virus
ccgagactattttctcaacgtggtc

SEQ ID NO: 84596 - DNA, 25 bp, SARS Virus
cgagactatttcttcaacgtggtcc

SEQ ID NO: 84597 - DNA, 25 bp, SARS Virus
gagactatttcctcaacgtggtcca

SEQ ID NO: 84598 - DNA, 25 bp, SARS Virus
agactatttccttaacgtggtccat

SEQ ID NO: 84599 - DNA, 25 bp, SARS Virus
gactatttcctctacgtggtccatg

SEQ ID NO: 84600 - DNA, 25 bp, SARS Virus
actatttcctcatcgtggtccatgt

SEQ ID NO: 84601 - DNA, 25 bp, SARS Virus
ctatttcctcaatgtggtccatgtc

SEQ ID NO: 84602 - DNA, 25 bp, SARS Virus
tatttcctcaacttggtccatgtcg

SEQ ID NO: 84603 - DNA, 25 bp, SARS Virus
atttcctcaacgtggtccatgtcga

SEQ ID NO: 84604 - DNA, 25 bp, SARS Virus
tttcctcaacgttgtccatgtcgac

SEQ ID NO: 84605 - DNA, 25 bp, SARS Virus
ttcctcaacgtgttccatgtcgaca

SEQ ID NO: 84606 - DNA, 25 bp, SARS Virus
tcctcaacgtggtccatgtcgacac

SEQ ID NO: 84607 - DNA, 25 bp, SARS Virus
cctcaacgtggttcatgtcgacacg

SEQ ID NO: 84608 - DNA, 25 bp, SARS Virus
ctcaacgtggtctatgtcgacacga

SEQ ID NO: 84609 - DNA, 25 bp, SARS Virus
tcaacgtggtccttgtcgacacgag

SEQ ID NO: 84610 - DNA, 25 bp, SARS Virus
caacgtggtccatgtcgacacgagt

SEQ ID NO: 84611 - DNA, 25 bp, SARS Virus
aacgtggtccatttcgacacgagtc

SEQ ID NO: 84612 - DNA, 25 bp, SARS Virus
acgtggtccatgtcgacacgagtct

SEQ ID NO: 84613 - DNA, 25 bp, SARS Virus
cgtggtccatgttgacacgagtctg

SEQ ID NO: 84614 - DNA, 25 bp, SARS Virus
gtggtccatgtctacacgagtctgt

SEQ ID NO: 84615 - DNA, 25 bp, SARS Virus
tggtccatgtcgtcacgagtctgtt

SEQ ID NO: 84616 - DNA, 25 bp, SARS Virus
ggtccatgtcgatacgagtctgtta

SEQ ID NO: 84617 - DNA, 25 bp, SARS Virus
gtccatgtcgactcgagtctgttac

SEQ ID NO: 84618 - DNA, 25 bp, SARS Virus
tccatgtcgacatgagtctgttacc

SEQ ID NO: 84619 - DNA, 25 bp, SARS Virus
ccatgtcgacactagtctgttacca

SEQ ID NO: 84620 - DNA, 25 bp, SARS Virus
catgtcgacacgtgtctgttaccaa

SEQ ID NO: 84621 - DNA, 25 bp, SARS Virus
atgtcgacacgattctgttaccaac

SEQ ID NO: 84622 - DNA, 25 bp, SARS Virus
tgtcgacacgagtctgttaccaacg

SEQ ID NO: 84623 - DNA, 25 bp, SARS Virus
gtcgacacgagtttgttaccaacgg

SEQ ID NO: 84624 - DNA, 25 bp, SARS Virus
tcgacacgagtctgttaccaacggt

SEQ ID NO: 84625 - DNA, 25 bp, SARS Virus
cgacacgagtcttttaccaacggtt

SEQ ID NO: 84626 - DNA, 25 bp, SARS Virus
gacacgagtctgttaccaacggttg

SEQ ID NO: 84627 - DNA, 25 bp, SARS Virus
acacgagtctgttaccaacggttga

SEQ ID NO: 84628 - DNA, 25 bp, SARS Virus
cacgagtctgtttccaacggttgac

SEQ ID NO: 84629 - DNA, 25 bp, SARS Virus
acgagtctgttatcaacggttgacc

SEQ ID NO: 84630 - DNA, 25 bp, SARS Virus
cgagtctgttactaacggttgaccg

SEQ ID NO: 84631 - DNA, 25 bp, SARS Virus
gagtctgttacctacggttgaccgt

SEQ ID NO: 84632 - DNA, 25 bp, SARS Virus
agtctgttaccatcggttgaccgtg

SEQ ID NO: 84633 - DNA, 25 bp, SARS Virus
gtctgttaccaatggttgaccgtgt

SEQ ID NO: 84634 - DNA, 25 bp, SARS Virus
tctgttaccaactgttgaccgtgtg

SEQ ID NO: 84635 - DNA, 25 bp, SARS Virus
ctgttaccaacgtttgaccgtgtga

SEQ ID NO: 84636 - DNA, 25 bp, SARS Virus
tgttaccaacggttgaccgtgtgat

SEQ ID NO: 84637 - DNA, 25 bp, SARS Virus
gttaccaacggttgaccgtgtgatg

SEQ ID NO: 84638 - DNA, 25 bp, SARS Virus
ttaccaacggtttaccgtgtgatga

SEQ ID NO: 84639 - DNA, 25 bp, SARS Virus
taccaacggttgtccgtgtgatgaa

SEQ ID NO: 84640 - DNA, 25 bp, SARS Virus
accaacggttgatcgtgtgatgaac

SEQ ID NO: 84641 - DNA, 25 bp, SARS Virus
ccaacggttgactgtgtgatgaaca

SEQ ID NO: 84642 - DNA, 25 bp, SARS Virus
caacggttgaccttgtgatgaacag

SEQ ID NO: 84643 - DNA, 25 bp, SARS Virus
aacggttgaccgtgtgatgaacagc

SEQ ID NO: 84644 - DNA, 25 bp, SARS Virus
acggttgaccgtttgatgaacagct

SEQ ID NO: 84645 - DNA, 25 bp, SARS Virus
cggttgaccgtgtgatgaacagcta

SEQ ID NO: 84646 - DNA, 25 bp, SARS Virus
ggttgaccgtgttatgaacagctaa

SEQ ID NO: 84647 - DNA, 25 bp, SARS Virus
gttgaccgtgtgttgaacagctaag

SEQ ID NO: 84648 - DNA, 25 bp, SARS Virus
ttgaccgtgtgatgaacagctaagt

SEQ ID NO: 84649 - DNA, 25 bp, SARS Virus
tgaccgtgtgattaacagctaagtc

SEQ ID NO: 84650 - DNA, 25 bp, SARS Virus
gaccgtgtgatgtacagctaagtct

SEQ ID NO: 84651 - DNA, 25 bp, SARS Virus
accgtgtgatgatcagctaagtcta

SEQ ID NO: 84652 - DNA, 25 bp, SARS Virus
ccgtgtgatgaatagctaagtctag

SEQ ID NO: 84653 - DNA, 25 bp, SARS Virus
cgtgtgatgaactgctaagtctaga

SEQ ID NO: 84654 - DNA, 25 bp, SARS Virus
gtgtgatgaacatctaagtctagaa

SEQ ID NO: 84655 - DNA, 25 bp, SARS Virus
tgtgatgaacagttaagtctagaat

SEQ ID NO: 84656 - DNA, 25 bp, SARS Virus
gtgatgaacagctaagtctagaatt

SEQ ID NO: 84657 - DNA, 25 bp, SARS Virus
tgatgaacagcttagtctagaatta

SEQ ID NO: 84658 - DNA, 25 bp, SARS Virus
gatgaacagctatgtctagaattac

SEQ ID NO: 84659 - DNA, 25 bp, SARS Virus
atgaacagctaattctagaattact

SEQ ID NO: 84660 - DNA, 25 bp, SARS Virus
tgaacagctaagtctagaattactg

SEQ ID NO: 84661 - DNA, 25 bp, SARS Virus
gaacagctaagtttagaattactga

SEQ ID NO: 84662 - DNA, 25 bp, SARS Virus
aacagctaagtctagaattactgaa

SEQ ID NO: 84663 - DNA, 25 bp, SARS Virus
acagctaagtcttgaattactgaag

SEQ ID NO: 84664 - DNA, 25 bp, SARS Virus
cagctaagtctataattactgaagc

SEQ ID NO: 84665 - DNA, 25 bp, SARS Virus
agctaagtctagtattactgaagca

SEQ ID NO: 84666 - DNA, 25 bp, SARS Virus
gctaagtctagatttactgaagcag

SEQ ID NO: 84667 - DNA, 25 bp, SARS Virus
ctaagtctagaattactgaagcaga

SEQ ID NO: 84668 - DNA, 25 bp, SARS Virus
taagtctagaattactgaagcagag

SEQ ID NO: 84669 - DNA, 25 bp, SARS Virus
aagtctagaatttctgaagcagagg

SEQ ID NO: 84670 - DNA, 25 bp, SARS Virus
agtctagaattattgaagcagaggc

SEQ ID NO: 84671 - DNA, 25 bp, SARS Virus
gtctagaattactgaagcagaggct

SEQ ID NO: 84672 - DNA, 25 bp, SARS Virus
tctagaattacttaagcagaggctg

SEQ ID NO: 84673 - DNA, 25 bp, SARS Virus
ctagaattactgtagcagaggctgc

SEQ ID NO: 84674 - DNA, 25 bp, SARS Virus
tagaattactgatgcagaggctgcg

SEQ ID NO: 84675 - DNA, 25 bp, SARS Virus
agaattactgaatcagaggctgcgt

SEQ ID NO: 84676 - DNA, 25 bp, SARS Virus
gaattactgaagtagaggctgcgtc

SEQ ID NO: 84677 - DNA, 25 bp, SARS Virus
aattactgaagctgaggctgcgtct

SEQ ID NO: 84678 - DNA, 25 bp, SARS Virus
attactgaagcataggctgcgtcta

SEQ ID NO: 84679 - DNA, 25 bp, SARS Virus
ttactgaagcagtggctgcgtctaa

SEQ ID NO: 84680 - DNA, 25 bp, SARS Virus
tactgaagcagatgctgcgtctaag

SEQ ID NO: 84681 - DNA, 25 bp, SARS Virus
actgaagcagagtctgcgtctaaga

SEQ ID NO: 84682 - DNA, 25 bp, SARS Virus
ctgaagcagaggttgcgtctaagat

SEQ ID NO: 84683 - DNA, 25 bp, SARS Virus
tgaagcagaggctgcgtctaagatg

SEQ ID NO: 84684 - DNA, 25 bp, SARS Virus
gaagcagaggcttcgtctaagatga

SEQ ID NO: 84685 - DNA, 25 bp, SARS Virus
aagcagaggctgtgtctaagatgaa

SEQ ID NO: 84686 - DNA, 25 bp, SARS Virus
agcagaggctgcttctaagatgaaa

SEQ ID NO: 84687 - DNA, 25 bp, SARS Virus
gcagaggctgcgtctaagatgaaat

SEQ ID NO: 84688 - DNA, 25 bp, SARS Virus
cagaggctgcgtttaagatgaaatt

SEQ ID NO: 84689 - DNA, 25 bp, SARS Virus
agaggctgcgtctaagatgaaatta

SEQ ID NO: 84690 - DNA, 25 bp, SARS Virus
gaggctgcgtcttagatgaaattaa

SEQ ID NO: 84691 - DNA, 25 bp, SARS Virus
aggctgcgtctatgatgaaattaac

SEQ ID NO: 84692 - DNA, 25 bp, SARS Virus
ggctgcgtctaatatgaaattaacc

SEQ ID NO: 84693 - DNA, 25 bp, SARS Virus
gctgcgtctaagttgaaattaacct

SEQ ID NO: 84694 - DNA, 25 bp, SARS Virus
ctgcgtctaagatgaaattaacctc

SEQ ID NO: 84695 - DNA, 25 bp, SARS Virus
tgcgtctaagattaaattaacctct

SEQ ID NO: 84696 - DNA, 25 bp, SARS Virus
gcgtctaagatgtaattaacctctg

SEQ ID NO: 84697 - DNA, 25 bp, SARS Virus
cgtctaagatgatattaacctctga

SEQ ID NO: 84698 - DNA, 25 bp, SARS Virus
gtctaagatgaatttaacctctgac

SEQ ID NO: 84699 - DNA, 25 bp, SARS Virus
tctaagatgaaattaacctctgaca

SEQ ID NO: 84700 - DNA, 25 bp, SARS Virus
ctaagatgaaattaacctctgacac

SEQ ID NO: 84701 - DNA, 25 bp, SARS Virus
taagatgaaatttacctctgacacg

SEQ ID NO: 84702 - DNA, 25 bp, SARS Virus
aagatgaaattatcctctgacacgt

SEQ ID NO: 84703 - DNA, 25 bp, SARS Virus
agatgaaattaatctctgacacgtt

SEQ ID NO: 84704 - DNA, 25 bp, SARS Virus
gatgaaattaacttctgacacgttg

SEQ ID NO: 84705 - DNA, 25 bp, SARS Virus
atgaaattaacctctgacacgttgt

SEQ ID NO: 84706 - DNA, 25 bp, SARS Virus
tgaaattaacctttgacacgttgtc

SEQ ID NO: 84707 - DNA, 25 bp, SARS Virus
gaaattaacctctgacacgttgtca

SEQ ID NO: 84708 - DNA, 25 bp, SARS Virus
aaattaacctcttacacgttgtcat

SEQ ID NO: 84709 - DNA, 25 bp, SARS Virus
aattaacctctgtcacgttgtcatg

SEQ ID NO: 84710 - DNA, 25 bp, SARS Virus
attaacctctgatacgttgtcatgt

SEQ ID NO: 84711 - DNA, 25 bp, SARS Virus
ttaacctctgactcgttgtcatgta

SEQ ID NO: 84712 - DNA, 25 bp, SARS Virus
taacctctgacatgttgtcatgtat

SEQ ID NO: 84713 - DNA, 25 bp, SARS Virus
aacctctgacactttgtcatgtatg

SEQ ID NO: 84714 - DNA, 25 bp, SARS Virus
acctctgacacgttgtcatgtatgc

SEQ ID NO: 84715 - DNA, 25 bp, SARS Virus
cctctgacacgttgtcatgtatgcc

SEQ ID NO: 84716 - DNA, 25 bp, SARS Virus
ctctgacacgttttcatgtatgccg

SEQ ID NO: 84717 - DNA, 25 bp, SARS Virus
tctgacacgttgtcatgtatgccga

SEQ ID NO: 84718 - DNA, 25 bp, SARS Virus
ctgacacgttgttatgtatgccgat

SEQ ID NO: 84719 - DNA, 25 bp, SARS Virus
tgacacgttgtcttgtatgccgatt

SEQ ID NO: 84720 - DNA, 25 bp, SARS Virus
gacacgttgtcatgtatgccgatta

SEQ ID NO: 84721 - DNA, 25 bp, SARS Virus
acacgttgtcatttatgccgattat

SEQ ID NO: 84722 - DNA, 25 bp, SARS Virus
cacgttgtcatgtatgccgattatt

SEQ ID NO: 84723 - DNA, 25 bp, SARS Virus
acgttgtcatgtttgccgattattt

SEQ ID NO: 84724 - DNA, 25 bp, SARS Virus
cgttgtcatgtatgccgattattta

SEQ ID NO: 84725 - DNA, 25 bp, SARS Virus
gttgtcatgtattccgattatttac

SEQ ID NO: 84726 - DNA, 25 bp, SARS Virus
ttgtcatgtatgtcgattatttacc

SEQ ID NO: 84727 - DNA, 25 bp, SARS Virus
tgtcatgtatgctgattatttaccc

SEQ ID NO: 84728 - DNA, 25 bp, SARS Virus
gtcatgtatgcctattatttaccct

SEQ ID NO: 84729 - DNA, 25 bp, SARS Virus
tcatgtatgccgtttatttaccctg

SEQ ID NO: 84730 - DNA, 25 bp, SARS Virus
catgtatgccgattatttaccctgg

SEQ ID NO: 84731 - DNA, 25 bp, SARS Virus
atgtatgccgattatttaccctgga

SEQ ID NO: 84732 - DNA, 25 bp, SARS Virus
tgtatgccgattttttaccctggaa

SEQ ID NO: 84733 - DNA, 25 bp, SARS Virus
gtatgccgattatttaccctggaat

SEQ ID NO: 84734 - DNA, 25 bp, SARS Virus
tatgccgattatttaccctggaata

SEQ ID NO: 84735 - DNA, 25 bp, SARS Virus
atgccgattatttaccctggaataa

SEQ ID NO: 84736 - DNA, 25 bp, SARS Virus
tgccgattattttccctggaataat

SEQ ID NO: 84737 - DNA, 25 bp, SARS Virus
gccgattatttatcctggaataata

SEQ ID NO: 84738 - DNA, 25 bp, SARS Virus
ccgattatttactctggaataataa

SEQ ID NO: 84739 - DNA, 25 bp, SARS Virus
cgattatttaccttggaataataat

SEQ ID NO: 84740 - DNA, 25 bp, SARS Virus
gattatttaccctggaataataatc

SEQ ID NO: 84741 - DNA, 25 bp, SARS Virus
attatttacccttgaataataatcg

SEQ ID NO: 84742 - DNA, 25 bp, SARS Virus
ttatttaccctgtaataataatcgc

SEQ ID NO: 84743 - DNA, 25 bp, SARS Virus
tatttaccctggtataataatcgct

SEQ ID NO: 84744 - DNA, 25 bp, SARS Virus
atttaccctggattaataatcgcta

SEQ ID NO: 84745 - DNA, 25 bp, SARS Virus
tttaccctggaataataatcgctat

SEQ ID NO: 84746 - DNA, 25 bp, SARS Virus
ttaccctggaattataatcgctata

SEQ ID NO: 84747 - DNA, 25 bp, SARS Virus
taccctggaatattaatcgctatac

SEQ ID NO: 84748 - DNA, 25 bp, SARS Virus
accctggaataataatcgctataca

SEQ ID NO: 84749 - DNA, 25 bp, SARS Virus
ccctggaataattatcgctatacat

SEQ ID NO: 84750 - DNA, 25 bp, SARS Virus
cctggaataatattcgctatacata

SEQ ID NO: 84751 - DNA, 25 bp, SARS Virus
ctggaataataatcgctatacatac

SEQ ID NO: 84752 - DNA, 25 bp, SARS Virus
tggaataataattgctatacatact

SEQ ID NO: 84753 - DNA, 25 bp, SARS Virus
ggaataataatctctatacatactg

SEQ ID NO: 84754 - DNA, 25 bp, SARS Virus
gaataataatcgttatacatactgg

SEQ ID NO: 84755 - DNA, 25 bp, SARS Virus
aataataatcgctatacatactggg

SEQ ID NO: 84756 - DNA, 25 bp, SARS Virus
ataataatcgctttacatactggga

SEQ ID NO: 84757 - DNA, 25 bp, SARS Virus
taataatcgctatacatactgggat

SEQ ID NO: 84758 - DNA, 25 bp, SARS Virus
aataatcgctattcatactgggatc

SEQ ID NO: 84759 - DNA, 25 bp, SARS Virus
ataatcgctatatatactgggatcc

SEQ ID NO: 84760 - DNA, 25 bp, SARS Virus
taatcgctatacttactgggatcct

SEQ ID NO: 84761 - DNA, 25 bp, SARS Virus
aatcgctatacatactgggatcctg

SEQ ID NO: 84762 - DNA, 25 bp, SARS Virus
atcgctatacattctgggatcctgg

SEQ ID NO: 84763 - DNA, 25 bp, SARS Virus
tcgctatacatattgggatcctggt

SEQ ID NO: 84764 - DNA, 25 bp, SARS Virus
cgctatacatactgggatcctggtt

SEQ ID NO: 84765 - DNA, 25 bp, SARS Virus
gctatacatacttggatcctggttt

SEQ ID NO: 84766 - DNA, 25 bp, SARS Virus
ctatacatactgtgatcctggtttg

SEQ ID NO: 84767 - DNA, 25 bp, SARS Virus
tatacatactggtatcctggtttgt

SEQ ID NO: 84768 - DNA, 25 bp, SARS Virus
atacatactgggttcctggtttgta

SEQ ID NO: 84769 - DNA, 25 bp, SARS Virus
tacatactgggatcctggtttgtac

SEQ ID NO: 84770 - DNA, 25 bp, SARS Virus
acatactgggattctggtttgtaca

SEQ ID NO: 84771 - DNA, 25 bp, SARS Virus
catactgggatcttggtttgtacac

SEQ ID NO: 84772 - DNA, 25 bp, SARS Virus
atactgggatcctggtttgtacact

SEQ ID NO: 84773 - DNA, 25 bp, SARS Virus
tactgggatccttgtttgtacactg

SEQ ID NO: 84774 - DNA, 25 bp, SARS Virus
actgggatcctgttttgtacactgt

SEQ ID NO: 84775 - DNA, 25 bp, SARS Virus
ctgggatcctggtttgtacactgtt

SEQ ID NO: 84776 - DNA, 25 bp, SARS Virus
tgggatcctggtttgtacactgttt

SEQ ID NO: 84777 - DNA, 25 bp, SARS Virus
gggatcctggtttgtacactgtttt

SEQ ID NO: 84778 - DNA, 25 bp, SARS Virus
ggatcctggtttttacactgttttc

SEQ ID NO: 84779 - DNA, 25 bp, SARS Virus
gatcctggtttgtacactgttttct

SEQ ID NO: 84780 - DNA, 25 bp, SARS Virus
atcctggtttgttcactgttttctc

SEQ ID NO: 84781 - DNA, 25 bp, SARS Virus
tcctggtttgtatactgttttctct

SEQ ID NO: 84782 - DNA, 25 bp, SARS Virus
cctggtttgtactctgttttctctt

SEQ ID NO: 84783 - DNA, 25 bp, SARS Virus
ctggtttgtacattgttttctctta

SEQ ID NO: 84784 - DNA, 25 bp, SARS Virus
tggtttgtacactgttttctcttac

SEQ ID NO: 84785 - DNA, 25 bp, SARS Virus
ggtttgtacacttttttctcttact

SEQ ID NO: 84786 - DNA, 25 bp, SARS Virus
gtttgtacactgttttctcttactg

SEQ ID NO: 84787 - DNA, 25 bp, SARS Virus
tttgtacactgttttctcttactga

SEQ ID NO: 84788 - DNA, 25 bp, SARS Virus
ttgtacactgttttctcttactgag

SEQ ID NO: 84789 - DNA, 25 bp, SARS Virus
tgtacactgttttctcttactgaga

SEQ ID NO: 84790 - DNA, 25 bp, SARS Virus
gtacactgttttttcttactgagat

SEQ ID NO: 84791 - DNA, 25 bp, SARS Virus
tacactgttttctcttactgagatt

SEQ ID NO: 84792 - DNA, 25 bp, SARS Virus
acactgttttcttttactgagattt

SEQ ID NO: 84793 - DNA, 25 bp, SARS Virus
cactgttttctcttactgagatttc

SEQ ID NO: 84794 - DNA, 25 bp, SARS Virus
actgttttctcttactgagatttct

SEQ ID NO: 84795 - DNA, 25 bp, SARS Virus
ctgttttctctttctgagatttctt

SEQ ID NO: 84796 - DNA, 25 bp, SARS Virus
tgttttctcttattgagatttcttc

SEQ ID NO: 84797 - DNA, 25 bp, SARS Virus
gttttctcttactgagatttcttcc

SEQ ID NO: 84798 - DNA, 25 bp, SARS Virus
ttttctcttacttagatttcttccc

SEQ ID NO: 84799 - DNA, 25 bp, SARS Virus
tttctcttactgtgatttcttccca

SEQ ID NO: 84800 - DNA, 25 bp, SARS Virus
ttctcttactgatatttcttcccaa

SEQ ID NO: 84801 - DNA, 25 bp, SARS Virus
tctcttactgagttttcttcccaaa

SEQ ID NO: 84802 - DNA, 25 bp, SARS Virus
ctcttactgagatttcttcccaaaa

SEQ ID NO: 84803 - DNA, 25 bp, SARS Virus
tcttactgagatttcttcccaaaaa

SEQ ID NO: 84804 - DNA, 25 bp, SARS Virus
cttactgagatttcttcccaaaaag

SEQ ID NO: 84805 - DNA, 25 bp, SARS Virus
ttactgagattttttcccaaaaagt

SEQ ID NO: 84806 - DNA, 25 bp, SARS Virus
tactgagatttcttcccaaaaagtg

SEQ ID NO: 84807 - DNA, 25 bp, SARS Virus
actgagatttcttcccaaaaagtga

SEQ ID NO: 84808 - DNA, 25 bp, SARS Virus
ctgagatttctttccaaaaagtgaa

SEQ ID NO: 84809 - DNA, 25 bp, SARS Virus
tgagatttcttctcaaaaagtgaat

SEQ ID NO: 84810 - DNA, 25 bp, SARS Virus
gagatttcttcctaaaaagtgaata

SEQ ID NO: 84811 - DNA, 25 bp, SARS Virus
agatttcttccctaaaagtgaatag

SEQ ID NO: 84812 - DNA, 25 bp, SARS Virus
gatttcttcccataaagtgaataga

SEQ ID NO: 84813 - DNA, 25 bp, SARS Virus
atttcttcccaataagtgaatagac

SEQ ID NO: 84814 - DNA, 25 bp, SARS Virus
tttcttcccaaatagtgaatagaca

SEQ ID NO: 84815 - DNA, 25 bp, SARS Virus
ttcttcccaaaatgtgaatagacac

SEQ ID NO: 84816 - DNA, 25 bp, SARS Virus
tcttcccaaaaattgaatagacaca

SEQ ID NO: 84817 - DNA, 25 bp, SARS Virus
cttcccaaaaagtgaatagacacac

SEQ ID NO: 84818 - DNA, 25 bp, SARS Virus
ttcccaaaaagttaatagacacacc

SEQ ID NO: 84819 - DNA, 25 bp, SARS Virus
tcccaaaaagtgtatagacacacct

SEQ ID NO: 84820 - DNA, 25 bp, SARS Virus
cccaaaaagtgattagacacaccta

SEQ ID NO: 84821 - DNA, 25 bp, SARS Virus
ccaaaaagtgaatagacacacctaa

SEQ ID NO: 84822 - DNA, 25 bp, SARS Virus
caaaaagtgaattgacacacctaaa

SEQ ID NO: 84823 - DNA, 25 bp, SARS Virus
aaaaagtgaatatacacacctaaat

SEQ ID NO: 84824 - DNA, 25 bp, SARS Virus
aaaagtgaatagtcacacctaaata

SEQ ID NO: 84825 - DNA, 25 bp, SARS Virus
aaagtgaatagatacacctaaatat

SEQ ID NO: 84826 - DNA, 25 bp, SARS Virus
aagtgaatagactcacctaaatatt

SEQ ID NO: 84827 - DNA, 25 bp, SARS Virus
agtgaatagacatacctaaatattt

SEQ ID NO: 84828 - DNA, 25 bp, SARS Virus
gtgaatagacactcctaaatatttc

SEQ ID NO: 84829 - DNA, 25 bp, SARS Virus
tgaatagacacatctaaatatttcg

SEQ ID NO: 84830 - DNA, 25 bp, SARS Virus
gaatagacacacttaaatatttcgt

SEQ ID NO: 84831 - DNA, 25 bp, SARS Virus
aatagacacacctaaatatttcgtt

SEQ ID NO: 84832 - DNA, 25 bp, SARS Virus
atagacacaccttaatatttcgttt

SEQ ID NO: 84833 - DNA, 25 bp, SARS Virus
tagacacacctatatatttcgtttt

SEQ ID NO: 84834 - DNA, 25 bp, SARS Virus
agacacacctaattatttcgttttt

SEQ ID NO: 84835 - DNA, 25 bp, SARS Virus
gacacacctaaatatttcgtttttg

SEQ ID NO: 84836 - DNA, 25 bp, SARS Virus
acacacctaaatttttcgtttttga

SEQ ID NO: 84837 - DNA, 25 bp, SARS Virus
cacacctaaatatttcgtttttgat

SEQ ID NO: 84838 - DNA, 25 bp, SARS Virus
acacctaaatatttcgtttttgatc

SEQ ID NO: 84839 - DNA, 25 bp, SARS Virus
cacctaaatatttcgtttttgatcg

SEQ ID NO: 84840 - DNA, 25 bp, SARS Virus
acctaaatattttgtttttgatcgg

SEQ ID NO: 84841 - DNA, 25 bp, SARS Virus
cctaaatatttcttttttgatcggg

SEQ ID NO: 84842 - DNA, 25 bp, SARS Virus
ctaaatatttcgtttttgatcggga

SEQ ID NO: 84843 - DNA, 25 bp, SARS Virus
taaatatttcgtttttgatcgggac

SEQ ID NO: 84844 - DNA, 25 bp, SARS Virus
aaatatttcgtttttgatcgggacc

SEQ ID NO: 84845 - DNA, 25 bp, SARS Virus
aatatttcgtttttgatcgggaccc

SEQ ID NO: 84846 - DNA, 25 bp, SARS Virus
atatttcgtttttgatcgggaccca

SEQ ID NO: 84847 - DNA, 25 bp, SARS Virus
tatttcgttttttatcgggacccac

SEQ ID NO: 84848 - DNA, 25 bp, SARS Virus
atttcgtttttgttcgggacccacc

SEQ ID NO: 84849 - DNA, 25 bp, SARS Virus
tttcgtttttgatcgggacccacca

SEQ ID NO: 84850 - DNA, 25 bp, SARS Virus
ttcgtttttgattgggacccaccaa

SEQ ID NO: 84851 - DNA, 25 bp, SARS Virus
tcgtttttgatctggacccaccaag

SEQ ID NO: 84852 - DNA, 25 bp, SARS Virus
cgtttttgatcgtgacccaccaaga

SEQ ID NO: 84853 - DNA, 25 bp, SARS Virus
gtttttgatcggtacccaccaagat

SEQ ID NO: 84854 - DNA, 25 bp, SARS Virus
tttttgatcgggtcccaccaagata

SEQ ID NO: 84855 - DNA, 25 bp, SARS Virus
ttttgatcgggatccaccaagatat

SEQ ID NO: 84856 - DNA, 25 bp, SARS Virus
tttgatcgggactcaccaagatatc

SEQ ID NO: 84857 - DNA, 25 bp, SARS Virus
ttgatcgggacctaccaagatatcg

SEQ ID NO: 84858 - DNA, 25 bp, SARS Virus
tgatcgggaccctccaagatatcga

SEQ ID NO: 84859 - DNA, 25 bp, SARS Virus
gatcgggacccatcaagatatcgac

SEQ ID NO: 84860 - DNA, 25 bp, SARS Virus
atcgggacccactaagatatcgaca

SEQ ID NO: 84861 - DNA, 25 bp, SARS Virus
tcgggacccacctagatatcgacat

SEQ ID NO: 84862 - DNA, 25 bp, SARS Virus
cgggacccaccatgatatcgacatt

SEQ ID NO: 84863 - DNA, 25 bp, SARS Virus
gggacccaccaatatatcgacattt

SEQ ID NO: 84864 - DNA, 25 bp, SARS Virus
ggacccaccaagttatcgacatttc

SEQ ID NO: 84865 - DNA, 25 bp, SARS Virus
gacccaccaagatatcgacatttct

SEQ ID NO: 84866 - DNA, 25 bp, SARS Virus
acccaccaagatttcgacatttcta

SEQ ID NO: 84867 - DNA, 25 bp, SARS Virus
cccaccaagatatcgacatttctat

SEQ ID NO: 84868 - DNA, 25 bp, SARS Virus
ccaccaagatattgacatttctatt

SEQ ID NO: 84869 - DNA, 25 bp, SARS Virus
caccaagatatctacatttctattg

SEQ ID NO: 84870 - DNA, 25 bp, SARS Virus
accaagatatcgtcatttctattgt

SEQ ID NO: 84871 - DNA, 25 bp, SARS Virus
ccaagatatcgatatttctattgtc

SEQ ID NO: 84872 - DNA, 25 bp, SARS Virus
caagatatcgacttttctattgtct

SEQ ID NO: 84873 - DNA, 25 bp, SARS Virus
aagatatcgacatttctattgtctc

SEQ ID NO: 84874 - DNA, 25 bp, SARS Virus
agatatcgacatttctattgtctcg

SEQ ID NO: 84875 - DNA, 25 bp, SARS Virus
gatatcgacatttctattgtctcgt

SEQ ID NO: 84876 - DNA, 25 bp, SARS Virus
atatcgacatttttattgtctcgta

SEQ ID NO: 84877 - DNA, 25 bp, SARS Virus
tatcgacatttctattgtctcgtaa

SEQ ID NO: 84878 - DNA, 25 bp, SARS Virus
atcgacatttcttttgtctcgtaag

SEQ ID NO: 84879 - DNA, 25 bp, SARS Virus
tcgacatttctattgtctcgtaaga

SEQ ID NO: 84880 - DNA, 25 bp, SARS Virus
cgacatttctattgtctcgtaagaa

SEQ ID NO: 84881 - DNA, 25 bp, SARS Virus
gacatttctattttctcgtaagaac

SEQ ID NO: 84882 - DNA, 25 bp, SARS Virus
acatttctattgtctcgtaagaacc

SEQ ID NO: 84883 - DNA, 25 bp, SARS Virus
catttctattgtttcgtaagaacct

SEQ ID NO: 84884 - DNA, 25 bp, SARS Virus
atttctattgtctcgtaagaacctt

SEQ ID NO: 84885 - DNA, 25 bp, SARS Virus
tttctattgtcttgtaagaacctta

SEQ ID NO: 84886 - DNA, 25 bp, SARS Virus
ttctattgtctcttaagaaccttac

SEQ ID NO: 84887 - DNA, 25 bp, SARS Virus
tctattgtctcgtaagaaccttacg

SEQ ID NO: 84888 - DNA, 25 bp, SARS Virus
ctattgtctcgttagaaccttacga

SEQ ID NO: 84889 - DNA, 25 bp, SARS Virus
tattgtctcgtatgaaccttacgac

SEQ ID NO: 84890 - DNA, 25 bp, SARS Virus
attgtctcgtaataaccttacgact

SEQ ID NO: 84891 - DNA, 25 bp, SARS Virus
ttgtctcgtaagtaccttacgactg

SEQ ID NO: 84892 - DNA, 25 bp, SARS Virus
tgtctcgtaagatccttacgactgg

SEQ ID NO: 84893 - DNA, 25 bp, SARS Virus
gtctcgtaagaatcttacgactgga

SEQ ID NO: 84894 - DNA, 25 bp, SARS Virus
tctcgtaagaactttacgactggaa

SEQ ID NO: 84895 - DNA, 25 bp, SARS Virus
ctcgtaagaaccttacgactggaaa

SEQ ID NO: 84896 - DNA, 25 bp, SARS Virus
tcgtaagaaccttacgactggaaat

SEQ ID NO: 84897 - DNA, 25 bp, SARS Virus
cgtaagaacctttcgactggaaatg

SEQ ID NO: 84898 - DNA, 25 bp, SARS Virus
gtaagaaccttatgactggaaatgt

SEQ ID NO: 84899 - DNA, 25 bp, SARS Virus
taagaaccttactactggaaatgtt

SEQ ID NO: 84900 - DNA, 25 bp, SARS Virus
aagaaccttacgtctggaaatgttc

SEQ ID NO: 84901 - DNA, 25 bp, SARS Virus
agaaccttacgattggaaatgttcg

SEQ ID NO: 84902 - DNA, 25 bp, SARS Virus
gaaccttacgactggaaatgttcga

SEQ ID NO: 84903 - DNA, 25 bp, SARS Virus
aaccttacgacttgaaatgttcgaa

SEQ ID NO: 84904 - DNA, 25 bp, SARS Virus
accttacgactgtaaatgttcgaat

SEQ ID NO: 84905 - DNA, 25 bp, SARS Virus
ccttacgactggtaatgttcgaata

SEQ ID NO: 84906 - DNA, 25 bp, SARS Virus
cttacgactggatatgttcgaatac

SEQ ID NO: 84907 - DNA, 25 bp, SARS Virus
ttacgactggaattgttcgaatacc

SEQ ID NO: 84908 - DNA, 25 bp, SARS Virus
tacgactggaaatgttcgaataccc

SEQ ID NO: 84909 - DNA, 25 bp, SARS Virus
acgactggaaattttcgaatacccg

SEQ ID NO: 84910 - DNA, 25 bp, SARS Virus
cgactggaaatgttcgaatacccgg

SEQ ID NO: 84911 - DNA, 25 bp, SARS Virus
gactggaaatgttcgaatacccggt

SEQ ID NO: 84912 - DNA, 25 bp, SARS Virus
actggaaatgtttgaatacccggta

SEQ ID NO: 84913 - DNA, 25 bp, SARS Virus
ctggaaatgttctaatacccggtaa

SEQ ID NO: 84914 - DNA, 25 bp, SARS Virus
tggaaatgttcgtatacccggtaaa

SEQ ID NO: 84915 - DNA, 25 bp, SARS Virus
ggaaatgttcgattacccggtaaag

SEQ ID NO: 84916 - DNA, 25 bp, SARS Virus
gaaatgttcgaatacccggtaaaga

SEQ ID NO: 84917 - DNA, 25 bp, SARS Virus
aaatgttcgaattcccggtaaagag

SEQ ID NO: 84918 - DNA, 25 bp, SARS Virus
aatgttcgaatatccggtaaagagt

SEQ ID NO: 84919 - DNA, 25 bp, SARS Virus
atgttcgaatactcggtaaagagta

SEQ ID NO: 84920 - DNA, 25 bp, SARS Virus
tgttcgaatacctggtaaagagtac

SEQ ID NO: 84921 - DNA, 25 bp, SARS Virus
gttcgaataccctgtaaagagtacc

SEQ ID NO: 84922 - DNA, 25 bp, SARS Virus
ttcgaatacccgttaaagagtacca

SEQ ID NO: 84923 - DNA, 25 bp, SARS Virus
tcgaatacccggtaaagagtaccac

SEQ ID NO: 84924 - DNA, 25 bp, SARS Virus
cgaatacccggttaagagtaccacc

SEQ ID NO: 84925 - DNA, 25 bp, SARS Virus
gaatacccggtatagagtaccacct

SEQ ID NO: 84926 - DNA, 25 bp, SARS Virus
aatacccggtaatgagtaccacctg

SEQ ID NO: 84927 - DNA, 25 bp, SARS Virus
atacccggtaaatagtaccacctgt

SEQ ID NO: 84928 - DNA, 25 bp, SARS Virus
tacccggtaaagtgtaccacctgtc

SEQ ID NO: 84929 - DNA, 25 bp, SARS Virus
acccggtaaagattaccacctgtcg

SEQ ID NO: 84930 - DNA, 25 bp, SARS Virus
cccggtaaagagtaccacctgtcga

SEQ ID NO: 84931 - DNA, 25 bp, SARS Virus
ccggtaaagagttccacctgtcgaa

SEQ ID NO: 84932 - DNA, 25 bp, SARS Virus
cggtaaagagtatcacctgtcgaaa

SEQ ID NO: 84933 - DNA, 25 bp, SARS Virus
ggtaaagagtactacctgtcgaaaa

SEQ ID NO: 84934 - DNA, 25 bp, SARS Virus
gtaaagagtacctcctgtcgaaaac

SEQ ID NO: 84935 - DNA, 25 bp, SARS Virus
taaagagtaccatctgtcgaaaaca

SEQ ID NO: 84936 - DNA, 25 bp, SARS Virus
aaagagtaccacttgtcgaaaacaa

SEQ ID NO: 84937 - DNA, 25 bp, SARS Virus
aagagtaccacctgtcgaaaacaat

SEQ ID NO: 84938 - DNA, 25 bp, SARS Virus
agagtaccacctttcgaaaacaatg

SEQ ID NO: 84939 - DNA, 25 bp, SARS Virus
gagtaccacctgtcgaaaacaatgt

SEQ ID NO: 84940 - DNA, 25 bp, SARS Virus
agtaccacctgttgaaaacaatgtt

SEQ ID NO: 84941 - DNA, 25 bp, SARS Virus
gtaccacctgtctaaaacaatgttt

SEQ ID NO: 84942 - DNA, 25 bp, SARS Virus
taccacctgtcgtaaacaatgttta

SEQ ID NO: 84943 - DNA, 25 bp, SARS Virus
accacctgtcgataacaatgtttac

SEQ ID NO: 84944 - DNA, 25 bp, SARS Virus
ccacctgtcgaatacaatgtttaca

SEQ ID NO: 84945 - DNA, 25 bp, SARS Virus
cacctgtcgaaatcaatgtttacat

SEQ ID NO: 84946 - DNA, 25 bp, SARS Virus
acctgtcgaaaataatgtttacatt

SEQ ID NO: 84947 - DNA, 25 bp, SARS Virus
cctgtcgaaaactatgtttacattt

SEQ ID NO: 84948 - DNA, 25 bp, SARS Virus
ctgtcgaaaacattgtttacattta

SEQ ID NO: 84949 - DNA, 25 bp, SARS Virus
tgtcgaaaacaatgtttacatttac

SEQ ID NO: 84950 - DNA, 25 bp, SARS Virus
gtcgaaaacaatttttacatttacg

SEQ ID NO: 84951 - DNA, 25 bp, SARS Virus
tcgaaaacaatgtttacatttacgt

SEQ ID NO: 84952 - DNA, 25 bp, SARS Virus
cgaaaacaatgtttacatttacgta

SEQ ID NO: 84953 - DNA, 25 bp, SARS Virus
gaaaacaatgtttacatttacgtag

SEQ ID NO: 84954 - DNA, 25 bp, SARS Virus
aaaacaatgttttcatttacgtagt

SEQ ID NO: 84955 - DNA, 25 bp, SARS Virus
aaacaatgtttatatttacgtagta

SEQ ID NO: 84956 - DNA, 25 bp, SARS Virus
aacaatgtttacttttacgtagtag

SEQ ID NO: 84957 - DNA, 25 bp, SARS Virus
acaatgtttacatttacgtagtagt

SEQ ID NO: 84958 - DNA, 25 bp, SARS Virus
caatgtttacatttacgtagtagta

SEQ ID NO: 84959 - DNA, 25 bp, SARS Virus
aatgtttacatttacgtagtagtag

SEQ ID NO: 84960 - DNA, 25 bp, SARS Virus
atgtttacattttcgtagtagtagc

SEQ ID NO: 84961 - DNA, 25 bp, SARS Virus
tgtttacatttatgtagtagtagcc

SEQ ID NO: 84962 - DNA, 25 bp, SARS Virus
gtttacatttacttagtagtagcct

SEQ ID NO: 84963 - DNA, 25 bp, SARS Virus
tttacatttacgtagtagtagcctt

SEQ ID NO: 84964 - DNA, 25 bp, SARS Virus
ttacatttacgttgtagtagccttc

SEQ ID NO: 84965 - DNA, 25 bp, SARS Virus
tacatttacgtattagtagccttcg

SEQ ID NO: 84966 - DNA, 25 bp, SARS Virus
acatttacgtagtagtagccttcgt

SEQ ID NO: 84967 - DNA, 25 bp, SARS Virus
catttacgtagttgtagccttcgta

SEQ ID NO: 84968 - DNA, 25 bp, SARS Virus
atttacgtagtattagccttcgtaa

SEQ ID NO: 84969 - DNA, 25 bp, SARS Virus
tttacgtagtagtagccttcgtaaa

SEQ ID NO: 84970 - DNA, 25 bp, SARS Virus
ttacgtagtagttgccttcgtaaaa

SEQ ID NO: 84971 - DNA, 25 bp, SARS Virus
tacgtagtagtatccttcgtaaaaa

SEQ ID NO: 84972 - DNA, 25 bp, SARS Virus
acgtagtagtagtcttcgtaaaaat

SEQ ID NO: 84973 - DNA, 25 bp, SARS Virus
cgtagtagtagctttcgtaaaaatt

SEQ ID NO: 84974 - DNA, 25 bp, SARS Virus
gtagtagtagccttcgtaaaaatta

SEQ ID NO: 84975 - DNA, 25 bp, SARS Virus
tagtagtagccttcgtaaaaattaa

SEQ ID NO: 84976 - DNA, 25 bp, SARS Virus
agtagtagcctttgtaaaaattaac

SEQ ID NO: 84977 - DNA, 25 bp, SARS Virus
gtagtagccttcttaaaaattaacc

SEQ ID NO: 84978 - DNA, 25 bp, SARS Virus
tagtagccttcgtaaaaattaaccc

SEQ ID NO: 84979 - DNA, 25 bp, SARS Virus
agtagccttcgttaaaattaacccc

SEQ ID NO: 84980 - DNA, 25 bp, SARS Virus
gtagccttcgtataaattaaccccg

SEQ ID NO: 84981 - DNA, 25 bp, SARS Virus
tagccttcgtaataattaaccccga

SEQ ID NO: 84982 - DNA, 25 bp, SARS Virus
agccttcgtaaatattaaccccgat

SEQ ID NO: 84983 - DNA, 25 bp, SARS Virus
gccttcgtaaaatttaaccccgatt

SEQ ID NO: 84984 - DNA, 25 bp, SARS Virus
ccttcgtaaaaattaaccccgattg

SEQ ID NO: 84985 - DNA, 25 bp, SARS Virus
cttcgtaaaaattaaccccgattga

SEQ ID NO: 84986 - DNA, 25 bp, SARS Virus
ttcgtaaaaatttaccccgattgat

SEQ ID NO: 84987 - DNA, 25 bp, SARS Virus
tcgtaaaaattatccccgattgata

SEQ ID NO: 84988 - DNA, 25 bp, SARS Virus
cgtaaaaattaatcccgattgatag

SEQ ID NO: 84989 - DNA, 25 bp, SARS Virus
gtaaaaattaactccgattgataga

SEQ ID NO: 84990 - DNA, 25 bp, SARS Virus
taaaaattaacctcgattgatagaa

SEQ ID NO: 84991 - DNA, 25 bp, SARS Virus
aaaaattaaccctgattgatagaac

SEQ ID NO: 84992 - DNA, 25 bp, SARS Virus
aaaattaacccctattgatagaacc

SEQ ID NO: 84993 - DNA, 25 bp, SARS Virus
aaattaaccccgtttgatagaaccg

SEQ ID NO: 84994 - DNA, 25 bp, SARS Virus
aattaaccccgattgatagaaccgt

SEQ ID NO: 84995 - DNA, 25 bp, SARS Virus
attaaccccgattgatagaaccgtt

SEQ ID NO: 84996 - DNA, 25 bp, SARS Virus
ttaaccccgatttatagaaccgttc

SEQ ID NO: 84997 - DNA, 25 bp, SARS Virus
taaccccgattgttagaaccgttcg

SEQ ID NO: 84998 - DNA, 25 bp, SARS Virus
aaccccgattgatagaaccgttcgg

SEQ ID NO: 84999 - DNA, 25 bp, SARS Virus
accccgattgattgaaccgttcggc

SEQ ID NO: 85000 - DNA, 25 bp, SARS Virus
ccccgattgatataaccgttcggct

SEQ ID NO: 85001 - DNA, 25 bp, SARS Virus
cccgattgatagtaccgttcggctt

SEQ ID NO: 85002 - DNA, 25 bp, SARS Virus
ccgattgatagatccgttcggcttc

SEQ ID NO: 85003 - DNA, 25 bp, SARS Virus
cgattgatagaatcgttcggcttcc

SEQ ID NO: 85004 - DNA, 25 bp, SARS Virus
gattgatagaactgttcggcttcct

SEQ ID NO: 85005 - DNA, 25 bp, SARS Virus
attgatagaacctttcggcttcctt

SEQ ID NO: 85006 - DNA, 25 bp, SARS Virus
ttgatagaaccgttcggcttccttg

SEQ ID NO: 85007 - DNA, 25 bp, SARS Virus
tgatagaaccgttcggcttccttgt

SEQ ID NO: 85008 - DNA, 25 bp, SARS Virus
gatagaaccgtttggcttccttgtt

SEQ ID NO: 85009 - DNA, 25 bp, SARS Virus
atagaaccgttctgcttccttgttt

SEQ ID NO: 85010 - DNA, 25 bp, SARS Virus
tagaaccgttcgtcttccttgttta

SEQ ID NO: 85011 - DNA, 25 bp, SARS Virus
agaaccgttcggtttccttgtttaa

SEQ ID NO: 85012 - DNA, 25 bp, SARS Virus
gaaccgttcggcttccttgtttaac

SEQ ID NO: 85013 - DNA, 25 bp, SARS Virus
aaccgttcggcttccttgtttaact

SEQ ID NO: 85014 - DNA, 25 bp, SARS Virus
accgttcggctttcttgtttaacta

SEQ ID NO: 85015 - DNA, 25 bp, SARS Virus
ccgttcggcttctttgtttaactac

SEQ ID NO: 85016 - DNA, 25 bp, SARS Virus
cgttcggcttccttgtttaactacc

SEQ ID NO: 85017 - DNA, 25 bp, SARS Virus
gttcggcttccttgtttaactaccg

SEQ ID NO: 85018 - DNA, 25 bp, SARS Virus
ttcggcttccttttttaactaccga

SEQ ID NO: 85019 - DNA, 25 bp, SARS Virus
tcggcttccttgtttaactaccgat

SEQ ID NO: 85020 - DNA, 25 bp, SARS Virus
cggcttccttgtttaactaccgata

SEQ ID NO: 85021 - DNA, 25 bp, SARS Virus
ggcttccttgtttaactaccgatat

SEQ ID NO: 85022 - DNA, 25 bp, SARS Virus
gcttccttgttttactaccgatatg

SEQ ID NO: 85023 - DNA, 25 bp, SARS Virus
cttccttgtttatctaccgatatgg

SEQ ID NO: 85024 - DNA, 25 bp, SARS Virus
ttccttgtttaattaccgatatggt

SEQ ID NO: 85025 - DNA, 25 bp, SARS Virus
tccttgtttaactaccgatatggta

SEQ ID NO: 85026 - DNA, 25 bp, SARS Virus
ccttgtttaacttccgatatggtac

SEQ ID NO: 85027 - DNA, 25 bp, SARS Virus
cttgtttaactatcgatatggtacg

SEQ ID NO: 85028 - DNA, 25 bp, SARS Virus
ttgtttaactactgatatggtacgt

SEQ ID NO: 85029 - DNA, 25 bp, SARS Virus
tgtttaactacctatatggtacgta

SEQ ID NO: 85030 - DNA, 25 bp, SARS Virus
gtttaactaccgttatggtacgtac

SEQ ID NO: 85031 - DNA, 25 bp, SARS Virus
tttaactaccgatatggtacgtacg

SEQ ID NO: 85032 - DNA, 25 bp, SARS Virus
ttaactaccgatttggtacgtacga

SEQ ID NO: 85033 - DNA, 25 bp, SARS Virus
taactaccgatatggtacgtacgat

SEQ ID NO: 85034 - DNA, 25 bp, SARS Virus
aactaccgatattgtacgtacgatt

SEQ ID NO: 85035 - DNA, 25 bp, SARS Virus
actaccgatatgttacgtacgattg

SEQ ID NO: 85036 - DNA, 25 bp, SARS Virus
ctaccgatatggtacgtacgattga

SEQ ID NO: 85037 - DNA, 25 bp, SARS Virus
taccgatatggttcgtacgattgat

SEQ ID NO: 85038 - DNA, 25 bp, SARS Virus
accgatatggtatgtacgattgatg

SEQ ID NO: 85039 - DNA, 25 bp, SARS Virus
ccgatatggtacttacgattgatgt

SEQ ID NO: 85040 - DNA, 25 bp, SARS Virus
cgatatggtacgtacgattgatgta

SEQ ID NO: 85041 - DNA, 25 bp, SARS Virus
gatatggtacgtacgattgatgtaa

SEQ ID NO: 85042 - DNA, 25 bp, SARS Virus
atatggtacgtaagattgatgtaaa

SEQ ID NO: 85043 - DNA, 25 bp, SARS Virus
tatggtacgtacaattgatgtaaaa

SEQ ID NO: 85044 - DNA, 25 bp, SARS Virus
atggtacgtacgattgatgtaaaag

SEQ ID NO: 85045 - DNA, 25 bp, SARS Virus
tggtacgtacgaatgatgtaaaaga

SEQ ID NO: 85046 - DNA, 25 bp, SARS Virus
ggtacgtacgatagatgtaaaagac

SEQ ID NO: 85047 - DNA, 25 bp, SARS Virus
gtacgtacgattaatgtaaaagacc

SEQ ID NO: 85048 - DNA, 25 bp, SARS Virus
tacgtacgattgatgtaaaagacct

SEQ ID NO: 85049 - DNA, 25 bp, SARS Virus
acgtacgattgaagtaaaagacctc

SEQ ID NO: 85050 - DNA, 25 bp, SARS Virus
cgtacgattgatataaaagacctcc

SEQ ID NO: 85051 - DNA, 25 bp, SARS Virus
gtacgattgatgaaaaagacctcct

SEQ ID NO: 85052 - DNA, 25 bp, SARS Virus
tacgattgatgtaaaagacctcctt

SEQ ID NO: 85053 - DNA, 25 bp, SARS Virus
acgattgatgtaaaagacctccttg

SEQ ID NO: 85054 - DNA, 25 bp, SARS Virus
cgattgatgtaaaagacctccttgt

SEQ ID NO: 85055 - DNA, 25 bp, SARS Virus
gattgatgtaaaagacctccttgtg

SEQ ID NO: 85056 - DNA, 25 bp, SARS Virus
attgatgtaaaaaacctccttgtgt

SEQ ID NO: 85057 - DNA, 25 bp, SARS Virus
ttgatgtaaaagacctccttgtgtt

SEQ ID NO: 85058 - DNA, 25 bp, SARS Virus
tgatgtaaaagaactccttgtgttt

SEQ ID NO: 85059 - DNA, 25 bp, SARS Virus
gatgtaaaagacatccttgtgttta

SEQ ID NO: 85060 - DNA, 25 bp, SARS Virus
atgtaaaagaccaccttgtgtttag

SEQ ID NO: 85061 - DNA, 25 bp, SARS Virus
tgtaaaagacctacttgtgtttagg

SEQ ID NO: 85062 - DNA, 25 bp, SARS Virus
gtaaaagacctcattgtgtttagga

SEQ ID NO: 85063 - DNA, 25 bp, SARS Virus
taaaagacctccatgtgtttaggat

SEQ ID NO: 85064 - DNA, 25 bp, SARS Virus
aaaagacctcctagtgtttaggata

SEQ ID NO: 85065 - DNA, 25 bp, SARS Virus
aaagacctccttatgtttaggatag

SEQ ID NO: 85066 - DNA, 25 bp, SARS Virus
aagacctccttgagtttaggatagg

SEQ ID NO: 85067 - DNA, 25 bp, SARS Virus
agacctccttgtatttaggataggt

SEQ ID NO: 85068 - DNA, 25 bp, SARS Virus
gacctccttgtgattaggataggtc

SEQ ID NO: 85069 - DNA, 25 bp, SARS Virus
acctccttgtgtataggataggtca

SEQ ID NO: 85070 - DNA, 25 bp, SARS Virus
cctccttgtgttaaggataggtcaa

SEQ ID NO: 85071 - DNA, 25 bp, SARS Virus
ctccttgtgtttaggataggtcaac

SEQ ID NO: 85072 - DNA, 25 bp, SARS Virus
tccttgtgtttaagataggtcaaca

SEQ ID NO: 85073 - DNA, 25 bp, SARS Virus
ccttgtgtttagaataggtcaacag

SEQ ID NO: 85074 - DNA, 25 bp, SARS Virus
cttgtgtttaggataggtcaacaga

SEQ ID NO: 85075 - DNA, 25 bp, SARS Virus
ttgtgtttaggaaaggtcaacagaa

SEQ ID NO: 85076 - DNA, 25 bp, SARS Virus
tgtgtttaggataggtcaacagaag

SEQ ID NO: 85077 - DNA, 25 bp, SARS Virus
gtgtttaggataagtcaacagaagg

SEQ ID NO: 85078 - DNA, 25 bp, SARS Virus
tgtttaggatagatcaacagaagga

SEQ ID NO: 85079 - DNA, 25 bp, SARS Virus
gtttaggataggacaacagaaggat

SEQ ID NO: 85080 - DNA, 25 bp, SARS Virus
tttaggataggtaaacagaaggata

SEQ ID NO: 85081 - DNA, 25 bp, SARS Virus
ttaggataggtcaacagaaggataa

SEQ ID NO: 85082 - DNA, 25 bp, SARS Virus
taggataggtcaacagaaggataag

SEQ ID NO: 85083 - DNA, 25 bp, SARS Virus
aggataggtcaaaagaaggataagt

SEQ ID NO: 85084 - DNA, 25 bp, SARS Virus
ggataggtcaacagaaggataagtg

SEQ ID NO: 85085 - DNA, 25 bp, SARS Virus
gataggtcaacaaaaggataagtga

SEQ ID NO: 85086 - DNA, 25 bp, SARS Virus
ataggtcaacagaaggataagtgag

SEQ ID NO: 85087 - DNA, 25 bp, SARS Virus
taggtcaacagaaggataagtgaga

SEQ ID NO: 85088 - DNA, 25 bp, SARS Virus
aggtcaacagaaagataagtgagaa

SEQ ID NO: 85089 - DNA, 25 bp, SARS Virus
ggtcaacagaagaataagtgagaaa

SEQ ID NO: 85090 - DNA, 25 bp, SARS Virus
gtcaacagaaggataagtgagaaac

SEQ ID NO: 85091 - DNA, 25 bp, SARS Virus
tcaacagaaggaaaagtgagaaact

SEQ ID NO: 85092 - DNA, 25 bp, SARS Virus
caacagaaggataagtgagaaactg

SEQ ID NO: 85093 - DNA, 25 bp, SARS Virus
aacagaaggataagtgagaaactgt

SEQ ID NO: 85094 - DNA, 25 bp, SARS Virus
acagaaggataaatgagaaactgta

SEQ ID NO: 85095 - DNA, 25 bp, SARS Virus
cagaaggataagagagaaactgtac

SEQ ID NO: 85096 - DNA, 25 bp, SARS Virus
agaaggataagtaagaaactgtact

SEQ ID NO: 85097 - DNA, 25 bp, SARS Virus
gaaggataagtgagaaactgtactc

SEQ ID NO: 85098 - DNA, 25 bp, SARS Virus
aaggataagtgaaaaactgtactcg

SEQ ID NO: 85099 - DNA, 25 bp, SARS Virus
aggataagtgagaaactgtactcgt

SEQ ID NO: 85100 - DNA, 25 bp, SARS Virus
ggataagtgagaaactgtactcgtt

SEQ ID NO: 85101 - DNA, 25 bp, SARS Virus
gataagtgagaaactgtactcgttt

SEQ ID NO: 85102 - DNA, 25 bp, SARS Virus
ataagtgagaaaatgtactcgttta

SEQ ID NO: 85103 - DNA, 25 bp, SARS Virus
taagtgagaaacagtactcgtttaa

SEQ ID NO: 85104 - DNA, 25 bp, SARS Virus
aagtgagaaactatactcgtttaaa

SEQ ID NO: 85105 - DNA, 25 bp, SARS Virus
agtgagaaactgaactcgtttaaag

SEQ ID NO: 85106 - DNA, 25 bp, SARS Virus
gtgagaaactgtactcgtttaaagg

SEQ ID NO: 85107 - DNA, 25 bp, SARS Virus
tgagaaactgtaatcgtttaaagga

SEQ ID NO: 85108 - DNA, 25 bp, SARS Virus
gagaaactgtacacgtttaaaggag

SEQ ID NO: 85109 - DNA, 25 bp, SARS Virus
agaaactgtactagtttaaaggaga

SEQ ID NO: 85110 - DNA, 25 bp, SARS Virus
gaaactgtactcatttaaaggagaa

SEQ ID NO: 85111 - DNA, 25 bp, SARS Virus
aaactgtactcgattaaaggagaat

SEQ ID NO: 85112 - DNA, 25 bp, SARS Virus
aactgtactcgtataaaggagaatt

SEQ ID NO: 85113 - DNA, 25 bp, SARS Virus
actgtactcgttaaaaggagaattt

SEQ ID NO: 85114 - DNA, 25 bp, SARS Virus
ctgtactcgtttaaaggagaattta

SEQ ID NO: 85115 - DNA, 25 bp, SARS Virus
tgtactcgtttaaaggagaatttaa

SEQ ID NO: 85116 - DNA, 25 bp, SARS Virus
gtactcgtttaaaggagaatttaat

SEQ ID NO: 85117 - DNA, 25 bp, SARS Virus
tactcgtttaaaagagaatttaatt

SEQ ID NO: 85118 - DNA, 25 bp, SARS Virus
actcgtttaaagaagaatttaattc

SEQ ID NO: 85119 - DNA, 25 bp, SARS Virus
ctcgtttaaaggagaatttaattct

SEQ ID NO: 85120 - DNA, 25 bp, SARS Virus
tcgtttaaaggaaaatttaattctc

SEQ ID NO: 85121 - DNA, 25 bp, SARS Virus
cgtttaaaggagaatttaattctcc

SEQ ID NO: 85122 - DNA, 25 bp, SARS Virus
gtttaaaggagaatttaattctcct

SEQ ID NO: 85123 - DNA, 25 bp, SARS Virus
tttaaaggagaaattaattctcctt

SEQ ID NO: 85124 - DNA, 25 bp, SARS Virus
ttaaaggagaatataattctccttg

SEQ ID NO: 85125 - DNA, 25 bp, SARS Virus
taaaggagaattaaattctccttga

SEQ ID NO: 85126 - DNA, 25 bp, SARS Virus
aaaggagaatttaattctccttgac

SEQ ID NO: 85127 - DNA, 25 bp, SARS Virus
aaggagaatttaattctccttgacg

SEQ ID NO: 85128 - DNA, 25 bp, SARS Virus
aggagaatttaaatctccttgacga

SEQ ID NO: 85129 - DNA, 25 bp, SARS Virus
ggagaatttaatactccttgacgac

SEQ ID NO: 85130 - DNA, 25 bp, SARS Virus
gagaatttaattatccttgacgaca

SEQ ID NO: 85131 - DNA, 25 bp, SARS Virus
agaatttaattcaccttgacgacat

SEQ ID NO: 85132 - DNA, 25 bp, SARS Virus
gaatttaattctacttgacgacatt

SEQ ID NO: 85133 - DNA, 25 bp, SARS Virus
aatttaattctcattgacgacatta

SEQ ID NO: 85134 - DNA, 25 bp, SARS Virus
atttaattctccatgacgacattac

SEQ ID NO: 85135 - DNA, 25 bp, SARS Virus
tttaattctcctagacgacattaca

SEQ ID NO: 85136 - DNA, 25 bp, SARS Virus
ttaattctccttaacgacattacag

SEQ ID NO: 85137 - DNA, 25 bp, SARS Virus
taattctccttgacgacattacaga

SEQ ID NO: 85138 - DNA, 25 bp, SARS Virus
aattctccttgaagacattacagag

SEQ ID NO: 85139 - DNA, 25 bp, SARS Virus
attctccttgacaacattacagaga

SEQ ID NO: 85140 - DNA, 25 bp, SARS Virus
ttctccttgacgacattacagagaa

SEQ ID NO: 85141 - DNA, 25 bp, SARS Virus
tctccttgacgaaattacagagaat

SEQ ID NO: 85142 - DNA, 25 bp, SARS Virus
ctccttgacgacattacagagaatt

SEQ ID NO: 85143 - DNA, 25 bp, SARS Virus
tccttgacgacaatacagagaattc

SEQ ID NO: 85144 - DNA, 25 bp, SARS Virus
ccttgacgacataacagagaattcc

SEQ ID NO: 85145 - DNA, 25 bp, SARS Virus
cttgacgacattacagagaattcct

SEQ ID NO: 85146 - DNA, 25 bp, SARS Virus
ttgacgacattaaagagaattcctc

SEQ ID NO: 85147 - DNA, 25 bp, SARS Virus
tgacgacattacagagaattcctct

SEQ ID NO: 85148 - DNA, 25 bp, SARS Virus
gacgacattacaaagaattcctctt

SEQ ID NO: 85149 - DNA, 25 bp, SARS Virus
acgacattacagagaattcctctta

SEQ ID NO: 85150 - DNA, 25 bp, SARS Virus
cgacattacagaaaattcctcttag

SEQ ID NO: 85151 - DNA, 25 bp, SARS Virus
gacattacagagaattcctcttagt

SEQ ID NO: 85152 - DNA, 25 bp, SARS Virus
acattacagagaattcctcttagtt

SEQ ID NO: 85153 - DNA, 25 bp, SARS Virus
cattacagagaaatcctcttagttt

SEQ ID NO: 85154 - DNA, 25 bp, SARS Virus
attacagagaatacctcttagttta

SEQ ID NO: 85155 - DNA, 25 bp, SARS Virus
ttacagagaattactcttagtttag

SEQ ID NO: 85156 - DNA, 25 bp, SARS Virus
tacagagaattcatcttagtttagt

SEQ ID NO: 85157 - DNA, 25 bp, SARS Virus
acagagaattccacttagtttagtt

SEQ ID NO: 85158 - DNA, 25 bp, SARS Virus
cagagaattcctattagtttagtta

SEQ ID NO: 85159 - DNA, 25 bp, SARS Virus
agagaattcctcatagtttagttac

SEQ ID NO: 85160 - DNA, 25 bp, SARS Virus
gagaattcctctaagtttagttact

SEQ ID NO: 85161 - DNA, 25 bp, SARS Virus
agaattcctcttagtttagttacta

SEQ ID NO: 85162 - DNA, 25 bp, SARS Virus
gaattcctcttaatttagttactat

SEQ ID NO: 85163 - DNA, 25 bp, SARS Virus
aattcctcttagattagttactata

SEQ ID NO: 85164 - DNA, 25 bp, SARS Virus
attcctcttagtatagttactatac

SEQ ID NO: 85165 - DNA, 25 bp, SARS Virus
ttcctcttagttaagttactatact

SEQ ID NO: 85166 - DNA, 25 bp, SARS Virus
tcctcttagtttagttactatacta

SEQ ID NO: 85167 - DNA, 25 bp, SARS Virus
cctcttagtttaattactatactaa

SEQ ID NO: 85168 - DNA, 25 bp, SARS Virus
ctcttagtttagatactatactaaa

SEQ ID NO: 85169 - DNA, 25 bp, SARS Virus
tcttagtttagtaactatactaaat

SEQ ID NO: 85170 - DNA, 25 bp, SARS Virus
cttagtttagttactatactaaata

SEQ ID NO: 85171 - DNA, 25 bp, SARS Virus
ttagtttagttaatatactaaataa

SEQ ID NO: 85172 - DNA, 25 bp, SARS Virus
tagtttagttacaatactaaataag

SEQ ID NO: 85173 - DNA, 25 bp, SARS Virus
agtttagttactatactaaataaga

SEQ ID NO: 85174 - DNA, 25 bp, SARS Virus
gtttagttactaaactaaataagag

SEQ ID NO: 85175 - DNA, 25 bp, SARS Virus
tttagttactatactaaataagaga

SEQ ID NO: 85176 - DNA, 25 bp, SARS Virus
ttagttactataataaataagagaa

SEQ ID NO: 85177 - DNA, 25 bp, SARS Virus
tagttactatacaaaataagagaag

SEQ ID NO: 85178 - DNA, 25 bp, SARS Virus
agttactatactaaataagagaaga

SEQ ID NO: 85179 - DNA, 25 bp, SARS Virus
gttactatactaaataagagaagac

SEQ ID NO: 85180 - DNA, 25 bp, SARS Virus
ttactatactaaataagagaagacc

SEQ ID NO: 85181 - DNA, 25 bp, SARS Virus
tactatactaaaaaagagaagacct

SEQ ID NO: 85182 - DNA, 25 bp, SARS Virus
actatactaaataagagaagacctt

SEQ ID NO: 85183 - DNA, 25 bp, SARS Virus
ctatactaaataagagaagaccttt

SEQ ID NO: 85184 - DNA, 25 bp, SARS Virus
tatactaaataaaagaagacctttt

SEQ ID NO: 85185 - DNA, 25 bp, SARS Virus
atactaaataagagaagaccttttt

SEQ ID NO: 85186 - DNA, 25 bp, SARS Virus
tactaaataagaaaagacctttttc

SEQ ID NO: 85187 - DNA, 25 bp, SARS Virus
actaaataagagaagacctttttcc

SEQ ID NO: 85188 - DNA, 25 bp, SARS Virus
ctaaataagagaagacctttttcca

SEQ ID NO: 85189 - DNA, 25 bp, SARS Virus
taaataagagaaaacctttttccat

SEQ ID NO: 85190 - DNA, 25 bp, SARS Virus
aaataagagaagacctttttccatc

SEQ ID NO: 85191 - DNA, 25 bp, SARS Virus
aataagagaagaactttttccatcc

SEQ ID NO: 85192 - DNA, 25 bp, SARS Virus
ataagagaagacatttttccatccg

SEQ ID NO: 85193 - DNA, 25 bp, SARS Virus
taagagaagaccattttccatccga

SEQ ID NO: 85194 - DNA, 25 bp, SARS Virus
aagagaagacctatttccatccgaa

SEQ ID NO: 85195 - DNA, 25 bp, SARS Virus
agagaagaccttattccatccgaat

SEQ ID NO: 85196 - DNA, 25 bp, SARS Virus
gagaagacctttatccatccgaata

SEQ ID NO: 85197 - DNA, 25 bp, SARS Virus
agaagaccttttaccatccgaatag

SEQ ID NO: 85198 - DNA, 25 bp, SARS Virus
gaagacctttttacatccgaatagt

SEQ ID NO: 85199 - DNA, 25 bp, SARS Virus
aagacctttttcaatccgaatagta

SEQ ID NO: 85200 - DNA, 25 bp, SARS Virus
agacctttttccatccgaatagtaa

SEQ ID NO: 85201 - DNA, 25 bp, SARS Virus
gacctttttccaaccgaatagtaat

SEQ ID NO: 85202 - DNA, 25 bp, SARS Virus
acctttttccatacgaatagtaatc

SEQ ID NO: 85203 - DNA, 25 bp, SARS Virus
cctttttccatcagaatagtaatct

SEQ ID NO: 85204 - DNA, 25 bp, SARS Virus
ctttttccatccaaatagtaatctc

SEQ ID NO: 85205 - DNA, 25 bp, SARS Virus
tttttccatccgaatagtaatctct

SEQ ID NO: 85206 - DNA, 25 bp, SARS Virus
ttttccatccgaatagtaatctctt

SEQ ID NO: 85207 - DNA, 25 bp, SARS Virus
tttccatccgaaaagtaatctcttt

SEQ ID NO: 85208 - DNA, 25 bp, SARS Virus
ttccatccgaatagtaatctctttt

SEQ ID NO: 85209 - DNA, 25 bp, SARS Virus
tccatccgaataataatctcttttg

SEQ ID NO: 85210 - DNA, 25 bp, SARS Virus
ccatccgaatagaaatctcttttgt

SEQ ID NO: 85211 - DNA, 25 bp, SARS Virus
catccgaatagtaatctcttttgtt

SEQ ID NO: 85212 - DNA, 25 bp, SARS Virus
atccgaatagtaatctcttttgttg

SEQ ID NO: 85213 - DNA, 25 bp, SARS Virus
tccgaatagtaaactcttttgttgt

SEQ ID NO: 85214 - DNA, 25 bp, SARS Virus
ccgaatagtaatatcttttgttgtc

SEQ ID NO: 85215 - DNA, 25 bp, SARS Virus
cgaatagtaatcacttttgttgtct

SEQ ID NO: 85216 - DNA, 25 bp, SARS Virus
gaatagtaatctattttgttgtctc

SEQ ID NO: 85217 - DNA, 25 bp, SARS Virus
aatagtaatctcatttgttgtctca

SEQ ID NO: 85218 - DNA, 25 bp, SARS Virus
atagtaatctctattgttgtctcaa

SEQ ID NO: 85219 - DNA, 25 bp, SARS Virus
tagtaatctcttatgttgtctcaac

SEQ ID NO: 85220 - DNA, 25 bp, SARS Virus
agtaatctctttagttgtctcaaca

SEQ ID NO: 85221 - DNA, 25 bp, SARS Virus
gtaatctcttttattgtctcaacac

SEQ ID NO: 85222 - DNA, 25 bp, SARS Virus
taatctcttttgatgtctcaacacc

SEQ ID NO: 85223 - DNA, 25 bp, SARS Virus
aatctcttttgtagtctcaacacca

SEQ ID NO: 85224 - DNA, 25 bp, SARS Virus
atctcttttgttatctcaacaccaa

SEQ ID NO: 85225 - DNA, 25 bp, SARS Virus
tctcttttgttgactcaacaccaaa

SEQ ID NO: 85226 - DNA, 25 bp, SARS Virus
ctcttttgttgtatcaacaccaaag

SEQ ID NO: 85227 - DNA, 25 bp, SARS Virus
tcttttgttgtcacaacaccaaagt

SEQ ID NO: 85228 - DNA, 25 bp, SARS Virus
cttttgttgtctaaacaccaaagtt

SEQ ID NO: 85229 - DNA, 25 bp, SARS Virus
ttttgttgtctcaacaccaaagttc

SEQ ID NO: 85230 - DNA, 25 bp, SARS Virus
tttgttgtctcaacaccaaagttca

SEQ ID NO: 85231 - DNA, 25 bp, SARS Virus
ttgttgtctcaaaaccaaagttcac

SEQ ID NO: 85232 - DNA, 25 bp, SARS Virus
tgttgtctcaacaccaaagttcact

SEQ ID NO: 85233 - DNA, 25 bp, SARS Virus
gttgtctcaacaacaaagttcacta

SEQ ID NO: 85234 - DNA, 25 bp, SARS Virus
ttgtctcaacacaaaagttcactat

SEQ ID NO: 85235 - DNA, 25 bp, SARS Virus
tgtctcaacaccaaagttcactata

SEQ ID NO: 85236 - DNA, 25 bp, SARS Virus
gtctcaacaccaaagttcactataa

SEQ ID NO: 85237 - DNA, 25 bp, SARS Virus
tctcaacaccaaagttcactataag

SEQ ID NO: 85238 - DNA, 25 bp, SARS Virus
ctcaacaccaaaattcactataaga

SEQ ID NO: 85239 - DNA, 25 bp, SARS Virus
tcaacaccaaagatcactataagaa

SEQ ID NO: 85240 - DNA, 25 bp, SARS Virus
caacaccaaagtacactataagaac

SEQ ID NO: 85241 - DNA, 25 bp, SARS Virus
aacaccaaagttaactataagaaca

SEQ ID NO: 85242 - DNA, 25 bp, SARS Virus
acaccaaagttcactataagaacaa

SEQ ID NO: 85243 - DNA, 25 bp, SARS Virus
caccaaagttcaatataagaacaat

SEQ ID NO: 85244 - DNA, 25 bp, SARS Virus
accaaagttcacaataagaacaatt

SEQ ID NO: 85245 - DNA, 25 bp, SARS Virus
ccaaagttcactataagaacaattg

SEQ ID NO: 85246 - DNA, 25 bp, SARS Virus
caaagttcactaaaagaacaattgt

SEQ ID NO: 85247 - DNA, 25 bp, SARS Virus
aaagttcactataagaacaattgtt

SEQ ID NO: 85248 - DNA, 25 bp, SARS Virus
aagttcactataagaacaattgttg

SEQ ID NO: 85249 - DNA, 25 bp, SARS Virus
agttcactataaaaacaattgttga

SEQ ID NO: 85250 - DNA, 25 bp, SARS Virus
gttcactataagaacaattgttgat

SEQ ID NO: 85251 - DNA, 25 bp, SARS Virus
ttcactataagaacaattgttgatt

SEQ ID NO: 85252 - DNA, 25 bp, SARS Virus
tcactataagaaaaattgttgattt

SEQ ID NO: 85253 - DNA, 25 bp, SARS Virus
cactataagaacaattgttgatttg

SEQ ID NO: 85254 - DNA, 25 bp, SARS Virus
actataagaacaattgttgatttgc

SEQ ID NO: 85255 - DNA, 25 bp, SARS Virus
ctataagaacaaatgttgatttgct

SEQ ID NO: 85256 - DNA, 25 bp, SARS Virus
tataagaacaatagttgatttgctt

SEQ ID NO: 85257 - DNA, 25 bp, SARS Virus
ataagaacaattattgatttgcttg

SEQ ID NO: 85258 - DNA, 25 bp, SARS Virus
taagaacaattgatgatttgcttgt

SEQ ID NO: 85259 - DNA, 25 bp, SARS Virus
aagaacaattgtagatttgcttgta

SEQ ID NO: 85260 - DNA, 25 bp, SARS Virus
agaacaattgttaatttgcttgtac

SEQ ID NO: 85261 - DNA, 25 bp, SARS Virus
gaacaattgttgatttgcttgtaca

SEQ ID NO: 85262 - DNA, 25 bp, SARS Virus
aacaattgttgaattgcttgtacaa

SEQ ID NO: 85263 - DNA, 25 bp, SARS Virus
acaattgttgatatgcttgtacaaa

SEQ ID NO: 85264 - DNA, 25 bp, SARS Virus
caattgttgattagcttgtacaaat

SEQ ID NO: 85265 - DNA, 25 bp, SARS Virus
aattgttgatttacttgtacaaata

SEQ ID NO: 85266 - DNA, 25 bp, SARS Virus
attgttgatttgattgtacaaataa

SEQ ID NO: 85267 - DNA, 25 bp, SARS Virus
ttgttgatttgcatgtacaaataaa

SEQ ID NO: 85268 - DNA, 25 bp, SARS Virus
tgttgatttgctagtacaaataaaa

SEQ ID NO: 85269 - DNA, 25 bp, SARS Virus
gttgatttgcttatacaaataaaag

SEQ ID NO: 85270 - DNA, 25 bp, SARS Virus
ttgatttgcttgaacaaataaaaga

SEQ ID NO: 85271 - DNA, 25 bp, SARS Virus
tgatttgcttgtacaaataaaagaa

SEQ ID NO: 85272 - DNA, 25 bp, SARS Virus
gatttgcttgtaaaaataaaagaat

SEQ ID NO: 85273 - DNA, 25 bp, SARS Virus
atttgcttgtacaaataaaagaata

SEQ ID NO: 85274 - DNA, 25 bp, SARS Virus
tttgcttgtacaaataaaagaataa

SEQ ID NO: 85275 - DNA, 25 bp, SARS Virus
ttgcttgtacaaataaaagaataat

SEQ ID NO: 85276 - DNA, 25 bp, SARS Virus
tgcttgtacaaaaaaaagaataata

SEQ ID NO: 85277 - DNA, 25 bp, SARS Virus
gcttgtacaaataaaagaataataa

SEQ ID NO: 85278 - DNA, 25 bp, SARS Virus
cttgtacaaataaaagaataataaa

SEQ ID NO: 85279 - DNA, 25 bp, SARS Virus
ttgtacaaataaaagaataataaag

SEQ ID NO: 85280 - DNA, 25 bp, SARS Virus
tgtacaaataaaagaataataaaga

SEQ ID NO: 85281 - DNA, 25 bp, SARS Virus
gtacaaataaaaaaataataaagaa

SEQ ID NO: 85282 - DNA, 25 bp, SARS Virus
tacaaataaaagaataataaagaat

SEQ ID NO: 85283 - DNA, 25 bp, SARS Virus
acaaataaaagaataataaagaatg

SEQ ID NO: 85284 - DNA, 25 bp, SARS Virus
caaataaaagaaaaataaagaatga

SEQ ID NO: 85285 - DNA, 25 bp, SARS Virus
aaataaaagaataataaagaatgag

SEQ ID NO: 85286 - DNA, 25 bp, SARS Virus
aataaaagaataataaagaatgaga

SEQ ID NO: 85287 - DNA, 25 bp, SARS Virus
ataaaagaataaaaaagaatgagag

SEQ ID NO: 85288 - DNA, 25 bp, SARS Virus
taaaagaataataaagaatgagagt

SEQ ID NO: 85289 - DNA, 25 bp, SARS Virus
aaaagaataataaagaatgagagtg

SEQ ID NO: 85290 - DNA, 25 bp, SARS Virus
aaagaataataaagaatgagagtga

SEQ ID NO: 85291 - DNA, 25 bp, SARS Virus
aagaataataaaaaatgagagtgat

SEQ ID NO: 85292 - DNA, 25 bp, SARS Virus
agaataataaagaatgagagtgatc

SEQ ID NO: 85293 - DNA, 25 bp, SARS Virus
gaataataaagaatgagagtgatca

SEQ ID NO: 85294 - DNA, 25 bp, SARS Virus
aataataaagaaagagagtgatcac

SEQ ID NO: 85295 - DNA, 25 bp, SARS Virus
ataataaagaataagagtgatcacc

SEQ ID NO: 85296 - DNA, 25 bp, SARS Virus
taataaagaatgagagtgatcacca

SEQ ID NO: 85297 - DNA, 25 bp, SARS Virus
aataaagaatgaaagtgatcaccat

SEQ ID NO: 85298 - DNA, 25 bp, SARS Virus
ataaagaatgagagtgatcaccatc

SEQ ID NO: 85299 - DNA, 25 bp, SARS Virus
taaagaatgagaatgatcaccatca

SEQ ID NO: 85300 - DNA, 25 bp, SARS Virus
aaagaatgagagagatcaccatcac

SEQ ID NO: 85301 - DNA, 25 bp, SARS Virus
aagaatgagagtaatcaccatcact

SEQ ID NO: 85302 - DNA, 25 bp, SARS Virus
agaatgagagtgatcaccatcactg

SEQ ID NO: 85303 - DNA, 25 bp, SARS Virus
gaatgagagtgaacaccatcactgg

SEQ ID NO: 85304 - DNA, 25 bp, SARS Virus
aatgagagtgataaccatcactgga

SEQ ID NO: 85305 - DNA, 25 bp, SARS Virus
atgagagtgatcaccatcactggaa

SEQ ID NO: 85306 - DNA, 25 bp, SARS Virus
tgagagtgatcaacatcactggaac

SEQ ID NO: 85307 - DNA, 25 bp, SARS Virus
gagagtgatcacaatcactggaact

SEQ ID NO: 85308 - DNA, 25 bp, SARS Virus
agagtgatcaccatcactggaactg

SEQ ID NO: 85309 - DNA, 25 bp, SARS Virus
gagtgatcaccaacactggaactgg

SEQ ID NO: 85310 - DNA, 25 bp, SARS Virus
agtgatcaccataactggaactggc

SEQ ID NO: 85311 - DNA, 25 bp, SARS Virus
gtgatcaccatcactggaactggcc

SEQ ID NO: 85312 - DNA, 25 bp, SARS Virus
tgatcaccatcaatggaactggcca

SEQ ID NO: 85313 - DNA, 25 bp, SARS Virus
gatcaccatcacaggaactggccac

SEQ ID NO: 85314 - DNA, 25 bp, SARS Virus
atcaccatcactagaactggccacg

SEQ ID NO: 85315 - DNA, 25 bp, SARS Virus
tcaccatcactgaaactggccacgt

SEQ ID NO: 85316 - DNA, 25 bp, SARS Virus
caccatcactggaactggccacgtg

SEQ ID NO: 85317 - DNA, 25 bp, SARS Virus
accatcactggaactggccacgtgg

SEQ ID NO: 85318 - DNA, 25 bp, SARS Virus
ccatcactggaaatggccacgtggt

SEQ ID NO: 85319 - DNA, 25 bp, SARS Virus
catcactggaacaggccacgtggtg

SEQ ID NO: 85320 - DNA, 25 bp, SARS Virus
atcactggaactagccacgtggtga

SEQ ID NO: 85321 - DNA, 25 bp, SARS Virus
tcactggaactgaccacgtggtgaa

SEQ ID NO: 85322 - DNA, 25 bp, SARS Virus
cactggaactggacacgtggtgaaa

SEQ ID NO: 85323 - DNA, 25 bp, SARS Virus
actggaactggcaacgtggtgaaaa

SEQ ID NO: 85324 - DNA, 25 bp, SARS Virus
ctggaactggccacgtggtgaaaac

SEQ ID NO: 85325 - DNA, 25 bp, SARS Virus
tggaactggccaagtggtgaaaact

SEQ ID NO: 85326 - DNA, 25 bp, SARS Virus
ggaactggccacatggtgaaaacta

SEQ ID NO: 85327 - DNA, 25 bp, SARS Virus
gaactggccacgaggtgaaaactac

SEQ ID NO: 85328 - DNA, 25 bp, SARS Virus
aactggccacgtagtgaaaactact

SEQ ID NO: 85329 - DNA, 25 bp, SARS Virus
actggccacgtgatgaaaactacta

SEQ ID NO: 85330 - DNA, 25 bp, SARS Virus
ctggccacgtggagaaaactactac

SEQ ID NO: 85331 - DNA, 25 bp, SARS Virus
tggccacgtggtaaaaactactaca

SEQ ID NO: 85332 - DNA, 25 bp, SARS Virus
ggccacgtggtgaaaactactacaa

SEQ ID NO: 85333 - DNA, 25 bp, SARS Virus
gccacgtggtgaaaactactacaag

SEQ ID NO: 85334 - DNA, 25 bp, SARS Virus
ccacgtggtgaaaactactacaagt

SEQ ID NO: 85335 - DNA, 25 bp, SARS Virus
cacgtggtgaaaactactacaagtt

SEQ ID NO: 85336 - DNA, 25 bp, SARS Virus
acgtggtgaaaaatactacaagttc

SEQ ID NO: 85337 - DNA, 25 bp, SARS Virus
cgtggtgaaaacaactacaagttcg

SEQ ID NO: 85338 - DNA, 25 bp, SARS Virus
gtggtgaaaactactacaagttcga

SEQ ID NO: 85339 - DNA, 25 bp, SARS Virus
tggtgaaaactaatacaagttcgag

SEQ ID NO: 85340 - DNA, 25 bp, SARS Virus
ggtgaaaactacaacaagttcgagg

SEQ ID NO: 85341 - DNA, 25 bp, SARS Virus
gtgaaaactactacaagttcgagga

SEQ ID NO: 85342 - DNA, 25 bp, SARS Virus
tgaaaactactaaaagttcgaggat

SEQ ID NO: 85343 - DNA, 25 bp, SARS Virus
gaaaactactacaagttcgaggatt

SEQ ID NO: 85344 - DNA, 25 bp, SARS Virus
aaaactactacaagttcgaggatta

SEQ ID NO: 85345 - DNA, 25 bp, SARS Virus
aaactactacaaattcgaggattaa

SEQ ID NO: 85346 - DNA, 25 bp, SARS Virus
aactactacaagatcgaggattaat

SEQ ID NO: 85347 - DNA, 25 bp, SARS Virus
actactacaagtacgaggattaatg

SEQ ID NO: 85348 - DNA, 25 bp, SARS Virus
ctactacaagttagaggattaatgt

SEQ ID NO: 85349 - DNA, 25 bp, SARS Virus
tactacaagttcaaggattaatgtg

SEQ ID NO: 85350 - DNA, 25 bp, SARS Virus
actacaagttcgaggattaatgtga

SEQ ID NO: 85351 - DNA, 25 bp, SARS Virus
ctacaagttcgaagattaatgtgag

SEQ ID NO: 85352 - DNA, 25 bp, SARS Virus
tacaagttcgagaattaatgtgagt

SEQ ID NO: 85353 - DNA, 25 bp, SARS Virus
acaagttcgaggattaatgtgagtt

SEQ ID NO: 85354 - DNA, 25 bp, SARS Virus
caagttcgaggaataatgtgagttg

SEQ ID NO: 85355 - DNA, 25 bp, SARS Virus
aagttcgaggataaatgtgagttgt

SEQ ID NO: 85356 - DNA, 25 bp, SARS Virus
agttcgaggattaatgtgagttgta

SEQ ID NO: 85357 - DNA, 25 bp, SARS Virus
gttcgaggattaatgtgagttgtat

SEQ ID NO: 85358 - DNA, 25 bp, SARS Virus
ttcgaggattaaagtgagttgtatg

SEQ ID NO: 85359 - DNA, 25 bp, SARS Virus
tcgaggattaatatgagttgtatga

SEQ ID NO: 85360 - DNA, 25 bp, SARS Virus
cgaggattaatgagagttgtatgaa

SEQ ID NO: 85361 - DNA, 25 bp, SARS Virus
gaggattaatgtaagttgtatgaag

SEQ ID NO: 85362 - DNA, 25 bp, SARS Virus
aggattaatgtgagttgtatgaagt

SEQ ID NO: 85363 - DNA, 25 bp, SARS Virus
ggattaatgtgaattgtatgaagta

SEQ ID NO: 85364 - DNA, 25 bp, SARS Virus
gattaatgtgagatgtatgaagtag

SEQ ID NO: 85365 - DNA, 25 bp, SARS Virus
attaatgtgagtagtatgaagtaga

SEQ ID NO: 85366 - DNA, 25 bp, SARS Virus
ttaatgtgagttatatgaagtagat

SEQ ID NO: 85367 - DNA, 25 bp, SARS Virus
taatgtgagttgaatgaagtagata

SEQ ID NO: 85368 - DNA, 25 bp, SARS Virus
aatgtgagttgtatgaagtagatac

SEQ ID NO: 85369 - DNA, 25 bp, SARS Virus
atgtgagttgtaagaagtagatact

SEQ ID NO: 85370 - DNA, 25 bp, SARS Virus
tgtgagttgtataaagtagatactc

SEQ ID NO: 85371 - DNA, 25 bp, SARS Virus
gtgagttgtatgaagtagatactcc

SEQ ID NO: 85372 - DNA, 25 bp, SARS Virus
tgagttgtatgaagtagatactccc

SEQ ID NO: 85373 - DNA, 25 bp, SARS Virus
gagttgtatgaaatagatactcccc

SEQ ID NO: 85374 - DNA, 25 bp, SARS Virus
agttgtatgaagaagatactccccc

SEQ ID NO: 85375 - DNA, 25 bp, SARS Virus
gttgtatgaagtagatactcccccc

SEQ ID NO: 85376 - DNA, 25 bp, SARS Virus
ttgtatgaagtaaatactcccccca

SEQ ID NO: 85377 - DNA, 25 bp, SARS Virus
tgtatgaagtagatactccccccaa

SEQ ID NO: 85378 - DNA, 25 bp, SARS Virus
gtatgaagtagaaactccccccaaa

SEQ ID NO: 85379 - DNA, 25 bp, SARS Virus
tatgaagtagatactccccccaaat

SEQ ID NO: 85380 - DNA, 25 bp, SARS Virus
atgaagtagataatccccccaaatg

SEQ ID NO: 85381 - DNA, 25 bp, SARS Virus
tgaagtagatacaccccccaaatga

SEQ ID NO: 85382 - DNA, 25 bp, SARS Virus
gaagtagatactacccccaaatgat

SEQ ID NO: 85383 - DNA, 25 bp, SARS Virus
aagtagatactcaccccaaatgata

SEQ ID NO: 85384 - DNA, 25 bp, SARS Virus
agtagatactccacccaaatgatag

SEQ ID NO: 85385 - DNA, 25 bp, SARS Virus
gtagatactcccaccaaatgatagg

SEQ ID NO: 85386 - DNA, 25 bp, SARS Virus
tagatactccccacaaatgatagga

SEQ ID NO: 85387 - DNA, 25 bp, SARS Virus
agatactcccccaaaatgataggac

SEQ ID NO: 85388 - DNA, 25 bp, SARS Virus
gatactccccccaaatgataggact

SEQ ID NO: 85389 - DNA, 25 bp, SARS Virus
atactccccccaaatgataggacta

SEQ ID NO: 85390 - DNA, 25 bp, SARS Virus
tactccccccaaatgataggactac

SEQ ID NO: 85391 - DNA, 25 bp, SARS Virus
actccccccaaaagataggactact

SEQ ID NO: 85392 - DNA, 25 bp, SARS Virus
ctccccccaaataataggactactt

SEQ ID NO: 85393 - DNA, 25 bp, SARS Virus
tccccccaaatgataggactacttt

SEQ ID NO: 85394 - DNA, 25 bp, SARS Virus
ccccccaaatgaaaggactacttta

SEQ ID NO: 85395 - DNA, 25 bp, SARS Virus
cccccaaatgataggactactttaa

SEQ ID NO: 85396 - DNA, 25 bp, SARS Virus
ccccaaatgataagactactttaaa

SEQ ID NO: 85397 - DNA, 25 bp, SARS Virus
cccaaatgatagaactactttaaaa

SEQ ID NO: 85398 - DNA, 25 bp, SARS Virus
ccaaatgataggactactttaaaaa

SEQ ID NO: 85399 - DNA, 25 bp, SARS Virus
caaatgataggaatactttaaaaat

SEQ ID NO: 85400 - DNA, 25 bp, SARS Virus
aaatgataggacaactttaaaaatc

SEQ ID NO: 85401 - DNA, 25 bp, SARS Virus
aatgataggactactttaaaaatct

SEQ ID NO: 85402 - DNA, 25 bp, SARS Virus
atgataggactaatttaaaaatcta

SEQ ID NO: 85403 - DNA, 25 bp, SARS Virus
tgataggactacattaaaaatctag

SEQ ID NO: 85404 - DNA, 25 bp, SARS Virus
gataggactactataaaaatctagt

SEQ ID NO: 85405 - DNA, 25 bp, SARS Virus
ataggactacttaaaaaatctagtc

SEQ ID NO: 85406 - DNA, 25 bp, SARS Virus
taggactactttaaaaatctagtct

SEQ ID NO: 85407 - DNA, 25 bp, SARS Virus
aggactactttaaaaatctagtctg

SEQ ID NO: 85408 - DNA, 25 bp, SARS Virus
ggactactttaaaaatctagtctgt

SEQ ID NO: 85409 - DNA, 25 bp, SARS Virus
gactactttaaaaatctagtctgtg

SEQ ID NO: 85410 - DNA, 25 bp, SARS Virus
actactttaaaaatctagtctgtga

SEQ ID NO: 85411 - DNA, 25 bp, SARS Virus
ctactttaaaaaactagtctgtgag

SEQ ID NO: 85412 - DNA, 25 bp, SARS Virus
tactttaaaaatatagtctgtgaga

SEQ ID NO: 85413 - DNA, 25 bp, SARS Virus
actttaaaaatcaagtctgtgagaa

SEQ ID NO: 85414 - DNA, 25 bp, SARS Virus
ctttaaaaatctagtctgtgagaaa

SEQ ID NO: 85415 - DNA, 25 bp, SARS Virus
tttaaaaatctaatctgtgagaaat

SEQ ID NO: 85416 - DNA, 25 bp, SARS Virus
ttaaaaatctagactgtgagaaata

SEQ ID NO: 85417 - DNA, 25 bp, SARS Virus
taaaaatctagtatgtgagaaataa

SEQ ID NO: 85418 - DNA, 25 bp, SARS Virus
aaaaatctagtcagtgagaaataaa

SEQ ID NO: 85419 - DNA, 25 bp, SARS Virus
aaaatctagtctatgagaaataaat

SEQ ID NO: 85420 - DNA, 25 bp, SARS Virus
aaatctagtctgagagaaataaatt

SEQ ID NO: 85421 - DNA, 25 bp, SARS Virus
aatctagtctgtaagaaataaattg

SEQ ID NO: 85422 - DNA, 25 bp, SARS Virus
atctagtctgtgagaaataaattga

SEQ ID NO: 85423 - DNA, 25 bp, SARS Virus
tctagtctgtgaaaaataaattgag

SEQ ID NO: 85424 - DNA, 25 bp, SARS Virus
ctagtctgtgagaaataaattgagt

SEQ ID NO: 85425 - DNA, 25 bp, SARS Virus
tagtctgtgagaaataaattgagtc

SEQ ID NO: 85426 - DNA, 25 bp, SARS Virus
agtctgtgagaaataaattgagtcc

SEQ ID NO: 85427 - DNA, 25 bp, SARS Virus
gtctgtgagaaaaaaattgagtcct

SEQ ID NO: 85428 - DNA, 25 bp, SARS Virus
tctgtgagaaataaattgagtccta

SEQ ID NO: 85429 - DNA, 25 bp, SARS Virus
ctgtgagaaataaattgagtcctaa

SEQ ID NO: 85430 - DNA, 25 bp, SARS Virus
tgtgagaaataaattgagtcctaaa

SEQ ID NO: 85431 - DNA, 25 bp, SARS Virus
gtgagaaataaaatgagtcctaaat

SEQ ID NO: 85432 - DNA, 25 bp, SARS Virus
tgagaaataaatagagtcctaaata

SEQ ID NO: 85433 - DNA, 25 bp, SARS Virus
gagaaataaattaagtcctaaataa

SEQ ID NO: 85434 - DNA, 25 bp, SARS Virus
agaaataaattgagtcctaaataaa

SEQ ID NO: 85435 - DNA, 25 bp, SARS Virus
gaaataaattgaatcctaaataaag

SEQ ID NO: 85436 - DNA, 25 bp, SARS Virus
aaataaattgagacctaaataaaga

SEQ ID NO: 85437 - DNA, 25 bp, SARS Virus
aataaattgagtactaaataaagaa

SEQ ID NO: 85438 - DNA, 25 bp, SARS Virus
ataaattgagtcataaataaagaag

SEQ ID NO: 85439 - DNA, 25 bp, SARS Virus
taaattgagtccaaaataaagaagg

SEQ ID NO: 85440 - DNA, 25 bp, SARS Virus
aaattgagtcctaaataaagaaggt

SEQ ID NO: 85441 - DNA, 25 bp, SARS Virus
aattgagtcctaaataaagaaggta

SEQ ID NO: 85442 - DNA, 25 bp, SARS Virus
attgagtcctaaataaagaaggtaa

SEQ ID NO: 85443 - DNA, 25 bp, SARS Virus
ttgagtcctaaaaaaagaaggtaaa

SEQ ID NO: 85444 - DNA, 25 bp, SARS Virus
tgagtcctaaataaagaaggtaaaa

SEQ ID NO: 85445 - DNA, 25 bp, SARS Virus
gagtcctaaataaagaaggtaaaat

SEQ ID NO: 85446 - DNA, 25 bp, SARS Virus
agtcctaaataaagaaggtaaaata

SEQ ID NO: 85447 - DNA, 25 bp, SARS Virus
gtcctaaataaaaaaggtaaaataa

SEQ ID NO: 85448 - DNA, 25 bp, SARS Virus
tcctaaataaagaaggtaaaataag

SEQ ID NO: 85449 - DNA, 25 bp, SARS Virus
cctaaataaagaaggtaaaataaga

SEQ ID NO: 85450 - DNA, 25 bp, SARS Virus
ctaaataaagaaagtaaaataagat

SEQ ID NO: 85451 - DNA, 25 bp, SARS Virus
taaataaagaagataaaataagatt

SEQ ID NO: 85452 - DNA, 25 bp, SARS Virus
aaataaagaaggaaaaataagatta

SEQ ID NO: 85453 - DNA, 25 bp, SARS Virus
aataaagaaggtaaaataagattac

SEQ ID NO: 85454 - DNA, 25 bp, SARS Virus
ataaagaaggtaaaataagattaca

SEQ ID NO: 85455 - DNA, 25 bp, SARS Virus
taaagaaggtaaaataagattacaa

SEQ ID NO: 85456 - DNA, 25 bp, SARS Virus
aaagaaggtaaaataagattacaat

SEQ ID NO: 85457 - DNA, 25 bp, SARS Virus
aagaaggtaaaaaaagattacaatg

SEQ ID NO: 85458 - DNA, 25 bp, SARS Virus
agaaggtaaaataagattacaatgt

SEQ ID NO: 85459 - DNA, 25 bp, SARS Virus
gaaggtaaaataagattacaatgtc

SEQ ID NO: 85460 - DNA, 25 bp, SARS Virus
aaggtaaaataaaattacaatgtcc

SEQ ID NO: 85461 - DNA, 25 bp, SARS Virus
aggtaaaataagattacaatgtccc

SEQ ID NO: 85462 - DNA, 25 bp, SARS Virus
ggtaaaataagaatacaatgtccca

SEQ ID NO: 85463 - DNA, 25 bp, SARS Virus
gtaaaataagataacaatgtcccaa

SEQ ID NO: 85464 - DNA, 25 bp, SARS Virus
taaaataagattacaatgtcccaaa

SEQ ID NO: 85465 - DNA, 25 bp, SARS Virus
aaaataagattaaaatgtcccaaag

SEQ ID NO: 85466 - DNA, 25 bp, SARS Virus
aaataagattacaatgtcccaaagt

SEQ ID NO: 85467 - DNA, 25 bp, SARS Virus
aataagattacaatgtcccaaagta

SEQ ID NO: 85468 - DNA, 25 bp, SARS Virus
ataagattacaaagtcccaaagtat

SEQ ID NO: 85469 - DNA, 25 bp, SARS Virus
taagattacaatatcccaaagtatg

SEQ ID NO: 85470 - DNA, 25 bp, SARS Virus
aagattacaatgacccaaagtatga

SEQ ID NO: 85471 - DNA, 25 bp, SARS Virus
agattacaatgtaccaaagtatgat

SEQ ID NO: 85472 - DNA, 25 bp, SARS Virus
gattacaatgtcacaaagtatgata

SEQ ID NO: 85473 - DNA, 25 bp, SARS Virus
attacaatgtccaaaagtatgataa

SEQ ID NO: 85474 - DNA, 25 bp, SARS Virus
ttacaatgtcccaaagtatgataat

SEQ ID NO: 85475 - DNA, 25 bp, SARS Virus
tacaatgtcccaaagtatgataatt

SEQ ID NO: 85476 - DNA, 25 bp, SARS Virus
acaatgtcccaaagtatgataatta

SEQ ID NO: 85477 - DNA, 25 bp, SARS Virus
caatgtcccaaaatatgataattag

SEQ ID NO: 85478 - DNA, 25 bp, SARS Virus
aatgtcccaaagaatgataattagt

SEQ ID NO: 85479 - DNA, 25 bp, SARS Virus
atgtcccaaagtatgataattagta

SEQ ID NO: 85480 - DNA, 25 bp, SARS Virus
tgtcccaaagtaagataattagtat

SEQ ID NO: 85481 - DNA, 25 bp, SARS Virus
gtcccaaagtataataattagtatg

SEQ ID NO: 85482 - DNA, 25 bp, SARS Virus
tcccaaagtatgataattagtatgc

SEQ ID NO: 85483 - DNA, 25 bp, SARS Virus
cccaaagtatgaaaattagtatgca

SEQ ID NO: 85484 - DNA, 25 bp, SARS Virus
ccaaagtatgataattagtatgcaa

SEQ ID NO: 85485 - DNA, 25 bp, SARS Virus
caaagtatgataattagtatgcaaa

SEQ ID NO: 85486 - DNA, 25 bp, SARS Virus
aaagtatgataaatagtatgcaaac

SEQ ID NO: 85487 - DNA, 25 bp, SARS Virus
aagtatgataataagtatgcaaacc

SEQ ID NO: 85488 - DNA, 25 bp, SARS Virus
agtatgataattagtatgcaaaccg

SEQ ID NO: 85489 - DNA, 25 bp, SARS Virus
gtatgataattaatatgcaaaccgt

SEQ ID NO: 85490 - DNA, 25 bp, SARS Virus
tatgataattagaatgcaaaccgtt

SEQ ID NO: 85491 - DNA, 25 bp, SARS Virus
atgataattagtatgcaaaccgttg

SEQ ID NO: 85492 - DNA, 25 bp, SARS Virus
tgataattagtaagcaaaccgttgg

SEQ ID NO: 85493 - DNA, 25 bp, SARS Virus
gataattagtatacaaaccgttggg

SEQ ID NO: 85494 - DNA, 25 bp, SARS Virus
ataattagtatgaaaaccgttggga

SEQ ID NO: 85495 - DNA, 25 bp, SARS Virus
taattagtatgcaaaccgttgggac

SEQ ID NO: 85496 - DNA, 25 bp, SARS Virus
aattagtatgcaaaccgttgggaca

SEQ ID NO: 85497 - DNA, 25 bp, SARS Virus
attagtatgcaaaccgttgggacag

SEQ ID NO: 85498 - DNA, 25 bp, SARS Virus
ttagtatgcaaaacgttgggacagt

SEQ ID NO: 85499 - DNA, 25 bp, SARS Virus
tagtatgcaaacagttgggacagta

SEQ ID NO: 85500 - DNA, 25 bp, SARS Virus
agtatgcaaaccattgggacagtat

SEQ ID NO: 85501 - DNA, 25 bp, SARS Virus
gtatgcaaaccgatgggacagtatg

SEQ ID NO: 85502 - DNA, 25 bp, SARS Virus
tatgcaaaccgtagggacagtatgg

SEQ ID NO: 85503 - DNA, 25 bp, SARS Virus
atgcaaaccgttaggacagtatgga

SEQ ID NO: 85504 - DNA, 25 bp, SARS Virus
tgcaaaccgttgagacagtatggaa

SEQ ID NO: 85505 - DNA, 25 bp, SARS Virus
gcaaaccgttggaacagtatggaaa

SEQ ID NO: 85506 - DNA, 25 bp, SARS Virus
caaaccgttgggacagtatggaaaa

SEQ ID NO: 85507 - DNA, 25 bp, SARS Virus
aaaccgttgggaaagtatggaaaat

SEQ ID NO: 85508 - DNA, 25 bp, SARS Virus
aaccgttgggacagtatggaaaatt

SEQ ID NO: 85509 - DNA, 25 bp, SARS Virus
accgttgggacaatatggaaaattc

SEQ ID NO: 85510 - DNA, 25 bp, SARS Virus
ccgttgggacagaatggaaaattcc

SEQ ID NO: 85511 - DNA, 25 bp, SARS Virus
cgttgggacagtatggaaaattcct

SEQ ID NO: 85512 - DNA, 25 bp, SARS Virus
gttgggacagtaaggaaaattccta

SEQ ID NO: 85513 - DNA, 25 bp, SARS Virus
ttgggacagtatagaaaattcctac

SEQ ID NO: 85514 - DNA, 25 bp, SARS Virus
tgggacagtatgaaaaattcctacc

SEQ ID NO: 85515 - DNA, 25 bp, SARS Virus
gggacagtatggaaaattcctacca

SEQ ID NO: 85516 - DNA, 25 bp, SARS Virus
ggacagtatggaaaattcctaccat

SEQ ID NO: 85517 - DNA, 25 bp, SARS Virus
gacagtatggaaaattcctaccata

SEQ ID NO: 85518 - DNA, 25 bp, SARS Virus
acagtatggaaaattcctaccataa

SEQ ID NO: 85519 - DNA, 25 bp, SARS Virus
cagtatggaaaaatcctaccataaa

SEQ ID NO: 85520 - DNA, 25 bp, SARS Virus
agtatggaaaatacctaccataaat

SEQ ID NO: 85521 - DNA, 25 bp, SARS Virus
gtatggaaaattactaccataaata

SEQ ID NO: 85522 - DNA, 25 bp, SARS Virus
tatggaaaattcataccataaataa

SEQ ID NO: 85523 - DNA, 25 bp, SARS Virus
atggaaaattccaaccataaataaa

SEQ ID NO: 85524 - DNA, 25 bp, SARS Virus
tggaaaattcctaccataaataaaa

SEQ ID NO: 85525 - DNA, 25 bp, SARS Virus
ggaaaattcctaacataaataaaac

SEQ ID NO: 85526 - DNA, 25 bp, SARS Virus
gaaaattcctacaataaataaaacg

SEQ ID NO: 85527 - DNA, 25 bp, SARS Virus
aaaattcctaccataaataaaacga

SEQ ID NO: 85528 - DNA, 25 bp, SARS Virus
aaattcctaccaaaaataaaacgac

SEQ ID NO: 85529 - DNA, 25 bp, SARS Virus
gatatggtacgtccgattgatgtaa

SEQ ID NO: 85530 - DNA, 25 bp, SARS Virus
atatggtacgtacgattgatgtaaa

SEQ ID NO: 85531 - DNA, 25 bp, SARS Virus
tatggtacgtaccattgatgtaaaa

SEQ ID NO: 85532 - DNA, 25 bp, SARS Virus
atggtacgtacgcttgatgtaaaag

SEQ ID NO: 85533 - DNA, 25 bp, SARS Virus
tggtacgtacgactgatgtaaaaga

SEQ ID NO: 85534 - DNA, 25 bp, SARS Virus
ggtacgtacgatcgatgtaaaagac

SEQ ID NO: 85535 - DNA, 25 bp, SARS Virus
gtacgtacgattcatgtaaaagacc

SEQ ID NO: 85536 - DNA, 25 bp, SARS Virus
tacgtacgattgctgtaaaagacct

SEQ ID NO: 85537 - DNA, 25 bp, SARS Virus
acgtacgattgacgtaaaagacctc

SEQ ID NO: 85538 - DNA, 25 bp, SARS Virus
cgtacgattgatctaaaagacctcc

SEQ ID NO: 85539 - DNA, 25 bp, SARS Virus
gtacgattgatgcaaaagacctcct

SEQ ID NO: 85540 - DNA, 25 bp, SARS Virus
tacgattgatgtcaaagacctcctt

SEQ ID NO: 85541 - DNA, 25 bp, SARS Virus
acgattgatgtacaagacctccttg

SEQ ID NO: 85542 - DNA, 25 bp, SARS Virus
cgattgatgtaacagacctccttgt

SEQ ID NO: 85543 - DNA, 25 bp, SARS Virus
gattgatgtaaacgacctccttgtg

SEQ ID NO: 85544 - DNA, 25 bp, SARS Virus
attgatgtaaaacacctccttgtgt

SEQ ID NO: 85545 - DNA, 25 bp, SARS Virus
ttgatgtaaaagccctccttgtgtt

SEQ ID NO: 85546 - DNA, 25 bp, SARS Virus
tgatgtaaaagacctccttgtgttt

SEQ ID NO: 85547 - DNA, 25 bp, SARS Virus
gatgtaaaagacctccttgtgttta

SEQ ID NO: 85548 - DNA, 25 bp, SARS Virus
atgtaaaagacccccttgtgtttag

SEQ ID NO: 85549 - DNA, 25 bp, SARS Virus
tgtaaaagacctccttgtgtttagg

SEQ ID NO: 85550 - DNA, 25 bp, SARS Virus
gtaaaagacctccttgtgtttagga

SEQ ID NO: 85551 - DNA, 25 bp, SARS Virus
taaaagacctccctgtgtttaggat

SEQ ID NO: 85552 - DNA, 25 bp, SARS Virus
aaaagacctcctcgtgtttaggata

SEQ ID NO: 85553 - DNA, 25 bp, SARS Virus
aaagacctccttctgtttaggatag

SEQ ID NO: 85554 - DNA, 25 bp, SARS Virus
aagacctccttgcgtttaggatagg

SEQ ID NO: 85555 - DNA, 25 bp, SARS Virus
agacctccttgtctttaggataggt

SEQ ID NO: 85556 - DNA, 25 bp, SARS Virus
gacctccttgtgcttaggataggtc

SEQ ID NO: 85557 - DNA, 25 bp, SARS Virus
acctccttgtgtctaggataggtca

SEQ ID NO: 85558 - DNA, 25 bp, SARS Virus
cctccttgtgttcaggataggtcaa

SEQ ID NO: 85559 - DNA, 25 bp, SARS Virus
ctccttgtgtttcggataggtcaac

SEQ ID NO: 85560 - DNA, 25 bp, SARS Virus
tccttgtgtttacgataggtcaaca

SEQ ID NO: 85561 - DNA, 25 bp, SARS Virus
ccttgtgtttagcataggtcaacag

SEQ ID NO: 85562 - DNA, 25 bp, SARS Virus
cttgtgtttaggctaggtcaacaga

SEQ ID NO: 85563 - DNA, 25 bp, SARS Virus
ttgtgtttaggacaggtcaacagaa

SEQ ID NO: 85564 - DNA, 25 bp, SARS Virus
tgtgtttaggatcggtcaacagaag

SEQ ID NO: 85565 - DNA, 25 bp, SARS Virus
gtgtttaggatacgtcaacagaagg

SEQ ID NO: 85566 - DNA, 25 bp, SARS Virus
tgtttaggatagctcaacagaagga

SEQ ID NO: 85567 - DNA, 25 bp, SARS Virus
gtttaggataggccaacagaaggat

SEQ ID NO: 85568 - DNA, 25 bp, SARS Virus
tttaggataggtcaacagaaggata

SEQ ID NO: 85569 - DNA, 25 bp, SARS Virus
ttaggataggtccacagaaggataa

SEQ ID NO: 85570 - DNA, 25 bp, SARS Virus
taggataggtcaccagaaggataag

SEQ ID NO: 85571 - DNA, 25 bp, SARS Virus
aggataggtcaacagaaggataagt

SEQ ID NO: 85572 - DNA, 25 bp, SARS Virus
ggataggtcaaccgaaggataagtg

SEQ ID NO: 85573 - DNA, 25 bp, SARS Virus
gataggtcaacacaaggataagtga

SEQ ID NO: 85574 - DNA, 25 bp, SARS Virus
ataggtcaacagcaggataagtgag

SEQ ID NO: 85575 - DNA, 25 bp, SARS Virus
taggtcaacagacggataagtgaga

SEQ ID NO: 85576 - DNA, 25 bp, SARS Virus
aggtcaacagaacgataagtgagaa

SEQ ID NO: 85577 - DNA, 25 bp, SARS Virus
ggtcaacagaagcataagtgagaaa

SEQ ID NO: 85578 - DNA, 25 bp, SARS Virus
gtcaacagaaggctaagtgagaaac

SEQ ID NO: 85579 - DNA, 25 bp, SARS Virus
tcaacagaaggacaagtgagaaact

SEQ ID NO: 85580 - DNA, 25 bp, SARS Virus
caacagaaggatcagtgagaaactg

SEQ ID NO: 85581 - DNA, 25 bp, SARS Virus
aacagaaggatacgtgagaaactgt

SEQ ID NO: 85582 - DNA, 25 bp, SARS Virus
acagaaggataactgagaaactgta

SEQ ID NO: 85583 - DNA, 25 bp, SARS Virus
cagaaggataagcgagaaactgtac

SEQ ID NO: 85584 - DNA, 25 bp, SARS Virus
agaaggataagtcagaaactgtact

SEQ ID NO: 85585 - DNA, 25 bp, SARS Virus
gaaggataagtgcgaaactgtactc

SEQ ID NO: 85586 - DNA, 25 bp, SARS Virus
aaggataagtgacaaactgtactcg

SEQ ID NO: 85587 - DNA, 25 bp, SARS Virus
aggataagtgagcaactgtactcgt

SEQ ID NO: 85588 - DNA, 25 bp, SARS Virus
ggataagtgagacactgtactcgtt

SEQ ID NO: 85589 - DNA, 25 bp, SARS Virus
gataagtgagaacctgtactcgttt

SEQ ID NO: 85590 - DNA, 25 bp, SARS Virus
ataagtgagaaactgtactcgttta

SEQ ID NO: 85591 - DNA, 25 bp, SARS Virus
taagtgagaaaccgtactcgtttaa

SEQ ID NO: 85592 - DNA, 25 bp, SARS Virus
aagtgagaaactctactcgtttaaa

SEQ ID NO: 85593 - DNA, 25 bp, SARS Virus
agtgagaaactgcactcgtttaaag

SEQ ID NO: 85594 - DNA, 25 bp, SARS Virus
gtgagaaactgtcctcgtttaaagg

SEQ ID NO: 85595 - DNA, 25 bp, SARS Virus
tgagaaactgtactcgtttaaagga

SEQ ID NO: 85596 - DNA, 25 bp, SARS Virus
gagaaactgtacccgtttaaaggag

SEQ ID NO: 85597 - DNA, 25 bp, SARS Virus
agaaactgtactcgtttaaaggaga

SEQ ID NO: 85598 - DNA, 25 bp, SARS Virus
gaaactgtactcctttaaaggagaa

SEQ ID NO: 85599 - DNA, 25 bp, SARS Virus
aaactgtactcgcttaaaggagaat

SEQ ID NO: 85600 - DNA, 25 bp, SARS Virus
aactgtactcgtctaaaggagaatt

SEQ ID NO: 85601 - DNA, 25 bp, SARS Virus
actgtactcgttcaaaggagaattt

SEQ ID NO: 85602 - DNA, 25 bp, SARS Virus
ctgtactcgtttcaaggagaattta

SEQ ID NO: 85603 - DNA, 25 bp, SARS Virus
tgtactcgtttacaggagaatttaa

SEQ ID NO: 85604 - DNA, 25 bp, SARS Virus
gtactcgtttaacggagaatttaat

SEQ ID NO: 85605 - DNA, 25 bp, SARS Virus
tactcgtttaaacgagaatttaatt

SEQ ID NO: 85606 - DNA, 25 bp, SARS Virus
actcgtttaaagcagaatttaattc

SEQ ID NO: 85607 - DNA, 25 bp, SARS Virus
ctcgtttaaaggcgaatttaattct

SEQ ID NO: 85608 - DNA, 25 bp, SARS Virus
tcgtttaaaggacaatttaattctc

SEQ ID NO: 85609 - DNA, 25 bp, SARS Virus
cgtttaaaggagcatttaattctcc

SEQ ID NO: 85610 - DNA, 25 bp, SARS Virus
gtttaaaggagactttaattctcct

SEQ ID NO: 85611 - DNA, 25 bp, SARS Virus
tttaaaggagaacttaattctcctt

SEQ ID NO: 85612 - DNA, 25 bp, SARS Virus
ttaaaggagaatctaattctccttg

SEQ ID NO: 85613 - DNA, 25 bp, SARS Virus
taaaggagaattcaattctccttga

SEQ ID NO: 85614 - DNA, 25 bp, SARS Virus
aaaggagaatttcattctccttgac

SEQ ID NO: 85615 - DNA, 25 bp, SARS Virus
aaggagaatttacttctccttgacg

SEQ ID NO: 85616 - DNA, 25 bp, SARS Virus
aggagaatttaactctccttgacga

SEQ ID NO: 85617 - DNA, 25 bp, SARS Virus
ggagaatttaatcctccttgacgac

SEQ ID NO: 85618 - DNA, 25 bp, SARS Virus
gagaatttaattctccttgacgaca

SEQ ID NO: 85619 - DNA, 25 bp, SARS Virus
agaatttaattccccttgacgacat

SEQ ID NO: 85620 - DNA, 25 bp, SARS Virus
gaatttaattctccttgacgacatt

SEQ ID NO: 85621 - DNA, 25 bp, SARS Virus
aatttaattctccttgacgacatta

SEQ ID NO: 85622 - DNA, 25 bp, SARS Virus
atttaattctccctgacgacattac

SEQ ID NO: 85623 - DNA, 25 bp, SARS Virus
tttaattctcctcgacgacattaca

SEQ ID NO: 85624 - DNA, 25 bp, SARS Virus
ttaattctccttcacgacattacag

SEQ ID NO: 85625 - DNA, 25 bp, SARS Virus
taattctccttgccgacattacaga

SEQ ID NO: 85626 - DNA, 25 bp, SARS Virus
aattctccttgacgacattacagag

SEQ ID NO: 85627 - DNA, 25 bp, SARS Virus
attctccttgaccacattacagaga

SEQ ID NO: 85628 - DNA, 25 bp, SARS Virus
ttctccttgacgccattacagagaa

SEQ ID NO: 85629 - DNA, 25 bp, SARS Virus
tctccttgacgacattacagagaat

SEQ ID NO: 85630 - DNA, 25 bp, SARS Virus
ctccttgacgaccttacagagaatt

SEQ ID NO: 85631 - DNA, 25 bp, SARS Virus
tccttgacgacactacagagaattc

SEQ ID NO: 85632 - DNA, 25 bp, SARS Virus
ccttgacgacatcacagagaattcc

SEQ ID NO: 85633 - DNA, 25 bp, SARS Virus
cttgacgacattccagagaattcct

SEQ ID NO: 85634 - DNA, 25 bp, SARS Virus
ttgacgacattacagagaattcctc

SEQ ID NO: 85635 - DNA, 25 bp, SARS Virus
tgacgacattaccgagaattcctct

SEQ ID NO: 85636 - DNA, 25 bp, SARS Virus
gacgacattacacagaattcctctt

SEQ ID NO: 85637 - DNA, 25 bp, SARS Virus
acgacattacagcgaattcctctta

SEQ ID NO: 85638 - DNA, 25 bp, SARS Virus
cgacattacagacaattcctcttag

SEQ ID NO: 85639 - DNA, 25 bp, SARS Virus
gacattacagagcattcctcttagt

SEQ ID NO: 85640 - DNA, 25 bp, SARS Virus
acattacagagacttcctcttagtt

SEQ ID NO: 85641 - DNA, 25 bp, SARS Virus
cattacagagaactcctcttagttt

SEQ ID NO: 85642 - DNA, 25 bp, SARS Virus
attacagagaatccctcttagttta

SEQ ID NO: 85643 - DNA, 25 bp, SARS Virus
ttacagagaattcctcttagtttag

SEQ ID NO: 85644 - DNA, 25 bp, SARS Virus
tacagagaattcctcttagtttagt

SEQ ID NO: 85645 - DNA, 25 bp, SARS Virus
acagagaattccccttagtttagtt

SEQ ID NO: 85646 - DNA, 25 bp, SARS Virus
cagagaattcctcttagtttagtta

SEQ ID NO: 85647 - DNA, 25 bp, SARS Virus
agagaattcctcctagtttagttac

SEQ ID NO: 85648 - DNA, 25 bp, SARS Virus
gagaattcctctcagtttagttact

SEQ ID NO: 85649 - DNA, 25 bp, SARS Virus
agaattcctcttcgtttagttacta

SEQ ID NO: 85650 - DNA, 25 bp, SARS Virus
gaattcctcttactttagttactat

SEQ ID NO: 85651 - DNA, 25 bp, SARS Virus
aattcctcttagcttagttactata

SEQ ID NO: 85652 - DNA, 25 bp, SARS Virus
attcctcttagtctagttactatac

SEQ ID NO: 85653 - DNA, 25 bp, SARS Virus
ttcctcttagttcagttactatact

SEQ ID NO: 85654 - DNA, 25 bp, SARS Virus
tcctcttagtttcgttactatacta

SEQ ID NO: 85655 - DNA, 25 bp, SARS Virus
cctcttagtttacttactatactaa

SEQ ID NO: 85656 - DNA, 25 bp, SARS Virus
ctcttagtttagctactatactaaa

SEQ ID NO: 85657 - DNA, 25 bp, SARS Virus
tcttagtttagtcactatactaaat

SEQ ID NO: 85658 - DNA, 25 bp, SARS Virus
cttagtttagttcctatactaaata

SEQ ID NO: 85659 - DNA, 25 bp, SARS Virus
ttagtttagttactatactaaataa

SEQ ID NO: 85660 - DNA, 25 bp, SARS Virus
tagtttagttaccatactaaataag

SEQ ID NO: 85661 - DNA, 25 bp, SARS Virus
agtttagttactctactaaataaga

SEQ ID NO: 85662 - DNA, 25 bp, SARS Virus
gtttagttactacactaaataagag

SEQ ID NO: 85663 - DNA, 25 bp, SARS Virus
tttagttactatcctaaataagaga

SEQ ID NO: 85664 - DNA, 25 bp, SARS Virus
ttagttactatactaaataagagaa

SEQ ID NO: 85665 - DNA, 25 bp, SARS Virus
tagttactataccaaataagagaag

SEQ ID NO: 85666 - DNA, 25 bp, SARS Virus
agttactatactcaataagagaaga

SEQ ID NO: 85667 - DNA, 25 bp, SARS Virus
gttactatactacataagagaagac

SEQ ID NO: 85668 - DNA, 25 bp, SARS Virus
ttactatactaactaagagaagacc

SEQ ID NO: 85669 - DNA, 25 bp, SARS Virus
tactatactaaacaagagaagacct

SEQ ID NO: 85670 - DNA, 25 bp, SARS Virus
actatactaaatcagagaagacctt

SEQ ID NO: 85671 - DNA, 25 bp, SARS Virus
ctatactaaatacgagaagaccttt

SEQ ID NO: 85672 - DNA, 25 bp, SARS Virus
tatactaaataacagaagacctttt

SEQ ID NO: 85673 - DNA, 25 bp, SARS Virus
atactaaataagcgaagaccttttt

SEQ ID NO: 85674 - DNA, 25 bp, SARS Virus
tactaaataagacaagacctttttc

SEQ ID NO: 85675 - DNA, 25 bp, SARS Virus
actaaataagagcagacctttttcc

SEQ ID NO: 85676 - DNA, 25 bp, SARS Virus
ctaaataagagacgacctttttcca

SEQ ID NO: 85677 - DNA, 25 bp, SARS Virus
taaataagagaacacctttttccat

SEQ ID NO: 85678 - DNA, 25 bp, SARS Virus
aaataagagaagccctttttccatc

SEQ ID NO: 85679 - DNA, 25 bp, SARS Virus
aataagagaagacctttttccatcc

SEQ ID NO: 85680 - DNA, 25 bp, SARS Virus
ataagagaagacctttttccatccg

SEQ ID NO: 85681 - DNA, 25 bp, SARS Virus
taagagaagacccttttccatccga

SEQ ID NO: 85682 - DNA, 25 bp, SARS Virus
aagagaagacctctttccatccgaa

SEQ ID NO: 85683 - DNA, 25 bp, SARS Virus
agagaagaccttcttccatccgaat

SEQ ID NO: 85684 - DNA, 25 bp, SARS Virus
gagaagacctttctccatccgaata

SEQ ID NO: 85685 - DNA, 25 bp, SARS Virus
agaagaccttttcccatccgaatag

SEQ ID NO: 85686 - DNA, 25 bp, SARS Virus
gaagacctttttccatccgaatagt

SEQ ID NO: 85687 - DNA, 25 bp, SARS Virus
aagacctttttccatccgaatagta

SEQ ID NO: 85688 - DNA, 25 bp, SARS Virus
agacctttttccctccgaatagtaa

SEQ ID NO: 85689 - DNA, 25 bp, SARS Virus
gacctttttccacccgaatagtaat

SEQ ID NO: 85690 - DNA, 25 bp, SARS Virus
acctttttccatccgaatagtaatc

SEQ ID NO: 85691 - DNA, 25 bp, SARS Virus
cctttttccatccgaatagtaatct

SEQ ID NO: 85692 - DNA, 25 bp, SARS Virus
ctttttccatcccaatagtaatctc

SEQ ID NO: 85693 - DNA, 25 bp, SARS Virus
tttttccatccgcatagtaatctct

SEQ ID NO: 85694 - DNA, 25 bp, SARS Virus
ttttccatccgactagtaatctctt

SEQ ID NO: 85695 - DNA, 25 bp, SARS Virus
tttccatccgaacagtaatctcttt

SEQ ID NO: 85696 - DNA, 25 bp, SARS Virus
ttccatccgaatcgtaatctctttt

SEQ ID NO: 85697 - DNA, 25 bp, SARS Virus
tccatccgaatactaatctcttttg

SEQ ID NO: 85698 - DNA, 25 bp, SARS Virus
ccatccgaatagcaatctcttttgt

SEQ ID NO: 85699 - DNA, 25 bp, SARS Virus
catccgaatagtcatctcttttgtt

SEQ ID NO: 85700 - DNA, 25 bp, SARS Virus
atccgaatagtactctcttttgttg

SEQ ID NO: 85701 - DNA, 25 bp, SARS Virus
tccgaatagtaacctcttttgttgt

SEQ ID NO: 85702 - DNA, 25 bp, SARS Virus
ccgaatagtaatctcttttgttgtc

SEQ ID NO: 85703 - DNA, 25 bp, SARS Virus
cgaatagtaatcccttttgttgtct

SEQ ID NO: 85704 - DNA, 25 bp, SARS Virus
gaatagtaatctcttttgttgtctc

SEQ ID NO: 85705 - DNA, 25 bp, SARS Virus
aatagtaatctcctttgttgtctca

SEQ ID NO: 85706 - DNA, 25 bp, SARS Virus
atagtaatctctcttgttgtctcaa

SEQ ID NO: 85707 - DNA, 25 bp, SARS Virus
tagtaatctcttctgttgtctcaac

SEQ ID NO: 85708 - DNA, 25 bp, SARS Virus
agtaatctctttcgttgtctcaaca

SEQ ID NO: 85709 - DNA, 25 bp, SARS Virus
gtaatctcttttcttgtctcaacac

SEQ ID NO: 85710 - DNA, 25 bp, SARS Virus
taatctcttttgctgtctcaacacc

SEQ ID NO: 85711 - DNA, 25 bp, SARS Virus
aatctcttttgtcgtctcaacacca

SEQ ID NO: 85712 - DNA, 25 bp, SARS Virus
atctcttttgttctctcaacaccaa

SEQ ID NO: 85713 - DNA, 25 bp, SARS Virus
tctcttttgttgcctcaacaccaaa

SEQ ID NO: 85714 - DNA, 25 bp, SARS Virus
ctcttttgttgtctcaacaccaaag

SEQ ID NO: 85715 - DNA, 25 bp, SARS Virus
tcttttgttgtcccaacaccaaagt

SEQ ID NO: 85716 - DNA, 25 bp, SARS Virus
cttttgttgtctcaacaccaaagtt

SEQ ID NO: 85717 - DNA, 25 bp, SARS Virus
ttttgttgtctccacaccaaagttc

SEQ ID NO: 85718 - DNA, 25 bp, SARS Virus
tttgttgtctcaccaccaaagttca

SEQ ID NO: 85719 - DNA, 25 bp, SARS Virus
ttgttgtctcaacaccaaagttcac

SEQ ID NO: 85720 - DNA, 25 bp, SARS Virus
tgttgtctcaaccccaaagttcact

SEQ ID NO: 85721 - DNA, 25 bp, SARS Virus
gttgtctcaacaccaaagttcacta

SEQ ID NO: 85722 - DNA, 25 bp, SARS Virus
ttgtctcaacaccaaagttcactat

SEQ ID NO: 85723 - DNA, 25 bp, SARS Virus
tgtctcaacacccaagttcactata

SEQ ID NO: 85724 - DNA, 25 bp, SARS Virus
gtctcaacaccacagttcactataa

SEQ ID NO: 85725 - DNA, 25 bp, SARS Virus
tctcaacaccaacgttcactataag

SEQ ID NO: 85726 - DNA, 25 bp, SARS Virus
ctcaacaccaaacttcactataaga

SEQ ID NO: 85727 - DNA, 25 bp, SARS Virus
tcaacaccaaagctcactataagaa

SEQ ID NO: 85728 - DNA, 25 bp, SARS Virus
caacaccaaagtccactataagaac

SEQ ID NO: 85729 - DNA, 25 bp, SARS Virus
aacaccaaagttcactataagaaca

SEQ ID NO: 85730 - DNA, 25 bp, SARS Virus
acaccaaagttccctataagaacaa

SEQ ID NO: 85731 - DNA, 25 bp, SARS Virus
caccaaagttcactataagaacaat

SEQ ID NO: 85732 - DNA, 25 bp, SARS Virus
accaaagttcaccataagaacaatt

SEQ ID NO: 85733 - DNA, 25 bp, SARS Virus
ccaaagttcactctaagaacaattg

SEQ ID NO: 85734 - DNA, 25 bp, SARS Virus
caaagttcactacaagaacaattgt

SEQ ID NO: 85735 - DNA, 25 bp, SARS Virus
aaagttcactatcagaacaattgtt

SEQ ID NO: 85736 - DNA, 25 bp, SARS Virus
aagttcactatacgaacaattgttg

SEQ ID NO: 85737 - DNA, 25 bp, SARS Virus
agttcactataacaacaattgttga

SEQ ID NO: 85738 - DNA, 25 bp, SARS Virus
gttcactataagcacaattgttgat

SEQ ID NO: 85739 - DNA, 25 bp, SARS Virus
ttcactataagaccaattgttgatt

SEQ ID NO: 85740 - DNA, 25 bp, SARS Virus
tcactataagaacaattgttgattt

SEQ ID NO: 85741 - DNA, 25 bp, SARS Virus
cactataagaaccattgttgatttg

SEQ ID NO: 85742 - DNA, 25 bp, SARS Virus
actataagaacacttgttgatttgc

SEQ ID NO: 85743 - DNA, 25 bp, SARS Virus
ctataagaacaactgttgatttgct

SEQ ID NO: 85744 - DNA, 25 bp, SARS Virus
tataagaacaatcgttgatttgctt

SEQ ID NO: 85745 - DNA, 25 bp, SARS Virus
ataagaacaattcttgatttgcttg

SEQ ID NO: 85746 - DNA, 25 bp, SARS Virus
taagaacaattgctgatttgcttgt

SEQ ID NO: 85747 - DNA, 25 bp, SARS Virus
aagaacaattgtcgatttgcttgta

SEQ ID NO: 85748 - DNA, 25 bp, SARS Virus
agaacaattgttcatttgcttgtac

SEQ ID NO: 85749 - DNA, 25 bp, SARS Virus
gaacaattgttgctttgcttgtaca

SEQ ID NO: 85750 - DNA, 25 bp, SARS Virus
aacaattgttgacttgcttgtacaa

SEQ ID NO: 85751 - DNA, 25 bp, SARS Virus
acaattgttgatctgcttgtacaaa

SEQ ID NO: 85752 - DNA, 25 bp, SARS Virus
caattgttgattcgcttgtacaaat

SEQ ID NO: 85753 - DNA, 25 bp, SARS Virus
aattgttgatttccttgtacaaata

SEQ ID NO: 85754 - DNA, 25 bp, SARS Virus
attgttgatttgcttgtacaaataa

SEQ ID NO: 85755 - DNA, 25 bp, SARS Virus
ttgttgatttgcctgtacaaataaa

SEQ ID NO: 85756 - DNA, 25 bp, SARS Virus
tgttgatttgctcgtacaaataaaa

SEQ ID NO: 85757 - DNA, 25 bp, SARS Virus
gttgatttgcttctacaaataaaag

SEQ ID NO: 85758 - DNA, 25 bp, SARS Virus
ttgatttgcttgcacaaataaaaga

SEQ ID NO: 85759 - DNA, 25 bp, SARS Virus
tgatttgcttgtccaaataaaagaa

SEQ ID NO: 85760 - DNA, 25 bp, SARS Virus
gatttgcttgtacaaataaaagaat

SEQ ID NO: 85761 - DNA, 25 bp, SARS Virus
atttgcttgtaccaataaaagaata

SEQ ID NO: 85762 - DNA, 25 bp, SARS Virus
tttgcttgtacacataaaagaataa

SEQ ID NO: 85763 - DNA, 25 bp, SARS Virus
ttgcttgtacaactaaaagaataat

SEQ ID NO: 85764 - DNA, 25 bp, SARS Virus
tgcttgtacaaacaaaagaataata

SEQ ID NO: 85765 - DNA, 25 bp, SARS Virus
gcttgtacaaatcaaagaataataa

SEQ ID NO: 85766 - DNA, 25 bp, SARS Virus
cttgtacaaatacaagaataataaa

SEQ ID NO: 85767 - DNA, 25 bp, SARS Virus
ttgtacaaataacagaataataaag

SEQ ID NO: 85768 - DNA, 25 bp, SARS Virus
tgtacaaataaacgaataataaaga

SEQ ID NO: 85769 - DNA, 25 bp, SARS Virus
gtacaaataaaacaataataaagaa

SEQ ID NO: 85770 - DNA, 25 bp, SARS Virus
tacaaataaaagcataataaagaat

SEQ ID NO: 85771 - DNA, 25 bp, SARS Virus
acaaataaaagactaataaagaatg

SEQ ID NO: 85772 - DNA, 25 bp, SARS Virus
caaataaaagaacaataaagaatga

SEQ ID NO: 85773 - DNA, 25 bp, SARS Virus
aaataaaagaatcataaagaatgag

SEQ ID NO: 85774 - DNA, 25 bp, SARS Virus
aataaaagaatactaaagaatgaga

SEQ ID NO: 85775 - DNA, 25 bp, SARS Virus
ataaaagaataacaaagaatgagag

SEQ ID NO: 85776 - DNA, 25 bp, SARS Virus
taaaagaataatcaagaatgagagt

SEQ ID NO: 85777 - DNA, 25 bp, SARS Virus
aaaagaataatacagaatgagagtg

SEQ ID NO: 85778 - DNA, 25 bp, SARS Virus
aaagaataataacgaatgagagtga

SEQ ID NO: 85779 - DNA, 25 bp, SARS Virus
aagaataataaacaatgagagtgat

SEQ ID NO: 85780 - DNA, 25 bp, SARS Virus
agaataataaagcatgagagtgatc

SEQ ID NO: 85781 - DNA, 25 bp, SARS Virus
gaataataaagactgagagtgatca

SEQ ID NO: 85782 - DNA, 25 bp, SARS Virus
aataataaagaacgagagtgatcac

SEQ ID NO: 85783 - DNA, 25 bp, SARS Virus
ataataaagaatcagagtgatcacc

SEQ ID NO: 85784 - DNA, 25 bp, SARS Virus
taataaagaatgcgagtgatcacca

SEQ ID NO: 85785 - DNA, 25 bp, SARS Virus
aataaagaatgacagtgatcaccat

SEQ ID NO: 85786 - DNA, 25 bp, SARS Virus
ataaagaatgagcgtgatcaccatc

SEQ ID NO: 85787 - DNA, 25 bp, SARS Virus
taaagaatgagactgatcaccatca

SEQ ID NO: 85788 - DNA, 25 bp, SARS Virus
aaagaatgagagcgatcaccatcac

SEQ ID NO: 85789 - DNA, 25 bp, SARS Virus
aagaatgagagtcatcaccatcact

SEQ ID NO: 85790 - DNA, 25 bp, SARS Virus
agaatgagagtgctcaccatcactg

SEQ ID NO: 85791 - DNA, 25 bp, SARS Virus
gaatgagagtgaccaccatcactgg

SEQ ID NO: 85792 - DNA, 25 bp, SARS Virus
aatgagagtgatcaccatcactgga

SEQ ID NO: 85793 - DNA, 25 bp, SARS Virus
atgagagtgatccccatcactggaa

SEQ ID NO: 85794 - DNA, 25 bp, SARS Virus
tgagagtgatcaccatcactggaac

SEQ ID NO: 85795 - DNA, 25 bp, SARS Virus
gagagtgatcaccatcactggaact

SEQ ID NO: 85796 - DNA, 25 bp, SARS Virus
agagtgatcaccctcactggaactg

SEQ ID NO: 85797 - DNA, 25 bp, SARS Virus
gagtgatcaccaccactggaactgg

SEQ ID NO: 85798 - DNA, 25 bp, SARS Virus
agtgatcaccatcactggaactggc

SEQ ID NO: 85799 - DNA, 25 bp, SARS Virus
gtgatcaccatccctggaactggcc

SEQ ID NO: 85800 - DNA, 25 bp, SARS Virus
tgatcaccatcactggaactggcca

SEQ ID NO: 85801 - DNA, 25 bp, SARS Virus
gatcaccatcaccggaactggccac

SEQ ID NO: 85802 - DNA, 25 bp, SARS Virus
atcaccatcactcgaactggccacg

SEQ ID NO: 85803 - DNA, 25 bp, SARS Virus
tcaccatcactgcaactggccacgt

SEQ ID NO: 85804 - DNA, 25 bp, SARS Virus
caccatcactggcactggccacgtg

SEQ ID NO: 85805 - DNA, 25 bp, SARS Virus
accatcactggacctggccacgtgg

SEQ ID NO: 85806 - DNA, 25 bp, SARS Virus
ccatcactggaactggccacgtggt

SEQ ID NO: 85807 - DNA, 25 bp, SARS Virus
catcactggaaccggccacgtggtg

SEQ ID NO: 85808 - DNA, 25 bp, SARS Virus
atcactggaactcgccacgtggtga

SEQ ID NO: 85809 - DNA, 25 bp, SARS Virus
tcactggaactgcccacgtggtgaa

SEQ ID NO: 85810 - DNA, 25 bp, SARS Virus
cactggaactggccacgtggtgaaa

SEQ ID NO: 85811 - DNA, 25 bp, SARS Virus
actggaactggccacgtggtgaaaa

SEQ ID NO: 85812 - DNA, 25 bp, SARS Virus
ctggaactggccccgtggtgaaaac

SEQ ID NO: 85813 - DNA, 25 bp, SARS Virus
tggaactggccacgtggtgaaaact

SEQ ID NO: 85814 - DNA, 25 bp, SARS Virus
ggaactggccacctggtgaaaacta

SEQ ID NO: 85815 - DNA, 25 bp, SARS Virus
gaactggccacgcggtgaaaactac

SEQ ID NO: 85816 - DNA, 25 bp, SARS Virus
aactggccacgtcgtgaaaactact

SEQ ID NO: 85817 - DNA, 25 bp, SARS Virus
actggccacgtgctgaaaactacta

SEQ ID NO: 85818 - DNA, 25 bp, SARS Virus
ctggccacgtggcgaaaactactac

SEQ ID NO: 85819 - DNA, 25 bp, SARS Virus
tggccacgtggtcaaaactactaca

SEQ ID NO: 85820 - DNA, 25 bp, SARS Virus
ggccacgtggtgcaaactactacaa

SEQ ID NO: 85821 - DNA, 25 bp, SARS Virus
gccacgtggtgacaactactacaag

SEQ ID NO: 85822 - DNA, 25 bp, SARS Virus
ccacgtggtgaacactactacaagt

SEQ ID NO: 85823 - DNA, 25 bp, SARS Virus
cacgtggtgaaacctactacaagtt

SEQ ID NO: 85824 - DNA, 25 bp, SARS Virus
acgtggtgaaaactactacaagttc

SEQ ID NO: 85825 - DNA, 25 bp, SARS Virus
cgtggtgaaaaccactacaagttcg

SEQ ID NO: 85826 - DNA, 25 bp, SARS Virus
gtggtgaaaactcctacaagttcga

SEQ ID NO: 85827 - DNA, 25 bp, SARS Virus
tggtgaaaactactacaagttcgag

SEQ ID NO: 85828 - DNA, 25 bp, SARS Virus
ggtgaaaactaccacaagttcgagg

SEQ ID NO: 85829 - DNA, 25 bp, SARS Virus
gtgaaaactactccaagttcgagga

SEQ ID NO: 85830 - DNA, 25 bp, SARS Virus
tgaaaactactacaagttcgaggat

SEQ ID NO: 85831 - DNA, 25 bp, SARS Virus
gaaaactactaccagttcgaggatt

SEQ ID NO: 85832 - DNA, 25 bp, SARS Virus
aaaactactacacgttcgaggatta

SEQ ID NO: 85833 - DNA, 25 bp, SARS Virus
aaactactacaacttcgaggattaa

SEQ ID NO: 85834 - DNA, 25 bp, SARS Virus
aactactacaagctcgaggattaat

SEQ ID NO: 85835 - DNA, 25 bp, SARS Virus
actactacaagtccgaggattaatg

SEQ ID NO: 85836 - DNA, 25 bp, SARS Virus
ctactacaagttcgaggattaatgt

SEQ ID NO: 85837 - DNA, 25 bp, SARS Virus
tactacaagttccaggattaatgtg

SEQ ID NO: 85838 - DNA, 25 bp, SARS Virus
actacaagttcgcggattaatgtga

SEQ ID NO: 85839 - DNA, 25 bp, SARS Virus
ctacaagttcgacgattaatgtgag

SEQ ID NO: 85840 - DNA, 25 bp, SARS Virus
tacaagttcgagcattaatgtgagt

SEQ ID NO: 85841 - DNA, 25 bp, SARS Virus
acaagttcgaggcttaatgtgagtt

SEQ ID NO: 85842 - DNA, 25 bp, SARS Virus
caagttcgaggactaatgtgagttg

SEQ ID NO: 85843 - DNA, 25 bp, SARS Virus
aagttcgaggatcaatgtgagttgt

SEQ ID NO: 85844 - DNA, 25 bp, SARS Virus
agttcgaggattcatgtgagttgta

SEQ ID NO: 85845 - DNA, 25 bp, SARS Virus
gttcgaggattactgtgagttgtat

SEQ ID NO: 85846 - DNA, 25 bp, SARS Virus
ttcgaggattaacgtgagttgtatg

SEQ ID NO: 85847 - DNA, 25 bp, SARS Virus
tcgaggattaatctgagttgtatga

SEQ ID NO: 85848 - DNA, 25 bp, SARS Virus
cgaggattaatgcgagttgtatgaa

SEQ ID NO: 85849 - DNA, 25 bp, SARS Virus
gaggattaatgtcagttgtatgaag

SEQ ID NO: 85850 - DNA, 25 bp, SARS Virus
aggattaatgtgcgttgtatgaagt

SEQ ID NO: 85851 - DNA, 25 bp, SARS Virus
ggattaatgtgacttgtatgaagta

SEQ ID NO: 85852 - DNA, 25 bp, SARS Virus
gattaatgtgagctgtatgaagtag

SEQ ID NO: 85853 - DNA, 25 bp, SARS Virus
attaatgtgagtcgtatgaagtaga

SEQ ID NO: 85854 - DNA, 25 bp, SARS Virus
ttaatgtgagttctatgaagtagat

SEQ ID NO: 85855 - DNA, 25 bp, SARS Virus
taatgtgagttgcatgaagtagata

SEQ ID NO: 85856 - DNA, 25 bp, SARS Virus
aatgtgagttgtctgaagtagatac

SEQ ID NO: 85857 - DNA, 25 bp, SARS Virus
atgtgagttgtacgaagtagatact

SEQ ID NO: 85858 - DNA, 25 bp, SARS Virus
tgtgagttgtatcaagtagatactc

SEQ ID NO: 85859 - DNA, 25 bp, SARS Virus
gtgagttgtatgcagtagatactcc

SEQ ID NO: 85860 - DNA, 25 bp, SARS Virus
tgagttgtatgacgtagatactccc

SEQ ID NO: 85861 - DNA, 25 bp, SARS Virus
gagttgtatgaactagatactcccc

SEQ ID NO: 85862 - DNA, 25 bp, SARS Virus
agttgtatgaagcagatactccccc

SEQ ID NO: 85863 - DNA, 25 bp, SARS Virus
gttgtatgaagtcgatactcccccc

SEQ ID NO: 85864 - DNA, 25 bp, SARS Virus
ttgtatgaagtacatactcccccca

SEQ ID NO: 85865 - DNA, 25 bp, SARS Virus
tgtatgaagtagctactccccccaa

SEQ ID NO: 85866 - DNA, 25 bp, SARS Virus
gtatgaagtagacactccccccaaa

SEQ ID NO: 85867 - DNA, 25 bp, SARS Virus
tatgaagtagatcctccccccaaat

SEQ ID NO: 85868 - DNA, 25 bp, SARS Virus
atgaagtagatactccccccaaatg

SEQ ID NO: 85869 - DNA, 25 bp, SARS Virus
tgaagtagataccccccccaaatga

SEQ ID NO: 85870 - DNA, 25 bp, SARS Virus
gaagtagatactccccccaaatgat

SEQ ID NO: 85871 - DNA, 25 bp, SARS Virus
aagtagatactccccccaaatgata

SEQ ID NO: 85872 - DNA, 25 bp, SARS Virus
agtagatactccccccaaatgatag

SEQ ID NO: 85873 - DNA, 25 bp, SARS Virus
gtagatactccccccaaatgatagg

SEQ ID NO: 85874 - DNA, 25 bp, SARS Virus
tagatactccccccaaatgatagga

SEQ ID NO: 85875 - DNA, 25 bp, SARS Virus
agatactccccccaaatgataggac

SEQ ID NO: 85876 - DNA, 25 bp, SARS Virus
gatactcccccccaatgataggact

SEQ ID NO: 85877 - DNA, 25 bp, SARS Virus
atactccccccacatgataggacta

SEQ ID NO: 85878 - DNA, 25 bp, SARS Virus
tactccccccaactgataggactac

SEQ ID NO: 85879 - DNA, 25 bp, SARS Virus
actccccccaaacgataggactact

SEQ ID NO: 85880 - DNA, 25 bp, SARS Virus
ctccccccaaatcataggactactt

SEQ ID NO: 85881 - DNA, 25 bp, SARS Virus
tccccccaaatgctaggactacttt

SEQ ID NO: 85882 - DNA, 25 bp, SARS Virus
ccccccaaatgacaggactacttta

SEQ ID NO: 85883 - DNA, 25 bp, SARS Virus
cccccaaatgatcggactactttaa

SEQ ID NO: 85884 - DNA, 25 bp, SARS Virus
ccccaaatgatacgactactttaaa

SEQ ID NO: 85885 - DNA, 25 bp, SARS Virus
cccaaatgatagcactactttaaaa

SEQ ID NO: 85886 - DNA, 25 bp, SARS Virus
ccaaatgataggcctactttaaaaa

SEQ ID NO: 85887 - DNA, 25 bp, SARS Virus
caaatgataggactactttaaaaat

SEQ ID NO: 85888 - DNA, 25 bp, SARS Virus
aaatgataggaccactttaaaaatc

SEQ ID NO: 85889 - DNA, 25 bp, SARS Virus
aatgataggactcctttaaaaatct

SEQ ID NO: 85890 - DNA, 25 bp, SARS Virus
atgataggactactttaaaaatcta

SEQ ID NO: 85891 - DNA, 25 bp, SARS Virus
tgataggactaccttaaaaatctag

SEQ ID NO: 85892 - DNA, 25 bp, SARS Virus
gataggactactctaaaaatctagt

SEQ ID NO: 85893 - DNA, 25 bp, SARS Virus
ataggactacttcaaaaatctagtc

SEQ ID NO: 85894 - DNA, 25 bp, SARS Virus
taggactactttcaaaatctagtct

SEQ ID NO: 85895 - DNA, 25 bp, SARS Virus
aggactactttacaaatctagtctg

SEQ ID NO: 85896 - DNA, 25 bp, SARS Virus
ggactactttaacaatctagtctgt

SEQ ID NO: 85897 - DNA, 25 bp, SARS Virus
gactactttaaacatctagtctgtg

SEQ ID NO: 85898 - DNA, 25 bp, SARS Virus
actactttaaaactctagtctgtga

SEQ ID NO: 85899 - DNA, 25 bp, SARS Virus
ctactttaaaaacctagtctgtgag

SEQ ID NO: 85900 - DNA, 25 bp, SARS Virus
tactttaaaaatctagtctgtgaga

SEQ ID NO: 85901 - DNA, 25 bp, SARS Virus
actttaaaaatccagtctgtgagaa

SEQ ID NO: 85902 - DNA, 25 bp, SARS Virus
ctttaaaaatctcgtctgtgagaaa

SEQ ID NO: 85903 - DNA, 25 bp, SARS Virus
tttaaaaatctactctgtgagaaat

SEQ ID NO: 85904 - DNA, 25 bp, SARS Virus
ttaaaaatctagcctgtgagaaata

SEQ ID NO: 85905 - DNA, 25 bp, SARS Virus
taaaaatctagtctgtgagaaataa

SEQ ID NO: 85906 - DNA, 25 bp, SARS Virus
aaaaatctagtccgtgagaaataaa

SEQ ID NO: 85907 - DNA, 25 bp, SARS Virus
aaaatctagtctctgagaaataaat

SEQ ID NO: 85908 - DNA, 25 bp, SARS Virus
aaatctagtctgcgagaaataaatt

SEQ ID NO: 85909 - DNA, 25 bp, SARS Virus
aatctagtctgtcagaaataaattg

SEQ ID NO: 85910 - DNA, 25 bp, SARS Virus
atctagtctgtgcgaaataaattga

SEQ ID NO: 85911 - DNA, 25 bp, SARS Virus
tctagtctgtgacaaataaattgag

SEQ ID NO: 85912 - DNA, 25 bp, SARS Virus
ctagtctgtgagcaataaattgagt

SEQ ID NO: 85913 - DNA, 25 bp, SARS Virus
tagtctgtgagacataaattgagtc

SEQ ID NO: 85914 - DNA, 25 bp, SARS Virus
agtctgtgagaactaaattgagtcc

SEQ ID NO: 85915 - DNA, 25 bp, SARS Virus
gtctgtgagaaacaaattgagtcct

SEQ ID NO: 85916 - DNA, 25 bp, SARS Virus
tctgtgagaaatcaattgagtccta

SEQ ID NO: 85917 - DNA, 25 bp, SARS Virus
ctgtgagaaatacattgagtcctaa

SEQ ID NO: 85918 - DNA, 25 bp, SARS Virus
tgtgagaaataacttgagtcctaaa

SEQ ID NO: 85919 - DNA, 25 bp, SARS Virus
gtgagaaataaactgagtcctaaat

SEQ ID NO: 85920 - DNA, 25 bp, SARS Virus
tgagaaataaatcgagtcctaaata

SEQ ID NO: 85921 - DNA, 25 bp, SARS Virus
gagaaataaattcagtcctaaataa

SEQ ID NO: 85922 - DNA, 25 bp, SARS Virus
agaaataaattgcgtcctaaataaa

SEQ ID NO: 85923 - DNA, 25 bp, SARS Virus
gaaataaattgactcctaaataaag

SEQ ID NO: 85924 - DNA, 25 bp, SARS Virus
aaataaattgagccctaaataaaga

SEQ ID NO: 85925 - DNA, 25 bp, SARS Virus
aataaattgagtcctaaataaagaa

SEQ ID NO: 85926 - DNA, 25 bp, SARS Virus
ataaattgagtcctaaataaagaag

SEQ ID NO: 85927 - DNA, 25 bp, SARS Virus
taaattgagtcccaaataaagaagg

SEQ ID NO: 85928 - DNA, 25 bp, SARS Virus
aaattgagtcctcaataaagaaggt

SEQ ID NO: 85929 - DNA, 25 bp, SARS Virus
aattgagtcctacataaagaaggta

SEQ ID NO: 85930 - DNA, 25 bp, SARS Virus
attgagtcctaactaaagaaggtaa

SEQ ID NO: 85931 - DNA, 25 bp, SARS Virus
ttgagtcctaaacaaagaaggtaaa

SEQ ID NO: 85932 - DNA, 25 bp, SARS Virus
tgagtcctaaatcaagaaggtaaaa

SEQ ID NO: 85933 - DNA, 25 bp, SARS Virus
gagtcctaaatacagaaggtaaaat

SEQ ID NO: 85934 - DNA, 25 bp, SARS Virus
agtcctaaataacgaaggtaaaata

SEQ ID NO: 85935 - DNA, 25 bp, SARS Virus
gtcctaaataaacaaggtaaaataa

SEQ ID NO: 85936 - DNA, 25 bp, SARS Virus
tcctaaataaagcaggtaaaataag

SEQ ID NO: 85937 - DNA, 25 bp, SARS Virus
cctaaataaagacggtaaaataaga

SEQ ID NO: 85938 - DNA, 25 bp, SARS Virus
ctaaataaagaacgtaaaataagat

SEQ ID NO: 85939 - DNA, 25 bp, SARS Virus
taaataaagaagctaaaataagatt

SEQ ID NO: 85940 - DNA, 25 bp, SARS Virus
aaataaagaaggcaaaataagatta

SEQ ID NO: 85941 - DNA, 25 bp, SARS Virus
aataaagaaggtcaaataagattac

SEQ ID NO: 85942 - DNA, 25 bp, SARS Virus
ataaagaaggtacaataagattaca

SEQ ID NO: 85943 - DNA, 25 bp, SARS Virus
taaagaaggtaacataagattacaa

SEQ ID NO: 85944 - DNA, 25 bp, SARS Virus
aaagaaggtaaactaagattacaat

SEQ ID NO: 85945 - DNA, 25 bp, SARS Virus
aagaaggtaaaacaagattacaatg

SEQ ID NO: 85946 - DNA, 25 bp, SARS Virus
agaaggtaaaatcagattacaatgt

SEQ ID NO: 85947 - DNA, 25 bp, SARS Virus
gaaggtaaaatacgattacaatgtc

SEQ ID NO: 85948 - DNA, 25 bp, SARS Virus
aaggtaaaataacattacaatgtcc

SEQ ID NO: 85949 - DNA, 25 bp, SARS Virus
aggtaaaataagcttacaatgtccc

SEQ ID NO: 85950 - DNA, 25 bp, SARS Virus
ggtaaaataagactacaatgtccca

SEQ ID NO: 85951 - DNA, 25 bp, SARS Virus
gtaaaataagatcacaatgtcccaa

SEQ ID NO: 85952 - DNA, 25 bp, SARS Virus
taaaataagattccaatgtcccaaa

SEQ ID NO: 85953 - DNA, 25 bp, SARS Virus
aaaataagattacaatgtcccaaag

SEQ ID NO: 85954 - DNA, 25 bp, SARS Virus
aaataagattaccatgtcccaaagt

SEQ ID NO: 85955 - DNA, 25 bp, SARS Virus
aataagattacactgtcccaaagta

SEQ ID NO: 85956 - DNA, 25 bp, SARS Virus
ataagattacaacgtcccaaagtat

SEQ ID NO: 85957 - DNA, 25 bp, SARS Virus
taagattacaatctcccaaagtatg

SEQ ID NO: 85958 - DNA, 25 bp, SARS Virus
aagattacaatgccccaaagtatga

SEQ ID NO: 85959 - DNA, 25 bp, SARS Virus
agattacaatgtcccaaagtatgat

SEQ ID NO: 85960 - DNA, 25 bp, SARS Virus
gattacaatgtcccaaagtatgata

SEQ ID NO: 85961 - DNA, 25 bp, SARS Virus
attacaatgtcccaaagtatgataa

SEQ ID NO: 85962 - DNA, 25 bp, SARS Virus
ttacaatgtccccaagtatgataat

SEQ ID NO: 85963 - DNA, 25 bp, SARS Virus
tacaatgtcccacagtatgataatt

SEQ ID NO: 85964 - DNA, 25 bp, SARS Virus
acaatgtcccaacgtatgataatta

SEQ ID NO: 85965 - DNA, 25 bp, SARS Virus
caatgtcccaaactatgataattag

SEQ ID NO: 85966 - DNA, 25 bp, SARS Virus
aatgtcccaaagcatgataattagt

SEQ ID NO: 85967 - DNA, 25 bp, SARS Virus
atgtcccaaagtctgataattagta

SEQ ID NO: 85968 - DNA, 25 bp, SARS Virus
tgtcccaaagtacgataattagtat

SEQ ID NO: 85969 - DNA, 25 bp, SARS Virus
gtcccaaagtatcataattagtatg

SEQ ID NO: 85970 - DNA, 25 bp, SARS Virus
tcccaaagtatgctaattagtatgc

SEQ ID NO: 85971 - DNA, 25 bp, SARS Virus
cccaaagtatgacaattagtatgca

SEQ ID NO: 85972 - DNA, 25 bp, SARS Virus
ccaaagtatgatcattagtatgcaa

SEQ ID NO: 85973 - DNA, 25 bp, SARS Virus
caaagtatgatacttagtatgcaaa

SEQ ID NO: 85974 - DNA, 25 bp, SARS Virus
aaagtatgataactagtatgcaaac

SEQ ID NO: 85975 - DNA, 25 bp, SARS Virus
aagtatgataatcagtatgcaaacc

SEQ ID NO: 85976 - DNA, 25 bp, SARS Virus
agtatgataattcgtatgcaaaccg

SEQ ID NO: 85977 - DNA, 25 bp, SARS Virus
gtatgataattactatgcaaaccgt

SEQ ID NO: 85978 - DNA, 25 bp, SARS Virus
tatgataattagcatgcaaaccgtt

SEQ ID NO: 85979 - DNA, 25 bp, SARS Virus
atgataattagtctgcaaaccgttg

SEQ ID NO: 85980 - DNA, 25 bp, SARS Virus
tgataattagtacgcaaaccgttgg

SEQ ID NO: 85981 - DNA, 25 bp, SARS Virus
gataattagtatccaaaccgttggg

SEQ ID NO: 85982 - DNA, 25 bp, SARS Virus
ataattagtatgcaaaccgttggga

SEQ ID NO: 85983 - DNA, 25 bp, SARS Virus
taattagtatgccaaccgttgggac

SEQ ID NO: 85984 - DNA, 25 bp, SARS Virus
aattagtatgcacaccgttgggaca

SEQ ID NO: 85985 - DNA, 25 bp, SARS Virus
attagtatgcaacccgttgggacag

SEQ ID NO: 85986 - DNA, 25 bp, SARS Virus
ttagtatgcaaaccgttgggacagt

SEQ ID NO: 85987 - DNA, 25 bp, SARS Virus
tagtatgcaaaccgttgggacagta

SEQ ID NO: 85988 - DNA, 25 bp, SARS Virus
agtatgcaaacccttgggacagtat

SEQ ID NO: 85989 - DNA, 25 bp, SARS Virus
gtatgcaaaccgctgggacagtatg

SEQ ID NO: 85990 - DNA, 25 bp, SARS Virus
tatgcaaaccgtcgggacagtatgg

SEQ ID NO: 85991 - DNA, 25 bp, SARS Virus
atgcaaaccgttcggacagtatgga

SEQ ID NO: 85992 - DNA, 25 bp, SARS Virus
tgcaaaccgttgcgacagtatggaa

SEQ ID NO: 85993 - DNA, 25 bp, SARS Virus
gcaaaccgttggcacagtatggaaa

SEQ ID NO: 85994 - DNA, 25 bp, SARS Virus
caaaccgttgggccagtatggaaaa

SEQ ID NO: 85995 - DNA, 25 bp, SARS Virus
aaaccgttgggacagtatggaaaat

SEQ ID NO: 85996 - DNA, 25 bp, SARS Virus
aaccgttgggaccgtatggaaaatt

SEQ ID NO: 85997 - DNA, 25 bp, SARS Virus
accgttgggacactatggaaaattc

SEQ ID NO: 85998 - DNA, 25 bp, SARS Virus
ccgttgggacagcatggaaaattcc

SEQ ID NO: 85999 - DNA, 25 bp, SARS Virus
cgttgggacagtctggaaaattcct

SEQ ID NO: 86000 - DNA, 25 bp, SARS Virus
gttgggacagtacggaaaattccta

SEQ ID NO: 86001 - DNA, 25 bp, SARS Virus
ttgggacagtatcgaaaattcctac

SEQ ID NO: 86002 - DNA, 25 bp, SARS Virus
tgggacagtatgcaaaattcctacc

SEQ ID NO: 86003 - DNA, 25 bp, SARS Virus
gggacagtatggcaaattcctacca

SEQ ID NO: 86004 - DNA, 25 bp, SARS Virus
ggacagtatggacaattcctaccat

SEQ ID NO: 86005 - DNA, 25 bp, SARS Virus
gacagtatggaacattcctaccata

SEQ ID NO: 86006 - DNA, 25 bp, SARS Virus
acagtatggaaacttcctaccataa

SEQ ID NO: 86007 - DNA, 25 bp, SARS Virus
cagtatggaaaactcctaccataaa

SEQ ID NO: 86008 - DNA, 25 bp, SARS Virus
agtatggaaaatccctaccataaat

SEQ ID NO: 86009 - DNA, 25 bp, SARS Virus
gtatggaaaattcctaccataaata

SEQ ID NO: 86010 - DNA, 25 bp, SARS Virus
tatggaaaattcctaccataaataa

SEQ ID NO: 86011 - DNA, 25 bp, SARS Virus
atggaaaattcccaccataaataaa

SEQ ID NO: 86012 - DNA, 25 bp, SARS Virus
tggaaaattcctcccataaataaaa

SEQ ID NO: 86013 - DNA, 25 bp, SARS Virus
ggaaaattcctaccataaataaaac

SEQ ID NO: 86014 - DNA, 25 bp, SARS Virus
gaaaattcctaccataaataaaacg

SEQ ID NO: 86015 - DNA, 25 bp, SARS Virus
aaaattcctaccctaaataaaacga

SEQ ID NO: 86016 - DNA, 25 bp, SARS Virus
aaattcctaccacaaataaaacgac

SEQ ID NO: 86017 - DNA, 25 bp, SARS Virus
gatatggtacgtgcgattgatgtaa

SEQ ID NO: 86018 - DNA, 25 bp, SARS Virus
atatggtacgtaggattgatgtaaa

SEQ ID NO: 86019 - DNA, 25 bp, SARS Virus
tatggtacgtacgattgatgtaaaa

SEQ ID NO: 86020 - DNA, 25 bp, SARS Virus
atggtacgtacggttgatgtaaaag

SEQ ID NO: 86021 - DNA, 25 bp, SARS Virus
tggtacgtacgagtgatgtaaaaga

SEQ ID NO: 86022 - DNA, 25 bp, SARS Virus
ggtacgtacgatggatgtaaaagac

SEQ ID NO: 86023 - DNA, 25 bp, SARS Virus
gtacgtacgattgatgtaaaagacc

SEQ ID NO: 86024 - DNA, 25 bp, SARS Virus
tacgtacgattggtgtaaaagacct

SEQ ID NO: 86025 - DNA, 25 bp, SARS Virus
acgtacgattgaggtaaaagacctc

SEQ ID NO: 86026 - DNA, 25 bp, SARS Virus
cgtacgattgatgtaaaagacctcc

SEQ ID NO: 86027 - DNA, 25 bp, SARS Virus
gtacgattgatggaaaagacctcct

SEQ ID NO: 86028 - DNA, 25 bp, SARS Virus
tacgattgatgtgaaagacctcctt

SEQ ID NO: 86029 - DNA, 25 bp, SARS Virus
acgattgatgtagaagacctccttg

SEQ ID NO: 86030 - DNA, 25 bp, SARS Virus
cgattgatgtaagagacctccttgt

SEQ ID NO: 86031 - DNA, 25 bp, SARS Virus
gattgatgtaaaggacctccttgtg

SEQ ID NO: 86032 - DNA, 25 bp, SARS Virus
attgatgtaaaagacctccttgtgt

SEQ ID NO: 86033 - DNA, 25 bp, SARS Virus
ttgatgtaaaaggcctccttgtgtt

SEQ ID NO: 86034 - DNA, 25 bp, SARS Virus
tgatgtaaaagagctccttgtgttt

SEQ ID NO: 86035 - DNA, 25 bp, SARS Virus
gatgtaaaagacgtccttgtgttta

SEQ ID NO: 86036 - DNA, 25 bp, SARS Virus
atgtaaaagaccgccttgtgtttag

SEQ ID NO: 86037 - DNA, 25 bp, SARS Virus
tgtaaaagacctgcttgtgtttagg

SEQ ID NO: 86038 - DNA, 25 bp, SARS Virus
gtaaaagacctcgttgtgtttagga

SEQ ID NO: 86039 - DNA, 25 bp, SARS Virus
taaaagacctccgtgtgtttaggat

SEQ ID NO: 86040 - DNA, 25 bp, SARS Virus
aaaagacctcctggtgtttaggata

SEQ ID NO: 86041 - DNA, 25 bp, SARS Virus
aaagacctccttgtgtttaggatag

SEQ ID NO: 86042 - DNA, 25 bp, SARS Virus
aagacctccttgggtttaggatagg

SEQ ID NO: 86043 - DNA, 25 bp, SARS Virus
agacctccttgtgtttaggataggt

SEQ ID NO: 86044 - DNA, 25 bp, SARS Virus
gacctccttgtggttaggataggtc

SEQ ID NO: 86045 - DNA, 25 bp, SARS Virus
acctccttgtgtgtaggataggtca

SEQ ID NO: 86046 - DNA, 25 bp, SARS Virus
cctccttgtgttgaggataggtcaa

SEQ ID NO: 86047 - DNA, 25 bp, SARS Virus
ctccttgtgtttgggataggtcaac

SEQ ID NO: 86048 - DNA, 25 bp, SARS Virus
tccttgtgtttaggataggtcaaca

SEQ ID NO: 86049 - DNA, 25 bp, SARS Virus
ccttgtgtttaggataggtcaacag

SEQ ID NO: 86050 - DNA, 25 bp, SARS Virus
cttgtgtttagggtaggtcaacaga

SEQ ID NO: 86051 - DNA, 25 bp, SARS Virus
ttgtgtttaggagaggtcaacagaa

SEQ ID NO: 86052 - DNA, 25 bp, SARS Virus
tgtgtttaggatgggtcaacagaag

SEQ ID NO: 86053 - DNA, 25 bp, SARS Virus
gtgtttaggataggtcaacagaagg

SEQ ID NO: 86054 - DNA, 25 bp, SARS Virus
tgtttaggataggtcaacagaagga

SEQ ID NO: 86055 - DNA, 25 bp, SARS Virus
gtttaggatagggcaacagaaggat

SEQ ID NO: 86056 - DNA, 25 bp, SARS Virus
tttaggataggtgaacagaaggata

SEQ ID NO: 86057 - DNA, 25 bp, SARS Virus
ttaggataggtcgacagaaggataa

SEQ ID NO: 86058 - DNA, 25 bp, SARS Virus
taggataggtcagcagaaggataag

SEQ ID NO: 86059 - DNA, 25 bp, SARS Virus
aggataggtcaagagaaggataagt

SEQ ID NO: 86060 - DNA, 25 bp, SARS Virus
ggataggtcaacggaaggataagtg

SEQ ID NO: 86061 - DNA, 25 bp, SARS Virus
gataggtcaacagaaggataagtga

SEQ ID NO: 86062 - DNA, 25 bp, SARS Virus
ataggtcaacaggaggataagtgag

SEQ ID NO: 86063 - DNA, 25 bp, SARS Virus
taggtcaacagagggataagtgaga

SEQ ID NO: 86064 - DNA, 25 bp, SARS Virus
aggtcaacagaaggataagtgagaa

SEQ ID NO: 86065 - DNA, 25 bp, SARS Virus
ggtcaacagaaggataagtgagaaa

SEQ ID NO: 86066 - DNA, 25 bp, SARS Virus
gtcaacagaagggtaagtgagaaac

SEQ ID NO: 86067 - DNA, 25 bp, SARS Virus
tcaacagaaggagaagtgagaaact

SEQ ID NO: 86068 - DNA, 25 bp, SARS Virus
caacagaaggatgagtgagaaactg

SEQ ID NO: 86069 - DNA, 25 bp, SARS Virus
aacagaaggataggtgagaaactgt

SEQ ID NO: 86070 - DNA, 25 bp, SARS Virus
acagaaggataagtgagaaactgta

SEQ ID NO: 86071 - DNA, 25 bp, SARS Virus
cagaaggataagggagaaactgtac

SEQ ID NO: 86072 - DNA, 25 bp, SARS Virus
agaaggataagtgagaaactgtact

SEQ ID NO: 86073 - DNA, 25 bp, SARS Virus
gaaggataagtgggaaactgtactc

SEQ ID NO: 86074 - DNA, 25 bp, SARS Virus
aaggataagtgagaaactgtactcg

SEQ ID NO: 86075 - DNA, 25 bp, SARS Virus
aggataagtgaggaactgtactcgt

SEQ ID NO: 86076 - DNA, 25 bp, SARS Virus
ggataagtgagagactgtactcgtt

SEQ ID NO: 86077 - DNA, 25 bp, SARS Virus
gataagtgagaagctgtactcgttt

SEQ ID NO: 86078 - DNA, 25 bp, SARS Virus
ataagtgagaaagtgtactcgttta

SEQ ID NO: 86079 - DNA, 25 bp, SARS Virus
taagtgagaaacggtactcgtttaa

SEQ ID NO: 86080 - DNA, 25 bp, SARS Virus
aagtgagaaactgtactcgtttaaa

SEQ ID NO: 86081 - DNA, 25 bp, SARS Virus
agtgagaaactggactcgtttaaag

SEQ ID NO: 86082 - DNA, 25 bp, SARS Virus
gtgagaaactgtgctcgtttaaagg

SEQ ID NO: 86083 - DNA, 25 bp, SARS Virus
tgagaaactgtagtcgtttaaagga

SEQ ID NO: 86084 - DNA, 25 bp, SARS Virus
gagaaactgtacgcgtttaaaggag

SEQ ID NO: 86085 - DNA, 25 bp, SARS Virus
agaaactgtactggtttaaaggaga

SEQ ID NO: 86086 - DNA, 25 bp, SARS Virus
gaaactgtactcgtttaaaggagaa

SEQ ID NO: 86087 - DNA, 25 bp, SARS Virus
aaactgtactcggttaaaggagaat

SEQ ID NO: 86088 - DNA, 25 bp, SARS Virus
aactgtactcgtgtaaaggagaatt

SEQ ID NO: 86089 - DNA, 25 bp, SARS Virus
actgtactcgttgaaaggagaattt

SEQ ID NO: 86090 - DNA, 25 bp, SARS Virus
ctgtactcgtttgaaggagaattta

SEQ ID NO: 86091 - DNA, 25 bp, SARS Virus
tgtactcgtttagaggagaatttaa

SEQ ID NO: 86092 - DNA, 25 bp, SARS Virus
gtactcgtttaagggagaatttaat

SEQ ID NO: 86093 - DNA, 25 bp, SARS Virus
tactcgtttaaaggagaatttaatt

SEQ ID NO: 86094 - DNA, 25 bp, SARS Virus
actcgtttaaaggagaatttaattc

SEQ ID NO: 86095 - DNA, 25 bp, SARS Virus
ctcgtttaaaggggaatttaattct

SEQ ID NO: 86096 - DNA, 25 bp, SARS Virus
tcgtttaaaggagaatttaattctc

SEQ ID NO: 86097 - DNA, 25 bp, SARS Virus
cgtttaaaggaggatttaattctcc

SEQ ID NO: 86098 - DNA, 25 bp, SARS Virus
gtttaaaggagagtttaattctcct

SEQ ID NO: 86099 - DNA, 25 bp, SARS Virus
tttaaaggagaagttaattctcctt

SEQ ID NO: 86100 - DNA, 25 bp, SARS Virus
ttaaaggagaatgtaattctccttg

SEQ ID NO: 86101 - DNA, 25 bp, SARS Virus
taaaggagaattgaattctccttga

SEQ ID NO: 86102 - DNA, 25 bp, SARS Virus
aaaggagaatttgattctccttgac

SEQ ID NO: 86103 - DNA, 25 bp, SARS Virus
aaggagaatttagttctccttgacg

SEQ ID NO: 86104 - DNA, 25 bp, SARS Virus
aggagaatttaagtctccttgacga

SEQ ID NO: 86105 - DNA, 25 bp, SARS Virus
ggagaatttaatgctccttgacgac

SEQ ID NO: 86106 - DNA, 25 bp, SARS Virus
gagaatttaattgtccttgacgaca

SEQ ID NO: 86107 - DNA, 25 bp, SARS Virus
agaatttaattcgccttgacgacat

SEQ ID NO: 86108 - DNA, 25 bp, SARS Virus
gaatttaattctgcttgacgacatt

SEQ ID NO: 86109 - DNA, 25 bp, SARS Virus
aatttaattctcgttgacgacatta

SEQ ID NO: 86110 - DNA, 25 bp, SARS Virus
atttaattctccgtgacgacattac

SEQ ID NO: 86111 - DNA, 25 bp, SARS Virus
tttaattctcctggacgacattaca

SEQ ID NO: 86112 - DNA, 25 bp, SARS Virus
ttaattctccttgacgacattacag

SEQ ID NO: 86113 - DNA, 25 bp, SARS Virus
taattctccttggcgacattacaga

SEQ ID NO: 86114 - DNA, 25 bp, SARS Virus
aattctccttgaggacattacagag

SEQ ID NO: 86115 - DNA, 25 bp, SARS Virus
attctccttgacgacattacagaga

SEQ ID NO: 86116 - DNA, 25 bp, SARS Virus
ttctccttgacggcattacagagaa

SEQ ID NO: 86117 - DNA, 25 bp, SARS Virus
tctccttgacgagattacagagaat

SEQ ID NO: 86118 - DNA, 25 bp, SARS Virus
ctccttgacgacgttacagagaatt

SEQ ID NO: 86119 - DNA, 25 bp, SARS Virus
tccttgacgacagtacagagaattc

SEQ ID NO: 86120 - DNA, 25 bp, SARS Virus
ccttgacgacatgacagagaattcc

SEQ ID NO: 86121 - DNA, 25 bp, SARS Virus
cttgacgacattgcagagaattcct

SEQ ID NO: 86122 - DNA, 25 bp, SARS Virus
ttgacgacattagagagaattcctc

SEQ ID NO: 86123 - DNA, 25 bp, SARS Virus
tgacgacattacggagaattcctct

SEQ ID NO: 86124 - DNA, 25 bp, SARS Virus
gacgacattacagagaattcctctt

SEQ ID NO: 86125 - DNA, 25 bp, SARS Virus
acgacattacagggaattcctctta

SEQ ID NO: 86126 - DNA, 25 bp, SARS Virus
cgacattacagagaattcctcttag

SEQ ID NO: 86127 - DNA, 25 bp, SARS Virus
gacattacagaggattcctcttagt

SEQ ID NO: 86128 - DNA, 25 bp, SARS Virus
acattacagagagttcctcttagtt

SEQ ID NO: 86129 - DNA, 25 bp, SARS Virus
cattacagagaagtcctcttagttt

SEQ ID NO: 86130 - DNA, 25 bp, SARS Virus
attacagagaatgcctcttagttta

SEQ ID NO: 86131 - DNA, 25 bp, SARS Virus
ttacagagaattgctcttagtttag

SEQ ID NO: 86132 - DNA, 25 bp, SARS Virus
tacagagaattcgtcttagtttagt

SEQ ID NO: 86133 - DNA, 25 bp, SARS Virus
acagagaattccgcttagtttagtt

SEQ ID NO: 86134 - DNA, 25 bp, SARS Virus
cagagaattcctgttagtttagtta

SEQ ID NO: 86135 - DNA, 25 bp, SARS Virus
agagaattcctcgtagtttagttac

SEQ ID NO: 86136 - DNA, 25 bp, SARS Virus
gagaattcctctgagtttagttact

SEQ ID NO: 86137 - DNA, 25 bp, SARS Virus
agaattcctcttggtttagttacta

SEQ ID NO: 86138 - DNA, 25 bp, SARS Virus
gaattcctcttagtttagttactat

SEQ ID NO: 86139 - DNA, 25 bp, SARS Virus
aattcctcttaggttagttactata

SEQ ID NO: 86140 - DNA, 25 bp, SARS Virus
attcctcttagtgtagttactatac

SEQ ID NO: 86141 - DNA, 25 bp, SARS Virus
ttcctcttagttgagttactatact

SEQ ID NO: 86142 - DNA, 25 bp, SARS Virus
tcctcttagtttggttactatacta

SEQ ID NO: 86143 - DNA, 25 bp, SARS Virus
cctcttagtttagttactatactaa

SEQ ID NO: 86144 - DNA, 25 bp, SARS Virus
ctcttagtttaggtactatactaaa

SEQ ID NO: 86145 - DNA, 25 bp, SARS Virus
tcttagtttagtgactatactaaat

SEQ ID NO: 86146 - DNA, 25 bp, SARS Virus
cttagtttagttgctatactaaata

SEQ ID NO: 86147 - DNA, 25 bp, SARS Virus
ttagtttagttagtatactaaataa

SEQ ID NO: 86148 - DNA, 25 bp, SARS Virus
tagtttagttacgatactaaataag

SEQ ID NO: 86149 - DNA, 25 bp, SARS Virus
agtttagttactgtactaaataaga

SEQ ID NO: 86150 - DNA, 25 bp, SARS Virus
gtttagttactagactaaataagag

SEQ ID NO: 86151 - DNA, 25 bp, SARS Virus
tttagttactatgctaaataagaga

SEQ ID NO: 86152 - DNA, 25 bp, SARS Virus
ttagttactatagtaaataagagaa

SEQ ID NO: 86153 - DNA, 25 bp, SARS Virus
tagttactatacgaaataagagaag

SEQ ID NO: 86154 - DNA, 25 bp, SARS Virus
agttactatactgaataagagaaga

SEQ ID NO: 86155 - DNA, 25 bp, SARS Virus
gttactatactagataagagaagac

SEQ ID NO: 86156 - DNA, 25 bp, SARS Virus
ttactatactaagtaagagaagacc

SEQ ID NO: 86157 - DNA, 25 bp, SARS Virus
tactatactaaagaagagaagacct

SEQ ID NO: 86158 - DNA, 25 bp, SARS Virus
actatactaaatgagagaagacctt

SEQ ID NO: 86159 - DNA, 25 bp, SARS Virus
ctatactaaataggagaagaccttt

SEQ ID NO: 86160 - DNA, 25 bp, SARS Virus
tatactaaataagagaagacctttt

SEQ ID NO: 86161 - DNA, 25 bp, SARS Virus
atactaaataagggaagaccttttt

SEQ ID NO: 86162 - DNA, 25 bp, SARS Virus
tactaaataagagaagacctttttc

SEQ ID NO: 86163 - DNA, 25 bp, SARS Virus
actaaataagaggagacctttttcc

SEQ ID NO: 86164 - DNA, 25 bp, SARS Virus
ctaaataagagaggacctttttcca

SEQ ID NO: 86165 - DNA, 25 bp, SARS Virus
taaataagagaagacctttttccat

SEQ ID NO: 86166 - DNA, 25 bp, SARS Virus
aaataagagaaggcctttttccatc

SEQ ID NO: 86167 - DNA, 25 bp, SARS Virus
aataagagaagagctttttccatcc

SEQ ID NO: 86168 - DNA, 25 bp, SARS Virus
ataagagaagacgtttttccatccg

SEQ ID NO: 86169 - DNA, 25 bp, SARS Virus
taagagaagaccgttttccatccga

SEQ ID NO: 86170 - DNA, 25 bp, SARS Virus
aagagaagacctgtttccatccgaa

SEQ ID NO: 86171 - DNA, 25 bp, SARS Virus
agagaagaccttgttccatccgaat

SEQ ID NO: 86172 - DNA, 25 bp, SARS Virus
gagaagacctttgtccatccgaata

SEQ ID NO: 86173 - DNA, 25 bp, SARS Virus
agaagaccttttgccatccgaatag

SEQ ID NO: 86174 - DNA, 25 bp, SARS Virus
gaagacctttttgcatccgaatagt

SEQ ID NO: 86175 - DNA, 25 bp, SARS Virus
aagacctttttcgatccgaatagta

SEQ ID NO: 86176 - DNA, 25 bp, SARS Virus
agacctttttccgtccgaatagtaa

SEQ ID NO: 86177 - DNA, 25 bp, SARS Virus
gacctttttccagccgaatagtaat

SEQ ID NO: 86178 - DNA, 25 bp, SARS Virus
acctttttccatgcgaatagtaatc

SEQ ID NO: 86179 - DNA, 25 bp, SARS Virus
cctttttccatcggaatagtaatct

SEQ ID NO: 86180 - DNA, 25 bp, SARS Virus
ctttttccatccgaatagtaatctc

SEQ ID NO: 86181 - DNA, 25 bp, SARS Virus
tttttccatccggatagtaatctct

SEQ ID NO: 86182 - DNA, 25 bp, SARS Virus
ttttccatccgagtagtaatctctt

SEQ ID NO: 86183 - DNA, 25 bp, SARS Virus
tttccatccgaagagtaatctcttt

SEQ ID NO: 86184 - DNA, 25 bp, SARS Virus
ttccatccgaatggtaatctctttt

SEQ ID NO: 86185 - DNA, 25 bp, SARS Virus
tccatccgaatagtaatctcttttg

SEQ ID NO: 86186 - DNA, 25 bp, SARS Virus
ccatccgaataggaatctcttttgt

SEQ ID NO: 86187 - DNA, 25 bp, SARS Virus
catccgaatagtgatctcttttgtt

SEQ ID NO: 86188 - DNA, 25 bp, SARS Virus
atccgaatagtagtctcttttgttg

SEQ ID NO: 86189 - DNA, 25 bp, SARS Virus
tccgaatagtaagctcttttgttgt

SEQ ID NO: 86190 - DNA, 25 bp, SARS Virus
ccgaatagtaatgtcttttgttgtc

SEQ ID NO: 86191 - DNA, 25 bp, SARS Virus
cgaatagtaatcgcttttgttgtct

SEQ ID NO: 86192 - DNA, 25 bp, SARS Virus
gaatagtaatctgttttgttgtctc

SEQ ID NO: 86193 - DNA, 25 bp, SARS Virus
aatagtaatctcgtttgttgtctca

SEQ ID NO: 86194 - DNA, 25 bp, SARS Virus
atagtaatctctgttgttgtctcaa

SEQ ID NO: 86195 - DNA, 25 bp, SARS Virus
tagtaatctcttgtgttgtctcaac

SEQ ID NO: 86196 - DNA, 25 bp, SARS Virus
agtaatctctttggttgtctcaaca

SEQ ID NO: 86197 - DNA, 25 bp, SARS Virus
gtaatctcttttgttgtctcaacac

SEQ ID NO: 86198 - DNA, 25 bp, SARS Virus
taatctcttttggtgtctcaacacc

SEQ ID NO: 86199 - DNA, 25 bp, SARS Virus
aatctcttttgtggtctcaacacca

SEQ ID NO: 86200 - DNA, 25 bp, SARS Virus
atctcttttgttgtctcaacaccaa

SEQ ID NO: 86201 - DNA, 25 bp, SARS Virus
tctcttttgttggctcaacaccaaa

SEQ ID NO: 86202 - DNA, 25 bp, SARS Virus
ctcttttgttgtgtcaacaccaaag

SEQ ID NO: 86203 - DNA, 25 bp, SARS Virus
tcttttgttgtcgcaacaccaaagt

SEQ ID NO: 86204 - DNA, 25 bp, SARS Virus
cttttgttgtctgaacaccaaagtt

SEQ ID NO: 86205 - DNA, 25 bp, SARS Virus
ttttgttgtctcgacaccaaagttc

SEQ ID NO: 86206 - DNA, 25 bp, SARS Virus
tttgttgtctcagcaccaaagttca

SEQ ID NO: 86207 - DNA, 25 bp, SARS Virus
ttgttgtctcaagaccaaagttcac

SEQ ID NO: 86208 - DNA, 25 bp, SARS Virus
tgttgtctcaacgccaaagttcact

SEQ ID NO: 86209 - DNA, 25 bp, SARS Virus
gttgtctcaacagcaaagttcacta

SEQ ID NO: 86210 - DNA, 25 bp, SARS Virus
ttgtctcaacacgaaagttcactat

SEQ ID NO: 86211 - DNA, 25 bp, SARS Virus
tgtctcaacaccgaagttcactata

SEQ ID NO: 86212 - DNA, 25 bp, SARS Virus
gtctcaacaccagagttcactataa

SEQ ID NO: 86213 - DNA, 25 bp, SARS Virus
tctcaacaccaaggttcactataag

SEQ ID NO: 86214 - DNA, 25 bp, SARS Virus
ctcaacaccaaagttcactataaga

SEQ ID NO: 86215 - DNA, 25 bp, SARS Virus
tcaacaccaaaggtcactataagaa

SEQ ID NO: 86216 - DNA, 25 bp, SARS Virus
caacaccaaagtgcactataagaac

SEQ ID NO: 86217 - DNA, 25 bp, SARS Virus
aacaccaaagttgactataagaaca

SEQ ID NO: 86218 - DNA, 25 bp, SARS Virus
acaccaaagttcgctataagaacaa

SEQ ID NO: 86219 - DNA, 25 bp, SARS Virus
caccaaagttcagtataagaacaat

SEQ ID NO: 86220 - DNA, 25 bp, SARS Virus
accaaagttcacgataagaacaatt

SEQ ID NO: 86221 - DNA, 25 bp, SARS Virus
ccaaagttcactgtaagaacaattg

SEQ ID NO: 86222 - DNA, 25 bp, SARS Virus
caaagttcactagaagaacaattgt

SEQ ID NO: 86223 - DNA, 25 bp, SARS Virus
aaagttcactatgagaacaattgtt

SEQ ID NO: 86224 - DNA, 25 bp, SARS Virus
aagttcactataggaacaattgttg

SEQ ID NO: 86225 - DNA, 25 bp, SARS Virus
agttcactataagaacaattgttga

SEQ ID NO: 86226 - DNA, 25 bp, SARS Virus
gttcactataaggacaattgttgat

SEQ ID NO: 86227 - DNA, 25 bp, SARS Virus
ttcactataagagcaattgttgatt

SEQ ID NO: 86228 - DNA, 25 bp, SARS Virus
tcactataagaagaattgttgattt

SEQ ID NO: 86229 - DNA, 25 bp, SARS Virus
cactataagaacgattgttgatttg

SEQ ID NO: 86230 - DNA, 25 bp, SARS Virus
actataagaacagttgttgatttgc

SEQ ID NO: 86231 - DNA, 25 bp, SARS Virus
ctataagaacaagtgttgatttgct

SEQ ID NO: 86232 - DNA, 25 bp, SARS Virus
tataagaacaatggttgatttgctt

SEQ ID NO: 86233 - DNA, 25 bp, SARS Virus
ataagaacaattgttgatttgcttg

SEQ ID NO: 86234 - DNA, 25 bp, SARS Virus
taagaacaattggtgatttgcttgt

SEQ ID NO: 86235 - DNA, 25 bp, SARS Virus
aagaacaattgtggatttgcttgta

SEQ ID NO: 86236 - DNA, 25 bp, SARS Virus
agaacaattgttgatttgcttgtac

SEQ ID NO: 86237 - DNA, 25 bp, SARS Virus
gaacaattgttggtttgcttgtaca

SEQ ID NO: 86238 - DNA, 25 bp, SARS Virus
aacaattgttgagttgcttgtacaa

SEQ ID NO: 86239 - DNA, 25 bp, SARS Virus
acaattgttgatgtgcttgtacaaa

SEQ ID NO: 86240 - DNA, 25 bp, SARS Virus
caattgttgattggcttgtacaaat

SEQ ID NO: 86241 - DNA, 25 bp, SARS Virus
aattgttgatttgcttgtacaaata

SEQ ID NO: 86242 - DNA, 25 bp, SARS Virus
attgttgatttggttgtacaaataa

SEQ ID NO: 86243 - DNA, 25 bp, SARS Virus
ttgttgatttgcgtgtacaaataaa

SEQ ID NO: 86244 - DNA, 25 bp, SARS Virus
tgttgatttgctggtacaaataaaa

SEQ ID NO: 86245 - DNA, 25 bp, SARS Virus
gttgatttgcttgtacaaataaaag

SEQ ID NO: 86246 - DNA, 25 bp, SARS Virus
ttgatttgcttggacaaataaaaga

SEQ ID NO: 86247 - DNA, 25 bp, SARS Virus
tgatttgcttgtgcaaataaaagaa

SEQ ID NO: 86248 - DNA, 25 bp, SARS Virus
gatttgcttgtagaaataaaagaat

SEQ ID NO: 86249 - DNA, 25 bp, SARS Virus
atttgcttgtacgaataaaagaata

SEQ ID NO: 86250 - DNA, 25 bp, SARS Virus
tttgcttgtacagataaaagaataa

SEQ ID NO: 86251 - DNA, 25 bp, SARS Virus
ttgcttgtacaagtaaaagaataat

SEQ ID NO: 86252 - DNA, 25 bp, SARS Virus
tgcttgtacaaagaaaagaataata

SEQ ID NO: 86253 - DNA, 25 bp, SARS Virus
gcttgtacaaatgaaagaataataa

SEQ ID NO: 86254 - DNA, 25 bp, SARS Virus
cttgtacaaatagaagaataataaa

SEQ ID NO: 86255 - DNA, 25 bp, SARS Virus
ttgtacaaataagagaataataaag

SEQ ID NO: 86256 - DNA, 25 bp, SARS Virus
tgtacaaataaaggaataataaaga

SEQ ID NO: 86257 - DNA, 25 bp, SARS Virus
gtacaaataaaagaataataaagaa

SEQ ID NO: 86258 - DNA, 25 bp, SARS Virus
tacaaataaaaggataataaagaat

SEQ ID NO: 86259 - DNA, 25 bp, SARS Virus
acaaataaaagagtaataaagaatg

SEQ ID NO: 86260 - DNA, 25 bp, SARS Virus
caaataaaagaagaataaagaatga

SEQ ID NO: 86261 - DNA, 25 bp, SARS Virus
aaataaaagaatgataaagaatgag

SEQ ID NO: 86262 - DNA, 25 bp, SARS Virus
aataaaagaatagtaaagaatgaga

SEQ ID NO: 86263 - DNA, 25 bp, SARS Virus
ataaaagaataagaaagaatgagag

SEQ ID NO: 86264 - DNA, 25 bp, SARS Virus
taaaagaataatgaagaatgagagt

SEQ ID NO: 86265 - DNA, 25 bp, SARS Virus
aaaagaataatagagaatgagagtg

SEQ ID NO: 86266 - DNA, 25 bp, SARS Virus
aaagaataataaggaatgagagtga

SEQ ID NO: 86267 - DNA, 25 bp, SARS Virus
aagaataataaagaatgagagtgat

SEQ ID NO: 86268 - DNA, 25 bp, SARS Virus
agaataataaaggatgagagtgatc

SEQ ID NO: 86269 - DNA, 25 bp, SARS Virus
gaataataaagagtgagagtgatca

SEQ ID NO: 86270 - DNA, 25 bp, SARS Virus
aataataaagaaggagagtgatcac

SEQ ID NO: 86271 - DNA, 25 bp, SARS Virus
ataataaagaatgagagtgatcacc

SEQ ID NO: 86272 - DNA, 25 bp, SARS Virus
taataaagaatgggagtgatcacca

SEQ ID NO: 86273 - DNA, 25 bp, SARS Virus
aataaagaatgagagtgatcaccat

SEQ ID NO: 86274 - DNA, 25 bp, SARS Virus
ataaagaatgagggtgatcaccatc

SEQ ID NO: 86275 - DNA, 25 bp, SARS Virus
taaagaatgagagtgatcaccatca

SEQ ID NO: 86276 - DNA, 25 bp, SARS Virus
aaagaatgagagggatcaccatcac

SEQ ID NO: 86277 - DNA, 25 bp, SARS Virus
aagaatgagagtgatcaccatcact

SEQ ID NO: 86278 - DNA, 25 bp, SARS Virus
agaatgagagtggtcaccatcactg

SEQ ID NO: 86279 - DNA, 25 bp, SARS Virus
gaatgagagtgagcaccatcactgg

SEQ ID NO: 86280 - DNA, 25 bp, SARS Virus
aatgagagtgatgaccatcactgga

SEQ ID NO: 86281 - DNA, 25 bp, SARS Virus
atgagagtgatcgccatcactggaa

SEQ ID NO: 86282 - DNA, 25 bp, SARS Virus
tgagagtgatcagcatcactggaac

SEQ ID NO: 86283 - DNA, 25 bp, SARS Virus
gagagtgatcacgatcactggaact

SEQ ID NO: 86284 - DNA, 25 bp, SARS Virus
agagtgatcaccgtcactggaactg

SEQ ID NO: 86285 - DNA, 25 bp, SARS Virus
gagtgatcaccagcactggaactgg

SEQ ID NO: 86286 - DNA, 25 bp, SARS Virus
agtgatcaccatgactggaactggc

SEQ ID NO: 86287 - DNA, 25 bp, SARS Virus
gtgatcaccatcgctggaactggcc

SEQ ID NO: 86288 - DNA, 25 bp, SARS Virus
tgatcaccatcagtggaactggcca

SEQ ID NO: 86289 - DNA, 25 bp, SARS Virus
gatcaccatcacgggaactggccac

SEQ ID NO: 86290 - DNA, 25 bp, SARS Virus
atcaccatcactggaactggccacg

SEQ ID NO: 86291 - DNA, 25 bp, SARS Virus
tcaccatcactggaactggccacgt

SEQ ID NO: 86292 - DNA, 25 bp, SARS Virus
caccatcactgggactggccacgtg

SEQ ID NO: 86293 - DNA, 25 bp, SARS Virus
accatcactggagctggccacgtgg

SEQ ID NO: 86294 - DNA, 25 bp, SARS Virus
ccatcactggaagtggccacgtggt

SEQ ID NO: 86295 - DNA, 25 bp, SARS Virus
catcactggaacgggccacgtggtg

SEQ ID NO: 86296 - DNA, 25 bp, SARS Virus
atcactggaactggccacgtggtga

SEQ ID NO: 86297 - DNA, 25 bp, SARS Virus
tcactggaactggccacgtggtgaa

SEQ ID NO: 86298 - DNA, 25 bp, SARS Virus
cactggaactgggcacgtggtgaaa

SEQ ID NO: 86299 - DNA, 25 bp, SARS Virus
actggaactggcgacgtggtgaaaa

SEQ ID NO: 86300 - DNA, 25 bp, SARS Virus
ctggaactggccgcgtggtgaaaac

SEQ ID NO: 86301 - DNA, 25 bp, SARS Virus
tggaactggccaggtggtgaaaact

SEQ ID NO: 86302 - DNA, 25 bp, SARS Virus
ggaactggccacgtggtgaaaacta

SEQ ID NO: 86303 - DNA, 25 bp, SARS Virus
gaactggccacggggtgaaaactac

SEQ ID NO: 86304 - DNA, 25 bp, SARS Virus
aactggccacgtggtgaaaactact

SEQ ID NO: 86305 - DNA, 25 bp, SARS Virus
actggccacgtggtgaaaactacta

SEQ ID NO: 86306 - DNA, 25 bp, SARS Virus
ctggccacgtggggaaaactactac

SEQ ID NO: 86307 - DNA, 25 bp, SARS Virus
tggccacgtggtgaaaactactaca

SEQ ID NO: 86308 - DNA, 25 bp, SARS Virus
ggccacgtggtggaaactactacaa

SEQ ID NO: 86309 - DNA, 25 bp, SARS Virus
gccacgtggtgagaactactacaag

SEQ ID NO: 86310 - DNA, 25 bp, SARS Virus
ccacgtggtgaagactactacaagt

SEQ ID NO: 86311 - DNA, 25 bp, SARS Virus
cacgtggtgaaagctactacaagtt

SEQ ID NO: 86312 - DNA, 25 bp, SARS Virus
acgtggtgaaaagtactacaagttc

SEQ ID NO: 86313 - DNA, 25 bp, SARS Virus
cgtggtgaaaacgactacaagttcg

SEQ ID NO: 86314 - DNA, 25 bp, SARS Virus
gtggtgaaaactgctacaagttcga

SEQ ID NO: 86315 - DNA, 25 bp, SARS Virus
tggtgaaaactagtacaagttcgag

SEQ ID NO: 86316 - DNA, 25 bp, SARS Virus
ggtgaaaactacgacaagttcgagg

SEQ ID NO: 86317 - DNA, 25 bp, SARS Virus
gtgaaaactactgcaagttcgagga

SEQ ID NO: 86318 - DNA, 25 bp, SARS Virus
tgaaaactactagaagttcgaggat

SEQ ID NO: 86319 - DNA, 25 bp, SARS Virus
gaaaactactacgagttcgaggatt

SEQ ID NO: 86320 - DNA, 25 bp, SARS Virus
aaaactactacaggttcgaggatta

SEQ ID NO: 86321 - DNA, 25 bp, SARS Virus
aaactactacaagttcgaggattaa

SEQ ID NO: 86322 - DNA, 25 bp, SARS Virus
aactactacaaggtcgaggattaat

SEQ ID NO: 86323 - DNA, 25 bp, SARS Virus
actactacaagtgcgaggattaatg

SEQ ID NO: 86324 - DNA, 25 bp, SARS Virus
ctactacaagttggaggattaatgt

SEQ ID NO: 86325 - DNA, 25 bp, SARS Virus
tactacaagttcgaggattaatgtg

SEQ ID NO: 86326 - DNA, 25 bp, SARS Virus
actacaagttcggggattaatgtga

SEQ ID NO: 86327 - DNA, 25 bp, SARS Virus
ctacaagttcgaggattaatgtgag

SEQ ID NO: 86328 - DNA, 25 bp, SARS Virus
tacaagttcgaggattaatgtgagt

SEQ ID NO: 86329 - DNA, 25 bp, SARS Virus
acaagttcgagggttaatgtgagtt

SEQ ID NO: 86330 - DNA, 25 bp, SARS Virus
caagttcgaggagtaatgtgagttg

SEQ ID NO: 86331 - DNA, 25 bp, SARS Virus
aagttcgaggatgaatgtgagttgt

SEQ ID NO: 86332 - DNA, 25 bp, SARS Virus
agttcgaggattgatgtgagttgta

SEQ ID NO: 86333 - DNA, 25 bp, SARS Virus
gttcgaggattagtgtgagttgtat

SEQ ID NO: 86334 - DNA, 25 bp, SARS Virus
ttcgaggattaaggtgagttgtatg

SEQ ID NO: 86335 - DNA, 25 bp, SARS Virus
tcgaggattaatgtgagttgtatga

SEQ ID NO: 86336 - DNA, 25 bp, SARS Virus
cgaggattaatgggagttgtatgaa

SEQ ID NO: 86337 - DNA, 25 bp, SARS Virus
gaggattaatgtgagttgtatgaag

SEQ ID NO: 86338 - DNA, 25 bp, SARS Virus
aggattaatgtgggttgtatgaagt

SEQ ID NO: 86339 - DNA, 25 bp, SARS Virus
ggattaatgtgagttgtatgaagta

SEQ ID NO: 86340 - DNA, 25 bp, SARS Virus
gattaatgtgaggtgtatgaagtag

SEQ ID NO: 86341 - DNA, 25 bp, SARS Virus
attaatgtgagtggtatgaagtaga

SEQ ID NO: 86342 - DNA, 25 bp, SARS Virus
ttaatgtgagttgtatgaagtagat

SEQ ID NO: 86343 - DNA, 25 bp, SARS Virus
taatgtgagttggatgaagtagata

SEQ ID NO: 86344 - DNA, 25 bp, SARS Virus
aatgtgagttgtgtgaagtagatac

SEQ ID NO: 86345 - DNA, 25 bp, SARS Virus
atgtgagttgtaggaagtagatact

SEQ ID NO: 86346 - DNA, 25 bp, SARS Virus
tgtgagttgtatgaagtagatactc

SEQ ID NO: 86347 - DNA, 25 bp, SARS Virus
gtgagttgtatggagtagatactcc

SEQ ID NO: 86348 - DNA, 25 bp, SARS Virus
tgagttgtatgaggtagatactccc

SEQ ID NO: 86349 - DNA, 25 bp, SARS Virus
gagttgtatgaagtagatactcccc

SEQ ID NO: 86350 - DNA, 25 bp, SARS Virus
agttgtatgaaggagatactccccc

SEQ ID NO: 86351 - DNA, 25 bp, SARS Virus
gttgtatgaagtggatactcccccc

SEQ ID NO: 86352 - DNA, 25 bp, SARS Virus
ttgtatgaagtagatactcccccca

SEQ ID NO: 86353 - DNA, 25 bp, SARS Virus
tgtatgaagtaggtactccccccaa

SEQ ID NO: 86354 - DNA, 25 bp, SARS Virus
gtatgaagtagagactccccccaaa

SEQ ID NO: 86355 - DNA, 25 bp, SARS Virus
tatgaagtagatgctccccccaaat

SEQ ID NO: 86356 - DNA, 25 bp, SARS Virus
atgaagtagatagtccccccaaatg

SEQ ID NO: 86357 - DNA, 25 bp, SARS Virus
tgaagtagatacgccccccaaatga

SEQ ID NO: 86358 - DNA, 25 bp, SARS Virus
gaagtagatactgcccccaaatgat

SEQ ID NO: 86359 - DNA, 25 bp, SARS Virus
aagtagatactcgccccaaatgata

SEQ ID NO: 86360 - DNA, 25 bp, SARS Virus
agtagatactccgcccaaatgatag

SEQ ID NO: 86361 - DNA, 25 bp, SARS Virus
gtagatactcccgccaaatgatagg

SEQ ID NO: 86362 - DNA, 25 bp, SARS Virus
tagatactccccgcaaatgatagga

SEQ ID NO: 86363 - DNA, 25 bp, SARS Virus
agatactcccccgaaatgataggac

SEQ ID NO: 86364 - DNA, 25 bp, SARS Virus
gatactccccccgaatgataggact

SEQ ID NO: 86365 - DNA, 25 bp, SARS Virus
atactccccccagatgataggacta

SEQ ID NO: 86366 - DNA, 25 bp, SARS Virus
tactccccccaagtgataggactac

SEQ ID NO: 86367 - DNA, 25 bp, SARS Virus
actccccccaaaggataggactact

SEQ ID NO: 86368 - DNA, 25 bp, SARS Virus
ctccccccaaatgataggactactt

SEQ ID NO: 86369 - DNA, 25 bp, SARS Virus
tccccccaaatggtaggactacttt

SEQ ID NO: 86370 - DNA, 25 bp, SARS Virus
ccccccaaatgagaggactacttta

SEQ ID NO: 86371 - DNA, 25 bp, SARS Virus
cccccaaatgatgggactactttaa

SEQ ID NO: 86372 - DNA, 25 bp, SARS Virus
ccccaaatgataggactactttaaa

SEQ ID NO: 86373 - DNA, 25 bp, SARS Virus
cccaaatgataggactactttaaaa

SEQ ID NO: 86374 - DNA, 25 bp, SARS Virus
ccaaatgatagggctactttaaaaa

SEQ ID NO: 86375 - DNA, 25 bp, SARS Virus
caaatgataggagtactttaaaaat

SEQ ID NO: 86376 - DNA, 25 bp, SARS Virus
aaatgataggacgactttaaaaatc

SEQ ID NO: 86377 - DNA, 25 bp, SARS Virus
aatgataggactgctttaaaaatct

SEQ ID NO: 86378 - DNA, 25 bp, SARS Virus
atgataggactagtttaaaaatcta

SEQ ID NO: 86379 - DNA, 25 bp, SARS Virus
tgataggactacgttaaaaatctag

SEQ ID NO: 86380 - DNA, 25 bp, SARS Virus
gataggactactgtaaaaatctagt

SEQ ID NO: 86381 - DNA, 25 bp, SARS Virus
ataggactacttgaaaaatctagtc

SEQ ID NO: 86382 - DNA, 25 bp, SARS Virus
taggactactttgaaaatctagtct

SEQ ID NO: 86383 - DNA, 25 bp, SARS Virus
aggactactttagaaatctagtctg

SEQ ID NO: 86384 - DNA, 25 bp, SARS Virus
ggactactttaagaatctagtctgt

SEQ ID NO: 86385 - DNA, 25 bp, SARS Virus
gactactttaaagatctagtctgtg

SEQ ID NO: 86386 - DNA, 25 bp, SARS Virus
actactttaaaagtctagtctgtga

SEQ ID NO: 86387 - DNA, 25 bp, SARS Virus
ctactttaaaaagctagtctgtgag

SEQ ID NO: 86388 - DNA, 25 bp, SARS Virus
tactttaaaaatgtagtctgtgaga

SEQ ID NO: 86389 - DNA, 25 bp, SARS Virus
actttaaaaatcgagtctgtgagaa

SEQ ID NO: 86390 - DNA, 25 bp, SARS Virus
ctttaaaaatctggtctgtgagaaa

SEQ ID NO: 86391 - DNA, 25 bp, SARS Virus
tttaaaaatctagtctgtgagaaat

SEQ ID NO: 86392 - DNA, 25 bp, SARS Virus
ttaaaaatctaggctgtgagaaata

SEQ ID NO: 86393 - DNA, 25 bp, SARS Virus
taaaaatctagtgtgtgagaaataa

SEQ ID NO: 86394 - DNA, 25 bp, SARS Virus
aaaaatctagtcggtgagaaataaa

SEQ ID NO: 86395 - DNA, 25 bp, SARS Virus
aaaatctagtctgtgagaaataaat

SEQ ID NO: 86396 - DNA, 25 bp, SARS Virus
aaatctagtctgggagaaataaatt

SEQ ID NO: 86397 - DNA, 25 bp, SARS Virus
aatctagtctgtgagaaataaattg

SEQ ID NO: 86398 - DNA, 25 bp, SARS Virus
atctagtctgtgggaaataaattga

SEQ ID NO: 86399 - DNA, 25 bp, SARS Virus
tctagtctgtgagaaataaattgag

SEQ ID NO: 86400 - DNA, 25 bp, SARS Virus
ctagtctgtgaggaataaattgagt

SEQ ID NO: 86401 - DNA, 25 bp, SARS Virus
tagtctgtgagagataaattgagtc

SEQ ID NO: 86402 - DNA, 25 bp, SARS Virus
agtctgtgagaagtaaattgagtcc

SEQ ID NO: 86403 - DNA, 25 bp, SARS Virus
gtctgtgagaaagaaattgagtcct

SEQ ID NO: 86404 - DNA, 25 bp, SARS Virus
tctgtgagaaatgaattgagtccta

SEQ ID NO: 86405 - DNA, 25 bp, SARS Virus
ctgtgagaaatagattgagtcctaa

SEQ ID NO: 86406 - DNA, 25 bp, SARS Virus
tgtgagaaataagttgagtcctaaa

SEQ ID NO: 86407 - DNA, 25 bp, SARS Virus
gtgagaaataaagtgagtcctaaat

SEQ ID NO: 86408 - DNA, 25 bp, SARS Virus
tgagaaataaatggagtcctaaata

SEQ ID NO: 86409 - DNA, 25 bp, SARS Virus
gagaaataaattgagtcctaaataa

SEQ ID NO: 86410 - DNA, 25 bp, SARS Virus
agaaataaattgggtcctaaataaa

SEQ ID NO: 86411 - DNA, 25 bp, SARS Virus
gaaataaattgagtcctaaataaag

SEQ ID NO: 86412 - DNA, 25 bp, SARS Virus
aaataaattgaggcctaaataaaga

SEQ ID NO: 86413 - DNA, 25 bp, SARS Virus
aataaattgagtgctaaataaagaa

SEQ ID NO: 86414 - DNA, 25 bp, SARS Virus
ataaattgagtcgtaaataaagaag

SEQ ID NO: 86415 - DNA, 25 bp, SARS Virus
taaattgagtccgaaataaagaagg

SEQ ID NO: 86416 - DNA, 25 bp, SARS Virus
aaattgagtcctgaataaagaaggt

SEQ ID NO: 86417 - DNA, 25 bp, SARS Virus
aattgagtcctagataaagaaggta

SEQ ID NO: 86418 - DNA, 25 bp, SARS Virus
attgagtcctaagtaaagaaggtaa

SEQ ID NO: 86419 - DNA, 25 bp, SARS Virus
ttgagtcctaaagaaagaaggtaaa

SEQ ID NO: 86420 - DNA, 25 bp, SARS Virus
tgagtcctaaatgaagaaggtaaaa

SEQ ID NO: 86421 - DNA, 25 bp, SARS Virus
gagtcctaaatagagaaggtaaaat

SEQ ID NO: 86422 - DNA, 25 bp, SARS Virus
agtcctaaataaggaaggtaaaata

SEQ ID NO: 86423 - DNA, 25 bp, SARS Virus
gtcctaaataaagaaggtaaaataa

SEQ ID NO: 86424 - DNA, 25 bp, SARS Virus
tcctaaataaaggaggtaaaataag

SEQ ID NO: 86425 - DNA, 25 bp, SARS Virus
cctaaataaagagggtaaaataaga

SEQ ID NO: 86426 - DNA, 25 bp, SARS Virus
ctaaataaagaaggtaaaataagat

SEQ ID NO: 86427 - DNA, 25 bp, SARS Virus
taaataaagaaggtaaaataagatt

SEQ ID NO: 86428 - DNA, 25 bp, SARS Virus
aaataaagaagggaaaataagatta

SEQ ID NO: 86429 - DNA, 25 bp, SARS Virus
aataaagaaggtgaaataagattac

SEQ ID NO: 86430 - DNA, 25 bp, SARS Virus
ataaagaaggtagaataagattaca

SEQ ID NO: 86431 - DNA, 25 bp, SARS Virus
taaagaaggtaagataagattacaa

SEQ ID NO: 86432 - DNA, 25 bp, SARS Virus
aaagaaggtaaagtaagattacaat

SEQ ID NO: 86433 - DNA, 25 bp, SARS Virus
aagaaggtaaaagaagattacaatg

SEQ ID NO: 86434 - DNA, 25 bp, SARS Virus
agaaggtaaaatgagattacaatgt

SEQ ID NO: 86435 - DNA, 25 bp, SARS Virus
gaaggtaaaataggattacaatgtc

SEQ ID NO: 86436 - DNA, 25 bp, SARS Virus
aaggtaaaataagattacaatgtcc

SEQ ID NO: 86437 - DNA, 25 bp, SARS Virus
aggtaaaataaggttacaatgtccc

SEQ ID NO: 86438 - DNA, 25 bp, SARS Virus
ggtaaaataagagtacaatgtccca

SEQ ID NO: 86439 - DNA, 25 bp, SARS Virus
gtaaaataagatgacaatgtcccaa

SEQ ID NO: 86440 - DNA, 25 bp, SARS Virus
taaaataagattgcaatgtcccaaa

SEQ ID NO: 86441 - DNA, 25 bp, SARS Virus
aaaataagattagaatgtcccaaag

SEQ ID NO: 86442 - DNA, 25 bp, SARS Virus
aaataagattacgatgtcccaaagt

SEQ ID NO: 86443 - DNA, 25 bp, SARS Virus
aataagattacagtgtcccaaagta

SEQ ID NO: 86444 - DNA, 25 bp, SARS Virus
ataagattacaaggtcccaaagtat

SEQ ID NO: 86445 - DNA, 25 bp, SARS Virus
taagattacaatgtcccaaagtatg

SEQ ID NO: 86446 - DNA, 25 bp, SARS Virus
aagattacaatggcccaaagtatga

SEQ ID NO: 86447 - DNA, 25 bp, SARS Virus
agattacaatgtgccaaagtatgat

SEQ ID NO: 86448 - DNA, 25 bp, SARS Virus
gattacaatgtcgcaaagtatgata

SEQ ID NO: 86449 - DNA, 25 bp, SARS Virus
attacaatgtccgaaagtatgataa

SEQ ID NO: 86450 - DNA, 25 bp, SARS Virus
ttacaatgtcccgaagtatgataat

SEQ ID NO: 86451 - DNA, 25 bp, SARS Virus
tacaatgtcccagagtatgataatt

SEQ ID NO: 86452 - DNA, 25 bp, SARS Virus
acaatgtcccaaggtatgataatta

SEQ ID NO: 86453 - DNA, 25 bp, SARS Virus
caatgtcccaaagtatgataattag

SEQ ID NO: 86454 - DNA, 25 bp, SARS Virus
aatgtcccaaaggatgataattagt

SEQ ID NO: 86455 - DNA, 25 bp, SARS Virus
atgtcccaaagtgtgataattagta

SEQ ID NO: 86456 - DNA, 25 bp, SARS Virus
tgtcccaaagtaggataattagtat

SEQ ID NO: 86457 - DNA, 25 bp, SARS Virus
gtcccaaagtatgataattagtatg

SEQ ID NO: 86458 - DNA, 25 bp, SARS Virus
tcccaaagtatggtaattagtatgc

SEQ ID NO: 86459 - DNA, 25 bp, SARS Virus
cccaaagtatgagaattagtatgca

SEQ ID NO: 86460 - DNA, 25 bp, SARS Virus
ccaaagtatgatgattagtatgcaa

SEQ ID NO: 86461 - DNA, 25 bp, SARS Virus
caaagtatgatagttagtatgcaaa

SEQ ID NO: 86462 - DNA, 25 bp, SARS Virus
aaagtatgataagtagtatgcaaac

SEQ ID NO: 86463 - DNA, 25 bp, SARS Virus
aagtatgataatgagtatgcaaacc

SEQ ID NO: 86464 - DNA, 25 bp, SARS Virus
agtatgataattggtatgcaaaccg

SEQ ID NO: 86465 - DNA, 25 bp, SARS Virus
gtatgataattagtatgcaaaccgt

SEQ ID NO: 86466 - DNA, 25 bp, SARS Virus
tatgataattaggatgcaaaccgtt

SEQ ID NO: 86467 - DNA, 25 bp, SARS Virus
atgataattagtgtgcaaaccgttg

SEQ ID NO: 86468 - DNA, 25 bp, SARS Virus
tgataattagtaggcaaaccgttgg

SEQ ID NO: 86469 - DNA, 25 bp, SARS Virus
gataattagtatgcaaaccgttggg

SEQ ID NO: 86470 - DNA, 25 bp, SARS Virus
ataattagtatggaaaccgttggga

SEQ ID NO: 86471 - DNA, 25 bp, SARS Virus
taattagtatgcgaaccgttgggac

SEQ ID NO: 86472 - DNA, 25 bp, SARS Virus
aattagtatgcagaccgttgggaca

SEQ ID NO: 86473 - DNA, 25 bp, SARS Virus
attagtatgcaagccgttgggacag

SEQ ID NO: 86474 - DNA, 25 bp, SARS Virus
ttagtatgcaaagcgttgggacagt

SEQ ID NO: 86475 - DNA, 25 bp, SARS Virus
tagtatgcaaacggttgggacagta

SEQ ID NO: 86476 - DNA, 25 bp, SARS Virus
agtatgcaaaccgttgggacagtat

SEQ ID NO: 86477 - DNA, 25 bp, SARS Virus
gtatgcaaaccggtgggacagtatg

SEQ ID NO: 86478 - DNA, 25 bp, SARS Virus
tatgcaaaccgtggggacagtatgg

SEQ ID NO: 86479 - DNA, 25 bp, SARS Virus
atgcaaaccgttgggacagtatgga

SEQ ID NO: 86480 - DNA, 25 bp, SARS Virus
tgcaaaccgttgggacagtatggaa

SEQ ID NO: 86481 - DNA, 25 bp, SARS Virus
gcaaaccgttgggacagtatggaaa

SEQ ID NO: 86482 - DNA, 25 bp, SARS Virus
caaaccgttggggcagtatggaaaa

SEQ ID NO: 86483 - DNA, 25 bp, SARS Virus
aaaccgttgggagagtatggaaaat

SEQ ID NO: 86484 - DNA, 25 bp, SARS Virus
aaccgttgggacggtatggaaaatt

SEQ ID NO: 86485 - DNA, 25 bp, SARS Virus
accgttgggacagtatggaaaattc

SEQ ID NO: 86486 - DNA, 25 bp, SARS Virus
ccgttgggacaggatggaaaattcc

SEQ ID NO: 86487 - DNA, 25 bp, SARS Virus
cgttgggacagtgtggaaaattcct

SEQ ID NO: 86488 - DNA, 25 bp, SARS Virus
gttgggacagtagggaaaattccta

SEQ ID NO: 86489 - DNA, 25 bp, SARS Virus
ttgggacagtatggaaaattcctac

SEQ ID NO: 86490 - DNA, 25 bp, SARS Virus
tgggacagtatggaaaattcctacc

SEQ ID NO: 86491 - DNA, 25 bp, SARS Virus
gggacagtatgggaaattcctacca

SEQ ID NO: 86492 - DNA, 25 bp, SARS Virus
ggacagtatggagaattcctaccat

SEQ ID NO: 86493 - DNA, 25 bp, SARS Virus
gacagtatggaagattcctaccata

SEQ ID NO: 86494 - DNA, 25 bp, SARS Virus
acagtatggaaagttcctaccataa

SEQ ID NO: 86495 - DNA, 25 bp, SARS Virus
cagtatggaaaagtcctaccataaa

SEQ ID NO: 86496 - DNA, 25 bp, SARS Virus
agtatggaaaatgcctaccataaat

SEQ ID NO: 86497 - DNA, 25 bp, SARS Virus
gtatggaaaattgctaccataaata

SEQ ID NO: 86498 - DNA, 25 bp, SARS Virus
tatggaaaattcgtaccataaataa

SEQ ID NO: 86499 - DNA, 25 bp, SARS Virus
atggaaaattccgaccataaataaa

SEQ ID NO: 86500 - DNA, 25 bp, SARS Virus
tggaaaattcctgccataaataaaa

SEQ ID NO: 86501 - DNA, 25 bp, SARS Virus
ggaaaattcctagcataaataaaac

SEQ ID NO: 86502 - DNA, 25 bp, SARS Virus
gaaaattcctacgataaataaaacg

SEQ ID NO: 86503 - DNA, 25 bp, SARS Virus
aaaattcctaccgtaaataaaacga

SEQ ID NO: 86504 - DNA, 25 bp, SARS Virus
aaattcctaccagaaataaaacgac

SEQ ID NO: 86505 - DNA, 25 bp, SARS Virus
gatatggtacgttcgattgatgtaa

SEQ ID NO: 86506 - DNA, 25 bp, SARS Virus
atatggtacgtatgattgatgtaaa

SEQ ID NO: 86507 - DNA, 25 bp, SARS Virus
tatggtacgtactattgatgtaaaa

SEQ ID NO: 86508 - DNA, 25 bp, SARS Virus
atggtacgtacgtttgatgtaaaag

SEQ ID NO: 86509 - DNA, 25 bp, SARS Virus
tggtacgtacgattgatgtaaaaga

SEQ ID NO: 86510 - DNA, 25 bp, SARS Virus
ggtacgtacgattgatgtaaaagac

SEQ ID NO: 86511 - DNA, 25 bp, SARS Virus
gtacgtacgatttatgtaaaagacc

SEQ ID NO: 86512 - DNA, 25 bp, SARS Virus
tacgtacgattgttgtaaaagacct

SEQ ID NO: 86513 - DNA, 25 bp, SARS Virus
acgtacgattgatgtaaaagacctc

SEQ ID NO: 86514 - DNA, 25 bp, SARS Virus
cgtacgattgatttaaaagacctcc

SEQ ID NO: 86515 - DNA, 25 bp, SARS Virus
gtacgattgatgtaaaagacctcct

SEQ ID NO: 86516 - DNA, 25 bp, SARS Virus
tacgattgatgttaaagacctcctt

SEQ ID NO: 86517 - DNA, 25 bp, SARS Virus
acgattgatgtataagacctccttg

SEQ ID NO: 86518 - DNA, 25 bp, SARS Virus
cgattgatgtaatagacctccttgt

SEQ ID NO: 86519 - DNA, 25 bp, SARS Virus
gattgatgtaaatgacctccttgtg

SEQ ID NO: 86520 - DNA, 25 bp, SARS Virus
attgatgtaaaatacctccttgtgt

SEQ ID NO: 86521 - DNA, 25 bp, SARS Virus
ttgatgtaaaagtcctccttgtgtt

SEQ ID NO: 86522 - DNA, 25 bp, SARS Virus
tgatgtaaaagatctccttgtgttt

SEQ ID NO: 86523 - DNA, 25 bp, SARS Virus
gatgtaaaagacttccttgtgttta

SEQ ID NO: 86524 - DNA, 25 bp, SARS Virus
atgtaaaagacctccttgtgtttag

SEQ ID NO: 86525 - DNA, 25 bp, SARS Virus
tgtaaaagaccttcttgtgtttagg

SEQ ID NO: 86526 - DNA, 25 bp, SARS Virus
gtaaaagacctctttgtgtttagga

SEQ ID NO: 86527 - DNA, 25 bp, SARS Virus
taaaagacctccttgtgtttaggat

SEQ ID NO: 86528 - DNA, 25 bp, SARS Virus
aaaagacctccttgtgtttaggata

SEQ ID NO: 86529 - DNA, 25 bp, SARS Virus
aaagacctccttttgtttaggatag

SEQ ID NO: 86530 - DNA, 25 bp, SARS Virus
aagacctccttgtgtttaggatagg

SEQ ID NO: 86531 - DNA, 25 bp, SARS Virus
agacctccttgtttttaggataggt

SEQ ID NO: 86532 - DNA, 25 bp, SARS Virus
gacctccttgtgtttaggataggtc

SEQ ID NO: 86533 - DNA, 25 bp, SARS Virus
acctccttgtgtttaggataggtca

SEQ ID NO: 86534 - DNA, 25 bp, SARS Virus
cctccttgtgtttaggataggtcaa

SEQ ID NO: 86535 - DNA, 25 bp, SARS Virus
ctccttgtgttttggataggtcaac

SEQ ID NO: 86536 - DNA, 25 bp, SARS Virus
tccttgtgtttatgataggtcaaca

SEQ ID NO: 86537 - DNA, 25 bp, SARS Virus
ccttgtgtttagtataggtcaacag

SEQ ID NO: 86538 - DNA, 25 bp, SARS Virus
cttgtgtttaggttaggtcaacaga

SEQ ID NO: 86539 - DNA, 25 bp, SARS Virus
ttgtgtttaggataggtcaacagaa

SEQ ID NO: 86540 - DNA, 25 bp, SARS Virus
tgtgtttaggattggtcaacagaag

SEQ ID NO: 86541 - DNA, 25 bp, SARS Virus
gtgtttaggatatgtcaacagaagg

SEQ ID NO: 86542 - DNA, 25 bp, SARS Virus
tgtttaggatagttcaacagaagga

SEQ ID NO: 86543 - DNA, 25 bp, SARS Virus
gtttaggataggtcaacagaaggat

SEQ ID NO: 86544 - DNA, 25 bp, SARS Virus
tttaggataggttaacagaaggata

SEQ ID NO: 86545 - DNA, 25 bp, SARS Virus
ttaggataggtctacagaaggataa

SEQ ID NO: 86546 - DNA, 25 bp, SARS Virus
taggataggtcatcagaaggataag

SEQ ID NO: 86547 - DNA, 25 bp, SARS Virus
aggataggtcaatagaaggataagt

SEQ ID NO: 86548 - DNA, 25 bp, SARS Virus
ggataggtcaactgaaggataagtg

SEQ ID NO: 86549 - DNA, 25 bp, SARS Virus
gataggtcaacataaggataagtga

SEQ ID NO: 86550 - DNA, 25 bp, SARS Virus
ataggtcaacagtaggataagtgag

SEQ ID NO: 86551 - DNA, 25 bp, SARS Virus
taggtcaacagatggataagtgaga

SEQ ID NO: 86552 - DNA, 25 bp, SARS Virus
aggtcaacagaatgataagtgagaa

SEQ ID NO: 86553 - DNA, 25 bp, SARS Virus
ggtcaacagaagtataagtgagaaa

SEQ ID NO: 86554 - DNA, 25 bp, SARS Virus
gtcaacagaaggttaagtgagaaac

SEQ ID NO: 86555 - DNA, 25 bp, SARS Virus
tcaacagaaggataagtgagaaact

SEQ ID NO: 86556 - DNA, 25 bp, SARS Virus
caacagaaggattagtgagaaactg

SEQ ID NO: 86557 - DNA, 25 bp, SARS Virus
aacagaaggatatgtgagaaactgt

SEQ ID NO: 86558 - DNA, 25 bp, SARS Virus
acagaaggataattgagaaactgta

SEQ ID NO: 86559 - DNA, 25 bp, SARS Virus
cagaaggataagtgagaaactgtac

SEQ ID NO: 86560 - DNA, 25 bp, SARS Virus
agaaggataagttagaaactgtact

SEQ ID NO: 86561 - DNA, 25 bp, SARS Virus
gaaggataagtgtgaaactgtactc

SEQ ID NO: 86562 - DNA, 25 bp, SARS Virus
aaggataagtgataaactgtactcg

SEQ ID NO: 86563 - DNA, 25 bp, SARS Virus
aggataagtgagtaactgtactcgt

SEQ ID NO: 86564 - DNA, 25 bp, SARS Virus
ggataagtgagatactgtactcgtt

SEQ ID NO: 86565 - DNA, 25 bp, SARS Virus
gataagtgagaatctgtactcgttt

SEQ ID NO: 86566 - DNA, 25 bp, SARS Virus
ataagtgagaaattgtactcgttta

SEQ ID NO: 86567 - DNA, 25 bp, SARS Virus
taagtgagaaactgtactcgtttaa

SEQ ID NO: 86568 - DNA, 25 bp, SARS Virus
aagtgagaaactttactcgtttaaa

SEQ ID NO: 86569 - DNA, 25 bp, SARS Virus
agtgagaaactgtactcgtttaaag

SEQ ID NO: 86570 - DNA, 25 bp, SARS Virus
gtgagaaactgttctcgtttaaagg

SEQ ID NO: 86571 - DNA, 25 bp, SARS Virus
tgagaaactgtattcgtttaaagga

SEQ ID NO: 86572 - DNA, 25 bp, SARS Virus
gagaaactgtactcgtttaaaggag

SEQ ID NO: 86573 - DNA, 25 bp, SARS Virus
agaaactgtacttgtttaaaggaga

SEQ ID NO: 86574 - DNA, 25 bp, SARS Virus
gaaactgtactcttttaaaggagaa

SEQ ID NO: 86575 - DNA, 25 bp, SARS Virus
aaactgtactcgtttaaaggagaat

SEQ ID NO: 86576 - DNA, 25 bp, SARS Virus
aactgtactcgtttaaaggagaatt

SEQ ID NO: 86577 - DNA, 25 bp, SARS Virus
actgtactcgtttaaaggagaattt

SEQ ID NO: 86578 - DNA, 25 bp, SARS Virus
ctgtactcgttttaaggagaattta

SEQ ID NO: 86579 - DNA, 25 bp, SARS Virus
tgtactcgtttataggagaatttaa

SEQ ID NO: 86580 - DNA, 25 bp, SARS Virus
gtactcgtttaatggagaatttaat

SEQ ID NO: 86581 - DNA, 25 bp, SARS Virus
tactcgtttaaatgagaatttaatt

SEQ ID NO: 86582 - DNA, 25 bp, SARS Virus
actcgtttaaagtagaatttaattc

SEQ ID NO: 86583 - DNA, 25 bp, SARS Virus
ctcgtttaaaggtgaatttaattct

SEQ ID NO: 86584 - DNA, 25 bp, SARS Virus
tcgtttaaaggataatttaattctc

SEQ ID NO: 86585 - DNA, 25 bp, SARS Virus
cgtttaaaggagtatttaattctcc

SEQ ID NO: 86586 - DNA, 25 bp, SARS Virus
gtttaaaggagattttaattctcct

SEQ ID NO: 86587 - DNA, 25 bp, SARS Virus
tttaaaggagaatttaattctcctt

SEQ ID NO: 86588 - DNA, 25 bp, SARS Virus
ttaaaggagaatttaattctccttg

SEQ ID NO: 86589 - DNA, 25 bp, SARS Virus
taaaggagaatttaattctccttga

SEQ ID NO: 86590 - DNA, 25 bp, SARS Virus
aaaggagaattttattctccttgac

SEQ ID NO: 86591 - DNA, 25 bp, SARS Virus
aaggagaatttatttctccttgacg

SEQ ID NO: 86592 - DNA, 25 bp, SARS Virus
aggagaatttaattctccttgacga

SEQ ID NO: 86593 - DNA, 25 bp, SARS Virus
ggagaatttaattctccttgacgac

SEQ ID NO: 86594 - DNA, 25 bp, SARS Virus
gagaatttaattttccttgacgaca

SEQ ID NO: 86595 - DNA, 25 bp, SARS Virus
agaatttaattctccttgacgacat

SEQ ID NO: 86596 - DNA, 25 bp, SARS Virus
gaatttaattcttcttgacgacatt

SEQ ID NO: 86597 - DNA, 25 bp, SARS Virus
aatttaattctctttgacgacatta

SEQ ID NO: 86598 - DNA, 25 bp, SARS Virus
atttaattctccttgacgacattac

SEQ ID NO: 86599 - DNA, 25 bp, SARS Virus
tttaattctccttgacgacattaca

SEQ ID NO: 86600 - DNA, 25 bp, SARS Virus
ttaattctcctttacgacattacag

SEQ ID NO: 86601 - DNA, 25 bp, SARS Virus
taattctccttgtcgacattacaga

SEQ ID NO: 86602 - DNA, 25 bp, SARS Virus
aattctccttgatgacattacagag

SEQ ID NO: 86603 - DNA, 25 bp, SARS Virus
attctccttgactacattacagaga

SEQ ID NO: 86604 - DNA, 25 bp, SARS Virus
ttctccttgacgtcattacagagaa

SEQ ID NO: 86605 - DNA, 25 bp, SARS Virus
tctccttgacgatattacagagaat

SEQ ID NO: 86606 - DNA, 25 bp, SARS Virus
ctccttgacgactttacagagaatt

SEQ ID NO: 86607 - DNA, 25 bp, SARS Virus
tccttgacgacattacagagaattc

SEQ ID NO: 86608 - DNA, 25 bp, SARS Virus
ccttgacgacattacagagaattcc

SEQ ID NO: 86609 - DNA, 25 bp, SARS Virus
cttgacgacatttcagagaattcct

SEQ ID NO: 86610 - DNA, 25 bp, SARS Virus
ttgacgacattatagagaattcctc

SEQ ID NO: 86611 - DNA, 25 bp, SARS Virus
tgacgacattactgagaattcctct

SEQ ID NO: 86612 - DNA, 25 bp, SARS Virus
gacgacattacatagaattcctctt

SEQ ID NO: 86613 - DNA, 25 bp, SARS Virus
acgacattacagtgaattcctctta

SEQ ID NO: 86614 - DNA, 25 bp, SARS Virus
cgacattacagataattcctcttag

SEQ ID NO: 86615 - DNA, 25 bp, SARS Virus
gacattacagagtattcctcttagt

SEQ ID NO: 86616 - DNA, 25 bp, SARS Virus
acattacagagatttcctcttagtt

SEQ ID NO: 86617 - DNA, 25 bp, SARS Virus
cattacagagaattcctcttagttt

SEQ ID NO: 86618 - DNA, 25 bp, SARS Virus
attacagagaattcctcttagttta

SEQ ID NO: 86619 - DNA, 25 bp, SARS Virus
ttacagagaatttctcttagtttag

SEQ ID NO: 86620 - DNA, 25 bp, SARS Virus
tacagagaattcttcttagtttagt

SEQ ID NO: 86621 - DNA, 25 bp, SARS Virus
acagagaattcctcttagtttagtt

SEQ ID NO: 86622 - DNA, 25 bp, SARS Virus
cagagaattccttttagtttagtta

SEQ ID NO: 86623 - DNA, 25 bp, SARS Virus
agagaattcctcttagtttagttac

SEQ ID NO: 86624 - DNA, 25 bp, SARS Virus
gagaattcctcttagtttagttact

SEQ ID NO: 86625 - DNA, 25 bp, SARS Virus
agaattcctctttgtttagttacta

SEQ ID NO: 86626 - DNA, 25 bp, SARS Virus
gaattcctcttattttagttactat

SEQ ID NO: 86627 - DNA, 25 bp, SARS Virus
aattcctcttagtttagttactata

SEQ ID NO: 86628 - DNA, 25 bp, SARS Virus
attcctcttagtttagttactatac

SEQ ID NO: 86629 - DNA, 25 bp, SARS Virus
ttcctcttagtttagttactatact

SEQ ID NO: 86630 - DNA, 25 bp, SARS Virus
tcctcttagttttgttactatacta

SEQ ID NO: 86631 - DNA, 25 bp, SARS Virus
cctcttagtttatttactatactaa

SEQ ID NO: 86632 - DNA, 25 bp, SARS Virus
ctcttagtttagttactatactaaa

SEQ ID NO: 86633 - DNA, 25 bp, SARS Virus
tcttagtttagttactatactaaat

SEQ ID NO: 86634 - DNA, 25 bp, SARS Virus
cttagtttagtttctatactaaata

SEQ ID NO: 86635 - DNA, 25 bp, SARS Virus
ttagtttagttattatactaaataa

SEQ ID NO: 86636 - DNA, 25 bp, SARS Virus
tagtttagttactatactaaataag

SEQ ID NO: 86637 - DNA, 25 bp, SARS Virus
agtttagttactttactaaataaga

SEQ ID NO: 86638 - DNA, 25 bp, SARS Virus
gtttagttactatactaaataagag

SEQ ID NO: 86639 - DNA, 25 bp, SARS Virus
tttagttactattctaaataagaga

SEQ ID NO: 86640 - DNA, 25 bp, SARS Virus
ttagttactatattaaataagagaa

SEQ ID NO: 86641 - DNA, 25 bp, SARS Virus
tagttactatactaaataagagaag

SEQ ID NO: 86642 - DNA, 25 bp, SARS Virus
agttactatacttaataagagaaga

SEQ ID NO: 86643 - DNA, 25 bp, SARS Virus
gttactatactatataagagaagac

SEQ ID NO: 86644 - DNA, 25 bp, SARS Virus
ttactatactaattaagagaagacc

SEQ ID NO: 86645 - DNA, 25 bp, SARS Virus
tactatactaaataagagaagacct

SEQ ID NO: 86646 - DNA, 25 bp, SARS Virus
actatactaaattagagaagacctt

SEQ ID NO: 86647 - DNA, 25 bp, SARS Virus
ctatactaaatatgagaagaccttt

SEQ ID NO: 86648 - DNA, 25 bp, SARS Virus
tatactaaataatagaagacctttt

SEQ ID NO: 86649 - DNA, 25 bp, SARS Virus
atactaaataagtgaagaccttttt

SEQ ID NO: 86650 - DNA, 25 bp, SARS Virus
tactaaataagataagacctttttc

SEQ ID NO: 86651 - DNA, 25 bp, SARS Virus
actaaataagagtagacctttttcc

SEQ ID NO: 86652 - DNA, 25 bp, SARS Virus
ctaaataagagatgacctttttcca

SEQ ID NO: 86653 - DNA, 25 bp, SARS Virus
taaataagagaatacctttttccat

SEQ ID NO: 86654 - DNA, 25 bp, SARS Virus
aaataagagaagtcctttttccatc

SEQ ID NO: 86655 - DNA, 25 bp, SARS Virus
aataagagaagatctttttccatcc

SEQ ID NO: 86656 - DNA, 25 bp, SARS Virus
ataagagaagacttttttccatccg

SEQ ID NO: 86657 - DNA, 25 bp, SARS Virus
taagagaagacctttttccatccga

SEQ ID NO: 86658 - DNA, 25 bp, SARS Virus
aagagaagacctttttccatccgaa

SEQ ID NO: 86659 - DNA, 25 bp, SARS Virus
agagaagacctttttccatccgaat

SEQ ID NO: 86660 - DNA, 25 bp, SARS Virus
gagaagacctttttccatccgaata

SEQ ID NO: 86661 - DNA, 25 bp, SARS Virus
agaagacctttttccatccgaatag

SEQ ID NO: 86662 - DNA, 25 bp, SARS Virus
gaagaccttttttcatccgaatagt

SEQ ID NO: 86663 - DNA, 25 bp, SARS Virus
aagacctttttctatccgaatagta

SEQ ID NO: 86664 - DNA, 25 bp, SARS Virus
agacctttttccttccgaatagtaa

SEQ ID NO: 86665 - DNA, 25 bp, SARS Virus
gacctttttccatccgaatagtaat

SEQ ID NO: 86666 - DNA, 25 bp, SARS Virus
acctttttccattcgaatagtaatc

SEQ ID NO: 86667 - DNA, 25 bp, SARS Virus
cctttttccatctgaatagtaatct

SEQ ID NO: 86668 - DNA, 25 bp, SARS Virus
ctttttccatcctaatagtaatctc

SEQ ID NO: 86669 - DNA, 25 bp, SARS Virus
tttttccatccgtatagtaatctct

SEQ ID NO: 86670 - DNA, 25 bp, SARS Virus
ttttccatccgattagtaatctctt

SEQ ID NO: 86671 - DNA, 25 bp, SARS Virus
tttccatccgaatagtaatctcttt

SEQ ID NO: 86672 - DNA, 25 bp, SARS Virus
ttccatccgaattgtaatctctttt

SEQ ID NO: 86673 - DNA, 25 bp, SARS Virus
tccatccgaatattaatctcttttg

SEQ ID NO: 86674 - DNA, 25 bp, SARS Virus
ccatccgaatagtaatctcttttgt

SEQ ID NO: 86675 - DNA, 25 bp, SARS Virus
catccgaatagttatctcttttgtt

SEQ ID NO: 86676 - DNA, 25 bp, SARS Virus
atccgaatagtattctcttttgttg

SEQ ID NO: 86677 - DNA, 25 bp, SARS Virus
tccgaatagtaatctcttttgttgt

SEQ ID NO: 86678 - DNA, 25 bp, SARS Virus
ccgaatagtaatttcttttgttgtc

SEQ ID NO: 86679 - DNA, 25 bp, SARS Virus
cgaatagtaatctcttttgttgtct

SEQ ID NO: 86680 - DNA, 25 bp, SARS Virus
gaatagtaatcttttttgttgtctc

SEQ ID NO: 86681 - DNA, 25 bp, SARS Virus
aatagtaatctcttttgttgtctca

SEQ ID NO: 86682 - DNA, 25 bp, SARS Virus
atagtaatctcttttgttgtctcaa

SEQ ID NO: 86683 - DNA, 25 bp, SARS Virus
tagtaatctcttttgttgtctcaac

SEQ ID NO: 86684 - DNA, 25 bp, SARS Virus
agtaatctcttttgttgtctcaaca

SEQ ID NO: 86685 - DNA, 25 bp, SARS Virus
gtaatctctttttttgtctcaacac

SEQ ID NO: 86686 - DNA, 25 bp, SARS Virus
taatctcttttgttgtctcaacacc

SEQ ID NO: 86687 - DNA, 25 bp, SARS Virus
aatctcttttgttgtctcaacacca

SEQ ID NO: 86688 - DNA, 25 bp, SARS Virus
atctcttttgttttctcaacaccaa

SEQ ID NO: 86689 - DNA, 25 bp, SARS Virus
tctcttttgttgtctcaacaccaaa

SEQ ID NO: 86690 - DNA, 25 bp, SARS Virus
ctcttttgttgtttcaacaccaaag

SEQ ID NO: 86691 - DNA, 25 bp, SARS Virus
tcttttgttgtctcaacaccaaagt

SEQ ID NO: 86692 - DNA, 25 bp, SARS Virus
cttttgttgtcttaacaccaaagtt

SEQ ID NO: 86693 - DNA, 25 bp, SARS Virus
ttttgttgtctctacaccaaagttc

SEQ ID NO: 86694 - DNA, 25 bp, SARS Virus
tttgttgtctcatcaccaaagttca

SEQ ID NO: 86695 - DNA, 25 bp, SARS Virus
ttgttgtctcaataccaaagttcac

SEQ ID NO: 86696 - DNA, 25 bp, SARS Virus
tgttgtctcaactccaaagttcact

SEQ ID NO: 86697 - DNA, 25 bp, SARS Virus
gttgtctcaacatcaaagttcacta

SEQ ID NO: 86698 - DNA, 25 bp, SARS Virus
ttgtctcaacactaaagttcactat

SEQ ID NO: 86699 - DNA, 25 bp, SARS Virus
tgtctcaacacctaagttcactata

SEQ ID NO: 86700 - DNA, 25 bp, SARS Virus
gtctcaacaccatagttcactataa

SEQ ID NO: 86701 - DNA, 25 bp, SARS Virus
tctcaacaccaatgttcactataag

SEQ ID NO: 86702 - DNA, 25 bp, SARS Virus
ctcaacaccaaatttcactataaga

SEQ ID NO: 86703 - DNA, 25 bp, SARS Virus
tcaacaccaaagttcactataagaa

SEQ ID NO: 86704 - DNA, 25 bp, SARS Virus
caacaccaaagttcactataagaac

SEQ ID NO: 86705 - DNA, 25 bp, SARS Virus
aacaccaaagtttactataagaaca

SEQ ID NO: 86706 - DNA, 25 bp, SARS Virus
acaccaaagttctctataagaacaa

SEQ ID NO: 86707 - DNA, 25 bp, SARS Virus
caccaaagttcattataagaacaat

SEQ ID NO: 86708 - DNA, 25 bp, SARS Virus
accaaagttcactataagaacaatt

SEQ ID NO: 86709 - DNA, 25 bp, SARS Virus
ccaaagttcactttaagaacaattg

SEQ ID NO: 86710 - DNA, 25 bp, SARS Virus
caaagttcactataagaacaattgt

SEQ ID NO: 86711 - DNA, 25 bp, SARS Virus
aaagttcactattagaacaattgtt

SEQ ID NO: 86712 - DNA, 25 bp, SARS Virus
aagttcactatatgaacaattgttg

SEQ ID NO: 86713 - DNA, 25 bp, SARS Virus
agttcactataataacaattgttga

SEQ ID NO: 86714 - DNA, 25 bp, SARS Virus
gttcactataagtacaattgttgat

SEQ ID NO: 86715 - DNA, 25 bp, SARS Virus
ttcactataagatcaattgttgatt

SEQ ID NO: 86716 - DNA, 25 bp, SARS Virus
tcactataagaataattgttgattt

SEQ ID NO: 86717 - DNA, 25 bp, SARS Virus
cactataagaactattgttgatttg

SEQ ID NO: 86718 - DNA, 25 bp, SARS Virus
actataagaacatttgttgatttgc

SEQ ID NO: 86719 - DNA, 25 bp, SARS Virus
ctataagaacaattgttgatttgct

SEQ ID NO: 86720 - DNA, 25 bp, SARS Virus
tataagaacaattgttgatttgctt

SEQ ID NO: 86721 - DNA, 25 bp, SARS Virus
ataagaacaatttttgatttgcttg

SEQ ID NO: 86722 - DNA, 25 bp, SARS Virus
taagaacaattgttgatttgcttgt

SEQ ID NO: 86723 - DNA, 25 bp, SARS Virus
aagaacaattgttgatttgcttgta

SEQ ID NO: 86724 - DNA, 25 bp, SARS Virus
agaacaattgtttatttgcttgtac

SEQ ID NO: 86725 - DNA, 25 bp, SARS Virus
gaacaattgttgttttgcttgtaca

SEQ ID NO: 86726 - DNA, 25 bp, SARS Virus
aacaattgttgatttgcttgtacaa

SEQ ID NO: 86727 - DNA, 25 bp, SARS Virus
acaattgttgatttgcttgtacaaa

SEQ ID NO: 86728 - DNA, 25 bp, SARS Virus
caattgttgatttgcttgtacaaat

SEQ ID NO: 86729 - DNA, 25 bp, SARS Virus
aattgttgattttcttgtacaaata

SEQ ID NO: 86730 - DNA, 25 bp, SARS Virus
attgttgatttgtttgtacaaataa

SEQ ID NO: 86731 - DNA, 25 bp, SARS Virus
ttgttgatttgcttgtacaaataaa

SEQ ID NO: 86732 - DNA, 25 bp, SARS Virus
tgttgatttgcttgtacaaataaaa

SEQ ID NO: 86733 - DNA, 25 bp, SARS Virus
gttgatttgcttttacaaataaaag

SEQ ID NO: 86734 - DNA, 25 bp, SARS Virus
ttgatttgcttgtacaaataaaaga

SEQ ID NO: 86735 - DNA, 25 bp, SARS Virus
tgatttgcttgttcaaataaaagaa

SEQ ID NO: 86736 - DNA, 25 bp, SARS Virus
gatttgcttgtataaataaaagaat

SEQ ID NO: 86737 - DNA, 25 bp, SARS Virus
atttgcttgtactaataaaagaata

SEQ ID NO: 86738 - DNA, 25 bp, SARS Virus
tttgcttgtacatataaaagaataa

SEQ ID NO: 86739 - DNA, 25 bp, SARS Virus
ttgcttgtacaattaaaagaataat

SEQ ID NO: 86740 - DNA, 25 bp, SARS Virus
tgcttgtacaaataaaagaataata

SEQ ID NO: 86741 - DNA, 25 bp, SARS Virus
gcttgtacaaattaaagaataataa

SEQ ID NO: 86742 - DNA, 25 bp, SARS Virus
cttgtacaaatataagaataataaa

SEQ ID NO: 86743 - DNA, 25 bp, SARS Virus
ttgtacaaataatagaataataaag

SEQ ID NO: 86744 - DNA, 25 bp, SARS Virus
tgtacaaataaatgaataataaaga

SEQ ID NO: 86745 - DNA, 25 bp, SARS Virus
gtacaaataaaataataataaagaa

SEQ ID NO: 86746 - DNA, 25 bp, SARS Virus
tacaaataaaagtataataaagaat

SEQ ID NO: 86747 - DNA, 25 bp, SARS Virus
acaaataaaagattaataaagaatg

SEQ ID NO: 86748 - DNA, 25 bp, SARS Virus
caaataaaagaataataaagaatga

SEQ ID NO: 86749 - DNA, 25 bp, SARS Virus
aaataaaagaattataaagaatgag

SEQ ID NO: 86750 - DNA, 25 bp, SARS Virus
aataaaagaatattaaagaatgaga

SEQ ID NO: 86751 - DNA, 25 bp, SARS Virus
ataaaagaataataaagaatgagag

SEQ ID NO: 86752 - DNA, 25 bp, SARS Virus
taaaagaataattaagaatgagagt

SEQ ID NO: 86753 - DNA, 25 bp, SARS Virus
aaaagaataatatagaatgagagtg

SEQ ID NO: 86754 - DNA, 25 bp, SARS Virus
aaagaataataatgaatgagagtga

SEQ ID NO: 86755 - DNA, 25 bp, SARS Virus
aagaataataaataatgagagtgat

SEQ ID NO: 86756 - DNA, 25 bp, SARS Virus
agaataataaagtatgagagtgatc

SEQ ID NO: 86757 - DNA, 25 bp, SARS Virus
gaataataaagattgagagtgatca

SEQ ID NO: 86758 - DNA, 25 bp, SARS Virus
aataataaagaatgagagtgatcac

SEQ ID NO: 86759 - DNA, 25 bp, SARS Virus
ataataaagaattagagtgatcacc

SEQ ID NO: 86760 - DNA, 25 bp, SARS Virus
taataaagaatgtgagtgatcacca

SEQ ID NO: 86761 - DNA, 25 bp, SARS Virus
aataaagaatgatagtgatcaccat

SEQ ID NO: 86762 - DNA, 25 bp, SARS Virus
ataaagaatgagtgtgatcaccatc

SEQ ID NO: 86763 - DNA, 25 bp, SARS Virus
taaagaatgagattgatcaccatca

SEQ ID NO: 86764 - DNA, 25 bp, SARS Virus
aaagaatgagagtgatcaccatcac

SEQ ID NO: 86765 - DNA, 25 bp, SARS Virus
aagaatgagagttatcaccatcact

SEQ ID NO: 86766 - DNA, 25 bp, SARS Virus
agaatgagagtgttcaccatcactg

SEQ ID NO: 86767 - DNA, 25 bp, SARS Virus
gaatgagagtgatcaccatcactgg

SEQ ID NO: 86768 - DNA, 25 bp, SARS Virus
aatgagagtgattaccatcactgga

SEQ ID NO: 86769 - DNA, 25 bp, SARS Virus
atgagagtgatctccatcactggaa

SEQ ID NO: 86770 - DNA, 25 bp, SARS Virus
tgagagtgatcatcatcactggaac

SEQ ID NO: 86771 - DNA, 25 bp, SARS Virus
gagagtgatcactatcactggaact

SEQ ID NO: 86772 - DNA, 25 bp, SARS Virus
agagtgatcaccttcactggaactg

SEQ ID NO: 86773 - DNA, 25 bp, SARS Virus
gagtgatcaccatcactggaactgg

SEQ ID NO: 86774 - DNA, 25 bp, SARS Virus
agtgatcaccattactggaactggc

SEQ ID NO: 86775 - DNA, 25 bp, SARS Virus
gtgatcaccatctctggaactggcc

SEQ ID NO: 86776 - DNA, 25 bp, SARS Virus
tgatcaccatcattggaactggcca

SEQ ID NO: 86777 - DNA, 25 bp, SARS Virus
gatcaccatcactggaactggccac

SEQ ID NO: 86778 - DNA, 25 bp, SARS Virus
atcaccatcacttgaactggccacg

SEQ ID NO: 86779 - DNA, 25 bp, SARS Virus
tcaccatcactgtaactggccacgt

SEQ ID NO: 86780 - DNA, 25 bp, SARS Virus
caccatcactggtactggccacgtg

SEQ ID NO: 86781 - DNA, 25 bp, SARS Virus
accatcactggatctggccacgtgg

SEQ ID NO: 86782 - DNA, 25 bp, SARS Virus
ccatcactggaattggccacgtggt

SEQ ID NO: 86783 - DNA, 25 bp, SARS Virus
catcactggaactggccacgtggtg

SEQ ID NO: 86784 - DNA, 25 bp, SARS Virus
atcactggaacttgccacgtggtga

SEQ ID NO: 86785 - DNA, 25 bp, SARS Virus
tcactggaactgtccacgtggtgaa

SEQ ID NO: 86786 - DNA, 25 bp, SARS Virus
cactggaactggtcacgtggtgaaa

SEQ ID NO: 86787 - DNA, 25 bp, SARS Virus
actggaactggctacgtggtgaaaa

SEQ ID NO: 86788 - DNA, 25 bp, SARS Virus
ctggaactggcctcgtggtgaaaac

SEQ ID NO: 86789 - DNA, 25 bp, SARS Virus
tggaactggccatgtggtgaaaact

SEQ ID NO: 86790 - DNA, 25 bp, SARS Virus
ggaactggccacttggtgaaaacta

SEQ ID NO: 86791 - DNA, 25 bp, SARS Virus
gaactggccacgtggtgaaaactac

SEQ ID NO: 86792 - DNA, 25 bp, SARS Virus
aactggccacgttgtgaaaactact

SEQ ID NO: 86793 - DNA, 25 bp, SARS Virus
actggccacgtgttgaaaactacta

SEQ ID NO: 86794 - DNA, 25 bp, SARS Virus
ctggccacgtggtgaaaactactac

SEQ ID NO: 86795 - DNA, 25 bp, SARS Virus
tggccacgtggttaaaactactaca

SEQ ID NO: 86796 - DNA, 25 bp, SARS Virus
ggccacgtggtgtaaactactacaa

SEQ ID NO: 86797 - DNA, 25 bp, SARS Virus
gccacgtggtgataactactacaag

SEQ ID NO: 86798 - DNA, 25 bp, SARS Virus
ccacgtggtgaatactactacaagt

SEQ ID NO: 86799 - DNA, 25 bp, SARS Virus
cacgtggtgaaatctactacaagtt

SEQ ID NO: 86800 - DNA, 25 bp, SARS Virus
acgtggtgaaaattactacaagttc

SEQ ID NO: 86801 - DNA, 25 bp, SARS Virus
cgtggtgaaaactactacaagttcg

SEQ ID NO: 86802 - DNA, 25 bp, SARS Virus
gtggtgaaaacttctacaagttcga

SEQ ID NO: 86803 - DNA, 25 bp, SARS Virus
tggtgaaaactattacaagttcgag

SEQ ID NO: 86804 - DNA, 25 bp, SARS Virus
ggtgaaaactactacaagttcgagg

SEQ ID NO: 86805 - DNA, 25 bp, SARS Virus
gtgaaaactacttcaagttcgagga

SEQ ID NO: 86806 - DNA, 25 bp, SARS Virus
tgaaaactactataagttcgaggat

SEQ ID NO: 86807 - DNA, 25 bp, SARS Virus
gaaaactactactagttcgaggatt

SEQ ID NO: 86808 - DNA, 25 bp, SARS Virus
aaaactactacatgttcgaggatta

SEQ ID NO: 86809 - DNA, 25 bp, SARS Virus
aaactactacaatttcgaggattaa

SEQ ID NO: 86810 - DNA, 25 bp, SARS Virus
aactactacaagttcgaggattaat

SEQ ID NO: 86811 - DNA, 25 bp, SARS Virus
actactacaagttcgaggattaatg

SEQ ID NO: 86812 - DNA, 25 bp, SARS Virus
ctactacaagtttgaggattaatgt

SEQ ID NO: 86813 - DNA, 25 bp, SARS Virus
tactacaagttctaggattaatgtg

SEQ ID NO: 86814 - DNA, 25 bp, SARS Virus
actacaagttcgtggattaatgtga

SEQ ID NO: 86815 - DNA, 25 bp, SARS Virus
ctacaagttcgatgattaatgtgag

SEQ ID NO: 86816 - DNA, 25 bp, SARS Virus
tacaagttcgagtattaatgtgagt

SEQ ID NO: 86817 - DNA, 25 bp, SARS Virus
acaagttcgaggtttaatgtgagtt

SEQ ID NO: 86818 - DNA, 25 bp, SARS Virus
caagttcgaggattaatgtgagttg

SEQ ID NO: 86819 - DNA, 25 bp, SARS Virus
aagttcgaggattaatgtgagttgt

SEQ ID NO: 86820 - DNA, 25 bp, SARS Virus
agttcgaggatttatgtgagttgta

SEQ ID NO: 86821 - DNA, 25 bp, SARS Virus
gttcgaggattattgtgagttgtat

SEQ ID NO: 86822 - DNA, 25 bp, SARS Virus
ttcgaggattaatgtgagttgtatg

SEQ ID NO: 86823 - DNA, 25 bp, SARS Virus
tcgaggattaatttgagttgtatga

SEQ ID NO: 86824 - DNA, 25 bp, SARS Virus
cgaggattaatgtgagttgtatgaa

SEQ ID NO: 86825 - DNA, 25 bp, SARS Virus
gaggattaatgttagttgtatgaag

SEQ ID NO: 86826 - DNA, 25 bp, SARS Virus
aggattaatgtgtgttgtatgaagt

SEQ ID NO: 86827 - DNA, 25 bp, SARS Virus
ggattaatgtgatttgtatgaagta

SEQ ID NO: 86828 - DNA, 25 bp, SARS Virus
gattaatgtgagttgtatgaagtag

SEQ ID NO: 86829 - DNA, 25 bp, SARS Virus
attaatgtgagttgtatgaagtaga

SEQ ID NO: 86830 - DNA, 25 bp, SARS Virus
ttaatgtgagttttatgaagtagat

SEQ ID NO: 86831 - DNA, 25 bp, SARS Virus
taatgtgagttgtatgaagtagata

SEQ ID NO: 86832 - DNA, 25 bp, SARS Virus
aatgtgagttgtttgaagtagatac

SEQ ID NO: 86833 - DNA, 25 bp, SARS Virus
atgtgagttgtatgaagtagatact

SEQ ID NO: 86834 - DNA, 25 bp, SARS Virus
tgtgagttgtattaagtagatactc

SEQ ID NO: 86835 - DNA, 25 bp, SARS Virus
gtgagttgtatgtagtagatactcc

SEQ ID NO: 86836 - DNA, 25 bp, SARS Virus
tgagttgtatgatgtagatactccc

SEQ ID NO: 86837 - DNA, 25 bp, SARS Virus
gagttgtatgaattagatactcccc

SEQ ID NO: 86838 - DNA, 25 bp, SARS Virus
agttgtatgaagtagatactccccc

SEQ ID NO: 86839 - DNA, 25 bp, SARS Virus
gttgtatgaagttgatactcccccc

SEQ ID NO: 86840 - DNA, 25 bp, SARS Virus
ttgtatgaagtatatactcccccca

SEQ ID NO: 86841 - DNA, 25 bp, SARS Virus
tgtatgaagtagttactccccccaa

SEQ ID NO: 86842 - DNA, 25 bp, SARS Virus
gtatgaagtagatactccccccaaa

SEQ ID NO: 86843 - DNA, 25 bp, SARS Virus
tatgaagtagattctccccccaaat

SEQ ID NO: 86844 - DNA, 25 bp, SARS Virus
atgaagtagatattccccccaaatg

SEQ ID NO: 86845 - DNA, 25 bp, SARS Virus
tgaagtagatactccccccaaatga

SEQ ID NO: 86846 - DNA, 25 bp, SARS Virus
gaagtagatacttcccccaaatgat

SEQ ID NO: 86847 - DNA, 25 bp, SARS Virus
aagtagatactctccccaaatgata

SEQ ID NO: 86848 - DNA, 25 bp, SARS Virus
agtagatactcctcccaaatgatag

SEQ ID NO: 86849 - DNA, 25 bp, SARS Virus
gtagatactccctccaaatgatagg

SEQ ID NO: 86850 - DNA, 25 bp, SARS Virus
tagatactcccctcaaatgatagga

SEQ ID NO: 86851 - DNA, 25 bp, SARS Virus
agatactccccctaaatgataggac

SEQ ID NO: 86852 - DNA, 25 bp, SARS Virus
gatactcccccctaatgataggact

SEQ ID NO: 86853 - DNA, 25 bp, SARS Virus
atactccccccatatgataggacta

SEQ ID NO: 86854 - DNA, 25 bp, SARS Virus
tactccccccaattgataggactac

SEQ ID NO: 86855 - DNA, 25 bp, SARS Virus
actccccccaaatgataggactact

SEQ ID NO: 86856 - DNA, 25 bp, SARS Virus
ctccccccaaattataggactactt

SEQ ID NO: 86857 - DNA, 25 bp, SARS Virus
tccccccaaatgttaggactacttt

SEQ ID NO: 86858 - DNA, 25 bp, SARS Virus
ccccccaaatgataggactacttta

SEQ ID NO: 86859 - DNA, 25 bp, SARS Virus
cccccaaatgattggactactttaa

SEQ ID NO: 86860 - DNA, 25 bp, SARS Virus
ccccaaatgatatgactactttaaa

SEQ ID NO: 86861 - DNA, 25 bp, SARS Virus
cccaaatgatagtactactttaaaa

SEQ ID NO: 86862 - DNA, 25 bp, SARS Virus
ccaaatgataggtctactttaaaaa

SEQ ID NO: 86863 - DNA, 25 bp, SARS Virus
caaatgataggattactttaaaaat

SEQ ID NO: 86864 - DNA, 25 bp, SARS Virus
aaatgataggactactttaaaaatc

SEQ ID NO: 86865 - DNA, 25 bp, SARS Virus
aatgataggacttctttaaaaatct

SEQ ID NO: 86866 - DNA, 25 bp, SARS Virus
atgataggactattttaaaaatcta

SEQ ID NO: 86867 - DNA, 25 bp, SARS Virus
tgataggactactttaaaaatctag

SEQ ID NO: 86868 - DNA, 25 bp, SARS Virus
gataggactactttaaaaatctagt

SEQ ID NO: 86869 - DNA, 25 bp, SARS Virus
ataggactactttaaaaatctagtc

SEQ ID NO: 86870 - DNA, 25 bp, SARS Virus
taggactacttttaaaatctagtct

SEQ ID NO: 86871 - DNA, 25 bp, SARS Virus
aggactactttataaatctagtctg

SEQ ID NO: 86872 - DNA, 25 bp, SARS Virus
ggactactttaataatctagtctgt

SEQ ID NO: 86873 - DNA, 25 bp, SARS Virus
gactactttaaatatctagtctgtg

SEQ ID NO: 86874 - DNA, 25 bp, SARS Virus
actactttaaaattctagtctgtga

SEQ ID NO: 86875 - DNA, 25 bp, SARS Virus
ctactttaaaaatctagtctgtgag

SEQ ID NO: 86876 - DNA, 25 bp, SARS Virus
tactttaaaaatttagtctgtgaga

SEQ ID NO: 86877 - DNA, 25 bp, SARS Virus
actttaaaaatctagtctgtgagaa

SEQ ID NO: 86878 - DNA, 25 bp, SARS Virus
ctttaaaaatcttgtctgtgagaaa

SEQ ID NO: 86879 - DNA, 25 bp, SARS Virus
tttaaaaatctattctgtgagaaat

SEQ ID NO: 86880 - DNA, 25 bp, SARS Virus
ttaaaaatctagtctgtgagaaata

SEQ ID NO: 86881 - DNA, 25 bp, SARS Virus
taaaaatctagtttgtgagaaataa

SEQ ID NO: 86882 - DNA, 25 bp, SARS Virus
aaaaatctagtctgtgagaaataaa

SEQ ID NO: 86883 - DNA, 25 bp, SARS Virus
aaaatctagtctttgagaaataaat

SEQ ID NO: 86884 - DNA, 25 bp, SARS Virus
aaatctagtctgtgagaaataaatt

SEQ ID NO: 86885 - DNA, 25 bp, SARS Virus
aatctagtctgttagaaataaattg

SEQ ID NO: 86886 - DNA, 25 bp, SARS Virus
atctagtctgtgtgaaataaattga

SEQ ID NO: 86887 - DNA, 25 bp, SARS Virus
tctagtctgtgataaataaattgag

SEQ ID NO: 86888 - DNA, 25 bp, SARS Virus
ctagtctgtgagtaataaattgagt

SEQ ID NO: 86889 - DNA, 25 bp, SARS Virus
tagtctgtgagatataaattgagtc

SEQ ID NO: 86890 - DNA, 25 bp, SARS Virus
agtctgtgagaattaaattgagtcc

SEQ ID NO: 86891 - DNA, 25 bp, SARS Virus
gtctgtgagaaataaattgagtcct

SEQ ID NO: 86892 - DNA, 25 bp, SARS Virus
tctgtgagaaattaattgagtccta

SEQ ID NO: 86893 - DNA, 25 bp, SARS Virus
ctgtgagaaatatattgagtcctaa

SEQ ID NO: 86894 - DNA, 25 bp, SARS Virus
tgtgagaaataatttgagtcctaaa

SEQ ID NO: 86895 - DNA, 25 bp, SARS Virus
gtgagaaataaattgagtcctaaat

SEQ ID NO: 86896 - DNA, 25 bp, SARS Virus
tgagaaataaattgagtcctaaata

SEQ ID NO: 86897 - DNA, 25 bp, SARS Virus
gagaaataaatttagtcctaaataa

SEQ ID NO: 86898 - DNA, 25 bp, SARS Virus
agaaataaattgtgtcctaaataaa

SEQ ID NO: 86899 - DNA, 25 bp, SARS Virus
gaaataaattgattcctaaataaag

SEQ ID NO: 86900 - DNA, 25 bp, SARS Virus
aaataaattgagtcctaaataaaga

SEQ ID NO: 86901 - DNA, 25 bp, SARS Virus
aataaattgagttctaaataaagaa

SEQ ID NO: 86902 - DNA, 25 bp, SARS Virus
ataaattgagtcttaaataaagaag

SEQ ID NO: 86903 - DNA, 25 bp, SARS Virus
taaattgagtcctaaataaagaagg

SEQ ID NO: 86904 - DNA, 25 bp, SARS Virus
aaattgagtccttaataaagaaggt

SEQ ID NO: 86905 - DNA, 25 bp, SARS Virus
aattgagtcctatataaagaaggta

SEQ ID NO: 86906 - DNA, 25 bp, SARS Virus
attgagtcctaattaaagaaggtaa

SEQ ID NO: 86907 - DNA, 25 bp, SARS Virus
ttgagtcctaaataaagaaggtaaa

SEQ ID NO: 86908 - DNA, 25 bp, SARS Virus
tgagtcctaaattaagaaggtaaaa

SEQ ID NO: 86909 - DNA, 25 bp, SARS Virus
gagtcctaaatatagaaggtaaaat

SEQ ID NO: 86910 - DNA, 25 bp, SARS Virus
agtcctaaataatgaaggtaaaata

SEQ ID NO: 86911 - DNA, 25 bp, SARS Virus
gtcctaaataaataaggtaaaataa

SEQ ID NO: 86912 - DNA, 25 bp, SARS Virus
tcctaaataaagtaggtaaaataag

SEQ ID NO: 86913 - DNA, 25 bp, SARS Virus
cctaaataaagatggtaaaataaga

SEQ ID NO: 86914 - DNA, 25 bp, SARS Virus
ctaaataaagaatgtaaaataagat

SEQ ID NO: 86915 - DNA, 25 bp, SARS Virus
taaataaagaagttaaaataagatt

SEQ ID NO: 86916 - DNA, 25 bp, SARS Virus
aaataaagaaggtaaaataagatta

SEQ ID NO: 86917 - DNA, 25 bp, SARS Virus
aataaagaaggttaaataagattac

SEQ ID NO: 86918 - DNA, 25 bp, SARS Virus
ataaagaaggtataataagattaca

SEQ ID NO: 86919 - DNA, 25 bp, SARS Virus
taaagaaggtaatataagattacaa

SEQ ID NO: 86920 - DNA, 25 bp, SARS Virus
aaagaaggtaaattaagattacaat

SEQ ID NO: 86921 - DNA, 25 bp, SARS Virus
aagaaggtaaaataagattacaatg

SEQ ID NO: 86922 - DNA, 25 bp, SARS Virus
agaaggtaaaattagattacaatgt

SEQ ID NO: 86923 - DNA, 25 bp, SARS Virus
gaaggtaaaatatgattacaatgtc

SEQ ID NO: 86924 - DNA, 25 bp, SARS Virus
aaggtaaaataatattacaatgtcc

SEQ ID NO: 86925 - DNA, 25 bp, SARS Virus
aggtaaaataagtttacaatgtccc

SEQ ID NO: 86926 - DNA, 25 bp, SARS Virus
ggtaaaataagattacaatgtccca

SEQ ID NO: 86927 - DNA, 25 bp, SARS Virus
gtaaaataagattacaatgtcccaa

SEQ ID NO: 86928 - DNA, 25 bp, SARS Virus
taaaataagatttcaatgtcccaaa

SEQ ID NO: 86929 - DNA, 25 bp, SARS Virus
aaaataagattataatgtcccaaag

SEQ ID NO: 86930 - DNA, 25 bp, SARS Virus
aaataagattactatgtcccaaagt

SEQ ID NO: 86931 - DNA, 25 bp, SARS Virus
aataagattacattgtcccaaagta

SEQ ID NO: 86932 - DNA, 25 bp, SARS Virus
ataagattacaatgtcccaaagtat

SEQ ID NO: 86933 - DNA, 25 bp, SARS Virus
taagattacaatttcccaaagtatg

SEQ ID NO: 86934 - DNA, 25 bp, SARS Virus
aagattacaatgtcccaaagtatga

SEQ ID NO: 86935 - DNA, 25 bp, SARS Virus
agattacaatgttccaaagtatgat

SEQ ID NO: 86936 - DNA, 25 bp, SARS Virus
gattacaatgtctcaaagtatgata

SEQ ID NO: 86937 - DNA, 25 bp, SARS Virus
attacaatgtcctaaagtatgataa

SEQ ID NO: 86938 - DNA, 25 bp, SARS Virus
ttacaatgtccctaagtatgataat

SEQ ID NO: 86939 - DNA, 25 bp, SARS Virus
tacaatgtcccatagtatgataatt

SEQ ID NO: 86940 - DNA, 25 bp, SARS Virus
acaatgtcccaatgtatgataatta

SEQ ID NO: 86941 - DNA, 25 bp, SARS Virus
caatgtcccaaattatgataattag

SEQ ID NO: 86942 - DNA, 25 bp, SARS Virus
aatgtcccaaagtatgataattagt

SEQ ID NO: 86943 - DNA, 25 bp, SARS Virus
atgtcccaaagtttgataattagta

SEQ ID NO: 86944 - DNA, 25 bp, SARS Virus
tgtcccaaagtatgataattagtat

SEQ ID NO: 86945 - DNA, 25 bp, SARS Virus
gtcccaaagtattataattagtatg

SEQ ID NO: 86946 - DNA, 25 bp, SARS Virus
tcccaaagtatgttaattagtatgc

SEQ ID NO: 86947 - DNA, 25 bp, SARS Virus
cccaaagtatgataattagtatgca

SEQ ID NO: 86948 - DNA, 25 bp, SARS Virus
ccaaagtatgattattagtatgcaa

SEQ ID NO: 86949 - DNA, 25 bp, SARS Virus
caaagtatgatatttagtatgcaaa

SEQ ID NO: 86950 - DNA, 25 bp, SARS Virus
aaagtatgataattagtatgcaaac

SEQ ID NO: 86951 - DNA, 25 bp, SARS Virus
aagtatgataattagtatgcaaacc

SEQ ID NO: 86952 - DNA, 25 bp, SARS Virus
agtatgataatttgtatgcaaaccg

SEQ ID NO: 86953 - DNA, 25 bp, SARS Virus
gtatgataattattatgcaaaccgt

SEQ ID NO: 86954 - DNA, 25 bp, SARS Virus
tatgataattagtatgcaaaccgtt

SEQ ID NO: 86955 - DNA, 25 bp, SARS Virus
atgataattagtttgcaaaccgttg

SEQ ID NO: 86956 - DNA, 25 bp, SARS Virus
tgataattagtatgcaaaccgttgg

SEQ ID NO: 86957 - DNA, 25 bp, SARS Virus
gataattagtattcaaaccgttggg

SEQ ID NO: 86958 - DNA, 25 bp, SARS Virus
ataattagtatgtaaaccgttggga

SEQ ID NO: 86959 - DNA, 25 bp, SARS Virus
taattagtatgctaaccgttgggac

SEQ ID NO: 86960 - DNA, 25 bp, SARS Virus
aattagtatgcataccgttgggaca

SEQ ID NO: 86961 - DNA, 25 bp, SARS Virus
attagtatgcaatccgttgggacag

SEQ ID NO: 86962 - DNA, 25 bp, SARS Virus
ttagtatgcaaatcgttgggacagt

SEQ ID NO: 86963 - DNA, 25 bp, SARS Virus
tagtatgcaaactgttgggacagta

SEQ ID NO: 86964 - DNA, 25 bp, SARS Virus
agtatgcaaacctttgggacagtat

SEQ ID NO: 86965 - DNA, 25 bp, SARS Virus
gtatgcaaaccgttgggacagtatg

SEQ ID NO: 86966 - DNA, 25 bp, SARS Virus
tatgcaaaccgttgggacagtatgg

SEQ ID NO: 86967 - DNA, 25 bp, SARS Virus
atgcaaaccgtttggacagtatgga

SEQ ID NO: 86968 - DNA, 25 bp, SARS Virus
tgcaaaccgttgtgacagtatggaa

SEQ ID NO: 86969 - DNA, 25 bp, SARS Virus
gcaaaccgttggtacagtatggaaa

SEQ ID NO: 86970 - DNA, 25 bp, SARS Virus
caaaccgttgggtcagtatggaaaa

SEQ ID NO: 86971 - DNA, 25 bp, SARS Virus
aaaccgttgggatagtatggaaaat

SEQ ID NO: 86972 - DNA, 25 bp, SARS Virus
aaccgttgggactgtatggaaaatt

SEQ ID NO: 86973 - DNA, 25 bp, SARS Virus
accgttgggacattatggaaaattc

SEQ ID NO: 86974 - DNA, 25 bp, SARS Virus
ccgttgggacagtatggaaaattcc

SEQ ID NO: 86975 - DNA, 25 bp, SARS Virus
cgttgggacagtttggaaaattcct

SEQ ID NO: 86976 - DNA, 25 bp, SARS Virus
gttgggacagtatggaaaattccta

SEQ ID NO: 86977 - DNA, 25 bp, SARS Virus
ttgggacagtattgaaaattcctac

SEQ ID NO: 86978 - DNA, 25 bp, SARS Virus
tgggacagtatgtaaaattcctacc

SEQ ID NO: 86979 - DNA, 25 bp, SARS Virus
gggacagtatggtaaattcctacca

SEQ ID NO: 86980 - DNA, 25 bp, SARS Virus
ggacagtatggataattcctaccat

SEQ ID NO: 86981 - DNA, 25 bp, SARS Virus
gacagtatggaatattcctaccata

SEQ ID NO: 86982 - DNA, 25 bp, SARS Virus
acagtatggaaatttcctaccataa

SEQ ID NO: 86983 - DNA, 25 bp, SARS Virus
cagtatggaaaattcctaccataaa

SEQ ID NO: 86984 - DNA, 25 bp, SARS Virus
agtatggaaaattcctaccataaat

SEQ ID NO: 86985 - DNA, 25 bp, SARS Virus
gtatggaaaatttctaccataaata

SEQ ID NO: 86986 - DNA, 25 bp, SARS Virus
tatggaaaattcttaccataaataa

SEQ ID NO: 86987 - DNA, 25 bp, SARS Virus
atggaaaattcctaccataaataaa

SEQ ID NO: 86988 - DNA, 25 bp, SARS Virus
tggaaaattccttccataaataaaa

SEQ ID NO: 86989 - DNA, 25 bp, SARS Virus
ggaaaattcctatcataaataaaac

SEQ ID NO: 86990 - DNA, 25 bp, SARS Virus
gaaaattcctactataaataaaacg

SEQ ID NO: 86991 - DNA, 25 bp, SARS Virus
aaaattcctaccttaaataaaacga

SEQ ID NO: 86992 - DNA, 25 bp, SARS Virus
aaattcctaccataaataaaacgac

SEQ ID NO: 86993 - DNA, 25 bp, SARS Virus
aattcctaccataaataaaacgacg

SEQ ID NO: 86994 - DNA, 25 bp, SARS Virus
attcctaccataaataaaacgacgg

SEQ ID NO: 86995 - DNA, 25 bp, SARS Virus
ttcctaccataaataaaacgacggt

SEQ ID NO: 86996 - DNA, 25 bp, SARS Virus
tcctaccataaaaaaaacgacggtg

SEQ ID NO: 86997 - DNA, 25 bp, SARS Virus
cctaccataaataaaacgacggtgt

SEQ ID NO: 86998 - DNA, 25 bp, SARS Virus
ctaccataaataaaacgacggtgtc

SEQ ID NO: 86999 - DNA, 25 bp, SARS Virus
taccataaataaaacgacggtgtct

SEQ ID NO: 87000 - DNA, 25 bp, SARS Virus
accataaataaaacgacggtgtctc

SEQ ID NO: 87001 - DNA, 25 bp, SARS Virus
ccataaataaaaagacggtgtctct

SEQ ID NO: 87002 - DNA, 25 bp, SARS Virus
cataaataaaacaacggtgtctctt

SEQ ID NO: 87003 - DNA, 25 bp, SARS Virus
ataaataaaacgacggtgtctcttt

SEQ ID NO: 87004 - DNA, 25 bp, SARS Virus
taaataaaacgaaggtgtctcttta

SEQ ID NO: 87005 - DNA, 25 bp, SARS Virus
aaataaaacgacagtgtctctttag

SEQ ID NO: 87006 - DNA, 25 bp, SARS Virus
aataaaacgacgatgtctctttagt

SEQ ID NO: 87007 - DNA, 25 bp, SARS Virus
ataaaacgacggagtctctttagtt

SEQ ID NO: 87008 - DNA, 25 bp, SARS Virus
taaaacgacggtatctctttagttt

SEQ ID NO: 87009 - DNA, 25 bp, SARS Virus
aaaacgacggtgactctttagttta

SEQ ID NO: 87010 - DNA, 25 bp, SARS Virus
aaacgacggtgtatctttagtttac

SEQ ID NO: 87011 - DNA, 25 bp, SARS Virus
aacgacggtgtcactttagtttaca

SEQ ID NO: 87012 - DNA, 25 bp, SARS Virus
acgacggtgtctatttagtttacaa

SEQ ID NO: 87013 - DNA, 25 bp, SARS Virus
cgacggtgtctcattagtttacaac

SEQ ID NO: 87014 - DNA, 25 bp, SARS Virus
gacggtgtctctatagtttacaaca

SEQ ID NO: 87015 - DNA, 25 bp, SARS Virus
acggtgtctcttaagtttacaacag

SEQ ID NO: 87016 - DNA, 25 bp, SARS Virus
cggtgtctctttagtttacaacagg

SEQ ID NO: 87017 - DNA, 25 bp, SARS Virus
ggtgtctctttaatttacaacaggc

SEQ ID NO: 87018 - DNA, 25 bp, SARS Virus
gtgtctctttagattacaacaggca

SEQ ID NO: 87019 - DNA, 25 bp, SARS Virus
tgtctctttagtatacaacaggcac

SEQ ID NO: 87020 - DNA, 25 bp, SARS Virus
gtctctttagttaacaacaggcacc

SEQ ID NO: 87021 - DNA, 25 bp, SARS Virus
tctctttagtttacaacaggcacca

SEQ ID NO: 87022 - DNA, 25 bp, SARS Virus
ctctttagtttaaaacaggcaccaa

SEQ ID NO: 87023 - DNA, 25 bp, SARS Virus
tctttagtttacaacaggcaccaac

SEQ ID NO: 87024 - DNA, 25 bp, SARS Virus
ctttagtttacaacaggcaccaacc

SEQ ID NO: 87025 - DNA, 25 bp, SARS Virus
tttagtttacaaaaggcaccaaccc

SEQ ID NO: 87026 - DNA, 25 bp, SARS Virus
ttagtttacaacaggcaccaaccca

SEQ ID NO: 87027 - DNA, 25 bp, SARS Virus
tagtttacaacaagcaccaacccaa

SEQ ID NO: 87028 - DNA, 25 bp, SARS Virus
agtttacaacagacaccaacccaaa

SEQ ID NO: 87029 - DNA, 25 bp, SARS Virus
gtttacaacaggaaccaacccaaaa

SEQ ID NO: 87030 - DNA, 25 bp, SARS Virus
tttacaacaggcaccaacccaaaaa

SEQ ID NO: 87031 - DNA, 25 bp, SARS Virus
ttacaacaggcaacaacccaaaaac

SEQ ID NO: 87032 - DNA, 25 bp, SARS Virus
tacaacaggcacaaacccaaaaacc

SEQ ID NO: 87033 - DNA, 25 bp, SARS Virus
acaacaggcaccaacccaaaaacca

SEQ ID NO: 87034 - DNA, 25 bp, SARS Virus
caacaggcaccaacccaaaaaccaa

SEQ ID NO: 87035 - DNA, 25 bp, SARS Virus
aacaggcaccaaaccaaaaaccaag

SEQ ID NO: 87036 - DNA, 25 bp, SARS Virus
acaggcaccaacacaaaaaccaaga

SEQ ID NO: 87037 - DNA, 25 bp, SARS Virus
caggcaccaaccaaaaaaccaagat

SEQ ID NO: 87038 - DNA, 25 bp, SARS Virus
aggcaccaacccaaaaaccaagatg

SEQ ID NO: 87039 - DNA, 25 bp, SARS Virus
ggcaccaacccaaaaaccaagatgg

SEQ ID NO: 87040 - DNA, 25 bp, SARS Virus
gcaccaacccaaaaaccaagatggt

SEQ ID NO: 87041 - DNA, 25 bp, SARS Virus
caccaacccaaaaaccaagatggta

SEQ ID NO: 87042 - DNA, 25 bp, SARS Virus
accaacccaaaaaccaagatggtac

SEQ ID NO: 87043 - DNA, 25 bp, SARS Virus
ccaacccaaaaaacaagatggtact

SEQ ID NO: 87044 - DNA, 25 bp, SARS Virus
caacccaaaaacaaagatggtactt

SEQ ID NO: 87045 - DNA, 25 bp, SARS Virus
aacccaaaaaccaagatggtacttg

SEQ ID NO: 87046 - DNA, 25 bp, SARS Virus
acccaaaaaccaagatggtacttgt

SEQ ID NO: 87047 - DNA, 25 bp, SARS Virus
cccaaaaaccaaaatggtacttgtt

SEQ ID NO: 87048 - DNA, 25 bp, SARS Virus
ccaaaaaccaagatggtacttgttg

SEQ ID NO: 87049 - DNA, 25 bp, SARS Virus
caaaaaccaagaaggtacttgttgt

SEQ ID NO: 87050 - DNA, 25 bp, SARS Virus
aaaaaccaagatagtacttgttgtt

SEQ ID NO: 87051 - DNA, 25 bp, SARS Virus
aaaaccaagatgatacttgttgttc

SEQ ID NO: 87052 - DNA, 25 bp, SARS Virus
aaaccaagatggaacttgttgttca

SEQ ID NO: 87053 - DNA, 25 bp, SARS Virus
aaccaagatggtacttgttgttcag

SEQ ID NO: 87054 - DNA, 25 bp, SARS Virus
accaagatggtaattgttgttcagt

SEQ ID NO: 87055 - DNA, 25 bp, SARS Virus
ccaagatggtacatgttgttcagtg

SEQ ID NO: 87056 - DNA, 25 bp, SARS Virus
caagatggtactagttgttcagtgt

SEQ ID NO: 87057 - DNA, 25 bp, SARS Virus
aagatggtacttattgttcagtgtc

SEQ ID NO: 87058 - DNA, 25 bp, SARS Virus
agatggtacttgatgttcagtgtca

SEQ ID NO: 87059 - DNA, 25 bp, SARS Virus
gatggtacttgtagttcagtgtcag

SEQ ID NO: 87060 - DNA, 25 bp, SARS Virus
atggtacttgttattcagtgtcagc

SEQ ID NO: 87061 - DNA, 25 bp, SARS Virus
tggtacttgttgatcagtgtcagcc

SEQ ID NO: 87062 - DNA, 25 bp, SARS Virus
ggtacttgttgtacagtgtcagcca

SEQ ID NO: 87063 - DNA, 25 bp, SARS Virus
gtacttgttgttaagtgtcagccac

SEQ ID NO: 87064 - DNA, 25 bp, SARS Virus
tacttgttgttcagtgtcagccact

SEQ ID NO: 87065 - DNA, 25 bp, SARS Virus
acttgttgttcaatgtcagccacta

SEQ ID NO: 87066 - DNA, 25 bp, SARS Virus
cttgttgttcagagtcagccactaa

SEQ ID NO: 87067 - DNA, 25 bp, SARS Virus
ttgttgttcagtatcagccactaat

SEQ ID NO: 87068 - DNA, 25 bp, SARS Virus
tgttgttcagtgacagccactaata

SEQ ID NO: 87069 - DNA, 25 bp, SARS Virus
gttgttcagtgtaagccactaataa

SEQ ID NO: 87070 - DNA, 25 bp, SARS Virus
ttgttcagtgtcagccactaataat

SEQ ID NO: 87071 - DNA, 25 bp, SARS Virus
tgttcagtgtcaaccactaataata

SEQ ID NO: 87072 - DNA, 25 bp, SARS Virus
gttcagtgtcagacactaataataa

SEQ ID NO: 87073 - DNA, 25 bp, SARS Virus
ttcagtgtcagcaactaataataat

SEQ ID NO: 87074 - DNA, 25 bp, SARS Virus
tcagtgtcagccactaataataatt

SEQ ID NO: 87075 - DNA, 25 bp, SARS Virus
cagtgtcagccaataataataattg

SEQ ID NO: 87076 - DNA, 25 bp, SARS Virus
agtgtcagccacaaataataattgt

SEQ ID NO: 87077 - DNA, 25 bp, SARS Virus
gtgtcagccactaataataattgtt

SEQ ID NO: 87078 - DNA, 25 bp, SARS Virus
tgtcagccactaataataattgtta

SEQ ID NO: 87079 - DNA, 25 bp, SARS Virus
gtcagccactaaaaataattgttaa

SEQ ID NO: 87080 - DNA, 25 bp, SARS Virus
tcagccactaataataattgttaag

SEQ ID NO: 87081 - DNA, 25 bp, SARS Virus
cagccactaataataattgttaaga

SEQ ID NO: 87082 - DNA, 25 bp, SARS Virus
agccactaataaaaattgttaagat

SEQ ID NO: 87083 - DNA, 25 bp, SARS Virus
gccactaataataattgttaagatg

SEQ ID NO: 87084 - DNA, 25 bp, SARS Virus
ccactaataataattgttaagatga

SEQ ID NO: 87085 - DNA, 25 bp, SARS Virus
cactaataataaatgttaagatgat

SEQ ID NO: 87086 - DNA, 25 bp, SARS Virus
actaataataatagttaagatgatt

SEQ ID NO: 87087 - DNA, 25 bp, SARS Virus
ctaataataattattaagatgatta

SEQ ID NO: 87088 - DNA, 25 bp, SARS Virus
taataataattgataagatgattac

SEQ ID NO: 87089 - DNA, 25 bp, SARS Virus
aataataattgtaaagatgattaca

SEQ ID NO: 87090 - DNA, 25 bp, SARS Virus
ataataattgttaagatgattacaa

SEQ ID NO: 87091 - DNA, 25 bp, SARS Virus
taataattgttaagatgattacaac

SEQ ID NO: 87092 - DNA, 25 bp, SARS Virus
aataattgttaaaatgattacaaca

SEQ ID NO: 87093 - DNA, 25 bp, SARS Virus
ataattgttaagatgattacaacaa

SEQ ID NO: 87094 - DNA, 25 bp, SARS Virus
taattgttaagaagattacaacaat

SEQ ID NO: 87095 - DNA, 25 bp, SARS Virus
aattgttaagataattacaacaata

SEQ ID NO: 87096 - DNA, 25 bp, SARS Virus
attgttaagatgattacaacaatat

SEQ ID NO: 87097 - DNA, 25 bp, SARS Virus
ttgttaagatgaatacaacaatatg

SEQ ID NO: 87098 - DNA, 25 bp, SARS Virus
tgttaagatgataacaacaatatgc

SEQ ID NO: 87099 - DNA, 25 bp, SARS Virus
gttaagatgattacaacaatatgct

SEQ ID NO: 87100 - DNA, 25 bp, SARS Virus
ttaagatgattaaaacaatatgctc

SEQ ID NO: 87101 - DNA, 25 bp, SARS Virus
taagatgattacaacaatatgctcg

SEQ ID NO: 87102 - DNA, 25 bp, SARS Virus
aagatgattacaacaatatgctcgt

SEQ ID NO: 87103 - DNA, 25 bp, SARS Virus
agatgattacaaaaatatgctcgta

SEQ ID NO: 87104 - DNA, 25 bp, SARS Virus
gatgattacaacaatatgctcgtac

SEQ ID NO: 87105 - DNA, 25 bp, SARS Virus
atgattacaacaatatgctcgtaca

SEQ ID NO: 87106 - DNA, 25 bp, SARS Virus
tgattacaacaaaatgctcgtacat

SEQ ID NO: 87107 - DNA, 25 bp, SARS Virus
gattacaacaatatgctcgtacatt

SEQ ID NO: 87108 - DNA, 25 bp, SARS Virus
attacaacaataagctcgtacattg

SEQ ID NO: 87109 - DNA, 25 bp, SARS Virus
ttacaacaatatactcgtacattga

SEQ ID NO: 87110 - DNA, 25 bp, SARS Virus
tacaacaatatgatcgtacattgaa

SEQ ID NO: 87111 - DNA, 25 bp, SARS Virus
acaacaatatgcacgtacattgaaa

SEQ ID NO: 87112 - DNA, 25 bp, SARS Virus
caacaatatgctagtacattgaaac

SEQ ID NO: 87113 - DNA, 25 bp, SARS Virus
aacaatatgctcatacattgaaact

SEQ ID NO: 87114 - DNA, 25 bp, SARS Virus
acaatatgctcgaacattgaaactt

SEQ ID NO: 87115 - DNA, 25 bp, SARS Virus
caatatgctcgtacattgaaactta

SEQ ID NO: 87116 - DNA, 25 bp, SARS Virus
aatatgctcgtaaattgaaacttaa

SEQ ID NO: 87117 - DNA, 25 bp, SARS Virus
atatgctcgtacattgaaacttaac

SEQ ID NO: 87118 - DNA, 25 bp, SARS Virus
tatgctcgtacaatgaaacttaaca

SEQ ID NO: 87119 - DNA, 25 bp, SARS Virus
atgctcgtacatagaaacttaacac

SEQ ID NO: 87120 - DNA, 25 bp, SARS Virus
tgctcgtacattaaaacttaacaca

SEQ ID NO: 87121 - DNA, 25 bp, SARS Virus
gctcgtacattgaaacttaacacac

SEQ ID NO: 87122 - DNA, 25 bp, SARS Virus
ctcgtacattgaaacttaacacact

SEQ ID NO: 87123 - DNA, 25 bp, SARS Virus
tcgtacattgaaacttaacacactg

SEQ ID NO: 87124 - DNA, 25 bp, SARS Virus
cgtacattgaaaattaacacactgt

SEQ ID NO: 87125 - DNA, 25 bp, SARS Virus
gtacattgaaacataacacactgtt

SEQ ID NO: 87126 - DNA, 25 bp, SARS Virus
tacattgaaactaaacacactgttg

SEQ ID NO: 87127 - DNA, 25 bp, SARS Virus
acattgaaacttaacacactgttgg

SEQ ID NO: 87128 - DNA, 25 bp, SARS Virus
cattgaaacttaacacactgttggg

SEQ ID NO: 87129 - DNA, 25 bp, SARS Virus
attgaaacttaaaacactgttggga

SEQ ID NO: 87130 - DNA, 25 bp, SARS Virus
ttgaaacttaacacactgttgggaa

SEQ ID NO: 87131 - DNA, 25 bp, SARS Virus
tgaaacttaacaaactgttgggaaa

SEQ ID NO: 87132 - DNA, 25 bp, SARS Virus
gaaacttaacacactgttgggaaag

SEQ ID NO: 87133 - DNA, 25 bp, SARS Virus
aaacttaacacaatgttgggaaaga

SEQ ID NO: 87134 - DNA, 25 bp, SARS Virus
aacttaacacacagttgggaaagaa

SEQ ID NO: 87135 - DNA, 25 bp, SARS Virus
acttaacacactattgggaaagaaa

SEQ ID NO: 87136 - DNA, 25 bp, SARS Virus
cttaacacactgatgggaaagaaac

SEQ ID NO: 87137 - DNA, 25 bp, SARS Virus
ttaacacactgtagggaaagaaacg

SEQ ID NO: 87138 - DNA, 25 bp, SARS Virus
taacacactgttaggaaagaaacga

SEQ ID NO: 87139 - DNA, 25 bp, SARS Virus
aacacactgttgagaaagaaacgac

SEQ ID NO: 87140 - DNA, 25 bp, SARS Virus
acacactgttggaaaagaaacgaca

SEQ ID NO: 87141 - DNA, 25 bp, SARS Virus
cacactgttgggaaagaaacgacaa

SEQ ID NO: 87142 - DNA, 25 bp, SARS Virus
acactgttgggaaagaaacgacaaa

SEQ ID NO: 87143 - DNA, 25 bp, SARS Virus
cactgttgggaaagaaacgacaaag

SEQ ID NO: 87144 - DNA, 25 bp, SARS Virus
actgttgggaaaaaaacgacaaaga

SEQ ID NO: 87145 - DNA, 25 bp, SARS Virus
ctgttgggaaagaaacgacaaagat

SEQ ID NO: 87146 - DNA, 25 bp, SARS Virus
tgttgggaaagaaacgacaaagatt

SEQ ID NO: 87147 - DNA, 25 bp, SARS Virus
gttgggaaagaaacgacaaagattt

SEQ ID NO: 87148 - DNA, 25 bp, SARS Virus
ttgggaaagaaaagacaaagatttg

SEQ ID NO: 87149 - DNA, 25 bp, SARS Virus
tgggaaagaaacaacaaagatttgg

SEQ ID NO: 87150 - DNA, 25 bp, SARS Virus
gggaaagaaacgacaaagatttggg

SEQ ID NO: 87151 - DNA, 25 bp, SARS Virus
ggaaagaaacgaaaaagatttgggt

SEQ ID NO: 87152 - DNA, 25 bp, SARS Virus
gaaagaaacgacaaagatttgggta

SEQ ID NO: 87153 - DNA, 25 bp, SARS Virus
aaagaaacgacaaagatttgggtac

SEQ ID NO: 87154 - DNA, 25 bp, SARS Virus
aagaaacgacaaagatttgggtacc

SEQ ID NO: 87155 - DNA, 25 bp, SARS Virus
agaaacgacaaaaatttgggtaccc

SEQ ID NO: 87156 - DNA, 25 bp, SARS Virus
gaaacgacaaagatttgggtaccca

SEQ ID NO: 87157 - DNA, 25 bp, SARS Virus
aaacgacaaagaattgggtacccat

SEQ ID NO: 87158 - DNA, 25 bp, SARS Virus
aacgacaaagatatgggtacccatg

SEQ ID NO: 87159 - DNA, 25 bp, SARS Virus
acgacaaagattagggtacccatgt

SEQ ID NO: 87160 - DNA, 25 bp, SARS Virus
cgacaaagatttaggtacccatgtg

SEQ ID NO: 87161 - DNA, 25 bp, SARS Virus
gacaaagatttgagtacccatgtgt

SEQ ID NO: 87162 - DNA, 25 bp, SARS Virus
acaaagatttggatacccatgtgtc

SEQ ID NO: 87163 - DNA, 25 bp, SARS Virus
caaagatttgggaacccatgtgtct

SEQ ID NO: 87164 - DNA, 25 bp, SARS Virus
aaagatttgggtacccatgtgtctg

SEQ ID NO: 87165 - DNA, 25 bp, SARS Virus
aagatttgggtaaccatgtgtctgt

SEQ ID NO: 87166 - DNA, 25 bp, SARS Virus
agatttgggtacacatgtgtctgtg

SEQ ID NO: 87167 - DNA, 25 bp, SARS Virus
gatttgggtaccaatgtgtctgtgt

SEQ ID NO: 87168 - DNA, 25 bp, SARS Virus
atttgggtacccatgtgtctgtgta

SEQ ID NO: 87169 - DNA, 25 bp, SARS Virus
tttgggtacccaagtgtctgtgtat

SEQ ID NO: 87170 - DNA, 25 bp, SARS Virus
ttgggtacccatatgtctgtgtatg

SEQ ID NO: 87171 - DNA, 25 bp, SARS Virus
tgggtacccatgagtctgtgtatga

SEQ ID NO: 87172 - DNA, 25 bp, SARS Virus
gggtacccatgtatctgtgtatgat

SEQ ID NO: 87173 - DNA, 25 bp, SARS Virus
ggtacccatgtgactgtgtatgata

SEQ ID NO: 87174 - DNA, 25 bp, SARS Virus
gtacccatgtgtatgtgtatgatac

SEQ ID NO: 87175 - DNA, 25 bp, SARS Virus
tacccatgtgtcagtgtatgatact

SEQ ID NO: 87176 - DNA, 25 bp, SARS Virus
acccatgtgtctatgtatgatacta

SEQ ID NO: 87177 - DNA, 25 bp, SARS Virus
cccatgtgtctgagtatgatactat

SEQ ID NO: 87178 - DNA, 25 bp, SARS Virus
ccatgtgtctgtatatgatactata

SEQ ID NO: 87179 - DNA, 25 bp, SARS Virus
catgtgtctgtgaatgatactataa

SEQ ID NO: 87180 - DNA, 25 bp, SARS Virus
atgtgtctgtgtatgatactataag

SEQ ID NO: 87181 - DNA, 25 bp, SARS Virus
tgtgtctgtgtaagatactataagc

SEQ ID NO: 87182 - DNA, 25 bp, SARS Virus
gtgtctgtgtataatactataagct

SEQ ID NO: 87183 - DNA, 25 bp, SARS Virus
tgtctgtgtatgatactataagcta

SEQ ID NO: 87184 - DNA, 25 bp, SARS Virus
gtctgtgtatgaaactataagctat

SEQ ID NO: 87185 - DNA, 25 bp, SARS Virus
tctgtgtatgatactataagctatt

SEQ ID NO: 87186 - DNA, 25 bp, SARS Virus
ctgtgtatgataatataagctatta

SEQ ID NO: 87187 - DNA, 25 bp, SARS Virus
tgtgtatgatacaataagctattac

SEQ ID NO: 87188 - DNA, 25 bp, SARS Virus
gtgtatgatactataagctattacg

SEQ ID NO: 87189 - DNA, 25 bp, SARS Virus
tgtatgatactaaaagctattacgt

SEQ ID NO: 87190 - DNA, 25 bp, SARS Virus
gtatgatactataagctattacgta

SEQ ID NO: 87191 - DNA, 25 bp, SARS Virus
tatgatactataagctattacgtaa

SEQ ID NO: 87192 - DNA, 25 bp, SARS Virus
atgatactataaactattacgtaaa

SEQ ID NO: 87193 - DNA, 25 bp, SARS Virus
tgatactataagatattacgtaaat

SEQ ID NO: 87194 - DNA, 25 bp, SARS Virus
gatactataagcaattacgtaaatt

SEQ ID NO: 87195 - DNA, 25 bp, SARS Virus
atactataagctattacgtaaatta

SEQ ID NO: 87196 - DNA, 25 bp, SARS Virus
tactataagctaatacgtaaattaa

SEQ ID NO: 87197 - DNA, 25 bp, SARS Virus
actataagctataacgtaaattaac

SEQ ID NO: 87198 - DNA, 25 bp, SARS Virus
ctataagctattacgtaaattaacg

SEQ ID NO: 87199 - DNA, 25 bp, SARS Virus
tataagctattaagtaaattaacgt

SEQ ID NO: 87200 - DNA, 25 bp, SARS Virus
ataagctattacataaattaacgtg

SEQ ID NO: 87201 - DNA, 25 bp, SARS Virus
taagctattacgaaaattaacgtga

SEQ ID NO: 87202 - DNA, 25 bp, SARS Virus
aagctattacgtaaattaacgtgaa

SEQ ID NO: 87203 - DNA, 25 bp, SARS Virus
agctattacgtaaattaacgtgaaa

SEQ ID NO: 87204 - DNA, 25 bp, SARS Virus
gctattacgtaaattaacgtgaaag

SEQ ID NO: 87205 - DNA, 25 bp, SARS Virus
ctattacgtaaaataacgtgaaagc

SEQ ID NO: 87206 - DNA, 25 bp, SARS Virus
tattacgtaaataaacgtgaaagct

SEQ ID NO: 87207 - DNA, 25 bp, SARS Virus
attacgtaaattaacgtgaaagctc

SEQ ID NO: 87208 - DNA, 25 bp, SARS Virus
ttacgtaaattaacgtgaaagctca

SEQ ID NO: 87209 - DNA, 25 bp, SARS Virus
tacgtaaattaaagtgaaagctcat

SEQ ID NO: 87210 - DNA, 25 bp, SARS Virus
acgtaaattaacatgaaagctcatg

SEQ ID NO: 87211 - DNA, 25 bp, SARS Virus
cgtaaattaacgagaaagctcatgt

SEQ ID NO: 87212 - DNA, 25 bp, SARS Virus
gtaaattaacgtaaaagctcatgta

SEQ ID NO: 87213 - DNA, 25 bp, SARS Virus
taaattaacgtgaaagctcatgtat

SEQ ID NO: 87214 - DNA, 25 bp, SARS Virus
aaattaacgtgaaagctcatgtata

SEQ ID NO: 87215 - DNA, 25 bp, SARS Virus
aattaacgtgaaagctcatgtatag

SEQ ID NO: 87216 - DNA, 25 bp, SARS Virus
attaacgtgaaaactcatgtataga

SEQ ID NO: 87217 - DNA, 25 bp, SARS Virus
ttaacgtgaaagatcatgtatagac

SEQ ID NO: 87218 - DNA, 25 bp, SARS Virus
taacgtgaaagcacatgtatagact

SEQ ID NO: 87219 - DNA, 25 bp, SARS Virus
aacgtgaaagctaatgtatagacta

SEQ ID NO: 87220 - DNA, 25 bp, SARS Virus
acgtgaaagctcatgtatagactac

SEQ ID NO: 87221 - DNA, 25 bp, SARS Virus
cgtgaaagctcaagtatagactacg

SEQ ID NO: 87222 - DNA, 25 bp, SARS Virus
gtgaaagctcatatatagactacgg

SEQ ID NO: 87223 - DNA, 25 bp, SARS Virus
tgaaagctcatgaatagactacgga

SEQ ID NO: 87224 - DNA, 25 bp, SARS Virus
gaaagctcatgtatagactacggaa

SEQ ID NO: 87225 - DNA, 25 bp, SARS Virus
aaagctcatgtaaagactacggaaa

SEQ ID NO: 87226 - DNA, 25 bp, SARS Virus
aagctcatgtatagactacggaaaa

SEQ ID NO: 87227 - DNA, 25 bp, SARS Virus
agctcatgtataaactacggaaaag

SEQ ID NO: 87228 - DNA, 25 bp, SARS Virus
gctcatgtatagactacggaaaagc

SEQ ID NO: 87229 - DNA, 25 bp, SARS Virus
ctcatgtatagaatacggaaaagcg

SEQ ID NO: 87230 - DNA, 25 bp, SARS Virus
tcatgtatagacaacggaaaagcga

SEQ ID NO: 87231 - DNA, 25 bp, SARS Virus
catgtatagactacggaaaagcgaa

SEQ ID NO: 87232 - DNA, 25 bp, SARS Virus
atgtatagactaaggaaaagcgaac

SEQ ID NO: 87233 - DNA, 25 bp, SARS Virus
tgtatagactacagaaaagcgaact

SEQ ID NO: 87234 - DNA, 25 bp, SARS Virus
gtatagactacgaaaaagcgaacta

SEQ ID NO: 87235 - DNA, 25 bp, SARS Virus
tatagactacggaaaagcgaactac

SEQ ID NO: 87236 - DNA, 25 bp, SARS Virus
atagactacggaaaagcgaactaca

SEQ ID NO: 87237 - DNA, 25 bp, SARS Virus
tagactacggaaaagcgaactacaa

SEQ ID NO: 87238 - DNA, 25 bp, SARS Virus
agactacggaaaagcgaactacaaa

SEQ ID NO: 87239 - DNA, 25 bp, SARS Virus
gactacggaaaaacgaactacaaag

SEQ ID NO: 87240 - DNA, 25 bp, SARS Virus
actacggaaaagagaactacaaagt

SEQ ID NO: 87241 - DNA, 25 bp, SARS Virus
ctacggaaaagcaaactacaaagtc

SEQ ID NO: 87242 - DNA, 25 bp, SARS Virus
tacggaaaagcgaactacaaagtct

SEQ ID NO: 87243 - DNA, 25 bp, SARS Virus
acggaaaagcgaactacaaagtctt

SEQ ID NO: 87244 - DNA, 25 bp, SARS Virus
cggaaaagcgaaatacaaagtcttt

SEQ ID NO: 87245 - DNA, 25 bp, SARS Virus
ggaaaagcgaacaacaaagtctttt

SEQ ID NO: 87246 - DNA, 25 bp, SARS Virus
gaaaagcgaactacaaagtcttttc

SEQ ID NO: 87247 - DNA, 25 bp, SARS Virus
aaaagcgaactaaaaagtcttttca

SEQ ID NO: 87248 - DNA, 25 bp, SARS Virus
aaagcgaactacaaagtcttttcag

SEQ ID NO: 87249 - DNA, 25 bp, SARS Virus
aagcgaactacaaagtcttttcagt

SEQ ID NO: 87250 - DNA, 25 bp, SARS Virus
agcgaactacaaagtcttttcagtc

SEQ ID NO: 87251 - DNA, 25 bp, SARS Virus
gcgaactacaaaatcttttcagtcc

SEQ ID NO: 87252 - DNA, 25 bp, SARS Virus
cgaactacaaagacttttcagtcca

SEQ ID NO: 87253 - DNA, 25 bp, SARS Virus
gaactacaaagtattttcagtccat

SEQ ID NO: 87254 - DNA, 25 bp, SARS Virus
aactacaaagtcatttcagtccatt

SEQ ID NO: 87255 - DNA, 25 bp, SARS Virus
actacaaagtctattcagtccatta

SEQ ID NO: 87256 - DNA, 25 bp, SARS Virus
ctacaaagtcttatcagtccattaa

SEQ ID NO: 87257 - DNA, 25 bp, SARS Virus
tacaaagtctttacagtccattaaa

SEQ ID NO: 87258 - DNA, 25 bp, SARS Virus
acaaagtcttttaagtccattaaaa

SEQ ID NO: 87259 - DNA, 25 bp, SARS Virus
caaagtcttttcagtccattaaaat

SEQ ID NO: 87260 - DNA, 25 bp, SARS Virus
aaagtcttttcaatccattaaaatt

SEQ ID NO: 87261 - DNA, 25 bp, SARS Virus
aagtcttttcagaccattaaaattt

SEQ ID NO: 87262 - DNA, 25 bp, SARS Virus
agtcttttcagtacattaaaatttg

SEQ ID NO: 87263 - DNA, 25 bp, SARS Virus
gtcttttcagtcaattaaaatttgt

SEQ ID NO: 87264 - DNA, 25 bp, SARS Virus
tcttttcagtccattaaaatttgtg

SEQ ID NO: 87265 - DNA, 25 bp, SARS Virus
cttttcagtccaataaaatttgtga

SEQ ID NO: 87266 - DNA, 25 bp, SARS Virus
ttttcagtccataaaaatttgtgaa

SEQ ID NO: 87267 - DNA, 25 bp, SARS Virus
tttcagtccattaaaatttgtgaat

SEQ ID NO: 87268 - DNA, 25 bp, SARS Virus
ttcagtccattaaaatttgtgaatg

SEQ ID NO: 87269 - DNA, 25 bp, SARS Virus
tcagtccattaaaatttgtgaatgc

SEQ ID NO: 87270 - DNA, 25 bp, SARS Virus
cagtccattaaaatttgtgaatgct

SEQ ID NO: 87271 - DNA, 25 bp, SARS Virus
agtccattaaaaattgtgaatgctc

SEQ ID NO: 87272 - DNA, 25 bp, SARS Virus
gtccattaaaatatgtgaatgctct

SEQ ID NO: 87273 - DNA, 25 bp, SARS Virus
tccattaaaattagtgaatgctctc

SEQ ID NO: 87274 - DNA, 25 bp, SARS Virus
ccattaaaatttatgaatgctctca

SEQ ID NO: 87275 - DNA, 25 bp, SARS Virus
cattaaaatttgagaatgctctcaa

SEQ ID NO: 87276 - DNA, 25 bp, SARS Virus
attaaaatttgtaaatgctctcaaa

SEQ ID NO: 87277 - DNA, 25 bp, SARS Virus
ttaaaatttgtgaatgctctcaaac

SEQ ID NO: 87278 - DNA, 25 bp, SARS Virus
taaaatttgtgaatgctctcaaaca

SEQ ID NO: 87279 - DNA, 25 bp, SARS Virus
aaaatttgtgaaagctctcaaacac

SEQ ID NO: 87280 - DNA, 25 bp, SARS Virus
aaatttgtgaatactctcaaacaca

SEQ ID NO: 87281 - DNA, 25 bp, SARS Virus
aatttgtgaatgatctcaaacacaa

SEQ ID NO: 87282 - DNA, 25 bp, SARS Virus
atttgtgaatgcactcaaacacaaa

SEQ ID NO: 87283 - DNA, 25 bp, SARS Virus
tttgtgaatgctatcaaacacaaat

SEQ ID NO: 87284 - DNA, 25 bp, SARS Virus
ttgtgaatgctcacaaacacaaatt

SEQ ID NO: 87285 - DNA, 25 bp, SARS Virus
tgtgaatgctctaaaacacaaattt

SEQ ID NO: 87286 - DNA, 25 bp, SARS Virus
gtgaatgctctcaaacacaaatttt

SEQ ID NO: 87287 - DNA, 25 bp, SARS Virus
tgaatgctctcaaacacaaattttt

SEQ ID NO: 87288 - DNA, 25 bp, SARS Virus
gaatgctctcaaacacaaattttta

SEQ ID NO: 87289 - DNA, 25 bp, SARS Virus
aatgctctcaaaaacaaatttttat

SEQ ID NO: 87290 - DNA, 25 bp, SARS Virus
atgctctcaaacacaaatttttatt

SEQ ID NO: 87291 - DNA, 25 bp, SARS Virus
tgctctcaaacaaaaatttttattt

SEQ ID NO: 87292 - DNA, 25 bp, SARS Virus
gctctcaaacacaaatttttatttc

SEQ ID NO: 87293 - DNA, 25 bp, SARS Virus
ctctcaaacacaaatttttatttct

SEQ ID NO: 87294 - DNA, 25 bp, SARS Virus
tctcaaacacaaatttttatttcta

SEQ ID NO: 87295 - DNA, 25 bp, SARS Virus
ctcaaacacaaaattttatttctac

SEQ ID NO: 87296 - DNA, 25 bp, SARS Virus
tcaaacacaaatatttatttctacc

SEQ ID NO: 87297 - DNA, 25 bp, SARS Virus
caaacacaaattattatttctaccc

SEQ ID NO: 87298 - DNA, 25 bp, SARS Virus
aaacacaaatttatatttctaccca

SEQ ID NO: 87299 - DNA, 25 bp, SARS Virus
aacacaaattttaatttctacccaa

SEQ ID NO: 87300 - DNA, 25 bp, SARS Virus
acacaaatttttatttctacccaaa

SEQ ID NO: 87301 - DNA, 25 bp, SARS Virus
cacaaatttttaattctacccaaag

SEQ ID NO: 87302 - DNA, 25 bp, SARS Virus
acaaatttttatatctacccaaaga

SEQ ID NO: 87303 - DNA, 25 bp, SARS Virus
caaatttttattactacccaaagag

SEQ ID NO: 87304 - DNA, 25 bp, SARS Virus
aaatttttatttatacccaaagaga

SEQ ID NO: 87305 - DNA, 25 bp, SARS Virus
aatttttatttcaacccaaagagat

SEQ ID NO: 87306 - DNA, 25 bp, SARS Virus
atttttatttctacccaaagagata

SEQ ID NO: 87307 - DNA, 25 bp, SARS Virus
tttttatttctaaccaaagagatac

SEQ ID NO: 87308 - DNA, 25 bp, SARS Virus
ttttatttctacacaaagagataca

SEQ ID NO: 87309 - DNA, 25 bp, SARS Virus
tttatttctaccaaaagagatacaa

SEQ ID NO: 87310 - DNA, 25 bp, SARS Virus
ttatttctacccaaagagatacaaa

SEQ ID NO: 87311 - DNA, 25 bp, SARS Virus
tatttctacccaaagagatacaaat

SEQ ID NO: 87312 - DNA, 25 bp, SARS Virus
atttctacccaaagagatacaaata

SEQ ID NO: 87313 - DNA, 25 bp, SARS Virus
tttctacccaaaaagatacaaatat

SEQ ID NO: 87314 - DNA, 25 bp, SARS Virus
ttctacccaaagagatacaaatatt

SEQ ID NO: 87315 - DNA, 25 bp, SARS Virus
tctacccaaagaaatacaaatattc

SEQ ID NO: 87316 - DNA, 25 bp, SARS Virus
ctacccaaagagatacaaatattcc

SEQ ID NO: 87317 - DNA, 25 bp, SARS Virus
tacccaaagagaaacaaatattccc

SEQ ID NO: 87318 - DNA, 25 bp, SARS Virus
acccaaagagatacaaatattcccg

SEQ ID NO: 87319 - DNA, 25 bp, SARS Virus
cccaaagagataaaaatattcccga

SEQ ID NO: 87320 - DNA, 25 bp, SARS Virus
ccaaagagatacaaatattcccgat

SEQ ID NO: 87321 - DNA, 25 bp, SARS Virus
caaagagatacaaatattcccgata

SEQ ID NO: 87322 - DNA, 25 bp, SARS Virus
aaagagatacaaatattcccgatag

SEQ ID NO: 87323 - DNA, 25 bp, SARS Virus
aagagatacaaaaattcccgatagt

SEQ ID NO: 87324 - DNA, 25 bp, SARS Virus
agagatacaaatattcccgatagtt

SEQ ID NO: 87325 - DNA, 25 bp, SARS Virus
gagatacaaataatcccgatagttg

SEQ ID NO: 87326 - DNA, 25 bp, SARS Virus
agatacaaatatacccgatagttgg

SEQ ID NO: 87327 - DNA, 25 bp, SARS Virus
gatacaaatattaccgatagttgga

SEQ ID NO: 87328 - DNA, 25 bp, SARS Virus
atacaaatattcacgatagttggat

SEQ ID NO: 87329 - DNA, 25 bp, SARS Virus
tacaaatattccagatagttggata

SEQ ID NO: 87330 - DNA, 25 bp, SARS Virus
acaaatattcccaatagttggatat

SEQ ID NO: 87331 - DNA, 25 bp, SARS Virus
caaatattcccgatagttggatatc

SEQ ID NO: 87332 - DNA, 25 bp, SARS Virus
aaatattcccgaaagttggatatct

SEQ ID NO: 87333 - DNA, 25 bp, SARS Virus
aatattcccgatagttggatatcta

SEQ ID NO: 87334 - DNA, 25 bp, SARS Virus
atattcccgataattggatatctac

SEQ ID NO: 87335 - DNA, 25 bp, SARS Virus
tattcccgatagatggatatctaca

SEQ ID NO: 87336 - DNA, 25 bp, SARS Virus
attcccgatagtaggatatctacat

SEQ ID NO: 87337 - DNA, 25 bp, SARS Virus
ttcccgatagttagatatctacatc

SEQ ID NO: 87338 - DNA, 25 bp, SARS Virus
tcccgatagttgaatatctacatca

SEQ ID NO: 87339 - DNA, 25 bp, SARS Virus
cccgatagttggatatctacatcaa

SEQ ID NO: 87340 - DNA, 25 bp, SARS Virus
ccgatagttggaaatctacatcaag

SEQ ID NO: 87341 - DNA, 25 bp, SARS Virus
cgatagttggatatctacatcaagc

SEQ ID NO: 87342 - DNA, 25 bp, SARS Virus
gatagttggataactacatcaagca

SEQ ID NO: 87343 - DNA, 25 bp, SARS Virus
atagttggatatatacatcaagcac

SEQ ID NO: 87344 - DNA, 25 bp, SARS Virus
tagttggatatcaacatcaagcact

SEQ ID NO: 87345 - DNA, 25 bp, SARS Virus
agttggatatctacatcaagcacta

SEQ ID NO: 87346 - DNA, 25 bp, SARS Virus
gttggatatctaaatcaagcactag

SEQ ID NO: 87347 - DNA, 25 bp, SARS Virus
ttggatatctacatcaagcactaga

SEQ ID NO: 87348 - DNA, 25 bp, SARS Virus
tggatatctacaacaagcactagat

SEQ ID NO: 87349 - DNA, 25 bp, SARS Virus
ggatatctacataaagcactagatg

SEQ ID NO: 87350 - DNA, 25 bp, SARS Virus
gatatctacatcaagcactagatgg

SEQ ID NO: 87351 - DNA, 25 bp, SARS Virus
atatctacatcaagcactagatgga

SEQ ID NO: 87352 - DNA, 25 bp, SARS Virus
tatctacatcaaacactagatggaa

SEQ ID NO: 87353 - DNA, 25 bp, SARS Virus
atctacatcaagaactagatggaag

SEQ ID NO: 87354 - DNA, 25 bp, SARS Virus
tctacatcaagcactagatggaaga

SEQ ID NO: 87355 - DNA, 25 bp, SARS Virus
ctacatcaagcaatagatggaagac

SEQ ID NO: 87356 - DNA, 25 bp, SARS Virus
tacatcaagcacaagatggaagacc

SEQ ID NO: 87357 - DNA, 25 bp, SARS Virus
acatcaagcactagatggaagacca

SEQ ID NO: 87358 - DNA, 25 bp, SARS Virus
catcaagcactaaatggaagaccaa

SEQ ID NO: 87359 - DNA, 25 bp, SARS Virus
atcaagcactagatggaagaccaaa

SEQ ID NO: 87360 - DNA, 25 bp, SARS Virus
tcaagcactagaaggaagaccaaaa

SEQ ID NO: 87361 - DNA, 25 bp, SARS Virus
caagcactagatagaagaccaaaat

SEQ ID NO: 87362 - DNA, 25 bp, SARS Virus
aagcactagatgaaagaccaaaatt

SEQ ID NO: 87363 - DNA, 25 bp, SARS Virus
agcactagatggaagaccaaaattg

SEQ ID NO: 87364 - DNA, 25 bp, SARS Virus
gcactagatggaagaccaaaattgt

SEQ ID NO: 87365 - DNA, 25 bp, SARS Virus
cactagatggaaaaccaaaattgtg

SEQ ID NO: 87366 - DNA, 25 bp, SARS Virus
actagatggaagaccaaaattgtga

SEQ ID NO: 87367 - DNA, 25 bp, SARS Virus
ctagatggaagaacaaaattgtgaa

SEQ ID NO: 87368 - DNA, 25 bp, SARS Virus
tagatggaagacaaaaattgtgaaa

SEQ ID NO: 87369 - DNA, 25 bp, SARS Virus
agatggaagaccaaaattgtgaaac

SEQ ID NO: 87370 - DNA, 25 bp, SARS Virus
gatggaagaccaaaattgtgaaact

SEQ ID NO: 87371 - DNA, 25 bp, SARS Virus
atggaagaccaaaattgtgaaactt

SEQ ID NO: 87372 - DNA, 25 bp, SARS Virus
tggaagaccaaaattgtgaaacttt

SEQ ID NO: 87373 - DNA, 25 bp, SARS Virus
ggaagaccaaaaatgtgaaactttg

SEQ ID NO: 87374 - DNA, 25 bp, SARS Virus
gaagaccaaaatagtgaaactttgg

SEQ ID NO: 87375 - DNA, 25 bp, SARS Virus
aagaccaaaattatgaaactttgga

SEQ ID NO: 87376 - DNA, 25 bp, SARS Virus
agaccaaaattgagaaactttggat

SEQ ID NO: 87377 - DNA, 25 bp, SARS Virus
gaccaaaattgtaaaactttggata

SEQ ID NO: 87378 - DNA, 25 bp, SARS Virus
accaaaattgtgaaactttggataa

SEQ ID NO: 87379 - DNA, 25 bp, SARS Virus
ccaaaattgtgaaactttggataaa

SEQ ID NO: 87380 - DNA, 25 bp, SARS Virus
caaaattgtgaaactttggataaaa

SEQ ID NO: 87381 - DNA, 25 bp, SARS Virus
aaaattgtgaaaatttggataaaaa

SEQ ID NO: 87382 - DNA, 25 bp, SARS Virus
aaattgtgaaacattggataaaaat

SEQ ID NO: 87383 - DNA, 25 bp, SARS Virus
aattgtgaaactatggataaaaatt

SEQ ID NO: 87384 - DNA, 25 bp, SARS Virus
attgtgaaacttaggataaaaattc

SEQ ID NO: 87385 - DNA, 25 bp, SARS Virus
ttgtgaaactttagataaaaattca

SEQ ID NO: 87386 - DNA, 25 bp, SARS Virus
tgtgaaactttgaataaaaattcaa

SEQ ID NO: 87387 - DNA, 25 bp, SARS Virus
gtgaaactttggataaaaattcaac

SEQ ID NO: 87388 - DNA, 25 bp, SARS Virus
tgaaactttggaaaaaaattcaacg

SEQ ID NO: 87389 - DNA, 25 bp, SARS Virus
gaaactttggataaaaattcaacgg

SEQ ID NO: 87390 - DNA, 25 bp, SARS Virus
aaactttggataaaaattcaacgga

SEQ ID NO: 87391 - DNA, 25 bp, SARS Virus
aactttggataaaaattcaacggag

SEQ ID NO: 87392 - DNA, 25 bp, SARS Virus
actttggataaaaattcaacggaga

SEQ ID NO: 87393 - DNA, 25 bp, SARS Virus
ctttggataaaaattcaacggagaa

SEQ ID NO: 87394 - DNA, 25 bp, SARS Virus
tttggataaaaaatcaacggagaac

SEQ ID NO: 87395 - DNA, 25 bp, SARS Virus
ttggataaaaatacaacggagaacc

SEQ ID NO: 87396 - DNA, 25 bp, SARS Virus
tggataaaaattaaacggagaacca

SEQ ID NO: 87397 - DNA, 25 bp, SARS Virus
ggataaaaattcaacggagaaccat

SEQ ID NO: 87398 - DNA, 25 bp, SARS Virus
gataaaaattcaacggagaaccata

SEQ ID NO: 87399 - DNA, 25 bp, SARS Virus
ataaaaattcaaaggagaaccataa

SEQ ID NO: 87400 - DNA, 25 bp, SARS Virus
taaaaattcaacagagaaccataat

SEQ ID NO: 87401 - DNA, 25 bp, SARS Virus
aaaaattcaacgaagaaccataatt

SEQ ID NO: 87402 - DNA, 25 bp, SARS Virus
aaaattcaacggagaaccataattg

SEQ ID NO: 87403 - DNA, 25 bp, SARS Virus
aaattcaacggaaaaccataattgt

SEQ ID NO: 87404 - DNA, 25 bp, SARS Virus
aattcaacggagaaccataattgta

SEQ ID NO: 87405 - DNA, 25 bp, SARS Virus
attcaacggagaaccataattgtaa

SEQ ID NO: 87406 - DNA, 25 bp, SARS Virus
ttcaacggagaaacataattgtaat

SEQ ID NO: 87407 - DNA, 25 bp, SARS Virus
tcaacggagaacaataattgtaatg

SEQ ID NO: 87408 - DNA, 25 bp, SARS Virus
caacggagaaccataattgtaatgt

SEQ ID NO: 87409 - DNA, 25 bp, SARS Virus
aacggagaaccaaaattgtaatgtt

SEQ ID NO: 87410 - DNA, 25 bp, SARS Virus
acggagaaccataattgtaatgttt

SEQ ID NO: 87411 - DNA, 25 bp, SARS Virus
cggagaaccataattgtaatgttta

SEQ ID NO: 87412 - DNA, 25 bp, SARS Virus
ggagaaccataaatgtaatgtttaa

SEQ ID NO: 87413 - DNA, 25 bp, SARS Virus
gagaaccataatagtaatgtttaaa

SEQ ID NO: 87414 - DNA, 25 bp, SARS Virus
agaaccataattataatgtttaaaa

SEQ ID NO: 87415 - DNA, 25 bp, SARS Virus
gaaccataattgaaatgtttaaaat

SEQ ID NO: 87416 - DNA, 25 bp, SARS Virus
aaccataattgtaatgtttaaaatc

SEQ ID NO: 87417 - DNA, 25 bp, SARS Virus
accataattgtaatgtttaaaatct

SEQ ID NO: 87418 - DNA, 25 bp, SARS Virus
ccataattgtaaagtttaaaatctc

SEQ ID NO: 87419 - DNA, 25 bp, SARS Virus
cataattgtaatatttaaaatctcg

SEQ ID NO: 87420 - DNA, 25 bp, SARS Virus
ataattgtaatgattaaaatctcgg

SEQ ID NO: 87421 - DNA, 25 bp, SARS Virus
taattgtaatgtataaaatctcggt

SEQ ID NO: 87422 - DNA, 25 bp, SARS Virus
aattgtaatgttaaaaatctcggta

SEQ ID NO: 87423 - DNA, 25 bp, SARS Virus
attgtaatgtttaaaatctcggtaa

SEQ ID NO: 87424 - DNA, 25 bp, SARS Virus
ttgtaatgtttaaaatctcggtaag

SEQ ID NO: 87425 - DNA, 25 bp, SARS Virus
tgtaatgtttaaaatctcggtaaga

SEQ ID NO: 87426 - DNA, 25 bp, SARS Virus
gtaatgtttaaaatctcggtaagaa

SEQ ID NO: 87427 - DNA, 25 bp, SARS Virus
taatgtttaaaaactcggtaagaat

SEQ ID NO: 87428 - DNA, 25 bp, SARS Virus
aatgtttaaaatatcggtaagaatg

SEQ ID NO: 87429 - DNA, 25 bp, SARS Virus
atgtttaaaatcacggtaagaatgt

SEQ ID NO: 87430 - DNA, 25 bp, SARS Virus
tgtttaaaatctaggtaagaatgtc

SEQ ID NO: 87431 - DNA, 25 bp, SARS Virus
gtttaaaatctcagtaagaatgtcg

SEQ ID NO: 87432 - DNA, 25 bp, SARS Virus
tttaaaatctcgataagaatgtcgg

SEQ ID NO: 87433 - DNA, 25 bp, SARS Virus
ttaaaatctcggaaagaatgtcgga

SEQ ID NO: 87434 - DNA, 25 bp, SARS Virus
taaaatctcggtaagaatgtcggaa

SEQ ID NO: 87435 - DNA, 25 bp, SARS Virus
aaaatctcggtaagaatgtcggaaa

SEQ ID NO: 87436 - DNA, 25 bp, SARS Virus
aaatctcggtaaaaatgtcggaaaa

SEQ ID NO: 87437 - DNA, 25 bp, SARS Virus
aatctcggtaagaatgtcggaaaag

SEQ ID NO: 87438 - DNA, 25 bp, SARS Virus
atctcggtaagaatgtcggaaaagt

SEQ ID NO: 87439 - DNA, 25 bp, SARS Virus
tctcggtaagaaagtcggaaaagtg

SEQ ID NO: 87440 - DNA, 25 bp, SARS Virus
ctcggtaagaatatcggaaaagtgg

SEQ ID NO: 87441 - DNA, 25 bp, SARS Virus
tcggtaagaatgacggaaaagtgga

SEQ ID NO: 87442 - DNA, 25 bp, SARS Virus
cggtaagaatgtaggaaaagtggac

SEQ ID NO: 87443 - DNA, 25 bp, SARS Virus
ggtaagaatgtcagaaaagtggacg

SEQ ID NO: 87444 - DNA, 25 bp, SARS Virus
gtaagaatgtcgaaaaagtggacga

SEQ ID NO: 87445 - DNA, 25 bp, SARS Virus
taagaatgtcggaaaagtggacgag

SEQ ID NO: 87446 - DNA, 25 bp, SARS Virus
aagaatgtcggaaaagtggacgagt

SEQ ID NO: 87447 - DNA, 25 bp, SARS Virus
agaatgtcggaaaagtggacgagtt

SEQ ID NO: 87448 - DNA, 25 bp, SARS Virus
gaatgtcggaaaagtggacgagttc

SEQ ID NO: 87449 - DNA, 25 bp, SARS Virus
aatgtcggaaaaatggacgagttct

SEQ ID NO: 87450 - DNA, 25 bp, SARS Virus
atgtcggaaaagaggacgagttctg

SEQ ID NO: 87451 - DNA, 25 bp, SARS Virus
tgtcggaaaagtagacgagttctgt

SEQ ID NO: 87452 - DNA, 25 bp, SARS Virus
gtcggaaaagtgaacgagttctgta

SEQ ID NO: 87453 - DNA, 25 bp, SARS Virus
tcggaaaagtggacgagttctgtaa

SEQ ID NO: 87454 - DNA, 25 bp, SARS Virus
cggaaaagtggaagagttctgtaaa

SEQ ID NO: 87455 - DNA, 25 bp, SARS Virus
ggaaaagtggacaagttctgtaaac

SEQ ID NO: 87456 - DNA, 25 bp, SARS Virus
gaaaagtggacgagttctgtaaacc

SEQ ID NO: 87457 - DNA, 25 bp, SARS Virus
aaaagtggacgaattctgtaaaccc

SEQ ID NO: 87458 - DNA, 25 bp, SARS Virus
aaagtggacgagatctgtaaacccc

SEQ ID NO: 87459 - DNA, 25 bp, SARS Virus
aagtggacgagtactgtaaaccccg

SEQ ID NO: 87460 - DNA, 25 bp, SARS Virus
agtggacgagttatgtaaaccccgt

SEQ ID NO: 87461 - DNA, 25 bp, SARS Virus
gtggacgagttcagtaaaccccgtg

SEQ ID NO: 87462 - DNA, 25 bp, SARS Virus
tggacgagttctataaaccccgtgc

SEQ ID NO: 87463 - DNA, 25 bp, SARS Virus
ggacgagttctgaaaaccccgtgca

SEQ ID NO: 87464 - DNA, 25 bp, SARS Virus
gacgagttctgtaaaccccgtgcag

SEQ ID NO: 87465 - DNA, 25 bp, SARS Virus
acgagttctgtaaaccccgtgcagt

SEQ ID NO: 87466 - DNA, 25 bp, SARS Virus
cgagttctgtaaaccccgtgcagtc

SEQ ID NO: 87467 - DNA, 25 bp, SARS Virus
gagttctgtaaaacccgtgcagtcg

SEQ ID NO: 87468 - DNA, 25 bp, SARS Virus
agttctgtaaacaccgtgcagtcga

SEQ ID NO: 87469 - DNA, 25 bp, SARS Virus
gttctgtaaaccacgtgcagtcgac

SEQ ID NO: 87470 - DNA, 25 bp, SARS Virus
ttctgtaaacccagtgcagtcgacg

SEQ ID NO: 87471 - DNA, 25 bp, SARS Virus
tctgtaaaccccatgcagtcgacgt

SEQ ID NO: 87472 - DNA, 25 bp, SARS Virus
ctgtaaaccccgagcagtcgacgtc

SEQ ID NO: 87473 - DNA, 25 bp, SARS Virus
tgtaaaccccgtacagtcgacgtcg

SEQ ID NO: 87474 - DNA, 25 bp, SARS Virus
gtaaaccccgtgaagtcgacgtcgg

SEQ ID NO: 87475 - DNA, 25 bp, SARS Virus
taaaccccgtgcagtcgacgtcgga

SEQ ID NO: 87476 - DNA, 25 bp, SARS Virus
aaaccccgtgcaatcgacgtcggat

SEQ ID NO: 87477 - DNA, 25 bp, SARS Virus
aaccccgtgcagacgacgtcggata

SEQ ID NO: 87478 - DNA, 25 bp, SARS Virus
accccgtgcagtagacgtcggataa

SEQ ID NO: 87479 - DNA, 25 bp, SARS Virus
ccccgtgcagtcaacgtcggataaa

SEQ ID NO: 87480 - DNA, 25 bp, SARS Virus
cccgtgcagtcgacgtcggataaaa

SEQ ID NO: 87481 - DNA, 25 bp, SARS Virus
aattcctaccatcaataaaacgacg

SEQ ID NO: 87482 - DNA, 25 bp, SARS Virus
attcctaccatacataaaacgacgg

SEQ ID NO: 87483 - DNA, 25 bp, SARS Virus
ttcctaccataactaaaacgacggt

SEQ ID NO: 87484 - DNA, 25 bp, SARS Virus
tcctaccataaacaaaacgacggtg

SEQ ID NO: 87485 - DNA, 25 bp, SARS Virus
cctaccataaatcaaacgacggtgt

SEQ ID NO: 87486 - DNA, 25 bp, SARS Virus
ctaccataaatacaacgacggtgtc

SEQ ID NO: 87487 - DNA, 25 bp, SARS Virus
taccataaataacacgacggtgtct

SEQ ID NO: 87488 - DNA, 25 bp, SARS Virus
accataaataaaccgacggtgtctc

SEQ ID NO: 87489 - DNA, 25 bp, SARS Virus
ccataaataaaacgacggtgtctct

SEQ ID NO: 87490 - DNA, 25 bp, SARS Virus
cataaataaaaccacggtgtctctt

SEQ ID NO: 87491 - DNA, 25 bp, SARS Virus
ataaataaaacgccggtgtctcttt

SEQ ID NO: 87492 - DNA, 25 bp, SARS Virus
taaataaaacgacggtgtctcttta

SEQ ID NO: 87493 - DNA, 25 bp, SARS Virus
aaataaaacgaccgtgtctctttag

SEQ ID NO: 87494 - DNA, 25 bp, SARS Virus
aataaaacgacgctgtctctttagt

SEQ ID NO: 87495 - DNA, 25 bp, SARS Virus
ataaaacgacggcgtctctttagtt

SEQ ID NO: 87496 - DNA, 25 bp, SARS Virus
taaaacgacggtctctctttagttt

SEQ ID NO: 87497 - DNA, 25 bp, SARS Virus
aaaacgacggtgcctctttagttta

SEQ ID NO: 87498 - DNA, 25 bp, SARS Virus
aaacgacggtgtctctttagtttac

SEQ ID NO: 87499 - DNA, 25 bp, SARS Virus
aacgacggtgtccctttagtttaca

SEQ ID NO: 87500 - DNA, 25 bp, SARS Virus
acgacggtgtctctttagtttacaa

SEQ ID NO: 87501 - DNA, 25 bp, SARS Virus
cgacggtgtctccttagtttacaac

SEQ ID NO: 87502 - DNA, 25 bp, SARS Virus
gacggtgtctctctagtttacaaca

SEQ ID NO: 87503 - DNA, 25 bp, SARS Virus
acggtgtctcttcagtttacaacag

SEQ ID NO: 87504 - DNA, 25 bp, SARS Virus
cggtgtctctttcgtttacaacagg

SEQ ID NO: 87505 - DNA, 25 bp, SARS Virus
ggtgtctctttactttacaacaggc

SEQ ID NO: 87506 - DNA, 25 bp, SARS Virus
gtgtctctttagcttacaacaggca

SEQ ID NO: 87507 - DNA, 25 bp, SARS Virus
tgtctctttagtctacaacaggcac

SEQ ID NO: 87508 - DNA, 25 bp, SARS Virus
gtctctttagttcacaacaggcacc

SEQ ID NO: 87509 - DNA, 25 bp, SARS Virus
tctctttagtttccaacaggcacca

SEQ ID NO: 87510 - DNA, 25 bp, SARS Virus
ctctttagtttacaacaggcaccaa

SEQ ID NO: 87511 - DNA, 25 bp, SARS Virus
tctttagtttaccacaggcaccaac

SEQ ID NO: 87512 - DNA, 25 bp, SARS Virus
ctttagtttacaccaggcaccaacc

SEQ ID NO: 87513 - DNA, 25 bp, SARS Virus
tttagtttacaacaggcaccaaccc

SEQ ID NO: 87514 - DNA, 25 bp, SARS Virus
ttagtttacaaccggcaccaaccca

SEQ ID NO: 87515 - DNA, 25 bp, SARS Virus
tagtttacaacacgcaccaacccaa

SEQ ID NO: 87516 - DNA, 25 bp, SARS Virus
agtttacaacagccaccaacccaaa

SEQ ID NO: 87517 - DNA, 25 bp, SARS Virus
gtttacaacaggcaccaacccaaaa

SEQ ID NO: 87518 - DNA, 25 bp, SARS Virus
tttacaacaggccccaacccaaaaa

SEQ ID NO: 87519 - DNA, 25 bp, SARS Virus
ttacaacaggcaccaacccaaaaac

SEQ ID NO: 87520 - DNA, 25 bp, SARS Virus
tacaacaggcaccaacccaaaaacc

SEQ ID NO: 87521 - DNA, 25 bp, SARS Virus
acaacaggcacccacccaaaaacca

SEQ ID NO: 87522 - DNA, 25 bp, SARS Virus
caacaggcaccaccccaaaaaccaa

SEQ ID NO: 87523 - DNA, 25 bp, SARS Virus
aacaggcaccaacccaaaaaccaag

SEQ ID NO: 87524 - DNA, 25 bp, SARS Virus
acaggcaccaacccaaaaaccaaga

SEQ ID NO: 87525 - DNA, 25 bp, SARS Virus
caggcaccaacccaaaaaccaagat

SEQ ID NO: 87526 - DNA, 25 bp, SARS Virus
aggcaccaaccccaaaaccaagatg

SEQ ID NO: 87527 - DNA, 25 bp, SARS Virus
ggcaccaacccacaaaccaagatgg

SEQ ID NO: 87528 - DNA, 25 bp, SARS Virus
gcaccaacccaacaaccaagatggt

SEQ ID NO: 87529 - DNA, 25 bp, SARS Virus
caccaacccaaacaccaagatggta

SEQ ID NO: 87530 - DNA, 25 bp, SARS Virus
accaacccaaaacccaagatggtac

SEQ ID NO: 87531 - DNA, 25 bp, SARS Virus
ccaacccaaaaaccaagatggtact

SEQ ID NO: 87532 - DNA, 25 bp, SARS Virus
caacccaaaaaccaagatggtactt

SEQ ID NO: 87533 - DNA, 25 bp, SARS Virus
aacccaaaaacccagatggtacttg

SEQ ID NO: 87534 - DNA, 25 bp, SARS Virus
acccaaaaaccacgatggtacttgt

SEQ ID NO: 87535 - DNA, 25 bp, SARS Virus
cccaaaaaccaacatggtacttgtt

SEQ ID NO: 87536 - DNA, 25 bp, SARS Virus
ccaaaaaccaagctggtacttgttg

SEQ ID NO: 87537 - DNA, 25 bp, SARS Virus
caaaaaccaagacggtacttgttgt

SEQ ID NO: 87538 - DNA, 25 bp, SARS Virus
aaaaaccaagatcgtacttgttgtt

SEQ ID NO: 87539 - DNA, 25 bp, SARS Virus
aaaaccaagatgctacttgttgttc

SEQ ID NO: 87540 - DNA, 25 bp, SARS Virus
aaaccaagatggcacttgttgttca

SEQ ID NO: 87541 - DNA, 25 bp, SARS Virus
aaccaagatggtccttgttgttcag

SEQ ID NO: 87542 - DNA, 25 bp, SARS Virus
accaagatggtacttgttgttcagt

SEQ ID NO: 87543 - DNA, 25 bp, SARS Virus
ccaagatggtacctgttgttcagtg

SEQ ID NO: 87544 - DNA, 25 bp, SARS Virus
caagatggtactcgttgttcagtgt

SEQ ID NO: 87545 - DNA, 25 bp, SARS Virus
aagatggtacttcttgttcagtgtc

SEQ ID NO: 87546 - DNA, 25 bp, SARS Virus
agatggtacttgctgttcagtgtca

SEQ ID NO: 87547 - DNA, 25 bp, SARS Virus
gatggtacttgtcgttcagtgtcag

SEQ ID NO: 87548 - DNA, 25 bp, SARS Virus
atggtacttgttcttcagtgtcagc

SEQ ID NO: 87549 - DNA, 25 bp, SARS Virus
tggtacttgttgctcagtgtcagcc

SEQ ID NO: 87550 - DNA, 25 bp, SARS Virus
ggtacttgttgtccagtgtcagcca

SEQ ID NO: 87551 - DNA, 25 bp, SARS Virus
gtacttgttgttcagtgtcagccac

SEQ ID NO: 87552 - DNA, 25 bp, SARS Virus
tacttgttgttccgtgtcagccact

SEQ ID NO: 87553 - DNA, 25 bp, SARS Virus
acttgttgttcactgtcagccacta

SEQ ID NO: 87554 - DNA, 25 bp, SARS Virus
cttgttgttcagcgtcagccactaa

SEQ ID NO: 87555 - DNA, 25 bp, SARS Virus
ttgttgttcagtctcagccactaat

SEQ ID NO: 87556 - DNA, 25 bp, SARS Virus
tgttgttcagtgccagccactaata

SEQ ID NO: 87557 - DNA, 25 bp, SARS Virus
gttgttcagtgtcagccactaataa

SEQ ID NO: 87558 - DNA, 25 bp, SARS Virus
ttgttcagtgtccgccactaataat

SEQ ID NO: 87559 - DNA, 25 bp, SARS Virus
tgttcagtgtcacccactaataata

SEQ ID NO: 87560 - DNA, 25 bp, SARS Virus
gttcagtgtcagccactaataataa

SEQ ID NO: 87561 - DNA, 25 bp, SARS Virus
ttcagtgtcagccactaataataat

SEQ ID NO: 87562 - DNA, 25 bp, SARS Virus
tcagtgtcagcccctaataataatt

SEQ ID NO: 87563 - DNA, 25 bp, SARS Virus
cagtgtcagccactaataataattg

SEQ ID NO: 87564 - DNA, 25 bp, SARS Virus
agtgtcagccaccaataataattgt

SEQ ID NO: 87565 - DNA, 25 bp, SARS Virus
gtgtcagccactcataataattgtt

SEQ ID NO: 87566 - DNA, 25 bp, SARS Virus
tgtcagccactactaataattgtta

SEQ ID NO: 87567 - DNA, 25 bp, SARS Virus
gtcagccactaacaataattgttaa

SEQ ID NO: 87568 - DNA, 25 bp, SARS Virus
tcagccactaatcataattgttaag

SEQ ID NO: 87569 - DNA, 25 bp, SARS Virus
cagccactaatactaattgttaaga

SEQ ID NO: 87570 - DNA, 25 bp, SARS Virus
agccactaataacaattgttaagat

SEQ ID NO: 87571 - DNA, 25 bp, SARS Virus
gccactaataatcattgttaagatg

SEQ ID NO: 87572 - DNA, 25 bp, SARS Virus
ccactaataatacttgttaagatga

SEQ ID NO: 87573 - DNA, 25 bp, SARS Virus
cactaataataactgttaagatgat

SEQ ID NO: 87574 - DNA, 25 bp, SARS Virus
actaataataatcgttaagatgatt

SEQ ID NO: 87575 - DNA, 25 bp, SARS Virus
ctaataataattcttaagatgatta

SEQ ID NO: 87576 - DNA, 25 bp, SARS Virus
taataataattgctaagatgattac

SEQ ID NO: 87577 - DNA, 25 bp, SARS Virus
aataataattgtcaagatgattaca

SEQ ID NO: 87578 - DNA, 25 bp, SARS Virus
ataataattgttcagatgattacaa

SEQ ID NO: 87579 - DNA, 25 bp, SARS Virus
taataattgttacgatgattacaac

SEQ ID NO: 87580 - DNA, 25 bp, SARS Virus
aataattgttaacatgattacaaca

SEQ ID NO: 87581 - DNA, 25 bp, SARS Virus
ataattgttaagctgattacaacaa

SEQ ID NO: 87582 - DNA, 25 bp, SARS Virus
taattgttaagacgattacaacaat

SEQ ID NO: 87583 - DNA, 25 bp, SARS Virus
aattgttaagatcattacaacaata

SEQ ID NO: 87584 - DNA, 25 bp, SARS Virus
attgttaagatgcttacaacaatat

SEQ ID NO: 87585 - DNA, 25 bp, SARS Virus
ttgttaagatgactacaacaatatg

SEQ ID NO: 87586 - DNA, 25 bp, SARS Virus
tgttaagatgatcacaacaatatgc

SEQ ID NO: 87587 - DNA, 25 bp, SARS Virus
gttaagatgattccaacaatatgct

SEQ ID NO: 87588 - DNA, 25 bp, SARS Virus
ttaagatgattacaacaatatgctc

SEQ ID NO: 87589 - DNA, 25 bp, SARS Virus
taagatgattaccacaatatgctcg

SEQ ID NO: 87590 - DNA, 25 bp, SARS Virus
aagatgattacaccaatatgctcgt

SEQ ID NO: 87591 - DNA, 25 bp, SARS Virus
agatgattacaacaatatgctcgta

SEQ ID NO: 87592 - DNA, 25 bp, SARS Virus
gatgattacaaccatatgctcgtac

SEQ ID NO: 87593 - DNA, 25 bp, SARS Virus
atgattacaacactatgctcgtaca

SEQ ID NO: 87594 - DNA, 25 bp, SARS Virus
tgattacaacaacatgctcgtacat

SEQ ID NO: 87595 - DNA, 25 bp, SARS Virus
gattacaacaatctgctcgtacatt

SEQ ID NO: 87596 - DNA, 25 bp, SARS Virus
attacaacaatacgctcgtacattg

SEQ ID NO: 87597 - DNA, 25 bp, SARS Virus
ttacaacaatatcctcgtacattga

SEQ ID NO: 87598 - DNA, 25 bp, SARS Virus
tacaacaatatgctcgtacattgaa

SEQ ID NO: 87599 - DNA, 25 bp, SARS Virus
acaacaatatgcccgtacattgaaa

SEQ ID NO: 87600 - DNA, 25 bp, SARS Virus
caacaatatgctcgtacattgaaac

SEQ ID NO: 87601 - DNA, 25 bp, SARS Virus
aacaatatgctcctacattgaaact

SEQ ID NO: 87602 - DNA, 25 bp, SARS Virus
acaatatgctcgcacattgaaactt

SEQ ID NO: 87603 - DNA, 25 bp, SARS Virus
caatatgctcgtccattgaaactta

SEQ ID NO: 87604 - DNA, 25 bp, SARS Virus
aatatgctcgtacattgaaacttaa

SEQ ID NO: 87605 - DNA, 25 bp, SARS Virus
atatgctcgtaccttgaaacttaac

SEQ ID NO: 87606 - DNA, 25 bp, SARS Virus
tatgctcgtacactgaaacttaaca

SEQ ID NO: 87607 - DNA, 25 bp, SARS Virus
atgctcgtacatcgaaacttaacac

SEQ ID NO: 87608 - DNA, 25 bp, SARS Virus
tgctcgtacattcaaacttaacaca

SEQ ID NO: 87609 - DNA, 25 bp, SARS Virus
gctcgtacattgcaacttaacacac

SEQ ID NO: 87610 - DNA, 25 bp, SARS Virus
ctcgtacattgacacttaacacact

SEQ ID NO: 87611 - DNA, 25 bp, SARS Virus
tcgtacattgaaccttaacacactg

SEQ ID NO: 87612 - DNA, 25 bp, SARS Virus
cgtacattgaaacttaacacactgt

SEQ ID NO: 87613 - DNA, 25 bp, SARS Virus
gtacattgaaacctaacacactgtt

SEQ ID NO: 87614 - DNA, 25 bp, SARS Virus
tacattgaaactcaacacactgttg

SEQ ID NO: 87615 - DNA, 25 bp, SARS Virus
acattgaaacttcacacactgttgg

SEQ ID NO: 87616 - DNA, 25 bp, SARS Virus
cattgaaacttaccacactgttggg

SEQ ID NO: 87617 - DNA, 25 bp, SARS Virus
attgaaacttaacacactgttggga

SEQ ID NO: 87618 - DNA, 25 bp, SARS Virus
ttgaaacttaacccactgttgggaa

SEQ ID NO: 87619 - DNA, 25 bp, SARS Virus
tgaaacttaacacactgttgggaaa

SEQ ID NO: 87620 - DNA, 25 bp, SARS Virus
gaaacttaacaccctgttgggaaag

SEQ ID NO: 87621 - DNA, 25 bp, SARS Virus
aaacttaacacactgttgggaaaga

SEQ ID NO: 87622 - DNA, 25 bp, SARS Virus
aacttaacacaccgttgggaaagaa

SEQ ID NO: 87623 - DNA, 25 bp, SARS Virus
acttaacacactcttgggaaagaaa

SEQ ID NO: 87624 - DNA, 25 bp, SARS Virus
cttaacacactgctgggaaagaaac

SEQ ID NO: 87625 - DNA, 25 bp, SARS Virus
ttaacacactgtcgggaaagaaacg

SEQ ID NO: 87626 - DNA, 25 bp, SARS Virus
taacacactgttcggaaagaaacga

SEQ ID NO: 87627 - DNA, 25 bp, SARS Virus
aacacactgttgcgaaagaaacgac

SEQ ID NO: 87628 - DNA, 25 bp, SARS Virus
acacactgttggcaaagaaacgaca

SEQ ID NO: 87629 - DNA, 25 bp, SARS Virus
cacactgttgggcaagaaacgacaa

SEQ ID NO: 87630 - DNA, 25 bp, SARS Virus
acactgttgggacagaaacgacaaa

SEQ ID NO: 87631 - DNA, 25 bp, SARS Virus
cactgttgggaacgaaacgacaaag

SEQ ID NO: 87632 - DNA, 25 bp, SARS Virus
actgttgggaaacaaacgacaaaga

SEQ ID NO: 87633 - DNA, 25 bp, SARS Virus
ctgttgggaaagcaacgacaaagat

SEQ ID NO: 87634 - DNA, 25 bp, SARS Virus
tgttgggaaagacacgacaaagatt

SEQ ID NO: 87635 - DNA, 25 bp, SARS Virus
gttgggaaagaaccgacaaagattt

SEQ ID NO: 87636 - DNA, 25 bp, SARS Virus
ttgggaaagaaacgacaaagatttg

SEQ ID NO: 87637 - DNA, 25 bp, SARS Virus
tgggaaagaaaccacaaagatttgg

SEQ ID NO: 87638 - DNA, 25 bp, SARS Virus
gggaaagaaacgccaaagatttggg

SEQ ID NO: 87639 - DNA, 25 bp, SARS Virus
ggaaagaaacgacaaagatttgggt

SEQ ID NO: 87640 - DNA, 25 bp, SARS Virus
gaaagaaacgaccaagatttgggta

SEQ ID NO: 87641 - DNA, 25 bp, SARS Virus
aaagaaacgacacagatttgggtac

SEQ ID NO: 87642 - DNA, 25 bp, SARS Virus
aagaaacgacaacgatttgggtacc

SEQ ID NO: 87643 - DNA, 25 bp, SARS Virus
agaaacgacaaacatttgggtaccc

SEQ ID NO: 87644 - DNA, 25 bp, SARS Virus
gaaacgacaaagctttgggtaccca

SEQ ID NO: 87645 - DNA, 25 bp, SARS Virus
aaacgacaaagacttgggtacccat

SEQ ID NO: 87646 - DNA, 25 bp, SARS Virus
aacgacaaagatctgggtacccatg

SEQ ID NO: 87647 - DNA, 25 bp, SARS Virus
acgacaaagattcgggtacccatgt

SEQ ID NO: 87648 - DNA, 25 bp, SARS Virus
cgacaaagatttcggtacccatgtg

SEQ ID NO: 87649 - DNA, 25 bp, SARS Virus
gacaaagatttgcgtacccatgtgt

SEQ ID NO: 87650 - DNA, 25 bp, SARS Virus
acaaagatttggctacccatgtgtc

SEQ ID NO: 87651 - DNA, 25 bp, SARS Virus
caaagatttgggcacccatgtgtct

SEQ ID NO: 87652 - DNA, 25 bp, SARS Virus
aaagatttgggtccccatgtgtctg

SEQ ID NO: 87653 - DNA, 25 bp, SARS Virus
aagatttgggtacccatgtgtctgt

SEQ ID NO: 87654 - DNA, 25 bp, SARS Virus
agatttgggtacccatgtgtctgtg

SEQ ID NO: 87655 - DNA, 25 bp, SARS Virus
gatttgggtacccatgtgtctgtgt

SEQ ID NO: 87656 - DNA, 25 bp, SARS Virus
atttgggtacccctgtgtctgtgta

SEQ ID NO: 87657 - DNA, 25 bp, SARS Virus
tttgggtacccacgtgtctgtgtat

SEQ ID NO: 87658 - DNA, 25 bp, SARS Virus
ttgggtacccatctgtctgtgtatg

SEQ ID NO: 87659 - DNA, 25 bp, SARS Virus
tgggtacccatgcgtctgtgtatga

SEQ ID NO: 87660 - DNA, 25 bp, SARS Virus
gggtacccatgtctctgtgtatgat

SEQ ID NO: 87661 - DNA, 25 bp, SARS Virus
ggtacccatgtgcctgtgtatgata

SEQ ID NO: 87662 - DNA, 25 bp, SARS Virus
gtacccatgtgtctgtgtatgatac

SEQ ID NO: 87663 - DNA, 25 bp, SARS Virus
tacccatgtgtccgtgtatgatact

SEQ ID NO: 87664 - DNA, 25 bp, SARS Virus
acccatgtgtctctgtatgatacta

SEQ ID NO: 87665 - DNA, 25 bp, SARS Virus
cccatgtgtctgcgtatgatactat

SEQ ID NO: 87666 - DNA, 25 bp, SARS Virus
ccatgtgtctgtctatgatactata

SEQ ID NO: 87667 - DNA, 25 bp, SARS Virus
catgtgtctgtgcatgatactataa

SEQ ID NO: 87668 - DNA, 25 bp, SARS Virus
atgtgtctgtgtctgatactataag

SEQ ID NO: 87669 - DNA, 25 bp, SARS Virus
tgtgtctgtgtacgatactataagc

SEQ ID NO: 87670 - DNA, 25 bp, SARS Virus
gtgtctgtgtatcatactataagct

SEQ ID NO: 87671 - DNA, 25 bp, SARS Virus
tgtctgtgtatgctactataagcta

SEQ ID NO: 87672 - DNA, 25 bp, SARS Virus
gtctgtgtatgacactataagctat

SEQ ID NO: 87673 - DNA, 25 bp, SARS Virus
tctgtgtatgatcctataagctatt

SEQ ID NO: 87674 - DNA, 25 bp, SARS Virus
ctgtgtatgatactataagctatta

SEQ ID NO: 87675 - DNA, 25 bp, SARS Virus
tgtgtatgataccataagctattac

SEQ ID NO: 87676 - DNA, 25 bp, SARS Virus
gtgtatgatactctaagctattacg

SEQ ID NO: 87677 - DNA, 25 bp, SARS Virus
tgtatgatactacaagctattacgt

SEQ ID NO: 87678 - DNA, 25 bp, SARS Virus
gtatgatactatcagctattacgta

SEQ ID NO: 87679 - DNA, 25 bp, SARS Virus
tatgatactatacgctattacgtaa

SEQ ID NO: 87680 - DNA, 25 bp, SARS Virus
atgatactataacctattacgtaaa

SEQ ID NO: 87681 - DNA, 25 bp, SARS Virus
tgatactataagctattacgtaaat

SEQ ID NO: 87682 - DNA, 25 bp, SARS Virus
gatactataagccattacgtaaatt

SEQ ID NO: 87683 - DNA, 25 bp, SARS Virus
atactataagctcttacgtaaatta

SEQ ID NO: 87684 - DNA, 25 bp, SARS Virus
tactataagctactacgtaaattaa

SEQ ID NO: 87685 - DNA, 25 bp, SARS Virus
actataagctatcacgtaaattaac

SEQ ID NO: 87686 - DNA, 25 bp, SARS Virus
ctataagctattccgtaaattaacg

SEQ ID NO: 87687 - DNA, 25 bp, SARS Virus
tataagctattacgtaaattaacgt

SEQ ID NO: 87688 - DNA, 25 bp, SARS Virus
ataagctattacctaaattaacgtg

SEQ ID NO: 87689 - DNA, 25 bp, SARS Virus
taagctattacgcaaattaacgtga

SEQ ID NO: 87690 - DNA, 25 bp, SARS Virus
aagctattacgtcaattaacgtgaa

SEQ ID NO: 87691 - DNA, 25 bp, SARS Virus
agctattacgtacattaacgtgaaa

SEQ ID NO: 87692 - DNA, 25 bp, SARS Virus
gctattacgtaacttaacgtgaaag

SEQ ID NO: 87693 - DNA, 25 bp, SARS Virus
ctattacgtaaactaacgtgaaagc

SEQ ID NO: 87694 - DNA, 25 bp, SARS Virus
tattacgtaaatcaacgtgaaagct

SEQ ID NO: 87695 - DNA, 25 bp, SARS Virus
attacgtaaattcacgtgaaagctc

SEQ ID NO: 87696 - DNA, 25 bp, SARS Virus
ttacgtaaattaccgtgaaagctca

SEQ ID NO: 87697 - DNA, 25 bp, SARS Virus
tacgtaaattaacgtgaaagctcat

SEQ ID NO: 87698 - DNA, 25 bp, SARS Virus
acgtaaattaacctgaaagctcatg

SEQ ID NO: 87699 - DNA, 25 bp, SARS Virus
cgtaaattaacgcgaaagctcatgt

SEQ ID NO: 87700 - DNA, 25 bp, SARS Virus
gtaaattaacgtcaaagctcatgta

SEQ ID NO: 87701 - DNA, 25 bp, SARS Virus
taaattaacgtgcaagctcatgtat

SEQ ID NO: 87702 - DNA, 25 bp, SARS Virus
aaattaacgtgacagctcatgtata

SEQ ID NO: 87703 - DNA, 25 bp, SARS Virus
aattaacgtgaacgctcatgtatag

SEQ ID NO: 87704 - DNA, 25 bp, SARS Virus
attaacgtgaaacctcatgtataga

SEQ ID NO: 87705 - DNA, 25 bp, SARS Virus
ttaacgtgaaagctcatgtatagac

SEQ ID NO: 87706 - DNA, 25 bp, SARS Virus
taacgtgaaagcccatgtatagact

SEQ ID NO: 87707 - DNA, 25 bp, SARS Virus
aacgtgaaagctcatgtatagacta

SEQ ID NO: 87708 - DNA, 25 bp, SARS Virus
acgtgaaagctcctgtatagactac

SEQ ID NO: 87709 - DNA, 25 bp, SARS Virus
cgtgaaagctcacgtatagactacg

SEQ ID NO: 87710 - DNA, 25 bp, SARS Virus
gtgaaagctcatctatagactacgg

SEQ ID NO: 87711 - DNA, 25 bp, SARS Virus
tgaaagctcatgcatagactacgga

SEQ ID NO: 87712 - DNA, 25 bp, SARS Virus
gaaagctcatgtctagactacggaa

SEQ ID NO: 87713 - DNA, 25 bp, SARS Virus
aaagctcatgtacagactacggaaa

SEQ ID NO: 87714 - DNA, 25 bp, SARS Virus
aagctcatgtatcgactacggaaaa

SEQ ID NO: 87715 - DNA, 25 bp, SARS Virus
agctcatgtatacactacggaaaag

SEQ ID NO: 87716 - DNA, 25 bp, SARS Virus
gctcatgtatagcctacggaaaagc

SEQ ID NO: 87717 - DNA, 25 bp, SARS Virus
ctcatgtatagactacggaaaagcg

SEQ ID NO: 87718 - DNA, 25 bp, SARS Virus
tcatgtatagaccacggaaaagcga

SEQ ID NO: 87719 - DNA, 25 bp, SARS Virus
catgtatagactccggaaaagcgaa

SEQ ID NO: 87720 - DNA, 25 bp, SARS Virus
atgtatagactacggaaaagcgaac

SEQ ID NO: 87721 - DNA, 25 bp, SARS Virus
tgtatagactaccgaaaagcgaact

SEQ ID NO: 87722 - DNA, 25 bp, SARS Virus
gtatagactacgcaaaagcgaacta

SEQ ID NO: 87723 - DNA, 25 bp, SARS Virus
tatagactacggcaaagcgaactac

SEQ ID NO: 87724 - DNA, 25 bp, SARS Virus
atagactacggacaagcgaactaca

SEQ ID NO: 87725 - DNA, 25 bp, SARS Virus
tagactacggaacagcgaactacaa

SEQ ID NO: 87726 - DNA, 25 bp, SARS Virus
agactacggaaacgcgaactacaaa

SEQ ID NO: 87727 - DNA, 25 bp, SARS Virus
gactacggaaaaccgaactacaaag

SEQ ID NO: 87728 - DNA, 25 bp, SARS Virus
actacggaaaagcgaactacaaagt

SEQ ID NO: 87729 - DNA, 25 bp, SARS Virus
ctacggaaaagccaactacaaagtc

SEQ ID NO: 87730 - DNA, 25 bp, SARS Virus
tacggaaaagcgcactacaaagtct

SEQ ID NO: 87731 - DNA, 25 bp, SARS Virus
acggaaaagcgacctacaaagtctt

SEQ ID NO: 87732 - DNA, 25 bp, SARS Virus
cggaaaagcgaactacaaagtcttt

SEQ ID NO: 87733 - DNA, 25 bp, SARS Virus
ggaaaagcgaaccacaaagtctttt

SEQ ID NO: 87734 - DNA, 25 bp, SARS Virus
gaaaagcgaactccaaagtcttttc

SEQ ID NO: 87735 - DNA, 25 bp, SARS Virus
aaaagcgaactacaaagtcttttca

SEQ ID NO: 87736 - DNA, 25 bp, SARS Virus
aaagcgaactaccaagtcttttcag

SEQ ID NO: 87737 - DNA, 25 bp, SARS Virus
aagcgaactacacagtcttttcagt

SEQ ID NO: 87738 - DNA, 25 bp, SARS Virus
agcgaactacaacgtcttttcagtc

SEQ ID NO: 87739 - DNA, 25 bp, SARS Virus
gcgaactacaaactcttttcagtcc

SEQ ID NO: 87740 - DNA, 25 bp, SARS Virus
cgaactacaaagccttttcagtcca

SEQ ID NO: 87741 - DNA, 25 bp, SARS Virus
gaactacaaagtcttttcagtccat

SEQ ID NO: 87742 - DNA, 25 bp, SARS Virus
aactacaaagtcctttcagtccatt

SEQ ID NO: 87743 - DNA, 25 bp, SARS Virus
actacaaagtctcttcagtccatta

SEQ ID NO: 87744 - DNA, 25 bp, SARS Virus
ctacaaagtcttctcagtccattaa

SEQ ID NO: 87745 - DNA, 25 bp, SARS Virus
tacaaagtctttccagtccattaaa

SEQ ID NO: 87746 - DNA, 25 bp, SARS Virus
acaaagtcttttcagtccattaaaa

SEQ ID NO: 87747 - DNA, 25 bp, SARS Virus
caaagtcttttccgtccattaaaat

SEQ ID NO: 87748 - DNA, 25 bp, SARS Virus
aaagtcttttcactccattaaaatt

SEQ ID NO: 87749 - DNA, 25 bp, SARS Virus
aagtcttttcagcccattaaaattt

SEQ ID NO: 87750 - DNA, 25 bp, SARS Virus
agtcttttcagtccattaaaatttg

SEQ ID NO: 87751 - DNA, 25 bp, SARS Virus
gtcttttcagtccattaaaatttgt

SEQ ID NO: 87752 - DNA, 25 bp, SARS Virus
tcttttcagtcccttaaaatttgtg

SEQ ID NO: 87753 - DNA, 25 bp, SARS Virus
cttttcagtccactaaaatttgtga

SEQ ID NO: 87754 - DNA, 25 bp, SARS Virus
ttttcagtccatcaaaatttgtgaa

SEQ ID NO: 87755 - DNA, 25 bp, SARS Virus
tttcagtccattcaaatttgtgaat

SEQ ID NO: 87756 - DNA, 25 bp, SARS Virus
ttcagtccattacaatttgtgaatg

SEQ ID NO: 87757 - DNA, 25 bp, SARS Virus
tcagtccattaacatttgtgaatgc

SEQ ID NO: 87758 - DNA, 25 bp, SARS Virus
cagtccattaaactttgtgaatgct

SEQ ID NO: 87759 - DNA, 25 bp, SARS Virus
agtccattaaaacttgtgaatgctc

SEQ ID NO: 87760 - DNA, 25 bp, SARS Virus
gtccattaaaatctgtgaatgctct

SEQ ID NO: 87761 - DNA, 25 bp, SARS Virus
tccattaaaattcgtgaatgctctc

SEQ ID NO: 87762 - DNA, 25 bp, SARS Virus
ccattaaaatttctgaatgctctca

SEQ ID NO: 87763 - DNA, 25 bp, SARS Virus
cattaaaatttgcgaatgctctcaa

SEQ ID NO: 87764 - DNA, 25 bp, SARS Virus
attaaaatttgtcaatgctctcaaa

SEQ ID NO: 87765 - DNA, 25 bp, SARS Virus
ttaaaatttgtgcatgctctcaaac

SEQ ID NO: 87766 - DNA, 25 bp, SARS Virus
taaaatttgtgactgctctcaaaca

SEQ ID NO: 87767 - DNA, 25 bp, SARS Virus
aaaatttgtgaacgctctcaaacac

SEQ ID NO: 87768 - DNA, 25 bp, SARS Virus
aaatttgtgaatcctctcaaacaca

SEQ ID NO: 87769 - DNA, 25 bp, SARS Virus
aatttgtgaatgctctcaaacacaa

SEQ ID NO: 87770 - DNA, 25 bp, SARS Virus
atttgtgaatgccctcaaacacaaa

SEQ ID NO: 87771 - DNA, 25 bp, SARS Virus
tttgtgaatgctctcaaacacaaat

SEQ ID NO: 87772 - DNA, 25 bp, SARS Virus
ttgtgaatgctcccaaacacaaatt

SEQ ID NO: 87773 - DNA, 25 bp, SARS Virus
tgtgaatgctctcaaacacaaattt

SEQ ID NO: 87774 - DNA, 25 bp, SARS Virus
gtgaatgctctccaacacaaatttt

SEQ ID NO: 87775 - DNA, 25 bp, SARS Virus
tgaatgctctcacacacaaattttt

SEQ ID NO: 87776 - DNA, 25 bp, SARS Virus
gaatgctctcaaccacaaattttta

SEQ ID NO: 87777 - DNA, 25 bp, SARS Virus
aatgctctcaaacacaaatttttat

SEQ ID NO: 87778 - DNA, 25 bp, SARS Virus
atgctctcaaacccaaatttttatt

SEQ ID NO: 87779 - DNA, 25 bp, SARS Virus
tgctctcaaacacaaatttttattt

SEQ ID NO: 87780 - DNA, 25 bp, SARS Virus
gctctcaaacaccaatttttatttc

SEQ ID NO: 87781 - DNA, 25 bp, SARS Virus
ctctcaaacacacatttttatttct

SEQ ID NO: 87782 - DNA, 25 bp, SARS Virus
tctcaaacacaactttttatttcta

SEQ ID NO: 87783 - DNA, 25 bp, SARS Virus
ctcaaacacaaacttttatttctac

SEQ ID NO: 87784 - DNA, 25 bp, SARS Virus
tcaaacacaaatctttatttctacc

SEQ ID NO: 87785 - DNA, 25 bp, SARS Virus
caaacacaaattcttatttctaccc

SEQ ID NO: 87786 - DNA, 25 bp, SARS Virus
aaacacaaatttctatttctaccca

SEQ ID NO: 87787 - DNA, 25 bp, SARS Virus
aacacaaattttcatttctacccaa

SEQ ID NO: 87788 - DNA, 25 bp, SARS Virus
acacaaatttttctttctacccaaa

SEQ ID NO: 87789 - DNA, 25 bp, SARS Virus
cacaaatttttacttctacccaaag

SEQ ID NO: 87790 - DNA, 25 bp, SARS Virus
acaaatttttatctctacccaaaga

SEQ ID NO: 87791 - DNA, 25 bp, SARS Virus
caaatttttattcctacccaaagag

SEQ ID NO: 87792 - DNA, 25 bp, SARS Virus
aaatttttatttctacccaaagaga

SEQ ID NO: 87793 - DNA, 25 bp, SARS Virus
aatttttatttccacccaaagagat

SEQ ID NO: 87794 - DNA, 25 bp, SARS Virus
atttttatttctccccaaagagata

SEQ ID NO: 87795 - DNA, 25 bp, SARS Virus
tttttatttctacccaaagagatac

SEQ ID NO: 87796 - DNA, 25 bp, SARS Virus
ttttatttctacccaaagagataca

SEQ ID NO: 87797 - DNA, 25 bp, SARS Virus
tttatttctacccaaagagatacaa

SEQ ID NO: 87798 - DNA, 25 bp, SARS Virus
ttatttctaccccaagagatacaaa

SEQ ID NO: 87799 - DNA, 25 bp, SARS Virus
tatttctacccacagagatacaaat

SEQ ID NO: 87800 - DNA, 25 bp, SARS Virus
atttctacccaacgagatacaaata

SEQ ID NO: 87801 - DNA, 25 bp, SARS Virus
tttctacccaaacagatacaaatat

SEQ ID NO: 87802 - DNA, 25 bp, SARS Virus
ttctacccaaagcgatacaaatatt

SEQ ID NO: 87803 - DNA, 25 bp, SARS Virus
tctacccaaagacatacaaatattc

SEQ ID NO: 87804 - DNA, 25 bp, SARS Virus
ctacccaaagagctacaaatattcc

SEQ ID NO: 87805 - DNA, 25 bp, SARS Virus
tacccaaagagacacaaatattccc

SEQ ID NO: 87806 - DNA, 25 bp, SARS Virus
acccaaagagatccaaatattcccg

SEQ ID NO: 87807 - DNA, 25 bp, SARS Virus
cccaaagagatacaaatattcccga

SEQ ID NO: 87808 - DNA, 25 bp, SARS Virus
ccaaagagataccaatattcccgat

SEQ ID NO: 87809 - DNA, 25 bp, SARS Virus
caaagagatacacatattcccgata

SEQ ID NO: 87810 - DNA, 25 bp, SARS Virus
aaagagatacaactattcccgatag

SEQ ID NO: 87811 - DNA, 25 bp, SARS Virus
aagagatacaaacattcccgatagt

SEQ ID NO: 87812 - DNA, 25 bp, SARS Virus
agagatacaaatcttcccgatagtt

SEQ ID NO: 87813 - DNA, 25 bp, SARS Virus
gagatacaaatactcccgatagttg

SEQ ID NO: 87814 - DNA, 25 bp, SARS Virus
agatacaaatatccccgatagttgg

SEQ ID NO: 87815 - DNA, 25 bp, SARS Virus
gatacaaatattcccgatagttgga

SEQ ID NO: 87816 - DNA, 25 bp, SARS Virus
atacaaatattcccgatagttggat

SEQ ID NO: 87817 - DNA, 25 bp, SARS Virus
tacaaatattcccgatagttggata

SEQ ID NO: 87818 - DNA, 25 bp, SARS Virus
acaaatattccccatagttggatat

SEQ ID NO: 87819 - DNA, 25 bp, SARS Virus
caaatattcccgctagttggatatc

SEQ ID NO: 87820 - DNA, 25 bp, SARS Virus
aaatattcccgacagttggatatct

SEQ ID NO: 87821 - DNA, 25 bp, SARS Virus
aatattcccgatcgttggatatcta

SEQ ID NO: 87822 - DNA, 25 bp, SARS Virus
atattcccgatacttggatatctac

SEQ ID NO: 87823 - DNA, 25 bp, SARS Virus
tattcccgatagctggatatctaca

SEQ ID NO: 87824 - DNA, 25 bp, SARS Virus
attcccgatagtcggatatctacat

SEQ ID NO: 87825 - DNA, 25 bp, SARS Virus
ttcccgatagttcgatatctacatc

SEQ ID NO: 87826 - DNA, 25 bp, SARS Virus
tcccgatagttgcatatctacatca

SEQ ID NO: 87827 - DNA, 25 bp, SARS Virus
cccgatagttggctatctacatcaa

SEQ ID NO: 87828 - DNA, 25 bp, SARS Virus
ccgatagttggacatctacatcaag

SEQ ID NO: 87829 - DNA, 25 bp, SARS Virus
cgatagttggatctctacatcaagc

SEQ ID NO: 87830 - DNA, 25 bp, SARS Virus
gatagttggatacctacatcaagca

SEQ ID NO: 87831 - DNA, 25 bp, SARS Virus
atagttggatatctacatcaagcac

SEQ ID NO: 87832 - DNA, 25 bp, SARS Virus
tagttggatatccacatcaagcact

SEQ ID NO: 87833 - DNA, 25 bp, SARS Virus
agttggatatctccatcaagcacta

SEQ ID NO: 87834 - DNA, 25 bp, SARS Virus
gttggatatctacatcaagcactag

SEQ ID NO: 87835 - DNA, 25 bp, SARS Virus
ttggatatctacctcaagcactaga

SEQ ID NO: 87836 - DNA, 25 bp, SARS Virus
tggatatctacaccaagcactagat

SEQ ID NO: 87837 - DNA, 25 bp, SARS Virus
ggatatctacatcaagcactagatg

SEQ ID NO: 87838 - DNA, 25 bp, SARS Virus
gatatctacatccagcactagatgg

SEQ ID NO: 87839 - DNA, 25 bp, SARS Virus
atatctacatcacgcactagatgga

SEQ ID NO: 87840 - DNA, 25 bp, SARS Virus
tatctacatcaaccactagatggaa

SEQ ID NO: 87841 - DNA, 25 bp, SARS Virus
atctacatcaagcactagatggaag

SEQ ID NO: 87842 - DNA, 25 bp, SARS Virus
tctacatcaagccctagatggaaga

SEQ ID NO: 87843 - DNA, 25 bp, SARS Virus
ctacatcaagcactagatggaagac

SEQ ID NO: 87844 - DNA, 25 bp, SARS Virus
tacatcaagcaccagatggaagacc

SEQ ID NO: 87845 - DNA, 25 bp, SARS Virus
acatcaagcactcgatggaagacca

SEQ ID NO: 87846 - DNA, 25 bp, SARS Virus
catcaagcactacatggaagaccaa

SEQ ID NO: 87847 - DNA, 25 bp, SARS Virus
atcaagcactagctggaagaccaaa

SEQ ID NO: 87848 - DNA, 25 bp, SARS Virus
tcaagcactagacggaagaccaaaa

SEQ ID NO: 87849 - DNA, 25 bp, SARS Virus
caagcactagatcgaagaccaaaat

SEQ ID NO: 87850 - DNA, 25 bp, SARS Virus
aagcactagatgcaagaccaaaatt

SEQ ID NO: 87851 - DNA, 25 bp, SARS Virus
agcactagatggcagaccaaaattg

SEQ ID NO: 87852 - DNA, 25 bp, SARS Virus
gcactagatggacgaccaaaattgt

SEQ ID NO: 87853 - DNA, 25 bp, SARS Virus
cactagatggaacaccaaaattgtg

SEQ ID NO: 87854 - DNA, 25 bp, SARS Virus
actagatggaagcccaaaattgtga

SEQ ID NO: 87855 - DNA, 25 bp, SARS Virus
ctagatggaagaccaaaattgtgaa

SEQ ID NO: 87856 - DNA, 25 bp, SARS Virus
tagatggaagaccaaaattgtgaaa

SEQ ID NO: 87857 - DNA, 25 bp, SARS Virus
agatggaagacccaaattgtgaaac

SEQ ID NO: 87858 - DNA, 25 bp, SARS Virus
gatggaagaccacaattgtgaaact

SEQ ID NO: 87859 - DNA, 25 bp, SARS Virus
atggaagaccaacattgtgaaactt

SEQ ID NO: 87860 - DNA, 25 bp, SARS Virus
tggaagaccaaacttgtgaaacttt

SEQ ID NO: 87861 - DNA, 25 bp, SARS Virus
ggaagaccaaaactgtgaaactttg

SEQ ID NO: 87862 - DNA, 25 bp, SARS Virus
gaagaccaaaatcgtgaaactttgg

SEQ ID NO: 87863 - DNA, 25 bp, SARS Virus
aagaccaaaattctgaaactttgga

SEQ ID NO: 87864 - DNA, 25 bp, SARS Virus
agaccaaaattgcgaaactttggat

SEQ ID NO: 87865 - DNA, 25 bp, SARS Virus
gaccaaaattgtcaaactttggata

SEQ ID NO: 87866 - DNA, 25 bp, SARS Virus
accaaaattgtgcaactttggataa

SEQ ID NO: 87867 - DNA, 25 bp, SARS Virus
ccaaaattgtgacactttggataaa

SEQ ID NO: 87868 - DNA, 25 bp, SARS Virus
caaaattgtgaacctttggataaaa

SEQ ID NO: 87869 - DNA, 25 bp, SARS Virus
aaaattgtgaaactttggataaaaa

SEQ ID NO: 87870 - DNA, 25 bp, SARS Virus
aaattgtgaaaccttggataaaaat

SEQ ID NO: 87871 - DNA, 25 bp, SARS Virus
aattgtgaaactctggataaaaatt

SEQ ID NO: 87872 - DNA, 25 bp, SARS Virus
attgtgaaacttcggataaaaattc

SEQ ID NO: 87873 - DNA, 25 bp, SARS Virus
ttgtgaaactttcgataaaaattca

SEQ ID NO: 87874 - DNA, 25 bp, SARS Virus
tgtgaaactttgcataaaaattcaa

SEQ ID NO: 87875 - DNA, 25 bp, SARS Virus
gtgaaactttggctaaaaattcaac

SEQ ID NO: 87876 - DNA, 25 bp, SARS Virus
tgaaactttggacaaaaattcaacg

SEQ ID NO: 87877 - DNA, 25 bp, SARS Virus
gaaactttggatcaaaattcaacgg

SEQ ID NO: 87878 - DNA, 25 bp, SARS Virus
aaactttggatacaaattcaacgga

SEQ ID NO: 87879 - DNA, 25 bp, SARS Virus
aactttggataacaattcaacggag

SEQ ID NO: 87880 - DNA, 25 bp, SARS Virus
actttggataaacattcaacggaga

SEQ ID NO: 87881 - DNA, 25 bp, SARS Virus
ctttggataaaacttcaacggagaa

SEQ ID NO: 87882 - DNA, 25 bp, SARS Virus
tttggataaaaactcaacggagaac

SEQ ID NO: 87883 - DNA, 25 bp, SARS Virus
ttggataaaaatccaacggagaacc

SEQ ID NO: 87884 - DNA, 25 bp, SARS Virus
tggataaaaattcaacggagaacca

SEQ ID NO: 87885 - DNA, 25 bp, SARS Virus
ggataaaaattccacggagaaccat

SEQ ID NO: 87886 - DNA, 25 bp, SARS Virus
gataaaaattcaccggagaaccata

SEQ ID NO: 87887 - DNA, 25 bp, SARS Virus
ataaaaattcaacggagaaccataa

SEQ ID NO: 87888 - DNA, 25 bp, SARS Virus
taaaaattcaaccgagaaccataat

SEQ ID NO: 87889 - DNA, 25 bp, SARS Virus
aaaaattcaacgcagaaccataatt

SEQ ID NO: 87890 - DNA, 25 bp, SARS Virus
aaaattcaacggcgaaccataattg

SEQ ID NO: 87891 - DNA, 25 bp, SARS Virus
aaattcaacggacaaccataattgt

SEQ ID NO: 87892 - DNA, 25 bp, SARS Virus
aattcaacggagcaccataattgta

SEQ ID NO: 87893 - DNA, 25 bp, SARS Virus
attcaacggagacccataattgtaa

SEQ ID NO: 87894 - DNA, 25 bp, SARS Virus
ttcaacggagaaccataattgtaat

SEQ ID NO: 87895 - DNA, 25 bp, SARS Virus
tcaacggagaaccataattgtaatg

SEQ ID NO: 87896 - DNA, 25 bp, SARS Virus
caacggagaaccctaattgtaatgt

SEQ ID NO: 87897 - DNA, 25 bp, SARS Virus
aacggagaaccacaattgtaatgtt

SEQ ID NO: 87898 - DNA, 25 bp, SARS Virus
acggagaaccatcattgtaatgttt

SEQ ID NO: 87899 - DNA, 25 bp, SARS Virus
cggagaaccatacttgtaatgttta

SEQ ID NO: 87900 - DNA, 25 bp, SARS Virus
ggagaaccataactgtaatgtttaa

SEQ ID NO: 87901 - DNA, 25 bp, SARS Virus
gagaaccataatcgtaatgtttaaa

SEQ ID NO: 87902 - DNA, 25 bp, SARS Virus
agaaccataattctaatgtttaaaa

SEQ ID NO: 87903 - DNA, 25 bp, SARS Virus
gaaccataattgcaatgtttaaaat

SEQ ID NO: 87904 - DNA, 25 bp, SARS Virus
aaccataattgtcatgtttaaaatc

SEQ ID NO: 87905 - DNA, 25 bp, SARS Virus
accataattgtactgtttaaaatct

SEQ ID NO: 87906 - DNA, 25 bp, SARS Virus
ccataattgtaacgtttaaaatctc

SEQ ID NO: 87907 - DNA, 25 bp, SARS Virus
cataattgtaatctttaaaatctcg

SEQ ID NO: 87908 - DNA, 25 bp, SARS Virus
ataattgtaatgcttaaaatctcgg

SEQ ID NO: 87909 - DNA, 25 bp, SARS Virus
taattgtaatgtctaaaatctcggt

SEQ ID NO: 87910 - DNA, 25 bp, SARS Virus
aattgtaatgttcaaaatctcggta

SEQ ID NO: 87911 - DNA, 25 bp, SARS Virus
attgtaatgtttcaaatctcggtaa

SEQ ID NO: 87912 - DNA, 25 bp, SARS Virus
ttgtaatgtttacaatctcggtaag

SEQ ID NO: 87913 - DNA, 25 bp, SARS Virus
tgtaatgtttaacatctcggtaaga

SEQ ID NO: 87914 - DNA, 25 bp, SARS Virus
gtaatgtttaaactctcggtaagaa

SEQ ID NO: 87915 - DNA, 25 bp, SARS Virus
taatgtttaaaacctcggtaagaat

SEQ ID NO: 87916 - DNA, 25 bp, SARS Virus
aatgtttaaaatctcggtaagaatg

SEQ ID NO: 87917 - DNA, 25 bp, SARS Virus
atgtttaaaatcccggtaagaatgt

SEQ ID NO: 87918 - DNA, 25 bp, SARS Virus
tgtttaaaatctcggtaagaatgtc

SEQ ID NO: 87919 - DNA, 25 bp, SARS Virus
gtttaaaatctccgtaagaatgtcg

SEQ ID NO: 87920 - DNA, 25 bp, SARS Virus
tttaaaatctcgctaagaatgtcgg

SEQ ID NO: 87921 - DNA, 25 bp, SARS Virus
ttaaaatctcggcaagaatgtcgga

SEQ ID NO: 87922 - DNA, 25 bp, SARS Virus
taaaatctcggtcagaatgtcggaa

SEQ ID NO: 87923 - DNA, 25 bp, SARS Virus
aaaatctcggtacgaatgtcggaaa

SEQ ID NO: 87924 - DNA, 25 bp, SARS Virus
aaatctcggtaacaatgtcggaaaa

SEQ ID NO: 87925 - DNA, 25 bp, SARS Virus
aatctcggtaagcatgtcggaaaag

SEQ ID NO: 87926 - DNA, 25 bp, SARS Virus
atctcggtaagactgtcggaaaagt

SEQ ID NO: 87927 - DNA, 25 bp, SARS Virus
tctcggtaagaacgtcggaaaagtg

SEQ ID NO: 87928 - DNA, 25 bp, SARS Virus
ctcggtaagaatctcggaaaagtgg

SEQ ID NO: 87929 - DNA, 25 bp, SARS Virus
tcggtaagaatgccggaaaagtgga

SEQ ID NO: 87930 - DNA, 25 bp, SARS Virus
cggtaagaatgtcggaaaagtggac

SEQ ID NO: 87931 - DNA, 25 bp, SARS Virus
ggtaagaatgtccgaaaagtggacg

SEQ ID NO: 87932 - DNA, 25 bp, SARS Virus
gtaagaatgtcgcaaaagtggacga

SEQ ID NO: 87933 - DNA, 25 bp, SARS Virus
taagaatgtcggcaaagtggacgag

SEQ ID NO: 87934 - DNA, 25 bp, SARS Virus
aagaatgtcggacaagtggacgagt

SEQ ID NO: 87935 - DNA, 25 bp, SARS Virus
agaatgtcggaacagtggacgagtt

SEQ ID NO: 87936 - DNA, 25 bp, SARS Virus
gaatgtcggaaacgtggacgagttc

SEQ ID NO: 87937 - DNA, 25 bp, SARS Virus
aatgtcggaaaactggacgagttct

SEQ ID NO: 87938 - DNA, 25 bp, SARS Virus
atgtcggaaaagcggacgagttctg

SEQ ID NO: 87939 - DNA, 25 bp, SARS Virus
tgtcggaaaagtcgacgagttctgt

SEQ ID NO: 87940 - DNA, 25 bp, SARS Virus
gtcggaaaagtgcacgagttctgta

SEQ ID NO: 87941 - DNA, 25 bp, SARS Virus
tcggaaaagtggccgagttctgtaa

SEQ ID NO: 87942 - DNA, 25 bp, SARS Virus
cggaaaagtggacgagttctgtaaa

SEQ ID NO: 87943 - DNA, 25 bp, SARS Virus
ggaaaagtggaccagttctgtaaac

SEQ ID NO: 87944 - DNA, 25 bp, SARS Virus
gaaaagtggacgcgttctgtaaacc

SEQ ID NO: 87945 - DNA, 25 bp, SARS Virus
aaaagtggacgacttctgtaaaccc

SEQ ID NO: 87946 - DNA, 25 bp, SARS Virus
aaagtggacgagctctgtaaacccc

SEQ ID NO: 87947 - DNA, 25 bp, SARS Virus
aagtggacgagtcctgtaaaccccg

SEQ ID NO: 87948 - DNA, 25 bp, SARS Virus
agtggacgagttctgtaaaccccgt

SEQ ID NO: 87949 - DNA, 25 bp, SARS Virus
gtggacgagttccgtaaaccccgtg

SEQ ID NO: 87950 - DNA, 25 bp, SARS Virus
tggacgagttctctaaaccccgtgc

SEQ ID NO: 87951 - DNA, 25 bp, SARS Virus
ggacgagttctgcaaaccccgtgca

SEQ ID NO: 87952 - DNA, 25 bp, SARS Virus
gacgagttctgtcaaccccgtgcag

SEQ ID NO: 87953 - DNA, 25 bp, SARS Virus
acgagttctgtacaccccgtgcagt

SEQ ID NO: 87954 - DNA, 25 bp, SARS Virus
cgagttctgtaacccccgtgcagtc

SEQ ID NO: 87955 - DNA, 25 bp, SARS Virus
gagttctgtaaaccccgtgcagtcg

SEQ ID NO: 87956 - DNA, 25 bp, SARS Virus
agttctgtaaaccccgtgcagtcga

SEQ ID NO: 87957 - DNA, 25 bp, SARS Virus
gttctgtaaaccccgtgcagtcgac

SEQ ID NO: 87958 - DNA, 25 bp, SARS Virus
ttctgtaaaccccgtgcagtcgacg

SEQ ID NO: 87959 - DNA, 25 bp, SARS Virus
tctgtaaaccccctgcagtcgacgt

SEQ ID NO: 87960 - DNA, 25 bp, SARS Virus
ctgtaaaccccgcgcagtcgacgtc

SEQ ID NO: 87961 - DNA, 25 bp, SARS Virus
tgtaaaccccgtccagtcgacgtcg

SEQ ID NO: 87962 - DNA, 25 bp, SARS Virus
gtaaaccccgtgcagtcgacgtcgg

SEQ ID NO: 87963 - DNA, 25 bp, SARS Virus
taaaccccgtgccgtcgacgtcgga

SEQ ID NO: 87964 - DNA, 25 bp, SARS Virus
aaaccccgtgcactcgacgtcggat

SEQ ID NO: 87965 - DNA, 25 bp, SARS Virus
aaccccgtgcagccgacgtcggata

SEQ ID NO: 87966 - DNA, 25 bp, SARS Virus
accccgtgcagtcgacgtcggataa

SEQ ID NO: 87967 - DNA, 25 bp, SARS Virus
ccccgtgcagtccacgtcggataaa

SEQ ID NO: 87968 - DNA, 25 bp, SARS Virus
cccgtgcagtcgccgtcggataaaa

SEQ ID NO: 87969 - DNA, 25 bp, SARS Virus
aattcctaccatgaataaaacgacg

SEQ ID NO: 87970 - DNA, 25 bp, SARS Virus
attcctaccatagataaaacgacgg

SEQ ID NO: 87971 - DNA, 25 bp, SARS Virus
ttcctaccataagtaaaacgacggt

SEQ ID NO: 87972 - DNA, 25 bp, SARS Virus
tcctaccataaagaaaacgacggtg

SEQ ID NO: 87973 - DNA, 25 bp, SARS Virus
cctaccataaatgaaacgacggtgt

SEQ ID NO: 87974 - DNA, 25 bp, SARS Virus
ctaccataaatagaacgacggtgtc

SEQ ID NO: 87975 - DNA, 25 bp, SARS Virus
taccataaataagacgacggtgtct

SEQ ID NO: 87976 - DNA, 25 bp, SARS Virus
accataaataaagcgacggtgtctc

SEQ ID NO: 87977 - DNA, 25 bp, SARS Virus
ccataaataaaaggacggtgtctct

SEQ ID NO: 87978 - DNA, 25 bp, SARS Virus
cataaataaaacgacggtgtctctt

SEQ ID NO: 87979 - DNA, 25 bp, SARS Virus
ataaataaaacggcggtgtctcttt

SEQ ID NO: 87980 - DNA, 25 bp, SARS Virus
taaataaaacgagggtgtctcttta

SEQ ID NO: 87981 - DNA, 25 bp, SARS Virus
aaataaaacgacggtgtctctttag

SEQ ID NO: 87982 - DNA, 25 bp, SARS Virus
aataaaacgacggtgtctctttagt

SEQ ID NO: 87983 - DNA, 25 bp, SARS Virus
ataaaacgacggggtctctttagtt

SEQ ID NO: 87984 - DNA, 25 bp, SARS Virus
taaaacgacggtgtctctttagttt

SEQ ID NO: 87985 - DNA, 25 bp, SARS Virus
aaaacgacggtggctctttagttta

SEQ ID NO: 87986 - DNA, 25 bp, SARS Virus
aaacgacggtgtgtctttagtttac

SEQ ID NO: 87987 - DNA, 25 bp, SARS Virus
aacgacggtgtcgctttagtttaca

SEQ ID NO: 87988 - DNA, 25 bp, SARS Virus
acgacggtgtctgtttagtttacaa

SEQ ID NO: 87989 - DNA, 25 bp, SARS Virus
cgacggtgtctcgttagtttacaac

SEQ ID NO: 87990 - DNA, 25 bp, SARS Virus
gacggtgtctctgtagtttacaaca

SEQ ID NO: 87991 - DNA, 25 bp, SARS Virus
acggtgtctcttgagtttacaacag

SEQ ID NO: 87992 - DNA, 25 bp, SARS Virus
cggtgtctctttggtttacaacagg

SEQ ID NO: 87993 - DNA, 25 bp, SARS Virus
ggtgtctctttagtttacaacaggc

SEQ ID NO: 87994 - DNA, 25 bp, SARS Virus
gtgtctctttaggttacaacaggca

SEQ ID NO: 87995 - DNA, 25 bp, SARS Virus
tgtctctttagtgtacaacaggcac

SEQ ID NO: 87996 - DNA, 25 bp, SARS Virus
gtctctttagttgacaacaggcacc

SEQ ID NO: 87997 - DNA, 25 bp, SARS Virus
tctctttagtttgcaacaggcacca

SEQ ID NO: 87998 - DNA, 25 bp, SARS Virus
ctctttagtttagaacaggcaccaa

SEQ ID NO: 87999 - DNA, 25 bp, SARS Virus
tctttagtttacgacaggcaccaac

SEQ ID NO: 88000 - DNA, 25 bp, SARS Virus
ctttagtttacagcaggcaccaacc

SEQ ID NO: 88001 - DNA, 25 bp, SARS Virus
tttagtttacaagaggcaccaaccc

SEQ ID NO: 88002 - DNA, 25 bp, SARS Virus
ttagtttacaacgggcaccaaccca

SEQ ID NO: 88003 - DNA, 25 bp, SARS Virus
tagtttacaacaggcaccaacccaa

SEQ ID NO: 88004 - DNA, 25 bp, SARS Virus
agtttacaacaggcaccaacccaaa

SEQ ID NO: 88005 - DNA, 25 bp, SARS Virus
gtttacaacagggaccaacccaaaa

SEQ ID NO: 88006 - DNA, 25 bp, SARS Virus
tttacaacaggcgccaacccaaaaa

SEQ ID NO: 88007 - DNA, 25 bp, SARS Virus
ttacaacaggcagcaacccaaaaac

SEQ ID NO: 88008 - DNA, 25 bp, SARS Virus
tacaacaggcacgaacccaaaaacc

SEQ ID NO: 88009 - DNA, 25 bp, SARS Virus
acaacaggcaccgacccaaaaacca

SEQ ID NO: 88010 - DNA, 25 bp, SARS Virus
caacaggcaccagcccaaaaaccaa

SEQ ID NO: 88011 - DNA, 25 bp, SARS Virus
aacaggcaccaagccaaaaaccaag

SEQ ID NO: 88012 - DNA, 25 bp, SARS Virus
acaggcaccaacgcaaaaaccaaga

SEQ ID NO: 88013 - DNA, 25 bp, SARS Virus
caggcaccaaccgaaaaaccaagat

SEQ ID NO: 88014 - DNA, 25 bp, SARS Virus
aggcaccaacccgaaaaccaagatg

SEQ ID NO: 88015 - DNA, 25 bp, SARS Virus
ggcaccaacccagaaaccaagatgg

SEQ ID NO: 88016 - DNA, 25 bp, SARS Virus
gcaccaacccaagaaccaagatggt

SEQ ID NO: 88017 - DNA, 25 bp, SARS Virus
caccaacccaaagaccaagatggta

SEQ ID NO: 88018 - DNA, 25 bp, SARS Virus
accaacccaaaagccaagatggtac

SEQ ID NO: 88019 - DNA, 25 bp, SARS Virus
ccaacccaaaaagcaagatggtact

SEQ ID NO: 88020 - DNA, 25 bp, SARS Virus
caacccaaaaacgaagatggtactt

SEQ ID NO: 88021 - DNA, 25 bp, SARS Virus
aacccaaaaaccgagatggtacttg

SEQ ID NO: 88022 - DNA, 25 bp, SARS Virus
acccaaaaaccaggatggtacttgt

SEQ ID NO: 88023 - DNA, 25 bp, SARS Virus
cccaaaaaccaagatggtacttgtt

SEQ ID NO: 88024 - DNA, 25 bp, SARS Virus
ccaaaaaccaaggtggtacttgttg

SEQ ID NO: 88025 - DNA, 25 bp, SARS Virus
caaaaaccaagagggtacttgttgt

SEQ ID NO: 88026 - DNA, 25 bp, SARS Virus
aaaaaccaagatggtacttgttgtt

SEQ ID NO: 88027 - DNA, 25 bp, SARS Virus
aaaaccaagatggtacttgttgttc

SEQ ID NO: 88028 - DNA, 25 bp, SARS Virus
aaaccaagatgggacttgttgttca

SEQ ID NO: 88029 - DNA, 25 bp, SARS Virus
aaccaagatggtgcttgttgttcag

SEQ ID NO: 88030 - DNA, 25 bp, SARS Virus
accaagatggtagttgttgttcagt

SEQ ID NO: 88031 - DNA, 25 bp, SARS Virus
ccaagatggtacgtgttgttcagtg

SEQ ID NO: 88032 - DNA, 25 bp, SARS Virus
caagatggtactggttgttcagtgt

SEQ ID NO: 88033 - DNA, 25 bp, SARS Virus
aagatggtacttgttgttcagtgtc

SEQ ID NO: 88034 - DNA, 25 bp, SARS Virus
agatggtacttggtgttcagtgtca

SEQ ID NO: 88035 - DNA, 25 bp, SARS Virus
gatggtacttgtggttcagtgtcag

SEQ ID NO: 88036 - DNA, 25 bp, SARS Virus
atggtacttgttgttcagtgtcagc

SEQ ID NO: 88037 - DNA, 25 bp, SARS Virus
tggtacttgttggtcagtgtcagcc

SEQ ID NO: 88038 - DNA, 25 bp, SARS Virus
ggtacttgttgtgcagtgtcagcca

SEQ ID NO: 88039 - DNA, 25 bp, SARS Virus
gtacttgttgttgagtgtcagccac

SEQ ID NO: 88040 - DNA, 25 bp, SARS Virus
tacttgttgttcggtgtcagccact

SEQ ID NO: 88041 - DNA, 25 bp, SARS Virus
acttgttgttcagtgtcagccacta

SEQ ID NO: 88042 - DNA, 25 bp, SARS Virus
cttgttgttcagggtcagccactaa

SEQ ID NO: 88043 - DNA, 25 bp, SARS Virus
ttgttgttcagtgtcagccactaat

SEQ ID NO: 88044 - DNA, 25 bp, SARS Virus
tgttgttcagtggcagccactaata

SEQ ID NO: 88045 - DNA, 25 bp, SARS Virus
gttgttcagtgtgagccactaataa

SEQ ID NO: 88046 - DNA, 25 bp, SARS Virus
ttgttcagtgtcggccactaataat

SEQ ID NO: 88047 - DNA, 25 bp, SARS Virus
tgttcagtgtcagccactaataata

SEQ ID NO: 88048 - DNA, 25 bp, SARS Virus
gttcagtgtcaggcactaataataa

SEQ ID NO: 88049 - DNA, 25 bp, SARS Virus
ttcagtgtcagcgactaataataat

SEQ ID NO: 88050 - DNA, 25 bp, SARS Virus
tcagtgtcagccgctaataataatt

SEQ ID NO: 88051 - DNA, 25 bp, SARS Virus
cagtgtcagccagtaataataattg

SEQ ID NO: 88052 - DNA, 25 bp, SARS Virus
agtgtcagccacgaataataattgt

SEQ ID NO: 88053 - DNA, 25 bp, SARS Virus
gtgtcagccactgataataattgtt

SEQ ID NO: 88054 - DNA, 25 bp, SARS Virus
tgtcagccactagtaataattgtta

SEQ ID NO: 88055 - DNA, 25 bp, SARS Virus
gtcagccactaagaataattgttaa

SEQ ID NO: 88056 - DNA, 25 bp, SARS Virus
tcagccactaatgataattgttaag

SEQ ID NO: 88057 - DNA, 25 bp, SARS Virus
cagccactaatagtaattgttaaga

SEQ ID NO: 88058 - DNA, 25 bp, SARS Virus
agccactaataagaattgttaagat

SEQ ID NO: 88059 - DNA, 25 bp, SARS Virus
gccactaataatgattgttaagatg

SEQ ID NO: 88060 - DNA, 25 bp, SARS Virus
ccactaataatagttgttaagatga

SEQ ID NO: 88061 - DNA, 25 bp, SARS Virus
cactaataataagtgttaagatgat

SEQ ID NO: 88062 - DNA, 25 bp, SARS Virus
actaataataatggttaagatgatt

SEQ ID NO: 88063 - DNA, 25 bp, SARS Virus
ctaataataattgttaagatgatta

SEQ ID NO: 88064 - DNA, 25 bp, SARS Virus
taataataattggtaagatgattac

SEQ ID NO: 88065 - DNA, 25 bp, SARS Virus
aataataattgtgaagatgattaca

SEQ ID NO: 88066 - DNA, 25 bp, SARS Virus
ataataattgttgagatgattacaa

SEQ ID NO: 88067 - DNA, 25 bp, SARS Virus
taataattgttaggatgattacaac

SEQ ID NO: 88068 - DNA, 25 bp, SARS Virus
aataattgttaagatgattacaaca

SEQ ID NO: 88069 - DNA, 25 bp, SARS Virus
ataattgttaaggtgattacaacaa

SEQ ID NO: 88070 - DNA, 25 bp, SARS Virus
taattgttaagaggattacaacaat

SEQ ID NO: 88071 - DNA, 25 bp, SARS Virus
aattgttaagatgattacaacaata

SEQ ID NO: 88072 - DNA, 25 bp, SARS Virus
attgttaagatggttacaacaatat

SEQ ID NO: 88073 - DNA, 25 bp, SARS Virus
ttgttaagatgagtacaacaatatg

SEQ ID NO: 88074 - DNA, 25 bp, SARS Virus
tgttaagatgatgacaacaatatgc

SEQ ID NO: 88075 - DNA, 25 bp, SARS Virus
gttaagatgattgcaacaatatgct

SEQ ID NO: 88076 - DNA, 25 bp, SARS Virus
ttaagatgattagaacaatatgctc

SEQ ID NO: 88077 - DNA, 25 bp, SARS Virus
taagatgattacgacaatatgctcg

SEQ ID NO: 88078 - DNA, 25 bp, SARS Virus
aagatgattacagcaatatgctcgt

SEQ ID NO: 88079 - DNA, 25 bp, SARS Virus
agatgattacaagaatatgctcgta

SEQ ID NO: 88080 - DNA, 25 bp, SARS Virus
gatgattacaacgatatgctcgtac

SEQ ID NO: 88081 - DNA, 25 bp, SARS Virus
atgattacaacagtatgctcgtaca

SEQ ID NO: 88082 - DNA, 25 bp, SARS Virus
tgattacaacaagatgctcgtacat

SEQ ID NO: 88083 - DNA, 25 bp, SARS Virus
gattacaacaatgtgctcgtacatt

SEQ ID NO: 88084 - DNA, 25 bp, SARS Virus
attacaacaataggctcgtacattg

SEQ ID NO: 88085 - DNA, 25 bp, SARS Virus
ttacaacaatatgctcgtacattga

SEQ ID NO: 88086 - DNA, 25 bp, SARS Virus
tacaacaatatggtcgtacattgaa

SEQ ID NO: 88087 - DNA, 25 bp, SARS Virus
acaacaatatgcgcgtacattgaaa

SEQ ID NO: 88088 - DNA, 25 bp, SARS Virus
caacaatatgctggtacattgaaac

SEQ ID NO: 88089 - DNA, 25 bp, SARS Virus
aacaatatgctcgtacattgaaact

SEQ ID NO: 88090 - DNA, 25 bp, SARS Virus
acaatatgctcggacattgaaactt

SEQ ID NO: 88091 - DNA, 25 bp, SARS Virus
caatatgctcgtgcattgaaactta

SEQ ID NO: 88092 - DNA, 25 bp, SARS Virus
aatatgctcgtagattgaaacttaa

SEQ ID NO: 88093 - DNA, 25 bp, SARS Virus
atatgctcgtacgttgaaacttaac

SEQ ID NO: 88094 - DNA, 25 bp, SARS Virus
tatgctcgtacagtgaaacttaaca

SEQ ID NO: 88095 - DNA, 25 bp, SARS Virus
atgctcgtacatggaaacttaacac

SEQ ID NO: 88096 - DNA, 25 bp, SARS Virus
tgctcgtacattgaaacttaacaca

SEQ ID NO: 88097 - DNA, 25 bp, SARS Virus
gctcgtacattggaacttaacacac

SEQ ID NO: 88098 - DNA, 25 bp, SARS Virus
ctcgtacattgagacttaacacact

SEQ ID NO: 88099 - DNA, 25 bp, SARS Virus
tcgtacattgaagcttaacacactg

SEQ ID NO: 88100 - DNA, 25 bp, SARS Virus
cgtacattgaaagttaacacactgt

SEQ ID NO: 88101 - DNA, 25 bp, SARS Virus
gtacattgaaacgtaacacactgtt

SEQ ID NO: 88102 - DNA, 25 bp, SARS Virus
tacattgaaactgaacacactgttg

SEQ ID NO: 88103 - DNA, 25 bp, SARS Virus
acattgaaacttgacacactgttgg

SEQ ID NO: 88104 - DNA, 25 bp, SARS Virus
cattgaaacttagcacactgttggg

SEQ ID NO: 88105 - DNA, 25 bp, SARS Virus
attgaaacttaagacactgttggga

SEQ ID NO: 88106 - DNA, 25 bp, SARS Virus
ttgaaacttaacgcactgttgggaa

SEQ ID NO: 88107 - DNA, 25 bp, SARS Virus
tgaaacttaacagactgttgggaaa

SEQ ID NO: 88108 - DNA, 25 bp, SARS Virus
gaaacttaacacgctgttgggaaag

SEQ ID NO: 88109 - DNA, 25 bp, SARS Virus
aaacttaacacagtgttgggaaaga

SEQ ID NO: 88110 - DNA, 25 bp, SARS Virus
aacttaacacacggttgggaaagaa

SEQ ID NO: 88111 - DNA, 25 bp, SARS Virus
acttaacacactgttgggaaagaaa

SEQ ID NO: 88112 - DNA, 25 bp, SARS Virus
cttaacacactggtgggaaagaaac

SEQ ID NO: 88113 - DNA, 25 bp, SARS Virus
ttaacacactgtggggaaagaaacg

SEQ ID NO: 88114 - DNA, 25 bp, SARS Virus
taacacactgttgggaaagaaacga

SEQ ID NO: 88115 - DNA, 25 bp, SARS Virus
aacacactgttgggaaagaaacgac

SEQ ID NO: 88116 - DNA, 25 bp, SARS Virus
acacactgttgggaaagaaacgaca

SEQ ID NO: 88117 - DNA, 25 bp, SARS Virus
cacactgttggggaagaaacgacaa

SEQ ID NO: 88118 - DNA, 25 bp, SARS Virus
acactgttgggagagaaacgacaaa

SEQ ID NO: 88119 - DNA, 25 bp, SARS Virus
cactgttgggaaggaaacgacaaag

SEQ ID NO: 88120 - DNA, 25 bp, SARS Virus
actgttgggaaagaaacgacaaaga

SEQ ID NO: 88121 - DNA, 25 bp, SARS Virus
ctgttgggaaaggaacgacaaagat

SEQ ID NO: 88122 - DNA, 25 bp, SARS Virus
tgttgggaaagagacgacaaagatt

SEQ ID NO: 88123 - DNA, 25 bp, SARS Virus
gttgggaaagaagcgacaaagattt

SEQ ID NO: 88124 - DNA, 25 bp, SARS Virus
ttgggaaagaaaggacaaagatttg

SEQ ID NO: 88125 - DNA, 25 bp, SARS Virus
tgggaaagaaacgacaaagatttgg

SEQ ID NO: 88126 - DNA, 25 bp, SARS Virus
gggaaagaaacggcaaagatttggg

SEQ ID NO: 88127 - DNA, 25 bp, SARS Virus
ggaaagaaacgagaaagatttgggt

SEQ ID NO: 88128 - DNA, 25 bp, SARS Virus
gaaagaaacgacgaagatttgggta

SEQ ID NO: 88129 - DNA, 25 bp, SARS Virus
aaagaaacgacagagatttgggtac

SEQ ID NO: 88130 - DNA, 25 bp, SARS Virus
aagaaacgacaaggatttgggtacc

SEQ ID NO: 88131 - DNA, 25 bp, SARS Virus
agaaacgacaaagatttgggtaccc

SEQ ID NO: 88132 - DNA, 25 bp, SARS Virus
gaaacgacaaaggtttgggtaccca

SEQ ID NO: 88133 - DNA, 25 bp, SARS Virus
aaacgacaaagagttgggtacccat

SEQ ID NO: 88134 - DNA, 25 bp, SARS Virus
aacgacaaagatgtgggtacccatg

SEQ ID NO: 88135 - DNA, 25 bp, SARS Virus
acgacaaagattggggtacccatgt

SEQ ID NO: 88136 - DNA, 25 bp, SARS Virus
cgacaaagatttgggtacccatgtg

SEQ ID NO: 88137 - DNA, 25 bp, SARS Virus
gacaaagatttgggtacccatgtgt

SEQ ID NO: 88138 - DNA, 25 bp, SARS Virus
acaaagatttgggtacccatgtgtc

SEQ ID NO: 88139 - DNA, 25 bp, SARS Virus
caaagatttggggacccatgtgtct

SEQ ID NO: 88140 - DNA, 25 bp, SARS Virus
aaagatttgggtgcccatgtgtctg

SEQ ID NO: 88141 - DNA, 25 bp, SARS Virus
aagatttgggtagccatgtgtctgt

SEQ ID NO: 88142 - DNA, 25 bp, SARS Virus
agatttgggtacgcatgtgtctgtg

SEQ ID NO: 88143 - DNA, 25 bp, SARS Virus
gatttgggtaccgatgtgtctgtgt

SEQ ID NO: 88144 - DNA, 25 bp, SARS Virus
atttgggtacccgtgtgtctgtgta

SEQ ID NO: 88145 - DNA, 25 bp, SARS Virus
tttgggtacccaggtgtctgtgtat

SEQ ID NO: 88146 - DNA, 25 bp, SARS Virus
ttgggtacccatgtgtctgtgtatg

SEQ ID NO: 88147 - DNA, 25 bp, SARS Virus
tgggtacccatgggtctgtgtatga

SEQ ID NO: 88148 - DNA, 25 bp, SARS Virus
gggtacccatgtgtctgtgtatgat

SEQ ID NO: 88149 - DNA, 25 bp, SARS Virus
ggtacccatgtggctgtgtatgata

SEQ ID NO: 88150 - DNA, 25 bp, SARS Virus
gtacccatgtgtgtgtgtatgatac

SEQ ID NO: 88151 - DNA, 25 bp, SARS Virus
tacccatgtgtcggtgtatgatact

SEQ ID NO: 88152 - DNA, 25 bp, SARS Virus
acccatgtgtctgtgtatgatacta

SEQ ID NO: 88153 - DNA, 25 bp, SARS Virus
cccatgtgtctgggtatgatactat

SEQ ID NO: 88154 - DNA, 25 bp, SARS Virus
ccatgtgtctgtgtatgatactata

SEQ ID NO: 88155 - DNA, 25 bp, SARS Virus
catgtgtctgtggatgatactataa

SEQ ID NO: 88156 - DNA, 25 bp, SARS Virus
atgtgtctgtgtgtgatactataag

SEQ ID NO: 88157 - DNA, 25 bp, SARS Virus
tgtgtctgtgtaggatactataagc

SEQ ID NO: 88158 - DNA, 25 bp, SARS Virus
gtgtctgtgtatgatactataagct

SEQ ID NO: 88159 - DNA, 25 bp, SARS Virus
tgtctgtgtatggtactataagcta

SEQ ID NO: 88160 - DNA, 25 bp, SARS Virus
gtctgtgtatgagactataagctat

SEQ ID NO: 88161 - DNA, 25 bp, SARS Virus
tctgtgtatgatgctataagctatt

SEQ ID NO: 88162 - DNA, 25 bp, SARS Virus
ctgtgtatgatagtataagctatta

SEQ ID NO: 88163 - DNA, 25 bp, SARS Virus
tgtgtatgatacgataagctattac

SEQ ID NO: 88164 - DNA, 25 bp, SARS Virus
gtgtatgatactgtaagctattacg

SEQ ID NO: 88165 - DNA, 25 bp, SARS Virus
tgtatgatactagaagctattacgt

SEQ ID NO: 88166 - DNA, 25 bp, SARS Virus
gtatgatactatgagctattacgta

SEQ ID NO: 88167 - DNA, 25 bp, SARS Virus
tatgatactataggctattacgtaa

SEQ ID NO: 88168 - DNA, 25 bp, SARS Virus
atgatactataagctattacgtaaa

SEQ ID NO: 88169 - DNA, 25 bp, SARS Virus
tgatactataaggtattacgtaaat

SEQ ID NO: 88170 - DNA, 25 bp, SARS Virus
gatactataagcgattacgtaaatt

SEQ ID NO: 88171 - DNA, 25 bp, SARS Virus
atactataagctgttacgtaaatta

SEQ ID NO: 88172 - DNA, 25 bp, SARS Virus
tactataagctagtacgtaaattaa

SEQ ID NO: 88173 - DNA, 25 bp, SARS Virus
actataagctatgacgtaaattaac

SEQ ID NO: 88174 - DNA, 25 bp, SARS Virus
ctataagctattgcgtaaattaacg

SEQ ID NO: 88175 - DNA, 25 bp, SARS Virus
tataagctattaggtaaattaacgt

SEQ ID NO: 88176 - DNA, 25 bp, SARS Virus
ataagctattacgtaaattaacgtg

SEQ ID NO: 88177 - DNA, 25 bp, SARS Virus
taagctattacggaaattaacgtga

SEQ ID NO: 88178 - DNA, 25 bp, SARS Virus
aagctattacgtgaattaacgtgaa

SEQ ID NO: 88179 - DNA, 25 bp, SARS Virus
agctattacgtagattaacgtgaaa

SEQ ID NO: 88180 - DNA, 25 bp, SARS Virus
gctattacgtaagttaacgtgaaag

SEQ ID NO: 88181 - DNA, 25 bp, SARS Virus
ctattacgtaaagtaacgtgaaagc

SEQ ID NO: 88182 - DNA, 25 bp, SARS Virus
tattacgtaaatgaacgtgaaagct

SEQ ID NO: 88183 - DNA, 25 bp, SARS Virus
attacgtaaattgacgtgaaagctc

SEQ ID NO: 88184 - DNA, 25 bp, SARS Virus
ttacgtaaattagcgtgaaagctca

SEQ ID NO: 88185 - DNA, 25 bp, SARS Virus
tacgtaaattaaggtgaaagctcat

SEQ ID NO: 88186 - DNA, 25 bp, SARS Virus
acgtaaattaacgtgaaagctcatg

SEQ ID NO: 88187 - DNA, 25 bp, SARS Virus
cgtaaattaacgggaaagctcatgt

SEQ ID NO: 88188 - DNA, 25 bp, SARS Virus
gtaaattaacgtgaaagctcatgta

SEQ ID NO: 88189 - DNA, 25 bp, SARS Virus
taaattaacgtggaagctcatgtat

SEQ ID NO: 88190 - DNA, 25 bp, SARS Virus
aaattaacgtgagagctcatgtata

SEQ ID NO: 88191 - DNA, 25 bp, SARS Virus
aattaacgtgaaggctcatgtatag

SEQ ID NO: 88192 - DNA, 25 bp, SARS Virus
attaacgtgaaagctcatgtataga

SEQ ID NO: 88193 - DNA, 25 bp, SARS Virus
ttaacgtgaaaggtcatgtatagac

SEQ ID NO: 88194 - DNA, 25 bp, SARS Virus
taacgtgaaagcgcatgtatagact

SEQ ID NO: 88195 - DNA, 25 bp, SARS Virus
aacgtgaaagctgatgtatagacta

SEQ ID NO: 88196 - DNA, 25 bp, SARS Virus
acgtgaaagctcgtgtatagactac

SEQ ID NO: 88197 - DNA, 25 bp, SARS Virus
cgtgaaagctcaggtatagactacg

SEQ ID NO: 88198 - DNA, 25 bp, SARS Virus
gtgaaagctcatgtatagactacgg

SEQ ID NO: 88199 - DNA, 25 bp, SARS Virus
tgaaagctcatggatagactacgga

SEQ ID NO: 88200 - DNA, 25 bp, SARS Virus
gaaagctcatgtgtagactacggaa

SEQ ID NO: 88201 - DNA, 25 bp, SARS Virus
aaagctcatgtagagactacggaaa

SEQ ID NO: 88202 - DNA, 25 bp, SARS Virus
aagctcatgtatggactacggaaaa

SEQ ID NO: 88203 - DNA, 25 bp, SARS Virus
agctcatgtatagactacggaaaag

SEQ ID NO: 88204 - DNA, 25 bp, SARS Virus
gctcatgtataggctacggaaaagc

SEQ ID NO: 88205 - DNA, 25 bp, SARS Virus
ctcatgtatagagtacggaaaagcg

SEQ ID NO: 88206 - DNA, 25 bp, SARS Virus
tcatgtatagacgacggaaaagcga

SEQ ID NO: 88207 - DNA, 25 bp, SARS Virus
catgtatagactgcggaaaagcgaa

SEQ ID NO: 88208 - DNA, 25 bp, SARS Virus
atgtatagactagggaaaagcgaac

SEQ ID NO: 88209 - DNA, 25 bp, SARS Virus
tgtatagactacggaaaagcgaact

SEQ ID NO: 88210 - DNA, 25 bp, SARS Virus
gtatagactacggaaaagcgaacta

SEQ ID NO: 88211 - DNA, 25 bp, SARS Virus
tatagactacgggaaagcgaactac

SEQ ID NO: 88212 - DNA, 25 bp, SARS Virus
atagactacggagaagcgaactaca

SEQ ID NO: 88213 - DNA, 25 bp, SARS Virus
tagactacggaagagcgaactacaa

SEQ ID NO: 88214 - DNA, 25 bp, SARS Virus
agactacggaaaggcgaactacaaa

SEQ ID NO: 88215 - DNA, 25 bp, SARS Virus
gactacggaaaagcgaactacaaag

SEQ ID NO: 88216 - DNA, 25 bp, SARS Virus
actacggaaaagggaactacaaagt

SEQ ID NO: 88217 - DNA, 25 bp, SARS Virus
ctacggaaaagcgaactacaaagtc

SEQ ID NO: 88218 - DNA, 25 bp, SARS Virus
tacggaaaagcggactacaaagtct

SEQ ID NO: 88219 - DNA, 25 bp, SARS Virus
acggaaaagcgagctacaaagtctt

SEQ ID NO: 88220 - DNA, 25 bp, SARS Virus
cggaaaagcgaagtacaaagtcttt

SEQ ID NO: 88221 - DNA, 25 bp, SARS Virus
ggaaaagcgaacgacaaagtctttt

SEQ ID NO: 88222 - DNA, 25 bp, SARS Virus
gaaaagcgaactgcaaagtcttttc

SEQ ID NO: 88223 - DNA, 25 bp, SARS Virus
aaaagcgaactagaaagtcttttca

SEQ ID NO: 88224 - DNA, 25 bp, SARS Virus
aaagcgaactacgaagtcttttcag

SEQ ID NO: 88225 - DNA, 25 bp, SARS Virus
aagcgaactacagagtcttttcagt

SEQ ID NO: 88226 - DNA, 25 bp, SARS Virus
agcgaactacaaggtcttttcagtc

SEQ ID NO: 88227 - DNA, 25 bp, SARS Virus
gcgaactacaaagtcttttcagtcc

SEQ ID NO: 88228 - DNA, 25 bp, SARS Virus
cgaactacaaaggcttttcagtcca

SEQ ID NO: 88229 - DNA, 25 bp, SARS Virus
gaactacaaagtgttttcagtccat

SEQ ID NO: 88230 - DNA, 25 bp, SARS Virus
aactacaaagtcgtttcagtccatt

SEQ ID NO: 88231 - DNA, 25 bp, SARS Virus
actacaaagtctgttcagtccatta

SEQ ID NO: 88232 - DNA, 25 bp, SARS Virus
ctacaaagtcttgtcagtccattaa

SEQ ID NO: 88233 - DNA, 25 bp, SARS Virus
tacaaagtctttgcagtccattaaa

SEQ ID NO: 88234 - DNA, 25 bp, SARS Virus
acaaagtcttttgagtccattaaaa

SEQ ID NO: 88235 - DNA, 25 bp, SARS Virus
caaagtcttttcggtccattaaaat

SEQ ID NO: 88236 - DNA, 25 bp, SARS Virus
aaagtcttttcagtccattaaaatt

SEQ ID NO: 88237 - DNA, 25 bp, SARS Virus
aagtcttttcaggccattaaaattt

SEQ ID NO: 88238 - DNA, 25 bp, SARS Virus
agtcttttcagtgcattaaaatttg

SEQ ID NO: 88239 - DNA, 25 bp, SARS Virus
gtcttttcagtcgattaaaatttgt

SEQ ID NO: 88240 - DNA, 25 bp, SARS Virus
tcttttcagtccgttaaaatttgtg

SEQ ID NO: 88241 - DNA, 25 bp, SARS Virus
cttttcagtccagtaaaatttgtga

SEQ ID NO: 88242 - DNA, 25 bp, SARS Virus
ttttcagtccatgaaaatttgtgaa

SEQ ID NO: 88243 - DNA, 25 bp, SARS Virus
tttcagtccattgaaatttgtgaat

SEQ ID NO: 88244 - DNA, 25 bp, SARS Virus
ttcagtccattagaatttgtgaatg

SEQ ID NO: 88245 - DNA, 25 bp, SARS Virus
tcagtccattaagatttgtgaatgc

SEQ ID NO: 88246 - DNA, 25 bp, SARS Virus
cagtccattaaagtttgtgaatgct

SEQ ID NO: 88247 - DNA, 25 bp, SARS Virus
agtccattaaaagttgtgaatgctc

SEQ ID NO: 88248 - DNA, 25 bp, SARS Virus
gtccattaaaatgtgtgaatgctct

SEQ ID NO: 88249 - DNA, 25 bp, SARS Virus
tccattaaaattggtgaatgctctc

SEQ ID NO: 88250 - DNA, 25 bp, SARS Virus
ccattaaaatttgtgaatgctctca

SEQ ID NO: 88251 - DNA, 25 bp, SARS Virus
cattaaaatttgggaatgctctcaa

SEQ ID NO: 88252 - DNA, 25 bp, SARS Virus
attaaaatttgtgaatgctctcaaa

SEQ ID NO: 88253 - DNA, 25 bp, SARS Virus
ttaaaatttgtggatgctctcaaac

SEQ ID NO: 88254 - DNA, 25 bp, SARS Virus
taaaatttgtgagtgctctcaaaca

SEQ ID NO: 88255 - DNA, 25 bp, SARS Virus
aaaatttgtgaaggctctcaaacac

SEQ ID NO: 88256 - DNA, 25 bp, SARS Virus
aaatttgtgaatgctctcaaacaca

SEQ ID NO: 88257 - DNA, 25 bp, SARS Virus
aatttgtgaatggtctcaaacacaa

SEQ ID NO: 88258 - DNA, 25 bp, SARS Virus
atttgtgaatgcgctcaaacacaaa

SEQ ID NO: 88259 - DNA, 25 bp, SARS Virus
tttgtgaatgctgtcaaacacaaat

SEQ ID NO: 88260 - DNA, 25 bp, SARS Virus
ttgtgaatgctcgcaaacacaaatt

SEQ ID NO: 88261 - DNA, 25 bp, SARS Virus
tgtgaatgctctgaaacacaaattt

SEQ ID NO: 88262 - DNA, 25 bp, SARS Virus
gtgaatgctctcgaacacaaatttt

SEQ ID NO: 88263 - DNA, 25 bp, SARS Virus
tgaatgctctcagacacaaattttt

SEQ ID NO: 88264 - DNA, 25 bp, SARS Virus
gaatgctctcaagcacaaattttta

SEQ ID NO: 88265 - DNA, 25 bp, SARS Virus
aatgctctcaaagacaaatttttat

SEQ ID NO: 88266 - DNA, 25 bp, SARS Virus
atgctctcaaacgcaaatttttatt

SEQ ID NO: 88267 - DNA, 25 bp, SARS Virus
tgctctcaaacagaaatttttattt

SEQ ID NO: 88268 - DNA, 25 bp, SARS Virus
gctctcaaacacgaatttttatttc

SEQ ID NO: 88269 - DNA, 25 bp, SARS Virus
ctctcaaacacagatttttatttct

SEQ ID NO: 88270 - DNA, 25 bp, SARS Virus
tctcaaacacaagtttttatttcta

SEQ ID NO: 88271 - DNA, 25 bp, SARS Virus
ctcaaacacaaagttttatttctac

SEQ ID NO: 88272 - DNA, 25 bp, SARS Virus
tcaaacacaaatgtttatttctacc

SEQ ID NO: 88273 - DNA, 25 bp, SARS Virus
caaacacaaattgttatttctaccc

SEQ ID NO: 88274 - DNA, 25 bp, SARS Virus
aaacacaaatttgtatttctaccca

SEQ ID NO: 88275 - DNA, 25 bp, SARS Virus
aacacaaattttgatttctacccaa

SEQ ID NO: 88276 - DNA, 25 bp, SARS Virus
acacaaatttttgtttctacccaaa

SEQ ID NO: 88277 - DNA, 25 bp, SARS Virus
cacaaatttttagttctacccaaag

SEQ ID NO: 88278 - DNA, 25 bp, SARS Virus
acaaatttttatgtctacccaaaga

SEQ ID NO: 88279 - DNA, 25 bp, SARS Virus
caaatttttattgctacccaaagag

SEQ ID NO: 88280 - DNA, 25 bp, SARS Virus
aaatttttatttgtacccaaagaga

SEQ ID NO: 88281 - DNA, 25 bp, SARS Virus
aatttttatttcgacccaaagagat

SEQ ID NO: 88282 - DNA, 25 bp, SARS Virus
atttttatttctgcccaaagagata

SEQ ID NO: 88283 - DNA, 25 bp, SARS Virus
tttttatttctagccaaagagatac

SEQ ID NO: 88284 - DNA, 25 bp, SARS Virus
ttttatttctacgcaaagagataca

SEQ ID NO: 88285 - DNA, 25 bp, SARS Virus
tttatttctaccgaaagagatacaa

SEQ ID NO: 88286 - DNA, 25 bp, SARS Virus
ttatttctacccgaagagatacaaa

SEQ ID NO: 88287 - DNA, 25 bp, SARS Virus
tatttctacccagagagatacaaat

SEQ ID NO: 88288 - DNA, 25 bp, SARS Virus
atttctacccaaggagatacaaata

SEQ ID NO: 88289 - DNA, 25 bp, SARS Virus
tttctacccaaagagatacaaatat

SEQ ID NO: 88290 - DNA, 25 bp, SARS Virus
ttctacccaaagggatacaaatatt

SEQ ID NO: 88291 - DNA, 25 bp, SARS Virus
tctacccaaagagatacaaatattc

SEQ ID NO: 88292 - DNA, 25 bp, SARS Virus
ctacccaaagaggtacaaatattcc

SEQ ID NO: 88293 - DNA, 25 bp, SARS Virus
tacccaaagagagacaaatattccc

SEQ ID NO: 88294 - DNA, 25 bp, SARS Virus
acccaaagagatgcaaatattcccg

SEQ ID NO: 88295 - DNA, 25 bp, SARS Virus
cccaaagagatagaaatattcccga

SEQ ID NO: 88296 - DNA, 25 bp, SARS Virus
ccaaagagatacgaatattcccgat

SEQ ID NO: 88297 - DNA, 25 bp, SARS Virus
caaagagatacagatattcccgata

SEQ ID NO: 88298 - DNA, 25 bp, SARS Virus
aaagagatacaagtattcccgatag

SEQ ID NO: 88299 - DNA, 25 bp, SARS Virus
aagagatacaaagattcccgatagt

SEQ ID NO: 88300 - DNA, 25 bp, SARS Virus
agagatacaaatgttcccgatagtt

SEQ ID NO: 88301 - DNA, 25 bp, SARS Virus
gagatacaaatagtcccgatagttg

SEQ ID NO: 88302 - DNA, 25 bp, SARS Virus
agatacaaatatgcccgatagttgg

SEQ ID NO: 88303 - DNA, 25 bp, SARS Virus
gatacaaatattgccgatagttgga

SEQ ID NO: 88304 - DNA, 25 bp, SARS Virus
atacaaatattcgcgatagttggat

SEQ ID NO: 88305 - DNA, 25 bp, SARS Virus
tacaaatattccggatagttggata

SEQ ID NO: 88306 - DNA, 25 bp, SARS Virus
acaaatattcccgatagttggatat

SEQ ID NO: 88307 - DNA, 25 bp, SARS Virus
caaatattcccggtagttggatatc

SEQ ID NO: 88308 - DNA, 25 bp, SARS Virus
aaatattcccgagagttggatatct

SEQ ID NO: 88309 - DNA, 25 bp, SARS Virus
aatattcccgatggttggatatcta

SEQ ID NO: 88310 - DNA, 25 bp, SARS Virus
atattcccgatagttggatatctac

SEQ ID NO: 88311 - DNA, 25 bp, SARS Virus
tattcccgataggtggatatctaca

SEQ ID NO: 88312 - DNA, 25 bp, SARS Virus
attcccgatagtgggatatctacat

SEQ ID NO: 88313 - DNA, 25 bp, SARS Virus
ttcccgatagttggatatctacatc

SEQ ID NO: 88314 - DNA, 25 bp, SARS Virus
tcccgatagttggatatctacatca

SEQ ID NO: 88315 - DNA, 25 bp, SARS Virus
cccgatagttgggtatctacatcaa

SEQ ID NO: 88316 - DNA, 25 bp, SARS Virus
ccgatagttggagatctacatcaag

SEQ ID NO: 88317 - DNA, 25 bp, SARS Virus
cgatagttggatgtctacatcaagc

SEQ ID NO: 88318 - DNA, 25 bp, SARS Virus
gatagttggatagctacatcaagca

SEQ ID NO: 88319 - DNA, 25 bp, SARS Virus
atagttggatatgtacatcaagcac

SEQ ID NO: 88320 - DNA, 25 bp, SARS Virus
tagttggatatcgacatcaagcact

SEQ ID NO: 88321 - DNA, 25 bp, SARS Virus
agttggatatctgcatcaagcacta

SEQ ID NO: 88322 - DNA, 25 bp, SARS Virus
gttggatatctagatcaagcactag

SEQ ID NO: 88323 - DNA, 25 bp, SARS Virus
ttggatatctacgtcaagcactaga

SEQ ID NO: 88324 - DNA, 25 bp, SARS Virus
tggatatctacagcaagcactagat

SEQ ID NO: 88325 - DNA, 25 bp, SARS Virus
ggatatctacatgaagcactagatg

SEQ ID NO: 88326 - DNA, 25 bp, SARS Virus
gatatctacatcgagcactagatgg

SEQ ID NO: 88327 - DNA, 25 bp, SARS Virus
atatctacatcaggcactagatgga

SEQ ID NO: 88328 - DNA, 25 bp, SARS Virus
tatctacatcaagcactagatggaa

SEQ ID NO: 88329 - DNA, 25 bp, SARS Virus
atctacatcaaggactagatggaag

SEQ ID NO: 88330 - DNA, 25 bp, SARS Virus
tctacatcaagcgctagatggaaga

SEQ ID NO: 88331 - DNA, 25 bp, SARS Virus
ctacatcaagcagtagatggaagac

SEQ ID NO: 88332 - DNA, 25 bp, SARS Virus
tacatcaagcacgagatggaagacc

SEQ ID NO: 88333 - DNA, 25 bp, SARS Virus
acatcaagcactggatggaagacca

SEQ ID NO: 88334 - DNA, 25 bp, SARS Virus
catcaagcactagatggaagaccaa

SEQ ID NO: 88335 - DNA, 25 bp, SARS Virus
atcaagcactaggtggaagaccaaa

SEQ ID NO: 88336 - DNA, 25 bp, SARS Virus
tcaagcactagagggaagaccaaaa

SEQ ID NO: 88337 - DNA, 25 bp, SARS Virus
caagcactagatggaagaccaaaat

SEQ ID NO: 88338 - DNA, 25 bp, SARS Virus
aagcactagatggaagaccaaaatt

SEQ ID NO: 88339 - DNA, 25 bp, SARS Virus
agcactagatgggagaccaaaattg

SEQ ID NO: 88340 - DNA, 25 bp, SARS Virus
gcactagatggaggaccaaaattgt

SEQ ID NO: 88341 - DNA, 25 bp, SARS Virus
cactagatggaagaccaaaattgtg

SEQ ID NO: 88342 - DNA, 25 bp, SARS Virus
actagatggaaggccaaaattgtga

SEQ ID NO: 88343 - DNA, 25 bp, SARS Virus
ctagatggaagagcaaaattgtgaa

SEQ ID NO: 88344 - DNA, 25 bp, SARS Virus
tagatggaagacgaaaattgtgaaa

SEQ ID NO: 88345 - DNA, 25 bp, SARS Virus
agatggaagaccgaaattgtgaaac

SEQ ID NO: 88346 - DNA, 25 bp, SARS Virus
gatggaagaccagaattgtgaaact

SEQ ID NO: 88347 - DNA, 25 bp, SARS Virus
atggaagaccaagattgtgaaactt

SEQ ID NO: 88348 - DNA, 25 bp, SARS Virus
tggaagaccaaagttgtgaaacttt

SEQ ID NO: 88349 - DNA, 25 bp, SARS Virus
ggaagaccaaaagtgtgaaactttg

SEQ ID NO: 88350 - DNA, 25 bp, SARS Virus
gaagaccaaaatggtgaaactttgg

SEQ ID NO: 88351 - DNA, 25 bp, SARS Virus
aagaccaaaattgtgaaactttgga

SEQ ID NO: 88352 - DNA, 25 bp, SARS Virus
agaccaaaattgggaaactttggat

SEQ ID NO: 88353 - DNA, 25 bp, SARS Virus
gaccaaaattgtgaaactttggata

SEQ ID NO: 88354 - DNA, 25 bp, SARS Virus
accaaaattgtggaactttggataa

SEQ ID NO: 88355 - DNA, 25 bp, SARS Virus
ccaaaattgtgagactttggataaa

SEQ ID NO: 88356 - DNA, 25 bp, SARS Virus
caaaattgtgaagctttggataaaa

SEQ ID NO: 88357 - DNA, 25 bp, SARS Virus
aaaattgtgaaagtttggataaaaa

SEQ ID NO: 88358 - DNA, 25 bp, SARS Virus
aaattgtgaaacgttggataaaaat

SEQ ID NO: 88359 - DNA, 25 bp, SARS Virus
aattgtgaaactgtggataaaaatt

SEQ ID NO: 88360 - DNA, 25 bp, SARS Virus
attgtgaaacttgggataaaaattc

SEQ ID NO: 88361 - DNA, 25 bp, SARS Virus
ttgtgaaactttggataaaaattca

SEQ ID NO: 88362 - DNA, 25 bp, SARS Virus
tgtgaaactttggataaaaattcaa

SEQ ID NO: 88363 - DNA, 25 bp, SARS Virus
gtgaaactttgggtaaaaattcaac

SEQ ID NO: 88364 - DNA, 25 bp, SARS Virus
tgaaactttggagaaaaattcaacg

SEQ ID NO: 88365 - DNA, 25 bp, SARS Virus
gaaactttggatgaaaattcaacgg

SEQ ID NO: 88366 - DNA, 25 bp, SARS Virus
aaactttggatagaaattcaacgga

SEQ ID NO: 88367 - DNA, 25 bp, SARS Virus
aactttggataagaattcaacggag

SEQ ID NO: 88368 - DNA, 25 bp, SARS Virus
actttggataaagattcaacggaga

SEQ ID NO: 88369 - DNA, 25 bp, SARS Virus
ctttggataaaagttcaacggagaa

SEQ ID NO: 88370 - DNA, 25 bp, SARS Virus
tttggataaaaagtcaacggagaac

SEQ ID NO: 88371 - DNA, 25 bp, SARS Virus
ttggataaaaatgcaacggagaacc

SEQ ID NO: 88372 - DNA, 25 bp, SARS Virus
tggataaaaattgaacggagaacca

SEQ ID NO: 88373 - DNA, 25 bp, SARS Virus
ggataaaaattcgacggagaaccat

SEQ ID NO: 88374 - DNA, 25 bp, SARS Virus
gataaaaattcagcggagaaccata

SEQ ID NO: 88375 - DNA, 25 bp, SARS Virus
ataaaaattcaagggagaaccataa

SEQ ID NO: 88376 - DNA, 25 bp, SARS Virus
taaaaattcaacggagaaccataat

SEQ ID NO: 88377 - DNA, 25 bp, SARS Virus
aaaaattcaacggagaaccataatt

SEQ ID NO: 88378 - DNA, 25 bp, SARS Virus
aaaattcaacggggaaccataattg

SEQ ID NO: 88379 - DNA, 25 bp, SARS Virus
aaattcaacggagaaccataattgt

SEQ ID NO: 88380 - DNA, 25 bp, SARS Virus
aattcaacggaggaccataattgta

SEQ ID NO: 88381 - DNA, 25 bp, SARS Virus
attcaacggagagccataattgtaa

SEQ ID NO: 88382 - DNA, 25 bp, SARS Virus
ttcaacggagaagcataattgtaat

SEQ ID NO: 88383 - DNA, 25 bp, SARS Virus
tcaacggagaacgataattgtaatg

SEQ ID NO: 88384 - DNA, 25 bp, SARS Virus
caacggagaaccgtaattgtaatgt

SEQ ID NO: 88385 - DNA, 25 bp, SARS Virus
aacggagaaccagaattgtaatgtt

SEQ ID NO: 88386 - DNA, 25 bp, SARS Virus
acggagaaccatgattgtaatgttt

SEQ ID NO: 88387 - DNA, 25 bp, SARS Virus
cggagaaccatagttgtaatgttta

SEQ ID NO: 88388 - DNA, 25 bp, SARS Virus
ggagaaccataagtgtaatgtttaa

SEQ ID NO: 88389 - DNA, 25 bp, SARS Virus
gagaaccataatggtaatgtttaaa

SEQ ID NO: 88390 - DNA, 25 bp, SARS Virus
agaaccataattgtaatgtttaaaa

SEQ ID NO: 88391 - DNA, 25 bp, SARS Virus
gaaccataattggaatgtttaaaat

SEQ ID NO: 88392 - DNA, 25 bp, SARS Virus
aaccataattgtgatgtttaaaatc

SEQ ID NO: 88393 - DNA, 25 bp, SARS Virus
accataattgtagtgtttaaaatct

SEQ ID NO: 88394 - DNA, 25 bp, SARS Virus
ccataattgtaaggtttaaaatctc

SEQ ID NO: 88395 - DNA, 25 bp, SARS Virus
cataattgtaatgtttaaaatctcg

SEQ ID NO: 88396 - DNA, 25 bp, SARS Virus
ataattgtaatggttaaaatctcgg

SEQ ID NO: 88397 - DNA, 25 bp, SARS Virus
taattgtaatgtgtaaaatctcggt

SEQ ID NO: 88398 - DNA, 25 bp, SARS Virus
aattgtaatgttgaaaatctcggta

SEQ ID NO: 88399 - DNA, 25 bp, SARS Virus
attgtaatgtttgaaatctcggtaa

SEQ ID NO: 88400 - DNA, 25 bp, SARS Virus
ttgtaatgtttagaatctcggtaag

SEQ ID NO: 88401 - DNA, 25 bp, SARS Virus
tgtaatgtttaagatctcggtaaga

SEQ ID NO: 88402 - DNA, 25 bp, SARS Virus
gtaatgtttaaagtctcggtaagaa

SEQ ID NO: 88403 - DNA, 25 bp, SARS Virus
taatgtttaaaagctcggtaagaat

SEQ ID NO: 88404 - DNA, 25 bp, SARS Virus
aatgtttaaaatgtcggtaagaatg

SEQ ID NO: 88405 - DNA, 25 bp, SARS Virus
atgtttaaaatcgcggtaagaatgt

SEQ ID NO: 88406 - DNA, 25 bp, SARS Virus
tgtttaaaatctgggtaagaatgtc

SEQ ID NO: 88407 - DNA, 25 bp, SARS Virus
gtttaaaatctcggtaagaatgtcg

SEQ ID NO: 88408 - DNA, 25 bp, SARS Virus
tttaaaatctcggtaagaatgtcgg

SEQ ID NO: 88409 - DNA, 25 bp, SARS Virus
ttaaaatctcgggaagaatgtcgga

SEQ ID NO: 88410 - DNA, 25 bp, SARS Virus
taaaatctcggtgagaatgtcggaa

SEQ ID NO: 88411 - DNA, 25 bp, SARS Virus
aaaatctcggtaggaatgtcggaaa

SEQ ID NO: 88412 - DNA, 25 bp, SARS Virus
aaatctcggtaagaatgtcggaaaa

SEQ ID NO: 88413 - DNA, 25 bp, SARS Virus
aatctcggtaaggatgtcggaaaag

SEQ ID NO: 88414 - DNA, 25 bp, SARS Virus
atctcggtaagagtgtcggaaaagt

SEQ ID NO: 88415 - DNA, 25 bp, SARS Virus
tctcggtaagaaggtcggaaaagtg

SEQ ID NO: 88416 - DNA, 25 bp, SARS Virus
ctcggtaagaatgtcggaaaagtgg

SEQ ID NO: 88417 - DNA, 25 bp, SARS Virus
tcggtaagaatggcggaaaagtgga

SEQ ID NO: 88418 - DNA, 25 bp, SARS Virus
cggtaagaatgtgggaaaagtggac

SEQ ID NO: 88419 - DNA, 25 bp, SARS Virus
ggtaagaatgtcggaaaagtggacg

SEQ ID NO: 88420 - DNA, 25 bp, SARS Virus
gtaagaatgtcggaaaagtggacga

SEQ ID NO: 88421 - DNA, 25 bp, SARS Virus
taagaatgtcgggaaagtggacgag

SEQ ID NO: 88422 - DNA, 25 bp, SARS Virus
aagaatgtcggagaagtggacgagt

SEQ ID NO: 88423 - DNA, 25 bp, SARS Virus
agaatgtcggaagagtggacgagtt

SEQ ID NO: 88424 - DNA, 25 bp, SARS Virus
gaatgtcggaaaggtggacgagttc

SEQ ID NO: 88425 - DNA, 25 bp, SARS Virus
aatgtcggaaaagtggacgagttct

SEQ ID NO: 88426 - DNA, 25 bp, SARS Virus
atgtcggaaaaggggacgagttctg

SEQ ID NO: 88427 - DNA, 25 bp, SARS Virus
tgtcggaaaagtggacgagttctgt

SEQ ID NO: 88428 - DNA, 25 bp, SARS Virus
gtcggaaaagtggacgagttctgta

SEQ ID NO: 88429 - DNA, 25 bp, SARS Virus
tcggaaaagtgggcgagttctgtaa

SEQ ID NO: 88430 - DNA, 25 bp, SARS Virus
cggaaaagtggaggagttctgtaaa

SEQ ID NO: 88431 - DNA, 25 bp, SARS Virus
ggaaaagtggacgagttctgtaaac

SEQ ID NO: 88432 - DNA, 25 bp, SARS Virus
gaaaagtggacgggttctgtaaacc

SEQ ID NO: 88433 - DNA, 25 bp, SARS Virus
aaaagtggacgagttctgtaaaccc

SEQ ID NO: 88434 - DNA, 25 bp, SARS Virus
aaagtggacgaggtctgtaaacccc

SEQ ID NO: 88435 - DNA, 25 bp, SARS Virus
aagtggacgagtgctgtaaaccccg

SEQ ID NO: 88436 - DNA, 25 bp, SARS Virus
agtggacgagttgtgtaaaccccgt

SEQ ID NO: 88437 - DNA, 25 bp, SARS Virus
gtggacgagttcggtaaaccccgtg

SEQ ID NO: 88438 - DNA, 25 bp, SARS Virus
tggacgagttctgtaaaccccgtgc

SEQ ID NO: 88439 - DNA, 25 bp, SARS Virus
ggacgagttctggaaaccccgtgca

SEQ ID NO: 88440 - DNA, 25 bp, SARS Virus
gacgagttctgtgaaccccgtgcag

SEQ ID NO: 88441 - DNA, 25 bp, SARS Virus
acgagttctgtagaccccgtgcagt

SEQ ID NO: 88442 - DNA, 25 bp, SARS Virus
cgagttctgtaagccccgtgcagtc

SEQ ID NO: 88443 - DNA, 25 bp, SARS Virus
gagttctgtaaagcccgtgcagtcg

SEQ ID NO: 88444 - DNA, 25 bp, SARS Virus
agttctgtaaacgccgtgcagtcga

SEQ ID NO: 88445 - DNA, 25 bp, SARS Virus
gttctgtaaaccgcgtgcagtcgac

SEQ ID NO: 88446 - DNA, 25 bp, SARS Virus
ttctgtaaacccggtgcagtcgacg

SEQ ID NO: 88447 - DNA, 25 bp, SARS Virus
tctgtaaaccccgtgcagtcgacgt

SEQ ID NO: 88448 - DNA, 25 bp, SARS Virus
ctgtaaaccccgggcagtcgacgtc

SEQ ID NO: 88449 - DNA, 25 bp, SARS Virus
tgtaaaccccgtgcagtcgacgtcg

SEQ ID NO: 88450 - DNA, 25 bp, SARS Virus
gtaaaccccgtggagtcgacgtcgg

SEQ ID NO: 88451 - DNA, 25 bp, SARS Virus
taaaccccgtgcggtcgacgtcgga

SEQ ID NO: 88452 - DNA, 25 bp, SARS Virus
aaaccccgtgcagtcgacgtcggat

SEQ ID NO: 88453 - DNA, 25 bp, SARS Virus
aaccccgtgcaggcgacgtcggata

SEQ ID NO: 88454 - DNA, 25 bp, SARS Virus
accccgtgcagtggacgtcggataa

SEQ ID NO: 88455 - DNA, 25 bp, SARS Virus
ccccgtgcagtcgacgtcggataaa

SEQ ID NO: 88456 - DNA, 25 bp, SARS Virus
cccgtgcagtcggcgtcggataaaa

SEQ ID NO: 88457 - DNA, 25 bp, SARS Virus
aattcctaccattaataaaacgacg

SEQ ID NO: 88458 - DNA, 25 bp, SARS Virus
attcctaccatatataaaacgacgg

SEQ ID NO: 88459 - DNA, 25 bp, SARS Virus
ttcctaccataattaaaacgacggt

SEQ ID NO: 88460 - DNA, 25 bp, SARS Virus
tcctaccataaataaaacgacggtg

SEQ ID NO: 88461 - DNA, 25 bp, SARS Virus
cctaccataaattaaacgacggtgt

SEQ ID NO: 88462 - DNA, 25 bp, SARS Virus
ctaccataaatataacgacggtgtc

SEQ ID NO: 88463 - DNA, 25 bp, SARS Virus
taccataaataatacgacggtgtct

SEQ ID NO: 88464 - DNA, 25 bp, SARS Virus
accataaataaatcgacggtgtctc

SEQ ID NO: 88465 - DNA, 25 bp, SARS Virus
ccataaataaaatgacggtgtctct

SEQ ID NO: 88466 - DNA, 25 bp, SARS Virus
cataaataaaactacggtgtctctt

SEQ ID NO: 88467 - DNA, 25 bp, SARS Virus
ataaataaaacgtcggtgtctcttt

SEQ ID NO: 88468 - DNA, 25 bp, SARS Virus
taaataaaacgatggtgtctcttta

SEQ ID NO: 88469 - DNA, 25 bp, SARS Virus
aaataaaacgactgtgtctctttag

SEQ ID NO: 88470 - DNA, 25 bp, SARS Virus
aataaaacgacgttgtctctttagt

SEQ ID NO: 88471 - DNA, 25 bp, SARS Virus
ataaaacgacggtgtctctttagtt

SEQ ID NO: 88472 - DNA, 25 bp, SARS Virus
taaaacgacggtttctctttagttt

SEQ ID NO: 88473 - DNA, 25 bp, SARS Virus
aaaacgacggtgtctctttagttta

SEQ ID NO: 88474 - DNA, 25 bp, SARS Virus
aaacgacggtgtttctttagtttac

SEQ ID NO: 88475 - DNA, 25 bp, SARS Virus
aacgacggtgtctctttagtttaca

SEQ ID NO: 88476 - DNA, 25 bp, SARS Virus
acgacggtgtctttttagtttacaa

SEQ ID NO: 88477 - DNA, 25 bp, SARS Virus
cgacggtgtctctttagtttacaac

SEQ ID NO: 88478 - DNA, 25 bp, SARS Virus
gacggtgtctctttagtttacaaca

SEQ ID NO: 88479 - DNA, 25 bp, SARS Virus
acggtgtctctttagtttacaacag

SEQ ID NO: 88480 - DNA, 25 bp, SARS Virus
cggtgtctcttttgtttacaacagg

SEQ ID NO: 88481 - DNA, 25 bp, SARS Virus
ggtgtctctttattttacaacaggc

SEQ ID NO: 88482 - DNA, 25 bp, SARS Virus
gtgtctctttagtttacaacaggca

SEQ ID NO: 88483 - DNA, 25 bp, SARS Virus
tgtctctttagtttacaacaggcac

SEQ ID NO: 88484 - DNA, 25 bp, SARS Virus
gtctctttagtttacaacaggcacc

SEQ ID NO: 88485 - DNA, 25 bp, SARS Virus
tctctttagttttcaacaggcacca

SEQ ID NO: 88486 - DNA, 25 bp, SARS Virus
ctctttagtttataacaggcaccaa

SEQ ID NO: 88487 - DNA, 25 bp, SARS Virus
tctttagtttactacaggcaccaac

SEQ ID NO: 88488 - DNA, 25 bp, SARS Virus
ctttagtttacatcaggcaccaacc

SEQ ID NO: 88489 - DNA, 25 bp, SARS Virus
tttagtttacaataggcaccaaccc

SEQ ID NO: 88490 - DNA, 25 bp, SARS Virus
ttagtttacaactggcaccaaccca

SEQ ID NO: 88491 - DNA, 25 bp, SARS Virus
tagtttacaacatgcaccaacccaa

SEQ ID NO: 88492 - DNA, 25 bp, SARS Virus
agtttacaacagtcaccaacccaaa

SEQ ID NO: 88493 - DNA, 25 bp, SARS Virus
gtttacaacaggtaccaacccaaaa

SEQ ID NO: 88494 - DNA, 25 bp, SARS Virus
tttacaacaggctccaacccaaaaa

SEQ ID NO: 88495 - DNA, 25 bp, SARS Virus
ttacaacaggcatcaacccaaaaac

SEQ ID NO: 88496 - DNA, 25 bp, SARS Virus
tacaacaggcactaacccaaaaacc

SEQ ID NO: 88497 - DNA, 25 bp, SARS Virus
acaacaggcacctacccaaaaacca

SEQ ID NO: 88498 - DNA, 25 bp, SARS Virus
caacaggcaccatcccaaaaaccaa

SEQ ID NO: 88499 - DNA, 25 bp, SARS Virus
aacaggcaccaatccaaaaaccaag

SEQ ID NO: 88500 - DNA, 25 bp, SARS Virus
acaggcaccaactcaaaaaccaaga

SEQ ID NO: 88501 - DNA, 25 bp, SARS Virus
caggcaccaacctaaaaaccaagat

SEQ ID NO: 88502 - DNA, 25 bp, SARS Virus
aggcaccaaccctaaaaccaagatg

SEQ ID NO: 88503 - DNA, 25 bp, SARS Virus
ggcaccaacccataaaccaagatgg

SEQ ID NO: 88504 - DNA, 25 bp, SARS Virus
gcaccaacccaataaccaagatggt

SEQ ID NO: 88505 - DNA, 25 bp, SARS Virus
caccaacccaaataccaagatggta

SEQ ID NO: 88506 - DNA, 25 bp, SARS Virus
accaacccaaaatccaagatggtac

SEQ ID NO: 88507 - DNA, 25 bp, SARS Virus
ccaacccaaaaatcaagatggtact

SEQ ID NO: 88508 - DNA, 25 bp, SARS Virus
caacccaaaaactaagatggtactt

SEQ ID NO: 88509 - DNA, 25 bp, SARS Virus
aacccaaaaacctagatggtacttg

SEQ ID NO: 88510 - DNA, 25 bp, SARS Virus
acccaaaaaccatgatggtacttgt

SEQ ID NO: 88511 - DNA, 25 bp, SARS Virus
cccaaaaaccaatatggtacttgtt

SEQ ID NO: 88512 - DNA, 25 bp, SARS Virus
ccaaaaaccaagttggtacttgttg

SEQ ID NO: 88513 - DNA, 25 bp, SARS Virus
caaaaaccaagatggtacttgttgt

SEQ ID NO: 88514 - DNA, 25 bp, SARS Virus
aaaaaccaagattgtacttgttgtt

SEQ ID NO: 88515 - DNA, 25 bp, SARS Virus
aaaaccaagatgttacttgttgttc

SEQ ID NO: 88516 - DNA, 25 bp, SARS Virus
aaaccaagatggtacttgttgttca

SEQ ID NO: 88517 - DNA, 25 bp, SARS Virus
aaccaagatggttcttgttgttcag

SEQ ID NO: 88518 - DNA, 25 bp, SARS Virus
accaagatggtatttgttgttcagt

SEQ ID NO: 88519 - DNA, 25 bp, SARS Virus
ccaagatggtacttgttgttcagtg

SEQ ID NO: 88520 - DNA, 25 bp, SARS Virus
caagatggtacttgttgttcagtgt

SEQ ID NO: 88521 - DNA, 25 bp, SARS Virus
aagatggtactttttgttcagtgtc

SEQ ID NO: 88522 - DNA, 25 bp, SARS Virus
agatggtacttgttgttcagtgtca

SEQ ID NO: 88523 - DNA, 25 bp, SARS Virus
gatggtacttgttgttcagtgtcag

SEQ ID NO: 88524 - DNA, 25 bp, SARS Virus
atggtacttgtttttcagtgtcagc

SEQ ID NO: 88525 - DNA, 25 bp, SARS Virus
tggtacttgttgttcagtgtcagcc

SEQ ID NO: 88526 - DNA, 25 bp, SARS Virus
ggtacttgttgttcagtgtcagcca

SEQ ID NO: 88527 - DNA, 25 bp, SARS Virus
gtacttgttgtttagtgtcagccac

SEQ ID NO: 88528 - DNA, 25 bp, SARS Virus
tacttgttgttctgtgtcagccact

SEQ ID NO: 88529 - DNA, 25 bp, SARS Virus
acttgttgttcattgtcagccacta

SEQ ID NO: 88530 - DNA, 25 bp, SARS Virus
cttgttgttcagtgtcagccactaa

SEQ ID NO: 88531 - DNA, 25 bp, SARS Virus
ttgttgttcagtttcagccactaat

SEQ ID NO: 88532 - DNA, 25 bp, SARS Virus
tgttgttcagtgtcagccactaata

SEQ ID NO: 88533 - DNA, 25 bp, SARS Virus
gttgttcagtgttagccactaataa

SEQ ID NO: 88534 - DNA, 25 bp, SARS Virus
ttgttcagtgtctgccactaataat

SEQ ID NO: 88535 - DNA, 25 bp, SARS Virus
tgttcagtgtcatccactaataata

SEQ ID NO: 88536 - DNA, 25 bp, SARS Virus
gttcagtgtcagtcactaataataa

SEQ ID NO: 88537 - DNA, 25 bp, SARS Virus
ttcagtgtcagctactaataataat

SEQ ID NO: 88538 - DNA, 25 bp, SARS Virus
tcagtgtcagcctctaataataatt

SEQ ID NO: 88539 - DNA, 25 bp, SARS Virus
cagtgtcagccattaataataattg

SEQ ID NO: 88540 - DNA, 25 bp, SARS Virus
agtgtcagccactaataataattgt

SEQ ID NO: 88541 - DNA, 25 bp, SARS Virus
gtgtcagccacttataataattgtt

SEQ ID NO: 88542 - DNA, 25 bp, SARS Virus
tgtcagccactattaataattgtta

SEQ ID NO: 88543 - DNA, 25 bp, SARS Virus
gtcagccactaataataattgttaa

SEQ ID NO: 88544 - DNA, 25 bp, SARS Virus
tcagccactaattataattgttaag

SEQ ID NO: 88545 - DNA, 25 bp, SARS Virus
cagccactaatattaattgttaaga

SEQ ID NO: 88546 - DNA, 25 bp, SARS Virus
agccactaataataattgttaagat

SEQ ID NO: 88547 - DNA, 25 bp, SARS Virus
gccactaataattattgttaagatg

SEQ ID NO: 88548 - DNA, 25 bp, SARS Virus
ccactaataatatttgttaagatga

SEQ ID NO: 88549 - DNA, 25 bp, SARS Virus
cactaataataattgttaagatgat

SEQ ID NO: 88550 - DNA, 25 bp, SARS Virus
actaataataattgttaagatgatt

SEQ ID NO: 88551 - DNA, 25 bp, SARS Virus
ctaataataatttttaagatgatta

SEQ ID NO: 88552 - DNA, 25 bp, SARS Virus
taataataattgttaagatgattac

SEQ ID NO: 88553 - DNA, 25 bp, SARS Virus
aataataattgttaagatgattaca

SEQ ID NO: 88554 - DNA, 25 bp, SARS Virus
ataataattgtttagatgattacaa

SEQ ID NO: 88555 - DNA, 25 bp, SARS Virus
taataattgttatgatgattacaac

SEQ ID NO: 88556 - DNA, 25 bp, SARS Virus
aataattgttaatatgattacaaca

SEQ ID NO: 88557 - DNA, 25 bp, SARS Virus
ataattgttaagttgattacaacaa

SEQ ID NO: 88558 - DNA, 25 bp, SARS Virus
taattgttaagatgattacaacaat

SEQ ID NO: 88559 - DNA, 25 bp, SARS Virus
aattgttaagattattacaacaata

SEQ ID NO: 88560 - DNA, 25 bp, SARS Virus
attgttaagatgtttacaacaatat

SEQ ID NO: 88561 - DNA, 25 bp, SARS Virus
ttgttaagatgattacaacaatatg

SEQ ID NO: 88562 - DNA, 25 bp, SARS Virus
tgttaagatgattacaacaatatgc

SEQ ID NO: 88563 - DNA, 25 bp, SARS Virus
gttaagatgatttcaacaatatgct

SEQ ID NO: 88564 - DNA, 25 bp, SARS Virus
ttaagatgattataacaatatgctc

SEQ ID NO: 88565 - DNA, 25 bp, SARS Virus
taagatgattactacaatatgctcg

SEQ ID NO: 88566 - DNA, 25 bp, SARS Virus
aagatgattacatcaatatgctcgt

SEQ ID NO: 88567 - DNA, 25 bp, SARS Virus
agatgattacaataatatgctcgta

SEQ ID NO: 88568 - DNA, 25 bp, SARS Virus
gatgattacaactatatgctcgtac

SEQ ID NO: 88569 - DNA, 25 bp, SARS Virus
atgattacaacattatgctcgtaca

SEQ ID NO: 88570 - DNA, 25 bp, SARS Virus
tgattacaacaatatgctcgtacat

SEQ ID NO: 88571 - DNA, 25 bp, SARS Virus
gattacaacaatttgctcgtacatt

SEQ ID NO: 88572 - DNA, 25 bp, SARS Virus
attacaacaatatgctcgtacattg

SEQ ID NO: 88573 - DNA, 25 bp, SARS Virus
ttacaacaatattctcgtacattga

SEQ ID NO: 88574 - DNA, 25 bp, SARS Virus
tacaacaatatgttcgtacattgaa

SEQ ID NO: 88575 - DNA, 25 bp, SARS Virus
acaacaatatgctcgtacattgaaa

SEQ ID NO: 88576 - DNA, 25 bp, SARS Virus
caacaatatgcttgtacattgaaac

SEQ ID NO: 88577 - DNA, 25 bp, SARS Virus
aacaatatgctcttacattgaaact

SEQ ID NO: 88578 - DNA, 25 bp, SARS Virus
acaatatgctcgtacattgaaactt

SEQ ID NO: 88579 - DNA, 25 bp, SARS Virus
caatatgctcgttcattgaaactta

SEQ ID NO: 88580 - DNA, 25 bp, SARS Virus
aatatgctcgtatattgaaacttaa

SEQ ID NO: 88581 - DNA, 25 bp, SARS Virus
atatgctcgtactttgaaacttaac

SEQ ID NO: 88582 - DNA, 25 bp, SARS Virus
tatgctcgtacattgaaacttaaca

SEQ ID NO: 88583 - DNA, 25 bp, SARS Virus
atgctcgtacattgaaacttaacac

SEQ ID NO: 88584 - DNA, 25 bp, SARS Virus
tgctcgtacatttaaacttaacaca

SEQ ID NO: 88585 - DNA, 25 bp, SARS Virus
gctcgtacattgtaacttaacacac

SEQ ID NO: 88586 - DNA, 25 bp, SARS Virus
ctcgtacattgatacttaacacact

SEQ ID NO: 88587 - DNA, 25 bp, SARS Virus
tcgtacattgaatcttaacacactg

SEQ ID NO: 88588 - DNA, 25 bp, SARS Virus
cgtacattgaaatttaacacactgt

SEQ ID NO: 88589 - DNA, 25 bp, SARS Virus
gtacattgaaacttaacacactgtt

SEQ ID NO: 88590 - DNA, 25 bp, SARS Virus
tacattgaaacttaacacactgttg

SEQ ID NO: 88591 - DNA, 25 bp, SARS Virus
acattgaaactttacacactgttgg

SEQ ID NO: 88592 - DNA, 25 bp, SARS Virus
cattgaaacttatcacactgttggg

SEQ ID NO: 88593 - DNA, 25 bp, SARS Virus
attgaaacttaatacactgttggga

SEQ ID NO: 88594 - DNA, 25 bp, SARS Virus
ttgaaacttaactcactgttgggaa

SEQ ID NO: 88595 - DNA, 25 bp, SARS Virus
tgaaacttaacatactgttgggaaa

SEQ ID NO: 88596 - DNA, 25 bp, SARS Virus
gaaacttaacactctgttgggaaag

SEQ ID NO: 88597 - DNA, 25 bp, SARS Virus
aaacttaacacattgttgggaaaga

SEQ ID NO: 88598 - DNA, 25 bp, SARS Virus
aacttaacacactgttgggaaagaa

SEQ ID NO: 88599 - DNA, 25 bp, SARS Virus
acttaacacacttttgggaaagaaa

SEQ ID NO: 88600 - DNA, 25 bp, SARS Virus
cttaacacactgttgggaaagaaac

SEQ ID NO: 88601 - DNA, 25 bp, SARS Virus
ttaacacactgttgggaaagaaacg

SEQ ID NO: 88602 - DNA, 25 bp, SARS Virus
taacacactgtttggaaagaaacga

SEQ ID NO: 88603 - DNA, 25 bp, SARS Virus
aacacactgttgtgaaagaaacgac

SEQ ID NO: 88604 - DNA, 25 bp, SARS Virus
acacactgttggtaaagaaacgaca

SEQ ID NO: 88605 - DNA, 25 bp, SARS Virus
cacactgttgggtaagaaacgacaa

SEQ ID NO: 88606 - DNA, 25 bp, SARS Virus
acactgttgggatagaaacgacaaa

SEQ ID NO: 88607 - DNA, 25 bp, SARS Virus
cactgttgggaatgaaacgacaaag

SEQ ID NO: 88608 - DNA, 25 bp, SARS Virus
actgttgggaaataaacgacaaaga

SEQ ID NO: 88609 - DNA, 25 bp, SARS Virus
ctgttgggaaagtaacgacaaagat

SEQ ID NO: 88610 - DNA, 25 bp, SARS Virus
tgttgggaaagatacgacaaagatt

SEQ ID NO: 88611 - DNA, 25 bp, SARS Virus
gttgggaaagaatcgacaaagattt

SEQ ID NO: 88612 - DNA, 25 bp, SARS Virus
ttgggaaagaaatgacaaagatttg

SEQ ID NO: 88613 - DNA, 25 bp, SARS Virus
tgggaaagaaactacaaagatttgg

SEQ ID NO: 88614 - DNA, 25 bp, SARS Virus
gggaaagaaacgtcaaagatttggg

SEQ ID NO: 88615 - DNA, 25 bp, SARS Virus
ggaaagaaacgataaagatttgggt

SEQ ID NO: 88616 - DNA, 25 bp, SARS Virus
gaaagaaacgactaagatttgggta

SEQ ID NO: 88617 - DNA, 25 bp, SARS Virus
aaagaaacgacatagatttgggtac

SEQ ID NO: 88618 - DNA, 25 bp, SARS Virus
aagaaacgacaatgatttgggtacc

SEQ ID NO: 88619 - DNA, 25 bp, SARS Virus
agaaacgacaaatatttgggtaccc

SEQ ID NO: 88620 - DNA, 25 bp, SARS Virus
gaaacgacaaagttttgggtaccca

SEQ ID NO: 88621 - DNA, 25 bp, SARS Virus
aaacgacaaagatttgggtacccat

SEQ ID NO: 88622 - DNA, 25 bp, SARS Virus
aacgacaaagatttgggtacccatg

SEQ ID NO: 88623 - DNA, 25 bp, SARS Virus
acgacaaagatttgggtacccatgt

SEQ ID NO: 88624 - DNA, 25 bp, SARS Virus
cgacaaagattttggtacccatgtg

SEQ ID NO: 88625 - DNA, 25 bp, SARS Virus
gacaaagatttgtgtacccatgtgt

SEQ ID NO: 88626 - DNA, 25 bp, SARS Virus
acaaagatttggttacccatgtgtc

SEQ ID NO: 88627 - DNA, 25 bp, SARS Virus
caaagatttgggtacccatgtgtct

SEQ ID NO: 88628 - DNA, 25 bp, SARS Virus
aaagatttgggttcccatgtgtctg

SEQ ID NO: 88629 - DNA, 25 bp, SARS Virus
aagatttgggtatccatgtgtctgt

SEQ ID NO: 88630 - DNA, 25 bp, SARS Virus
agatttgggtactcatgtgtctgtg

SEQ ID NO: 88631 - DNA, 25 bp, SARS Virus
gatttgggtacctatgtgtctgtgt

SEQ ID NO: 88632 - DNA, 25 bp, SARS Virus
atttgggtacccttgtgtctgtgta

SEQ ID NO: 88633 - DNA, 25 bp, SARS Virus
tttgggtacccatgtgtctgtgtat

SEQ ID NO: 88634 - DNA, 25 bp, SARS Virus
ttgggtacccatttgtctgtgtatg

SEQ ID NO: 88635 - DNA, 25 bp, SARS Virus
tgggtacccatgtgtctgtgtatga

SEQ ID NO: 88636 - DNA, 25 bp, SARS Virus
gggtacccatgtttctgtgtatgat

SEQ ID NO: 88637 - DNA, 25 bp, SARS Virus
ggtacccatgtgtctgtgtatgata

SEQ ID NO: 88638 - DNA, 25 bp, SARS Virus
gtacccatgtgtttgtgtatgatac

SEQ ID NO: 88639 - DNA, 25 bp, SARS Virus
tacccatgtgtctgtgtatgatact

SEQ ID NO: 88640 - DNA, 25 bp, SARS Virus
acccatgtgtctttgtatgatacta

SEQ ID NO: 88641 - DNA, 25 bp, SARS Virus
cccatgtgtctgtgtatgatactat

SEQ ID NO: 88642 - DNA, 25 bp, SARS Virus
ccatgtgtctgtttatgatactata

SEQ ID NO: 88643 - DNA, 25 bp, SARS Virus
catgtgtctgtgtatgatactataa

SEQ ID NO: 88644 - DNA, 25 bp, SARS Virus
atgtgtctgtgtttgatactataag

SEQ ID NO: 88645 - DNA, 25 bp, SARS Virus
tgtgtctgtgtatgatactataagc

SEQ ID NO: 88646 - DNA, 25 bp, SARS Virus
gtgtctgtgtattatactataagct

SEQ ID NO: 88647 - DNA, 25 bp, SARS Virus
tgtctgtgtatgttactataagcta

SEQ ID NO: 88648 - DNA, 25 bp, SARS Virus
gtctgtgtatgatactataagctat

SEQ ID NO: 88649 - DNA, 25 bp, SARS Virus
tctgtgtatgattctataagctatt

SEQ ID NO: 88650 - DNA, 25 bp, SARS Virus
ctgtgtatgatattataagctatta

SEQ ID NO: 88651 - DNA, 25 bp, SARS Virus
tgtgtatgatactataagctattac

SEQ ID NO: 88652 - DNA, 25 bp, SARS Virus
gtgtatgatactttaagctattacg

SEQ ID NO: 88653 - DNA, 25 bp, SARS Virus
tgtatgatactataagctattacgt

SEQ ID NO: 88654 - DNA, 25 bp, SARS Virus
gtatgatactattagctattacgta

SEQ ID NO: 88655 - DNA, 25 bp, SARS Virus
tatgatactatatgctattacgtaa

SEQ ID NO: 88656 - DNA, 25 bp, SARS Virus
atgatactataatctattacgtaaa

SEQ ID NO: 88657 - DNA, 25 bp, SARS Virus
tgatactataagttattacgtaaat

SEQ ID NO: 88658 - DNA, 25 bp, SARS Virus
gatactataagctattacgtaaatt

SEQ ID NO: 88659 - DNA, 25 bp, SARS Virus
atactataagcttttacgtaaatta

SEQ ID NO: 88660 - DNA, 25 bp, SARS Virus
tactataagctattacgtaaattaa

SEQ ID NO: 88661 - DNA, 25 bp, SARS Virus
actataagctattacgtaaattaac

SEQ ID NO: 88662 - DNA, 25 bp, SARS Virus
ctataagctatttcgtaaattaacg

SEQ ID NO: 88663 - DNA, 25 bp, SARS Virus
tataagctattatgtaaattaacgt

SEQ ID NO: 88664 - DNA, 25 bp, SARS Virus
ataagctattacttaaattaacgtg

SEQ ID NO: 88665 - DNA, 25 bp, SARS Virus
taagctattacgtaaattaacgtga

SEQ ID NO: 88666 - DNA, 25 bp, SARS Virus
aagctattacgttaattaacgtgaa

SEQ ID NO: 88667 - DNA, 25 bp, SARS Virus
agctattacgtatattaacgtgaaa

SEQ ID NO: 88668 - DNA, 25 bp, SARS Virus
gctattacgtaatttaacgtgaaag

SEQ ID NO: 88669 - DNA, 25 bp, SARS Virus
ctattacgtaaattaacgtgaaagc

SEQ ID NO: 88670 - DNA, 25 bp, SARS Virus
tattacgtaaattaacgtgaaagct

SEQ ID NO: 88671 - DNA, 25 bp, SARS Virus
attacgtaaatttacgtgaaagctc

SEQ ID NO: 88672 - DNA, 25 bp, SARS Virus
ttacgtaaattatcgtgaaagctca

SEQ ID NO: 88673 - DNA, 25 bp, SARS Virus
tacgtaaattaatgtgaaagctcat

SEQ ID NO: 88674 - DNA, 25 bp, SARS Virus
acgtaaattaacttgaaagctcatg

SEQ ID NO: 88675 - DNA, 25 bp, SARS Virus
cgtaaattaacgtgaaagctcatgt

SEQ ID NO: 88676 - DNA, 25 bp, SARS Virus
gtaaattaacgttaaagctcatgta

SEQ ID NO: 88677 - DNA, 25 bp, SARS Virus
taaattaacgtgtaagctcatgtat

SEQ ID NO: 88678 - DNA, 25 bp, SARS Virus
aaattaacgtgatagctcatgtata

SEQ ID NO: 88679 - DNA, 25 bp, SARS Virus
aattaacgtgaatgctcatgtatag

SEQ ID NO: 88680 - DNA, 25 bp, SARS Virus
attaacgtgaaatctcatgtataga

SEQ ID NO: 88681 - DNA, 25 bp, SARS Virus
ttaacgtgaaagttcatgtatagac

SEQ ID NO: 88682 - DNA, 25 bp, SARS Virus
taacgtgaaagctcatgtatagact

SEQ ID NO: 88683 - DNA, 25 bp, SARS Virus
aacgtgaaagcttatgtatagacta

SEQ ID NO: 88684 - DNA, 25 bp, SARS Virus
acgtgaaagctcttgtatagactac

SEQ ID NO: 88685 - DNA, 25 bp, SARS Virus
cgtgaaagctcatgtatagactacg

SEQ ID NO: 88686 - DNA, 25 bp, SARS Virus
gtgaaagctcatttatagactacgg

SEQ ID NO: 88687 - DNA, 25 bp, SARS Virus
tgaaagctcatgtatagactacgga

SEQ ID NO: 88688 - DNA, 25 bp, SARS Virus
gaaagctcatgtttagactacggaa

SEQ ID NO: 88689 - DNA, 25 bp, SARS Virus
aaagctcatgtatagactacggaaa

SEQ ID NO: 88690 - DNA, 25 bp, SARS Virus
aagctcatgtattgactacggaaaa

SEQ ID NO: 88691 - DNA, 25 bp, SARS Virus
agctcatgtatatactacggaaaag

SEQ ID NO: 88692 - DNA, 25 bp, SARS Virus
gctcatgtatagtctacggaaaagc

SEQ ID NO: 88693 - DNA, 25 bp, SARS Virus
ctcatgtatagattacggaaaagcg

SEQ ID NO: 88694 - DNA, 25 bp, SARS Virus
tcatgtatagactacggaaaagcga

SEQ ID NO: 88695 - DNA, 25 bp, SARS Virus
catgtatagacttcggaaaagcgaa

SEQ ID NO: 88696 - DNA, 25 bp, SARS Virus
atgtatagactatggaaaagcgaac

SEQ ID NO: 88697 - DNA, 25 bp, SARS Virus
tgtatagactactgaaaagcgaact

SEQ ID NO: 88698 - DNA, 25 bp, SARS Virus
gtatagactacgtaaaagcgaacta

SEQ ID NO: 88699 - DNA, 25 bp, SARS Virus
tatagactacggtaaagcgaactac

SEQ ID NO: 88700 - DNA, 25 bp, SARS Virus
atagactacggataagcgaactaca

SEQ ID NO: 88701 - DNA, 25 bp, SARS Virus
tagactacggaatagcgaactacaa

SEQ ID NO: 88702 - DNA, 25 bp, SARS Virus
agactacggaaatgcgaactacaaa

SEQ ID NO: 88703 - DNA, 25 bp, SARS Virus
gactacggaaaatcgaactacaaag

SEQ ID NO: 88704 - DNA, 25 bp, SARS Virus
actacggaaaagtgaactacaaagt

SEQ ID NO: 88705 - DNA, 25 bp, SARS Virus
ctacggaaaagctaactacaaagtc

SEQ ID NO: 88706 - DNA, 25 bp, SARS Virus
tacggaaaagcgtactacaaagtct

SEQ ID NO: 88707 - DNA, 25 bp, SARS Virus
acggaaaagcgatctacaaagtctt

SEQ ID NO: 88708 - DNA, 25 bp, SARS Virus
cggaaaagcgaattacaaagtcttt

SEQ ID NO: 88709 - DNA, 25 bp, SARS Virus
ggaaaagcgaactacaaagtctttt

SEQ ID NO: 88710 - DNA, 25 bp, SARS Virus
gaaaagcgaacttcaaagtcttttc

SEQ ID NO: 88711 - DNA, 25 bp, SARS Virus
aaaagcgaactataaagtcttttca

SEQ ID NO: 88712 - DNA, 25 bp, SARS Virus
aaagcgaactactaagtcttttcag

SEQ ID NO: 88713 - DNA, 25 bp, SARS Virus
aagcgaactacatagtcttttcagt

SEQ ID NO: 88714 - DNA, 25 bp, SARS Virus
agcgaactacaatgtcttttcagtc

SEQ ID NO: 88715 - DNA, 25 bp, SARS Virus
gcgaactacaaattcttttcagtcc

SEQ ID NO: 88716 - DNA, 25 bp, SARS Virus
cgaactacaaagtcttttcagtcca

SEQ ID NO: 88717 - DNA, 25 bp, SARS Virus
gaactacaaagttttttcagtccat

SEQ ID NO: 88718 - DNA, 25 bp, SARS Virus
aactacaaagtcttttcagtccatt

SEQ ID NO: 88719 - DNA, 25 bp, SARS Virus
actacaaagtcttttcagtccatta

SEQ ID NO: 88720 - DNA, 25 bp, SARS Virus
ctacaaagtcttttcagtccattaa

SEQ ID NO: 88721 - DNA, 25 bp, SARS Virus
tacaaagtcttttcagtccattaaa

SEQ ID NO: 88722 - DNA, 25 bp, SARS Virus
acaaagtctttttagtccattaaaa

SEQ ID NO: 88723 - DNA, 25 bp, SARS Virus
caaagtcttttctgtccattaaaat

SEQ ID NO: 88724 - DNA, 25 bp, SARS Virus
aaagtcttttcattccattaaaatt

SEQ ID NO: 88725 - DNA, 25 bp, SARS Virus
aagtcttttcagtccattaaaattt

SEQ ID NO: 88726 - DNA, 25 bp, SARS Virus
agtcttttcagttcattaaaatttg

SEQ ID NO: 88727 - DNA, 25 bp, SARS Virus
gtcttttcagtctattaaaatttgt

SEQ ID NO: 88728 - DNA, 25 bp, SARS Virus
tcttttcagtcctttaaaatttgtg

SEQ ID NO: 88729 - DNA, 25 bp, SARS Virus
cttttcagtccattaaaatttgtga

SEQ ID NO: 88730 - DNA, 25 bp, SARS Virus
ttttcagtccattaaaatttgtgaa

SEQ ID NO: 88731 - DNA, 25 bp, SARS Virus
tttcagtccatttaaatttgtgaat

SEQ ID NO: 88732 - DNA, 25 bp, SARS Virus
ttcagtccattataatttgtgaatg

SEQ ID NO: 88733 - DNA, 25 bp, SARS Virus
tcagtccattaatatttgtgaatgc

SEQ ID NO: 88734 - DNA, 25 bp, SARS Virus
cagtccattaaattttgtgaatgct

SEQ ID NO: 88735 - DNA, 25 bp, SARS Virus
agtccattaaaatttgtgaatgctc

SEQ ID NO: 88736 - DNA, 25 bp, SARS Virus
gtccattaaaatttgtgaatgctct

SEQ ID NO: 88737 - DNA, 25 bp, SARS Virus
tccattaaaatttgtgaatgctctc

SEQ ID NO: 88738 - DNA, 25 bp, SARS Virus
ccattaaaatttttgaatgctctca

SEQ ID NO: 88739 - DNA, 25 bp, SARS Virus
cattaaaatttgtgaatgctctcaa

SEQ ID NO: 88740 - DNA, 25 bp, SARS Virus
attaaaatttgttaatgctctcaaa

SEQ ID NO: 88741 - DNA, 25 bp, SARS Virus
ttaaaatttgtgtatgctctcaaac

SEQ ID NO: 88742 - DNA, 25 bp, SARS Virus
taaaatttgtgattgctctcaaaca

SEQ ID NO: 88743 - DNA, 25 bp, SARS Virus
aaaatttgtgaatgctctcaaacac

SEQ ID NO: 88744 - DNA, 25 bp, SARS Virus
aaatttgtgaattctctcaaacaca

SEQ ID NO: 88745 - DNA, 25 bp, SARS Virus
aatttgtgaatgttctcaaacacaa

SEQ ID NO: 88746 - DNA, 25 bp, SARS Virus
atttgtgaatgctctcaaacacaaa

SEQ ID NO: 88747 - DNA, 25 bp, SARS Virus
tttgtgaatgctttcaaacacaaat

SEQ ID NO: 88748 - DNA, 25 bp, SARS Virus
ttgtgaatgctctcaaacacaaatt

SEQ ID NO: 88749 - DNA, 25 bp, SARS Virus
tgtgaatgctcttaaacacaaattt

SEQ ID NO: 88750 - DNA, 25 bp, SARS Virus
gtgaatgctctctaacacaaatttt

SEQ ID NO: 88751 - DNA, 25 bp, SARS Virus
tgaatgctctcatacacaaattttt

SEQ ID NO: 88752 - DNA, 25 bp, SARS Virus
gaatgctctcaatcacaaattttta

SEQ ID NO: 88753 - DNA, 25 bp, SARS Virus
aatgctctcaaatacaaatttttat

SEQ ID NO: 88754 - DNA, 25 bp, SARS Virus
atgctctcaaactcaaatttttatt

SEQ ID NO: 88755 - DNA, 25 bp, SARS Virus
tgctctcaaacataaatttttattt

SEQ ID NO: 88756 - DNA, 25 bp, SARS Virus
gctctcaaacactaatttttatttc

SEQ ID NO: 88757 - DNA, 25 bp, SARS Virus
ctctcaaacacatatttttatttct

SEQ ID NO: 88758 - DNA, 25 bp, SARS Virus
tctcaaacacaattttttatttcta

SEQ ID NO: 88759 - DNA, 25 bp, SARS Virus
ctcaaacacaaatttttatttctac

SEQ ID NO: 88760 - DNA, 25 bp, SARS Virus
tcaaacacaaatttttatttctacc

SEQ ID NO: 88761 - DNA, 25 bp, SARS Virus
caaacacaaatttttatttctaccc

SEQ ID NO: 88762 - DNA, 25 bp, SARS Virus
aaacacaaatttttatttctaccca

SEQ ID NO: 88763 - DNA, 25 bp, SARS Virus
aacacaaatttttatttctacccaa

SEQ ID NO: 88764 - DNA, 25 bp, SARS Virus
acacaaatttttttttctacccaaa

SEQ ID NO: 88765 - DNA, 25 bp, SARS Virus
cacaaatttttatttctacccaaag

SEQ ID NO: 88766 - DNA, 25 bp, SARS Virus
acaaatttttatttctacccaaaga

SEQ ID NO: 88767 - DNA, 25 bp, SARS Virus
caaatttttatttctacccaaagag

SEQ ID NO: 88768 - DNA, 25 bp, SARS Virus
aaatttttatttttacccaaagaga

SEQ ID NO: 88769 - DNA, 25 bp, SARS Virus
aatttttatttctacccaaagagat

SEQ ID NO: 88770 - DNA, 25 bp, SARS Virus
atttttatttcttcccaaagagata

SEQ ID NO: 88771 - DNA, 25 bp, SARS Virus
tttttatttctatccaaagagatac

SEQ ID NO: 88772 - DNA, 25 bp, SARS Virus
ttttatttctactcaaagagataca

SEQ ID NO: 88773 - DNA, 25 bp, SARS Virus
tttatttctacctaaagagatacaa

SEQ ID NO: 88774 - DNA, 25 bp, SARS Virus
ttatttctaccctaagagatacaaa

SEQ ID NO: 88775 - DNA, 25 bp, SARS Virus
tatttctacccatagagatacaaat

SEQ ID NO: 88776 - DNA, 25 bp, SARS Virus
atttctacccaatgagatacaaata

SEQ ID NO: 88777 - DNA, 25 bp, SARS Virus
tttctacccaaatagatacaaatat

SEQ ID NO: 88778 - DNA, 25 bp, SARS Virus
ttctacccaaagtgatacaaatatt

SEQ ID NO: 88779 - DNA, 25 bp, SARS Virus
tctacccaaagatatacaaatattc

SEQ ID NO: 88780 - DNA, 25 bp, SARS Virus
ctacccaaagagttacaaatattcc

SEQ ID NO: 88781 - DNA, 25 bp, SARS Virus
tacccaaagagatacaaatattccc

SEQ ID NO: 88782 - DNA, 25 bp, SARS Virus
acccaaagagattcaaatattcccg

SEQ ID NO: 88783 - DNA, 25 bp, SARS Virus
cccaaagagatataaatattcccga

SEQ ID NO: 88784 - DNA, 25 bp, SARS Virus
ccaaagagatactaatattcccgat

SEQ ID NO: 88785 - DNA, 25 bp, SARS Virus
caaagagatacatatattcccgata

SEQ ID NO: 88786 - DNA, 25 bp, SARS Virus
aaagagatacaattattcccgatag

SEQ ID NO: 88787 - DNA, 25 bp, SARS Virus
aagagatacaaatattcccgatagt

SEQ ID NO: 88788 - DNA, 25 bp, SARS Virus
agagatacaaattttcccgatagtt

SEQ ID NO: 88789 - DNA, 25 bp, SARS Virus
gagatacaaatattcccgatagttg

SEQ ID NO: 88790 - DNA, 25 bp, SARS Virus
agatacaaatattcccgatagttgg

SEQ ID NO: 88791 - DNA, 25 bp, SARS Virus
gatacaaatatttccgatagttgga

SEQ ID NO: 88792 - DNA, 25 bp, SARS Virus
atacaaatattctcgatagttggat

SEQ ID NO: 88793 - DNA, 25 bp, SARS Virus
tacaaatattcctgatagttggata

SEQ ID NO: 88794 - DNA, 25 bp, SARS Virus
acaaatattccctatagttggatat

SEQ ID NO: 88795 - DNA, 25 bp, SARS Virus
caaatattcccgttagttggatatc

SEQ ID NO: 88796 - DNA, 25 bp, SARS Virus
aaatattcccgatagttggatatct

SEQ ID NO: 88797 - DNA, 25 bp, SARS Virus
aatattcccgattgttggatatcta

SEQ ID NO: 88798 - DNA, 25 bp, SARS Virus
atattcccgatatttggatatctac

SEQ ID NO: 88799 - DNA, 25 bp, SARS Virus
tattcccgatagttggatatctaca

SEQ ID NO: 88800 - DNA, 25 bp, SARS Virus
attcccgatagttggatatctacat

SEQ ID NO: 88801 - DNA, 25 bp, SARS Virus
ttcccgatagtttgatatctacatc

SEQ ID NO: 88802 - DNA, 25 bp, SARS Virus
tcccgatagttgtatatctacatca

SEQ ID NO: 88803 - DNA, 25 bp, SARS Virus
cccgatagttggttatctacatcaa

SEQ ID NO: 88804 - DNA, 25 bp, SARS Virus
ccgatagttggatatctacatcaag

SEQ ID NO: 88805 - DNA, 25 bp, SARS Virus
cgatagttggatttctacatcaagc

SEQ ID NO: 88806 - DNA, 25 bp, SARS Virus
gatagttggatatctacatcaagca

SEQ ID NO: 88807 - DNA, 25 bp, SARS Virus
atagttggatatttacatcaagcac

SEQ ID NO: 88808 - DNA, 25 bp, SARS Virus
tagttggatatctacatcaagcact

SEQ ID NO: 88809 - DNA, 25 bp, SARS Virus
agttggatatcttcatcaagcacta

SEQ ID NO: 88810 - DNA, 25 bp, SARS Virus
gttggatatctatatcaagcactag

SEQ ID NO: 88811 - DNA, 25 bp, SARS Virus
ttggatatctacttcaagcactaga

SEQ ID NO: 88812 - DNA, 25 bp, SARS Virus
tggatatctacatcaagcactagat

SEQ ID NO: 88813 - DNA, 25 bp, SARS Virus
ggatatctacattaagcactagatg

SEQ ID NO: 88814 - DNA, 25 bp, SARS Virus
gatatctacatctagcactagatgg

SEQ ID NO: 88815 - DNA, 25 bp, SARS Virus
atatctacatcatgcactagatgga

SEQ ID NO: 88816 - DNA, 25 bp, SARS Virus
tatctacatcaatcactagatggaa

SEQ ID NO: 88817 - DNA, 25 bp, SARS Virus
atctacatcaagtactagatggaag

SEQ ID NO: 88818 - DNA, 25 bp, SARS Virus
tctacatcaagctctagatggaaga

SEQ ID NO: 88819 - DNA, 25 bp, SARS Virus
ctacatcaagcattagatggaagac

SEQ ID NO: 88820 - DNA, 25 bp, SARS Virus
tacatcaagcactagatggaagacc

SEQ ID NO: 88821 - DNA, 25 bp, SARS Virus
acatcaagcacttgatggaagacca

SEQ ID NO: 88822 - DNA, 25 bp, SARS Virus
catcaagcactatatggaagaccaa

SEQ ID NO: 88823 - DNA, 25 bp, SARS Virus
atcaagcactagttggaagaccaaa

SEQ ID NO: 88824 - DNA, 25 bp, SARS Virus
tcaagcactagatggaagaccaaaa

SEQ ID NO: 88825 - DNA, 25 bp, SARS Virus
caagcactagattgaagaccaaaat

SEQ ID NO: 88826 - DNA, 25 bp, SARS Virus
aagcactagatgtaagaccaaaatt

SEQ ID NO: 88827 - DNA, 25 bp, SARS Virus
agcactagatggtagaccaaaattg

SEQ ID NO: 88828 - DNA, 25 bp, SARS Virus
gcactagatggatgaccaaaattgt

SEQ ID NO: 88829 - DNA, 25 bp, SARS Virus
cactagatggaataccaaaattgtg

SEQ ID NO: 88830 - DNA, 25 bp, SARS Virus
actagatggaagtccaaaattgtga

SEQ ID NO: 88831 - DNA, 25 bp, SARS Virus
ctagatggaagatcaaaattgtgaa

SEQ ID NO: 88832 - DNA, 25 bp, SARS Virus
tagatggaagactaaaattgtgaaa

SEQ ID NO: 88833 - DNA, 25 bp, SARS Virus
agatggaagacctaaattgtgaaac

SEQ ID NO: 88834 - DNA, 25 bp, SARS Virus
gatggaagaccataattgtgaaact

SEQ ID NO: 88835 - DNA, 25 bp, SARS Virus
atggaagaccaatattgtgaaactt

SEQ ID NO: 88836 - DNA, 25 bp, SARS Virus
tggaagaccaaatttgtgaaacttt

SEQ ID NO: 88837 - DNA, 25 bp, SARS Virus
ggaagaccaaaattgtgaaactttg

SEQ ID NO: 88838 - DNA, 25 bp, SARS Virus
gaagaccaaaattgtgaaactttgg

SEQ ID NO: 88839 - DNA, 25 bp, SARS Virus
aagaccaaaattttgaaactttgga

SEQ ID NO: 88840 - DNA, 25 bp, SARS Virus
agaccaaaattgtgaaactttggat

SEQ ID NO: 88841 - DNA, 25 bp, SARS Virus
gaccaaaattgttaaactttggata

SEQ ID NO: 88842 - DNA, 25 bp, SARS Virus
accaaaattgtgtaactttggataa

SEQ ID NO: 88843 - DNA, 25 bp, SARS Virus
ccaaaattgtgatactttggataaa

SEQ ID NO: 88844 - DNA, 25 bp, SARS Virus
caaaattgtgaatctttggataaaa

SEQ ID NO: 88845 - DNA, 25 bp, SARS Virus
aaaattgtgaaattttggataaaaa

SEQ ID NO: 88846 - DNA, 25 bp, SARS Virus
aaattgtgaaactttggataaaaat

SEQ ID NO: 88847 - DNA, 25 bp, SARS Virus
aattgtgaaactttggataaaaatt

SEQ ID NO: 88848 - DNA, 25 bp, SARS Virus
attgtgaaactttggataaaaattc

SEQ ID NO: 88849 - DNA, 25 bp, SARS Virus
ttgtgaaacttttgataaaaattca

SEQ ID NO: 88850 - DNA, 25 bp, SARS Virus
tgtgaaactttgtataaaaattcaa

SEQ ID NO: 88851 - DNA, 25 bp, SARS Virus
gtgaaactttggttaaaaattcaac

SEQ ID NO: 88852 - DNA, 25 bp, SARS Virus
tgaaactttggataaaaattcaacg

SEQ ID NO: 88853 - DNA, 25 bp, SARS Virus
gaaactttggattaaaattcaacgg

SEQ ID NO: 88854 - DNA, 25 bp, SARS Virus
aaactttggatataaattcaacgga

SEQ ID NO: 88855 - DNA, 25 bp, SARS Virus
aactttggataataattcaacggag

SEQ ID NO: 88856 - DNA, 25 bp, SARS Virus
actttggataaatattcaacggaga

SEQ ID NO: 88857 - DNA, 25 bp, SARS Virus
ctttggataaaatttcaacggagaa

SEQ ID NO: 88858 - DNA, 25 bp, SARS Virus
tttggataaaaattcaacggagaac

SEQ ID NO: 88859 - DNA, 25 bp, SARS Virus
ttggataaaaattcaacggagaacc

SEQ ID NO: 88860 - DNA, 25 bp, SARS Virus
tggataaaaatttaacggagaacca

SEQ ID NO: 88861 - DNA, 25 bp, SARS Virus
ggataaaaattctacggagaaccat

SEQ ID NO: 88862 - DNA, 25 bp, SARS Virus
gataaaaattcatcggagaaccata

SEQ ID NO: 88863 - DNA, 25 bp, SARS Virus
ataaaaattcaatggagaaccataa

SEQ ID NO: 88864 - DNA, 25 bp, SARS Virus
taaaaattcaactgagaaccataat

SEQ ID NO: 88865 - DNA, 25 bp, SARS Virus
aaaaattcaacgtagaaccataatt

SEQ ID NO: 88866 - DNA, 25 bp, SARS Virus
aaaattcaacggtgaaccataattg

SEQ ID NO: 88867 - DNA, 25 bp, SARS Virus
aaattcaacggataaccataattgt

SEQ ID NO: 88868 - DNA, 25 bp, SARS Virus
aattcaacggagtaccataattgta

SEQ ID NO: 88869 - DNA, 25 bp, SARS Virus
attcaacggagatccataattgtaa

SEQ ID NO: 88870 - DNA, 25 bp, SARS Virus
ttcaacggagaatcataattgtaat

SEQ ID NO: 88871 - DNA, 25 bp, SARS Virus
tcaacggagaactataattgtaatg

SEQ ID NO: 88872 - DNA, 25 bp, SARS Virus
caacggagaaccttaattgtaatgt

SEQ ID NO: 88873 - DNA, 25 bp, SARS Virus
aacggagaaccataattgtaatgtt

SEQ ID NO: 88874 - DNA, 25 bp, SARS Virus
acggagaaccattattgtaatgttt

SEQ ID NO: 88875 - DNA, 25 bp, SARS Virus
cggagaaccatatttgtaatgttta

SEQ ID NO: 88876 - DNA, 25 bp, SARS Virus
ggagaaccataattgtaatgtttaa

SEQ ID NO: 88877 - DNA, 25 bp, SARS Virus
gagaaccataattgtaatgtttaaa

SEQ ID NO: 88878 - DNA, 25 bp, SARS Virus
agaaccataattttaatgtttaaaa

SEQ ID NO: 88879 - DNA, 25 bp, SARS Virus
gaaccataattgtaatgtttaaaat

SEQ ID NO: 88880 - DNA, 25 bp, SARS Virus
aaccataattgttatgtttaaaatc

SEQ ID NO: 88881 - DNA, 25 bp, SARS Virus
accataattgtattgtttaaaatct

SEQ ID NO: 88882 - DNA, 25 bp, SARS Virus
ccataattgtaatgtttaaaatctc

SEQ ID NO: 88883 - DNA, 25 bp, SARS Virus
cataattgtaatttttaaaatctcg

SEQ ID NO: 88884 - DNA, 25 bp, SARS Virus
ataattgtaatgtttaaaatctcgg

SEQ ID NO: 88885 - DNA, 25 bp, SARS Virus
taattgtaatgtttaaaatctcggt

SEQ ID NO: 88886 - DNA, 25 bp, SARS Virus
aattgtaatgtttaaaatctcggta

SEQ ID NO: 88887 - DNA, 25 bp, SARS Virus
attgtaatgttttaaatctcggtaa

SEQ ID NO: 88888 - DNA, 25 bp, SARS Virus
ttgtaatgtttataatctcggtaag

SEQ ID NO: 88889 - DNA, 25 bp, SARS Virus
tgtaatgtttaatatctcggtaaga

SEQ ID NO: 88890 - DNA, 25 bp, SARS Virus
gtaatgtttaaattctcggtaagaa

SEQ ID NO: 88891 - DNA, 25 bp, SARS Virus
taatgtttaaaatctcggtaagaat

SEQ ID NO: 88892 - DNA, 25 bp, SARS Virus
aatgtttaaaatttcggtaagaatg

SEQ ID NO: 88893 - DNA, 25 bp, SARS Virus
atgtttaaaatctcggtaagaatgt

SEQ ID NO: 88894 - DNA, 25 bp, SARS Virus
tgtttaaaatcttggtaagaatgtc

SEQ ID NO: 88895 - DNA, 25 bp, SARS Virus
gtttaaaatctctgtaagaatgtcg

SEQ ID NO: 88896 - DNA, 25 bp, SARS Virus
tttaaaatctcgttaagaatgtcgg

SEQ ID NO: 88897 - DNA, 25 bp, SARS Virus
ttaaaatctcggtaagaatgtcgga

SEQ ID NO: 88898 - DNA, 25 bp, SARS Virus
taaaatctcggttagaatgtcggaa

SEQ ID NO: 88899 - DNA, 25 bp, SARS Virus
aaaatctcggtatgaatgtcggaaa

SEQ ID NO: 88900 - DNA, 25 bp, SARS Virus
aaatctcggtaataatgtcggaaaa

SEQ ID NO: 88901 - DNA, 25 bp, SARS Virus
aatctcggtaagtatgtcggaaaag

SEQ ID NO: 88902 - DNA, 25 bp, SARS Virus
atctcggtaagattgtcggaaaagt

SEQ ID NO: 88903 - DNA, 25 bp, SARS Virus
tctcggtaagaatgtcggaaaagtg

SEQ ID NO: 88904 - DNA, 25 bp, SARS Virus
ctcggtaagaatttcggaaaagtgg

SEQ ID NO: 88905 - DNA, 25 bp, SARS Virus
tcggtaagaatgtcggaaaagtgga

SEQ ID NO: 88906 - DNA, 25 bp, SARS Virus
cggtaagaatgttggaaaagtggac

SEQ ID NO: 88907 - DNA, 25 bp, SARS Virus
ggtaagaatgtctgaaaagtggacg

SEQ ID NO: 88908 - DNA, 25 bp, SARS Virus
gtaagaatgtcgtaaaagtggacga

SEQ ID NO: 88909 - DNA, 25 bp, SARS Virus
taagaatgtcggtaaagtggacgag

SEQ ID NO: 88910 - DNA, 25 bp, SARS Virus
aagaatgtcggataagtggacgagt

SEQ ID NO: 88911 - DNA, 25 bp, SARS Virus
agaatgtcggaatagtggacgagtt

SEQ ID NO: 88912 - DNA, 25 bp, SARS Virus
gaatgtcggaaatgtggacgagttc

SEQ ID NO: 88913 - DNA, 25 bp, SARS Virus
aatgtcggaaaattggacgagttct

SEQ ID NO: 88914 - DNA, 25 bp, SARS Virus
atgtcggaaaagtggacgagttctg

SEQ ID NO: 88915 - DNA, 25 bp, SARS Virus
tgtcggaaaagttgacgagttctgt

SEQ ID NO: 88916 - DNA, 25 bp, SARS Virus
gtcggaaaagtgtacgagttctgta

SEQ ID NO: 88917 - DNA, 25 bp, SARS Virus
tcggaaaagtggtcgagttctgtaa

SEQ ID NO: 88918 - DNA, 25 bp, SARS Virus
cggaaaagtggatgagttctgtaaa

SEQ ID NO: 88919 - DNA, 25 bp, SARS Virus
ggaaaagtggactagttctgtaaac

SEQ ID NO: 88920 - DNA, 25 bp, SARS Virus
gaaaagtggacgtgttctgtaaacc

SEQ ID NO: 88921 - DNA, 25 bp, SARS Virus
aaaagtggacgatttctgtaaaccc

SEQ ID NO: 88922 - DNA, 25 bp, SARS Virus
aaagtggacgagttctgtaaacccc

SEQ ID NO: 88923 - DNA, 25 bp, SARS Virus
aagtggacgagttctgtaaaccccg

SEQ ID NO: 88924 - DNA, 25 bp, SARS Virus
agtggacgagttttgtaaaccccgt

SEQ ID NO: 88925 - DNA, 25 bp, SARS Virus
gtggacgagttctgtaaaccccgtg

SEQ ID NO: 88926 - DNA, 25 bp, SARS Virus
tggacgagttctttaaaccccgtgc

SEQ ID NO: 88927 - DNA, 25 bp, SARS Virus
ggacgagttctgtaaaccccgtgca

SEQ ID NO: 88928 - DNA, 25 bp, SARS Virus
gacgagttctgttaaccccgtgcag

SEQ ID NO: 88929 - DNA, 25 bp, SARS Virus
acgagttctgtataccccgtgcagt

SEQ ID NO: 88930 - DNA, 25 bp, SARS Virus
cgagttctgtaatccccgtgcagtc

SEQ ID NO: 88931 - DNA, 25 bp, SARS Virus
gagttctgtaaatcccgtgcagtcg

SEQ ID NO: 88932 - DNA, 25 bp, SARS Virus
agttctgtaaactccgtgcagtcga

SEQ ID NO: 88933 - DNA, 25 bp, SARS Virus
gttctgtaaacctcgtgcagtcgac

SEQ ID NO: 88934 - DNA, 25 bp, SARS Virus
ttctgtaaaccctgtgcagtcgacg

SEQ ID NO: 88935 - DNA, 25 bp, SARS Virus
tctgtaaaccccttgcagtcgacgt

SEQ ID NO: 88936 - DNA, 25 bp, SARS Virus
ctgtaaaccccgtgcagtcgacgtc

SEQ ID NO: 88937 - DNA, 25 bp, SARS Virus
tgtaaaccccgttcagtcgacgtcg

SEQ ID NO: 88938 - DNA, 25 bp, SARS Virus
gtaaaccccgtgtagtcgacgtcgg

SEQ ID NO: 88939 - DNA, 25 bp, SARS Virus
taaaccccgtgctgtcgacgtcgga

SEQ ID NO: 88940 - DNA, 25 bp, SARS Virus
aaaccccgtgcattcgacgtcggat

SEQ ID NO: 88941 - DNA, 25 bp, SARS Virus
aaccccgtgcagtcgacgtcggata

SEQ ID NO: 88942 - DNA, 25 bp, SARS Virus
accccgtgcagttgacgtcggataa

SEQ ID NO: 88943 - DNA, 25 bp, SARS Virus
ccccgtgcagtctacgtcggataaa

SEQ ID NO: 88944 - DNA, 25 bp, SARS Virus
cccgtgcagtcgtcgtcggataaaa

SEQ ID NO: 88945 - DNA, 25 bp, SARS Virus
ccgtgcagtcgaagtcggataaaac

SEQ ID NO: 88946 - DNA, 25 bp, SARS Virus
cgtgcagtcgacatcggataaaaca

SEQ ID NO: 88947 - DNA, 25 bp, SARS Virus
gtgcagtcgacgacggataaaacaa

SEQ ID NO: 88948 - DNA, 25 bp, SARS Virus
tgcagtcgacgtaggataaaacaac

SEQ ID NO: 88949 - DNA, 25 bp, SARS Virus
gcagtcgacgtcagataaaacaacc

SEQ ID NO: 88950 - DNA, 25 bp, SARS Virus
cagtcgacgtcgaataaaacaaccg

SEQ ID NO: 88951 - DNA, 25 bp, SARS Virus
agtcgacgtcggataaaacaaccga

SEQ ID NO: 88952 - DNA, 25 bp, SARS Virus
gtcgacgtcggaaaaaacaaccgat

SEQ ID NO: 88953 - DNA, 25 bp, SARS Virus
tcgacgtcggataaaacaaccgata

SEQ ID NO: 88954 - DNA, 25 bp, SARS Virus
cgacgtcggataaaacaaccgataa

SEQ ID NO: 88955 - DNA, 25 bp, SARS Virus
gacgtcggataaaacaaccgataaa

SEQ ID NO: 88956 - DNA, 25 bp, SARS Virus
acgtcggataaaacaaccgataaat

SEQ ID NO: 88957 - DNA, 25 bp, SARS Virus
cgtcggataaaaaaaccgataaatt

SEQ ID NO: 88958 - DNA, 25 bp, SARS Virus
gtcggataaaacaaccgataaattt

SEQ ID NO: 88959 - DNA, 25 bp, SARS Virus
tcggataaaacaaccgataaatttc

SEQ ID NO: 88960 - DNA, 25 bp, SARS Virus
cggataaaacaaacgataaatttcg

SEQ ID NO: 88961 - DNA, 25 bp, SARS Virus
ggataaaacaacagataaatttcgg

SEQ ID NO: 88962 - DNA, 25 bp, SARS Virus
gataaaacaaccaataaatttcggt

SEQ ID NO: 88963 - DNA, 25 bp, SARS Virus
ataaaacaaccgataaatttcggtt

SEQ ID NO: 88964 - DNA, 25 bp, SARS Virus
taaaacaaccgaaaaatttcggttg

SEQ ID NO: 88965 - DNA, 25 bp, SARS Virus
aaaacaaccgataaatttcggttga

SEQ ID NO: 88966 - DNA, 25 bp, SARS Virus
aaacaaccgataaatttcggttgat

SEQ ID NO: 88967 - DNA, 25 bp, SARS Virus
aacaaccgataaatttcggttgatg

SEQ ID NO: 88968 - DNA, 25 bp, SARS Virus
acaaccgataaaattcggttgatgt

SEQ ID NO: 88969 - DNA, 25 bp, SARS Virus
caaccgataaatatcggttgatgta

SEQ ID NO: 88970 - DNA, 25 bp, SARS Virus
aaccgataaattacggttgatgtaa

SEQ ID NO: 88971 - DNA, 25 bp, SARS Virus
accgataaatttaggttgatgtaaa

SEQ ID NO: 88972 - DNA, 25 bp, SARS Virus
ccgataaatttcagttgatgtaaat

SEQ ID NO: 88973 - DNA, 25 bp, SARS Virus
cgataaatttcgattgatgtaaata

SEQ ID NO: 88974 - DNA, 25 bp, SARS Virus
gataaatttcggatgatgtaaatac

SEQ ID NO: 88975 - DNA, 25 bp, SARS Virus
ataaatttcggtagatgtaaatacg

SEQ ID NO: 88976 - DNA, 25 bp, SARS Virus
taaatttcggttaatgtaaatacga

SEQ ID NO: 88977 - DNA, 25 bp, SARS Virus
aaatttcggttgatgtaaatacgag

SEQ ID NO: 88978 - DNA, 25 bp, SARS Virus
aatttcggttgaagtaaatacgagt

SEQ ID NO: 88979 - DNA, 25 bp, SARS Virus
atttcggttgatataaatacgagtt

SEQ ID NO: 88980 - DNA, 25 bp, SARS Virus
tttcggttgatgaaaatacgagttc

SEQ ID NO: 88981 - DNA, 25 bp, SARS Virus
ttcggttgatgtaaatacgagttca

SEQ ID NO: 88982 - DNA, 25 bp, SARS Virus
tcggttgatgtaaatacgagttcat

SEQ ID NO: 88983 - DNA, 25 bp, SARS Virus
cggttgatgtaaatacgagttcata

SEQ ID NO: 88984 - DNA, 25 bp, SARS Virus
ggttgatgtaaaaacgagttcatac

SEQ ID NO: 88985 - DNA, 25 bp, SARS Virus
gttgatgtaaatacgagttcatact

SEQ ID NO: 88986 - DNA, 25 bp, SARS Virus
ttgatgtaaataagagttcatacta

SEQ ID NO: 88987 - DNA, 25 bp, SARS Virus
tgatgtaaatacaagttcatactac

SEQ ID NO: 88988 - DNA, 25 bp, SARS Virus
gatgtaaatacgagttcatactact

SEQ ID NO: 88989 - DNA, 25 bp, SARS Virus
atgtaaatacgaattcatactactt

SEQ ID NO: 88990 - DNA, 25 bp, SARS Virus
tgtaaatacgagatcatactacttt

SEQ ID NO: 88991 - DNA, 25 bp, SARS Virus
gtaaatacgagtacatactactttt

SEQ ID NO: 88992 - DNA, 25 bp, SARS Virus
taaatacgagttaatactactttta

SEQ ID NO: 88993 - DNA, 25 bp, SARS Virus
aaatacgagttcatactacttttac

SEQ ID NO: 88994 - DNA, 25 bp, SARS Virus
aatacgagttcaaactacttttacc

SEQ ID NO: 88995 - DNA, 25 bp, SARS Virus
atacgagttcatactacttttacca

SEQ ID NO: 88996 - DNA, 25 bp, SARS Virus
tacgagttcataatacttttaccat

SEQ ID NO: 88997 - DNA, 25 bp, SARS Virus
acgagttcatacaacttttaccatg

SEQ ID NO: 88998 - DNA, 25 bp, SARS Virus
cgagttcatactacttttaccatgt

SEQ ID NO: 88999 - DNA, 25 bp, SARS Virus
gagttcatactaattttaccatgtt

SEQ ID NO: 89000 - DNA, 25 bp, SARS Virus
agttcatactacatttaccatgtta

SEQ ID NO: 89001 - DNA, 25 bp, SARS Virus
gttcatactactattaccatgttag

SEQ ID NO: 89002 - DNA, 25 bp, SARS Virus
ttcatactacttataccatgttagt

SEQ ID NO: 89003 - DNA, 25 bp, SARS Virus
tcatactactttaaccatgttagtg

SEQ ID NO: 89004 - DNA, 25 bp, SARS Virus
catactacttttaccatgttagtgt

SEQ ID NO: 89005 - DNA, 25 bp, SARS Virus
atactacttttaacatgttagtgtc

SEQ ID NO: 89006 - DNA, 25 bp, SARS Virus
tactacttttacaatgttagtgtct

SEQ ID NO: 89007 - DNA, 25 bp, SARS Virus
actacttttaccatgttagtgtcta

SEQ ID NO: 89008 - DNA, 25 bp, SARS Virus
ctacttttaccaagttagtgtctac

SEQ ID NO: 89009 - DNA, 25 bp, SARS Virus
tacttttaccatattagtgtctacg

SEQ ID NO: 89010 - DNA, 25 bp, SARS Virus
acttttaccatgatagtgtctacga

SEQ ID NO: 89011 - DNA, 25 bp, SARS Virus
cttttaccatgtaagtgtctacgac

SEQ ID NO: 89012 - DNA, 25 bp, SARS Virus
ttttaccatgttagtgtctacgaca

SEQ ID NO: 89013 - DNA, 25 bp, SARS Virus
tttaccatgttaatgtctacgacaa

SEQ ID NO: 89014 - DNA, 25 bp, SARS Virus
ttaccatgttagagtctacgacaac

SEQ ID NO: 89015 - DNA, 25 bp, SARS Virus
taccatgttagtatctacgacaact

SEQ ID NO: 89016 - DNA, 25 bp, SARS Virus
accatgttagtgactacgacaacta

SEQ ID NO: 89017 - DNA, 25 bp, SARS Virus
ccatgttagtgtatacgacaactaa

SEQ ID NO: 89018 - DNA, 25 bp, SARS Virus
catgttagtgtcaacgacaactaac

SEQ ID NO: 89019 - DNA, 25 bp, SARS Virus
atgttagtgtctacgacaactaaca

SEQ ID NO: 89020 - DNA, 25 bp, SARS Virus
tgttagtgtctaagacaactaacaa

SEQ ID NO: 89021 - DNA, 25 bp, SARS Virus
gttagtgtctacaacaactaacaag

SEQ ID NO: 89022 - DNA, 25 bp, SARS Virus
ttagtgtctacgacaactaacaaga

SEQ ID NO: 89023 - DNA, 25 bp, SARS Virus
tagtgtctacgaaaactaacaagag

SEQ ID NO: 89024 - DNA, 25 bp, SARS Virus
agtgtctacgacaactaacaagagt

SEQ ID NO: 89025 - DNA, 25 bp, SARS Virus
gtgtctacgacaactaacaagagtt

SEQ ID NO: 89026 - DNA, 25 bp, SARS Virus
tgtctacgacaaataacaagagttt

SEQ ID NO: 89027 - DNA, 25 bp, SARS Virus
gtctacgacaacaaacaagagtttt

SEQ ID NO: 89028 - DNA, 25 bp, SARS Virus
tctacgacaactaacaagagtttta

SEQ ID NO: 89029 - DNA, 25 bp, SARS Virus
ctacgacaactaacaagagttttag

SEQ ID NO: 89030 - DNA, 25 bp, SARS Virus
tacgacaactaaaaagagttttagg

SEQ ID NO: 89031 - DNA, 25 bp, SARS Virus
acgacaactaacaagagttttaggt

SEQ ID NO: 89032 - DNA, 25 bp, SARS Virus
cgacaactaacaagagttttaggtg

SEQ ID NO: 89033 - DNA, 25 bp, SARS Virus
gacaactaacaaaagttttaggtga

SEQ ID NO: 89034 - DNA, 25 bp, SARS Virus
acaactaacaagagttttaggtgaa

SEQ ID NO: 89035 - DNA, 25 bp, SARS Virus
caactaacaagaattttaggtgaac

SEQ ID NO: 89036 - DNA, 25 bp, SARS Virus
aactaacaagagatttaggtgaacg

SEQ ID NO: 89037 - DNA, 25 bp, SARS Virus
actaacaagagtattaggtgaacga

SEQ ID NO: 89038 - DNA, 25 bp, SARS Virus
ctaacaagagttataggtgaacgac

SEQ ID NO: 89039 - DNA, 25 bp, SARS Virus
taacaagagtttaaggtgaacgact

SEQ ID NO: 89040 - DNA, 25 bp, SARS Virus
aacaagagttttaggtgaacgactt

SEQ ID NO: 89041 - DNA, 25 bp, SARS Virus
acaagagttttaagtgaacgacttg

SEQ ID NO: 89042 - DNA, 25 bp, SARS Virus
caagagttttagatgaacgacttga

SEQ ID NO: 89043 - DNA, 25 bp, SARS Virus
aagagttttaggagaacgacttgag

SEQ ID NO: 89044 - DNA, 25 bp, SARS Virus
agagttttaggtaaacgacttgagt

SEQ ID NO: 89045 - DNA, 25 bp, SARS Virus
gagttttaggtgaacgacttgagtt

SEQ ID NO: 89046 - DNA, 25 bp, SARS Virus
agttttaggtgaacgacttgagttt

SEQ ID NO: 89047 - DNA, 25 bp, SARS Virus
gttttaggtgaaagacttgagttta

SEQ ID NO: 89048 - DNA, 25 bp, SARS Virus
ttttaggtgaacaacttgagtttac

SEQ ID NO: 89049 - DNA, 25 bp, SARS Virus
tttaggtgaacgacttgagtttacg

SEQ ID NO: 89050 - DNA, 25 bp, SARS Virus
ttaggtgaacgaattgagtttacga

SEQ ID NO: 89051 - DNA, 25 bp, SARS Virus
taggtgaacgacatgagtttacgag

SEQ ID NO: 89052 - DNA, 25 bp, SARS Virus
aggtgaacgactagagtttacgaga

SEQ ID NO: 89053 - DNA, 25 bp, SARS Virus
ggtgaacgacttaagtttacgagac

SEQ ID NO: 89054 - DNA, 25 bp, SARS Virus
gtgaacgacttgagtttacgagaca

SEQ ID NO: 89055 - DNA, 25 bp, SARS Virus
tgaacgacttgaatttacgagacaa

SEQ ID NO: 89056 - DNA, 25 bp, SARS Virus
gaacgacttgagattacgagacaat

SEQ ID NO: 89057 - DNA, 25 bp, SARS Virus
aacgacttgagtatacgagacaatt

SEQ ID NO: 89058 - DNA, 25 bp, SARS Virus
acgacttgagttaacgagacaattc

SEQ ID NO: 89059 - DNA, 25 bp, SARS Virus
cgacttgagtttacgagacaattct

SEQ ID NO: 89060 - DNA, 25 bp, SARS Virus
gacttgagtttaagagacaattctc

SEQ ID NO: 89061 - DNA, 25 bp, SARS Virus
acttgagtttacaagacaattctcg

SEQ ID NO: 89062 - DNA, 25 bp, SARS Virus
cttgagtttacgagacaattctcga

SEQ ID NO: 89063 - DNA, 25 bp, SARS Virus
ttgagtttacgaaacaattctcgaa

SEQ ID NO: 89064 - DNA, 25 bp, SARS Virus
tgagtttacgagacaattctcgaaa

SEQ ID NO: 89065 - DNA, 25 bp, SARS Virus
gagtttacgagaaaattctcgaaac

SEQ ID NO: 89066 - DNA, 25 bp, SARS Virus
agtttacgagacaattctcgaaact

SEQ ID NO: 89067 - DNA, 25 bp, SARS Virus
gtttacgagacaattctcgaaactc

SEQ ID NO: 89068 - DNA, 25 bp, SARS Virus
tttacgagacaaatctcgaaactct

SEQ ID NO: 89069 - DNA, 25 bp, SARS Virus
ttacgagacaatactcgaaactcta

SEQ ID NO: 89070 - DNA, 25 bp, SARS Virus
tacgagacaattatcgaaactctaa

SEQ ID NO: 89071 - DNA, 25 bp, SARS Virus
acgagacaattcacgaaactctaac

SEQ ID NO: 89072 - DNA, 25 bp, SARS Virus
cgagacaattctagaaactctaact

SEQ ID NO: 89073 - DNA, 25 bp, SARS Virus
gagacaattctcaaaactctaactg

SEQ ID NO: 89074 - DNA, 25 bp, SARS Virus
agacaattctcgaaactctaactgt

SEQ ID NO: 89075 - DNA, 25 bp, SARS Virus
gacaattctcgaaactctaactgtt

SEQ ID NO: 89076 - DNA, 25 bp, SARS Virus
acaattctcgaaactctaactgttt

SEQ ID NO: 89077 - DNA, 25 bp, SARS Virus
caattctcgaaaatctaactgtttc

SEQ ID NO: 89078 - DNA, 25 bp, SARS Virus
aattctcgaaacactaactgtttcc

SEQ ID NO: 89079 - DNA, 25 bp, SARS Virus
attctcgaaactataactgtttcct

SEQ ID NO: 89080 - DNA, 25 bp, SARS Virus
ttctcgaaactcaaactgtttcctt

SEQ ID NO: 89081 - DNA, 25 bp, SARS Virus
tctcgaaactctaactgtttcctta

SEQ ID NO: 89082 - DNA, 25 bp, SARS Virus
ctcgaaactctaactgtttccttaa

SEQ ID NO: 89083 - DNA, 25 bp, SARS Virus
tcgaaactctaaatgtttccttaaa

SEQ ID NO: 89084 - DNA, 25 bp, SARS Virus
cgaaactctaacagtttccttaaat

SEQ ID NO: 89085 - DNA, 25 bp, SARS Virus
gaaactctaactatttccttaaatg

SEQ ID NO: 89086 - DNA, 25 bp, SARS Virus
aaactctaactgattccttaaatgg

SEQ ID NO: 89087 - DNA, 25 bp, SARS Virus
aactctaactgtatccttaaatggt

SEQ ID NO: 89088 - DNA, 25 bp, SARS Virus
actctaactgttaccttaaatggtc

SEQ ID NO: 89089 - DNA, 25 bp, SARS Virus
ctctaactgtttacttaaatggtct

SEQ ID NO: 89090 - DNA, 25 bp, SARS Virus
tctaactgtttcattaaatggtctg

SEQ ID NO: 89091 - DNA, 25 bp, SARS Virus
ctaactgtttccataaatggtctgg

SEQ ID NO: 89092 - DNA, 25 bp, SARS Virus
taactgtttcctaaaatggtctgga

SEQ ID NO: 89093 - DNA, 25 bp, SARS Virus
aactgtttccttaaatggtctggag

SEQ ID NO: 89094 - DNA, 25 bp, SARS Virus
actgtttccttaaatggtctggaga

SEQ ID NO: 89095 - DNA, 25 bp, SARS Virus
ctgtttccttaaatggtctggagat

SEQ ID NO: 89096 - DNA, 25 bp, SARS Virus
tgtttccttaaaaggtctggagatt

SEQ ID NO: 89097 - DNA, 25 bp, SARS Virus
gtttccttaaatagtctggagatta

SEQ ID NO: 89098 - DNA, 25 bp, SARS Virus
tttccttaaatgatctggagattaa

SEQ ID NO: 89099 - DNA, 25 bp, SARS Virus
ttccttaaatggactggagattaaa

SEQ ID NO: 89100 - DNA, 25 bp, SARS Virus
tccttaaatggtatggagattaaag

SEQ ID NO: 89101 - DNA, 25 bp, SARS Virus
ccttaaatggtcaggagattaaagt

SEQ ID NO: 89102 - DNA, 25 bp, SARS Virus
cttaaatggtctagagattaaagtc

SEQ ID NO: 89103 - DNA, 25 bp, SARS Virus
ttaaatggtctgaagattaaagtcc

SEQ ID NO: 89104 - DNA, 25 bp, SARS Virus
taaatggtctggagattaaagtccc

SEQ ID NO: 89105 - DNA, 25 bp, SARS Virus
aaatggtctggaaattaaagtccca

SEQ ID NO: 89106 - DNA, 25 bp, SARS Virus
aatggtctggagattaaagtcccaa

SEQ ID NO: 89107 - DNA, 25 bp, SARS Virus
atggtctggagaataaagtcccaac

SEQ ID NO: 89108 - DNA, 25 bp, SARS Virus
tggtctggagataaaagtcccaaca

SEQ ID NO: 89109 - DNA, 25 bp, SARS Virus
ggtctggagattaaagtcccaacaa

SEQ ID NO: 89110 - DNA, 25 bp, SARS Virus
gtctggagattaaagtcccaacaag

SEQ ID NO: 89111 - DNA, 25 bp, SARS Virus
tctggagattaaagtcccaacaagg

SEQ ID NO: 89112 - DNA, 25 bp, SARS Virus
ctggagattaaaatcccaacaaggg

SEQ ID NO: 89113 - DNA, 25 bp, SARS Virus
tggagattaaagacccaacaaggga

SEQ ID NO: 89114 - DNA, 25 bp, SARS Virus
ggagattaaagtaccaacaagggag

SEQ ID NO: 89115 - DNA, 25 bp, SARS Virus
gagattaaagtcacaacaagggagt

SEQ ID NO: 89116 - DNA, 25 bp, SARS Virus
agattaaagtccaaacaagggagtc

SEQ ID NO: 89117 - DNA, 25 bp, SARS Virus
gattaaagtcccaacaagggagtcc

SEQ ID NO: 89118 - DNA, 25 bp, SARS Virus
attaaagtcccaacaagggagtcct

SEQ ID NO: 89119 - DNA, 25 bp, SARS Virus
ttaaagtcccaaaaagggagtcctc

SEQ ID NO: 89120 - DNA, 25 bp, SARS Virus
taaagtcccaacaagggagtcctct

SEQ ID NO: 89121 - DNA, 25 bp, SARS Virus
aaagtcccaacaagggagtcctcta

SEQ ID NO: 89122 - DNA, 25 bp, SARS Virus
aagtcccaacaaaggagtcctctac

SEQ ID NO: 89123 - DNA, 25 bp, SARS Virus
agtcccaacaagagagtcctctaca

SEQ ID NO: 89124 - DNA, 25 bp, SARS Virus
gtcccaacaaggaagtcctctacaa

SEQ ID NO: 89125 - DNA, 25 bp, SARS Virus
tcccaacaagggagtcctctacaac

SEQ ID NO: 89126 - DNA, 25 bp, SARS Virus
cccaacaagggaatcctctacaaca

SEQ ID NO: 89127 - DNA, 25 bp, SARS Virus
ccaacaagggagacctctacaacac

SEQ ID NO: 89128 - DNA, 25 bp, SARS Virus
caacaagggagtactctacaacact

SEQ ID NO: 89129 - DNA, 25 bp, SARS Virus
aacaagggagtcatctacaacactc

SEQ ID NO: 89130 - DNA, 25 bp, SARS Virus
acaagggagtccactacaacactct

SEQ ID NO: 89131 - DNA, 25 bp, SARS Virus
caagggagtcctatacaacactcta

SEQ ID NO: 89132 - DNA, 25 bp, SARS Virus
aagggagtcctcaacaacactctaa

SEQ ID NO: 89133 - DNA, 25 bp, SARS Virus
agggagtcctctacaacactctaag

SEQ ID NO: 89134 - DNA, 25 bp, SARS Virus
gggagtcctctaaaacactctaagg

SEQ ID NO: 89135 - DNA, 25 bp, SARS Virus
ggagtcctctacaacactctaaggg

SEQ ID NO: 89136 - DNA, 25 bp, SARS Virus
gagtcctctacaacactctaaggga

SEQ ID NO: 89137 - DNA, 25 bp, SARS Virus
agtcctctacaaaactctaagggat

SEQ ID NO: 89138 - DNA, 25 bp, SARS Virus
gtcctctacaacactctaagggatt

SEQ ID NO: 89139 - DNA, 25 bp, SARS Virus
tcctctacaacaatctaagggatta

SEQ ID NO: 89140 - DNA, 25 bp, SARS Virus
cctctacaacacactaagggattat

SEQ ID NO: 89141 - DNA, 25 bp, SARS Virus
ctctacaacactataagggattata

SEQ ID NO: 89142 - DNA, 25 bp, SARS Virus
tctacaacactcaaagggattataa

SEQ ID NO: 89143 - DNA, 25 bp, SARS Virus
ctacaacactctaagggattataat

SEQ ID NO: 89144 - DNA, 25 bp, SARS Virus
tacaacactctaagggattataatg

SEQ ID NO: 89145 - DNA, 25 bp, SARS Virus
acaacactctaaaggattataatgt

SEQ ID NO: 89146 - DNA, 25 bp, SARS Virus
caacactctaagagattataatgtt

SEQ ID NO: 89147 - DNA, 25 bp, SARS Virus
aacactctaaggaattataatgttt

SEQ ID NO: 89148 - DNA, 25 bp, SARS Virus
acactctaagggattataatgtttg

SEQ ID NO: 89149 - DNA, 25 bp, SARS Virus
cactctaagggaatataatgtttga

SEQ ID NO: 89150 - DNA, 25 bp, SARS Virus
actctaagggataataatgtttgaa

SEQ ID NO: 89151 - DNA, 25 bp, SARS Virus
ctctaagggattataatgtttgaac

SEQ ID NO: 89152 - DNA, 25 bp, SARS Virus
tctaagggattaaaatgtttgaaca

SEQ ID NO: 89153 - DNA, 25 bp, SARS Virus
ctaagggattataatgtttgaacac

SEQ ID NO: 89154 - DNA, 25 bp, SARS Virus
taagggattataatgtttgaacaca

SEQ ID NO: 89155 - DNA, 25 bp, SARS Virus
aagggattataaagtttgaacacag

SEQ ID NO: 89156 - DNA, 25 bp, SARS Virus
agggattataatatttgaacacagg

SEQ ID NO: 89157 - DNA, 25 bp, SARS Virus
gggattataatgattgaacacagga

SEQ ID NO: 89158 - DNA, 25 bp, SARS Virus
ggattataatgtatgaacacaggaa

SEQ ID NO: 89159 - DNA, 25 bp, SARS Virus
gattataatgttagaacacaggaaa

SEQ ID NO: 89160 - DNA, 25 bp, SARS Virus
attataatgtttaaacacaggaaaa

SEQ ID NO: 89161 - DNA, 25 bp, SARS Virus
ttataatgtttgaacacaggaaaac

SEQ ID NO: 89162 - DNA, 25 bp, SARS Virus
tataatgtttgaacacaggaaaacc

SEQ ID NO: 89163 - DNA, 25 bp, SARS Virus
ataatgtttgaaaacaggaaaacct

SEQ ID NO: 89164 - DNA, 25 bp, SARS Virus
taatgtttgaacacaggaaaacctc

SEQ ID NO: 89165 - DNA, 25 bp, SARS Virus
aatgtttgaacaaaggaaaacctct

SEQ ID NO: 89166 - DNA, 25 bp, SARS Virus
atgtttgaacacaggaaaacctctc

SEQ ID NO: 89167 - DNA, 25 bp, SARS Virus
tgtttgaacacaagaaaacctctcc

SEQ ID NO: 89168 - DNA, 25 bp, SARS Virus
gtttgaacacagaaaaacctctcca

SEQ ID NO: 89169 - DNA, 25 bp, SARS Virus
tttgaacacaggaaaacctctccaa

SEQ ID NO: 89170 - DNA, 25 bp, SARS Virus
ttgaacacaggaaaacctctccaaa

SEQ ID NO: 89171 - DNA, 25 bp, SARS Virus
tgaacacaggaaaacctctccaaaa

SEQ ID NO: 89172 - DNA, 25 bp, SARS Virus
gaacacaggaaaacctctccaaaaa

SEQ ID NO: 89173 - DNA, 25 bp, SARS Virus
aacacaggaaaaactctccaaaaat

SEQ ID NO: 89174 - DNA, 25 bp, SARS Virus
acacaggaaaacatctccaaaaatt

SEQ ID NO: 89175 - DNA, 25 bp, SARS Virus
cacaggaaaaccactccaaaaatta

SEQ ID NO: 89176 - DNA, 25 bp, SARS Virus
acaggaaaacctatccaaaaattac

SEQ ID NO: 89177 - DNA, 25 bp, SARS Virus
caggaaaacctcaccaaaaattacg

SEQ ID NO: 89178 - DNA, 25 bp, SARS Virus
aggaaaacctctacaaaaattacga

SEQ ID NO: 89179 - DNA, 25 bp, SARS Virus
ggaaaacctctcaaaaaattacgat

SEQ ID NO: 89180 - DNA, 25 bp, SARS Virus
gaaaacctctccaaaaattacgatg

SEQ ID NO: 89181 - DNA, 25 bp, SARS Virus
aaaacctctccaaaaattacgatga

SEQ ID NO: 89182 - DNA, 25 bp, SARS Virus
aaacctctccaaaaattacgatgat

SEQ ID NO: 89183 - DNA, 25 bp, SARS Virus
aacctctccaaaaattacgatgatt

SEQ ID NO: 89184 - DNA, 25 bp, SARS Virus
acctctccaaaaattacgatgattt

SEQ ID NO: 89185 - DNA, 25 bp, SARS Virus
cctctccaaaaaatacgatgattta

SEQ ID NO: 89186 - DNA, 25 bp, SARS Virus
ctctccaaaaataacgatgatttaa

SEQ ID NO: 89187 - DNA, 25 bp, SARS Virus
tctccaaaaattacgatgatttaag

SEQ ID NO: 89188 - DNA, 25 bp, SARS Virus
ctccaaaaattaagatgatttaagg

SEQ ID NO: 89189 - DNA, 25 bp, SARS Virus
tccaaaaattacaatgatttaaggg

SEQ ID NO: 89190 - DNA, 25 bp, SARS Virus
ccaaaaattacgatgatttaaggga

SEQ ID NO: 89191 - DNA, 25 bp, SARS Virus
caaaaattacgaagatttaagggaa

SEQ ID NO: 89192 - DNA, 25 bp, SARS Virus
aaaaattacgataatttaagggaag

SEQ ID NO: 89193 - DNA, 25 bp, SARS Virus
aaaattacgatgatttaagggaaga

SEQ ID NO: 89194 - DNA, 25 bp, SARS Virus
aaattacgatgaattaagggaagac

SEQ ID NO: 89195 - DNA, 25 bp, SARS Virus
aattacgatgatataagggaagaca

SEQ ID NO: 89196 - DNA, 25 bp, SARS Virus
attacgatgattaaagggaagacag

SEQ ID NO: 89197 - DNA, 25 bp, SARS Virus
ttacgatgatttaagggaagacaga

SEQ ID NO: 89198 - DNA, 25 bp, SARS Virus
tacgatgatttaagggaagacagat

SEQ ID NO: 89199 - DNA, 25 bp, SARS Virus
acgatgatttaaaggaagacagata

SEQ ID NO: 89200 - DNA, 25 bp, SARS Virus
cgatgatttaagagaagacagatac

SEQ ID NO: 89201 - DNA, 25 bp, SARS Virus
gatgatttaaggaaagacagatacg

SEQ ID NO: 89202 - DNA, 25 bp, SARS Virus
atgatttaagggaagacagatacgt

SEQ ID NO: 89203 - DNA, 25 bp, SARS Virus
tgatttaagggaagacagatacgta

SEQ ID NO: 89204 - DNA, 25 bp, SARS Virus
gatttaagggaaaacagatacgtac

SEQ ID NO: 89205 - DNA, 25 bp, SARS Virus
atttaagggaagacagatacgtacc

SEQ ID NO: 89206 - DNA, 25 bp, SARS Virus
tttaagggaagaaagatacgtaccc

SEQ ID NO: 89207 - DNA, 25 bp, SARS Virus
ttaagggaagacagatacgtaccct

SEQ ID NO: 89208 - DNA, 25 bp, SARS Virus
taagggaagacaaatacgtaccctc

SEQ ID NO: 89209 - DNA, 25 bp, SARS Virus
aagggaagacagatacgtaccctct

SEQ ID NO: 89210 - DNA, 25 bp, SARS Virus
agggaagacagaaacgtaccctctc

SEQ ID NO: 89211 - DNA, 25 bp, SARS Virus
gggaagacagatacgtaccctctct

SEQ ID NO: 89212 - DNA, 25 bp, SARS Virus
ggaagacagataagtaccctctctt

SEQ ID NO: 89213 - DNA, 25 bp, SARS Virus
gaagacagatacataccctctcttt

SEQ ID NO: 89214 - DNA, 25 bp, SARS Virus
aagacagatacgaaccctctctttt

SEQ ID NO: 89215 - DNA, 25 bp, SARS Virus
agacagatacgtaccctctcttttt

SEQ ID NO: 89216 - DNA, 25 bp, SARS Virus
gacagatacgtaacctctctttttt

SEQ ID NO: 89217 - DNA, 25 bp, SARS Virus
acagatacgtacactctcttttttt

SEQ ID NO: 89218 - DNA, 25 bp, SARS Virus
cagatacgtaccatctctttttttt

SEQ ID NO: 89219 - DNA, 25 bp, SARS Virus
agatacgtacccactctttttttta

SEQ ID NO: 89220 - DNA, 25 bp, SARS Virus
gatacgtaccctatcttttttttaa

SEQ ID NO: 89221 - DNA, 25 bp, SARS Virus
atacgtaccctcacttttttttaaa

SEQ ID NO: 89222 - DNA, 25 bp, SARS Virus
tacgtaccctctattttttttaaag

SEQ ID NO: 89223 - DNA, 25 bp, SARS Virus
acgtaccctctcatttttttaaaga

SEQ ID NO: 89224 - DNA, 25 bp, SARS Virus
cgtaccctctctattttttaaagat

SEQ ID NO: 89225 - DNA, 25 bp, SARS Virus
gtaccctctcttatttttaaagatt

SEQ ID NO: 89226 - DNA, 25 bp, SARS Virus
taccctctctttattttaaagatta

SEQ ID NO: 89227 - DNA, 25 bp, SARS Virus
accctctcttttatttaaagattaa

SEQ ID NO: 89228 - DNA, 25 bp, SARS Virus
ccctctctttttattaaagattaac

SEQ ID NO: 89229 - DNA, 25 bp, SARS Virus
cctctcttttttataaagattaaca

SEQ ID NO: 89230 - DNA, 25 bp, SARS Virus
ctctctttttttaaaagattaacac

SEQ ID NO: 89231 - DNA, 25 bp, SARS Virus
tctcttttttttaaagattaacaca

SEQ ID NO: 89232 - DNA, 25 bp, SARS Virus
ctcttttttttaaagattaacacaa

SEQ ID NO: 89233 - DNA, 25 bp, SARS Virus
tcttttttttaaagattaacacaac

SEQ ID NO: 89234 - DNA, 25 bp, SARS Virus
cttttttttaaaaattaacacaacg

SEQ ID NO: 89235 - DNA, 25 bp, SARS Virus
ttttttttaaagattaacacaacga

SEQ ID NO: 89236 - DNA, 25 bp, SARS Virus
tttttttaaagaataacacaacgac

SEQ ID NO: 89237 - DNA, 25 bp, SARS Virus
ttttttaaagataaacacaacgact

SEQ ID NO: 89238 - DNA, 25 bp, SARS Virus
tttttaaagattaacacaacgacta

SEQ ID NO: 89239 - DNA, 25 bp, SARS Virus
ttttaaagattaacacaacgactaa

SEQ ID NO: 89240 - DNA, 25 bp, SARS Virus
tttaaagattaaaacaacgactaat

SEQ ID NO: 89241 - DNA, 25 bp, SARS Virus
ttaaagattaacacaacgactaatg

SEQ ID NO: 89242 - DNA, 25 bp, SARS Virus
taaagattaacaaaacgactaatga

SEQ ID NO: 89243 - DNA, 25 bp, SARS Virus
aaagattaacacaacgactaatgag

SEQ ID NO: 89244 - DNA, 25 bp, SARS Virus
aagattaacacaacgactaatgaga

SEQ ID NO: 89245 - DNA, 25 bp, SARS Virus
agattaacacaaagactaatgagac

SEQ ID NO: 89246 - DNA, 25 bp, SARS Virus
gattaacacaacaactaatgagaca

SEQ ID NO: 89247 - DNA, 25 bp, SARS Virus
attaacacaacgactaatgagacac

SEQ ID NO: 89248 - DNA, 25 bp, SARS Virus
ttaacacaacgaataatgagacacg

SEQ ID NO: 89249 - DNA, 25 bp, SARS Virus
taacacaacgacaaatgagacacga

SEQ ID NO: 89250 - DNA, 25 bp, SARS Virus
aacacaacgactaatgagacacgag

SEQ ID NO: 89251 - DNA, 25 bp, SARS Virus
acacaacgactaatgagacacgaga

SEQ ID NO: 89252 - DNA, 25 bp, SARS Virus
cacaacgactaaagagacacgagat

SEQ ID NO: 89253 - DNA, 25 bp, SARS Virus
acaacgactaataagacacgagatg

SEQ ID NO: 89254 - DNA, 25 bp, SARS Virus
caacgactaatgagacacgagatgt

SEQ ID NO: 89255 - DNA, 25 bp, SARS Virus
aacgactaatgaaacacgagatgtt

SEQ ID NO: 89256 - DNA, 25 bp, SARS Virus
acgactaatgagacacgagatgttg

SEQ ID NO: 89257 - DNA, 25 bp, SARS Virus
cgactaatgagaaacgagatgttga

SEQ ID NO: 89258 - DNA, 25 bp, SARS Virus
gactaatgagacacgagatgttgag

SEQ ID NO: 89259 - DNA, 25 bp, SARS Virus
actaatgagacaagagatgttgagt

SEQ ID NO: 89260 - DNA, 25 bp, SARS Virus
ctaatgagacacaagatgttgagtt

SEQ ID NO: 89261 - DNA, 25 bp, SARS Virus
taatgagacacgagatgttgagttg

SEQ ID NO: 89262 - DNA, 25 bp, SARS Virus
aatgagacacgaaatgttgagttgt

SEQ ID NO: 89263 - DNA, 25 bp, SARS Virus
atgagacacgagatgttgagttgta

SEQ ID NO: 89264 - DNA, 25 bp, SARS Virus
tgagacacgagaagttgagttgtaa

SEQ ID NO: 89265 - DNA, 25 bp, SARS Virus
gagacacgagatattgagttgtaaa

SEQ ID NO: 89266 - DNA, 25 bp, SARS Virus
agacacgagatgatgagttgtaaaa

SEQ ID NO: 89267 - DNA, 25 bp, SARS Virus
gacacgagatgtagagttgtaaaaa

SEQ ID NO: 89268 - DNA, 25 bp, SARS Virus
acacgagatgttaagttgtaaaaaa

SEQ ID NO: 89269 - DNA, 25 bp, SARS Virus
cacgagatgttgagttgtaaaaaaa

SEQ ID NO: 89270 - DNA, 25 bp, SARS Virus
acgagatgttgaattgtaaaaaaag

SEQ ID NO: 89271 - DNA, 25 bp, SARS Virus
cgagatgttgagatgtaaaaaaagt

SEQ ID NO: 89272 - DNA, 25 bp, SARS Virus
gagatgttgagtagtaaaaaaagtt

SEQ ID NO: 89273 - DNA, 25 bp, SARS Virus
agatgttgagttataaaaaaagttg

SEQ ID NO: 89274 - DNA, 25 bp, SARS Virus
gatgttgagttgaaaaaaaagttgg

SEQ ID NO: 89275 - DNA, 25 bp, SARS Virus
atgttgagttgtaaaaaaagttgga

SEQ ID NO: 89276 - DNA, 25 bp, SARS Virus
tgttgagttgtaaaaaaagttggaa

SEQ ID NO: 89277 - DNA, 25 bp, SARS Virus
gttgagttgtaaaaaaagttggaaa

SEQ ID NO: 89278 - DNA, 25 bp, SARS Virus
ttgagttgtaaaaaaagttggaaat

SEQ ID NO: 89279 - DNA, 25 bp, SARS Virus
tgagttgtaaaaaaagttggaaatt

SEQ ID NO: 89280 - DNA, 25 bp, SARS Virus
gagttgtaaaaaaagttggaaattc

SEQ ID NO: 89281 - DNA, 25 bp, SARS Virus
agttgtaaaaaaagttggaaattca

SEQ ID NO: 89282 - DNA, 25 bp, SARS Virus
gttgtaaaaaaaattggaaattcac

SEQ ID NO: 89283 - DNA, 25 bp, SARS Virus
ttgtaaaaaaagatggaaattcacg

SEQ ID NO: 89284 - DNA, 25 bp, SARS Virus
tgtaaaaaaagtaggaaattcacga

SEQ ID NO: 89285 - DNA, 25 bp, SARS Virus
gtaaaaaaagttagaaattcacgat

SEQ ID NO: 89286 - DNA, 25 bp, SARS Virus
taaaaaaagttgaaaattcacgata

SEQ ID NO: 89287 - DNA, 25 bp, SARS Virus
aaaaaaagttggaaattcacgatac

SEQ ID NO: 89288 - DNA, 25 bp, SARS Virus
aaaaaagttggaaattcacgatacc

SEQ ID NO: 89289 - DNA, 25 bp, SARS Virus
aaaaagttggaaattcacgataccg

SEQ ID NO: 89290 - DNA, 25 bp, SARS Virus
aaaagttggaaaatcacgataccgc

SEQ ID NO: 89291 - DNA, 25 bp, SARS Virus
aaagttggaaatacacgataccgca

SEQ ID NO: 89292 - DNA, 25 bp, SARS Virus
aagttggaaattaacgataccgcaa

SEQ ID NO: 89293 - DNA, 25 bp, SARS Virus
agttggaaattcacgataccgcaaa

SEQ ID NO: 89294 - DNA, 25 bp, SARS Virus
gttggaaattcaagataccgcaaag

SEQ ID NO: 89295 - DNA, 25 bp, SARS Virus
ttggaaattcacaataccgcaaaga

SEQ ID NO: 89296 - DNA, 25 bp, SARS Virus
tggaaattcacgataccgcaaagac

SEQ ID NO: 89297 - DNA, 25 bp, SARS Virus
ggaaattcacgaaaccgcaaagacg

SEQ ID NO: 89298 - DNA, 25 bp, SARS Virus
gaaattcacgataccgcaaagacgg

SEQ ID NO: 89299 - DNA, 25 bp, SARS Virus
aaattcacgataacgcaaagacggt

SEQ ID NO: 89300 - DNA, 25 bp, SARS Virus
aattcacgatacagcaaagacggtg

SEQ ID NO: 89301 - DNA, 25 bp, SARS Virus
attcacgataccacaaagacggtga

SEQ ID NO: 89302 - DNA, 25 bp, SARS Virus
ttcacgataccgaaaagacggtgat

SEQ ID NO: 89303 - DNA, 25 bp, SARS Virus
tcacgataccgcaaagacggtgatt

SEQ ID NO: 89304 - DNA, 25 bp, SARS Virus
cacgataccgcaaagacggtgattc

SEQ ID NO: 89305 - DNA, 25 bp, SARS Virus
acgataccgcaaagacggtgattca

SEQ ID NO: 89306 - DNA, 25 bp, SARS Virus
cgataccgcaaaaacggtgattcaa

SEQ ID NO: 89307 - DNA, 25 bp, SARS Virus
gataccgcaaagacggtgattcaac

SEQ ID NO: 89308 - DNA, 25 bp, SARS Virus
ataccgcaaagaaggtgattcaact

SEQ ID NO: 89309 - DNA, 25 bp, SARS Virus
taccgcaaagacagtgattcaactt

SEQ ID NO: 89310 - DNA, 25 bp, SARS Virus
accgcaaagacgatgattcaactta

SEQ ID NO: 89311 - DNA, 25 bp, SARS Virus
ccgcaaagacggagattcaacttac

SEQ ID NO: 89312 - DNA, 25 bp, SARS Virus
cgcaaagacggtaattcaacttact

SEQ ID NO: 89313 - DNA, 25 bp, SARS Virus
gcaaagacggtgattcaacttacta

SEQ ID NO: 89314 - DNA, 25 bp, SARS Virus
caaagacggtgaatcaacttactag

SEQ ID NO: 89315 - DNA, 25 bp, SARS Virus
aaagacggtgatacaacttactaga

SEQ ID NO: 89316 - DNA, 25 bp, SARS Virus
aagacggtgattaaacttactagaa

SEQ ID NO: 89317 - DNA, 25 bp, SARS Virus
agacggtgattcaacttactagaaa

SEQ ID NO: 89318 - DNA, 25 bp, SARS Virus
gacggtgattcaacttactagaaac

SEQ ID NO: 89319 - DNA, 25 bp, SARS Virus
acggtgattcaaattactagaaacg

SEQ ID NO: 89320 - DNA, 25 bp, SARS Virus
cggtgattcaacatactagaaacga

SEQ ID NO: 89321 - DNA, 25 bp, SARS Virus
ggtgattcaactaactagaaacgaa

SEQ ID NO: 89322 - DNA, 25 bp, SARS Virus
gtgattcaacttactagaaacgaag

SEQ ID NO: 89323 - DNA, 25 bp, SARS Virus
tgattcaacttaatagaaacgaaga

SEQ ID NO: 89324 - DNA, 25 bp, SARS Virus
gattcaacttacaagaaacgaagag

SEQ ID NO: 89325 - DNA, 25 bp, SARS Virus
attcaacttactagaaacgaagagg

SEQ ID NO: 89326 - DNA, 25 bp, SARS Virus
ttcaacttactaaaaacgaagaggt

SEQ ID NO: 89327 - DNA, 25 bp, SARS Virus
tcaacttactagaaacgaagaggtt

SEQ ID NO: 89328 - DNA, 25 bp, SARS Virus
caacttactagaaacgaagaggtta

SEQ ID NO: 89329 - DNA, 25 bp, SARS Virus
aacttactagaaacgaagaggttac

SEQ ID NO: 89330 - DNA, 25 bp, SARS Virus
acttactagaaaagaagaggttaca

SEQ ID NO: 89331 - DNA, 25 bp, SARS Virus
cttactagaaacaaagaggttacag

SEQ ID NO: 89332 - DNA, 25 bp, SARS Virus
ttactagaaacgaagaggttacaga

SEQ ID NO: 89333 - DNA, 25 bp, SARS Virus
tactagaaacgaagaggttacagat

SEQ ID NO: 89334 - DNA, 25 bp, SARS Virus
actagaaacgaaaaggttacagata

SEQ ID NO: 89335 - DNA, 25 bp, SARS Virus
ctagaaacgaagaggttacagatac

SEQ ID NO: 89336 - DNA, 25 bp, SARS Virus
tagaaacgaagaagttacagatacg

SEQ ID NO: 89337 - DNA, 25 bp, SARS Virus
agaaacgaagagattacagatacgt

SEQ ID NO: 89338 - DNA, 25 bp, SARS Virus
gaaacgaagaggatacagatacgtc

SEQ ID NO: 89339 - DNA, 25 bp, SARS Virus
aaacgaagaggtaacagatacgtct

SEQ ID NO: 89340 - DNA, 25 bp, SARS Virus
aacgaagaggttacagatacgtcta

SEQ ID NO: 89341 - DNA, 25 bp, SARS Virus
acgaagaggttaaagatacgtctaa

SEQ ID NO: 89342 - DNA, 25 bp, SARS Virus
cgaagaggttacagatacgtctaag

SEQ ID NO: 89343 - DNA, 25 bp, SARS Virus
gaagaggttacaaatacgtctaaga

SEQ ID NO: 89344 - DNA, 25 bp, SARS Virus
aagaggttacagatacgtctaagaa

SEQ ID NO: 89345 - DNA, 25 bp, SARS Virus
agaggttacagaaacgtctaagaaa

SEQ ID NO: 89346 - DNA, 25 bp, SARS Virus
gaggttacagatacgtctaagaaaa

SEQ ID NO: 89347 - DNA, 25 bp, SARS Virus
aggttacagataagtctaagaaaac

SEQ ID NO: 89348 - DNA, 25 bp, SARS Virus
ggttacagatacatctaagaaaaca

SEQ ID NO: 89349 - DNA, 25 bp, SARS Virus
gttacagatacgactaagaaaacat

SEQ ID NO: 89350 - DNA, 25 bp, SARS Virus
ttacagatacgtataagaaaacatc

SEQ ID NO: 89351 - DNA, 25 bp, SARS Virus
tacagatacgtcaaagaaaacatca

SEQ ID NO: 89352 - DNA, 25 bp, SARS Virus
acagatacgtctaagaaaacatcag

SEQ ID NO: 89353 - DNA, 25 bp, SARS Virus
cagatacgtctaagaaaacatcagt

SEQ ID NO: 89354 - DNA, 25 bp, SARS Virus
agatacgtctaaaaaaacatcagtt

SEQ ID NO: 89355 - DNA, 25 bp, SARS Virus
gatacgtctaagaaaacatcagttc

SEQ ID NO: 89356 - DNA, 25 bp, SARS Virus
atacgtctaagaaaacatcagttcc

SEQ ID NO: 89357 - DNA, 25 bp, SARS Virus
tacgtctaagaaaacatcagttccc

SEQ ID NO: 89358 - DNA, 25 bp, SARS Virus
acgtctaagaaaacatcagttccct

SEQ ID NO: 89359 - DNA, 25 bp, SARS Virus
cgtctaagaaaaaatcagttccctc

SEQ ID NO: 89360 - DNA, 25 bp, SARS Virus
gtctaagaaaacatcagttccctct

SEQ ID NO: 89361 - DNA, 25 bp, SARS Virus
tctaagaaaacaacagttccctcta

SEQ ID NO: 89362 - DNA, 25 bp, SARS Virus
ctaagaaaacataagttccctctac

SEQ ID NO: 89363 - DNA, 25 bp, SARS Virus
taagaaaacatcagttccctctact

SEQ ID NO: 89364 - DNA, 25 bp, SARS Virus
aagaaaacatcaattccctctacta

SEQ ID NO: 89365 - DNA, 25 bp, SARS Virus
agaaaacatcagatccctctactac

SEQ ID NO: 89366 - DNA, 25 bp, SARS Virus
gaaaacatcagtaccctctactaca

SEQ ID NO: 89367 - DNA, 25 bp, SARS Virus
aaaacatcagttacctctactacat

SEQ ID NO: 89368 - DNA, 25 bp, SARS Virus
aaacatcagttcactctactacatt

SEQ ID NO: 89369 - DNA, 25 bp, SARS Virus
aacatcagttccatctactacattc

SEQ ID NO: 89370 - DNA, 25 bp, SARS Virus
acatcagttcccactactacattct

SEQ ID NO: 89371 - DNA, 25 bp, SARS Virus
catcagttccctatactacattctg

SEQ ID NO: 89372 - DNA, 25 bp, SARS Virus
atcagttccctcaactacattctgt

SEQ ID NO: 89373 - DNA, 25 bp, SARS Virus
tcagttccctctactacattctgtt

SEQ ID NO: 89374 - DNA, 25 bp, SARS Virus
cagttccctctaatacattctgttt

SEQ ID NO: 89375 - DNA, 25 bp, SARS Virus
agttccctctacaacattctgttta

SEQ ID NO: 89376 - DNA, 25 bp, SARS Virus
gttccctctactacattctgtttat

SEQ ID NO: 89377 - DNA, 25 bp, SARS Virus
ttccctctactaaattctgtttatc

SEQ ID NO: 89378 - DNA, 25 bp, SARS Virus
tccctctactacattctgtttatcg

SEQ ID NO: 89379 - DNA, 25 bp, SARS Virus
ccctctactacaatctgtttatcgc

SEQ ID NO: 89380 - DNA, 25 bp, SARS Virus
cctctactacatactgtttatcgcg

SEQ ID NO: 89381 - DNA, 25 bp, SARS Virus
ctctactacattatgtttatcgcgg

SEQ ID NO: 89382 - DNA, 25 bp, SARS Virus
tctactacattcagtttatcgcggt

SEQ ID NO: 89383 - DNA, 25 bp, SARS Virus
ctactacattctatttatcgcggtc

SEQ ID NO: 89384 - DNA, 25 bp, SARS Virus
tactacattctgattatcgcggtcc

SEQ ID NO: 89385 - DNA, 25 bp, SARS Virus
actacattctgtatatcgcggtcct

SEQ ID NO: 89386 - DNA, 25 bp, SARS Virus
ctacattctgttaatcgcggtcctg

SEQ ID NO: 89387 - DNA, 25 bp, SARS Virus
tacattctgtttatcgcggtcctgt

SEQ ID NO: 89388 - DNA, 25 bp, SARS Virus
acattctgtttaacgcggtcctgtt

SEQ ID NO: 89389 - DNA, 25 bp, SARS Virus
cattctgtttatagcggtcctgttt

SEQ ID NO: 89390 - DNA, 25 bp, SARS Virus
attctgtttatcacggtcctgtttg

SEQ ID NO: 89391 - DNA, 25 bp, SARS Virus
ttctgtttatcgaggtcctgtttga

SEQ ID NO: 89392 - DNA, 25 bp, SARS Virus
tctgtttatcgcagtcctgtttgac

SEQ ID NO: 89393 - DNA, 25 bp, SARS Virus
ctgtttatcgcgatcctgtttgacc

SEQ ID NO: 89394 - DNA, 25 bp, SARS Virus
tgtttatcgcggacctgtttgacca

SEQ ID NO: 89395 - DNA, 25 bp, SARS Virus
gtttatcgcggtactgtttgaccac

SEQ ID NO: 89396 - DNA, 25 bp, SARS Virus
tttatcgcggtcatgtttgaccaca

SEQ ID NO: 89397 - DNA, 25 bp, SARS Virus
ttatcgcggtccagtttgaccacaa

SEQ ID NO: 89398 - DNA, 25 bp, SARS Virus
tatcgcggtcctatttgaccacaat

SEQ ID NO: 89399 - DNA, 25 bp, SARS Virus
atcgcggtcctgattgaccacaata

SEQ ID NO: 89400 - DNA, 25 bp, SARS Virus
tcgcggtcctgtatgaccacaataa

SEQ ID NO: 89401 - DNA, 25 bp, SARS Virus
cgcggtcctgttagaccacaataac

SEQ ID NO: 89402 - DNA, 25 bp, SARS Virus
gcggtcctgtttaaccacaataacg

SEQ ID NO: 89403 - DNA, 25 bp, SARS Virus
cggtcctgtttgaccacaataacga

SEQ ID NO: 89404 - DNA, 25 bp, SARS Virus
ggtcctgtttgaacacaataacgac

SEQ ID NO: 89405 - DNA, 25 bp, SARS Virus
gtcctgtttgacaacaataacgact

SEQ ID NO: 89406 - DNA, 25 bp, SARS Virus
tcctgtttgaccacaataacgacta

SEQ ID NO: 89407 - DNA, 25 bp, SARS Virus
cctgtttgaccaaaataacgactaa

SEQ ID NO: 89408 - DNA, 25 bp, SARS Virus
ctgtttgaccacaataacgactaat

SEQ ID NO: 89409 - DNA, 25 bp, SARS Virus
tgtttgaccacaataacgactaata

SEQ ID NO: 89410 - DNA, 25 bp, SARS Virus
gtttgaccacaaaaacgactaatat

SEQ ID NO: 89411 - DNA, 25 bp, SARS Virus
tttgaccacaataacgactaatatt

SEQ ID NO: 89412 - DNA, 25 bp, SARS Virus
ttgaccacaataacgactaatatta

SEQ ID NO: 89413 - DNA, 25 bp, SARS Virus
tgaccacaataaagactaatattaa

SEQ ID NO: 89414 - DNA, 25 bp, SARS Virus
gaccacaataacaactaatattaat

SEQ ID NO: 89415 - DNA, 25 bp, SARS Virus
accacaataacgactaatattaata

SEQ ID NO: 89416 - DNA, 25 bp, SARS Virus
ccacaataacgaataatattaatat

SEQ ID NO: 89417 - DNA, 25 bp, SARS Virus
cacaataacgacaaatattaatatt

SEQ ID NO: 89418 - DNA, 25 bp, SARS Virus
acaataacgactaatattaatattt

SEQ ID NO: 89419 - DNA, 25 bp, SARS Virus
caataacgactaatattaatattta

SEQ ID NO: 89420 - DNA, 25 bp, SARS Virus
aataacgactaaaattaatatttaa

SEQ ID NO: 89421 - DNA, 25 bp, SARS Virus
ataacgactaatattaatatttaac

SEQ ID NO: 89422 - DNA, 25 bp, SARS Virus
taacgactaataataatatttaacg

SEQ ID NO: 89423 - DNA, 25 bp, SARS Virus
aacgactaatataaatatttaacgg

SEQ ID NO: 89424 - DNA, 25 bp, SARS Virus
acgactaatattaatatttaacggt

SEQ ID NO: 89425 - DNA, 25 bp, SARS Virus
cgactaatattaatatttaacggtc

SEQ ID NO: 89426 - DNA, 25 bp, SARS Virus
gactaatattaaaatttaacggtct

SEQ ID NO: 89427 - DNA, 25 bp, SARS Virus
actaatattaatatttaacggtcta

SEQ ID NO: 89428 - DNA, 25 bp, SARS Virus
ctaatattaataattaacggtctac

SEQ ID NO: 89429 - DNA, 25 bp, SARS Virus
taatattaatatataacggtctact

SEQ ID NO: 89430 - DNA, 25 bp, SARS Virus
aatattaatattaaacggtctacta

SEQ ID NO: 89431 - DNA, 25 bp, SARS Virus
atattaatatttaacggtctactaa

SEQ ID NO: 89432 - DNA, 25 bp, SARS Virus
tattaatatttaacggtctactaaa

SEQ ID NO: 89433 - DNA, 25 bp, SARS Virus
ccgtgcagtcgacgtcggataaaac

SEQ ID NO: 89434 - DNA, 25 bp, SARS Virus
cgtgcagtcgacctcggataaaaca

SEQ ID NO: 89435 - DNA, 25 bp, SARS Virus
gtgcagtcgacgccggataaaacaa

SEQ ID NO: 89436 - DNA, 25 bp, SARS Virus
tgcagtcgacgtcggataaaacaac

SEQ ID NO: 89437 - DNA, 25 bp, SARS Virus
gcagtcgacgtccgataaaacaacc

SEQ ID NO: 89438 - DNA, 25 bp, SARS Virus
cagtcgacgtcgcataaaacaaccg

SEQ ID NO: 89439 - DNA, 25 bp, SARS Virus
agtcgacgtcggctaaaacaaccga

SEQ ID NO: 89440 - DNA, 25 bp, SARS Virus
gtcgacgtcggacaaaacaaccgat

SEQ ID NO: 89441 - DNA, 25 bp, SARS Virus
tcgacgtcggatcaaacaaccgata

SEQ ID NO: 89442 - DNA, 25 bp, SARS Virus
cgacgtcggatacaacaaccgataa

SEQ ID NO: 89443 - DNA, 25 bp, SARS Virus
gacgtcggataacacaaccgataaa

SEQ ID NO: 89444 - DNA, 25 bp, SARS Virus
acgtcggataaaccaaccgataaat

SEQ ID NO: 89445 - DNA, 25 bp, SARS Virus
cgtcggataaaacaaccgataaatt

SEQ ID NO: 89446 - DNA, 25 bp, SARS Virus
gtcggataaaaccaccgataaattt

SEQ ID NO: 89447 - DNA, 25 bp, SARS Virus
tcggataaaacacccgataaatttc

SEQ ID NO: 89448 - DNA, 25 bp, SARS Virus
cggataaaacaaccgataaatttcg

SEQ ID NO: 89449 - DNA, 25 bp, SARS Virus
ggataaaacaaccgataaatttcgg

SEQ ID NO: 89450 - DNA, 25 bp, SARS Virus
gataaaacaacccataaatttcggt

SEQ ID NO: 89451 - DNA, 25 bp, SARS Virus
ataaaacaaccgctaaatttcggtt

SEQ ID NO: 89452 - DNA, 25 bp, SARS Virus
taaaacaaccgacaaatttcggttg

SEQ ID NO: 89453 - DNA, 25 bp, SARS Virus
aaaacaaccgatcaatttcggttga

SEQ ID NO: 89454 - DNA, 25 bp, SARS Virus
aaacaaccgatacatttcggttgat

SEQ ID NO: 89455 - DNA, 25 bp, SARS Virus
aacaaccgataactttcggttgatg

SEQ ID NO: 89456 - DNA, 25 bp, SARS Virus
acaaccgataaacttcggttgatgt

SEQ ID NO: 89457 - DNA, 25 bp, SARS Virus
caaccgataaatctcggttgatgta

SEQ ID NO: 89458 - DNA, 25 bp, SARS Virus
aaccgataaattccggttgatgtaa

SEQ ID NO: 89459 - DNA, 25 bp, SARS Virus
accgataaatttcggttgatgtaaa

SEQ ID NO: 89460 - DNA, 25 bp, SARS Virus
ccgataaatttccgttgatgtaaat

SEQ ID NO: 89461 - DNA, 25 bp, SARS Virus
cgataaatttcgcttgatgtaaata

SEQ ID NO: 89462 - DNA, 25 bp, SARS Virus
gataaatttcggctgatgtaaatac

SEQ ID NO: 89463 - DNA, 25 bp, SARS Virus
ataaatttcggtcgatgtaaatacg

SEQ ID NO: 89464 - DNA, 25 bp, SARS Virus
taaatttcggttcatgtaaatacga

SEQ ID NO: 89465 - DNA, 25 bp, SARS Virus
aaatttcggttgctgtaaatacgag

SEQ ID NO: 89466 - DNA, 25 bp, SARS Virus
aatttcggttgacgtaaatacgagt

SEQ ID NO: 89467 - DNA, 25 bp, SARS Virus
atttcggttgatctaaatacgagtt

SEQ ID NO: 89468 - DNA, 25 bp, SARS Virus
tttcggttgatgcaaatacgagttc

SEQ ID NO: 89469 - DNA, 25 bp, SARS Virus
ttcggttgatgtcaatacgagttca

SEQ ID NO: 89470 - DNA, 25 bp, SARS Virus
tcggttgatgtacatacgagttcat

SEQ ID NO: 89471 - DNA, 25 bp, SARS Virus
cggttgatgtaactacgagttcata

SEQ ID NO: 89472 - DNA, 25 bp, SARS Virus
ggttgatgtaaacacgagttcatac

SEQ ID NO: 89473 - DNA, 25 bp, SARS Virus
gttgatgtaaatccgagttcatact

SEQ ID NO: 89474 - DNA, 25 bp, SARS Virus
ttgatgtaaatacgagttcatacta

SEQ ID NO: 89475 - DNA, 25 bp, SARS Virus
tgatgtaaataccagttcatactac

SEQ ID NO: 89476 - DNA, 25 bp, SARS Virus
gatgtaaatacgcgttcatactact

SEQ ID NO: 89477 - DNA, 25 bp, SARS Virus
atgtaaatacgacttcatactactt

SEQ ID NO: 89478 - DNA, 25 bp, SARS Virus
tgtaaatacgagctcatactacttt

SEQ ID NO: 89479 - DNA, 25 bp, SARS Virus
gtaaatacgagtccatactactttt

SEQ ID NO: 89480 - DNA, 25 bp, SARS Virus
taaatacgagttcatactactttta

SEQ ID NO: 89481 - DNA, 25 bp, SARS Virus
aaatacgagttcctactacttttac

SEQ ID NO: 89482 - DNA, 25 bp, SARS Virus
aatacgagttcacactacttttacc

SEQ ID NO: 89483 - DNA, 25 bp, SARS Virus
atacgagttcatcctacttttacca

SEQ ID NO: 89484 - DNA, 25 bp, SARS Virus
tacgagttcatactacttttaccat

SEQ ID NO: 89485 - DNA, 25 bp, SARS Virus
acgagttcataccacttttaccatg

SEQ ID NO: 89486 - DNA, 25 bp, SARS Virus
cgagttcatactccttttaccatgt

SEQ ID NO: 89487 - DNA, 25 bp, SARS Virus
gagttcatactacttttaccatgtt

SEQ ID NO: 89488 - DNA, 25 bp, SARS Virus
agttcatactacctttaccatgtta

SEQ ID NO: 89489 - DNA, 25 bp, SARS Virus
gttcatactactcttaccatgttag

SEQ ID NO: 89490 - DNA, 25 bp, SARS Virus
ttcatactacttctaccatgttagt

SEQ ID NO: 89491 - DNA, 25 bp, SARS Virus
tcatactactttcaccatgttagtg

SEQ ID NO: 89492 - DNA, 25 bp, SARS Virus
catactacttttcccatgttagtgt

SEQ ID NO: 89493 - DNA, 25 bp, SARS Virus
atactacttttaccatgttagtgtc

SEQ ID NO: 89494 - DNA, 25 bp, SARS Virus
tactacttttaccatgttagtgtct

SEQ ID NO: 89495 - DNA, 25 bp, SARS Virus
actacttttaccctgttagtgtcta

SEQ ID NO: 89496 - DNA, 25 bp, SARS Virus
ctacttttaccacgttagtgtctac

SEQ ID NO: 89497 - DNA, 25 bp, SARS Virus
tacttttaccatcttagtgtctacg

SEQ ID NO: 89498 - DNA, 25 bp, SARS Virus
acttttaccatgctagtgtctacga

SEQ ID NO: 89499 - DNA, 25 bp, SARS Virus
cttttaccatgtcagtgtctacgac

SEQ ID NO: 89500 - DNA, 25 bp, SARS Virus
ttttaccatgttcgtgtctacgaca

SEQ ID NO: 89501 - DNA, 25 bp, SARS Virus
tttaccatgttactgtctacgacaa

SEQ ID NO: 89502 - DNA, 25 bp, SARS Virus
ttaccatgttagcgtctacgacaac

SEQ ID NO: 89503 - DNA, 25 bp, SARS Virus
taccatgttagtctctacgacaact

SEQ ID NO: 89504 - DNA, 25 bp, SARS Virus
accatgttagtgcctacgacaacta

SEQ ID NO: 89505 - DNA, 25 bp, SARS Virus
ccatgttagtgtctacgacaactaa

SEQ ID NO: 89506 - DNA, 25 bp, SARS Virus
catgttagtgtccacgacaactaac

SEQ ID NO: 89507 - DNA, 25 bp, SARS Virus
atgttagtgtctccgacaactaaca

SEQ ID NO: 89508 - DNA, 25 bp, SARS Virus
tgttagtgtctacgacaactaacaa

SEQ ID NO: 89509 - DNA, 25 bp, SARS Virus
gttagtgtctaccacaactaacaag

SEQ ID NO: 89510 - DNA, 25 bp, SARS Virus
ttagtgtctacgccaactaacaaga

SEQ ID NO: 89511 - DNA, 25 bp, SARS Virus
tagtgtctacgacaactaacaagag

SEQ ID NO: 89512 - DNA, 25 bp, SARS Virus
agtgtctacgaccactaacaagagt

SEQ ID NO: 89513 - DNA, 25 bp, SARS Virus
gtgtctacgacacctaacaagagtt

SEQ ID NO: 89514 - DNA, 25 bp, SARS Virus
tgtctacgacaactaacaagagttt

SEQ ID NO: 89515 - DNA, 25 bp, SARS Virus
gtctacgacaaccaacaagagtttt

SEQ ID NO: 89516 - DNA, 25 bp, SARS Virus
tctacgacaactcacaagagtttta

SEQ ID NO: 89517 - DNA, 25 bp, SARS Virus
ctacgacaactaccaagagttttag

SEQ ID NO: 89518 - DNA, 25 bp, SARS Virus
tacgacaactaacaagagttttagg

SEQ ID NO: 89519 - DNA, 25 bp, SARS Virus
acgacaactaaccagagttttaggt

SEQ ID NO: 89520 - DNA, 25 bp, SARS Virus
cgacaactaacacgagttttaggtg

SEQ ID NO: 89521 - DNA, 25 bp, SARS Virus
gacaactaacaacagttttaggtga

SEQ ID NO: 89522 - DNA, 25 bp, SARS Virus
acaactaacaagcgttttaggtgaa

SEQ ID NO: 89523 - DNA, 25 bp, SARS Virus
caactaacaagacttttaggtgaac

SEQ ID NO: 89524 - DNA, 25 bp, SARS Virus
aactaacaagagctttaggtgaacg

SEQ ID NO: 89525 - DNA, 25 bp, SARS Virus
actaacaagagtcttaggtgaacga

SEQ ID NO: 89526 - DNA, 25 bp, SARS Virus
ctaacaagagttctaggtgaacgac

SEQ ID NO: 89527 - DNA, 25 bp, SARS Virus
taacaagagtttcaggtgaacgact

SEQ ID NO: 89528 - DNA, 25 bp, SARS Virus
aacaagagttttcggtgaacgactt

SEQ ID NO: 89529 - DNA, 25 bp, SARS Virus
acaagagttttacgtgaacgacttg

SEQ ID NO: 89530 - DNA, 25 bp, SARS Virus
caagagttttagctgaacgacttga

SEQ ID NO: 89531 - DNA, 25 bp, SARS Virus
aagagttttaggcgaacgacttgag

SEQ ID NO: 89532 - DNA, 25 bp, SARS Virus
agagttttaggtcaacgacttgagt

SEQ ID NO: 89533 - DNA, 25 bp, SARS Virus
gagttttaggtgcacgacttgagtt

SEQ ID NO: 89534 - DNA, 25 bp, SARS Virus
agttttaggtgaccgacttgagttt

SEQ ID NO: 89535 - DNA, 25 bp, SARS Virus
gttttaggtgaacgacttgagttta

SEQ ID NO: 89536 - DNA, 25 bp, SARS Virus
ttttaggtgaaccacttgagtttac

SEQ ID NO: 89537 - DNA, 25 bp, SARS Virus
tttaggtgaacgccttgagtttacg

SEQ ID NO: 89538 - DNA, 25 bp, SARS Virus
ttaggtgaacgacttgagtttacga

SEQ ID NO: 89539 - DNA, 25 bp, SARS Virus
taggtgaacgacctgagtttacgag

SEQ ID NO: 89540 - DNA, 25 bp, SARS Virus
aggtgaacgactcgagtttacgaga

SEQ ID NO: 89541 - DNA, 25 bp, SARS Virus
ggtgaacgacttcagtttacgagac

SEQ ID NO: 89542 - DNA, 25 bp, SARS Virus
gtgaacgacttgcgtttacgagaca

SEQ ID NO: 89543 - DNA, 25 bp, SARS Virus
tgaacgacttgactttacgagacaa

SEQ ID NO: 89544 - DNA, 25 bp, SARS Virus
gaacgacttgagcttacgagacaat

SEQ ID NO: 89545 - DNA, 25 bp, SARS Virus
aacgacttgagtctacgagacaatt

SEQ ID NO: 89546 - DNA, 25 bp, SARS Virus
acgacttgagttcacgagacaattc

SEQ ID NO: 89547 - DNA, 25 bp, SARS Virus
cgacttgagtttccgagacaattct

SEQ ID NO: 89548 - DNA, 25 bp, SARS Virus
gacttgagtttacgagacaattctc

SEQ ID NO: 89549 - DNA, 25 bp, SARS Virus
acttgagtttaccagacaattctcg

SEQ ID NO: 89550 - DNA, 25 bp, SARS Virus
cttgagtttacgcgacaattctcga

SEQ ID NO: 89551 - DNA, 25 bp, SARS Virus
ttgagtttacgacacaattctcgaa

SEQ ID NO: 89552 - DNA, 25 bp, SARS Virus
tgagtttacgagccaattctcgaaa

SEQ ID NO: 89553 - DNA, 25 bp, SARS Virus
gagtttacgagacaattctcgaaac

SEQ ID NO: 89554 - DNA, 25 bp, SARS Virus
agtttacgagaccattctcgaaact

SEQ ID NO: 89555 - DNA, 25 bp, SARS Virus
gtttacgagacacttctcgaaactc

SEQ ID NO: 89556 - DNA, 25 bp, SARS Virus
tttacgagacaactctcgaaactct

SEQ ID NO: 89557 - DNA, 25 bp, SARS Virus
ttacgagacaatcctcgaaactcta

SEQ ID NO: 89558 - DNA, 25 bp, SARS Virus
tacgagacaattctcgaaactctaa

SEQ ID NO: 89559 - DNA, 25 bp, SARS Virus
acgagacaattcccgaaactctaac

SEQ ID NO: 89560 - DNA, 25 bp, SARS Virus
cgagacaattctcgaaactctaact

SEQ ID NO: 89561 - DNA, 25 bp, SARS Virus
gagacaattctccaaactctaactg

SEQ ID NO: 89562 - DNA, 25 bp, SARS Virus
agacaattctcgcaactctaactgt

SEQ ID NO: 89563 - DNA, 25 bp, SARS Virus
gacaattctcgacactctaactgtt

SEQ ID NO: 89564 - DNA, 25 bp, SARS Virus
acaattctcgaacctctaactgttt

SEQ ID NO: 89565 - DNA, 25 bp, SARS Virus
caattctcgaaactctaactgtttc

SEQ ID NO: 89566 - DNA, 25 bp, SARS Virus
aattctcgaaaccctaactgtttcc

SEQ ID NO: 89567 - DNA, 25 bp, SARS Virus
attctcgaaactctaactgtttcct

SEQ ID NO: 89568 - DNA, 25 bp, SARS Virus
ttctcgaaactccaactgtttcctt

SEQ ID NO: 89569 - DNA, 25 bp, SARS Virus
tctcgaaactctcactgtttcctta

SEQ ID NO: 89570 - DNA, 25 bp, SARS Virus
ctcgaaactctacctgtttccttaa

SEQ ID NO: 89571 - DNA, 25 bp, SARS Virus
tcgaaactctaactgtttccttaaa

SEQ ID NO: 89572 - DNA, 25 bp, SARS Virus
cgaaactctaaccgtttccttaaat

SEQ ID NO: 89573 - DNA, 25 bp, SARS Virus
gaaactctaactctttccttaaatg

SEQ ID NO: 89574 - DNA, 25 bp, SARS Virus
aaactctaactgcttccttaaatgg

SEQ ID NO: 89575 - DNA, 25 bp, SARS Virus
aactctaactgtctccttaaatggt

SEQ ID NO: 89576 - DNA, 25 bp, SARS Virus
actctaactgttcccttaaatggtc

SEQ ID NO: 89577 - DNA, 25 bp, SARS Virus
ctctaactgtttccttaaatggtct

SEQ ID NO: 89578 - DNA, 25 bp, SARS Virus
tctaactgtttccttaaatggtctg

SEQ ID NO: 89579 - DNA, 25 bp, SARS Virus
ctaactgtttccctaaatggtctgg

SEQ ID NO: 89580 - DNA, 25 bp, SARS Virus
taactgtttcctcaaatggtctgga

SEQ ID NO: 89581 - DNA, 25 bp, SARS Virus
aactgtttccttcaatggtctggag

SEQ ID NO: 89582 - DNA, 25 bp, SARS Virus
actgtttccttacatggtctggaga

SEQ ID NO: 89583 - DNA, 25 bp, SARS Virus
ctgtttccttaactggtctggagat

SEQ ID NO: 89584 - DNA, 25 bp, SARS Virus
tgtttccttaaacggtctggagatt

SEQ ID NO: 89585 - DNA, 25 bp, SARS Virus
gtttccttaaatcgtctggagatta

SEQ ID NO: 89586 - DNA, 25 bp, SARS Virus
tttccttaaatgctctggagattaa

SEQ ID NO: 89587 - DNA, 25 bp, SARS Virus
ttccttaaatggcctggagattaaa

SEQ ID NO: 89588 - DNA, 25 bp, SARS Virus
tccttaaatggtctggagattaaag

SEQ ID NO: 89589 - DNA, 25 bp, SARS Virus
ccttaaatggtccggagattaaagt

SEQ ID NO: 89590 - DNA, 25 bp, SARS Virus
cttaaatggtctcgagattaaagtc

SEQ ID NO: 89591 - DNA, 25 bp, SARS Virus
ttaaatggtctgcagattaaagtcc

SEQ ID NO: 89592 - DNA, 25 bp, SARS Virus
taaatggtctggcgattaaagtccc

SEQ ID NO: 89593 - DNA, 25 bp, SARS Virus
aaatggtctggacattaaagtccca

SEQ ID NO: 89594 - DNA, 25 bp, SARS Virus
aatggtctggagcttaaagtcccaa

SEQ ID NO: 89595 - DNA, 25 bp, SARS Virus
atggtctggagactaaagtcccaac

SEQ ID NO: 89596 - DNA, 25 bp, SARS Virus
tggtctggagatcaaagtcccaaca

SEQ ID NO: 89597 - DNA, 25 bp, SARS Virus
ggtctggagattcaagtcccaacaa

SEQ ID NO: 89598 - DNA, 25 bp, SARS Virus
gtctggagattacagtcccaacaag

SEQ ID NO: 89599 - DNA, 25 bp, SARS Virus
tctggagattaacgtcccaacaagg

SEQ ID NO: 89600 - DNA, 25 bp, SARS Virus
ctggagattaaactcccaacaaggg

SEQ ID NO: 89601 - DNA, 25 bp, SARS Virus
tggagattaaagccccaacaaggga

SEQ ID NO: 89602 - DNA, 25 bp, SARS Virus
ggagattaaagtcccaacaagggag

SEQ ID NO: 89603 - DNA, 25 bp, SARS Virus
gagattaaagtcccaacaagggagt

SEQ ID NO: 89604 - DNA, 25 bp, SARS Virus
agattaaagtcccaacaagggagtc

SEQ ID NO: 89605 - DNA, 25 bp, SARS Virus
gattaaagtccccacaagggagtcc

SEQ ID NO: 89606 - DNA, 25 bp, SARS Virus
attaaagtcccaccaagggagtcct

SEQ ID NO: 89607 - DNA, 25 bp, SARS Virus
ttaaagtcccaacaagggagtcctc

SEQ ID NO: 89608 - DNA, 25 bp, SARS Virus
taaagtcccaaccagggagtcctct

SEQ ID NO: 89609 - DNA, 25 bp, SARS Virus
aaagtcccaacacgggagtcctcta

SEQ ID NO: 89610 - DNA, 25 bp, SARS Virus
aagtcccaacaacggagtcctctac

SEQ ID NO: 89611 - DNA, 25 bp, SARS Virus
agtcccaacaagcgagtcctctaca

SEQ ID NO: 89612 - DNA, 25 bp, SARS Virus
gtcccaacaaggcagtcctctacaa

SEQ ID NO: 89613 - DNA, 25 bp, SARS Virus
tcccaacaagggcgtcctctacaac

SEQ ID NO: 89614 - DNA, 25 bp, SARS Virus
cccaacaagggactcctctacaaca

SEQ ID NO: 89615 - DNA, 25 bp, SARS Virus
ccaacaagggagccctctacaacac

SEQ ID NO: 89616 - DNA, 25 bp, SARS Virus
caacaagggagtcctctacaacact

SEQ ID NO: 89617 - DNA, 25 bp, SARS Virus
aacaagggagtcctctacaacactc

SEQ ID NO: 89618 - DNA, 25 bp, SARS Virus
acaagggagtcccctacaacactct

SEQ ID NO: 89619 - DNA, 25 bp, SARS Virus
caagggagtcctctacaacactcta

SEQ ID NO: 89620 - DNA, 25 bp, SARS Virus
aagggagtcctccacaacactctaa

SEQ ID NO: 89621 - DNA, 25 bp, SARS Virus
agggagtcctctccaacactctaag

SEQ ID NO: 89622 - DNA, 25 bp, SARS Virus
gggagtcctctacaacactctaagg

SEQ ID NO: 89623 - DNA, 25 bp, SARS Virus
ggagtcctctaccacactctaaggg

SEQ ID NO: 89624 - DNA, 25 bp, SARS Virus
gagtcctctacaccactctaaggga

SEQ ID NO: 89625 - DNA, 25 bp, SARS Virus
agtcctctacaacactctaagggat

SEQ ID NO: 89626 - DNA, 25 bp, SARS Virus
gtcctctacaaccctctaagggatt

SEQ ID NO: 89627 - DNA, 25 bp, SARS Virus
tcctctacaacactctaagggatta

SEQ ID NO: 89628 - DNA, 25 bp, SARS Virus
cctctacaacaccctaagggattat

SEQ ID NO: 89629 - DNA, 25 bp, SARS Virus
ctctacaacactctaagggattata

SEQ ID NO: 89630 - DNA, 25 bp, SARS Virus
tctacaacactccaagggattataa

SEQ ID NO: 89631 - DNA, 25 bp, SARS Virus
ctacaacactctcagggattataat

SEQ ID NO: 89632 - DNA, 25 bp, SARS Virus
tacaacactctacgggattataatg

SEQ ID NO: 89633 - DNA, 25 bp, SARS Virus
acaacactctaacggattataatgt

SEQ ID NO: 89634 - DNA, 25 bp, SARS Virus
caacactctaagcgattataatgtt

SEQ ID NO: 89635 - DNA, 25 bp, SARS Virus
aacactctaaggcattataatgttt

SEQ ID NO: 89636 - DNA, 25 bp, SARS Virus
acactctaagggcttataatgtttg

SEQ ID NO: 89637 - DNA, 25 bp, SARS Virus
cactctaagggactataatgtttga

SEQ ID NO: 89638 - DNA, 25 bp, SARS Virus
actctaagggatcataatgtttgaa

SEQ ID NO: 89639 - DNA, 25 bp, SARS Virus
ctctaagggattctaatgtttgaac

SEQ ID NO: 89640 - DNA, 25 bp, SARS Virus
tctaagggattacaatgtttgaaca

SEQ ID NO: 89641 - DNA, 25 bp, SARS Virus
ctaagggattatcatgtttgaacac

SEQ ID NO: 89642 - DNA, 25 bp, SARS Virus
taagggattatactgtttgaacaca

SEQ ID NO: 89643 - DNA, 25 bp, SARS Virus
aagggattataacgtttgaacacag

SEQ ID NO: 89644 - DNA, 25 bp, SARS Virus
agggattataatctttgaacacagg

SEQ ID NO: 89645 - DNA, 25 bp, SARS Virus
gggattataatgcttgaacacagga

SEQ ID NO: 89646 - DNA, 25 bp, SARS Virus
ggattataatgtctgaacacaggaa

SEQ ID NO: 89647 - DNA, 25 bp, SARS Virus
gattataatgttcgaacacaggaaa

SEQ ID NO: 89648 - DNA, 25 bp, SARS Virus
attataatgtttcaacacaggaaaa

SEQ ID NO: 89649 - DNA, 25 bp, SARS Virus
ttataatgtttgcacacaggaaaac

SEQ ID NO: 89650 - DNA, 25 bp, SARS Virus
tataatgtttgaccacaggaaaacc

SEQ ID NO: 89651 - DNA, 25 bp, SARS Virus
ataatgtttgaacacaggaaaacct

SEQ ID NO: 89652 - DNA, 25 bp, SARS Virus
taatgtttgaacccaggaaaacctc

SEQ ID NO: 89653 - DNA, 25 bp, SARS Virus
aatgtttgaacacaggaaaacctct

SEQ ID NO: 89654 - DNA, 25 bp, SARS Virus
atgtttgaacaccggaaaacctctc

SEQ ID NO: 89655 - DNA, 25 bp, SARS Virus
tgtttgaacacacgaaaacctctcc

SEQ ID NO: 89656 - DNA, 25 bp, SARS Virus
gtttgaacacagcaaaacctctcca

SEQ ID NO: 89657 - DNA, 25 bp, SARS Virus
tttgaacacaggcaaacctctccaa

SEQ ID NO: 89658 - DNA, 25 bp, SARS Virus
ttgaacacaggacaacctctccaaa

SEQ ID NO: 89659 - DNA, 25 bp, SARS Virus
tgaacacaggaacacctctccaaaa

SEQ ID NO: 89660 - DNA, 25 bp, SARS Virus
gaacacaggaaaccctctccaaaaa

SEQ ID NO: 89661 - DNA, 25 bp, SARS Virus
aacacaggaaaacctctccaaaaat

SEQ ID NO: 89662 - DNA, 25 bp, SARS Virus
acacaggaaaacctctccaaaaatt

SEQ ID NO: 89663 - DNA, 25 bp, SARS Virus
cacaggaaaacccctccaaaaatta

SEQ ID NO: 89664 - DNA, 25 bp, SARS Virus
acaggaaaacctctccaaaaattac

SEQ ID NO: 89665 - DNA, 25 bp, SARS Virus
caggaaaacctccccaaaaattacg

SEQ ID NO: 89666 - DNA, 25 bp, SARS Virus
aggaaaacctctccaaaaattacga

SEQ ID NO: 89667 - DNA, 25 bp, SARS Virus
ggaaaacctctccaaaaattacgat

SEQ ID NO: 89668 - DNA, 25 bp, SARS Virus
gaaaacctctcccaaaattacgatg

SEQ ID NO: 89669 - DNA, 25 bp, SARS Virus
aaaacctctccacaaattacgatga

SEQ ID NO: 89670 - DNA, 25 bp, SARS Virus
aaacctctccaacaattacgatgat

SEQ ID NO: 89671 - DNA, 25 bp, SARS Virus
aacctctccaaacattacgatgatt

SEQ ID NO: 89672 - DNA, 25 bp, SARS Virus
acctctccaaaacttacgatgattt

SEQ ID NO: 89673 - DNA, 25 bp, SARS Virus
cctctccaaaaactacgatgattta

SEQ ID NO: 89674 - DNA, 25 bp, SARS Virus
ctctccaaaaatcacgatgatttaa

SEQ ID NO: 89675 - DNA, 25 bp, SARS Virus
tctccaaaaattccgatgatttaag

SEQ ID NO: 89676 - DNA, 25 bp, SARS Virus
ctccaaaaattacgatgatttaagg

SEQ ID NO: 89677 - DNA, 25 bp, SARS Virus
tccaaaaattaccatgatttaaggg

SEQ ID NO: 89678 - DNA, 25 bp, SARS Virus
ccaaaaattacgctgatttaaggga

SEQ ID NO: 89679 - DNA, 25 bp, SARS Virus
caaaaattacgacgatttaagggaa

SEQ ID NO: 89680 - DNA, 25 bp, SARS Virus
aaaaattacgatcatttaagggaag

SEQ ID NO: 89681 - DNA, 25 bp, SARS Virus
aaaattacgatgctttaagggaaga

SEQ ID NO: 89682 - DNA, 25 bp, SARS Virus
aaattacgatgacttaagggaagac

SEQ ID NO: 89683 - DNA, 25 bp, SARS Virus
aattacgatgatctaagggaagaca

SEQ ID NO: 89684 - DNA, 25 bp, SARS Virus
attacgatgattcaagggaagacag

SEQ ID NO: 89685 - DNA, 25 bp, SARS Virus
ttacgatgatttcagggaagacaga

SEQ ID NO: 89686 - DNA, 25 bp, SARS Virus
tacgatgatttacgggaagacagat

SEQ ID NO: 89687 - DNA, 25 bp, SARS Virus
acgatgatttaacggaagacagata

SEQ ID NO: 89688 - DNA, 25 bp, SARS Virus
cgatgatttaagcgaagacagatac

SEQ ID NO: 89689 - DNA, 25 bp, SARS Virus
gatgatttaaggcaagacagatacg

SEQ ID NO: 89690 - DNA, 25 bp, SARS Virus
atgatttaagggcagacagatacgt

SEQ ID NO: 89691 - DNA, 25 bp, SARS Virus
tgatttaagggacgacagatacgta

SEQ ID NO: 89692 - DNA, 25 bp, SARS Virus
gatttaagggaacacagatacgtac

SEQ ID NO: 89693 - DNA, 25 bp, SARS Virus
atttaagggaagccagatacgtacc

SEQ ID NO: 89694 - DNA, 25 bp, SARS Virus
tttaagggaagacagatacgtaccc

SEQ ID NO: 89695 - DNA, 25 bp, SARS Virus
ttaagggaagaccgatacgtaccct

SEQ ID NO: 89696 - DNA, 25 bp, SARS Virus
taagggaagacacatacgtaccctc

SEQ ID NO: 89697 - DNA, 25 bp, SARS Virus
aagggaagacagctacgtaccctct

SEQ ID NO: 89698 - DNA, 25 bp, SARS Virus
agggaagacagacacgtaccctctc

SEQ ID NO: 89699 - DNA, 25 bp, SARS Virus
gggaagacagatccgtaccctctct

SEQ ID NO: 89700 - DNA, 25 bp, SARS Virus
ggaagacagatacgtaccctctctt

SEQ ID NO: 89701 - DNA, 25 bp, SARS Virus
gaagacagatacctaccctctcttt

SEQ ID NO: 89702 - DNA, 25 bp, SARS Virus
aagacagatacgcaccctctctttt

SEQ ID NO: 89703 - DNA, 25 bp, SARS Virus
agacagatacgtcccctctcttttt

SEQ ID NO: 89704 - DNA, 25 bp, SARS Virus
gacagatacgtaccctctctttttt

SEQ ID NO: 89705 - DNA, 25 bp, SARS Virus
acagatacgtaccctctcttttttt

SEQ ID NO: 89706 - DNA, 25 bp, SARS Virus
cagatacgtaccctctctttttttt

SEQ ID NO: 89707 - DNA, 25 bp, SARS Virus
agatacgtaccccctctttttttta

SEQ ID NO: 89708 - DNA, 25 bp, SARS Virus
gatacgtaccctctcttttttttaa

SEQ ID NO: 89709 - DNA, 25 bp, SARS Virus
atacgtaccctcccttttttttaaa

SEQ ID NO: 89710 - DNA, 25 bp, SARS Virus
tacgtaccctctcttttttttaaag

SEQ ID NO: 89711 - DNA, 25 bp, SARS Virus
acgtaccctctcctttttttaaaga

SEQ ID NO: 89712 - DNA, 25 bp, SARS Virus
cgtaccctctctcttttttaaagat

SEQ ID NO: 89713 - DNA, 25 bp, SARS Virus
gtaccctctcttctttttaaagatt

SEQ ID NO: 89714 - DNA, 25 bp, SARS Virus
taccctctctttcttttaaagatta

SEQ ID NO: 89715 - DNA, 25 bp, SARS Virus
accctctcttttctttaaagattaa

SEQ ID NO: 89716 - DNA, 25 bp, SARS Virus
ccctctctttttcttaaagattaac

SEQ ID NO: 89717 - DNA, 25 bp, SARS Virus
cctctcttttttctaaagattaaca

SEQ ID NO: 89718 - DNA, 25 bp, SARS Virus
ctctctttttttcaaagattaacac

SEQ ID NO: 89719 - DNA, 25 bp, SARS Virus
tctcttttttttcaagattaacaca

SEQ ID NO: 89720 - DNA, 25 bp, SARS Virus
ctcttttttttacagattaacacaa

SEQ ID NO: 89721 - DNA, 25 bp, SARS Virus
tcttttttttaacgattaacacaac

SEQ ID NO: 89722 - DNA, 25 bp, SARS Virus
cttttttttaaacattaacacaacg

SEQ ID NO: 89723 - DNA, 25 bp, SARS Virus
ttttttttaaagcttaacacaacga

SEQ ID NO: 89724 - DNA, 25 bp, SARS Virus
tttttttaaagactaacacaacgac

SEQ ID NO: 89725 - DNA, 25 bp, SARS Virus
ttttttaaagatcaacacaacgact

SEQ ID NO: 89726 - DNA, 25 bp, SARS Virus
tttttaaagattcacacaacgacta

SEQ ID NO: 89727 - DNA, 25 bp, SARS Virus
ttttaaagattaccacaacgactaa

SEQ ID NO: 89728 - DNA, 25 bp, SARS Virus
tttaaagattaacacaacgactaat

SEQ ID NO: 89729 - DNA, 25 bp, SARS Virus
ttaaagattaacccaacgactaatg

SEQ ID NO: 89730 - DNA, 25 bp, SARS Virus
taaagattaacacaacgactaatga

SEQ ID NO: 89731 - DNA, 25 bp, SARS Virus
aaagattaacaccacgactaatgag

SEQ ID NO: 89732 - DNA, 25 bp, SARS Virus
aagattaacacaccgactaatgaga

SEQ ID NO: 89733 - DNA, 25 bp, SARS Virus
agattaacacaacgactaatgagac

SEQ ID NO: 89734 - DNA, 25 bp, SARS Virus
gattaacacaaccactaatgagaca

SEQ ID NO: 89735 - DNA, 25 bp, SARS Virus
attaacacaacgcctaatgagacac

SEQ ID NO: 89736 - DNA, 25 bp, SARS Virus
ttaacacaacgactaatgagacacg

SEQ ID NO: 89737 - DNA, 25 bp, SARS Virus
taacacaacgaccaatgagacacga

SEQ ID NO: 89738 - DNA, 25 bp, SARS Virus
aacacaacgactcatgagacacgag

SEQ ID NO: 89739 - DNA, 25 bp, SARS Virus
acacaacgactactgagacacgaga

SEQ ID NO: 89740 - DNA, 25 bp, SARS Virus
cacaacgactaacgagacacgagat

SEQ ID NO: 89741 - DNA, 25 bp, SARS Virus
acaacgactaatcagacacgagatg

SEQ ID NO: 89742 - DNA, 25 bp, SARS Virus
caacgactaatgcgacacgagatgt

SEQ ID NO: 89743 - DNA, 25 bp, SARS Virus
aacgactaatgacacacgagatgtt

SEQ ID NO: 89744 - DNA, 25 bp, SARS Virus
acgactaatgagccacgagatgttg

SEQ ID NO: 89745 - DNA, 25 bp, SARS Virus
cgactaatgagacacgagatgttga

SEQ ID NO: 89746 - DNA, 25 bp, SARS Virus
gactaatgagacccgagatgttgag

SEQ ID NO: 89747 - DNA, 25 bp, SARS Virus
actaatgagacacgagatgttgagt

SEQ ID NO: 89748 - DNA, 25 bp, SARS Virus
ctaatgagacaccagatgttgagtt

SEQ ID NO: 89749 - DNA, 25 bp, SARS Virus
taatgagacacgcgatgttgagttg

SEQ ID NO: 89750 - DNA, 25 bp, SARS Virus
aatgagacacgacatgttgagttgt

SEQ ID NO: 89751 - DNA, 25 bp, SARS Virus
atgagacacgagctgttgagttgta

SEQ ID NO: 89752 - DNA, 25 bp, SARS Virus
tgagacacgagacgttgagttgtaa

SEQ ID NO: 89753 - DNA, 25 bp, SARS Virus
gagacacgagatcttgagttgtaaa

SEQ ID NO: 89754 - DNA, 25 bp, SARS Virus
agacacgagatgctgagttgtaaaa

SEQ ID NO: 89755 - DNA, 25 bp, SARS Virus
gacacgagatgtcgagttgtaaaaa

SEQ ID NO: 89756 - DNA, 25 bp, SARS Virus
acacgagatgttcagttgtaaaaaa

SEQ ID NO: 89757 - DNA, 25 bp, SARS Virus
cacgagatgttgcgttgtaaaaaaa

SEQ ID NO: 89758 - DNA, 25 bp, SARS Virus
acgagatgttgacttgtaaaaaaag

SEQ ID NO: 89759 - DNA, 25 bp, SARS Virus
cgagatgttgagctgtaaaaaaagt

SEQ ID NO: 89760 - DNA, 25 bp, SARS Virus
gagatgttgagtcgtaaaaaaagtt

SEQ ID NO: 89761 - DNA, 25 bp, SARS Virus
agatgttgagttctaaaaaaagttg

SEQ ID NO: 89762 - DNA, 25 bp, SARS Virus
gatgttgagttgcaaaaaaagttgg

SEQ ID NO: 89763 - DNA, 25 bp, SARS Virus
atgttgagttgtcaaaaaagttgga

SEQ ID NO: 89764 - DNA, 25 bp, SARS Virus
tgttgagttgtacaaaaagttggaa

SEQ ID NO: 89765 - DNA, 25 bp, SARS Virus
gttgagttgtaacaaaagttggaaa

SEQ ID NO: 89766 - DNA, 25 bp, SARS Virus
ttgagttgtaaacaaagttggaaat

SEQ ID NO: 89767 - DNA, 25 bp, SARS Virus
tgagttgtaaaacaagttggaaatt

SEQ ID NO: 89768 - DNA, 25 bp, SARS Virus
gagttgtaaaaacagttggaaattc

SEQ ID NO: 89769 - DNA, 25 bp, SARS Virus
agttgtaaaaaacgttggaaattca

SEQ ID NO: 89770 - DNA, 25 bp, SARS Virus
gttgtaaaaaaacttggaaattcac

SEQ ID NO: 89771 - DNA, 25 bp, SARS Virus
ttgtaaaaaaagctggaaattcacg

SEQ ID NO: 89772 - DNA, 25 bp, SARS Virus
tgtaaaaaaagtcggaaattcacga

SEQ ID NO: 89773 - DNA, 25 bp, SARS Virus
gtaaaaaaagttcgaaattcacgat

SEQ ID NO: 89774 - DNA, 25 bp, SARS Virus
taaaaaaagttgcaaattcacgata

SEQ ID NO: 89775 - DNA, 25 bp, SARS Virus
aaaaaaagttggcaattcacgatac

SEQ ID NO: 89776 - DNA, 25 bp, SARS Virus
aaaaaagttggacattcacgatacc

SEQ ID NO: 89777 - DNA, 25 bp, SARS Virus
aaaaagttggaacttcacgataccg

SEQ ID NO: 89778 - DNA, 25 bp, SARS Virus
aaaagttggaaactcacgataccgc

SEQ ID NO: 89779 - DNA, 25 bp, SARS Virus
aaagttggaaatccacgataccgca

SEQ ID NO: 89780 - DNA, 25 bp, SARS Virus
aagttggaaattcacgataccgcaa

SEQ ID NO: 89781 - DNA, 25 bp, SARS Virus
agttggaaattcccgataccgcaaa

SEQ ID NO: 89782 - DNA, 25 bp, SARS Virus
gttggaaattcacgataccgcaaag

SEQ ID NO: 89783 - DNA, 25 bp, SARS Virus
ttggaaattcaccataccgcaaaga

SEQ ID NO: 89784 - DNA, 25 bp, SARS Virus
tggaaattcacgctaccgcaaagac

SEQ ID NO: 89785 - DNA, 25 bp, SARS Virus
ggaaattcacgacaccgcaaagacg

SEQ ID NO: 89786 - DNA, 25 bp, SARS Virus
gaaattcacgatcccgcaaagacgg

SEQ ID NO: 89787 - DNA, 25 bp, SARS Virus
aaattcacgataccgcaaagacggt

SEQ ID NO: 89788 - DNA, 25 bp, SARS Virus
aattcacgataccgcaaagacggtg

SEQ ID NO: 89789 - DNA, 25 bp, SARS Virus
attcacgataccccaaagacggtga

SEQ ID NO: 89790 - DNA, 25 bp, SARS Virus
ttcacgataccgcaaagacggtgat

SEQ ID NO: 89791 - DNA, 25 bp, SARS Virus
tcacgataccgccaagacggtgatt

SEQ ID NO: 89792 - DNA, 25 bp, SARS Virus
cacgataccgcacagacggtgattc

SEQ ID NO: 89793 - DNA, 25 bp, SARS Virus
acgataccgcaacgacggtgattca

SEQ ID NO: 89794 - DNA, 25 bp, SARS Virus
cgataccgcaaacacggtgattcaa

SEQ ID NO: 89795 - DNA, 25 bp, SARS Virus
gataccgcaaagccggtgattcaac

SEQ ID NO: 89796 - DNA, 25 bp, SARS Virus
ataccgcaaagacggtgattcaact

SEQ ID NO: 89797 - DNA, 25 bp, SARS Virus
taccgcaaagaccgtgattcaactt

SEQ ID NO: 89798 - DNA, 25 bp, SARS Virus
accgcaaagacgctgattcaactta

SEQ ID NO: 89799 - DNA, 25 bp, SARS Virus
ccgcaaagacggcgattcaacttac

SEQ ID NO: 89800 - DNA, 25 bp, SARS Virus
cgcaaagacggtcattcaacttact

SEQ ID NO: 89801 - DNA, 25 bp, SARS Virus
gcaaagacggtgcttcaacttacta

SEQ ID NO: 89802 - DNA, 25 bp, SARS Virus
caaagacggtgactcaacttactag

SEQ ID NO: 89803 - DNA, 25 bp, SARS Virus
aaagacggtgatccaacttactaga

SEQ ID NO: 89804 - DNA, 25 bp, SARS Virus
aagacggtgattcaacttactagaa

SEQ ID NO: 89805 - DNA, 25 bp, SARS Virus
agacggtgattccacttactagaaa

SEQ ID NO: 89806 - DNA, 25 bp, SARS Virus
gacggtgattcaccttactagaaac

SEQ ID NO: 89807 - DNA, 25 bp, SARS Virus
acggtgattcaacttactagaaacg

SEQ ID NO: 89808 - DNA, 25 bp, SARS Virus
cggtgattcaacctactagaaacga

SEQ ID NO: 89809 - DNA, 25 bp, SARS Virus
ggtgattcaactcactagaaacgaa

SEQ ID NO: 89810 - DNA, 25 bp, SARS Virus
gtgattcaacttcctagaaacgaag

SEQ ID NO: 89811 - DNA, 25 bp, SARS Virus
tgattcaacttactagaaacgaaga

SEQ ID NO: 89812 - DNA, 25 bp, SARS Virus
gattcaacttaccagaaacgaagag

SEQ ID NO: 89813 - DNA, 25 bp, SARS Virus
attcaacttactcgaaacgaagagg

SEQ ID NO: 89814 - DNA, 25 bp, SARS Virus
ttcaacttactacaaacgaagaggt

SEQ ID NO: 89815 - DNA, 25 bp, SARS Virus
tcaacttactagcaacgaagaggtt

SEQ ID NO: 89816 - DNA, 25 bp, SARS Virus
caacttactagacacgaagaggtta

SEQ ID NO: 89817 - DNA, 25 bp, SARS Virus
aacttactagaaccgaagaggttac

SEQ ID NO: 89818 - DNA, 25 bp, SARS Virus
acttactagaaacgaagaggttaca

SEQ ID NO: 89819 - DNA, 25 bp, SARS Virus
cttactagaaaccaagaggttacag

SEQ ID NO: 89820 - DNA, 25 bp, SARS Virus
ttactagaaacgcagaggttacaga

SEQ ID NO: 89821 - DNA, 25 bp, SARS Virus
tactagaaacgacgaggttacagat

SEQ ID NO: 89822 - DNA, 25 bp, SARS Virus
actagaaacgaacaggttacagata

SEQ ID NO: 89823 - DNA, 25 bp, SARS Virus
ctagaaacgaagcggttacagatac

SEQ ID NO: 89824 - DNA, 25 bp, SARS Virus
tagaaacgaagacgttacagatacg

SEQ ID NO: 89825 - DNA, 25 bp, SARS Virus
agaaacgaagagcttacagatacgt

SEQ ID NO: 89826 - DNA, 25 bp, SARS Virus
gaaacgaagaggctacagatacgtc

SEQ ID NO: 89827 - DNA, 25 bp, SARS Virus
aaacgaagaggtcacagatacgtct

SEQ ID NO: 89828 - DNA, 25 bp, SARS Virus
aacgaagaggttccagatacgtcta

SEQ ID NO: 89829 - DNA, 25 bp, SARS Virus
acgaagaggttacagatacgtctaa

SEQ ID NO: 89830 - DNA, 25 bp, SARS Virus
cgaagaggttaccgatacgtctaag

SEQ ID NO: 89831 - DNA, 25 bp, SARS Virus
gaagaggttacacatacgtctaaga

SEQ ID NO: 89832 - DNA, 25 bp, SARS Virus
aagaggttacagctacgtctaagaa

SEQ ID NO: 89833 - DNA, 25 bp, SARS Virus
agaggttacagacacgtctaagaaa

SEQ ID NO: 89834 - DNA, 25 bp, SARS Virus
gaggttacagatccgtctaagaaaa

SEQ ID NO: 89835 - DNA, 25 bp, SARS Virus
aggttacagatacgtctaagaaaac

SEQ ID NO: 89836 - DNA, 25 bp, SARS Virus
ggttacagatacctctaagaaaaca

SEQ ID NO: 89837 - DNA, 25 bp, SARS Virus
gttacagatacgcctaagaaaacat

SEQ ID NO: 89838 - DNA, 25 bp, SARS Virus
ttacagatacgtctaagaaaacatc

SEQ ID NO: 89839 - DNA, 25 bp, SARS Virus
tacagatacgtccaagaaaacatca

SEQ ID NO: 89840 - DNA, 25 bp, SARS Virus
acagatacgtctcagaaaacatcag

SEQ ID NO: 89841 - DNA, 25 bp, SARS Virus
cagatacgtctacgaaaacatcagt

SEQ ID NO: 89842 - DNA, 25 bp, SARS Virus
agatacgtctaacaaaacatcagtt

SEQ ID NO: 89843 - DNA, 25 bp, SARS Virus
gatacgtctaagcaaacatcagttc

SEQ ID NO: 89844 - DNA, 25 bp, SARS Virus
atacgtctaagacaacatcagttcc

SEQ ID NO: 89845 - DNA, 25 bp, SARS Virus
tacgtctaagaacacatcagttccc

SEQ ID NO: 89846 - DNA, 25 bp, SARS Virus
acgtctaagaaaccatcagttccct

SEQ ID NO: 89847 - DNA, 25 bp, SARS Virus
cgtctaagaaaacatcagttccctc

SEQ ID NO: 89848 - DNA, 25 bp, SARS Virus
gtctaagaaaacctcagttccctct

SEQ ID NO: 89849 - DNA, 25 bp, SARS Virus
tctaagaaaacaccagttccctcta

SEQ ID NO: 89850 - DNA, 25 bp, SARS Virus
ctaagaaaacatcagttccctctac

SEQ ID NO: 89851 - DNA, 25 bp, SARS Virus
taagaaaacatccgttccctctact

SEQ ID NO: 89852 - DNA, 25 bp, SARS Virus
aagaaaacatcacttccctctacta

SEQ ID NO: 89853 - DNA, 25 bp, SARS Virus
agaaaacatcagctccctctactac

SEQ ID NO: 89854 - DNA, 25 bp, SARS Virus
gaaaacatcagtcccctctactaca

SEQ ID NO: 89855 - DNA, 25 bp, SARS Virus
aaaacatcagttccctctactacat

SEQ ID NO: 89856 - DNA, 25 bp, SARS Virus
aaacatcagttccctctactacatt

SEQ ID NO: 89857 - DNA, 25 bp, SARS Virus
aacatcagttccctctactacattc

SEQ ID NO: 89858 - DNA, 25 bp, SARS Virus
acatcagttccccctactacattct

SEQ ID NO: 89859 - DNA, 25 bp, SARS Virus
catcagttccctctactacattctg

SEQ ID NO: 89860 - DNA, 25 bp, SARS Virus
atcagttccctccactacattctgt

SEQ ID NO: 89861 - DNA, 25 bp, SARS Virus
tcagttccctctcctacattctgtt

SEQ ID NO: 89862 - DNA, 25 bp, SARS Virus
cagttccctctactacattctgttt

SEQ ID NO: 89863 - DNA, 25 bp, SARS Virus
agttccctctaccacattctgttta

SEQ ID NO: 89864 - DNA, 25 bp, SARS Virus
gttccctctactccattctgtttat

SEQ ID NO: 89865 - DNA, 25 bp, SARS Virus
ttccctctactacattctgtttatc

SEQ ID NO: 89866 - DNA, 25 bp, SARS Virus
tccctctactaccttctgtttatcg

SEQ ID NO: 89867 - DNA, 25 bp, SARS Virus
ccctctactacactctgtttatcgc

SEQ ID NO: 89868 - DNA, 25 bp, SARS Virus
cctctactacatcctgtttatcgcg

SEQ ID NO: 89869 - DNA, 25 bp, SARS Virus
ctctactacattctgtttatcgcgg

SEQ ID NO: 89870 - DNA, 25 bp, SARS Virus
tctactacattccgtttatcgcggt

SEQ ID NO: 89871 - DNA, 25 bp, SARS Virus
ctactacattctctttatcgcggtc

SEQ ID NO: 89872 - DNA, 25 bp, SARS Virus
tactacattctgcttatcgcggtcc

SEQ ID NO: 89873 - DNA, 25 bp, SARS Virus
actacattctgtctatcgcggtcct

SEQ ID NO: 89874 - DNA, 25 bp, SARS Virus
ctacattctgttcatcgcggtcctg

SEQ ID NO: 89875 - DNA, 25 bp, SARS Virus
tacattctgtttctcgcggtcctgt

SEQ ID NO: 89876 - DNA, 25 bp, SARS Virus
acattctgtttaccgcggtcctgtt

SEQ ID NO: 89877 - DNA, 25 bp, SARS Virus
cattctgtttatcgcggtcctgttt

SEQ ID NO: 89878 - DNA, 25 bp, SARS Virus
attctgtttatcccggtcctgtttg

SEQ ID NO: 89879 - DNA, 25 bp, SARS Virus
ttctgtttatcgcggtcctgtttga

SEQ ID NO: 89880 - DNA, 25 bp, SARS Virus
tctgtttatcgccgtcctgtttgac

SEQ ID NO: 89881 - DNA, 25 bp, SARS Virus
ctgtttatcgcgctcctgtttgacc

SEQ ID NO: 89882 - DNA, 25 bp, SARS Virus
tgtttatcgcggccctgtttgacca

SEQ ID NO: 89883 - DNA, 25 bp, SARS Virus
gtttatcgcggtcctgtttgaccac

SEQ ID NO: 89884 - DNA, 25 bp, SARS Virus
tttatcgcggtcctgtttgaccaca

SEQ ID NO: 89885 - DNA, 25 bp, SARS Virus
ttatcgcggtcccgtttgaccacaa

SEQ ID NO: 89886 - DNA, 25 bp, SARS Virus
tatcgcggtcctctttgaccacaat

SEQ ID NO: 89887 - DNA, 25 bp, SARS Virus
atcgcggtcctgcttgaccacaata

SEQ ID NO: 89888 - DNA, 25 bp, SARS Virus
tcgcggtcctgtctgaccacaataa

SEQ ID NO: 89889 - DNA, 25 bp, SARS Virus
cgcggtcctgttcgaccacaataac

SEQ ID NO: 89890 - DNA, 25 bp, SARS Virus
gcggtcctgtttcaccacaataacg

SEQ ID NO: 89891 - DNA, 25 bp, SARS Virus
cggtcctgtttgcccacaataacga

SEQ ID NO: 89892 - DNA, 25 bp, SARS Virus
ggtcctgtttgaccacaataacgac

SEQ ID NO: 89893 - DNA, 25 bp, SARS Virus
gtcctgtttgaccacaataacgact

SEQ ID NO: 89894 - DNA, 25 bp, SARS Virus
tcctgtttgaccccaataacgacta

SEQ ID NO: 89895 - DNA, 25 bp, SARS Virus
cctgtttgaccacaataacgactaa

SEQ ID NO: 89896 - DNA, 25 bp, SARS Virus
ctgtttgaccaccataacgactaat

SEQ ID NO: 89897 - DNA, 25 bp, SARS Virus
tgtttgaccacactaacgactaata

SEQ ID NO: 89898 - DNA, 25 bp, SARS Virus
gtttgaccacaacaacgactaatat

SEQ ID NO: 89899 - DNA, 25 bp, SARS Virus
tttgaccacaatcacgactaatatt

SEQ ID NO: 89900 - DNA, 25 bp, SARS Virus
ttgaccacaataccgactaatatta

SEQ ID NO: 89901 - DNA, 25 bp, SARS Virus
tgaccacaataacgactaatattaa

SEQ ID NO: 89902 - DNA, 25 bp, SARS Virus
gaccacaataaccactaatattaat

SEQ ID NO: 89903 - DNA, 25 bp, SARS Virus
accacaataacgcctaatattaata

SEQ ID NO: 89904 - DNA, 25 bp, SARS Virus
ccacaataacgactaatattaatat

SEQ ID NO: 89905 - DNA, 25 bp, SARS Virus
cacaataacgaccaatattaatatt

SEQ ID NO: 89906 - DNA, 25 bp, SARS Virus
acaataacgactcatattaatattt

SEQ ID NO: 89907 - DNA, 25 bp, SARS Virus
caataacgactactattaatattta

SEQ ID NO: 89908 - DNA, 25 bp, SARS Virus
aataacgactaacattaatatttaa

SEQ ID NO: 89909 - DNA, 25 bp, SARS Virus
ataacgactaatcttaatatttaac

SEQ ID NO: 89910 - DNA, 25 bp, SARS Virus
taacgactaatactaatatttaacg

SEQ ID NO: 89911 - DNA, 25 bp, SARS Virus
aacgactaatatcaatatttaacgg

SEQ ID NO: 89912 - DNA, 25 bp, SARS Virus
acgactaatattcatatttaacggt

SEQ ID NO: 89913 - DNA, 25 bp, SARS Virus
cgactaatattactatttaacggtc

SEQ ID NO: 89914 - DNA, 25 bp, SARS Virus
gactaatattaacatttaacggtct

SEQ ID NO: 89915 - DNA, 25 bp, SARS Virus
actaatattaatctttaacggtcta

SEQ ID NO: 89916 - DNA, 25 bp, SARS Virus
ctaatattaatacttaacggtctac

SEQ ID NO: 89917 - DNA, 25 bp, SARS Virus
taatattaatatctaacggtctact

SEQ ID NO: 89918 - DNA, 25 bp, SARS Virus
aatattaatattcaacggtctacta

SEQ ID NO: 89919 - DNA, 25 bp, SARS Virus
atattaatatttcacggtctactaa

SEQ ID NO: 89920 - DNA, 25 bp, SARS Virus
tattaatatttaccggtctactaaa

SEQ ID NO: 89921 - DNA, 25 bp, SARS Virus
ccgtgcagtcgaggtcggataaaac

SEQ ID NO: 89922 - DNA, 25 bp, SARS Virus
cgtgcagtcgacgtcggataaaaca

SEQ ID NO: 89923 - DNA, 25 bp, SARS Virus
gtgcagtcgacggcggataaaacaa

SEQ ID NO: 89924 - DNA, 25 bp, SARS Virus
tgcagtcgacgtgggataaaacaac

SEQ ID NO: 89925 - DNA, 25 bp, SARS Virus
gcagtcgacgtcggataaaacaacc

SEQ ID NO: 89926 - DNA, 25 bp, SARS Virus
cagtcgacgtcggataaaacaaccg

SEQ ID NO: 89927 - DNA, 25 bp, SARS Virus
agtcgacgtcgggtaaaacaaccga

SEQ ID NO: 89928 - DNA, 25 bp, SARS Virus
gtcgacgtcggagaaaacaaccgat

SEQ ID NO: 89929 - DNA, 25 bp, SARS Virus
tcgacgtcggatgaaacaaccgata

SEQ ID NO: 89930 - DNA, 25 bp, SARS Virus
cgacgtcggatagaacaaccgataa

SEQ ID NO: 89931 - DNA, 25 bp, SARS Virus
gacgtcggataagacaaccgataaa

SEQ ID NO: 89932 - DNA, 25 bp, SARS Virus
acgtcggataaagcaaccgataaat

SEQ ID NO: 89933 - DNA, 25 bp, SARS Virus
cgtcggataaaagaaccgataaatt

SEQ ID NO: 89934 - DNA, 25 bp, SARS Virus
gtcggataaaacgaccgataaattt

SEQ ID NO: 89935 - DNA, 25 bp, SARS Virus
tcggataaaacagccgataaatttc

SEQ ID NO: 89936 - DNA, 25 bp, SARS Virus
cggataaaacaagcgataaatttcg

SEQ ID NO: 89937 - DNA, 25 bp, SARS Virus
ggataaaacaacggataaatttcgg

SEQ ID NO: 89938 - DNA, 25 bp, SARS Virus
gataaaacaaccgataaatttcggt

SEQ ID NO: 89939 - DNA, 25 bp, SARS Virus
ataaaacaaccggtaaatttcggtt

SEQ ID NO: 89940 - DNA, 25 bp, SARS Virus
taaaacaaccgagaaatttcggttg

SEQ ID NO: 89941 - DNA, 25 bp, SARS Virus
aaaacaaccgatgaatttcggttga

SEQ ID NO: 89942 - DNA, 25 bp, SARS Virus
aaacaaccgatagatttcggttgat

SEQ ID NO: 89943 - DNA, 25 bp, SARS Virus
aacaaccgataagtttcggttgatg

SEQ ID NO: 89944 - DNA, 25 bp, SARS Virus
acaaccgataaagttcggttgatgt

SEQ ID NO: 89945 - DNA, 25 bp, SARS Virus
caaccgataaatgtcggttgatgta

SEQ ID NO: 89946 - DNA, 25 bp, SARS Virus
aaccgataaattgcggttgatgtaa

SEQ ID NO: 89947 - DNA, 25 bp, SARS Virus
accgataaatttgggttgatgtaaa

SEQ ID NO: 89948 - DNA, 25 bp, SARS Virus
ccgataaatttcggttgatgtaaat

SEQ ID NO: 89949 - DNA, 25 bp, SARS Virus
cgataaatttcggttgatgtaaata

SEQ ID NO: 89950 - DNA, 25 bp, SARS Virus
gataaatttcgggtgatgtaaatac

SEQ ID NO: 89951 - DNA, 25 bp, SARS Virus
ataaatttcggtggatgtaaatacg

SEQ ID NO: 89952 - DNA, 25 bp, SARS Virus
taaatttcggttgatgtaaatacga

SEQ ID NO: 89953 - DNA, 25 bp, SARS Virus
aaatttcggttggtgtaaatacgag

SEQ ID NO: 89954 - DNA, 25 bp, SARS Virus
aatttcggttgaggtaaatacgagt

SEQ ID NO: 89955 - DNA, 25 bp, SARS Virus
atttcggttgatgtaaatacgagtt

SEQ ID NO: 89956 - DNA, 25 bp, SARS Virus
tttcggttgatggaaatacgagttc

SEQ ID NO: 89957 - DNA, 25 bp, SARS Virus
ttcggttgatgtgaatacgagttca

SEQ ID NO: 89958 - DNA, 25 bp, SARS Virus
tcggttgatgtagatacgagttcat

SEQ ID NO: 89959 - DNA, 25 bp, SARS Virus
cggttgatgtaagtacgagttcata

SEQ ID NO: 89960 - DNA, 25 bp, SARS Virus
ggttgatgtaaagacgagttcatac

SEQ ID NO: 89961 - DNA, 25 bp, SARS Virus
gttgatgtaaatgcgagttcatact

SEQ ID NO: 89962 - DNA, 25 bp, SARS Virus
ttgatgtaaataggagttcatacta

SEQ ID NO: 89963 - DNA, 25 bp, SARS Virus
tgatgtaaatacgagttcatactac

SEQ ID NO: 89964 - DNA, 25 bp, SARS Virus
gatgtaaatacgggttcatactact

SEQ ID NO: 89965 - DNA, 25 bp, SARS Virus
atgtaaatacgagttcatactactt

SEQ ID NO: 89966 - DNA, 25 bp, SARS Virus
tgtaaatacgaggtcatactacttt

SEQ ID NO: 89967 - DNA, 25 bp, SARS Virus
gtaaatacgagtgcatactactttt

SEQ ID NO: 89968 - DNA, 25 bp, SARS Virus
taaatacgagttgatactactttta

SEQ ID NO: 89969 - DNA, 25 bp, SARS Virus
aaatacgagttcgtactacttttac

SEQ ID NO: 89970 - DNA, 25 bp, SARS Virus
aatacgagttcagactacttttacc

SEQ ID NO: 89971 - DNA, 25 bp, SARS Virus
atacgagttcatgctacttttacca

SEQ ID NO: 89972 - DNA, 25 bp, SARS Virus
tacgagttcatagtacttttaccat

SEQ ID NO: 89973 - DNA, 25 bp, SARS Virus
acgagttcatacgacttttaccatg

SEQ ID NO: 89974 - DNA, 25 bp, SARS Virus
cgagttcatactgcttttaccatgt

SEQ ID NO: 89975 - DNA, 25 bp, SARS Virus
gagttcatactagttttaccatgtt

SEQ ID NO: 89976 - DNA, 25 bp, SARS Virus
agttcatactacgtttaccatgtta

SEQ ID NO: 89977 - DNA, 25 bp, SARS Virus
gttcatactactgttaccatgttag

SEQ ID NO: 89978 - DNA, 25 bp, SARS Virus
ttcatactacttgtaccatgttagt

SEQ ID NO: 89979 - DNA, 25 bp, SARS Virus
tcatactactttgaccatgttagtg

SEQ ID NO: 89980 - DNA, 25 bp, SARS Virus
catactacttttgccatgttagtgt

SEQ ID NO: 89981 - DNA, 25 bp, SARS Virus
atactacttttagcatgttagtgtc

SEQ ID NO: 89982 - DNA, 25 bp, SARS Virus
tactacttttacgatgttagtgtct

SEQ ID NO: 89983 - DNA, 25 bp, SARS Virus
actacttttaccgtgttagtgtcta

SEQ ID NO: 89984 - DNA, 25 bp, SARS Virus
ctacttttaccaggttagtgtctac

SEQ ID NO: 89985 - DNA, 25 bp, SARS Virus
tacttttaccatgttagtgtctacg

SEQ ID NO: 89986 - DNA, 25 bp, SARS Virus
acttttaccatggtagtgtctacga

SEQ ID NO: 89987 - DNA, 25 bp, SARS Virus
cttttaccatgtgagtgtctacgac

SEQ ID NO: 89988 - DNA, 25 bp, SARS Virus
ttttaccatgttggtgtctacgaca

SEQ ID NO: 89989 - DNA, 25 bp, SARS Virus
tttaccatgttagtgtctacgacaa

SEQ ID NO: 89990 - DNA, 25 bp, SARS Virus
ttaccatgttagggtctacgacaac

SEQ ID NO: 89991 - DNA, 25 bp, SARS Virus
taccatgttagtgtctacgacaact

SEQ ID NO: 89992 - DNA, 25 bp, SARS Virus
accatgttagtggctacgacaacta

SEQ ID NO: 89993 - DNA, 25 bp, SARS Virus
ccatgttagtgtgtacgacaactaa

SEQ ID NO: 89994 - DNA, 25 bp, SARS Virus
catgttagtgtcgacgacaactaac

SEQ ID NO: 89995 - DNA, 25 bp, SARS Virus
atgttagtgtctgcgacaactaaca

SEQ ID NO: 89996 - DNA, 25 bp, SARS Virus
tgttagtgtctaggacaactaacaa

SEQ ID NO: 89997 - DNA, 25 bp, SARS Virus
gttagtgtctacgacaactaacaag

SEQ ID NO: 89998 - DNA, 25 bp, SARS Virus
ttagtgtctacggcaactaacaaga

SEQ ID NO: 89999 - DNA, 25 bp, SARS Virus
tagtgtctacgagaactaacaagag

SEQ ID NO: 90000 - DNA, 25 bp, SARS Virus
agtgtctacgacgactaacaagagt

SEQ ID NO: 90001 - DNA, 25 bp, SARS Virus
gtgtctacgacagctaacaagagtt

SEQ ID NO: 90002 - DNA, 25 bp, SARS Virus
tgtctacgacaagtaacaagagttt

SEQ ID NO: 90003 - DNA, 25 bp, SARS Virus
gtctacgacaacgaacaagagtttt

SEQ ID NO: 90004 - DNA, 25 bp, SARS Virus
tctacgacaactgacaagagtttta

SEQ ID NO: 90005 - DNA, 25 bp, SARS Virus
ctacgacaactagcaagagttttag

SEQ ID NO: 90006 - DNA, 25 bp, SARS Virus
tacgacaactaagaagagttttagg

SEQ ID NO: 90007 - DNA, 25 bp, SARS Virus
acgacaactaacgagagttttaggt

SEQ ID NO: 90008 - DNA, 25 bp, SARS Virus
cgacaactaacaggagttttaggtg

SEQ ID NO: 90009 - DNA, 25 bp, SARS Virus
gacaactaacaagagttttaggtga

SEQ ID NO: 90010 - DNA, 25 bp, SARS Virus
acaactaacaagggttttaggtgaa

SEQ ID NO: 90011 - DNA, 25 bp, SARS Virus
caactaacaagagttttaggtgaac

SEQ ID NO: 90012 - DNA, 25 bp, SARS Virus
aactaacaagaggtttaggtgaacg

SEQ ID NO: 90013 - DNA, 25 bp, SARS Virus
actaacaagagtgttaggtgaacga

SEQ ID NO: 90014 - DNA, 25 bp, SARS Virus
ctaacaagagttgtaggtgaacgac

SEQ ID NO: 90015 - DNA, 25 bp, SARS Virus
taacaagagtttgaggtgaacgact

SEQ ID NO: 90016 - DNA, 25 bp, SARS Virus
aacaagagttttgggtgaacgactt

SEQ ID NO: 90017 - DNA, 25 bp, SARS Virus
acaagagttttaggtgaacgacttg

SEQ ID NO: 90018 - DNA, 25 bp, SARS Virus
caagagttttaggtgaacgacttga

SEQ ID NO: 90019 - DNA, 25 bp, SARS Virus
aagagttttaggggaacgacttgag

SEQ ID NO: 90020 - DNA, 25 bp, SARS Virus
agagttttaggtgaacgacttgagt

SEQ ID NO: 90021 - DNA, 25 bp, SARS Virus
gagttttaggtggacgacttgagtt

SEQ ID NO: 90022 - DNA, 25 bp, SARS Virus
agttttaggtgagcgacttgagttt

SEQ ID NO: 90023 - DNA, 25 bp, SARS Virus
gttttaggtgaaggacttgagttta

SEQ ID NO: 90024 - DNA, 25 bp, SARS Virus
ttttaggtgaacgacttgagtttac

SEQ ID NO: 90025 - DNA, 25 bp, SARS Virus
tttaggtgaacggcttgagtttacg

SEQ ID NO: 90026 - DNA, 25 bp, SARS Virus
ttaggtgaacgagttgagtttacga

SEQ ID NO: 90027 - DNA, 25 bp, SARS Virus
taggtgaacgacgtgagtttacgag

SEQ ID NO: 90028 - DNA, 25 bp, SARS Virus
aggtgaacgactggagtttacgaga

SEQ ID NO: 90029 - DNA, 25 bp, SARS Virus
ggtgaacgacttgagtttacgagac

SEQ ID NO: 90030 - DNA, 25 bp, SARS Virus
gtgaacgacttgggtttacgagaca

SEQ ID NO: 90031 - DNA, 25 bp, SARS Virus
tgaacgacttgagtttacgagacaa

SEQ ID NO: 90032 - DNA, 25 bp, SARS Virus
gaacgacttgaggttacgagacaat

SEQ ID NO: 90033 - DNA, 25 bp, SARS Virus
aacgacttgagtgtacgagacaatt

SEQ ID NO: 90034 - DNA, 25 bp, SARS Virus
acgacttgagttgacgagacaattc

SEQ ID NO: 90035 - DNA, 25 bp, SARS Virus
cgacttgagtttgcgagacaattct

SEQ ID NO: 90036 - DNA, 25 bp, SARS Virus
gacttgagtttaggagacaattctc

SEQ ID NO: 90037 - DNA, 25 bp, SARS Virus
acttgagtttacgagacaattctcg

SEQ ID NO: 90038 - DNA, 25 bp, SARS Virus
cttgagtttacgggacaattctcga

SEQ ID NO: 90039 - DNA, 25 bp, SARS Virus
ttgagtttacgagacaattctcgaa

SEQ ID NO: 90040 - DNA, 25 bp, SARS Virus
tgagtttacgaggcaattctcgaaa

SEQ ID NO: 90041 - DNA, 25 bp, SARS Virus
gagtttacgagagaattctcgaaac

SEQ ID NO: 90042 - DNA, 25 bp, SARS Virus
agtttacgagacgattctcgaaact

SEQ ID NO: 90043 - DNA, 25 bp, SARS Virus
gtttacgagacagttctcgaaactc

SEQ ID NO: 90044 - DNA, 25 bp, SARS Virus
tttacgagacaagtctcgaaactct

SEQ ID NO: 90045 - DNA, 25 bp, SARS Virus
ttacgagacaatgctcgaaactcta

SEQ ID NO: 90046 - DNA, 25 bp, SARS Virus
tacgagacaattgtcgaaactctaa

SEQ ID NO: 90047 - DNA, 25 bp, SARS Virus
acgagacaattcgcgaaactctaac

SEQ ID NO: 90048 - DNA, 25 bp, SARS Virus
cgagacaattctggaaactctaact

SEQ ID NO: 90049 - DNA, 25 bp, SARS Virus
gagacaattctcgaaactctaactg

SEQ ID NO: 90050 - DNA, 25 bp, SARS Virus
agacaattctcggaactctaactgt

SEQ ID NO: 90051 - DNA, 25 bp, SARS Virus
gacaattctcgagactctaactgtt

SEQ ID NO: 90052 - DNA, 25 bp, SARS Virus
acaattctcgaagctctaactgttt

SEQ ID NO: 90053 - DNA, 25 bp, SARS Virus
caattctcgaaagtctaactgtttc

SEQ ID NO: 90054 - DNA, 25 bp, SARS Virus
aattctcgaaacgctaactgtttcc

SEQ ID NO: 90055 - DNA, 25 bp, SARS Virus
attctcgaaactgtaactgtttcct

SEQ ID NO: 90056 - DNA, 25 bp, SARS Virus
ttctcgaaactcgaactgtttcctt

SEQ ID NO: 90057 - DNA, 25 bp, SARS Virus
tctcgaaactctgactgtttcctta

SEQ ID NO: 90058 - DNA, 25 bp, SARS Virus
ctcgaaactctagctgtttccttaa

SEQ ID NO: 90059 - DNA, 25 bp, SARS Virus
tcgaaactctaagtgtttccttaaa

SEQ ID NO: 90060 - DNA, 25 bp, SARS Virus
cgaaactctaacggtttccttaaat

SEQ ID NO: 90061 - DNA, 25 bp, SARS Virus
gaaactctaactgtttccttaaatg

SEQ ID NO: 90062 - DNA, 25 bp, SARS Virus
aaactctaactggttccttaaatgg

SEQ ID NO: 90063 - DNA, 25 bp, SARS Virus
aactctaactgtgtccttaaatggt

SEQ ID NO: 90064 - DNA, 25 bp, SARS Virus
actctaactgttgccttaaatggtc

SEQ ID NO: 90065 - DNA, 25 bp, SARS Virus
ctctaactgtttgcttaaatggtct

SEQ ID NO: 90066 - DNA, 25 bp, SARS Virus
tctaactgtttcgttaaatggtctg

SEQ ID NO: 90067 - DNA, 25 bp, SARS Virus
ctaactgtttccgtaaatggtctgg

SEQ ID NO: 90068 - DNA, 25 bp, SARS Virus
taactgtttcctgaaatggtctgga

SEQ ID NO: 90069 - DNA, 25 bp, SARS Virus
aactgtttccttgaatggtctggag

SEQ ID NO: 90070 - DNA, 25 bp, SARS Virus
actgtttccttagatggtctggaga

SEQ ID NO: 90071 - DNA, 25 bp, SARS Virus
ctgtttccttaagtggtctggagat

SEQ ID NO: 90072 - DNA, 25 bp, SARS Virus
tgtttccttaaagggtctggagatt

SEQ ID NO: 90073 - DNA, 25 bp, SARS Virus
gtttccttaaatggtctggagatta

SEQ ID NO: 90074 - DNA, 25 bp, SARS Virus
tttccttaaatggtctggagattaa

SEQ ID NO: 90075 - DNA, 25 bp, SARS Virus
ttccttaaatgggctggagattaaa

SEQ ID NO: 90076 - DNA, 25 bp, SARS Virus
tccttaaatggtgtggagattaaag

SEQ ID NO: 90077 - DNA, 25 bp, SARS Virus
ccttaaatggtcgggagattaaagt

SEQ ID NO: 90078 - DNA, 25 bp, SARS Virus
cttaaatggtctggagattaaagtc

SEQ ID NO: 90079 - DNA, 25 bp, SARS Virus
ttaaatggtctggagattaaagtcc

SEQ ID NO: 90080 - DNA, 25 bp, SARS Virus
taaatggtctggggattaaagtccc

SEQ ID NO: 90081 - DNA, 25 bp, SARS Virus
aaatggtctggagattaaagtccca

SEQ ID NO: 90082 - DNA, 25 bp, SARS Virus
aatggtctggaggttaaagtcccaa

SEQ ID NO: 90083 - DNA, 25 bp, SARS Virus
atggtctggagagtaaagtcccaac

SEQ ID NO: 90084 - DNA, 25 bp, SARS Virus
tggtctggagatgaaagtcccaaca

SEQ ID NO: 90085 - DNA, 25 bp, SARS Virus
ggtctggagattgaagtcccaacaa

SEQ ID NO: 90086 - DNA, 25 bp, SARS Virus
gtctggagattagagtcccaacaag

SEQ ID NO: 90087 - DNA, 25 bp, SARS Virus
tctggagattaaggtcccaacaagg

SEQ ID NO: 90088 - DNA, 25 bp, SARS Virus
ctggagattaaagtcccaacaaggg

SEQ ID NO: 90089 - DNA, 25 bp, SARS Virus
tggagattaaaggcccaacaaggga

SEQ ID NO: 90090 - DNA, 25 bp, SARS Virus
ggagattaaagtgccaacaagggag

SEQ ID NO: 90091 - DNA, 25 bp, SARS Virus
gagattaaagtcgcaacaagggagt

SEQ ID NO: 90092 - DNA, 25 bp, SARS Virus
agattaaagtccgaacaagggagtc

SEQ ID NO: 90093 - DNA, 25 bp, SARS Virus
gattaaagtcccgacaagggagtcc

SEQ ID NO: 90094 - DNA, 25 bp, SARS Virus
attaaagtcccagcaagggagtcct

SEQ ID NO: 90095 - DNA, 25 bp, SARS Virus
ttaaagtcccaagaagggagtcctc

SEQ ID NO: 90096 - DNA, 25 bp, SARS Virus
taaagtcccaacgagggagtcctct

SEQ ID NO: 90097 - DNA, 25 bp, SARS Virus
aaagtcccaacaggggagtcctcta

SEQ ID NO: 90098 - DNA, 25 bp, SARS Virus
aagtcccaacaagggagtcctctac

SEQ ID NO: 90099 - DNA, 25 bp, SARS Virus
agtcccaacaagggagtcctctaca

SEQ ID NO: 90100 - DNA, 25 bp, SARS Virus
gtcccaacaagggagtcctctacaa

SEQ ID NO: 90101 - DNA, 25 bp, SARS Virus
tcccaacaagggggtcctctacaac

SEQ ID NO: 90102 - DNA, 25 bp, SARS Virus
cccaacaagggagtcctctacaaca

SEQ ID NO: 90103 - DNA, 25 bp, SARS Virus
ccaacaagggaggcctctacaacac

SEQ ID NO: 90104 - DNA, 25 bp, SARS Virus
caacaagggagtgctctacaacact

SEQ ID NO: 90105 - DNA, 25 bp, SARS Virus
aacaagggagtcgtctacaacactc

SEQ ID NO: 90106 - DNA, 25 bp, SARS Virus
acaagggagtccgctacaacactct

SEQ ID NO: 90107 - DNA, 25 bp, SARS Virus
caagggagtcctgtacaacactcta

SEQ ID NO: 90108 - DNA, 25 bp, SARS Virus
aagggagtcctcgacaacactctaa

SEQ ID NO: 90109 - DNA, 25 bp, SARS Virus
agggagtcctctgcaacactctaag

SEQ ID NO: 90110 - DNA, 25 bp, SARS Virus
gggagtcctctagaacactctaagg

SEQ ID NO: 90111 - DNA, 25 bp, SARS Virus
ggagtcctctacgacactctaaggg

SEQ ID NO: 90112 - DNA, 25 bp, SARS Virus
gagtcctctacagcactctaaggga

SEQ ID NO: 90113 - DNA, 25 bp, SARS Virus
agtcctctacaagactctaagggat

SEQ ID NO: 90114 - DNA, 25 bp, SARS Virus
gtcctctacaacgctctaagggatt

SEQ ID NO: 90115 - DNA, 25 bp, SARS Virus
tcctctacaacagtctaagggatta

SEQ ID NO: 90116 - DNA, 25 bp, SARS Virus
cctctacaacacgctaagggattat

SEQ ID NO: 90117 - DNA, 25 bp, SARS Virus
ctctacaacactgtaagggattata

SEQ ID NO: 90118 - DNA, 25 bp, SARS Virus
tctacaacactcgaagggattataa

SEQ ID NO: 90119 - DNA, 25 bp, SARS Virus
ctacaacactctgagggattataat

SEQ ID NO: 90120 - DNA, 25 bp, SARS Virus
tacaacactctaggggattataatg

SEQ ID NO: 90121 - DNA, 25 bp, SARS Virus
acaacactctaagggattataatgt

SEQ ID NO: 90122 - DNA, 25 bp, SARS Virus
caacactctaagggattataatgtt

SEQ ID NO: 90123 - DNA, 25 bp, SARS Virus
aacactctaagggattataatgttt

SEQ ID NO: 90124 - DNA, 25 bp, SARS Virus
acactctaaggggttataatgtttg

SEQ ID NO: 90125 - DNA, 25 bp, SARS Virus
cactctaagggagtataatgtttga

SEQ ID NO: 90126 - DNA, 25 bp, SARS Virus
actctaagggatgataatgtttgaa

SEQ ID NO: 90127 - DNA, 25 bp, SARS Virus
ctctaagggattgtaatgtttgaac

SEQ ID NO: 90128 - DNA, 25 bp, SARS Virus
tctaagggattagaatgtttgaaca

SEQ ID NO: 90129 - DNA, 25 bp, SARS Virus
ctaagggattatgatgtttgaacac

SEQ ID NO: 90130 - DNA, 25 bp, SARS Virus
taagggattatagtgtttgaacaca

SEQ ID NO: 90131 - DNA, 25 bp, SARS Virus
aagggattataaggtttgaacacag

SEQ ID NO: 90132 - DNA, 25 bp, SARS Virus
agggattataatgtttgaacacagg

SEQ ID NO: 90133 - DNA, 25 bp, SARS Virus
gggattataatggttgaacacagga

SEQ ID NO: 90134 - DNA, 25 bp, SARS Virus
ggattataatgtgtgaacacaggaa

SEQ ID NO: 90135 - DNA, 25 bp, SARS Virus
gattataatgttggaacacaggaaa

SEQ ID NO: 90136 - DNA, 25 bp, SARS Virus
attataatgtttgaacacaggaaaa

SEQ ID NO: 90137 - DNA, 25 bp, SARS Virus
ttataatgtttggacacaggaaaac

SEQ ID NO: 90138 - DNA, 25 bp, SARS Virus
tataatgtttgagcacaggaaaacc

SEQ ID NO: 90139 - DNA, 25 bp, SARS Virus
ataatgtttgaagacaggaaaacct

SEQ ID NO: 90140 - DNA, 25 bp, SARS Virus
taatgtttgaacgcaggaaaacctc

SEQ ID NO: 90141 - DNA, 25 bp, SARS Virus
aatgtttgaacagaggaaaacctct

SEQ ID NO: 90142 - DNA, 25 bp, SARS Virus
atgtttgaacacgggaaaacctctc

SEQ ID NO: 90143 - DNA, 25 bp, SARS Virus
tgtttgaacacaggaaaacctctcc

SEQ ID NO: 90144 - DNA, 25 bp, SARS Virus
gtttgaacacaggaaaacctctcca

SEQ ID NO: 90145 - DNA, 25 bp, SARS Virus
tttgaacacagggaaacctctccaa

SEQ ID NO: 90146 - DNA, 25 bp, SARS Virus
ttgaacacaggagaacctctccaaa

SEQ ID NO: 90147 - DNA, 25 bp, SARS Virus
tgaacacaggaagacctctccaaaa

SEQ ID NO: 90148 - DNA, 25 bp, SARS Virus
gaacacaggaaagcctctccaaaaa

SEQ ID NO: 90149 - DNA, 25 bp, SARS Virus
aacacaggaaaagctctccaaaaat

SEQ ID NO: 90150 - DNA, 25 bp, SARS Virus
acacaggaaaacgtctccaaaaatt

SEQ ID NO: 90151 - DNA, 25 bp, SARS Virus
cacaggaaaaccgctccaaaaatta

SEQ ID NO: 90152 - DNA, 25 bp, SARS Virus
acaggaaaacctgtccaaaaattac

SEQ ID NO: 90153 - DNA, 25 bp, SARS Virus
caggaaaacctcgccaaaaattacg

SEQ ID NO: 90154 - DNA, 25 bp, SARS Virus
aggaaaacctctgcaaaaattacga

SEQ ID NO: 90155 - DNA, 25 bp, SARS Virus
ggaaaacctctcgaaaaattacgat

SEQ ID NO: 90156 - DNA, 25 bp, SARS Virus
gaaaacctctccgaaaattacgatg

SEQ ID NO: 90157 - DNA, 25 bp, SARS Virus
aaaacctctccagaaattacgatga

SEQ ID NO: 90158 - DNA, 25 bp, SARS Virus
aaacctctccaagaattacgatgat

SEQ ID NO: 90159 - DNA, 25 bp, SARS Virus
aacctctccaaagattacgatgatt

SEQ ID NO: 90160 - DNA, 25 bp, SARS Virus
acctctccaaaagttacgatgattt

SEQ ID NO: 90161 - DNA, 25 bp, SARS Virus
cctctccaaaaagtacgatgattta

SEQ ID NO: 90162 - DNA, 25 bp, SARS Virus
ctctccaaaaatgacgatgatttaa

SEQ ID NO: 90163 - DNA, 25 bp, SARS Virus
tctccaaaaattgcgatgatttaag

SEQ ID NO: 90164 - DNA, 25 bp, SARS Virus
ctccaaaaattaggatgatttaagg

SEQ ID NO: 90165 - DNA, 25 bp, SARS Virus
tccaaaaattacgatgatttaaggg

SEQ ID NO: 90166 - DNA, 25 bp, SARS Virus
ccaaaaattacggtgatttaaggga

SEQ ID NO: 90167 - DNA, 25 bp, SARS Virus
caaaaattacgaggatttaagggaa

SEQ ID NO: 90168 - DNA, 25 bp, SARS Virus
aaaaattacgatgatttaagggaag

SEQ ID NO: 90169 - DNA, 25 bp, SARS Virus
aaaattacgatggtttaagggaaga

SEQ ID NO: 90170 - DNA, 25 bp, SARS Virus
aaattacgatgagttaagggaagac

SEQ ID NO: 90171 - DNA, 25 bp, SARS Virus
aattacgatgatgtaagggaagaca

SEQ ID NO: 90172 - DNA, 25 bp, SARS Virus
attacgatgattgaagggaagacag

SEQ ID NO: 90173 - DNA, 25 bp, SARS Virus
ttacgatgatttgagggaagacaga

SEQ ID NO: 90174 - DNA, 25 bp, SARS Virus
tacgatgatttaggggaagacagat

SEQ ID NO: 90175 - DNA, 25 bp, SARS Virus
acgatgatttaagggaagacagata

SEQ ID NO: 90176 - DNA, 25 bp, SARS Virus
cgatgatttaagggaagacagatac

SEQ ID NO: 90177 - DNA, 25 bp, SARS Virus
gatgatttaagggaagacagatacg

SEQ ID NO: 90178 - DNA, 25 bp, SARS Virus
atgatttaaggggagacagatacgt

SEQ ID NO: 90179 - DNA, 25 bp, SARS Virus
tgatttaagggaggacagatacgta

SEQ ID NO: 90180 - DNA, 25 bp, SARS Virus
gatttaagggaagacagatacgtac

SEQ ID NO: 90181 - DNA, 25 bp, SARS Virus
atttaagggaaggcagatacgtacc

SEQ ID NO: 90182 - DNA, 25 bp, SARS Virus
tttaagggaagagagatacgtaccc

SEQ ID NO: 90183 - DNA, 25 bp, SARS Virus
ttaagggaagacggatacgtaccct

SEQ ID NO: 90184 - DNA, 25 bp, SARS Virus
taagggaagacagatacgtaccctc

SEQ ID NO: 90185 - DNA, 25 bp, SARS Virus
aagggaagacaggtacgtaccctct

SEQ ID NO: 90186 - DNA, 25 bp, SARS Virus
agggaagacagagacgtaccctctc

SEQ ID NO: 90187 - DNA, 25 bp, SARS Virus
gggaagacagatgcgtaccctctct

SEQ ID NO: 90188 - DNA, 25 bp, SARS Virus
ggaagacagataggtaccctctctt

SEQ ID NO: 90189 - DNA, 25 bp, SARS Virus
gaagacagatacgtaccctctcttt

SEQ ID NO: 90190 - DNA, 25 bp, SARS Virus
aagacagatacggaccctctctttt

SEQ ID NO: 90191 - DNA, 25 bp, SARS Virus
agacagatacgtgccctctcttttt

SEQ ID NO: 90192 - DNA, 25 bp, SARS Virus
gacagatacgtagcctctctttttt

SEQ ID NO: 90193 - DNA, 25 bp, SARS Virus
acagatacgtacgctctcttttttt

SEQ ID NO: 90194 - DNA, 25 bp, SARS Virus
cagatacgtaccgtctctttttttt

SEQ ID NO: 90195 - DNA, 25 bp, SARS Virus
agatacgtacccgctctttttttta

SEQ ID NO: 90196 - DNA, 25 bp, SARS Virus
gatacgtaccctgtcttttttttaa

SEQ ID NO: 90197 - DNA, 25 bp, SARS Virus
atacgtaccctcgcttttttttaaa

SEQ ID NO: 90198 - DNA, 25 bp, SARS Virus
tacgtaccctctgttttttttaaag

SEQ ID NO: 90199 - DNA, 25 bp, SARS Virus
acgtaccctctcgtttttttaaaga

SEQ ID NO: 90200 - DNA, 25 bp, SARS Virus
cgtaccctctctgttttttaaagat

SEQ ID NO: 90201 - DNA, 25 bp, SARS Virus
gtaccctctcttgtttttaaagatt

SEQ ID NO: 90202 - DNA, 25 bp, SARS Virus
taccctctctttgttttaaagatta

SEQ ID NO: 90203 - DNA, 25 bp, SARS Virus
accctctcttttgtttaaagattaa

SEQ ID NO: 90204 - DNA, 25 bp, SARS Virus
ccctctctttttgttaaagattaac

SEQ ID NO: 90205 - DNA, 25 bp, SARS Virus
cctctcttttttgtaaagattaaca

SEQ ID NO: 90206 - DNA, 25 bp, SARS Virus
ctctctttttttgaaagattaacac

SEQ ID NO: 90207 - DNA, 25 bp, SARS Virus
tctcttttttttgaagattaacaca

SEQ ID NO: 90208 - DNA, 25 bp, SARS Virus
ctcttttttttagagattaacacaa

SEQ ID NO: 90209 - DNA, 25 bp, SARS Virus
tcttttttttaaggattaacacaac

SEQ ID NO: 90210 - DNA, 25 bp, SARS Virus
cttttttttaaagattaacacaacg

SEQ ID NO: 90211 - DNA, 25 bp, SARS Virus
ttttttttaaaggttaacacaacga

SEQ ID NO: 90212 - DNA, 25 bp, SARS Virus
tttttttaaagagtaacacaacgac

SEQ ID NO: 90213 - DNA, 25 bp, SARS Virus
ttttttaaagatgaacacaacgact

SEQ ID NO: 90214 - DNA, 25 bp, SARS Virus
tttttaaagattgacacaacgacta

SEQ ID NO: 90215 - DNA, 25 bp, SARS Virus
ttttaaagattagcacaacgactaa

SEQ ID NO: 90216 - DNA, 25 bp, SARS Virus
tttaaagattaagacaacgactaat

SEQ ID NO: 90217 - DNA, 25 bp, SARS Virus
ttaaagattaacgcaacgactaatg

SEQ ID NO: 90218 - DNA, 25 bp, SARS Virus
taaagattaacagaacgactaatga

SEQ ID NO: 90219 - DNA, 25 bp, SARS Virus
aaagattaacacgacgactaatgag

SEQ ID NO: 90220 - DNA, 25 bp, SARS Virus
aagattaacacagcgactaatgaga

SEQ ID NO: 90221 - DNA, 25 bp, SARS Virus
agattaacacaaggactaatgagac

SEQ ID NO: 90222 - DNA, 25 bp, SARS Virus
gattaacacaacgactaatgagaca

SEQ ID NO: 90223 - DNA, 25 bp, SARS Virus
attaacacaacggctaatgagacac

SEQ ID NO: 90224 - DNA, 25 bp, SARS Virus
ttaacacaacgagtaatgagacacg

SEQ ID NO: 90225 - DNA, 25 bp, SARS Virus
taacacaacgacgaatgagacacga

SEQ ID NO: 90226 - DNA, 25 bp, SARS Virus
aacacaacgactgatgagacacgag

SEQ ID NO: 90227 - DNA, 25 bp, SARS Virus
acacaacgactagtgagacacgaga

SEQ ID NO: 90228 - DNA, 25 bp, SARS Virus
cacaacgactaaggagacacgagat

SEQ ID NO: 90229 - DNA, 25 bp, SARS Virus
acaacgactaatgagacacgagatg

SEQ ID NO: 90230 - DNA, 25 bp, SARS Virus
caacgactaatgggacacgagatgt

SEQ ID NO: 90231 - DNA, 25 bp, SARS Virus
aacgactaatgagacacgagatgtt

SEQ ID NO: 90232 - DNA, 25 bp, SARS Virus
acgactaatgaggcacgagatgttg

SEQ ID NO: 90233 - DNA, 25 bp, SARS Virus
cgactaatgagagacgagatgttga

SEQ ID NO: 90234 - DNA, 25 bp, SARS Virus
gactaatgagacgcgagatgttgag

SEQ ID NO: 90235 - DNA, 25 bp, SARS Virus
actaatgagacaggagatgttgagt

SEQ ID NO: 90236 - DNA, 25 bp, SARS Virus
ctaatgagacacgagatgttgagtt

SEQ ID NO: 90237 - DNA, 25 bp, SARS Virus
taatgagacacgggatgttgagttg

SEQ ID NO: 90238 - DNA, 25 bp, SARS Virus
aatgagacacgagatgttgagttgt

SEQ ID NO: 90239 - DNA, 25 bp, SARS Virus
atgagacacgaggtgttgagttgta

SEQ ID NO: 90240 - DNA, 25 bp, SARS Virus
tgagacacgagaggttgagttgtaa

SEQ ID NO: 90241 - DNA, 25 bp, SARS Virus
gagacacgagatgttgagttgtaaa

SEQ ID NO: 90242 - DNA, 25 bp, SARS Virus
agacacgagatggtgagttgtaaaa

SEQ ID NO: 90243 - DNA, 25 bp, SARS Virus
gacacgagatgtggagttgtaaaaa

SEQ ID NO: 90244 - DNA, 25 bp, SARS Virus
acacgagatgttgagttgtaaaaaa

SEQ ID NO: 90245 - DNA, 25 bp, SARS Virus
cacgagatgttgggttgtaaaaaaa

SEQ ID NO: 90246 - DNA, 25 bp, SARS Virus
acgagatgttgagttgtaaaaaaag

SEQ ID NO: 90247 - DNA, 25 bp, SARS Virus
cgagatgttgaggtgtaaaaaaagt

SEQ ID NO: 90248 - DNA, 25 bp, SARS Virus
gagatgttgagtggtaaaaaaagtt

SEQ ID NO: 90249 - DNA, 25 bp, SARS Virus
agatgttgagttgtaaaaaaagttg

SEQ ID NO: 90250 - DNA, 25 bp, SARS Virus
gatgttgagttggaaaaaaagttgg

SEQ ID NO: 90251 - DNA, 25 bp, SARS Virus
atgttgagttgtgaaaaaagttgga

SEQ ID NO: 90252 - DNA, 25 bp, SARS Virus
tgttgagttgtagaaaaagttggaa

SEQ ID NO: 90253 - DNA, 25 bp, SARS Virus
gttgagttgtaagaaaagttggaaa

SEQ ID NO: 90254 - DNA, 25 bp, SARS Virus
ttgagttgtaaagaaagttggaaat

SEQ ID NO: 90255 - DNA, 25 bp, SARS Virus
tgagttgtaaaagaagttggaaatt

SEQ ID NO: 90256 - DNA, 25 bp, SARS Virus
gagttgtaaaaagagttggaaattc

SEQ ID NO: 90257 - DNA, 25 bp, SARS Virus
agttgtaaaaaaggttggaaattca

SEQ ID NO: 90258 - DNA, 25 bp, SARS Virus
gttgtaaaaaaagttggaaattcac

SEQ ID NO: 90259 - DNA, 25 bp, SARS Virus
ttgtaaaaaaaggtggaaattcacg

SEQ ID NO: 90260 - DNA, 25 bp, SARS Virus
tgtaaaaaaagtgggaaattcacga

SEQ ID NO: 90261 - DNA, 25 bp, SARS Virus
gtaaaaaaagttggaaattcacgat

SEQ ID NO: 90262 - DNA, 25 bp, SARS Virus
taaaaaaagttggaaattcacgata

SEQ ID NO: 90263 - DNA, 25 bp, SARS Virus
aaaaaaagttgggaattcacgatac

SEQ ID NO: 90264 - DNA, 25 bp, SARS Virus
aaaaaagttggagattcacgatacc

SEQ ID NO: 90265 - DNA, 25 bp, SARS Virus
aaaaagttggaagttcacgataccg

SEQ ID NO: 90266 - DNA, 25 bp, SARS Virus
aaaagttggaaagtcacgataccgc

SEQ ID NO: 90267 - DNA, 25 bp, SARS Virus
aaagttggaaatgcacgataccgca

SEQ ID NO: 90268 - DNA, 25 bp, SARS Virus
aagttggaaattgacgataccgcaa

SEQ ID NO: 90269 - DNA, 25 bp, SARS Virus
agttggaaattcgcgataccgcaaa

SEQ ID NO: 90270 - DNA, 25 bp, SARS Virus
gttggaaattcaggataccgcaaag

SEQ ID NO: 90271 - DNA, 25 bp, SARS Virus
ttggaaattcacgataccgcaaaga

SEQ ID NO: 90272 - DNA, 25 bp, SARS Virus
tggaaattcacggtaccgcaaagac

SEQ ID NO: 90273 - DNA, 25 bp, SARS Virus
ggaaattcacgagaccgcaaagacg

SEQ ID NO: 90274 - DNA, 25 bp, SARS Virus
gaaattcacgatgccgcaaagacgg

SEQ ID NO: 90275 - DNA, 25 bp, SARS Virus
aaattcacgatagcgcaaagacggt

SEQ ID NO: 90276 - DNA, 25 bp, SARS Virus
aattcacgatacggcaaagacggtg

SEQ ID NO: 90277 - DNA, 25 bp, SARS Virus
attcacgataccgcaaagacggtga

SEQ ID NO: 90278 - DNA, 25 bp, SARS Virus
ttcacgataccggaaagacggtgat

SEQ ID NO: 90279 - DNA, 25 bp, SARS Virus
tcacgataccgcgaagacggtgatt

SEQ ID NO: 90280 - DNA, 25 bp, SARS Virus
cacgataccgcagagacggtgattc

SEQ ID NO: 90281 - DNA, 25 bp, SARS Virus
acgataccgcaaggacggtgattca

SEQ ID NO: 90282 - DNA, 25 bp, SARS Virus
cgataccgcaaagacggtgattcaa

SEQ ID NO: 90283 - DNA, 25 bp, SARS Virus
gataccgcaaaggcggtgattcaac

SEQ ID NO: 90284 - DNA, 25 bp, SARS Virus
ataccgcaaagagggtgattcaact

SEQ ID NO: 90285 - DNA, 25 bp, SARS Virus
taccgcaaagacggtgattcaactt

SEQ ID NO: 90286 - DNA, 25 bp, SARS Virus
accgcaaagacggtgattcaactta

SEQ ID NO: 90287 - DNA, 25 bp, SARS Virus
ccgcaaagacggggattcaacttac

SEQ ID NO: 90288 - DNA, 25 bp, SARS Virus
cgcaaagacggtgattcaacttact

SEQ ID NO: 90289 - DNA, 25 bp, SARS Virus
gcaaagacggtggttcaacttacta

SEQ ID NO: 90290 - DNA, 25 bp, SARS Virus
caaagacggtgagtcaacttactag

SEQ ID NO: 90291 - DNA, 25 bp, SARS Virus
aaagacggtgatgcaacttactaga

SEQ ID NO: 90292 - DNA, 25 bp, SARS Virus
aagacggtgattgaacttactagaa

SEQ ID NO: 90293 - DNA, 25 bp, SARS Virus
agacggtgattcgacttactagaaa

SEQ ID NO: 90294 - DNA, 25 bp, SARS Virus
gacggtgattcagcttactagaaac

SEQ ID NO: 90295 - DNA, 25 bp, SARS Virus
acggtgattcaagttactagaaacg

SEQ ID NO: 90296 - DNA, 25 bp, SARS Virus
cggtgattcaacgtactagaaacga

SEQ ID NO: 90297 - DNA, 25 bp, SARS Virus
ggtgattcaactgactagaaacgaa

SEQ ID NO: 90298 - DNA, 25 bp, SARS Virus
gtgattcaacttgctagaaacgaag

SEQ ID NO: 90299 - DNA, 25 bp, SARS Virus
tgattcaacttagtagaaacgaaga

SEQ ID NO: 90300 - DNA, 25 bp, SARS Virus
gattcaacttacgagaaacgaagag

SEQ ID NO: 90301 - DNA, 25 bp, SARS Virus
attcaacttactggaaacgaagagg

SEQ ID NO: 90302 - DNA, 25 bp, SARS Virus
ttcaacttactagaaacgaagaggt

SEQ ID NO: 90303 - DNA, 25 bp, SARS Virus
tcaacttactaggaacgaagaggtt

SEQ ID NO: 90304 - DNA, 25 bp, SARS Virus
caacttactagagacgaagaggtta

SEQ ID NO: 90305 - DNA, 25 bp, SARS Virus
aacttactagaagcgaagaggttac

SEQ ID NO: 90306 - DNA, 25 bp, SARS Virus
acttactagaaaggaagaggttaca

SEQ ID NO: 90307 - DNA, 25 bp, SARS Virus
cttactagaaacgaagaggttacag

SEQ ID NO: 90308 - DNA, 25 bp, SARS Virus
ttactagaaacggagaggttacaga

SEQ ID NO: 90309 - DNA, 25 bp, SARS Virus
tactagaaacgaggaggttacagat

SEQ ID NO: 90310 - DNA, 25 bp, SARS Virus
actagaaacgaagaggttacagata

SEQ ID NO: 90311 - DNA, 25 bp, SARS Virus
ctagaaacgaaggggttacagatac

SEQ ID NO: 90312 - DNA, 25 bp, SARS Virus
tagaaacgaagaggttacagatacg

SEQ ID NO: 90313 - DNA, 25 bp, SARS Virus
agaaacgaagaggttacagatacgt

SEQ ID NO: 90314 - DNA, 25 bp, SARS Virus
gaaacgaagagggtacagatacgtc

SEQ ID NO: 90315 - DNA, 25 bp, SARS Virus
aaacgaagaggtgacagatacgtct

SEQ ID NO: 90316 - DNA, 25 bp, SARS Virus
aacgaagaggttgcagatacgtcta

SEQ ID NO: 90317 - DNA, 25 bp, SARS Virus
acgaagaggttagagatacgtctaa

SEQ ID NO: 90318 - DNA, 25 bp, SARS Virus
cgaagaggttacggatacgtctaag

SEQ ID NO: 90319 - DNA, 25 bp, SARS Virus
gaagaggttacagatacgtctaaga

SEQ ID NO: 90320 - DNA, 25 bp, SARS Virus
aagaggttacaggtacgtctaagaa

SEQ ID NO: 90321 - DNA, 25 bp, SARS Virus
agaggttacagagacgtctaagaaa

SEQ ID NO: 90322 - DNA, 25 bp, SARS Virus
gaggttacagatgcgtctaagaaaa

SEQ ID NO: 90323 - DNA, 25 bp, SARS Virus
aggttacagataggtctaagaaaac

SEQ ID NO: 90324 - DNA, 25 bp, SARS Virus
ggttacagatacgtctaagaaaaca

SEQ ID NO: 90325 - DNA, 25 bp, SARS Virus
gttacagatacggctaagaaaacat

SEQ ID NO: 90326 - DNA, 25 bp, SARS Virus
ttacagatacgtgtaagaaaacatc

SEQ ID NO: 90327 - DNA, 25 bp, SARS Virus
tacagatacgtcgaagaaaacatca

SEQ ID NO: 90328 - DNA, 25 bp, SARS Virus
acagatacgtctgagaaaacatcag

SEQ ID NO: 90329 - DNA, 25 bp, SARS Virus
cagatacgtctaggaaaacatcagt

SEQ ID NO: 90330 - DNA, 25 bp, SARS Virus
agatacgtctaagaaaacatcagtt

SEQ ID NO: 90331 - DNA, 25 bp, SARS Virus
gatacgtctaaggaaacatcagttc

SEQ ID NO: 90332 - DNA, 25 bp, SARS Virus
atacgtctaagagaacatcagttcc

SEQ ID NO: 90333 - DNA, 25 bp, SARS Virus
tacgtctaagaagacatcagttccc

SEQ ID NO: 90334 - DNA, 25 bp, SARS Virus
acgtctaagaaagcatcagttccct

SEQ ID NO: 90335 - DNA, 25 bp, SARS Virus
cgtctaagaaaagatcagttccctc

SEQ ID NO: 90336 - DNA, 25 bp, SARS Virus
gtctaagaaaacgtcagttccctct

SEQ ID NO: 90337 - DNA, 25 bp, SARS Virus
tctaagaaaacagcagttccctcta

SEQ ID NO: 90338 - DNA, 25 bp, SARS Virus
ctaagaaaacatgagttccctctac

SEQ ID NO: 90339 - DNA, 25 bp, SARS Virus
taagaaaacatcggttccctctact

SEQ ID NO: 90340 - DNA, 25 bp, SARS Virus
aagaaaacatcagttccctctacta

SEQ ID NO: 90341 - DNA, 25 bp, SARS Virus
agaaaacatcaggtccctctactac

SEQ ID NO: 90342 - DNA, 25 bp, SARS Virus
gaaaacatcagtgccctctactaca

SEQ ID NO: 90343 - DNA, 25 bp, SARS Virus
aaaacatcagttgcctctactacat

SEQ ID NO: 90344 - DNA, 25 bp, SARS Virus
aaacatcagttcgctctactacatt

SEQ ID NO: 90345 - DNA, 25 bp, SARS Virus
aacatcagttccgtctactacattc

SEQ ID NO: 90346 - DNA, 25 bp, SARS Virus
acatcagttcccgctactacattct

SEQ ID NO: 90347 - DNA, 25 bp, SARS Virus
catcagttccctgtactacattctg

SEQ ID NO: 90348 - DNA, 25 bp, SARS Virus
atcagttccctcgactacattctgt

SEQ ID NO: 90349 - DNA, 25 bp, SARS Virus
tcagttccctctgctacattctgtt

SEQ ID NO: 90350 - DNA, 25 bp, SARS Virus
cagttccctctagtacattctgttt

SEQ ID NO: 90351 - DNA, 25 bp, SARS Virus
agttccctctacgacattctgttta

SEQ ID NO: 90352 - DNA, 25 bp, SARS Virus
gttccctctactgcattctgtttat

SEQ ID NO: 90353 - DNA, 25 bp, SARS Virus
ttccctctactagattctgtttatc

SEQ ID NO: 90354 - DNA, 25 bp, SARS Virus
tccctctactacgttctgtttatcg

SEQ ID NO: 90355 - DNA, 25 bp, SARS Virus
ccctctactacagtctgtttatcgc

SEQ ID NO: 90356 - DNA, 25 bp, SARS Virus
cctctactacatgctgtttatcgcg

SEQ ID NO: 90357 - DNA, 25 bp, SARS Virus
ctctactacattgtgtttatcgcgg

SEQ ID NO: 90358 - DNA, 25 bp, SARS Virus
tctactacattcggtttatcgcggt

SEQ ID NO: 90359 - DNA, 25 bp, SARS Virus
ctactacattctgtttatcgcggtc

SEQ ID NO: 90360 - DNA, 25 bp, SARS Virus
tactacattctggttatcgcggtcc

SEQ ID NO: 90361 - DNA, 25 bp, SARS Virus
actacattctgtgtatcgcggtcct

SEQ ID NO: 90362 - DNA, 25 bp, SARS Virus
ctacattctgttgatcgcggtcctg

SEQ ID NO: 90363 - DNA, 25 bp, SARS Virus
tacattctgtttgtcgcggtcctgt

SEQ ID NO: 90364 - DNA, 25 bp, SARS Virus
acattctgtttagcgcggtcctgtt

SEQ ID NO: 90365 - DNA, 25 bp, SARS Virus
cattctgtttatggcggtcctgttt

SEQ ID NO: 90366 - DNA, 25 bp, SARS Virus
attctgtttatcgcggtcctgtttg

SEQ ID NO: 90367 - DNA, 25 bp, SARS Virus
ttctgtttatcggggtcctgtttga

SEQ ID NO: 90368 - DNA, 25 bp, SARS Virus
tctgtttatcgcggtcctgtttgac

SEQ ID NO: 90369 - DNA, 25 bp, SARS Virus
ctgtttatcgcggtcctgtttgacc

SEQ ID NO: 90370 - DNA, 25 bp, SARS Virus
tgtttatcgcgggcctgtttgacca

SEQ ID NO: 90371 - DNA, 25 bp, SARS Virus
gtttatcgcggtgctgtttgaccac

SEQ ID NO: 90372 - DNA, 25 bp, SARS Virus
tttatcgcggtcgtgtttgaccaca

SEQ ID NO: 90373 - DNA, 25 bp, SARS Virus
ttatcgcggtccggtttgaccacaa

SEQ ID NO: 90374 - DNA, 25 bp, SARS Virus
tatcgcggtcctgtttgaccacaat

SEQ ID NO: 90375 - DNA, 25 bp, SARS Virus
atcgcggtcctggttgaccacaata

SEQ ID NO: 90376 - DNA, 25 bp, SARS Virus
tcgcggtcctgtgtgaccacaataa

SEQ ID NO: 90377 - DNA, 25 bp, SARS Virus
cgcggtcctgttggaccacaataac

SEQ ID NO: 90378 - DNA, 25 bp, SARS Virus
gcggtcctgtttgaccacaataacg

SEQ ID NO: 90379 - DNA, 25 bp, SARS Virus
cggtcctgtttggccacaataacga

SEQ ID NO: 90380 - DNA, 25 bp, SARS Virus
ggtcctgtttgagcacaataacgac

SEQ ID NO: 90381 - DNA, 25 bp, SARS Virus
gtcctgtttgacgacaataacgact

SEQ ID NO: 90382 - DNA, 25 bp, SARS Virus
tcctgtttgaccgcaataacgacta

SEQ ID NO: 90383 - DNA, 25 bp, SARS Virus
cctgtttgaccagaataacgactaa

SEQ ID NO: 90384 - DNA, 25 bp, SARS Virus
ctgtttgaccacgataacgactaat

SEQ ID NO: 90385 - DNA, 25 bp, SARS Virus
tgtttgaccacagtaacgactaata

SEQ ID NO: 90386 - DNA, 25 bp, SARS Virus
gtttgaccacaagaacgactaatat

SEQ ID NO: 90387 - DNA, 25 bp, SARS Virus
tttgaccacaatgacgactaatatt

SEQ ID NO: 90388 - DNA, 25 bp, SARS Virus
ttgaccacaatagcgactaatatta

SEQ ID NO: 90389 - DNA, 25 bp, SARS Virus
tgaccacaataaggactaatattaa

SEQ ID NO: 90390 - DNA, 25 bp, SARS Virus
gaccacaataacgactaatattaat

SEQ ID NO: 90391 - DNA, 25 bp, SARS Virus
accacaataacggctaatattaata

SEQ ID NO: 90392 - DNA, 25 bp, SARS Virus
ccacaataacgagtaatattaatat

SEQ ID NO: 90393 - DNA, 25 bp, SARS Virus
cacaataacgacgaatattaatatt

SEQ ID NO: 90394 - DNA, 25 bp, SARS Virus
acaataacgactgatattaatattt

SEQ ID NO: 90395 - DNA, 25 bp, SARS Virus
caataacgactagtattaatattta

SEQ ID NO: 90396 - DNA, 25 bp, SARS Virus
aataacgactaagattaatatttaa

SEQ ID NO: 90397 - DNA, 25 bp, SARS Virus
ataacgactaatgttaatatttaac

SEQ ID NO: 90398 - DNA, 25 bp, SARS Virus
taacgactaatagtaatatttaacg

SEQ ID NO: 90399 - DNA, 25 bp, SARS Virus
aacgactaatatgaatatttaacgg

SEQ ID NO: 90400 - DNA, 25 bp, SARS Virus
acgactaatattgatatttaacggt

SEQ ID NO: 90401 - DNA, 25 bp, SARS Virus
cgactaatattagtatttaacggtc

SEQ ID NO: 90402 - DNA, 25 bp, SARS Virus
gactaatattaagatttaacggtct

SEQ ID NO: 90403 - DNA, 25 bp, SARS Virus
actaatattaatgtttaacggtcta

SEQ ID NO: 90404 - DNA, 25 bp, SARS Virus
ctaatattaatagttaacggtctac

SEQ ID NO: 90405 - DNA, 25 bp, SARS Virus
taatattaatatgtaacggtctact

SEQ ID NO: 90406 - DNA, 25 bp, SARS Virus
aatattaatattgaacggtctacta

SEQ ID NO: 90407 - DNA, 25 bp, SARS Virus
atattaatatttgacggtctactaa

SEQ ID NO: 90408 - DNA, 25 bp, SARS Virus
tattaatatttagcggtctactaaa

SEQ ID NO: 90409 - DNA, 25 bp, SARS Virus
ccgtgcagtcgatgtcggataaaac

SEQ ID NO: 90410 - DNA, 25 bp, SARS Virus
cgtgcagtcgacttcggataaaaca

SEQ ID NO: 90411 - DNA, 25 bp, SARS Virus
gtgcagtcgacgtcggataaaacaa

SEQ ID NO: 90412 - DNA, 25 bp, SARS Virus
tgcagtcgacgttggataaaacaac

SEQ ID NO: 90413 - DNA, 25 bp, SARS Virus
gcagtcgacgtctgataaaacaacc

SEQ ID NO: 90414 - DNA, 25 bp, SARS Virus
cagtcgacgtcgtataaaacaaccg

SEQ ID NO: 90415 - DNA, 25 bp, SARS Virus
agtcgacgtcggttaaaacaaccga

SEQ ID NO: 90416 - DNA, 25 bp, SARS Virus
gtcgacgtcggataaaacaaccgat

SEQ ID NO: 90417 - DNA, 25 bp, SARS Virus
tcgacgtcggattaaacaaccgata

SEQ ID NO: 90418 - DNA, 25 bp, SARS Virus
cgacgtcggatataacaaccgataa

SEQ ID NO: 90419 - DNA, 25 bp, SARS Virus
gacgtcggataatacaaccgataaa

SEQ ID NO: 90420 - DNA, 25 bp, SARS Virus
acgtcggataaatcaaccgataaat

SEQ ID NO: 90421 - DNA, 25 bp, SARS Virus
cgtcggataaaataaccgataaatt

SEQ ID NO: 90422 - DNA, 25 bp, SARS Virus
gtcggataaaactaccgataaattt

SEQ ID NO: 90423 - DNA, 25 bp, SARS Virus
tcggataaaacatccgataaatttc

SEQ ID NO: 90424 - DNA, 25 bp, SARS Virus
cggataaaacaatcgataaatttcg

SEQ ID NO: 90425 - DNA, 25 bp, SARS Virus
ggataaaacaactgataaatttcgg

SEQ ID NO: 90426 - DNA, 25 bp, SARS Virus
gataaaacaacctataaatttcggt

SEQ ID NO: 90427 - DNA, 25 bp, SARS Virus
ataaaacaaccgttaaatttcggtt

SEQ ID NO: 90428 - DNA, 25 bp, SARS Virus
taaaacaaccgataaatttcggttg

SEQ ID NO: 90429 - DNA, 25 bp, SARS Virus
aaaacaaccgattaatttcggttga

SEQ ID NO: 90430 - DNA, 25 bp, SARS Virus
aaacaaccgatatatttcggttgat

SEQ ID NO: 90431 - DNA, 25 bp, SARS Virus
aacaaccgataattttcggttgatg

SEQ ID NO: 90432 - DNA, 25 bp, SARS Virus
acaaccgataaatttcggttgatgt

SEQ ID NO: 90433 - DNA, 25 bp, SARS Virus
caaccgataaatttcggttgatgta

SEQ ID NO: 90434 - DNA, 25 bp, SARS Virus
aaccgataaatttcggttgatgtaa

SEQ ID NO: 90435 - DNA, 25 bp, SARS Virus
accgataaattttggttgatgtaaa

SEQ ID NO: 90436 - DNA, 25 bp, SARS Virus
ccgataaatttctgttgatgtaaat

SEQ ID NO: 90437 - DNA, 25 bp, SARS Virus
cgataaatttcgtttgatgtaaata

SEQ ID NO: 90438 - DNA, 25 bp, SARS Virus
gataaatttcggttgatgtaaatac

SEQ ID NO: 90439 - DNA, 25 bp, SARS Virus
ataaatttcggttgatgtaaatacg

SEQ ID NO: 90440 - DNA, 25 bp, SARS Virus
taaatttcggtttatgtaaatacga

SEQ ID NO: 90441 - DNA, 25 bp, SARS Virus
aaatttcggttgttgtaaatacgag

SEQ ID NO: 90442 - DNA, 25 bp, SARS Virus
aatttcggttgatgtaaatacgagt

SEQ ID NO: 90443 - DNA, 25 bp, SARS Virus
atttcggttgatttaaatacgagtt

SEQ ID NO: 90444 - DNA, 25 bp, SARS Virus
tttcggttgatgtaaatacgagttc

SEQ ID NO: 90445 - DNA, 25 bp, SARS Virus
ttcggttgatgttaatacgagttca

SEQ ID NO: 90446 - DNA, 25 bp, SARS Virus
tcggttgatgtatatacgagttcat

SEQ ID NO: 90447 - DNA, 25 bp, SARS Virus
cggttgatgtaattacgagttcata

SEQ ID NO: 90448 - DNA, 25 bp, SARS Virus
ggttgatgtaaatacgagttcatac

SEQ ID NO: 90449 - DNA, 25 bp, SARS Virus
gttgatgtaaattcgagttcatact

SEQ ID NO: 90450 - DNA, 25 bp, SARS Virus
ttgatgtaaatatgagttcatacta

SEQ ID NO: 90451 - DNA, 25 bp, SARS Virus
tgatgtaaatactagttcatactac

SEQ ID NO: 90452 - DNA, 25 bp, SARS Virus
gatgtaaatacgtgttcatactact

SEQ ID NO: 90453 - DNA, 25 bp, SARS Virus
atgtaaatacgatttcatactactt

SEQ ID NO: 90454 - DNA, 25 bp, SARS Virus
tgtaaatacgagttcatactacttt

SEQ ID NO: 90455 - DNA, 25 bp, SARS Virus
gtaaatacgagttcatactactttt

SEQ ID NO: 90456 - DNA, 25 bp, SARS Virus
taaatacgagtttatactactttta

SEQ ID NO: 90457 - DNA, 25 bp, SARS Virus
aaatacgagttcttactacttttac

SEQ ID NO: 90458 - DNA, 25 bp, SARS Virus
aatacgagttcatactacttttacc

SEQ ID NO: 90459 - DNA, 25 bp, SARS Virus
atacgagttcattctacttttacca

SEQ ID NO: 90460 - DNA, 25 bp, SARS Virus
tacgagttcatattacttttaccat

SEQ ID NO: 90461 - DNA, 25 bp, SARS Virus
acgagttcatactacttttaccatg

SEQ ID NO: 90462 - DNA, 25 bp, SARS Virus
cgagttcatacttcttttaccatgt

SEQ ID NO: 90463 - DNA, 25 bp, SARS Virus
gagttcatactatttttaccatgtt

SEQ ID NO: 90464 - DNA, 25 bp, SARS Virus
agttcatactacttttaccatgtta

SEQ ID NO: 90465 - DNA, 25 bp, SARS Virus
gttcatactacttttaccatgttag

SEQ ID NO: 90466 - DNA, 25 bp, SARS Virus
ttcatactacttttaccatgttagt

SEQ ID NO: 90467 - DNA, 25 bp, SARS Virus
tcatactacttttaccatgttagtg

SEQ ID NO: 90468 - DNA, 25 bp, SARS Virus
catactactttttccatgttagtgt

SEQ ID NO: 90469 - DNA, 25 bp, SARS Virus
atactacttttatcatgttagtgtc

SEQ ID NO: 90470 - DNA, 25 bp, SARS Virus
tactacttttactatgttagtgtct

SEQ ID NO: 90471 - DNA, 25 bp, SARS Virus
actacttttaccttgttagtgtcta

SEQ ID NO: 90472 - DNA, 25 bp, SARS Virus
ctacttttaccatgttagtgtctac

SEQ ID NO: 90473 - DNA, 25 bp, SARS Virus
tacttttaccattttagtgtctacg

SEQ ID NO: 90474 - DNA, 25 bp, SARS Virus
acttttaccatgttagtgtctacga

SEQ ID NO: 90475 - DNA, 25 bp, SARS Virus
cttttaccatgttagtgtctacgac

SEQ ID NO: 90476 - DNA, 25 bp, SARS Virus
ttttaccatgtttgtgtctacgaca

SEQ ID NO: 90477 - DNA, 25 bp, SARS Virus
tttaccatgttattgtctacgacaa

SEQ ID NO: 90478 - DNA, 25 bp, SARS Virus
ttaccatgttagtgtctacgacaac

SEQ ID NO: 90479 - DNA, 25 bp, SARS Virus
taccatgttagtttctacgacaact

SEQ ID NO: 90480 - DNA, 25 bp, SARS Virus
accatgttagtgtctacgacaacta

SEQ ID NO: 90481 - DNA, 25 bp, SARS Virus
ccatgttagtgtttacgacaactaa

SEQ ID NO: 90482 - DNA, 25 bp, SARS Virus
catgttagtgtctacgacaactaac

SEQ ID NO: 90483 - DNA, 25 bp, SARS Virus
atgttagtgtcttcgacaactaaca

SEQ ID NO: 90484 - DNA, 25 bp, SARS Virus
tgttagtgtctatgacaactaacaa

SEQ ID NO: 90485 - DNA, 25 bp, SARS Virus
gttagtgtctactacaactaacaag

SEQ ID NO: 90486 - DNA, 25 bp, SARS Virus
ttagtgtctacgtcaactaacaaga

SEQ ID NO: 90487 - DNA, 25 bp, SARS Virus
tagtgtctacgataactaacaagag

SEQ ID NO: 90488 - DNA, 25 bp, SARS Virus
agtgtctacgactactaacaagagt

SEQ ID NO: 90489 - DNA, 25 bp, SARS Virus
gtgtctacgacatctaacaagagtt

SEQ ID NO: 90490 - DNA, 25 bp, SARS Virus
tgtctacgacaattaacaagagttt

SEQ ID NO: 90491 - DNA, 25 bp, SARS Virus
gtctacgacaactaacaagagtttt

SEQ ID NO: 90492 - DNA, 25 bp, SARS Virus
tctacgacaacttacaagagtttta

SEQ ID NO: 90493 - DNA, 25 bp, SARS Virus
ctacgacaactatcaagagttttag

SEQ ID NO: 90494 - DNA, 25 bp, SARS Virus
tacgacaactaataagagttttagg

SEQ ID NO: 90495 - DNA, 25 bp, SARS Virus
acgacaactaactagagttttaggt

SEQ ID NO: 90496 - DNA, 25 bp, SARS Virus
cgacaactaacatgagttttaggtg

SEQ ID NO: 90497 - DNA, 25 bp, SARS Virus
gacaactaacaatagttttaggtga

SEQ ID NO: 90498 - DNA, 25 bp, SARS Virus
acaactaacaagtgttttaggtgaa

SEQ ID NO: 90499 - DNA, 25 bp, SARS Virus
caactaacaagatttttaggtgaac

SEQ ID NO: 90500 - DNA, 25 bp, SARS Virus
aactaacaagagttttaggtgaacg

SEQ ID NO: 90501 - DNA, 25 bp, SARS Virus
actaacaagagttttaggtgaacga

SEQ ID NO: 90502 - DNA, 25 bp, SARS Virus
ctaacaagagttttaggtgaacgac

SEQ ID NO: 90503 - DNA, 25 bp, SARS Virus
taacaagagttttaggtgaacgact

SEQ ID NO: 90504 - DNA, 25 bp, SARS Virus
aacaagagtttttggtgaacgactt

SEQ ID NO: 90505 - DNA, 25 bp, SARS Virus
acaagagttttatgtgaacgacttg

SEQ ID NO: 90506 - DNA, 25 bp, SARS Virus
caagagttttagttgaacgacttga

SEQ ID NO: 90507 - DNA, 25 bp, SARS Virus
aagagttttaggtgaacgacttgag

SEQ ID NO: 90508 - DNA, 25 bp, SARS Virus
agagttttaggttaacgacttgagt

SEQ ID NO: 90509 - DNA, 25 bp, SARS Virus
gagttttaggtgtacgacttgagtt

SEQ ID NO: 90510 - DNA, 25 bp, SARS Virus
agttttaggtgatcgacttgagttt

SEQ ID NO: 90511 - DNA, 25 bp, SARS Virus
gttttaggtgaatgacttgagttta

SEQ ID NO: 90512 - DNA, 25 bp, SARS Virus
ttttaggtgaactacttgagtttac

SEQ ID NO: 90513 - DNA, 25 bp, SARS Virus
tttaggtgaacgtcttgagtttacg

SEQ ID NO: 90514 - DNA, 25 bp, SARS Virus
ttaggtgaacgatttgagtttacga

SEQ ID NO: 90515 - DNA, 25 bp, SARS Virus
taggtgaacgacttgagtttacgag

SEQ ID NO: 90516 - DNA, 25 bp, SARS Virus
aggtgaacgacttgagtttacgaga

SEQ ID NO: 90517 - DNA, 25 bp, SARS Virus
ggtgaacgactttagtttacgagac

SEQ ID NO: 90518 - DNA, 25 bp, SARS Virus
gtgaacgacttgtgtttacgagaca

SEQ ID NO: 90519 - DNA, 25 bp, SARS Virus
tgaacgacttgattttacgagacaa

SEQ ID NO: 90520 - DNA, 25 bp, SARS Virus
gaacgacttgagtttacgagacaat

SEQ ID NO: 90521 - DNA, 25 bp, SARS Virus
aacgacttgagtttacgagacaatt

SEQ ID NO: 90522 - DNA, 25 bp, SARS Virus
acgacttgagtttacgagacaattc

SEQ ID NO: 90523 - DNA, 25 bp, SARS Virus
cgacttgagttttcgagacaattct

SEQ ID NO: 90524 - DNA, 25 bp, SARS Virus
gacttgagtttatgagacaattctc

SEQ ID NO: 90525 - DNA, 25 bp, SARS Virus
acttgagtttactagacaattctcg

SEQ ID NO: 90526 - DNA, 25 bp, SARS Virus
cttgagtttacgtgacaattctcga

SEQ ID NO: 90527 - DNA, 25 bp, SARS Virus
ttgagtttacgatacaattctcgaa

SEQ ID NO: 90528 - DNA, 25 bp, SARS Virus
tgagtttacgagtcaattctcgaaa

SEQ ID NO: 90529 - DNA, 25 bp, SARS Virus
gagtttacgagataattctcgaaac

SEQ ID NO: 90530 - DNA, 25 bp, SARS Virus
agtttacgagactattctcgaaact

SEQ ID NO: 90531 - DNA, 25 bp, SARS Virus
gtttacgagacatttctcgaaactc

SEQ ID NO: 90532 - DNA, 25 bp, SARS Virus
tttacgagacaattctcgaaactct

SEQ ID NO: 90533 - DNA, 25 bp, SARS Virus
ttacgagacaattctcgaaactcta

SEQ ID NO: 90534 - DNA, 25 bp, SARS Virus
tacgagacaattttcgaaactctaa

SEQ ID NO: 90535 - DNA, 25 bp, SARS Virus
acgagacaattctcgaaactctaac

SEQ ID NO: 90536 - DNA, 25 bp, SARS Virus
cgagacaattcttgaaactctaact

SEQ ID NO: 90537 - DNA, 25 bp, SARS Virus
gagacaattctctaaactctaactg

SEQ ID NO: 90538 - DNA, 25 bp, SARS Virus
agacaattctcgtaactctaactgt

SEQ ID NO: 90539 - DNA, 25 bp, SARS Virus
gacaattctcgatactctaactgtt

SEQ ID NO: 90540 - DNA, 25 bp, SARS Virus
acaattctcgaatctctaactgttt

SEQ ID NO: 90541 - DNA, 25 bp, SARS Virus
caattctcgaaattctaactgtttc

SEQ ID NO: 90542 - DNA, 25 bp, SARS Virus
aattctcgaaactctaactgtttcc

SEQ ID NO: 90543 - DNA, 25 bp, SARS Virus
attctcgaaactttaactgtttcct

SEQ ID NO: 90544 - DNA, 25 bp, SARS Virus
ttctcgaaactctaactgtttcctt

SEQ ID NO: 90545 - DNA, 25 bp, SARS Virus
tctcgaaactcttactgtttcctta

SEQ ID NO: 90546 - DNA, 25 bp, SARS Virus
ctcgaaactctatctgtttccttaa

SEQ ID NO: 90547 - DNA, 25 bp, SARS Virus
tcgaaactctaattgtttccttaaa

SEQ ID NO: 90548 - DNA, 25 bp, SARS Virus
cgaaactctaactgtttccttaaat

SEQ ID NO: 90549 - DNA, 25 bp, SARS Virus
gaaactctaactttttccttaaatg

SEQ ID NO: 90550 - DNA, 25 bp, SARS Virus
aaactctaactgtttccttaaatgg

SEQ ID NO: 90551 - DNA, 25 bp, SARS Virus
aactctaactgtttccttaaatggt

SEQ ID NO: 90552 - DNA, 25 bp, SARS Virus
actctaactgtttccttaaatggtc

SEQ ID NO: 90553 - DNA, 25 bp, SARS Virus
ctctaactgttttcttaaatggtct

SEQ ID NO: 90554 - DNA, 25 bp, SARS Virus
tctaactgtttctttaaatggtctg

SEQ ID NO: 90555 - DNA, 25 bp, SARS Virus
ctaactgtttccttaaatggtctgg

SEQ ID NO: 90556 - DNA, 25 bp, SARS Virus
taactgtttccttaaatggtctgga

SEQ ID NO: 90557 - DNA, 25 bp, SARS Virus
aactgtttcctttaatggtctggag

SEQ ID NO: 90558 - DNA, 25 bp, SARS Virus
actgtttccttatatggtctggaga

SEQ ID NO: 90559 - DNA, 25 bp, SARS Virus
ctgtttccttaattggtctggagat

SEQ ID NO: 90560 - DNA, 25 bp, SARS Virus
tgtttccttaaatggtctggagatt

SEQ ID NO: 90561 - DNA, 25 bp, SARS Virus
gtttccttaaattgtctggagatta

SEQ ID NO: 90562 - DNA, 25 bp, SARS Virus
tttccttaaatgttctggagattaa

SEQ ID NO: 90563 - DNA, 25 bp, SARS Virus
ttccttaaatggtctggagattaaa

SEQ ID NO: 90564 - DNA, 25 bp, SARS Virus
tccttaaatggtttggagattaaag

SEQ ID NO: 90565 - DNA, 25 bp, SARS Virus
ccttaaatggtctggagattaaagt

SEQ ID NO: 90566 - DNA, 25 bp, SARS Virus
cttaaatggtcttgagattaaagtc

SEQ ID NO: 90567 - DNA, 25 bp, SARS Virus
ttaaatggtctgtagattaaagtcc

SEQ ID NO: 90568 - DNA, 25 bp, SARS Virus
taaatggtctggtgattaaagtccc

SEQ ID NO: 90569 - DNA, 25 bp, SARS Virus
aaatggtctggatattaaagtccca

SEQ ID NO: 90570 - DNA, 25 bp, SARS Virus
aatggtctggagtttaaagtcccaa

SEQ ID NO: 90571 - DNA, 25 bp, SARS Virus
atggtctggagattaaagtcccaac

SEQ ID NO: 90572 - DNA, 25 bp, SARS Virus
tggtctggagattaaagtcccaaca

SEQ ID NO: 90573 - DNA, 25 bp, SARS Virus
ggtctggagatttaagtcccaacaa

SEQ ID NO: 90574 - DNA, 25 bp, SARS Virus
gtctggagattatagtcccaacaag

SEQ ID NO: 90575 - DNA, 25 bp, SARS Virus
tctggagattaatgtcccaacaagg

SEQ ID NO: 90576 - DNA, 25 bp, SARS Virus
ctggagattaaattcccaacaaggg

SEQ ID NO: 90577 - DNA, 25 bp, SARS Virus
tggagattaaagtcccaacaaggga

SEQ ID NO: 90578 - DNA, 25 bp, SARS Virus
ggagattaaagttccaacaagggag

SEQ ID NO: 90579 - DNA, 25 bp, SARS Virus
gagattaaagtctcaacaagggagt

SEQ ID NO: 90580 - DNA, 25 bp, SARS Virus
agattaaagtcctaacaagggagtc

SEQ ID NO: 90581 - DNA, 25 bp, SARS Virus
gattaaagtccctacaagggagtcc

SEQ ID NO: 90582 - DNA, 25 bp, SARS Virus
attaaagtcccatcaagggagtcct

SEQ ID NO: 90583 - DNA, 25 bp, SARS Virus
ttaaagtcccaataagggagtcctc

SEQ ID NO: 90584 - DNA, 25 bp, SARS Virus
taaagtcccaactagggagtcctct

SEQ ID NO: 90585 - DNA, 25 bp, SARS Virus
aaagtcccaacatgggagtcctcta

SEQ ID NO: 90586 - DNA, 25 bp, SARS Virus
aagtcccaacaatggagtcctctac

SEQ ID NO: 90587 - DNA, 25 bp, SARS Virus
agtcccaacaagtgagtcctctaca

SEQ ID NO: 90588 - DNA, 25 bp, SARS Virus
gtcccaacaaggtagtcctctacaa

SEQ ID NO: 90589 - DNA, 25 bp, SARS Virus
tcccaacaagggtgtcctctacaac

SEQ ID NO: 90590 - DNA, 25 bp, SARS Virus
cccaacaagggattcctctacaaca

SEQ ID NO: 90591 - DNA, 25 bp, SARS Virus
ccaacaagggagtcctctacaacac

SEQ ID NO: 90592 - DNA, 25 bp, SARS Virus
caacaagggagttctctacaacact

SEQ ID NO: 90593 - DNA, 25 bp, SARS Virus
aacaagggagtcttctacaacactc

SEQ ID NO: 90594 - DNA, 25 bp, SARS Virus
acaagggagtcctctacaacactct

SEQ ID NO: 90595 - DNA, 25 bp, SARS Virus
caagggagtcctttacaacactcta

SEQ ID NO: 90596 - DNA, 25 bp, SARS Virus
aagggagtcctctacaacactctaa

SEQ ID NO: 90597 - DNA, 25 bp, SARS Virus
agggagtcctcttcaacactctaag

SEQ ID NO: 90598 - DNA, 25 bp, SARS Virus
gggagtcctctataacactctaagg

SEQ ID NO: 90599 - DNA, 25 bp, SARS Virus
ggagtcctctactacactctaaggg

SEQ ID NO: 90600 - DNA, 25 bp, SARS Virus
gagtcctctacatcactctaaggga

SEQ ID NO: 90601 - DNA, 25 bp, SARS Virus
agtcctctacaatactctaagggat

SEQ ID NO: 90602 - DNA, 25 bp, SARS Virus
gtcctctacaactctctaagggatt

SEQ ID NO: 90603 - DNA, 25 bp, SARS Virus
tcctctacaacattctaagggatta

SEQ ID NO: 90604 - DNA, 25 bp, SARS Virus
cctctacaacactctaagggattat

SEQ ID NO: 90605 - DNA, 25 bp, SARS Virus
ctctacaacactttaagggattata

SEQ ID NO: 90606 - DNA, 25 bp, SARS Virus
tctacaacactctaagggattataa

SEQ ID NO: 90607 - DNA, 25 bp, SARS Virus
ctacaacactcttagggattataat

SEQ ID NO: 90608 - DNA, 25 bp, SARS Virus
tacaacactctatgggattataatg

SEQ ID NO: 90609 - DNA, 25 bp, SARS Virus
acaacactctaatggattataatgt

SEQ ID NO: 90610 - DNA, 25 bp, SARS Virus
caacactctaagtgattataatgtt

SEQ ID NO: 90611 - DNA, 25 bp, SARS Virus
aacactctaaggtattataatgttt

SEQ ID NO: 90612 - DNA, 25 bp, SARS Virus
acactctaagggtttataatgtttg

SEQ ID NO: 90613 - DNA, 25 bp, SARS Virus
cactctaagggattataatgtttga

SEQ ID NO: 90614 - DNA, 25 bp, SARS Virus
actctaagggattataatgtttgaa

SEQ ID NO: 90615 - DNA, 25 bp, SARS Virus
ctctaagggattttaatgtttgaac

SEQ ID NO: 90616 - DNA, 25 bp, SARS Virus
tctaagggattataatgtttgaaca

SEQ ID NO: 90617 - DNA, 25 bp, SARS Virus
ctaagggattattatgtttgaacac

SEQ ID NO: 90618 - DNA, 25 bp, SARS Virus
taagggattatattgtttgaacaca

SEQ ID NO: 90619 - DNA, 25 bp, SARS Virus
aagggattataatgtttgaacacag

SEQ ID NO: 90620 - DNA, 25 bp, SARS Virus
agggattataatttttgaacacagg

SEQ ID NO: 90621 - DNA, 25 bp, SARS Virus
gggattataatgtttgaacacagga

SEQ ID NO: 90622 - DNA, 25 bp, SARS Virus
ggattataatgtttgaacacaggaa

SEQ ID NO: 90623 - DNA, 25 bp, SARS Virus
gattataatgtttgaacacaggaaa

SEQ ID NO: 90624 - DNA, 25 bp, SARS Virus
attataatgttttaacacaggaaaa

SEQ ID NO: 90625 - DNA, 25 bp, SARS Virus
ttataatgtttgtacacaggaaaac

SEQ ID NO: 90626 - DNA, 25 bp, SARS Virus
tataatgtttgatcacaggaaaacc

SEQ ID NO: 90627 - DNA, 25 bp, SARS Virus
ataatgtttgaatacaggaaaacct

SEQ ID NO: 90628 - DNA, 25 bp, SARS Virus
taatgtttgaactcaggaaaacctc

SEQ ID NO: 90629 - DNA, 25 bp, SARS Virus
aatgtttgaacataggaaaacctct

SEQ ID NO: 90630 - DNA, 25 bp, SARS Virus
atgtttgaacactggaaaacctctc

SEQ ID NO: 90631 - DNA, 25 bp, SARS Virus
tgtttgaacacatgaaaacctctcc

SEQ ID NO: 90632 - DNA, 25 bp, SARS Virus
gtttgaacacagtaaaacctctcca

SEQ ID NO: 90633 - DNA, 25 bp, SARS Virus
tttgaacacaggtaaacctctccaa

SEQ ID NO: 90634 - DNA, 25 bp, SARS Virus
ttgaacacaggataacctctccaaa

SEQ ID NO: 90635 - DNA, 25 bp, SARS Virus
tgaacacaggaatacctctccaaaa

SEQ ID NO: 90636 - DNA, 25 bp, SARS Virus
gaacacaggaaatcctctccaaaaa

SEQ ID NO: 90637 - DNA, 25 bp, SARS Virus
aacacaggaaaatctctccaaaaat

SEQ ID NO: 90638 - DNA, 25 bp, SARS Virus
acacaggaaaacttctccaaaaatt

SEQ ID NO: 90639 - DNA, 25 bp, SARS Virus
cacaggaaaacctctccaaaaatta

SEQ ID NO: 90640 - DNA, 25 bp, SARS Virus
acaggaaaacctttccaaaaattac

SEQ ID NO: 90641 - DNA, 25 bp, SARS Virus
caggaaaacctctccaaaaattacg

SEQ ID NO: 90642 - DNA, 25 bp, SARS Virus
aggaaaacctcttcaaaaattacga

SEQ ID NO: 90643 - DNA, 25 bp, SARS Virus
ggaaaacctctctaaaaattacgat

SEQ ID NO: 90644 - DNA, 25 bp, SARS Virus
gaaaacctctcctaaaattacgatg

SEQ ID NO: 90645 - DNA, 25 bp, SARS Virus
aaaacctctccataaattacgatga

SEQ ID NO: 90646 - DNA, 25 bp, SARS Virus
aaacctctccaataattacgatgat

SEQ ID NO: 90647 - DNA, 25 bp, SARS Virus
aacctctccaaatattacgatgatt

SEQ ID NO: 90648 - DNA, 25 bp, SARS Virus
acctctccaaaatttacgatgattt

SEQ ID NO: 90649 - DNA, 25 bp, SARS Virus
cctctccaaaaattacgatgattta

SEQ ID NO: 90650 - DNA, 25 bp, SARS Virus
ctctccaaaaattacgatgatttaa

SEQ ID NO: 90651 - DNA, 25 bp, SARS Virus
tctccaaaaatttcgatgatttaag

SEQ ID NO: 90652 - DNA, 25 bp, SARS Virus
ctccaaaaattatgatgatttaagg

SEQ ID NO: 90653 - DNA, 25 bp, SARS Virus
tccaaaaattactatgatttaaggg

SEQ ID NO: 90654 - DNA, 25 bp, SARS Virus
ccaaaaattacgttgatttaaggga

SEQ ID NO: 90655 - DNA, 25 bp, SARS Virus
caaaaattacgatgatttaagggaa

SEQ ID NO: 90656 - DNA, 25 bp, SARS Virus
aaaaattacgattatttaagggaag

SEQ ID NO: 90657 - DNA, 25 bp, SARS Virus
aaaattacgatgttttaagggaaga

SEQ ID NO: 90658 - DNA, 25 bp, SARS Virus
aaattacgatgatttaagggaagac

SEQ ID NO: 90659 - DNA, 25 bp, SARS Virus
aattacgatgatttaagggaagaca

SEQ ID NO: 90660 - DNA, 25 bp, SARS Virus
attacgatgatttaagggaagacag

SEQ ID NO: 90661 - DNA, 25 bp, SARS Virus
ttacgatgattttagggaagacaga

SEQ ID NO: 90662 - DNA, 25 bp, SARS Virus
tacgatgatttatgggaagacagat

SEQ ID NO: 90663 - DNA, 25 bp, SARS Virus
acgatgatttaatggaagacagata

SEQ ID NO: 90664 - DNA, 25 bp, SARS Virus
cgatgatttaagtgaagacagatac

SEQ ID NO: 90665 - DNA, 25 bp, SARS Virus
gatgatttaaggtaagacagatacg

SEQ ID NO: 90666 - DNA, 25 bp, SARS Virus
atgatttaagggtagacagatacgt

SEQ ID NO: 90667 - DNA, 25 bp, SARS Virus
tgatttaagggatgacagatacgta

SEQ ID NO: 90668 - DNA, 25 bp, SARS Virus
gatttaagggaatacagatacgtac

SEQ ID NO: 90669 - DNA, 25 bp, SARS Virus
atttaagggaagtcagatacgtacc

SEQ ID NO: 90670 - DNA, 25 bp, SARS Virus
tttaagggaagatagatacgtaccc

SEQ ID NO: 90671 - DNA, 25 bp, SARS Virus
ttaagggaagactgatacgtaccct

SEQ ID NO: 90672 - DNA, 25 bp, SARS Virus
taagggaagacatatacgtaccctc

SEQ ID NO: 90673 - DNA, 25 bp, SARS Virus
aagggaagacagttacgtaccctct

SEQ ID NO: 90674 - DNA, 25 bp, SARS Virus
agggaagacagatacgtaccctctc

SEQ ID NO: 90675 - DNA, 25 bp, SARS Virus
gggaagacagattcgtaccctctct

SEQ ID NO: 90676 - DNA, 25 bp, SARS Virus
ggaagacagatatgtaccctctctt

SEQ ID NO: 90677 - DNA, 25 bp, SARS Virus
gaagacagatacttaccctctcttt

SEQ ID NO: 90678 - DNA, 25 bp, SARS Virus
aagacagatacgtaccctctctttt

SEQ ID NO: 90679 - DNA, 25 bp, SARS Virus
agacagatacgttccctctcttttt

SEQ ID NO: 90680 - DNA, 25 bp, SARS Virus
gacagatacgtatcctctctttttt

SEQ ID NO: 90681 - DNA, 25 bp, SARS Virus
acagatacgtactctctcttttttt

SEQ ID NO: 90682 - DNA, 25 bp, SARS Virus
cagatacgtaccttctctttttttt

SEQ ID NO: 90683 - DNA, 25 bp, SARS Virus
agatacgtaccctctctttttttta

SEQ ID NO: 90684 - DNA, 25 bp, SARS Virus
gatacgtaccctttcttttttttaa

SEQ ID NO: 90685 - DNA, 25 bp, SARS Virus
atacgtaccctctcttttttttaaa

SEQ ID NO: 90686 - DNA, 25 bp, SARS Virus
tacgtaccctcttttttttttaaag

SEQ ID NO: 90687 - DNA, 25 bp, SARS Virus
acgtaccctctcttttttttaaaga

SEQ ID NO: 90688 - DNA, 25 bp, SARS Virus
cgtaccctctcttttttttaaagat

SEQ ID NO: 90689 - DNA, 25 bp, SARS Virus
gtaccctctcttttttttaaagatt

SEQ ID NO: 90690 - DNA, 25 bp, SARS Virus
taccctctcttttttttaaagatta

SEQ ID NO: 90691 - DNA, 25 bp, SARS Virus
accctctcttttttttaaagattaa

SEQ ID NO: 90692 - DNA, 25 bp, SARS Virus
ccctctcttttttttaaagattaac

SEQ ID NO: 90693 - DNA, 25 bp, SARS Virus
cctctcttttttttaaagattaaca

SEQ ID NO: 90694 - DNA, 25 bp, SARS Virus
ctctcttttttttaaagattaacac

SEQ ID NO: 90695 - DNA, 25 bp, SARS Virus
tctctttttttttaagattaacaca

SEQ ID NO: 90696 - DNA, 25 bp, SARS Virus
ctcttttttttatagattaacacaa

SEQ ID NO: 90697 - DNA, 25 bp, SARS Virus
tcttttttttaatgattaacacaac

SEQ ID NO: 90698 - DNA, 25 bp, SARS Virus
cttttttttaaatattaacacaacg

SEQ ID NO: 90699 - DNA, 25 bp, SARS Virus
ttttttttaaagtttaacacaacga

SEQ ID NO: 90700 - DNA, 25 bp, SARS Virus
tttttttaaagattaacacaacgac

SEQ ID NO: 90701 - DNA, 25 bp, SARS Virus
ttttttaaagattaacacaacgact

SEQ ID NO: 90702 - DNA, 25 bp, SARS Virus
tttttaaagatttacacaacgacta

SEQ ID NO: 90703 - DNA, 25 bp, SARS Virus
ttttaaagattatcacaacgactaa

SEQ ID NO: 90704 - DNA, 25 bp, SARS Virus
tttaaagattaatacaacgactaat

SEQ ID NO: 90705 - DNA, 25 bp, SARS Virus
ttaaagattaactcaacgactaatg

SEQ ID NO: 90706 - DNA, 25 bp, SARS Virus
taaagattaacataacgactaatga

SEQ ID NO: 90707 - DNA, 25 bp, SARS Virus
aaagattaacactacgactaatgag

SEQ ID NO: 90708 - DNA, 25 bp, SARS Virus
aagattaacacatcgactaatgaga

SEQ ID NO: 90709 - DNA, 25 bp, SARS Virus
agattaacacaatgactaatgagac

SEQ ID NO: 90710 - DNA, 25 bp, SARS Virus
gattaacacaactactaatgagaca

SEQ ID NO: 90711 - DNA, 25 bp, SARS Virus
attaacacaacgtctaatgagacac

SEQ ID NO: 90712 - DNA, 25 bp, SARS Virus
ttaacacaacgattaatgagacacg

SEQ ID NO: 90713 - DNA, 25 bp, SARS Virus
taacacaacgactaatgagacacga

SEQ ID NO: 90714 - DNA, 25 bp, SARS Virus
aacacaacgacttatgagacacgag

SEQ ID NO: 90715 - DNA, 25 bp, SARS Virus
acacaacgactattgagacacgaga

SEQ ID NO: 90716 - DNA, 25 bp, SARS Virus
cacaacgactaatgagacacgagat

SEQ ID NO: 90717 - DNA, 25 bp, SARS Virus
acaacgactaattagacacgagatg

SEQ ID NO: 90718 - DNA, 25 bp, SARS Virus
caacgactaatgtgacacgagatgt

SEQ ID NO: 90719 - DNA, 25 bp, SARS Virus
aacgactaatgatacacgagatgtt

SEQ ID NO: 90720 - DNA, 25 bp, SARS Virus
acgactaatgagtcacgagatgttg

SEQ ID NO: 90721 - DNA, 25 bp, SARS Virus
cgactaatgagatacgagatgttga

SEQ ID NO: 90722 - DNA, 25 bp, SARS Virus
gactaatgagactcgagatgttgag

SEQ ID NO: 90723 - DNA, 25 bp, SARS Virus
actaatgagacatgagatgttgagt

SEQ ID NO: 90724 - DNA, 25 bp, SARS Virus
ctaatgagacactagatgttgagtt

SEQ ID NO: 90725 - DNA, 25 bp, SARS Virus
taatgagacacgtgatgttgagttg

SEQ ID NO: 90726 - DNA, 25 bp, SARS Virus
aatgagacacgatatgttgagttgt

SEQ ID NO: 90727 - DNA, 25 bp, SARS Virus
atgagacacgagttgttgagttgta

SEQ ID NO: 90728 - DNA, 25 bp, SARS Virus
tgagacacgagatgttgagttgtaa

SEQ ID NO: 90729 - DNA, 25 bp, SARS Virus
gagacacgagattttgagttgtaaa

SEQ ID NO: 90730 - DNA, 25 bp, SARS Virus
agacacgagatgttgagttgtaaaa

SEQ ID NO: 90731 - DNA, 25 bp, SARS Virus
gacacgagatgttgagttgtaaaaa

SEQ ID NO: 90732 - DNA, 25 bp, SARS Virus
acacgagatgtttagttgtaaaaaa

SEQ ID NO: 90733 - DNA, 25 bp, SARS Virus
cacgagatgttgtgttgtaaaaaaa

SEQ ID NO: 90734 - DNA, 25 bp, SARS Virus
acgagatgttgatttgtaaaaaaag

SEQ ID NO: 90735 - DNA, 25 bp, SARS Virus
cgagatgttgagttgtaaaaaaagt

SEQ ID NO: 90736 - DNA, 25 bp, SARS Virus
gagatgttgagttgtaaaaaaagtt

SEQ ID NO: 90737 - DNA, 25 bp, SARS Virus
agatgttgagttttaaaaaaagttg

SEQ ID NO: 90738 - DNA, 25 bp, SARS Virus
gatgttgagttgtaaaaaaagttgg

SEQ ID NO: 90739 - DNA, 25 bp, SARS Virus
atgttgagttgttaaaaaagttgga

SEQ ID NO: 90740 - DNA, 25 bp, SARS Virus
tgttgagttgtataaaaagttggaa

SEQ ID NO: 90741 - DNA, 25 bp, SARS Virus
gttgagttgtaataaaagttggaaa

SEQ ID NO: 90742 - DNA, 25 bp, SARS Virus
ttgagttgtaaataaagttggaaat

SEQ ID NO: 90743 - DNA, 25 bp, SARS Virus
tgagttgtaaaataagttggaaatt

SEQ ID NO: 90744 - DNA, 25 bp, SARS Virus
gagttgtaaaaatagttggaaattc

SEQ ID NO: 90745 - DNA, 25 bp, SARS Virus
agttgtaaaaaatgttggaaattca

SEQ ID NO: 90746 - DNA, 25 bp, SARS Virus
gttgtaaaaaaatttggaaattcac

SEQ ID NO: 90747 - DNA, 25 bp, SARS Virus
ttgtaaaaaaagttggaaattcacg

SEQ ID NO: 90748 - DNA, 25 bp, SARS Virus
tgtaaaaaaagttggaaattcacga

SEQ ID NO: 90749 - DNA, 25 bp, SARS Virus
gtaaaaaaagtttgaaattcacgat

SEQ ID NO: 90750 - DNA, 25 bp, SARS Virus
taaaaaaagttgtaaattcacgata

SEQ ID NO: 90751 - DNA, 25 bp, SARS Virus
aaaaaaagttggtaattcacgatac

SEQ ID NO: 90752 - DNA, 25 bp, SARS Virus
aaaaaagttggatattcacgatacc

SEQ ID NO: 90753 - DNA, 25 bp, SARS Virus
aaaaagttggaatttcacgataccg

SEQ ID NO: 90754 - DNA, 25 bp, SARS Virus
aaaagttggaaattcacgataccgc

SEQ ID NO: 90755 - DNA, 25 bp, SARS Virus
aaagttggaaattcacgataccgca

SEQ ID NO: 90756 - DNA, 25 bp, SARS Virus
aagttggaaatttacgataccgcaa

SEQ ID NO: 90757 - DNA, 25 bp, SARS Virus
agttggaaattctcgataccgcaaa

SEQ ID NO: 90758 - DNA, 25 bp, SARS Virus
gttggaaattcatgataccgcaaag

SEQ ID NO: 90759 - DNA, 25 bp, SARS Virus
ttggaaattcactataccgcaaaga

SEQ ID NO: 90760 - DNA, 25 bp, SARS Virus
tggaaattcacgttaccgcaaagac

SEQ ID NO: 90761 - DNA, 25 bp, SARS Virus
ggaaattcacgataccgcaaagacg

SEQ ID NO: 90762 - DNA, 25 bp, SARS Virus
gaaattcacgattccgcaaagacgg

SEQ ID NO: 90763 - DNA, 25 bp, SARS Virus
aaattcacgatatcgcaaagacggt

SEQ ID NO: 90764 - DNA, 25 bp, SARS Virus
aattcacgatactgcaaagacggtg

SEQ ID NO: 90765 - DNA, 25 bp, SARS Virus
attcacgatacctcaaagacggtga

SEQ ID NO: 90766 - DNA, 25 bp, SARS Virus
ttcacgataccgtaaagacggtgat

SEQ ID NO: 90767 - DNA, 25 bp, SARS Virus
tcacgataccgctaagacggtgatt

SEQ ID NO: 90768 - DNA, 25 bp, SARS Virus
cacgataccgcatagacggtgattc

SEQ ID NO: 90769 - DNA, 25 bp, SARS Virus
acgataccgcaatgacggtgattca

SEQ ID NO: 90770 - DNA, 25 bp, SARS Virus
cgataccgcaaatacggtgattcaa

SEQ ID NO: 90771 - DNA, 25 bp, SARS Virus
gataccgcaaagtcggtgattcaac

SEQ ID NO: 90772 - DNA, 25 bp, SARS Virus
ataccgcaaagatggtgattcaact

SEQ ID NO: 90773 - DNA, 25 bp, SARS Virus
taccgcaaagactgtgattcaactt

SEQ ID NO: 90774 - DNA, 25 bp, SARS Virus
accgcaaagacgttgattcaactta

SEQ ID NO: 90775 - DNA, 25 bp, SARS Virus
ccgcaaagacggtgattcaacttac

SEQ ID NO: 90776 - DNA, 25 bp, SARS Virus
cgcaaagacggttattcaacttact

SEQ ID NO: 90777 - DNA, 25 bp, SARS Virus
gcaaagacggtgtttcaacttacta

SEQ ID NO: 90778 - DNA, 25 bp, SARS Virus
caaagacggtgattcaacttactag

SEQ ID NO: 90779 - DNA, 25 bp, SARS Virus
aaagacggtgattcaacttactaga

SEQ ID NO: 90780 - DNA, 25 bp, SARS Virus
aagacggtgatttaacttactagaa

SEQ ID NO: 90781 - DNA, 25 bp, SARS Virus
agacggtgattctacttactagaaa

SEQ ID NO: 90782 - DNA, 25 bp, SARS Virus
gacggtgattcatcttactagaaac

SEQ ID NO: 90783 - DNA, 25 bp, SARS Virus
acggtgattcaatttactagaaacg

SEQ ID NO: 90784 - DNA, 25 bp, SARS Virus
cggtgattcaacttactagaaacga

SEQ ID NO: 90785 - DNA, 25 bp, SARS Virus
ggtgattcaacttactagaaacgaa

SEQ ID NO: 90786 - DNA, 25 bp, SARS Virus
gtgattcaactttctagaaacgaag

SEQ ID NO: 90787 - DNA, 25 bp, SARS Virus
tgattcaacttattagaaacgaaga

SEQ ID NO: 90788 - DNA, 25 bp, SARS Virus
gattcaacttactagaaacgaagag

SEQ ID NO: 90789 - DNA, 25 bp, SARS Virus
attcaacttacttgaaacgaagagg

SEQ ID NO: 90790 - DNA, 25 bp, SARS Virus
ttcaacttactataaacgaagaggt

SEQ ID NO: 90791 - DNA, 25 bp, SARS Virus
tcaacttactagtaacgaagaggtt

SEQ ID NO: 90792 - DNA, 25 bp, SARS Virus
caacttactagatacgaagaggtta

SEQ ID NO: 90793 - DNA, 25 bp, SARS Virus
aacttactagaatcgaagaggttac

SEQ ID NO: 90794 - DNA, 25 bp, SARS Virus
acttactagaaatgaagaggttaca

SEQ ID NO: 90795 - DNA, 25 bp, SARS Virus
cttactagaaactaagaggttacag

SEQ ID NO: 90796 - DNA, 25 bp, SARS Virus
ttactagaaacgtagaggttacaga

SEQ ID NO: 90797 - DNA, 25 bp, SARS Virus
tactagaaacgatgaggttacagat

SEQ ID NO: 90798 - DNA, 25 bp, SARS Virus
actagaaacgaataggttacagata

SEQ ID NO: 90799 - DNA, 25 bp, SARS Virus
ctagaaacgaagtggttacagatac

SEQ ID NO: 90800 - DNA, 25 bp, SARS Virus
tagaaacgaagatgttacagatacg

SEQ ID NO: 90801 - DNA, 25 bp, SARS Virus
agaaacgaagagtttacagatacgt

SEQ ID NO: 90802 - DNA, 25 bp, SARS Virus
gaaacgaagaggttacagatacgtc

SEQ ID NO: 90803 - DNA, 25 bp, SARS Virus
aaacgaagaggttacagatacgtct

SEQ ID NO: 90804 - DNA, 25 bp, SARS Virus
aacgaagaggtttcagatacgtcta

SEQ ID NO: 90805 - DNA, 25 bp, SARS Virus
acgaagaggttatagatacgtctaa

SEQ ID NO: 90806 - DNA, 25 bp, SARS Virus
cgaagaggttactgatacgtctaag

SEQ ID NO: 90807 - DNA, 25 bp, SARS Virus
gaagaggttacatatacgtctaaga

SEQ ID NO: 90808 - DNA, 25 bp, SARS Virus
aagaggttacagttacgtctaagaa

SEQ ID NO: 90809 - DNA, 25 bp, SARS Virus
agaggttacagatacgtctaagaaa

SEQ ID NO: 90810 - DNA, 25 bp, SARS Virus
gaggttacagattcgtctaagaaaa

SEQ ID NO: 90811 - DNA, 25 bp, SARS Virus
aggttacagatatgtctaagaaaac

SEQ ID NO: 90812 - DNA, 25 bp, SARS Virus
ggttacagatacttctaagaaaaca

SEQ ID NO: 90813 - DNA, 25 bp, SARS Virus
gttacagatacgtctaagaaaacat

SEQ ID NO: 90814 - DNA, 25 bp, SARS Virus
ttacagatacgtttaagaaaacatc

SEQ ID NO: 90815 - DNA, 25 bp, SARS Virus
tacagatacgtctaagaaaacatca

SEQ ID NO: 90816 - DNA, 25 bp, SARS Virus
acagatacgtcttagaaaacatcag

SEQ ID NO: 90817 - DNA, 25 bp, SARS Virus
cagatacgtctatgaaaacatcagt

SEQ ID NO: 90818 - DNA, 25 bp, SARS Virus
agatacgtctaataaaacatcagtt

SEQ ID NO: 90819 - DNA, 25 bp, SARS Virus
gatacgtctaagtaaacatcagttc

SEQ ID NO: 90820 - DNA, 25 bp, SARS Virus
atacgtctaagataacatcagttcc

SEQ ID NO: 90821 - DNA, 25 bp, SARS Virus
tacgtctaagaatacatcagttccc

SEQ ID NO: 90822 - DNA, 25 bp, SARS Virus
acgtctaagaaatcatcagttccct

SEQ ID NO: 90823 - DNA, 25 bp, SARS Virus
cgtctaagaaaatatcagttccctc

SEQ ID NO: 90824 - DNA, 25 bp, SARS Virus
gtctaagaaaacttcagttccctct

SEQ ID NO: 90825 - DNA, 25 bp, SARS Virus
tctaagaaaacatcagttccctcta

SEQ ID NO: 90826 - DNA, 25 bp, SARS Virus
ctaagaaaacattagttccctctac

SEQ ID NO: 90827 - DNA, 25 bp, SARS Virus
taagaaaacatctgttccctctact

SEQ ID NO: 90828 - DNA, 25 bp, SARS Virus
aagaaaacatcatttccctctacta

SEQ ID NO: 90829 - DNA, 25 bp, SARS Virus
agaaaacatcagttccctctactac

SEQ ID NO: 90830 - DNA, 25 bp, SARS Virus
gaaaacatcagttccctctactaca

SEQ ID NO: 90831 - DNA, 25 bp, SARS Virus
aaaacatcagtttcctctactacat

SEQ ID NO: 90832 - DNA, 25 bp, SARS Virus
aaacatcagttctctctactacatt

SEQ ID NO: 90833 - DNA, 25 bp, SARS Virus
aacatcagttccttctactacattc

SEQ ID NO: 90834 - DNA, 25 bp, SARS Virus
acatcagttccctctactacattct

SEQ ID NO: 90835 - DNA, 25 bp, SARS Virus
catcagttccctttactacattctg

SEQ ID NO: 90836 - DNA, 25 bp, SARS Virus
atcagttccctctactacattctgt

SEQ ID NO: 90837 - DNA, 25 bp, SARS Virus
tcagttccctcttctacattctgtt

SEQ ID NO: 90838 - DNA, 25 bp, SARS Virus
cagttccctctattacattctgttt

SEQ ID NO: 90839 - DNA, 25 bp, SARS Virus
agttccctctactacattctgttta

SEQ ID NO: 90840 - DNA, 25 bp, SARS Virus
gttccctctacttcattctgtttat

SEQ ID NO: 90841 - DNA, 25 bp, SARS Virus
ttccctctactatattctgtttatc

SEQ ID NO: 90842 - DNA, 25 bp, SARS Virus
tccctctactactttctgtttatcg

SEQ ID NO: 90843 - DNA, 25 bp, SARS Virus
ccctctactacattctgtttatcgc

SEQ ID NO: 90844 - DNA, 25 bp, SARS Virus
cctctactacattctgtttatcgcg

SEQ ID NO: 90845 - DNA, 25 bp, SARS Virus
ctctactacattttgtttatcgcgg

SEQ ID NO: 90846 - DNA, 25 bp, SARS Virus
tctactacattctgtttatcgcggt

SEQ ID NO: 90847 - DNA, 25 bp, SARS Virus
ctactacattctttttatcgcggtc

SEQ ID NO: 90848 - DNA, 25 bp, SARS Virus
tactacattctgtttatcgcggtcc

SEQ ID NO: 90849 - DNA, 25 bp, SARS Virus
actacattctgtttatcgcggtcct

SEQ ID NO: 90850 - DNA, 25 bp, SARS Virus
ctacattctgtttatcgcggtcctg

SEQ ID NO: 90851 - DNA, 25 bp, SARS Virus
tacattctgtttttcgcggtcctgt

SEQ ID NO: 90852 - DNA, 25 bp, SARS Virus
acattctgtttatcgcggtcctgtt

SEQ ID NO: 90853 - DNA, 25 bp, SARS Virus
cattctgtttattgcggtcctgttt

SEQ ID NO: 90854 - DNA, 25 bp, SARS Virus
attctgtttatctcggtcctgtttg

SEQ ID NO: 90855 - DNA, 25 bp, SARS Virus
ttctgtttatcgtggtcctgtttga

SEQ ID NO: 90856 - DNA, 25 bp, SARS Virus
tctgtttatcgctgtcctgtttgac

SEQ ID NO: 90857 - DNA, 25 bp, SARS Virus
ctgtttatcgcgttcctgtttgacc

SEQ ID NO: 90858 - DNA, 25 bp, SARS Virus
tgtttatcgcggtcctgtttgacca

SEQ ID NO: 90859 - DNA, 25 bp, SARS Virus
gtttatcgcggttctgtttgaccac

SEQ ID NO: 90860 - DNA, 25 bp, SARS Virus
tttatcgcggtcttgtttgaccaca

SEQ ID NO: 90861 - DNA, 25 bp, SARS Virus
ttatcgcggtcctgtttgaccacaa

SEQ ID NO: 90862 - DNA, 25 bp, SARS Virus
tatcgcggtcctttttgaccacaat

SEQ ID NO: 90863 - DNA, 25 bp, SARS Virus
atcgcggtcctgtttgaccacaata

SEQ ID NO: 90864 - DNA, 25 bp, SARS Virus
tcgcggtcctgtttgaccacaataa

SEQ ID NO: 90865 - DNA, 25 bp, SARS Virus
cgcggtcctgtttgaccacaataac

SEQ ID NO: 90866 - DNA, 25 bp, SARS Virus
gcggtcctgttttaccacaataacg

SEQ ID NO: 90867 - DNA, 25 bp, SARS Virus
cggtcctgtttgtccacaataacga

SEQ ID NO: 90868 - DNA, 25 bp, SARS Virus
ggtcctgtttgatcacaataacgac

SEQ ID NO: 90869 - DNA, 25 bp, SARS Virus
gtcctgtttgactacaataacgact

SEQ ID NO: 90870 - DNA, 25 bp, SARS Virus
tcctgtttgacctcaataacgacta

SEQ ID NO: 90871 - DNA, 25 bp, SARS Virus
cctgtttgaccataataacgactaa

SEQ ID NO: 90872 - DNA, 25 bp, SARS Virus
ctgtttgaccactataacgactaat

SEQ ID NO: 90873 - DNA, 25 bp, SARS Virus
tgtttgaccacattaacgactaata

SEQ ID NO: 90874 - DNA, 25 bp, SARS Virus
gtttgaccacaataacgactaatat

SEQ ID NO: 90875 - DNA, 25 bp, SARS Virus
tttgaccacaattacgactaatatt

SEQ ID NO: 90876 - DNA, 25 bp, SARS Virus
ttgaccacaatatcgactaatatta

SEQ ID NO: 90877 - DNA, 25 bp, SARS Virus
tgaccacaataatgactaatattaa

SEQ ID NO: 90878 - DNA, 25 bp, SARS Virus
gaccacaataactactaatattaat

SEQ ID NO: 90879 - DNA, 25 bp, SARS Virus
accacaataacgtctaatattaata

SEQ ID NO: 90880 - DNA, 25 bp, SARS Virus
ccacaataacgattaatattaatat

SEQ ID NO: 90881 - DNA, 25 bp, SARS Virus
cacaataacgactaatattaatatt

SEQ ID NO: 90882 - DNA, 25 bp, SARS Virus
acaataacgacttatattaatattt

SEQ ID NO: 90883 - DNA, 25 bp, SARS Virus
caataacgactattattaatattta

SEQ ID NO: 90884 - DNA, 25 bp, SARS Virus
aataacgactaatattaatatttaa

SEQ ID NO: 90885 - DNA, 25 bp, SARS Virus
ataacgactaattttaatatttaac

SEQ ID NO: 90886 - DNA, 25 bp, SARS Virus
taacgactaatattaatatttaacg

SEQ ID NO: 90887 - DNA, 25 bp, SARS Virus
aacgactaatattaatatttaacgg

SEQ ID NO: 90888 - DNA, 25 bp, SARS Virus
acgactaatatttatatttaacggt

SEQ ID NO: 90889 - DNA, 25 bp, SARS Virus
cgactaatattattatttaacggtc

SEQ ID NO: 90890 - DNA, 25 bp, SARS Virus
gactaatattaatatttaacggtct

SEQ ID NO: 90891 - DNA, 25 bp, SARS Virus
actaatattaatttttaacggtcta

SEQ ID NO: 90892 - DNA, 25 bp, SARS Virus
ctaatattaatatttaacggtctac

SEQ ID NO: 90893 - DNA, 25 bp, SARS Virus
taatattaatatttaacggtctact

SEQ ID NO: 90894 - DNA, 25 bp, SARS Virus
aatattaatatttaacggtctacta

SEQ ID NO: 90895 - DNA, 25 bp, SARS Virus
atattaatattttacggtctactaa

SEQ ID NO: 90896 - DNA, 25 bp, SARS Virus
tattaatatttatcggtctactaaa

SEQ ID NO: 90897 - DNA, 25 bp, SARS Virus
attaatatttaaaggtctactaaag

SEQ ID NO: 90898 - DNA, 25 bp, SARS Virus
ttaatatttaacagtctactaaagt

SEQ ID NO: 90899 - DNA, 25 bp, SARS Virus
taatatttaacgatctactaaagta

SEQ ID NO: 90900 - DNA, 25 bp, SARS Virus
aatatttaacggactactaaagtac

SEQ ID NO: 90901 - DNA, 25 bp, SARS Virus
atatttaacggtatactaaagtacc

SEQ ID NO: 90902 - DNA, 25 bp, SARS Virus
tatttaacggtcaactaaagtaccc

SEQ ID NO: 90903 - DNA, 25 bp, SARS Virus
atttaacggtctactaaagtaccca

SEQ ID NO: 90904 - DNA, 25 bp, SARS Virus
tttaacggtctaataaagtacccaa

SEQ ID NO: 90905 - DNA, 25 bp, SARS Virus
ttaacggtctacaaaagtacccaac

SEQ ID NO: 90906 - DNA, 25 bp, SARS Virus
taacggtctactaaagtacccaaca

SEQ ID NO: 90907 - DNA, 25 bp, SARS Virus
aacggtctactaaagtacccaacac

SEQ ID NO: 90908 - DNA, 25 bp, SARS Virus
acggtctactaaagtacccaacaca

SEQ ID NO: 90909 - DNA, 25 bp, SARS Virus
cggtctactaaaatacccaacacag

SEQ ID NO: 90910 - DNA, 25 bp, SARS Virus
ggtctactaaagaacccaacacagg

SEQ ID NO: 90911 - DNA, 25 bp, SARS Virus
gtctactaaagtacccaacacagga

SEQ ID NO: 90912 - DNA, 25 bp, SARS Virus
tctactaaagtaaccaacacaggaa

SEQ ID NO: 90913 - DNA, 25 bp, SARS Virus
ctactaaagtacacaacacaggaac

SEQ ID NO: 90914 - DNA, 25 bp, SARS Virus
tactaaagtaccaaacacaggaacg

SEQ ID NO: 90915 - DNA, 25 bp, SARS Virus
actaaagtacccaacacaggaacga

SEQ ID NO: 90916 - DNA, 25 bp, SARS Virus
ctaaagtacccaacacaggaacgaa

SEQ ID NO: 90917 - DNA, 25 bp, SARS Virus
taaagtacccaaaacaggaacgaac

SEQ ID NO: 90918 - DNA, 25 bp, SARS Virus
aaagtacccaacacaggaacgaacc

SEQ ID NO: 90919 - DNA, 25 bp, SARS Virus
aagtacccaacaaaggaacgaacct

SEQ ID NO: 90920 - DNA, 25 bp, SARS Virus
agtacccaacacaggaacgaacctt

SEQ ID NO: 90921 - DNA, 25 bp, SARS Virus
gtacccaacacaagaacgaacctta

SEQ ID NO: 90922 - DNA, 25 bp, SARS Virus
tacccaacacagaaacgaaccttat

SEQ ID NO: 90923 - DNA, 25 bp, SARS Virus
acccaacacaggaacgaaccttatg

SEQ ID NO: 90924 - DNA, 25 bp, SARS Virus
cccaacacaggaacgaaccttatga

SEQ ID NO: 90925 - DNA, 25 bp, SARS Virus
ccaacacaggaaagaaccttatgat

SEQ ID NO: 90926 - DNA, 25 bp, SARS Virus
caacacaggaacaaaccttatgatc

SEQ ID NO: 90927 - DNA, 25 bp, SARS Virus
aacacaggaacgaaccttatgatcc

SEQ ID NO: 90928 - DNA, 25 bp, SARS Virus
acacaggaacgaaccttatgatcct

SEQ ID NO: 90929 - DNA, 25 bp, SARS Virus
cacaggaacgaaacttatgatcctt

SEQ ID NO: 90930 - DNA, 25 bp, SARS Virus
acaggaacgaacattatgatccttg

SEQ ID NO: 90931 - DNA, 25 bp, SARS Virus
caggaacgaaccatatgatccttgt

SEQ ID NO: 90932 - DNA, 25 bp, SARS Virus
aggaacgaacctaatgatccttgta

SEQ ID NO: 90933 - DNA, 25 bp, SARS Virus
ggaacgaaccttatgatccttgtaa

SEQ ID NO: 90934 - DNA, 25 bp, SARS Virus
gaacgaaccttaagatccttgtaac

SEQ ID NO: 90935 - DNA, 25 bp, SARS Virus
aacgaaccttataatccttgtaact

SEQ ID NO: 90936 - DNA, 25 bp, SARS Virus
acgaaccttatgatccttgtaacta

SEQ ID NO: 90937 - DNA, 25 bp, SARS Virus
cgaaccttatgaaccttgtaactac

SEQ ID NO: 90938 - DNA, 25 bp, SARS Virus
gaaccttatgatacttgtaactacg

SEQ ID NO: 90939 - DNA, 25 bp, SARS Virus
aaccttatgatcattgtaactacga

SEQ ID NO: 90940 - DNA, 25 bp, SARS Virus
accttatgatccatgtaactacgat

SEQ ID NO: 90941 - DNA, 25 bp, SARS Virus
ccttatgatcctagtaactacgatg

SEQ ID NO: 90942 - DNA, 25 bp, SARS Virus
cttatgatccttataactacgatga

SEQ ID NO: 90943 - DNA, 25 bp, SARS Virus
ttatgatccttgaaactacgatgaa

SEQ ID NO: 90944 - DNA, 25 bp, SARS Virus
tatgatccttgtaactacgatgaag

SEQ ID NO: 90945 - DNA, 25 bp, SARS Virus
atgatccttgtaactacgatgaagt

SEQ ID NO: 90946 - DNA, 25 bp, SARS Virus
tgatccttgtaaatacgatgaagtt

SEQ ID NO: 90947 - DNA, 25 bp, SARS Virus
gatccttgtaacaacgatgaagttg

SEQ ID NO: 90948 - DNA, 25 bp, SARS Virus
atccttgtaactacgatgaagttga

SEQ ID NO: 90949 - DNA, 25 bp, SARS Virus
tccttgtaactaagatgaagttgac

SEQ ID NO: 90950 - DNA, 25 bp, SARS Virus
ccttgtaactacaatgaagttgacc

SEQ ID NO: 90951 - DNA, 25 bp, SARS Virus
cttgtaactacgatgaagttgacca

SEQ ID NO: 90952 - DNA, 25 bp, SARS Virus
ttgtaactacgaagaagttgaccat

SEQ ID NO: 90953 - DNA, 25 bp, SARS Virus
tgtaactacgataaagttgaccatt

SEQ ID NO: 90954 - DNA, 25 bp, SARS Virus
gtaactacgatgaagttgaccatta

SEQ ID NO: 90955 - DNA, 25 bp, SARS Virus
taactacgatgaagttgaccattaa

SEQ ID NO: 90956 - DNA, 25 bp, SARS Virus
aactacgatgaaattgaccattaat

SEQ ID NO: 90957 - DNA, 25 bp, SARS Virus
actacgatgaagatgaccattaata

SEQ ID NO: 90958 - DNA, 25 bp, SARS Virus
ctacgatgaagtagaccattaatat

SEQ ID NO: 90959 - DNA, 25 bp, SARS Virus
tacgatgaagttaaccattaatatt

SEQ ID NO: 90960 - DNA, 25 bp, SARS Virus
acgatgaagttgaccattaatatta

SEQ ID NO: 90961 - DNA, 25 bp, SARS Virus
cgatgaagttgaacattaatattaa

SEQ ID NO: 90962 - DNA, 25 bp, SARS Virus
gatgaagttgacaattaatattaat

SEQ ID NO: 90963 - DNA, 25 bp, SARS Virus
atgaagttgaccattaatattaata

SEQ ID NO: 90964 - DNA, 25 bp, SARS Virus
tgaagttgaccaataatattaatat

SEQ ID NO: 90965 - DNA, 25 bp, SARS Virus
gaagttgaccataaatattaatatt

SEQ ID NO: 90966 - DNA, 25 bp, SARS Virus
aagttgaccattaatattaatattt

SEQ ID NO: 90967 - DNA, 25 bp, SARS Virus
agttgaccattaatattaatattta

SEQ ID NO: 90968 - DNA, 25 bp, SARS Virus
gttgaccattaaaattaatatttat

SEQ ID NO: 90969 - DNA, 25 bp, SARS Virus
ttgaccattaatattaatatttata

SEQ ID NO: 90970 - DNA, 25 bp, SARS Virus
tgaccattaataataatatttatat

SEQ ID NO: 90971 - DNA, 25 bp, SARS Virus
gaccattaatataaatatttatatc

SEQ ID NO: 90972 - DNA, 25 bp, SARS Virus
accattaatattaatatttatatcc

SEQ ID NO: 90973 - DNA, 25 bp, SARS Virus
ccattaatattaatatttatatcca

SEQ ID NO: 90974 - DNA, 25 bp, SARS Virus
cattaatattaaaatttatatccat

SEQ ID NO: 90975 - DNA, 25 bp, SARS Virus
attaatattaatatttatatccata

SEQ ID NO: 90976 - DNA, 25 bp, SARS Virus
ttaatattaataattatatccatag

SEQ ID NO: 90977 - DNA, 25 bp, SARS Virus
taatattaatatatatatccataga

SEQ ID NO: 90978 - DNA, 25 bp, SARS Virus
aatattaatattaatatccatagaa

SEQ ID NO: 90979 - DNA, 25 bp, SARS Virus
atattaatatttatatccatagaat

SEQ ID NO: 90980 - DNA, 25 bp, SARS Virus
tattaatatttaaatccatagaatc

SEQ ID NO: 90981 - DNA, 25 bp, SARS Virus
attaatatttatatccatagaatct

SEQ ID NO: 90982 - DNA, 25 bp, SARS Virus
ttaatatttataaccatagaatctg

SEQ ID NO: 90983 - DNA, 25 bp, SARS Virus
taatatttatatacatagaatctgt

SEQ ID NO: 90984 - DNA, 25 bp, SARS Virus
aatatttatatcaatagaatctgta

SEQ ID NO: 90985 - DNA, 25 bp, SARS Virus
atatttatatccatagaatctgtac

SEQ ID NO: 90986 - DNA, 25 bp, SARS Virus
tatttatatccaaagaatctgtacc

SEQ ID NO: 90987 - DNA, 25 bp, SARS Virus
atttatatccatagaatctgtaccg

SEQ ID NO: 90988 - DNA, 25 bp, SARS Virus
tttatatccataaaatctgtaccgt

SEQ ID NO: 90989 - DNA, 25 bp, SARS Virus
ttatatccatagaatctgtaccgtt

SEQ ID NO: 90990 - DNA, 25 bp, SARS Virus
tatatccatagaatctgtaccgttc

SEQ ID NO: 90991 - DNA, 25 bp, SARS Virus
atatccatagaaactgtaccgttcg

SEQ ID NO: 90992 - DNA, 25 bp, SARS Virus
tatccatagaatatgtaccgttcga

SEQ ID NO: 90993 - DNA, 25 bp, SARS Virus
atccatagaatcagtaccgttcgaa

SEQ ID NO: 90994 - DNA, 25 bp, SARS Virus
tccatagaatctataccgttcgaat

SEQ ID NO: 90995 - DNA, 25 bp, SARS Virus
ccatagaatctgaaccgttcgaatc

SEQ ID NO: 90996 - DNA, 25 bp, SARS Virus
catagaatctgtaccgttcgaatcc

SEQ ID NO: 90997 - DNA, 25 bp, SARS Virus
atagaatctgtaacgttcgaatccg

SEQ ID NO: 90998 - DNA, 25 bp, SARS Virus
tagaatctgtacagttcgaatccgg

SEQ ID NO: 90999 - DNA, 25 bp, SARS Virus
agaatctgtaccattcgaatccggg

SEQ ID NO: 91000 - DNA, 25 bp, SARS Virus
gaatctgtaccgatcgaatccggga

SEQ ID NO: 91001 - DNA, 25 bp, SARS Virus
aatctgtaccgtacgaatccgggaa

SEQ ID NO: 91002 - DNA, 25 bp, SARS Virus
atctgtaccgttagaatccgggaaa

SEQ ID NO: 91003 - DNA, 25 bp, SARS Virus
tctgtaccgttcaaatccgggaaac

SEQ ID NO: 91004 - DNA, 25 bp, SARS Virus
ctgtaccgttcgaatccgggaaact

SEQ ID NO: 91005 - DNA, 25 bp, SARS Virus
tgtaccgttcgaatccgggaaactc

SEQ ID NO: 91006 - DNA, 25 bp, SARS Virus
gtaccgttcgaaaccgggaaactct

SEQ ID NO: 91007 - DNA, 25 bp, SARS Virus
taccgttcgaatacgggaaactctc

SEQ ID NO: 91008 - DNA, 25 bp, SARS Virus
accgttcgaatcagggaaactctct

SEQ ID NO: 91009 - DNA, 25 bp, SARS Virus
ccgttcgaatccaggaaactctctc

SEQ ID NO: 91010 - DNA, 25 bp, SARS Virus
cgttcgaatccgagaaactctctct

SEQ ID NO: 91011 - DNA, 25 bp, SARS Virus
gttcgaatccggaaaactctctctg

SEQ ID NO: 91012 - DNA, 25 bp, SARS Virus
ttcgaatccgggaaactctctctgt

SEQ ID NO: 91013 - DNA, 25 bp, SARS Virus
tcgaatccgggaaactctctctgta

SEQ ID NO: 91014 - DNA, 25 bp, SARS Virus
cgaatccgggaaactctctctgtat

SEQ ID NO: 91015 - DNA, 25 bp, SARS Virus
gaatccgggaaaatctctctgtata

SEQ ID NO: 91016 - DNA, 25 bp, SARS Virus
aatccgggaaacactctctgtatag

SEQ ID NO: 91017 - DNA, 25 bp, SARS Virus
atccgggaaactatctctgtataga

SEQ ID NO: 91018 - DNA, 25 bp, SARS Virus
tccgggaaactcactctgtatagat

SEQ ID NO: 91019 - DNA, 25 bp, SARS Virus
ccgggaaactctatctgtatagatt

SEQ ID NO: 91020 - DNA, 25 bp, SARS Virus
cgggaaactctcactgtatagatta

SEQ ID NO: 91021 - DNA, 25 bp, SARS Virus
gggaaactctctatgtatagattac

SEQ ID NO: 91022 - DNA, 25 bp, SARS Virus
ggaaactctctcagtatagattaca

SEQ ID NO: 91023 - DNA, 25 bp, SARS Virus
gaaactctctctatatagattacac

SEQ ID NO: 91024 - DNA, 25 bp, SARS Virus
aaactctctctgaatagattacacg

SEQ ID NO: 91025 - DNA, 25 bp, SARS Virus
aactctctctgtatagattacacgg

SEQ ID NO: 91026 - DNA, 25 bp, SARS Virus
actctctctgtaaagattacacgga

SEQ ID NO: 91027 - DNA, 25 bp, SARS Virus
ctctctctgtatagattacacggaa

SEQ ID NO: 91028 - DNA, 25 bp, SARS Virus
tctctctgtataaattacacggaaa

SEQ ID NO: 91029 - DNA, 25 bp, SARS Virus
ctctctgtatagattacacggaaag

SEQ ID NO: 91030 - DNA, 25 bp, SARS Virus
tctctgtatagaatacacggaaaga

SEQ ID NO: 91031 - DNA, 25 bp, SARS Virus
ctctgtatagataacacggaaagag

SEQ ID NO: 91032 - DNA, 25 bp, SARS Virus
tctgtatagattacacggaaagagg

SEQ ID NO: 91033 - DNA, 25 bp, SARS Virus
ctgtatagattaaacggaaagaggg

SEQ ID NO: 91034 - DNA, 25 bp, SARS Virus
tgtatagattacacggaaagagggg

SEQ ID NO: 91035 - DNA, 25 bp, SARS Virus
gtatagattacaaggaaagagggga

SEQ ID NO: 91036 - DNA, 25 bp, SARS Virus
tatagattacacagaaagaggggac

SEQ ID NO: 91037 - DNA, 25 bp, SARS Virus
atagattacacgaaaagaggggact

SEQ ID NO: 91038 - DNA, 25 bp, SARS Virus
tagattacacggaaagaggggacta

SEQ ID NO: 91039 - DNA, 25 bp, SARS Virus
agattacacggaaagaggggactac

SEQ ID NO: 91040 - DNA, 25 bp, SARS Virus
gattacacggaaagaggggactacc

SEQ ID NO: 91041 - DNA, 25 bp, SARS Virus
attacacggaaaaaggggactaccg

SEQ ID NO: 91042 - DNA, 25 bp, SARS Virus
ttacacggaaagaggggactaccgt

SEQ ID NO: 91043 - DNA, 25 bp, SARS Virus
tacacggaaagaagggactaccgtt

SEQ ID NO: 91044 - DNA, 25 bp, SARS Virus
acacggaaagagaggactaccgttt

SEQ ID NO: 91045 - DNA, 25 bp, SARS Virus
cacggaaagaggagactaccgtttg

SEQ ID NO: 91046 - DNA, 25 bp, SARS Virus
acggaaagagggaactaccgtttgg

SEQ ID NO: 91047 - DNA, 25 bp, SARS Virus
cggaaagaggggactaccgtttgga

SEQ ID NO: 91048 - DNA, 25 bp, SARS Virus
ggaaagaggggaataccgtttggaa

SEQ ID NO: 91049 - DNA, 25 bp, SARS Virus
gaaagaggggacaaccgtttggaac

SEQ ID NO: 91050 - DNA, 25 bp, SARS Virus
aaagaggggactaccgtttggaacg

SEQ ID NO: 91051 - DNA, 25 bp, SARS Virus
aagaggggactaacgtttggaacgt

SEQ ID NO: 91052 - DNA, 25 bp, SARS Virus
agaggggactacagtttggaacgtg

SEQ ID NO: 91053 - DNA, 25 bp, SARS Virus
gaggggactaccatttggaacgtgg

SEQ ID NO: 91054 - DNA, 25 bp, SARS Virus
aggggactaccgattggaacgtggg

SEQ ID NO: 91055 - DNA, 25 bp, SARS Virus
ggggactaccgtatggaacgtgggg

SEQ ID NO: 91056 - DNA, 25 bp, SARS Virus
gggactaccgttaggaacgtggggt

SEQ ID NO: 91057 - DNA, 25 bp, SARS Virus
ggactaccgtttagaacgtggggtg

SEQ ID NO: 91058 - DNA, 25 bp, SARS Virus
gactaccgtttgaaacgtggggtgg

SEQ ID NO: 91059 - DNA, 25 bp, SARS Virus
actaccgtttggaacgtggggtgga

SEQ ID NO: 91060 - DNA, 25 bp, SARS Virus
ctaccgtttggaacgtggggtggac

SEQ ID NO: 91061 - DNA, 25 bp, SARS Virus
taccgtttggaaagtggggtggacg

SEQ ID NO: 91062 - DNA, 25 bp, SARS Virus
accgtttggaacatggggtggacga

SEQ ID NO: 91063 - DNA, 25 bp, SARS Virus
ccgtttggaacgaggggtggacgag

SEQ ID NO: 91064 - DNA, 25 bp, SARS Virus
cgtttggaacgtagggtggacgaga

SEQ ID NO: 91065 - DNA, 25 bp, SARS Virus
gtttggaacgtgaggtggacgagaa

SEQ ID NO: 91066 - DNA, 25 bp, SARS Virus
tttggaacgtggagtggacgagaat

SEQ ID NO: 91067 - DNA, 25 bp, SARS Virus
ttggaacgtgggatggacgagaatt

SEQ ID NO: 91068 - DNA, 25 bp, SARS Virus
tggaacgtggggaggacgagaatta

SEQ ID NO: 91069 - DNA, 25 bp, SARS Virus
ggaacgtggggtagacgagaattaa

SEQ ID NO: 91070 - DNA, 25 bp, SARS Virus
gaacgtggggtgaacgagaattaac

SEQ ID NO: 91071 - DNA, 25 bp, SARS Virus
aacgtggggtggacgagaattaaca

SEQ ID NO: 91072 - DNA, 25 bp, SARS Virus
acgtggggtggaagagaattaacaa

SEQ ID NO: 91073 - DNA, 25 bp, SARS Virus
cgtggggtggacaagaattaacaat

SEQ ID NO: 91074 - DNA, 25 bp, SARS Virus
gtggggtggacgagaattaacaata

SEQ ID NO: 91075 - DNA, 25 bp, SARS Virus
tggggtggacgaaaattaacaataa

SEQ ID NO: 91076 - DNA, 25 bp, SARS Virus
ggggtggacgagaattaacaataac

SEQ ID NO: 91077 - DNA, 25 bp, SARS Virus
gggtggacgagaattaacaataacc

SEQ ID NO: 91078 - DNA, 25 bp, SARS Virus
ggtggacgagaaataacaataaccg

SEQ ID NO: 91079 - DNA, 25 bp, SARS Virus
gtggacgagaataaacaataaccgg

SEQ ID NO: 91080 - DNA, 25 bp, SARS Virus
tggacgagaattaacaataaccggt

SEQ ID NO: 91081 - DNA, 25 bp, SARS Virus
ggacgagaattaacaataaccggta

SEQ ID NO: 91082 - DNA, 25 bp, SARS Virus
gacgagaattaaaaataaccggtaa

SEQ ID NO: 91083 - DNA, 25 bp, SARS Virus
acgagaattaacaataaccggtaat

SEQ ID NO: 91084 - DNA, 25 bp, SARS Virus
cgagaattaacaataaccggtaatt

SEQ ID NO: 91085 - DNA, 25 bp, SARS Virus
gagaattaacaaaaaccggtaattt

SEQ ID NO: 91086 - DNA, 25 bp, SARS Virus
agaattaacaataaccggtaattta

SEQ ID NO: 91087 - DNA, 25 bp, SARS Virus
gaattaacaataaccggtaatttac

SEQ ID NO: 91088 - DNA, 25 bp, SARS Virus
aattaacaataaacggtaatttact

SEQ ID NO: 91089 - DNA, 25 bp, SARS Virus
attaacaataacaggtaatttacta

SEQ ID NO: 91090 - DNA, 25 bp, SARS Virus
ttaacaataaccagtaatttactaa

SEQ ID NO: 91091 - DNA, 25 bp, SARS Virus
taacaataaccgataatttactaat

SEQ ID NO: 91092 - DNA, 25 bp, SARS Virus
aacaataaccggaaatttactaata

SEQ ID NO: 91093 - DNA, 25 bp, SARS Virus
acaataaccggtaatttactaatac

SEQ ID NO: 91094 - DNA, 25 bp, SARS Virus
caataaccggtaatttactaatacc

SEQ ID NO: 91095 - DNA, 25 bp, SARS Virus
aataaccggtaaattactaatacca

SEQ ID NO: 91096 - DNA, 25 bp, SARS Virus
ataaccggtaatatactaataccaa

SEQ ID NO: 91097 - DNA, 25 bp, SARS Virus
taaccggtaattaactaataccaaa

SEQ ID NO: 91098 - DNA, 25 bp, SARS Virus
aaccggtaatttactaataccaaaa

SEQ ID NO: 91099 - DNA, 25 bp, SARS Virus
accggtaatttaataataccaaaaa

SEQ ID NO: 91100 - DNA, 25 bp, SARS Virus
ccggtaatttacaaataccaaaaat

SEQ ID NO: 91101 - DNA, 25 bp, SARS Virus
cggtaatttactaataccaaaaatg

SEQ ID NO: 91102 - DNA, 25 bp, SARS Virus
ggtaatttactaataccaaaaatgt

SEQ ID NO: 91103 - DNA, 25 bp, SARS Virus
gtaatttactaaaaccaaaaatgtg

SEQ ID NO: 91104 - DNA, 25 bp, SARS Virus
taatttactaataccaaaaatgtgg

SEQ ID NO: 91105 - DNA, 25 bp, SARS Virus
aatttactaataacaaaaatgtggt

SEQ ID NO: 91106 - DNA, 25 bp, SARS Virus
atttactaatacaaaaaatgtggtg

SEQ ID NO: 91107 - DNA, 25 bp, SARS Virus
tttactaataccaaaaatgtggtga

SEQ ID NO: 91108 - DNA, 25 bp, SARS Virus
ttactaataccaaaaatgtggtgat

SEQ ID NO: 91109 - DNA, 25 bp, SARS Virus
tactaataccaaaaatgtggtgatg

SEQ ID NO: 91110 - DNA, 25 bp, SARS Virus
actaataccaaaaatgtggtgatga

SEQ ID NO: 91111 - DNA, 25 bp, SARS Virus
ctaataccaaaaatgtggtgatgac

SEQ ID NO: 91112 - DNA, 25 bp, SARS Virus
taataccaaaaaagtggtgatgacc

SEQ ID NO: 91113 - DNA, 25 bp, SARS Virus
aataccaaaaatatggtgatgaccg

SEQ ID NO: 91114 - DNA, 25 bp, SARS Virus
ataccaaaaatgaggtgatgaccgt

SEQ ID NO: 91115 - DNA, 25 bp, SARS Virus
taccaaaaatgtagtgatgaccgta

SEQ ID NO: 91116 - DNA, 25 bp, SARS Virus
accaaaaatgtgatgatgaccgtaa

SEQ ID NO: 91117 - DNA, 25 bp, SARS Virus
ccaaaaatgtggagatgaccgtaac

SEQ ID NO: 91118 - DNA, 25 bp, SARS Virus
caaaaatgtggtaatgaccgtaacc

SEQ ID NO: 91119 - DNA, 25 bp, SARS Virus
aaaaatgtggtgatgaccgtaaccg

SEQ ID NO: 91120 - DNA, 25 bp, SARS Virus
aaaatgtggtgaagaccgtaaccga

SEQ ID NO: 91121 - DNA, 25 bp, SARS Virus
aaatgtggtgataaccgtaaccgat

SEQ ID NO: 91122 - DNA, 25 bp, SARS Virus
aatgtggtgatgaccgtaaccgatg

SEQ ID NO: 91123 - DNA, 25 bp, SARS Virus
atgtggtgatgaacgtaaccgatgg

SEQ ID NO: 91124 - DNA, 25 bp, SARS Virus
tgtggtgatgacagtaaccgatggt

SEQ ID NO: 91125 - DNA, 25 bp, SARS Virus
gtggtgatgaccataaccgatggtt

SEQ ID NO: 91126 - DNA, 25 bp, SARS Virus
tggtgatgaccgaaaccgatggttg

SEQ ID NO: 91127 - DNA, 25 bp, SARS Virus
ggtgatgaccgtaaccgatggttgg

SEQ ID NO: 91128 - DNA, 25 bp, SARS Virus
gtgatgaccgtaaccgatggttgga

SEQ ID NO: 91129 - DNA, 25 bp, SARS Virus
tgatgaccgtaaacgatggttggaa

SEQ ID NO: 91130 - DNA, 25 bp, SARS Virus
gatgaccgtaacagatggttggaat

SEQ ID NO: 91131 - DNA, 25 bp, SARS Virus
atgaccgtaaccaatggttggaatg

SEQ ID NO: 91132 - DNA, 25 bp, SARS Virus
tgaccgtaaccgatggttggaatgt

SEQ ID NO: 91133 - DNA, 25 bp, SARS Virus
gaccgtaaccgaaggttggaatgtc

SEQ ID NO: 91134 - DNA, 25 bp, SARS Virus
accgtaaccgatagttggaatgtct

SEQ ID NO: 91135 - DNA, 25 bp, SARS Virus
ccgtaaccgatgattggaatgtctc

SEQ ID NO: 91136 - DNA, 25 bp, SARS Virus
cgtaaccgatggatggaatgtctca

SEQ ID NO: 91137 - DNA, 25 bp, SARS Virus
gtaaccgatggtaggaatgtctcaa

SEQ ID NO: 91138 - DNA, 25 bp, SARS Virus
taaccgatggttagaatgtctcaac

SEQ ID NO: 91139 - DNA, 25 bp, SARS Virus
aaccgatggttgaaatgtctcaaca

SEQ ID NO: 91140 - DNA, 25 bp, SARS Virus
accgatggttggaatgtctcaacat

SEQ ID NO: 91141 - DNA, 25 bp, SARS Virus
ccgatggttggaatgtctcaacatc

SEQ ID NO: 91142 - DNA, 25 bp, SARS Virus
cgatggttggaaagtctcaacatca

SEQ ID NO: 91143 - DNA, 25 bp, SARS Virus
gatggttggaatatctcaacatcat

SEQ ID NO: 91144 - DNA, 25 bp, SARS Virus
atggttggaatgactcaacatcatg

SEQ ID NO: 91145 - DNA, 25 bp, SARS Virus
tggttggaatgtatcaacatcatga

SEQ ID NO: 91146 - DNA, 25 bp, SARS Virus
ggttggaatgtcacaacatcatgaa

SEQ ID NO: 91147 - DNA, 25 bp, SARS Virus
gttggaatgtctaaacatcatgaaa

SEQ ID NO: 91148 - DNA, 25 bp, SARS Virus
ttggaatgtctcaacatcatgaaag

SEQ ID NO: 91149 - DNA, 25 bp, SARS Virus
tggaatgtctcaacatcatgaaaga

SEQ ID NO: 91150 - DNA, 25 bp, SARS Virus
ggaatgtctcaaaatcatgaaagaa

SEQ ID NO: 91151 - DNA, 25 bp, SARS Virus
gaatgtctcaacatcatgaaagaaa

SEQ ID NO: 91152 - DNA, 25 bp, SARS Virus
aatgtctcaacaacatgaaagaaaa

SEQ ID NO: 91153 - DNA, 25 bp, SARS Virus
atgtctcaacataatgaaagaaaac

SEQ ID NO: 91154 - DNA, 25 bp, SARS Virus
tgtctcaacatcatgaaagaaaact

SEQ ID NO: 91155 - DNA, 25 bp, SARS Virus
gtctcaacatcaagaaagaaaactt

SEQ ID NO: 91156 - DNA, 25 bp, SARS Virus
tctcaacatcataaaagaaaacttg

SEQ ID NO: 91157 - DNA, 25 bp, SARS Virus
ctcaacatcatgaaagaaaacttga

SEQ ID NO: 91158 - DNA, 25 bp, SARS Virus
tcaacatcatgaaagaaaacttgaa

SEQ ID NO: 91159 - DNA, 25 bp, SARS Virus
caacatcatgaaagaaaacttgaaa

SEQ ID NO: 91160 - DNA, 25 bp, SARS Virus
aacatcatgaaaaaaaacttgaaaa

SEQ ID NO: 91161 - DNA, 25 bp, SARS Virus
acatcatgaaagaaaacttgaaaat

SEQ ID NO: 91162 - DNA, 25 bp, SARS Virus
catcatgaaagaaaacttgaaaatt

SEQ ID NO: 91163 - DNA, 25 bp, SARS Virus
atcatgaaagaaaacttgaaaattt

SEQ ID NO: 91164 - DNA, 25 bp, SARS Virus
tcatgaaagaaaacttgaaaattta

SEQ ID NO: 91165 - DNA, 25 bp, SARS Virus
catgaaagaaaaattgaaaatttac

SEQ ID NO: 91166 - DNA, 25 bp, SARS Virus
atgaaagaaaacatgaaaatttacg

SEQ ID NO: 91167 - DNA, 25 bp, SARS Virus
tgaaagaaaactagaaaatttacgt

SEQ ID NO: 91168 - DNA, 25 bp, SARS Virus
gaaagaaaacttaaaaatttacgtg

SEQ ID NO: 91169 - DNA, 25 bp, SARS Virus
aaagaaaacttgaaaatttacgtgg

SEQ ID NO: 91170 - DNA, 25 bp, SARS Virus
aagaaaacttgaaaatttacgtggc

SEQ ID NO: 91171 - DNA, 25 bp, SARS Virus
agaaaacttgaaaatttacgtggcc

SEQ ID NO: 91172 - DNA, 25 bp, SARS Virus
gaaaacttgaaaatttacgtggccg

SEQ ID NO: 91173 - DNA, 25 bp, SARS Virus
aaaacttgaaaaattacgtggccgg

SEQ ID NO: 91174 - DNA, 25 bp, SARS Virus
aaacttgaaaatatacgtggccggt

SEQ ID NO: 91175 - DNA, 25 bp, SARS Virus
aacttgaaaattaacgtggccggtg

SEQ ID NO: 91176 - DNA, 25 bp, SARS Virus
acttgaaaatttacgtggccggtgc

SEQ ID NO: 91177 - DNA, 25 bp, SARS Virus
cttgaaaatttaagtggccggtgcc

SEQ ID NO: 91178 - DNA, 25 bp, SARS Virus
ttgaaaatttacatggccggtgcca

SEQ ID NO: 91179 - DNA, 25 bp, SARS Virus
tgaaaatttacgaggccggtgccaa

SEQ ID NO: 91180 - DNA, 25 bp, SARS Virus
gaaaatttacgtagccggtgccaaa

SEQ ID NO: 91181 - DNA, 25 bp, SARS Virus
aaaatttacgtgaccggtgccaaac

SEQ ID NO: 91182 - DNA, 25 bp, SARS Virus
aaatttacgtggacggtgccaaaca

SEQ ID NO: 91183 - DNA, 25 bp, SARS Virus
aatttacgtggcaggtgccaaacac

SEQ ID NO: 91184 - DNA, 25 bp, SARS Virus
atttacgtggccagtgccaaacacc

SEQ ID NO: 91185 - DNA, 25 bp, SARS Virus
tttacgtggccgatgccaaacacct

SEQ ID NO: 91186 - DNA, 25 bp, SARS Virus
ttacgtggccggagccaaacacctg

SEQ ID NO: 91187 - DNA, 25 bp, SARS Virus
tacgtggccggtaccaaacacctgg

SEQ ID NO: 91188 - DNA, 25 bp, SARS Virus
acgtggccggtgacaaacacctggt

SEQ ID NO: 91189 - DNA, 25 bp, SARS Virus
cgtggccggtgcaaaacacctggtt

SEQ ID NO: 91190 - DNA, 25 bp, SARS Virus
gtggccggtgccaaacacctggttt

SEQ ID NO: 91191 - DNA, 25 bp, SARS Virus
tggccggtgccaaacacctggtttt

SEQ ID NO: 91192 - DNA, 25 bp, SARS Virus
ggccggtgccaaacacctggtttta

SEQ ID NO: 91193 - DNA, 25 bp, SARS Virus
gccggtgccaaaaacctggttttaa

SEQ ID NO: 91194 - DNA, 25 bp, SARS Virus
ccggtgccaaacacctggttttaat

SEQ ID NO: 91195 - DNA, 25 bp, SARS Virus
cggtgccaaacaactggttttaata

SEQ ID NO: 91196 - DNA, 25 bp, SARS Virus
ggtgccaaacacatggttttaatag

SEQ ID NO: 91197 - DNA, 25 bp, SARS Virus
gtgccaaacaccaggttttaatagg

SEQ ID NO: 91198 - DNA, 25 bp, SARS Virus
tgccaaacacctagttttaataggt

SEQ ID NO: 91199 - DNA, 25 bp, SARS Virus
gccaaacacctgattttaataggtg

SEQ ID NO: 91200 - DNA, 25 bp, SARS Virus
ccaaacacctggatttaataggtga

SEQ ID NO: 91201 - DNA, 25 bp, SARS Virus
caaacacctggtattaataggtgac

SEQ ID NO: 91202 - DNA, 25 bp, SARS Virus
aaacacctggttataataggtgact

SEQ ID NO: 91203 - DNA, 25 bp, SARS Virus
aacacctggtttaaataggtgactg

SEQ ID NO: 91204 - DNA, 25 bp, SARS Virus
acacctggttttaataggtgactgg

SEQ ID NO: 91205 - DNA, 25 bp, SARS Virus
cacctggttttaataggtgactgga

SEQ ID NO: 91206 - DNA, 25 bp, SARS Virus
acctggttttaaaaggtgactggaa

SEQ ID NO: 91207 - DNA, 25 bp, SARS Virus
cctggttttaataggtgactggaat

SEQ ID NO: 91208 - DNA, 25 bp, SARS Virus
ctggttttaataagtgactggaata

SEQ ID NO: 91209 - DNA, 25 bp, SARS Virus
tggttttaatagatgactggaataa

SEQ ID NO: 91210 - DNA, 25 bp, SARS Virus
ggttttaataggagactggaataat

SEQ ID NO: 91211 - DNA, 25 bp, SARS Virus
gttttaataggtaactggaataatt

SEQ ID NO: 91212 - DNA, 25 bp, SARS Virus
ttttaataggtgactggaataattc

SEQ ID NO: 91213 - DNA, 25 bp, SARS Virus
tttaataggtgaatggaataattct

SEQ ID NO: 91214 - DNA, 25 bp, SARS Virus
ttaataggtgacaggaataattctt

SEQ ID NO: 91215 - DNA, 25 bp, SARS Virus
taataggtgactagaataattcttg

SEQ ID NO: 91216 - DNA, 25 bp, SARS Virus
aataggtgactgaaataattcttgg

SEQ ID NO: 91217 - DNA, 25 bp, SARS Virus
ataggtgactggaataattcttggt

SEQ ID NO: 91218 - DNA, 25 bp, SARS Virus
taggtgactggaataattcttggtc

SEQ ID NO: 91219 - DNA, 25 bp, SARS Virus
aggtgactggaaaaattcttggtca

SEQ ID NO: 91220 - DNA, 25 bp, SARS Virus
ggtgactggaataattcttggtcac

SEQ ID NO: 91221 - DNA, 25 bp, SARS Virus
gtgactggaataattcttggtcaca

SEQ ID NO: 91222 - DNA, 25 bp, SARS Virus
tgactggaataaatcttggtcacac

SEQ ID NO: 91223 - DNA, 25 bp, SARS Virus
gactggaataatacttggtcacaca

SEQ ID NO: 91224 - DNA, 25 bp, SARS Virus
actggaataattattggtcacacag

SEQ ID NO: 91225 - DNA, 25 bp, SARS Virus
ctggaataattcatggtcacacagt

SEQ ID NO: 91226 - DNA, 25 bp, SARS Virus
tggaataattctaggtcacacagtt

SEQ ID NO: 91227 - DNA, 25 bp, SARS Virus
ggaataattcttagtcacacagtta

SEQ ID NO: 91228 - DNA, 25 bp, SARS Virus
gaataattcttgatcacacagttaa

SEQ ID NO: 91229 - DNA, 25 bp, SARS Virus
aataattcttggacacacagttaaa

SEQ ID NO: 91230 - DNA, 25 bp, SARS Virus
ataattcttggtaacacagttaaaa

SEQ ID NO: 91231 - DNA, 25 bp, SARS Virus
taattcttggtcacacagttaaaat

SEQ ID NO: 91232 - DNA, 25 bp, SARS Virus
aattcttggtcaaacagttaaaatt

SEQ ID NO: 91233 - DNA, 25 bp, SARS Virus
attcttggtcacacagttaaaatta

SEQ ID NO: 91234 - DNA, 25 bp, SARS Virus
ttcttggtcacaaagttaaaattaa

SEQ ID NO: 91235 - DNA, 25 bp, SARS Virus
tcttggtcacacagttaaaattaaa

SEQ ID NO: 91236 - DNA, 25 bp, SARS Virus
cttggtcacacaattaaaattaaaa

SEQ ID NO: 91237 - DNA, 25 bp, SARS Virus
ttggtcacacagataaaattaaaat

SEQ ID NO: 91238 - DNA, 25 bp, SARS Virus
tggtcacacagtaaaaattaaaatt

SEQ ID NO: 91239 - DNA, 25 bp, SARS Virus
ggtcacacagttaaaattaaaatta

SEQ ID NO: 91240 - DNA, 25 bp, SARS Virus
gtcacacagttaaaattaaaattac

SEQ ID NO: 91241 - DNA, 25 bp, SARS Virus
tcacacagttaaaattaaaattacc

SEQ ID NO: 91242 - DNA, 25 bp, SARS Virus
cacacagttaaaattaaaattacct

SEQ ID NO: 91243 - DNA, 25 bp, SARS Virus
acacagttaaaaataaaattacctg

SEQ ID NO: 91244 - DNA, 25 bp, SARS Virus
cacagttaaaataaaaattacctga

SEQ ID NO: 91245 - DNA, 25 bp, SARS Virus
acagttaaaattaaaattacctgag

SEQ ID NO: 91246 - DNA, 25 bp, SARS Virus
cagttaaaattaaaattacctgagt

SEQ ID NO: 91247 - DNA, 25 bp, SARS Virus
agttaaaattaaaattacctgagtg

SEQ ID NO: 91248 - DNA, 25 bp, SARS Virus
gttaaaattaaaattacctgagtga

SEQ ID NO: 91249 - DNA, 25 bp, SARS Virus
ttaaaattaaaaatacctgagtgac

SEQ ID NO: 91250 - DNA, 25 bp, SARS Virus
taaaattaaaataacctgagtgacc

SEQ ID NO: 91251 - DNA, 25 bp, SARS Virus
aaaattaaaattacctgagtgacca

SEQ ID NO: 91252 - DNA, 25 bp, SARS Virus
aaattaaaattaactgagtgaccat

SEQ ID NO: 91253 - DNA, 25 bp, SARS Virus
aattaaaattacatgagtgaccatg

SEQ ID NO: 91254 - DNA, 25 bp, SARS Virus
attaaaattaccagagtgaccatga

SEQ ID NO: 91255 - DNA, 25 bp, SARS Virus
ttaaaattacctaagtgaccatgac

SEQ ID NO: 91256 - DNA, 25 bp, SARS Virus
taaaattacctgagtgaccatgacc

SEQ ID NO: 91257 - DNA, 25 bp, SARS Virus
aaaattacctgaatgaccatgacca

SEQ ID NO: 91258 - DNA, 25 bp, SARS Virus
aaattacctgagagaccatgaccac

SEQ ID NO: 91259 - DNA, 25 bp, SARS Virus
aattacctgagtaaccatgaccaca

SEQ ID NO: 91260 - DNA, 25 bp, SARS Virus
attacctgagtgaccatgaccacac

SEQ ID NO: 91261 - DNA, 25 bp, SARS Virus
ttacctgagtgaacatgaccacaca

SEQ ID NO: 91262 - DNA, 25 bp, SARS Virus
tacctgagtgacaatgaccacacaa

SEQ ID NO: 91263 - DNA, 25 bp, SARS Virus
acctgagtgaccatgaccacacaat

SEQ ID NO: 91264 - DNA, 25 bp, SARS Virus
cctgagtgaccaagaccacacaatt

SEQ ID NO: 91265 - DNA, 25 bp, SARS Virus
ctgagtgaccataaccacacaattg

SEQ ID NO: 91266 - DNA, 25 bp, SARS Virus
tgagtgaccatgaccacacaattga

SEQ ID NO: 91267 - DNA, 25 bp, SARS Virus
gagtgaccatgaacacacaattgag

SEQ ID NO: 91268 - DNA, 25 bp, SARS Virus
agtgaccatgacaacacaattgagg

SEQ ID NO: 91269 - DNA, 25 bp, SARS Virus
gtgaccatgaccacacaattgagga

SEQ ID NO: 91270 - DNA, 25 bp, SARS Virus
tgaccatgaccaaacaattgaggaa

SEQ ID NO: 91271 - DNA, 25 bp, SARS Virus
gaccatgaccacacaattgaggaag

SEQ ID NO: 91272 - DNA, 25 bp, SARS Virus
accatgaccacaaaattgaggaaga

SEQ ID NO: 91273 - DNA, 25 bp, SARS Virus
ccatgaccacacaattgaggaagaa

SEQ ID NO: 91274 - DNA, 25 bp, SARS Virus
catgaccacacaattgaggaagaag

SEQ ID NO: 91275 - DNA, 25 bp, SARS Virus
atgaccacacaaatgaggaagaagt

SEQ ID NO: 91276 - DNA, 25 bp, SARS Virus
tgaccacacaatagaggaagaagtt

SEQ ID NO: 91277 - DNA, 25 bp, SARS Virus
gaccacacaattaaggaagaagttt

SEQ ID NO: 91278 - DNA, 25 bp, SARS Virus
accacacaattgaggaagaagtttc

SEQ ID NO: 91279 - DNA, 25 bp, SARS Virus
ccacacaattgaagaagaagtttct

SEQ ID NO: 91280 - DNA, 25 bp, SARS Virus
cacacaattgagaaagaagtttctc

SEQ ID NO: 91281 - DNA, 25 bp, SARS Virus
acacaattgaggaagaagtttctct

SEQ ID NO: 91282 - DNA, 25 bp, SARS Virus
cacaattgaggaagaagtttctcta

SEQ ID NO: 91283 - DNA, 25 bp, SARS Virus
acaattgaggaaaaagtttctctaa

SEQ ID NO: 91284 - DNA, 25 bp, SARS Virus
caattgaggaagaagtttctctaaa

SEQ ID NO: 91285 - DNA, 25 bp, SARS Virus
aattgaggaagaagtttctctaaag

SEQ ID NO: 91286 - DNA, 25 bp, SARS Virus
attgaggaagaaatttctctaaagt

SEQ ID NO: 91287 - DNA, 25 bp, SARS Virus
ttgaggaagaagattctctaaagtt

SEQ ID NO: 91288 - DNA, 25 bp, SARS Virus
tgaggaagaagtatctctaaagttg

SEQ ID NO: 91289 - DNA, 25 bp, SARS Virus
gaggaagaagttactctaaagttgg

SEQ ID NO: 91290 - DNA, 25 bp, SARS Virus
aggaagaagtttatctaaagttggt

SEQ ID NO: 91291 - DNA, 25 bp, SARS Virus
ggaagaagtttcactaaagttggta

SEQ ID NO: 91292 - DNA, 25 bp, SARS Virus
gaagaagtttctataaagttggtaa

SEQ ID NO: 91293 - DNA, 25 bp, SARS Virus
aagaagtttctcaaaagttggtaaa

SEQ ID NO: 91294 - DNA, 25 bp, SARS Virus
agaagtttctctaaagttggtaaag

SEQ ID NO: 91295 - DNA, 25 bp, SARS Virus
gaagtttctctaaagttggtaaagt

SEQ ID NO: 91296 - DNA, 25 bp, SARS Virus
aagtttctctaaagttggtaaagtt

SEQ ID NO: 91297 - DNA, 25 bp, SARS Virus
agtttctctaaaattggtaaagttg

SEQ ID NO: 91298 - DNA, 25 bp, SARS Virus
gtttctctaaagatggtaaagttgt

SEQ ID NO: 91299 - DNA, 25 bp, SARS Virus
tttctctaaagtaggtaaagttgtt

SEQ ID NO: 91300 - DNA, 25 bp, SARS Virus
ttctctaaagttagtaaagttgtta

SEQ ID NO: 91301 - DNA, 25 bp, SARS Virus
tctctaaagttgataaagttgttaa

SEQ ID NO: 91302 - DNA, 25 bp, SARS Virus
ctctaaagttggaaaagttgttaaa

SEQ ID NO: 91303 - DNA, 25 bp, SARS Virus
tctaaagttggtaaagttgttaaac

SEQ ID NO: 91304 - DNA, 25 bp, SARS Virus
ctaaagttggtaaagttgttaaacc

SEQ ID NO: 91305 - DNA, 25 bp, SARS Virus
taaagttggtaaagttgttaaaccg

SEQ ID NO: 91306 - DNA, 25 bp, SARS Virus
aaagttggtaaaattgttaaaccgg

SEQ ID NO: 91307 - DNA, 25 bp, SARS Virus
aagttggtaaagatgttaaaccggc

SEQ ID NO: 91308 - DNA, 25 bp, SARS Virus
agttggtaaagtagttaaaccggca

SEQ ID NO: 91309 - DNA, 25 bp, SARS Virus
gttggtaaagttattaaaccggcac

SEQ ID NO: 91310 - DNA, 25 bp, SARS Virus
ttggtaaagttgataaaccggcact

SEQ ID NO: 91311 - DNA, 25 bp, SARS Virus
tggtaaagttgtaaaaccggcacta

SEQ ID NO: 91312 - DNA, 25 bp, SARS Virus
ggtaaagttgttaaaccggcactac

SEQ ID NO: 91313 - DNA, 25 bp, SARS Virus
gtaaagttgttaaaccggcactaca

SEQ ID NO: 91314 - DNA, 25 bp, SARS Virus
taaagttgttaaaccggcactacaa

SEQ ID NO: 91315 - DNA, 25 bp, SARS Virus
aaagttgttaaaacggcactacaaa

SEQ ID NO: 91316 - DNA, 25 bp, SARS Virus
aagttgttaaacaggcactacaaag

SEQ ID NO: 91317 - DNA, 25 bp, SARS Virus
agttgttaaaccagcactacaaaga

SEQ ID NO: 91318 - DNA, 25 bp, SARS Virus
gttgttaaaccgacactacaaagac

SEQ ID NO: 91319 - DNA, 25 bp, SARS Virus
ttgttaaaccggaactacaaagact

SEQ ID NO: 91320 - DNA, 25 bp, SARS Virus
tgttaaaccggcactacaaagacta

SEQ ID NO: 91321 - DNA, 25 bp, SARS Virus
gttaaaccggcaatacaaagactaa

SEQ ID NO: 91322 - DNA, 25 bp, SARS Virus
ttaaaccggcacaacaaagactaaa

SEQ ID NO: 91323 - DNA, 25 bp, SARS Virus
taaaccggcactacaaagactaaag

SEQ ID NO: 91324 - DNA, 25 bp, SARS Virus
aaaccggcactaaaaagactaaagt

SEQ ID NO: 91325 - DNA, 25 bp, SARS Virus
aaccggcactacaaagactaaagtg

SEQ ID NO: 91326 - DNA, 25 bp, SARS Virus
accggcactacaaagactaaagtga

SEQ ID NO: 91327 - DNA, 25 bp, SARS Virus
ccggcactacaaagactaaagtgac

SEQ ID NO: 91328 - DNA, 25 bp, SARS Virus
cggcactacaaaaactaaagtgact

SEQ ID NO: 91329 - DNA, 25 bp, SARS Virus
ggcactacaaagactaaagtgacta

SEQ ID NO: 91330 - DNA, 25 bp, SARS Virus
gcactacaaagaataaagtgactaa

SEQ ID NO: 91331 - DNA, 25 bp, SARS Virus
cactacaaagacaaaagtgactaag

SEQ ID NO: 91332 - DNA, 25 bp, SARS Virus
actacaaagactaaagtgactaagg

SEQ ID NO: 91333 - DNA, 25 bp, SARS Virus
ctacaaagactaaagtgactaaggc

SEQ ID NO: 91334 - DNA, 25 bp, SARS Virus
tacaaagactaaagtgactaaggca

SEQ ID NO: 91335 - DNA, 25 bp, SARS Virus
acaaagactaaaatgactaaggcaa

SEQ ID NO: 91336 - DNA, 25 bp, SARS Virus
caaagactaaagagactaaggcaag

SEQ ID NO: 91337 - DNA, 25 bp, SARS Virus
aaagactaaagtaactaaggcaagc

SEQ ID NO: 91338 - DNA, 25 bp, SARS Virus
aagactaaagtgactaaggcaagct

SEQ ID NO: 91339 - DNA, 25 bp, SARS Virus
agactaaagtgaataaggcaagctc

SEQ ID NO: 91340 - DNA, 25 bp, SARS Virus
gactaaagtgacaaaggcaagctct

SEQ ID NO: 91341 - DNA, 25 bp, SARS Virus
actaaagtgactaaggcaagctcta

SEQ ID NO: 91342 - DNA, 25 bp, SARS Virus
ctaaagtgactaaggcaagctctag

SEQ ID NO: 91343 - DNA, 25 bp, SARS Virus
taaagtgactaaagcaagctctagg

SEQ ID NO: 91344 - DNA, 25 bp, SARS Virus
aaagtgactaagacaagctctagga

SEQ ID NO: 91345 - DNA, 25 bp, SARS Virus
aagtgactaaggaaagctctaggat

SEQ ID NO: 91346 - DNA, 25 bp, SARS Virus
agtgactaaggcaagctctaggatt

SEQ ID NO: 91347 - DNA, 25 bp, SARS Virus
gtgactaaggcaagctctaggattt

SEQ ID NO: 91348 - DNA, 25 bp, SARS Virus
tgactaaggcaaactctaggatttt

SEQ ID NO: 91349 - DNA, 25 bp, SARS Virus
gactaaggcaagatctaggattttg

SEQ ID NO: 91350 - DNA, 25 bp, SARS Virus
actaaggcaagcactaggattttgt

SEQ ID NO: 91351 - DNA, 25 bp, SARS Virus
ctaaggcaagctataggattttgta

SEQ ID NO: 91352 - DNA, 25 bp, SARS Virus
taaggcaagctcaaggattttgtag

SEQ ID NO: 91353 - DNA, 25 bp, SARS Virus
aaggcaagctctaggattttgtaga

SEQ ID NO: 91354 - DNA, 25 bp, SARS Virus
aggcaagctctaagattttgtagac

SEQ ID NO: 91355 - DNA, 25 bp, SARS Virus
ggcaagctctagaattttgtagact

SEQ ID NO: 91356 - DNA, 25 bp, SARS Virus
gcaagctctaggattttgtagactt

SEQ ID NO: 91357 - DNA, 25 bp, SARS Virus
caagctctaggaatttgtagacttt

SEQ ID NO: 91358 - DNA, 25 bp, SARS Virus
aagctctaggatattgtagacttta

SEQ ID NO: 91359 - DNA, 25 bp, SARS Virus
agctctaggattatgtagactttat

SEQ ID NO: 91360 - DNA, 25 bp, SARS Virus
gctctaggatttagtagactttata

SEQ ID NO: 91361 - DNA, 25 bp, SARS Virus
ctctaggattttatagactttataa

SEQ ID NO: 91362 - DNA, 25 bp, SARS Virus
tctaggattttgaagactttataat

SEQ ID NO: 91363 - DNA, 25 bp, SARS Virus
ctaggattttgtagactttataatc

SEQ ID NO: 91364 - DNA, 25 bp, SARS Virus
taggattttgtaaactttataatct

SEQ ID NO: 91365 - DNA, 25 bp, SARS Virus
aggattttgtagactttataatctg

SEQ ID NO: 91366 - DNA, 25 bp, SARS Virus
ggattttgtagaatttataatctgt

SEQ ID NO: 91367 - DNA, 25 bp, SARS Virus
gattttgtagacattataatctgta

SEQ ID NO: 91368 - DNA, 25 bp, SARS Virus
attttgtagactatataatctgtaa

SEQ ID NO: 91369 - DNA, 25 bp, SARS Virus
ttttgtagacttaataatctgtaaa

SEQ ID NO: 91370 - DNA, 25 bp, SARS Virus
tttgtagactttataatctgtaaag

SEQ ID NO: 91371 - DNA, 25 bp, SARS Virus
ttgtagactttaaaatctgtaaagt

SEQ ID NO: 91372 - DNA, 25 bp, SARS Virus
tgtagactttataatctgtaaagtg

SEQ ID NO: 91373 - DNA, 25 bp, SARS Virus
gtagactttataatctgtaaagtgg

SEQ ID NO: 91374 - DNA, 25 bp, SARS Virus
tagactttataaactgtaaagtgga

SEQ ID NO: 91375 - DNA, 25 bp, SARS Virus
agactttataatatgtaaagtggaa

SEQ ID NO: 91376 - DNA, 25 bp, SARS Virus
gactttataatcagtaaagtggaac

SEQ ID NO: 91377 - DNA, 25 bp, SARS Virus
actttataatctataaagtggaacg

SEQ ID NO: 91378 - DNA, 25 bp, SARS Virus
ctttataatctgaaaagtggaacgc

SEQ ID NO: 91379 - DNA, 25 bp, SARS Virus
tttataatctgtaaagtggaacgcg

SEQ ID NO: 91380 - DNA, 25 bp, SARS Virus
ttataatctgtaaagtggaacgcga

SEQ ID NO: 91381 - DNA, 25 bp, SARS Virus
tataatctgtaaagtggaacgcgaa

SEQ ID NO: 91382 - DNA, 25 bp, SARS Virus
ataatctgtaaaatggaacgcgaaa

SEQ ID NO: 91383 - DNA, 25 bp, SARS Virus
taatctgtaaagaggaacgcgaaaa

SEQ ID NO: 91384 - DNA, 25 bp, SARS Virus
aatctgtaaagtagaacgcgaaaac

SEQ ID NO: 91385 - DNA, 25 bp, SARS Virus
attaatatttaacggtctactaaag

SEQ ID NO: 91386 - DNA, 25 bp, SARS Virus
ttaatatttaaccgtctactaaagt

SEQ ID NO: 91387 - DNA, 25 bp, SARS Virus
taatatttaacgctctactaaagta

SEQ ID NO: 91388 - DNA, 25 bp, SARS Virus
aatatttaacggcctactaaagtac

SEQ ID NO: 91389 - DNA, 25 bp, SARS Virus
atatttaacggtctactaaagtacc

SEQ ID NO: 91390 - DNA, 25 bp, SARS Virus
tatttaacggtccactaaagtaccc

SEQ ID NO: 91391 - DNA, 25 bp, SARS Virus
atttaacggtctcctaaagtaccca

SEQ ID NO: 91392 - DNA, 25 bp, SARS Virus
tttaacggtctactaaagtacccaa

SEQ ID NO: 91393 - DNA, 25 bp, SARS Virus
ttaacggtctaccaaagtacccaac

SEQ ID NO: 91394 - DNA, 25 bp, SARS Virus
taacggtctactcaagtacccaaca

SEQ ID NO: 91395 - DNA, 25 bp, SARS Virus
aacggtctactacagtacccaacac

SEQ ID NO: 91396 - DNA, 25 bp, SARS Virus
acggtctactaacgtacccaacaca

SEQ ID NO: 91397 - DNA, 25 bp, SARS Virus
cggtctactaaactacccaacacag

SEQ ID NO: 91398 - DNA, 25 bp, SARS Virus
ggtctactaaagcacccaacacagg

SEQ ID NO: 91399 - DNA, 25 bp, SARS Virus
gtctactaaagtccccaacacagga

SEQ ID NO: 91400 - DNA, 25 bp, SARS Virus
tctactaaagtacccaacacaggaa

SEQ ID NO: 91401 - DNA, 25 bp, SARS Virus
ctactaaagtacccaacacaggaac

SEQ ID NO: 91402 - DNA, 25 bp, SARS Virus
tactaaagtacccaacacaggaacg

SEQ ID NO: 91403 - DNA, 25 bp, SARS Virus
actaaagtaccccacacaggaacga

SEQ ID NO: 91404 - DNA, 25 bp, SARS Virus
ctaaagtacccaccacaggaacgaa

SEQ ID NO: 91405 - DNA, 25 bp, SARS Virus
taaagtacccaacacaggaacgaac

SEQ ID NO: 91406 - DNA, 25 bp, SARS Virus
aaagtacccaacccaggaacgaacc

SEQ ID NO: 91407 - DNA, 25 bp, SARS Virus
aagtacccaacacaggaacgaacct

SEQ ID NO: 91408 - DNA, 25 bp, SARS Virus
agtacccaacaccggaacgaacctt

SEQ ID NO: 91409 - DNA, 25 bp, SARS Virus
gtacccaacacacgaacgaacctta

SEQ ID NO: 91410 - DNA, 25 bp, SARS Virus
tacccaacacagcaacgaaccttat

SEQ ID NO: 91411 - DNA, 25 bp, SARS Virus
acccaacacaggcacgaaccttatg

SEQ ID NO: 91412 - DNA, 25 bp, SARS Virus
cccaacacaggaccgaaccttatga

SEQ ID NO: 91413 - DNA, 25 bp, SARS Virus
ccaacacaggaacgaaccttatgat

SEQ ID NO: 91414 - DNA, 25 bp, SARS Virus
caacacaggaaccaaccttatgatc

SEQ ID NO: 91415 - DNA, 25 bp, SARS Virus
aacacaggaacgcaccttatgatcc

SEQ ID NO: 91416 - DNA, 25 bp, SARS Virus
acacaggaacgacccttatgatcct

SEQ ID NO: 91417 - DNA, 25 bp, SARS Virus
cacaggaacgaaccttatgatcctt

SEQ ID NO: 91418 - DNA, 25 bp, SARS Virus
acaggaacgaaccttatgatccttg

SEQ ID NO: 91419 - DNA, 25 bp, SARS Virus
caggaacgaaccctatgatccttgt

SEQ ID NO: 91420 - DNA, 25 bp, SARS Virus
aggaacgaacctcatgatccttgta

SEQ ID NO: 91421 - DNA, 25 bp, SARS Virus
ggaacgaaccttctgatccttgtaa

SEQ ID NO: 91422 - DNA, 25 bp, SARS Virus
gaacgaaccttacgatccttgtaac

SEQ ID NO: 91423 - DNA, 25 bp, SARS Virus
aacgaaccttatcatccttgtaact

SEQ ID NO: 91424 - DNA, 25 bp, SARS Virus
acgaaccttatgctccttgtaacta

SEQ ID NO: 91425 - DNA, 25 bp, SARS Virus
cgaaccttatgacccttgtaactac

SEQ ID NO: 91426 - DNA, 25 bp, SARS Virus
gaaccttatgatccttgtaactacg

SEQ ID NO: 91427 - DNA, 25 bp, SARS Virus
aaccttatgatccttgtaactacga

SEQ ID NO: 91428 - DNA, 25 bp, SARS Virus
accttatgatccctgtaactacgat

SEQ ID NO: 91429 - DNA, 25 bp, SARS Virus
ccttatgatcctcgtaactacgatg

SEQ ID NO: 91430 - DNA, 25 bp, SARS Virus
cttatgatccttctaactacgatga

SEQ ID NO: 91431 - DNA, 25 bp, SARS Virus
ttatgatccttgcaactacgatgaa

SEQ ID NO: 91432 - DNA, 25 bp, SARS Virus
tatgatccttgtcactacgatgaag

SEQ ID NO: 91433 - DNA, 25 bp, SARS Virus
atgatccttgtacctacgatgaagt

SEQ ID NO: 91434 - DNA, 25 bp, SARS Virus
tgatccttgtaactacgatgaagtt

SEQ ID NO: 91435 - DNA, 25 bp, SARS Virus
gatccttgtaaccacgatgaagttg

SEQ ID NO: 91436 - DNA, 25 bp, SARS Virus
atccttgtaactccgatgaagttga

SEQ ID NO: 91437 - DNA, 25 bp, SARS Virus
tccttgtaactacgatgaagttgac

SEQ ID NO: 91438 - DNA, 25 bp, SARS Virus
ccttgtaactaccatgaagttgacc

SEQ ID NO: 91439 - DNA, 25 bp, SARS Virus
cttgtaactacgctgaagttgacca

SEQ ID NO: 91440 - DNA, 25 bp, SARS Virus
ttgtaactacgacgaagttgaccat

SEQ ID NO: 91441 - DNA, 25 bp, SARS Virus
tgtaactacgatcaagttgaccatt

SEQ ID NO: 91442 - DNA, 25 bp, SARS Virus
gtaactacgatgcagttgaccatta

SEQ ID NO: 91443 - DNA, 25 bp, SARS Virus
taactacgatgacgttgaccattaa

SEQ ID NO: 91444 - DNA, 25 bp, SARS Virus
aactacgatgaacttgaccattaat

SEQ ID NO: 91445 - DNA, 25 bp, SARS Virus
actacgatgaagctgaccattaata

SEQ ID NO: 91446 - DNA, 25 bp, SARS Virus
ctacgatgaagtcgaccattaatat

SEQ ID NO: 91447 - DNA, 25 bp, SARS Virus
tacgatgaagttcaccattaatatt

SEQ ID NO: 91448 - DNA, 25 bp, SARS Virus
acgatgaagttgcccattaatatta

SEQ ID NO: 91449 - DNA, 25 bp, SARS Virus
cgatgaagttgaccattaatattaa

SEQ ID NO: 91450 - DNA, 25 bp, SARS Virus
gatgaagttgaccattaatattaat

SEQ ID NO: 91451 - DNA, 25 bp, SARS Virus
atgaagttgacccttaatattaata

SEQ ID NO: 91452 - DNA, 25 bp, SARS Virus
tgaagttgaccactaatattaatat

SEQ ID NO: 91453 - DNA, 25 bp, SARS Virus
gaagttgaccatcaatattaatatt

SEQ ID NO: 91454 - DNA, 25 bp, SARS Virus
aagttgaccattcatattaatattt

SEQ ID NO: 91455 - DNA, 25 bp, SARS Virus
agttgaccattactattaatattta

SEQ ID NO: 91456 - DNA, 25 bp, SARS Virus
gttgaccattaacattaatatttat

SEQ ID NO: 91457 - DNA, 25 bp, SARS Virus
ttgaccattaatcttaatatttata

SEQ ID NO: 91458 - DNA, 25 bp, SARS Virus
tgaccattaatactaatatttatat

SEQ ID NO: 91459 - DNA, 25 bp, SARS Virus
gaccattaatatcaatatttatatc

SEQ ID NO: 91460 - DNA, 25 bp, SARS Virus
accattaatattcatatttatatcc

SEQ ID NO: 91461 - DNA, 25 bp, SARS Virus
ccattaatattactatttatatcca

SEQ ID NO: 91462 - DNA, 25 bp, SARS Virus
cattaatattaacatttatatccat

SEQ ID NO: 91463 - DNA, 25 bp, SARS Virus
attaatattaatctttatatccata

SEQ ID NO: 91464 - DNA, 25 bp, SARS Virus
ttaatattaatacttatatccatag

SEQ ID NO: 91465 - DNA, 25 bp, SARS Virus
taatattaatatctatatccataga

SEQ ID NO: 91466 - DNA, 25 bp, SARS Virus
aatattaatattcatatccatagaa

SEQ ID NO: 91467 - DNA, 25 bp, SARS Virus
atattaatatttctatccatagaat

SEQ ID NO: 91468 - DNA, 25 bp, SARS Virus
tattaatatttacatccatagaatc

SEQ ID NO: 91469 - DNA, 25 bp, SARS Virus
attaatatttatctccatagaatct

SEQ ID NO: 91470 - DNA, 25 bp, SARS Virus
ttaatatttatacccatagaatctg

SEQ ID NO: 91471 - DNA, 25 bp, SARS Virus
taatatttatatccatagaatctgt

SEQ ID NO: 91472 - DNA, 25 bp, SARS Virus
aatatttatatccatagaatctgta

SEQ ID NO: 91473 - DNA, 25 bp, SARS Virus
atatttatatccctagaatctgtac

SEQ ID NO: 91474 - DNA, 25 bp, SARS Virus
tatttatatccacagaatctgtacc

SEQ ID NO: 91475 - DNA, 25 bp, SARS Virus
atttatatccatcgaatctgtaccg

SEQ ID NO: 91476 - DNA, 25 bp, SARS Virus
tttatatccatacaatctgtaccgt

SEQ ID NO: 91477 - DNA, 25 bp, SARS Virus
ttatatccatagcatctgtaccgtt

SEQ ID NO: 91478 - DNA, 25 bp, SARS Virus
tatatccatagactctgtaccgttc

SEQ ID NO: 91479 - DNA, 25 bp, SARS Virus
atatccatagaacctgtaccgttcg

SEQ ID NO: 91480 - DNA, 25 bp, SARS Virus
tatccatagaatctgtaccgttcga

SEQ ID NO: 91481 - DNA, 25 bp, SARS Virus
atccatagaatccgtaccgttcgaa

SEQ ID NO: 91482 - DNA, 25 bp, SARS Virus
tccatagaatctctaccgttcgaat

SEQ ID NO: 91483 - DNA, 25 bp, SARS Virus
ccatagaatctgcaccgttcgaatc

SEQ ID NO: 91484 - DNA, 25 bp, SARS Virus
catagaatctgtcccgttcgaatcc

SEQ ID NO: 91485 - DNA, 25 bp, SARS Virus
atagaatctgtaccgttcgaatccg

SEQ ID NO: 91486 - DNA, 25 bp, SARS Virus
tagaatctgtaccgttcgaatccgg

SEQ ID NO: 91487 - DNA, 25 bp, SARS Virus
agaatctgtacccttcgaatccggg

SEQ ID NO: 91488 - DNA, 25 bp, SARS Virus
gaatctgtaccgctcgaatccggga

SEQ ID NO: 91489 - DNA, 25 bp, SARS Virus
aatctgtaccgtccgaatccgggaa

SEQ ID NO: 91490 - DNA, 25 bp, SARS Virus
atctgtaccgttcgaatccgggaaa

SEQ ID NO: 91491 - DNA, 25 bp, SARS Virus
tctgtaccgttccaatccgggaaac

SEQ ID NO: 91492 - DNA, 25 bp, SARS Virus
ctgtaccgttcgcatccgggaaact

SEQ ID NO: 91493 - DNA, 25 bp, SARS Virus
tgtaccgttcgactccgggaaactc

SEQ ID NO: 91494 - DNA, 25 bp, SARS Virus
gtaccgttcgaacccgggaaactct

SEQ ID NO: 91495 - DNA, 25 bp, SARS Virus
taccgttcgaatccgggaaactctc

SEQ ID NO: 91496 - DNA, 25 bp, SARS Virus
accgttcgaatccgggaaactctct

SEQ ID NO: 91497 - DNA, 25 bp, SARS Virus
ccgttcgaatcccggaaactctctc

SEQ ID NO: 91498 - DNA, 25 bp, SARS Virus
cgttcgaatccgcgaaactctctct

SEQ ID NO: 91499 - DNA, 25 bp, SARS Virus
gttcgaatccggcaaactctctctg

SEQ ID NO: 91500 - DNA, 25 bp, SARS Virus
ttcgaatccgggcaactctctctgt

SEQ ID NO: 91501 - DNA, 25 bp, SARS Virus
tcgaatccgggacactctctctgta

SEQ ID NO: 91502 - DNA, 25 bp, SARS Virus
cgaatccgggaacctctctctgtat

SEQ ID NO: 91503 - DNA, 25 bp, SARS Virus
gaatccgggaaactctctctgtata

SEQ ID NO: 91504 - DNA, 25 bp, SARS Virus
aatccgggaaaccctctctgtatag

SEQ ID NO: 91505 - DNA, 25 bp, SARS Virus
atccgggaaactctctctgtataga

SEQ ID NO: 91506 - DNA, 25 bp, SARS Virus
tccgggaaactccctctgtatagat

SEQ ID NO: 91507 - DNA, 25 bp, SARS Virus
ccgggaaactctctctgtatagatt

SEQ ID NO: 91508 - DNA, 25 bp, SARS Virus
cgggaaactctccctgtatagatta

SEQ ID NO: 91509 - DNA, 25 bp, SARS Virus
gggaaactctctctgtatagattac

SEQ ID NO: 91510 - DNA, 25 bp, SARS Virus
ggaaactctctccgtatagattaca

SEQ ID NO: 91511 - DNA, 25 bp, SARS Virus
gaaactctctctctatagattacac

SEQ ID NO: 91512 - DNA, 25 bp, SARS Virus
aaactctctctgcatagattacacg

SEQ ID NO: 91513 - DNA, 25 bp, SARS Virus
aactctctctgtctagattacacgg

SEQ ID NO: 91514 - DNA, 25 bp, SARS Virus
actctctctgtacagattacacgga

SEQ ID NO: 91515 - DNA, 25 bp, SARS Virus
ctctctctgtatcgattacacggaa

SEQ ID NO: 91516 - DNA, 25 bp, SARS Virus
tctctctgtatacattacacggaaa

SEQ ID NO: 91517 - DNA, 25 bp, SARS Virus
ctctctgtatagcttacacggaaag

SEQ ID NO: 91518 - DNA, 25 bp, SARS Virus
tctctgtatagactacacggaaaga

SEQ ID NO: 91519 - DNA, 25 bp, SARS Virus
ctctgtatagatcacacggaaagag

SEQ ID NO: 91520 - DNA, 25 bp, SARS Virus
tctgtatagattccacggaaagagg

SEQ ID NO: 91521 - DNA, 25 bp, SARS Virus
ctgtatagattacacggaaagaggg

SEQ ID NO: 91522 - DNA, 25 bp, SARS Virus
tgtatagattacccggaaagagggg

SEQ ID NO: 91523 - DNA, 25 bp, SARS Virus
gtatagattacacggaaagagggga

SEQ ID NO: 91524 - DNA, 25 bp, SARS Virus
tatagattacaccgaaagaggggac

SEQ ID NO: 91525 - DNA, 25 bp, SARS Virus
atagattacacgcaaagaggggact

SEQ ID NO: 91526 - DNA, 25 bp, SARS Virus
tagattacacggcaagaggggacta

SEQ ID NO: 91527 - DNA, 25 bp, SARS Virus
agattacacggacagaggggactac

SEQ ID NO: 91528 - DNA, 25 bp, SARS Virus
gattacacggaacgaggggactacc

SEQ ID NO: 91529 - DNA, 25 bp, SARS Virus
attacacggaaacaggggactaccg

SEQ ID NO: 91530 - DNA, 25 bp, SARS Virus
ttacacggaaagcggggactaccgt

SEQ ID NO: 91531 - DNA, 25 bp, SARS Virus
tacacggaaagacgggactaccgtt

SEQ ID NO: 91532 - DNA, 25 bp, SARS Virus
acacggaaagagcggactaccgttt

SEQ ID NO: 91533 - DNA, 25 bp, SARS Virus
cacggaaagaggcgactaccgtttg

SEQ ID NO: 91534 - DNA, 25 bp, SARS Virus
acggaaagagggcactaccgtttgg

SEQ ID NO: 91535 - DNA, 25 bp, SARS Virus
cggaaagaggggcctaccgtttgga

SEQ ID NO: 91536 - DNA, 25 bp, SARS Virus
ggaaagaggggactaccgtttggaa

SEQ ID NO: 91537 - DNA, 25 bp, SARS Virus
gaaagaggggaccaccgtttggaac

SEQ ID NO: 91538 - DNA, 25 bp, SARS Virus
aaagaggggactcccgtttggaacg

SEQ ID NO: 91539 - DNA, 25 bp, SARS Virus
aagaggggactaccgtttggaacgt

SEQ ID NO: 91540 - DNA, 25 bp, SARS Virus
agaggggactaccgtttggaacgtg

SEQ ID NO: 91541 - DNA, 25 bp, SARS Virus
gaggggactaccctttggaacgtgg

SEQ ID NO: 91542 - DNA, 25 bp, SARS Virus
aggggactaccgcttggaacgtggg

SEQ ID NO: 91543 - DNA, 25 bp, SARS Virus
ggggactaccgtctggaacgtgggg

SEQ ID NO: 91544 - DNA, 25 bp, SARS Virus
gggactaccgttcggaacgtggggt

SEQ ID NO: 91545 - DNA, 25 bp, SARS Virus
ggactaccgtttcgaacgtggggtg

SEQ ID NO: 91546 - DNA, 25 bp, SARS Virus
gactaccgtttgcaacgtggggtgg

SEQ ID NO: 91547 - DNA, 25 bp, SARS Virus
actaccgtttggcacgtggggtgga

SEQ ID NO: 91548 - DNA, 25 bp, SARS Virus
ctaccgtttggaccgtggggtggac

SEQ ID NO: 91549 - DNA, 25 bp, SARS Virus
taccgtttggaacgtggggtggacg

SEQ ID NO: 91550 - DNA, 25 bp, SARS Virus
accgtttggaacctggggtggacga

SEQ ID NO: 91551 - DNA, 25 bp, SARS Virus
ccgtttggaacgcggggtggacgag

SEQ ID NO: 91552 - DNA, 25 bp, SARS Virus
cgtttggaacgtcgggtggacgaga

SEQ ID NO: 91553 - DNA, 25 bp, SARS Virus
gtttggaacgtgcggtggacgagaa

SEQ ID NO: 91554 - DNA, 25 bp, SARS Virus
tttggaacgtggcgtggacgagaat

SEQ ID NO: 91555 - DNA, 25 bp, SARS Virus
ttggaacgtgggctggacgagaatt

SEQ ID NO: 91556 - DNA, 25 bp, SARS Virus
tggaacgtggggcggacgagaatta

SEQ ID NO: 91557 - DNA, 25 bp, SARS Virus
ggaacgtggggtcgacgagaattaa

SEQ ID NO: 91558 - DNA, 25 bp, SARS Virus
gaacgtggggtgcacgagaattaac

SEQ ID NO: 91559 - DNA, 25 bp, SARS Virus
aacgtggggtggccgagaattaaca

SEQ ID NO: 91560 - DNA, 25 bp, SARS Virus
acgtggggtggacgagaattaacaa

SEQ ID NO: 91561 - DNA, 25 bp, SARS Virus
cgtggggtggaccagaattaacaat

SEQ ID NO: 91562 - DNA, 25 bp, SARS Virus
gtggggtggacgcgaattaacaata

SEQ ID NO: 91563 - DNA, 25 bp, SARS Virus
tggggtggacgacaattaacaataa

SEQ ID NO: 91564 - DNA, 25 bp, SARS Virus
ggggtggacgagcattaacaataac

SEQ ID NO: 91565 - DNA, 25 bp, SARS Virus
gggtggacgagacttaacaataacc

SEQ ID NO: 91566 - DNA, 25 bp, SARS Virus
ggtggacgagaactaacaataaccg

SEQ ID NO: 91567 - DNA, 25 bp, SARS Virus
gtggacgagaatcaacaataaccgg

SEQ ID NO: 91568 - DNA, 25 bp, SARS Virus
tggacgagaattcacaataaccggt

SEQ ID NO: 91569 - DNA, 25 bp, SARS Virus
ggacgagaattaccaataaccggta

SEQ ID NO: 91570 - DNA, 25 bp, SARS Virus
gacgagaattaacaataaccggtaa

SEQ ID NO: 91571 - DNA, 25 bp, SARS Virus
acgagaattaaccataaccggtaat

SEQ ID NO: 91572 - DNA, 25 bp, SARS Virus
cgagaattaacactaaccggtaatt

SEQ ID NO: 91573 - DNA, 25 bp, SARS Virus
gagaattaacaacaaccggtaattt

SEQ ID NO: 91574 - DNA, 25 bp, SARS Virus
agaattaacaatcaccggtaattta

SEQ ID NO: 91575 - DNA, 25 bp, SARS Virus
gaattaacaatacccggtaatttac

SEQ ID NO: 91576 - DNA, 25 bp, SARS Virus
aattaacaataaccggtaatttact

SEQ ID NO: 91577 - DNA, 25 bp, SARS Virus
attaacaataaccggtaatttacta

SEQ ID NO: 91578 - DNA, 25 bp, SARS Virus
ttaacaataacccgtaatttactaa

SEQ ID NO: 91579 - DNA, 25 bp, SARS Virus
taacaataaccgctaatttactaat

SEQ ID NO: 91580 - DNA, 25 bp, SARS Virus
aacaataaccggcaatttactaata

SEQ ID NO: 91581 - DNA, 25 bp, SARS Virus
acaataaccggtcatttactaatac

SEQ ID NO: 91582 - DNA, 25 bp, SARS Virus
caataaccggtactttactaatacc

SEQ ID NO: 91583 - DNA, 25 bp, SARS Virus
aataaccggtaacttactaatacca

SEQ ID NO: 91584 - DNA, 25 bp, SARS Virus
ataaccggtaatctactaataccaa

SEQ ID NO: 91585 - DNA, 25 bp, SARS Virus
taaccggtaattcactaataccaaa

SEQ ID NO: 91586 - DNA, 25 bp, SARS Virus
aaccggtaatttcctaataccaaaa

SEQ ID NO: 91587 - DNA, 25 bp, SARS Virus
accggtaatttactaataccaaaaa

SEQ ID NO: 91588 - DNA, 25 bp, SARS Virus
ccggtaatttaccaataccaaaaat

SEQ ID NO: 91589 - DNA, 25 bp, SARS Virus
cggtaatttactcataccaaaaatg

SEQ ID NO: 91590 - DNA, 25 bp, SARS Virus
ggtaatttactactaccaaaaatgt

SEQ ID NO: 91591 - DNA, 25 bp, SARS Virus
gtaatttactaacaccaaaaatgtg

SEQ ID NO: 91592 - DNA, 25 bp, SARS Virus
taatttactaatcccaaaaatgtgg

SEQ ID NO: 91593 - DNA, 25 bp, SARS Virus
aatttactaataccaaaaatgtggt

SEQ ID NO: 91594 - DNA, 25 bp, SARS Virus
atttactaataccaaaaatgtggtg

SEQ ID NO: 91595 - DNA, 25 bp, SARS Virus
tttactaatacccaaaatgtggtga

SEQ ID NO: 91596 - DNA, 25 bp, SARS Virus
ttactaataccacaaatgtggtgat

SEQ ID NO: 91597 - DNA, 25 bp, SARS Virus
tactaataccaacaatgtggtgatg

SEQ ID NO: 91598 - DNA, 25 bp, SARS Virus
actaataccaaacatgtggtgatga

SEQ ID NO: 91599 - DNA, 25 bp, SARS Virus
ctaataccaaaactgtggtgatgac

SEQ ID NO: 91600 - DNA, 25 bp, SARS Virus
taataccaaaaacgtggtgatgacc

SEQ ID NO: 91601 - DNA, 25 bp, SARS Virus
aataccaaaaatctggtgatgaccg

SEQ ID NO: 91602 - DNA, 25 bp, SARS Virus
ataccaaaaatgcggtgatgaccgt

SEQ ID NO: 91603 - DNA, 25 bp, SARS Virus
taccaaaaatgtcgtgatgaccgta

SEQ ID NO: 91604 - DNA, 25 bp, SARS Virus
accaaaaatgtgctgatgaccgtaa

SEQ ID NO: 91605 - DNA, 25 bp, SARS Virus
ccaaaaatgtggcgatgaccgtaac

SEQ ID NO: 91606 - DNA, 25 bp, SARS Virus
caaaaatgtggtcatgaccgtaacc

SEQ ID NO: 91607 - DNA, 25 bp, SARS Virus
aaaaatgtggtgctgaccgtaaccg

SEQ ID NO: 91608 - DNA, 25 bp, SARS Virus
aaaatgtggtgacgaccgtaaccga

SEQ ID NO: 91609 - DNA, 25 bp, SARS Virus
aaatgtggtgatcaccgtaaccgat

SEQ ID NO: 91610 - DNA, 25 bp, SARS Virus
aatgtggtgatgcccgtaaccgatg

SEQ ID NO: 91611 - DNA, 25 bp, SARS Virus
atgtggtgatgaccgtaaccgatgg

SEQ ID NO: 91612 - DNA, 25 bp, SARS Virus
tgtggtgatgaccgtaaccgatggt

SEQ ID NO: 91613 - DNA, 25 bp, SARS Virus
gtggtgatgaccctaaccgatggtt

SEQ ID NO: 91614 - DNA, 25 bp, SARS Virus
tggtgatgaccgcaaccgatggttg

SEQ ID NO: 91615 - DNA, 25 bp, SARS Virus
ggtgatgaccgtcaccgatggttgg

SEQ ID NO: 91616 - DNA, 25 bp, SARS Virus
gtgatgaccgtacccgatggttgga

SEQ ID NO: 91617 - DNA, 25 bp, SARS Virus
tgatgaccgtaaccgatggttggaa

SEQ ID NO: 91618 - DNA, 25 bp, SARS Virus
gatgaccgtaaccgatggttggaat

SEQ ID NO: 91619 - DNA, 25 bp, SARS Virus
atgaccgtaacccatggttggaatg

SEQ ID NO: 91620 - DNA, 25 bp, SARS Virus
tgaccgtaaccgctggttggaatgt

SEQ ID NO: 91621 - DNA, 25 bp, SARS Virus
gaccgtaaccgacggttggaatgtc

SEQ ID NO: 91622 - DNA, 25 bp, SARS Virus
accgtaaccgatcgttggaatgtct

SEQ ID NO: 91623 - DNA, 25 bp, SARS Virus
ccgtaaccgatgcttggaatgtctc

SEQ ID NO: 91624 - DNA, 25 bp, SARS Virus
cgtaaccgatggctggaatgtctca

SEQ ID NO: 91625 - DNA, 25 bp, SARS Virus
gtaaccgatggtcggaatgtctcaa

SEQ ID NO: 91626 - DNA, 25 bp, SARS Virus
taaccgatggttcgaatgtctcaac

SEQ ID NO: 91627 - DNA, 25 bp, SARS Virus
aaccgatggttgcaatgtctcaaca

SEQ ID NO: 91628 - DNA, 25 bp, SARS Virus
accgatggttggcatgtctcaacat

SEQ ID NO: 91629 - DNA, 25 bp, SARS Virus
ccgatggttggactgtctcaacatc

SEQ ID NO: 91630 - DNA, 25 bp, SARS Virus
cgatggttggaacgtctcaacatca

SEQ ID NO: 91631 - DNA, 25 bp, SARS Virus
gatggttggaatctctcaacatcat

SEQ ID NO: 91632 - DNA, 25 bp, SARS Virus
atggttggaatgcctcaacatcatg

SEQ ID NO: 91633 - DNA, 25 bp, SARS Virus
tggttggaatgtctcaacatcatga

SEQ ID NO: 91634 - DNA, 25 bp, SARS Virus
ggttggaatgtcccaacatcatgaa

SEQ ID NO: 91635 - DNA, 25 bp, SARS Virus
gttggaatgtctcaacatcatgaaa

SEQ ID NO: 91636 - DNA, 25 bp, SARS Virus
ttggaatgtctccacatcatgaaag

SEQ ID NO: 91637 - DNA, 25 bp, SARS Virus
tggaatgtctcaccatcatgaaaga

SEQ ID NO: 91638 - DNA, 25 bp, SARS Virus
ggaatgtctcaacatcatgaaagaa

SEQ ID NO: 91639 - DNA, 25 bp, SARS Virus
gaatgtctcaacctcatgaaagaaa

SEQ ID NO: 91640 - DNA, 25 bp, SARS Virus
aatgtctcaacaccatgaaagaaaa

SEQ ID NO: 91641 - DNA, 25 bp, SARS Virus
atgtctcaacatcatgaaagaaaac

SEQ ID NO: 91642 - DNA, 25 bp, SARS Virus
tgtctcaacatcctgaaagaaaact

SEQ ID NO: 91643 - DNA, 25 bp, SARS Virus
gtctcaacatcacgaaagaaaactt

SEQ ID NO: 91644 - DNA, 25 bp, SARS Virus
tctcaacatcatcaaagaaaacttg

SEQ ID NO: 91645 - DNA, 25 bp, SARS Virus
ctcaacatcatgcaagaaaacttga

SEQ ID NO: 91646 - DNA, 25 bp, SARS Virus
tcaacatcatgacagaaaacttgaa

SEQ ID NO: 91647 - DNA, 25 bp, SARS Virus
caacatcatgaacgaaaacttgaaa

SEQ ID NO: 91648 - DNA, 25 bp, SARS Virus
aacatcatgaaacaaaacttgaaaa

SEQ ID NO: 91649 - DNA, 25 bp, SARS Virus
acatcatgaaagcaaacttgaaaat

SEQ ID NO: 91650 - DNA, 25 bp, SARS Virus
catcatgaaagacaacttgaaaatt

SEQ ID NO: 91651 - DNA, 25 bp, SARS Virus
atcatgaaagaacacttgaaaattt

SEQ ID NO: 91652 - DNA, 25 bp, SARS Virus
tcatgaaagaaaccttgaaaattta

SEQ ID NO: 91653 - DNA, 25 bp, SARS Virus
catgaaagaaaacttgaaaatttac

SEQ ID NO: 91654 - DNA, 25 bp, SARS Virus
atgaaagaaaacctgaaaatttacg

SEQ ID NO: 91655 - DNA, 25 bp, SARS Virus
tgaaagaaaactcgaaaatttacgt

SEQ ID NO: 91656 - DNA, 25 bp, SARS Virus
gaaagaaaacttcaaaatttacgtg

SEQ ID NO: 91657 - DNA, 25 bp, SARS Virus
aaagaaaacttgcaaatttacgtgg

SEQ ID NO: 91658 - DNA, 25 bp, SARS Virus
aagaaaacttgacaatttacgtggc

SEQ ID NO: 91659 - DNA, 25 bp, SARS Virus
agaaaacttgaacatttacgtggcc

SEQ ID NO: 91660 - DNA, 25 bp, SARS Virus
gaaaacttgaaactttacgtggccg

SEQ ID NO: 91661 - DNA, 25 bp, SARS Virus
aaaacttgaaaacttacgtggccgg

SEQ ID NO: 91662 - DNA, 25 bp, SARS Virus
aaacttgaaaatctacgtggccggt

SEQ ID NO: 91663 - DNA, 25 bp, SARS Virus
aacttgaaaattcacgtggccggtg

SEQ ID NO: 91664 - DNA, 25 bp, SARS Virus
acttgaaaatttccgtggccggtgc

SEQ ID NO: 91665 - DNA, 25 bp, SARS Virus
cttgaaaatttacgtggccggtgcc

SEQ ID NO: 91666 - DNA, 25 bp, SARS Virus
ttgaaaatttacctggccggtgcca

SEQ ID NO: 91667 - DNA, 25 bp, SARS Virus
tgaaaatttacgcggccggtgccaa

SEQ ID NO: 91668 - DNA, 25 bp, SARS Virus
gaaaatttacgtcgccggtgccaaa

SEQ ID NO: 91669 - DNA, 25 bp, SARS Virus
aaaatttacgtgcccggtgccaaac

SEQ ID NO: 91670 - DNA, 25 bp, SARS Virus
aaatttacgtggccggtgccaaaca

SEQ ID NO: 91671 - DNA, 25 bp, SARS Virus
aatttacgtggccggtgccaaacac

SEQ ID NO: 91672 - DNA, 25 bp, SARS Virus
atttacgtggcccgtgccaaacacc

SEQ ID NO: 91673 - DNA, 25 bp, SARS Virus
tttacgtggccgctgccaaacacct

SEQ ID NO: 91674 - DNA, 25 bp, SARS Virus
ttacgtggccggcgccaaacacctg

SEQ ID NO: 91675 - DNA, 25 bp, SARS Virus
tacgtggccggtcccaaacacctgg

SEQ ID NO: 91676 - DNA, 25 bp, SARS Virus
acgtggccggtgccaaacacctggt

SEQ ID NO: 91677 - DNA, 25 bp, SARS Virus
cgtggccggtgccaaacacctggtt

SEQ ID NO: 91678 - DNA, 25 bp, SARS Virus
gtggccggtgcccaacacctggttt

SEQ ID NO: 91679 - DNA, 25 bp, SARS Virus
tggccggtgccacacacctggtttt

SEQ ID NO: 91680 - DNA, 25 bp, SARS Virus
ggccggtgccaaccacctggtttta

SEQ ID NO: 91681 - DNA, 25 bp, SARS Virus
gccggtgccaaacacctggttttaa

SEQ ID NO: 91682 - DNA, 25 bp, SARS Virus
ccggtgccaaacccctggttttaat

SEQ ID NO: 91683 - DNA, 25 bp, SARS Virus
cggtgccaaacacctggttttaata

SEQ ID NO: 91684 - DNA, 25 bp, SARS Virus
ggtgccaaacacctggttttaatag

SEQ ID NO: 91685 - DNA, 25 bp, SARS Virus
gtgccaaacacccggttttaatagg

SEQ ID NO: 91686 - DNA, 25 bp, SARS Virus
tgccaaacacctcgttttaataggt

SEQ ID NO: 91687 - DNA, 25 bp, SARS Virus
gccaaacacctgcttttaataggtg

SEQ ID NO: 91688 - DNA, 25 bp, SARS Virus
ccaaacacctggctttaataggtga

SEQ ID NO: 91689 - DNA, 25 bp, SARS Virus
caaacacctggtcttaataggtgac

SEQ ID NO: 91690 - DNA, 25 bp, SARS Virus
aaacacctggttctaataggtgact

SEQ ID NO: 91691 - DNA, 25 bp, SARS Virus
aacacctggtttcaataggtgactg

SEQ ID NO: 91692 - DNA, 25 bp, SARS Virus
acacctggttttcataggtgactgg

SEQ ID NO: 91693 - DNA, 25 bp, SARS Virus
cacctggttttactaggtgactgga

SEQ ID NO: 91694 - DNA, 25 bp, SARS Virus
acctggttttaacaggtgactggaa

SEQ ID NO: 91695 - DNA, 25 bp, SARS Virus
cctggttttaatcggtgactggaat

SEQ ID NO: 91696 - DNA, 25 bp, SARS Virus
ctggttttaatacgtgactggaata

SEQ ID NO: 91697 - DNA, 25 bp, SARS Virus
tggttttaatagctgactggaataa

SEQ ID NO: 91698 - DNA, 25 bp, SARS Virus
ggttttaataggcgactggaataat

SEQ ID NO: 91699 - DNA, 25 bp, SARS Virus
gttttaataggtcactggaataatt

SEQ ID NO: 91700 - DNA, 25 bp, SARS Virus
ttttaataggtgcctggaataattc

SEQ ID NO: 91701 - DNA, 25 bp, SARS Virus
tttaataggtgactggaataattct

SEQ ID NO: 91702 - DNA, 25 bp, SARS Virus
ttaataggtgaccggaataattctt

SEQ ID NO: 91703 - DNA, 25 bp, SARS Virus
taataggtgactcgaataattcttg

SEQ ID NO: 91704 - DNA, 25 bp, SARS Virus
aataggtgactgcaataattcttgg

SEQ ID NO: 91705 - DNA, 25 bp, SARS Virus
ataggtgactggcataattcttggt

SEQ ID NO: 91706 - DNA, 25 bp, SARS Virus
taggtgactggactaattcttggtc

SEQ ID NO: 91707 - DNA, 25 bp, SARS Virus
aggtgactggaacaattcttggtca

SEQ ID NO: 91708 - DNA, 25 bp, SARS Virus
ggtgactggaatcattcttggtcac

SEQ ID NO: 91709 - DNA, 25 bp, SARS Virus
gtgactggaatacttcttggtcaca

SEQ ID NO: 91710 - DNA, 25 bp, SARS Virus
tgactggaataactcttggtcacac

SEQ ID NO: 91711 - DNA, 25 bp, SARS Virus
gactggaataatccttggtcacaca

SEQ ID NO: 91712 - DNA, 25 bp, SARS Virus
actggaataattcttggtcacacag

SEQ ID NO: 91713 - DNA, 25 bp, SARS Virus
ctggaataattcctggtcacacagt

SEQ ID NO: 91714 - DNA, 25 bp, SARS Virus
tggaataattctcggtcacacagtt

SEQ ID NO: 91715 - DNA, 25 bp, SARS Virus
ggaataattcttcgtcacacagtta

SEQ ID NO: 91716 - DNA, 25 bp, SARS Virus
gaataattcttgctcacacagttaa

SEQ ID NO: 91717 - DNA, 25 bp, SARS Virus
aataattcttggccacacagttaaa

SEQ ID NO: 91718 - DNA, 25 bp, SARS Virus
ataattcttggtcacacagttaaaa

SEQ ID NO: 91719 - DNA, 25 bp, SARS Virus
taattcttggtcccacagttaaaat

SEQ ID NO: 91720 - DNA, 25 bp, SARS Virus
aattcttggtcacacagttaaaatt

SEQ ID NO: 91721 - DNA, 25 bp, SARS Virus
attcttggtcacccagttaaaatta

SEQ ID NO: 91722 - DNA, 25 bp, SARS Virus
ttcttggtcacacagttaaaattaa

SEQ ID NO: 91723 - DNA, 25 bp, SARS Virus
tcttggtcacaccgttaaaattaaa

SEQ ID NO: 91724 - DNA, 25 bp, SARS Virus
cttggtcacacacttaaaattaaaa

SEQ ID NO: 91725 - DNA, 25 bp, SARS Virus
ttggtcacacagctaaaattaaaat

SEQ ID NO: 91726 - DNA, 25 bp, SARS Virus
tggtcacacagtcaaaattaaaatt

SEQ ID NO: 91727 - DNA, 25 bp, SARS Virus
ggtcacacagttcaaattaaaatta

SEQ ID NO: 91728 - DNA, 25 bp, SARS Virus
gtcacacagttacaattaaaattac

SEQ ID NO: 91729 - DNA, 25 bp, SARS Virus
tcacacagttaacattaaaattacc

SEQ ID NO: 91730 - DNA, 25 bp, SARS Virus
cacacagttaaacttaaaattacct

SEQ ID NO: 91731 - DNA, 25 bp, SARS Virus
acacagttaaaactaaaattacctg

SEQ ID NO: 91732 - DNA, 25 bp, SARS Virus
cacagttaaaatcaaaattacctga

SEQ ID NO: 91733 - DNA, 25 bp, SARS Virus
acagttaaaattcaaattacctgag

SEQ ID NO: 91734 - DNA, 25 bp, SARS Virus
cagttaaaattacaattacctgagt

SEQ ID NO: 91735 - DNA, 25 bp, SARS Virus
agttaaaattaacattacctgagtg

SEQ ID NO: 91736 - DNA, 25 bp, SARS Virus
gttaaaattaaacttacctgagtga

SEQ ID NO: 91737 - DNA, 25 bp, SARS Virus
ttaaaattaaaactacctgagtgac

SEQ ID NO: 91738 - DNA, 25 bp, SARS Virus
taaaattaaaatcacctgagtgacc

SEQ ID NO: 91739 - DNA, 25 bp, SARS Virus
aaaattaaaattccctgagtgacca

SEQ ID NO: 91740 - DNA, 25 bp, SARS Virus
aaattaaaattacctgagtgaccat

SEQ ID NO: 91741 - DNA, 25 bp, SARS Virus
aattaaaattacctgagtgaccatg

SEQ ID NO: 91742 - DNA, 25 bp, SARS Virus
attaaaattacccgagtgaccatga

SEQ ID NO: 91743 - DNA, 25 bp, SARS Virus
ttaaaattacctcagtgaccatgac

SEQ ID NO: 91744 - DNA, 25 bp, SARS Virus
taaaattacctgcgtgaccatgacc

SEQ ID NO: 91745 - DNA, 25 bp, SARS Virus
aaaattacctgactgaccatgacca

SEQ ID NO: 91746 - DNA, 25 bp, SARS Virus
aaattacctgagcgaccatgaccac

SEQ ID NO: 91747 - DNA, 25 bp, SARS Virus
aattacctgagtcaccatgaccaca

SEQ ID NO: 91748 - DNA, 25 bp, SARS Virus
attacctgagtgcccatgaccacac

SEQ ID NO: 91749 - DNA, 25 bp, SARS Virus
ttacctgagtgaccatgaccacaca

SEQ ID NO: 91750 - DNA, 25 bp, SARS Virus
tacctgagtgaccatgaccacacaa

SEQ ID NO: 91751 - DNA, 25 bp, SARS Virus
acctgagtgaccctgaccacacaat

SEQ ID NO: 91752 - DNA, 25 bp, SARS Virus
cctgagtgaccacgaccacacaatt

SEQ ID NO: 91753 - DNA, 25 bp, SARS Virus
ctgagtgaccatcaccacacaattg

SEQ ID NO: 91754 - DNA, 25 bp, SARS Virus
tgagtgaccatgcccacacaattga

SEQ ID NO: 91755 - DNA, 25 bp, SARS Virus
gagtgaccatgaccacacaattgag

SEQ ID NO: 91756 - DNA, 25 bp, SARS Virus
agtgaccatgaccacacaattgagg

SEQ ID NO: 91757 - DNA, 25 bp, SARS Virus
gtgaccatgaccccacaattgagga

SEQ ID NO: 91758 - DNA, 25 bp, SARS Virus
tgaccatgaccacacaattgaggaa

SEQ ID NO: 91759 - DNA, 25 bp, SARS Virus
gaccatgaccacccaattgaggaag

SEQ ID NO: 91760 - DNA, 25 bp, SARS Virus
accatgaccacacaattgaggaaga

SEQ ID NO: 91761 - DNA, 25 bp, SARS Virus
ccatgaccacaccattgaggaagaa

SEQ ID NO: 91762 - DNA, 25 bp, SARS Virus
catgaccacacacttgaggaagaag

SEQ ID NO: 91763 - DNA, 25 bp, SARS Virus
atgaccacacaactgaggaagaagt

SEQ ID NO: 91764 - DNA, 25 bp, SARS Virus
tgaccacacaatcgaggaagaagtt

SEQ ID NO: 91765 - DNA, 25 bp, SARS Virus
gaccacacaattcaggaagaagttt

SEQ ID NO: 91766 - DNA, 25 bp, SARS Virus
accacacaattgcggaagaagtttc

SEQ ID NO: 91767 - DNA, 25 bp, SARS Virus
ccacacaattgacgaagaagtttct

SEQ ID NO: 91768 - DNA, 25 bp, SARS Virus
cacacaattgagcaagaagtttctc

SEQ ID NO: 91769 - DNA, 25 bp, SARS Virus
acacaattgaggcagaagtttctct

SEQ ID NO: 91770 - DNA, 25 bp, SARS Virus
cacaattgaggacgaagtttctcta

SEQ ID NO: 91771 - DNA, 25 bp, SARS Virus
acaattgaggaacaagtttctctaa

SEQ ID NO: 91772 - DNA, 25 bp, SARS Virus
caattgaggaagcagtttctctaaa

SEQ ID NO: 91773 - DNA, 25 bp, SARS Virus
aattgaggaagacgtttctctaaag

SEQ ID NO: 91774 - DNA, 25 bp, SARS Virus
attgaggaagaactttctctaaagt

SEQ ID NO: 91775 - DNA, 25 bp, SARS Virus
ttgaggaagaagcttctctaaagtt

SEQ ID NO: 91776 - DNA, 25 bp, SARS Virus
tgaggaagaagtctctctaaagttg

SEQ ID NO: 91777 - DNA, 25 bp, SARS Virus
gaggaagaagttcctctaaagttgg

SEQ ID NO: 91778 - DNA, 25 bp, SARS Virus
aggaagaagtttctctaaagttggt

SEQ ID NO: 91779 - DNA, 25 bp, SARS Virus
ggaagaagtttccctaaagttggta

SEQ ID NO: 91780 - DNA, 25 bp, SARS Virus
gaagaagtttctctaaagttggtaa

SEQ ID NO: 91781 - DNA, 25 bp, SARS Virus
aagaagtttctccaaagttggtaaa

SEQ ID NO: 91782 - DNA, 25 bp, SARS Virus
agaagtttctctcaagttggtaaag

SEQ ID NO: 91783 - DNA, 25 bp, SARS Virus
gaagtttctctacagttggtaaagt

SEQ ID NO: 91784 - DNA, 25 bp, SARS Virus
aagtttctctaacgttggtaaagtt

SEQ ID NO: 91785 - DNA, 25 bp, SARS Virus
agtttctctaaacttggtaaagttg

SEQ ID NO: 91786 - DNA, 25 bp, SARS Virus
gtttctctaaagctggtaaagttgt

SEQ ID NO: 91787 - DNA, 25 bp, SARS Virus
tttctctaaagtcggtaaagttgtt

SEQ ID NO: 91788 - DNA, 25 bp, SARS Virus
ttctctaaagttcgtaaagttgtta

SEQ ID NO: 91789 - DNA, 25 bp, SARS Virus
tctctaaagttgctaaagttgttaa

SEQ ID NO: 91790 - DNA, 25 bp, SARS Virus
ctctaaagttggcaaagttgttaaa

SEQ ID NO: 91791 - DNA, 25 bp, SARS Virus
tctaaagttggtcaagttgttaaac

SEQ ID NO: 91792 - DNA, 25 bp, SARS Virus
ctaaagttggtacagttgttaaacc

SEQ ID NO: 91793 - DNA, 25 bp, SARS Virus
taaagttggtaacgttgttaaaccg

SEQ ID NO: 91794 - DNA, 25 bp, SARS Virus
aaagttggtaaacttgttaaaccgg

SEQ ID NO: 91795 - DNA, 25 bp, SARS Virus
aagttggtaaagctgttaaaccggc

SEQ ID NO: 91796 - DNA, 25 bp, SARS Virus
agttggtaaagtcgttaaaccggca

SEQ ID NO: 91797 - DNA, 25 bp, SARS Virus
gttggtaaagttcttaaaccggcac

SEQ ID NO: 91798 - DNA, 25 bp, SARS Virus
ttggtaaagttgctaaaccggcact

SEQ ID NO: 91799 - DNA, 25 bp, SARS Virus
tggtaaagttgtcaaaccggcacta

SEQ ID NO: 91800 - DNA, 25 bp, SARS Virus
ggtaaagttgttcaaccggcactac

SEQ ID NO: 91801 - DNA, 25 bp, SARS Virus
gtaaagttgttacaccggcactaca

SEQ ID NO: 91802 - DNA, 25 bp, SARS Virus
taaagttgttaacccggcactacaa

SEQ ID NO: 91803 - DNA, 25 bp, SARS Virus
aaagttgttaaaccggcactacaaa

SEQ ID NO: 91804 - DNA, 25 bp, SARS Virus
aagttgttaaaccggcactacaaag

SEQ ID NO: 91805 - DNA, 25 bp, SARS Virus
agttgttaaacccgcactacaaaga

SEQ ID NO: 91806 - DNA, 25 bp, SARS Virus
gttgttaaaccgccactacaaagac

SEQ ID NO: 91807 - DNA, 25 bp, SARS Virus
ttgttaaaccggcactacaaagact

SEQ ID NO: 91808 - DNA, 25 bp, SARS Virus
tgttaaaccggccctacaaagacta

SEQ ID NO: 91809 - DNA, 25 bp, SARS Virus
gttaaaccggcactacaaagactaa

SEQ ID NO: 91810 - DNA, 25 bp, SARS Virus
ttaaaccggcaccacaaagactaaa

SEQ ID NO: 91811 - DNA, 25 bp, SARS Virus
taaaccggcactccaaagactaaag

SEQ ID NO: 91812 - DNA, 25 bp, SARS Virus
aaaccggcactacaaagactaaagt

SEQ ID NO: 91813 - DNA, 25 bp, SARS Virus
aaccggcactaccaagactaaagtg

SEQ ID NO: 91814 - DNA, 25 bp, SARS Virus
accggcactacacagactaaagtga

SEQ ID NO: 91815 - DNA, 25 bp, SARS Virus
ccggcactacaacgactaaagtgac

SEQ ID NO: 91816 - DNA, 25 bp, SARS Virus
cggcactacaaacactaaagtgact

SEQ ID NO: 91817 - DNA, 25 bp, SARS Virus
ggcactacaaagcctaaagtgacta

SEQ ID NO: 91818 - DNA, 25 bp, SARS Virus
gcactacaaagactaaagtgactaa

SEQ ID NO: 91819 - DNA, 25 bp, SARS Virus
cactacaaagaccaaagtgactaag

SEQ ID NO: 91820 - DNA, 25 bp, SARS Virus
actacaaagactcaagtgactaagg

SEQ ID NO: 91821 - DNA, 25 bp, SARS Virus
ctacaaagactacagtgactaaggc

SEQ ID NO: 91822 - DNA, 25 bp, SARS Virus
tacaaagactaacgtgactaaggca

SEQ ID NO: 91823 - DNA, 25 bp, SARS Virus
acaaagactaaactgactaaggcaa

SEQ ID NO: 91824 - DNA, 25 bp, SARS Virus
caaagactaaagcgactaaggcaag

SEQ ID NO: 91825 - DNA, 25 bp, SARS Virus
aaagactaaagtcactaaggcaagc

SEQ ID NO: 91826 - DNA, 25 bp, SARS Virus
aagactaaagtgcctaaggcaagct

SEQ ID NO: 91827 - DNA, 25 bp, SARS Virus
agactaaagtgactaaggcaagctc

SEQ ID NO: 91828 - DNA, 25 bp, SARS Virus
gactaaagtgaccaaggcaagctct

SEQ ID NO: 91829 - DNA, 25 bp, SARS Virus
actaaagtgactcaggcaagctcta

SEQ ID NO: 91830 - DNA, 25 bp, SARS Virus
ctaaagtgactacggcaagctctag

SEQ ID NO: 91831 - DNA, 25 bp, SARS Virus
taaagtgactaacgcaagctctagg

SEQ ID NO: 91832 - DNA, 25 bp, SARS Virus
aaagtgactaagccaagctctagga

SEQ ID NO: 91833 - DNA, 25 bp, SARS Virus
aagtgactaaggcaagctctaggat

SEQ ID NO: 91834 - DNA, 25 bp, SARS Virus
agtgactaaggccagctctaggatt

SEQ ID NO: 91835 - DNA, 25 bp, SARS Virus
gtgactaaggcacgctctaggattt

SEQ ID NO: 91836 - DNA, 25 bp, SARS Virus
tgactaaggcaacctctaggatttt

SEQ ID NO: 91837 - DNA, 25 bp, SARS Virus
gactaaggcaagctctaggattttg

SEQ ID NO: 91838 - DNA, 25 bp, SARS Virus
actaaggcaagccctaggattttgt

SEQ ID NO: 91839 - DNA, 25 bp, SARS Virus
ctaaggcaagctctaggattttgta

SEQ ID NO: 91840 - DNA, 25 bp, SARS Virus
taaggcaagctccaggattttgtag

SEQ ID NO: 91841 - DNA, 25 bp, SARS Virus
aaggcaagctctcggattttgtaga

SEQ ID NO: 91842 - DNA, 25 bp, SARS Virus
aggcaagctctacgattttgtagac

SEQ ID NO: 91843 - DNA, 25 bp, SARS Virus
ggcaagctctagcattttgtagact

SEQ ID NO: 91844 - DNA, 25 bp, SARS Virus
gcaagctctaggcttttgtagactt

SEQ ID NO: 91845 - DNA, 25 bp, SARS Virus
caagctctaggactttgtagacttt

SEQ ID NO: 91846 - DNA, 25 bp, SARS Virus
aagctctaggatcttgtagacttta

SEQ ID NO: 91847 - DNA, 25 bp, SARS Virus
agctctaggattctgtagactttat

SEQ ID NO: 91848 - DNA, 25 bp, SARS Virus
gctctaggatttcgtagactttata

SEQ ID NO: 91849 - DNA, 25 bp, SARS Virus
ctctaggattttctagactttataa

SEQ ID NO: 91850 - DNA, 25 bp, SARS Virus
tctaggattttgcagactttataat

SEQ ID NO: 91851 - DNA, 25 bp, SARS Virus
ctaggattttgtcgactttataatc

SEQ ID NO: 91852 - DNA, 25 bp, SARS Virus
taggattttgtacactttataatct

SEQ ID NO: 91853 - DNA, 25 bp, SARS Virus
aggattttgtagcctttataatctg

SEQ ID NO: 91854 - DNA, 25 bp, SARS Virus
ggattttgtagactttataatctgt

SEQ ID NO: 91855 - DNA, 25 bp, SARS Virus
gattttgtagaccttataatctgta

SEQ ID NO: 91856 - DNA, 25 bp, SARS Virus
attttgtagactctataatctgtaa

SEQ ID NO: 91857 - DNA, 25 bp, SARS Virus
ttttgtagacttcataatctgtaaa

SEQ ID NO: 91858 - DNA, 25 bp, SARS Virus
tttgtagactttctaatctgtaaag

SEQ ID NO: 91859 - DNA, 25 bp, SARS Virus
ttgtagactttacaatctgtaaagt

SEQ ID NO: 91860 - DNA, 25 bp, SARS Virus
tgtagactttatcatctgtaaagtg

SEQ ID NO: 91861 - DNA, 25 bp, SARS Virus
gtagactttatactctgtaaagtgg

SEQ ID NO: 91862 - DNA, 25 bp, SARS Virus
tagactttataacctgtaaagtgga

SEQ ID NO: 91863 - DNA, 25 bp, SARS Virus
agactttataatctgtaaagtggaa

SEQ ID NO: 91864 - DNA, 25 bp, SARS Virus
gactttataatccgtaaagtggaac

SEQ ID NO: 91865 - DNA, 25 bp, SARS Virus
actttataatctctaaagtggaacg

SEQ ID NO: 91866 - DNA, 25 bp, SARS Virus
ctttataatctgcaaagtggaacgc

SEQ ID NO: 91867 - DNA, 25 bp, SARS Virus
tttataatctgtcaagtggaacgcg

SEQ ID NO: 91868 - DNA, 25 bp, SARS Virus
ttataatctgtacagtggaacgcga

SEQ ID NO: 91869 - DNA, 25 bp, SARS Virus
tataatctgtaacgtggaacgcgaa

SEQ ID NO: 91870 - DNA, 25 bp, SARS Virus
ataatctgtaaactggaacgcgaaa

SEQ ID NO: 91871 - DNA, 25 bp, SARS Virus
taatctgtaaagcggaacgcgaaaa

SEQ ID NO: 91872 - DNA, 25 bp, SARS Virus
aatctgtaaagtcgaacgcgaaaac

SEQ ID NO: 91873 - DNA, 25 bp, SARS Virus
attaatatttaagggtctactaaag

SEQ ID NO: 91874 - DNA, 25 bp, SARS Virus
ttaatatttaacggtctactaaagt

SEQ ID NO: 91875 - DNA, 25 bp, SARS Virus
taatatttaacggtctactaaagta

SEQ ID NO: 91876 - DNA, 25 bp, SARS Virus
aatatttaacgggctactaaagtac

SEQ ID NO: 91877 - DNA, 25 bp, SARS Virus
atatttaacggtgtactaaagtacc

SEQ ID NO: 91878 - DNA, 25 bp, SARS Virus
tatttaacggtcgactaaagtaccc

SEQ ID NO: 91879 - DNA, 25 bp, SARS Virus
atttaacggtctgctaaagtaccca

SEQ ID NO: 91880 - DNA, 25 bp, SARS Virus
tttaacggtctagtaaagtacccaa

SEQ ID NO: 91881 - DNA, 25 bp, SARS Virus
ttaacggtctacgaaagtacccaac

SEQ ID NO: 91882 - DNA, 25 bp, SARS Virus
taacggtctactgaagtacccaaca

SEQ ID NO: 91883 - DNA, 25 bp, SARS Virus
aacggtctactagagtacccaacac

SEQ ID NO: 91884 - DNA, 25 bp, SARS Virus
acggtctactaaggtacccaacaca

SEQ ID NO: 91885 - DNA, 25 bp, SARS Virus
cggtctactaaagtacccaacacag

SEQ ID NO: 91886 - DNA, 25 bp, SARS Virus
ggtctactaaaggacccaacacagg

SEQ ID NO: 91887 - DNA, 25 bp, SARS Virus
gtctactaaagtgcccaacacagga

SEQ ID NO: 91888 - DNA, 25 bp, SARS Virus
tctactaaagtagccaacacaggaa

SEQ ID NO: 91889 - DNA, 25 bp, SARS Virus
ctactaaagtacgcaacacaggaac

SEQ ID NO: 91890 - DNA, 25 bp, SARS Virus
tactaaagtaccgaacacaggaacg

SEQ ID NO: 91891 - DNA, 25 bp, SARS Virus
actaaagtacccgacacaggaacga

SEQ ID NO: 91892 - DNA, 25 bp, SARS Virus
ctaaagtacccagcacaggaacgaa

SEQ ID NO: 91893 - DNA, 25 bp, SARS Virus
taaagtacccaagacaggaacgaac

SEQ ID NO: 91894 - DNA, 25 bp, SARS Virus
aaagtacccaacgcaggaacgaacc

SEQ ID NO: 91895 - DNA, 25 bp, SARS Virus
aagtacccaacagaggaacgaacct

SEQ ID NO: 91896 - DNA, 25 bp, SARS Virus
agtacccaacacgggaacgaacctt

SEQ ID NO: 91897 - DNA, 25 bp, SARS Virus
gtacccaacacaggaacgaacctta

SEQ ID NO: 91898 - DNA, 25 bp, SARS Virus
tacccaacacaggaacgaaccttat

SEQ ID NO: 91899 - DNA, 25 bp, SARS Virus
acccaacacagggacgaaccttatg

SEQ ID NO: 91900 - DNA, 25 bp, SARS Virus
cccaacacaggagcgaaccttatga

SEQ ID NO: 91901 - DNA, 25 bp, SARS Virus
ccaacacaggaaggaaccttatgat

SEQ ID NO: 91902 - DNA, 25 bp, SARS Virus
caacacaggaacgaaccttatgatc

SEQ ID NO: 91903 - DNA, 25 bp, SARS Virus
aacacaggaacggaccttatgatcc

SEQ ID NO: 91904 - DNA, 25 bp, SARS Virus
acacaggaacgagccttatgatcct

SEQ ID NO: 91905 - DNA, 25 bp, SARS Virus
cacaggaacgaagcttatgatcctt

SEQ ID NO: 91906 - DNA, 25 bp, SARS Virus
acaggaacgaacgttatgatccttg

SEQ ID NO: 91907 - DNA, 25 bp, SARS Virus
caggaacgaaccgtatgatccttgt

SEQ ID NO: 91908 - DNA, 25 bp, SARS Virus
aggaacgaacctgatgatccttgta

SEQ ID NO: 91909 - DNA, 25 bp, SARS Virus
ggaacgaaccttgtgatccttgtaa

SEQ ID NO: 91910 - DNA, 25 bp, SARS Virus
gaacgaaccttaggatccttgtaac

SEQ ID NO: 91911 - DNA, 25 bp, SARS Virus
aacgaaccttatgatccttgtaact

SEQ ID NO: 91912 - DNA, 25 bp, SARS Virus
acgaaccttatggtccttgtaacta

SEQ ID NO: 91913 - DNA, 25 bp, SARS Virus
cgaaccttatgagccttgtaactac

SEQ ID NO: 91914 - DNA, 25 bp, SARS Virus
gaaccttatgatgcttgtaactacg

SEQ ID NO: 91915 - DNA, 25 bp, SARS Virus
aaccttatgatcgttgtaactacga

SEQ ID NO: 91916 - DNA, 25 bp, SARS Virus
accttatgatccgtgtaactacgat

SEQ ID NO: 91917 - DNA, 25 bp, SARS Virus
ccttatgatcctggtaactacgatg

SEQ ID NO: 91918 - DNA, 25 bp, SARS Virus
cttatgatccttgtaactacgatga

SEQ ID NO: 91919 - DNA, 25 bp, SARS Virus
ttatgatccttggaactacgatgaa

SEQ ID NO: 91920 - DNA, 25 bp, SARS Virus
tatgatccttgtgactacgatgaag

SEQ ID NO: 91921 - DNA, 25 bp, SARS Virus
atgatccttgtagctacgatgaagt

SEQ ID NO: 91922 - DNA, 25 bp, SARS Virus
tgatccttgtaagtacgatgaagtt

SEQ ID NO: 91923 - DNA, 25 bp, SARS Virus
gatccttgtaacgacgatgaagttg

SEQ ID NO: 91924 - DNA, 25 bp, SARS Virus
atccttgtaactgcgatgaagttga

SEQ ID NO: 91925 - DNA, 25 bp, SARS Virus
tccttgtaactaggatgaagttgac

SEQ ID NO: 91926 - DNA, 25 bp, SARS Virus
ccttgtaactacgatgaagttgacc

SEQ ID NO: 91927 - DNA, 25 bp, SARS Virus
cttgtaactacggtgaagttgacca

SEQ ID NO: 91928 - DNA, 25 bp, SARS Virus
ttgtaactacgaggaagttgaccat

SEQ ID NO: 91929 - DNA, 25 bp, SARS Virus
tgtaactacgatgaagttgaccatt

SEQ ID NO: 91930 - DNA, 25 bp, SARS Virus
gtaactacgatggagttgaccatta

SEQ ID NO: 91931 - DNA, 25 bp, SARS Virus
taactacgatgaggttgaccattaa

SEQ ID NO: 91932 - DNA, 25 bp, SARS Virus
aactacgatgaagttgaccattaat

SEQ ID NO: 91933 - DNA, 25 bp, SARS Virus
actacgatgaaggtgaccattaata

SEQ ID NO: 91934 - DNA, 25 bp, SARS Virus
ctacgatgaagtggaccattaatat

SEQ ID NO: 91935 - DNA, 25 bp, SARS Virus
tacgatgaagttgaccattaatatt

SEQ ID NO: 91936 - DNA, 25 bp, SARS Virus
acgatgaagttggccattaatatta

SEQ ID NO: 91937 - DNA, 25 bp, SARS Virus
cgatgaagttgagcattaatattaa

SEQ ID NO: 91938 - DNA, 25 bp, SARS Virus
gatgaagttgacgattaatattaat

SEQ ID NO: 91939 - DNA, 25 bp, SARS Virus
atgaagttgaccgttaatattaata

SEQ ID NO: 91940 - DNA, 25 bp, SARS Virus
tgaagttgaccagtaatattaatat

SEQ ID NO: 91941 - DNA, 25 bp, SARS Virus
gaagttgaccatgaatattaatatt

SEQ ID NO: 91942 - DNA, 25 bp, SARS Virus
aagttgaccattgatattaatattt

SEQ ID NO: 91943 - DNA, 25 bp, SARS Virus
agttgaccattagtattaatattta

SEQ ID NO: 91944 - DNA, 25 bp, SARS Virus
gttgaccattaagattaatatttat

SEQ ID NO: 91945 - DNA, 25 bp, SARS Virus
ttgaccattaatgttaatatttata

SEQ ID NO: 91946 - DNA, 25 bp, SARS Virus
tgaccattaatagtaatatttatat

SEQ ID NO: 91947 - DNA, 25 bp, SARS Virus
gaccattaatatgaatatttatatc

SEQ ID NO: 91948 - DNA, 25 bp, SARS Virus
accattaatattgatatttatatcc

SEQ ID NO: 91949 - DNA, 25 bp, SARS Virus
ccattaatattagtatttatatcca

SEQ ID NO: 91950 - DNA, 25 bp, SARS Virus
cattaatattaagatttatatccat

SEQ ID NO: 91951 - DNA, 25 bp, SARS Virus
attaatattaatgtttatatccata

SEQ ID NO: 91952 - DNA, 25 bp, SARS Virus
ttaatattaatagttatatccatag

SEQ ID NO: 91953 - DNA, 25 bp, SARS Virus
taatattaatatgtatatccataga

SEQ ID NO: 91954 - DNA, 25 bp, SARS Virus
aatattaatattgatatccatagaa

SEQ ID NO: 91955 - DNA, 25 bp, SARS Virus
atattaatatttgtatccatagaat

SEQ ID NO: 91956 - DNA, 25 bp, SARS Virus
tattaatatttagatccatagaatc

SEQ ID NO: 91957 - DNA, 25 bp, SARS Virus
attaatatttatgtccatagaatct

SEQ ID NO: 91958 - DNA, 25 bp, SARS Virus
ttaatatttatagccatagaatctg

SEQ ID NO: 91959 - DNA, 25 bp, SARS Virus
taatatttatatgcatagaatctgt

SEQ ID NO: 91960 - DNA, 25 bp, SARS Virus
aatatttatatcgatagaatctgta

SEQ ID NO: 91961 - DNA, 25 bp, SARS Virus
atatttatatccgtagaatctgtac

SEQ ID NO: 91962 - DNA, 25 bp, SARS Virus
tatttatatccagagaatctgtacc

SEQ ID NO: 91963 - DNA, 25 bp, SARS Virus
atttatatccatggaatctgtaccg

SEQ ID NO: 91964 - DNA, 25 bp, SARS Virus
tttatatccatagaatctgtaccgt

SEQ ID NO: 91965 - DNA, 25 bp, SARS Virus
ttatatccataggatctgtaccgtt

SEQ ID NO: 91966 - DNA, 25 bp, SARS Virus
tatatccatagagtctgtaccgttc

SEQ ID NO: 91967 - DNA, 25 bp, SARS Virus
atatccatagaagctgtaccgttcg

SEQ ID NO: 91968 - DNA, 25 bp, SARS Virus
tatccatagaatgtgtaccgttcga

SEQ ID NO: 91969 - DNA, 25 bp, SARS Virus
atccatagaatcggtaccgttcgaa

SEQ ID NO: 91970 - DNA, 25 bp, SARS Virus
tccatagaatctgtaccgttcgaat

SEQ ID NO: 91971 - DNA, 25 bp, SARS Virus
ccatagaatctggaccgttcgaatc

SEQ ID NO: 91972 - DNA, 25 bp, SARS Virus
catagaatctgtgccgttcgaatcc

SEQ ID NO: 91973 - DNA, 25 bp, SARS Virus
atagaatctgtagcgttcgaatccg

SEQ ID NO: 91974 - DNA, 25 bp, SARS Virus
tagaatctgtacggttcgaatccgg

SEQ ID NO: 91975 - DNA, 25 bp, SARS Virus
agaatctgtaccgttcgaatccggg

SEQ ID NO: 91976 - DNA, 25 bp, SARS Virus
gaatctgtaccggtcgaatccggga

SEQ ID NO: 91977 - DNA, 25 bp, SARS Virus
aatctgtaccgtgcgaatccgggaa

SEQ ID NO: 91978 - DNA, 25 bp, SARS Virus
atctgtaccgttggaatccgggaaa

SEQ ID NO: 91979 - DNA, 25 bp, SARS Virus
tctgtaccgttcgaatccgggaaac

SEQ ID NO: 91980 - DNA, 25 bp, SARS Virus
ctgtaccgttcggatccgggaaact

SEQ ID NO: 91981 - DNA, 25 bp, SARS Virus
tgtaccgttcgagtccgggaaactc

SEQ ID NO: 91982 - DNA, 25 bp, SARS Virus
gtaccgttcgaagccgggaaactct

SEQ ID NO: 91983 - DNA, 25 bp, SARS Virus
taccgttcgaatgcgggaaactctc

SEQ ID NO: 91984 - DNA, 25 bp, SARS Virus
accgttcgaatcggggaaactctct

SEQ ID NO: 91985 - DNA, 25 bp, SARS Virus
ccgttcgaatccgggaaactctctc

SEQ ID NO: 91986 - DNA, 25 bp, SARS Virus
cgttcgaatccgggaaactctctct

SEQ ID NO: 91987 - DNA, 25 bp, SARS Virus
gttcgaatccgggaaactctctctg

SEQ ID NO: 91988 - DNA, 25 bp, SARS Virus
ttcgaatccggggaactctctctgt

SEQ ID NO: 91989 - DNA, 25 bp, SARS Virus
tcgaatccgggagactctctctgta

SEQ ID NO: 91990 - DNA, 25 bp, SARS Virus
cgaatccgggaagctctctctgtat

SEQ ID NO: 91991 - DNA, 25 bp, SARS Virus
gaatccgggaaagtctctctgtata

SEQ ID NO: 91992 - DNA, 25 bp, SARS Virus
aatccgggaaacgctctctgtatag

SEQ ID NO: 91993 - DNA, 25 bp, SARS Virus
atccgggaaactgtctctgtataga

SEQ ID NO: 91994 - DNA, 25 bp, SARS Virus
tccgggaaactcgctctgtatagat

SEQ ID NO: 91995 - DNA, 25 bp, SARS Virus
ccgggaaactctgtctgtatagatt

SEQ ID NO: 91996 - DNA, 25 bp, SARS Virus
cgggaaactctcgctgtatagatta

SEQ ID NO: 91997 - DNA, 25 bp, SARS Virus
gggaaactctctgtgtatagattac

SEQ ID NO: 91998 - DNA, 25 bp, SARS Virus
ggaaactctctcggtatagattaca

SEQ ID NO: 91999 - DNA, 25 bp, SARS Virus
gaaactctctctgtatagattacac

SEQ ID NO: 92000 - DNA, 25 bp, SARS Virus
aaactctctctggatagattacacg

SEQ ID NO: 92001 - DNA, 25 bp, SARS Virus
aactctctctgtgtagattacacgg

SEQ ID NO: 92002 - DNA, 25 bp, SARS Virus
actctctctgtagagattacacgga

SEQ ID NO: 92003 - DNA, 25 bp, SARS Virus
ctctctctgtatggattacacggaa

SEQ ID NO: 92004 - DNA, 25 bp, SARS Virus
tctctctgtatagattacacggaaa

SEQ ID NO: 92005 - DNA, 25 bp, SARS Virus
ctctctgtataggttacacggaaag

SEQ ID NO: 92006 - DNA, 25 bp, SARS Virus
tctctgtatagagtacacggaaaga

SEQ ID NO: 92007 - DNA, 25 bp, SARS Virus
ctctgtatagatgacacggaaagag

SEQ ID NO: 92008 - DNA, 25 bp, SARS Virus
tctgtatagattgcacggaaagagg

SEQ ID NO: 92009 - DNA, 25 bp, SARS Virus
ctgtatagattagacggaaagaggg

SEQ ID NO: 92010 - DNA, 25 bp, SARS Virus
tgtatagattacgcggaaagagggg

SEQ ID NO: 92011 - DNA, 25 bp, SARS Virus
gtatagattacagggaaagagggga

SEQ ID NO: 92012 - DNA, 25 bp, SARS Virus
tatagattacacggaaagaggggac

SEQ ID NO: 92013 - DNA, 25 bp, SARS Virus
atagattacacggaaagaggggact

SEQ ID NO: 92014 - DNA, 25 bp, SARS Virus
tagattacacgggaagaggggacta

SEQ ID NO: 92015 - DNA, 25 bp, SARS Virus
agattacacggagagaggggactac

SEQ ID NO: 92016 - DNA, 25 bp, SARS Virus
gattacacggaaggaggggactacc

SEQ ID NO: 92017 - DNA, 25 bp, SARS Virus
attacacggaaagaggggactaccg

SEQ ID NO: 92018 - DNA, 25 bp, SARS Virus
ttacacggaaaggggggactaccgt

SEQ ID NO: 92019 - DNA, 25 bp, SARS Virus
tacacggaaagaggggactaccgtt

SEQ ID NO: 92020 - DNA, 25 bp, SARS Virus
acacggaaagaggggactaccgttt

SEQ ID NO: 92021 - DNA, 25 bp, SARS Virus
cacggaaagaggggactaccgtttg

SEQ ID NO: 92022 - DNA, 25 bp, SARS Virus
acggaaagaggggactaccgtttgg

SEQ ID NO: 92023 - DNA, 25 bp, SARS Virus
cggaaagagggggctaccgtttgga

SEQ ID NO: 92024 - DNA, 25 bp, SARS Virus
ggaaagaggggagtaccgtttggaa

SEQ ID NO: 92025 - DNA, 25 bp, SARS Virus
gaaagaggggacgaccgtttggaac

SEQ ID NO: 92026 - DNA, 25 bp, SARS Virus
aaagaggggactgccgtttggaacg

SEQ ID NO: 92027 - DNA, 25 bp, SARS Virus
aagaggggactagcgtttggaacgt

SEQ ID NO: 92028 - DNA, 25 bp, SARS Virus
agaggggactacggtttggaacgtg

SEQ ID NO: 92029 - DNA, 25 bp, SARS Virus
gaggggactaccgtttggaacgtgg

SEQ ID NO: 92030 - DNA, 25 bp, SARS Virus
aggggactaccggttggaacgtggg

SEQ ID NO: 92031 - DNA, 25 bp, SARS Virus
ggggactaccgtgtggaacgtgggg

SEQ ID NO: 92032 - DNA, 25 bp, SARS Virus
gggactaccgttgggaacgtggggt

SEQ ID NO: 92033 - DNA, 25 bp, SARS Virus
ggactaccgtttggaacgtggggtg

SEQ ID NO: 92034 - DNA, 25 bp, SARS Virus
gactaccgtttggaacgtggggtgg

SEQ ID NO: 92035 - DNA, 25 bp, SARS Virus
actaccgtttgggacgtggggtgga

SEQ ID NO: 92036 - DNA, 25 bp, SARS Virus
ctaccgtttggagcgtggggtggac

SEQ ID NO: 92037 - DNA, 25 bp, SARS Virus
taccgtttggaaggtggggtggacg

SEQ ID NO: 92038 - DNA, 25 bp, SARS Virus
accgtttggaacgtggggtggacga

SEQ ID NO: 92039 - DNA, 25 bp, SARS Virus
ccgtttggaacggggggtggacgag

SEQ ID NO: 92040 - DNA, 25 bp, SARS Virus
cgtttggaacgtggggtggacgaga

SEQ ID NO: 92041 - DNA, 25 bp, SARS Virus
gtttggaacgtggggtggacgagaa

SEQ ID NO: 92042 - DNA, 25 bp, SARS Virus
tttggaacgtggggtggacgagaat

SEQ ID NO: 92043 - DNA, 25 bp, SARS Virus
ttggaacgtggggtggacgagaatt

SEQ ID NO: 92044 - DNA, 25 bp, SARS Virus
tggaacgtgggggggacgagaatta

SEQ ID NO: 92045 - DNA, 25 bp, SARS Virus
ggaacgtggggtggacgagaattaa

SEQ ID NO: 92046 - DNA, 25 bp, SARS Virus
gaacgtggggtggacgagaattaac

SEQ ID NO: 92047 - DNA, 25 bp, SARS Virus
aacgtggggtgggcgagaattaaca

SEQ ID NO: 92048 - DNA, 25 bp, SARS Virus
acgtggggtggaggagaattaacaa

SEQ ID NO: 92049 - DNA, 25 bp, SARS Virus
cgtggggtggacgagaattaacaat

SEQ ID NO: 92050 - DNA, 25 bp, SARS Virus
gtggggtggacgggaattaacaata

SEQ ID NO: 92051 - DNA, 25 bp, SARS Virus
tggggtggacgagaattaacaataa

SEQ ID NO: 92052 - DNA, 25 bp, SARS Virus
ggggtggacgaggattaacaataac

SEQ ID NO: 92053 - DNA, 25 bp, SARS Virus
gggtggacgagagttaacaataacc

SEQ ID NO: 92054 - DNA, 25 bp, SARS Virus
ggtggacgagaagtaacaataaccg

SEQ ID NO: 92055 - DNA, 25 bp, SARS Virus
gtggacgagaatgaacaataaccgg

SEQ ID NO: 92056 - DNA, 25 bp, SARS Virus
tggacgagaattgacaataaccggt

SEQ ID NO: 92057 - DNA, 25 bp, SARS Virus
ggacgagaattagcaataaccggta

SEQ ID NO: 92058 - DNA, 25 bp, SARS Virus
gacgagaattaagaataaccggtaa

SEQ ID NO: 92059 - DNA, 25 bp, SARS Virus
acgagaattaacgataaccggtaat

SEQ ID NO: 92060 - DNA, 25 bp, SARS Virus
cgagaattaacagtaaccggtaatt

SEQ ID NO: 92061 - DNA, 25 bp, SARS Virus
gagaattaacaagaaccggtaattt

SEQ ID NO: 92062 - DNA, 25 bp, SARS Virus
agaattaacaatgaccggtaattta

SEQ ID NO: 92063 - DNA, 25 bp, SARS Virus
gaattaacaatagccggtaatttac

SEQ ID NO: 92064 - DNA, 25 bp, SARS Virus
aattaacaataagcggtaatttact

SEQ ID NO: 92065 - DNA, 25 bp, SARS Virus
attaacaataacgggtaatttacta

SEQ ID NO: 92066 - DNA, 25 bp, SARS Virus
ttaacaataaccggtaatttactaa

SEQ ID NO: 92067 - DNA, 25 bp, SARS Virus
taacaataaccggtaatttactaat

SEQ ID NO: 92068 - DNA, 25 bp, SARS Virus
aacaataaccgggaatttactaata

SEQ ID NO: 92069 - DNA, 25 bp, SARS Virus
acaataaccggtgatttactaatac

SEQ ID NO: 92070 - DNA, 25 bp, SARS Virus
caataaccggtagtttactaatacc

SEQ ID NO: 92071 - DNA, 25 bp, SARS Virus
aataaccggtaagttactaatacca

SEQ ID NO: 92072 - DNA, 25 bp, SARS Virus
ataaccggtaatgtactaataccaa

SEQ ID NO: 92073 - DNA, 25 bp, SARS Virus
taaccggtaattgactaataccaaa

SEQ ID NO: 92074 - DNA, 25 bp, SARS Virus
aaccggtaatttgctaataccaaaa

SEQ ID NO: 92075 - DNA, 25 bp, SARS Virus
accggtaatttagtaataccaaaaa

SEQ ID NO: 92076 - DNA, 25 bp, SARS Virus
ccggtaatttacgaataccaaaaat

SEQ ID NO: 92077 - DNA, 25 bp, SARS Virus
cggtaatttactgataccaaaaatg

SEQ ID NO: 92078 - DNA, 25 bp, SARS Virus
ggtaatttactagtaccaaaaatgt

SEQ ID NO: 92079 - DNA, 25 bp, SARS Virus
gtaatttactaagaccaaaaatgtg

SEQ ID NO: 92080 - DNA, 25 bp, SARS Virus
taatttactaatgccaaaaatgtgg

SEQ ID NO: 92081 - DNA, 25 bp, SARS Virus
aatttactaatagcaaaaatgtggt

SEQ ID NO: 92082 - DNA, 25 bp, SARS Virus
atttactaatacgaaaaatgtggtg

SEQ ID NO: 92083 - DNA, 25 bp, SARS Virus
tttactaataccgaaaatgtggtga

SEQ ID NO: 92084 - DNA, 25 bp, SARS Virus
ttactaataccagaaatgtggtgat

SEQ ID NO: 92085 - DNA, 25 bp, SARS Virus
tactaataccaagaatgtggtgatg

SEQ ID NO: 92086 - DNA, 25 bp, SARS Virus
actaataccaaagatgtggtgatga

SEQ ID NO: 92087 - DNA, 25 bp, SARS Virus
ctaataccaaaagtgtggtgatgac

SEQ ID NO: 92088 - DNA, 25 bp, SARS Virus
taataccaaaaaggtggtgatgacc

SEQ ID NO: 92089 - DNA, 25 bp, SARS Virus
aataccaaaaatgtggtgatgaccg

SEQ ID NO: 92090 - DNA, 25 bp, SARS Virus
ataccaaaaatggggtgatgaccgt

SEQ ID NO: 92091 - DNA, 25 bp, SARS Virus
taccaaaaatgtggtgatgaccgta

SEQ ID NO: 92092 - DNA, 25 bp, SARS Virus
accaaaaatgtggtgatgaccgtaa

SEQ ID NO: 92093 - DNA, 25 bp, SARS Virus
ccaaaaatgtggggatgaccgtaac

SEQ ID NO: 92094 - DNA, 25 bp, SARS Virus
caaaaatgtggtgatgaccgtaacc

SEQ ID NO: 92095 - DNA, 25 bp, SARS Virus
aaaaatgtggtggtgaccgtaaccg

SEQ ID NO: 92096 - DNA, 25 bp, SARS Virus
aaaatgtggtgaggaccgtaaccga

SEQ ID NO: 92097 - DNA, 25 bp, SARS Virus
aaatgtggtgatgaccgtaaccgat

SEQ ID NO: 92098 - DNA, 25 bp, SARS Virus
aatgtggtgatggccgtaaccgatg

SEQ ID NO: 92099 - DNA, 25 bp, SARS Virus
atgtggtgatgagcgtaaccgatgg

SEQ ID NO: 92100 - DNA, 25 bp, SARS Virus
tgtggtgatgacggtaaccgatggt

SEQ ID NO: 92101 - DNA, 25 bp, SARS Virus
gtggtgatgaccgtaaccgatggtt

SEQ ID NO: 92102 - DNA, 25 bp, SARS Virus
tggtgatgaccggaaccgatggttg

SEQ ID NO: 92103 - DNA, 25 bp, SARS Virus
ggtgatgaccgtgaccgatggttgg

SEQ ID NO: 92104 - DNA, 25 bp, SARS Virus
gtgatgaccgtagccgatggttgga

SEQ ID NO: 92105 - DNA, 25 bp, SARS Virus
tgatgaccgtaagcgatggttggaa

SEQ ID NO: 92106 - DNA, 25 bp, SARS Virus
gatgaccgtaacggatggttggaat

SEQ ID NO: 92107 - DNA, 25 bp, SARS Virus
atgaccgtaaccgatggttggaatg

SEQ ID NO: 92108 - DNA, 25 bp, SARS Virus
tgaccgtaaccggtggttggaatgt

SEQ ID NO: 92109 - DNA, 25 bp, SARS Virus
gaccgtaaccgagggttggaatgtc

SEQ ID NO: 92110 - DNA, 25 bp, SARS Virus
accgtaaccgatggttggaatgtct

SEQ ID NO: 92111 - DNA, 25 bp, SARS Virus
ccgtaaccgatggttggaatgtctc

SEQ ID NO: 92112 - DNA, 25 bp, SARS Virus
cgtaaccgatgggtggaatgtctca

SEQ ID NO: 92113 - DNA, 25 bp, SARS Virus
gtaaccgatggtgggaatgtctcaa

SEQ ID NO: 92114 - DNA, 25 bp, SARS Virus
taaccgatggttggaatgtctcaac

SEQ ID NO: 92115 - DNA, 25 bp, SARS Virus
aaccgatggttggaatgtctcaaca

SEQ ID NO: 92116 - DNA, 25 bp, SARS Virus
accgatggttgggatgtctcaacat

SEQ ID NO: 92117 - DNA, 25 bp, SARS Virus
ccgatggttggagtgtctcaacatc

SEQ ID NO: 92118 - DNA, 25 bp, SARS Virus
cgatggttggaaggtctcaacatca

SEQ ID NO: 92119 - DNA, 25 bp, SARS Virus
gatggttggaatgtctcaacatcat

SEQ ID NO: 92120 - DNA, 25 bp, SARS Virus
atggttggaatggctcaacatcatg

SEQ ID NO: 92121 - DNA, 25 bp, SARS Virus
tggttggaatgtgtcaacatcatga

SEQ ID NO: 92122 - DNA, 25 bp, SARS Virus
ggttggaatgtcgcaacatcatgaa

SEQ ID NO: 92123 - DNA, 25 bp, SARS Virus
gttggaatgtctgaacatcatgaaa

SEQ ID NO: 92124 - DNA, 25 bp, SARS Virus
ttggaatgtctcgacatcatgaaag

SEQ ID NO: 92125 - DNA, 25 bp, SARS Virus
tggaatgtctcagcatcatgaaaga

SEQ ID NO: 92126 - DNA, 25 bp, SARS Virus
ggaatgtctcaagatcatgaaagaa

SEQ ID NO: 92127 - DNA, 25 bp, SARS Virus
gaatgtctcaacgtcatgaaagaaa

SEQ ID NO: 92128 - DNA, 25 bp, SARS Virus
aatgtctcaacagcatgaaagaaaa

SEQ ID NO: 92129 - DNA, 25 bp, SARS Virus
atgtctcaacatgatgaaagaaaac

SEQ ID NO: 92130 - DNA, 25 bp, SARS Virus
tgtctcaacatcgtgaaagaaaact

SEQ ID NO: 92131 - DNA, 25 bp, SARS Virus
gtctcaacatcaggaaagaaaactt

SEQ ID NO: 92132 - DNA, 25 bp, SARS Virus
tctcaacatcatgaaagaaaacttg

SEQ ID NO: 92133 - DNA, 25 bp, SARS Virus
ctcaacatcatggaagaaaacttga

SEQ ID NO: 92134 - DNA, 25 bp, SARS Virus
tcaacatcatgagagaaaacttgaa

SEQ ID NO: 92135 - DNA, 25 bp, SARS Virus
caacatcatgaaggaaaacttgaaa

SEQ ID NO: 92136 - DNA, 25 bp, SARS Virus
aacatcatgaaagaaaacttgaaaa

SEQ ID NO: 92137 - DNA, 25 bp, SARS Virus
acatcatgaaaggaaacttgaaaat

SEQ ID NO: 92138 - DNA, 25 bp, SARS Virus
catcatgaaagagaacttgaaaatt

SEQ ID NO: 92139 - DNA, 25 bp, SARS Virus
atcatgaaagaagacttgaaaattt

SEQ ID NO: 92140 - DNA, 25 bp, SARS Virus
tcatgaaagaaagcttgaaaattta

SEQ ID NO: 92141 - DNA, 25 bp, SARS Virus
catgaaagaaaagttgaaaatttac

SEQ ID NO: 92142 - DNA, 25 bp, SARS Virus
atgaaagaaaacgtgaaaatttacg

SEQ ID NO: 92143 - DNA, 25 bp, SARS Virus
tgaaagaaaactggaaaatttacgt

SEQ ID NO: 92144 - DNA, 25 bp, SARS Virus
gaaagaaaacttgaaaatttacgtg

SEQ ID NO: 92145 - DNA, 25 bp, SARS Virus
aaagaaaacttggaaatttacgtgg

SEQ ID NO: 92146 - DNA, 25 bp, SARS Virus
aagaaaacttgagaatttacgtggc

SEQ ID NO: 92147 - DNA, 25 bp, SARS Virus
agaaaacttgaagatttacgtggcc

SEQ ID NO: 92148 - DNA, 25 bp, SARS Virus
gaaaacttgaaagtttacgtggccg

SEQ ID NO: 92149 - DNA, 25 bp, SARS Virus
aaaacttgaaaagttacgtggccgg

SEQ ID NO: 92150 - DNA, 25 bp, SARS Virus
aaacttgaaaatgtacgtggccggt

SEQ ID NO: 92151 - DNA, 25 bp, SARS Virus
aacttgaaaattgacgtggccggtg

SEQ ID NO: 92152 - DNA, 25 bp, SARS Virus
acttgaaaatttgcgtggccggtgc

SEQ ID NO: 92153 - DNA, 25 bp, SARS Virus
cttgaaaatttaggtggccggtgcc

SEQ ID NO: 92154 - DNA, 25 bp, SARS Virus
ttgaaaatttacgtggccggtgcca

SEQ ID NO: 92155 - DNA, 25 bp, SARS Virus
tgaaaatttacggggccggtgccaa

SEQ ID NO: 92156 - DNA, 25 bp, SARS Virus
gaaaatttacgtggccggtgccaaa

SEQ ID NO: 92157 - DNA, 25 bp, SARS Virus
aaaatttacgtggccggtgccaaac

SEQ ID NO: 92158 - DNA, 25 bp, SARS Virus
aaatttacgtgggcggtgccaaaca

SEQ ID NO: 92159 - DNA, 25 bp, SARS Virus
aatttacgtggcgggtgccaaacac

SEQ ID NO: 92160 - DNA, 25 bp, SARS Virus
atttacgtggccggtgccaaacacc

SEQ ID NO: 92161 - DNA, 25 bp, SARS Virus
tttacgtggccggtgccaaacacct

SEQ ID NO: 92162 - DNA, 25 bp, SARS Virus
ttacgtggccggggccaaacacctg

SEQ ID NO: 92163 - DNA, 25 bp, SARS Virus
tacgtggccggtgccaaacacctgg

SEQ ID NO: 92164 - DNA, 25 bp, SARS Virus
acgtggccggtggcaaacacctggt

SEQ ID NO: 92165 - DNA, 25 bp, SARS Virus
cgtggccggtgcgaaacacctggtt

SEQ ID NO: 92166 - DNA, 25 bp, SARS Virus
gtggccggtgccgaacacctggttt

SEQ ID NO: 92167 - DNA, 25 bp, SARS Virus
tggccggtgccagacacctggtttt

SEQ ID NO: 92168 - DNA, 25 bp, SARS Virus
ggccggtgccaagcacctggtttta

SEQ ID NO: 92169 - DNA, 25 bp, SARS Virus
gccggtgccaaagacctggttttaa

SEQ ID NO: 92170 - DNA, 25 bp, SARS Virus
ccggtgccaaacgcctggttttaat

SEQ ID NO: 92171 - DNA, 25 bp, SARS Virus
cggtgccaaacagctggttttaata

SEQ ID NO: 92172 - DNA, 25 bp, SARS Virus
ggtgccaaacacgtggttttaatag

SEQ ID NO: 92173 - DNA, 25 bp, SARS Virus
gtgccaaacaccgggttttaatagg

SEQ ID NO: 92174 - DNA, 25 bp, SARS Virus
tgccaaacacctggttttaataggt

SEQ ID NO: 92175 - DNA, 25 bp, SARS Virus
gccaaacacctggttttaataggtg

SEQ ID NO: 92176 - DNA, 25 bp, SARS Virus
ccaaacacctgggtttaataggtga

SEQ ID NO: 92177 - DNA, 25 bp, SARS Virus
caaacacctggtgttaataggtgac

SEQ ID NO: 92178 - DNA, 25 bp, SARS Virus
aaacacctggttgtaataggtgact

SEQ ID NO: 92179 - DNA, 25 bp, SARS Virus
aacacctggtttgaataggtgactg

SEQ ID NO: 92180 - DNA, 25 bp, SARS Virus
acacctggttttgataggtgactgg

SEQ ID NO: 92181 - DNA, 25 bp, SARS Virus
cacctggttttagtaggtgactgga

SEQ ID NO: 92182 - DNA, 25 bp, SARS Virus
acctggttttaagaggtgactggaa

SEQ ID NO: 92183 - DNA, 25 bp, SARS Virus
cctggttttaatgggtgactggaat

SEQ ID NO: 92184 - DNA, 25 bp, SARS Virus
ctggttttaataggtgactggaata

SEQ ID NO: 92185 - DNA, 25 bp, SARS Virus
tggttttaataggtgactggaataa

SEQ ID NO: 92186 - DNA, 25 bp, SARS Virus
ggttttaataggggactggaataat

SEQ ID NO: 92187 - DNA, 25 bp, SARS Virus
gttttaataggtgactggaataatt

SEQ ID NO: 92188 - DNA, 25 bp, SARS Virus
ttttaataggtggctggaataattc

SEQ ID NO: 92189 - DNA, 25 bp, SARS Virus
tttaataggtgagtggaataattct

SEQ ID NO: 92190 - DNA, 25 bp, SARS Virus
ttaataggtgacgggaataattctt

SEQ ID NO: 92191 - DNA, 25 bp, SARS Virus
taataggtgactggaataattcttg

SEQ ID NO: 92192 - DNA, 25 bp, SARS Virus
aataggtgactggaataattcttgg

SEQ ID NO: 92193 - DNA, 25 bp, SARS Virus
ataggtgactgggataattcttggt

SEQ ID NO: 92194 - DNA, 25 bp, SARS Virus
taggtgactggagtaattcttggtc

SEQ ID NO: 92195 - DNA, 25 bp, SARS Virus
aggtgactggaagaattcttggtca

SEQ ID NO: 92196 - DNA, 25 bp, SARS Virus
ggtgactggaatgattcttggtcac

SEQ ID NO: 92197 - DNA, 25 bp, SARS Virus
gtgactggaatagttcttggtcaca

SEQ ID NO: 92198 - DNA, 25 bp, SARS Virus
tgactggaataagtcttggtcacac

SEQ ID NO: 92199 - DNA, 25 bp, SARS Virus
gactggaataatgcttggtcacaca

SEQ ID NO: 92200 - DNA, 25 bp, SARS Virus
actggaataattgttggtcacacag

SEQ ID NO: 92201 - DNA, 25 bp, SARS Virus
ctggaataattcgtggtcacacagt

SEQ ID NO: 92202 - DNA, 25 bp, SARS Virus
tggaataattctgggtcacacagtt

SEQ ID NO: 92203 - DNA, 25 bp, SARS Virus
ggaataattcttggtcacacagtta

SEQ ID NO: 92204 - DNA, 25 bp, SARS Virus
gaataattcttggtcacacagttaa

SEQ ID NO: 92205 - DNA, 25 bp, SARS Virus
aataattcttgggcacacagttaaa

SEQ ID NO: 92206 - DNA, 25 bp, SARS Virus
ataattcttggtgacacagttaaaa

SEQ ID NO: 92207 - DNA, 25 bp, SARS Virus
taattcttggtcgcacagttaaaat

SEQ ID NO: 92208 - DNA, 25 bp, SARS Virus
aattcttggtcagacagttaaaatt

SEQ ID NO: 92209 - DNA, 25 bp, SARS Virus
attcttggtcacgcagttaaaatta

SEQ ID NO: 92210 - DNA, 25 bp, SARS Virus
ttcttggtcacagagttaaaattaa

SEQ ID NO: 92211 - DNA, 25 bp, SARS Virus
tcttggtcacacggttaaaattaaa

SEQ ID NO: 92212 - DNA, 25 bp, SARS Virus
cttggtcacacagttaaaattaaaa

SEQ ID NO: 92213 - DNA, 25 bp, SARS Virus
ttggtcacacaggtaaaattaaaat

SEQ ID NO: 92214 - DNA, 25 bp, SARS Virus
tggtcacacagtgaaaattaaaatt

SEQ ID NO: 92215 - DNA, 25 bp, SARS Virus
ggtcacacagttgaaattaaaatta

SEQ ID NO: 92216 - DNA, 25 bp, SARS Virus
gtcacacagttagaattaaaattac

SEQ ID NO: 92217 - DNA, 25 bp, SARS Virus
tcacacagttaagattaaaattacc

SEQ ID NO: 92218 - DNA, 25 bp, SARS Virus
cacacagttaaagttaaaattacct

SEQ ID NO: 92219 - DNA, 25 bp, SARS Virus
acacagttaaaagtaaaattacctg

SEQ ID NO: 92220 - DNA, 25 bp, SARS Virus
cacagttaaaatgaaaattacctga

SEQ ID NO: 92221 - DNA, 25 bp, SARS Virus
acagttaaaattgaaattacctgag

SEQ ID NO: 92222 - DNA, 25 bp, SARS Virus
cagttaaaattagaattacctgagt

SEQ ID NO: 92223 - DNA, 25 bp, SARS Virus
agttaaaattaagattacctgagtg

SEQ ID NO: 92224 - DNA, 25 bp, SARS Virus
gttaaaattaaagttacctgagtga

SEQ ID NO: 92225 - DNA, 25 bp, SARS Virus
ttaaaattaaaagtacctgagtgac

SEQ ID NO: 92226 - DNA, 25 bp, SARS Virus
taaaattaaaatgacctgagtgacc

SEQ ID NO: 92227 - DNA, 25 bp, SARS Virus
aaaattaaaattgcctgagtgacca

SEQ ID NO: 92228 - DNA, 25 bp, SARS Virus
aaattaaaattagctgagtgaccat

SEQ ID NO: 92229 - DNA, 25 bp, SARS Virus
aattaaaattacgtgagtgaccatg

SEQ ID NO: 92230 - DNA, 25 bp, SARS Virus
attaaaattaccggagtgaccatga

SEQ ID NO: 92231 - DNA, 25 bp, SARS Virus
ttaaaattacctgagtgaccatgac

SEQ ID NO: 92232 - DNA, 25 bp, SARS Virus
taaaattacctgggtgaccatgacc

SEQ ID NO: 92233 - DNA, 25 bp, SARS Virus
aaaattacctgagtgaccatgacca

SEQ ID NO: 92234 - DNA, 25 bp, SARS Virus
aaattacctgagggaccatgaccac

SEQ ID NO: 92235 - DNA, 25 bp, SARS Virus
aattacctgagtgaccatgaccaca

SEQ ID NO: 92236 - DNA, 25 bp, SARS Virus
attacctgagtggccatgaccacac

SEQ ID NO: 92237 - DNA, 25 bp, SARS Virus
ttacctgagtgagcatgaccacaca

SEQ ID NO: 92238 - DNA, 25 bp, SARS Virus
tacctgagtgacgatgaccacacaa

SEQ ID NO: 92239 - DNA, 25 bp, SARS Virus
acctgagtgaccgtgaccacacaat

SEQ ID NO: 92240 - DNA, 25 bp, SARS Virus
cctgagtgaccaggaccacacaatt

SEQ ID NO: 92241 - DNA, 25 bp, SARS Virus
ctgagtgaccatgaccacacaattg

SEQ ID NO: 92242 - DNA, 25 bp, SARS Virus
tgagtgaccatggccacacaattga

SEQ ID NO: 92243 - DNA, 25 bp, SARS Virus
gagtgaccatgagcacacaattgag

SEQ ID NO: 92244 - DNA, 25 bp, SARS Virus
agtgaccatgacgacacaattgagg

SEQ ID NO: 92245 - DNA, 25 bp, SARS Virus
gtgaccatgaccgcacaattgagga

SEQ ID NO: 92246 - DNA, 25 bp, SARS Virus
tgaccatgaccagacaattgaggaa

SEQ ID NO: 92247 - DNA, 25 bp, SARS Virus
gaccatgaccacgcaattgaggaag

SEQ ID NO: 92248 - DNA, 25 bp, SARS Virus
accatgaccacagaattgaggaaga

SEQ ID NO: 92249 - DNA, 25 bp, SARS Virus
ccatgaccacacgattgaggaagaa

SEQ ID NO: 92250 - DNA, 25 bp, SARS Virus
catgaccacacagttgaggaagaag

SEQ ID NO: 92251 - DNA, 25 bp, SARS Virus
atgaccacacaagtgaggaagaagt

SEQ ID NO: 92252 - DNA, 25 bp, SARS Virus
tgaccacacaatggaggaagaagtt

SEQ ID NO: 92253 - DNA, 25 bp, SARS Virus
gaccacacaattgaggaagaagttt

SEQ ID NO: 92254 - DNA, 25 bp, SARS Virus
accacacaattggggaagaagtttc

SEQ ID NO: 92255 - DNA, 25 bp, SARS Virus
ccacacaattgaggaagaagtttct

SEQ ID NO: 92256 - DNA, 25 bp, SARS Virus
cacacaattgaggaagaagtttctc

SEQ ID NO: 92257 - DNA, 25 bp, SARS Virus
acacaattgagggagaagtttctct

SEQ ID NO: 92258 - DNA, 25 bp, SARS Virus
cacaattgaggaggaagtttctcta

SEQ ID NO: 92259 - DNA, 25 bp, SARS Virus
acaattgaggaagaagtttctctaa

SEQ ID NO: 92260 - DNA, 25 bp, SARS Virus
caattgaggaaggagtttctctaaa

SEQ ID NO: 92261 - DNA, 25 bp, SARS Virus
aattgaggaagaggtttctctaaag

SEQ ID NO: 92262 - DNA, 25 bp, SARS Virus
attgaggaagaagtttctctaaagt

SEQ ID NO: 92263 - DNA, 25 bp, SARS Virus
ttgaggaagaaggttctctaaagtt

SEQ ID NO: 92264 - DNA, 25 bp, SARS Virus
tgaggaagaagtgtctctaaagttg

SEQ ID NO: 92265 - DNA, 25 bp, SARS Virus
gaggaagaagttgctctaaagttgg

SEQ ID NO: 92266 - DNA, 25 bp, SARS Virus
aggaagaagtttgtctaaagttggt

SEQ ID NO: 92267 - DNA, 25 bp, SARS Virus
ggaagaagtttcgctaaagttggta

SEQ ID NO: 92268 - DNA, 25 bp, SARS Virus
gaagaagtttctgtaaagttggtaa

SEQ ID NO: 92269 - DNA, 25 bp, SARS Virus
aagaagtttctcgaaagttggtaaa

SEQ ID NO: 92270 - DNA, 25 bp, SARS Virus
agaagtttctctgaagttggtaaag

SEQ ID NO: 92271 - DNA, 25 bp, SARS Virus
gaagtttctctagagttggtaaagt

SEQ ID NO: 92272 - DNA, 25 bp, SARS Virus
aagtttctctaaggttggtaaagtt

SEQ ID NO: 92273 - DNA, 25 bp, SARS Virus
agtttctctaaagttggtaaagttg

SEQ ID NO: 92274 - DNA, 25 bp, SARS Virus
gtttctctaaaggtggtaaagttgt

SEQ ID NO: 92275 - DNA, 25 bp, SARS Virus
tttctctaaagtgggtaaagttgtt

SEQ ID NO: 92276 - DNA, 25 bp, SARS Virus
ttctctaaagttggtaaagttgtta

SEQ ID NO: 92277 - DNA, 25 bp, SARS Virus
tctctaaagttggtaaagttgttaa

SEQ ID NO: 92278 - DNA, 25 bp, SARS Virus
ctctaaagttgggaaagttgttaaa

SEQ ID NO: 92279 - DNA, 25 bp, SARS Virus
tctaaagttggtgaagttgttaaac

SEQ ID NO: 92280 - DNA, 25 bp, SARS Virus
ctaaagttggtagagttgttaaacc

SEQ ID NO: 92281 - DNA, 25 bp, SARS Virus
taaagttggtaaggttgttaaaccg

SEQ ID NO: 92282 - DNA, 25 bp, SARS Virus
aaagttggtaaagttgttaaaccgg

SEQ ID NO: 92283 - DNA, 25 bp, SARS Virus
aagttggtaaaggtgttaaaccggc

SEQ ID NO: 92284 - DNA, 25 bp, SARS Virus
agttggtaaagtggttaaaccggca

SEQ ID NO: 92285 - DNA, 25 bp, SARS Virus
gttggtaaagttgttaaaccggcac

SEQ ID NO: 92286 - DNA, 25 bp, SARS Virus
ttggtaaagttggtaaaccggcact

SEQ ID NO: 92287 - DNA, 25 bp, SARS Virus
tggtaaagttgtgaaaccggcacta

SEQ ID NO: 92288 - DNA, 25 bp, SARS Virus
ggtaaagttgttgaaccggcactac

SEQ ID NO: 92289 - DNA, 25 bp, SARS Virus
gtaaagttgttagaccggcactaca

SEQ ID NO: 92290 - DNA, 25 bp, SARS Virus
taaagttgttaagccggcactacaa

SEQ ID NO: 92291 - DNA, 25 bp, SARS Virus
aaagttgttaaagcggcactacaaa

SEQ ID NO: 92292 - DNA, 25 bp, SARS Virus
aagttgttaaacgggcactacaaag

SEQ ID NO: 92293 - DNA, 25 bp, SARS Virus
agttgttaaaccggcactacaaaga

SEQ ID NO: 92294 - DNA, 25 bp, SARS Virus
gttgttaaaccggcactacaaagac

SEQ ID NO: 92295 - DNA, 25 bp, SARS Virus
ttgttaaaccgggactacaaagact

SEQ ID NO: 92296 - DNA, 25 bp, SARS Virus
tgttaaaccggcgctacaaagacta

SEQ ID NO: 92297 - DNA, 25 bp, SARS Virus
gttaaaccggcagtacaaagactaa

SEQ ID NO: 92298 - DNA, 25 bp, SARS Virus
ttaaaccggcacgacaaagactaaa

SEQ ID NO: 92299 - DNA, 25 bp, SARS Virus
taaaccggcactgcaaagactaaag

SEQ ID NO: 92300 - DNA, 25 bp, SARS Virus
aaaccggcactagaaagactaaagt

SEQ ID NO: 92301 - DNA, 25 bp, SARS Virus
aaccggcactacgaagactaaagtg

SEQ ID NO: 92302 - DNA, 25 bp, SARS Virus
accggcactacagagactaaagtga

SEQ ID NO: 92303 - DNA, 25 bp, SARS Virus
ccggcactacaaggactaaagtgac

SEQ ID NO: 92304 - DNA, 25 bp, SARS Virus
cggcactacaaagactaaagtgact

SEQ ID NO: 92305 - DNA, 25 bp, SARS Virus
ggcactacaaaggctaaagtgacta

SEQ ID NO: 92306 - DNA, 25 bp, SARS Virus
gcactacaaagagtaaagtgactaa

SEQ ID NO: 92307 - DNA, 25 bp, SARS Virus
cactacaaagacgaaagtgactaag

SEQ ID NO: 92308 - DNA, 25 bp, SARS Virus
actacaaagactgaagtgactaagg

SEQ ID NO: 92309 - DNA, 25 bp, SARS Virus
ctacaaagactagagtgactaaggc

SEQ ID NO: 92310 - DNA, 25 bp, SARS Virus
tacaaagactaaggtgactaaggca

SEQ ID NO: 92311 - DNA, 25 bp, SARS Virus
acaaagactaaagtgactaaggcaa

SEQ ID NO: 92312 - DNA, 25 bp, SARS Virus
caaagactaaagggactaaggcaag

SEQ ID NO: 92313 - DNA, 25 bp, SARS Virus
aaagactaaagtgactaaggcaagc

SEQ ID NO: 92314 - DNA, 25 bp, SARS Virus
aagactaaagtggctaaggcaagct

SEQ ID NO: 92315 - DNA, 25 bp, SARS Virus
agactaaagtgagtaaggcaagctc

SEQ ID NO: 92316 - DNA, 25 bp, SARS Virus
gactaaagtgacgaaggcaagctct

SEQ ID NO: 92317 - DNA, 25 bp, SARS Virus
actaaagtgactgaggcaagctcta

SEQ ID NO: 92318 - DNA, 25 bp, SARS Virus
ctaaagtgactagggcaagctctag

SEQ ID NO: 92319 - DNA, 25 bp, SARS Virus
taaagtgactaaggcaagctctagg

SEQ ID NO: 92320 - DNA, 25 bp, SARS Virus
aaagtgactaaggcaagctctagga

SEQ ID NO: 92321 - DNA, 25 bp, SARS Virus
aagtgactaagggaagctctaggat

SEQ ID NO: 92322 - DNA, 25 bp, SARS Virus
agtgactaaggcgagctctaggatt

SEQ ID NO: 92323 - DNA, 25 bp, SARS Virus
gtgactaaggcaggctctaggattt

SEQ ID NO: 92324 - DNA, 25 bp, SARS Virus
tgactaaggcaagctctaggatttt

SEQ ID NO: 92325 - DNA, 25 bp, SARS Virus
gactaaggcaaggtctaggattttg

SEQ ID NO: 92326 - DNA, 25 bp, SARS Virus
actaaggcaagcgctaggattttgt

SEQ ID NO: 92327 - DNA, 25 bp, SARS Virus
ctaaggcaagctgtaggattttgta

SEQ ID NO: 92328 - DNA, 25 bp, SARS Virus
taaggcaagctcgaggattttgtag

SEQ ID NO: 92329 - DNA, 25 bp, SARS Virus
aaggcaagctctgggattttgtaga

SEQ ID NO: 92330 - DNA, 25 bp, SARS Virus
aggcaagctctaggattttgtagac

SEQ ID NO: 92331 - DNA, 25 bp, SARS Virus
ggcaagctctaggattttgtagact

SEQ ID NO: 92332 - DNA, 25 bp, SARS Virus
gcaagctctagggttttgtagactt

SEQ ID NO: 92333 - DNA, 25 bp, SARS Virus
caagctctaggagtttgtagacttt

SEQ ID NO: 92334 - DNA, 25 bp, SARS Virus
aagctctaggatgttgtagacttta

SEQ ID NO: 92335 - DNA, 25 bp, SARS Virus
agctctaggattgtgtagactttat

SEQ ID NO: 92336 - DNA, 25 bp, SARS Virus
gctctaggatttggtagactttata

SEQ ID NO: 92337 - DNA, 25 bp, SARS Virus
ctctaggattttgtagactttataa

SEQ ID NO: 92338 - DNA, 25 bp, SARS Virus
tctaggattttggagactttataat

SEQ ID NO: 92339 - DNA, 25 bp, SARS Virus
ctaggattttgtggactttataatc

SEQ ID NO: 92340 - DNA, 25 bp, SARS Virus
taggattttgtagactttataatct

SEQ ID NO: 92341 - DNA, 25 bp, SARS Virus
aggattttgtaggctttataatctg

SEQ ID NO: 92342 - DNA, 25 bp, SARS Virus
ggattttgtagagtttataatctgt

SEQ ID NO: 92343 - DNA, 25 bp, SARS Virus
gattttgtagacgttataatctgta

SEQ ID NO: 92344 - DNA, 25 bp, SARS Virus
attttgtagactgtataatctgtaa

SEQ ID NO: 92345 - DNA, 25 bp, SARS Virus
ttttgtagacttgataatctgtaaa

SEQ ID NO: 92346 - DNA, 25 bp, SARS Virus
tttgtagactttgtaatctgtaaag

SEQ ID NO: 92347 - DNA, 25 bp, SARS Virus
ttgtagactttagaatctgtaaagt

SEQ ID NO: 92348 - DNA, 25 bp, SARS Virus
tgtagactttatgatctgtaaagtg

SEQ ID NO: 92349 - DNA, 25 bp, SARS Virus
gtagactttatagtctgtaaagtgg

SEQ ID NO: 92350 - DNA, 25 bp, SARS Virus
tagactttataagctgtaaagtgga

SEQ ID NO: 92351 - DNA, 25 bp, SARS Virus
agactttataatgtgtaaagtggaa

SEQ ID NO: 92352 - DNA, 25 bp, SARS Virus
gactttataatcggtaaagtggaac

SEQ ID NO: 92353 - DNA, 25 bp, SARS Virus
actttataatctgtaaagtggaacg

SEQ ID NO: 92354 - DNA, 25 bp, SARS Virus
ctttataatctggaaagtggaacgc

SEQ ID NO: 92355 - DNA, 25 bp, SARS Virus
tttataatctgtgaagtggaacgcg

SEQ ID NO: 92356 - DNA, 25 bp, SARS Virus
ttataatctgtagagtggaacgcga

SEQ ID NO: 92357 - DNA, 25 bp, SARS Virus
tataatctgtaaggtggaacgcgaa

SEQ ID NO: 92358 - DNA, 25 bp, SARS Virus
ataatctgtaaagtggaacgcgaaa

SEQ ID NO: 92359 - DNA, 25 bp, SARS Virus
taatctgtaaaggggaacgcgaaaa

SEQ ID NO: 92360 - DNA, 25 bp, SARS Virus
aatctgtaaagtggaacgcgaaaac

SEQ ID NO: 92361 - DNA, 25 bp, SARS Virus
attaatatttaatggtctactaaag

SEQ ID NO: 92362 - DNA, 25 bp, SARS Virus
ttaatatttaactgtctactaaagt

SEQ ID NO: 92363 - DNA, 25 bp, SARS Virus
taatatttaacgttctactaaagta

SEQ ID NO: 92364 - DNA, 25 bp, SARS Virus
aatatttaacggtctactaaagtac

SEQ ID NO: 92365 - DNA, 25 bp, SARS Virus
atatttaacggtttactaaagtacc

SEQ ID NO: 92366 - DNA, 25 bp, SARS Virus
tatttaacggtctactaaagtaccc

SEQ ID NO: 92367 - DNA, 25 bp, SARS Virus
atttaacggtcttctaaagtaccca

SEQ ID NO: 92368 - DNA, 25 bp, SARS Virus
tttaacggtctattaaagtacccaa

SEQ ID NO: 92369 - DNA, 25 bp, SARS Virus
ttaacggtctactaaagtacccaac

SEQ ID NO: 92370 - DNA, 25 bp, SARS Virus
taacggtctacttaagtacccaaca

SEQ ID NO: 92371 - DNA, 25 bp, SARS Virus
aacggtctactatagtacccaacac

SEQ ID NO: 92372 - DNA, 25 bp, SARS Virus
acggtctactaatgtacccaacaca

SEQ ID NO: 92373 - DNA, 25 bp, SARS Virus
cggtctactaaattacccaacacag

SEQ ID NO: 92374 - DNA, 25 bp, SARS Virus
ggtctactaaagtacccaacacagg

SEQ ID NO: 92375 - DNA, 25 bp, SARS Virus
gtctactaaagttcccaacacagga

SEQ ID NO: 92376 - DNA, 25 bp, SARS Virus
tctactaaagtatccaacacaggaa

SEQ ID NO: 92377 - DNA, 25 bp, SARS Virus
ctactaaagtactcaacacaggaac

SEQ ID NO: 92378 - DNA, 25 bp, SARS Virus
tactaaagtacctaacacaggaacg

SEQ ID NO: 92379 - DNA, 25 bp, SARS Virus
actaaagtaccctacacaggaacga

SEQ ID NO: 92380 - DNA, 25 bp, SARS Virus
ctaaagtacccatcacaggaacgaa

SEQ ID NO: 92381 - DNA, 25 bp, SARS Virus
taaagtacccaatacaggaacgaac

SEQ ID NO: 92382 - DNA, 25 bp, SARS Virus
aaagtacccaactcaggaacgaacc

SEQ ID NO: 92383 - DNA, 25 bp, SARS Virus
aagtacccaacataggaacgaacct

SEQ ID NO: 92384 - DNA, 25 bp, SARS Virus
agtacccaacactggaacgaacctt

SEQ ID NO: 92385 - DNA, 25 bp, SARS Virus
gtacccaacacatgaacgaacctta

SEQ ID NO: 92386 - DNA, 25 bp, SARS Virus
tacccaacacagtaacgaaccttat

SEQ ID NO: 92387 - DNA, 25 bp, SARS Virus
acccaacacaggtacgaaccttatg

SEQ ID NO: 92388 - DNA, 25 bp, SARS Virus
cccaacacaggatcgaaccttatga

SEQ ID NO: 92389 - DNA, 25 bp, SARS Virus
ccaacacaggaatgaaccttatgat

SEQ ID NO: 92390 - DNA, 25 bp, SARS Virus
caacacaggaactaaccttatgatc

SEQ ID NO: 92391 - DNA, 25 bp, SARS Virus
aacacaggaacgtaccttatgatcc

SEQ ID NO: 92392 - DNA, 25 bp, SARS Virus
acacaggaacgatccttatgatcct

SEQ ID NO: 92393 - DNA, 25 bp, SARS Virus
cacaggaacgaatcttatgatcctt

SEQ ID NO: 92394 - DNA, 25 bp, SARS Virus
acaggaacgaactttatgatccttg

SEQ ID NO: 92395 - DNA, 25 bp, SARS Virus
caggaacgaaccttatgatccttgt

SEQ ID NO: 92396 - DNA, 25 bp, SARS Virus
aggaacgaaccttatgatccttgta

SEQ ID NO: 92397 - DNA, 25 bp, SARS Virus
ggaacgaaccttttgatccttgtaa

SEQ ID NO: 92398 - DNA, 25 bp, SARS Virus
gaacgaaccttatgatccttgtaac

SEQ ID NO: 92399 - DNA, 25 bp, SARS Virus
aacgaaccttattatccttgtaact

SEQ ID NO: 92400 - DNA, 25 bp, SARS Virus
acgaaccttatgttccttgtaacta

SEQ ID NO: 92401 - DNA, 25 bp, SARS Virus
cgaaccttatgatccttgtaactac

SEQ ID NO: 92402 - DNA, 25 bp, SARS Virus
gaaccttatgattcttgtaactacg

SEQ ID NO: 92403 - DNA, 25 bp, SARS Virus
aaccttatgatctttgtaactacga

SEQ ID NO: 92404 - DNA, 25 bp, SARS Virus
accttatgatccttgtaactacgat

SEQ ID NO: 92405 - DNA, 25 bp, SARS Virus
ccttatgatccttgtaactacgatg

SEQ ID NO: 92406 - DNA, 25 bp, SARS Virus
cttatgatccttttaactacgatga

SEQ ID NO: 92407 - DNA, 25 bp, SARS Virus
ttatgatccttgtaactacgatgaa

SEQ ID NO: 92408 - DNA, 25 bp, SARS Virus
tatgatccttgttactacgatgaag

SEQ ID NO: 92409 - DNA, 25 bp, SARS Virus
atgatccttgtatctacgatgaagt

SEQ ID NO: 92410 - DNA, 25 bp, SARS Virus
tgatccttgtaattacgatgaagtt

SEQ ID NO: 92411 - DNA, 25 bp, SARS Virus
gatccttgtaactacgatgaagttg

SEQ ID NO: 92412 - DNA, 25 bp, SARS Virus
atccttgtaacttcgatgaagttga

SEQ ID NO: 92413 - DNA, 25 bp, SARS Virus
tccttgtaactatgatgaagttgac

SEQ ID NO: 92414 - DNA, 25 bp, SARS Virus
ccttgtaactactatgaagttgacc

SEQ ID NO: 92415 - DNA, 25 bp, SARS Virus
cttgtaactacgttgaagttgacca

SEQ ID NO: 92416 - DNA, 25 bp, SARS Virus
ttgtaactacgatgaagttgaccat

SEQ ID NO: 92417 - DNA, 25 bp, SARS Virus
tgtaactacgattaagttgaccatt

SEQ ID NO: 92418 - DNA, 25 bp, SARS Virus
gtaactacgatgtagttgaccatta

SEQ ID NO: 92419 - DNA, 25 bp, SARS Virus
taactacgatgatgttgaccattaa

SEQ ID NO: 92420 - DNA, 25 bp, SARS Virus
aactacgatgaatttgaccattaat

SEQ ID NO: 92421 - DNA, 25 bp, SARS Virus
actacgatgaagttgaccattaata

SEQ ID NO: 92422 - DNA, 25 bp, SARS Virus
ctacgatgaagttgaccattaatat

SEQ ID NO: 92423 - DNA, 25 bp, SARS Virus
tacgatgaagtttaccattaatatt

SEQ ID NO: 92424 - DNA, 25 bp, SARS Virus
acgatgaagttgtccattaatatta

SEQ ID NO: 92425 - DNA, 25 bp, SARS Virus
cgatgaagttgatcattaatattaa

SEQ ID NO: 92426 - DNA, 25 bp, SARS Virus
gatgaagttgactattaatattaat

SEQ ID NO: 92427 - DNA, 25 bp, SARS Virus
atgaagttgacctttaatattaata

SEQ ID NO: 92428 - DNA, 25 bp, SARS Virus
tgaagttgaccattaatattaatat

SEQ ID NO: 92429 - DNA, 25 bp, SARS Virus
gaagttgaccattaatattaatatt

SEQ ID NO: 92430 - DNA, 25 bp, SARS Virus
aagttgaccatttatattaatattt

SEQ ID NO: 92431 - DNA, 25 bp, SARS Virus
agttgaccattattattaatattta

SEQ ID NO: 92432 - DNA, 25 bp, SARS Virus
gttgaccattaatattaatatttat

SEQ ID NO: 92433 - DNA, 25 bp, SARS Virus
ttgaccattaattttaatatttata

SEQ ID NO: 92434 - DNA, 25 bp, SARS Virus
tgaccattaatattaatatttatat

SEQ ID NO: 92435 - DNA, 25 bp, SARS Virus
gaccattaatattaatatttatatc

SEQ ID NO: 92436 - DNA, 25 bp, SARS Virus
accattaatatttatatttatatcc

SEQ ID NO: 92437 - DNA, 25 bp, SARS Virus
ccattaatattattatttatatcca

SEQ ID NO: 92438 - DNA, 25 bp, SARS Virus
cattaatattaatatttatatccat

SEQ ID NO: 92439 - DNA, 25 bp, SARS Virus
attaatattaatttttatatccata

SEQ ID NO: 92440 - DNA, 25 bp, SARS Virus
ttaatattaatatttatatccatag

SEQ ID NO: 92441 - DNA, 25 bp, SARS Virus
taatattaatatttatatccataga

SEQ ID NO: 92442 - DNA, 25 bp, SARS Virus
aatattaatatttatatccatagaa

SEQ ID NO: 92443 - DNA, 25 bp, SARS Virus
atattaatatttttatccatagaat

SEQ ID NO: 92444 - DNA, 25 bp, SARS Virus
tattaatatttatatccatagaatc

SEQ ID NO: 92445 - DNA, 25 bp, SARS Virus
attaatatttatttccatagaatct

SEQ ID NO: 92446 - DNA, 25 bp, SARS Virus
ttaatatttatatccatagaatctg

SEQ ID NO: 92447 - DNA, 25 bp, SARS Virus
taatatttatattcatagaatctgt

SEQ ID NO: 92448 - DNA, 25 bp, SARS Virus
aatatttatatctatagaatctgta

SEQ ID NO: 92449 - DNA, 25 bp, SARS Virus
atatttatatccttagaatctgtac

SEQ ID NO: 92450 - DNA, 25 bp, SARS Virus
tatttatatccatagaatctgtacc

SEQ ID NO: 92451 - DNA, 25 bp, SARS Virus
atttatatccattgaatctgtaccg

SEQ ID NO: 92452 - DNA, 25 bp, SARS Virus
tttatatccatataatctgtaccgt

SEQ ID NO: 92453 - DNA, 25 bp, SARS Virus
ttatatccatagtatctgtaccgtt

SEQ ID NO: 92454 - DNA, 25 bp, SARS Virus
tatatccatagattctgtaccgttc

SEQ ID NO: 92455 - DNA, 25 bp, SARS Virus
atatccatagaatctgtaccgttcg

SEQ ID NO: 92456 - DNA, 25 bp, SARS Virus
tatccatagaatttgtaccgttcga

SEQ ID NO: 92457 - DNA, 25 bp, SARS Virus
atccatagaatctgtaccgttcgaa

SEQ ID NO: 92458 - DNA, 25 bp, SARS Virus
tccatagaatctttaccgttcgaat

SEQ ID NO: 92459 - DNA, 25 bp, SARS Virus
ccatagaatctgtaccgttcgaatc

SEQ ID NO: 92460 - DNA, 25 bp, SARS Virus
catagaatctgttccgttcgaatcc

SEQ ID NO: 92461 - DNA, 25 bp, SARS Virus
atagaatctgtatcgttcgaatccg

SEQ ID NO: 92462 - DNA, 25 bp, SARS Virus
tagaatctgtactgttcgaatccgg

SEQ ID NO: 92463 - DNA, 25 bp, SARS Virus
agaatctgtacctttcgaatccggg

SEQ ID NO: 92464 - DNA, 25 bp, SARS Virus
gaatctgtaccgttcgaatccggga

SEQ ID NO: 92465 - DNA, 25 bp, SARS Virus
aatctgtaccgttcgaatccgggaa

SEQ ID NO: 92466 - DNA, 25 bp, SARS Virus
atctgtaccgtttgaatccgggaaa

SEQ ID NO: 92467 - DNA, 25 bp, SARS Virus
tctgtaccgttctaatccgggaaac

SEQ ID NO: 92468 - DNA, 25 bp, SARS Virus
ctgtaccgttcgtatccgggaaact

SEQ ID NO: 92469 - DNA, 25 bp, SARS Virus
tgtaccgttcgattccgggaaactc

SEQ ID NO: 92470 - DNA, 25 bp, SARS Virus
gtaccgttcgaatccgggaaactct

SEQ ID NO: 92471 - DNA, 25 bp, SARS Virus
taccgttcgaattcgggaaactctc

SEQ ID NO: 92472 - DNA, 25 bp, SARS Virus
accgttcgaatctgggaaactctct

SEQ ID NO: 92473 - DNA, 25 bp, SARS Virus
ccgttcgaatcctggaaactctctc

SEQ ID NO: 92474 - DNA, 25 bp, SARS Virus
cgttcgaatccgtgaaactctctct

SEQ ID NO: 92475 - DNA, 25 bp, SARS Virus
gttcgaatccggtaaactctctctg

SEQ ID NO: 92476 - DNA, 25 bp, SARS Virus
ttcgaatccgggtaactctctctgt

SEQ ID NO: 92477 - DNA, 25 bp, SARS Virus
tcgaatccgggatactctctctgta

SEQ ID NO: 92478 - DNA, 25 bp, SARS Virus
cgaatccgggaatctctctctgtat

SEQ ID NO: 92479 - DNA, 25 bp, SARS Virus
gaatccgggaaattctctctgtata

SEQ ID NO: 92480 - DNA, 25 bp, SARS Virus
aatccgggaaactctctctgtatag

SEQ ID NO: 92481 - DNA, 25 bp, SARS Virus
atccgggaaactttctctgtataga

SEQ ID NO: 92482 - DNA, 25 bp, SARS Virus
tccgggaaactctctctgtatagat

SEQ ID NO: 92483 - DNA, 25 bp, SARS Virus
ccgggaaactctttctgtatagatt

SEQ ID NO: 92484 - DNA, 25 bp, SARS Virus
cgggaaactctctctgtatagatta

SEQ ID NO: 92485 - DNA, 25 bp, SARS Virus
gggaaactctctttgtatagattac

SEQ ID NO: 92486 - DNA, 25 bp, SARS Virus
ggaaactctctctgtatagattaca

SEQ ID NO: 92487 - DNA, 25 bp, SARS Virus
gaaactctctctttatagattacac

SEQ ID NO: 92488 - DNA, 25 bp, SARS Virus
aaactctctctgtatagattacacg

SEQ ID NO: 92489 - DNA, 25 bp, SARS Virus
aactctctctgtttagattacacgg

SEQ ID NO: 92490 - DNA, 25 bp, SARS Virus
actctctctgtatagattacacgga

SEQ ID NO: 92491 - DNA, 25 bp, SARS Virus
ctctctctgtattgattacacggaa

SEQ ID NO: 92492 - DNA, 25 bp, SARS Virus
tctctctgtatatattacacggaaa

SEQ ID NO: 92493 - DNA, 25 bp, SARS Virus
ctctctgtatagtttacacggaaag

SEQ ID NO: 92494 - DNA, 25 bp, SARS Virus
tctctgtatagattacacggaaaga

SEQ ID NO: 92495 - DNA, 25 bp, SARS Virus
ctctgtatagattacacggaaagag

SEQ ID NO: 92496 - DNA, 25 bp, SARS Virus
tctgtatagatttcacggaaagagg

SEQ ID NO: 92497 - DNA, 25 bp, SARS Virus
ctgtatagattatacggaaagaggg

SEQ ID NO: 92498 - DNA, 25 bp, SARS Virus
tgtatagattactcggaaagagggg

SEQ ID NO: 92499 - DNA, 25 bp, SARS Virus
gtatagattacatggaaagagggga

SEQ ID NO: 92500 - DNA, 25 bp, SARS Virus
tatagattacactgaaagaggggac

SEQ ID NO: 92501 - DNA, 25 bp, SARS Virus
atagattacacgtaaagaggggact

SEQ ID NO: 92502 - DNA, 25 bp, SARS Virus
tagattacacggtaagaggggacta

SEQ ID NO: 92503 - DNA, 25 bp, SARS Virus
agattacacggatagaggggactac

SEQ ID NO: 92504 - DNA, 25 bp, SARS Virus
gattacacggaatgaggggactacc

SEQ ID NO: 92505 - DNA, 25 bp, SARS Virus
attacacggaaataggggactaccg

SEQ ID NO: 92506 - DNA, 25 bp, SARS Virus
ttacacggaaagtggggactaccgt

SEQ ID NO: 92507 - DNA, 25 bp, SARS Virus
tacacggaaagatgggactaccgtt

SEQ ID NO: 92508 - DNA, 25 bp, SARS Virus
acacggaaagagtggactaccgttt

SEQ ID NO: 92509 - DNA, 25 bp, SARS Virus
cacggaaagaggtgactaccgtttg

SEQ ID NO: 92510 - DNA, 25 bp, SARS Virus
acggaaagagggtactaccgtttgg

SEQ ID NO: 92511 - DNA, 25 bp, SARS Virus
cggaaagaggggtctaccgtttgga

SEQ ID NO: 92512 - DNA, 25 bp, SARS Virus
ggaaagaggggattaccgtttggaa

SEQ ID NO: 92513 - DNA, 25 bp, SARS Virus
gaaagaggggactaccgtttggaac

SEQ ID NO: 92514 - DNA, 25 bp, SARS Virus
aaagaggggacttccgtttggaacg

SEQ ID NO: 92515 - DNA, 25 bp, SARS Virus
aagaggggactatcgtttggaacgt

SEQ ID NO: 92516 - DNA, 25 bp, SARS Virus
agaggggactactgtttggaacgtg

SEQ ID NO: 92517 - DNA, 25 bp, SARS Virus
gaggggactaccttttggaacgtgg

SEQ ID NO: 92518 - DNA, 25 bp, SARS Virus
aggggactaccgtttggaacgtggg

SEQ ID NO: 92519 - DNA, 25 bp, SARS Virus
ggggactaccgtttggaacgtgggg

SEQ ID NO: 92520 - DNA, 25 bp, SARS Virus
gggactaccgtttggaacgtggggt

SEQ ID NO: 92521 - DNA, 25 bp, SARS Virus
ggactaccgttttgaacgtggggtg

SEQ ID NO: 92522 - DNA, 25 bp, SARS Virus
gactaccgtttgtaacgtggggtgg

SEQ ID NO: 92523 - DNA, 25 bp, SARS Virus
actaccgtttggtacgtggggtgga

SEQ ID NO: 92524 - DNA, 25 bp, SARS Virus
ctaccgtttggatcgtggggtggac

SEQ ID NO: 92525 - DNA, 25 bp, SARS Virus
taccgtttggaatgtggggtggacg

SEQ ID NO: 92526 - DNA, 25 bp, SARS Virus
accgtttggaacttggggtggacga

SEQ ID NO: 92527 - DNA, 25 bp, SARS Virus
ccgtttggaacgtggggtggacgag

SEQ ID NO: 92528 - DNA, 25 bp, SARS Virus
cgtttggaacgttgggtggacgaga

SEQ ID NO: 92529 - DNA, 25 bp, SARS Virus
gtttggaacgtgtggtggacgagaa

SEQ ID NO: 92530 - DNA, 25 bp, SARS Virus
tttggaacgtggtgtggacgagaat

SEQ ID NO: 92531 - DNA, 25 bp, SARS Virus
ttggaacgtgggttggacgagaatt

SEQ ID NO: 92532 - DNA, 25 bp, SARS Virus
tggaacgtggggtggacgagaatta

SEQ ID NO: 92533 - DNA, 25 bp, SARS Virus
ggaacgtggggttgacgagaattaa

SEQ ID NO: 92534 - DNA, 25 bp, SARS Virus
gaacgtggggtgtacgagaattaac

SEQ ID NO: 92535 - DNA, 25 bp, SARS Virus
aacgtggggtggtcgagaattaaca

SEQ ID NO: 92536 - DNA, 25 bp, SARS Virus
acgtggggtggatgagaattaacaa

SEQ ID NO: 92537 - DNA, 25 bp, SARS Virus
cgtggggtggactagaattaacaat

SEQ ID NO: 92538 - DNA, 25 bp, SARS Virus
gtggggtggacgtgaattaacaata

SEQ ID NO: 92539 - DNA, 25 bp, SARS Virus
tggggtggacgataattaacaataa

SEQ ID NO: 92540 - DNA, 25 bp, SARS Virus
ggggtggacgagtattaacaataac

SEQ ID NO: 92541 - DNA, 25 bp, SARS Virus
gggtggacgagatttaacaataacc

SEQ ID NO: 92542 - DNA, 25 bp, SARS Virus
ggtggacgagaattaacaataaccg

SEQ ID NO: 92543 - DNA, 25 bp, SARS Virus
gtggacgagaattaacaataaccgg

SEQ ID NO: 92544 - DNA, 25 bp, SARS Virus
tggacgagaatttacaataaccggt

SEQ ID NO: 92545 - DNA, 25 bp, SARS Virus
ggacgagaattatcaataaccggta

SEQ ID NO: 92546 - DNA, 25 bp, SARS Virus
gacgagaattaataataaccggtaa

SEQ ID NO: 92547 - DNA, 25 bp, SARS Virus
acgagaattaactataaccggtaat

SEQ ID NO: 92548 - DNA, 25 bp, SARS Virus
cgagaattaacattaaccggtaatt

SEQ ID NO: 92549 - DNA, 25 bp, SARS Virus
gagaattaacaataaccggtaattt

SEQ ID NO: 92550 - DNA, 25 bp, SARS Virus
agaattaacaattaccggtaattta

SEQ ID NO: 92551 - DNA, 25 bp, SARS Virus
gaattaacaatatccggtaatttac

SEQ ID NO: 92552 - DNA, 25 bp, SARS Virus
aattaacaataatcggtaatttact

SEQ ID NO: 92553 - DNA, 25 bp, SARS Virus
attaacaataactggtaatttacta

SEQ ID NO: 92554 - DNA, 25 bp, SARS Virus
ttaacaataacctgtaatttactaa

SEQ ID NO: 92555 - DNA, 25 bp, SARS Virus
taacaataaccgttaatttactaat

SEQ ID NO: 92556 - DNA, 25 bp, SARS Virus
aacaataaccggtaatttactaata

SEQ ID NO: 92557 - DNA, 25 bp, SARS Virus
acaataaccggttatttactaatac

SEQ ID NO: 92558 - DNA, 25 bp, SARS Virus
caataaccggtattttactaatacc

SEQ ID NO: 92559 - DNA, 25 bp, SARS Virus
aataaccggtaatttactaatacca

SEQ ID NO: 92560 - DNA, 25 bp, SARS Virus
ataaccggtaatttactaataccaa

SEQ ID NO: 92561 - DNA, 25 bp, SARS Virus
taaccggtaatttactaataccaaa

SEQ ID NO: 92562 - DNA, 25 bp, SARS Virus
aaccggtaattttctaataccaaaa

SEQ ID NO: 92563 - DNA, 25 bp, SARS Virus
accggtaatttattaataccaaaaa

SEQ ID NO: 92564 - DNA, 25 bp, SARS Virus
ccggtaatttactaataccaaaaat

SEQ ID NO: 92565 - DNA, 25 bp, SARS Virus
cggtaatttacttataccaaaaatg

SEQ ID NO: 92566 - DNA, 25 bp, SARS Virus
ggtaatttactattaccaaaaatgt

SEQ ID NO: 92567 - DNA, 25 bp, SARS Virus
gtaatttactaataccaaaaatgtg

SEQ ID NO: 92568 - DNA, 25 bp, SARS Virus
taatttactaattccaaaaatgtgg

SEQ ID NO: 92569 - DNA, 25 bp, SARS Virus
aatttactaatatcaaaaatgtggt

SEQ ID NO: 92570 - DNA, 25 bp, SARS Virus
atttactaatactaaaaatgtggtg

SEQ ID NO: 92571 - DNA, 25 bp, SARS Virus
tttactaatacctaaaatgtggtga

SEQ ID NO: 92572 - DNA, 25 bp, SARS Virus
ttactaataccataaatgtggtgat

SEQ ID NO: 92573 - DNA, 25 bp, SARS Virus
tactaataccaataatgtggtgatg

SEQ ID NO: 92574 - DNA, 25 bp, SARS Virus
actaataccaaatatgtggtgatga

SEQ ID NO: 92575 - DNA, 25 bp, SARS Virus
ctaataccaaaattgtggtgatgac

SEQ ID NO: 92576 - DNA, 25 bp, SARS Virus
taataccaaaaatgtggtgatgacc

SEQ ID NO: 92577 - DNA, 25 bp, SARS Virus
aataccaaaaatttggtgatgaccg

SEQ ID NO: 92578 - DNA, 25 bp, SARS Virus
ataccaaaaatgtggtgatgaccgt

SEQ ID NO: 92579 - DNA, 25 bp, SARS Virus
taccaaaaatgttgtgatgaccgta

SEQ ID NO: 92580 - DNA, 25 bp, SARS Virus
accaaaaatgtgttgatgaccgtaa

SEQ ID NO: 92581 - DNA, 25 bp, SARS Virus
ccaaaaatgtggtgatgaccgtaac

SEQ ID NO: 92582 - DNA, 25 bp, SARS Virus
caaaaatgtggttatgaccgtaacc

SEQ ID NO: 92583 - DNA, 25 bp, SARS Virus
aaaaatgtggtgttgaccgtaaccg

SEQ ID NO: 92584 - DNA, 25 bp, SARS Virus
aaaatgtggtgatgaccgtaaccga

SEQ ID NO: 92585 - DNA, 25 bp, SARS Virus
aaatgtggtgattaccgtaaccgat

SEQ ID NO: 92586 - DNA, 25 bp, SARS Virus
aatgtggtgatgtccgtaaccgatg

SEQ ID NO: 92587 - DNA, 25 bp, SARS Virus
atgtggtgatgatcgtaaccgatgg

SEQ ID NO: 92588 - DNA, 25 bp, SARS Virus
tgtggtgatgactgtaaccgatggt

SEQ ID NO: 92589 - DNA, 25 bp, SARS Virus
gtggtgatgaccttaaccgatggtt

SEQ ID NO: 92590 - DNA, 25 bp, SARS Virus
tggtgatgaccgtaaccgatggttg

SEQ ID NO: 92591 - DNA, 25 bp, SARS Virus
ggtgatgaccgttaccgatggttgg

SEQ ID NO: 92592 - DNA, 25 bp, SARS Virus
gtgatgaccgtatccgatggttgga

SEQ ID NO: 92593 - DNA, 25 bp, SARS Virus
tgatgaccgtaatcgatggttggaa

SEQ ID NO: 92594 - DNA, 25 bp, SARS Virus
gatgaccgtaactgatggttggaat

SEQ ID NO: 92595 - DNA, 25 bp, SARS Virus
atgaccgtaacctatggttggaatg

SEQ ID NO: 92596 - DNA, 25 bp, SARS Virus
tgaccgtaaccgttggttggaatgt

SEQ ID NO: 92597 - DNA, 25 bp, SARS Virus
gaccgtaaccgatggttggaatgtc

SEQ ID NO: 92598 - DNA, 25 bp, SARS Virus
accgtaaccgattgttggaatgtct

SEQ ID NO: 92599 - DNA, 25 bp, SARS Virus
ccgtaaccgatgtttggaatgtctc

SEQ ID NO: 92600 - DNA, 25 bp, SARS Virus
cgtaaccgatggttggaatgtctca

SEQ ID NO: 92601 - DNA, 25 bp, SARS Virus
gtaaccgatggttggaatgtctcaa

SEQ ID NO: 92602 - DNA, 25 bp, SARS Virus
taaccgatggtttgaatgtctcaac

SEQ ID NO: 92603 - DNA, 25 bp, SARS Virus
aaccgatggttgtaatgtctcaaca

SEQ ID NO: 92604 - DNA, 25 bp, SARS Virus
accgatggttggtatgtctcaacat

SEQ ID NO: 92605 - DNA, 25 bp, SARS Virus
ccgatggttggattgtctcaacatc

SEQ ID NO: 92606 - DNA, 25 bp, SARS Virus
cgatggttggaatgtctcaacatca

SEQ ID NO: 92607 - DNA, 25 bp, SARS Virus
gatggttggaatttctcaacatcat

SEQ ID NO: 92608 - DNA, 25 bp, SARS Virus
atggttggaatgtctcaacatcatg

SEQ ID NO: 92609 - DNA, 25 bp, SARS Virus
tggttggaatgtttcaacatcatga

SEQ ID NO: 92610 - DNA, 25 bp, SARS Virus
ggttggaatgtctcaacatcatgaa

SEQ ID NO: 92611 - DNA, 25 bp, SARS Virus
gttggaatgtcttaacatcatgaaa

SEQ ID NO: 92612 - DNA, 25 bp, SARS Virus
ttggaatgtctctacatcatgaaag

SEQ ID NO: 92613 - DNA, 25 bp, SARS Virus
tggaatgtctcatcatcatgaaaga

SEQ ID NO: 92614 - DNA, 25 bp, SARS Virus
ggaatgtctcaatatcatgaaagaa

SEQ ID NO: 92615 - DNA, 25 bp, SARS Virus
gaatgtctcaacttcatgaaagaaa

SEQ ID NO: 92616 - DNA, 25 bp, SARS Virus
aatgtctcaacatcatgaaagaaaa

SEQ ID NO: 92617 - DNA, 25 bp, SARS Virus
atgtctcaacattatgaaagaaaac

SEQ ID NO: 92618 - DNA, 25 bp, SARS Virus
tgtctcaacatcttgaaagaaaact

SEQ ID NO: 92619 - DNA, 25 bp, SARS Virus
gtctcaacatcatgaaagaaaactt

SEQ ID NO: 92620 - DNA, 25 bp, SARS Virus
tctcaacatcattaaagaaaacttg

SEQ ID NO: 92621 - DNA, 25 bp, SARS Virus
ctcaacatcatgtaagaaaacttga

SEQ ID NO: 92622 - DNA, 25 bp, SARS Virus
tcaacatcatgatagaaaacttgaa

SEQ ID NO: 92623 - DNA, 25 bp, SARS Virus
caacatcatgaatgaaaacttgaaa

SEQ ID NO: 92624 - DNA, 25 bp, SARS Virus
aacatcatgaaataaaacttgaaaa

SEQ ID NO: 92625 - DNA, 25 bp, SARS Virus
acatcatgaaagtaaacttgaaaat

SEQ ID NO: 92626 - DNA, 25 bp, SARS Virus
catcatgaaagataacttgaaaatt

SEQ ID NO: 92627 - DNA, 25 bp, SARS Virus
atcatgaaagaatacttgaaaattt

SEQ ID NO: 92628 - DNA, 25 bp, SARS Virus
tcatgaaagaaatcttgaaaattta

SEQ ID NO: 92629 - DNA, 25 bp, SARS Virus
catgaaagaaaatttgaaaatttac

SEQ ID NO: 92630 - DNA, 25 bp, SARS Virus
atgaaagaaaacttgaaaatttacg

SEQ ID NO: 92631 - DNA, 25 bp, SARS Virus
tgaaagaaaacttgaaaatttacgt

SEQ ID NO: 92632 - DNA, 25 bp, SARS Virus
gaaagaaaactttaaaatttacgtg

SEQ ID NO: 92633 - DNA, 25 bp, SARS Virus
aaagaaaacttgtaaatttacgtgg

SEQ ID NO: 92634 - DNA, 25 bp, SARS Virus
aagaaaacttgataatttacgtggc

SEQ ID NO: 92635 - DNA, 25 bp, SARS Virus
agaaaacttgaatatttacgtggcc

SEQ ID NO: 92636 - DNA, 25 bp, SARS Virus
gaaaacttgaaattttacgtggccg

SEQ ID NO: 92637 - DNA, 25 bp, SARS Virus
aaaacttgaaaatttacgtggccgg

SEQ ID NO: 92638 - DNA, 25 bp, SARS Virus
aaacttgaaaatttacgtggccggt

SEQ ID NO: 92639 - DNA, 25 bp, SARS Virus
aacttgaaaatttacgtggccggtg

SEQ ID NO: 92640 - DNA, 25 bp, SARS Virus
acttgaaaattttcgtggccggtgc

SEQ ID NO: 92641 - DNA, 25 bp, SARS Virus
cttgaaaatttatgtggccggtgcc

SEQ ID NO: 92642 - DNA, 25 bp, SARS Virus
ttgaaaatttacttggccggtgcca

SEQ ID NO: 92643 - DNA, 25 bp, SARS Virus
tgaaaatttacgtggccggtgccaa

SEQ ID NO: 92644 - DNA, 25 bp, SARS Virus
gaaaatttacgttgccggtgccaaa

SEQ ID NO: 92645 - DNA, 25 bp, SARS Virus
aaaatttacgtgtccggtgccaaac

SEQ ID NO: 92646 - DNA, 25 bp, SARS Virus
aaatttacgtggtcggtgccaaaca

SEQ ID NO: 92647 - DNA, 25 bp, SARS Virus
aatttacgtggctggtgccaaacac

SEQ ID NO: 92648 - DNA, 25 bp, SARS Virus
atttacgtggcctgtgccaaacacc

SEQ ID NO: 92649 - DNA, 25 bp, SARS Virus
tttacgtggccgttgccaaacacct

SEQ ID NO: 92650 - DNA, 25 bp, SARS Virus
ttacgtggccggtgccaaacacctg

SEQ ID NO: 92651 - DNA, 25 bp, SARS Virus
tacgtggccggttccaaacacctgg

SEQ ID NO: 92652 - DNA, 25 bp, SARS Virus
acgtggccggtgtcaaacacctggt

SEQ ID NO: 92653 - DNA, 25 bp, SARS Virus
cgtggccggtgctaaacacctggtt

SEQ ID NO: 92654 - DNA, 25 bp, SARS Virus
gtggccggtgcctaacacctggttt

SEQ ID NO: 92655 - DNA, 25 bp, SARS Virus
tggccggtgccatacacctggtttt

SEQ ID NO: 92656 - DNA, 25 bp, SARS Virus
ggccggtgccaatcacctggtttta

SEQ ID NO: 92657 - DNA, 25 bp, SARS Virus
gccggtgccaaatacctggttttaa

SEQ ID NO: 92658 - DNA, 25 bp, SARS Virus
ccggtgccaaactcctggttttaat

SEQ ID NO: 92659 - DNA, 25 bp, SARS Virus
cggtgccaaacatctggttttaata

SEQ ID NO: 92660 - DNA, 25 bp, SARS Virus
ggtgccaaacacttggttttaatag

SEQ ID NO: 92661 - DNA, 25 bp, SARS Virus
gtgccaaacacctggttttaatagg

SEQ ID NO: 92662 - DNA, 25 bp, SARS Virus
tgccaaacaccttgttttaataggt

SEQ ID NO: 92663 - DNA, 25 bp, SARS Virus
gccaaacacctgtttttaataggtg

SEQ ID NO: 92664 - DNA, 25 bp, SARS Virus
ccaaacacctggttttaataggtga

SEQ ID NO: 92665 - DNA, 25 bp, SARS Virus
caaacacctggttttaataggtgac

SEQ ID NO: 92666 - DNA, 25 bp, SARS Virus
aaacacctggttttaataggtgact

SEQ ID NO: 92667 - DNA, 25 bp, SARS Virus
aacacctggttttaataggtgactg

SEQ ID NO: 92668 - DNA, 25 bp, SARS Virus
acacctggtttttataggtgactgg

SEQ ID NO: 92669 - DNA, 25 bp, SARS Virus
cacctggttttattaggtgactgga

SEQ ID NO: 92670 - DNA, 25 bp, SARS Virus
acctggttttaataggtgactggaa

SEQ ID NO: 92671 - DNA, 25 bp, SARS Virus
cctggttttaattggtgactggaat

SEQ ID NO: 92672 - DNA, 25 bp, SARS Virus
ctggttttaatatgtgactggaata

SEQ ID NO: 92673 - DNA, 25 bp, SARS Virus
tggttttaatagttgactggaataa

SEQ ID NO: 92674 - DNA, 25 bp, SARS Virus
ggttttaataggtgactggaataat

SEQ ID NO: 92675 - DNA, 25 bp, SARS Virus
gttttaataggttactggaataatt

SEQ ID NO: 92676 - DNA, 25 bp, SARS Virus
ttttaataggtgtctggaataattc

SEQ ID NO: 92677 - DNA, 25 bp, SARS Virus
tttaataggtgattggaataattct

SEQ ID NO: 92678 - DNA, 25 bp, SARS Virus
ttaataggtgactggaataattctt

SEQ ID NO: 92679 - DNA, 25 bp, SARS Virus
taataggtgacttgaataattcttg

SEQ ID NO: 92680 - DNA, 25 bp, SARS Virus
aataggtgactgtaataattcttgg

SEQ ID NO: 92681 - DNA, 25 bp, SARS Virus
ataggtgactggtataattcttggt

SEQ ID NO: 92682 - DNA, 25 bp, SARS Virus
taggtgactggattaattcttggtc

SEQ ID NO: 92683 - DNA, 25 bp, SARS Virus
aggtgactggaataattcttggtca

SEQ ID NO: 92684 - DNA, 25 bp, SARS Virus
ggtgactggaattattcttggtcac

SEQ ID NO: 92685 - DNA, 25 bp, SARS Virus
gtgactggaatatttcttggtcaca

SEQ ID NO: 92686 - DNA, 25 bp, SARS Virus
tgactggaataattcttggtcacac

SEQ ID NO: 92687 - DNA, 25 bp, SARS Virus
gactggaataattcttggtcacaca

SEQ ID NO: 92688 - DNA, 25 bp, SARS Virus
actggaataatttttggtcacacag

SEQ ID NO: 92689 - DNA, 25 bp, SARS Virus
ctggaataattcttggtcacacagt

SEQ ID NO: 92690 - DNA, 25 bp, SARS Virus
tggaataattcttggtcacacagtt

SEQ ID NO: 92691 - DNA, 25 bp, SARS Virus
ggaataattctttgtcacacagtta

SEQ ID NO: 92692 - DNA, 25 bp, SARS Virus
gaataattcttgttcacacagttaa

SEQ ID NO: 92693 - DNA, 25 bp, SARS Virus
aataattcttggtcacacagttaaa

SEQ ID NO: 92694 - DNA, 25 bp, SARS Virus
ataattcttggttacacagttaaaa

SEQ ID NO: 92695 - DNA, 25 bp, SARS Virus
taattcttggtctcacagttaaaat

SEQ ID NO: 92696 - DNA, 25 bp, SARS Virus
aattcttggtcatacagttaaaatt

SEQ ID NO: 92697 - DNA, 25 bp, SARS Virus
attcttggtcactcagttaaaatta

SEQ ID NO: 92698 - DNA, 25 bp, SARS Virus
ttcttggtcacatagttaaaattaa

SEQ ID NO: 92699 - DNA, 25 bp, SARS Virus
tcttggtcacactgttaaaattaaa

SEQ ID NO: 92700 - DNA, 25 bp, SARS Virus
cttggtcacacatttaaaattaaaa

SEQ ID NO: 92701 - DNA, 25 bp, SARS Virus
ttggtcacacagttaaaattaaaat

SEQ ID NO: 92702 - DNA, 25 bp, SARS Virus
tggtcacacagttaaaattaaaatt

SEQ ID NO: 92703 - DNA, 25 bp, SARS Virus
ggtcacacagtttaaattaaaatta

SEQ ID NO: 92704 - DNA, 25 bp, SARS Virus
gtcacacagttataattaaaattac

SEQ ID NO: 92705 - DNA, 25 bp, SARS Virus
tcacacagttaatattaaaattacc

SEQ ID NO: 92706 - DNA, 25 bp, SARS Virus
cacacagttaaatttaaaattacct

SEQ ID NO: 92707 - DNA, 25 bp, SARS Virus
acacagttaaaattaaaattacctg

SEQ ID NO: 92708 - DNA, 25 bp, SARS Virus
cacagttaaaattaaaattacctga

SEQ ID NO: 92709 - DNA, 25 bp, SARS Virus
acagttaaaatttaaattacctgag

SEQ ID NO: 92710 - DNA, 25 bp, SARS Virus
cagttaaaattataattacctgagt

SEQ ID NO: 92711 - DNA, 25 bp, SARS Virus
agttaaaattaatattacctgagtg

SEQ ID NO: 92712 - DNA, 25 bp, SARS Virus
gttaaaattaaatttacctgagtga

SEQ ID NO: 92713 - DNA, 25 bp, SARS Virus
ttaaaattaaaattacctgagtgac

SEQ ID NO: 92714 - DNA, 25 bp, SARS Virus
taaaattaaaattacctgagtgacc

SEQ ID NO: 92715 - DNA, 25 bp, SARS Virus
aaaattaaaatttcctgagtgacca

SEQ ID NO: 92716 - DNA, 25 bp, SARS Virus
aaattaaaattatctgagtgaccat

SEQ ID NO: 92717 - DNA, 25 bp, SARS Virus
aattaaaattacttgagtgaccatg

SEQ ID NO: 92718 - DNA, 25 bp, SARS Virus
attaaaattacctgagtgaccatga

SEQ ID NO: 92719 - DNA, 25 bp, SARS Virus
ttaaaattaccttagtgaccatgac

SEQ ID NO: 92720 - DNA, 25 bp, SARS Virus
taaaattacctgtgtgaccatgacc

SEQ ID NO: 92721 - DNA, 25 bp, SARS Virus
aaaattacctgattgaccatgacca

SEQ ID NO: 92722 - DNA, 25 bp, SARS Virus
aaattacctgagtgaccatgaccac

SEQ ID NO: 92723 - DNA, 25 bp, SARS Virus
aattacctgagttaccatgaccaca

SEQ ID NO: 92724 - DNA, 25 bp, SARS Virus
attacctgagtgtccatgaccacac

SEQ ID NO: 92725 - DNA, 25 bp, SARS Virus
ttacctgagtgatcatgaccacaca

SEQ ID NO: 92726 - DNA, 25 bp, SARS Virus
tacctgagtgactatgaccacacaa

SEQ ID NO: 92727 - DNA, 25 bp, SARS Virus
acctgagtgaccttgaccacacaat

SEQ ID NO: 92728 - DNA, 25 bp, SARS Virus
cctgagtgaccatgaccacacaatt

SEQ ID NO: 92729 - DNA, 25 bp, SARS Virus
ctgagtgaccattaccacacaattg

SEQ ID NO: 92730 - DNA, 25 bp, SARS Virus
tgagtgaccatgtccacacaattga

SEQ ID NO: 92731 - DNA, 25 bp, SARS Virus
gagtgaccatgatcacacaattgag

SEQ ID NO: 92732 - DNA, 25 bp, SARS Virus
agtgaccatgactacacaattgagg

SEQ ID NO: 92733 - DNA, 25 bp, SARS Virus
gtgaccatgacctcacaattgagga

SEQ ID NO: 92734 - DNA, 25 bp, SARS Virus
tgaccatgaccatacaattgaggaa

SEQ ID NO: 92735 - DNA, 25 bp, SARS Virus
gaccatgaccactcaattgaggaag

SEQ ID NO: 92736 - DNA, 25 bp, SARS Virus
accatgaccacataattgaggaaga

SEQ ID NO: 92737 - DNA, 25 bp, SARS Virus
ccatgaccacactattgaggaagaa

SEQ ID NO: 92738 - DNA, 25 bp, SARS Virus
catgaccacacatttgaggaagaag

SEQ ID NO: 92739 - DNA, 25 bp, SARS Virus
atgaccacacaattgaggaagaagt

SEQ ID NO: 92740 - DNA, 25 bp, SARS Virus
tgaccacacaattgaggaagaagtt

SEQ ID NO: 92741 - DNA, 25 bp, SARS Virus
gaccacacaatttaggaagaagttt

SEQ ID NO: 92742 - DNA, 25 bp, SARS Virus
accacacaattgtggaagaagtttc

SEQ ID NO: 92743 - DNA, 25 bp, SARS Virus
ccacacaattgatgaagaagtttct

SEQ ID NO: 92744 - DNA, 25 bp, SARS Virus
cacacaattgagtaagaagtttctc

SEQ ID NO: 92745 - DNA, 25 bp, SARS Virus
acacaattgaggtagaagtttctct

SEQ ID NO: 92746 - DNA, 25 bp, SARS Virus
cacaattgaggatgaagtttctcta

SEQ ID NO: 92747 - DNA, 25 bp, SARS Virus
acaattgaggaataagtttctctaa

SEQ ID NO: 92748 - DNA, 25 bp, SARS Virus
caattgaggaagtagtttctctaaa

SEQ ID NO: 92749 - DNA, 25 bp, SARS Virus
aattgaggaagatgtttctctaaag

SEQ ID NO: 92750 - DNA, 25 bp, SARS Virus
attgaggaagaattttctctaaagt

SEQ ID NO: 92751 - DNA, 25 bp, SARS Virus
ttgaggaagaagtttctctaaagtt

SEQ ID NO: 92752 - DNA, 25 bp, SARS Virus
tgaggaagaagtttctctaaagttg

SEQ ID NO: 92753 - DNA, 25 bp, SARS Virus
gaggaagaagtttctctaaagttgg

SEQ ID NO: 92754 - DNA, 25 bp, SARS Virus
aggaagaagtttttctaaagttggt

SEQ ID NO: 92755 - DNA, 25 bp, SARS Virus
ggaagaagtttctctaaagttggta

SEQ ID NO: 92756 - DNA, 25 bp, SARS Virus
gaagaagtttctttaaagttggtaa

SEQ ID NO: 92757 - DNA, 25 bp, SARS Virus
aagaagtttctctaaagttggtaaa

SEQ ID NO: 92758 - DNA, 25 bp, SARS Virus
agaagtttctcttaagttggtaaag

SEQ ID NO: 92759 - DNA, 25 bp, SARS Virus
gaagtttctctatagttggtaaagt

SEQ ID NO: 92760 - DNA, 25 bp, SARS Virus
aagtttctctaatgttggtaaagtt

SEQ ID NO: 92761 - DNA, 25 bp, SARS Virus
agtttctctaaatttggtaaagttg

SEQ ID NO: 92762 - DNA, 25 bp, SARS Virus
gtttctctaaagttggtaaagttgt

SEQ ID NO: 92763 - DNA, 25 bp, SARS Virus
tttctctaaagttggtaaagttgtt

SEQ ID NO: 92764 - DNA, 25 bp, SARS Virus
ttctctaaagtttgtaaagttgtta

SEQ ID NO: 92765 - DNA, 25 bp, SARS Virus
tctctaaagttgttaaagttgttaa

SEQ ID NO: 92766 - DNA, 25 bp, SARS Virus
ctctaaagttggtaaagttgttaaa

SEQ ID NO: 92767 - DNA, 25 bp, SARS Virus
tctaaagttggttaagttgttaaac

SEQ ID NO: 92768 - DNA, 25 bp, SARS Virus
ctaaagttggtatagttgttaaacc

SEQ ID NO: 92769 - DNA, 25 bp, SARS Virus
taaagttggtaatgttgttaaaccg

SEQ ID NO: 92770 - DNA, 25 bp, SARS Virus
aaagttggtaaatttgttaaaccgg

SEQ ID NO: 92771 - DNA, 25 bp, SARS Virus
aagttggtaaagttgttaaaccggc

SEQ ID NO: 92772 - DNA, 25 bp, SARS Virus
agttggtaaagttgttaaaccggca

SEQ ID NO: 92773 - DNA, 25 bp, SARS Virus
gttggtaaagtttttaaaccggcac

SEQ ID NO: 92774 - DNA, 25 bp, SARS Virus
ttggtaaagttgttaaaccggcact

SEQ ID NO: 92775 - DNA, 25 bp, SARS Virus
tggtaaagttgttaaaccggcacta

SEQ ID NO: 92776 - DNA, 25 bp, SARS Virus
ggtaaagttgtttaaccggcactac

SEQ ID NO: 92777 - DNA, 25 bp, SARS Virus
gtaaagttgttataccggcactaca

SEQ ID NO: 92778 - DNA, 25 bp, SARS Virus
taaagttgttaatccggcactacaa

SEQ ID NO: 92779 - DNA, 25 bp, SARS Virus
aaagttgttaaatcggcactacaaa

SEQ ID NO: 92780 - DNA, 25 bp, SARS Virus
aagttgttaaactggcactacaaag

SEQ ID NO: 92781 - DNA, 25 bp, SARS Virus
agttgttaaacctgcactacaaaga

SEQ ID NO: 92782 - DNA, 25 bp, SARS Virus
gttgttaaaccgtcactacaaagac

SEQ ID NO: 92783 - DNA, 25 bp, SARS Virus
ttgttaaaccggtactacaaagact

SEQ ID NO: 92784 - DNA, 25 bp, SARS Virus
tgttaaaccggctctacaaagacta

SEQ ID NO: 92785 - DNA, 25 bp, SARS Virus
gttaaaccggcattacaaagactaa

SEQ ID NO: 92786 - DNA, 25 bp, SARS Virus
ttaaaccggcactacaaagactaaa

SEQ ID NO: 92787 - DNA, 25 bp, SARS Virus
taaaccggcacttcaaagactaaag

SEQ ID NO: 92788 - DNA, 25 bp, SARS Virus
aaaccggcactataaagactaaagt

SEQ ID NO: 92789 - DNA, 25 bp, SARS Virus
aaccggcactactaagactaaagtg

SEQ ID NO: 92790 - DNA, 25 bp, SARS Virus
accggcactacatagactaaagtga

SEQ ID NO: 92791 - DNA, 25 bp, SARS Virus
ccggcactacaatgactaaagtgac

SEQ ID NO: 92792 - DNA, 25 bp, SARS Virus
cggcactacaaatactaaagtgact

SEQ ID NO: 92793 - DNA, 25 bp, SARS Virus
ggcactacaaagtctaaagtgacta

SEQ ID NO: 92794 - DNA, 25 bp, SARS Virus
gcactacaaagattaaagtgactaa

SEQ ID NO: 92795 - DNA, 25 bp, SARS Virus
cactacaaagactaaagtgactaag

SEQ ID NO: 92796 - DNA, 25 bp, SARS Virus
actacaaagacttaagtgactaagg

SEQ ID NO: 92797 - DNA, 25 bp, SARS Virus
ctacaaagactatagtgactaaggc

SEQ ID NO: 92798 - DNA, 25 bp, SARS Virus
tacaaagactaatgtgactaaggca

SEQ ID NO: 92799 - DNA, 25 bp, SARS Virus
acaaagactaaattgactaaggcaa

SEQ ID NO: 92800 - DNA, 25 bp, SARS Virus
caaagactaaagtgactaaggcaag

SEQ ID NO: 92801 - DNA, 25 bp, SARS Virus
aaagactaaagttactaaggcaagc

SEQ ID NO: 92802 - DNA, 25 bp, SARS Virus
aagactaaagtgtctaaggcaagct

SEQ ID NO: 92803 - DNA, 25 bp, SARS Virus
agactaaagtgattaaggcaagctc

SEQ ID NO: 92804 - DNA, 25 bp, SARS Virus
gactaaagtgactaaggcaagctct

SEQ ID NO: 92805 - DNA, 25 bp, SARS Virus
actaaagtgacttaggcaagctcta

SEQ ID NO: 92806 - DNA, 25 bp, SARS Virus
ctaaagtgactatggcaagctctag

SEQ ID NO: 92807 - DNA, 25 bp, SARS Virus
taaagtgactaatgcaagctctagg

SEQ ID NO: 92808 - DNA, 25 bp, SARS Virus
aaagtgactaagtcaagctctagga

SEQ ID NO: 92809 - DNA, 25 bp, SARS Virus
aagtgactaaggtaagctctaggat

SEQ ID NO: 92810 - DNA, 25 bp, SARS Virus
agtgactaaggctagctctaggatt

SEQ ID NO: 92811 - DNA, 25 bp, SARS Virus
gtgactaaggcatgctctaggattt

SEQ ID NO: 92812 - DNA, 25 bp, SARS Virus
tgactaaggcaatctctaggatttt

SEQ ID NO: 92813 - DNA, 25 bp, SARS Virus
gactaaggcaagttctaggattttg

SEQ ID NO: 92814 - DNA, 25 bp, SARS Virus
actaaggcaagctctaggattttgt

SEQ ID NO: 92815 - DNA, 25 bp, SARS Virus
ctaaggcaagctttaggattttgta

SEQ ID NO: 92816 - DNA, 25 bp, SARS Virus
taaggcaagctctaggattttgtag

SEQ ID NO: 92817 - DNA, 25 bp, SARS Virus
aaggcaagctcttggattttgtaga

SEQ ID NO: 92818 - DNA, 25 bp, SARS Virus
aggcaagctctatgattttgtagac

SEQ ID NO: 92819 - DNA, 25 bp, SARS Virus
ggcaagctctagtattttgtagact

SEQ ID NO: 92820 - DNA, 25 bp, SARS Virus
gcaagctctaggtttttgtagactt

SEQ ID NO: 92821 - DNA, 25 bp, SARS Virus
caagctctaggattttgtagacttt

SEQ ID NO: 92822 - DNA, 25 bp, SARS Virus
aagctctaggattttgtagacttta

SEQ ID NO: 92823 - DNA, 25 bp, SARS Virus
agctctaggattttgtagactttat

SEQ ID NO: 92824 - DNA, 25 bp, SARS Virus
gctctaggattttgtagactttata

SEQ ID NO: 92825 - DNA, 25 bp, SARS Virus
ctctaggattttttagactttataa

SEQ ID NO: 92826 - DNA, 25 bp, SARS Virus
tctaggattttgtagactttataat

SEQ ID NO: 92827 - DNA, 25 bp, SARS Virus
ctaggattttgttgactttataatc

SEQ ID NO: 92828 - DNA, 25 bp, SARS Virus
taggattttgtatactttataatct

SEQ ID NO: 92829 - DNA, 25 bp, SARS Virus
aggattttgtagtctttataatctg

SEQ ID NO: 92830 - DNA, 25 bp, SARS Virus
ggattttgtagattttataatctgt

SEQ ID NO: 92831 - DNA, 25 bp, SARS Virus
gattttgtagactttataatctgta

SEQ ID NO: 92832 - DNA, 25 bp, SARS Virus
attttgtagactttataatctgtaa

SEQ ID NO: 92833 - DNA, 25 bp, SARS Virus
ttttgtagactttataatctgtaaa

SEQ ID NO: 92834 - DNA, 25 bp, SARS Virus
tttgtagactttttaatctgtaaag

SEQ ID NO: 92835 - DNA, 25 bp, SARS Virus
ttgtagactttataatctgtaaagt

SEQ ID NO: 92836 - DNA, 25 bp, SARS Virus
tgtagactttattatctgtaaagtg

SEQ ID NO: 92837 - DNA, 25 bp, SARS Virus
gtagactttatattctgtaaagtgg

SEQ ID NO: 92838 - DNA, 25 bp, SARS Virus
tagactttataatctgtaaagtgga

SEQ ID NO: 92839 - DNA, 25 bp, SARS Virus
agactttataatttgtaaagtggaa

SEQ ID NO: 92840 - DNA, 25 bp, SARS Virus
gactttataatctgtaaagtggaac

SEQ ID NO: 92841 - DNA, 25 bp, SARS Virus
actttataatctttaaagtggaacg

SEQ ID NO: 92842 - DNA, 25 bp, SARS Virus
ctttataatctgtaaagtggaacgc

SEQ ID NO: 92843 - DNA, 25 bp, SARS Virus
tttataatctgttaagtggaacgcg

SEQ ID NO: 92844 - DNA, 25 bp, SARS Virus
ttataatctgtatagtggaacgcga

SEQ ID NO: 92845 - DNA, 25 bp, SARS Virus
tataatctgtaatgtggaacgcgaa

SEQ ID NO: 92846 - DNA, 25 bp, SARS Virus
ataatctgtaaattggaacgcgaaa

SEQ ID NO: 92847 - DNA, 25 bp, SARS Virus
taatctgtaaagtggaacgcgaaaa

SEQ ID NO: 92848 - DNA, 25 bp, SARS Virus
aatctgtaaagttgaacgcgaaaac

SEQ ID NO: 92849 - DNA, 25 bp, SARS Virus
atctgtaaagtgaaacgcgaaaacc

SEQ ID NO: 92850 - DNA, 25 bp, SARS Virus
tctgtaaagtggaacgcgaaaaccc

SEQ ID NO: 92851 - DNA, 25 bp, SARS Virus
ctgtaaagtggaacgcgaaaacccc

SEQ ID NO: 92852 - DNA, 25 bp, SARS Virus
tgtaaagtggaaagcgaaaaccccc

SEQ ID NO: 92853 - DNA, 25 bp, SARS Virus
gtaaagtggaacacgaaaaccccca

SEQ ID NO: 92854 - DNA, 25 bp, SARS Virus
taaagtggaacgagaaaacccccac

SEQ ID NO: 92855 - DNA, 25 bp, SARS Virus
aaagtggaacgcaaaaacccccaca

SEQ ID NO: 92856 - DNA, 25 bp, SARS Virus
aagtggaacgcgaaaacccccacat

SEQ ID NO: 92857 - DNA, 25 bp, SARS Virus
agtggaacgcgaaaacccccacatt

SEQ ID NO: 92858 - DNA, 25 bp, SARS Virus
gtggaacgcgaaaacccccacattc

SEQ ID NO: 92859 - DNA, 25 bp, SARS Virus
tggaacgcgaaaacccccacattca

SEQ ID NO: 92860 - DNA, 25 bp, SARS Virus
ggaacgcgaaaaaccccacattcac

SEQ ID NO: 92861 - DNA, 25 bp, SARS Virus
gaacgcgaaaacacccacattcaca

SEQ ID NO: 92862 - DNA, 25 bp, SARS Virus
aacgcgaaaaccaccacattcacat

SEQ ID NO: 92863 - DNA, 25 bp, SARS Virus
acgcgaaaacccacacattcacatt

SEQ ID NO: 92864 - DNA, 25 bp, SARS Virus
cgcgaaaaccccaacattcacatta

SEQ ID NO: 92865 - DNA, 25 bp, SARS Virus
gcgaaaacccccacattcacattaa

SEQ ID NO: 92866 - DNA, 25 bp, SARS Virus
cgaaaacccccaaattcacattaat

SEQ ID NO: 92867 - DNA, 25 bp, SARS Virus
gaaaacccccacattcacattaatg

SEQ ID NO: 92868 - DNA, 25 bp, SARS Virus
aaaacccccacaatcacattaatgt

SEQ ID NO: 92869 - DNA, 25 bp, SARS Virus
aaacccccacatacacattaatgtg

SEQ ID NO: 92870 - DNA, 25 bp, SARS Virus
aacccccacattaacattaatgtgg

SEQ ID NO: 92871 - DNA, 25 bp, SARS Virus
acccccacattcacattaatgtgga

SEQ ID NO: 92872 - DNA, 25 bp, SARS Virus
cccccacattcaaattaatgtggac

SEQ ID NO: 92873 - DNA, 25 bp, SARS Virus
ccccacattcacattaatgtggacc

SEQ ID NO: 92874 - DNA, 25 bp, SARS Virus
cccacattcacaataatgtggacct

SEQ ID NO: 92875 - DNA, 25 bp, SARS Virus
ccacattcacataaatgtggacctt

SEQ ID NO: 92876 - DNA, 25 bp, SARS Virus
cacattcacattaatgtggaccttg

SEQ ID NO: 92877 - DNA, 25 bp, SARS Virus
acattcacattaatgtggaccttgt

SEQ ID NO: 92878 - DNA, 25 bp, SARS Virus
cattcacattaaagtggaccttgtt

SEQ ID NO: 92879 - DNA, 25 bp, SARS Virus
attcacattaatatggaccttgttt

SEQ ID NO: 92880 - DNA, 25 bp, SARS Virus
ttcacattaatgaggaccttgttta

SEQ ID NO: 92881 - DNA, 25 bp, SARS Virus
tcacattaatgtagaccttgtttac

SEQ ID NO: 92882 - DNA, 25 bp, SARS Virus
cacattaatgtgaaccttgtttacg

SEQ ID NO: 92883 - DNA, 25 bp, SARS Virus
acattaatgtggaccttgtttacga

SEQ ID NO: 92884 - DNA, 25 bp, SARS Virus
cattaatgtggaacttgtttacgaa

SEQ ID NO: 92885 - DNA, 25 bp, SARS Virus
attaatgtggacattgtttacgaag

SEQ ID NO: 92886 - DNA, 25 bp, SARS Virus
ttaatgtggaccatgtttacgaagt

SEQ ID NO: 92887 - DNA, 25 bp, SARS Virus
taatgtggacctagtttacgaagta

SEQ ID NO: 92888 - DNA, 25 bp, SARS Virus
aatgtggaccttatttacgaagtag

SEQ ID NO: 92889 - DNA, 25 bp, SARS Virus
atgtggaccttgattacgaagtaga

SEQ ID NO: 92890 - DNA, 25 bp, SARS Virus
tgtggaccttgtatacgaagtagac

SEQ ID NO: 92891 - DNA, 25 bp, SARS Virus
gtggaccttgttaacgaagtagact

SEQ ID NO: 92892 - DNA, 25 bp, SARS Virus
tggaccttgtttacgaagtagactt

SEQ ID NO: 92893 - DNA, 25 bp, SARS Virus
ggaccttgtttaagaagtagacttc

SEQ ID NO: 92894 - DNA, 25 bp, SARS Virus
gaccttgtttacaaagtagacttca

SEQ ID NO: 92895 - DNA, 25 bp, SARS Virus
accttgtttacgaagtagacttcaa

SEQ ID NO: 92896 - DNA, 25 bp, SARS Virus
ccttgtttacgaagtagacttcaac

SEQ ID NO: 92897 - DNA, 25 bp, SARS Virus
cttgtttacgaaatagacttcaacg

SEQ ID NO: 92898 - DNA, 25 bp, SARS Virus
ttgtttacgaagaagacttcaacga

SEQ ID NO: 92899 - DNA, 25 bp, SARS Virus
tgtttacgaagtagacttcaacgac

SEQ ID NO: 92900 - DNA, 25 bp, SARS Virus
gtttacgaagtaaacttcaacgaca

SEQ ID NO: 92901 - DNA, 25 bp, SARS Virus
tttacgaagtagacttcaacgacaa

SEQ ID NO: 92902 - DNA, 25 bp, SARS Virus
ttacgaagtagaattcaacgacaag

SEQ ID NO: 92903 - DNA, 25 bp, SARS Virus
tacgaagtagacatcaacgacaaga

SEQ ID NO: 92904 - DNA, 25 bp, SARS Virus
acgaagtagactacaacgacaagat

SEQ ID NO: 92905 - DNA, 25 bp, SARS Virus
cgaagtagacttaaacgacaagata

SEQ ID NO: 92906 - DNA, 25 bp, SARS Virus
gaagtagacttcaacgacaagatat

SEQ ID NO: 92907 - DNA, 25 bp, SARS Virus
aagtagacttcaacgacaagatata

SEQ ID NO: 92908 - DNA, 25 bp, SARS Virus
agtagacttcaaagacaagatatag

SEQ ID NO: 92909 - DNA, 25 bp, SARS Virus
gtagacttcaacaacaagatatagt

SEQ ID NO: 92910 - DNA, 25 bp, SARS Virus
tagacttcaacgacaagatatagtt

SEQ ID NO: 92911 - DNA, 25 bp, SARS Virus
agacttcaacgaaaagatatagttc

SEQ ID NO: 92912 - DNA, 25 bp, SARS Virus
gacttcaacgacaagatatagttct

SEQ ID NO: 92913 - DNA, 25 bp, SARS Virus
acttcaacgacaagatatagttcta

SEQ ID NO: 92914 - DNA, 25 bp, SARS Virus
cttcaacgacaaaatatagttctac

SEQ ID NO: 92915 - DNA, 25 bp, SARS Virus
ttcaacgacaagatatagttctaca

SEQ ID NO: 92916 - DNA, 25 bp, SARS Virus
tcaacgacaagaaatagttctacaa

SEQ ID NO: 92917 - DNA, 25 bp, SARS Virus
caacgacaagatatagttctacaat

SEQ ID NO: 92918 - DNA, 25 bp, SARS Virus
aacgacaagataaagttctacaatt

SEQ ID NO: 92919 - DNA, 25 bp, SARS Virus
acgacaagatatagttctacaattg

SEQ ID NO: 92920 - DNA, 25 bp, SARS Virus
cgacaagatataattctacaattga

SEQ ID NO: 92921 - DNA, 25 bp, SARS Virus
gacaagatatagatctacaattgac

SEQ ID NO: 92922 - DNA, 25 bp, SARS Virus
acaagatatagtactacaattgacg

SEQ ID NO: 92923 - DNA, 25 bp, SARS Virus
caagatatagttatacaattgacgt

SEQ ID NO: 92924 - DNA, 25 bp, SARS Virus
aagatatagttcaacaattgacgtg

SEQ ID NO: 92925 - DNA, 25 bp, SARS Virus
agatatagttctacaattgacgtga

SEQ ID NO: 92926 - DNA, 25 bp, SARS Virus
gatatagttctaaaattgacgtgac

SEQ ID NO: 92927 - DNA, 25 bp, SARS Virus
atatagttctacaattgacgtgact

SEQ ID NO: 92928 - DNA, 25 bp, SARS Virus
tatagttctacaattgacgtgacta

SEQ ID NO: 92929 - DNA, 25 bp, SARS Virus
atagttctacaaatgacgtgactac

SEQ ID NO: 92930 - DNA, 25 bp, SARS Virus
tagttctacaatagacgtgactaca

SEQ ID NO: 92931 - DNA, 25 bp, SARS Virus
agttctacaattaacgtgactacaa

SEQ ID NO: 92932 - DNA, 25 bp, SARS Virus
gttctacaattgacgtgactacaaa

SEQ ID NO: 92933 - DNA, 25 bp, SARS Virus
ttctacaattgaagtgactacaaag

SEQ ID NO: 92934 - DNA, 25 bp, SARS Virus
tctacaattgacatgactacaaaga

SEQ ID NO: 92935 - DNA, 25 bp, SARS Virus
ctacaattgacgagactacaaagat

SEQ ID NO: 92936 - DNA, 25 bp, SARS Virus
tacaattgacgtaactacaaagatg

SEQ ID NO: 92937 - DNA, 25 bp, SARS Virus
acaattgacgtgactacaaagatgt

SEQ ID NO: 92938 - DNA, 25 bp, SARS Virus
caattgacgtgaatacaaagatgtc

SEQ ID NO: 92939 - DNA, 25 bp, SARS Virus
aattgacgtgacaacaaagatgtcg

SEQ ID NO: 92940 - DNA, 25 bp, SARS Virus
attgacgtgactacaaagatgtcgt

SEQ ID NO: 92941 - DNA, 25 bp, SARS Virus
ttgacgtgactaaaaagatgtcgtt

SEQ ID NO: 92942 - DNA, 25 bp, SARS Virus
tgacgtgactacaaagatgtcgtta

SEQ ID NO: 92943 - DNA, 25 bp, SARS Virus
gacgtgactacaaagatgtcgttaa

SEQ ID NO: 92944 - DNA, 25 bp, SARS Virus
acgtgactacaaagatgtcgttaag

SEQ ID NO: 92945 - DNA, 25 bp, SARS Virus
cgtgactacaaaaatgtcgttaagt

SEQ ID NO: 92946 - DNA, 25 bp, SARS Virus
gtgactacaaagatgtcgttaagta

SEQ ID NO: 92947 - DNA, 25 bp, SARS Virus
tgactacaaagaagtcgttaagtac

SEQ ID NO: 92948 - DNA, 25 bp, SARS Virus
gactacaaagatatcgttaagtacg

SEQ ID NO: 92949 - DNA, 25 bp, SARS Virus
actacaaagatgacgttaagtacgt

SEQ ID NO: 92950 - DNA, 25 bp, SARS Virus
ctacaaagatgtagttaagtacgtc

SEQ ID NO: 92951 - DNA, 25 bp, SARS Virus
tacaaagatgtcattaagtacgtct

SEQ ID NO: 92952 - DNA, 25 bp, SARS Virus
acaaagatgtcgataagtacgtcta

SEQ ID NO: 92953 - DNA, 25 bp, SARS Virus
caaagatgtcgtaaagtacgtctag

SEQ ID NO: 92954 - DNA, 25 bp, SARS Virus
aaagatgtcgttaagtacgtctagt

SEQ ID NO: 92955 - DNA, 25 bp, SARS Virus
aagatgtcgttaagtacgtctagtt

SEQ ID NO: 92956 - DNA, 25 bp, SARS Virus
agatgtcgttaaatacgtctagttg

SEQ ID NO: 92957 - DNA, 25 bp, SARS Virus
gatgtcgttaagaacgtctagttga

SEQ ID NO: 92958 - DNA, 25 bp, SARS Virus
atgtcgttaagtacgtctagttgag

SEQ ID NO: 92959 - DNA, 25 bp, SARS Virus
tgtcgttaagtaagtctagttgagt

SEQ ID NO: 92960 - DNA, 25 bp, SARS Virus
gtcgttaagtacatctagttgagtg

SEQ ID NO: 92961 - DNA, 25 bp, SARS Virus
tcgttaagtacgactagttgagtgt

SEQ ID NO: 92962 - DNA, 25 bp, SARS Virus
cgttaagtacgtatagttgagtgtg

SEQ ID NO: 92963 - DNA, 25 bp, SARS Virus
gttaagtacgtcaagttgagtgtgg

SEQ ID NO: 92964 - DNA, 25 bp, SARS Virus
ttaagtacgtctagttgagtgtggt

SEQ ID NO: 92965 - DNA, 25 bp, SARS Virus
taagtacgtctaattgagtgtggtc

SEQ ID NO: 92966 - DNA, 25 bp, SARS Virus
aagtacgtctagatgagtgtggtcg

SEQ ID NO: 92967 - DNA, 25 bp, SARS Virus
agtacgtctagtagagtgtggtcga

SEQ ID NO: 92968 - DNA, 25 bp, SARS Virus
gtacgtctagttaagtgtggtcgaa

SEQ ID NO: 92969 - DNA, 25 bp, SARS Virus
tacgtctagttgagtgtggtcgaac

SEQ ID NO: 92970 - DNA, 25 bp, SARS Virus
acgtctagttgaatgtggtcgaacc

SEQ ID NO: 92971 - DNA, 25 bp, SARS Virus
cgtctagttgagagtggtcgaaccg

SEQ ID NO: 92972 - DNA, 25 bp, SARS Virus
gtctagttgagtatggtcgaaccgc

SEQ ID NO: 92973 - DNA, 25 bp, SARS Virus
tctagttgagtgaggtcgaaccgcg

SEQ ID NO: 92974 - DNA, 25 bp, SARS Virus
ctagttgagtgtagtcgaaccgcgt

SEQ ID NO: 92975 - DNA, 25 bp, SARS Virus
tagttgagtgtgatcgaaccgcgta

SEQ ID NO: 92976 - DNA, 25 bp, SARS Virus
agttgagtgtggacgaaccgcgtat

SEQ ID NO: 92977 - DNA, 25 bp, SARS Virus
gttgagtgtggtagaaccgcgtata

SEQ ID NO: 92978 - DNA, 25 bp, SARS Virus
ttgagtgtggtcaaaccgcgtatat

SEQ ID NO: 92979 - DNA, 25 bp, SARS Virus
tgagtgtggtcgaaccgcgtatata

SEQ ID NO: 92980 - DNA, 25 bp, SARS Virus
gagtgtggtcgaaccgcgtatataa

SEQ ID NO: 92981 - DNA, 25 bp, SARS Virus
agtgtggtcgaaacgcgtatataag

SEQ ID NO: 92982 - DNA, 25 bp, SARS Virus
gtgtggtcgaacagcgtatataaga

SEQ ID NO: 92983 - DNA, 25 bp, SARS Virus
tgtggtcgaaccacgtatataagat

SEQ ID NO: 92984 - DNA, 25 bp, SARS Virus
gtggtcgaaccgagtatataagatg

SEQ ID NO: 92985 - DNA, 25 bp, SARS Virus
tggtcgaaccgcatatataagatga

SEQ ID NO: 92986 - DNA, 25 bp, SARS Virus
ggtcgaaccgcgaatataagatgac

SEQ ID NO: 92987 - DNA, 25 bp, SARS Virus
gtcgaaccgcgtatataagatgacc

SEQ ID NO: 92988 - DNA, 25 bp, SARS Virus
tcgaaccgcgtaaataagatgacct

SEQ ID NO: 92989 - DNA, 25 bp, SARS Virus
cgaaccgcgtatataagatgacctt

SEQ ID NO: 92990 - DNA, 25 bp, SARS Virus
gaaccgcgtataaaagatgaccttt

SEQ ID NO: 92991 - DNA, 25 bp, SARS Virus
aaccgcgtatataagatgacctttg

SEQ ID NO: 92992 - DNA, 25 bp, SARS Virus
accgcgtatataagatgacctttgt

SEQ ID NO: 92993 - DNA, 25 bp, SARS Virus
ccgcgtatataaaatgacctttgtt

SEQ ID NO: 92994 - DNA, 25 bp, SARS Virus
cgcgtatataagatgacctttgtta

SEQ ID NO: 92995 - DNA, 25 bp, SARS Virus
gcgtatataagaagacctttgttac

SEQ ID NO: 92996 - DNA, 25 bp, SARS Virus
cgtatataagataacctttgttaca

SEQ ID NO: 92997 - DNA, 25 bp, SARS Virus
gtatataagatgacctttgttacat

SEQ ID NO: 92998 - DNA, 25 bp, SARS Virus
tatataagatgaactttgttacata

SEQ ID NO: 92999 - DNA, 25 bp, SARS Virus
atataagatgacatttgttacataa

SEQ ID NO: 93000 - DNA, 25 bp, SARS Virus
tataagatgaccattgttacataag

SEQ ID NO: 93001 - DNA, 25 bp, SARS Virus
ataagatgacctatgttacataagg

SEQ ID NO: 93002 - DNA, 25 bp, SARS Virus
taagatgaccttagttacataaggt

SEQ ID NO: 93003 - DNA, 25 bp, SARS Virus
aagatgacctttattacataaggtc

SEQ ID NO: 93004 - DNA, 25 bp, SARS Virus
agatgacctttgatacataaggtct

SEQ ID NO: 93005 - DNA, 25 bp, SARS Virus
gatgacctttgtaacataaggtctg

SEQ ID NO: 93006 - DNA, 25 bp, SARS Virus
atgacctttgttacataaggtctga

SEQ ID NO: 93007 - DNA, 25 bp, SARS Virus
tgacctttgttaaataaggtctgag

SEQ ID NO: 93008 - DNA, 25 bp, SARS Virus
gacctttgttacataaggtctgagt

SEQ ID NO: 93009 - DNA, 25 bp, SARS Virus
acctttgttacaaaaggtctgagtt

SEQ ID NO: 93010 - DNA, 25 bp, SARS Virus
cctttgttacataaggtctgagttc

SEQ ID NO: 93011 - DNA, 25 bp, SARS Virus
ctttgttacataaggtctgagttcg

SEQ ID NO: 93012 - DNA, 25 bp, SARS Virus
tttgttacataaagtctgagttcgt

SEQ ID NO: 93013 - DNA, 25 bp, SARS Virus
ttgttacataagatctgagttcgtc

SEQ ID NO: 93014 - DNA, 25 bp, SARS Virus
tgttacataaggactgagttcgtcc

SEQ ID NO: 93015 - DNA, 25 bp, SARS Virus
gttacataaggtatgagttcgtccg

SEQ ID NO: 93016 - DNA, 25 bp, SARS Virus
ttacataaggtcagagttcgtccga

SEQ ID NO: 93017 - DNA, 25 bp, SARS Virus
tacataaggtctaagttcgtccgac

SEQ ID NO: 93018 - DNA, 25 bp, SARS Virus
acataaggtctgagttcgtccgaca

SEQ ID NO: 93019 - DNA, 25 bp, SARS Virus
cataaggtctgaattcgtccgacag

SEQ ID NO: 93020 - DNA, 25 bp, SARS Virus
ataaggtctgagatcgtccgacaga

SEQ ID NO: 93021 - DNA, 25 bp, SARS Virus
taaggtctgagtacgtccgacagaa

SEQ ID NO: 93022 - DNA, 25 bp, SARS Virus
aaggtctgagttagtccgacagaat

SEQ ID NO: 93023 - DNA, 25 bp, SARS Virus
aggtctgagttcatccgacagaata

SEQ ID NO: 93024 - DNA, 25 bp, SARS Virus
ggtctgagttcgaccgacagaatat

SEQ ID NO: 93025 - DNA, 25 bp, SARS Virus
gtctgagttcgtacgacagaatatc

SEQ ID NO: 93026 - DNA, 25 bp, SARS Virus
tctgagttcgtcagacagaatatcc

SEQ ID NO: 93027 - DNA, 25 bp, SARS Virus
ctgagttcgtccaacagaatatcct

SEQ ID NO: 93028 - DNA, 25 bp, SARS Virus
tgagttcgtccgacagaatatcctc

SEQ ID NO: 93029 - DNA, 25 bp, SARS Virus
gagttcgtccgaaagaatatcctcg

SEQ ID NO: 93030 - DNA, 25 bp, SARS Virus
agttcgtccgacagaatatcctcga

SEQ ID NO: 93031 - DNA, 25 bp, SARS Virus
gttcgtccgacaaaatatcctcgac

SEQ ID NO: 93032 - DNA, 25 bp, SARS Virus
ttcgtccgacagaatatcctcgact

SEQ ID NO: 93033 - DNA, 25 bp, SARS Virus
tcgtccgacagaatatcctcgactc

SEQ ID NO: 93034 - DNA, 25 bp, SARS Virus
cgtccgacagaaaatcctcgactcg

SEQ ID NO: 93035 - DNA, 25 bp, SARS Virus
gtccgacagaatatcctcgactcgt

SEQ ID NO: 93036 - DNA, 25 bp, SARS Virus
tccgacagaataacctcgactcgta

SEQ ID NO: 93037 - DNA, 25 bp, SARS Virus
ccgacagaatatactcgactcgtac

SEQ ID NO: 93038 - DNA, 25 bp, SARS Virus
cgacagaatatcatcgactcgtaca

SEQ ID NO: 93039 - DNA, 25 bp, SARS Virus
gacagaatatccacgactcgtacag

SEQ ID NO: 93040 - DNA, 25 bp, SARS Virus
acagaatatcctagactcgtacagc

SEQ ID NO: 93041 - DNA, 25 bp, SARS Virus
cagaatatcctcaactcgtacagct

SEQ ID NO: 93042 - DNA, 25 bp, SARS Virus
agaatatcctcgactcgtacagctg

SEQ ID NO: 93043 - DNA, 25 bp, SARS Virus
gaatatcctcgaatcgtacagctgt

SEQ ID NO: 93044 - DNA, 25 bp, SARS Virus
aatatcctcgacacgtacagctgtg

SEQ ID NO: 93045 - DNA, 25 bp, SARS Virus
atatcctcgactagtacagctgtga

SEQ ID NO: 93046 - DNA, 25 bp, SARS Virus
tatcctcgactcatacagctgtgaa

SEQ ID NO: 93047 - DNA, 25 bp, SARS Virus
atcctcgactcgaacagctgtgaag

SEQ ID NO: 93048 - DNA, 25 bp, SARS Virus
tcctcgactcgtacagctgtgaaga

SEQ ID NO: 93049 - DNA, 25 bp, SARS Virus
cctcgactcgtaaagctgtgaagaa

SEQ ID NO: 93050 - DNA, 25 bp, SARS Virus
ctcgactcgtacagctgtgaagaat

SEQ ID NO: 93051 - DNA, 25 bp, SARS Virus
tcgactcgtacaactgtgaagaata

SEQ ID NO: 93052 - DNA, 25 bp, SARS Virus
cgactcgtacagatgtgaagaatac

SEQ ID NO: 93053 - DNA, 25 bp, SARS Virus
gactcgtacagcagtgaagaatact

SEQ ID NO: 93054 - DNA, 25 bp, SARS Virus
actcgtacagctatgaagaatactc

SEQ ID NO: 93055 - DNA, 25 bp, SARS Virus
ctcgtacagctgagaagaatactca

SEQ ID NO: 93056 - DNA, 25 bp, SARS Virus
tcgtacagctgtaaagaatactcac

SEQ ID NO: 93057 - DNA, 25 bp, SARS Virus
cgtacagctgtgaagaatactcacg

SEQ ID NO: 93058 - DNA, 25 bp, SARS Virus
gtacagctgtgaagaatactcacgc

SEQ ID NO: 93059 - DNA, 25 bp, SARS Virus
tacagctgtgaaaaatactcacgct

SEQ ID NO: 93060 - DNA, 25 bp, SARS Virus
acagctgtgaagaatactcacgctg

SEQ ID NO: 93061 - DNA, 25 bp, SARS Virus
cagctgtgaagaatactcacgctgt

SEQ ID NO: 93062 - DNA, 25 bp, SARS Virus
agctgtgaagaaaactcacgctgta

SEQ ID NO: 93063 - DNA, 25 bp, SARS Virus
gctgtgaagaatactcacgctgtaa

SEQ ID NO: 93064 - DNA, 25 bp, SARS Virus
ctgtgaagaataatcacgctgtaag

SEQ ID NO: 93065 - DNA, 25 bp, SARS Virus
tgtgaagaatacacacgctgtaagg

SEQ ID NO: 93066 - DNA, 25 bp, SARS Virus
gtgaagaatactaacgctgtaagga

SEQ ID NO: 93067 - DNA, 25 bp, SARS Virus
tgaagaatactcacgctgtaaggat

SEQ ID NO: 93068 - DNA, 25 bp, SARS Virus
gaagaatactcaagctgtaaggata

SEQ ID NO: 93069 - DNA, 25 bp, SARS Virus
aagaatactcacactgtaaggataa

SEQ ID NO: 93070 - DNA, 25 bp, SARS Virus
agaatactcacgatgtaaggataac

SEQ ID NO: 93071 - DNA, 25 bp, SARS Virus
gaatactcacgcagtaaggataacc

SEQ ID NO: 93072 - DNA, 25 bp, SARS Virus
aatactcacgctataaggataacct

SEQ ID NO: 93073 - DNA, 25 bp, SARS Virus
atactcacgctgaaaggataacctc

SEQ ID NO: 93074 - DNA, 25 bp, SARS Virus
tactcacgctgtaaggataacctcg

SEQ ID NO: 93075 - DNA, 25 bp, SARS Virus
actcacgctgtaaggataacctcga

SEQ ID NO: 93076 - DNA, 25 bp, SARS Virus
ctcacgctgtaaagataacctcgac

SEQ ID NO: 93077 - DNA, 25 bp, SARS Virus
tcacgctgtaagaataacctcgacc

SEQ ID NO: 93078 - DNA, 25 bp, SARS Virus
cacgctgtaaggataacctcgaccg

SEQ ID NO: 93079 - DNA, 25 bp, SARS Virus
acgctgtaaggaaaacctcgaccgt

SEQ ID NO: 93080 - DNA, 25 bp, SARS Virus
cgctgtaaggataacctcgaccgta

SEQ ID NO: 93081 - DNA, 25 bp, SARS Virus
gctgtaaggataacctcgaccgtaa

SEQ ID NO: 93082 - DNA, 25 bp, SARS Virus
ctgtaaggataaactcgaccgtaaa

SEQ ID NO: 93083 - DNA, 25 bp, SARS Virus
tgtaaggataacatcgaccgtaaac

SEQ ID NO: 93084 - DNA, 25 bp, SARS Virus
gtaaggataaccacgaccgtaaaca

SEQ ID NO: 93085 - DNA, 25 bp, SARS Virus
taaggataacctagaccgtaaacac

SEQ ID NO: 93086 - DNA, 25 bp, SARS Virus
aaggataacctcaaccgtaaacacg

SEQ ID NO: 93087 - DNA, 25 bp, SARS Virus
aggataacctcgaccgtaaacacga

SEQ ID NO: 93088 - DNA, 25 bp, SARS Virus
ggataacctcgaacgtaaacacgat

SEQ ID NO: 93089 - DNA, 25 bp, SARS Virus
gataacctcgacagtaaacacgatc

SEQ ID NO: 93090 - DNA, 25 bp, SARS Virus
ataacctcgaccataaacacgatca

SEQ ID NO: 93091 - DNA, 25 bp, SARS Virus
taacctcgaccgaaaacacgatcaa

SEQ ID NO: 93092 - DNA, 25 bp, SARS Virus
aacctcgaccgtaaacacgatcaat

SEQ ID NO: 93093 - DNA, 25 bp, SARS Virus
acctcgaccgtaaacacgatcaatg

SEQ ID NO: 93094 - DNA, 25 bp, SARS Virus
cctcgaccgtaaacacgatcaatgg

SEQ ID NO: 93095 - DNA, 25 bp, SARS Virus
ctcgaccgtaaaaacgatcaatggt

SEQ ID NO: 93096 - DNA, 25 bp, SARS Virus
tcgaccgtaaacacgatcaatggta

SEQ ID NO: 93097 - DNA, 25 bp, SARS Virus
cgaccgtaaacaagatcaatggtat

SEQ ID NO: 93098 - DNA, 25 bp, SARS Virus
gaccgtaaacacaatcaatggtatg

SEQ ID NO: 93099 - DNA, 25 bp, SARS Virus
accgtaaacacgatcaatggtatgt

SEQ ID NO: 93100 - DNA, 25 bp, SARS Virus
ccgtaaacacgaacaatggtatgtc

SEQ ID NO: 93101 - DNA, 25 bp, SARS Virus
cgtaaacacgataaatggtatgtca

SEQ ID NO: 93102 - DNA, 25 bp, SARS Virus
gtaaacacgatcaatggtatgtcaa

SEQ ID NO: 93103 - DNA, 25 bp, SARS Virus
taaacacgatcaatggtatgtcaaa

SEQ ID NO: 93104 - DNA, 25 bp, SARS Virus
aaacacgatcaaaggtatgtcaaag

SEQ ID NO: 93105 - DNA, 25 bp, SARS Virus
aacacgatcaatagtatgtcaaaga

SEQ ID NO: 93106 - DNA, 25 bp, SARS Virus
acacgatcaatgatatgtcaaagaa

SEQ ID NO: 93107 - DNA, 25 bp, SARS Virus
cacgatcaatggaatgtcaaagaaa

SEQ ID NO: 93108 - DNA, 25 bp, SARS Virus
acgatcaatggtatgtcaaagaaat

SEQ ID NO: 93109 - DNA, 25 bp, SARS Virus
cgatcaatggtaagtcaaagaaata

SEQ ID NO: 93110 - DNA, 25 bp, SARS Virus
gatcaatggtatatcaaagaaataa

SEQ ID NO: 93111 - DNA, 25 bp, SARS Virus
atcaatggtatgacaaagaaataat

SEQ ID NO: 93112 - DNA, 25 bp, SARS Virus
tcaatggtatgtaaaagaaataatg

SEQ ID NO: 93113 - DNA, 25 bp, SARS Virus
caatggtatgtcaaagaaataatgc

SEQ ID NO: 93114 - DNA, 25 bp, SARS Virus
aatggtatgtcaaagaaataatgca

SEQ ID NO: 93115 - DNA, 25 bp, SARS Virus
atggtatgtcaaagaaataatgcat

SEQ ID NO: 93116 - DNA, 25 bp, SARS Virus
tggtatgtcaaaaaaataatgcatc

SEQ ID NO: 93117 - DNA, 25 bp, SARS Virus
ggtatgtcaaagaaataatgcatca

SEQ ID NO: 93118 - DNA, 25 bp, SARS Virus
gtatgtcaaagaaataatgcatcat

SEQ ID NO: 93119 - DNA, 25 bp, SARS Virus
tatgtcaaagaaataatgcatcatg

SEQ ID NO: 93120 - DNA, 25 bp, SARS Virus
atgtcaaagaaaaaatgcatcatga

SEQ ID NO: 93121 - DNA, 25 bp, SARS Virus
tgtcaaagaaataatgcatcatgat

SEQ ID NO: 93122 - DNA, 25 bp, SARS Virus
gtcaaagaaataatgcatcatgatc

SEQ ID NO: 93123 - DNA, 25 bp, SARS Virus
tcaaagaaataaagcatcatgatcg

SEQ ID NO: 93124 - DNA, 25 bp, SARS Virus
caaagaaataatacatcatgatcgg

SEQ ID NO: 93125 - DNA, 25 bp, SARS Virus
aaagaaataatgaatcatgatcggt

SEQ ID NO: 93126 - DNA, 25 bp, SARS Virus
aagaaataatgcatcatgatcggtt

SEQ ID NO: 93127 - DNA, 25 bp, SARS Virus
agaaataatgcaacatgatcggttt

SEQ ID NO: 93128 - DNA, 25 bp, SARS Virus
gaaataatgcataatgatcggtttt

SEQ ID NO: 93129 - DNA, 25 bp, SARS Virus
aaataatgcatcatgatcggttttt

SEQ ID NO: 93130 - DNA, 25 bp, SARS Virus
aataatgcatcaagatcggttttta

SEQ ID NO: 93131 - DNA, 25 bp, SARS Virus
ataatgcatcataatcggtttttag

SEQ ID NO: 93132 - DNA, 25 bp, SARS Virus
taatgcatcatgatcggtttttaga

SEQ ID NO: 93133 - DNA, 25 bp, SARS Virus
aatgcatcatgaacggtttttagat

SEQ ID NO: 93134 - DNA, 25 bp, SARS Virus
atgcatcatgataggtttttagata

SEQ ID NO: 93135 - DNA, 25 bp, SARS Virus
tgcatcatgatcagtttttagataa

SEQ ID NO: 93136 - DNA, 25 bp, SARS Virus
gcatcatgatcgatttttagataac

SEQ ID NO: 93137 - DNA, 25 bp, SARS Virus
catcatgatcggattttagataaca

SEQ ID NO: 93138 - DNA, 25 bp, SARS Virus
atcatgatcggtatttagataacac

SEQ ID NO: 93139 - DNA, 25 bp, SARS Virus
tcatgatcggttattagataacacc

SEQ ID NO: 93140 - DNA, 25 bp, SARS Virus
catgatcggtttatagataacaccg

SEQ ID NO: 93141 - DNA, 25 bp, SARS Virus
atgatcggttttaagataacaccga

SEQ ID NO: 93142 - DNA, 25 bp, SARS Virus
tgatcggtttttagataacaccgaa

SEQ ID NO: 93143 - DNA, 25 bp, SARS Virus
gatcggtttttaaataacaccgaat

SEQ ID NO: 93144 - DNA, 25 bp, SARS Virus
atcggtttttagataacaccgaata

SEQ ID NO: 93145 - DNA, 25 bp, SARS Virus
tcggtttttagaaaacaccgaatat

SEQ ID NO: 93146 - DNA, 25 bp, SARS Virus
cggtttttagataacaccgaatatg

SEQ ID NO: 93147 - DNA, 25 bp, SARS Virus
ggtttttagataacaccgaatatga

SEQ ID NO: 93148 - DNA, 25 bp, SARS Virus
gtttttagataaaaccgaatatgat

SEQ ID NO: 93149 - DNA, 25 bp, SARS Virus
tttttagataacaccgaatatgata

SEQ ID NO: 93150 - DNA, 25 bp, SARS Virus
ttttagataacaacgaatatgatac

SEQ ID NO: 93151 - DNA, 25 bp, SARS Virus
tttagataacacagaatatgataca

SEQ ID NO: 93152 - DNA, 25 bp, SARS Virus
ttagataacaccaaatatgatacag

SEQ ID NO: 93153 - DNA, 25 bp, SARS Virus
tagataacaccgaatatgatacaga

SEQ ID NO: 93154 - DNA, 25 bp, SARS Virus
agataacaccgaatatgatacagaa

SEQ ID NO: 93155 - DNA, 25 bp, SARS Virus
gataacaccgaaaatgatacagaaa

SEQ ID NO: 93156 - DNA, 25 bp, SARS Virus
ataacaccgaatatgatacagaaat

SEQ ID NO: 93157 - DNA, 25 bp, SARS Virus
taacaccgaataagatacagaaatc

SEQ ID NO: 93158 - DNA, 25 bp, SARS Virus
aacaccgaatataatacagaaatcc

SEQ ID NO: 93159 - DNA, 25 bp, SARS Virus
acaccgaatatgatacagaaatcca

SEQ ID NO: 93160 - DNA, 25 bp, SARS Virus
caccgaatatgaaacagaaatccac

SEQ ID NO: 93161 - DNA, 25 bp, SARS Virus
accgaatatgatacagaaatccacg

SEQ ID NO: 93162 - DNA, 25 bp, SARS Virus
ccgaatatgataaagaaatccacga

SEQ ID NO: 93163 - DNA, 25 bp, SARS Virus
cgaatatgatacagaaatccacgac

SEQ ID NO: 93164 - DNA, 25 bp, SARS Virus
gaatatgatacaaaaatccacgact

SEQ ID NO: 93165 - DNA, 25 bp, SARS Virus
aatatgatacagaaatccacgacta

SEQ ID NO: 93166 - DNA, 25 bp, SARS Virus
atatgatacagaaatccacgactat

SEQ ID NO: 93167 - DNA, 25 bp, SARS Virus
tatgatacagaaatccacgactatc

SEQ ID NO: 93168 - DNA, 25 bp, SARS Virus
atgatacagaaaaccacgactatca

SEQ ID NO: 93169 - DNA, 25 bp, SARS Virus
tgatacagaaatacacgactatcaa

SEQ ID NO: 93170 - DNA, 25 bp, SARS Virus
gatacagaaatcaacgactatcaag

SEQ ID NO: 93171 - DNA, 25 bp, SARS Virus
atacagaaatccacgactatcaagt

SEQ ID NO: 93172 - DNA, 25 bp, SARS Virus
tacagaaatccaagactatcaagtt

SEQ ID NO: 93173 - DNA, 25 bp, SARS Virus
acagaaatccacaactatcaagtta

SEQ ID NO: 93174 - DNA, 25 bp, SARS Virus
cagaaatccacgactatcaagttaa

SEQ ID NO: 93175 - DNA, 25 bp, SARS Virus
agaaatccacgaatatcaagttaac

SEQ ID NO: 93176 - DNA, 25 bp, SARS Virus
gaaatccacgacaatcaagttaacg

SEQ ID NO: 93177 - DNA, 25 bp, SARS Virus
aaatccacgactatcaagttaacga

SEQ ID NO: 93178 - DNA, 25 bp, SARS Virus
aatccacgactaacaagttaacgaa

SEQ ID NO: 93179 - DNA, 25 bp, SARS Virus
atccacgactataaagttaacgaat

SEQ ID NO: 93180 - DNA, 25 bp, SARS Virus
tccacgactatcaagttaacgaatg

SEQ ID NO: 93181 - DNA, 25 bp, SARS Virus
ccacgactatcaagttaacgaatga

SEQ ID NO: 93182 - DNA, 25 bp, SARS Virus
cacgactatcaaattaacgaatgag

SEQ ID NO: 93183 - DNA, 25 bp, SARS Virus
acgactatcaagataacgaatgaga

SEQ ID NO: 93184 - DNA, 25 bp, SARS Virus
cgactatcaagtaaacgaatgagat

SEQ ID NO: 93185 - DNA, 25 bp, SARS Virus
gactatcaagttaacgaatgagatt

SEQ ID NO: 93186 - DNA, 25 bp, SARS Virus
actatcaagttaacgaatgagatta

SEQ ID NO: 93187 - DNA, 25 bp, SARS Virus
ctatcaagttaaagaatgagattat

SEQ ID NO: 93188 - DNA, 25 bp, SARS Virus
tatcaagttaacaaatgagattatt

SEQ ID NO: 93189 - DNA, 25 bp, SARS Virus
atcaagttaacgaatgagattattg

SEQ ID NO: 93190 - DNA, 25 bp, SARS Virus
tcaagttaacgaatgagattattgt

SEQ ID NO: 93191 - DNA, 25 bp, SARS Virus
caagttaacgaaagagattattgtg

SEQ ID NO: 93192 - DNA, 25 bp, SARS Virus
aagttaacgaataagattattgtgg

SEQ ID NO: 93193 - DNA, 25 bp, SARS Virus
agttaacgaatgagattattgtggt

SEQ ID NO: 93194 - DNA, 25 bp, SARS Virus
gttaacgaatgaaattattgtggta

SEQ ID NO: 93195 - DNA, 25 bp, SARS Virus
ttaacgaatgagattattgtggtaa

SEQ ID NO: 93196 - DNA, 25 bp, SARS Virus
taacgaatgagaatattgtggtaac

SEQ ID NO: 93197 - DNA, 25 bp, SARS Virus
aacgaatgagataattgtggtaacg

SEQ ID NO: 93198 - DNA, 25 bp, SARS Virus
acgaatgagattattgtggtaacga

SEQ ID NO: 93199 - DNA, 25 bp, SARS Virus
cgaatgagattaatgtggtaacgat

SEQ ID NO: 93200 - DNA, 25 bp, SARS Virus
gaatgagattatagtggtaacgata

SEQ ID NO: 93201 - DNA, 25 bp, SARS Virus
aatgagattattatggtaacgatat

SEQ ID NO: 93202 - DNA, 25 bp, SARS Virus
atgagattattgaggtaacgatatg

SEQ ID NO: 93203 - DNA, 25 bp, SARS Virus
tgagattattgtagtaacgatatgg

SEQ ID NO: 93204 - DNA, 25 bp, SARS Virus
gagattattgtgataacgatatgga

SEQ ID NO: 93205 - DNA, 25 bp, SARS Virus
agattattgtggaaacgatatggat

SEQ ID NO: 93206 - DNA, 25 bp, SARS Virus
gattattgtggtaacgatatggatg

SEQ ID NO: 93207 - DNA, 25 bp, SARS Virus
attattgtggtaacgatatggatga

SEQ ID NO: 93208 - DNA, 25 bp, SARS Virus
ttattgtggtaaagatatggatgat

SEQ ID NO: 93209 - DNA, 25 bp, SARS Virus
tattgtggtaacaatatggatgatt

SEQ ID NO: 93210 - DNA, 25 bp, SARS Virus
attgtggtaacgatatggatgattg

SEQ ID NO: 93211 - DNA, 25 bp, SARS Virus
ttgtggtaacgaaatggatgattga

SEQ ID NO: 93212 - DNA, 25 bp, SARS Virus
tgtggtaacgatatggatgattgaa

SEQ ID NO: 93213 - DNA, 25 bp, SARS Virus
gtggtaacgataaggatgattgaaa

SEQ ID NO: 93214 - DNA, 25 bp, SARS Virus
tggtaacgatatagatgattgaaaa

SEQ ID NO: 93215 - DNA, 25 bp, SARS Virus
ggtaacgatatgaatgattgaaaag

SEQ ID NO: 93216 - DNA, 25 bp, SARS Virus
gtaacgatatggatgattgaaaagt

SEQ ID NO: 93217 - DNA, 25 bp, SARS Virus
taacgatatggaagattgaaaagtt

SEQ ID NO: 93218 - DNA, 25 bp, SARS Virus
aacgatatggataattgaaaagtta

SEQ ID NO: 93219 - DNA, 25 bp, SARS Virus
acgatatggatgattgaaaagttaa

SEQ ID NO: 93220 - DNA, 25 bp, SARS Virus
cgatatggatgaatgaaaagttaat

SEQ ID NO: 93221 - DNA, 25 bp, SARS Virus
gatatggatgatagaaaagttaatc

SEQ ID NO: 93222 - DNA, 25 bp, SARS Virus
atatggatgattaaaaagttaatcg

SEQ ID NO: 93223 - DNA, 25 bp, SARS Virus
tatggatgattgaaaagttaatcgt

SEQ ID NO: 93224 - DNA, 25 bp, SARS Virus
atggatgattgaaaagttaatcgta

SEQ ID NO: 93225 - DNA, 25 bp, SARS Virus
tggatgattgaaaagttaatcgtaa

SEQ ID NO: 93226 - DNA, 25 bp, SARS Virus
ggatgattgaaaagttaatcgtaat

SEQ ID NO: 93227 - DNA, 25 bp, SARS Virus
gatgattgaaaaattaatcgtaatg

SEQ ID NO: 93228 - DNA, 25 bp, SARS Virus
atgattgaaaagataatcgtaatga

SEQ ID NO: 93229 - DNA, 25 bp, SARS Virus
tgattgaaaagtaaatcgtaatgat

SEQ ID NO: 93230 - DNA, 25 bp, SARS Virus
gattgaaaagttaatcgtaatgatg

SEQ ID NO: 93231 - DNA, 25 bp, SARS Virus
attgaaaagttaatcgtaatgatgt

SEQ ID NO: 93232 - DNA, 25 bp, SARS Virus
ttgaaaagttaaacgtaatgatgtc

SEQ ID NO: 93233 - DNA, 25 bp, SARS Virus
tgaaaagttaatagtaatgatgtct

SEQ ID NO: 93234 - DNA, 25 bp, SARS Virus
gaaaagttaatcataatgatgtctt

SEQ ID NO: 93235 - DNA, 25 bp, SARS Virus
aaaagttaatcgaaatgatgtcttc

SEQ ID NO: 93236 - DNA, 25 bp, SARS Virus
aaagttaatcgtaatgatgtcttca

SEQ ID NO: 93237 - DNA, 25 bp, SARS Virus
aagttaatcgtaatgatgtcttcat

SEQ ID NO: 93238 - DNA, 25 bp, SARS Virus
agttaatcgtaaagatgtcttcatt

SEQ ID NO: 93239 - DNA, 25 bp, SARS Virus
gttaatcgtaataatgtcttcatta

SEQ ID NO: 93240 - DNA, 25 bp, SARS Virus
ttaatcgtaatgatgtcttcattac

SEQ ID NO: 93241 - DNA, 25 bp, SARS Virus
taatcgtaatgaagtcttcattacg

SEQ ID NO: 93242 - DNA, 25 bp, SARS Virus
aatcgtaatgatatcttcattacgg

SEQ ID NO: 93243 - DNA, 25 bp, SARS Virus
atcgtaatgatgacttcattacgga

SEQ ID NO: 93244 - DNA, 25 bp, SARS Virus
tcgtaatgatgtattcattacggac

SEQ ID NO: 93245 - DNA, 25 bp, SARS Virus
cgtaatgatgtcatcattacggaca

SEQ ID NO: 93246 - DNA, 25 bp, SARS Virus
gtaatgatgtctacattacggacaa

SEQ ID NO: 93247 - DNA, 25 bp, SARS Virus
taatgatgtcttaattacggacaaa

SEQ ID NO: 93248 - DNA, 25 bp, SARS Virus
aatgatgtcttcattacggacaaag

SEQ ID NO: 93249 - DNA, 25 bp, SARS Virus
atgatgtcttcaatacggacaaaga

SEQ ID NO: 93250 - DNA, 25 bp, SARS Virus
tgatgtcttcataacggacaaagat

SEQ ID NO: 93251 - DNA, 25 bp, SARS Virus
gatgtcttcattacggacaaagata

SEQ ID NO: 93252 - DNA, 25 bp, SARS Virus
atgtcttcattaaggacaaagatac

SEQ ID NO: 93253 - DNA, 25 bp, SARS Virus
tgtcttcattacagacaaagatacc

SEQ ID NO: 93254 - DNA, 25 bp, SARS Virus
gtcttcattacgaacaaagataccg

SEQ ID NO: 93255 - DNA, 25 bp, SARS Virus
tcttcattacggacaaagataccga

SEQ ID NO: 93256 - DNA, 25 bp, SARS Virus
cttcattacggaaaaagataccgat

SEQ ID NO: 93257 - DNA, 25 bp, SARS Virus
ttcattacggacaaagataccgatt

SEQ ID NO: 93258 - DNA, 25 bp, SARS Virus
tcattacggacaaagataccgattt

SEQ ID NO: 93259 - DNA, 25 bp, SARS Virus
cattacggacaaagataccgatttt

SEQ ID NO: 93260 - DNA, 25 bp, SARS Virus
attacggacaaaaataccgattttg

SEQ ID NO: 93261 - DNA, 25 bp, SARS Virus
ttacggacaaagataccgattttgg

SEQ ID NO: 93262 - DNA, 25 bp, SARS Virus
tacggacaaagaaaccgattttgga

SEQ ID NO: 93263 - DNA, 25 bp, SARS Virus
acggacaaagataccgattttggag

SEQ ID NO: 93264 - DNA, 25 bp, SARS Virus
cggacaaagataacgattttggagg

SEQ ID NO: 93265 - DNA, 25 bp, SARS Virus
ggacaaagatacagattttggaggc

SEQ ID NO: 93266 - DNA, 25 bp, SARS Virus
gacaaagataccaattttggaggca

SEQ ID NO: 93267 - DNA, 25 bp, SARS Virus
acaaagataccgattttggaggcat

SEQ ID NO: 93268 - DNA, 25 bp, SARS Virus
caaagataccgaatttggaggcatc

SEQ ID NO: 93269 - DNA, 25 bp, SARS Virus
aaagataccgatattggaggcatct

SEQ ID NO: 93270 - DNA, 25 bp, SARS Virus
aagataccgattatggaggcatcta

SEQ ID NO: 93271 - DNA, 25 bp, SARS Virus
agataccgatttaggaggcatctaa

SEQ ID NO: 93272 - DNA, 25 bp, SARS Virus
gataccgattttagaggcatctaac

SEQ ID NO: 93273 - DNA, 25 bp, SARS Virus
ataccgattttgaaggcatctaaca

SEQ ID NO: 93274 - DNA, 25 bp, SARS Virus
taccgattttggaggcatctaacat

SEQ ID NO: 93275 - DNA, 25 bp, SARS Virus
accgattttggaagcatctaacatt

SEQ ID NO: 93276 - DNA, 25 bp, SARS Virus
ccgattttggagacatctaacatta

SEQ ID NO: 93277 - DNA, 25 bp, SARS Virus
cgattttggaggaatctaacattat

SEQ ID NO: 93278 - DNA, 25 bp, SARS Virus
gattttggaggcatctaacattata

SEQ ID NO: 93279 - DNA, 25 bp, SARS Virus
attttggaggcaactaacattatac

SEQ ID NO: 93280 - DNA, 25 bp, SARS Virus
ttttggaggcatataacattataca

SEQ ID NO: 93281 - DNA, 25 bp, SARS Virus
tttggaggcatcaaacattatacat

SEQ ID NO: 93282 - DNA, 25 bp, SARS Virus
ttggaggcatctaacattatacatg

SEQ ID NO: 93283 - DNA, 25 bp, SARS Virus
tggaggcatctaacattatacatgt

SEQ ID NO: 93284 - DNA, 25 bp, SARS Virus
ggaggcatctaaaattatacatgta

SEQ ID NO: 93285 - DNA, 25 bp, SARS Virus
gaggcatctaacattatacatgtag

SEQ ID NO: 93286 - DNA, 25 bp, SARS Virus
aggcatctaacaatatacatgtaga

SEQ ID NO: 93287 - DNA, 25 bp, SARS Virus
ggcatctaacataatacatgtagac

SEQ ID NO: 93288 - DNA, 25 bp, SARS Virus
gcatctaacattatacatgtagacg

SEQ ID NO: 93289 - DNA, 25 bp, SARS Virus
catctaacattaaacatgtagacgc

SEQ ID NO: 93290 - DNA, 25 bp, SARS Virus
atctaacattatacatgtagacgcc

SEQ ID NO: 93291 - DNA, 25 bp, SARS Virus
tctaacattataaatgtagacgcct

SEQ ID NO: 93292 - DNA, 25 bp, SARS Virus
ctaacattatacatgtagacgcctc

SEQ ID NO: 93293 - DNA, 25 bp, SARS Virus
taacattatacaagtagacgcctct

SEQ ID NO: 93294 - DNA, 25 bp, SARS Virus
aacattatacatatagacgcctcta

SEQ ID NO: 93295 - DNA, 25 bp, SARS Virus
acattatacatgaagacgcctctaa

SEQ ID NO: 93296 - DNA, 25 bp, SARS Virus
cattatacatgtagacgcctctaag

SEQ ID NO: 93297 - DNA, 25 bp, SARS Virus
attatacatgtaaacgcctctaaga

SEQ ID NO: 93298 - DNA, 25 bp, SARS Virus
ttatacatgtagacgcctctaagat

SEQ ID NO: 93299 - DNA, 25 bp, SARS Virus
tatacatgtagaagcctctaagatg

SEQ ID NO: 93300 - DNA, 25 bp, SARS Virus
atacatgtagacacctctaagatga

SEQ ID NO: 93301 - DNA, 25 bp, SARS Virus
tacatgtagacgactctaagatgac

SEQ ID NO: 93302 - DNA, 25 bp, SARS Virus
acatgtagacgcatctaagatgact

SEQ ID NO: 93303 - DNA, 25 bp, SARS Virus
catgtagacgccactaagatgactt

SEQ ID NO: 93304 - DNA, 25 bp, SARS Virus
atgtagacgcctataagatgactta

SEQ ID NO: 93305 - DNA, 25 bp, SARS Virus
tgtagacgcctcaaagatgacttac

SEQ ID NO: 93306 - DNA, 25 bp, SARS Virus
gtagacgcctctaagatgacttaca

SEQ ID NO: 93307 - DNA, 25 bp, SARS Virus
tagacgcctctaagatgacttacac

SEQ ID NO: 93308 - DNA, 25 bp, SARS Virus
agacgcctctaaaatgacttacacg

SEQ ID NO: 93309 - DNA, 25 bp, SARS Virus
gacgcctctaagatgacttacacga

SEQ ID NO: 93310 - DNA, 25 bp, SARS Virus
acgcctctaagaagacttacacgat

SEQ ID NO: 93311 - DNA, 25 bp, SARS Virus
cgcctctaagataacttacacgatt

SEQ ID NO: 93312 - DNA, 25 bp, SARS Virus
gcctctaagatgacttacacgatta

SEQ ID NO: 93313 - DNA, 25 bp, SARS Virus
cctctaagatgaattacacgattaa

SEQ ID NO: 93314 - DNA, 25 bp, SARS Virus
ctctaagatgacatacacgattaaa

SEQ ID NO: 93315 - DNA, 25 bp, SARS Virus
tctaagatgactaacacgattaaac

SEQ ID NO: 93316 - DNA, 25 bp, SARS Virus
ctaagatgacttacacgattaaacg

SEQ ID NO: 93317 - DNA, 25 bp, SARS Virus
taagatgacttaaacgattaaacga

SEQ ID NO: 93318 - DNA, 25 bp, SARS Virus
aagatgacttacacgattaaacgaa

SEQ ID NO: 93319 - DNA, 25 bp, SARS Virus
agatgacttacaagattaaacgaag

SEQ ID NO: 93320 - DNA, 25 bp, SARS Virus
gatgacttacacaattaaacgaaga

SEQ ID NO: 93321 - DNA, 25 bp, SARS Virus
atgacttacacgattaaacgaagag

SEQ ID NO: 93322 - DNA, 25 bp, SARS Virus
tgacttacacgaataaacgaagagg

SEQ ID NO: 93323 - DNA, 25 bp, SARS Virus
gacttacacgataaaacgaagaggt

SEQ ID NO: 93324 - DNA, 25 bp, SARS Virus
acttacacgattaaacgaagaggtt

SEQ ID NO: 93325 - DNA, 25 bp, SARS Virus
cttacacgattaaacgaagaggtta

SEQ ID NO: 93326 - DNA, 25 bp, SARS Virus
ttacacgattaaacgaagaggttat

SEQ ID NO: 93327 - DNA, 25 bp, SARS Virus
tacacgattaaaagaagaggttata

SEQ ID NO: 93328 - DNA, 25 bp, SARS Virus
acacgattaaacaaagaggttatac

SEQ ID NO: 93329 - DNA, 25 bp, SARS Virus
cacgattaaacgaagaggttatacc

SEQ ID NO: 93330 - DNA, 25 bp, SARS Virus
acgattaaacgaagaggttatacca

SEQ ID NO: 93331 - DNA, 25 bp, SARS Virus
cgattaaacgaaaaggttataccat

SEQ ID NO: 93332 - DNA, 25 bp, SARS Virus
gattaaacgaagaggttataccatc

SEQ ID NO: 93333 - DNA, 25 bp, SARS Virus
attaaacgaagaagttataccatcg

SEQ ID NO: 93334 - DNA, 25 bp, SARS Virus
ttaaacgaagagattataccatcga

SEQ ID NO: 93335 - DNA, 25 bp, SARS Virus
taaacgaagaggatataccatcgaa

SEQ ID NO: 93336 - DNA, 25 bp, SARS Virus
aaacgaagaggtaataccatcgaaa

SEQ ID NO: 93337 - DNA, 25 bp, SARS Virus
atctgtaaagtgcaacgcgaaaacc

SEQ ID NO: 93338 - DNA, 25 bp, SARS Virus
tctgtaaagtggcacgcgaaaaccc

SEQ ID NO: 93339 - DNA, 25 bp, SARS Virus
ctgtaaagtggaccgcgaaaacccc

SEQ ID NO: 93340 - DNA, 25 bp, SARS Virus
tgtaaagtggaacgcgaaaaccccc

SEQ ID NO: 93341 - DNA, 25 bp, SARS Virus
gtaaagtggaacccgaaaaccccca

SEQ ID NO: 93342 - DNA, 25 bp, SARS Virus
taaagtggaacgcgaaaacccccac

SEQ ID NO: 93343 - DNA, 25 bp, SARS Virus
aaagtggaacgccaaaacccccaca

SEQ ID NO: 93344 - DNA, 25 bp, SARS Virus
aagtggaacgcgcaaacccccacat

SEQ ID NO: 93345 - DNA, 25 bp, SARS Virus
agtggaacgcgacaacccccacatt

SEQ ID NO: 93346 - DNA, 25 bp, SARS Virus
gtggaacgcgaacacccccacattc

SEQ ID NO: 93347 - DNA, 25 bp, SARS Virus
tggaacgcgaaaccccccacattca

SEQ ID NO: 93348 - DNA, 25 bp, SARS Virus
ggaacgcgaaaacccccacattcac

SEQ ID NO: 93349 - DNA, 25 bp, SARS Virus
gaacgcgaaaacccccacattcaca

SEQ ID NO: 93350 - DNA, 25 bp, SARS Virus
aacgcgaaaacccccacattcacat

SEQ ID NO: 93351 - DNA, 25 bp, SARS Virus
acgcgaaaacccccacattcacatt

SEQ ID NO: 93352 - DNA, 25 bp, SARS Virus
cgcgaaaacccccacattcacatta

SEQ ID NO: 93353 - DNA, 25 bp, SARS Virus
gcgaaaacccccccattcacattaa

SEQ ID NO: 93354 - DNA, 25 bp, SARS Virus
cgaaaacccccacattcacattaat

SEQ ID NO: 93355 - DNA, 25 bp, SARS Virus
gaaaacccccaccttcacattaatg

SEQ ID NO: 93356 - DNA, 25 bp, SARS Virus
aaaacccccacactcacattaatgt

SEQ ID NO: 93357 - DNA, 25 bp, SARS Virus
aaacccccacatccacattaatgtg

SEQ ID NO: 93358 - DNA, 25 bp, SARS Virus
aacccccacattcacattaatgtgg

SEQ ID NO: 93359 - DNA, 25 bp, SARS Virus
acccccacattcccattaatgtgga

SEQ ID NO: 93360 - DNA, 25 bp, SARS Virus
cccccacattcacattaatgtggac

SEQ ID NO: 93361 - DNA, 25 bp, SARS Virus
ccccacattcaccttaatgtggacc

SEQ ID NO: 93362 - DNA, 25 bp, SARS Virus
cccacattcacactaatgtggacct

SEQ ID NO: 93363 - DNA, 25 bp, SARS Virus
ccacattcacatcaatgtggacctt

SEQ ID NO: 93364 - DNA, 25 bp, SARS Virus
cacattcacattcatgtggaccttg

SEQ ID NO: 93365 - DNA, 25 bp, SARS Virus
acattcacattactgtggaccttgt

SEQ ID NO: 93366 - DNA, 25 bp, SARS Virus
cattcacattaacgtggaccttgtt

SEQ ID NO: 93367 - DNA, 25 bp, SARS Virus
attcacattaatctggaccttgttt

SEQ ID NO: 93368 - DNA, 25 bp, SARS Virus
ttcacattaatgcggaccttgttta

SEQ ID NO: 93369 - DNA, 25 bp, SARS Virus
tcacattaatgtcgaccttgtttac

SEQ ID NO: 93370 - DNA, 25 bp, SARS Virus
cacattaatgtgcaccttgtttacg

SEQ ID NO: 93371 - DNA, 25 bp, SARS Virus
acattaatgtggcccttgtttacga

SEQ ID NO: 93372 - DNA, 25 bp, SARS Virus
cattaatgtggaccttgtttacgaa

SEQ ID NO: 93373 - DNA, 25 bp, SARS Virus
attaatgtggaccttgtttacgaag

SEQ ID NO: 93374 - DNA, 25 bp, SARS Virus
ttaatgtggaccctgtttacgaagt

SEQ ID NO: 93375 - DNA, 25 bp, SARS Virus
taatgtggacctcgtttacgaagta

SEQ ID NO: 93376 - DNA, 25 bp, SARS Virus
aatgtggaccttctttacgaagtag

SEQ ID NO: 93377 - DNA, 25 bp, SARS Virus
atgtggaccttgcttacgaagtaga

SEQ ID NO: 93378 - DNA, 25 bp, SARS Virus
tgtggaccttgtctacgaagtagac

SEQ ID NO: 93379 - DNA, 25 bp, SARS Virus
gtggaccttgttcacgaagtagact

SEQ ID NO: 93380 - DNA, 25 bp, SARS Virus
tggaccttgtttccgaagtagactt

SEQ ID NO: 93381 - DNA, 25 bp, SARS Virus
ggaccttgtttacgaagtagacttc

SEQ ID NO: 93382 - DNA, 25 bp, SARS Virus
gaccttgtttaccaagtagacttca

SEQ ID NO: 93383 - DNA, 25 bp, SARS Virus
accttgtttacgcagtagacttcaa

SEQ ID NO: 93384 - DNA, 25 bp, SARS Virus
ccttgtttacgacgtagacttcaac

SEQ ID NO: 93385 - DNA, 25 bp, SARS Virus
cttgtttacgaactagacttcaacg

SEQ ID NO: 93386 - DNA, 25 bp, SARS Virus
ttgtttacgaagcagacttcaacga

SEQ ID NO: 93387 - DNA, 25 bp, SARS Virus
tgtttacgaagtcgacttcaacgac

SEQ ID NO: 93388 - DNA, 25 bp, SARS Virus
gtttacgaagtacacttcaacgaca

SEQ ID NO: 93389 - DNA, 25 bp, SARS Virus
tttacgaagtagccttcaacgacaa

SEQ ID NO: 93390 - DNA, 25 bp, SARS Virus
ttacgaagtagacttcaacgacaag

SEQ ID NO: 93391 - DNA, 25 bp, SARS Virus
tacgaagtagacctcaacgacaaga

SEQ ID NO: 93392 - DNA, 25 bp, SARS Virus
acgaagtagactccaacgacaagat

SEQ ID NO: 93393 - DNA, 25 bp, SARS Virus
cgaagtagacttcaacgacaagata

SEQ ID NO: 93394 - DNA, 25 bp, SARS Virus
gaagtagacttccacgacaagatat

SEQ ID NO: 93395 - DNA, 25 bp, SARS Virus
aagtagacttcaccgacaagatata

SEQ ID NO: 93396 - DNA, 25 bp, SARS Virus
agtagacttcaacgacaagatatag

SEQ ID NO: 93397 - DNA, 25 bp, SARS Virus
gtagacttcaaccacaagatatagt

SEQ ID NO: 93398 - DNA, 25 bp, SARS Virus
tagacttcaacgccaagatatagtt

SEQ ID NO: 93399 - DNA, 25 bp, SARS Virus
agacttcaacgacaagatatagttc

SEQ ID NO: 93400 - DNA, 25 bp, SARS Virus
gacttcaacgaccagatatagttct

SEQ ID NO: 93401 - DNA, 25 bp, SARS Virus
acttcaacgacacgatatagttcta

SEQ ID NO: 93402 - DNA, 25 bp, SARS Virus
cttcaacgacaacatatagttctac

SEQ ID NO: 93403 - DNA, 25 bp, SARS Virus
ttcaacgacaagctatagttctaca

SEQ ID NO: 93404 - DNA, 25 bp, SARS Virus
tcaacgacaagacatagttctacaa

SEQ ID NO: 93405 - DNA, 25 bp, SARS Virus
caacgacaagatctagttctacaat

SEQ ID NO: 93406 - DNA, 25 bp, SARS Virus
aacgacaagatacagttctacaatt

SEQ ID NO: 93407 - DNA, 25 bp, SARS Virus
acgacaagatatcgttctacaattg

SEQ ID NO: 93408 - DNA, 25 bp, SARS Virus
cgacaagatatacttctacaattga

SEQ ID NO: 93409 - DNA, 25 bp, SARS Virus
gacaagatatagctctacaattgac

SEQ ID NO: 93410 - DNA, 25 bp, SARS Virus
acaagatatagtcctacaattgacg

SEQ ID NO: 93411 - DNA, 25 bp, SARS Virus
caagatatagttctacaattgacgt

SEQ ID NO: 93412 - DNA, 25 bp, SARS Virus
aagatatagttccacaattgacgtg

SEQ ID NO: 93413 - DNA, 25 bp, SARS Virus
agatatagttctccaattgacgtga

SEQ ID NO: 93414 - DNA, 25 bp, SARS Virus
gatatagttctacaattgacgtgac

SEQ ID NO: 93415 - DNA, 25 bp, SARS Virus
atatagttctaccattgacgtgact

SEQ ID NO: 93416 - DNA, 25 bp, SARS Virus
tatagttctacacttgacgtgacta

SEQ ID NO: 93417 - DNA, 25 bp, SARS Virus
atagttctacaactgacgtgactac

SEQ ID NO: 93418 - DNA, 25 bp, SARS Virus
tagttctacaatcgacgtgactaca

SEQ ID NO: 93419 - DNA, 25 bp, SARS Virus
agttctacaattcacgtgactacaa

SEQ ID NO: 93420 - DNA, 25 bp, SARS Virus
gttctacaattgccgtgactacaaa

SEQ ID NO: 93421 - DNA, 25 bp, SARS Virus
ttctacaattgacgtgactacaaag

SEQ ID NO: 93422 - DNA, 25 bp, SARS Virus
tctacaattgacctgactacaaaga

SEQ ID NO: 93423 - DNA, 25 bp, SARS Virus
ctacaattgacgcgactacaaagat

SEQ ID NO: 93424 - DNA, 25 bp, SARS Virus
tacaattgacgtcactacaaagatg

SEQ ID NO: 93425 - DNA, 25 bp, SARS Virus
acaattgacgtgcctacaaagatgt

SEQ ID NO: 93426 - DNA, 25 bp, SARS Virus
caattgacgtgactacaaagatgtc

SEQ ID NO: 93427 - DNA, 25 bp, SARS Virus
aattgacgtgaccacaaagatgtcg

SEQ ID NO: 93428 - DNA, 25 bp, SARS Virus
attgacgtgactccaaagatgtcgt

SEQ ID NO: 93429 - DNA, 25 bp, SARS Virus
ttgacgtgactacaaagatgtcgtt

SEQ ID NO: 93430 - DNA, 25 bp, SARS Virus
tgacgtgactaccaagatgtcgtta

SEQ ID NO: 93431 - DNA, 25 bp, SARS Virus
gacgtgactacacagatgtcgttaa

SEQ ID NO: 93432 - DNA, 25 bp, SARS Virus
acgtgactacaacgatgtcgttaag

SEQ ID NO: 93433 - DNA, 25 bp, SARS Virus
cgtgactacaaacatgtcgttaagt

SEQ ID NO: 93434 - DNA, 25 bp, SARS Virus
gtgactacaaagctgtcgttaagta

SEQ ID NO: 93435 - DNA, 25 bp, SARS Virus
tgactacaaagacgtcgttaagtac

SEQ ID NO: 93436 - DNA, 25 bp, SARS Virus
gactacaaagatctcgttaagtacg

SEQ ID NO: 93437 - DNA, 25 bp, SARS Virus
actacaaagatgccgttaagtacgt

SEQ ID NO: 93438 - DNA, 25 bp, SARS Virus
ctacaaagatgtcgttaagtacgtc

SEQ ID NO: 93439 - DNA, 25 bp, SARS Virus
tacaaagatgtccttaagtacgtct

SEQ ID NO: 93440 - DNA, 25 bp, SARS Virus
acaaagatgtcgctaagtacgtcta

SEQ ID NO: 93441 - DNA, 25 bp, SARS Virus
caaagatgtcgtcaagtacgtctag

SEQ ID NO: 93442 - DNA, 25 bp, SARS Virus
aaagatgtcgttcagtacgtctagt

SEQ ID NO: 93443 - DNA, 25 bp, SARS Virus
aagatgtcgttacgtacgtctagtt

SEQ ID NO: 93444 - DNA, 25 bp, SARS Virus
agatgtcgttaactacgtctagttg

SEQ ID NO: 93445 - DNA, 25 bp, SARS Virus
gatgtcgttaagcacgtctagttga

SEQ ID NO: 93446 - DNA, 25 bp, SARS Virus
atgtcgttaagtccgtctagttgag

SEQ ID NO: 93447 - DNA, 25 bp, SARS Virus
tgtcgttaagtacgtctagttgagt

SEQ ID NO: 93448 - DNA, 25 bp, SARS Virus
gtcgttaagtacctctagttgagtg

SEQ ID NO: 93449 - DNA, 25 bp, SARS Virus
tcgttaagtacgcctagttgagtgt

SEQ ID NO: 93450 - DNA, 25 bp, SARS Virus
cgttaagtacgtctagttgagtgtg

SEQ ID NO: 93451 - DNA, 25 bp, SARS Virus
gttaagtacgtccagttgagtgtgg

SEQ ID NO: 93452 - DNA, 25 bp, SARS Virus
ttaagtacgtctcgttgagtgtggt

SEQ ID NO: 93453 - DNA, 25 bp, SARS Virus
taagtacgtctacttgagtgtggtc

SEQ ID NO: 93454 - DNA, 25 bp, SARS Virus
aagtacgtctagctgagtgtggtcg

SEQ ID NO: 93455 - DNA, 25 bp, SARS Virus
agtacgtctagtcgagtgtggtcga

SEQ ID NO: 93456 - DNA, 25 bp, SARS Virus
gtacgtctagttcagtgtggtcgaa

SEQ ID NO: 93457 - DNA, 25 bp, SARS Virus
tacgtctagttgcgtgtggtcgaac

SEQ ID NO: 93458 - DNA, 25 bp, SARS Virus
acgtctagttgactgtggtcgaacc

SEQ ID NO: 93459 - DNA, 25 bp, SARS Virus
cgtctagttgagcgtggtcgaaccg

SEQ ID NO: 93460 - DNA, 25 bp, SARS Virus
gtctagttgagtctggtcgaaccgc

SEQ ID NO: 93461 - DNA, 25 bp, SARS Virus
tctagttgagtgcggtcgaaccgcg

SEQ ID NO: 93462 - DNA, 25 bp, SARS Virus
ctagttgagtgtcgtcgaaccgcgt

SEQ ID NO: 93463 - DNA, 25 bp, SARS Virus
tagttgagtgtgctcgaaccgcgta

SEQ ID NO: 93464 - DNA, 25 bp, SARS Virus
agttgagtgtggccgaaccgcgtat

SEQ ID NO: 93465 - DNA, 25 bp, SARS Virus
gttgagtgtggtcgaaccgcgtata

SEQ ID NO: 93466 - DNA, 25 bp, SARS Virus
ttgagtgtggtccaaccgcgtatat

SEQ ID NO: 93467 - DNA, 25 bp, SARS Virus
tgagtgtggtcgcaccgcgtatata

SEQ ID NO: 93468 - DNA, 25 bp, SARS Virus
gagtgtggtcgacccgcgtatataa

SEQ ID NO: 93469 - DNA, 25 bp, SARS Virus
agtgtggtcgaaccgcgtatataag

SEQ ID NO: 93470 - DNA, 25 bp, SARS Virus
gtgtggtcgaaccgcgtatataaga

SEQ ID NO: 93471 - DNA, 25 bp, SARS Virus
tgtggtcgaaccccgtatataagat

SEQ ID NO: 93472 - DNA, 25 bp, SARS Virus
gtggtcgaaccgcgtatataagatg

SEQ ID NO: 93473 - DNA, 25 bp, SARS Virus
tggtcgaaccgcctatataagatga

SEQ ID NO: 93474 - DNA, 25 bp, SARS Virus
ggtcgaaccgcgcatataagatgac

SEQ ID NO: 93475 - DNA, 25 bp, SARS Virus
gtcgaaccgcgtctataagatgacc

SEQ ID NO: 93476 - DNA, 25 bp, SARS Virus
tcgaaccgcgtacataagatgacct

SEQ ID NO: 93477 - DNA, 25 bp, SARS Virus
cgaaccgcgtatctaagatgacctt

SEQ ID NO: 93478 - DNA, 25 bp, SARS Virus
gaaccgcgtatacaagatgaccttt

SEQ ID NO: 93479 - DNA, 25 bp, SARS Virus
aaccgcgtatatcagatgacctttg

SEQ ID NO: 93480 - DNA, 25 bp, SARS Virus
accgcgtatatacgatgacctttgt

SEQ ID NO: 93481 - DNA, 25 bp, SARS Virus
ccgcgtatataacatgacctttgtt

SEQ ID NO: 93482 - DNA, 25 bp, SARS Virus
cgcgtatataagctgacctttgtta

SEQ ID NO: 93483 - DNA, 25 bp, SARS Virus
gcgtatataagacgacctttgttac

SEQ ID NO: 93484 - DNA, 25 bp, SARS Virus
cgtatataagatcacctttgttaca

SEQ ID NO: 93485 - DNA, 25 bp, SARS Virus
gtatataagatgccctttgttacat

SEQ ID NO: 93486 - DNA, 25 bp, SARS Virus
tatataagatgacctttgttacata

SEQ ID NO: 93487 - DNA, 25 bp, SARS Virus
atataagatgacctttgttacataa

SEQ ID NO: 93488 - DNA, 25 bp, SARS Virus
tataagatgacccttgttacataag

SEQ ID NO: 93489 - DNA, 25 bp, SARS Virus
ataagatgacctctgttacataagg

SEQ ID NO: 93490 - DNA, 25 bp, SARS Virus
taagatgaccttcgttacataaggt

SEQ ID NO: 93491 - DNA, 25 bp, SARS Virus
aagatgacctttcttacataaggtc

SEQ ID NO: 93492 - DNA, 25 bp, SARS Virus
agatgacctttgctacataaggtct

SEQ ID NO: 93493 - DNA, 25 bp, SARS Virus
gatgacctttgtcacataaggtctg

SEQ ID NO: 93494 - DNA, 25 bp, SARS Virus
atgacctttgttccataaggtctga

SEQ ID NO: 93495 - DNA, 25 bp, SARS Virus
tgacctttgttacataaggtctgag

SEQ ID NO: 93496 - DNA, 25 bp, SARS Virus
gacctttgttacctaaggtctgagt

SEQ ID NO: 93497 - DNA, 25 bp, SARS Virus
acctttgttacacaaggtctgagtt

SEQ ID NO: 93498 - DNA, 25 bp, SARS Virus
cctttgttacatcaggtctgagttc

SEQ ID NO: 93499 - DNA, 25 bp, SARS Virus
ctttgttacatacggtctgagttcg

SEQ ID NO: 93500 - DNA, 25 bp, SARS Virus
tttgttacataacgtctgagttcgt

SEQ ID NO: 93501 - DNA, 25 bp, SARS Virus
ttgttacataagctctgagttcgtc

SEQ ID NO: 93502 - DNA, 25 bp, SARS Virus
tgttacataaggcctgagttcgtcc

SEQ ID NO: 93503 - DNA, 25 bp, SARS Virus
gttacataaggtctgagttcgtccg

SEQ ID NO: 93504 - DNA, 25 bp, SARS Virus
ttacataaggtccgagttcgtccga

SEQ ID NO: 93505 - DNA, 25 bp, SARS Virus
tacataaggtctcagttcgtccgac

SEQ ID NO: 93506 - DNA, 25 bp, SARS Virus
acataaggtctgcgttcgtccgaca

SEQ ID NO: 93507 - DNA, 25 bp, SARS Virus
cataaggtctgacttcgtccgacag

SEQ ID NO: 93508 - DNA, 25 bp, SARS Virus
ataaggtctgagctcgtccgacaga

SEQ ID NO: 93509 - DNA, 25 bp, SARS Virus
taaggtctgagtccgtccgacagaa

SEQ ID NO: 93510 - DNA, 25 bp, SARS Virus
aaggtctgagttcgtccgacagaat

SEQ ID NO: 93511 - DNA, 25 bp, SARS Virus
aggtctgagttcctccgacagaata

SEQ ID NO: 93512 - DNA, 25 bp, SARS Virus
ggtctgagttcgcccgacagaatat

SEQ ID NO: 93513 - DNA, 25 bp, SARS Virus
gtctgagttcgtccgacagaatatc

SEQ ID NO: 93514 - DNA, 25 bp, SARS Virus
tctgagttcgtccgacagaatatcc

SEQ ID NO: 93515 - DNA, 25 bp, SARS Virus
ctgagttcgtcccacagaatatcct

SEQ ID NO: 93516 - DNA, 25 bp, SARS Virus
tgagttcgtccgccagaatatcctc

SEQ ID NO: 93517 - DNA, 25 bp, SARS Virus
gagttcgtccgacagaatatcctcg

SEQ ID NO: 93518 - DNA, 25 bp, SARS Virus
agttcgtccgaccgaatatcctcga

SEQ ID NO: 93519 - DNA, 25 bp, SARS Virus
gttcgtccgacacaatatcctcgac

SEQ ID NO: 93520 - DNA, 25 bp, SARS Virus
ttcgtccgacagcatatcctcgact

SEQ ID NO: 93521 - DNA, 25 bp, SARS Virus
tcgtccgacagactatcctcgactc

SEQ ID NO: 93522 - DNA, 25 bp, SARS Virus
cgtccgacagaacatcctcgactcg

SEQ ID NO: 93523 - DNA, 25 bp, SARS Virus
gtccgacagaatctcctcgactcgt

SEQ ID NO: 93524 - DNA, 25 bp, SARS Virus
tccgacagaataccctcgactcgta

SEQ ID NO: 93525 - DNA, 25 bp, SARS Virus
ccgacagaatatcctcgactcgtac

SEQ ID NO: 93526 - DNA, 25 bp, SARS Virus
cgacagaatatcctcgactcgtaca

SEQ ID NO: 93527 - DNA, 25 bp, SARS Virus
gacagaatatccccgactcgtacag

SEQ ID NO: 93528 - DNA, 25 bp, SARS Virus
acagaatatcctcgactcgtacagc

SEQ ID NO: 93529 - DNA, 25 bp, SARS Virus
cagaatatcctccactcgtacagct

SEQ ID NO: 93530 - DNA, 25 bp, SARS Virus
agaatatcctcgcctcgtacagctg

SEQ ID NO: 93531 - DNA, 25 bp, SARS Virus
gaatatcctcgactcgtacagctgt

SEQ ID NO: 93532 - DNA, 25 bp, SARS Virus
aatatcctcgacccgtacagctgtg

SEQ ID NO: 93533 - DNA, 25 bp, SARS Virus
atatcctcgactcgtacagctgtga

SEQ ID NO: 93534 - DNA, 25 bp, SARS Virus
tatcctcgactcctacagctgtgaa

SEQ ID NO: 93535 - DNA, 25 bp, SARS Virus
atcctcgactcgcacagctgtgaag

SEQ ID NO: 93536 - DNA, 25 bp, SARS Virus
tcctcgactcgtccagctgtgaaga

SEQ ID NO: 93537 - DNA, 25 bp, SARS Virus
cctcgactcgtacagctgtgaagaa

SEQ ID NO: 93538 - DNA, 25 bp, SARS Virus
ctcgactcgtaccgctgtgaagaat

SEQ ID NO: 93539 - DNA, 25 bp, SARS Virus
tcgactcgtacacctgtgaagaata

SEQ ID NO: 93540 - DNA, 25 bp, SARS Virus
cgactcgtacagctgtgaagaatac

SEQ ID NO: 93541 - DNA, 25 bp, SARS Virus
gactcgtacagccgtgaagaatact

SEQ ID NO: 93542 - DNA, 25 bp, SARS Virus
actcgtacagctctgaagaatactc

SEQ ID NO: 93543 - DNA, 25 bp, SARS Virus
ctcgtacagctgcgaagaatactca

SEQ ID NO: 93544 - DNA, 25 bp, SARS Virus
tcgtacagctgtcaagaatactcac

SEQ ID NO: 93545 - DNA, 25 bp, SARS Virus
cgtacagctgtgcagaatactcacg

SEQ ID NO: 93546 - DNA, 25 bp, SARS Virus
gtacagctgtgacgaatactcacgc

SEQ ID NO: 93547 - DNA, 25 bp, SARS Virus
tacagctgtgaacaatactcacgct

SEQ ID NO: 93548 - DNA, 25 bp, SARS Virus
acagctgtgaagcatactcacgctg

SEQ ID NO: 93549 - DNA, 25 bp, SARS Virus
cagctgtgaagactactcacgctgt

SEQ ID NO: 93550 - DNA, 25 bp, SARS Virus
agctgtgaagaacactcacgctgta

SEQ ID NO: 93551 - DNA, 25 bp, SARS Virus
gctgtgaagaatcctcacgctgtaa

SEQ ID NO: 93552 - DNA, 25 bp, SARS Virus
ctgtgaagaatactcacgctgtaag

SEQ ID NO: 93553 - DNA, 25 bp, SARS Virus
tgtgaagaatacccacgctgtaagg

SEQ ID NO: 93554 - DNA, 25 bp, SARS Virus
gtgaagaatactcacgctgtaagga

SEQ ID NO: 93555 - DNA, 25 bp, SARS Virus
tgaagaatactcccgctgtaaggat

SEQ ID NO: 93556 - DNA, 25 bp, SARS Virus
gaagaatactcacgctgtaaggata

SEQ ID NO: 93557 - DNA, 25 bp, SARS Virus
aagaatactcaccctgtaaggataa

SEQ ID NO: 93558 - DNA, 25 bp, SARS Virus
agaatactcacgctgtaaggataac

SEQ ID NO: 93559 - DNA, 25 bp, SARS Virus
gaatactcacgccgtaaggataacc

SEQ ID NO: 93560 - DNA, 25 bp, SARS Virus
aatactcacgctctaaggataacct

SEQ ID NO: 93561 - DNA, 25 bp, SARS Virus
atactcacgctgcaaggataacctc

SEQ ID NO: 93562 - DNA, 25 bp, SARS Virus
tactcacgctgtcaggataacctcg

SEQ ID NO: 93563 - DNA, 25 bp, SARS Virus
actcacgctgtacggataacctcga

SEQ ID NO: 93564 - DNA, 25 bp, SARS Virus
ctcacgctgtaacgataacctcgac

SEQ ID NO: 93565 - DNA, 25 bp, SARS Virus
tcacgctgtaagcataacctcgacc

SEQ ID NO: 93566 - DNA, 25 bp, SARS Virus
cacgctgtaaggctaacctcgaccg

SEQ ID NO: 93567 - DNA, 25 bp, SARS Virus
acgctgtaaggacaacctcgaccgt

SEQ ID NO: 93568 - DNA, 25 bp, SARS Virus
cgctgtaaggatcacctcgaccgta

SEQ ID NO: 93569 - DNA, 25 bp, SARS Virus
gctgtaaggataccctcgaccgtaa

SEQ ID NO: 93570 - DNA, 25 bp, SARS Virus
ctgtaaggataacctcgaccgtaaa

SEQ ID NO: 93571 - DNA, 25 bp, SARS Virus
tgtaaggataacctcgaccgtaaac

SEQ ID NO: 93572 - DNA, 25 bp, SARS Virus
gtaaggataaccccgaccgtaaaca

SEQ ID NO: 93573 - DNA, 25 bp, SARS Virus
taaggataacctcgaccgtaaacac

SEQ ID NO: 93574 - DNA, 25 bp, SARS Virus
aaggataacctccaccgtaaacacg

SEQ ID NO: 93575 - DNA, 25 bp, SARS Virus
aggataacctcgcccgtaaacacga

SEQ ID NO: 93576 - DNA, 25 bp, SARS Virus
ggataacctcgaccgtaaacacgat

SEQ ID NO: 93577 - DNA, 25 bp, SARS Virus
gataacctcgaccgtaaacacgatc

SEQ ID NO: 93578 - DNA, 25 bp, SARS Virus
ataacctcgaccctaaacacgatca

SEQ ID NO: 93579 - DNA, 25 bp, SARS Virus
taacctcgaccgcaaacacgatcaa

SEQ ID NO: 93580 - DNA, 25 bp, SARS Virus
aacctcgaccgtcaacacgatcaat

SEQ ID NO: 93581 - DNA, 25 bp, SARS Virus
acctcgaccgtacacacgatcaatg

SEQ ID NO: 93582 - DNA, 25 bp, SARS Virus
cctcgaccgtaaccacgatcaatgg

SEQ ID NO: 93583 - DNA, 25 bp, SARS Virus
ctcgaccgtaaacacgatcaatggt

SEQ ID NO: 93584 - DNA, 25 bp, SARS Virus
tcgaccgtaaacccgatcaatggta

SEQ ID NO: 93585 - DNA, 25 bp, SARS Virus
cgaccgtaaacacgatcaatggtat

SEQ ID NO: 93586 - DNA, 25 bp, SARS Virus
gaccgtaaacaccatcaatggtatg

SEQ ID NO: 93587 - DNA, 25 bp, SARS Virus
accgtaaacacgctcaatggtatgt

SEQ ID NO: 93588 - DNA, 25 bp, SARS Virus
ccgtaaacacgaccaatggtatgtc

SEQ ID NO: 93589 - DNA, 25 bp, SARS Virus
cgtaaacacgatcaatggtatgtca

SEQ ID NO: 93590 - DNA, 25 bp, SARS Virus
gtaaacacgatccatggtatgtcaa

SEQ ID NO: 93591 - DNA, 25 bp, SARS Virus
taaacacgatcactggtatgtcaaa

SEQ ID NO: 93592 - DNA, 25 bp, SARS Virus
aaacacgatcaacggtatgtcaaag

SEQ ID NO: 93593 - DNA, 25 bp, SARS Virus
aacacgatcaatcgtatgtcaaaga

SEQ ID NO: 93594 - DNA, 25 bp, SARS Virus
acacgatcaatgctatgtcaaagaa

SEQ ID NO: 93595 - DNA, 25 bp, SARS Virus
cacgatcaatggcatgtcaaagaaa

SEQ ID NO: 93596 - DNA, 25 bp, SARS Virus
acgatcaatggtctgtcaaagaaat

SEQ ID NO: 93597 - DNA, 25 bp, SARS Virus
cgatcaatggtacgtcaaagaaata

SEQ ID NO: 93598 - DNA, 25 bp, SARS Virus
gatcaatggtatctcaaagaaataa

SEQ ID NO: 93599 - DNA, 25 bp, SARS Virus
atcaatggtatgccaaagaaataat

SEQ ID NO: 93600 - DNA, 25 bp, SARS Virus
tcaatggtatgtcaaagaaataatg

SEQ ID NO: 93601 - DNA, 25 bp, SARS Virus
caatggtatgtccaagaaataatgc

SEQ ID NO: 93602 - DNA, 25 bp, SARS Virus
aatggtatgtcacagaaataatgca

SEQ ID NO: 93603 - DNA, 25 bp, SARS Virus
atggtatgtcaacgaaataatgcat

SEQ ID NO: 93604 - DNA, 25 bp, SARS Virus
tggtatgtcaaacaaataatgcatc

SEQ ID NO: 93605 - DNA, 25 bp, SARS Virus
ggtatgtcaaagcaataatgcatca

SEQ ID NO: 93606 - DNA, 25 bp, SARS Virus
gtatgtcaaagacataatgcatcat

SEQ ID NO: 93607 - DNA, 25 bp, SARS Virus
tatgtcaaagaactaatgcatcatg

SEQ ID NO: 93608 - DNA, 25 bp, SARS Virus
atgtcaaagaaacaatgcatcatga

SEQ ID NO: 93609 - DNA, 25 bp, SARS Virus
tgtcaaagaaatcatgcatcatgat

SEQ ID NO: 93610 - DNA, 25 bp, SARS Virus
gtcaaagaaatactgcatcatgatc

SEQ ID NO: 93611 - DNA, 25 bp, SARS Virus
tcaaagaaataacgcatcatgatcg

SEQ ID NO: 93612 - DNA, 25 bp, SARS Virus
caaagaaataatccatcatgatcgg

SEQ ID NO: 93613 - DNA, 25 bp, SARS Virus
aaagaaataatgcatcatgatcggt

SEQ ID NO: 93614 - DNA, 25 bp, SARS Virus
aagaaataatgcctcatgatcggtt

SEQ ID NO: 93615 - DNA, 25 bp, SARS Virus
agaaataatgcaccatgatcggttt

SEQ ID NO: 93616 - DNA, 25 bp, SARS Virus
gaaataatgcatcatgatcggtttt

SEQ ID NO: 93617 - DNA, 25 bp, SARS Virus
aaataatgcatcctgatcggttttt

SEQ ID NO: 93618 - DNA, 25 bp, SARS Virus
aataatgcatcacgatcggttttta

SEQ ID NO: 93619 - DNA, 25 bp, SARS Virus
ataatgcatcatcatcggtttttag

SEQ ID NO: 93620 - DNA, 25 bp, SARS Virus
taatgcatcatgctcggtttttaga

SEQ ID NO: 93621 - DNA, 25 bp, SARS Virus
aatgcatcatgaccggtttttagat

SEQ ID NO: 93622 - DNA, 25 bp, SARS Virus
atgcatcatgatcggtttttagata

SEQ ID NO: 93623 - DNA, 25 bp, SARS Virus
tgcatcatgatccgtttttagataa

SEQ ID NO: 93624 - DNA, 25 bp, SARS Virus
gcatcatgatcgctttttagataac

SEQ ID NO: 93625 - DNA, 25 bp, SARS Virus
catcatgatcggcttttagataaca

SEQ ID NO: 93626 - DNA, 25 bp, SARS Virus
atcatgatcggtctttagataacac

SEQ ID NO: 93627 - DNA, 25 bp, SARS Virus
tcatgatcggttcttagataacacc

SEQ ID NO: 93628 - DNA, 25 bp, SARS Virus
catgatcggtttctagataacaccg

SEQ ID NO: 93629 - DNA, 25 bp, SARS Virus
atgatcggttttcagataacaccga

SEQ ID NO: 93630 - DNA, 25 bp, SARS Virus
tgatcggtttttcgataacaccgaa

SEQ ID NO: 93631 - DNA, 25 bp, SARS Virus
gatcggtttttacataacaccgaat

SEQ ID NO: 93632 - DNA, 25 bp, SARS Virus
atcggtttttagctaacaccgaata

SEQ ID NO: 93633 - DNA, 25 bp, SARS Virus
tcggtttttagacaacaccgaatat

SEQ ID NO: 93634 - DNA, 25 bp, SARS Virus
cggtttttagatcacaccgaatatg

SEQ ID NO: 93635 - DNA, 25 bp, SARS Virus
ggtttttagataccaccgaatatga

SEQ ID NO: 93636 - DNA, 25 bp, SARS Virus
gtttttagataacaccgaatatgat

SEQ ID NO: 93637 - DNA, 25 bp, SARS Virus
tttttagataaccccgaatatgata

SEQ ID NO: 93638 - DNA, 25 bp, SARS Virus
ttttagataacaccgaatatgatac

SEQ ID NO: 93639 - DNA, 25 bp, SARS Virus
tttagataacaccgaatatgataca

SEQ ID NO: 93640 - DNA, 25 bp, SARS Virus
ttagataacacccaatatgatacag

SEQ ID NO: 93641 - DNA, 25 bp, SARS Virus
tagataacaccgcatatgatacaga

SEQ ID NO: 93642 - DNA, 25 bp, SARS Virus
agataacaccgactatgatacagaa

SEQ ID NO: 93643 - DNA, 25 bp, SARS Virus
gataacaccgaacatgatacagaaa

SEQ ID NO: 93644 - DNA, 25 bp, SARS Virus
ataacaccgaatctgatacagaaat

SEQ ID NO: 93645 - DNA, 25 bp, SARS Virus
taacaccgaatacgatacagaaatc

SEQ ID NO: 93646 - DNA, 25 bp, SARS Virus
aacaccgaatatcatacagaaatcc

SEQ ID NO: 93647 - DNA, 25 bp, SARS Virus
acaccgaatatgctacagaaatcca

SEQ ID NO: 93648 - DNA, 25 bp, SARS Virus
caccgaatatgacacagaaatccac

SEQ ID NO: 93649 - DNA, 25 bp, SARS Virus
accgaatatgatccagaaatccacg

SEQ ID NO: 93650 - DNA, 25 bp, SARS Virus
ccgaatatgatacagaaatccacga

SEQ ID NO: 93651 - DNA, 25 bp, SARS Virus
cgaatatgataccgaaatccacgac

SEQ ID NO: 93652 - DNA, 25 bp, SARS Virus
gaatatgatacacaaatccacgact

SEQ ID NO: 93653 - DNA, 25 bp, SARS Virus
aatatgatacagcaatccacgacta

SEQ ID NO: 93654 - DNA, 25 bp, SARS Virus
atatgatacagacatccacgactat

SEQ ID NO: 93655 - DNA, 25 bp, SARS Virus
tatgatacagaactccacgactatc

SEQ ID NO: 93656 - DNA, 25 bp, SARS Virus
atgatacagaaacccacgactatca

SEQ ID NO: 93657 - DNA, 25 bp, SARS Virus
tgatacagaaatccacgactatcaa

SEQ ID NO: 93658 - DNA, 25 bp, SARS Virus
gatacagaaatccacgactatcaag

SEQ ID NO: 93659 - DNA, 25 bp, SARS Virus
atacagaaatccccgactatcaagt

SEQ ID NO: 93660 - DNA, 25 bp, SARS Virus
tacagaaatccacgactatcaagtt

SEQ ID NO: 93661 - DNA, 25 bp, SARS Virus
acagaaatccaccactatcaagtta

SEQ ID NO: 93662 - DNA, 25 bp, SARS Virus
cagaaatccacgcctatcaagttaa

SEQ ID NO: 93663 - DNA, 25 bp, SARS Virus
agaaatccacgactatcaagttaac

SEQ ID NO: 93664 - DNA, 25 bp, SARS Virus
gaaatccacgaccatcaagttaacg

SEQ ID NO: 93665 - DNA, 25 bp, SARS Virus
aaatccacgactctcaagttaacga

SEQ ID NO: 93666 - DNA, 25 bp, SARS Virus
aatccacgactaccaagttaacgaa

SEQ ID NO: 93667 - DNA, 25 bp, SARS Virus
atccacgactatcaagttaacgaat

SEQ ID NO: 93668 - DNA, 25 bp, SARS Virus
tccacgactatccagttaacgaatg

SEQ ID NO: 93669 - DNA, 25 bp, SARS Virus
ccacgactatcacgttaacgaatga

SEQ ID NO: 93670 - DNA, 25 bp, SARS Virus
cacgactatcaacttaacgaatgag

SEQ ID NO: 93671 - DNA, 25 bp, SARS Virus
acgactatcaagctaacgaatgaga

SEQ ID NO: 93672 - DNA, 25 bp, SARS Virus
cgactatcaagtcaacgaatgagat

SEQ ID NO: 93673 - DNA, 25 bp, SARS Virus
gactatcaagttcacgaatgagatt

SEQ ID NO: 93674 - DNA, 25 bp, SARS Virus
actatcaagttaccgaatgagatta

SEQ ID NO: 93675 - DNA, 25 bp, SARS Virus
ctatcaagttaacgaatgagattat

SEQ ID NO: 93676 - DNA, 25 bp, SARS Virus
tatcaagttaaccaatgagattatt

SEQ ID NO: 93677 - DNA, 25 bp, SARS Virus
atcaagttaacgcatgagattattg

SEQ ID NO: 93678 - DNA, 25 bp, SARS Virus
tcaagttaacgactgagattattgt

SEQ ID NO: 93679 - DNA, 25 bp, SARS Virus
caagttaacgaacgagattattgtg

SEQ ID NO: 93680 - DNA, 25 bp, SARS Virus
aagttaacgaatcagattattgtgg

SEQ ID NO: 93681 - DNA, 25 bp, SARS Virus
agttaacgaatgcgattattgtggt

SEQ ID NO: 93682 - DNA, 25 bp, SARS Virus
gttaacgaatgacattattgtggta

SEQ ID NO: 93683 - DNA, 25 bp, SARS Virus
ttaacgaatgagcttattgtggtaa

SEQ ID NO: 93684 - DNA, 25 bp, SARS Virus
taacgaatgagactattgtggtaac

SEQ ID NO: 93685 - DNA, 25 bp, SARS Virus
aacgaatgagatcattgtggtaacg

SEQ ID NO: 93686 - DNA, 25 bp, SARS Virus
acgaatgagattcttgtggtaacga

SEQ ID NO: 93687 - DNA, 25 bp, SARS Virus
cgaatgagattactgtggtaacgat

SEQ ID NO: 93688 - DNA, 25 bp, SARS Virus
gaatgagattatcgtggtaacgata

SEQ ID NO: 93689 - DNA, 25 bp, SARS Virus
aatgagattattctggtaacgatat

SEQ ID NO: 93690 - DNA, 25 bp, SARS Virus
atgagattattgcggtaacgatatg

SEQ ID NO: 93691 - DNA, 25 bp, SARS Virus
tgagattattgtcgtaacgatatgg

SEQ ID NO: 93692 - DNA, 25 bp, SARS Virus
gagattattgtgctaacgatatgga

SEQ ID NO: 93693 - DNA, 25 bp, SARS Virus
agattattgtggcaacgatatggat

SEQ ID NO: 93694 - DNA, 25 bp, SARS Virus
gattattgtggtcacgatatggatg

SEQ ID NO: 93695 - DNA, 25 bp, SARS Virus
attattgtggtaccgatatggatga

SEQ ID NO: 93696 - DNA, 25 bp, SARS Virus
ttattgtggtaacgatatggatgat

SEQ ID NO: 93697 - DNA, 25 bp, SARS Virus
tattgtggtaaccatatggatgatt

SEQ ID NO: 93698 - DNA, 25 bp, SARS Virus
attgtggtaacgctatggatgattg

SEQ ID NO: 93699 - DNA, 25 bp, SARS Virus
ttgtggtaacgacatggatgattga

SEQ ID NO: 93700 - DNA, 25 bp, SARS Virus
tgtggtaacgatctggatgattgaa

SEQ ID NO: 93701 - DNA, 25 bp, SARS Virus
gtggtaacgatacggatgattgaaa

SEQ ID NO: 93702 - DNA, 25 bp, SARS Virus
tggtaacgatatcgatgattgaaaa

SEQ ID NO: 93703 - DNA, 25 bp, SARS Virus
ggtaacgatatgcatgattgaaaag

SEQ ID NO: 93704 - DNA, 25 bp, SARS Virus
gtaacgatatggctgattgaaaagt

SEQ ID NO: 93705 - DNA, 25 bp, SARS Virus
taacgatatggacgattgaaaagtt

SEQ ID NO: 93706 - DNA, 25 bp, SARS Virus
aacgatatggatcattgaaaagtta

SEQ ID NO: 93707 - DNA, 25 bp, SARS Virus
acgatatggatgcttgaaaagttaa

SEQ ID NO: 93708 - DNA, 25 bp, SARS Virus
cgatatggatgactgaaaagttaat

SEQ ID NO: 93709 - DNA, 25 bp, SARS Virus
gatatggatgatcgaaaagttaatc

SEQ ID NO: 93710 - DNA, 25 bp, SARS Virus
atatggatgattcaaaagttaatcg

SEQ ID NO: 93711 - DNA, 25 bp, SARS Virus
tatggatgattgcaaagttaatcgt

SEQ ID NO: 93712 - DNA, 25 bp, SARS Virus
atggatgattgacaagttaatcgta

SEQ ID NO: 93713 - DNA, 25 bp, SARS Virus
tggatgattgaacagttaatcgtaa

SEQ ID NO: 93714 - DNA, 25 bp, SARS Virus
ggatgattgaaacgttaatcgtaat

SEQ ID NO: 93715 - DNA, 25 bp, SARS Virus
gatgattgaaaacttaatcgtaatg

SEQ ID NO: 93716 - DNA, 25 bp, SARS Virus
atgattgaaaagctaatcgtaatga

SEQ ID NO: 93717 - DNA, 25 bp, SARS Virus
tgattgaaaagtcaatcgtaatgat

SEQ ID NO: 93718 - DNA, 25 bp, SARS Virus
gattgaaaagttcatcgtaatgatg

SEQ ID NO: 93719 - DNA, 25 bp, SARS Virus
attgaaaagttactcgtaatgatgt

SEQ ID NO: 93720 - DNA, 25 bp, SARS Virus
ttgaaaagttaaccgtaatgatgtc

SEQ ID NO: 93721 - DNA, 25 bp, SARS Virus
tgaaaagttaatcgtaatgatgtct

SEQ ID NO: 93722 - DNA, 25 bp, SARS Virus
gaaaagttaatcctaatgatgtctt

SEQ ID NO: 93723 - DNA, 25 bp, SARS Virus
aaaagttaatcgcaatgatgtcttc

SEQ ID NO: 93724 - DNA, 25 bp, SARS Virus
aaagttaatcgtcatgatgtcttca

SEQ ID NO: 93725 - DNA, 25 bp, SARS Virus
aagttaatcgtactgatgtcttcat

SEQ ID NO: 93726 - DNA, 25 bp, SARS Virus
agttaatcgtaacgatgtcttcatt

SEQ ID NO: 93727 - DNA, 25 bp, SARS Virus
gttaatcgtaatcatgtcttcatta

SEQ ID NO: 93728 - DNA, 25 bp, SARS Virus
ttaatcgtaatgctgtcttcattac

SEQ ID NO: 93729 - DNA, 25 bp, SARS Virus
taatcgtaatgacgtcttcattacg

SEQ ID NO: 93730 - DNA, 25 bp, SARS Virus
aatcgtaatgatctcttcattacgg

SEQ ID NO: 93731 - DNA, 25 bp, SARS Virus
atcgtaatgatgccttcattacgga

SEQ ID NO: 93732 - DNA, 25 bp, SARS Virus
tcgtaatgatgtcttcattacggac

SEQ ID NO: 93733 - DNA, 25 bp, SARS Virus
cgtaatgatgtcctcattacggaca

SEQ ID NO: 93734 - DNA, 25 bp, SARS Virus
gtaatgatgtctccattacggacaa

SEQ ID NO: 93735 - DNA, 25 bp, SARS Virus
taatgatgtcttcattacggacaaa

SEQ ID NO: 93736 - DNA, 25 bp, SARS Virus
aatgatgtcttccttacggacaaag

SEQ ID NO: 93737 - DNA, 25 bp, SARS Virus
atgatgtcttcactacggacaaaga

SEQ ID NO: 93738 - DNA, 25 bp, SARS Virus
tgatgtcttcatcacggacaaagat

SEQ ID NO: 93739 - DNA, 25 bp, SARS Virus
gatgtcttcattccggacaaagata

SEQ ID NO: 93740 - DNA, 25 bp, SARS Virus
atgtcttcattacggacaaagatac

SEQ ID NO: 93741 - DNA, 25 bp, SARS Virus
tgtcttcattaccgacaaagatacc

SEQ ID NO: 93742 - DNA, 25 bp, SARS Virus
gtcttcattacgcacaaagataccg

SEQ ID NO: 93743 - DNA, 25 bp, SARS Virus
tcttcattacggccaaagataccga

SEQ ID NO: 93744 - DNA, 25 bp, SARS Virus
cttcattacggacaaagataccgat

SEQ ID NO: 93745 - DNA, 25 bp, SARS Virus
ttcattacggaccaagataccgatt

SEQ ID NO: 93746 - DNA, 25 bp, SARS Virus
tcattacggacacagataccgattt

SEQ ID NO: 93747 - DNA, 25 bp, SARS Virus
cattacggacaacgataccgatttt

SEQ ID NO: 93748 - DNA, 25 bp, SARS Virus
attacggacaaacataccgattttg

SEQ ID NO: 93749 - DNA, 25 bp, SARS Virus
ttacggacaaagctaccgattttgg

SEQ ID NO: 93750 - DNA, 25 bp, SARS Virus
tacggacaaagacaccgattttgga

SEQ ID NO: 93751 - DNA, 25 bp, SARS Virus
acggacaaagatcccgattttggag

SEQ ID NO: 93752 - DNA, 25 bp, SARS Virus
cggacaaagataccgattttggagg

SEQ ID NO: 93753 - DNA, 25 bp, SARS Virus
ggacaaagataccgattttggaggc

SEQ ID NO: 93754 - DNA, 25 bp, SARS Virus
gacaaagatacccattttggaggca

SEQ ID NO: 93755 - DNA, 25 bp, SARS Virus
acaaagataccgcttttggaggcat

SEQ ID NO: 93756 - DNA, 25 bp, SARS Virus
caaagataccgactttggaggcatc

SEQ ID NO: 93757 - DNA, 25 bp, SARS Virus
aaagataccgatcttggaggcatct

SEQ ID NO: 93758 - DNA, 25 bp, SARS Virus
aagataccgattctggaggcatcta

SEQ ID NO: 93759 - DNA, 25 bp, SARS Virus
agataccgatttcggaggcatctaa

SEQ ID NO: 93760 - DNA, 25 bp, SARS Virus
gataccgattttcgaggcatctaac

SEQ ID NO: 93761 - DNA, 25 bp, SARS Virus
ataccgattttgcaggcatctaaca

SEQ ID NO: 93762 - DNA, 25 bp, SARS Virus
taccgattttggcggcatctaacat

SEQ ID NO: 93763 - DNA, 25 bp, SARS Virus
accgattttggacgcatctaacatt

SEQ ID NO: 93764 - DNA, 25 bp, SARS Virus
ccgattttggagccatctaacatta

SEQ ID NO: 93765 - DNA, 25 bp, SARS Virus
cgattttggaggcatctaacattat

SEQ ID NO: 93766 - DNA, 25 bp, SARS Virus
gattttggaggcctctaacattata

SEQ ID NO: 93767 - DNA, 25 bp, SARS Virus
attttggaggcacctaacattatac

SEQ ID NO: 93768 - DNA, 25 bp, SARS Virus
ttttggaggcatctaacattataca

SEQ ID NO: 93769 - DNA, 25 bp, SARS Virus
tttggaggcatccaacattatacat

SEQ ID NO: 93770 - DNA, 25 bp, SARS Virus
ttggaggcatctcacattatacatg

SEQ ID NO: 93771 - DNA, 25 bp, SARS Virus
tggaggcatctaccattatacatgt

SEQ ID NO: 93772 - DNA, 25 bp, SARS Virus
ggaggcatctaacattatacatgta

SEQ ID NO: 93773 - DNA, 25 bp, SARS Virus
gaggcatctaaccttatacatgtag

SEQ ID NO: 93774 - DNA, 25 bp, SARS Virus
aggcatctaacactatacatgtaga

SEQ ID NO: 93775 - DNA, 25 bp, SARS Virus
ggcatctaacatcatacatgtagac

SEQ ID NO: 93776 - DNA, 25 bp, SARS Virus
gcatctaacattctacatgtagacg

SEQ ID NO: 93777 - DNA, 25 bp, SARS Virus
catctaacattacacatgtagacgc

SEQ ID NO: 93778 - DNA, 25 bp, SARS Virus
atctaacattatccatgtagacgcc

SEQ ID NO: 93779 - DNA, 25 bp, SARS Virus
tctaacattatacatgtagacgcct

SEQ ID NO: 93780 - DNA, 25 bp, SARS Virus
ctaacattatacctgtagacgcctc

SEQ ID NO: 93781 - DNA, 25 bp, SARS Virus
taacattatacacgtagacgcctct

SEQ ID NO: 93782 - DNA, 25 bp, SARS Virus
aacattatacatctagacgcctcta

SEQ ID NO: 93783 - DNA, 25 bp, SARS Virus
acattatacatgcagacgcctctaa

SEQ ID NO: 93784 - DNA, 25 bp, SARS Virus
cattatacatgtcgacgcctctaag

SEQ ID NO: 93785 - DNA, 25 bp, SARS Virus
attatacatgtacacgcctctaaga

SEQ ID NO: 93786 - DNA, 25 bp, SARS Virus
ttatacatgtagccgcctctaagat

SEQ ID NO: 93787 - DNA, 25 bp, SARS Virus
tatacatgtagacgcctctaagatg

SEQ ID NO: 93788 - DNA, 25 bp, SARS Virus
atacatgtagacccctctaagatga

SEQ ID NO: 93789 - DNA, 25 bp, SARS Virus
tacatgtagacgcctctaagatgac

SEQ ID NO: 93790 - DNA, 25 bp, SARS Virus
acatgtagacgcctctaagatgact

SEQ ID NO: 93791 - DNA, 25 bp, SARS Virus
catgtagacgcccctaagatgactt

SEQ ID NO: 93792 - DNA, 25 bp, SARS Virus
atgtagacgcctctaagatgactta

SEQ ID NO: 93793 - DNA, 25 bp, SARS Virus
tgtagacgcctccaagatgacttac

SEQ ID NO: 93794 - DNA, 25 bp, SARS Virus
gtagacgcctctcagatgacttaca

SEQ ID NO: 93795 - DNA, 25 bp, SARS Virus
tagacgcctctacgatgacttacac

SEQ ID NO: 93796 - DNA, 25 bp, SARS Virus
agacgcctctaacatgacttacacg

SEQ ID NO: 93797 - DNA, 25 bp, SARS Virus
gacgcctctaagctgacttacacga

SEQ ID NO: 93798 - DNA, 25 bp, SARS Virus
acgcctctaagacgacttacacgat

SEQ ID NO: 93799 - DNA, 25 bp, SARS Virus
cgcctctaagatcacttacacgatt

SEQ ID NO: 93800 - DNA, 25 bp, SARS Virus
gcctctaagatgccttacacgatta

SEQ ID NO: 93801 - DNA, 25 bp, SARS Virus
cctctaagatgacttacacgattaa

SEQ ID NO: 93802 - DNA, 25 bp, SARS Virus
ctctaagatgacctacacgattaaa

SEQ ID NO: 93803 - DNA, 25 bp, SARS Virus
tctaagatgactcacacgattaaac

SEQ ID NO: 93804 - DNA, 25 bp, SARS Virus
ctaagatgacttccacgattaaacg

SEQ ID NO: 93805 - DNA, 25 bp, SARS Virus
taagatgacttacacgattaaacga

SEQ ID NO: 93806 - DNA, 25 bp, SARS Virus
aagatgacttacccgattaaacgaa

SEQ ID NO: 93807 - DNA, 25 bp, SARS Virus
agatgacttacacgattaaacgaag

SEQ ID NO: 93808 - DNA, 25 bp, SARS Virus
gatgacttacaccattaaacgaaga

SEQ ID NO: 93809 - DNA, 25 bp, SARS Virus
atgacttacacgcttaaacgaagag

SEQ ID NO: 93810 - DNA, 25 bp, SARS Virus
tgacttacacgactaaacgaagagg

SEQ ID NO: 93811 - DNA, 25 bp, SARS Virus
gacttacacgatcaaacgaagaggt

SEQ ID NO: 93812 - DNA, 25 bp, SARS Virus
acttacacgattcaacgaagaggtt

SEQ ID NO: 93813 - DNA, 25 bp, SARS Virus
cttacacgattacacgaagaggtta

SEQ ID NO: 93814 - DNA, 25 bp, SARS Virus
ttacacgattaaccgaagaggttat

SEQ ID NO: 93815 - DNA, 25 bp, SARS Virus
tacacgattaaacgaagaggttata

SEQ ID NO: 93816 - DNA, 25 bp, SARS Virus
acacgattaaaccaagaggttatac

SEQ ID NO: 93817 - DNA, 25 bp, SARS Virus
cacgattaaacgcagaggttatacc

SEQ ID NO: 93818 - DNA, 25 bp, SARS Virus
acgattaaacgacgaggttatacca

SEQ ID NO: 93819 - DNA, 25 bp, SARS Virus
cgattaaacgaacaggttataccat

SEQ ID NO: 93820 - DNA, 25 bp, SARS Virus
gattaaacgaagcggttataccatc

SEQ ID NO: 93821 - DNA, 25 bp, SARS Virus
attaaacgaagacgttataccatcg

SEQ ID NO: 93822 - DNA, 25 bp, SARS Virus
ttaaacgaagagcttataccatcga

SEQ ID NO: 93823 - DNA, 25 bp, SARS Virus
taaacgaagaggctataccatcgaa

SEQ ID NO: 93824 - DNA, 25 bp, SARS Virus
aaacgaagaggtcataccatcgaaa

SEQ ID NO: 93825 - DNA, 25 bp, SARS Virus
atctgtaaagtggaacgcgaaaacc

SEQ ID NO: 93826 - DNA, 25 bp, SARS Virus
tctgtaaagtgggacgcgaaaaccc

SEQ ID NO: 93827 - DNA, 25 bp, SARS Virus
ctgtaaagtggagcgcgaaaacccc

SEQ ID NO: 93828 - DNA, 25 bp, SARS Virus
tgtaaagtggaaggcgaaaaccccc

SEQ ID NO: 93829 - DNA, 25 bp, SARS Virus
gtaaagtggaacgcgaaaaccccca

SEQ ID NO: 93830 - DNA, 25 bp, SARS Virus
taaagtggaacgggaaaacccccac

SEQ ID NO: 93831 - DNA, 25 bp, SARS Virus
aaagtggaacgcgaaaacccccaca

SEQ ID NO: 93832 - DNA, 25 bp, SARS Virus
aagtggaacgcggaaacccccacat

SEQ ID NO: 93833 - DNA, 25 bp, SARS Virus
agtggaacgcgagaacccccacatt

SEQ ID NO: 93834 - DNA, 25 bp, SARS Virus
gtggaacgcgaagacccccacattc

SEQ ID NO: 93835 - DNA, 25 bp, SARS Virus
tggaacgcgaaagcccccacattca

SEQ ID NO: 93836 - DNA, 25 bp, SARS Virus
ggaacgcgaaaagccccacattcac

SEQ ID NO: 93837 - DNA, 25 bp, SARS Virus
gaacgcgaaaacgcccacattcaca

SEQ ID NO: 93838 - DNA, 25 bp, SARS Virus
aacgcgaaaaccgccacattcacat

SEQ ID NO: 93839 - DNA, 25 bp, SARS Virus
acgcgaaaacccgcacattcacatt

SEQ ID NO: 93840 - DNA, 25 bp, SARS Virus
cgcgaaaaccccgacattcacatta

SEQ ID NO: 93841 - DNA, 25 bp, SARS Virus
gcgaaaacccccgcattcacattaa

SEQ ID NO: 93842 - DNA, 25 bp, SARS Virus
cgaaaacccccagattcacattaat

SEQ ID NO: 93843 - DNA, 25 bp, SARS Virus
gaaaacccccacgttcacattaatg

SEQ ID NO: 93844 - DNA, 25 bp, SARS Virus
aaaacccccacagtcacattaatgt

SEQ ID NO: 93845 - DNA, 25 bp, SARS Virus
aaacccccacatgcacattaatgtg

SEQ ID NO: 93846 - DNA, 25 bp, SARS Virus
aacccccacattgacattaatgtgg

SEQ ID NO: 93847 - DNA, 25 bp, SARS Virus
acccccacattcgcattaatgtgga

SEQ ID NO: 93848 - DNA, 25 bp, SARS Virus
cccccacattcagattaatgtggac

SEQ ID NO: 93849 - DNA, 25 bp, SARS Virus
ccccacattcacgttaatgtggacc

SEQ ID NO: 93850 - DNA, 25 bp, SARS Virus
cccacattcacagtaatgtggacct

SEQ ID NO: 93851 - DNA, 25 bp, SARS Virus
ccacattcacatgaatgtggacctt

SEQ ID NO: 93852 - DNA, 25 bp, SARS Virus
cacattcacattgatgtggaccttg

SEQ ID NO: 93853 - DNA, 25 bp, SARS Virus
acattcacattagtgtggaccttgt

SEQ ID NO: 93854 - DNA, 25 bp, SARS Virus
cattcacattaaggtggaccttgtt

SEQ ID NO: 93855 - DNA, 25 bp, SARS Virus
attcacattaatgtggaccttgttt

SEQ ID NO: 93856 - DNA, 25 bp, SARS Virus
ttcacattaatggggaccttgttta

SEQ ID NO: 93857 - DNA, 25 bp, SARS Virus
tcacattaatgtggaccttgtttac

SEQ ID NO: 93858 - DNA, 25 bp, SARS Virus
cacattaatgtggaccttgtttacg

SEQ ID NO: 93859 - DNA, 25 bp, SARS Virus
acattaatgtgggccttgtttacga

SEQ ID NO: 93860 - DNA, 25 bp, SARS Virus
cattaatgtggagcttgtttacgaa

SEQ ID NO: 93861 - DNA, 25 bp, SARS Virus
attaatgtggacgttgtttacgaag

SEQ ID NO: 93862 - DNA, 25 bp, SARS Virus
ttaatgtggaccgtgtttacgaagt

SEQ ID NO: 93863 - DNA, 25 bp, SARS Virus
taatgtggacctggtttacgaagta

SEQ ID NO: 93864 - DNA, 25 bp, SARS Virus
aatgtggaccttgtttacgaagtag

SEQ ID NO: 93865 - DNA, 25 bp, SARS Virus
atgtggaccttggttacgaagtaga

SEQ ID NO: 93866 - DNA, 25 bp, SARS Virus
tgtggaccttgtgtacgaagtagac

SEQ ID NO: 93867 - DNA, 25 bp, SARS Virus
gtggaccttgttgacgaagtagact

SEQ ID NO: 93868 - DNA, 25 bp, SARS Virus
tggaccttgtttgcgaagtagactt

SEQ ID NO: 93869 - DNA, 25 bp, SARS Virus
ggaccttgtttaggaagtagacttc

SEQ ID NO: 93870 - DNA, 25 bp, SARS Virus
gaccttgtttacgaagtagacttca

SEQ ID NO: 93871 - DNA, 25 bp, SARS Virus
accttgtttacggagtagacttcaa

SEQ ID NO: 93872 - DNA, 25 bp, SARS Virus
ccttgtttacgaggtagacttcaac

SEQ ID NO: 93873 - DNA, 25 bp, SARS Virus
cttgtttacgaagtagacttcaacg

SEQ ID NO: 93874 - DNA, 25 bp, SARS Virus
ttgtttacgaaggagacttcaacga

SEQ ID NO: 93875 - DNA, 25 bp, SARS Virus
tgtttacgaagtggacttcaacgac

SEQ ID NO: 93876 - DNA, 25 bp, SARS Virus
gtttacgaagtagacttcaacgaca

SEQ ID NO: 93877 - DNA, 25 bp, SARS Virus
tttacgaagtaggcttcaacgacaa

SEQ ID NO: 93878 - DNA, 25 bp, SARS Virus
ttacgaagtagagttcaacgacaag

SEQ ID NO: 93879 - DNA, 25 bp, SARS Virus
tacgaagtagacgtcaacgacaaga

SEQ ID NO: 93880 - DNA, 25 bp, SARS Virus
acgaagtagactgcaacgacaagat

SEQ ID NO: 93881 - DNA, 25 bp, SARS Virus
cgaagtagacttgaacgacaagata

SEQ ID NO: 93882 - DNA, 25 bp, SARS Virus
gaagtagacttcgacgacaagatat

SEQ ID NO: 93883 - DNA, 25 bp, SARS Virus
aagtagacttcagcgacaagatata

SEQ ID NO: 93884 - DNA, 25 bp, SARS Virus
agtagacttcaaggacaagatatag

SEQ ID NO: 93885 - DNA, 25 bp, SARS Virus
gtagacttcaacgacaagatatagt

SEQ ID NO: 93886 - DNA, 25 bp, SARS Virus
tagacttcaacggcaagatatagtt

SEQ ID NO: 93887 - DNA, 25 bp, SARS Virus
agacttcaacgagaagatatagttc

SEQ ID NO: 93888 - DNA, 25 bp, SARS Virus
gacttcaacgacgagatatagttct

SEQ ID NO: 93889 - DNA, 25 bp, SARS Virus
acttcaacgacaggatatagttcta

SEQ ID NO: 93890 - DNA, 25 bp, SARS Virus
cttcaacgacaagatatagttctac

SEQ ID NO: 93891 - DNA, 25 bp, SARS Virus
ttcaacgacaaggtatagttctaca

SEQ ID NO: 93892 - DNA, 25 bp, SARS Virus
tcaacgacaagagatagttctacaa

SEQ ID NO: 93893 - DNA, 25 bp, SARS Virus
caacgacaagatgtagttctacaat

SEQ ID NO: 93894 - DNA, 25 bp, SARS Virus
aacgacaagatagagttctacaatt

SEQ ID NO: 93895 - DNA, 25 bp, SARS Virus
acgacaagatatggttctacaattg

SEQ ID NO: 93896 - DNA, 25 bp, SARS Virus
cgacaagatatagttctacaattga

SEQ ID NO: 93897 - DNA, 25 bp, SARS Virus
gacaagatataggtctacaattgac

SEQ ID NO: 93898 - DNA, 25 bp, SARS Virus
acaagatatagtgctacaattgacg

SEQ ID NO: 93899 - DNA, 25 bp, SARS Virus
caagatatagttgtacaattgacgt

SEQ ID NO: 93900 - DNA, 25 bp, SARS Virus
aagatatagttcgacaattgacgtg

SEQ ID NO: 93901 - DNA, 25 bp, SARS Virus
agatatagttctgcaattgacgtga

SEQ ID NO: 93902 - DNA, 25 bp, SARS Virus
gatatagttctagaattgacgtgac

SEQ ID NO: 93903 - DNA, 25 bp, SARS Virus
atatagttctacgattgacgtgact

SEQ ID NO: 93904 - DNA, 25 bp, SARS Virus
tatagttctacagttgacgtgacta

SEQ ID NO: 93905 - DNA, 25 bp, SARS Virus
atagttctacaagtgacgtgactac

SEQ ID NO: 93906 - DNA, 25 bp, SARS Virus
tagttctacaatggacgtgactaca

SEQ ID NO: 93907 - DNA, 25 bp, SARS Virus
agttctacaattgacgtgactacaa

SEQ ID NO: 93908 - DNA, 25 bp, SARS Virus
gttctacaattggcgtgactacaaa

SEQ ID NO: 93909 - DNA, 25 bp, SARS Virus
ttctacaattgaggtgactacaaag

SEQ ID NO: 93910 - DNA, 25 bp, SARS Virus
tctacaattgacgtgactacaaaga

SEQ ID NO: 93911 - DNA, 25 bp, SARS Virus
ctacaattgacgggactacaaagat

SEQ ID NO: 93912 - DNA, 25 bp, SARS Virus
tacaattgacgtgactacaaagatg

SEQ ID NO: 93913 - DNA, 25 bp, SARS Virus
acaattgacgtggctacaaagatgt

SEQ ID NO: 93914 - DNA, 25 bp, SARS Virus
caattgacgtgagtacaaagatgtc

SEQ ID NO: 93915 - DNA, 25 bp, SARS Virus
aattgacgtgacgacaaagatgtcg

SEQ ID NO: 93916 - DNA, 25 bp, SARS Virus
attgacgtgactgcaaagatgtcgt

SEQ ID NO: 93917 - DNA, 25 bp, SARS Virus
ttgacgtgactagaaagatgtcgtt

SEQ ID NO: 93918 - DNA, 25 bp, SARS Virus
tgacgtgactacgaagatgtcgtta

SEQ ID NO: 93919 - DNA, 25 bp, SARS Virus
gacgtgactacagagatgtcgttaa

SEQ ID NO: 93920 - DNA, 25 bp, SARS Virus
acgtgactacaaggatgtcgttaag

SEQ ID NO: 93921 - DNA, 25 bp, SARS Virus
cgtgactacaaagatgtcgttaagt

SEQ ID NO: 93922 - DNA, 25 bp, SARS Virus
gtgactacaaaggtgtcgttaagta

SEQ ID NO: 93923 - DNA, 25 bp, SARS Virus
tgactacaaagaggtcgttaagtac

SEQ ID NO: 93924 - DNA, 25 bp, SARS Virus
gactacaaagatgtcgttaagtacg

SEQ ID NO: 93925 - DNA, 25 bp, SARS Virus
actacaaagatggcgttaagtacgt

SEQ ID NO: 93926 - DNA, 25 bp, SARS Virus
ctacaaagatgtggttaagtacgtc

SEQ ID NO: 93927 - DNA, 25 bp, SARS Virus
tacaaagatgtcgttaagtacgtct

SEQ ID NO: 93928 - DNA, 25 bp, SARS Virus
acaaagatgtcggtaagtacgtcta

SEQ ID NO: 93929 - DNA, 25 bp, SARS Virus
caaagatgtcgtgaagtacgtctag

SEQ ID NO: 93930 - DNA, 25 bp, SARS Virus
aaagatgtcgttgagtacgtctagt

SEQ ID NO: 93931 - DNA, 25 bp, SARS Virus
aagatgtcgttaggtacgtctagtt

SEQ ID NO: 93932 - DNA, 25 bp, SARS Virus
agatgtcgttaagtacgtctagttg

SEQ ID NO: 93933 - DNA, 25 bp, SARS Virus
gatgtcgttaaggacgtctagttga

SEQ ID NO: 93934 - DNA, 25 bp, SARS Virus
atgtcgttaagtgcgtctagttgag

SEQ ID NO: 93935 - DNA, 25 bp, SARS Virus
tgtcgttaagtaggtctagttgagt

SEQ ID NO: 93936 - DNA, 25 bp, SARS Virus
gtcgttaagtacgtctagttgagtg

SEQ ID NO: 93937 - DNA, 25 bp, SARS Virus
tcgttaagtacggctagttgagtgt

SEQ ID NO: 93938 - DNA, 25 bp, SARS Virus
cgttaagtacgtgtagttgagtgtg

SEQ ID NO: 93939 - DNA, 25 bp, SARS Virus
gttaagtacgtcgagttgagtgtgg

SEQ ID NO: 93940 - DNA, 25 bp, SARS Virus
ttaagtacgtctggttgagtgtggt

SEQ ID NO: 93941 - DNA, 25 bp, SARS Virus
taagtacgtctagttgagtgtggtc

SEQ ID NO: 93942 - DNA, 25 bp, SARS Virus
aagtacgtctaggtgagtgtggtcg

SEQ ID NO: 93943 - DNA, 25 bp, SARS Virus
agtacgtctagtggagtgtggtcga

SEQ ID NO: 93944 - DNA, 25 bp, SARS Virus
gtacgtctagttgagtgtggtcgaa

SEQ ID NO: 93945 - DNA, 25 bp, SARS Virus
tacgtctagttgggtgtggtcgaac

SEQ ID NO: 93946 - DNA, 25 bp, SARS Virus
acgtctagttgagtgtggtcgaacc

SEQ ID NO: 93947 - DNA, 25 bp, SARS Virus
cgtctagttgagggtggtcgaaccg

SEQ ID NO: 93948 - DNA, 25 bp, SARS Virus
gtctagttgagtgtggtcgaaccgc

SEQ ID NO: 93949 - DNA, 25 bp, SARS Virus
tctagttgagtggggtcgaaccgcg

SEQ ID NO: 93950 - DNA, 25 bp, SARS Virus
ctagttgagtgtggtcgaaccgcgt

SEQ ID NO: 93951 - DNA, 25 bp, SARS Virus
tagttgagtgtggtcgaaccgcgta

SEQ ID NO: 93952 - DNA, 25 bp, SARS Virus
agttgagtgtgggcgaaccgcgtat

SEQ ID NO: 93953 - DNA, 25 bp, SARS Virus
gttgagtgtggtggaaccgcgtata

SEQ ID NO: 93954 - DNA, 25 bp, SARS Virus
ttgagtgtggtcgaaccgcgtatat

SEQ ID NO: 93955 - DNA, 25 bp, SARS Virus
tgagtgtggtcggaccgcgtatata

SEQ ID NO: 93956 - DNA, 25 bp, SARS Virus
gagtgtggtcgagccgcgtatataa

SEQ ID NO: 93957 - DNA, 25 bp, SARS Virus
agtgtggtcgaagcgcgtatataag

SEQ ID NO: 93958 - DNA, 25 bp, SARS Virus
gtgtggtcgaacggcgtatataaga

SEQ ID NO: 93959 - DNA, 25 bp, SARS Virus
tgtggtcgaaccgcgtatataagat

SEQ ID NO: 93960 - DNA, 25 bp, SARS Virus
gtggtcgaaccgggtatataagatg

SEQ ID NO: 93961 - DNA, 25 bp, SARS Virus
tggtcgaaccgcgtatataagatga

SEQ ID NO: 93962 - DNA, 25 bp, SARS Virus
ggtcgaaccgcggatataagatgac

SEQ ID NO: 93963 - DNA, 25 bp, SARS Virus
gtcgaaccgcgtgtataagatgacc

SEQ ID NO: 93964 - DNA, 25 bp, SARS Virus
tcgaaccgcgtagataagatgacct

SEQ ID NO: 93965 - DNA, 25 bp, SARS Virus
cgaaccgcgtatgtaagatgacctt

SEQ ID NO: 93966 - DNA, 25 bp, SARS Virus
gaaccgcgtatagaagatgaccttt

SEQ ID NO: 93967 - DNA, 25 bp, SARS Virus
aaccgcgtatatgagatgacctttg

SEQ ID NO: 93968 - DNA, 25 bp, SARS Virus
accgcgtatataggatgacctttgt

SEQ ID NO: 93969 - DNA, 25 bp, SARS Virus
ccgcgtatataagatgacctttgtt

SEQ ID NO: 93970 - DNA, 25 bp, SARS Virus
cgcgtatataaggtgacctttgtta

SEQ ID NO: 93971 - DNA, 25 bp, SARS Virus
gcgtatataagaggacctttgttac

SEQ ID NO: 93972 - DNA, 25 bp, SARS Virus
cgtatataagatgacctttgttaca

SEQ ID NO: 93973 - DNA, 25 bp, SARS Virus
gtatataagatggcctttgttacat

SEQ ID NO: 93974 - DNA, 25 bp, SARS Virus
tatataagatgagctttgttacata

SEQ ID NO: 93975 - DNA, 25 bp, SARS Virus
atataagatgacgtttgttacataa

SEQ ID NO: 93976 - DNA, 25 bp, SARS Virus
tataagatgaccgttgttacataag

SEQ ID NO: 93977 - DNA, 25 bp, SARS Virus
ataagatgacctgtgttacataagg

SEQ ID NO: 93978 - DNA, 25 bp, SARS Virus
taagatgaccttggttacataaggt

SEQ ID NO: 93979 - DNA, 25 bp, SARS Virus
aagatgacctttgttacataaggtc

SEQ ID NO: 93980 - DNA, 25 bp, SARS Virus
agatgacctttggtacataaggtct

SEQ ID NO: 93981 - DNA, 25 bp, SARS Virus
gatgacctttgtgacataaggtctg

SEQ ID NO: 93982 - DNA, 25 bp, SARS Virus
atgacctttgttgcataaggtctga

SEQ ID NO: 93983 - DNA, 25 bp, SARS Virus
tgacctttgttagataaggtctgag

SEQ ID NO: 93984 - DNA, 25 bp, SARS Virus
gacctttgttacgtaaggtctgagt

SEQ ID NO: 93985 - DNA, 25 bp, SARS Virus
acctttgttacagaaggtctgagtt

SEQ ID NO: 93986 - DNA, 25 bp, SARS Virus
cctttgttacatgaggtctgagttc

SEQ ID NO: 93987 - DNA, 25 bp, SARS Virus
ctttgttacatagggtctgagttcg

SEQ ID NO: 93988 - DNA, 25 bp, SARS Virus
tttgttacataaggtctgagttcgt

SEQ ID NO: 93989 - DNA, 25 bp, SARS Virus
ttgttacataaggtctgagttcgtc

SEQ ID NO: 93990 - DNA, 25 bp, SARS Virus
tgttacataagggctgagttcgtcc

SEQ ID NO: 93991 - DNA, 25 bp, SARS Virus
gttacataaggtgtgagttcgtccg

SEQ ID NO: 93992 - DNA, 25 bp, SARS Virus
ttacataaggtcggagttcgtccga

SEQ ID NO: 93993 - DNA, 25 bp, SARS Virus
tacataaggtctgagttcgtccgac

SEQ ID NO: 93994 - DNA, 25 bp, SARS Virus
acataaggtctgggttcgtccgaca

SEQ ID NO: 93995 - DNA, 25 bp, SARS Virus
cataaggtctgagttcgtccgacag

SEQ ID NO: 93996 - DNA, 25 bp, SARS Virus
ataaggtctgaggtcgtccgacaga

SEQ ID NO: 93997 - DNA, 25 bp, SARS Virus
taaggtctgagtgcgtccgacagaa

SEQ ID NO: 93998 - DNA, 25 bp, SARS Virus
aaggtctgagttggtccgacagaat

SEQ ID NO: 93999 - DNA, 25 bp, SARS Virus
aggtctgagttcgtccgacagaata

SEQ ID NO: 94000 - DNA, 25 bp, SARS Virus
ggtctgagttcggccgacagaatat

SEQ ID NO: 94001 - DNA, 25 bp, SARS Virus
gtctgagttcgtgcgacagaatatc

SEQ ID NO: 94002 - DNA, 25 bp, SARS Virus
tctgagttcgtcggacagaatatcc

SEQ ID NO: 94003 - DNA, 25 bp, SARS Virus
ctgagttcgtccgacagaatatcct

SEQ ID NO: 94004 - DNA, 25 bp, SARS Virus
tgagttcgtccggcagaatatcctc

SEQ ID NO: 94005 - DNA, 25 bp, SARS Virus
gagttcgtccgagagaatatcctcg

SEQ ID NO: 94006 - DNA, 25 bp, SARS Virus
agttcgtccgacggaatatcctcga

SEQ ID NO: 94007 - DNA, 25 bp, SARS Virus
gttcgtccgacagaatatcctcgac

SEQ ID NO: 94008 - DNA, 25 bp, SARS Virus
ttcgtccgacaggatatcctcgact

SEQ ID NO: 94009 - DNA, 25 bp, SARS Virus
tcgtccgacagagtatcctcgactc

SEQ ID NO: 94010 - DNA, 25 bp, SARS Virus
cgtccgacagaagatcctcgactcg

SEQ ID NO: 94011 - DNA, 25 bp, SARS Virus
gtccgacagaatgtcctcgactcgt

SEQ ID NO: 94012 - DNA, 25 bp, SARS Virus
tccgacagaatagcctcgactcgta

SEQ ID NO: 94013 - DNA, 25 bp, SARS Virus
ccgacagaatatgctcgactcgtac

SEQ ID NO: 94014 - DNA, 25 bp, SARS Virus
cgacagaatatcgtcgactcgtaca

SEQ ID NO: 94015 - DNA, 25 bp, SARS Virus
gacagaatatccgcgactcgtacag

SEQ ID NO: 94016 - DNA, 25 bp, SARS Virus
acagaatatcctggactcgtacagc

SEQ ID NO: 94017 - DNA, 25 bp, SARS Virus
cagaatatcctcgactcgtacagct

SEQ ID NO: 94018 - DNA, 25 bp, SARS Virus
agaatatcctcggctcgtacagctg

SEQ ID NO: 94019 - DNA, 25 bp, SARS Virus
gaatatcctcgagtcgtacagctgt

SEQ ID NO: 94020 - DNA, 25 bp, SARS Virus
aatatcctcgacgcgtacagctgtg

SEQ ID NO: 94021 - DNA, 25 bp, SARS Virus
atatcctcgactggtacagctgtga

SEQ ID NO: 94022 - DNA, 25 bp, SARS Virus
tatcctcgactcgtacagctgtgaa

SEQ ID NO: 94023 - DNA, 25 bp, SARS Virus
atcctcgactcggacagctgtgaag

SEQ ID NO: 94024 - DNA, 25 bp, SARS Virus
tcctcgactcgtgcagctgtgaaga

SEQ ID NO: 94025 - DNA, 25 bp, SARS Virus
cctcgactcgtagagctgtgaagaa

SEQ ID NO: 94026 - DNA, 25 bp, SARS Virus
ctcgactcgtacggctgtgaagaat

SEQ ID NO: 94027 - DNA, 25 bp, SARS Virus
tcgactcgtacagctgtgaagaata

SEQ ID NO: 94028 - DNA, 25 bp, SARS Virus
cgactcgtacaggtgtgaagaatac

SEQ ID NO: 94029 - DNA, 25 bp, SARS Virus
gactcgtacagcggtgaagaatact

SEQ ID NO: 94030 - DNA, 25 bp, SARS Virus
actcgtacagctgtgaagaatactc

SEQ ID NO: 94031 - DNA, 25 bp, SARS Virus
ctcgtacagctgggaagaatactca

SEQ ID NO: 94032 - DNA, 25 bp, SARS Virus
tcgtacagctgtgaagaatactcac

SEQ ID NO: 94033 - DNA, 25 bp, SARS Virus
cgtacagctgtggagaatactcacg

SEQ ID NO: 94034 - DNA, 25 bp, SARS Virus
gtacagctgtgaggaatactcacgc

SEQ ID NO: 94035 - DNA, 25 bp, SARS Virus
tacagctgtgaagaatactcacgct

SEQ ID NO: 94036 - DNA, 25 bp, SARS Virus
acagctgtgaaggatactcacgctg

SEQ ID NO: 94037 - DNA, 25 bp, SARS Virus
cagctgtgaagagtactcacgctgt

SEQ ID NO: 94038 - DNA, 25 bp, SARS Virus
agctgtgaagaagactcacgctgta

SEQ ID NO: 94039 - DNA, 25 bp, SARS Virus
gctgtgaagaatgctcacgctgtaa

SEQ ID NO: 94040 - DNA, 25 bp, SARS Virus
ctgtgaagaatagtcacgctgtaag

SEQ ID NO: 94041 - DNA, 25 bp, SARS Virus
tgtgaagaatacgcacgctgtaagg

SEQ ID NO: 94042 - DNA, 25 bp, SARS Virus
gtgaagaatactgacgctgtaagga

SEQ ID NO: 94043 - DNA, 25 bp, SARS Virus
tgaagaatactcgcgctgtaaggat

SEQ ID NO: 94044 - DNA, 25 bp, SARS Virus
gaagaatactcaggctgtaaggata

SEQ ID NO: 94045 - DNA, 25 bp, SARS Virus
aagaatactcacgctgtaaggataa

SEQ ID NO: 94046 - DNA, 25 bp, SARS Virus
agaatactcacggtgtaaggataac

SEQ ID NO: 94047 - DNA, 25 bp, SARS Virus
gaatactcacgcggtaaggataacc

SEQ ID NO: 94048 - DNA, 25 bp, SARS Virus
aatactcacgctgtaaggataacct

SEQ ID NO: 94049 - DNA, 25 bp, SARS Virus
atactcacgctggaaggataacctc

SEQ ID NO: 94050 - DNA, 25 bp, SARS Virus
tactcacgctgtgaggataacctcg

SEQ ID NO: 94051 - DNA, 25 bp, SARS Virus
actcacgctgtagggataacctcga

SEQ ID NO: 94052 - DNA, 25 bp, SARS Virus
ctcacgctgtaaggataacctcgac

SEQ ID NO: 94053 - DNA, 25 bp, SARS Virus
tcacgctgtaaggataacctcgacc

SEQ ID NO: 94054 - DNA, 25 bp, SARS Virus
cacgctgtaagggtaacctcgaccg

SEQ ID NO: 94055 - DNA, 25 bp, SARS Virus
acgctgtaaggagaacctcgaccgt

SEQ ID NO: 94056 - DNA, 25 bp, SARS Virus
cgctgtaaggatgacctcgaccgta

SEQ ID NO: 94057 - DNA, 25 bp, SARS Virus
gctgtaaggatagcctcgaccgtaa

SEQ ID NO: 94058 - DNA, 25 bp, SARS Virus
ctgtaaggataagctcgaccgtaaa

SEQ ID NO: 94059 - DNA, 25 bp, SARS Virus
tgtaaggataacgtcgaccgtaaac

SEQ ID NO: 94060 - DNA, 25 bp, SARS Virus
gtaaggataaccgcgaccgtaaaca

SEQ ID NO: 94061 - DNA, 25 bp, SARS Virus
taaggataacctggaccgtaaacac

SEQ ID NO: 94062 - DNA, 25 bp, SARS Virus
aaggataacctcgaccgtaaacacg

SEQ ID NO: 94063 - DNA, 25 bp, SARS Virus
aggataacctcggccgtaaacacga

SEQ ID NO: 94064 - DNA, 25 bp, SARS Virus
ggataacctcgagcgtaaacacgat

SEQ ID NO: 94065 - DNA, 25 bp, SARS Virus
gataacctcgacggtaaacacgatc

SEQ ID NO: 94066 - DNA, 25 bp, SARS Virus
ataacctcgaccgtaaacacgatca

SEQ ID NO: 94067 - DNA, 25 bp, SARS Virus
taacctcgaccggaaacacgatcaa

SEQ ID NO: 94068 - DNA, 25 bp, SARS Virus
aacctcgaccgtgaacacgatcaat

SEQ ID NO: 94069 - DNA, 25 bp, SARS Virus
acctcgaccgtagacacgatcaatg

SEQ ID NO: 94070 - DNA, 25 bp, SARS Virus
cctcgaccgtaagcacgatcaatgg

SEQ ID NO: 94071 - DNA, 25 bp, SARS Virus
ctcgaccgtaaagacgatcaatggt

SEQ ID NO: 94072 - DNA, 25 bp, SARS Virus
tcgaccgtaaacgcgatcaatggta

SEQ ID NO: 94073 - DNA, 25 bp, SARS Virus
cgaccgtaaacaggatcaatggtat

SEQ ID NO: 94074 - DNA, 25 bp, SARS Virus
gaccgtaaacacgatcaatggtatg

SEQ ID NO: 94075 - DNA, 25 bp, SARS Virus
accgtaaacacggtcaatggtatgt

SEQ ID NO: 94076 - DNA, 25 bp, SARS Virus
ccgtaaacacgagcaatggtatgtc

SEQ ID NO: 94077 - DNA, 25 bp, SARS Virus
cgtaaacacgatgaatggtatgtca

SEQ ID NO: 94078 - DNA, 25 bp, SARS Virus
gtaaacacgatcgatggtatgtcaa

SEQ ID NO: 94079 - DNA, 25 bp, SARS Virus
taaacacgatcagtggtatgtcaaa

SEQ ID NO: 94080 - DNA, 25 bp, SARS Virus
aaacacgatcaagggtatgtcaaag

SEQ ID NO: 94081 - DNA, 25 bp, SARS Virus
aacacgatcaatggtatgtcaaaga

SEQ ID NO: 94082 - DNA, 25 bp, SARS Virus
acacgatcaatggtatgtcaaagaa

SEQ ID NO: 94083 - DNA, 25 bp, SARS Virus
cacgatcaatgggatgtcaaagaaa

SEQ ID NO: 94084 - DNA, 25 bp, SARS Virus
acgatcaatggtgtgtcaaagaaat

SEQ ID NO: 94085 - DNA, 25 bp, SARS Virus
cgatcaatggtaggtcaaagaaata

SEQ ID NO: 94086 - DNA, 25 bp, SARS Virus
gatcaatggtatgtcaaagaaataa

SEQ ID NO: 94087 - DNA, 25 bp, SARS Virus
atcaatggtatggcaaagaaataat

SEQ ID NO: 94088 - DNA, 25 bp, SARS Virus
tcaatggtatgtgaaagaaataatg

SEQ ID NO: 94089 - DNA, 25 bp, SARS Virus
caatggtatgtcgaagaaataatgc

SEQ ID NO: 94090 - DNA, 25 bp, SARS Virus
aatggtatgtcagagaaataatgca

SEQ ID NO: 94091 - DNA, 25 bp, SARS Virus
atggtatgtcaaggaaataatgcat

SEQ ID NO: 94092 - DNA, 25 bp, SARS Virus
tggtatgtcaaagaaataatgcatc

SEQ ID NO: 94093 - DNA, 25 bp, SARS Virus
ggtatgtcaaaggaataatgcatca

SEQ ID NO: 94094 - DNA, 25 bp, SARS Virus
gtatgtcaaagagataatgcatcat

SEQ ID NO: 94095 - DNA, 25 bp, SARS Virus
tatgtcaaagaagtaatgcatcatg

SEQ ID NO: 94096 - DNA, 25 bp, SARS Virus
atgtcaaagaaagaatgcatcatga

SEQ ID NO: 94097 - DNA, 25 bp, SARS Virus
tgtcaaagaaatgatgcatcatgat

SEQ ID NO: 94098 - DNA, 25 bp, SARS Virus
gtcaaagaaatagtgcatcatgatc

SEQ ID NO: 94099 - DNA, 25 bp, SARS Virus
tcaaagaaataaggcatcatgatcg

SEQ ID NO: 94100 - DNA, 25 bp, SARS Virus
caaagaaataatgcatcatgatcgg

SEQ ID NO: 94101 - DNA, 25 bp, SARS Virus
aaagaaataatggatcatgatcggt

SEQ ID NO: 94102 - DNA, 25 bp, SARS Virus
aagaaataatgcgtcatgatcggtt

SEQ ID NO: 94103 - DNA, 25 bp, SARS Virus
agaaataatgcagcatgatcggttt

SEQ ID NO: 94104 - DNA, 25 bp, SARS Virus
gaaataatgcatgatgatcggtttt

SEQ ID NO: 94105 - DNA, 25 bp, SARS Virus
aaataatgcatcgtgatcggttttt

SEQ ID NO: 94106 - DNA, 25 bp, SARS Virus
aataatgcatcaggatcggttttta

SEQ ID NO: 94107 - DNA, 25 bp, SARS Virus
ataatgcatcatgatcggtttttag

SEQ ID NO: 94108 - DNA, 25 bp, SARS Virus
taatgcatcatggtcggtttttaga

SEQ ID NO: 94109 - DNA, 25 bp, SARS Virus
aatgcatcatgagcggtttttagat

SEQ ID NO: 94110 - DNA, 25 bp, SARS Virus
atgcatcatgatgggtttttagata

SEQ ID NO: 94111 - DNA, 25 bp, SARS Virus
tgcatcatgatcggtttttagataa

SEQ ID NO: 94112 - DNA, 25 bp, SARS Virus
gcatcatgatcggtttttagataac

SEQ ID NO: 94113 - DNA, 25 bp, SARS Virus
catcatgatcgggttttagataaca

SEQ ID NO: 94114 - DNA, 25 bp, SARS Virus
atcatgatcggtgtttagataacac

SEQ ID NO: 94115 - DNA, 25 bp, SARS Virus
tcatgatcggttgttagataacacc

SEQ ID NO: 94116 - DNA, 25 bp, SARS Virus
catgatcggtttgtagataacaccg

SEQ ID NO: 94117 - DNA, 25 bp, SARS Virus
atgatcggttttgagataacaccga

SEQ ID NO: 94118 - DNA, 25 bp, SARS Virus
tgatcggtttttggataacaccgaa

SEQ ID NO: 94119 - DNA, 25 bp, SARS Virus
gatcggtttttagataacaccgaat

SEQ ID NO: 94120 - DNA, 25 bp, SARS Virus
atcggtttttaggtaacaccgaata

SEQ ID NO: 94121 - DNA, 25 bp, SARS Virus
tcggtttttagagaacaccgaatat

SEQ ID NO: 94122 - DNA, 25 bp, SARS Virus
cggtttttagatgacaccgaatatg

SEQ ID NO: 94123 - DNA, 25 bp, SARS Virus
ggtttttagatagcaccgaatatga

SEQ ID NO: 94124 - DNA, 25 bp, SARS Virus
gtttttagataagaccgaatatgat

SEQ ID NO: 94125 - DNA, 25 bp, SARS Virus
tttttagataacgccgaatatgata

SEQ ID NO: 94126 - DNA, 25 bp, SARS Virus
ttttagataacagcgaatatgatac

SEQ ID NO: 94127 - DNA, 25 bp, SARS Virus
tttagataacacggaatatgataca

SEQ ID NO: 94128 - DNA, 25 bp, SARS Virus
ttagataacaccgaatatgatacag

SEQ ID NO: 94129 - DNA, 25 bp, SARS Virus
tagataacaccggatatgatacaga

SEQ ID NO: 94130 - DNA, 25 bp, SARS Virus
agataacaccgagtatgatacagaa

SEQ ID NO: 94131 - DNA, 25 bp, SARS Virus
gataacaccgaagatgatacagaaa

SEQ ID NO: 94132 - DNA, 25 bp, SARS Virus
ataacaccgaatgtgatacagaaat

SEQ ID NO: 94133 - DNA, 25 bp, SARS Virus
taacaccgaataggatacagaaatc

SEQ ID NO: 94134 - DNA, 25 bp, SARS Virus
aacaccgaatatgatacagaaatcc

SEQ ID NO: 94135 - DNA, 25 bp, SARS Virus
acaccgaatatggtacagaaatcca

SEQ ID NO: 94136 - DNA, 25 bp, SARS Virus
caccgaatatgagacagaaatccac

SEQ ID NO: 94137 - DNA, 25 bp, SARS Virus
accgaatatgatgcagaaatccacg

SEQ ID NO: 94138 - DNA, 25 bp, SARS Virus
ccgaatatgatagagaaatccacga

SEQ ID NO: 94139 - DNA, 25 bp, SARS Virus
cgaatatgatacggaaatccacgac

SEQ ID NO: 94140 - DNA, 25 bp, SARS Virus
gaatatgatacagaaatccacgact

SEQ ID NO: 94141 - DNA, 25 bp, SARS Virus
aatatgatacaggaatccacgacta

SEQ ID NO: 94142 - DNA, 25 bp, SARS Virus
atatgatacagagatccacgactat

SEQ ID NO: 94143 - DNA, 25 bp, SARS Virus
tatgatacagaagtccacgactatc

SEQ ID NO: 94144 - DNA, 25 bp, SARS Virus
atgatacagaaagccacgactatca

SEQ ID NO: 94145 - DNA, 25 bp, SARS Virus
tgatacagaaatgcacgactatcaa

SEQ ID NO: 94146 - DNA, 25 bp, SARS Virus
gatacagaaatcgacgactatcaag

SEQ ID NO: 94147 - DNA, 25 bp, SARS Virus
atacagaaatccgcgactatcaagt

SEQ ID NO: 94148 - DNA, 25 bp, SARS Virus
tacagaaatccaggactatcaagtt

SEQ ID NO: 94149 - DNA, 25 bp, SARS Virus
acagaaatccacgactatcaagtta

SEQ ID NO: 94150 - DNA, 25 bp, SARS Virus
cagaaatccacggctatcaagttaa

SEQ ID NO: 94151 - DNA, 25 bp, SARS Virus
agaaatccacgagtatcaagttaac

SEQ ID NO: 94152 - DNA, 25 bp, SARS Virus
gaaatccacgacgatcaagttaacg

SEQ ID NO: 94153 - DNA, 25 bp, SARS Virus
aaatccacgactgtcaagttaacga

SEQ ID NO: 94154 - DNA, 25 bp, SARS Virus
aatccacgactagcaagttaacgaa

SEQ ID NO: 94155 - DNA, 25 bp, SARS Virus
atccacgactatgaagttaacgaat

SEQ ID NO: 94156 - DNA, 25 bp, SARS Virus
tccacgactatcgagttaacgaatg

SEQ ID NO: 94157 - DNA, 25 bp, SARS Virus
ccacgactatcaggttaacgaatga

SEQ ID NO: 94158 - DNA, 25 bp, SARS Virus
cacgactatcaagttaacgaatgag

SEQ ID NO: 94159 - DNA, 25 bp, SARS Virus
acgactatcaaggtaacgaatgaga

SEQ ID NO: 94160 - DNA, 25 bp, SARS Virus
cgactatcaagtgaacgaatgagat

SEQ ID NO: 94161 - DNA, 25 bp, SARS Virus
gactatcaagttgacgaatgagatt

SEQ ID NO: 94162 - DNA, 25 bp, SARS Virus
actatcaagttagcgaatgagatta

SEQ ID NO: 94163 - DNA, 25 bp, SARS Virus
ctatcaagttaaggaatgagattat

SEQ ID NO: 94164 - DNA, 25 bp, SARS Virus
tatcaagttaacgaatgagattatt

SEQ ID NO: 94165 - DNA, 25 bp, SARS Virus
atcaagttaacggatgagattattg

SEQ ID NO: 94166 - DNA, 25 bp, SARS Virus
tcaagttaacgagtgagattattgt

SEQ ID NO: 94167 - DNA, 25 bp, SARS Virus
caagttaacgaaggagattattgtg

SEQ ID NO: 94168 - DNA, 25 bp, SARS Virus
aagttaacgaatgagattattgtgg

SEQ ID NO: 94169 - DNA, 25 bp, SARS Virus
agttaacgaatgggattattgtggt

SEQ ID NO: 94170 - DNA, 25 bp, SARS Virus
gttaacgaatgagattattgtggta

SEQ ID NO: 94171 - DNA, 25 bp, SARS Virus
ttaacgaatgaggttattgtggtaa

SEQ ID NO: 94172 - DNA, 25 bp, SARS Virus
taacgaatgagagtattgtggtaac

SEQ ID NO: 94173 - DNA, 25 bp, SARS Virus
aacgaatgagatgattgtggtaacg

SEQ ID NO: 94174 - DNA, 25 bp, SARS Virus
acgaatgagattgttgtggtaacga

SEQ ID NO: 94175 - DNA, 25 bp, SARS Virus
cgaatgagattagtgtggtaacgat

SEQ ID NO: 94176 - DNA, 25 bp, SARS Virus
gaatgagattatggtggtaacgata

SEQ ID NO: 94177 - DNA, 25 bp, SARS Virus
aatgagattattgtggtaacgatat

SEQ ID NO: 94178 - DNA, 25 bp, SARS Virus
atgagattattggggtaacgatatg

SEQ ID NO: 94179 - DNA, 25 bp, SARS Virus
tgagattattgtggtaacgatatgg

SEQ ID NO: 94180 - DNA, 25 bp, SARS Virus
gagattattgtggtaacgatatgga

SEQ ID NO: 94181 - DNA, 25 bp, SARS Virus
agattattgtgggaacgatatggat

SEQ ID NO: 94182 - DNA, 25 bp, SARS Virus
gattattgtggtgacgatatggatg

SEQ ID NO: 94183 - DNA, 25 bp, SARS Virus
attattgtggtagcgatatggatga

SEQ ID NO: 94184 - DNA, 25 bp, SARS Virus
ttattgtggtaaggatatggatgat

SEQ ID NO: 94185 - DNA, 25 bp, SARS Virus
tattgtggtaacgatatggatgatt

SEQ ID NO: 94186 - DNA, 25 bp, SARS Virus
attgtggtaacggtatggatgattg

SEQ ID NO: 94187 - DNA, 25 bp, SARS Virus
ttgtggtaacgagatggatgattga

SEQ ID NO: 94188 - DNA, 25 bp, SARS Virus
tgtggtaacgatgtggatgattgaa

SEQ ID NO: 94189 - DNA, 25 bp, SARS Virus
gtggtaacgatagggatgattgaaa

SEQ ID NO: 94190 - DNA, 25 bp, SARS Virus
tggtaacgatatggatgattgaaaa

SEQ ID NO: 94191 - DNA, 25 bp, SARS Virus
ggtaacgatatggatgattgaaaag

SEQ ID NO: 94192 - DNA, 25 bp, SARS Virus
gtaacgatatgggtgattgaaaagt

SEQ ID NO: 94193 - DNA, 25 bp, SARS Virus
taacgatatggaggattgaaaagtt

SEQ ID NO: 94194 - DNA, 25 bp, SARS Virus
aacgatatggatgattgaaaagtta

SEQ ID NO: 94195 - DNA, 25 bp, SARS Virus
acgatatggatggttgaaaagttaa

SEQ ID NO: 94196 - DNA, 25 bp, SARS Virus
cgatatggatgagtgaaaagttaat

SEQ ID NO: 94197 - DNA, 25 bp, SARS Virus
gatatggatgatggaaaagttaatc

SEQ ID NO: 94198 - DNA, 25 bp, SARS Virus
atatggatgattgaaaagttaatcg

SEQ ID NO: 94199 - DNA, 25 bp, SARS Virus
tatggatgattggaaagttaatcgt

SEQ ID NO: 94200 - DNA, 25 bp, SARS Virus
atggatgattgagaagttaatcgta

SEQ ID NO: 94201 - DNA, 25 bp, SARS Virus
tggatgattgaagagttaatcgtaa

SEQ ID NO: 94202 - DNA, 25 bp, SARS Virus
ggatgattgaaaggttaatcgtaat

SEQ ID NO: 94203 - DNA, 25 bp, SARS Virus
gatgattgaaaagttaatcgtaatg

SEQ ID NO: 94204 - DNA, 25 bp, SARS Virus
atgattgaaaaggtaatcgtaatga

SEQ ID NO: 94205 - DNA, 25 bp, SARS Virus
tgattgaaaagtgaatcgtaatgat

SEQ ID NO: 94206 - DNA, 25 bp, SARS Virus
gattgaaaagttgatcgtaatgatg

SEQ ID NO: 94207 - DNA, 25 bp, SARS Virus
attgaaaagttagtcgtaatgatgt

SEQ ID NO: 94208 - DNA, 25 bp, SARS Virus
ttgaaaagttaagcgtaatgatgtc

SEQ ID NO: 94209 - DNA, 25 bp, SARS Virus
tgaaaagttaatggtaatgatgtct

SEQ ID NO: 94210 - DNA, 25 bp, SARS Virus
gaaaagttaatcgtaatgatgtctt

SEQ ID NO: 94211 - DNA, 25 bp, SARS Virus
aaaagttaatcggaatgatgtcttc

SEQ ID NO: 94212 - DNA, 25 bp, SARS Virus
aaagttaatcgtgatgatgtcttca

SEQ ID NO: 94213 - DNA, 25 bp, SARS Virus
aagttaatcgtagtgatgtcttcat

SEQ ID NO: 94214 - DNA, 25 bp, SARS Virus
agttaatcgtaaggatgtcttcatt

SEQ ID NO: 94215 - DNA, 25 bp, SARS Virus
gttaatcgtaatgatgtcttcatta

SEQ ID NO: 94216 - DNA, 25 bp, SARS Virus
ttaatcgtaatggtgtcttcattac

SEQ ID NO: 94217 - DNA, 25 bp, SARS Virus
taatcgtaatgaggtcttcattacg

SEQ ID NO: 94218 - DNA, 25 bp, SARS Virus
aatcgtaatgatgtcttcattacgg

SEQ ID NO: 94219 - DNA, 25 bp, SARS Virus
atcgtaatgatggcttcattacgga

SEQ ID NO: 94220 - DNA, 25 bp, SARS Virus
tcgtaatgatgtgttcattacggac

SEQ ID NO: 94221 - DNA, 25 bp, SARS Virus
cgtaatgatgtcgtcattacggaca

SEQ ID NO: 94222 - DNA, 25 bp, SARS Virus
gtaatgatgtctgcattacggacaa

SEQ ID NO: 94223 - DNA, 25 bp, SARS Virus
taatgatgtcttgattacggacaaa

SEQ ID NO: 94224 - DNA, 25 bp, SARS Virus
aatgatgtcttcgttacggacaaag

SEQ ID NO: 94225 - DNA, 25 bp, SARS Virus
atgatgtcttcagtacggacaaaga

SEQ ID NO: 94226 - DNA, 25 bp, SARS Virus
tgatgtcttcatgacggacaaagat

SEQ ID NO: 94227 - DNA, 25 bp, SARS Virus
gatgtcttcattgcggacaaagata

SEQ ID NO: 94228 - DNA, 25 bp, SARS Virus
atgtcttcattagggacaaagatac

SEQ ID NO: 94229 - DNA, 25 bp, SARS Virus
tgtcttcattacggacaaagatacc

SEQ ID NO: 94230 - DNA, 25 bp, SARS Virus
gtcttcattacggacaaagataccg

SEQ ID NO: 94231 - DNA, 25 bp, SARS Virus
tcttcattacgggcaaagataccga

SEQ ID NO: 94232 - DNA, 25 bp, SARS Virus
cttcattacggagaaagataccgat

SEQ ID NO: 94233 - DNA, 25 bp, SARS Virus
ttcattacggacgaagataccgatt

SEQ ID NO: 94234 - DNA, 25 bp, SARS Virus
tcattacggacagagataccgattt

SEQ ID NO: 94235 - DNA, 25 bp, SARS Virus
cattacggacaaggataccgatttt

SEQ ID NO: 94236 - DNA, 25 bp, SARS Virus
attacggacaaagataccgattttg

SEQ ID NO: 94237 - DNA, 25 bp, SARS Virus
ttacggacaaaggtaccgattttgg

SEQ ID NO: 94238 - DNA, 25 bp, SARS Virus
tacggacaaagagaccgattttgga

SEQ ID NO: 94239 - DNA, 25 bp, SARS Virus
acggacaaagatgccgattttggag

SEQ ID NO: 94240 - DNA, 25 bp, SARS Virus
cggacaaagatagcgattttggagg

SEQ ID NO: 94241 - DNA, 25 bp, SARS Virus
ggacaaagatacggattttggaggc

SEQ ID NO: 94242 - DNA, 25 bp, SARS Virus
gacaaagataccgattttggaggca

SEQ ID NO: 94243 - DNA, 25 bp, SARS Virus
acaaagataccggttttggaggcat

SEQ ID NO: 94244 - DNA, 25 bp, SARS Virus
caaagataccgagtttggaggcatc

SEQ ID NO: 94245 - DNA, 25 bp, SARS Virus
aaagataccgatgttggaggcatct

SEQ ID NO: 94246 - DNA, 25 bp, SARS Virus
aagataccgattgtggaggcatcta

SEQ ID NO: 94247 - DNA, 25 bp, SARS Virus
agataccgatttgggaggcatctaa

SEQ ID NO: 94248 - DNA, 25 bp, SARS Virus
gataccgattttggaggcatctaac

SEQ ID NO: 94249 - DNA, 25 bp, SARS Virus
ataccgattttggaggcatctaaca

SEQ ID NO: 94250 - DNA, 25 bp, SARS Virus
taccgattttgggggcatctaacat

SEQ ID NO: 94251 - DNA, 25 bp, SARS Virus
accgattttggaggcatctaacatt

SEQ ID NO: 94252 - DNA, 25 bp, SARS Virus
ccgattttggaggcatctaacatta

SEQ ID NO: 94253 - DNA, 25 bp, SARS Virus
cgattttggagggatctaacattat

SEQ ID NO: 94254 - DNA, 25 bp, SARS Virus
gattttggaggcgtctaacattata

SEQ ID NO: 94255 - DNA, 25 bp, SARS Virus
attttggaggcagctaacattatac

SEQ ID NO: 94256 - DNA, 25 bp, SARS Virus
ttttggaggcatgtaacattataca

SEQ ID NO: 94257 - DNA, 25 bp, SARS Virus
tttggaggcatcgaacattatacat

SEQ ID NO: 94258 - DNA, 25 bp, SARS Virus
ttggaggcatctgacattatacatg

SEQ ID NO: 94259 - DNA, 25 bp, SARS Virus
tggaggcatctagcattatacatgt

SEQ ID NO: 94260 - DNA, 25 bp, SARS Virus
ggaggcatctaagattatacatgta

SEQ ID NO: 94261 - DNA, 25 bp, SARS Virus
gaggcatctaacgttatacatgtag

SEQ ID NO: 94262 - DNA, 25 bp, SARS Virus
aggcatctaacagtatacatgtaga

SEQ ID NO: 94263 - DNA, 25 bp, SARS Virus
ggcatctaacatgatacatgtagac

SEQ ID NO: 94264 - DNA, 25 bp, SARS Virus
gcatctaacattgtacatgtagacg

SEQ ID NO: 94265 - DNA, 25 bp, SARS Virus
catctaacattagacatgtagacgc

SEQ ID NO: 94266 - DNA, 25 bp, SARS Virus
atctaacattatgcatgtagacgcc

SEQ ID NO: 94267 - DNA, 25 bp, SARS Virus
tctaacattatagatgtagacgcct

SEQ ID NO: 94268 - DNA, 25 bp, SARS Virus
ctaacattatacgtgtagacgcctc

SEQ ID NO: 94269 - DNA, 25 bp, SARS Virus
taacattatacaggtagacgcctct

SEQ ID NO: 94270 - DNA, 25 bp, SARS Virus
aacattatacatgtagacgcctcta

SEQ ID NO: 94271 - DNA, 25 bp, SARS Virus
acattatacatggagacgcctctaa

SEQ ID NO: 94272 - DNA, 25 bp, SARS Virus
cattatacatgtggacgcctctaag

SEQ ID NO: 94273 - DNA, 25 bp, SARS Virus
attatacatgtagacgcctctaaga

SEQ ID NO: 94274 - DNA, 25 bp, SARS Virus
ttatacatgtaggcgcctctaagat

SEQ ID NO: 94275 - DNA, 25 bp, SARS Virus
tatacatgtagaggcctctaagatg

SEQ ID NO: 94276 - DNA, 25 bp, SARS Virus
atacatgtagacgcctctaagatga

SEQ ID NO: 94277 - DNA, 25 bp, SARS Virus
tacatgtagacggctctaagatgac

SEQ ID NO: 94278 - DNA, 25 bp, SARS Virus
acatgtagacgcgtctaagatgact

SEQ ID NO: 94279 - DNA, 25 bp, SARS Virus
catgtagacgccgctaagatgactt

SEQ ID NO: 94280 - DNA, 25 bp, SARS Virus
atgtagacgcctgtaagatgactta

SEQ ID NO: 94281 - DNA, 25 bp, SARS Virus
tgtagacgcctcgaagatgacttac

SEQ ID NO: 94282 - DNA, 25 bp, SARS Virus
gtagacgcctctgagatgacttaca

SEQ ID NO: 94283 - DNA, 25 bp, SARS Virus
tagacgcctctaggatgacttacac

SEQ ID NO: 94284 - DNA, 25 bp, SARS Virus
agacgcctctaagatgacttacacg

SEQ ID NO: 94285 - DNA, 25 bp, SARS Virus
gacgcctctaaggtgacttacacga

SEQ ID NO: 94286 - DNA, 25 bp, SARS Virus
acgcctctaagaggacttacacgat

SEQ ID NO: 94287 - DNA, 25 bp, SARS Virus
cgcctctaagatgacttacacgatt

SEQ ID NO: 94288 - DNA, 25 bp, SARS Virus
gcctctaagatggcttacacgatta

SEQ ID NO: 94289 - DNA, 25 bp, SARS Virus
cctctaagatgagttacacgattaa

SEQ ID NO: 94290 - DNA, 25 bp, SARS Virus
ctctaagatgacgtacacgattaaa

SEQ ID NO: 94291 - DNA, 25 bp, SARS Virus
tctaagatgactgacacgattaaac

SEQ ID NO: 94292 - DNA, 25 bp, SARS Virus
ctaagatgacttgcacgattaaacg

SEQ ID NO: 94293 - DNA, 25 bp, SARS Virus
taagatgacttagacgattaaacga

SEQ ID NO: 94294 - DNA, 25 bp, SARS Virus
aagatgacttacgcgattaaacgaa

SEQ ID NO: 94295 - DNA, 25 bp, SARS Virus
agatgacttacaggattaaacgaag

SEQ ID NO: 94296 - DNA, 25 bp, SARS Virus
gatgacttacacgattaaacgaaga

SEQ ID NO: 94297 - DNA, 25 bp, SARS Virus
atgacttacacggttaaacgaagag

SEQ ID NO: 94298 - DNA, 25 bp, SARS Virus
tgacttacacgagtaaacgaagagg

SEQ ID NO: 94299 - DNA, 25 bp, SARS Virus
gacttacacgatgaaacgaagaggt

SEQ ID NO: 94300 - DNA, 25 bp, SARS Virus
acttacacgattgaacgaagaggtt

SEQ ID NO: 94301 - DNA, 25 bp, SARS Virus
cttacacgattagacgaagaggtta

SEQ ID NO: 94302 - DNA, 25 bp, SARS Virus
ttacacgattaagcgaagaggttat

SEQ ID NO: 94303 - DNA, 25 bp, SARS Virus
tacacgattaaaggaagaggttata

SEQ ID NO: 94304 - DNA, 25 bp, SARS Virus
acacgattaaacgaagaggttatac

SEQ ID NO: 94305 - DNA, 25 bp, SARS Virus
cacgattaaacggagaggttatacc

SEQ ID NO: 94306 - DNA, 25 bp, SARS Virus
acgattaaacgaggaggttatacca

SEQ ID NO: 94307 - DNA, 25 bp, SARS Virus
cgattaaacgaagaggttataccat

SEQ ID NO: 94308 - DNA, 25 bp, SARS Virus
gattaaacgaaggggttataccatc

SEQ ID NO: 94309 - DNA, 25 bp, SARS Virus
attaaacgaagaggttataccatcg

SEQ ID NO: 94310 - DNA, 25 bp, SARS Virus
ttaaacgaagaggttataccatcga

SEQ ID NO: 94311 - DNA, 25 bp, SARS Virus
taaacgaagagggtataccatcgaa

SEQ ID NO: 94312 - DNA, 25 bp, SARS Virus
aaacgaagaggtgataccatcgaaa

SEQ ID NO: 94313 - DNA, 25 bp, SARS Virus
atctgtaaagtgtaacgcgaaaacc

SEQ ID NO: 94314 - DNA, 25 bp, SARS Virus
tctgtaaagtggtacgcgaaaaccc

SEQ ID NO: 94315 - DNA, 25 bp, SARS Virus
ctgtaaagtggatcgcgaaaacccc

SEQ ID NO: 94316 - DNA, 25 bp, SARS Virus
tgtaaagtggaatgcgaaaaccccc

SEQ ID NO: 94317 - DNA, 25 bp, SARS Virus
gtaaagtggaactcgaaaaccccca

SEQ ID NO: 94318 - DNA, 25 bp, SARS Virus
taaagtggaacgtgaaaacccccac

SEQ ID NO: 94319 - DNA, 25 bp, SARS Virus
aaagtggaacgctaaaacccccaca

SEQ ID NO: 94320 - DNA, 25 bp, SARS Virus
aagtggaacgcgtaaacccccacat

SEQ ID NO: 94321 - DNA, 25 bp, SARS Virus
agtggaacgcgataacccccacatt

SEQ ID NO: 94322 - DNA, 25 bp, SARS Virus
gtggaacgcgaatacccccacattc

SEQ ID NO: 94323 - DNA, 25 bp, SARS Virus
tggaacgcgaaatcccccacattca

SEQ ID NO: 94324 - DNA, 25 bp, SARS Virus
ggaacgcgaaaatccccacattcac

SEQ ID NO: 94325 - DNA, 25 bp, SARS Virus
gaacgcgaaaactcccacattcaca

SEQ ID NO: 94326 - DNA, 25 bp, SARS Virus
aacgcgaaaacctccacattcacat

SEQ ID NO: 94327 - DNA, 25 bp, SARS Virus
acgcgaaaaccctcacattcacatt

SEQ ID NO: 94328 - DNA, 25 bp, SARS Virus
cgcgaaaacccctacattcacatta

SEQ ID NO: 94329 - DNA, 25 bp, SARS Virus
gcgaaaaccccctcattcacattaa

SEQ ID NO: 94330 - DNA, 25 bp, SARS Virus
cgaaaacccccatattcacattaat

SEQ ID NO: 94331 - DNA, 25 bp, SARS Virus
gaaaacccccactttcacattaatg

SEQ ID NO: 94332 - DNA, 25 bp, SARS Virus
aaaacccccacattcacattaatgt

SEQ ID NO: 94333 - DNA, 25 bp, SARS Virus
aaacccccacattcacattaatgtg

SEQ ID NO: 94334 - DNA, 25 bp, SARS Virus
aacccccacatttacattaatgtgg

SEQ ID NO: 94335 - DNA, 25 bp, SARS Virus
acccccacattctcattaatgtgga

SEQ ID NO: 94336 - DNA, 25 bp, SARS Virus
cccccacattcatattaatgtggac

SEQ ID NO: 94337 - DNA, 25 bp, SARS Virus
ccccacattcactttaatgtggacc

SEQ ID NO: 94338 - DNA, 25 bp, SARS Virus
cccacattcacattaatgtggacct

SEQ ID NO: 94339 - DNA, 25 bp, SARS Virus
ccacattcacattaatgtggacctt

SEQ ID NO: 94340 - DNA, 25 bp, SARS Virus
cacattcacatttatgtggaccttg

SEQ ID NO: 94341 - DNA, 25 bp, SARS Virus
acattcacattattgtggaccttgt

SEQ ID NO: 94342 - DNA, 25 bp, SARS Virus
cattcacattaatgtggaccttgtt

SEQ ID NO: 94343 - DNA, 25 bp, SARS Virus
attcacattaatttggaccttgttt

SEQ ID NO: 94344 - DNA, 25 bp, SARS Virus
ttcacattaatgtggaccttgttta

SEQ ID NO: 94345 - DNA, 25 bp, SARS Virus
tcacattaatgttgaccttgtttac

SEQ ID NO: 94346 - DNA, 25 bp, SARS Virus
cacattaatgtgtaccttgtttacg

SEQ ID NO: 94347 - DNA, 25 bp, SARS Virus
acattaatgtggtccttgtttacga

SEQ ID NO: 94348 - DNA, 25 bp, SARS Virus
cattaatgtggatcttgtttacgaa

SEQ ID NO: 94349 - DNA, 25 bp, SARS Virus
attaatgtggactttgtttacgaag

SEQ ID NO: 94350 - DNA, 25 bp, SARS Virus
ttaatgtggaccttgtttacgaagt

SEQ ID NO: 94351 - DNA, 25 bp, SARS Virus
taatgtggaccttgtttacgaagta

SEQ ID NO: 94352 - DNA, 25 bp, SARS Virus
aatgtggaccttttttacgaagtag

SEQ ID NO: 94353 - DNA, 25 bp, SARS Virus
atgtggaccttgtttacgaagtaga

SEQ ID NO: 94354 - DNA, 25 bp, SARS Virus
tgtggaccttgtttacgaagtagac

SEQ ID NO: 94355 - DNA, 25 bp, SARS Virus
gtggaccttgtttacgaagtagact

SEQ ID NO: 94356 - DNA, 25 bp, SARS Virus
tggaccttgttttcgaagtagactt

SEQ ID NO: 94357 - DNA, 25 bp, SARS Virus
ggaccttgtttatgaagtagacttc

SEQ ID NO: 94358 - DNA, 25 bp, SARS Virus
gaccttgtttactaagtagacttca

SEQ ID NO: 94359 - DNA, 25 bp, SARS Virus
accttgtttacgtagtagacttcaa

SEQ ID NO: 94360 - DNA, 25 bp, SARS Virus
ccttgtttacgatgtagacttcaac

SEQ ID NO: 94361 - DNA, 25 bp, SARS Virus
cttgtttacgaattagacttcaacg

SEQ ID NO: 94362 - DNA, 25 bp, SARS Virus
ttgtttacgaagtagacttcaacga

SEQ ID NO: 94363 - DNA, 25 bp, SARS Virus
tgtttacgaagttgacttcaacgac

SEQ ID NO: 94364 - DNA, 25 bp, SARS Virus
gtttacgaagtatacttcaacgaca

SEQ ID NO: 94365 - DNA, 25 bp, SARS Virus
tttacgaagtagtcttcaacgacaa

SEQ ID NO: 94366 - DNA, 25 bp, SARS Virus
ttacgaagtagatttcaacgacaag

SEQ ID NO: 94367 - DNA, 25 bp, SARS Virus
tacgaagtagacttcaacgacaaga

SEQ ID NO: 94368 - DNA, 25 bp, SARS Virus
acgaagtagacttcaacgacaagat

SEQ ID NO: 94369 - DNA, 25 bp, SARS Virus
cgaagtagactttaacgacaagata

SEQ ID NO: 94370 - DNA, 25 bp, SARS Virus
gaagtagacttctacgacaagatat

SEQ ID NO: 94371 - DNA, 25 bp, SARS Virus
aagtagacttcatcgacaagatata

SEQ ID NO: 94372 - DNA, 25 bp, SARS Virus
agtagacttcaatgacaagatatag

SEQ ID NO: 94373 - DNA, 25 bp, SARS Virus
gtagacttcaactacaagatatagt

SEQ ID NO: 94374 - DNA, 25 bp, SARS Virus
tagacttcaacgtcaagatatagtt

SEQ ID NO: 94375 - DNA, 25 bp, SARS Virus
agacttcaacgataagatatagttc

SEQ ID NO: 94376 - DNA, 25 bp, SARS Virus
gacttcaacgactagatatagttct

SEQ ID NO: 94377 - DNA, 25 bp, SARS Virus
acttcaacgacatgatatagttcta

SEQ ID NO: 94378 - DNA, 25 bp, SARS Virus
cttcaacgacaatatatagttctac

SEQ ID NO: 94379 - DNA, 25 bp, SARS Virus
ttcaacgacaagttatagttctaca

SEQ ID NO: 94380 - DNA, 25 bp, SARS Virus
tcaacgacaagatatagttctacaa

SEQ ID NO: 94381 - DNA, 25 bp, SARS Virus
caacgacaagatttagttctacaat

SEQ ID NO: 94382 - DNA, 25 bp, SARS Virus
aacgacaagatatagttctacaatt

SEQ ID NO: 94383 - DNA, 25 bp, SARS Virus
acgacaagatattgttctacaattg

SEQ ID NO: 94384 - DNA, 25 bp, SARS Virus
cgacaagatatatttctacaattga

SEQ ID NO: 94385 - DNA, 25 bp, SARS Virus
gacaagatatagttctacaattgac

SEQ ID NO: 94386 - DNA, 25 bp, SARS Virus
acaagatatagttctacaattgacg

SEQ ID NO: 94387 - DNA, 25 bp, SARS Virus
caagatatagttttacaattgacgt

SEQ ID NO: 94388 - DNA, 25 bp, SARS Virus
aagatatagttctacaattgacgtg

SEQ ID NO: 94389 - DNA, 25 bp, SARS Virus
agatatagttcttcaattgacgtga

SEQ ID NO: 94390 - DNA, 25 bp, SARS Virus
gatatagttctataattgacgtgac

SEQ ID NO: 94391 - DNA, 25 bp, SARS Virus
atatagttctactattgacgtgact

SEQ ID NO: 94392 - DNA, 25 bp, SARS Virus
tatagttctacatttgacgtgacta

SEQ ID NO: 94393 - DNA, 25 bp, SARS Virus
atagttctacaattgacgtgactac

SEQ ID NO: 94394 - DNA, 25 bp, SARS Virus
tagttctacaattgacgtgactaca

SEQ ID NO: 94395 - DNA, 25 bp, SARS Virus
agttctacaatttacgtgactacaa

SEQ ID NO: 94396 - DNA, 25 bp, SARS Virus
gttctacaattgtcgtgactacaaa

SEQ ID NO: 94397 - DNA, 25 bp, SARS Virus
ttctacaattgatgtgactacaaag

SEQ ID NO: 94398 - DNA, 25 bp, SARS Virus
tctacaattgacttgactacaaaga

SEQ ID NO: 94399 - DNA, 25 bp, SARS Virus
ctacaattgacgtgactacaaagat

SEQ ID NO: 94400 - DNA, 25 bp, SARS Virus
tacaattgacgttactacaaagatg

SEQ ID NO: 94401 - DNA, 25 bp, SARS Virus
acaattgacgtgtctacaaagatgt

SEQ ID NO: 94402 - DNA, 25 bp, SARS Virus
caattgacgtgattacaaagatgtc

SEQ ID NO: 94403 - DNA, 25 bp, SARS Virus
aattgacgtgactacaaagatgtcg

SEQ ID NO: 94404 - DNA, 25 bp, SARS Virus
attgacgtgacttcaaagatgtcgt

SEQ ID NO: 94405 - DNA, 25 bp, SARS Virus
ttgacgtgactataaagatgtcgtt

SEQ ID NO: 94406 - DNA, 25 bp, SARS Virus
tgacgtgactactaagatgtcgtta

SEQ ID NO: 94407 - DNA, 25 bp, SARS Virus
gacgtgactacatagatgtcgttaa

SEQ ID NO: 94408 - DNA, 25 bp, SARS Virus
acgtgactacaatgatgtcgttaag

SEQ ID NO: 94409 - DNA, 25 bp, SARS Virus
cgtgactacaaatatgtcgttaagt

SEQ ID NO: 94410 - DNA, 25 bp, SARS Virus
gtgactacaaagttgtcgttaagta

SEQ ID NO: 94411 - DNA, 25 bp, SARS Virus
tgactacaaagatgtcgttaagtac

SEQ ID NO: 94412 - DNA, 25 bp, SARS Virus
gactacaaagatttcgttaagtacg

SEQ ID NO: 94413 - DNA, 25 bp, SARS Virus
actacaaagatgtcgttaagtacgt

SEQ ID NO: 94414 - DNA, 25 bp, SARS Virus
ctacaaagatgttgttaagtacgtc

SEQ ID NO: 94415 - DNA, 25 bp, SARS Virus
tacaaagatgtctttaagtacgtct

SEQ ID NO: 94416 - DNA, 25 bp, SARS Virus
acaaagatgtcgttaagtacgtcta

SEQ ID NO: 94417 - DNA, 25 bp, SARS Virus
caaagatgtcgttaagtacgtctag

SEQ ID NO: 94418 - DNA, 25 bp, SARS Virus
aaagatgtcgtttagtacgtctagt

SEQ ID NO: 94419 - DNA, 25 bp, SARS Virus
aagatgtcgttatgtacgtctagtt

SEQ ID NO: 94420 - DNA, 25 bp, SARS Virus
agatgtcgttaattacgtctagttg

SEQ ID NO: 94421 - DNA, 25 bp, SARS Virus
gatgtcgttaagtacgtctagttga

SEQ ID NO: 94422 - DNA, 25 bp, SARS Virus
atgtcgttaagttcgtctagttgag

SEQ ID NO: 94423 - DNA, 25 bp, SARS Virus
tgtcgttaagtatgtctagttgagt

SEQ ID NO: 94424 - DNA, 25 bp, SARS Virus
gtcgttaagtacttctagttgagtg

SEQ ID NO: 94425 - DNA, 25 bp, SARS Virus
tcgttaagtacgtctagttgagtgt

SEQ ID NO: 94426 - DNA, 25 bp, SARS Virus
cgttaagtacgtttagttgagtgtg

SEQ ID NO: 94427 - DNA, 25 bp, SARS Virus
gttaagtacgtctagttgagtgtgg

SEQ ID NO: 94428 - DNA, 25 bp, SARS Virus
ttaagtacgtcttgttgagtgtggt

SEQ ID NO: 94429 - DNA, 25 bp, SARS Virus
taagtacgtctatttgagtgtggtc

SEQ ID NO: 94430 - DNA, 25 bp, SARS Virus
aagtacgtctagttgagtgtggtcg

SEQ ID NO: 94431 - DNA, 25 bp, SARS Virus
agtacgtctagttgagtgtggtcga

SEQ ID NO: 94432 - DNA, 25 bp, SARS Virus
gtacgtctagtttagtgtggtcgaa

SEQ ID NO: 94433 - DNA, 25 bp, SARS Virus
tacgtctagttgtgtgtggtcgaac

SEQ ID NO: 94434 - DNA, 25 bp, SARS Virus
acgtctagttgattgtggtcgaacc

SEQ ID NO: 94435 - DNA, 25 bp, SARS Virus
cgtctagttgagtgtggtcgaaccg

SEQ ID NO: 94436 - DNA, 25 bp, SARS Virus
gtctagttgagtttggtcgaaccgc

SEQ ID NO: 94437 - DNA, 25 bp, SARS Virus
tctagttgagtgtggtcgaaccgcg

SEQ ID NO: 94438 - DNA, 25 bp, SARS Virus
ctagttgagtgttgtcgaaccgcgt

SEQ ID NO: 94439 - DNA, 25 bp, SARS Virus
tagttgagtgtgttcgaaccgcgta

SEQ ID NO: 94440 - DNA, 25 bp, SARS Virus
agttgagtgtggtcgaaccgcgtat

SEQ ID NO: 94441 - DNA, 25 bp, SARS Virus
gttgagtgtggttgaaccgcgtata

SEQ ID NO: 94442 - DNA, 25 bp, SARS Virus
ttgagtgtggtctaaccgcgtatat

SEQ ID NO: 94443 - DNA, 25 bp, SARS Virus
tgagtgtggtcgtaccgcgtatata

SEQ ID NO: 94444 - DNA, 25 bp, SARS Virus
gagtgtggtcgatccgcgtatataa

SEQ ID NO: 94445 - DNA, 25 bp, SARS Virus
agtgtggtcgaatcgcgtatataag

SEQ ID NO: 94446 - DNA, 25 bp, SARS Virus
gtgtggtcgaactgcgtatataaga

SEQ ID NO: 94447 - DNA, 25 bp, SARS Virus
tgtggtcgaacctcgtatataagat

SEQ ID NO: 94448 - DNA, 25 bp, SARS Virus
gtggtcgaaccgtgtatataagatg

SEQ ID NO: 94449 - DNA, 25 bp, SARS Virus
tggtcgaaccgcttatataagatga

SEQ ID NO: 94450 - DNA, 25 bp, SARS Virus
ggtcgaaccgcgtatataagatgac

SEQ ID NO: 94451 - DNA, 25 bp, SARS Virus
gtcgaaccgcgtttataagatgacc

SEQ ID NO: 94452 - DNA, 25 bp, SARS Virus
tcgaaccgcgtatataagatgacct

SEQ ID NO: 94453 - DNA, 25 bp, SARS Virus
cgaaccgcgtatttaagatgacctt

SEQ ID NO: 94454 - DNA, 25 bp, SARS Virus
gaaccgcgtatataagatgaccttt

SEQ ID NO: 94455 - DNA, 25 bp, SARS Virus
aaccgcgtatattagatgacctttg

SEQ ID NO: 94456 - DNA, 25 bp, SARS Virus
accgcgtatatatgatgacctttgt

SEQ ID NO: 94457 - DNA, 25 bp, SARS Virus
ccgcgtatataatatgacctttgtt

SEQ ID NO: 94458 - DNA, 25 bp, SARS Virus
cgcgtatataagttgacctttgtta

SEQ ID NO: 94459 - DNA, 25 bp, SARS Virus
gcgtatataagatgacctttgttac

SEQ ID NO: 94460 - DNA, 25 bp, SARS Virus
cgtatataagattacctttgttaca

SEQ ID NO: 94461 - DNA, 25 bp, SARS Virus
gtatataagatgtcctttgttacat

SEQ ID NO: 94462 - DNA, 25 bp, SARS Virus
tatataagatgatctttgttacata

SEQ ID NO: 94463 - DNA, 25 bp, SARS Virus
atataagatgacttttgttacataa

SEQ ID NO: 94464 - DNA, 25 bp, SARS Virus
tataagatgacctttgttacataag

SEQ ID NO: 94465 - DNA, 25 bp, SARS Virus
ataagatgacctttgttacataagg

SEQ ID NO: 94466 - DNA, 25 bp, SARS Virus
taagatgacctttgttacataaggt

SEQ ID NO: 94467 - DNA, 25 bp, SARS Virus
aagatgaccttttttacataaggtc

SEQ ID NO: 94468 - DNA, 25 bp, SARS Virus
agatgacctttgttacataaggtct

SEQ ID NO: 94469 - DNA, 25 bp, SARS Virus
gatgacctttgttacataaggtctg

SEQ ID NO: 94470 - DNA, 25 bp, SARS Virus
atgacctttgtttcataaggtctga

SEQ ID NO: 94471 - DNA, 25 bp, SARS Virus
tgacctttgttatataaggtctgag

SEQ ID NO: 94472 - DNA, 25 bp, SARS Virus
gacctttgttacttaaggtctgagt

SEQ ID NO: 94473 - DNA, 25 bp, SARS Virus
acctttgttacataaggtctgagtt

SEQ ID NO: 94474 - DNA, 25 bp, SARS Virus
cctttgttacattaggtctgagttc

SEQ ID NO: 94475 - DNA, 25 bp, SARS Virus
ctttgttacatatggtctgagttcg

SEQ ID NO: 94476 - DNA, 25 bp, SARS Virus
tttgttacataatgtctgagttcgt

SEQ ID NO: 94477 - DNA, 25 bp, SARS Virus
ttgttacataagttctgagttcgtc

SEQ ID NO: 94478 - DNA, 25 bp, SARS Virus
tgttacataaggtctgagttcgtcc

SEQ ID NO: 94479 - DNA, 25 bp, SARS Virus
gttacataaggtttgagttcgtccg

SEQ ID NO: 94480 - DNA, 25 bp, SARS Virus
ttacataaggtctgagttcgtccga

SEQ ID NO: 94481 - DNA, 25 bp, SARS Virus
tacataaggtcttagttcgtccgac

SEQ ID NO: 94482 - DNA, 25 bp, SARS Virus
acataaggtctgtgttcgtccgaca

SEQ ID NO: 94483 - DNA, 25 bp, SARS Virus
cataaggtctgatttcgtccgacag

SEQ ID NO: 94484 - DNA, 25 bp, SARS Virus
ataaggtctgagttcgtccgacaga

SEQ ID NO: 94485 - DNA, 25 bp, SARS Virus
taaggtctgagttcgtccgacagaa

SEQ ID NO: 94486 - DNA, 25 bp, SARS Virus
aaggtctgagtttgtccgacagaat

SEQ ID NO: 94487 - DNA, 25 bp, SARS Virus
aggtctgagttcttccgacagaata

SEQ ID NO: 94488 - DNA, 25 bp, SARS Virus
ggtctgagttcgtccgacagaatat

SEQ ID NO: 94489 - DNA, 25 bp, SARS Virus
gtctgagttcgttcgacagaatatc

SEQ ID NO: 94490 - DNA, 25 bp, SARS Virus
tctgagttcgtctgacagaatatcc

SEQ ID NO: 94491 - DNA, 25 bp, SARS Virus
ctgagttcgtcctacagaatatcct

SEQ ID NO: 94492 - DNA, 25 bp, SARS Virus
tgagttcgtccgtcagaatatcctc

SEQ ID NO: 94493 - DNA, 25 bp, SARS Virus
gagttcgtccgatagaatatcctcg

SEQ ID NO: 94494 - DNA, 25 bp, SARS Virus
agttcgtccgactgaatatcctcga

SEQ ID NO: 94495 - DNA, 25 bp, SARS Virus
gttcgtccgacataatatcctcgac

SEQ ID NO: 94496 - DNA, 25 bp, SARS Virus
ttcgtccgacagtatatcctcgact

SEQ ID NO: 94497 - DNA, 25 bp, SARS Virus
tcgtccgacagattatcctcgactc

SEQ ID NO: 94498 - DNA, 25 bp, SARS Virus
cgtccgacagaatatcctcgactcg

SEQ ID NO: 94499 - DNA, 25 bp, SARS Virus
gtccgacagaatttcctcgactcgt

SEQ ID NO: 94500 - DNA, 25 bp, SARS Virus
tccgacagaatatcctcgactcgta

SEQ ID NO: 94501 - DNA, 25 bp, SARS Virus
ccgacagaatattctcgactcgtac

SEQ ID NO: 94502 - DNA, 25 bp, SARS Virus
cgacagaatatcttcgactcgtaca

SEQ ID NO: 94503 - DNA, 25 bp, SARS Virus
gacagaatatcctcgactcgtacag

SEQ ID NO: 94504 - DNA, 25 bp, SARS Virus
acagaatatccttgactcgtacagc

SEQ ID NO: 94505 - DNA, 25 bp, SARS Virus
cagaatatcctctactcgtacagct

SEQ ID NO: 94506 - DNA, 25 bp, SARS Virus
agaatatcctcgtctcgtacagctg

SEQ ID NO: 94507 - DNA, 25 bp, SARS Virus
gaatatcctcgattcgtacagctgt

SEQ ID NO: 94508 - DNA, 25 bp, SARS Virus
aatatcctcgactcgtacagctgtg

SEQ ID NO: 94509 - DNA, 25 bp, SARS Virus
atatcctcgacttgtacagctgtga

SEQ ID NO: 94510 - DNA, 25 bp, SARS Virus
tatcctcgactcttacagctgtgaa

SEQ ID NO: 94511 - DNA, 25 bp, SARS Virus
atcctcgactcgtacagctgtgaag

SEQ ID NO: 94512 - DNA, 25 bp, SARS Virus
tcctcgactcgttcagctgtgaaga

SEQ ID NO: 94513 - DNA, 25 bp, SARS Virus
cctcgactcgtatagctgtgaagaa

SEQ ID NO: 94514 - DNA, 25 bp, SARS Virus
ctcgactcgtactgctgtgaagaat

SEQ ID NO: 94515 - DNA, 25 bp, SARS Virus
tcgactcgtacatctgtgaagaata

SEQ ID NO: 94516 - DNA, 25 bp, SARS Virus
cgactcgtacagttgtgaagaatac

SEQ ID NO: 94517 - DNA, 25 bp, SARS Virus
gactcgtacagctgtgaagaatact

SEQ ID NO: 94518 - DNA, 25 bp, SARS Virus
actcgtacagctttgaagaatactc

SEQ ID NO: 94519 - DNA, 25 bp, SARS Virus
ctcgtacagctgtgaagaatactca

SEQ ID NO: 94520 - DNA, 25 bp, SARS Virus
tcgtacagctgttaagaatactcac

SEQ ID NO: 94521 - DNA, 25 bp, SARS Virus
cgtacagctgtgtagaatactcacg

SEQ ID NO: 94522 - DNA, 25 bp, SARS Virus
gtacagctgtgatgaatactcacgc

SEQ ID NO: 94523 - DNA, 25 bp, SARS Virus
tacagctgtgaataatactcacgct

SEQ ID NO: 94524 - DNA, 25 bp, SARS Virus
acagctgtgaagtatactcacgctg

SEQ ID NO: 94525 - DNA, 25 bp, SARS Virus
cagctgtgaagattactcacgctgt

SEQ ID NO: 94526 - DNA, 25 bp, SARS Virus
agctgtgaagaatactcacgctgta

SEQ ID NO: 94527 - DNA, 25 bp, SARS Virus
gctgtgaagaattctcacgctgtaa

SEQ ID NO: 94528 - DNA, 25 bp, SARS Virus
ctgtgaagaatattcacgctgtaag

SEQ ID NO: 94529 - DNA, 25 bp, SARS Virus
tgtgaagaatactcacgctgtaagg

SEQ ID NO: 94530 - DNA, 25 bp, SARS Virus
gtgaagaatacttacgctgtaagga

SEQ ID NO: 94531 - DNA, 25 bp, SARS Virus
tgaagaatactctcgctgtaaggat

SEQ ID NO: 94532 - DNA, 25 bp, SARS Virus
gaagaatactcatgctgtaaggata

SEQ ID NO: 94533 - DNA, 25 bp, SARS Virus
aagaatactcactctgtaaggataa

SEQ ID NO: 94534 - DNA, 25 bp, SARS Virus
agaatactcacgttgtaaggataac

SEQ ID NO: 94535 - DNA, 25 bp, SARS Virus
gaatactcacgctgtaaggataacc

SEQ ID NO: 94536 - DNA, 25 bp, SARS Virus
aatactcacgctttaaggataacct

SEQ ID NO: 94537 - DNA, 25 bp, SARS Virus
atactcacgctgtaaggataacctc

SEQ ID NO: 94538 - DNA, 25 bp, SARS Virus
tactcacgctgttaggataacctcg

SEQ ID NO: 94539 - DNA, 25 bp, SARS Virus
actcacgctgtatggataacctcga

SEQ ID NO: 94540 - DNA, 25 bp, SARS Virus
ctcacgctgtaatgataacctcgac

SEQ ID NO: 94541 - DNA, 25 bp, SARS Virus
tcacgctgtaagtataacctcgacc

SEQ ID NO: 94542 - DNA, 25 bp, SARS Virus
cacgctgtaaggttaacctcgaccg

SEQ ID NO: 94543 - DNA, 25 bp, SARS Virus
acgctgtaaggataacctcgaccgt

SEQ ID NO: 94544 - DNA, 25 bp, SARS Virus
cgctgtaaggattacctcgaccgta

SEQ ID NO: 94545 - DNA, 25 bp, SARS Virus
gctgtaaggatatcctcgaccgtaa

SEQ ID NO: 94546 - DNA, 25 bp, SARS Virus
ctgtaaggataatctcgaccgtaaa

SEQ ID NO: 94547 - DNA, 25 bp, SARS Virus
tgtaaggataacttcgaccgtaaac

SEQ ID NO: 94548 - DNA, 25 bp, SARS Virus
gtaaggataacctcgaccgtaaaca

SEQ ID NO: 94549 - DNA, 25 bp, SARS Virus
taaggataaccttgaccgtaaacac

SEQ ID NO: 94550 - DNA, 25 bp, SARS Virus
aaggataacctctaccgtaaacacg

SEQ ID NO: 94551 - DNA, 25 bp, SARS Virus
aggataacctcgtccgtaaacacga

SEQ ID NO: 94552 - DNA, 25 bp, SARS Virus
ggataacctcgatcgtaaacacgat

SEQ ID NO: 94553 - DNA, 25 bp, SARS Virus
gataacctcgactgtaaacacgatc

SEQ ID NO: 94554 - DNA, 25 bp, SARS Virus
ataacctcgaccttaaacacgatca

SEQ ID NO: 94555 - DNA, 25 bp, SARS Virus
taacctcgaccgtaaacacgatcaa

SEQ ID NO: 94556 - DNA, 25 bp, SARS Virus
aacctcgaccgttaacacgatcaat

SEQ ID NO: 94557 - DNA, 25 bp, SARS Virus
acctcgaccgtatacacgatcaatg

SEQ ID NO: 94558 - DNA, 25 bp, SARS Virus
cctcgaccgtaatcacgatcaatgg

SEQ ID NO: 94559 - DNA, 25 bp, SARS Virus
ctcgaccgtaaatacgatcaatggt

SEQ ID NO: 94560 - DNA, 25 bp, SARS Virus
tcgaccgtaaactcgatcaatggta

SEQ ID NO: 94561 - DNA, 25 bp, SARS Virus
cgaccgtaaacatgatcaatggtat

SEQ ID NO: 94562 - DNA, 25 bp, SARS Virus
gaccgtaaacactatcaatggtatg

SEQ ID NO: 94563 - DNA, 25 bp, SARS Virus
accgtaaacacgttcaatggtatgt

SEQ ID NO: 94564 - DNA, 25 bp, SARS Virus
ccgtaaacacgatcaatggtatgtc

SEQ ID NO: 94565 - DNA, 25 bp, SARS Virus
cgtaaacacgattaatggtatgtca

SEQ ID NO: 94566 - DNA, 25 bp, SARS Virus
gtaaacacgatctatggtatgtcaa

SEQ ID NO: 94567 - DNA, 25 bp, SARS Virus
taaacacgatcattggtatgtcaaa

SEQ ID NO: 94568 - DNA, 25 bp, SARS Virus
aaacacgatcaatggtatgtcaaag

SEQ ID NO: 94569 - DNA, 25 bp, SARS Virus
aacacgatcaattgtatgtcaaaga

SEQ ID NO: 94570 - DNA, 25 bp, SARS Virus
acacgatcaatgttatgtcaaagaa

SEQ ID NO: 94571 - DNA, 25 bp, SARS Virus
cacgatcaatggtatgtcaaagaaa

SEQ ID NO: 94572 - DNA, 25 bp, SARS Virus
acgatcaatggtttgtcaaagaaat

SEQ ID NO: 94573 - DNA, 25 bp, SARS Virus
cgatcaatggtatgtcaaagaaata

SEQ ID NO: 94574 - DNA, 25 bp, SARS Virus
gatcaatggtatttcaaagaaataa

SEQ ID NO: 94575 - DNA, 25 bp, SARS Virus
atcaatggtatgtcaaagaaataat

SEQ ID NO: 94576 - DNA, 25 bp, SARS Virus
tcaatggtatgttaaagaaataatg

SEQ ID NO: 94577 - DNA, 25 bp, SARS Virus
caatggtatgtctaagaaataatgc

SEQ ID NO: 94578 - DNA, 25 bp, SARS Virus
aatggtatgtcatagaaataatgca

SEQ ID NO: 94579 - DNA, 25 bp, SARS Virus
atggtatgtcaatgaaataatgcat

SEQ ID NO: 94580 - DNA, 25 bp, SARS Virus
tggtatgtcaaataaataatgcatc

SEQ ID NO: 94581 - DNA, 25 bp, SARS Virus
ggtatgtcaaagtaataatgcatca

SEQ ID NO: 94582 - DNA, 25 bp, SARS Virus
gtatgtcaaagatataatgcatcat

SEQ ID NO: 94583 - DNA, 25 bp, SARS Virus
tatgtcaaagaattaatgcatcatg

SEQ ID NO: 94584 - DNA, 25 bp, SARS Virus
atgtcaaagaaataatgcatcatga

SEQ ID NO: 94585 - DNA, 25 bp, SARS Virus
tgtcaaagaaattatgcatcatgat

SEQ ID NO: 94586 - DNA, 25 bp, SARS Virus
gtcaaagaaatattgcatcatgatc

SEQ ID NO: 94587 - DNA, 25 bp, SARS Virus
tcaaagaaataatgcatcatgatcg

SEQ ID NO: 94588 - DNA, 25 bp, SARS Virus
caaagaaataattcatcatgatcgg

SEQ ID NO: 94589 - DNA, 25 bp, SARS Virus
aaagaaataatgtatcatgatcggt

SEQ ID NO: 94590 - DNA, 25 bp, SARS Virus
aagaaataatgcttcatgatcggtt

SEQ ID NO: 94591 - DNA, 25 bp, SARS Virus
agaaataatgcatcatgatcggttt

SEQ ID NO: 94592 - DNA, 25 bp, SARS Virus
gaaataatgcattatgatcggtttt

SEQ ID NO: 94593 - DNA, 25 bp, SARS Virus
aaataatgcatcttgatcggttttt

SEQ ID NO: 94594 - DNA, 25 bp, SARS Virus
aataatgcatcatgatcggttttta

SEQ ID NO: 94595 - DNA, 25 bp, SARS Virus
ataatgcatcattatcggtttttag

SEQ ID NO: 94596 - DNA, 25 bp, SARS Virus
taatgcatcatgttcggtttttaga

SEQ ID NO: 94597 - DNA, 25 bp, SARS Virus
aatgcatcatgatcggtttttagat

SEQ ID NO: 94598 - DNA, 25 bp, SARS Virus
atgcatcatgattggtttttagata

SEQ ID NO: 94599 - DNA, 25 bp, SARS Virus
tgcatcatgatctgtttttagataa

SEQ ID NO: 94600 - DNA, 25 bp, SARS Virus
gcatcatgatcgttttttagataac

SEQ ID NO: 94601 - DNA, 25 bp, SARS Virus
catcatgatcggtttttagataaca

SEQ ID NO: 94602 - DNA, 25 bp, SARS Virus
atcatgatcggtttttagataacac

SEQ ID NO: 94603 - DNA, 25 bp, SARS Virus
tcatgatcggtttttagataacacc

SEQ ID NO: 94604 - DNA, 25 bp, SARS Virus
catgatcggtttttagataacaccg

SEQ ID NO: 94605 - DNA, 25 bp, SARS Virus
atgatcggtttttagataacaccga

SEQ ID NO: 94606 - DNA, 25 bp, SARS Virus
tgatcggttttttgataacaccgaa

SEQ ID NO: 94607 - DNA, 25 bp, SARS Virus
gatcggtttttatataacaccgaat

SEQ ID NO: 94608 - DNA, 25 bp, SARS Virus
atcggtttttagttaacaccgaata

SEQ ID NO: 94609 - DNA, 25 bp, SARS Virus
tcggtttttagataacaccgaatat

SEQ ID NO: 94610 - DNA, 25 bp, SARS Virus
cggtttttagattacaccgaatatg

SEQ ID NO: 94611 - DNA, 25 bp, SARS Virus
ggtttttagatatcaccgaatatga

SEQ ID NO: 94612 - DNA, 25 bp, SARS Virus
gtttttagataataccgaatatgat

SEQ ID NO: 94613 - DNA, 25 bp, SARS Virus
tttttagataactccgaatatgata

SEQ ID NO: 94614 - DNA, 25 bp, SARS Virus
ttttagataacatcgaatatgatac

SEQ ID NO: 94615 - DNA, 25 bp, SARS Virus
tttagataacactgaatatgataca

SEQ ID NO: 94616 - DNA, 25 bp, SARS Virus
ttagataacacctaatatgatacag

SEQ ID NO: 94617 - DNA, 25 bp, SARS Virus
tagataacaccgtatatgatacaga

SEQ ID NO: 94618 - DNA, 25 bp, SARS Virus
agataacaccgattatgatacagaa

SEQ ID NO: 94619 - DNA, 25 bp, SARS Virus
gataacaccgaatatgatacagaaa

SEQ ID NO: 94620 - DNA, 25 bp, SARS Virus
ataacaccgaatttgatacagaaat

SEQ ID NO: 94621 - DNA, 25 bp, SARS Virus
taacaccgaatatgatacagaaatc

SEQ ID NO: 94622 - DNA, 25 bp, SARS Virus
aacaccgaatattatacagaaatcc

SEQ ID NO: 94623 - DNA, 25 bp, SARS Virus
acaccgaatatgttacagaaatcca

SEQ ID NO: 94624 - DNA, 25 bp, SARS Virus
caccgaatatgatacagaaatccac

SEQ ID NO: 94625 - DNA, 25 bp, SARS Virus
accgaatatgattcagaaatccacg

SEQ ID NO: 94626 - DNA, 25 bp, SARS Virus
ccgaatatgatatagaaatccacga

SEQ ID NO: 94627 - DNA, 25 bp, SARS Virus
cgaatatgatactgaaatccacgac

SEQ ID NO: 94628 - DNA, 25 bp, SARS Virus
gaatatgatacataaatccacgact

SEQ ID NO: 94629 - DNA, 25 bp, SARS Virus
aatatgatacagtaatccacgacta

SEQ ID NO: 94630 - DNA, 25 bp, SARS Virus
atatgatacagatatccacgactat

SEQ ID NO: 94631 - DNA, 25 bp, SARS Virus
tatgatacagaattccacgactatc

SEQ ID NO: 94632 - DNA, 25 bp, SARS Virus
atgatacagaaatccacgactatca

SEQ ID NO: 94633 - DNA, 25 bp, SARS Virus
tgatacagaaattcacgactatcaa

SEQ ID NO: 94634 - DNA, 25 bp, SARS Virus
gatacagaaatctacgactatcaag

SEQ ID NO: 94635 - DNA, 25 bp, SARS Virus
atacagaaatcctcgactatcaagt

SEQ ID NO: 94636 - DNA, 25 bp, SARS Virus
tacagaaatccatgactatcaagtt

SEQ ID NO: 94637 - DNA, 25 bp, SARS Virus
acagaaatccactactatcaagtta

SEQ ID NO: 94638 - DNA, 25 bp, SARS Virus
cagaaatccacgtctatcaagttaa

SEQ ID NO: 94639 - DNA, 25 bp, SARS Virus
agaaatccacgattatcaagttaac

SEQ ID NO: 94640 - DNA, 25 bp, SARS Virus
gaaatccacgactatcaagttaacg

SEQ ID NO: 94641 - DNA, 25 bp, SARS Virus
aaatccacgactttcaagttaacga

SEQ ID NO: 94642 - DNA, 25 bp, SARS Virus
aatccacgactatcaagttaacgaa

SEQ ID NO: 94643 - DNA, 25 bp, SARS Virus
atccacgactattaagttaacgaat

SEQ ID NO: 94644 - DNA, 25 bp, SARS Virus
tccacgactatctagttaacgaatg

SEQ ID NO: 94645 - DNA, 25 bp, SARS Virus
ccacgactatcatgttaacgaatga

SEQ ID NO: 94646 - DNA, 25 bp, SARS Virus
cacgactatcaatttaacgaatgag

SEQ ID NO: 94647 - DNA, 25 bp, SARS Virus
acgactatcaagttaacgaatgaga

SEQ ID NO: 94648 - DNA, 25 bp, SARS Virus
cgactatcaagttaacgaatgagat

SEQ ID NO: 94649 - DNA, 25 bp, SARS Virus
gactatcaagtttacgaatgagatt

SEQ ID NO: 94650 - DNA, 25 bp, SARS Virus
actatcaagttatcgaatgagatta

SEQ ID NO: 94651 - DNA, 25 bp, SARS Virus
ctatcaagttaatgaatgagattat

SEQ ID NO: 94652 - DNA, 25 bp, SARS Virus
tatcaagttaactaatgagattatt

SEQ ID NO: 94653 - DNA, 25 bp, SARS Virus
atcaagttaacgtatgagattattg

SEQ ID NO: 94654 - DNA, 25 bp, SARS Virus
tcaagttaacgattgagattattgt

SEQ ID NO: 94655 - DNA, 25 bp, SARS Virus
caagttaacgaatgagattattgtg

SEQ ID NO: 94656 - DNA, 25 bp, SARS Virus
aagttaacgaattagattattgtgg

SEQ ID NO: 94657 - DNA, 25 bp, SARS Virus
agttaacgaatgtgattattgtggt

SEQ ID NO: 94658 - DNA, 25 bp, SARS Virus
gttaacgaatgatattattgtggta

SEQ ID NO: 94659 - DNA, 25 bp, SARS Virus
ttaacgaatgagtttattgtggtaa

SEQ ID NO: 94660 - DNA, 25 bp, SARS Virus
taacgaatgagattattgtggtaac

SEQ ID NO: 94661 - DNA, 25 bp, SARS Virus
aacgaatgagattattgtggtaacg

SEQ ID NO: 94662 - DNA, 25 bp, SARS Virus
acgaatgagatttttgtggtaacga

SEQ ID NO: 94663 - DNA, 25 bp, SARS Virus
cgaatgagattattgtggtaacgat

SEQ ID NO: 94664 - DNA, 25 bp, SARS Virus
gaatgagattattgtggtaacgata

SEQ ID NO: 94665 - DNA, 25 bp, SARS Virus
aatgagattattttggtaacgatat

SEQ ID NO: 94666 - DNA, 25 bp, SARS Virus
atgagattattgtggtaacgatatg

SEQ ID NO: 94667 - DNA, 25 bp, SARS Virus
tgagattattgttgtaacgatatgg

SEQ ID NO: 94668 - DNA, 25 bp, SARS Virus
gagattattgtgttaacgatatgga

SEQ ID NO: 94669 - DNA, 25 bp, SARS Virus
agattattgtggtaacgatatggat

SEQ ID NO: 94670 - DNA, 25 bp, SARS Virus
gattattgtggttacgatatggatg

SEQ ID NO: 94671 - DNA, 25 bp, SARS Virus
attattgtggtatcgatatggatga

SEQ ID NO: 94672 - DNA, 25 bp, SARS Virus
ttattgtggtaatgatatggatgat

SEQ ID NO: 94673 - DNA, 25 bp, SARS Virus
tattgtggtaactatatggatgatt

SEQ ID NO: 94674 - DNA, 25 bp, SARS Virus
attgtggtaacgttatggatgattg

SEQ ID NO: 94675 - DNA, 25 bp, SARS Virus
ttgtggtaacgatatggatgattga

SEQ ID NO: 94676 - DNA, 25 bp, SARS Virus
tgtggtaacgatttggatgattgaa

SEQ ID NO: 94677 - DNA, 25 bp, SARS Virus
gtggtaacgatatggatgattgaaa

SEQ ID NO: 94678 - DNA, 25 bp, SARS Virus
tggtaacgatattgatgattgaaaa

SEQ ID NO: 94679 - DNA, 25 bp, SARS Virus
ggtaacgatatgtatgattgaaaag

SEQ ID NO: 94680 - DNA, 25 bp, SARS Virus
gtaacgatatggttgattgaaaagt

SEQ ID NO: 94681 - DNA, 25 bp, SARS Virus
taacgatatggatgattgaaaagtt

SEQ ID NO: 94682 - DNA, 25 bp, SARS Virus
aacgatatggattattgaaaagtta

SEQ ID NO: 94683 - DNA, 25 bp, SARS Virus
acgatatggatgtttgaaaagttaa

SEQ ID NO: 94684 - DNA, 25 bp, SARS Virus
cgatatggatgattgaaaagttaat

SEQ ID NO: 94685 - DNA, 25 bp, SARS Virus
gatatggatgattgaaaagttaatc

SEQ ID NO: 94686 - DNA, 25 bp, SARS Virus
atatggatgatttaaaagttaatcg

SEQ ID NO: 94687 - DNA, 25 bp, SARS Virus
tatggatgattgtaaagttaatcgt

SEQ ID NO: 94688 - DNA, 25 bp, SARS Virus
atggatgattgataagttaatcgta

SEQ ID NO: 94689 - DNA, 25 bp, SARS Virus
tggatgattgaatagttaatcgtaa

SEQ ID NO: 94690 - DNA, 25 bp, SARS Virus
ggatgattgaaatgttaatcgtaat

SEQ ID NO: 94691 - DNA, 25 bp, SARS Virus
gatgattgaaaatttaatcgtaatg

SEQ ID NO: 94692 - DNA, 25 bp, SARS Virus
atgattgaaaagttaatcgtaatga

SEQ ID NO: 94693 - DNA, 25 bp, SARS Virus
tgattgaaaagttaatcgtaatgat

SEQ ID NO: 94694 - DNA, 25 bp, SARS Virus
gattgaaaagtttatcgtaatgatg

SEQ ID NO: 94695 - DNA, 25 bp, SARS Virus
attgaaaagttattcgtaatgatgt

SEQ ID NO: 94696 - DNA, 25 bp, SARS Virus
ttgaaaagttaatcgtaatgatgtc

SEQ ID NO: 94697 - DNA, 25 bp, SARS Virus
tgaaaagttaattgtaatgatgtct

SEQ ID NO: 94698 - DNA, 25 bp, SARS Virus
gaaaagttaatcttaatgatgtctt

SEQ ID NO: 94699 - DNA, 25 bp, SARS Virus
aaaagttaatcgtaatgatgtcttc

SEQ ID NO: 94700 - DNA, 25 bp, SARS Virus
aaagttaatcgttatgatgtcttca

SEQ ID NO: 94701 - DNA, 25 bp, SARS Virus
aagttaatcgtattgatgtcttcat

SEQ ID NO: 94702 - DNA, 25 bp, SARS Virus
agttaatcgtaatgatgtcttcatt

SEQ ID NO: 94703 - DNA, 25 bp, SARS Virus
gttaatcgtaattatgtcttcatta

SEQ ID NO: 94704 - DNA, 25 bp, SARS Virus
ttaatcgtaatgttgtcttcattac

SEQ ID NO: 94705 - DNA, 25 bp, SARS Virus
taatcgtaatgatgtcttcattacg

SEQ ID NO: 94706 - DNA, 25 bp, SARS Virus
aatcgtaatgatttcttcattacgg

SEQ ID NO: 94707 - DNA, 25 bp, SARS Virus
atcgtaatgatgtcttcattacgga

SEQ ID NO: 94708 - DNA, 25 bp, SARS Virus
tcgtaatgatgttttcattacggac

SEQ ID NO: 94709 - DNA, 25 bp, SARS Virus
cgtaatgatgtcttcattacggaca

SEQ ID NO: 94710 - DNA, 25 bp, SARS Virus
gtaatgatgtcttcattacggacaa

SEQ ID NO: 94711 - DNA, 25 bp, SARS Virus
taatgatgtctttattacggacaaa

SEQ ID NO: 94712 - DNA, 25 bp, SARS Virus
aatgatgtcttctttacggacaaag

SEQ ID NO: 94713 - DNA, 25 bp, SARS Virus
atgatgtcttcattacggacaaaga

SEQ ID NO: 94714 - DNA, 25 bp, SARS Virus
tgatgtcttcattacggacaaagat

SEQ ID NO: 94715 - DNA, 25 bp, SARS Virus
gatgtcttcatttcggacaaagata

SEQ ID NO: 94716 - DNA, 25 bp, SARS Virus
atgtcttcattatggacaaagatac

SEQ ID NO: 94717 - DNA, 25 bp, SARS Virus
tgtcttcattactgacaaagatacc

SEQ ID NO: 94718 - DNA, 25 bp, SARS Virus
gtcttcattacgtacaaagataccg

SEQ ID NO: 94719 - DNA, 25 bp, SARS Virus
tcttcattacggtcaaagataccga

SEQ ID NO: 94720 - DNA, 25 bp, SARS Virus
cttcattacggataaagataccgat

SEQ ID NO: 94721 - DNA, 25 bp, SARS Virus
ttcattacggactaagataccgatt

SEQ ID NO: 94722 - DNA, 25 bp, SARS Virus
tcattacggacatagataccgattt

SEQ ID NO: 94723 - DNA, 25 bp, SARS Virus
cattacggacaatgataccgatttt

SEQ ID NO: 94724 - DNA, 25 bp, SARS Virus
attacggacaaatataccgattttg

SEQ ID NO: 94725 - DNA, 25 bp, SARS Virus
ttacggacaaagttaccgattttgg

SEQ ID NO: 94726 - DNA, 25 bp, SARS Virus
tacggacaaagataccgattttgga

SEQ ID NO: 94727 - DNA, 25 bp, SARS Virus
acggacaaagattccgattttggag

SEQ ID NO: 94728 - DNA, 25 bp, SARS Virus
cggacaaagatatcgattttggagg

SEQ ID NO: 94729 - DNA, 25 bp, SARS Virus
ggacaaagatactgattttggaggc

SEQ ID NO: 94730 - DNA, 25 bp, SARS Virus
gacaaagatacctattttggaggca

SEQ ID NO: 94731 - DNA, 25 bp, SARS Virus
acaaagataccgtttttggaggcat

SEQ ID NO: 94732 - DNA, 25 bp, SARS Virus
caaagataccgattttggaggcatc

SEQ ID NO: 94733 - DNA, 25 bp, SARS Virus
aaagataccgattttggaggcatct

SEQ ID NO: 94734 - DNA, 25 bp, SARS Virus
aagataccgattttggaggcatcta

SEQ ID NO: 94735 - DNA, 25 bp, SARS Virus
agataccgattttggaggcatctaa

SEQ ID NO: 94736 - DNA, 25 bp, SARS Virus
gataccgatttttgaggcatctaac

SEQ ID NO: 94737 - DNA, 25 bp, SARS Virus
ataccgattttgtaggcatctaaca

SEQ ID NO: 94738 - DNA, 25 bp, SARS Virus
taccgattttggtggcatctaacat

SEQ ID NO: 94739 - DNA, 25 bp, SARS Virus
accgattttggatgcatctaacatt

SEQ ID NO: 94740 - DNA, 25 bp, SARS Virus
ccgattttggagtcatctaacatta

SEQ ID NO: 94741 - DNA, 25 bp, SARS Virus
cgattttggaggtatctaacattat

SEQ ID NO: 94742 - DNA, 25 bp, SARS Virus
gattttggaggcttctaacattata

SEQ ID NO: 94743 - DNA, 25 bp, SARS Virus
attttggaggcatctaacattatac

SEQ ID NO: 94744 - DNA, 25 bp, SARS Virus
ttttggaggcatttaacattataca

SEQ ID NO: 94745 - DNA, 25 bp, SARS Virus
tttggaggcatctaacattatacat

SEQ ID NO: 94746 - DNA, 25 bp, SARS Virus
ttggaggcatcttacattatacatg

SEQ ID NO: 94747 - DNA, 25 bp, SARS Virus
tggaggcatctatcattatacatgt

SEQ ID NO: 94748 - DNA, 25 bp, SARS Virus
ggaggcatctaatattatacatgta

SEQ ID NO: 94749 - DNA, 25 bp, SARS Virus
gaggcatctaactttatacatgtag

SEQ ID NO: 94750 - DNA, 25 bp, SARS Virus
aggcatctaacattatacatgtaga

SEQ ID NO: 94751 - DNA, 25 bp, SARS Virus
ggcatctaacattatacatgtagac

SEQ ID NO: 94752 - DNA, 25 bp, SARS Virus
gcatctaacattttacatgtagacg

SEQ ID NO: 94753 - DNA, 25 bp, SARS Virus
catctaacattatacatgtagacgc

SEQ ID NO: 94754 - DNA, 25 bp, SARS Virus
atctaacattattcatgtagacgcc

SEQ ID NO: 94755 - DNA, 25 bp, SARS Virus
tctaacattatatatgtagacgcct

SEQ ID NO: 94756 - DNA, 25 bp, SARS Virus
ctaacattatacttgtagacgcctc

SEQ ID NO: 94757 - DNA, 25 bp, SARS Virus
taacattatacatgtagacgcctct

SEQ ID NO: 94758 - DNA, 25 bp, SARS Virus
aacattatacatttagacgcctcta

SEQ ID NO: 94759 - DNA, 25 bp, SARS Virus
acattatacatgtagacgcctctaa

SEQ ID NO: 94760 - DNA, 25 bp, SARS Virus
cattatacatgttgacgcctctaag

SEQ ID NO: 94761 - DNA, 25 bp, SARS Virus
attatacatgtatacgcctctaaga

SEQ ID NO: 94762 - DNA, 25 bp, SARS Virus
ttatacatgtagtcgcctctaagat

SEQ ID NO: 94763 - DNA, 25 bp, SARS Virus
tatacatgtagatgcctctaagatg

SEQ ID NO: 94764 - DNA, 25 bp, SARS Virus
atacatgtagactcctctaagatga

SEQ ID NO: 94765 - DNA, 25 bp, SARS Virus
tacatgtagacgtctctaagatgac

SEQ ID NO: 94766 - DNA, 25 bp, SARS Virus
acatgtagacgcttctaagatgact

SEQ ID NO: 94767 - DNA, 25 bp, SARS Virus
catgtagacgcctctaagatgactt

SEQ ID NO: 94768 - DNA, 25 bp, SARS Virus
atgtagacgcctttaagatgactta

SEQ ID NO: 94769 - DNA, 25 bp, SARS Virus
tgtagacgcctctaagatgacttac

SEQ ID NO: 94770 - DNA, 25 bp, SARS Virus
gtagacgcctcttagatgacttaca

SEQ ID NO: 94771 - DNA, 25 bp, SARS Virus
tagacgcctctatgatgacttacac

SEQ ID NO: 94772 - DNA, 25 bp, SARS Virus
agacgcctctaatatgacttacacg

SEQ ID NO: 94773 - DNA, 25 bp, SARS Virus
gacgcctctaagttgacttacacga

SEQ ID NO: 94774 - DNA, 25 bp, SARS Virus
acgcctctaagatgacttacacgat

SEQ ID NO: 94775 - DNA, 25 bp, SARS Virus
cgcctctaagattacttacacgatt

SEQ ID NO: 94776 - DNA, 25 bp, SARS Virus
gcctctaagatgtcttacacgatta

SEQ ID NO: 94777 - DNA, 25 bp, SARS Virus
cctctaagatgatttacacgattaa

SEQ ID NO: 94778 - DNA, 25 bp, SARS Virus
ctctaagatgacttacacgattaaa

SEQ ID NO: 94779 - DNA, 25 bp, SARS Virus
tctaagatgacttacacgattaaac

SEQ ID NO: 94780 - DNA, 25 bp, SARS Virus
ctaagatgactttcacgattaaacg

SEQ ID NO: 94781 - DNA, 25 bp, SARS Virus
taagatgacttatacgattaaacga

SEQ ID NO: 94782 - DNA, 25 bp, SARS Virus
aagatgacttactcgattaaacgaa

SEQ ID NO: 94783 - DNA, 25 bp, SARS Virus
agatgacttacatgattaaacgaag

SEQ ID NO: 94784 - DNA, 25 bp, SARS Virus
gatgacttacactattaaacgaaga

SEQ ID NO: 94785 - DNA, 25 bp, SARS Virus
atgacttacacgtttaaacgaagag

SEQ ID NO: 94786 - DNA, 25 bp, SARS Virus
tgacttacacgattaaacgaagagg

SEQ ID NO: 94787 - DNA, 25 bp, SARS Virus
gacttacacgattaaacgaagaggt

SEQ ID NO: 94788 - DNA, 25 bp, SARS Virus
acttacacgatttaacgaagaggtt

SEQ ID NO: 94789 - DNA, 25 bp, SARS Virus
cttacacgattatacgaagaggtta

SEQ ID NO: 94790 - DNA, 25 bp, SARS Virus
ttacacgattaatcgaagaggttat

SEQ ID NO: 94791 - DNA, 25 bp, SARS Virus
tacacgattaaatgaagaggttata

SEQ ID NO: 94792 - DNA, 25 bp, SARS Virus
acacgattaaactaagaggttatac

SEQ ID NO: 94793 - DNA, 25 bp, SARS Virus
cacgattaaacgtagaggttatacc

SEQ ID NO: 94794 - DNA, 25 bp, SARS Virus
acgattaaacgatgaggttatacca

SEQ ID NO: 94795 - DNA, 25 bp, SARS Virus
cgattaaacgaataggttataccat

SEQ ID NO: 94796 - DNA, 25 bp, SARS Virus
gattaaacgaagtggttataccatc

SEQ ID NO: 94797 - DNA, 25 bp, SARS Virus
attaaacgaagatgttataccatcg

SEQ ID NO: 94798 - DNA, 25 bp, SARS Virus
ttaaacgaagagtttataccatcga

SEQ ID NO: 94799 - DNA, 25 bp, SARS Virus
taaacgaagaggttataccatcgaa

SEQ ID NO: 94800 - DNA, 25 bp, SARS Virus
aaacgaagaggttataccatcgaaa

SEQ ID NO: 94801 - DNA, 25 bp, SARS Virus
aacgaagaggttataccatcgaaaa

SEQ ID NO: 94802 - DNA, 25 bp, SARS Virus
acgaagaggttaaaccatcgaaaac

SEQ ID NO: 94803 - DNA, 25 bp, SARS Virus
cgaagaggttataccatcgaaaacg

SEQ ID NO: 94804 - DNA, 25 bp, SARS Virus
gaagaggttataacatcgaaaacgt

SEQ ID NO: 94805 - DNA, 25 bp, SARS Virus
aagaggttatacaatcgaaaacgtg

SEQ ID NO: 94806 - DNA, 25 bp, SARS Virus
agaggttataccatcgaaaacgtgt

SEQ ID NO: 94807 - DNA, 25 bp, SARS Virus
gaggttataccaacgaaaacgtgtg

SEQ ID NO: 94808 - DNA, 25 bp, SARS Virus
aggttataccatagaaaacgtgtgt

SEQ ID NO: 94809 - DNA, 25 bp, SARS Virus
ggttataccatcaaaaacgtgtgtt

SEQ ID NO: 94810 - DNA, 25 bp, SARS Virus
gttataccatcgaaaacgtgtgttg

SEQ ID NO: 94811 - DNA, 25 bp, SARS Virus
ttataccatcgaaaacgtgtgttga

SEQ ID NO: 94812 - DNA, 25 bp, SARS Virus
tataccatcgaaaacgtgtgttgat

SEQ ID NO: 94813 - DNA, 25 bp, SARS Virus
ataccatcgaaaacgtgtgttgatt

SEQ ID NO: 94814 - DNA, 25 bp, SARS Virus
taccatcgaaaaagtgtgttgattt

SEQ ID NO: 94815 - DNA, 25 bp, SARS Virus
accatcgaaaacatgtgttgattta

SEQ ID NO: 94816 - DNA, 25 bp, SARS Virus
ccatcgaaaacgagtgttgatttag

SEQ ID NO: 94817 - DNA, 25 bp, SARS Virus
catcgaaaacgtatgttgatttagc

SEQ ID NO: 94818 - DNA, 25 bp, SARS Virus
atcgaaaacgtgagttgatttagca

SEQ ID NO: 94819 - DNA, 25 bp, SARS Virus
tcgaaaacgtgtattgatttagcac

SEQ ID NO: 94820 - DNA, 25 bp, SARS Virus
cgaaaacgtgtgatgatttagcacg

SEQ ID NO: 94821 - DNA, 25 bp, SARS Virus
gaaaacgtgtgtagatttagcacgt

SEQ ID NO: 94822 - DNA, 25 bp, SARS Virus
aaaacgtgtgttaatttagcacgtg

SEQ ID NO: 94823 - DNA, 25 bp, SARS Virus
aaacgtgtgttgatttagcacgtga

SEQ ID NO: 94824 - DNA, 25 bp, SARS Virus
aacgtgtgttgaattagcacgtgag

SEQ ID NO: 94825 - DNA, 25 bp, SARS Virus
acgtgtgttgatatagcacgtgaga

SEQ ID NO: 94826 - DNA, 25 bp, SARS Virus
cgtgtgttgattaagcacgtgagag

SEQ ID NO: 94827 - DNA, 25 bp, SARS Virus
gtgtgttgatttagcacgtgagagt

SEQ ID NO: 94828 - DNA, 25 bp, SARS Virus
tgtgttgatttaacacgtgagagtc

SEQ ID NO: 94829 - DNA, 25 bp, SARS Virus
gtgttgatttagaacgtgagagtcc

SEQ ID NO: 94830 - DNA, 25 bp, SARS Virus
tgttgatttagcacgtgagagtcca

SEQ ID NO: 94831 - DNA, 25 bp, SARS Virus
gttgatttagcaagtgagagtccat

SEQ ID NO: 94832 - DNA, 25 bp, SARS Virus
ttgatttagcacatgagagtccata

SEQ ID NO: 94833 - DNA, 25 bp, SARS Virus
tgatttagcacgagagagtccataa

SEQ ID NO: 94834 - DNA, 25 bp, SARS Virus
gatttagcacgtaagagtccataac

SEQ ID NO: 94835 - DNA, 25 bp, SARS Virus
atttagcacgtgagagtccataacg

SEQ ID NO: 94836 - DNA, 25 bp, SARS Virus
tttagcacgtgaaagtccataacga

SEQ ID NO: 94837 - DNA, 25 bp, SARS Virus
ttagcacgtgagagtccataacgac

SEQ ID NO: 94838 - DNA, 25 bp, SARS Virus
tagcacgtgagaatccataacgacg

SEQ ID NO: 94839 - DNA, 25 bp, SARS Virus
agcacgtgagagaccataacgacga

SEQ ID NO: 94840 - DNA, 25 bp, SARS Virus
gcacgtgagagtacataacgacgac

SEQ ID NO: 94841 - DNA, 25 bp, SARS Virus
cacgtgagagtcaataacgacgact

SEQ ID NO: 94842 - DNA, 25 bp, SARS Virus
acgtgagagtccataacgacgactt

SEQ ID NO: 94843 - DNA, 25 bp, SARS Virus
cgtgagagtccaaaacgacgacttg

SEQ ID NO: 94844 - DNA, 25 bp, SARS Virus
gtgagagtccataacgacgacttgt

SEQ ID NO: 94845 - DNA, 25 bp, SARS Virus
tgagagtccataacgacgacttgtc

SEQ ID NO: 94846 - DNA, 25 bp, SARS Virus
gagagtccataaagacgacttgtcc

SEQ ID NO: 94847 - DNA, 25 bp, SARS Virus
agagtccataacaacgacttgtcct

SEQ ID NO: 94848 - DNA, 25 bp, SARS Virus
gagtccataacgacgacttgtccta

SEQ ID NO: 94849 - DNA, 25 bp, SARS Virus
agtccataacgaagacttgtcctag

SEQ ID NO: 94850 - DNA, 25 bp, SARS Virus
gtccataacgacaacttgtcctagc

SEQ ID NO: 94851 - DNA, 25 bp, SARS Virus
tccataacgacgacttgtcctagcg

SEQ ID NO: 94852 - DNA, 25 bp, SARS Virus
ccataacgacgaattgtcctagcgt

SEQ ID NO: 94853 - DNA, 25 bp, SARS Virus
cataacgacgacatgtcctagcgtt

SEQ ID NO: 94854 - DNA, 25 bp, SARS Virus
ataacgacgactagtcctagcgttg

SEQ ID NO: 94855 - DNA, 25 bp, SARS Virus
taacgacgacttatcctagcgttgt

SEQ ID NO: 94856 - DNA, 25 bp, SARS Virus
aacgacgacttgacctagcgttgtg

SEQ ID NO: 94857 - DNA, 25 bp, SARS Virus
acgacgacttgtactagcgttgtgt

SEQ ID NO: 94858 - DNA, 25 bp, SARS Virus
cgacgacttgtcatagcgttgtgtg

SEQ ID NO: 94859 - DNA, 25 bp, SARS Virus
gacgacttgtccaagcgttgtgtgc

SEQ ID NO: 94860 - DNA, 25 bp, SARS Virus
acgacttgtcctagcgttgtgtgca

SEQ ID NO: 94861 - DNA, 25 bp, SARS Virus
cgacttgtcctaacgttgtgtgcac

SEQ ID NO: 94862 - DNA, 25 bp, SARS Virus
gacttgtcctagagttgtgtgcact

SEQ ID NO: 94863 - DNA, 25 bp, SARS Virus
acttgtcctagcattgtgtgcactt

SEQ ID NO: 94864 - DNA, 25 bp, SARS Virus
cttgtcctagcgatgtgtgcacttc

SEQ ID NO: 94865 - DNA, 25 bp, SARS Virus
ttgtcctagcgtagtgtgcacttca

SEQ ID NO: 94866 - DNA, 25 bp, SARS Virus
tgtcctagcgttatgtgcacttcac

SEQ ID NO: 94867 - DNA, 25 bp, SARS Virus
gtcctagcgttgagtgcacttcaca

SEQ ID NO: 94868 - DNA, 25 bp, SARS Virus
tcctagcgttgtatgcacttcacaa

SEQ ID NO: 94869 - DNA, 25 bp, SARS Virus
cctagcgttgtgagcacttcacaag

SEQ ID NO: 94870 - DNA, 25 bp, SARS Virus
ctagcgttgtgtacacttcacaagc

SEQ ID NO: 94871 - DNA, 25 bp, SARS Virus
tagcgttgtgtgaacttcacaagcg

SEQ ID NO: 94872 - DNA, 25 bp, SARS Virus
agcgttgtgtgcacttcacaagcga

SEQ ID NO: 94873 - DNA, 25 bp, SARS Virus
gcgttgtgtgcaattcacaagcgag

SEQ ID NO: 94874 - DNA, 25 bp, SARS Virus
cgttgtgtgcacatcacaagcgagt

SEQ ID NO: 94875 - DNA, 25 bp, SARS Virus
gttgtgtgcactacacaagcgagtt

SEQ ID NO: 94876 - DNA, 25 bp, SARS Virus
ttgtgtgcacttaacaagcgagttc

SEQ ID NO: 94877 - DNA, 25 bp, SARS Virus
tgtgtgcacttcacaagcgagttca

SEQ ID NO: 94878 - DNA, 25 bp, SARS Virus
gtgtgcacttcaaaagcgagttcag

SEQ ID NO: 94879 - DNA, 25 bp, SARS Virus
tgtgcacttcacaagcgagttcagt

SEQ ID NO: 94880 - DNA, 25 bp, SARS Virus
gtgcacttcacaagcgagttcagtt

SEQ ID NO: 94881 - DNA, 25 bp, SARS Virus
tgcacttcacaaacgagttcagttt

SEQ ID NO: 94882 - DNA, 25 bp, SARS Virus
gcacttcacaagagagttcagtttg

SEQ ID NO: 94883 - DNA, 25 bp, SARS Virus
cacttcacaagcaagttcagtttgt

SEQ ID NO: 94884 - DNA, 25 bp, SARS Virus
acttcacaagcgagttcagtttgtt

SEQ ID NO: 94885 - DNA, 25 bp, SARS Virus
cttcacaagcgaattcagtttgttt

SEQ ID NO: 94886 - DNA, 25 bp, SARS Virus
ttcacaagcgagatcagtttgttta

SEQ ID NO: 94887 - DNA, 25 bp, SARS Virus
tcacaagcgagtacagtttgtttac

SEQ ID NO: 94888 - DNA, 25 bp, SARS Virus
cacaagcgagttaagtttgtttaca

SEQ ID NO: 94889 - DNA, 25 bp, SARS Virus
acaagcgagttcagtttgtttacat

SEQ ID NO: 94890 - DNA, 25 bp, SARS Virus
caagcgagttcaatttgtttacatg

SEQ ID NO: 94891 - DNA, 25 bp, SARS Virus
aagcgagttcagattgtttacatgt

SEQ ID NO: 94892 - DNA, 25 bp, SARS Virus
agcgagttcagtatgtttacatgtt

SEQ ID NO: 94893 - DNA, 25 bp, SARS Virus
gcgagttcagttagtttacatgttt

SEQ ID NO: 94894 - DNA, 25 bp, SARS Virus
cgagttcagtttatttacatgtttt

SEQ ID NO: 94895 - DNA, 25 bp, SARS Virus
gagttcagtttgattacatgttttg

SEQ ID NO: 94896 - DNA, 25 bp, SARS Virus
agttcagtttgtatacatgttttgg

SEQ ID NO: 94897 - DNA, 25 bp, SARS Virus
gttcagtttgttaacatgttttggg

SEQ ID NO: 94898 - DNA, 25 bp, SARS Virus
ttcagtttgtttacatgttttgggg

SEQ ID NO: 94899 - DNA, 25 bp, SARS Virus
tcagtttgtttaaatgttttggggt

SEQ ID NO: 94900 - DNA, 25 bp, SARS Virus
cagtttgtttacatgttttggggtt

SEQ ID NO: 94901 - DNA, 25 bp, SARS Virus
agtttgtttacaagttttggggttg

SEQ ID NO: 94902 - DNA, 25 bp, SARS Virus
gtttgtttacatattttggggttga

SEQ ID NO: 94903 - DNA, 25 bp, SARS Virus
tttgtttacatgatttggggttgaa

SEQ ID NO: 94904 - DNA, 25 bp, SARS Virus
ttgtttacatgtattggggttgaaa

SEQ ID NO: 94905 - DNA, 25 bp, SARS Virus
tgtttacatgttatggggttgaaac

SEQ ID NO: 94906 - DNA, 25 bp, SARS Virus
gtttacatgtttaggggttgaaact

SEQ ID NO: 94907 - DNA, 25 bp, SARS Virus
tttacatgttttagggttgaaactt

SEQ ID NO: 94908 - DNA, 25 bp, SARS Virus
ttacatgttttgaggttgaaacttt

SEQ ID NO: 94909 - DNA, 25 bp, SARS Virus
tacatgttttggagttgaaacttta

SEQ ID NO: 94910 - DNA, 25 bp, SARS Virus
acatgttttgggattgaaactttat

SEQ ID NO: 94911 - DNA, 25 bp, SARS Virus
catgttttggggatgaaactttata

SEQ ID NO: 94912 - DNA, 25 bp, SARS Virus
atgttttggggtagaaactttataa

SEQ ID NO: 94913 - DNA, 25 bp, SARS Virus
tgttttggggttaaaactttataaa

SEQ ID NO: 94914 - DNA, 25 bp, SARS Virus
gttttggggttgaaactttataaaa

SEQ ID NO: 94915 - DNA, 25 bp, SARS Virus
ttttggggttgaaactttataaaac

SEQ ID NO: 94916 - DNA, 25 bp, SARS Virus
tttggggttgaaactttataaaacc

SEQ ID NO: 94917 - DNA, 25 bp, SARS Virus
ttggggttgaaaatttataaaacca

SEQ ID NO: 94918 - DNA, 25 bp, SARS Virus
tggggttgaaacattataaaaccac

SEQ ID NO: 94919 - DNA, 25 bp, SARS Virus
ggggttgaaactatataaaaccacc

SEQ ID NO: 94920 - DNA, 25 bp, SARS Virus
gggttgaaacttaataaaaccacca

SEQ ID NO: 94921 - DNA, 25 bp, SARS Virus
ggttgaaactttataaaaccaccaa

SEQ ID NO: 94922 - DNA, 25 bp, SARS Virus
gttgaaactttaaaaaaccaccaaa

SEQ ID NO: 94923 - DNA, 25 bp, SARS Virus
ttgaaactttataaaaccaccaaaa

SEQ ID NO: 94924 - DNA, 25 bp, SARS Virus
tgaaactttataaaaccaccaaaat

SEQ ID NO: 94925 - DNA, 25 bp, SARS Virus
gaaactttataaaaccaccaaaatt

SEQ ID NO: 94926 - DNA, 25 bp, SARS Virus
aaactttataaaaccaccaaaatta

SEQ ID NO: 94927 - DNA, 25 bp, SARS Virus
aactttataaaaacaccaaaattaa

SEQ ID NO: 94928 - DNA, 25 bp, SARS Virus
actttataaaacaaccaaaattaaa

SEQ ID NO: 94929 - DNA, 25 bp, SARS Virus
ctttataaaaccaccaaaattaaaa

SEQ ID NO: 94930 - DNA, 25 bp, SARS Virus
tttataaaaccaacaaaattaaaaa

SEQ ID NO: 94931 - DNA, 25 bp, SARS Virus
ttataaaaccacaaaaattaaaaag

SEQ ID NO: 94932 - DNA, 25 bp, SARS Virus
tataaaaccaccaaaattaaaaagt

SEQ ID NO: 94933 - DNA, 25 bp, SARS Virus
ataaaaccaccaaaattaaaaagtg

SEQ ID NO: 94934 - DNA, 25 bp, SARS Virus
taaaaccaccaaaattaaaaagtgt

SEQ ID NO: 94935 - DNA, 25 bp, SARS Virus
aaaaccaccaaaattaaaaagtgtt

SEQ ID NO: 94936 - DNA, 25 bp, SARS Virus
aaaccaccaaaaataaaaagtgttt

SEQ ID NO: 94937 - DNA, 25 bp, SARS Virus
aaccaccaaaataaaaaagtgttta

SEQ ID NO: 94938 - DNA, 25 bp, SARS Virus
accaccaaaattaaaaagtgtttat

SEQ ID NO: 94939 - DNA, 25 bp, SARS Virus
ccaccaaaattaaaaagtgtttata

SEQ ID NO: 94940 - DNA, 25 bp, SARS Virus
caccaaaattaaaaagtgtttataa

SEQ ID NO: 94941 - DNA, 25 bp, SARS Virus
accaaaattaaaaagtgtttataat

SEQ ID NO: 94942 - DNA, 25 bp, SARS Virus
ccaaaattaaaaagtgtttataatg

SEQ ID NO: 94943 - DNA, 25 bp, SARS Virus
caaaattaaaaaatgtttataatgg

SEQ ID NO: 94944 - DNA, 25 bp, SARS Virus
aaaattaaaaagagtttataatgga

SEQ ID NO: 94945 - DNA, 25 bp, SARS Virus
aaattaaaaagtatttataatggac

SEQ ID NO: 94946 - DNA, 25 bp, SARS Virus
aattaaaaagtgattataatggact

SEQ ID NO: 94947 - DNA, 25 bp, SARS Virus
attaaaaagtgtatataatggactg

SEQ ID NO: 94948 - DNA, 25 bp, SARS Virus
ttaaaaagtgttaataatggactgg

SEQ ID NO: 94949 - DNA, 25 bp, SARS Virus
taaaaagtgtttataatggactggg

SEQ ID NO: 94950 - DNA, 25 bp, SARS Virus
aaaaagtgtttaaaatggactggga

SEQ ID NO: 94951 - DNA, 25 bp, SARS Virus
aaaagtgtttataatggactgggag

SEQ ID NO: 94952 - DNA, 25 bp, SARS Virus
aaagtgtttataatggactgggaga

SEQ ID NO: 94953 - DNA, 25 bp, SARS Virus
aagtgtttataaaggactgggagat

SEQ ID NO: 94954 - DNA, 25 bp, SARS Virus
agtgtttataatagactgggagatt

SEQ ID NO: 94955 - DNA, 25 bp, SARS Virus
gtgtttataatgaactgggagattt

SEQ ID NO: 94956 - DNA, 25 bp, SARS Virus
tgtttataatggactgggagatttc

SEQ ID NO: 94957 - DNA, 25 bp, SARS Virus
gtttataatggaatgggagatttcg

SEQ ID NO: 94958 - DNA, 25 bp, SARS Virus
tttataatggacagggagatttcgg

SEQ ID NO: 94959 - DNA, 25 bp, SARS Virus
ttataatggactaggagatttcggt

SEQ ID NO: 94960 - DNA, 25 bp, SARS Virus
tataatggactgagagatttcggtt

SEQ ID NO: 94961 - DNA, 25 bp, SARS Virus
ataatggactggaagatttcggttg

SEQ ID NO: 94962 - DNA, 25 bp, SARS Virus
taatggactgggagatttcggttga

SEQ ID NO: 94963 - DNA, 25 bp, SARS Virus
aatggactgggaaatttcggttgat

SEQ ID NO: 94964 - DNA, 25 bp, SARS Virus
atggactgggagatttcggttgatt

SEQ ID NO: 94965 - DNA, 25 bp, SARS Virus
tggactgggagaattcggttgattc

SEQ ID NO: 94966 - DNA, 25 bp, SARS Virus
ggactgggagatatcggttgattct

SEQ ID NO: 94967 - DNA, 25 bp, SARS Virus
gactgggagattacggttgattctc

SEQ ID NO: 94968 - DNA, 25 bp, SARS Virus
actgggagatttaggttgattctcc

SEQ ID NO: 94969 - DNA, 25 bp, SARS Virus
ctgggagatttcagttgattctcca

SEQ ID NO: 94970 - DNA, 25 bp, SARS Virus
tgggagatttcgattgattctccag

SEQ ID NO: 94971 - DNA, 25 bp, SARS Virus
gggagatttcggatgattctccaga

SEQ ID NO: 94972 - DNA, 25 bp, SARS Virus
ggagatttcggtagattctccagaa

SEQ ID NO: 94973 - DNA, 25 bp, SARS Virus
gagatttcggttaattctccagaaa

SEQ ID NO: 94974 - DNA, 25 bp, SARS Virus
agatttcggttgattctccagaaaa

SEQ ID NO: 94975 - DNA, 25 bp, SARS Virus
gatttcggttgaatctccagaaaat

SEQ ID NO: 94976 - DNA, 25 bp, SARS Virus
atttcggttgatactccagaaaata

SEQ ID NO: 94977 - DNA, 25 bp, SARS Virus
tttcggttgattatccagaaaataa

SEQ ID NO: 94978 - DNA, 25 bp, SARS Virus
ttcggttgattcaccagaaaataac

SEQ ID NO: 94979 - DNA, 25 bp, SARS Virus
tcggttgattctacagaaaataact

SEQ ID NO: 94980 - DNA, 25 bp, SARS Virus
cggttgattctcaagaaaataactc

SEQ ID NO: 94981 - DNA, 25 bp, SARS Virus
ggttgattctccagaaaataactcc

SEQ ID NO: 94982 - DNA, 25 bp, SARS Virus
gttgattctccaaaaaataactcct

SEQ ID NO: 94983 - DNA, 25 bp, SARS Virus
ttgattctccagaaaataactcctg

SEQ ID NO: 94984 - DNA, 25 bp, SARS Virus
tgattctccagaaaataactcctga

SEQ ID NO: 94985 - DNA, 25 bp, SARS Virus
gattctccagaaaataactcctgaa

SEQ ID NO: 94986 - DNA, 25 bp, SARS Virus
attctccagaaaataactcctgaac

SEQ ID NO: 94987 - DNA, 25 bp, SARS Virus
ttctccagaaaaaaactcctgaacg

SEQ ID NO: 94988 - DNA, 25 bp, SARS Virus
tctccagaaaataactcctgaacga

SEQ ID NO: 94989 - DNA, 25 bp, SARS Virus
ctccagaaaataactcctgaacgag

SEQ ID NO: 94990 - DNA, 25 bp, SARS Virus
tccagaaaataaatcctgaacgaga

SEQ ID NO: 94991 - DNA, 25 bp, SARS Virus
ccagaaaataacacctgaacgagaa

SEQ ID NO: 94992 - DNA, 25 bp, SARS Virus
cagaaaataactactgaacgagaaa

SEQ ID NO: 94993 - DNA, 25 bp, SARS Virus
agaaaataactcatgaacgagaaat

SEQ ID NO: 94994 - DNA, 25 bp, SARS Virus
gaaaataactccagaacgagaaatt

SEQ ID NO: 94995 - DNA, 25 bp, SARS Virus
aaaataactcctaaacgagaaatta

SEQ ID NO: 94996 - DNA, 25 bp, SARS Virus
aaataactcctgaacgagaaattat

SEQ ID NO: 94997 - DNA, 25 bp, SARS Virus
aataactcctgaacgagaaattatt

SEQ ID NO: 94998 - DNA, 25 bp, SARS Virus
ataactcctgaaagagaaattattc

SEQ ID NO: 94999 - DNA, 25 bp, SARS Virus
taactcctgaacaagaaattattcc

SEQ ID NO: 95000 - DNA, 25 bp, SARS Virus
aactcctgaacgagaaattattcca

SEQ ID NO: 95001 - DNA, 25 bp, SARS Virus
actcctgaacgaaaaattattccac

SEQ ID NO: 95002 - DNA, 25 bp, SARS Virus
ctcctgaacgagaaattattccact

SEQ ID NO: 95003 - DNA, 25 bp, SARS Virus
tcctgaacgagaaattattccactg

SEQ ID NO: 95004 - DNA, 25 bp, SARS Virus
cctgaacgagaaattattccactgt

SEQ ID NO: 95005 - DNA, 25 bp, SARS Virus
ctgaacgagaaaatattccactgtg

SEQ ID NO: 95006 - DNA, 25 bp, SARS Virus
tgaacgagaaataattccactgtga

SEQ ID NO: 95007 - DNA, 25 bp, SARS Virus
gaacgagaaattattccactgtgag

SEQ ID NO: 95008 - DNA, 25 bp, SARS Virus
aacgagaaattaatccactgtgagc

SEQ ID NO: 95009 - DNA, 25 bp, SARS Virus
acgagaaattataccactgtgagcg

SEQ ID NO: 95010 - DNA, 25 bp, SARS Virus
cgagaaattattacactgtgagcga

SEQ ID NO: 95011 - DNA, 25 bp, SARS Virus
gagaaattattcaactgtgagcgac

SEQ ID NO: 95012 - DNA, 25 bp, SARS Virus
agaaattattccactgtgagcgact

SEQ ID NO: 95013 - DNA, 25 bp, SARS Virus
gaaattattccaatgtgagcgacta

SEQ ID NO: 95014 - DNA, 25 bp, SARS Virus
aaattattccacagtgagcgactac

SEQ ID NO: 95015 - DNA, 25 bp, SARS Virus
aattattccactatgagcgactacg

SEQ ID NO: 95016 - DNA, 25 bp, SARS Virus
attattccactgagagcgactacga

SEQ ID NO: 95017 - DNA, 25 bp, SARS Virus
ttattccactgtaagcgactacgac

SEQ ID NO: 95018 - DNA, 25 bp, SARS Virus
tattccactgtgagcgactacgacc

SEQ ID NO: 95019 - DNA, 25 bp, SARS Virus
attccactgtgaacgactacgaccg

SEQ ID NO: 95020 - DNA, 25 bp, SARS Virus
ttccactgtgagagactacgaccga

SEQ ID NO: 95021 - DNA, 25 bp, SARS Virus
tccactgtgagcaactacgaccgaa

SEQ ID NO: 95022 - DNA, 25 bp, SARS Virus
ccactgtgagcgactacgaccgaag

SEQ ID NO: 95023 - DNA, 25 bp, SARS Virus
cactgtgagcgaatacgaccgaagt

SEQ ID NO: 95024 - DNA, 25 bp, SARS Virus
actgtgagcgacaacgaccgaagta

SEQ ID NO: 95025 - DNA, 25 bp, SARS Virus
ctgtgagcgactacgaccgaagtac

SEQ ID NO: 95026 - DNA, 25 bp, SARS Virus
tgtgagcgactaagaccgaagtact

SEQ ID NO: 95027 - DNA, 25 bp, SARS Virus
gtgagcgactacaaccgaagtactt

SEQ ID NO: 95028 - DNA, 25 bp, SARS Virus
tgagcgactacgaccgaagtacttc

SEQ ID NO: 95029 - DNA, 25 bp, SARS Virus
gagcgactacgaacgaagtacttcg

SEQ ID NO: 95030 - DNA, 25 bp, SARS Virus
agcgactacgacagaagtacttcgt

SEQ ID NO: 95031 - DNA, 25 bp, SARS Virus
gcgactacgaccaaagtacttcgtt

SEQ ID NO: 95032 - DNA, 25 bp, SARS Virus
cgactacgaccgaagtacttcgtta

SEQ ID NO: 95033 - DNA, 25 bp, SARS Virus
gactacgaccgaagtacttcgttat

SEQ ID NO: 95034 - DNA, 25 bp, SARS Virus
actacgaccgaaatacttcgttata

SEQ ID NO: 95035 - DNA, 25 bp, SARS Virus
ctacgaccgaagaacttcgttatac

SEQ ID NO: 95036 - DNA, 25 bp, SARS Virus
tacgaccgaagtacttcgttatacc

SEQ ID NO: 95037 - DNA, 25 bp, SARS Virus
acgaccgaagtaattcgttataccg

SEQ ID NO: 95038 - DNA, 25 bp, SARS Virus
cgaccgaagtacatcgttataccgc

SEQ ID NO: 95039 - DNA, 25 bp, SARS Virus
gaccgaagtactacgttataccgct

SEQ ID NO: 95040 - DNA, 25 bp, SARS Virus
accgaagtacttagttataccgctt

SEQ ID NO: 95041 - DNA, 25 bp, SARS Virus
ccgaagtacttcattataccgctta

SEQ ID NO: 95042 - DNA, 25 bp, SARS Virus
cgaagtacttcgatataccgcttac

SEQ ID NO: 95043 - DNA, 25 bp, SARS Virus
gaagtacttcgtaataccgcttacg

SEQ ID NO: 95044 - DNA, 25 bp, SARS Virus
aagtacttcgttataccgcttacgg

SEQ ID NO: 95045 - DNA, 25 bp, SARS Virus
agtacttcgttaaaccgcttacgga

SEQ ID NO: 95046 - DNA, 25 bp, SARS Virus
gtacttcgttataccgcttacggat

SEQ ID NO: 95047 - DNA, 25 bp, SARS Virus
tacttcgttataacgcttacggatc

SEQ ID NO: 95048 - DNA, 25 bp, SARS Virus
acttcgttatacagcttacggatcc

SEQ ID NO: 95049 - DNA, 25 bp, SARS Virus
cttcgttataccacttacggatcca

SEQ ID NO: 95050 - DNA, 25 bp, SARS Virus
ttcgttataccgattacggatccac

SEQ ID NO: 95051 - DNA, 25 bp, SARS Virus
tcgttataccgcatacggatccact

SEQ ID NO: 95052 - DNA, 25 bp, SARS Virus
cgttataccgctaacggatccacta

SEQ ID NO: 95053 - DNA, 25 bp, SARS Virus
gttataccgcttacggatccactat

SEQ ID NO: 95054 - DNA, 25 bp, SARS Virus
ttataccgcttaaggatccactata

SEQ ID NO: 95055 - DNA, 25 bp, SARS Virus
tataccgcttacagatccactataa

SEQ ID NO: 95056 - DNA, 25 bp, SARS Virus
ataccgcttacgaatccactataat

SEQ ID NO: 95057 - DNA, 25 bp, SARS Virus
taccgcttacggatccactataatt

SEQ ID NO: 95058 - DNA, 25 bp, SARS Virus
accgcttacggaaccactataatta

SEQ ID NO: 95059 - DNA, 25 bp, SARS Virus
ccgcttacggatacactataattac

SEQ ID NO: 95060 - DNA, 25 bp, SARS Virus
cgcttacggatcaactataattacg

SEQ ID NO: 95061 - DNA, 25 bp, SARS Virus
gcttacggatccactataattacga

SEQ ID NO: 95062 - DNA, 25 bp, SARS Virus
cttacggatccaatataattacgat

SEQ ID NO: 95063 - DNA, 25 bp, SARS Virus
ttacggatccacaataattacgatc

SEQ ID NO: 95064 - DNA, 25 bp, SARS Virus
tacggatccactataattacgatct

SEQ ID NO: 95065 - DNA, 25 bp, SARS Virus
acggatccactaaaattacgatctc

SEQ ID NO: 95066 - DNA, 25 bp, SARS Virus
cggatccactataattacgatctct

SEQ ID NO: 95067 - DNA, 25 bp, SARS Virus
ggatccactataattacgatctcta

SEQ ID NO: 95068 - DNA, 25 bp, SARS Virus
gatccactataaatacgatctctag

SEQ ID NO: 95069 - DNA, 25 bp, SARS Virus
atccactataataacgatctctaga

SEQ ID NO: 95070 - DNA, 25 bp, SARS Virus
tccactataattacgatctctagag

SEQ ID NO: 95071 - DNA, 25 bp, SARS Virus
ccactataattaagatctctagagt

SEQ ID NO: 95072 - DNA, 25 bp, SARS Virus
cactataattacaatctctagagta

SEQ ID NO: 95073 - DNA, 25 bp, SARS Virus
actataattacgatctctagagtaa

SEQ ID NO: 95074 - DNA, 25 bp, SARS Virus
ctataattacgaactctagagtaaa

SEQ ID NO: 95075 - DNA, 25 bp, SARS Virus
tataattacgatatctagagtaaac

SEQ ID NO: 95076 - DNA, 25 bp, SARS Virus
ataattacgatcactagagtaaaca

SEQ ID NO: 95077 - DNA, 25 bp, SARS Virus
taattacgatctatagagtaaacac

SEQ ID NO: 95078 - DNA, 25 bp, SARS Virus
aattacgatctcaagagtaaacacg

SEQ ID NO: 95079 - DNA, 25 bp, SARS Virus
attacgatctctagagtaaacacgc

SEQ ID NO: 95080 - DNA, 25 bp, SARS Virus
ttacgatctctaaagtaaacacgcg

SEQ ID NO: 95081 - DNA, 25 bp, SARS Virus
tacgatctctagagtaaacacgcgt

SEQ ID NO: 95082 - DNA, 25 bp, SARS Virus
acgatctctagaataaacacgcgtc

SEQ ID NO: 95083 - DNA, 25 bp, SARS Virus
cgatctctagagaaaacacgcgtct

SEQ ID NO: 95084 - DNA, 25 bp, SARS Virus
gatctctagagtaaacacgcgtctt

SEQ ID NO: 95085 - DNA, 25 bp, SARS Virus
atctctagagtaaacacgcgtcttc

SEQ ID NO: 95086 - DNA, 25 bp, SARS Virus
tctctagagtaaacacgcgtcttca

SEQ ID NO: 95087 - DNA, 25 bp, SARS Virus
ctctagagtaaaaacgcgtcttcaa

SEQ ID NO: 95088 - DNA, 25 bp, SARS Virus
tctagagtaaacacgcgtcttcaag

SEQ ID NO: 95089 - DNA, 25 bp, SARS Virus
ctagagtaaacaagcgtcttcaagt

SEQ ID NO: 95090 - DNA, 25 bp, SARS Virus
tagagtaaacacacgtcttcaagtt

SEQ ID NO: 95091 - DNA, 25 bp, SARS Virus
agagtaaacacgagtcttcaagtta

SEQ ID NO: 95092 - DNA, 25 bp, SARS Virus
gagtaaacacgcatcttcaagttac

SEQ ID NO: 95093 - DNA, 25 bp, SARS Virus
agtaaacacgcgacttcaagttacc

SEQ ID NO: 95094 - DNA, 25 bp, SARS Virus
gtaaacacgcgtattcaagttacct

SEQ ID NO: 95095 - DNA, 25 bp, SARS Virus
taaacacgcgtcatcaagttacctg

SEQ ID NO: 95096 - DNA, 25 bp, SARS Virus
aaacacgcgtctacaagttacctga

SEQ ID NO: 95097 - DNA, 25 bp, SARS Virus
aacacgcgtcttaaagttacctgaa

SEQ ID NO: 95098 - DNA, 25 bp, SARS Virus
acacgcgtcttcaagttacctgaat

SEQ ID NO: 95099 - DNA, 25 bp, SARS Virus
cacgcgtcttcaagttacctgaatg

SEQ ID NO: 95100 - DNA, 25 bp, SARS Virus
acgcgtcttcaaattacctgaatgt

SEQ ID NO: 95101 - DNA, 25 bp, SARS Virus
cgcgtcttcaagatacctgaatgtc

SEQ ID NO: 95102 - DNA, 25 bp, SARS Virus
gcgtcttcaagtaacctgaatgtca

SEQ ID NO: 95103 - DNA, 25 bp, SARS Virus
cgtcttcaagttacctgaatgtcac

SEQ ID NO: 95104 - DNA, 25 bp, SARS Virus
gtcttcaagttaactgaatgtcaca

SEQ ID NO: 95105 - DNA, 25 bp, SARS Virus
tcttcaagttacatgaatgtcacaa

SEQ ID NO: 95106 - DNA, 25 bp, SARS Virus
cttcaagttaccagaatgtcacaac

SEQ ID NO: 95107 - DNA, 25 bp, SARS Virus
ttcaagttacctaaatgtcacaacg

SEQ ID NO: 95108 - DNA, 25 bp, SARS Virus
tcaagttacctgaatgtcacaacgg

SEQ ID NO: 95109 - DNA, 25 bp, SARS Virus
caagttacctgaatgtcacaacggt

SEQ ID NO: 95110 - DNA, 25 bp, SARS Virus
aagttacctgaaagtcacaacggtg

SEQ ID NO: 95111 - DNA, 25 bp, SARS Virus
agttacctgaatatcacaacggtgg

SEQ ID NO: 95112 - DNA, 25 bp, SARS Virus
gttacctgaatgacacaacggtgga

SEQ ID NO: 95113 - DNA, 25 bp, SARS Virus
ttacctgaatgtaacaacggtggag

SEQ ID NO: 95114 - DNA, 25 bp, SARS Virus
tacctgaatgtcacaacggtggaga

SEQ ID NO: 95115 - DNA, 25 bp, SARS Virus
acctgaatgtcaaaacggtggagac

SEQ ID NO: 95116 - DNA, 25 bp, SARS Virus
cctgaatgtcacaacggtggagacg

SEQ ID NO: 95117 - DNA, 25 bp, SARS Virus
ctgaatgtcacaacggtggagacga

SEQ ID NO: 95118 - DNA, 25 bp, SARS Virus
tgaatgtcacaaaggtggagacgag

SEQ ID NO: 95119 - DNA, 25 bp, SARS Virus
gaatgtcacaacagtggagacgagt

SEQ ID NO: 95120 - DNA, 25 bp, SARS Virus
aatgtcacaacgatggagacgagtg

SEQ ID NO: 95121 - DNA, 25 bp, SARS Virus
atgtcacaacggaggagacgagtga

SEQ ID NO: 95122 - DNA, 25 bp, SARS Virus
tgtcacaacggtagagacgagtgac

SEQ ID NO: 95123 - DNA, 25 bp, SARS Virus
gtcacaacggtgaagacgagtgact

SEQ ID NO: 95124 - DNA, 25 bp, SARS Virus
tcacaacggtggagacgagtgacta

SEQ ID NO: 95125 - DNA, 25 bp, SARS Virus
cacaacggtggaaacgagtgactac

SEQ ID NO: 95126 - DNA, 25 bp, SARS Virus
acaacggtggagacgagtgactact

SEQ ID NO: 95127 - DNA, 25 bp, SARS Virus
caacggtggagaagagtgactacta

SEQ ID NO: 95128 - DNA, 25 bp, SARS Virus
aacggtggagacaagtgactactat

SEQ ID NO: 95129 - DNA, 25 bp, SARS Virus
acggtggagacgagtgactactata

SEQ ID NO: 95130 - DNA, 25 bp, SARS Virus
cggtggagacgaatgactactatac

SEQ ID NO: 95131 - DNA, 25 bp, SARS Virus
ggtggagacgagagactactatact

SEQ ID NO: 95132 - DNA, 25 bp, SARS Virus
gtggagacgagtaactactatacta

SEQ ID NO: 95133 - DNA, 25 bp, SARS Virus
tggagacgagtgactactatactaa

SEQ ID NO: 95134 - DNA, 25 bp, SARS Virus
ggagacgagtgaatactatactaac

SEQ ID NO: 95135 - DNA, 25 bp, SARS Virus
gagacgagtgacaactatactaacg

SEQ ID NO: 95136 - DNA, 25 bp, SARS Virus
agacgagtgactactatactaacga

SEQ ID NO: 95137 - DNA, 25 bp, SARS Virus
gacgagtgactaatatactaacgac

SEQ ID NO: 95138 - DNA, 25 bp, SARS Virus
acgagtgactacaatactaacgacg

SEQ ID NO: 95139 - DNA, 25 bp, SARS Virus
cgagtgactactatactaacgacgg

SEQ ID NO: 95140 - DNA, 25 bp, SARS Virus
gagtgactactaaactaacgacgga

SEQ ID NO: 95141 - DNA, 25 bp, SARS Virus
agtgactactatactaacgacggat

SEQ ID NO: 95142 - DNA, 25 bp, SARS Virus
gtgactactataataacgacggatg

SEQ ID NO: 95143 - DNA, 25 bp, SARS Virus
tgactactatacaaacgacggatgt

SEQ ID NO: 95144 - DNA, 25 bp, SARS Virus
gactactatactaacgacggatgtg

SEQ ID NO: 95145 - DNA, 25 bp, SARS Virus
actactatactaacgacggatgtga

SEQ ID NO: 95146 - DNA, 25 bp, SARS Virus
ctactatactaaagacggatgtgac

SEQ ID NO: 95147 - DNA, 25 bp, SARS Virus
tactatactaacaacggatgtgacg

SEQ ID NO: 95148 - DNA, 25 bp, SARS Virus
actatactaacgacggatgtgacga

SEQ ID NO: 95149 - DNA, 25 bp, SARS Virus
ctatactaacgaaggatgtgacgac

SEQ ID NO: 95150 - DNA, 25 bp, SARS Virus
tatactaacgacagatgtgacgacg

SEQ ID NO: 95151 - DNA, 25 bp, SARS Virus
atactaacgacgaatgtgacgacga

SEQ ID NO: 95152 - DNA, 25 bp, SARS Virus
tactaacgacggatgtgacgacgag

SEQ ID NO: 95153 - DNA, 25 bp, SARS Virus
actaacgacggaagtgacgacgaga

SEQ ID NO: 95154 - DNA, 25 bp, SARS Virus
ctaacgacggatatgacgacgagat

SEQ ID NO: 95155 - DNA, 25 bp, SARS Virus
taacgacggatgagacgacgagatc

SEQ ID NO: 95156 - DNA, 25 bp, SARS Virus
aacgacggatgtaacgacgagatca

SEQ ID NO: 95157 - DNA, 25 bp, SARS Virus
acgacggatgtgacgacgagatcaa

SEQ ID NO: 95158 - DNA, 25 bp, SARS Virus
cgacggatgtgaagacgagatcaat

SEQ ID NO: 95159 - DNA, 25 bp, SARS Virus
gacggatgtgacaacgagatcaatc

SEQ ID NO: 95160 - DNA, 25 bp, SARS Virus
acggatgtgacgacgagatcaatca

SEQ ID NO: 95161 - DNA, 25 bp, SARS Virus
cggatgtgacgaagagatcaatcac

SEQ ID NO: 95162 - DNA, 25 bp, SARS Virus
ggatgtgacgacaagatcaatcacc

SEQ ID NO: 95163 - DNA, 25 bp, SARS Virus
gatgtgacgacgagatcaatcacca

SEQ ID NO: 95164 - DNA, 25 bp, SARS Virus
atgtgacgacgaaatcaatcaccat

SEQ ID NO: 95165 - DNA, 25 bp, SARS Virus
tgtgacgacgagatcaatcaccatg

SEQ ID NO: 95166 - DNA, 25 bp, SARS Virus
gtgacgacgagaacaatcaccatga

SEQ ID NO: 95167 - DNA, 25 bp, SARS Virus
tgacgacgagataaatcaccatgac

SEQ ID NO: 95168 - DNA, 25 bp, SARS Virus
gacgacgagatcaatcaccatgacg

SEQ ID NO: 95169 - DNA, 25 bp, SARS Virus
acgacgagatcaatcaccatgacgg

SEQ ID NO: 95170 - DNA, 25 bp, SARS Virus
cgacgagatcaaacaccatgacggt

SEQ ID NO: 95171 - DNA, 25 bp, SARS Virus
gacgagatcaataaccatgacggtg

SEQ ID NO: 95172 - DNA, 25 bp, SARS Virus
acgagatcaatcaccatgacggtga

SEQ ID NO: 95173 - DNA, 25 bp, SARS Virus
cgagatcaatcaacatgacggtgac

SEQ ID NO: 95174 - DNA, 25 bp, SARS Virus
gagatcaatcacaatgacggtgacg

SEQ ID NO: 95175 - DNA, 25 bp, SARS Virus
agatcaatcaccatgacggtgacga

SEQ ID NO: 95176 - DNA, 25 bp, SARS Virus
gatcaatcaccaagacggtgacgac

SEQ ID NO: 95177 - DNA, 25 bp, SARS Virus
atcaatcaccataacggtgacgacc

SEQ ID NO: 95178 - DNA, 25 bp, SARS Virus
tcaatcaccatgacggtgacgacct

SEQ ID NO: 95179 - DNA, 25 bp, SARS Virus
caatcaccatgaaggtgacgaccta

SEQ ID NO: 95180 - DNA, 25 bp, SARS Virus
aatcaccatgacagtgacgacctac

SEQ ID NO: 95181 - DNA, 25 bp, SARS Virus
atcaccatgacgatgacgacctacc

SEQ ID NO: 95182 - DNA, 25 bp, SARS Virus
tcaccatgacggagacgacctacct

SEQ ID NO: 95183 - DNA, 25 bp, SARS Virus
caccatgacggtaacgacctacctg

SEQ ID NO: 95184 - DNA, 25 bp, SARS Virus
accatgacggtgacgacctacctgt

SEQ ID NO: 95185 - DNA, 25 bp, SARS Virus
ccatgacggtgaagacctacctgta

SEQ ID NO: 95186 - DNA, 25 bp, SARS Virus
catgacggtgacaacctacctgtaa

SEQ ID NO: 95187 - DNA, 25 bp, SARS Virus
atgacggtgacgacctacctgtaaa

SEQ ID NO: 95188 - DNA, 25 bp, SARS Virus
tgacggtgacgaactacctgtaaac

SEQ ID NO: 95189 - DNA, 25 bp, SARS Virus
gacggtgacgacatacctgtaaacc

SEQ ID NO: 95190 - DNA, 25 bp, SARS Virus
acggtgacgaccaacctgtaaacca

SEQ ID NO: 95191 - DNA, 25 bp, SARS Virus
cggtgacgacctacctgtaaaccac

SEQ ID NO: 95192 - DNA, 25 bp, SARS Virus
ggtgacgacctaactgtaaaccacg

SEQ ID NO: 95193 - DNA, 25 bp, SARS Virus
gtgacgacctacatgtaaaccacga

SEQ ID NO: 95194 - DNA, 25 bp, SARS Virus
tgacgacctaccagtaaaccacgac

SEQ ID NO: 95195 - DNA, 25 bp, SARS Virus
gacgacctacctataaaccacgacc

SEQ ID NO: 95196 - DNA, 25 bp, SARS Virus
acgacctacctgaaaaccacgaccg

SEQ ID NO: 95197 - DNA, 25 bp, SARS Virus
cgacctacctgtaaaccacgaccgc

SEQ ID NO: 95198 - DNA, 25 bp, SARS Virus
gacctacctgtaaaccacgaccgcg

SEQ ID NO: 95199 - DNA, 25 bp, SARS Virus
acctacctgtaaaccacgaccgcga

SEQ ID NO: 95200 - DNA, 25 bp, SARS Virus
cctacctgtaaaacacgaccgcgac

SEQ ID NO: 95201 - DNA, 25 bp, SARS Virus
ctacctgtaaacaacgaccgcgacg

SEQ ID NO: 95202 - DNA, 25 bp, SARS Virus
tacctgtaaaccacgaccgcgacga

SEQ ID NO: 95203 - DNA, 25 bp, SARS Virus
acctgtaaaccaagaccgcgacgag

SEQ ID NO: 95204 - DNA, 25 bp, SARS Virus
cctgtaaaccacaaccgcgacgaga

SEQ ID NO: 95205 - DNA, 25 bp, SARS Virus
ctgtaaaccacgaccgcgacgagaa

SEQ ID NO: 95206 - DNA, 25 bp, SARS Virus
tgtaaaccacgaacgcgacgagaag

SEQ ID NO: 95207 - DNA, 25 bp, SARS Virus
gtaaaccacgacagcgacgagaagt

SEQ ID NO: 95208 - DNA, 25 bp, SARS Virus
taaaccacgaccacgacgagaagtt

SEQ ID NO: 95209 - DNA, 25 bp, SARS Virus
aaaccacgaccgagacgagaagttt

SEQ ID NO: 95210 - DNA, 25 bp, SARS Virus
aaccacgaccgcaacgagaagttta

SEQ ID NO: 95211 - DNA, 25 bp, SARS Virus
accacgaccgcgacgagaagtttat

SEQ ID NO: 95212 - DNA, 25 bp, SARS Virus
ccacgaccgcgaagagaagtttatg

SEQ ID NO: 95213 - DNA, 25 bp, SARS Virus
cacgaccgcgacaagaagtttatgg

SEQ ID NO: 95214 - DNA, 25 bp, SARS Virus
acgaccgcgacgagaagtttatgga

SEQ ID NO: 95215 - DNA, 25 bp, SARS Virus
cgaccgcgacgaaaagtttatggaa

SEQ ID NO: 95216 - DNA, 25 bp, SARS Virus
gaccgcgacgagaagtttatggaaa

SEQ ID NO: 95217 - DNA, 25 bp, SARS Virus
accgcgacgagaagtttatggaaaa

SEQ ID NO: 95218 - DNA, 25 bp, SARS Virus
ccgcgacgagaaatttatggaaaac

SEQ ID NO: 95219 - DNA, 25 bp, SARS Virus
cgcgacgagaagattatggaaaacg

SEQ ID NO: 95220 - DNA, 25 bp, SARS Virus
gcgacgagaagtatatggaaaacga

SEQ ID NO: 95221 - DNA, 25 bp, SARS Virus
cgacgagaagttaatggaaaacgat

SEQ ID NO: 95222 - DNA, 25 bp, SARS Virus
gacgagaagtttatggaaaacgata

SEQ ID NO: 95223 - DNA, 25 bp, SARS Virus
acgagaagtttaaggaaaacgatac

SEQ ID NO: 95224 - DNA, 25 bp, SARS Virus
cgagaagtttatagaaaacgatacg

SEQ ID NO: 95225 - DNA, 25 bp, SARS Virus
gagaagtttatgaaaaacgatacgt

SEQ ID NO: 95226 - DNA, 25 bp, SARS Virus
agaagtttatggaaaacgatacgtt

SEQ ID NO: 95227 - DNA, 25 bp, SARS Virus
gaagtttatggaaaacgatacgttt

SEQ ID NO: 95228 - DNA, 25 bp, SARS Virus
aagtttatggaaaacgatacgttta

SEQ ID NO: 95229 - DNA, 25 bp, SARS Virus
agtttatggaaaacgatacgtttac

SEQ ID NO: 95230 - DNA, 25 bp, SARS Virus
gtttatggaaaaagatacgtttacc

SEQ ID NO: 95231 - DNA, 25 bp, SARS Virus
tttatggaaaacaatacgtttaccg

SEQ ID NO: 95232 - DNA, 25 bp, SARS Virus
ttatggaaaacgatacgtttaccgt

SEQ ID NO: 95233 - DNA, 25 bp, SARS Virus
tatggaaaacgaaacgtttaccgta

SEQ ID NO: 95234 - DNA, 25 bp, SARS Virus
atggaaaacgatacgtttaccgtat

SEQ ID NO: 95235 - DNA, 25 bp, SARS Virus
tggaaaacgataagtttaccgtata

SEQ ID NO: 95236 - DNA, 25 bp, SARS Virus
ggaaaacgatacatttaccgtatat

SEQ ID NO: 95237 - DNA, 25 bp, SARS Virus
gaaaacgatacgattaccgtatatc

SEQ ID NO: 95238 - DNA, 25 bp, SARS Virus
aaaacgatacgtataccgtatatcc

SEQ ID NO: 95239 - DNA, 25 bp, SARS Virus
aaacgatacgttaaccgtatatcca

SEQ ID NO: 95240 - DNA, 25 bp, SARS Virus
aacgatacgtttaccgtatatccaa

SEQ ID NO: 95241 - DNA, 25 bp, SARS Virus
acgatacgtttaacgtatatccaag

SEQ ID NO: 95242 - DNA, 25 bp, SARS Virus
cgatacgtttacagtatatccaagt

SEQ ID NO: 95243 - DNA, 25 bp, SARS Virus
gatacgtttaccatatatccaagtt

SEQ ID NO: 95244 - DNA, 25 bp, SARS Virus
atacgtttaccgaatatccaagtta

SEQ ID NO: 95245 - DNA, 25 bp, SARS Virus
tacgtttaccgtatatccaagttac

SEQ ID NO: 95246 - DNA, 25 bp, SARS Virus
acgtttaccgtaaatccaagttacc

SEQ ID NO: 95247 - DNA, 25 bp, SARS Virus
cgtttaccgtatatccaagttaccg

SEQ ID NO: 95248 - DNA, 25 bp, SARS Virus
gtttaccgtataaccaagttaccgt

SEQ ID NO: 95249 - DNA, 25 bp, SARS Virus
tttaccgtatatacaagttaccgta

SEQ ID NO: 95250 - DNA, 25 bp, SARS Virus
ttaccgtatatcaaagttaccgtaa

SEQ ID NO: 95251 - DNA, 25 bp, SARS Virus
taccgtatatccaagttaccgtaac

SEQ ID NO: 95252 - DNA, 25 bp, SARS Virus
accgtatatccaagttaccgtaacc

SEQ ID NO: 95253 - DNA, 25 bp, SARS Virus
ccgtatatccaaattaccgtaacct

SEQ ID NO: 95254 - DNA, 25 bp, SARS Virus
cgtatatccaagataccgtaacctc

SEQ ID NO: 95255 - DNA, 25 bp, SARS Virus
gtatatccaagtaaccgtaacctca

SEQ ID NO: 95256 - DNA, 25 bp, SARS Virus
tatatccaagttaccgtaacctcaa

SEQ ID NO: 95257 - DNA, 25 bp, SARS Virus
atatccaagttaacgtaacctcaat

SEQ ID NO: 95258 - DNA, 25 bp, SARS Virus
tatccaagttacagtaacctcaatg

SEQ ID NO: 95259 - DNA, 25 bp, SARS Virus
atccaagttaccataacctcaatgg

SEQ ID NO: 95260 - DNA, 25 bp, SARS Virus
tccaagttaccgaaacctcaatggg

SEQ ID NO: 95261 - DNA, 25 bp, SARS Virus
ccaagttaccgtaacctcaatgggt

SEQ ID NO: 95262 - DNA, 25 bp, SARS Virus
caagttaccgtaacctcaatgggtt

SEQ ID NO: 95263 - DNA, 25 bp, SARS Virus
aagttaccgtaaactcaatgggttt

SEQ ID NO: 95264 - DNA, 25 bp, SARS Virus
agttaccgtaacatcaatgggtttt

SEQ ID NO: 95265 - DNA, 25 bp, SARS Virus
gttaccgtaaccacaatgggtttta

SEQ ID NO: 95266 - DNA, 25 bp, SARS Virus
ttaccgtaacctaaatgggttttac

SEQ ID NO: 95267 - DNA, 25 bp, SARS Virus
taccgtaacctcaatgggttttaca

SEQ ID NO: 95268 - DNA, 25 bp, SARS Virus
accgtaacctcaatgggttttacaa

SEQ ID NO: 95269 - DNA, 25 bp, SARS Virus
ccgtaacctcaaagggttttacaag

SEQ ID NO: 95270 - DNA, 25 bp, SARS Virus
cgtaacctcaataggttttacaaga

SEQ ID NO: 95271 - DNA, 25 bp, SARS Virus
gtaacctcaatgagttttacaagag

SEQ ID NO: 95272 - DNA, 25 bp, SARS Virus
taacctcaatggattttacaagaga

SEQ ID NO: 95273 - DNA, 25 bp, SARS Virus
aacctcaatgggatttacaagagat

SEQ ID NO: 95274 - DNA, 25 bp, SARS Virus
acctcaatgggtattacaagagata

SEQ ID NO: 95275 - DNA, 25 bp, SARS Virus
cctcaatgggttatacaagagatac

SEQ ID NO: 95276 - DNA, 25 bp, SARS Virus
ctcaatgggtttaacaagagatact

SEQ ID NO: 95277 - DNA, 25 bp, SARS Virus
tcaatgggttttacaagagatactc

SEQ ID NO: 95278 - DNA, 25 bp, SARS Virus
caatgggttttaaaagagatactct

SEQ ID NO: 95279 - DNA, 25 bp, SARS Virus
aatgggttttacaagagatactctt

SEQ ID NO: 95280 - DNA, 25 bp, SARS Virus
atgggttttacaagagatactcttg

SEQ ID NO: 95281 - DNA, 25 bp, SARS Virus
tgggttttacaaaagatactcttgg

SEQ ID NO: 95282 - DNA, 25 bp, SARS Virus
gggttttacaagagatactcttggt

SEQ ID NO: 95283 - DNA, 25 bp, SARS Virus
ggttttacaagaaatactcttggtt

SEQ ID NO: 95284 - DNA, 25 bp, SARS Virus
gttttacaagagatactcttggttt

SEQ ID NO: 95285 - DNA, 25 bp, SARS Virus
ttttacaagagaaactcttggtttt

SEQ ID NO: 95286 - DNA, 25 bp, SARS Virus
tttacaagagatactcttggttttt

SEQ ID NO: 95287 - DNA, 25 bp, SARS Virus
ttacaagagataatcttggtttttg

SEQ ID NO: 95288 - DNA, 25 bp, SARS Virus
tacaagagatacacttggtttttgt

SEQ ID NO: 95289 - DNA, 25 bp, SARS Virus
aacgaagaggttctaccatcgaaaa

SEQ ID NO: 95290 - DNA, 25 bp, SARS Virus
acgaagaggttacaccatcgaaaac

SEQ ID NO: 95291 - DNA, 25 bp, SARS Virus
cgaagaggttatcccatcgaaaacg

SEQ ID NO: 95292 - DNA, 25 bp, SARS Virus
gaagaggttataccatcgaaaacgt

SEQ ID NO: 95293 - DNA, 25 bp, SARS Virus
aagaggttataccatcgaaaacgtg

SEQ ID NO: 95294 - DNA, 25 bp, SARS Virus
agaggttataccctcgaaaacgtgt

SEQ ID NO: 95295 - DNA, 25 bp, SARS Virus
gaggttataccaccgaaaacgtgtg

SEQ ID NO: 95296 - DNA, 25 bp, SARS Virus
aggttataccatcgaaaacgtgtgt

SEQ ID NO: 95297 - DNA, 25 bp, SARS Virus
ggttataccatccaaaacgtgtgtt

SEQ ID NO: 95298 - DNA, 25 bp, SARS Virus
gttataccatcgcaaacgtgtgttg

SEQ ID NO: 95299 - DNA, 25 bp, SARS Virus
ttataccatcgacaacgtgtgttga

SEQ ID NO: 95300 - DNA, 25 bp, SARS Virus
tataccatcgaacacgtgtgttgat

SEQ ID NO: 95301 - DNA, 25 bp, SARS Virus
ataccatcgaaaccgtgtgttgatt

SEQ ID NO: 95302 - DNA, 25 bp, SARS Virus
taccatcgaaaacgtgtgttgattt

SEQ ID NO: 95303 - DNA, 25 bp, SARS Virus
accatcgaaaacctgtgttgattta

SEQ ID NO: 95304 - DNA, 25 bp, SARS Virus
ccatcgaaaacgcgtgttgatttag

SEQ ID NO: 95305 - DNA, 25 bp, SARS Virus
catcgaaaacgtctgttgatttagc

SEQ ID NO: 95306 - DNA, 25 bp, SARS Virus
atcgaaaacgtgcgttgatttagca

SEQ ID NO: 95307 - DNA, 25 bp, SARS Virus
tcgaaaacgtgtcttgatttagcac

SEQ ID NO: 95308 - DNA, 25 bp, SARS Virus
cgaaaacgtgtgctgatttagcacg

SEQ ID NO: 95309 - DNA, 25 bp, SARS Virus
gaaaacgtgtgtcgatttagcacgt

SEQ ID NO: 95310 - DNA, 25 bp, SARS Virus
aaaacgtgtgttcatttagcacgtg

SEQ ID NO: 95311 - DNA, 25 bp, SARS Virus
aaacgtgtgttgctttagcacgtga

SEQ ID NO: 95312 - DNA, 25 bp, SARS Virus
aacgtgtgttgacttagcacgtgag

SEQ ID NO: 95313 - DNA, 25 bp, SARS Virus
acgtgtgttgatctagcacgtgaga

SEQ ID NO: 95314 - DNA, 25 bp, SARS Virus
cgtgtgttgattcagcacgtgagag

SEQ ID NO: 95315 - DNA, 25 bp, SARS Virus
gtgtgttgatttcgcacgtgagagt

SEQ ID NO: 95316 - DNA, 25 bp, SARS Virus
tgtgttgatttaccacgtgagagtc

SEQ ID NO: 95317 - DNA, 25 bp, SARS Virus
gtgttgatttagcacgtgagagtcc

SEQ ID NO: 95318 - DNA, 25 bp, SARS Virus
tgttgatttagcccgtgagagtcca

SEQ ID NO: 95319 - DNA, 25 bp, SARS Virus
gttgatttagcacgtgagagtccat

SEQ ID NO: 95320 - DNA, 25 bp, SARS Virus
ttgatttagcacctgagagtccata

SEQ ID NO: 95321 - DNA, 25 bp, SARS Virus
tgatttagcacgcgagagtccataa

SEQ ID NO: 95322 - DNA, 25 bp, SARS Virus
gatttagcacgtcagagtccataac

SEQ ID NO: 95323 - DNA, 25 bp, SARS Virus
atttagcacgtgcgagtccataacg

SEQ ID NO: 95324 - DNA, 25 bp, SARS Virus
tttagcacgtgacagtccataacga

SEQ ID NO: 95325 - DNA, 25 bp, SARS Virus
ttagcacgtgagcgtccataacgac

SEQ ID NO: 95326 - DNA, 25 bp, SARS Virus
tagcacgtgagactccataacgacg

SEQ ID NO: 95327 - DNA, 25 bp, SARS Virus
agcacgtgagagcccataacgacga

SEQ ID NO: 95328 - DNA, 25 bp, SARS Virus
gcacgtgagagtccataacgacgac

SEQ ID NO: 95329 - DNA, 25 bp, SARS Virus
cacgtgagagtccataacgacgact

SEQ ID NO: 95330 - DNA, 25 bp, SARS Virus
acgtgagagtccctaacgacgactt

SEQ ID NO: 95331 - DNA, 25 bp, SARS Virus
cgtgagagtccacaacgacgacttg

SEQ ID NO: 95332 - DNA, 25 bp, SARS Virus
gtgagagtccatcacgacgacttgt

SEQ ID NO: 95333 - DNA, 25 bp, SARS Virus
tgagagtccataccgacgacttgtc

SEQ ID NO: 95334 - DNA, 25 bp, SARS Virus
gagagtccataacgacgacttgtcc

SEQ ID NO: 95335 - DNA, 25 bp, SARS Virus
agagtccataaccacgacttgtcct

SEQ ID NO: 95336 - DNA, 25 bp, SARS Virus
gagtccataacgccgacttgtccta

SEQ ID NO: 95337 - DNA, 25 bp, SARS Virus
agtccataacgacgacttgtcctag

SEQ ID NO: 95338 - DNA, 25 bp, SARS Virus
gtccataacgaccacttgtcctagc

SEQ ID NO: 95339 - DNA, 25 bp, SARS Virus
tccataacgacgccttgtcctagcg

SEQ ID NO: 95340 - DNA, 25 bp, SARS Virus
ccataacgacgacttgtcctagcgt

SEQ ID NO: 95341 - DNA, 25 bp, SARS Virus
cataacgacgacctgtcctagcgtt

SEQ ID NO: 95342 - DNA, 25 bp, SARS Virus
ataacgacgactcgtcctagcgttg

SEQ ID NO: 95343 - DNA, 25 bp, SARS Virus
taacgacgacttctcctagcgttgt

SEQ ID NO: 95344 - DNA, 25 bp, SARS Virus
aacgacgacttgccctagcgttgtg

SEQ ID NO: 95345 - DNA, 25 bp, SARS Virus
acgacgacttgtcctagcgttgtgt

SEQ ID NO: 95346 - DNA, 25 bp, SARS Virus
cgacgacttgtcctagcgttgtgtg

SEQ ID NO: 95347 - DNA, 25 bp, SARS Virus
gacgacttgtcccagcgttgtgtgc

SEQ ID NO: 95348 - DNA, 25 bp, SARS Virus
acgacttgtcctcgcgttgtgtgca

SEQ ID NO: 95349 - DNA, 25 bp, SARS Virus
cgacttgtcctaccgttgtgtgcac

SEQ ID NO: 95350 - DNA, 25 bp, SARS Virus
gacttgtcctagcgttgtgtgcact

SEQ ID NO: 95351 - DNA, 25 bp, SARS Virus
acttgtcctagccttgtgtgcactt

SEQ ID NO: 95352 - DNA, 25 bp, SARS Virus
cttgtcctagcgctgtgtgcacttc

SEQ ID NO: 95353 - DNA, 25 bp, SARS Virus
ttgtcctagcgtcgtgtgcacttca

SEQ ID NO: 95354 - DNA, 25 bp, SARS Virus
tgtcctagcgttctgtgcacttcac

SEQ ID NO: 95355 - DNA, 25 bp, SARS Virus
gtcctagcgttgcgtgcacttcaca

SEQ ID NO: 95356 - DNA, 25 bp, SARS Virus
tcctagcgttgtctgcacttcacaa

SEQ ID NO: 95357 - DNA, 25 bp, SARS Virus
cctagcgttgtgcgcacttcacaag

SEQ ID NO: 95358 - DNA, 25 bp, SARS Virus
ctagcgttgtgtccacttcacaagc

SEQ ID NO: 95359 - DNA, 25 bp, SARS Virus
tagcgttgtgtgcacttcacaagcg

SEQ ID NO: 95360 - DNA, 25 bp, SARS Virus
agcgttgtgtgcccttcacaagcga

SEQ ID NO: 95361 - DNA, 25 bp, SARS Virus
gcgttgtgtgcacttcacaagcgag

SEQ ID NO: 95362 - DNA, 25 bp, SARS Virus
cgttgtgtgcacctcacaagcgagt

SEQ ID NO: 95363 - DNA, 25 bp, SARS Virus
gttgtgtgcactccacaagcgagtt

SEQ ID NO: 95364 - DNA, 25 bp, SARS Virus
ttgtgtgcacttcacaagcgagttc

SEQ ID NO: 95365 - DNA, 25 bp, SARS Virus
tgtgtgcacttcccaagcgagttca

SEQ ID NO: 95366 - DNA, 25 bp, SARS Virus
gtgtgcacttcacaagcgagttcag

SEQ ID NO: 95367 - DNA, 25 bp, SARS Virus
tgtgcacttcaccagcgagttcagt

SEQ ID NO: 95368 - DNA, 25 bp, SARS Virus
gtgcacttcacacgcgagttcagtt

SEQ ID NO: 95369 - DNA, 25 bp, SARS Virus
tgcacttcacaaccgagttcagttt

SEQ ID NO: 95370 - DNA, 25 bp, SARS Virus
gcacttcacaagcgagttcagtttg

SEQ ID NO: 95371 - DNA, 25 bp, SARS Virus
cacttcacaagccagttcagtttgt

SEQ ID NO: 95372 - DNA, 25 bp, SARS Virus
acttcacaagcgcgttcagtttgtt

SEQ ID NO: 95373 - DNA, 25 bp, SARS Virus
cttcacaagcgacttcagtttgttt

SEQ ID NO: 95374 - DNA, 25 bp, SARS Virus
ttcacaagcgagctcagtttgttta

SEQ ID NO: 95375 - DNA, 25 bp, SARS Virus
tcacaagcgagtccagtttgtttac

SEQ ID NO: 95376 - DNA, 25 bp, SARS Virus
cacaagcgagttcagtttgtttaca

SEQ ID NO: 95377 - DNA, 25 bp, SARS Virus
acaagcgagttccgtttgtttacat

SEQ ID NO: 95378 - DNA, 25 bp, SARS Virus
caagcgagttcactttgtttacatg

SEQ ID NO: 95379 - DNA, 25 bp, SARS Virus
aagcgagttcagcttgtttacatgt

SEQ ID NO: 95380 - DNA, 25 bp, SARS Virus
agcgagttcagtctgtttacatgtt

SEQ ID NO: 95381 - DNA, 25 bp, SARS Virus
gcgagttcagttcgtttacatgttt

SEQ ID NO: 95382 - DNA, 25 bp, SARS Virus
cgagttcagtttctttacatgtttt

SEQ ID NO: 95383 - DNA, 25 bp, SARS Virus
gagttcagtttgcttacatgttttg

SEQ ID NO: 95384 - DNA, 25 bp, SARS Virus
agttcagtttgtctacatgttttgg

SEQ ID NO: 95385 - DNA, 25 bp, SARS Virus
gttcagtttgttcacatgttttggg

SEQ ID NO: 95386 - DNA, 25 bp, SARS Virus
ttcagtttgtttccatgttttgggg

SEQ ID NO: 95387 - DNA, 25 bp, SARS Virus
tcagtttgtttacatgttttggggt

SEQ ID NO: 95388 - DNA, 25 bp, SARS Virus
cagtttgtttacctgttttggggtt

SEQ ID NO: 95389 - DNA, 25 bp, SARS Virus
agtttgtttacacgttttggggttg

SEQ ID NO: 95390 - DNA, 25 bp, SARS Virus
gtttgtttacatcttttggggttga

SEQ ID NO: 95391 - DNA, 25 bp, SARS Virus
tttgtttacatgctttggggttgaa

SEQ ID NO: 95392 - DNA, 25 bp, SARS Virus
ttgtttacatgtcttggggttgaaa

SEQ ID NO: 95393 - DNA, 25 bp, SARS Virus
tgtttacatgttctggggttgaaac

SEQ ID NO: 95394 - DNA, 25 bp, SARS Virus
gtttacatgtttcggggttgaaact

SEQ ID NO: 95395 - DNA, 25 bp, SARS Virus
tttacatgttttcgggttgaaactt

SEQ ID NO: 95396 - DNA, 25 bp, SARS Virus
ttacatgttttgcggttgaaacttt

SEQ ID NO: 95397 - DNA, 25 bp, SARS Virus
tacatgttttggcgttgaaacttta

SEQ ID NO: 95398 - DNA, 25 bp, SARS Virus
acatgttttgggcttgaaactttat

SEQ ID NO: 95399 - DNA, 25 bp, SARS Virus
catgttttggggctgaaactttata

SEQ ID NO: 95400 - DNA, 25 bp, SARS Virus
atgttttggggtcgaaactttataa

SEQ ID NO: 95401 - DNA, 25 bp, SARS Virus
tgttttggggttcaaactttataaa

SEQ ID NO: 95402 - DNA, 25 bp, SARS Virus
gttttggggttgcaactttataaaa

SEQ ID NO: 95403 - DNA, 25 bp, SARS Virus
ttttggggttgacactttataaaac

SEQ ID NO: 95404 - DNA, 25 bp, SARS Virus
tttggggttgaacctttataaaacc

SEQ ID NO: 95405 - DNA, 25 bp, SARS Virus
ttggggttgaaactttataaaacca

SEQ ID NO: 95406 - DNA, 25 bp, SARS Virus
tggggttgaaaccttataaaaccac

SEQ ID NO: 95407 - DNA, 25 bp, SARS Virus
ggggttgaaactctataaaaccacc

SEQ ID NO: 95408 - DNA, 25 bp, SARS Virus
gggttgaaacttcataaaaccacca

SEQ ID NO: 95409 - DNA, 25 bp, SARS Virus
ggttgaaactttctaaaaccaccaa

SEQ ID NO: 95410 - DNA, 25 bp, SARS Virus
gttgaaactttacaaaaccaccaaa

SEQ ID NO: 95411 - DNA, 25 bp, SARS Virus
ttgaaactttatcaaaccaccaaaa

SEQ ID NO: 95412 - DNA, 25 bp, SARS Virus
tgaaactttatacaaccaccaaaat

SEQ ID NO: 95413 - DNA, 25 bp, SARS Virus
gaaactttataacaccaccaaaatt

SEQ ID NO: 95414 - DNA, 25 bp, SARS Virus
aaactttataaacccaccaaaatta

SEQ ID NO: 95415 - DNA, 25 bp, SARS Virus
aactttataaaaccaccaaaattaa

SEQ ID NO: 95416 - DNA, 25 bp, SARS Virus
actttataaaaccaccaaaattaaa

SEQ ID NO: 95417 - DNA, 25 bp, SARS Virus
ctttataaaacccccaaaattaaaa

SEQ ID NO: 95418 - DNA, 25 bp, SARS Virus
tttataaaaccaccaaaattaaaaa

SEQ ID NO: 95419 - DNA, 25 bp, SARS Virus
ttataaaaccaccaaaattaaaaag

SEQ ID NO: 95420 - DNA, 25 bp, SARS Virus
tataaaaccacccaaattaaaaagt

SEQ ID NO: 95421 - DNA, 25 bp, SARS Virus
ataaaaccaccacaattaaaaagtg

SEQ ID NO: 95422 - DNA, 25 bp, SARS Virus
taaaaccaccaacattaaaaagtgt

SEQ ID NO: 95423 - DNA, 25 bp, SARS Virus
aaaaccaccaaacttaaaaagtgtt

SEQ ID NO: 95424 - DNA, 25 bp, SARS Virus
aaaccaccaaaactaaaaagtgttt

SEQ ID NO: 95425 - DNA, 25 bp, SARS Virus
aaccaccaaaatcaaaaagtgttta

SEQ ID NO: 95426 - DNA, 25 bp, SARS Virus
accaccaaaattcaaaagtgtttat

SEQ ID NO: 95427 - DNA, 25 bp, SARS Virus
ccaccaaaattacaaagtgtttata

SEQ ID NO: 95428 - DNA, 25 bp, SARS Virus
caccaaaattaacaagtgtttataa

SEQ ID NO: 95429 - DNA, 25 bp, SARS Virus
accaaaattaaacagtgtttataat

SEQ ID NO: 95430 - DNA, 25 bp, SARS Virus
ccaaaattaaaacgtgtttataatg

SEQ ID NO: 95431 - DNA, 25 bp, SARS Virus
caaaattaaaaactgtttataatgg

SEQ ID NO: 95432 - DNA, 25 bp, SARS Virus
aaaattaaaaagcgtttataatgga

SEQ ID NO: 95433 - DNA, 25 bp, SARS Virus
aaattaaaaagtctttataatggac

SEQ ID NO: 95434 - DNA, 25 bp, SARS Virus
aattaaaaagtgcttataatggact

SEQ ID NO: 95435 - DNA, 25 bp, SARS Virus
attaaaaagtgtctataatggactg

SEQ ID NO: 95436 - DNA, 25 bp, SARS Virus
ttaaaaagtgttcataatggactgg

SEQ ID NO: 95437 - DNA, 25 bp, SARS Virus
taaaaagtgtttctaatggactggg

SEQ ID NO: 95438 - DNA, 25 bp, SARS Virus
aaaaagtgtttacaatggactggga

SEQ ID NO: 95439 - DNA, 25 bp, SARS Virus
aaaagtgtttatcatggactgggag

SEQ ID NO: 95440 - DNA, 25 bp, SARS Virus
aaagtgtttatactggactgggaga

SEQ ID NO: 95441 - DNA, 25 bp, SARS Virus
aagtgtttataacggactgggagat

SEQ ID NO: 95442 - DNA, 25 bp, SARS Virus
agtgtttataatcgactgggagatt

SEQ ID NO: 95443 - DNA, 25 bp, SARS Virus
gtgtttataatgcactgggagattt

SEQ ID NO: 95444 - DNA, 25 bp, SARS Virus
tgtttataatggcctgggagatttc

SEQ ID NO: 95445 - DNA, 25 bp, SARS Virus
gtttataatggactgggagatttcg

SEQ ID NO: 95446 - DNA, 25 bp, SARS Virus
tttataatggaccgggagatttcgg

SEQ ID NO: 95447 - DNA, 25 bp, SARS Virus
ttataatggactcggagatttcggt

SEQ ID NO: 95448 - DNA, 25 bp, SARS Virus
tataatggactgcgagatttcggtt

SEQ ID NO: 95449 - DNA, 25 bp, SARS Virus
ataatggactggcagatttcggttg

SEQ ID NO: 95450 - DNA, 25 bp, SARS Virus
taatggactgggcgatttcggttga

SEQ ID NO: 95451 - DNA, 25 bp, SARS Virus
aatggactgggacatttcggttgat

SEQ ID NO: 95452 - DNA, 25 bp, SARS Virus
atggactgggagctttcggttgatt

SEQ ID NO: 95453 - DNA, 25 bp, SARS Virus
tggactgggagacttcggttgattc

SEQ ID NO: 95454 - DNA, 25 bp, SARS Virus
ggactgggagatctcggttgattct

SEQ ID NO: 95455 - DNA, 25 bp, SARS Virus
gactgggagattccggttgattctc

SEQ ID NO: 95456 - DNA, 25 bp, SARS Virus
actgggagatttcggttgattctcc

SEQ ID NO: 95457 - DNA, 25 bp, SARS Virus
ctgggagatttccgttgattctcca

SEQ ID NO: 95458 - DNA, 25 bp, SARS Virus
tgggagatttcgcttgattctccag

SEQ ID NO: 95459 - DNA, 25 bp, SARS Virus
gggagatttcggctgattctccaga

SEQ ID NO: 95460 - DNA, 25 bp, SARS Virus
ggagatttcggtcgattctccagaa

SEQ ID NO: 95461 - DNA, 25 bp, SARS Virus
gagatttcggttcattctccagaaa

SEQ ID NO: 95462 - DNA, 25 bp, SARS Virus
agatttcggttgcttctccagaaaa

SEQ ID NO: 95463 - DNA, 25 bp, SARS Virus
gatttcggttgactctccagaaaat

SEQ ID NO: 95464 - DNA, 25 bp, SARS Virus
atttcggttgatcctccagaaaata

SEQ ID NO: 95465 - DNA, 25 bp, SARS Virus
tttcggttgattctccagaaaataa

SEQ ID NO: 95466 - DNA, 25 bp, SARS Virus
ttcggttgattccccagaaaataac

SEQ ID NO: 95467 - DNA, 25 bp, SARS Virus
tcggttgattctccagaaaataact

SEQ ID NO: 95468 - DNA, 25 bp, SARS Virus
cggttgattctccagaaaataactc

SEQ ID NO: 95469 - DNA, 25 bp, SARS Virus
ggttgattctcccgaaaataactcc

SEQ ID NO: 95470 - DNA, 25 bp, SARS Virus
gttgattctccacaaaataactcct

SEQ ID NO: 95471 - DNA, 25 bp, SARS Virus
ttgattctccagcaaataactcctg

SEQ ID NO: 95472 - DNA, 25 bp, SARS Virus
tgattctccagacaataactcctga

SEQ ID NO: 95473 - DNA, 25 bp, SARS Virus
gattctccagaacataactcctgaa

SEQ ID NO: 95474 - DNA, 25 bp, SARS Virus
attctccagaaactaactcctgaac

SEQ ID NO: 95475 - DNA, 25 bp, SARS Virus
ttctccagaaaacaactcctgaacg

SEQ ID NO: 95476 - DNA, 25 bp, SARS Virus
tctccagaaaatcactcctgaacga

SEQ ID NO: 95477 - DNA, 25 bp, SARS Virus
ctccagaaaatacctcctgaacgag

SEQ ID NO: 95478 - DNA, 25 bp, SARS Virus
tccagaaaataactcctgaacgaga

SEQ ID NO: 95479 - DNA, 25 bp, SARS Virus
ccagaaaataacccctgaacgagaa

SEQ ID NO: 95480 - DNA, 25 bp, SARS Virus
cagaaaataactcctgaacgagaaa

SEQ ID NO: 95481 - DNA, 25 bp, SARS Virus
agaaaataactcctgaacgagaaat

SEQ ID NO: 95482 - DNA, 25 bp, SARS Virus
gaaaataactcccgaacgagaaatt

SEQ ID NO: 95483 - DNA, 25 bp, SARS Virus
aaaataactcctcaacgagaaatta

SEQ ID NO: 95484 - DNA, 25 bp, SARS Virus
aaataactcctgcacgagaaattat

SEQ ID NO: 95485 - DNA, 25 bp, SARS Virus
aataactcctgaccgagaaattatt

SEQ ID NO: 95486 - DNA, 25 bp, SARS Virus
ataactcctgaacgagaaattattc

SEQ ID NO: 95487 - DNA, 25 bp, SARS Virus
taactcctgaaccagaaattattcc

SEQ ID NO: 95488 - DNA, 25 bp, SARS Virus
aactcctgaacgcgaaattattcca

SEQ ID NO: 95489 - DNA, 25 bp, SARS Virus
actcctgaacgacaaattattccac

SEQ ID NO: 95490 - DNA, 25 bp, SARS Virus
ctcctgaacgagcaattattccact

SEQ ID NO: 95491 - DNA, 25 bp, SARS Virus
tcctgaacgagacattattccactg

SEQ ID NO: 95492 - DNA, 25 bp, SARS Virus
cctgaacgagaacttattccactgt

SEQ ID NO: 95493 - DNA, 25 bp, SARS Virus
ctgaacgagaaactattccactgtg

SEQ ID NO: 95494 - DNA, 25 bp, SARS Virus
tgaacgagaaatcattccactgtga

SEQ ID NO: 95495 - DNA, 25 bp, SARS Virus
gaacgagaaattcttccactgtgag

SEQ ID NO: 95496 - DNA, 25 bp, SARS Virus
aacgagaaattactccactgtgagc

SEQ ID NO: 95497 - DNA, 25 bp, SARS Virus
acgagaaattatcccactgtgagcg

SEQ ID NO: 95498 - DNA, 25 bp, SARS Virus
cgagaaattattccactgtgagcga

SEQ ID NO: 95499 - DNA, 25 bp, SARS Virus
gagaaattattccactgtgagcgac

SEQ ID NO: 95500 - DNA, 25 bp, SARS Virus
agaaattattcccctgtgagcgact

SEQ ID NO: 95501 - DNA, 25 bp, SARS Virus
gaaattattccactgtgagcgacta

SEQ ID NO: 95502 - DNA, 25 bp, SARS Virus
aaattattccaccgtgagcgactac

SEQ ID NO: 95503 - DNA, 25 bp, SARS Virus
aattattccactctgagcgactacg

SEQ ID NO: 95504 - DNA, 25 bp, SARS Virus
attattccactgcgagcgactacga

SEQ ID NO: 95505 - DNA, 25 bp, SARS Virus
ttattccactgtcagcgactacgac

SEQ ID NO: 95506 - DNA, 25 bp, SARS Virus
tattccactgtgcgcgactacgacc

SEQ ID NO: 95507 - DNA, 25 bp, SARS Virus
attccactgtgaccgactacgaccg

SEQ ID NO: 95508 - DNA, 25 bp, SARS Virus
ttccactgtgagcgactacgaccga

SEQ ID NO: 95509 - DNA, 25 bp, SARS Virus
tccactgtgagccactacgaccgaa

SEQ ID NO: 95510 - DNA, 25 bp, SARS Virus
ccactgtgagcgcctacgaccgaag

SEQ ID NO: 95511 - DNA, 25 bp, SARS Virus
cactgtgagcgactacgaccgaagt

SEQ ID NO: 95512 - DNA, 25 bp, SARS Virus
actgtgagcgaccacgaccgaagta

SEQ ID NO: 95513 - DNA, 25 bp, SARS Virus
ctgtgagcgactccgaccgaagtac

SEQ ID NO: 95514 - DNA, 25 bp, SARS Virus
tgtgagcgactacgaccgaagtact

SEQ ID NO: 95515 - DNA, 25 bp, SARS Virus
gtgagcgactaccaccgaagtactt

SEQ ID NO: 95516 - DNA, 25 bp, SARS Virus
tgagcgactacgcccgaagtacttc

SEQ ID NO: 95517 - DNA, 25 bp, SARS Virus
gagcgactacgaccgaagtacttcg

SEQ ID NO: 95518 - DNA, 25 bp, SARS Virus
agcgactacgaccgaagtacttcgt

SEQ ID NO: 95519 - DNA, 25 bp, SARS Virus
gcgactacgacccaagtacttcgtt

SEQ ID NO: 95520 - DNA, 25 bp, SARS Virus
cgactacgaccgcagtacttcgtta

SEQ ID NO: 95521 - DNA, 25 bp, SARS Virus
gactacgaccgacgtacttcgttat

SEQ ID NO: 95522 - DNA, 25 bp, SARS Virus
actacgaccgaactacttcgttata

SEQ ID NO: 95523 - DNA, 25 bp, SARS Virus
ctacgaccgaagcacttcgttatac

SEQ ID NO: 95524 - DNA, 25 bp, SARS Virus
tacgaccgaagtccttcgttatacc

SEQ ID NO: 95525 - DNA, 25 bp, SARS Virus
acgaccgaagtacttcgttataccg

SEQ ID NO: 95526 - DNA, 25 bp, SARS Virus
cgaccgaagtacctcgttataccgc

SEQ ID NO: 95527 - DNA, 25 bp, SARS Virus
gaccgaagtactccgttataccgct

SEQ ID NO: 95528 - DNA, 25 bp, SARS Virus
accgaagtacttcgttataccgctt

SEQ ID NO: 95529 - DNA, 25 bp, SARS Virus
ccgaagtacttccttataccgctta

SEQ ID NO: 95530 - DNA, 25 bp, SARS Virus
cgaagtacttcgctataccgcttac

SEQ ID NO: 95531 - DNA, 25 bp, SARS Virus
gaagtacttcgtcataccgcttacg

SEQ ID NO: 95532 - DNA, 25 bp, SARS Virus
aagtacttcgttctaccgcttacgg

SEQ ID NO: 95533 - DNA, 25 bp, SARS Virus
agtacttcgttacaccgcttacgga

SEQ ID NO: 95534 - DNA, 25 bp, SARS Virus
gtacttcgttatcccgcttacggat

SEQ ID NO: 95535 - DNA, 25 bp, SARS Virus
tacttcgttataccgcttacggatc

SEQ ID NO: 95536 - DNA, 25 bp, SARS Virus
acttcgttataccgcttacggatcc

SEQ ID NO: 95537 - DNA, 25 bp, SARS Virus
cttcgttataccccttacggatcca

SEQ ID NO: 95538 - DNA, 25 bp, SARS Virus
ttcgttataccgcttacggatccac

SEQ ID NO: 95539 - DNA, 25 bp, SARS Virus
tcgttataccgcctacggatccact

SEQ ID NO: 95540 - DNA, 25 bp, SARS Virus
cgttataccgctcacggatccacta

SEQ ID NO: 95541 - DNA, 25 bp, SARS Virus
gttataccgcttccggatccactat

SEQ ID NO: 95542 - DNA, 25 bp, SARS Virus
ttataccgcttacggatccactata

SEQ ID NO: 95543 - DNA, 25 bp, SARS Virus
tataccgcttaccgatccactataa

SEQ ID NO: 95544 - DNA, 25 bp, SARS Virus
ataccgcttacgcatccactataat

SEQ ID NO: 95545 - DNA, 25 bp, SARS Virus
taccgcttacggctccactataatt

SEQ ID NO: 95546 - DNA, 25 bp, SARS Virus
accgcttacggacccactataatta

SEQ ID NO: 95547 - DNA, 25 bp, SARS Virus
ccgcttacggatccactataattac

SEQ ID NO: 95548 - DNA, 25 bp, SARS Virus
cgcttacggatccactataattacg

SEQ ID NO: 95549 - DNA, 25 bp, SARS Virus
gcttacggatcccctataattacga

SEQ ID NO: 95550 - DNA, 25 bp, SARS Virus
cttacggatccactataattacgat

SEQ ID NO: 95551 - DNA, 25 bp, SARS Virus
ttacggatccaccataattacgatc

SEQ ID NO: 95552 - DNA, 25 bp, SARS Virus
tacggatccactctaattacgatct

SEQ ID NO: 95553 - DNA, 25 bp, SARS Virus
acggatccactacaattacgatctc

SEQ ID NO: 95554 - DNA, 25 bp, SARS Virus
cggatccactatcattacgatctct

SEQ ID NO: 95555 - DNA, 25 bp, SARS Virus
ggatccactatacttacgatctcta

SEQ ID NO: 95556 - DNA, 25 bp, SARS Virus
gatccactataactacgatctctag

SEQ ID NO: 95557 - DNA, 25 bp, SARS Virus
atccactataatcacgatctctaga

SEQ ID NO: 95558 - DNA, 25 bp, SARS Virus
tccactataattccgatctctagag

SEQ ID NO: 95559 - DNA, 25 bp, SARS Virus
ccactataattacgatctctagagt

SEQ ID NO: 95560 - DNA, 25 bp, SARS Virus
cactataattaccatctctagagta

SEQ ID NO: 95561 - DNA, 25 bp, SARS Virus
actataattacgctctctagagtaa

SEQ ID NO: 95562 - DNA, 25 bp, SARS Virus
ctataattacgacctctagagtaaa

SEQ ID NO: 95563 - DNA, 25 bp, SARS Virus
tataattacgatctctagagtaaac

SEQ ID NO: 95564 - DNA, 25 bp, SARS Virus
ataattacgatccctagagtaaaca

SEQ ID NO: 95565 - DNA, 25 bp, SARS Virus
taattacgatctctagagtaaacac

SEQ ID NO: 95566 - DNA, 25 bp, SARS Virus
aattacgatctccagagtaaacacg

SEQ ID NO: 95567 - DNA, 25 bp, SARS Virus
attacgatctctcgagtaaacacgc

SEQ ID NO: 95568 - DNA, 25 bp, SARS Virus
ttacgatctctacagtaaacacgcg

SEQ ID NO: 95569 - DNA, 25 bp, SARS Virus
tacgatctctagcgtaaacacgcgt

SEQ ID NO: 95570 - DNA, 25 bp, SARS Virus
acgatctctagactaaacacgcgtc

SEQ ID NO: 95571 - DNA, 25 bp, SARS Virus
cgatctctagagcaaacacgcgtct

SEQ ID NO: 95572 - DNA, 25 bp, SARS Virus
gatctctagagtcaacacgcgtctt

SEQ ID NO: 95573 - DNA, 25 bp, SARS Virus
atctctagagtacacacgcgtcttc

SEQ ID NO: 95574 - DNA, 25 bp, SARS Virus
tctctagagtaaccacgcgtcttca

SEQ ID NO: 95575 - DNA, 25 bp, SARS Virus
ctctagagtaaacacgcgtcttcaa

SEQ ID NO: 95576 - DNA, 25 bp, SARS Virus
tctagagtaaacccgcgtcttcaag

SEQ ID NO: 95577 - DNA, 25 bp, SARS Virus
ctagagtaaacacgcgtcttcaagt

SEQ ID NO: 95578 - DNA, 25 bp, SARS Virus
tagagtaaacacccgtcttcaagtt

SEQ ID NO: 95579 - DNA, 25 bp, SARS Virus
agagtaaacacgcgtcttcaagtta

SEQ ID NO: 95580 - DNA, 25 bp, SARS Virus
gagtaaacacgcctcttcaagttac

SEQ ID NO: 95581 - DNA, 25 bp, SARS Virus
agtaaacacgcgccttcaagttacc

SEQ ID NO: 95582 - DNA, 25 bp, SARS Virus
gtaaacacgcgtcttcaagttacct

SEQ ID NO: 95583 - DNA, 25 bp, SARS Virus
taaacacgcgtcctcaagttacctg

SEQ ID NO: 95584 - DNA, 25 bp, SARS Virus
aaacacgcgtctccaagttacctga

SEQ ID NO: 95585 - DNA, 25 bp, SARS Virus
aacacgcgtcttcaagttacctgaa

SEQ ID NO: 95586 - DNA, 25 bp, SARS Virus
acacgcgtcttccagttacctgaat

SEQ ID NO: 95587 - DNA, 25 bp, SARS Virus
cacgcgtcttcacgttacctgaatg

SEQ ID NO: 95588 - DNA, 25 bp, SARS Virus
acgcgtcttcaacttacctgaatgt

SEQ ID NO: 95589 - DNA, 25 bp, SARS Virus
cgcgtcttcaagctacctgaatgtc

SEQ ID NO: 95590 - DNA, 25 bp, SARS Virus
gcgtcttcaagtcacctgaatgtca

SEQ ID NO: 95591 - DNA, 25 bp, SARS Virus
cgtcttcaagttccctgaatgtcac

SEQ ID NO: 95592 - DNA, 25 bp, SARS Virus
gtcttcaagttacctgaatgtcaca

SEQ ID NO: 95593 - DNA, 25 bp, SARS Virus
tcttcaagttacctgaatgtcacaa

SEQ ID NO: 95594 - DNA, 25 bp, SARS Virus
cttcaagttacccgaatgtcacaac

SEQ ID NO: 95595 - DNA, 25 bp, SARS Virus
ttcaagttacctcaatgtcacaacg

SEQ ID NO: 95596 - DNA, 25 bp, SARS Virus
tcaagttacctgcatgtcacaacgg

SEQ ID NO: 95597 - DNA, 25 bp, SARS Virus
caagttacctgactgtcacaacggt

SEQ ID NO: 95598 - DNA, 25 bp, SARS Virus
aagttacctgaacgtcacaacggtg

SEQ ID NO: 95599 - DNA, 25 bp, SARS Virus
agttacctgaatctcacaacggtgg

SEQ ID NO: 95600 - DNA, 25 bp, SARS Virus
gttacctgaatgccacaacggtgga

SEQ ID NO: 95601 - DNA, 25 bp, SARS Virus
ttacctgaatgtcacaacggtggag

SEQ ID NO: 95602 - DNA, 25 bp, SARS Virus
tacctgaatgtcccaacggtggaga

SEQ ID NO: 95603 - DNA, 25 bp, SARS Virus
acctgaatgtcacaacggtggagac

SEQ ID NO: 95604 - DNA, 25 bp, SARS Virus
cctgaatgtcaccacggtggagacg

SEQ ID NO: 95605 - DNA, 25 bp, SARS Virus
ctgaatgtcacaccggtggagacga

SEQ ID NO: 95606 - DNA, 25 bp, SARS Virus
tgaatgtcacaacggtggagacgag

SEQ ID NO: 95607 - DNA, 25 bp, SARS Virus
gaatgtcacaaccgtggagacgagt

SEQ ID NO: 95608 - DNA, 25 bp, SARS Virus
aatgtcacaacgctggagacgagtg

SEQ ID NO: 95609 - DNA, 25 bp, SARS Virus
atgtcacaacggcggagacgagtga

SEQ ID NO: 95610 - DNA, 25 bp, SARS Virus
tgtcacaacggtcgagacgagtgac

SEQ ID NO: 95611 - DNA, 25 bp, SARS Virus
gtcacaacggtgcagacgagtgact

SEQ ID NO: 95612 - DNA, 25 bp, SARS Virus
tcacaacggtggcgacgagtgacta

SEQ ID NO: 95613 - DNA, 25 bp, SARS Virus
cacaacggtggacacgagtgactac

SEQ ID NO: 95614 - DNA, 25 bp, SARS Virus
acaacggtggagccgagtgactact

SEQ ID NO: 95615 - DNA, 25 bp, SARS Virus
caacggtggagacgagtgactacta

SEQ ID NO: 95616 - DNA, 25 bp, SARS Virus
aacggtggagaccagtgactactat

SEQ ID NO: 95617 - DNA, 25 bp, SARS Virus
acggtggagacgcgtgactactata

SEQ ID NO: 95618 - DNA, 25 bp, SARS Virus
cggtggagacgactgactactatac

SEQ ID NO: 95619 - DNA, 25 bp, SARS Virus
ggtggagacgagcgactactatact

SEQ ID NO: 95620 - DNA, 25 bp, SARS Virus
gtggagacgagtcactactatacta

SEQ ID NO: 95621 - DNA, 25 bp, SARS Virus
tggagacgagtgcctactatactaa

SEQ ID NO: 95622 - DNA, 25 bp, SARS Virus
ggagacgagtgactactatactaac

SEQ ID NO: 95623 - DNA, 25 bp, SARS Virus
gagacgagtgaccactatactaacg

SEQ ID NO: 95624 - DNA, 25 bp, SARS Virus
agacgagtgactcctatactaacga

SEQ ID NO: 95625 - DNA, 25 bp, SARS Virus
gacgagtgactactatactaacgac

SEQ ID NO: 95626 - DNA, 25 bp, SARS Virus
acgagtgactaccatactaacgacg

SEQ ID NO: 95627 - DNA, 25 bp, SARS Virus
cgagtgactactctactaacgacgg

SEQ ID NO: 95628 - DNA, 25 bp, SARS Virus
gagtgactactacactaacgacgga

SEQ ID NO: 95629 - DNA, 25 bp, SARS Virus
agtgactactatcctaacgacggat

SEQ ID NO: 95630 - DNA, 25 bp, SARS Virus
gtgactactatactaacgacggatg

SEQ ID NO: 95631 - DNA, 25 bp, SARS Virus
tgactactataccaacgacggatgt

SEQ ID NO: 95632 - DNA, 25 bp, SARS Virus
gactactatactcacgacggatgtg

SEQ ID NO: 95633 - DNA, 25 bp, SARS Virus
actactatactaccgacggatgtga

SEQ ID NO: 95634 - DNA, 25 bp, SARS Virus
ctactatactaacgacggatgtgac

SEQ ID NO: 95635 - DNA, 25 bp, SARS Virus
tactatactaaccacggatgtgacg

SEQ ID NO: 95636 - DNA, 25 bp, SARS Virus
actatactaacgccggatgtgacga

SEQ ID NO: 95637 - DNA, 25 bp, SARS Virus
ctatactaacgacggatgtgacgac

SEQ ID NO: 95638 - DNA, 25 bp, SARS Virus
tatactaacgaccgatgtgacgacg

SEQ ID NO: 95639 - DNA, 25 bp, SARS Virus
atactaacgacgcatgtgacgacga

SEQ ID NO: 95640 - DNA, 25 bp, SARS Virus
tactaacgacggctgtgacgacgag

SEQ ID NO: 95641 - DNA, 25 bp, SARS Virus
actaacgacggacgtgacgacgaga

SEQ ID NO: 95642 - DNA, 25 bp, SARS Virus
ctaacgacggatctgacgacgagat

SEQ ID NO: 95643 - DNA, 25 bp, SARS Virus
taacgacggatgcgacgacgagatc

SEQ ID NO: 95644 - DNA, 25 bp, SARS Virus
aacgacggatgtcacgacgagatca

SEQ ID NO: 95645 - DNA, 25 bp, SARS Virus
acgacggatgtgccgacgagatcaa

SEQ ID NO: 95646 - DNA, 25 bp, SARS Virus
cgacggatgtgacgacgagatcaat

SEQ ID NO: 95647 - DNA, 25 bp, SARS Virus
gacggatgtgaccacgagatcaatc

SEQ ID NO: 95648 - DNA, 25 bp, SARS Virus
acggatgtgacgccgagatcaatca

SEQ ID NO: 95649 - DNA, 25 bp, SARS Virus
cggatgtgacgacgagatcaatcac

SEQ ID NO: 95650 - DNA, 25 bp, SARS Virus
ggatgtgacgaccagatcaatcacc

SEQ ID NO: 95651 - DNA, 25 bp, SARS Virus
gatgtgacgacgcgatcaatcacca

SEQ ID NO: 95652 - DNA, 25 bp, SARS Virus
atgtgacgacgacatcaatcaccat

SEQ ID NO: 95653 - DNA, 25 bp, SARS Virus
tgtgacgacgagctcaatcaccatg

SEQ ID NO: 95654 - DNA, 25 bp, SARS Virus
gtgacgacgagaccaatcaccatga

SEQ ID NO: 95655 - DNA, 25 bp, SARS Virus
tgacgacgagatcaatcaccatgac

SEQ ID NO: 95656 - DNA, 25 bp, SARS Virus
gacgacgagatccatcaccatgacg

SEQ ID NO: 95657 - DNA, 25 bp, SARS Virus
acgacgagatcactcaccatgacgg

SEQ ID NO: 95658 - DNA, 25 bp, SARS Virus
cgacgagatcaaccaccatgacggt

SEQ ID NO: 95659 - DNA, 25 bp, SARS Virus
gacgagatcaatcaccatgacggtg

SEQ ID NO: 95660 - DNA, 25 bp, SARS Virus
acgagatcaatccccatgacggtga

SEQ ID NO: 95661 - DNA, 25 bp, SARS Virus
cgagatcaatcaccatgacggtgac

SEQ ID NO: 95662 - DNA, 25 bp, SARS Virus
gagatcaatcaccatgacggtgacg

SEQ ID NO: 95663 - DNA, 25 bp, SARS Virus
agatcaatcaccctgacggtgacga

SEQ ID NO: 95664 - DNA, 25 bp, SARS Virus
gatcaatcaccacgacggtgacgac

SEQ ID NO: 95665 - DNA, 25 bp, SARS Virus
atcaatcaccatcacggtgacgacc

SEQ ID NO: 95666 - DNA, 25 bp, SARS Virus
tcaatcaccatgccggtgacgacct

SEQ ID NO: 95667 - DNA, 25 bp, SARS Virus
caatcaccatgacggtgacgaccta

SEQ ID NO: 95668 - DNA, 25 bp, SARS Virus
aatcaccatgaccgtgacgacctac

SEQ ID NO: 95669 - DNA, 25 bp, SARS Virus
atcaccatgacgctgacgacctacc

SEQ ID NO: 95670 - DNA, 25 bp, SARS Virus
tcaccatgacggcgacgacctacct

SEQ ID NO: 95671 - DNA, 25 bp, SARS Virus
caccatgacggtcacgacctacctg

SEQ ID NO: 95672 - DNA, 25 bp, SARS Virus
accatgacggtgccgacctacctgt

SEQ ID NO: 95673 - DNA, 25 bp, SARS Virus
ccatgacggtgacgacctacctgta

SEQ ID NO: 95674 - DNA, 25 bp, SARS Virus
catgacggtgaccacctacctgtaa

SEQ ID NO: 95675 - DNA, 25 bp, SARS Virus
atgacggtgacgccctacctgtaaa

SEQ ID NO: 95676 - DNA, 25 bp, SARS Virus
tgacggtgacgacctacctgtaaac

SEQ ID NO: 95677 - DNA, 25 bp, SARS Virus
gacggtgacgacctacctgtaaacc

SEQ ID NO: 95678 - DNA, 25 bp, SARS Virus
acggtgacgacccacctgtaaacca

SEQ ID NO: 95679 - DNA, 25 bp, SARS Virus
cggtgacgacctccctgtaaaccac

SEQ ID NO: 95680 - DNA, 25 bp, SARS Virus
ggtgacgacctacctgtaaaccacg

SEQ ID NO: 95681 - DNA, 25 bp, SARS Virus
gtgacgacctacctgtaaaccacga

SEQ ID NO: 95682 - DNA, 25 bp, SARS Virus
tgacgacctacccgtaaaccacgac

SEQ ID NO: 95683 - DNA, 25 bp, SARS Virus
gacgacctacctctaaaccacgacc

SEQ ID NO: 95684 - DNA, 25 bp, SARS Virus
acgacctacctgcaaaccacgaccg

SEQ ID NO: 95685 - DNA, 25 bp, SARS Virus
cgacctacctgtcaaccacgaccgc

SEQ ID NO: 95686 - DNA, 25 bp, SARS Virus
gacctacctgtacaccacgaccgcg

SEQ ID NO: 95687 - DNA, 25 bp, SARS Virus
acctacctgtaacccacgaccgcga

SEQ ID NO: 95688 - DNA, 25 bp, SARS Virus
cctacctgtaaaccacgaccgcgac

SEQ ID NO: 95689 - DNA, 25 bp, SARS Virus
ctacctgtaaaccacgaccgcgacg

SEQ ID NO: 95690 - DNA, 25 bp, SARS Virus
tacctgtaaaccccgaccgcgacga

SEQ ID NO: 95691 - DNA, 25 bp, SARS Virus
acctgtaaaccacgaccgcgacgag

SEQ ID NO: 95692 - DNA, 25 bp, SARS Virus
cctgtaaaccaccaccgcgacgaga

SEQ ID NO: 95693 - DNA, 25 bp, SARS Virus
ctgtaaaccacgcccgcgacgagaa

SEQ ID NO: 95694 - DNA, 25 bp, SARS Virus
tgtaaaccacgaccgcgacgagaag

SEQ ID NO: 95695 - DNA, 25 bp, SARS Virus
gtaaaccacgaccgcgacgagaagt

SEQ ID NO: 95696 - DNA, 25 bp, SARS Virus
taaaccacgaccccgacgagaagtt

SEQ ID NO: 95697 - DNA, 25 bp, SARS Virus
aaaccacgaccgcgacgagaagttt

SEQ ID NO: 95698 - DNA, 25 bp, SARS Virus
aaccacgaccgccacgagaagttta

SEQ ID NO: 95699 - DNA, 25 bp, SARS Virus
accacgaccgcgccgagaagtttat

SEQ ID NO: 95700 - DNA, 25 bp, SARS Virus
ccacgaccgcgacgagaagtttatg

SEQ ID NO: 95701 - DNA, 25 bp, SARS Virus
cacgaccgcgaccagaagtttatgg

SEQ ID NO: 95702 - DNA, 25 bp, SARS Virus
acgaccgcgacgcgaagtttatgga

SEQ ID NO: 95703 - DNA, 25 bp, SARS Virus
cgaccgcgacgacaagtttatggaa

SEQ ID NO: 95704 - DNA, 25 bp, SARS Virus
gaccgcgacgagcagtttatggaaa

SEQ ID NO: 95705 - DNA, 25 bp, SARS Virus
accgcgacgagacgtttatggaaaa

SEQ ID NO: 95706 - DNA, 25 bp, SARS Virus
ccgcgacgagaactttatggaaaac

SEQ ID NO: 95707 - DNA, 25 bp, SARS Virus
cgcgacgagaagcttatggaaaacg

SEQ ID NO: 95708 - DNA, 25 bp, SARS Virus
gcgacgagaagtctatggaaaacga

SEQ ID NO: 95709 - DNA, 25 bp, SARS Virus
cgacgagaagttcatggaaaacgat

SEQ ID NO: 95710 - DNA, 25 bp, SARS Virus
gacgagaagtttctggaaaacgata

SEQ ID NO: 95711 - DNA, 25 bp, SARS Virus
acgagaagtttacggaaaacgatac

SEQ ID NO: 95712 - DNA, 25 bp, SARS Virus
cgagaagtttatcgaaaacgatacg

SEQ ID NO: 95713 - DNA, 25 bp, SARS Virus
gagaagtttatgcaaaacgatacgt

SEQ ID NO: 95714 - DNA, 25 bp, SARS Virus
agaagtttatggcaaacgatacgtt

SEQ ID NO: 95715 - DNA, 25 bp, SARS Virus
gaagtttatggacaacgatacgttt

SEQ ID NO: 95716 - DNA, 25 bp, SARS Virus
aagtttatggaacacgatacgttta

SEQ ID NO: 95717 - DNA, 25 bp, SARS Virus
agtttatggaaaccgatacgtttac

SEQ ID NO: 95718 - DNA, 25 bp, SARS Virus
gtttatggaaaacgatacgtttacc

SEQ ID NO: 95719 - DNA, 25 bp, SARS Virus
tttatggaaaaccatacgtttaccg

SEQ ID NO: 95720 - DNA, 25 bp, SARS Virus
ttatggaaaacgctacgtttaccgt

SEQ ID NO: 95721 - DNA, 25 bp, SARS Virus
tatggaaaacgacacgtttaccgta

SEQ ID NO: 95722 - DNA, 25 bp, SARS Virus
atggaaaacgatccgtttaccgtat

SEQ ID NO: 95723 - DNA, 25 bp, SARS Virus
tggaaaacgatacgtttaccgtata

SEQ ID NO: 95724 - DNA, 25 bp, SARS Virus
ggaaaacgatacctttaccgtatat

SEQ ID NO: 95725 - DNA, 25 bp, SARS Virus
gaaaacgatacgcttaccgtatatc

SEQ ID NO: 95726 - DNA, 25 bp, SARS Virus
aaaacgatacgtctaccgtatatcc

SEQ ID NO: 95727 - DNA, 25 bp, SARS Virus
aaacgatacgttcaccgtatatcca

SEQ ID NO: 95728 - DNA, 25 bp, SARS Virus
aacgatacgtttcccgtatatccaa

SEQ ID NO: 95729 - DNA, 25 bp, SARS Virus
acgatacgtttaccgtatatccaag

SEQ ID NO: 95730 - DNA, 25 bp, SARS Virus
cgatacgtttaccgtatatccaagt

SEQ ID NO: 95731 - DNA, 25 bp, SARS Virus
gatacgtttaccctatatccaagtt

SEQ ID NO: 95732 - DNA, 25 bp, SARS Virus
atacgtttaccgcatatccaagtta

SEQ ID NO: 95733 - DNA, 25 bp, SARS Virus
tacgtttaccgtctatccaagttac

SEQ ID NO: 95734 - DNA, 25 bp, SARS Virus
acgtttaccgtacatccaagttacc

SEQ ID NO: 95735 - DNA, 25 bp, SARS Virus
cgtttaccgtatctccaagttaccg

SEQ ID NO: 95736 - DNA, 25 bp, SARS Virus
gtttaccgtatacccaagttaccgt

SEQ ID NO: 95737 - DNA, 25 bp, SARS Virus
tttaccgtatatccaagttaccgta

SEQ ID NO: 95738 - DNA, 25 bp, SARS Virus
ttaccgtatatccaagttaccgtaa

SEQ ID NO: 95739 - DNA, 25 bp, SARS Virus
taccgtatatcccagttaccgtaac

SEQ ID NO: 95740 - DNA, 25 bp, SARS Virus
accgtatatccacgttaccgtaacc

SEQ ID NO: 95741 - DNA, 25 bp, SARS Virus
ccgtatatccaacttaccgtaacct

SEQ ID NO: 95742 - DNA, 25 bp, SARS Virus
cgtatatccaagctaccgtaacctc

SEQ ID NO: 95743 - DNA, 25 bp, SARS Virus
gtatatccaagtcaccgtaacctca

SEQ ID NO: 95744 - DNA, 25 bp, SARS Virus
tatatccaagttcccgtaacctcaa

SEQ ID NO: 95745 - DNA, 25 bp, SARS Virus
atatccaagttaccgtaacctcaat

SEQ ID NO: 95746 - DNA, 25 bp, SARS Virus
tatccaagttaccgtaacctcaatg

SEQ ID NO: 95747 - DNA, 25 bp, SARS Virus
atccaagttaccctaacctcaatgg

SEQ ID NO: 95748 - DNA, 25 bp, SARS Virus
tccaagttaccgcaacctcaatggg

SEQ ID NO: 95749 - DNA, 25 bp, SARS Virus
ccaagttaccgtcacctcaatgggt

SEQ ID NO: 95750 - DNA, 25 bp, SARS Virus
caagttaccgtaccctcaatgggtt

SEQ ID NO: 95751 - DNA, 25 bp, SARS Virus
aagttaccgtaacctcaatgggttt

SEQ ID NO: 95752 - DNA, 25 bp, SARS Virus
agttaccgtaacctcaatgggtttt

SEQ ID NO: 95753 - DNA, 25 bp, SARS Virus
gttaccgtaaccccaatgggtttta

SEQ ID NO: 95754 - DNA, 25 bp, SARS Virus
ttaccgtaacctcaatgggttttac

SEQ ID NO: 95755 - DNA, 25 bp, SARS Virus
taccgtaacctccatgggttttaca

SEQ ID NO: 95756 - DNA, 25 bp, SARS Virus
accgtaacctcactgggttttacaa

SEQ ID NO: 95757 - DNA, 25 bp, SARS Virus
ccgtaacctcaacgggttttacaag

SEQ ID NO: 95758 - DNA, 25 bp, SARS Virus
cgtaacctcaatcggttttacaaga

SEQ ID NO: 95759 - DNA, 25 bp, SARS Virus
gtaacctcaatgcgttttacaagag

SEQ ID NO: 95760 - DNA, 25 bp, SARS Virus
taacctcaatggcttttacaagaga

SEQ ID NO: 95761 - DNA, 25 bp, SARS Virus
aacctcaatgggctttacaagagat

SEQ ID NO: 95762 - DNA, 25 bp, SARS Virus
acctcaatgggtcttacaagagata

SEQ ID NO: 95763 - DNA, 25 bp, SARS Virus
cctcaatgggttctacaagagatac

SEQ ID NO: 95764 - DNA, 25 bp, SARS Virus
ctcaatgggtttcacaagagatact

SEQ ID NO: 95765 - DNA, 25 bp, SARS Virus
tcaatgggttttccaagagatactc

SEQ ID NO: 95766 - DNA, 25 bp, SARS Virus
caatgggttttacaagagatactct

SEQ ID NO: 95767 - DNA, 25 bp, SARS Virus
aatgggttttaccagagatactctt

SEQ ID NO: 95768 - DNA, 25 bp, SARS Virus
atgggttttacacgagatactcttg

SEQ ID NO: 95769 - DNA, 25 bp, SARS Virus
tgggttttacaacagatactcttgg

SEQ ID NO: 95770 - DNA, 25 bp, SARS Virus
gggttttacaagcgatactcttggt

SEQ ID NO: 95771 - DNA, 25 bp, SARS Virus
ggttttacaagacatactcttggtt

SEQ ID NO: 95772 - DNA, 25 bp, SARS Virus
gttttacaagagctactcttggttt

SEQ ID NO: 95773 - DNA, 25 bp, SARS Virus
ttttacaagagacactcttggtttt

SEQ ID NO: 95774 - DNA, 25 bp, SARS Virus
tttacaagagatcctcttggttttt

SEQ ID NO: 95775 - DNA, 25 bp, SARS Virus
ttacaagagatactcttggtttttg

SEQ ID NO: 95776 - DNA, 25 bp, SARS Virus
tacaagagatacccttggtttttgt

SEQ ID NO: 95777 - DNA, 25 bp, SARS Virus
aacgaagaggttgtaccatcgaaaa

SEQ ID NO: 95778 - DNA, 25 bp, SARS Virus
acgaagaggttagaccatcgaaaac

SEQ ID NO: 95779 - DNA, 25 bp, SARS Virus
cgaagaggttatgccatcgaaaacg

SEQ ID NO: 95780 - DNA, 25 bp, SARS Virus
gaagaggttatagcatcgaaaacgt

SEQ ID NO: 95781 - DNA, 25 bp, SARS Virus
aagaggttatacgatcgaaaacgtg

SEQ ID NO: 95782 - DNA, 25 bp, SARS Virus
agaggttataccgtcgaaaacgtgt

SEQ ID NO: 95783 - DNA, 25 bp, SARS Virus
gaggttataccagcgaaaacgtgtg

SEQ ID NO: 95784 - DNA, 25 bp, SARS Virus
aggttataccatggaaaacgtgtgt

SEQ ID NO: 95785 - DNA, 25 bp, SARS Virus
ggttataccatcgaaaacgtgtgtt

SEQ ID NO: 95786 - DNA, 25 bp, SARS Virus
gttataccatcggaaacgtgtgttg

SEQ ID NO: 95787 - DNA, 25 bp, SARS Virus
ttataccatcgagaacgtgtgttga

SEQ ID NO: 95788 - DNA, 25 bp, SARS Virus
tataccatcgaagacgtgtgttgat

SEQ ID NO: 95789 - DNA, 25 bp, SARS Virus
ataccatcgaaagcgtgtgttgatt

SEQ ID NO: 95790 - DNA, 25 bp, SARS Virus
taccatcgaaaaggtgtgttgattt

SEQ ID NO: 95791 - DNA, 25 bp, SARS Virus
accatcgaaaacgtgtgttgattta

SEQ ID NO: 95792 - DNA, 25 bp, SARS Virus
ccatcgaaaacgggtgttgatttag

SEQ ID NO: 95793 - DNA, 25 bp, SARS Virus
catcgaaaacgtgtgttgatttagc

SEQ ID NO: 95794 - DNA, 25 bp, SARS Virus
atcgaaaacgtgggttgatttagca

SEQ ID NO: 95795 - DNA, 25 bp, SARS Virus
tcgaaaacgtgtgttgatttagcac

SEQ ID NO: 95796 - DNA, 25 bp, SARS Virus
cgaaaacgtgtggtgatttagcacg

SEQ ID NO: 95797 - DNA, 25 bp, SARS Virus
gaaaacgtgtgtggatttagcacgt

SEQ ID NO: 95798 - DNA, 25 bp, SARS Virus
aaaacgtgtgttgatttagcacgtg

SEQ ID NO: 95799 - DNA, 25 bp, SARS Virus
aaacgtgtgttggtttagcacgtga

SEQ ID NO: 95800 - DNA, 25 bp, SARS Virus
aacgtgtgttgagttagcacgtgag

SEQ ID NO: 95801 - DNA, 25 bp, SARS Virus
acgtgtgttgatgtagcacgtgaga

SEQ ID NO: 95802 - DNA, 25 bp, SARS Virus
cgtgtgttgattgagcacgtgagag

SEQ ID NO: 95803 - DNA, 25 bp, SARS Virus
gtgtgttgatttggcacgtgagagt

SEQ ID NO: 95804 - DNA, 25 bp, SARS Virus
tgtgttgatttagcacgtgagagtc

SEQ ID NO: 95805 - DNA, 25 bp, SARS Virus
gtgttgatttaggacgtgagagtcc

SEQ ID NO: 95806 - DNA, 25 bp, SARS Virus
tgttgatttagcgcgtgagagtcca

SEQ ID NO: 95807 - DNA, 25 bp, SARS Virus
gttgatttagcaggtgagagtccat

SEQ ID NO: 95808 - DNA, 25 bp, SARS Virus
ttgatttagcacgtgagagtccata

SEQ ID NO: 95809 - DNA, 25 bp, SARS Virus
tgatttagcacgggagagtccataa

SEQ ID NO: 95810 - DNA, 25 bp, SARS Virus
gatttagcacgtgagagtccataac

SEQ ID NO: 95811 - DNA, 25 bp, SARS Virus
atttagcacgtgggagtccataacg

SEQ ID NO: 95812 - DNA, 25 bp, SARS Virus
tttagcacgtgagagtccataacga

SEQ ID NO: 95813 - DNA, 25 bp, SARS Virus
ttagcacgtgagggtccataacgac

SEQ ID NO: 95814 - DNA, 25 bp, SARS Virus
tagcacgtgagagtccataacgacg

SEQ ID NO: 95815 - DNA, 25 bp, SARS Virus
agcacgtgagaggccataacgacga

SEQ ID NO: 95816 - DNA, 25 bp, SARS Virus
gcacgtgagagtgcataacgacgac

SEQ ID NO: 95817 - DNA, 25 bp, SARS Virus
cacgtgagagtcgataacgacgact

SEQ ID NO: 95818 - DNA, 25 bp, SARS Virus
acgtgagagtccgtaacgacgactt

SEQ ID NO: 95819 - DNA, 25 bp, SARS Virus
cgtgagagtccagaacgacgacttg

SEQ ID NO: 95820 - DNA, 25 bp, SARS Virus
gtgagagtccatgacgacgacttgt

SEQ ID NO: 95821 - DNA, 25 bp, SARS Virus
tgagagtccatagcgacgacttgtc

SEQ ID NO: 95822 - DNA, 25 bp, SARS Virus
gagagtccataaggacgacttgtcc

SEQ ID NO: 95823 - DNA, 25 bp, SARS Virus
agagtccataacgacgacttgtcct

SEQ ID NO: 95824 - DNA, 25 bp, SARS Virus
gagtccataacggcgacttgtccta

SEQ ID NO: 95825 - DNA, 25 bp, SARS Virus
agtccataacgaggacttgtcctag

SEQ ID NO: 95826 - DNA, 25 bp, SARS Virus
gtccataacgacgacttgtcctagc

SEQ ID NO: 95827 - DNA, 25 bp, SARS Virus
tccataacgacggcttgtcctagcg

SEQ ID NO: 95828 - DNA, 25 bp, SARS Virus
ccataacgacgagttgtcctagcgt

SEQ ID NO: 95829 - DNA, 25 bp, SARS Virus
cataacgacgacgtgtcctagcgtt

SEQ ID NO: 95830 - DNA, 25 bp, SARS Virus
ataacgacgactggtcctagcgttg

SEQ ID NO: 95831 - DNA, 25 bp, SARS Virus
taacgacgacttgtcctagcgttgt

SEQ ID NO: 95832 - DNA, 25 bp, SARS Virus
aacgacgacttggcctagcgttgtg

SEQ ID NO: 95833 - DNA, 25 bp, SARS Virus
acgacgacttgtgctagcgttgtgt

SEQ ID NO: 95834 - DNA, 25 bp, SARS Virus
cgacgacttgtcgtagcgttgtgtg

SEQ ID NO: 95835 - DNA, 25 bp, SARS Virus
gacgacttgtccgagcgttgtgtgc

SEQ ID NO: 95836 - DNA, 25 bp, SARS Virus
acgacttgtcctggcgttgtgtgca

SEQ ID NO: 95837 - DNA, 25 bp, SARS Virus
cgacttgtcctagcgttgtgtgcac

SEQ ID NO: 95838 - DNA, 25 bp, SARS Virus
gacttgtcctagggttgtgtgcact

SEQ ID NO: 95839 - DNA, 25 bp, SARS Virus
acttgtcctagcgttgtgtgcactt

SEQ ID NO: 95840 - DNA, 25 bp, SARS Virus
cttgtcctagcggtgtgtgcacttc

SEQ ID NO: 95841 - DNA, 25 bp, SARS Virus
ttgtcctagcgtggtgtgcacttca

SEQ ID NO: 95842 - DNA, 25 bp, SARS Virus
tgtcctagcgttgtgtgcacttcac

SEQ ID NO: 95843 - DNA, 25 bp, SARS Virus
gtcctagcgttgggtgcacttcaca

SEQ ID NO: 95844 - DNA, 25 bp, SARS Virus
tcctagcgttgtgtgcacttcacaa

SEQ ID NO: 95845 - DNA, 25 bp, SARS Virus
cctagcgttgtgggcacttcacaag

SEQ ID NO: 95846 - DNA, 25 bp, SARS Virus
ctagcgttgtgtgcacttcacaagc

SEQ ID NO: 95847 - DNA, 25 bp, SARS Virus
tagcgttgtgtggacttcacaagcg

SEQ ID NO: 95848 - DNA, 25 bp, SARS Virus
agcgttgtgtgcgcttcacaagcga

SEQ ID NO: 95849 - DNA, 25 bp, SARS Virus
gcgttgtgtgcagttcacaagcgag

SEQ ID NO: 95850 - DNA, 25 bp, SARS Virus
cgttgtgtgcacgtcacaagcgagt

SEQ ID NO: 95851 - DNA, 25 bp, SARS Virus
gttgtgtgcactgcacaagcgagtt

SEQ ID NO: 95852 - DNA, 25 bp, SARS Virus
ttgtgtgcacttgacaagcgagttc

SEQ ID NO: 95853 - DNA, 25 bp, SARS Virus
tgtgtgcacttcgcaagcgagttca

SEQ ID NO: 95854 - DNA, 25 bp, SARS Virus
gtgtgcacttcagaagcgagttcag

SEQ ID NO: 95855 - DNA, 25 bp, SARS Virus
tgtgcacttcacgagcgagttcagt

SEQ ID NO: 95856 - DNA, 25 bp, SARS Virus
gtgcacttcacaggcgagttcagtt

SEQ ID NO: 95857 - DNA, 25 bp, SARS Virus
tgcacttcacaagcgagttcagttt

SEQ ID NO: 95858 - DNA, 25 bp, SARS Virus
gcacttcacaagggagttcagtttg

SEQ ID NO: 95859 - DNA, 25 bp, SARS Virus
cacttcacaagcgagttcagtttgt

SEQ ID NO: 95860 - DNA, 25 bp, SARS Virus
acttcacaagcgggttcagtttgtt

SEQ ID NO: 95861 - DNA, 25 bp, SARS Virus
cttcacaagcgagttcagtttgttt

SEQ ID NO: 95862 - DNA, 25 bp, SARS Virus
ttcacaagcgaggtcagtttgttta

SEQ ID NO: 95863 - DNA, 25 bp, SARS Virus
tcacaagcgagtgcagtttgtttac

SEQ ID NO: 95864 - DNA, 25 bp, SARS Virus
cacaagcgagttgagtttgtttaca

SEQ ID NO: 95865 - DNA, 25 bp, SARS Virus
acaagcgagttcggtttgtttacat

SEQ ID NO: 95866 - DNA, 25 bp, SARS Virus
caagcgagttcagtttgtttacatg

SEQ ID NO: 95867 - DNA, 25 bp, SARS Virus
aagcgagttcaggttgtttacatgt

SEQ ID NO: 95868 - DNA, 25 bp, SARS Virus
agcgagttcagtgtgtttacatgtt

SEQ ID NO: 95869 - DNA, 25 bp, SARS Virus
gcgagttcagttggtttacatgttt

SEQ ID NO: 95870 - DNA, 25 bp, SARS Virus
cgagttcagtttgtttacatgtttt

SEQ ID NO: 95871 - DNA, 25 bp, SARS Virus
gagttcagtttggttacatgttttg

SEQ ID NO: 95872 - DNA, 25 bp, SARS Virus
agttcagtttgtgtacatgttttgg

SEQ ID NO: 95873 - DNA, 25 bp, SARS Virus
gttcagtttgttgacatgttttggg

SEQ ID NO: 95874 - DNA, 25 bp, SARS Virus
ttcagtttgtttgcatgttttgggg

SEQ ID NO: 95875 - DNA, 25 bp, SARS Virus
tcagtttgtttagatgttttggggt

SEQ ID NO: 95876 - DNA, 25 bp, SARS Virus
cagtttgtttacgtgttttggggtt

SEQ ID NO: 95877 - DNA, 25 bp, SARS Virus
agtttgtttacaggttttggggttg

SEQ ID NO: 95878 - DNA, 25 bp, SARS Virus
gtttgtttacatgttttggggttga

SEQ ID NO: 95879 - DNA, 25 bp, SARS Virus
tttgtttacatggtttggggttgaa

SEQ ID NO: 95880 - DNA, 25 bp, SARS Virus
ttgtttacatgtgttggggttgaaa

SEQ ID NO: 95881 - DNA, 25 bp, SARS Virus
tgtttacatgttgtggggttgaaac

SEQ ID NO: 95882 - DNA, 25 bp, SARS Virus
gtttacatgtttgggggttgaaact

SEQ ID NO: 95883 - DNA, 25 bp, SARS Virus
tttacatgttttggggttgaaactt

SEQ ID NO: 95884 - DNA, 25 bp, SARS Virus
ttacatgttttggggttgaaacttt

SEQ ID NO: 95885 - DNA, 25 bp, SARS Virus
tacatgttttggggttgaaacttta

SEQ ID NO: 95886 - DNA, 25 bp, SARS Virus
acatgttttggggttgaaactttat

SEQ ID NO: 95887 - DNA, 25 bp, SARS Virus
catgttttgggggtgaaactttata

SEQ ID NO: 95888 - DNA, 25 bp, SARS Virus
atgttttggggtggaaactttataa

SEQ ID NO: 95889 - DNA, 25 bp, SARS Virus
tgttttggggttgaaactttataaa

SEQ ID NO: 95890 - DNA, 25 bp, SARS Virus
gttttggggttggaactttataaaa

SEQ ID NO: 95891 - DNA, 25 bp, SARS Virus
ttttggggttgagactttataaaac

SEQ ID NO: 95892 - DNA, 25 bp, SARS Virus
tttggggttgaagctttataaaacc

SEQ ID NO: 95893 - DNA, 25 bp, SARS Virus
ttggggttgaaagtttataaaacca

SEQ ID NO: 95894 - DNA, 25 bp, SARS Virus
tggggttgaaacgttataaaaccac

SEQ ID NO: 95895 - DNA, 25 bp, SARS Virus
ggggttgaaactgtataaaaccacc

SEQ ID NO: 95896 - DNA, 25 bp, SARS Virus
gggttgaaacttgataaaaccacca

SEQ ID NO: 95897 - DNA, 25 bp, SARS Virus
ggttgaaactttgtaaaaccaccaa

SEQ ID NO: 95898 - DNA, 25 bp, SARS Virus
gttgaaactttagaaaaccaccaaa

SEQ ID NO: 95899 - DNA, 25 bp, SARS Virus
ttgaaactttatgaaaccaccaaaa

SEQ ID NO: 95900 - DNA, 25 bp, SARS Virus
tgaaactttatagaaccaccaaaat

SEQ ID NO: 95901 - DNA, 25 bp, SARS Virus
gaaactttataagaccaccaaaatt

SEQ ID NO: 95902 - DNA, 25 bp, SARS Virus
aaactttataaagccaccaaaatta

SEQ ID NO: 95903 - DNA, 25 bp, SARS Virus
aactttataaaagcaccaaaattaa

SEQ ID NO: 95904 - DNA, 25 bp, SARS Virus
actttataaaacgaccaaaattaaa

SEQ ID NO: 95905 - DNA, 25 bp, SARS Virus
ctttataaaaccgccaaaattaaaa

SEQ ID NO: 95906 - DNA, 25 bp, SARS Virus
tttataaaaccagcaaaattaaaaa

SEQ ID NO: 95907 - DNA, 25 bp, SARS Virus
ttataaaaccacgaaaattaaaaag

SEQ ID NO: 95908 - DNA, 25 bp, SARS Virus
tataaaaccaccgaaattaaaaagt

SEQ ID NO: 95909 - DNA, 25 bp, SARS Virus
ataaaaccaccagaattaaaaagtg

SEQ ID NO: 95910 - DNA, 25 bp, SARS Virus
taaaaccaccaagattaaaaagtgt

SEQ ID NO: 95911 - DNA, 25 bp, SARS Virus
aaaaccaccaaagttaaaaagtgtt

SEQ ID NO: 95912 - DNA, 25 bp, SARS Virus
aaaccaccaaaagtaaaaagtgttt

SEQ ID NO: 95913 - DNA, 25 bp, SARS Virus
aaccaccaaaatgaaaaagtgttta

SEQ ID NO: 95914 - DNA, 25 bp, SARS Virus
accaccaaaattgaaaagtgtttat

SEQ ID NO: 95915 - DNA, 25 bp, SARS Virus
ccaccaaaattagaaagtgtttata

SEQ ID NO: 95916 - DNA, 25 bp, SARS Virus
caccaaaattaagaagtgtttataa

SEQ ID NO: 95917 - DNA, 25 bp, SARS Virus
accaaaattaaagagtgtttataat

SEQ ID NO: 95918 - DNA, 25 bp, SARS Virus
ccaaaattaaaaggtgtttataatg

SEQ ID NO: 95919 - DNA, 25 bp, SARS Virus
caaaattaaaaagtgtttataatgg

SEQ ID NO: 95920 - DNA, 25 bp, SARS Virus
aaaattaaaaagggtttataatgga

SEQ ID NO: 95921 - DNA, 25 bp, SARS Virus
aaattaaaaagtgtttataatggac

SEQ ID NO: 95922 - DNA, 25 bp, SARS Virus
aattaaaaagtggttataatggact

SEQ ID NO: 95923 - DNA, 25 bp, SARS Virus
attaaaaagtgtgtataatggactg

SEQ ID NO: 95924 - DNA, 25 bp, SARS Virus
ttaaaaagtgttgataatggactgg

SEQ ID NO: 95925 - DNA, 25 bp, SARS Virus
taaaaagtgtttgtaatggactggg

SEQ ID NO: 95926 - DNA, 25 bp, SARS Virus
aaaaagtgtttagaatggactggga

SEQ ID NO: 95927 - DNA, 25 bp, SARS Virus
aaaagtgtttatgatggactgggag

SEQ ID NO: 95928 - DNA, 25 bp, SARS Virus
aaagtgtttatagtggactgggaga

SEQ ID NO: 95929 - DNA, 25 bp, SARS Virus
aagtgtttataagggactgggagat

SEQ ID NO: 95930 - DNA, 25 bp, SARS Virus
agtgtttataatggactgggagatt

SEQ ID NO: 95931 - DNA, 25 bp, SARS Virus
gtgtttataatggactgggagattt

SEQ ID NO: 95932 - DNA, 25 bp, SARS Virus
tgtttataatgggctgggagatttc

SEQ ID NO: 95933 - DNA, 25 bp, SARS Virus
gtttataatggagtgggagatttcg

SEQ ID NO: 95934 - DNA, 25 bp, SARS Virus
tttataatggacggggagatttcgg

SEQ ID NO: 95935 - DNA, 25 bp, SARS Virus
ttataatggactgggagatttcggt

SEQ ID NO: 95936 - DNA, 25 bp, SARS Virus
tataatggactgggagatttcggtt

SEQ ID NO: 95937 - DNA, 25 bp, SARS Virus
ataatggactgggagatttcggttg

SEQ ID NO: 95938 - DNA, 25 bp, SARS Virus
taatggactgggggatttcggttga

SEQ ID NO: 95939 - DNA, 25 bp, SARS Virus
aatggactgggagatttcggttgat

SEQ ID NO: 95940 - DNA, 25 bp, SARS Virus
atggactgggaggtttcggttgatt

SEQ ID NO: 95941 - DNA, 25 bp, SARS Virus
tggactgggagagttcggttgattc

SEQ ID NO: 95942 - DNA, 25 bp, SARS Virus
ggactgggagatgtcggttgattct

SEQ ID NO: 95943 - DNA, 25 bp, SARS Virus
gactgggagattgcggttgattctc

SEQ ID NO: 95944 - DNA, 25 bp, SARS Virus
actgggagatttgggttgattctcc

SEQ ID NO: 95945 - DNA, 25 bp, SARS Virus
ctgggagatttcggttgattctcca

SEQ ID NO: 95946 - DNA, 25 bp, SARS Virus
tgggagatttcggttgattctccag

SEQ ID NO: 95947 - DNA, 25 bp, SARS Virus
gggagatttcgggtgattctccaga

SEQ ID NO: 95948 - DNA, 25 bp, SARS Virus
ggagatttcggtggattctccagaa

SEQ ID NO: 95949 - DNA, 25 bp, SARS Virus
gagatttcggttgattctccagaaa

SEQ ID NO: 95950 - DNA, 25 bp, SARS Virus
agatttcggttggttctccagaaaa

SEQ ID NO: 95951 - DNA, 25 bp, SARS Virus
gatttcggttgagtctccagaaaat

SEQ ID NO: 95952 - DNA, 25 bp, SARS Virus
atttcggttgatgctccagaaaata

SEQ ID NO: 95953 - DNA, 25 bp, SARS Virus
tttcggttgattgtccagaaaataa

SEQ ID NO: 95954 - DNA, 25 bp, SARS Virus
ttcggttgattcgccagaaaataac

SEQ ID NO: 95955 - DNA, 25 bp, SARS Virus
tcggttgattctgcagaaaataact

SEQ ID NO: 95956 - DNA, 25 bp, SARS Virus
cggttgattctcgagaaaataactc

SEQ ID NO: 95957 - DNA, 25 bp, SARS Virus
ggttgattctccggaaaataactcc

SEQ ID NO: 95958 - DNA, 25 bp, SARS Virus
gttgattctccagaaaataactcct

SEQ ID NO: 95959 - DNA, 25 bp, SARS Virus
ttgattctccaggaaataactcctg

SEQ ID NO: 95960 - DNA, 25 bp, SARS Virus
tgattctccagagaataactcctga

SEQ ID NO: 95961 - DNA, 25 bp, SARS Virus
gattctccagaagataactcctgaa

SEQ ID NO: 95962 - DNA, 25 bp, SARS Virus
attctccagaaagtaactcctgaac

SEQ ID NO: 95963 - DNA, 25 bp, SARS Virus
ttctccagaaaagaactcctgaacg

SEQ ID NO: 95964 - DNA, 25 bp, SARS Virus
tctccagaaaatgactcctgaacga

SEQ ID NO: 95965 - DNA, 25 bp, SARS Virus
ctccagaaaatagctcctgaacgag

SEQ ID NO: 95966 - DNA, 25 bp, SARS Virus
tccagaaaataagtcctgaacgaga

SEQ ID NO: 95967 - DNA, 25 bp, SARS Virus
ccagaaaataacgcctgaacgagaa

SEQ ID NO: 95968 - DNA, 25 bp, SARS Virus
cagaaaataactgctgaacgagaaa

SEQ ID NO: 95969 - DNA, 25 bp, SARS Virus
agaaaataactcgtgaacgagaaat

SEQ ID NO: 95970 - DNA, 25 bp, SARS Virus
gaaaataactccggaacgagaaatt

SEQ ID NO: 95971 - DNA, 25 bp, SARS Virus
aaaataactcctgaacgagaaatta

SEQ ID NO: 95972 - DNA, 25 bp, SARS Virus
aaataactcctggacgagaaattat

SEQ ID NO: 95973 - DNA, 25 bp, SARS Virus
aataactcctgagcgagaaattatt

SEQ ID NO: 95974 - DNA, 25 bp, SARS Virus
ataactcctgaaggagaaattattc

SEQ ID NO: 95975 - DNA, 25 bp, SARS Virus
taactcctgaacgagaaattattcc

SEQ ID NO: 95976 - DNA, 25 bp, SARS Virus
aactcctgaacgggaaattattcca

SEQ ID NO: 95977 - DNA, 25 bp, SARS Virus
actcctgaacgagaaattattccac

SEQ ID NO: 95978 - DNA, 25 bp, SARS Virus
ctcctgaacgaggaattattccact

SEQ ID NO: 95979 - DNA, 25 bp, SARS Virus
tcctgaacgagagattattccactg

SEQ ID NO: 95980 - DNA, 25 bp, SARS Virus
cctgaacgagaagttattccactgt

SEQ ID NO: 95981 - DNA, 25 bp, SARS Virus
ctgaacgagaaagtattccactgtg

SEQ ID NO: 95982 - DNA, 25 bp, SARS Virus
tgaacgagaaatgattccactgtga

SEQ ID NO: 95983 - DNA, 25 bp, SARS Virus
gaacgagaaattgttccactgtgag

SEQ ID NO: 95984 - DNA, 25 bp, SARS Virus
aacgagaaattagtccactgtgagc

SEQ ID NO: 95985 - DNA, 25 bp, SARS Virus
acgagaaattatgccactgtgagcg

SEQ ID NO: 95986 - DNA, 25 bp, SARS Virus
cgagaaattattgcactgtgagcga

SEQ ID NO: 95987 - DNA, 25 bp, SARS Virus
gagaaattattcgactgtgagcgac

SEQ ID NO: 95988 - DNA, 25 bp, SARS Virus
agaaattattccgctgtgagcgact

SEQ ID NO: 95989 - DNA, 25 bp, SARS Virus
gaaattattccagtgtgagcgacta

SEQ ID NO: 95990 - DNA, 25 bp, SARS Virus
aaattattccacggtgagcgactac

SEQ ID NO: 95991 - DNA, 25 bp, SARS Virus
aattattccactgtgagcgactacg

SEQ ID NO: 95992 - DNA, 25 bp, SARS Virus
attattccactgggagcgactacga

SEQ ID NO: 95993 - DNA, 25 bp, SARS Virus
ttattccactgtgagcgactacgac

SEQ ID NO: 95994 - DNA, 25 bp, SARS Virus
tattccactgtgggcgactacgacc

SEQ ID NO: 95995 - DNA, 25 bp, SARS Virus
attccactgtgagcgactacgaccg

SEQ ID NO: 95996 - DNA, 25 bp, SARS Virus
ttccactgtgagggactacgaccga

SEQ ID NO: 95997 - DNA, 25 bp, SARS Virus
tccactgtgagcgactacgaccgaa

SEQ ID NO: 95998 - DNA, 25 bp, SARS Virus
ccactgtgagcggctacgaccgaag

SEQ ID NO: 95999 - DNA, 25 bp, SARS Virus
cactgtgagcgagtacgaccgaagt

SEQ ID NO: 96000 - DNA, 25 bp, SARS Virus
actgtgagcgacgacgaccgaagta

SEQ ID NO: 96001 - DNA, 25 bp, SARS Virus
ctgtgagcgactgcgaccgaagtac

SEQ ID NO: 96002 - DNA, 25 bp, SARS Virus
tgtgagcgactaggaccgaagtact

SEQ ID NO: 96003 - DNA, 25 bp, SARS Virus
gtgagcgactacgaccgaagtactt

SEQ ID NO: 96004 - DNA, 25 bp, SARS Virus
tgagcgactacggccgaagtacttc

SEQ ID NO: 96005 - DNA, 25 bp, SARS Virus
gagcgactacgagcgaagtacttcg

SEQ ID NO: 96006 - DNA, 25 bp, SARS Virus
agcgactacgacggaagtacttcgt

SEQ ID NO: 96007 - DNA, 25 bp, SARS Virus
gcgactacgaccgaagtacttcgtt

SEQ ID NO: 96008 - DNA, 25 bp, SARS Virus
cgactacgaccggagtacttcgtta

SEQ ID NO: 96009 - DNA, 25 bp, SARS Virus
gactacgaccgaggtacttcgttat

SEQ ID NO: 96010 - DNA, 25 bp, SARS Virus
actacgaccgaagtacttcgttata

SEQ ID NO: 96011 - DNA, 25 bp, SARS Virus
ctacgaccgaaggacttcgttatac

SEQ ID NO: 96012 - DNA, 25 bp, SARS Virus
tacgaccgaagtgcttcgttatacc

SEQ ID NO: 96013 - DNA, 25 bp, SARS Virus
acgaccgaagtagttcgttataccg

SEQ ID NO: 96014 - DNA, 25 bp, SARS Virus
cgaccgaagtacgtcgttataccgc

SEQ ID NO: 96015 - DNA, 25 bp, SARS Virus
gaccgaagtactgcgttataccgct

SEQ ID NO: 96016 - DNA, 25 bp, SARS Virus
accgaagtacttggttataccgctt

SEQ ID NO: 96017 - DNA, 25 bp, SARS Virus
ccgaagtacttcgttataccgctta

SEQ ID NO: 96018 - DNA, 25 bp, SARS Virus
cgaagtacttcggtataccgcttac

SEQ ID NO: 96019 - DNA, 25 bp, SARS Virus
gaagtacttcgtgataccgcttacg

SEQ ID NO: 96020 - DNA, 25 bp, SARS Virus
aagtacttcgttgtaccgcttacgg

SEQ ID NO: 96021 - DNA, 25 bp, SARS Virus
agtacttcgttagaccgcttacgga

SEQ ID NO: 96022 - DNA, 25 bp, SARS Virus
gtacttcgttatgccgcttacggat

SEQ ID NO: 96023 - DNA, 25 bp, SARS Virus
tacttcgttatagcgcttacggatc

SEQ ID NO: 96024 - DNA, 25 bp, SARS Virus
acttcgttatacggcttacggatcc

SEQ ID NO: 96025 - DNA, 25 bp, SARS Virus
cttcgttataccgcttacggatcca

SEQ ID NO: 96026 - DNA, 25 bp, SARS Virus
ttcgttataccggttacggatccac

SEQ ID NO: 96027 - DNA, 25 bp, SARS Virus
tcgttataccgcgtacggatccact

SEQ ID NO: 96028 - DNA, 25 bp, SARS Virus
cgttataccgctgacggatccacta

SEQ ID NO: 96029 - DNA, 25 bp, SARS Virus
gttataccgcttgcggatccactat

SEQ ID NO: 96030 - DNA, 25 bp, SARS Virus
ttataccgcttagggatccactata

SEQ ID NO: 96031 - DNA, 25 bp, SARS Virus
tataccgcttacggatccactataa

SEQ ID NO: 96032 - DNA, 25 bp, SARS Virus
ataccgcttacggatccactataat

SEQ ID NO: 96033 - DNA, 25 bp, SARS Virus
taccgcttacgggtccactataatt

SEQ ID NO: 96034 - DNA, 25 bp, SARS Virus
accgcttacggagccactataatta

SEQ ID NO: 96035 - DNA, 25 bp, SARS Virus
ccgcttacggatgcactataattac

SEQ ID NO: 96036 - DNA, 25 bp, SARS Virus
cgcttacggatcgactataattacg

SEQ ID NO: 96037 - DNA, 25 bp, SARS Virus
gcttacggatccgctataattacga

SEQ ID NO: 96038 - DNA, 25 bp, SARS Virus
cttacggatccagtataattacgat

SEQ ID NO: 96039 - DNA, 25 bp, SARS Virus
ttacggatccacgataattacgatc

SEQ ID NO: 96040 - DNA, 25 bp, SARS Virus
tacggatccactgtaattacgatct

SEQ ID NO: 96041 - DNA, 25 bp, SARS Virus
acggatccactagaattacgatctc

SEQ ID NO: 96042 - DNA, 25 bp, SARS Virus
cggatccactatgattacgatctct

SEQ ID NO: 96043 - DNA, 25 bp, SARS Virus
ggatccactatagttacgatctcta

SEQ ID NO: 96044 - DNA, 25 bp, SARS Virus
gatccactataagtacgatctctag

SEQ ID NO: 96045 - DNA, 25 bp, SARS Virus
atccactataatgacgatctctaga

SEQ ID NO: 96046 - DNA, 25 bp, SARS Virus
tccactataattgcgatctctagag

SEQ ID NO: 96047 - DNA, 25 bp, SARS Virus
ccactataattaggatctctagagt

SEQ ID NO: 96048 - DNA, 25 bp, SARS Virus
cactataattacgatctctagagta

SEQ ID NO: 96049 - DNA, 25 bp, SARS Virus
actataattacggtctctagagtaa

SEQ ID NO: 96050 - DNA, 25 bp, SARS Virus
ctataattacgagctctagagtaaa

SEQ ID NO: 96051 - DNA, 25 bp, SARS Virus
tataattacgatgtctagagtaaac

SEQ ID NO: 96052 - DNA, 25 bp, SARS Virus
ataattacgatcgctagagtaaaca

SEQ ID NO: 96053 - DNA, 25 bp, SARS Virus
taattacgatctgtagagtaaacac

SEQ ID NO: 96054 - DNA, 25 bp, SARS Virus
aattacgatctcgagagtaaacacg

SEQ ID NO: 96055 - DNA, 25 bp, SARS Virus
attacgatctctggagtaaacacgc

SEQ ID NO: 96056 - DNA, 25 bp, SARS Virus
ttacgatctctagagtaaacacgcg

SEQ ID NO: 96057 - DNA, 25 bp, SARS Virus
tacgatctctagggtaaacacgcgt

SEQ ID NO: 96058 - DNA, 25 bp, SARS Virus
acgatctctagagtaaacacgcgtc

SEQ ID NO: 96059 - DNA, 25 bp, SARS Virus
cgatctctagaggaaacacgcgtct

SEQ ID NO: 96060 - DNA, 25 bp, SARS Virus
gatctctagagtgaacacgcgtctt

SEQ ID NO: 96061 - DNA, 25 bp, SARS Virus
atctctagagtagacacgcgtcttc

SEQ ID NO: 96062 - DNA, 25 bp, SARS Virus
tctctagagtaagcacgcgtcttca

SEQ ID NO: 96063 - DNA, 25 bp, SARS Virus
ctctagagtaaagacgcgtcttcaa

SEQ ID NO: 96064 - DNA, 25 bp, SARS Virus
tctagagtaaacgcgcgtcttcaag

SEQ ID NO: 96065 - DNA, 25 bp, SARS Virus
ctagagtaaacaggcgtcttcaagt

SEQ ID NO: 96066 - DNA, 25 bp, SARS Virus
tagagtaaacacgcgtcttcaagtt

SEQ ID NO: 96067 - DNA, 25 bp, SARS Virus
agagtaaacacgggtcttcaagtta

SEQ ID NO: 96068 - DNA, 25 bp, SARS Virus
gagtaaacacgcgtcttcaagttac

SEQ ID NO: 96069 - DNA, 25 bp, SARS Virus
agtaaacacgcggcttcaagttacc

SEQ ID NO: 96070 - DNA, 25 bp, SARS Virus
gtaaacacgcgtgttcaagttacct

SEQ ID NO: 96071 - DNA, 25 bp, SARS Virus
taaacacgcgtcgtcaagttacctg

SEQ ID NO: 96072 - DNA, 25 bp, SARS Virus
aaacacgcgtctgcaagttacctga

SEQ ID NO: 96073 - DNA, 25 bp, SARS Virus
aacacgcgtcttgaagttacctgaa

SEQ ID NO: 96074 - DNA, 25 bp, SARS Virus
acacgcgtcttcgagttacctgaat

SEQ ID NO: 96075 - DNA, 25 bp, SARS Virus
cacgcgtcttcaggttacctgaatg

SEQ ID NO: 96076 - DNA, 25 bp, SARS Virus
acgcgtcttcaagttacctgaatgt

SEQ ID NO: 96077 - DNA, 25 bp, SARS Virus
cgcgtcttcaaggtacctgaatgtc

SEQ ID NO: 96078 - DNA, 25 bp, SARS Virus
gcgtcttcaagtgacctgaatgtca

SEQ ID NO: 96079 - DNA, 25 bp, SARS Virus
cgtcttcaagttgcctgaatgtcac

SEQ ID NO: 96080 - DNA, 25 bp, SARS Virus
gtcttcaagttagctgaatgtcaca

SEQ ID NO: 96081 - DNA, 25 bp, SARS Virus
tcttcaagttacgtgaatgtcacaa

SEQ ID NO: 96082 - DNA, 25 bp, SARS Virus
cttcaagttaccggaatgtcacaac

SEQ ID NO: 96083 - DNA, 25 bp, SARS Virus
ttcaagttacctgaatgtcacaacg

SEQ ID NO: 96084 - DNA, 25 bp, SARS Virus
tcaagttacctggatgtcacaacgg

SEQ ID NO: 96085 - DNA, 25 bp, SARS Virus
caagttacctgagtgtcacaacggt

SEQ ID NO: 96086 - DNA, 25 bp, SARS Virus
aagttacctgaaggtcacaacggtg

SEQ ID NO: 96087 - DNA, 25 bp, SARS Virus
agttacctgaatgtcacaacggtgg

SEQ ID NO: 96088 - DNA, 25 bp, SARS Virus
gttacctgaatggcacaacggtgga

SEQ ID NO: 96089 - DNA, 25 bp, SARS Virus
ttacctgaatgtgacaacggtggag

SEQ ID NO: 96090 - DNA, 25 bp, SARS Virus
tacctgaatgtcgcaacggtggaga

SEQ ID NO: 96091 - DNA, 25 bp, SARS Virus
acctgaatgtcagaacggtggagac

SEQ ID NO: 96092 - DNA, 25 bp, SARS Virus
cctgaatgtcacgacggtggagacg

SEQ ID NO: 96093 - DNA, 25 bp, SARS Virus
ctgaatgtcacagcggtggagacga

SEQ ID NO: 96094 - DNA, 25 bp, SARS Virus
tgaatgtcacaagggtggagacgag

SEQ ID NO: 96095 - DNA, 25 bp, SARS Virus
gaatgtcacaacggtggagacgagt

SEQ ID NO: 96096 - DNA, 25 bp, SARS Virus
aatgtcacaacggtggagacgagtg

SEQ ID NO: 96097 - DNA, 25 bp, SARS Virus
atgtcacaacgggggagacgagtga

SEQ ID NO: 96098 - DNA, 25 bp, SARS Virus
tgtcacaacggtggagacgagtgac

SEQ ID NO: 96099 - DNA, 25 bp, SARS Virus
gtcacaacggtggagacgagtgact

SEQ ID NO: 96100 - DNA, 25 bp, SARS Virus
tcacaacggtggggacgagtgacta

SEQ ID NO: 96101 - DNA, 25 bp, SARS Virus
cacaacggtggagacgagtgactac

SEQ ID NO: 96102 - DNA, 25 bp, SARS Virus
acaacggtggaggcgagtgactact

SEQ ID NO: 96103 - DNA, 25 bp, SARS Virus
caacggtggagaggagtgactacta

SEQ ID NO: 96104 - DNA, 25 bp, SARS Virus
aacggtggagacgagtgactactat

SEQ ID NO: 96105 - DNA, 25 bp, SARS Virus
acggtggagacgggtgactactata

SEQ ID NO: 96106 - DNA, 25 bp, SARS Virus
cggtggagacgagtgactactatac

SEQ ID NO: 96107 - DNA, 25 bp, SARS Virus
ggtggagacgagggactactatact

SEQ ID NO: 96108 - DNA, 25 bp, SARS Virus
gtggagacgagtgactactatacta

SEQ ID NO: 96109 - DNA, 25 bp, SARS Virus
tggagacgagtggctactatactaa

SEQ ID NO: 96110 - DNA, 25 bp, SARS Virus
ggagacgagtgagtactatactaac

SEQ ID NO: 96111 - DNA, 25 bp, SARS Virus
gagacgagtgacgactatactaacg

SEQ ID NO: 96112 - DNA, 25 bp, SARS Virus
agacgagtgactgctatactaacga

SEQ ID NO: 96113 - DNA, 25 bp, SARS Virus
gacgagtgactagtatactaacgac

SEQ ID NO: 96114 - DNA, 25 bp, SARS Virus
acgagtgactacgatactaacgacg

SEQ ID NO: 96115 - DNA, 25 bp, SARS Virus
cgagtgactactgtactaacgacgg

SEQ ID NO: 96116 - DNA, 25 bp, SARS Virus
gagtgactactagactaacgacgga

SEQ ID NO: 96117 - DNA, 25 bp, SARS Virus
agtgactactatgctaacgacggat

SEQ ID NO: 96118 - DNA, 25 bp, SARS Virus
gtgactactatagtaacgacggatg

SEQ ID NO: 96119 - DNA, 25 bp, SARS Virus
tgactactatacgaacgacggatgt

SEQ ID NO: 96120 - DNA, 25 bp, SARS Virus
gactactatactgacgacggatgtg

SEQ ID NO: 96121 - DNA, 25 bp, SARS Virus
actactatactagcgacggatgtga

SEQ ID NO: 96122 - DNA, 25 bp, SARS Virus
ctactatactaaggacggatgtgac

SEQ ID NO: 96123 - DNA, 25 bp, SARS Virus
tactatactaacgacggatgtgacg

SEQ ID NO: 96124 - DNA, 25 bp, SARS Virus
actatactaacggcggatgtgacga

SEQ ID NO: 96125 - DNA, 25 bp, SARS Virus
ctatactaacgagggatgtgacgac

SEQ ID NO: 96126 - DNA, 25 bp, SARS Virus
tatactaacgacggatgtgacgacg

SEQ ID NO: 96127 - DNA, 25 bp, SARS Virus
atactaacgacggatgtgacgacga

SEQ ID NO: 96128 - DNA, 25 bp, SARS Virus
tactaacgacgggtgtgacgacgag

SEQ ID NO: 96129 - DNA, 25 bp, SARS Virus
actaacgacggaggtgacgacgaga

SEQ ID NO: 96130 - DNA, 25 bp, SARS Virus
ctaacgacggatgtgacgacgagat

SEQ ID NO: 96131 - DNA, 25 bp, SARS Virus
taacgacggatgggacgacgagatc

SEQ ID NO: 96132 - DNA, 25 bp, SARS Virus
aacgacggatgtgacgacgagatca

SEQ ID NO: 96133 - DNA, 25 bp, SARS Virus
acgacggatgtggcgacgagatcaa

SEQ ID NO: 96134 - DNA, 25 bp, SARS Virus
cgacggatgtgaggacgagatcaat

SEQ ID NO: 96135 - DNA, 25 bp, SARS Virus
gacggatgtgacgacgagatcaatc

SEQ ID NO: 96136 - DNA, 25 bp, SARS Virus
acggatgtgacggcgagatcaatca

SEQ ID NO: 96137 - DNA, 25 bp, SARS Virus
cggatgtgacgaggagatcaatcac

SEQ ID NO: 96138 - DNA, 25 bp, SARS Virus
ggatgtgacgacgagatcaatcacc

SEQ ID NO: 96139 - DNA, 25 bp, SARS Virus
gatgtgacgacgggatcaatcacca

SEQ ID NO: 96140 - DNA, 25 bp, SARS Virus
atgtgacgacgagatcaatcaccat

SEQ ID NO: 96141 - DNA, 25 bp, SARS Virus
tgtgacgacgaggtcaatcaccatg

SEQ ID NO: 96142 - DNA, 25 bp, SARS Virus
gtgacgacgagagcaatcaccatga

SEQ ID NO: 96143 - DNA, 25 bp, SARS Virus
tgacgacgagatgaatcaccatgac

SEQ ID NO: 96144 - DNA, 25 bp, SARS Virus
gacgacgagatcgatcaccatgacg

SEQ ID NO: 96145 - DNA, 25 bp, SARS Virus
acgacgagatcagtcaccatgacgg

SEQ ID NO: 96146 - DNA, 25 bp, SARS Virus
cgacgagatcaagcaccatgacggt

SEQ ID NO: 96147 - DNA, 25 bp, SARS Virus
gacgagatcaatgaccatgacggtg

SEQ ID NO: 96148 - DNA, 25 bp, SARS Virus
acgagatcaatcgccatgacggtga

SEQ ID NO: 96149 - DNA, 25 bp, SARS Virus
cgagatcaatcagcatgacggtgac

SEQ ID NO: 96150 - DNA, 25 bp, SARS Virus
gagatcaatcacgatgacggtgacg

SEQ ID NO: 96151 - DNA, 25 bp, SARS Virus
agatcaatcaccgtgacggtgacga

SEQ ID NO: 96152 - DNA, 25 bp, SARS Virus
gatcaatcaccaggacggtgacgac

SEQ ID NO: 96153 - DNA, 25 bp, SARS Virus
atcaatcaccatgacggtgacgacc

SEQ ID NO: 96154 - DNA, 25 bp, SARS Virus
tcaatcaccatggcggtgacgacct

SEQ ID NO: 96155 - DNA, 25 bp, SARS Virus
caatcaccatgagggtgacgaccta

SEQ ID NO: 96156 - DNA, 25 bp, SARS Virus
aatcaccatgacggtgacgacctac

SEQ ID NO: 96157 - DNA, 25 bp, SARS Virus
atcaccatgacggtgacgacctacc

SEQ ID NO: 96158 - DNA, 25 bp, SARS Virus
tcaccatgacggggacgacctacct

SEQ ID NO: 96159 - DNA, 25 bp, SARS Virus
caccatgacggtgacgacctacctg

SEQ ID NO: 96160 - DNA, 25 bp, SARS Virus
accatgacggtggcgacctacctgt

SEQ ID NO: 96161 - DNA, 25 bp, SARS Virus
ccatgacggtgaggacctacctgta

SEQ ID NO: 96162 - DNA, 25 bp, SARS Virus
catgacggtgacgacctacctgtaa

SEQ ID NO: 96163 - DNA, 25 bp, SARS Virus
atgacggtgacggcctacctgtaaa

SEQ ID NO: 96164 - DNA, 25 bp, SARS Virus
tgacggtgacgagctacctgtaaac

SEQ ID NO: 96165 - DNA, 25 bp, SARS Virus
gacggtgacgacgtacctgtaaacc

SEQ ID NO: 96166 - DNA, 25 bp, SARS Virus
acggtgacgaccgacctgtaaacca

SEQ ID NO: 96167 - DNA, 25 bp, SARS Virus
cggtgacgacctgcctgtaaaccac

SEQ ID NO: 96168 - DNA, 25 bp, SARS Virus
ggtgacgacctagctgtaaaccacg

SEQ ID NO: 96169 - DNA, 25 bp, SARS Virus
gtgacgacctacgtgtaaaccacga

SEQ ID NO: 96170 - DNA, 25 bp, SARS Virus
tgacgacctaccggtaaaccacgac

SEQ ID NO: 96171 - DNA, 25 bp, SARS Virus
gacgacctacctgtaaaccacgacc

SEQ ID NO: 96172 - DNA, 25 bp, SARS Virus
acgacctacctggaaaccacgaccg

SEQ ID NO: 96173 - DNA, 25 bp, SARS Virus
cgacctacctgtgaaccacgaccgc

SEQ ID NO: 96174 - DNA, 25 bp, SARS Virus
gacctacctgtagaccacgaccgcg

SEQ ID NO: 96175 - DNA, 25 bp, SARS Virus
acctacctgtaagccacgaccgcga

SEQ ID NO: 96176 - DNA, 25 bp, SARS Virus
cctacctgtaaagcacgaccgcgac

SEQ ID NO: 96177 - DNA, 25 bp, SARS Virus
ctacctgtaaacgacgaccgcgacg

SEQ ID NO: 96178 - DNA, 25 bp, SARS Virus
tacctgtaaaccgcgaccgcgacga

SEQ ID NO: 96179 - DNA, 25 bp, SARS Virus
acctgtaaaccaggaccgcgacgag

SEQ ID NO: 96180 - DNA, 25 bp, SARS Virus
cctgtaaaccacgaccgcgacgaga

SEQ ID NO: 96181 - DNA, 25 bp, SARS Virus
ctgtaaaccacggccgcgacgagaa

SEQ ID NO: 96182 - DNA, 25 bp, SARS Virus
tgtaaaccacgagcgcgacgagaag

SEQ ID NO: 96183 - DNA, 25 bp, SARS Virus
gtaaaccacgacggcgacgagaagt

SEQ ID NO: 96184 - DNA, 25 bp, SARS Virus
taaaccacgaccgcgacgagaagtt

SEQ ID NO: 96185 - DNA, 25 bp, SARS Virus
aaaccacgaccgggacgagaagttt

SEQ ID NO: 96186 - DNA, 25 bp, SARS Virus
aaccacgaccgcgacgagaagttta

SEQ ID NO: 96187 - DNA, 25 bp, SARS Virus
accacgaccgcggcgagaagtttat

SEQ ID NO: 96188 - DNA, 25 bp, SARS Virus
ccacgaccgcgaggagaagtttatg

SEQ ID NO: 96189 - DNA, 25 bp, SARS Virus
cacgaccgcgacgagaagtttatgg

SEQ ID NO: 96190 - DNA, 25 bp, SARS Virus
acgaccgcgacgggaagtttatgga

SEQ ID NO: 96191 - DNA, 25 bp, SARS Virus
cgaccgcgacgagaagtttatggaa

SEQ ID NO: 96192 - DNA, 25 bp, SARS Virus
gaccgcgacgaggagtttatggaaa

SEQ ID NO: 96193 - DNA, 25 bp, SARS Virus
accgcgacgagaggtttatggaaaa

SEQ ID NO: 96194 - DNA, 25 bp, SARS Virus
ccgcgacgagaagtttatggaaaac

SEQ ID NO: 96195 - DNA, 25 bp, SARS Virus
cgcgacgagaaggttatggaaaacg

SEQ ID NO: 96196 - DNA, 25 bp, SARS Virus
gcgacgagaagtgtatggaaaacga

SEQ ID NO: 96197 - DNA, 25 bp, SARS Virus
cgacgagaagttgatggaaaacgat

SEQ ID NO: 96198 - DNA, 25 bp, SARS Virus
gacgagaagtttgtggaaaacgata

SEQ ID NO: 96199 - DNA, 25 bp, SARS Virus
acgagaagtttagggaaaacgatac

SEQ ID NO: 96200 - DNA, 25 bp, SARS Virus
cgagaagtttatggaaaacgatacg

SEQ ID NO: 96201 - DNA, 25 bp, SARS Virus
gagaagtttatggaaaacgatacgt

SEQ ID NO: 96202 - DNA, 25 bp, SARS Virus
agaagtttatgggaaacgatacgtt

SEQ ID NO: 96203 - DNA, 25 bp, SARS Virus
gaagtttatggagaacgatacgttt

SEQ ID NO: 96204 - DNA, 25 bp, SARS Virus
aagtttatggaagacgatacgttta

SEQ ID NO: 96205 - DNA, 25 bp, SARS Virus
agtttatggaaagcgatacgtttac

SEQ ID NO: 96206 - DNA, 25 bp, SARS Virus
gtttatggaaaaggatacgtttacc

SEQ ID NO: 96207 - DNA, 25 bp, SARS Virus
tttatggaaaacgatacgtttaccg

SEQ ID NO: 96208 - DNA, 25 bp, SARS Virus
ttatggaaaacggtacgtttaccgt

SEQ ID NO: 96209 - DNA, 25 bp, SARS Virus
tatggaaaacgagacgtttaccgta

SEQ ID NO: 96210 - DNA, 25 bp, SARS Virus
atggaaaacgatgcgtttaccgtat

SEQ ID NO: 96211 - DNA, 25 bp, SARS Virus
tggaaaacgataggtttaccgtata

SEQ ID NO: 96212 - DNA, 25 bp, SARS Virus
ggaaaacgatacgtttaccgtatat

SEQ ID NO: 96213 - DNA, 25 bp, SARS Virus
gaaaacgatacggttaccgtatatc

SEQ ID NO: 96214 - DNA, 25 bp, SARS Virus
aaaacgatacgtgtaccgtatatcc

SEQ ID NO: 96215 - DNA, 25 bp, SARS Virus
aaacgatacgttgaccgtatatcca

SEQ ID NO: 96216 - DNA, 25 bp, SARS Virus
aacgatacgtttgccgtatatccaa

SEQ ID NO: 96217 - DNA, 25 bp, SARS Virus
acgatacgtttagcgtatatccaag

SEQ ID NO: 96218 - DNA, 25 bp, SARS Virus
cgatacgtttacggtatatccaagt

SEQ ID NO: 96219 - DNA, 25 bp, SARS Virus
gatacgtttaccgtatatccaagtt

SEQ ID NO: 96220 - DNA, 25 bp, SARS Virus
atacgtttaccggatatccaagtta

SEQ ID NO: 96221 - DNA, 25 bp, SARS Virus
tacgtttaccgtgtatccaagttac

SEQ ID NO: 96222 - DNA, 25 bp, SARS Virus
acgtttaccgtagatccaagttacc

SEQ ID NO: 96223 - DNA, 25 bp, SARS Virus
cgtttaccgtatgtccaagttaccg

SEQ ID NO: 96224 - DNA, 25 bp, SARS Virus
gtttaccgtatagccaagttaccgt

SEQ ID NO: 96225 - DNA, 25 bp, SARS Virus
tttaccgtatatgcaagttaccgta

SEQ ID NO: 96226 - DNA, 25 bp, SARS Virus
ttaccgtatatcgaagttaccgtaa

SEQ ID NO: 96227 - DNA, 25 bp, SARS Virus
taccgtatatccgagttaccgtaac

SEQ ID NO: 96228 - DNA, 25 bp, SARS Virus
accgtatatccaggttaccgtaacc

SEQ ID NO: 96229 - DNA, 25 bp, SARS Virus
ccgtatatccaagttaccgtaacct

SEQ ID NO: 96230 - DNA, 25 bp, SARS Virus
cgtatatccaaggtaccgtaacctc

SEQ ID NO: 96231 - DNA, 25 bp, SARS Virus
gtatatccaagtgaccgtaacctca

SEQ ID NO: 96232 - DNA, 25 bp, SARS Virus
tatatccaagttgccgtaacctcaa

SEQ ID NO: 96233 - DNA, 25 bp, SARS Virus
atatccaagttagcgtaacctcaat

SEQ ID NO: 96234 - DNA, 25 bp, SARS Virus
tatccaagttacggtaacctcaatg

SEQ ID NO: 96235 - DNA, 25 bp, SARS Virus
atccaagttaccgtaacctcaatgg

SEQ ID NO: 96236 - DNA, 25 bp, SARS Virus
tccaagttaccggaacctcaatggg

SEQ ID NO: 96237 - DNA, 25 bp, SARS Virus
ccaagttaccgtgacctcaatgggt

SEQ ID NO: 96238 - DNA, 25 bp, SARS Virus
caagttaccgtagcctcaatgggtt

SEQ ID NO: 96239 - DNA, 25 bp, SARS Virus
aagttaccgtaagctcaatgggttt

SEQ ID NO: 96240 - DNA, 25 bp, SARS Virus
agttaccgtaacgtcaatgggtttt

SEQ ID NO: 96241 - DNA, 25 bp, SARS Virus
gttaccgtaaccgcaatgggtttta

SEQ ID NO: 96242 - DNA, 25 bp, SARS Virus
ttaccgtaacctgaatgggttttac

SEQ ID NO: 96243 - DNA, 25 bp, SARS Virus
taccgtaacctcgatgggttttaca

SEQ ID NO: 96244 - DNA, 25 bp, SARS Virus
accgtaacctcagtgggttttacaa

SEQ ID NO: 96245 - DNA, 25 bp, SARS Virus
ccgtaacctcaaggggttttacaag

SEQ ID NO: 96246 - DNA, 25 bp, SARS Virus
cgtaacctcaatgggttttacaaga

SEQ ID NO: 96247 - DNA, 25 bp, SARS Virus
gtaacctcaatgggttttacaagag

SEQ ID NO: 96248 - DNA, 25 bp, SARS Virus
taacctcaatgggttttacaagaga

SEQ ID NO: 96249 - DNA, 25 bp, SARS Virus
aacctcaatggggtttacaagagat

SEQ ID NO: 96250 - DNA, 25 bp, SARS Virus
acctcaatgggtgttacaagagata

SEQ ID NO: 96251 - DNA, 25 bp, SARS Virus
cctcaatgggttgtacaagagatac

SEQ ID NO: 96252 - DNA, 25 bp, SARS Virus
ctcaatgggtttgacaagagatact

SEQ ID NO: 96253 - DNA, 25 bp, SARS Virus
tcaatgggttttgcaagagatactc

SEQ ID NO: 96254 - DNA, 25 bp, SARS Virus
caatgggttttagaagagatactct

SEQ ID NO: 96255 - DNA, 25 bp, SARS Virus
aatgggttttacgagagatactctt

SEQ ID NO: 96256 - DNA, 25 bp, SARS Virus
atgggttttacaggagatactcttg

SEQ ID NO: 96257 - DNA, 25 bp, SARS Virus
tgggttttacaagagatactcttgg

SEQ ID NO: 96258 - DNA, 25 bp, SARS Virus
gggttttacaagggatactcttggt

SEQ ID NO: 96259 - DNA, 25 bp, SARS Virus
ggttttacaagagatactcttggtt

SEQ ID NO: 96260 - DNA, 25 bp, SARS Virus
gttttacaagaggtactcttggttt

SEQ ID NO: 96261 - DNA, 25 bp, SARS Virus
ttttacaagagagactcttggtttt

SEQ ID NO: 96262 - DNA, 25 bp, SARS Virus
tttacaagagatgctcttggttttt

SEQ ID NO: 96263 - DNA, 25 bp, SARS Virus
ttacaagagatagtcttggtttttg

SEQ ID NO: 96264 - DNA, 25 bp, SARS Virus
tacaagagatacgcttggtttttgt

SEQ ID NO: 96265 - DNA, 25 bp, SARS Virus
aacgaagaggttttaccatcgaaaa

SEQ ID NO: 96266 - DNA, 25 bp, SARS Virus
acgaagaggttataccatcgaaaac

SEQ ID NO: 96267 - DNA, 25 bp, SARS Virus
cgaagaggttattccatcgaaaacg

SEQ ID NO: 96268 - DNA, 25 bp, SARS Virus
gaagaggttatatcatcgaaaacgt

SEQ ID NO: 96269 - DNA, 25 bp, SARS Virus
aagaggttatactatcgaaaacgtg

SEQ ID NO: 96270 - DNA, 25 bp, SARS Virus
agaggttataccttcgaaaacgtgt

SEQ ID NO: 96271 - DNA, 25 bp, SARS Virus
gaggttataccatcgaaaacgtgtg

SEQ ID NO: 96272 - DNA, 25 bp, SARS Virus
aggttataccattgaaaacgtgtgt

SEQ ID NO: 96273 - DNA, 25 bp, SARS Virus
ggttataccatctaaaacgtgtgtt

SEQ ID NO: 96274 - DNA, 25 bp, SARS Virus
gttataccatcgtaaacgtgtgttg

SEQ ID NO: 96275 - DNA, 25 bp, SARS Virus
ttataccatcgataacgtgtgttga

SEQ ID NO: 96276 - DNA, 25 bp, SARS Virus
tataccatcgaatacgtgtgttgat

SEQ ID NO: 96277 - DNA, 25 bp, SARS Virus
ataccatcgaaatcgtgtgttgatt

SEQ ID NO: 96278 - DNA, 25 bp, SARS Virus
taccatcgaaaatgtgtgttgattt

SEQ ID NO: 96279 - DNA, 25 bp, SARS Virus
accatcgaaaacttgtgttgattta

SEQ ID NO: 96280 - DNA, 25 bp, SARS Virus
ccatcgaaaacgtgtgttgatttag

SEQ ID NO: 96281 - DNA, 25 bp, SARS Virus
catcgaaaacgtttgttgatttagc

SEQ ID NO: 96282 - DNA, 25 bp, SARS Virus
atcgaaaacgtgtgttgatttagca

SEQ ID NO: 96283 - DNA, 25 bp, SARS Virus
tcgaaaacgtgttttgatttagcac

SEQ ID NO: 96284 - DNA, 25 bp, SARS Virus
cgaaaacgtgtgttgatttagcacg

SEQ ID NO: 96285 - DNA, 25 bp, SARS Virus
gaaaacgtgtgttgatttagcacgt

SEQ ID NO: 96286 - DNA, 25 bp, SARS Virus
aaaacgtgtgtttatttagcacgtg

SEQ ID NO: 96287 - DNA, 25 bp, SARS Virus
aaacgtgtgttgttttagcacgtga

SEQ ID NO: 96288 - DNA, 25 bp, SARS Virus
aacgtgtgttgatttagcacgtgag

SEQ ID NO: 96289 - DNA, 25 bp, SARS Virus
acgtgtgttgatttagcacgtgaga

SEQ ID NO: 96290 - DNA, 25 bp, SARS Virus
cgtgtgttgatttagcacgtgagag

SEQ ID NO: 96291 - DNA, 25 bp, SARS Virus
gtgtgttgattttgcacgtgagagt

SEQ ID NO: 96292 - DNA, 25 bp, SARS Virus
tgtgttgatttatcacgtgagagtc

SEQ ID NO: 96293 - DNA, 25 bp, SARS Virus
gtgttgatttagtacgtgagagtcc

SEQ ID NO: 96294 - DNA, 25 bp, SARS Virus
tgttgatttagctcgtgagagtcca

SEQ ID NO: 96295 - DNA, 25 bp, SARS Virus
gttgatttagcatgtgagagtccat

SEQ ID NO: 96296 - DNA, 25 bp, SARS Virus
ttgatttagcacttgagagtccata

SEQ ID NO: 96297 - DNA, 25 bp, SARS Virus
tgatttagcacgtgagagtccataa

SEQ ID NO: 96298 - DNA, 25 bp, SARS Virus
gatttagcacgttagagtccataac

SEQ ID NO: 96299 - DNA, 25 bp, SARS Virus
atttagcacgtgtgagtccataacg

SEQ ID NO: 96300 - DNA, 25 bp, SARS Virus
tttagcacgtgatagtccataacga

SEQ ID NO: 96301 - DNA, 25 bp, SARS Virus
ttagcacgtgagtgtccataacgac

SEQ ID NO: 96302 - DNA, 25 bp, SARS Virus
tagcacgtgagattccataacgacg

SEQ ID NO: 96303 - DNA, 25 bp, SARS Virus
agcacgtgagagtccataacgacga

SEQ ID NO: 96304 - DNA, 25 bp, SARS Virus
gcacgtgagagttcataacgacgac

SEQ ID NO: 96305 - DNA, 25 bp, SARS Virus
cacgtgagagtctataacgacgact

SEQ ID NO: 96306 - DNA, 25 bp, SARS Virus
acgtgagagtccttaacgacgactt

SEQ ID NO: 96307 - DNA, 25 bp, SARS Virus
cgtgagagtccataacgacgacttg

SEQ ID NO: 96308 - DNA, 25 bp, SARS Virus
gtgagagtccattacgacgacttgt

SEQ ID NO: 96309 - DNA, 25 bp, SARS Virus
tgagagtccatatcgacgacttgtc

SEQ ID NO: 96310 - DNA, 25 bp, SARS Virus
gagagtccataatgacgacttgtcc

SEQ ID NO: 96311 - DNA, 25 bp, SARS Virus
agagtccataactacgacttgtcct

SEQ ID NO: 96312 - DNA, 25 bp, SARS Virus
gagtccataacgtcgacttgtccta

SEQ ID NO: 96313 - DNA, 25 bp, SARS Virus
agtccataacgatgacttgtcctag

SEQ ID NO: 96314 - DNA, 25 bp, SARS Virus
gtccataacgactacttgtcctagc

SEQ ID NO: 96315 - DNA, 25 bp, SARS Virus
tccataacgacgtcttgtcctagcg

SEQ ID NO: 96316 - DNA, 25 bp, SARS Virus
ccataacgacgatttgtcctagcgt

SEQ ID NO: 96317 - DNA, 25 bp, SARS Virus
cataacgacgacttgtcctagcgtt

SEQ ID NO: 96318 - DNA, 25 bp, SARS Virus
ataacgacgacttgtcctagcgttg

SEQ ID NO: 96319 - DNA, 25 bp, SARS Virus
taacgacgacttttcctagcgttgt

SEQ ID NO: 96320 - DNA, 25 bp, SARS Virus
aacgacgacttgtcctagcgttgtg

SEQ ID NO: 96321 - DNA, 25 bp, SARS Virus
acgacgacttgttctagcgttgtgt

SEQ ID NO: 96322 - DNA, 25 bp, SARS Virus
cgacgacttgtcttagcgttgtgtg

SEQ ID NO: 96323 - DNA, 25 bp, SARS Virus
gacgacttgtcctagcgttgtgtgc

SEQ ID NO: 96324 - DNA, 25 bp, SARS Virus
acgacttgtccttgcgttgtgtgca

SEQ ID NO: 96325 - DNA, 25 bp, SARS Virus
cgacttgtcctatcgttgtgtgcac

SEQ ID NO: 96326 - DNA, 25 bp, SARS Virus
gacttgtcctagtgttgtgtgcact

SEQ ID NO: 96327 - DNA, 25 bp, SARS Virus
acttgtcctagctttgtgtgcactt

SEQ ID NO: 96328 - DNA, 25 bp, SARS Virus
cttgtcctagcgttgtgtgcacttc

SEQ ID NO: 96329 - DNA, 25 bp, SARS Virus
ttgtcctagcgttgtgtgcacttca

SEQ ID NO: 96330 - DNA, 25 bp, SARS Virus
tgtcctagcgttttgtgcacttcac

SEQ ID NO: 96331 - DNA, 25 bp, SARS Virus
gtcctagcgttgtgtgcacttcaca

SEQ ID NO: 96332 - DNA, 25 bp, SARS Virus
tcctagcgttgtttgcacttcacaa

SEQ ID NO: 96333 - DNA, 25 bp, SARS Virus
cctagcgttgtgtgcacttcacaag

SEQ ID NO: 96334 - DNA, 25 bp, SARS Virus
ctagcgttgtgttcacttcacaagc

SEQ ID NO: 96335 - DNA, 25 bp, SARS Virus
tagcgttgtgtgtacttcacaagcg

SEQ ID NO: 96336 - DNA, 25 bp, SARS Virus
agcgttgtgtgctcttcacaagcga

SEQ ID NO: 96337 - DNA, 25 bp, SARS Virus
gcgttgtgtgcatttcacaagcgag

SEQ ID NO: 96338 - DNA, 25 bp, SARS Virus
cgttgtgtgcacttcacaagcgagt

SEQ ID NO: 96339 - DNA, 25 bp, SARS Virus
gttgtgtgcacttcacaagcgagtt

SEQ ID NO: 96340 - DNA, 25 bp, SARS Virus
ttgtgtgcactttacaagcgagttc

SEQ ID NO: 96341 - DNA, 25 bp, SARS Virus
tgtgtgcacttctcaagcgagttca

SEQ ID NO: 96342 - DNA, 25 bp, SARS Virus
gtgtgcacttcataagcgagttcag

SEQ ID NO: 96343 - DNA, 25 bp, SARS Virus
tgtgcacttcactagcgagttcagt

SEQ ID NO: 96344 - DNA, 25 bp, SARS Virus
gtgcacttcacatgcgagttcagtt

SEQ ID NO: 96345 - DNA, 25 bp, SARS Virus
tgcacttcacaatcgagttcagttt

SEQ ID NO: 96346 - DNA, 25 bp, SARS Virus
gcacttcacaagtgagttcagtttg

SEQ ID NO: 96347 - DNA, 25 bp, SARS Virus
cacttcacaagctagttcagtttgt

SEQ ID NO: 96348 - DNA, 25 bp, SARS Virus
acttcacaagcgtgttcagtttgtt

SEQ ID NO: 96349 - DNA, 25 bp, SARS Virus
cttcacaagcgatttcagtttgttt

SEQ ID NO: 96350 - DNA, 25 bp, SARS Virus
ttcacaagcgagttcagtttgttta

SEQ ID NO: 96351 - DNA, 25 bp, SARS Virus
tcacaagcgagttcagtttgtttac

SEQ ID NO: 96352 - DNA, 25 bp, SARS Virus
cacaagcgagtttagtttgtttaca

SEQ ID NO: 96353 - DNA, 25 bp, SARS Virus
acaagcgagttctgtttgtttacat

SEQ ID NO: 96354 - DNA, 25 bp, SARS Virus
caagcgagttcattttgtttacatg

SEQ ID NO: 96355 - DNA, 25 bp, SARS Virus
aagcgagttcagtttgtttacatgt

SEQ ID NO: 96356 - DNA, 25 bp, SARS Virus
agcgagttcagtttgtttacatgtt

SEQ ID NO: 96357 - DNA, 25 bp, SARS Virus
gcgagttcagtttgtttacatgttt

SEQ ID NO: 96358 - DNA, 25 bp, SARS Virus
cgagttcagtttttttacatgtttt

SEQ ID NO: 96359 - DNA, 25 bp, SARS Virus
gagttcagtttgtttacatgttttg

SEQ ID NO: 96360 - DNA, 25 bp, SARS Virus
agttcagtttgtttacatgttttgg

SEQ ID NO: 96361 - DNA, 25 bp, SARS Virus
gttcagtttgtttacatgttttggg

SEQ ID NO: 96362 - DNA, 25 bp, SARS Virus
ttcagtttgttttcatgttttgggg

SEQ ID NO: 96363 - DNA, 25 bp, SARS Virus
tcagtttgtttatatgttttggggt

SEQ ID NO: 96364 - DNA, 25 bp, SARS Virus
cagtttgtttacttgttttggggtt

SEQ ID NO: 96365 - DNA, 25 bp, SARS Virus
agtttgtttacatgttttggggttg

SEQ ID NO: 96366 - DNA, 25 bp, SARS Virus
gtttgtttacattttttggggttga

SEQ ID NO: 96367 - DNA, 25 bp, SARS Virus
tttgtttacatgttttggggttgaa

SEQ ID NO: 96368 - DNA, 25 bp, SARS Virus
ttgtttacatgttttggggttgaaa

SEQ ID NO: 96369 - DNA, 25 bp, SARS Virus
tgtttacatgttttggggttgaaac

SEQ ID NO: 96370 - DNA, 25 bp, SARS Virus
gtttacatgttttggggttgaaact

SEQ ID NO: 96371 - DNA, 25 bp, SARS Virus
tttacatgtttttgggttgaaactt

SEQ ID NO: 96372 - DNA, 25 bp, SARS Virus
ttacatgttttgtggttgaaacttt

SEQ ID NO: 96373 - DNA, 25 bp, SARS Virus
tacatgttttggtgttgaaacttta

SEQ ID NO: 96374 - DNA, 25 bp, SARS Virus
acatgttttgggtttgaaactttat

SEQ ID NO: 96375 - DNA, 25 bp, SARS Virus
catgttttggggttgaaactttata

SEQ ID NO: 96376 - DNA, 25 bp, SARS Virus
atgttttggggttgaaactttataa

SEQ ID NO: 96377 - DNA, 25 bp, SARS Virus
tgttttggggtttaaactttataaa

SEQ ID NO: 96378 - DNA, 25 bp, SARS Virus
gttttggggttgtaactttataaaa

SEQ ID NO: 96379 - DNA, 25 bp, SARS Virus
ttttggggttgatactttataaaac

SEQ ID NO: 96380 - DNA, 25 bp, SARS Virus
tttggggttgaatctttataaaacc

SEQ ID NO: 96381 - DNA, 25 bp, SARS Virus
ttggggttgaaattttataaaacca

SEQ ID NO: 96382 - DNA, 25 bp, SARS Virus
tggggttgaaactttataaaaccac

SEQ ID NO: 96383 - DNA, 25 bp, SARS Virus
ggggttgaaactttataaaaccacc

SEQ ID NO: 96384 - DNA, 25 bp, SARS Virus
gggttgaaactttataaaaccacca

SEQ ID NO: 96385 - DNA, 25 bp, SARS Virus
ggttgaaactttttaaaaccaccaa

SEQ ID NO: 96386 - DNA, 25 bp, SARS Virus
gttgaaactttataaaaccaccaaa

SEQ ID NO: 96387 - DNA, 25 bp, SARS Virus
ttgaaactttattaaaccaccaaaa

SEQ ID NO: 96388 - DNA, 25 bp, SARS Virus
tgaaactttatataaccaccaaaat

SEQ ID NO: 96389 - DNA, 25 bp, SARS Virus
gaaactttataataccaccaaaatt

SEQ ID NO: 96390 - DNA, 25 bp, SARS Virus
aaactttataaatccaccaaaatta

SEQ ID NO: 96391 - DNA, 25 bp, SARS Virus
aactttataaaatcaccaaaattaa

SEQ ID NO: 96392 - DNA, 25 bp, SARS Virus
actttataaaactaccaaaattaaa

SEQ ID NO: 96393 - DNA, 25 bp, SARS Virus
ctttataaaacctccaaaattaaaa

SEQ ID NO: 96394 - DNA, 25 bp, SARS Virus
tttataaaaccatcaaaattaaaaa

SEQ ID NO: 96395 - DNA, 25 bp, SARS Virus
ttataaaaccactaaaattaaaaag

SEQ ID NO: 96396 - DNA, 25 bp, SARS Virus
tataaaaccacctaaattaaaaagt

SEQ ID NO: 96397 - DNA, 25 bp, SARS Virus
ataaaaccaccataattaaaaagtg

SEQ ID NO: 96398 - DNA, 25 bp, SARS Virus
taaaaccaccaatattaaaaagtgt

SEQ ID NO: 96399 - DNA, 25 bp, SARS Virus
aaaaccaccaaatttaaaaagtgtt

SEQ ID NO: 96400 - DNA, 25 bp, SARS Virus
aaaccaccaaaattaaaaagtgttt

SEQ ID NO: 96401 - DNA, 25 bp, SARS Virus
aaccaccaaaattaaaaagtgttta

SEQ ID NO: 96402 - DNA, 25 bp, SARS Virus
accaccaaaatttaaaagtgtttat

SEQ ID NO: 96403 - DNA, 25 bp, SARS Virus
ccaccaaaattataaagtgtttata

SEQ ID NO: 96404 - DNA, 25 bp, SARS Virus
caccaaaattaataagtgtttataa

SEQ ID NO: 96405 - DNA, 25 bp, SARS Virus
accaaaattaaatagtgtttataat

SEQ ID NO: 96406 - DNA, 25 bp, SARS Virus
ccaaaattaaaatgtgtttataatg

SEQ ID NO: 96407 - DNA, 25 bp, SARS Virus
caaaattaaaaattgtttataatgg

SEQ ID NO: 96408 - DNA, 25 bp, SARS Virus
aaaattaaaaagtgtttataatgga

SEQ ID NO: 96409 - DNA, 25 bp, SARS Virus
aaattaaaaagtttttataatggac

SEQ ID NO: 96410 - DNA, 25 bp, SARS Virus
aattaaaaagtgtttataatggact

SEQ ID NO: 96411 - DNA, 25 bp, SARS Virus
attaaaaagtgtttataatggactg

SEQ ID NO: 96412 - DNA, 25 bp, SARS Virus
ttaaaaagtgtttataatggactgg

SEQ ID NO: 96413 - DNA, 25 bp, SARS Virus
taaaaagtgtttttaatggactggg

SEQ ID NO: 96414 - DNA, 25 bp, SARS Virus
aaaaagtgtttataatggactggga

SEQ ID NO: 96415 - DNA, 25 bp, SARS Virus
aaaagtgtttattatggactgggag

SEQ ID NO: 96416 - DNA, 25 bp, SARS Virus
aaagtgtttatattggactgggaga

SEQ ID NO: 96417 - DNA, 25 bp, SARS Virus
aagtgtttataatggactgggagat

SEQ ID NO: 96418 - DNA, 25 bp, SARS Virus
agtgtttataattgactgggagatt

SEQ ID NO: 96419 - DNA, 25 bp, SARS Virus
gtgtttataatgtactgggagattt

SEQ ID NO: 96420 - DNA, 25 bp, SARS Virus
tgtttataatggtctgggagatttc

SEQ ID NO: 96421 - DNA, 25 bp, SARS Virus
gtttataatggattgggagatttcg

SEQ ID NO: 96422 - DNA, 25 bp, SARS Virus
tttataatggactgggagatttcgg

SEQ ID NO: 96423 - DNA, 25 bp, SARS Virus
ttataatggacttggagatttcggt

SEQ ID NO: 96424 - DNA, 25 bp, SARS Virus
tataatggactgtgagatttcggtt

SEQ ID NO: 96425 - DNA, 25 bp, SARS Virus
ataatggactggtagatttcggttg

SEQ ID NO: 96426 - DNA, 25 bp, SARS Virus
taatggactgggtgatttcggttga

SEQ ID NO: 96427 - DNA, 25 bp, SARS Virus
aatggactgggatatttcggttgat

SEQ ID NO: 96428 - DNA, 25 bp, SARS Virus
atggactgggagttttcggttgatt

SEQ ID NO: 96429 - DNA, 25 bp, SARS Virus
tggactgggagatttcggttgattc

SEQ ID NO: 96430 - DNA, 25 bp, SARS Virus
ggactgggagatttcggttgattct

SEQ ID NO: 96431 - DNA, 25 bp, SARS Virus
gactgggagatttcggttgattctc

SEQ ID NO: 96432 - DNA, 25 bp, SARS Virus
actgggagattttggttgattctcc

SEQ ID NO: 96433 - DNA, 25 bp, SARS Virus
ctgggagatttctgttgattctcca

SEQ ID NO: 96434 - DNA, 25 bp, SARS Virus
tgggagatttcgtttgattctccag

SEQ ID NO: 96435 - DNA, 25 bp, SARS Virus
gggagatttcggttgattctccaga

SEQ ID NO: 96436 - DNA, 25 bp, SARS Virus
ggagatttcggttgattctccagaa

SEQ ID NO: 96437 - DNA, 25 bp, SARS Virus
gagatttcggtttattctccagaaa

SEQ ID NO: 96438 - DNA, 25 bp, SARS Virus
agatttcggttgtttctccagaaaa

SEQ ID NO: 96439 - DNA, 25 bp, SARS Virus
gatttcggttgattctccagaaaat

SEQ ID NO: 96440 - DNA, 25 bp, SARS Virus
atttcggttgattctccagaaaata

SEQ ID NO: 96441 - DNA, 25 bp, SARS Virus
tttcggttgattttccagaaaataa

SEQ ID NO: 96442 - DNA, 25 bp, SARS Virus
ttcggttgattctccagaaaataac

SEQ ID NO: 96443 - DNA, 25 bp, SARS Virus
tcggttgattcttcagaaaataact

SEQ ID NO: 96444 - DNA, 25 bp, SARS Virus
cggttgattctctagaaaataactc

SEQ ID NO: 96445 - DNA, 25 bp, SARS Virus
ggttgattctcctgaaaataactcc

SEQ ID NO: 96446 - DNA, 25 bp, SARS Virus
gttgattctccataaaataactcct

SEQ ID NO: 96447 - DNA, 25 bp, SARS Virus
ttgattctccagtaaataactcctg

SEQ ID NO: 96448 - DNA, 25 bp, SARS Virus
tgattctccagataataactcctga

SEQ ID NO: 96449 - DNA, 25 bp, SARS Virus
gattctccagaatataactcctgaa

SEQ ID NO: 96450 - DNA, 25 bp, SARS Virus
attctccagaaattaactcctgaac

SEQ ID NO: 96451 - DNA, 25 bp, SARS Virus
ttctccagaaaataactcctgaacg

SEQ ID NO: 96452 - DNA, 25 bp, SARS Virus
tctccagaaaattactcctgaacga

SEQ ID NO: 96453 - DNA, 25 bp, SARS Virus
ctccagaaaatatctcctgaacgag

SEQ ID NO: 96454 - DNA, 25 bp, SARS Virus
tccagaaaataattcctgaacgaga

SEQ ID NO: 96455 - DNA, 25 bp, SARS Virus
ccagaaaataactcctgaacgagaa

SEQ ID NO: 96456 - DNA, 25 bp, SARS Virus
cagaaaataacttctgaacgagaaa

SEQ ID NO: 96457 - DNA, 25 bp, SARS Virus
agaaaataactcttgaacgagaaat

SEQ ID NO: 96458 - DNA, 25 bp, SARS Virus
gaaaataactcctgaacgagaaatt

SEQ ID NO: 96459 - DNA, 25 bp, SARS Virus
aaaataactccttaacgagaaatta

SEQ ID NO: 96460 - DNA, 25 bp, SARS Virus
aaataactcctgtacgagaaattat

SEQ ID NO: 96461 - DNA, 25 bp, SARS Virus
aataactcctgatcgagaaattatt

SEQ ID NO: 96462 - DNA, 25 bp, SARS Virus
ataactcctgaatgagaaattattc

SEQ ID NO: 96463 - DNA, 25 bp, SARS Virus
taactcctgaactagaaattattcc

SEQ ID NO: 96464 - DNA, 25 bp, SARS Virus
aactcctgaacgtgaaattattcca

SEQ ID NO: 96465 - DNA, 25 bp, SARS Virus
actcctgaacgataaattattccac

SEQ ID NO: 96466 - DNA, 25 bp, SARS Virus
ctcctgaacgagtaattattccact

SEQ ID NO: 96467 - DNA, 25 bp, SARS Virus
tcctgaacgagatattattccactg

SEQ ID NO: 96468 - DNA, 25 bp, SARS Virus
cctgaacgagaatttattccactgt

SEQ ID NO: 96469 - DNA, 25 bp, SARS Virus
ctgaacgagaaattattccactgtg

SEQ ID NO: 96470 - DNA, 25 bp, SARS Virus
tgaacgagaaattattccactgtga

SEQ ID NO: 96471 - DNA, 25 bp, SARS Virus
gaacgagaaatttttccactgtgag

SEQ ID NO: 96472 - DNA, 25 bp, SARS Virus
aacgagaaattattccactgtgagc

SEQ ID NO: 96473 - DNA, 25 bp, SARS Virus
acgagaaattattccactgtgagcg

SEQ ID NO: 96474 - DNA, 25 bp, SARS Virus
cgagaaattatttcactgtgagcga

SEQ ID NO: 96475 - DNA, 25 bp, SARS Virus
gagaaattattctactgtgagcgac

SEQ ID NO: 96476 - DNA, 25 bp, SARS Virus
agaaattattcctctgtgagcgact

SEQ ID NO: 96477 - DNA, 25 bp, SARS Virus
gaaattattccattgtgagcgacta

SEQ ID NO: 96478 - DNA, 25 bp, SARS Virus
aaattattccactgtgagcgactac

SEQ ID NO: 96479 - DNA, 25 bp, SARS Virus
aattattccactttgagcgactacg

SEQ ID NO: 96480 - DNA, 25 bp, SARS Virus
attattccactgtgagcgactacga

SEQ ID NO: 96481 - DNA, 25 bp, SARS Virus
ttattccactgttagcgactacgac

SEQ ID NO: 96482 - DNA, 25 bp, SARS Virus
tattccactgtgtgcgactacgacc

SEQ ID NO: 96483 - DNA, 25 bp, SARS Virus
attccactgtgatcgactacgaccg

SEQ ID NO: 96484 - DNA, 25 bp, SARS Virus
ttccactgtgagtgactacgaccga

SEQ ID NO: 96485 - DNA, 25 bp, SARS Virus
tccactgtgagctactacgaccgaa

SEQ ID NO: 96486 - DNA, 25 bp, SARS Virus
ccactgtgagcgtctacgaccgaag

SEQ ID NO: 96487 - DNA, 25 bp, SARS Virus
cactgtgagcgattacgaccgaagt

SEQ ID NO: 96488 - DNA, 25 bp, SARS Virus
actgtgagcgactacgaccgaagta

SEQ ID NO: 96489 - DNA, 25 bp, SARS Virus
ctgtgagcgacttcgaccgaagtac

SEQ ID NO: 96490 - DNA, 25 bp, SARS Virus
tgtgagcgactatgaccgaagtact

SEQ ID NO: 96491 - DNA, 25 bp, SARS Virus
gtgagcgactactaccgaagtactt

SEQ ID NO: 96492 - DNA, 25 bp, SARS Virus
tgagcgactacgtccgaagtacttc

SEQ ID NO: 96493 - DNA, 25 bp, SARS Virus
gagcgactacgatcgaagtacttcg

SEQ ID NO: 96494 - DNA, 25 bp, SARS Virus
agcgactacgactgaagtacttcgt

SEQ ID NO: 96495 - DNA, 25 bp, SARS Virus
gcgactacgacctaagtacttcgtt

SEQ ID NO: 96496 - DNA, 25 bp, SARS Virus
cgactacgaccgtagtacttcgtta

SEQ ID NO: 96497 - DNA, 25 bp, SARS Virus
gactacgaccgatgtacttcgttat

SEQ ID NO: 96498 - DNA, 25 bp, SARS Virus
actacgaccgaattacttcgttata

SEQ ID NO: 96499 - DNA, 25 bp, SARS Virus
ctacgaccgaagtacttcgttatac

SEQ ID NO: 96500 - DNA, 25 bp, SARS Virus
tacgaccgaagttcttcgttatacc

SEQ ID NO: 96501 - DNA, 25 bp, SARS Virus
acgaccgaagtatttcgttataccg

SEQ ID NO: 96502 - DNA, 25 bp, SARS Virus
cgaccgaagtacttcgttataccgc

SEQ ID NO: 96503 - DNA, 25 bp, SARS Virus
gaccgaagtacttcgttataccgct

SEQ ID NO: 96504 - DNA, 25 bp, SARS Virus
accgaagtactttgttataccgctt

SEQ ID NO: 96505 - DNA, 25 bp, SARS Virus
ccgaagtacttctttataccgctta

SEQ ID NO: 96506 - DNA, 25 bp, SARS Virus
cgaagtacttcgttataccgcttac

SEQ ID NO: 96507 - DNA, 25 bp, SARS Virus
gaagtacttcgttataccgcttacg

SEQ ID NO: 96508 - DNA, 25 bp, SARS Virus
aagtacttcgttttaccgcttacgg

SEQ ID NO: 96509 - DNA, 25 bp, SARS Virus
agtacttcgttataccgcttacgga

SEQ ID NO: 96510 - DNA, 25 bp, SARS Virus
gtacttcgttattccgcttacggat

SEQ ID NO: 96511 - DNA, 25 bp, SARS Virus
tacttcgttatatcgcttacggatc

SEQ ID NO: 96512 - DNA, 25 bp, SARS Virus
acttcgttatactgcttacggatcc

SEQ ID NO: 96513 - DNA, 25 bp, SARS Virus
cttcgttatacctcttacggatcca

SEQ ID NO: 96514 - DNA, 25 bp, SARS Virus
ttcgttataccgtttacggatccac

SEQ ID NO: 96515 - DNA, 25 bp, SARS Virus
tcgttataccgcttacggatccact

SEQ ID NO: 96516 - DNA, 25 bp, SARS Virus
cgttataccgcttacggatccacta

SEQ ID NO: 96517 - DNA, 25 bp, SARS Virus
gttataccgctttcggatccactat

SEQ ID NO: 96518 - DNA, 25 bp, SARS Virus
ttataccgcttatggatccactata

SEQ ID NO: 96519 - DNA, 25 bp, SARS Virus
tataccgcttactgatccactataa

SEQ ID NO: 96520 - DNA, 25 bp, SARS Virus
ataccgcttacgtatccactataat

SEQ ID NO: 96521 - DNA, 25 bp, SARS Virus
taccgcttacggttccactataatt

SEQ ID NO: 96522 - DNA, 25 bp, SARS Virus
accgcttacggatccactataatta

SEQ ID NO: 96523 - DNA, 25 bp, SARS Virus
ccgcttacggattcactataattac

SEQ ID NO: 96524 - DNA, 25 bp, SARS Virus
cgcttacggatctactataattacg

SEQ ID NO: 96525 - DNA, 25 bp, SARS Virus
gcttacggatcctctataattacga

SEQ ID NO: 96526 - DNA, 25 bp, SARS Virus
cttacggatccattataattacgat

SEQ ID NO: 96527 - DNA, 25 bp, SARS Virus
ttacggatccactataattacgatc

SEQ ID NO: 96528 - DNA, 25 bp, SARS Virus
tacggatccactttaattacgatct

SEQ ID NO: 96529 - DNA, 25 bp, SARS Virus
acggatccactataattacgatctc

SEQ ID NO: 96530 - DNA, 25 bp, SARS Virus
cggatccactattattacgatctct

SEQ ID NO: 96531 - DNA, 25 bp, SARS Virus
ggatccactatatttacgatctcta

SEQ ID NO: 96532 - DNA, 25 bp, SARS Virus
gatccactataattacgatctctag

SEQ ID NO: 96533 - DNA, 25 bp, SARS Virus
atccactataattacgatctctaga

SEQ ID NO: 96534 - DNA, 25 bp, SARS Virus
tccactataatttcgatctctagag

SEQ ID NO: 96535 - DNA, 25 bp, SARS Virus
ccactataattatgatctctagagt

SEQ ID NO: 96536 - DNA, 25 bp, SARS Virus
cactataattactatctctagagta

SEQ ID NO: 96537 - DNA, 25 bp, SARS Virus
actataattacgttctctagagtaa

SEQ ID NO: 96538 - DNA, 25 bp, SARS Virus
ctataattacgatctctagagtaaa

SEQ ID NO: 96539 - DNA, 25 bp, SARS Virus
tataattacgatttctagagtaaac

SEQ ID NO: 96540 - DNA, 25 bp, SARS Virus
ataattacgatctctagagtaaaca

SEQ ID NO: 96541 - DNA, 25 bp, SARS Virus
taattacgatctttagagtaaacac

SEQ ID NO: 96542 - DNA, 25 bp, SARS Virus
aattacgatctctagagtaaacacg

SEQ ID NO: 96543 - DNA, 25 bp, SARS Virus
attacgatctcttgagtaaacacgc

SEQ ID NO: 96544 - DNA, 25 bp, SARS Virus
ttacgatctctatagtaaacacgcg

SEQ ID NO: 96545 - DNA, 25 bp, SARS Virus
tacgatctctagtgtaaacacgcgt

SEQ ID NO: 96546 - DNA, 25 bp, SARS Virus
acgatctctagattaaacacgcgtc

SEQ ID NO: 96547 - DNA, 25 bp, SARS Virus
cgatctctagagtaaacacgcgtct

SEQ ID NO: 96548 - DNA, 25 bp, SARS Virus
gatctctagagttaacacgcgtctt

SEQ ID NO: 96549 - DNA, 25 bp, SARS Virus
atctctagagtatacacgcgtcttc

SEQ ID NO: 96550 - DNA, 25 bp, SARS Virus
tctctagagtaatcacgcgtcttca

SEQ ID NO: 96551 - DNA, 25 bp, SARS Virus
ctctagagtaaatacgcgtcttcaa

SEQ ID NO: 96552 - DNA, 25 bp, SARS Virus
tctagagtaaactcgcgtcttcaag

SEQ ID NO: 96553 - DNA, 25 bp, SARS Virus
ctagagtaaacatgcgtcttcaagt

SEQ ID NO: 96554 - DNA, 25 bp, SARS Virus
tagagtaaacactcgtcttcaagtt

SEQ ID NO: 96555 - DNA, 25 bp, SARS Virus
agagtaaacacgtgtcttcaagtta

SEQ ID NO: 96556 - DNA, 25 bp, SARS Virus
gagtaaacacgcttcttcaagttac

SEQ ID NO: 96557 - DNA, 25 bp, SARS Virus
agtaaacacgcgtcttcaagttacc

SEQ ID NO: 96558 - DNA, 25 bp, SARS Virus
gtaaacacgcgttttcaagttacct

SEQ ID NO: 96559 - DNA, 25 bp, SARS Virus
taaacacgcgtcttcaagttacctg

SEQ ID NO: 96560 - DNA, 25 bp, SARS Virus
aaacacgcgtcttcaagttacctga

SEQ ID NO: 96561 - DNA, 25 bp, SARS Virus
aacacgcgtctttaagttacctgaa

SEQ ID NO: 96562 - DNA, 25 bp, SARS Virus
acacgcgtcttctagttacctgaat

SEQ ID NO: 96563 - DNA, 25 bp, SARS Virus
cacgcgtcttcatgttacctgaatg

SEQ ID NO: 96564 - DNA, 25 bp, SARS Virus
acgcgtcttcaatttacctgaatgt

SEQ ID NO: 96565 - DNA, 25 bp, SARS Virus
cgcgtcttcaagttacctgaatgtc

SEQ ID NO: 96566 - DNA, 25 bp, SARS Virus
gcgtcttcaagttacctgaatgtca

SEQ ID NO: 96567 - DNA, 25 bp, SARS Virus
cgtcttcaagtttcctgaatgtcac

SEQ ID NO: 96568 - DNA, 25 bp, SARS Virus
gtcttcaagttatctgaatgtcaca

SEQ ID NO: 96569 - DNA, 25 bp, SARS Virus
tcttcaagttacttgaatgtcacaa

SEQ ID NO: 96570 - DNA, 25 bp, SARS Virus
cttcaagttacctgaatgtcacaac

SEQ ID NO: 96571 - DNA, 25 bp, SARS Virus
ttcaagttaccttaatgtcacaacg

SEQ ID NO: 96572 - DNA, 25 bp, SARS Virus
tcaagttacctgtatgtcacaacgg

SEQ ID NO: 96573 - DNA, 25 bp, SARS Virus
caagttacctgattgtcacaacggt

SEQ ID NO: 96574 - DNA, 25 bp, SARS Virus
aagttacctgaatgtcacaacggtg

SEQ ID NO: 96575 - DNA, 25 bp, SARS Virus
agttacctgaatttcacaacggtgg

SEQ ID NO: 96576 - DNA, 25 bp, SARS Virus
gttacctgaatgtcacaacggtgga

SEQ ID NO: 96577 - DNA, 25 bp, SARS Virus
ttacctgaatgttacaacggtggag

SEQ ID NO: 96578 - DNA, 25 bp, SARS Virus
tacctgaatgtctcaacggtggaga

SEQ ID NO: 96579 - DNA, 25 bp, SARS Virus
acctgaatgtcataacggtggagac

SEQ ID NO: 96580 - DNA, 25 bp, SARS Virus
cctgaatgtcactacggtggagacg

SEQ ID NO: 96581 - DNA, 25 bp, SARS Virus
ctgaatgtcacatcggtggagacga

SEQ ID NO: 96582 - DNA, 25 bp, SARS Virus
tgaatgtcacaatggtggagacgag

SEQ ID NO: 96583 - DNA, 25 bp, SARS Virus
gaatgtcacaactgtggagacgagt

SEQ ID NO: 96584 - DNA, 25 bp, SARS Virus
aatgtcacaacgttggagacgagtg

SEQ ID NO: 96585 - DNA, 25 bp, SARS Virus
atgtcacaacggtggagacgagtga

SEQ ID NO: 96586 - DNA, 25 bp, SARS Virus
tgtcacaacggttgagacgagtgac

SEQ ID NO: 96587 - DNA, 25 bp, SARS Virus
gtcacaacggtgtagacgagtgact

SEQ ID NO: 96588 - DNA, 25 bp, SARS Virus
tcacaacggtggtgacgagtgacta

SEQ ID NO: 96589 - DNA, 25 bp, SARS Virus
cacaacggtggatacgagtgactac

SEQ ID NO: 96590 - DNA, 25 bp, SARS Virus
acaacggtggagtcgagtgactact

SEQ ID NO: 96591 - DNA, 25 bp, SARS Virus
caacggtggagatgagtgactacta

SEQ ID NO: 96592 - DNA, 25 bp, SARS Virus
aacggtggagactagtgactactat

SEQ ID NO: 96593 - DNA, 25 bp, SARS Virus
acggtggagacgtgtgactactata

SEQ ID NO: 96594 - DNA, 25 bp, SARS Virus
cggtggagacgattgactactatac

SEQ ID NO: 96595 - DNA, 25 bp, SARS Virus
ggtggagacgagtgactactatact

SEQ ID NO: 96596 - DNA, 25 bp, SARS Virus
gtggagacgagttactactatacta

SEQ ID NO: 96597 - DNA, 25 bp, SARS Virus
tggagacgagtgtctactatactaa

SEQ ID NO: 96598 - DNA, 25 bp, SARS Virus
ggagacgagtgattactatactaac

SEQ ID NO: 96599 - DNA, 25 bp, SARS Virus
gagacgagtgactactatactaacg

SEQ ID NO: 96600 - DNA, 25 bp, SARS Virus
agacgagtgacttctatactaacga

SEQ ID NO: 96601 - DNA, 25 bp, SARS Virus
gacgagtgactattatactaacgac

SEQ ID NO: 96602 - DNA, 25 bp, SARS Virus
acgagtgactactatactaacgacg

SEQ ID NO: 96603 - DNA, 25 bp, SARS Virus
cgagtgactactttactaacgacgg

SEQ ID NO: 96604 - DNA, 25 bp, SARS Virus
gagtgactactatactaacgacgga

SEQ ID NO: 96605 - DNA, 25 bp, SARS Virus
agtgactactattctaacgacggat

SEQ ID NO: 96606 - DNA, 25 bp, SARS Virus
gtgactactatattaacgacggatg

SEQ ID NO: 96607 - DNA, 25 bp, SARS Virus
tgactactatactaacgacggatgt

SEQ ID NO: 96608 - DNA, 25 bp, SARS Virus
gactactatacttacgacggatgtg

SEQ ID NO: 96609 - DNA, 25 bp, SARS Virus
actactatactatcgacggatgtga

SEQ ID NO: 96610 - DNA, 25 bp, SARS Virus
ctactatactaatgacggatgtgac

SEQ ID NO: 96611 - DNA, 25 bp, SARS Virus
tactatactaactacggatgtgacg

SEQ ID NO: 96612 - DNA, 25 bp, SARS Virus
actatactaacgtcggatgtgacga

SEQ ID NO: 96613 - DNA, 25 bp, SARS Virus
ctatactaacgatggatgtgacgac

SEQ ID NO: 96614 - DNA, 25 bp, SARS Virus
tatactaacgactgatgtgacgacg

SEQ ID NO: 96615 - DNA, 25 bp, SARS Virus
atactaacgacgtatgtgacgacga

SEQ ID NO: 96616 - DNA, 25 bp, SARS Virus
tactaacgacggttgtgacgacgag

SEQ ID NO: 96617 - DNA, 25 bp, SARS Virus
actaacgacggatgtgacgacgaga

SEQ ID NO: 96618 - DNA, 25 bp, SARS Virus
ctaacgacggatttgacgacgagat

SEQ ID NO: 96619 - DNA, 25 bp, SARS Virus
taacgacggatgtgacgacgagatc

SEQ ID NO: 96620 - DNA, 25 bp, SARS Virus
aacgacggatgttacgacgagatca

SEQ ID NO: 96621 - DNA, 25 bp, SARS Virus
acgacggatgtgtcgacgagatcaa

SEQ ID NO: 96622 - DNA, 25 bp, SARS Virus
cgacggatgtgatgacgagatcaat

SEQ ID NO: 96623 - DNA, 25 bp, SARS Virus
gacggatgtgactacgagatcaatc

SEQ ID NO: 96624 - DNA, 25 bp, SARS Virus
acggatgtgacgtcgagatcaatca

SEQ ID NO: 96625 - DNA, 25 bp, SARS Virus
cggatgtgacgatgagatcaatcac

SEQ ID NO: 96626 - DNA, 25 bp, SARS Virus
ggatgtgacgactagatcaatcacc

SEQ ID NO: 96627 - DNA, 25 bp, SARS Virus
gatgtgacgacgtgatcaatcacca

SEQ ID NO: 96628 - DNA, 25 bp, SARS Virus
atgtgacgacgatatcaatcaccat

SEQ ID NO: 96629 - DNA, 25 bp, SARS Virus
tgtgacgacgagttcaatcaccatg

SEQ ID NO: 96630 - DNA, 25 bp, SARS Virus
gtgacgacgagatcaatcaccatga

SEQ ID NO: 96631 - DNA, 25 bp, SARS Virus
tgacgacgagattaatcaccatgac

SEQ ID NO: 96632 - DNA, 25 bp, SARS Virus
gacgacgagatctatcaccatgacg

SEQ ID NO: 96633 - DNA, 25 bp, SARS Virus
acgacgagatcattcaccatgacgg

SEQ ID NO: 96634 - DNA, 25 bp, SARS Virus
cgacgagatcaatcaccatgacggt

SEQ ID NO: 96635 - DNA, 25 bp, SARS Virus
gacgagatcaattaccatgacggtg

SEQ ID NO: 96636 - DNA, 25 bp, SARS Virus
acgagatcaatctccatgacggtga

SEQ ID NO: 96637 - DNA, 25 bp, SARS Virus
cgagatcaatcatcatgacggtgac

SEQ ID NO: 96638 - DNA, 25 bp, SARS Virus
gagatcaatcactatgacggtgacg

SEQ ID NO: 96639 - DNA, 25 bp, SARS Virus
agatcaatcaccttgacggtgacga

SEQ ID NO: 96640 - DNA, 25 bp, SARS Virus
gatcaatcaccatgacggtgacgac

SEQ ID NO: 96641 - DNA, 25 bp, SARS Virus
atcaatcaccattacggtgacgacc

SEQ ID NO: 96642 - DNA, 25 bp, SARS Virus
tcaatcaccatgtcggtgacgacct

SEQ ID NO: 96643 - DNA, 25 bp, SARS Virus
caatcaccatgatggtgacgaccta

SEQ ID NO: 96644 - DNA, 25 bp, SARS Virus
aatcaccatgactgtgacgacctac

SEQ ID NO: 96645 - DNA, 25 bp, SARS Virus
atcaccatgacgttgacgacctacc

SEQ ID NO: 96646 - DNA, 25 bp, SARS Virus
tcaccatgacggtgacgacctacct

SEQ ID NO: 96647 - DNA, 25 bp, SARS Virus
caccatgacggttacgacctacctg

SEQ ID NO: 96648 - DNA, 25 bp, SARS Virus
accatgacggtgtcgacctacctgt

SEQ ID NO: 96649 - DNA, 25 bp, SARS Virus
ccatgacggtgatgacctacctgta

SEQ ID NO: 96650 - DNA, 25 bp, SARS Virus
catgacggtgactacctacctgtaa

SEQ ID NO: 96651 - DNA, 25 bp, SARS Virus
atgacggtgacgtcctacctgtaaa

SEQ ID NO: 96652 - DNA, 25 bp, SARS Virus
tgacggtgacgatctacctgtaaac

SEQ ID NO: 96653 - DNA, 25 bp, SARS Virus
gacggtgacgacttacctgtaaacc

SEQ ID NO: 96654 - DNA, 25 bp, SARS Virus
acggtgacgacctacctgtaaacca

SEQ ID NO: 96655 - DNA, 25 bp, SARS Virus
cggtgacgaccttcctgtaaaccac

SEQ ID NO: 96656 - DNA, 25 bp, SARS Virus
ggtgacgacctatctgtaaaccacg

SEQ ID NO: 96657 - DNA, 25 bp, SARS Virus
gtgacgacctacttgtaaaccacga

SEQ ID NO: 96658 - DNA, 25 bp, SARS Virus
tgacgacctacctgtaaaccacgac

SEQ ID NO: 96659 - DNA, 25 bp, SARS Virus
gacgacctacctttaaaccacgacc

SEQ ID NO: 96660 - DNA, 25 bp, SARS Virus
acgacctacctgtaaaccacgaccg

SEQ ID NO: 96661 - DNA, 25 bp, SARS Virus
cgacctacctgttaaccacgaccgc

SEQ ID NO: 96662 - DNA, 25 bp, SARS Virus
gacctacctgtataccacgaccgcg

SEQ ID NO: 96663 - DNA, 25 bp, SARS Virus
acctacctgtaatccacgaccgcga

SEQ ID NO: 96664 - DNA, 25 bp, SARS Virus
cctacctgtaaatcacgaccgcgac

SEQ ID NO: 96665 - DNA, 25 bp, SARS Virus
ctacctgtaaactacgaccgcgacg

SEQ ID NO: 96666 - DNA, 25 bp, SARS Virus
tacctgtaaacctcgaccgcgacga

SEQ ID NO: 96667 - DNA, 25 bp, SARS Virus
acctgtaaaccatgaccgcgacgag

SEQ ID NO: 96668 - DNA, 25 bp, SARS Virus
cctgtaaaccactaccgcgacgaga

SEQ ID NO: 96669 - DNA, 25 bp, SARS Virus
ctgtaaaccacgtccgcgacgagaa

SEQ ID NO: 96670 - DNA, 25 bp, SARS Virus
tgtaaaccacgatcgcgacgagaag

SEQ ID NO: 96671 - DNA, 25 bp, SARS Virus
gtaaaccacgactgcgacgagaagt

SEQ ID NO: 96672 - DNA, 25 bp, SARS Virus
taaaccacgacctcgacgagaagtt

SEQ ID NO: 96673 - DNA, 25 bp, SARS Virus
aaaccacgaccgtgacgagaagttt

SEQ ID NO: 96674 - DNA, 25 bp, SARS Virus
aaccacgaccgctacgagaagttta

SEQ ID NO: 96675 - DNA, 25 bp, SARS Virus
accacgaccgcgtcgagaagtttat

SEQ ID NO: 96676 - DNA, 25 bp, SARS Virus
ccacgaccgcgatgagaagtttatg

SEQ ID NO: 96677 - DNA, 25 bp, SARS Virus
cacgaccgcgactagaagtttatgg

SEQ ID NO: 96678 - DNA, 25 bp, SARS Virus
acgaccgcgacgtgaagtttatgga

SEQ ID NO: 96679 - DNA, 25 bp, SARS Virus
cgaccgcgacgataagtttatggaa

SEQ ID NO: 96680 - DNA, 25 bp, SARS Virus
gaccgcgacgagtagtttatggaaa

SEQ ID NO: 96681 - DNA, 25 bp, SARS Virus
accgcgacgagatgtttatggaaaa

SEQ ID NO: 96682 - DNA, 25 bp, SARS Virus
ccgcgacgagaattttatggaaaac

SEQ ID NO: 96683 - DNA, 25 bp, SARS Virus
cgcgacgagaagtttatggaaaacg

SEQ ID NO: 96684 - DNA, 25 bp, SARS Virus
gcgacgagaagtttatggaaaacga

SEQ ID NO: 96685 - DNA, 25 bp, SARS Virus
cgacgagaagtttatggaaaacgat

SEQ ID NO: 96686 - DNA, 25 bp, SARS Virus
gacgagaagtttttggaaaacgata

SEQ ID NO: 96687 - DNA, 25 bp, SARS Virus
acgagaagtttatggaaaacgatac

SEQ ID NO: 96688 - DNA, 25 bp, SARS Virus
cgagaagtttattgaaaacgatacg

SEQ ID NO: 96689 - DNA, 25 bp, SARS Virus
gagaagtttatgtaaaacgatacgt

SEQ ID NO: 96690 - DNA, 25 bp, SARS Virus
agaagtttatggtaaacgatacgtt

SEQ ID NO: 96691 - DNA, 25 bp, SARS Virus
gaagtttatggataacgatacgttt

SEQ ID NO: 96692 - DNA, 25 bp, SARS Virus
aagtttatggaatacgatacgttta

SEQ ID NO: 96693 - DNA, 25 bp, SARS Virus
agtttatggaaatcgatacgtttac

SEQ ID NO: 96694 - DNA, 25 bp, SARS Virus
gtttatggaaaatgatacgtttacc

SEQ ID NO: 96695 - DNA, 25 bp, SARS Virus
tttatggaaaactatacgtttaccg

SEQ ID NO: 96696 - DNA, 25 bp, SARS Virus
ttatggaaaacgttacgtttaccgt

SEQ ID NO: 96697 - DNA, 25 bp, SARS Virus
tatggaaaacgatacgtttaccgta

SEQ ID NO: 96698 - DNA, 25 bp, SARS Virus
atggaaaacgattcgtttaccgtat

SEQ ID NO: 96699 - DNA, 25 bp, SARS Virus
tggaaaacgatatgtttaccgtata

SEQ ID NO: 96700 - DNA, 25 bp, SARS Virus
ggaaaacgatacttttaccgtatat

SEQ ID NO: 96701 - DNA, 25 bp, SARS Virus
gaaaacgatacgtttaccgtatatc

SEQ ID NO: 96702 - DNA, 25 bp, SARS Virus
aaaacgatacgtttaccgtatatcc

SEQ ID NO: 96703 - DNA, 25 bp, SARS Virus
aaacgatacgtttaccgtatatcca

SEQ ID NO: 96704 - DNA, 25 bp, SARS Virus
aacgatacgttttccgtatatccaa

SEQ ID NO: 96705 - DNA, 25 bp, SARS Virus
acgatacgtttatcgtatatccaag

SEQ ID NO: 96706 - DNA, 25 bp, SARS Virus
cgatacgtttactgtatatccaagt

SEQ ID NO: 96707 - DNA, 25 bp, SARS Virus
gatacgtttaccttatatccaagtt

SEQ ID NO: 96708 - DNA, 25 bp, SARS Virus
atacgtttaccgtatatccaagtta

SEQ ID NO: 96709 - DNA, 25 bp, SARS Virus
tacgtttaccgtttatccaagttac

SEQ ID NO: 96710 - DNA, 25 bp, SARS Virus
acgtttaccgtatatccaagttacc

SEQ ID NO: 96711 - DNA, 25 bp, SARS Virus
cgtttaccgtatttccaagttaccg

SEQ ID NO: 96712 - DNA, 25 bp, SARS Virus
gtttaccgtatatccaagttaccgt

SEQ ID NO: 96713 - DNA, 25 bp, SARS Virus
tttaccgtatattcaagttaccgta

SEQ ID NO: 96714 - DNA, 25 bp, SARS Virus
ttaccgtatatctaagttaccgtaa

SEQ ID NO: 96715 - DNA, 25 bp, SARS Virus
taccgtatatcctagttaccgtaac

SEQ ID NO: 96716 - DNA, 25 bp, SARS Virus
accgtatatccatgttaccgtaacc

SEQ ID NO: 96717 - DNA, 25 bp, SARS Virus
ccgtatatccaatttaccgtaacct

SEQ ID NO: 96718 - DNA, 25 bp, SARS Virus
cgtatatccaagttaccgtaacctc

SEQ ID NO: 96719 - DNA, 25 bp, SARS Virus
gtatatccaagttaccgtaacctca

SEQ ID NO: 96720 - DNA, 25 bp, SARS Virus
tatatccaagtttccgtaacctcaa

SEQ ID NO: 96721 - DNA, 25 bp, SARS Virus
atatccaagttatcgtaacctcaat

SEQ ID NO: 96722 - DNA, 25 bp, SARS Virus
tatccaagttactgtaacctcaatg

SEQ ID NO: 96723 - DNA, 25 bp, SARS Virus
atccaagttaccttaacctcaatgg

SEQ ID NO: 96724 - DNA, 25 bp, SARS Virus
tccaagttaccgtaacctcaatggg

SEQ ID NO: 96725 - DNA, 25 bp, SARS Virus
ccaagttaccgttacctcaatgggt

SEQ ID NO: 96726 - DNA, 25 bp, SARS Virus
caagttaccgtatcctcaatgggtt

SEQ ID NO: 96727 - DNA, 25 bp, SARS Virus
aagttaccgtaatctcaatgggttt

SEQ ID NO: 96728 - DNA, 25 bp, SARS Virus
agttaccgtaacttcaatgggtttt

SEQ ID NO: 96729 - DNA, 25 bp, SARS Virus
gttaccgtaacctcaatgggtttta

SEQ ID NO: 96730 - DNA, 25 bp, SARS Virus
ttaccgtaaccttaatgggttttac

SEQ ID NO: 96731 - DNA, 25 bp, SARS Virus
taccgtaacctctatgggttttaca

SEQ ID NO: 96732 - DNA, 25 bp, SARS Virus
accgtaacctcattgggttttacaa

SEQ ID NO: 96733 - DNA, 25 bp, SARS Virus
ccgtaacctcaatgggttttacaag

SEQ ID NO: 96734 - DNA, 25 bp, SARS Virus
cgtaacctcaattggttttacaaga

SEQ ID NO: 96735 - DNA, 25 bp, SARS Virus
gtaacctcaatgtgttttacaagag

SEQ ID NO: 96736 - DNA, 25 bp, SARS Virus
taacctcaatggtttttacaagaga

SEQ ID NO: 96737 - DNA, 25 bp, SARS Virus
aacctcaatgggttttacaagagat

SEQ ID NO: 96738 - DNA, 25 bp, SARS Virus
acctcaatgggttttacaagagata

SEQ ID NO: 96739 - DNA, 25 bp, SARS Virus
cctcaatgggttttacaagagatac

SEQ ID NO: 96740 - DNA, 25 bp, SARS Virus
ctcaatgggttttacaagagatact

SEQ ID NO: 96741 - DNA, 25 bp, SARS Virus
tcaatgggtttttcaagagatactc

SEQ ID NO: 96742 - DNA, 25 bp, SARS Virus
caatgggttttataagagatactct

SEQ ID NO: 96743 - DNA, 25 bp, SARS Virus
aatgggttttactagagatactctt

SEQ ID NO: 96744 - DNA, 25 bp, SARS Virus
atgggttttacatgagatactcttg

SEQ ID NO: 96745 - DNA, 25 bp, SARS Virus
tgggttttacaatagatactcttgg

SEQ ID NO: 96746 - DNA, 25 bp, SARS Virus
gggttttacaagtgatactcttggt

SEQ ID NO: 96747 - DNA, 25 bp, SARS Virus
ggttttacaagatatactcttggtt

SEQ ID NO: 96748 - DNA, 25 bp, SARS Virus
gttttacaagagttactcttggttt

SEQ ID NO: 96749 - DNA, 25 bp, SARS Virus
ttttacaagagatactcttggtttt

SEQ ID NO: 96750 - DNA, 25 bp, SARS Virus
tttacaagagattctcttggttttt

SEQ ID NO: 96751 - DNA, 25 bp, SARS Virus
ttacaagagatattcttggtttttg

SEQ ID NO: 96752 - DNA, 25 bp, SARS Virus
tacaagagatactcttggtttttgt

SEQ ID NO: 96753 - DNA, 25 bp, SARS Virus
acaagagatactattggtttttgtt

SEQ ID NO: 96754 - DNA, 25 bp, SARS Virus
caagagatactcatggtttttgttt

SEQ ID NO: 96755 - DNA, 25 bp, SARS Virus
aagagatactctaggtttttgttta

SEQ ID NO: 96756 - DNA, 25 bp, SARS Virus
agagatactcttagtttttgtttag

SEQ ID NO: 96757 - DNA, 25 bp, SARS Virus
gagatactcttgatttttgtttagc

SEQ ID NO: 96758 - DNA, 25 bp, SARS Virus
agatactcttggattttgtttagcg

SEQ ID NO: 96759 - DNA, 25 bp, SARS Virus
gatactcttggtatttgtttagcgg

SEQ ID NO: 96760 - DNA, 25 bp, SARS Virus
atactcttggttattgtttagcggt

SEQ ID NO: 96761 - DNA, 25 bp, SARS Virus
tactcttggtttatgtttagcggtt

SEQ ID NO: 96762 - DNA, 25 bp, SARS Virus
actcttggttttagtttagcggttg

SEQ ID NO: 96763 - DNA, 25 bp, SARS Virus
ctcttggtttttatttagcggttgg

SEQ ID NO: 96764 - DNA, 25 bp, SARS Virus
tcttggtttttgattagcggttggt

SEQ ID NO: 96765 - DNA, 25 bp, SARS Virus
cttggtttttgtatagcggttggtt

SEQ ID NO: 96766 - DNA, 25 bp, SARS Virus
ttggtttttgttaagcggttggtta

SEQ ID NO: 96767 - DNA, 25 bp, SARS Virus
tggtttttgtttagcggttggttaa

SEQ ID NO: 96768 - DNA, 25 bp, SARS Virus
ggtttttgtttaacggttggttaaa

SEQ ID NO: 96769 - DNA, 25 bp, SARS Virus
gtttttgtttagaggttggttaaat

SEQ ID NO: 96770 - DNA, 25 bp, SARS Virus
tttttgtttagcagttggttaaatt

SEQ ID NO: 96771 - DNA, 25 bp, SARS Virus
ttttgtttagcgattggttaaattg

SEQ ID NO: 96772 - DNA, 25 bp, SARS Virus
tttgtttagcggatggttaaattgt

SEQ ID NO: 96773 - DNA, 25 bp, SARS Virus
ttgtttagcggtaggttaaattgtt

SEQ ID NO: 96774 - DNA, 25 bp, SARS Virus
tgtttagcggttagttaaattgttc

SEQ ID NO: 96775 - DNA, 25 bp, SARS Virus
gtttagcggttgattaaattgttcc

SEQ ID NO: 96776 - DNA, 25 bp, SARS Virus
tttagcggttggataaattgttccg

SEQ ID NO: 96777 - DNA, 25 bp, SARS Virus
ttagcggttggtaaaattgttccgc

SEQ ID NO: 96778 - DNA, 25 bp, SARS Virus
tagcggttggttaaattgttccgct

SEQ ID NO: 96779 - DNA, 25 bp, SARS Virus
agcggttggttaaattgttccgcta

SEQ ID NO: 96780 - DNA, 25 bp, SARS Virus
gcggttggttaaattgttccgctaa

SEQ ID NO: 96781 - DNA, 25 bp, SARS Virus
cggttggttaaaatgttccgctaat

SEQ ID NO: 96782 - DNA, 25 bp, SARS Virus
ggttggttaaatagttccgctaatc

SEQ ID NO: 96783 - DNA, 25 bp, SARS Virus
gttggttaaattattccgctaatca

SEQ ID NO: 96784 - DNA, 25 bp, SARS Virus
ttggttaaattgatccgctaatcag

SEQ ID NO: 96785 - DNA, 25 bp, SARS Virus
tggttaaattgtaccgctaatcagt

SEQ ID NO: 96786 - DNA, 25 bp, SARS Virus
ggttaaattgttacgctaatcagtt

SEQ ID NO: 96787 - DNA, 25 bp, SARS Virus
gttaaattgttcagctaatcagttt

SEQ ID NO: 96788 - DNA, 25 bp, SARS Virus
ttaaattgttccactaatcagttta

SEQ ID NO: 96789 - DNA, 25 bp, SARS Virus
taaattgttccgataatcagtttaa

SEQ ID NO: 96790 - DNA, 25 bp, SARS Virus
aaattgttccgcaaatcagtttaag

SEQ ID NO: 96791 - DNA, 25 bp, SARS Virus
aattgttccgctaatcagtttaagt

SEQ ID NO: 96792 - DNA, 25 bp, SARS Virus
attgttccgctaatcagtttaagtt

SEQ ID NO: 96793 - DNA, 25 bp, SARS Virus
ttgttccgctaaacagtttaagttc

SEQ ID NO: 96794 - DNA, 25 bp, SARS Virus
tgttccgctaataagtttaagttct

SEQ ID NO: 96795 - DNA, 25 bp, SARS Virus
gttccgctaatcagtttaagttctt

SEQ ID NO: 96796 - DNA, 25 bp, SARS Virus
ttccgctaatcaatttaagttctta

SEQ ID NO: 96797 - DNA, 25 bp, SARS Virus
tccgctaatcagattaagttcttag

SEQ ID NO: 96798 - DNA, 25 bp, SARS Virus
ccgctaatcagtataagttcttagt

SEQ ID NO: 96799 - DNA, 25 bp, SARS Virus
cgctaatcagttaaagttcttagtg

SEQ ID NO: 96800 - DNA, 25 bp, SARS Virus
gctaatcagtttaagttcttagtga

SEQ ID NO: 96801 - DNA, 25 bp, SARS Virus
ctaatcagtttaagttcttagtgaa

SEQ ID NO: 96802 - DNA, 25 bp, SARS Virus
taatcagtttaaattcttagtgaat

SEQ ID NO: 96803 - DNA, 25 bp, SARS Virus
aatcagtttaagatcttagtgaatg

SEQ ID NO: 96804 - DNA, 25 bp, SARS Virus
atcagtttaagtacttagtgaatgt

SEQ ID NO: 96805 - DNA, 25 bp, SARS Virus
tcagtttaagttattagtgaatgtt

SEQ ID NO: 96806 - DNA, 25 bp, SARS Virus
cagtttaagttcatagtgaatgttg

SEQ ID NO: 96807 - DNA, 25 bp, SARS Virus
agtttaagttctaagtgaatgttgt

SEQ ID NO: 96808 - DNA, 25 bp, SARS Virus
gtttaagttcttagtgaatgttgtt

SEQ ID NO: 96809 - DNA, 25 bp, SARS Virus
tttaagttcttaatgaatgttgttg

SEQ ID NO: 96810 - DNA, 25 bp, SARS Virus
ttaagttcttagagaatgttgttgt

SEQ ID NO: 96811 - DNA, 25 bp, SARS Virus
taagttcttagtaaatgttgttgta

SEQ ID NO: 96812 - DNA, 25 bp, SARS Virus
aagttcttagtgaatgttgttgtag

SEQ ID NO: 96813 - DNA, 25 bp, SARS Virus
agttcttagtgaatgttgttgtagt

SEQ ID NO: 96814 - DNA, 25 bp, SARS Virus
gttcttagtgaaagttgttgtagtt

SEQ ID NO: 96815 - DNA, 25 bp, SARS Virus
ttcttagtgaatattgttgtagttg

SEQ ID NO: 96816 - DNA, 25 bp, SARS Virus
tcttagtgaatgatgttgtagttga

SEQ ID NO: 96817 - DNA, 25 bp, SARS Virus
cttagtgaatgtagttgtagttgac

SEQ ID NO: 96818 - DNA, 25 bp, SARS Virus
ttagtgaatgttattgtagttgacg

SEQ ID NO: 96819 - DNA, 25 bp, SARS Virus
tagtgaatgttgatgtagttgacgt

SEQ ID NO: 96820 - DNA, 25 bp, SARS Virus
agtgaatgttgtagtagttgacgta

SEQ ID NO: 96821 - DNA, 25 bp, SARS Virus
gtgaatgttgttatagttgacgtaa

SEQ ID NO: 96822 - DNA, 25 bp, SARS Virus
tgaatgttgttgaagttgacgtaac

SEQ ID NO: 96823 - DNA, 25 bp, SARS Virus
gaatgttgttgtagttgacgtaacc

SEQ ID NO: 96824 - DNA, 25 bp, SARS Virus
aatgttgttgtaattgacgtaaccc

SEQ ID NO: 96825 - DNA, 25 bp, SARS Virus
atgttgttgtagatgacgtaacccg

SEQ ID NO: 96826 - DNA, 25 bp, SARS Virus
tgttgttgtagtagacgtaacccgt

SEQ ID NO: 96827 - DNA, 25 bp, SARS Virus
gttgttgtagttaacgtaacccgtt

SEQ ID NO: 96828 - DNA, 25 bp, SARS Virus
ttgttgtagttgacgtaacccgttc

SEQ ID NO: 96829 - DNA, 25 bp, SARS Virus
tgttgtagttgaagtaacccgttcg

SEQ ID NO: 96830 - DNA, 25 bp, SARS Virus
gttgtagttgacataacccgttcga

SEQ ID NO: 96831 - DNA, 25 bp, SARS Virus
ttgtagttgacgaaacccgttcgac

SEQ ID NO: 96832 - DNA, 25 bp, SARS Virus
tgtagttgacgtaacccgttcgacg

SEQ ID NO: 96833 - DNA, 25 bp, SARS Virus
gtagttgacgtaacccgttcgacgt

SEQ ID NO: 96834 - DNA, 25 bp, SARS Virus
tagttgacgtaaaccgttcgacgtt

SEQ ID NO: 96835 - DNA, 25 bp, SARS Virus
agttgacgtaacacgttcgacgttc

SEQ ID NO: 96836 - DNA, 25 bp, SARS Virus
gttgacgtaaccagttcgacgttct

SEQ ID NO: 96837 - DNA, 25 bp, SARS Virus
ttgacgtaacccattcgacgttctg

SEQ ID NO: 96838 - DNA, 25 bp, SARS Virus
tgacgtaacccgatcgacgttctgc

SEQ ID NO: 96839 - DNA, 25 bp, SARS Virus
gacgtaacccgtacgacgttctgca

SEQ ID NO: 96840 - DNA, 25 bp, SARS Virus
acgtaacccgttagacgttctgcaa

SEQ ID NO: 96841 - DNA, 25 bp, SARS Virus
cgtaacccgttcaacgttctgcaac

SEQ ID NO: 96842 - DNA, 25 bp, SARS Virus
gtaacccgttcgacgttctgcaaca

SEQ ID NO: 96843 - DNA, 25 bp, SARS Virus
taacccgttcgaagttctgcaacaa

SEQ ID NO: 96844 - DNA, 25 bp, SARS Virus
aacccgttcgacattctgcaacaat

SEQ ID NO: 96845 - DNA, 25 bp, SARS Virus
acccgttcgacgatctgcaacaatt

SEQ ID NO: 96846 - DNA, 25 bp, SARS Virus
cccgttcgacgtactgcaacaattg

SEQ ID NO: 96847 - DNA, 25 bp, SARS Virus
ccgttcgacgttatgcaacaattgg

SEQ ID NO: 96848 - DNA, 25 bp, SARS Virus
cgttcgacgttcagcaacaattggt

SEQ ID NO: 96849 - DNA, 25 bp, SARS Virus
gttcgacgttctacaacaattggtc

SEQ ID NO: 96850 - DNA, 25 bp, SARS Virus
ttcgacgttctgaaacaattggtct

SEQ ID NO: 96851 - DNA, 25 bp, SARS Virus
tcgacgttctgcaacaattggtctt

SEQ ID NO: 96852 - DNA, 25 bp, SARS Virus
cgacgttctgcaacaattggtctta

SEQ ID NO: 96853 - DNA, 25 bp, SARS Virus
gacgttctgcaaaaattggtcttac

SEQ ID NO: 96854 - DNA, 25 bp, SARS Virus
acgttctgcaacaattggtcttacg

SEQ ID NO: 96855 - DNA, 25 bp, SARS Virus
cgttctgcaacaattggtcttacga

SEQ ID NO: 96856 - DNA, 25 bp, SARS Virus
gttctgcaacaaatggtcttacgag

SEQ ID NO: 96857 - DNA, 25 bp, SARS Virus
ttctgcaacaataggtcttacgagt

SEQ ID NO: 96858 - DNA, 25 bp, SARS Virus
tctgcaacaattagtcttacgagtt

SEQ ID NO: 96859 - DNA, 25 bp, SARS Virus
ctgcaacaattgatcttacgagttc

SEQ ID NO: 96860 - DNA, 25 bp, SARS Virus
tgcaacaattggacttacgagttcg

SEQ ID NO: 96861 - DNA, 25 bp, SARS Virus
gcaacaattggtattacgagttcgt

SEQ ID NO: 96862 - DNA, 25 bp, SARS Virus
caacaattggtcatacgagttcgta

SEQ ID NO: 96863 - DNA, 25 bp, SARS Virus
aacaattggtctaacgagttcgtaa

SEQ ID NO: 96864 - DNA, 25 bp, SARS Virus
acaattggtcttacgagttcgtaat

SEQ ID NO: 96865 - DNA, 25 bp, SARS Virus
caattggtcttaagagttcgtaatt

SEQ ID NO: 96866 - DNA, 25 bp, SARS Virus
aattggtcttacaagttcgtaattt

SEQ ID NO: 96867 - DNA, 25 bp, SARS Virus
attggtcttacgagttcgtaatttg

SEQ ID NO: 96868 - DNA, 25 bp, SARS Virus
ttggtcttacgaattcgtaatttgt

SEQ ID NO: 96869 - DNA, 25 bp, SARS Virus
tggtcttacgagatcgtaatttgtg

SEQ ID NO: 96870 - DNA, 25 bp, SARS Virus
ggtcttacgagtacgtaatttgtgt

SEQ ID NO: 96871 - DNA, 25 bp, SARS Virus
gtcttacgagttagtaatttgtgtg

SEQ ID NO: 96872 - DNA, 25 bp, SARS Virus
tcttacgagttcataatttgtgtga

SEQ ID NO: 96873 - DNA, 25 bp, SARS Virus
cttacgagttcgaaatttgtgtgaa

SEQ ID NO: 96874 - DNA, 25 bp, SARS Virus
ttacgagttcgtaatttgtgtgaac

SEQ ID NO: 96875 - DNA, 25 bp, SARS Virus
tacgagttcgtaatttgtgtgaaca

SEQ ID NO: 96876 - DNA, 25 bp, SARS Virus
acgagttcgtaaattgtgtgaacaa

SEQ ID NO: 96877 - DNA, 25 bp, SARS Virus
cgagttcgtaatatgtgtgaacaat

SEQ ID NO: 96878 - DNA, 25 bp, SARS Virus
gagttcgtaattagtgtgaacaatt

SEQ ID NO: 96879 - DNA, 25 bp, SARS Virus
agttcgtaatttatgtgaacaattt

SEQ ID NO: 96880 - DNA, 25 bp, SARS Virus
gttcgtaatttgagtgaacaatttg

SEQ ID NO: 96881 - DNA, 25 bp, SARS Virus
ttcgtaatttgtatgaacaatttgt

SEQ ID NO: 96882 - DNA, 25 bp, SARS Virus
tcgtaatttgtgagaacaatttgtt

SEQ ID NO: 96883 - DNA, 25 bp, SARS Virus
cgtaatttgtgtaaacaatttgttg

SEQ ID NO: 96884 - DNA, 25 bp, SARS Virus
gtaatttgtgtgaacaatttgttga

SEQ ID NO: 96885 - DNA, 25 bp, SARS Virus
taatttgtgtgaacaatttgttgaa

SEQ ID NO: 96886 - DNA, 25 bp, SARS Virus
aatttgtgtgaaaaatttgttgaat

SEQ ID NO: 96887 - DNA, 25 bp, SARS Virus
atttgtgtgaacaatttgttgaatc

SEQ ID NO: 96888 - DNA, 25 bp, SARS Virus
tttgtgtgaacaatttgttgaatcg

SEQ ID NO: 96889 - DNA, 25 bp, SARS Virus
ttgtgtgaacaaattgttgaatcga

SEQ ID NO: 96890 - DNA, 25 bp, SARS Virus
tgtgtgaacaatatgttgaatcgag

SEQ ID NO: 96891 - DNA, 25 bp, SARS Virus
gtgtgaacaattagttgaatcgaga

SEQ ID NO: 96892 - DNA, 25 bp, SARS Virus
tgtgaacaatttattgaatcgagat

SEQ ID NO: 96893 - DNA, 25 bp, SARS Virus
gtgaacaatttgatgaatcgagatt

SEQ ID NO: 96894 - DNA, 25 bp, SARS Virus
tgaacaatttgtagaatcgagatta

SEQ ID NO: 96895 - DNA, 25 bp, SARS Virus
gaacaatttgttaaatcgagattaa

SEQ ID NO: 96896 - DNA, 25 bp, SARS Virus
aacaatttgttgaatcgagattaaa

SEQ ID NO: 96897 - DNA, 25 bp, SARS Virus
acaatttgttgaatcgagattaaaa

SEQ ID NO: 96898 - DNA, 25 bp, SARS Virus
caatttgttgaaacgagattaaaac

SEQ ID NO: 96899 - DNA, 25 bp, SARS Virus
aatttgttgaatagagattaaaacc

SEQ ID NO: 96900 - DNA, 25 bp, SARS Virus
atttgttgaatcaagattaaaacca

SEQ ID NO: 96901 - DNA, 25 bp, SARS Virus
tttgttgaatcgagattaaaaccac

SEQ ID NO: 96902 - DNA, 25 bp, SARS Virus
ttgttgaatcgaaattaaaaccacg

SEQ ID NO: 96903 - DNA, 25 bp, SARS Virus
tgttgaatcgagattaaaaccacgt

SEQ ID NO: 96904 - DNA, 25 bp, SARS Virus
gttgaatcgagaataaaaccacgtt

SEQ ID NO: 96905 - DNA, 25 bp, SARS Virus
ttgaatcgagataaaaaccacgtta

SEQ ID NO: 96906 - DNA, 25 bp, SARS Virus
tgaatcgagattaaaaccacgttaa

SEQ ID NO: 96907 - DNA, 25 bp, SARS Virus
gaatcgagattaaaaccacgttaaa

SEQ ID NO: 96908 - DNA, 25 bp, SARS Virus
aatcgagattaaaaccacgttaaag

SEQ ID NO: 96909 - DNA, 25 bp, SARS Virus
atcgagattaaaaccacgttaaagt

SEQ ID NO: 96910 - DNA, 25 bp, SARS Virus
tcgagattaaaaacacgttaaagtt

SEQ ID NO: 96911 - DNA, 25 bp, SARS Virus
cgagattaaaacaacgttaaagttc

SEQ ID NO: 96912 - DNA, 25 bp, SARS Virus
gagattaaaaccacgttaaagttca

SEQ ID NO: 96913 - DNA, 25 bp, SARS Virus
agattaaaaccaagttaaagttcac

SEQ ID NO: 96914 - DNA, 25 bp, SARS Virus
gattaaaaccacattaaagttcaca

SEQ ID NO: 96915 - DNA, 25 bp, SARS Virus
attaaaaccacgataaagttcacac

SEQ ID NO: 96916 - DNA, 25 bp, SARS Virus
ttaaaaccacgtaaaagttcacacg

SEQ ID NO: 96917 - DNA, 25 bp, SARS Virus
taaaaccacgttaaagttcacacga

SEQ ID NO: 96918 - DNA, 25 bp, SARS Virus
aaaaccacgttaaagttcacacgat

SEQ ID NO: 96919 - DNA, 25 bp, SARS Virus
aaaccacgttaaagttcacacgatt

SEQ ID NO: 96920 - DNA, 25 bp, SARS Virus
aaccacgttaaaattcacacgattt

SEQ ID NO: 96921 - DNA, 25 bp, SARS Virus
accacgttaaagatcacacgattta

SEQ ID NO: 96922 - DNA, 25 bp, SARS Virus
ccacgttaaagtacacacgatttac

SEQ ID NO: 96923 - DNA, 25 bp, SARS Virus
cacgttaaagttaacacgatttact

SEQ ID NO: 96924 - DNA, 25 bp, SARS Virus
acgttaaagttcacacgatttacta

SEQ ID NO: 96925 - DNA, 25 bp, SARS Virus
cgttaaagttcaaacgatttactat

SEQ ID NO: 96926 - DNA, 25 bp, SARS Virus
gttaaagttcacacgatttactata

SEQ ID NO: 96927 - DNA, 25 bp, SARS Virus
ttaaagttcacaagatttactatag

SEQ ID NO: 96928 - DNA, 25 bp, SARS Virus
taaagttcacacaatttactatagg

SEQ ID NO: 96929 - DNA, 25 bp, SARS Virus
aaagttcacacgatttactatagga

SEQ ID NO: 96930 - DNA, 25 bp, SARS Virus
aagttcacacgaattactataggaa

SEQ ID NO: 96931 - DNA, 25 bp, SARS Virus
agttcacacgatatactataggaaa

SEQ ID NO: 96932 - DNA, 25 bp, SARS Virus
gttcacacgattaactataggaaag

SEQ ID NO: 96933 - DNA, 25 bp, SARS Virus
ttcacacgatttactataggaaagc

SEQ ID NO: 96934 - DNA, 25 bp, SARS Virus
tcacacgatttaatataggaaagcg

SEQ ID NO: 96935 - DNA, 25 bp, SARS Virus
cacacgatttacaataggaaagcgc

SEQ ID NO: 96936 - DNA, 25 bp, SARS Virus
acacgatttactataggaaagcgct

SEQ ID NO: 96937 - DNA, 25 bp, SARS Virus
cacgatttactaaaggaaagcgctg

SEQ ID NO: 96938 - DNA, 25 bp, SARS Virus
acgatttactataggaaagcgctga

SEQ ID NO: 96939 - DNA, 25 bp, SARS Virus
cgatttactataagaaagcgctgaa

SEQ ID NO: 96940 - DNA, 25 bp, SARS Virus
gatttactatagaaaagcgctgaac

SEQ ID NO: 96941 - DNA, 25 bp, SARS Virus
atttactataggaaagcgctgaact

SEQ ID NO: 96942 - DNA, 25 bp, SARS Virus
tttactataggaaagcgctgaacta

SEQ ID NO: 96943 - DNA, 25 bp, SARS Virus
ttactataggaaagcgctgaactat

SEQ ID NO: 96944 - DNA, 25 bp, SARS Virus
tactataggaaaacgctgaactatt

SEQ ID NO: 96945 - DNA, 25 bp, SARS Virus
actataggaaagagctgaactattt

SEQ ID NO: 96946 - DNA, 25 bp, SARS Virus
ctataggaaagcactgaactatttc

SEQ ID NO: 96947 - DNA, 25 bp, SARS Virus
tataggaaagcgatgaactatttca

SEQ ID NO: 96948 - DNA, 25 bp, SARS Virus
ataggaaagcgcagaactatttcag

SEQ ID NO: 96949 - DNA, 25 bp, SARS Virus
taggaaagcgctaaactatttcagc

SEQ ID NO: 96950 - DNA, 25 bp, SARS Virus
aggaaagcgctgaactatttcagct

SEQ ID NO: 96951 - DNA, 25 bp, SARS Virus
ggaaagcgctgaactatttcagctc

SEQ ID NO: 96952 - DNA, 25 bp, SARS Virus
gaaagcgctgaaatatttcagctcc

SEQ ID NO: 96953 - DNA, 25 bp, SARS Virus
aaagcgctgaacaatttcagctccg

SEQ ID NO: 96954 - DNA, 25 bp, SARS Virus
aagcgctgaactatttcagctccgc

SEQ ID NO: 96955 - DNA, 25 bp, SARS Virus
agcgctgaactaattcagctccgcc

SEQ ID NO: 96956 - DNA, 25 bp, SARS Virus
gcgctgaactatatcagctccgcct

SEQ ID NO: 96957 - DNA, 25 bp, SARS Virus
cgctgaactattacagctccgcctc

SEQ ID NO: 96958 - DNA, 25 bp, SARS Virus
gctgaactatttaagctccgcctcc

SEQ ID NO: 96959 - DNA, 25 bp, SARS Virus
ctgaactatttcagctccgcctcca

SEQ ID NO: 96960 - DNA, 25 bp, SARS Virus
tgaactatttcaactccgcctccat

SEQ ID NO: 96961 - DNA, 25 bp, SARS Virus
gaactatttcagatccgcctccatg

SEQ ID NO: 96962 - DNA, 25 bp, SARS Virus
aactatttcagcaccgcctccatgt

SEQ ID NO: 96963 - DNA, 25 bp, SARS Virus
actatttcagctacgcctccatgtt

SEQ ID NO: 96964 - DNA, 25 bp, SARS Virus
ctatttcagctcagcctccatgttt

SEQ ID NO: 96965 - DNA, 25 bp, SARS Virus
tatttcagctccacctccatgttta

SEQ ID NO: 96966 - DNA, 25 bp, SARS Virus
atttcagctccgactccatgtttaa

SEQ ID NO: 96967 - DNA, 25 bp, SARS Virus
tttcagctccgcatccatgtttaac

SEQ ID NO: 96968 - DNA, 25 bp, SARS Virus
ttcagctccgccaccatgtttaact

SEQ ID NO: 96969 - DNA, 25 bp, SARS Virus
tcagctccgcctacatgtttaactg

SEQ ID NO: 96970 - DNA, 25 bp, SARS Virus
cagctccgcctcaatgtttaactgt

SEQ ID NO: 96971 - DNA, 25 bp, SARS Virus
agctccgcctccatgtttaactgtc

SEQ ID NO: 96972 - DNA, 25 bp, SARS Virus
gctccgcctccaagtttaactgtcc

SEQ ID NO: 96973 - DNA, 25 bp, SARS Virus
ctccgcctccatatttaactgtcca

SEQ ID NO: 96974 - DNA, 25 bp, SARS Virus
tccgcctccatgattaactgtccaa

SEQ ID NO: 96975 - DNA, 25 bp, SARS Virus
ccgcctccatgtataactgtccaat

SEQ ID NO: 96976 - DNA, 25 bp, SARS Virus
cgcctccatgttaaactgtccaatt

SEQ ID NO: 96977 - DNA, 25 bp, SARS Virus
gcctccatgtttaactgtccaatta

SEQ ID NO: 96978 - DNA, 25 bp, SARS Virus
cctccatgtttaactgtccaattaa

SEQ ID NO: 96979 - DNA, 25 bp, SARS Virus
ctccatgtttaaatgtccaattaat

SEQ ID NO: 96980 - DNA, 25 bp, SARS Virus
tccatgtttaacagtccaattaatg

SEQ ID NO: 96981 - DNA, 25 bp, SARS Virus
ccatgtttaactatccaattaatgt

SEQ ID NO: 96982 - DNA, 25 bp, SARS Virus
catgtttaactgaccaattaatgtc

SEQ ID NO: 96983 - DNA, 25 bp, SARS Virus
atgtttaactgtacaattaatgtcc

SEQ ID NO: 96984 - DNA, 25 bp, SARS Virus
tgtttaactgtcaaattaatgtccg

SEQ ID NO: 96985 - DNA, 25 bp, SARS Virus
gtttaactgtccaattaatgtccgt

SEQ ID NO: 96986 - DNA, 25 bp, SARS Virus
tttaactgtccaattaatgtccgtc

SEQ ID NO: 96987 - DNA, 25 bp, SARS Virus
ttaactgtccaaataatgtccgtct

SEQ ID NO: 96988 - DNA, 25 bp, SARS Virus
taactgtccaataaatgtccgtctg

SEQ ID NO: 96989 - DNA, 25 bp, SARS Virus
aactgtccaattaatgtccgtctga

SEQ ID NO: 96990 - DNA, 25 bp, SARS Virus
actgtccaattaatgtccgtctgaa

SEQ ID NO: 96991 - DNA, 25 bp, SARS Virus
ctgtccaattaaagtccgtctgaag

SEQ ID NO: 96992 - DNA, 25 bp, SARS Virus
tgtccaattaatatccgtctgaagt

SEQ ID NO: 96993 - DNA, 25 bp, SARS Virus
gtccaattaatgaccgtctgaagtt

SEQ ID NO: 96994 - DNA, 25 bp, SARS Virus
tccaattaatgtacgtctgaagttt

SEQ ID NO: 96995 - DNA, 25 bp, SARS Virus
ccaattaatgtcagtctgaagtttc

SEQ ID NO: 96996 - DNA, 25 bp, SARS Virus
caattaatgtccatctgaagtttcg

SEQ ID NO: 96997 - DNA, 25 bp, SARS Virus
aattaatgtccgactgaagtttcgg

SEQ ID NO: 96998 - DNA, 25 bp, SARS Virus
attaatgtccgtatgaagtttcgga

SEQ ID NO: 96999 - DNA, 25 bp, SARS Virus
ttaatgtccgtcagaagtttcggaa

SEQ ID NO: 97000 - DNA, 25 bp, SARS Virus
taatgtccgtctaaagtttcggaag

SEQ ID NO: 97001 - DNA, 25 bp, SARS Virus
aatgtccgtctgaagtttcggaagt

SEQ ID NO: 97002 - DNA, 25 bp, SARS Virus
atgtccgtctgaagtttcggaagtt

SEQ ID NO: 97003 - DNA, 25 bp, SARS Virus
tgtccgtctgaaatttcggaagttt

SEQ ID NO: 97004 - DNA, 25 bp, SARS Virus
gtccgtctgaagattcggaagtttg

SEQ ID NO: 97005 - DNA, 25 bp, SARS Virus
tccgtctgaagtatcggaagtttgg

SEQ ID NO: 97006 - DNA, 25 bp, SARS Virus
ccgtctgaagttacggaagtttgga

SEQ ID NO: 97007 - DNA, 25 bp, SARS Virus
cgtctgaagtttaggaagtttggat

SEQ ID NO: 97008 - DNA, 25 bp, SARS Virus
gtctgaagtttcagaagtttggata

SEQ ID NO: 97009 - DNA, 25 bp, SARS Virus
tctgaagtttcgaaagtttggatac

SEQ ID NO: 97010 - DNA, 25 bp, SARS Virus
ctgaagtttcggaagtttggataca

SEQ ID NO: 97011 - DNA, 25 bp, SARS Virus
tgaagtttcggaagtttggatacat

SEQ ID NO: 97012 - DNA, 25 bp, SARS Virus
gaagtttcggaaatttggatacatt

SEQ ID NO: 97013 - DNA, 25 bp, SARS Virus
aagtttcggaagattggatacattg

SEQ ID NO: 97014 - DNA, 25 bp, SARS Virus
agtttcggaagtatggatacattgt

SEQ ID NO: 97015 - DNA, 25 bp, SARS Virus
gtttcggaagttaggatacattgtg

SEQ ID NO: 97016 - DNA, 25 bp, SARS Virus
tttcggaagtttagatacattgtgt

SEQ ID NO: 97017 - DNA, 25 bp, SARS Virus
ttcggaagtttgaatacattgtgtt

SEQ ID NO: 97018 - DNA, 25 bp, SARS Virus
tcggaagtttggatacattgtgttg

SEQ ID NO: 97019 - DNA, 25 bp, SARS Virus
cggaagtttggaaacattgtgttgt

SEQ ID NO: 97020 - DNA, 25 bp, SARS Virus
ggaagtttggatacattgtgttgtt

SEQ ID NO: 97021 - DNA, 25 bp, SARS Virus
gaagtttggataaattgtgttgttg

SEQ ID NO: 97022 - DNA, 25 bp, SARS Virus
aagtttggatacattgtgttgttga

SEQ ID NO: 97023 - DNA, 25 bp, SARS Virus
agtttggatacaatgtgttgttgat

SEQ ID NO: 97024 - DNA, 25 bp, SARS Virus
gtttggatacatagtgttgttgatt

SEQ ID NO: 97025 - DNA, 25 bp, SARS Virus
tttggatacattatgttgttgatta

SEQ ID NO: 97026 - DNA, 25 bp, SARS Virus
ttggatacattgagttgttgattag

SEQ ID NO: 97027 - DNA, 25 bp, SARS Virus
tggatacattgtattgttgattagt

SEQ ID NO: 97028 - DNA, 25 bp, SARS Virus
ggatacattgtgatgttgattagtc

SEQ ID NO: 97029 - DNA, 25 bp, SARS Virus
gatacattgtgtagttgattagtcc

SEQ ID NO: 97030 - DNA, 25 bp, SARS Virus
atacattgtgttattgattagtccc

SEQ ID NO: 97031 - DNA, 25 bp, SARS Virus
tacattgtgttgatgattagtcccg

SEQ ID NO: 97032 - DNA, 25 bp, SARS Virus
acattgtgttgtagattagtcccga

SEQ ID NO: 97033 - DNA, 25 bp, SARS Virus
cattgtgttgttaattagtcccgac

SEQ ID NO: 97034 - DNA, 25 bp, SARS Virus
attgtgttgttgattagtcccgacg

SEQ ID NO: 97035 - DNA, 25 bp, SARS Virus
ttgtgttgttgaatagtcccgacga

SEQ ID NO: 97036 - DNA, 25 bp, SARS Virus
tgtgttgttgataagtcccgacgac

SEQ ID NO: 97037 - DNA, 25 bp, SARS Virus
gtgttgttgattagtcccgacgact

SEQ ID NO: 97038 - DNA, 25 bp, SARS Virus
tgttgttgattaatcccgacgactt

SEQ ID NO: 97039 - DNA, 25 bp, SARS Virus
gttgttgattagacccgacgacttt

SEQ ID NO: 97040 - DNA, 25 bp, SARS Virus
ttgttgattagtaccgacgacttta

SEQ ID NO: 97041 - DNA, 25 bp, SARS Virus
tgttgattagtcacgacgactttag

SEQ ID NO: 97042 - DNA, 25 bp, SARS Virus
gttgattagtccagacgactttagt

SEQ ID NO: 97043 - DNA, 25 bp, SARS Virus
ttgattagtcccaacgactttagtc

SEQ ID NO: 97044 - DNA, 25 bp, SARS Virus
tgattagtcccgacgactttagtcc

SEQ ID NO: 97045 - DNA, 25 bp, SARS Virus
gattagtcccgaagactttagtccc

SEQ ID NO: 97046 - DNA, 25 bp, SARS Virus
attagtcccgacaactttagtcccg

SEQ ID NO: 97047 - DNA, 25 bp, SARS Virus
ttagtcccgacgactttagtcccga

SEQ ID NO: 97048 - DNA, 25 bp, SARS Virus
tagtcccgacgaatttagtcccgaa

SEQ ID NO: 97049 - DNA, 25 bp, SARS Virus
agtcccgacgacattagtcccgaag

SEQ ID NO: 97050 - DNA, 25 bp, SARS Virus
gtcccgacgactatagtcccgaaga

SEQ ID NO: 97051 - DNA, 25 bp, SARS Virus
tcccgacgacttaagtcccgaagac

SEQ ID NO: 97052 - DNA, 25 bp, SARS Virus
cccgacgactttagtcccgaagacg

SEQ ID NO: 97053 - DNA, 25 bp, SARS Virus
ccgacgactttaatcccgaagacga

SEQ ID NO: 97054 - DNA, 25 bp, SARS Virus
cgacgactttagacccgaagacgat

SEQ ID NO: 97055 - DNA, 25 bp, SARS Virus
gacgactttagtaccgaagacgatt

SEQ ID NO: 97056 - DNA, 25 bp, SARS Virus
acgactttagtcacgaagacgatta

SEQ ID NO: 97057 - DNA, 25 bp, SARS Virus
cgactttagtccagaagacgattag

SEQ ID NO: 97058 - DNA, 25 bp, SARS Virus
gactttagtcccaaagacgattaga

SEQ ID NO: 97059 - DNA, 25 bp, SARS Virus
actttagtcccgaagacgattagaa

SEQ ID NO: 97060 - DNA, 25 bp, SARS Virus
ctttagtcccgaagacgattagaac

SEQ ID NO: 97061 - DNA, 25 bp, SARS Virus
tttagtcccgaaaacgattagaacg

SEQ ID NO: 97062 - DNA, 25 bp, SARS Virus
ttagtcccgaagacgattagaacga

SEQ ID NO: 97063 - DNA, 25 bp, SARS Virus
tagtcccgaagaagattagaacgac

SEQ ID NO: 97064 - DNA, 25 bp, SARS Virus
agtcccgaagacaattagaacgacg

SEQ ID NO: 97065 - DNA, 25 bp, SARS Virus
gtcccgaagacgattagaacgacga

SEQ ID NO: 97066 - DNA, 25 bp, SARS Virus
tcccgaagacgaatagaacgacgat

SEQ ID NO: 97067 - DNA, 25 bp, SARS Virus
cccgaagacgataagaacgacgatg

SEQ ID NO: 97068 - DNA, 25 bp, SARS Virus
ccgaagacgattagaacgacgatga

SEQ ID NO: 97069 - DNA, 25 bp, SARS Virus
cgaagacgattaaaacgacgatgat

SEQ ID NO: 97070 - DNA, 25 bp, SARS Virus
gaagacgattagaacgacgatgatt

SEQ ID NO: 97071 - DNA, 25 bp, SARS Virus
aagacgattagaacgacgatgattt

SEQ ID NO: 97072 - DNA, 25 bp, SARS Virus
agacgattagaaagacgatgatttt

SEQ ID NO: 97073 - DNA, 25 bp, SARS Virus
gacgattagaacaacgatgatttta

SEQ ID NO: 97074 - DNA, 25 bp, SARS Virus
acgattagaacgacgatgattttac

SEQ ID NO: 97075 - DNA, 25 bp, SARS Virus
cgattagaacgaagatgattttaca

SEQ ID NO: 97076 - DNA, 25 bp, SARS Virus
gattagaacgacaatgattttacag

SEQ ID NO: 97077 - DNA, 25 bp, SARS Virus
attagaacgacgatgattttacaga

SEQ ID NO: 97078 - DNA, 25 bp, SARS Virus
ttagaacgacgaagattttacagac

SEQ ID NO: 97079 - DNA, 25 bp, SARS Virus
tagaacgacgataattttacagact

SEQ ID NO: 97080 - DNA, 25 bp, SARS Virus
agaacgacgatgattttacagactc

SEQ ID NO: 97081 - DNA, 25 bp, SARS Virus
gaacgacgatgaatttacagactca

SEQ ID NO: 97082 - DNA, 25 bp, SARS Virus
aacgacgatgatattacagactcac

SEQ ID NO: 97083 - DNA, 25 bp, SARS Virus
acgacgatgattatacagactcaca

SEQ ID NO: 97084 - DNA, 25 bp, SARS Virus
cgacgatgatttaacagactcacac

SEQ ID NO: 97085 - DNA, 25 bp, SARS Virus
gacgatgattttacagactcacaca

SEQ ID NO: 97086 - DNA, 25 bp, SARS Virus
acgatgattttaaagactcacacaa

SEQ ID NO: 97087 - DNA, 25 bp, SARS Virus
cgatgattttacagactcacacaag

SEQ ID NO: 97088 - DNA, 25 bp, SARS Virus
gatgattttacaaactcacacaaga

SEQ ID NO: 97089 - DNA, 25 bp, SARS Virus
atgattttacagactcacacaagaa

SEQ ID NO: 97090 - DNA, 25 bp, SARS Virus
tgattttacagaatcacacaagaac

SEQ ID NO: 97091 - DNA, 25 bp, SARS Virus
gattttacagacacacacaagaacc

SEQ ID NO: 97092 - DNA, 25 bp, SARS Virus
attttacagactaacacaagaacct

SEQ ID NO: 97093 - DNA, 25 bp, SARS Virus
ttttacagactcacacaagaacctg

SEQ ID NO: 97094 - DNA, 25 bp, SARS Virus
tttacagactcaaacaagaacctgt

SEQ ID NO: 97095 - DNA, 25 bp, SARS Virus
ttacagactcacacaagaacctgtt

SEQ ID NO: 97096 - DNA, 25 bp, SARS Virus
tacagactcacaaaagaacctgtta

SEQ ID NO: 97097 - DNA, 25 bp, SARS Virus
acagactcacacaagaacctgttag

SEQ ID NO: 97098 - DNA, 25 bp, SARS Virus
cagactcacacaagaacctgttagt

SEQ ID NO: 97099 - DNA, 25 bp, SARS Virus
agactcacacaaaaacctgttagtt

SEQ ID NO: 97100 - DNA, 25 bp, SARS Virus
gactcacacaagaacctgttagttt

SEQ ID NO: 97101 - DNA, 25 bp, SARS Virus
actcacacaagaacctgttagtttt

SEQ ID NO: 97102 - DNA, 25 bp, SARS Virus
ctcacacaagaaactgttagttttt

SEQ ID NO: 97103 - DNA, 25 bp, SARS Virus
tcacacaagaacatgttagtttttc

SEQ ID NO: 97104 - DNA, 25 bp, SARS Virus
cacacaagaaccagttagtttttct

SEQ ID NO: 97105 - DNA, 25 bp, SARS Virus
acacaagaacctattagtttttctc

SEQ ID NO: 97106 - DNA, 25 bp, SARS Virus
cacaagaacctgatagtttttctca

SEQ ID NO: 97107 - DNA, 25 bp, SARS Virus
acaagaacctgtaagtttttctcaa

SEQ ID NO: 97108 - DNA, 25 bp, SARS Virus
caagaacctgttagtttttctcaac

SEQ ID NO: 97109 - DNA, 25 bp, SARS Virus
aagaacctgttaatttttctcaact

SEQ ID NO: 97110 - DNA, 25 bp, SARS Virus
agaacctgttagattttctcaactg

SEQ ID NO: 97111 - DNA, 25 bp, SARS Virus
gaacctgttagtatttctcaactga

SEQ ID NO: 97112 - DNA, 25 bp, SARS Virus
aacctgttagttattctcaactgaa

SEQ ID NO: 97113 - DNA, 25 bp, SARS Virus
acctgttagtttatctcaactgaaa

SEQ ID NO: 97114 - DNA, 25 bp, SARS Virus
cctgttagttttactcaactgaaaa

SEQ ID NO: 97115 - DNA, 25 bp, SARS Virus
ctgttagtttttatcaactgaaaac

SEQ ID NO: 97116 - DNA, 25 bp, SARS Virus
tgttagtttttcacaactgaaaaca

SEQ ID NO: 97117 - DNA, 25 bp, SARS Virus
gttagtttttctaaactgaaaacac

SEQ ID NO: 97118 - DNA, 25 bp, SARS Virus
ttagtttttctcaactgaaaacacc

SEQ ID NO: 97119 - DNA, 25 bp, SARS Virus
tagtttttctcaactgaaaacacct

SEQ ID NO: 97120 - DNA, 25 bp, SARS Virus
agtttttctcaaatgaaaacacctt

SEQ ID NO: 97121 - DNA, 25 bp, SARS Virus
gtttttctcaacagaaaacaccttt

SEQ ID NO: 97122 - DNA, 25 bp, SARS Virus
tttttctcaactaaaaacacctttc

SEQ ID NO: 97123 - DNA, 25 bp, SARS Virus
ttttctcaactgaaaacacctttcc

SEQ ID NO: 97124 - DNA, 25 bp, SARS Virus
tttctcaactgaaaacacctttccc

SEQ ID NO: 97125 - DNA, 25 bp, SARS Virus
ttctcaactgaaaacacctttcccg

SEQ ID NO: 97126 - DNA, 25 bp, SARS Virus
tctcaactgaaaacacctttcccga

SEQ ID NO: 97127 - DNA, 25 bp, SARS Virus
ctcaactgaaaaaacctttcccgat

SEQ ID NO: 97128 - DNA, 25 bp, SARS Virus
tcaactgaaaacacctttcccgatg

SEQ ID NO: 97129 - DNA, 25 bp, SARS Virus
caactgaaaacaactttcccgatgg

SEQ ID NO: 97130 - DNA, 25 bp, SARS Virus
aactgaaaacacatttcccgatggt

SEQ ID NO: 97131 - DNA, 25 bp, SARS Virus
actgaaaacaccattcccgatggtg

SEQ ID NO: 97132 - DNA, 25 bp, SARS Virus
ctgaaaacacctatcccgatggtgg

SEQ ID NO: 97133 - DNA, 25 bp, SARS Virus
tgaaaacaccttacccgatggtgga

SEQ ID NO: 97134 - DNA, 25 bp, SARS Virus
gaaaacacctttaccgatggtggaa

SEQ ID NO: 97135 - DNA, 25 bp, SARS Virus
aaaacacctttcacgatggtggaat

SEQ ID NO: 97136 - DNA, 25 bp, SARS Virus
aaacacctttccagatggtggaata

SEQ ID NO: 97137 - DNA, 25 bp, SARS Virus
aacacctttcccaatggtggaatac

SEQ ID NO: 97138 - DNA, 25 bp, SARS Virus
acacctttcccgatggtggaataca

SEQ ID NO: 97139 - DNA, 25 bp, SARS Virus
cacctttcccgaaggtggaatacag

SEQ ID NO: 97140 - DNA, 25 bp, SARS Virus
acctttcccgatagtggaatacagg

SEQ ID NO: 97141 - DNA, 25 bp, SARS Virus
cctttcccgatgatggaatacagga

SEQ ID NO: 97142 - DNA, 25 bp, SARS Virus
ctttcccgatggaggaatacaggaa

SEQ ID NO: 97143 - DNA, 25 bp, SARS Virus
tttcccgatggtagaatacaggaag

SEQ ID NO: 97144 - DNA, 25 bp, SARS Virus
ttcccgatggtgaaatacaggaagg

SEQ ID NO: 97145 - DNA, 25 bp, SARS Virus
tcccgatggtggaatacaggaaggg

SEQ ID NO: 97146 - DNA, 25 bp, SARS Virus
cccgatggtggaatacaggaagggt

SEQ ID NO: 97147 - DNA, 25 bp, SARS Virus
ccgatggtggaaaacaggaagggtg

SEQ ID NO: 97148 - DNA, 25 bp, SARS Virus
cgatggtggaatacaggaagggtgt

SEQ ID NO: 97149 - DNA, 25 bp, SARS Virus
gatggtggaataaaggaagggtgtt

SEQ ID NO: 97150 - DNA, 25 bp, SARS Virus
atggtggaatacaggaagggtgttc

SEQ ID NO: 97151 - DNA, 25 bp, SARS Virus
tggtggaatacaagaagggtgttcg

SEQ ID NO: 97152 - DNA, 25 bp, SARS Virus
ggtggaatacagaaagggtgttcgt

SEQ ID NO: 97153 - DNA, 25 bp, SARS Virus
gtggaatacaggaagggtgttcgtc

SEQ ID NO: 97154 - DNA, 25 bp, SARS Virus
tggaatacaggaagggtgttcgtcg

SEQ ID NO: 97155 - DNA, 25 bp, SARS Virus
ggaatacaggaaaggtgttcgtcgg

SEQ ID NO: 97156 - DNA, 25 bp, SARS Virus
gaatacaggaagagtgttcgtcggg

SEQ ID NO: 97157 - DNA, 25 bp, SARS Virus
aatacaggaaggatgttcgtcgggg

SEQ ID NO: 97158 - DNA, 25 bp, SARS Virus
atacaggaagggagttcgtcggggc

SEQ ID NO: 97159 - DNA, 25 bp, SARS Virus
tacaggaagggtattcgtcggggcg

SEQ ID NO: 97160 - DNA, 25 bp, SARS Virus
acaggaagggtgatcgtcggggcgt

SEQ ID NO: 97161 - DNA, 25 bp, SARS Virus
caggaagggtgtacgtcggggcgta

SEQ ID NO: 97162 - DNA, 25 bp, SARS Virus
aggaagggtgttagtcggggcgtac

SEQ ID NO: 97163 - DNA, 25 bp, SARS Virus
ggaagggtgttcatcggggcgtacc

SEQ ID NO: 97164 - DNA, 25 bp, SARS Virus
gaagggtgttcgacggggcgtacca

SEQ ID NO: 97165 - DNA, 25 bp, SARS Virus
aagggtgttcgtaggggcgtaccac

SEQ ID NO: 97166 - DNA, 25 bp, SARS Virus
agggtgttcgtcagggcgtaccaca

SEQ ID NO: 97167 - DNA, 25 bp, SARS Virus
gggtgttcgtcgaggcgtaccacaa

SEQ ID NO: 97168 - DNA, 25 bp, SARS Virus
ggtgttcgtcggagcgtaccacaac

SEQ ID NO: 97169 - DNA, 25 bp, SARS Virus
gtgttcgtcgggacgtaccacaaca

SEQ ID NO: 97170 - DNA, 25 bp, SARS Virus
tgttcgtcggggagtaccacaacag

SEQ ID NO: 97171 - DNA, 25 bp, SARS Virus
gttcgtcggggcataccacaacaga

SEQ ID NO: 97172 - DNA, 25 bp, SARS Virus
ttcgtcggggcgaaccacaacagaa

SEQ ID NO: 97173 - DNA, 25 bp, SARS Virus
tcgtcggggcgtaccacaacagaag

SEQ ID NO: 97174 - DNA, 25 bp, SARS Virus
cgtcggggcgtaacacaacagaagg

SEQ ID NO: 97175 - DNA, 25 bp, SARS Virus
gtcggggcgtacaacaacagaagga

SEQ ID NO: 97176 - DNA, 25 bp, SARS Virus
tcggggcgtaccacaacagaaggat

SEQ ID NO: 97177 - DNA, 25 bp, SARS Virus
cggggcgtaccaaaacagaaggatg

SEQ ID NO: 97178 - DNA, 25 bp, SARS Virus
ggggcgtaccacaacagaaggatgt

SEQ ID NO: 97179 - DNA, 25 bp, SARS Virus
gggcgtaccacaacagaaggatgta

SEQ ID NO: 97180 - DNA, 25 bp, SARS Virus
ggcgtaccacaaaagaaggatgtac

SEQ ID NO: 97181 - DNA, 25 bp, SARS Virus
gcgtaccacaacagaaggatgtaca

SEQ ID NO: 97182 - DNA, 25 bp, SARS Virus
cgtaccacaacaaaaggatgtacag

SEQ ID NO: 97183 - DNA, 25 bp, SARS Virus
gtaccacaacagaaggatgtacagt

SEQ ID NO: 97184 - DNA, 25 bp, SARS Virus
taccacaacagaaggatgtacagtg

SEQ ID NO: 97185 - DNA, 25 bp, SARS Virus
accacaacagaaagatgtacagtgc

SEQ ID NO: 97186 - DNA, 25 bp, SARS Virus
ccacaacagaagaatgtacagtgca

SEQ ID NO: 97187 - DNA, 25 bp, SARS Virus
cacaacagaaggatgtacagtgcat

SEQ ID NO: 97188 - DNA, 25 bp, SARS Virus
acaacagaaggaagtacagtgcata

SEQ ID NO: 97189 - DNA, 25 bp, SARS Virus
caacagaaggatatacagtgcatac

SEQ ID NO: 97190 - DNA, 25 bp, SARS Virus
aacagaaggatgaacagtgcataca

SEQ ID NO: 97191 - DNA, 25 bp, SARS Virus
acagaaggatgtacagtgcatacac

SEQ ID NO: 97192 - DNA, 25 bp, SARS Virus
cagaaggatgtaaagtgcatacacg

SEQ ID NO: 97193 - DNA, 25 bp, SARS Virus
agaaggatgtacagtgcatacacgg

SEQ ID NO: 97194 - DNA, 25 bp, SARS Virus
gaaggatgtacaatgcatacacggt

SEQ ID NO: 97195 - DNA, 25 bp, SARS Virus
aaggatgtacagagcatacacggta

SEQ ID NO: 97196 - DNA, 25 bp, SARS Virus
aggatgtacagtacatacacggtag

SEQ ID NO: 97197 - DNA, 25 bp, SARS Virus
ggatgtacagtgaatacacggtagg

SEQ ID NO: 97198 - DNA, 25 bp, SARS Virus
gatgtacagtgcatacacggtaggg

SEQ ID NO: 97199 - DNA, 25 bp, SARS Virus
atgtacagtgcaaacacggtagggt

SEQ ID NO: 97200 - DNA, 25 bp, SARS Virus
tgtacagtgcatacacggtagggtc

SEQ ID NO: 97201 - DNA, 25 bp, SARS Virus
gtacagtgcataaacggtagggtcc

SEQ ID NO: 97202 - DNA, 25 bp, SARS Virus
tacagtgcatacacggtagggtcct

SEQ ID NO: 97203 - DNA, 25 bp, SARS Virus
acagtgcatacaaggtagggtcctc

SEQ ID NO: 97204 - DNA, 25 bp, SARS Virus
cagtgcatacacagtagggtcctct

SEQ ID NO: 97205 - DNA, 25 bp, SARS Virus
agtgcatacacgatagggtcctctc

SEQ ID NO: 97206 - DNA, 25 bp, SARS Virus
gtgcatacacggaagggtcctctcc

SEQ ID NO: 97207 - DNA, 25 bp, SARS Virus
tgcatacacggtagggtcctctcct

SEQ ID NO: 97208 - DNA, 25 bp, SARS Virus
gcatacacggtaaggtcctctcctt

SEQ ID NO: 97209 - DNA, 25 bp, SARS Virus
catacacggtagagtcctctccttg

SEQ ID NO: 97210 - DNA, 25 bp, SARS Virus
atacacggtaggatcctctccttga

SEQ ID NO: 97211 - DNA, 25 bp, SARS Virus
tacacggtagggacctctccttgaa

SEQ ID NO: 97212 - DNA, 25 bp, SARS Virus
acacggtagggtactctccttgaag

SEQ ID NO: 97213 - DNA, 25 bp, SARS Virus
cacggtagggtcatctccttgaagt

SEQ ID NO: 97214 - DNA, 25 bp, SARS Virus
acggtagggtccactccttgaagtg

SEQ ID NO: 97215 - DNA, 25 bp, SARS Virus
cggtagggtcctatccttgaagtgg

SEQ ID NO: 97216 - DNA, 25 bp, SARS Virus
ggtagggtcctcaccttgaagtggt

SEQ ID NO: 97217 - DNA, 25 bp, SARS Virus
gtagggtcctctacttgaagtggtg

SEQ ID NO: 97218 - DNA, 25 bp, SARS Virus
tagggtcctctcattgaagtggtgt

SEQ ID NO: 97219 - DNA, 25 bp, SARS Virus
agggtcctctccatgaagtggtgtc

SEQ ID NO: 97220 - DNA, 25 bp, SARS Virus
gggtcctctcctagaagtggtgtcg

SEQ ID NO: 97221 - DNA, 25 bp, SARS Virus
ggtcctctccttaaagtggtgtcgc

SEQ ID NO: 97222 - DNA, 25 bp, SARS Virus
gtcctctccttgaagtggtgtcgcg

SEQ ID NO: 97223 - DNA, 25 bp, SARS Virus
tcctctccttgaagtggtgtcgcgg

SEQ ID NO: 97224 - DNA, 25 bp, SARS Virus
cctctccttgaaatggtgtcgcggt

SEQ ID NO: 97225 - DNA, 25 bp, SARS Virus
ctctccttgaagaggtgtcgcggtc

SEQ ID NO: 97226 - DNA, 25 bp, SARS Virus
tctccttgaagtagtgtcgcggtcg

SEQ ID NO: 97227 - DNA, 25 bp, SARS Virus
ctccttgaagtgatgtcgcggtcgt

SEQ ID NO: 97228 - DNA, 25 bp, SARS Virus
tccttgaagtggagtcgcggtcgtt

SEQ ID NO: 97229 - DNA, 25 bp, SARS Virus
ccttgaagtggtatcgcggtcgtta

SEQ ID NO: 97230 - DNA, 25 bp, SARS Virus
cttgaagtggtgacgcggtcgttaa

SEQ ID NO: 97231 - DNA, 25 bp, SARS Virus
ttgaagtggtgtagcggtcgttaaa

SEQ ID NO: 97232 - DNA, 25 bp, SARS Virus
tgaagtggtgtcacggtcgttaaac

SEQ ID NO: 97233 - DNA, 25 bp, SARS Virus
gaagtggtgtcgaggtcgttaaaca

SEQ ID NO: 97234 - DNA, 25 bp, SARS Virus
aagtggtgtcgcagtcgttaaacag

SEQ ID NO: 97235 - DNA, 25 bp, SARS Virus
agtggtgtcgcgatcgttaaacagt

SEQ ID NO: 97236 - DNA, 25 bp, SARS Virus
gtggtgtcgcggacgttaaacagta

SEQ ID NO: 97237 - DNA, 25 bp, SARS Virus
tggtgtcgcggtagttaaacagtac

SEQ ID NO: 97238 - DNA, 25 bp, SARS Virus
ggtgtcgcggtcattaaacagtact

SEQ ID NO: 97239 - DNA, 25 bp, SARS Virus
gtgtcgcggtcgataaacagtactt

SEQ ID NO: 97240 - DNA, 25 bp, SARS Virus
tgtcgcggtcgtaaaacagtacttc

SEQ ID NO: 97241 - DNA, 25 bp, SARS Virus
acaagagatactcttggtttttgtt

SEQ ID NO: 97242 - DNA, 25 bp, SARS Virus
caagagatactcctggtttttgttt

SEQ ID NO: 97243 - DNA, 25 bp, SARS Virus
aagagatactctcggtttttgttta

SEQ ID NO: 97244 - DNA, 25 bp, SARS Virus
agagatactcttcgtttttgtttag

SEQ ID NO: 97245 - DNA, 25 bp, SARS Virus
gagatactcttgctttttgtttagc

SEQ ID NO: 97246 - DNA, 25 bp, SARS Virus
agatactcttggcttttgtttagcg

SEQ ID NO: 97247 - DNA, 25 bp, SARS Virus
gatactcttggtctttgtttagcgg

SEQ ID NO: 97248 - DNA, 25 bp, SARS Virus
atactcttggttcttgtttagcggt

SEQ ID NO: 97249 - DNA, 25 bp, SARS Virus
tactcttggtttctgtttagcggtt

SEQ ID NO: 97250 - DNA, 25 bp, SARS Virus
actcttggttttcgtttagcggttg

SEQ ID NO: 97251 - DNA, 25 bp, SARS Virus
ctcttggtttttctttagcggttgg

SEQ ID NO: 97252 - DNA, 25 bp, SARS Virus
tcttggtttttgcttagcggttggt

SEQ ID NO: 97253 - DNA, 25 bp, SARS Virus
cttggtttttgtctagcggttggtt

SEQ ID NO: 97254 - DNA, 25 bp, SARS Virus
ttggtttttgttcagcggttggtta

SEQ ID NO: 97255 - DNA, 25 bp, SARS Virus
tggtttttgtttcgcggttggttaa

SEQ ID NO: 97256 - DNA, 25 bp, SARS Virus
ggtttttgtttaccggttggttaaa

SEQ ID NO: 97257 - DNA, 25 bp, SARS Virus
gtttttgtttagcggttggttaaat

SEQ ID NO: 97258 - DNA, 25 bp, SARS Virus
tttttgtttagccgttggttaaatt

SEQ ID NO: 97259 - DNA, 25 bp, SARS Virus
ttttgtttagcgcttggttaaattg

SEQ ID NO: 97260 - DNA, 25 bp, SARS Virus
tttgtttagcggctggttaaattgt

SEQ ID NO: 97261 - DNA, 25 bp, SARS Virus
ttgtttagcggtcggttaaattgtt

SEQ ID NO: 97262 - DNA, 25 bp, SARS Virus
tgtttagcggttcgttaaattgttc

SEQ ID NO: 97263 - DNA, 25 bp, SARS Virus
gtttagcggttgcttaaattgttcc

SEQ ID NO: 97264 - DNA, 25 bp, SARS Virus
tttagcggttggctaaattgttccg

SEQ ID NO: 97265 - DNA, 25 bp, SARS Virus
ttagcggttggtcaaattgttccgc

SEQ ID NO: 97266 - DNA, 25 bp, SARS Virus
tagcggttggttcaattgttccgct

SEQ ID NO: 97267 - DNA, 25 bp, SARS Virus
agcggttggttacattgttccgcta

SEQ ID NO: 97268 - DNA, 25 bp, SARS Virus
gcggttggttaacttgttccgctaa

SEQ ID NO: 97269 - DNA, 25 bp, SARS Virus
cggttggttaaactgttccgctaat

SEQ ID NO: 97270 - DNA, 25 bp, SARS Virus
ggttggttaaatcgttccgctaatc

SEQ ID NO: 97271 - DNA, 25 bp, SARS Virus
gttggttaaattcttccgctaatca

SEQ ID NO: 97272 - DNA, 25 bp, SARS Virus
ttggttaaattgctccgctaatcag

SEQ ID NO: 97273 - DNA, 25 bp, SARS Virus
tggttaaattgtcccgctaatcagt

SEQ ID NO: 97274 - DNA, 25 bp, SARS Virus
ggttaaattgttccgctaatcagtt

SEQ ID NO: 97275 - DNA, 25 bp, SARS Virus
gttaaattgttccgctaatcagttt

SEQ ID NO: 97276 - DNA, 25 bp, SARS Virus
ttaaattgttcccctaatcagttta

SEQ ID NO: 97277 - DNA, 25 bp, SARS Virus
taaattgttccgctaatcagtttaa

SEQ ID NO: 97278 - DNA, 25 bp, SARS Virus
aaattgttccgccaatcagtttaag

SEQ ID NO: 97279 - DNA, 25 bp, SARS Virus
aattgttccgctcatcagtttaagt

SEQ ID NO: 97280 - DNA, 25 bp, SARS Virus
attgttccgctactcagtttaagtt

SEQ ID NO: 97281 - DNA, 25 bp, SARS Virus
ttgttccgctaaccagtttaagttc

SEQ ID NO: 97282 - DNA, 25 bp, SARS Virus
tgttccgctaatcagtttaagttct

SEQ ID NO: 97283 - DNA, 25 bp, SARS Virus
gttccgctaatccgtttaagttctt

SEQ ID NO: 97284 - DNA, 25 bp, SARS Virus
ttccgctaatcactttaagttctta

SEQ ID NO: 97285 - DNA, 25 bp, SARS Virus
tccgctaatcagcttaagttcttag

SEQ ID NO: 97286 - DNA, 25 bp, SARS Virus
ccgctaatcagtctaagttcttagt

SEQ ID NO: 97287 - DNA, 25 bp, SARS Virus
cgctaatcagttcaagttcttagtg

SEQ ID NO: 97288 - DNA, 25 bp, SARS Virus
gctaatcagtttcagttcttagtga

SEQ ID NO: 97289 - DNA, 25 bp, SARS Virus
ctaatcagtttacgttcttagtgaa

SEQ ID NO: 97290 - DNA, 25 bp, SARS Virus
taatcagtttaacttcttagtgaat

SEQ ID NO: 97291 - DNA, 25 bp, SARS Virus
aatcagtttaagctcttagtgaatg

SEQ ID NO: 97292 - DNA, 25 bp, SARS Virus
atcagtttaagtccttagtgaatgt

SEQ ID NO: 97293 - DNA, 25 bp, SARS Virus
tcagtttaagttcttagtgaatgtt

SEQ ID NO: 97294 - DNA, 25 bp, SARS Virus
cagtttaagttcctagtgaatgttg

SEQ ID NO: 97295 - DNA, 25 bp, SARS Virus
agtttaagttctcagtgaatgttgt

SEQ ID NO: 97296 - DNA, 25 bp, SARS Virus
gtttaagttcttcgtgaatgttgtt

SEQ ID NO: 97297 - DNA, 25 bp, SARS Virus
tttaagttcttactgaatgttgttg

SEQ ID NO: 97298 - DNA, 25 bp, SARS Virus
ttaagttcttagcgaatgttgttgt

SEQ ID NO: 97299 - DNA, 25 bp, SARS Virus
taagttcttagtcaatgttgttgta

SEQ ID NO: 97300 - DNA, 25 bp, SARS Virus
aagttcttagtgcatgttgttgtag

SEQ ID NO: 97301 - DNA, 25 bp, SARS Virus
agttcttagtgactgttgttgtagt

SEQ ID NO: 97302 - DNA, 25 bp, SARS Virus
gttcttagtgaacgttgttgtagtt

SEQ ID NO: 97303 - DNA, 25 bp, SARS Virus
ttcttagtgaatcttgttgtagttg

SEQ ID NO: 97304 - DNA, 25 bp, SARS Virus
tcttagtgaatgctgttgtagttga

SEQ ID NO: 97305 - DNA, 25 bp, SARS Virus
cttagtgaatgtcgttgtagttgac

SEQ ID NO: 97306 - DNA, 25 bp, SARS Virus
ttagtgaatgttcttgtagttgacg

SEQ ID NO: 97307 - DNA, 25 bp, SARS Virus
tagtgaatgttgctgtagttgacgt

SEQ ID NO: 97308 - DNA, 25 bp, SARS Virus
agtgaatgttgtcgtagttgacgta

SEQ ID NO: 97309 - DNA, 25 bp, SARS Virus
gtgaatgttgttctagttgacgtaa

SEQ ID NO: 97310 - DNA, 25 bp, SARS Virus
tgaatgttgttgcagttgacgtaac

SEQ ID NO: 97311 - DNA, 25 bp, SARS Virus
gaatgttgttgtcgttgacgtaacc

SEQ ID NO: 97312 - DNA, 25 bp, SARS Virus
aatgttgttgtacttgacgtaaccc

SEQ ID NO: 97313 - DNA, 25 bp, SARS Virus
atgttgttgtagctgacgtaacccg

SEQ ID NO: 97314 - DNA, 25 bp, SARS Virus
tgttgttgtagtcgacgtaacccgt

SEQ ID NO: 97315 - DNA, 25 bp, SARS Virus
gttgttgtagttcacgtaacccgtt

SEQ ID NO: 97316 - DNA, 25 bp, SARS Virus
ttgttgtagttgccgtaacccgttc

SEQ ID NO: 97317 - DNA, 25 bp, SARS Virus
tgttgtagttgacgtaacccgttcg

SEQ ID NO: 97318 - DNA, 25 bp, SARS Virus
gttgtagttgacctaacccgttcga

SEQ ID NO: 97319 - DNA, 25 bp, SARS Virus
ttgtagttgacgcaacccgttcgac

SEQ ID NO: 97320 - DNA, 25 bp, SARS Virus
tgtagttgacgtcacccgttcgacg

SEQ ID NO: 97321 - DNA, 25 bp, SARS Virus
gtagttgacgtaccccgttcgacgt

SEQ ID NO: 97322 - DNA, 25 bp, SARS Virus
tagttgacgtaacccgttcgacgtt

SEQ ID NO: 97323 - DNA, 25 bp, SARS Virus
agttgacgtaacccgttcgacgttc

SEQ ID NO: 97324 - DNA, 25 bp, SARS Virus
gttgacgtaacccgttcgacgttct

SEQ ID NO: 97325 - DNA, 25 bp, SARS Virus
ttgacgtaaccccttcgacgttctg

SEQ ID NO: 97326 - DNA, 25 bp, SARS Virus
tgacgtaacccgctcgacgttctgc

SEQ ID NO: 97327 - DNA, 25 bp, SARS Virus
gacgtaacccgtccgacgttctgca

SEQ ID NO: 97328 - DNA, 25 bp, SARS Virus
acgtaacccgttcgacgttctgcaa

SEQ ID NO: 97329 - DNA, 25 bp, SARS Virus
cgtaacccgttccacgttctgcaac

SEQ ID NO: 97330 - DNA, 25 bp, SARS Virus
gtaacccgttcgccgttctgcaaca

SEQ ID NO: 97331 - DNA, 25 bp, SARS Virus
taacccgttcgacgttctgcaacaa

SEQ ID NO: 97332 - DNA, 25 bp, SARS Virus
aacccgttcgaccttctgcaacaat

SEQ ID NO: 97333 - DNA, 25 bp, SARS Virus
acccgttcgacgctctgcaacaatt

SEQ ID NO: 97334 - DNA, 25 bp, SARS Virus
cccgttcgacgtcctgcaacaattg

SEQ ID NO: 97335 - DNA, 25 bp, SARS Virus
ccgttcgacgttctgcaacaattgg

SEQ ID NO: 97336 - DNA, 25 bp, SARS Virus
cgttcgacgttccgcaacaattggt

SEQ ID NO: 97337 - DNA, 25 bp, SARS Virus
gttcgacgttctccaacaattggtc

SEQ ID NO: 97338 - DNA, 25 bp, SARS Virus
ttcgacgttctgcaacaattggtct

SEQ ID NO: 97339 - DNA, 25 bp, SARS Virus
tcgacgttctgccacaattggtctt

SEQ ID NO: 97340 - DNA, 25 bp, SARS Virus
cgacgttctgcaccaattggtctta

SEQ ID NO: 97341 - DNA, 25 bp, SARS Virus
gacgttctgcaacaattggtcttac

SEQ ID NO: 97342 - DNA, 25 bp, SARS Virus
acgttctgcaaccattggtcttacg

SEQ ID NO: 97343 - DNA, 25 bp, SARS Virus
cgttctgcaacacttggtcttacga

SEQ ID NO: 97344 - DNA, 25 bp, SARS Virus
gttctgcaacaactggtcttacgag

SEQ ID NO: 97345 - DNA, 25 bp, SARS Virus
ttctgcaacaatcggtcttacgagt

SEQ ID NO: 97346 - DNA, 25 bp, SARS Virus
tctgcaacaattcgtcttacgagtt

SEQ ID NO: 97347 - DNA, 25 bp, SARS Virus
ctgcaacaattgctcttacgagttc

SEQ ID NO: 97348 - DNA, 25 bp, SARS Virus
tgcaacaattggccttacgagttcg

SEQ ID NO: 97349 - DNA, 25 bp, SARS Virus
gcaacaattggtcttacgagttcgt

SEQ ID NO: 97350 - DNA, 25 bp, SARS Virus
caacaattggtcctacgagttcgta

SEQ ID NO: 97351 - DNA, 25 bp, SARS Virus
aacaattggtctcacgagttcgtaa

SEQ ID NO: 97352 - DNA, 25 bp, SARS Virus
acaattggtcttccgagttcgtaat

SEQ ID NO: 97353 - DNA, 25 bp, SARS Virus
caattggtcttacgagttcgtaatt

SEQ ID NO: 97354 - DNA, 25 bp, SARS Virus
aattggtcttaccagttcgtaattt

SEQ ID NO: 97355 - DNA, 25 bp, SARS Virus
attggtcttacgcgttcgtaatttg

SEQ ID NO: 97356 - DNA, 25 bp, SARS Virus
ttggtcttacgacttcgtaatttgt

SEQ ID NO: 97357 - DNA, 25 bp, SARS Virus
tggtcttacgagctcgtaatttgtg

SEQ ID NO: 97358 - DNA, 25 bp, SARS Virus
ggtcttacgagtccgtaatttgtgt

SEQ ID NO: 97359 - DNA, 25 bp, SARS Virus
gtcttacgagttcgtaatttgtgtg

SEQ ID NO: 97360 - DNA, 25 bp, SARS Virus
tcttacgagttcctaatttgtgtga

SEQ ID NO: 97361 - DNA, 25 bp, SARS Virus
cttacgagttcgcaatttgtgtgaa

SEQ ID NO: 97362 - DNA, 25 bp, SARS Virus
ttacgagttcgtcatttgtgtgaac

SEQ ID NO: 97363 - DNA, 25 bp, SARS Virus
tacgagttcgtactttgtgtgaaca

SEQ ID NO: 97364 - DNA, 25 bp, SARS Virus
acgagttcgtaacttgtgtgaacaa

SEQ ID NO: 97365 - DNA, 25 bp, SARS Virus
cgagttcgtaatctgtgtgaacaat

SEQ ID NO: 97366 - DNA, 25 bp, SARS Virus
gagttcgtaattcgtgtgaacaatt

SEQ ID NO: 97367 - DNA, 25 bp, SARS Virus
agttcgtaatttctgtgaacaattt

SEQ ID NO: 97368 - DNA, 25 bp, SARS Virus
gttcgtaatttgcgtgaacaatttg

SEQ ID NO: 97369 - DNA, 25 bp, SARS Virus
ttcgtaatttgtctgaacaatttgt

SEQ ID NO: 97370 - DNA, 25 bp, SARS Virus
tcgtaatttgtgcgaacaatttgtt

SEQ ID NO: 97371 - DNA, 25 bp, SARS Virus
cgtaatttgtgtcaacaatttgttg

SEQ ID NO: 97372 - DNA, 25 bp, SARS Virus
gtaatttgtgtgcacaatttgttga

SEQ ID NO: 97373 - DNA, 25 bp, SARS Virus
taatttgtgtgaccaatttgttgaa

SEQ ID NO: 97374 - DNA, 25 bp, SARS Virus
aatttgtgtgaacaatttgttgaat

SEQ ID NO: 97375 - DNA, 25 bp, SARS Virus
atttgtgtgaaccatttgttgaatc

SEQ ID NO: 97376 - DNA, 25 bp, SARS Virus
tttgtgtgaacactttgttgaatcg

SEQ ID NO: 97377 - DNA, 25 bp, SARS Virus
ttgtgtgaacaacttgttgaatcga

SEQ ID NO: 97378 - DNA, 25 bp, SARS Virus
tgtgtgaacaatctgttgaatcgag

SEQ ID NO: 97379 - DNA, 25 bp, SARS Virus
gtgtgaacaattcgttgaatcgaga

SEQ ID NO: 97380 - DNA, 25 bp, SARS Virus
tgtgaacaatttcttgaatcgagat

SEQ ID NO: 97381 - DNA, 25 bp, SARS Virus
gtgaacaatttgctgaatcgagatt

SEQ ID NO: 97382 - DNA, 25 bp, SARS Virus
tgaacaatttgtcgaatcgagatta

SEQ ID NO: 97383 - DNA, 25 bp, SARS Virus
gaacaatttgttcaatcgagattaa

SEQ ID NO: 97384 - DNA, 25 bp, SARS Virus
aacaatttgttgcatcgagattaaa

SEQ ID NO: 97385 - DNA, 25 bp, SARS Virus
acaatttgttgactcgagattaaaa

SEQ ID NO: 97386 - DNA, 25 bp, SARS Virus
caatttgttgaaccgagattaaaac

SEQ ID NO: 97387 - DNA, 25 bp, SARS Virus
aatttgttgaatcgagattaaaacc

SEQ ID NO: 97388 - DNA, 25 bp, SARS Virus
atttgttgaatccagattaaaacca

SEQ ID NO: 97389 - DNA, 25 bp, SARS Virus
tttgttgaatcgcgattaaaaccac

SEQ ID NO: 97390 - DNA, 25 bp, SARS Virus
ttgttgaatcgacattaaaaccacg

SEQ ID NO: 97391 - DNA, 25 bp, SARS Virus
tgttgaatcgagcttaaaaccacgt

SEQ ID NO: 97392 - DNA, 25 bp, SARS Virus
gttgaatcgagactaaaaccacgtt

SEQ ID NO: 97393 - DNA, 25 bp, SARS Virus
ttgaatcgagatcaaaaccacgtta

SEQ ID NO: 97394 - DNA, 25 bp, SARS Virus
tgaatcgagattcaaaccacgttaa

SEQ ID NO: 97395 - DNA, 25 bp, SARS Virus
gaatcgagattacaaccacgttaaa

SEQ ID NO: 97396 - DNA, 25 bp, SARS Virus
aatcgagattaacaccacgttaaag

SEQ ID NO: 97397 - DNA, 25 bp, SARS Virus
atcgagattaaacccacgttaaagt

SEQ ID NO: 97398 - DNA, 25 bp, SARS Virus
tcgagattaaaaccacgttaaagtt

SEQ ID NO: 97399 - DNA, 25 bp, SARS Virus
cgagattaaaaccacgttaaagttc

SEQ ID NO: 97400 - DNA, 25 bp, SARS Virus
gagattaaaaccccgttaaagttca

SEQ ID NO: 97401 - DNA, 25 bp, SARS Virus
agattaaaaccacgttaaagttcac

SEQ ID NO: 97402 - DNA, 25 bp, SARS Virus
gattaaaaccaccttaaagttcaca

SEQ ID NO: 97403 - DNA, 25 bp, SARS Virus
attaaaaccacgctaaagttcacac

SEQ ID NO: 97404 - DNA, 25 bp, SARS Virus
ttaaaaccacgtcaaagttcacacg

SEQ ID NO: 97405 - DNA, 25 bp, SARS Virus
taaaaccacgttcaagttcacacga

SEQ ID NO: 97406 - DNA, 25 bp, SARS Virus
aaaaccacgttacagttcacacgat

SEQ ID NO: 97407 - DNA, 25 bp, SARS Virus
aaaccacgttaacgttcacacgatt

SEQ ID NO: 97408 - DNA, 25 bp, SARS Virus
aaccacgttaaacttcacacgattt

SEQ ID NO: 97409 - DNA, 25 bp, SARS Virus
accacgttaaagctcacacgattta

SEQ ID NO: 97410 - DNA, 25 bp, SARS Virus
ccacgttaaagtccacacgatttac

SEQ ID NO: 97411 - DNA, 25 bp, SARS Virus
cacgttaaagttcacacgatttact

SEQ ID NO: 97412 - DNA, 25 bp, SARS Virus
acgttaaagttcccacgatttacta

SEQ ID NO: 97413 - DNA, 25 bp, SARS Virus
cgttaaagttcacacgatttactat

SEQ ID NO: 97414 - DNA, 25 bp, SARS Virus
gttaaagttcacccgatttactata

SEQ ID NO: 97415 - DNA, 25 bp, SARS Virus
ttaaagttcacacgatttactatag

SEQ ID NO: 97416 - DNA, 25 bp, SARS Virus
taaagttcacaccatttactatagg

SEQ ID NO: 97417 - DNA, 25 bp, SARS Virus
aaagttcacacgctttactatagga

SEQ ID NO: 97418 - DNA, 25 bp, SARS Virus
aagttcacacgacttactataggaa

SEQ ID NO: 97419 - DNA, 25 bp, SARS Virus
agttcacacgatctactataggaaa

SEQ ID NO: 97420 - DNA, 25 bp, SARS Virus
gttcacacgattcactataggaaag

SEQ ID NO: 97421 - DNA, 25 bp, SARS Virus
ttcacacgatttcctataggaaagc

SEQ ID NO: 97422 - DNA, 25 bp, SARS Virus
tcacacgatttactataggaaagcg

SEQ ID NO: 97423 - DNA, 25 bp, SARS Virus
cacacgatttaccataggaaagcgc

SEQ ID NO: 97424 - DNA, 25 bp, SARS Virus
acacgatttactctaggaaagcgct

SEQ ID NO: 97425 - DNA, 25 bp, SARS Virus
cacgatttactacaggaaagcgctg

SEQ ID NO: 97426 - DNA, 25 bp, SARS Virus
acgatttactatcggaaagcgctga

SEQ ID NO: 97427 - DNA, 25 bp, SARS Virus
cgatttactatacgaaagcgctgaa

SEQ ID NO: 97428 - DNA, 25 bp, SARS Virus
gatttactatagcaaagcgctgaac

SEQ ID NO: 97429 - DNA, 25 bp, SARS Virus
atttactataggcaagcgctgaact

SEQ ID NO: 97430 - DNA, 25 bp, SARS Virus
tttactataggacagcgctgaacta

SEQ ID NO: 97431 - DNA, 25 bp, SARS Virus
ttactataggaacgcgctgaactat

SEQ ID NO: 97432 - DNA, 25 bp, SARS Virus
tactataggaaaccgctgaactatt

SEQ ID NO: 97433 - DNA, 25 bp, SARS Virus
actataggaaagcgctgaactattt

SEQ ID NO: 97434 - DNA, 25 bp, SARS Virus
ctataggaaagccctgaactatttc

SEQ ID NO: 97435 - DNA, 25 bp, SARS Virus
tataggaaagcgctgaactatttca

SEQ ID NO: 97436 - DNA, 25 bp, SARS Virus
ataggaaagcgccgaactatttcag

SEQ ID NO: 97437 - DNA, 25 bp, SARS Virus
taggaaagcgctcaactatttcagc

SEQ ID NO: 97438 - DNA, 25 bp, SARS Virus
aggaaagcgctgcactatttcagct

SEQ ID NO: 97439 - DNA, 25 bp, SARS Virus
ggaaagcgctgacctatttcagctc

SEQ ID NO: 97440 - DNA, 25 bp, SARS Virus
gaaagcgctgaactatttcagctcc

SEQ ID NO: 97441 - DNA, 25 bp, SARS Virus
aaagcgctgaaccatttcagctccg

SEQ ID NO: 97442 - DNA, 25 bp, SARS Virus
aagcgctgaactctttcagctccgc

SEQ ID NO: 97443 - DNA, 25 bp, SARS Virus
agcgctgaactacttcagctccgcc

SEQ ID NO: 97444 - DNA, 25 bp, SARS Virus
gcgctgaactatctcagctccgcct

SEQ ID NO: 97445 - DNA, 25 bp, SARS Virus
cgctgaactattccagctccgcctc

SEQ ID NO: 97446 - DNA, 25 bp, SARS Virus
gctgaactatttcagctccgcctcc

SEQ ID NO: 97447 - DNA, 25 bp, SARS Virus
ctgaactatttccgctccgcctcca

SEQ ID NO: 97448 - DNA, 25 bp, SARS Virus
tgaactatttcacctccgcctccat

SEQ ID NO: 97449 - DNA, 25 bp, SARS Virus
gaactatttcagctccgcctccatg

SEQ ID NO: 97450 - DNA, 25 bp, SARS Virus
aactatttcagccccgcctccatgt

SEQ ID NO: 97451 - DNA, 25 bp, SARS Virus
actatttcagctccgcctccatgtt

SEQ ID NO: 97452 - DNA, 25 bp, SARS Virus
ctatttcagctccgcctccatgttt

SEQ ID NO: 97453 - DNA, 25 bp, SARS Virus
tatttcagctccccctccatgttta

SEQ ID NO: 97454 - DNA, 25 bp, SARS Virus
atttcagctccgcctccatgtttaa

SEQ ID NO: 97455 - DNA, 25 bp, SARS Virus
tttcagctccgcctccatgtttaac

SEQ ID NO: 97456 - DNA, 25 bp, SARS Virus
ttcagctccgcccccatgtttaact

SEQ ID NO: 97457 - DNA, 25 bp, SARS Virus
tcagctccgcctccatgtttaactg

SEQ ID NO: 97458 - DNA, 25 bp, SARS Virus
cagctccgcctccatgtttaactgt

SEQ ID NO: 97459 - DNA, 25 bp, SARS Virus
agctccgcctccctgtttaactgtc

SEQ ID NO: 97460 - DNA, 25 bp, SARS Virus
gctccgcctccacgtttaactgtcc

SEQ ID NO: 97461 - DNA, 25 bp, SARS Virus
ctccgcctccatctttaactgtcca

SEQ ID NO: 97462 - DNA, 25 bp, SARS Virus
tccgcctccatgcttaactgtccaa

SEQ ID NO: 97463 - DNA, 25 bp, SARS Virus
ccgcctccatgtctaactgtccaat

SEQ ID NO: 97464 - DNA, 25 bp, SARS Virus
cgcctccatgttcaactgtccaatt

SEQ ID NO: 97465 - DNA, 25 bp, SARS Virus
gcctccatgtttcactgtccaatta

SEQ ID NO: 97466 - DNA, 25 bp, SARS Virus
cctccatgtttacctgtccaattaa

SEQ ID NO: 97467 - DNA, 25 bp, SARS Virus
ctccatgtttaactgtccaattaat

SEQ ID NO: 97468 - DNA, 25 bp, SARS Virus
tccatgtttaaccgtccaattaatg

SEQ ID NO: 97469 - DNA, 25 bp, SARS Virus
ccatgtttaactctccaattaatgt

SEQ ID NO: 97470 - DNA, 25 bp, SARS Virus
catgtttaactgcccaattaatgtc

SEQ ID NO: 97471 - DNA, 25 bp, SARS Virus
atgtttaactgtccaattaatgtcc

SEQ ID NO: 97472 - DNA, 25 bp, SARS Virus
tgtttaactgtccaattaatgtccg

SEQ ID NO: 97473 - DNA, 25 bp, SARS Virus
gtttaactgtcccattaatgtccgt

SEQ ID NO: 97474 - DNA, 25 bp, SARS Virus
tttaactgtccacttaatgtccgtc

SEQ ID NO: 97475 - DNA, 25 bp, SARS Virus
ttaactgtccaactaatgtccgtct

SEQ ID NO: 97476 - DNA, 25 bp, SARS Virus
taactgtccaatcaatgtccgtctg

SEQ ID NO: 97477 - DNA, 25 bp, SARS Virus
aactgtccaattcatgtccgtctga

SEQ ID NO: 97478 - DNA, 25 bp, SARS Virus
actgtccaattactgtccgtctgaa

SEQ ID NO: 97479 - DNA, 25 bp, SARS Virus
ctgtccaattaacgtccgtctgaag

SEQ ID NO: 97480 - DNA, 25 bp, SARS Virus
tgtccaattaatctccgtctgaagt

SEQ ID NO: 97481 - DNA, 25 bp, SARS Virus
gtccaattaatgcccgtctgaagtt

SEQ ID NO: 97482 - DNA, 25 bp, SARS Virus
tccaattaatgtccgtctgaagttt

SEQ ID NO: 97483 - DNA, 25 bp, SARS Virus
ccaattaatgtccgtctgaagtttc

SEQ ID NO: 97484 - DNA, 25 bp, SARS Virus
caattaatgtccctctgaagtttcg

SEQ ID NO: 97485 - DNA, 25 bp, SARS Virus
aattaatgtccgcctgaagtttcgg

SEQ ID NO: 97486 - DNA, 25 bp, SARS Virus
attaatgtccgtctgaagtttcgga

SEQ ID NO: 97487 - DNA, 25 bp, SARS Virus
ttaatgtccgtccgaagtttcggaa

SEQ ID NO: 97488 - DNA, 25 bp, SARS Virus
taatgtccgtctcaagtttcggaag

SEQ ID NO: 97489 - DNA, 25 bp, SARS Virus
aatgtccgtctgcagtttcggaagt

SEQ ID NO: 97490 - DNA, 25 bp, SARS Virus
atgtccgtctgacgtttcggaagtt

SEQ ID NO: 97491 - DNA, 25 bp, SARS Virus
tgtccgtctgaactttcggaagttt

SEQ ID NO: 97492 - DNA, 25 bp, SARS Virus
gtccgtctgaagcttcggaagtttg

SEQ ID NO: 97493 - DNA, 25 bp, SARS Virus
tccgtctgaagtctcggaagtttgg

SEQ ID NO: 97494 - DNA, 25 bp, SARS Virus
ccgtctgaagttccggaagtttgga

SEQ ID NO: 97495 - DNA, 25 bp, SARS Virus
cgtctgaagtttcggaagtttggat

SEQ ID NO: 97496 - DNA, 25 bp, SARS Virus
gtctgaagtttccgaagtttggata

SEQ ID NO: 97497 - DNA, 25 bp, SARS Virus
tctgaagtttcgcaagtttggatac

SEQ ID NO: 97498 - DNA, 25 bp, SARS Virus
ctgaagtttcggcagtttggataca

SEQ ID NO: 97499 - DNA, 25 bp, SARS Virus
tgaagtttcggacgtttggatacat

SEQ ID NO: 97500 - DNA, 25 bp, SARS Virus
gaagtttcggaactttggatacatt

SEQ ID NO: 97501 - DNA, 25 bp, SARS Virus
aagtttcggaagcttggatacattg

SEQ ID NO: 97502 - DNA, 25 bp, SARS Virus
agtttcggaagtctggatacattgt

SEQ ID NO: 97503 - DNA, 25 bp, SARS Virus
gtttcggaagttcggatacattgtg

SEQ ID NO: 97504 - DNA, 25 bp, SARS Virus
tttcggaagtttcgatacattgtgt

SEQ ID NO: 97505 - DNA, 25 bp, SARS Virus
ttcggaagtttgcatacattgtgtt

SEQ ID NO: 97506 - DNA, 25 bp, SARS Virus
tcggaagtttggctacattgtgttg

SEQ ID NO: 97507 - DNA, 25 bp, SARS Virus
cggaagtttggacacattgtgttgt

SEQ ID NO: 97508 - DNA, 25 bp, SARS Virus
ggaagtttggatccattgtgttgtt

SEQ ID NO: 97509 - DNA, 25 bp, SARS Virus
gaagtttggatacattgtgttgttg

SEQ ID NO: 97510 - DNA, 25 bp, SARS Virus
aagtttggataccttgtgttgttga

SEQ ID NO: 97511 - DNA, 25 bp, SARS Virus
agtttggatacactgtgttgttgat

SEQ ID NO: 97512 - DNA, 25 bp, SARS Virus
gtttggatacatcgtgttgttgatt

SEQ ID NO: 97513 - DNA, 25 bp, SARS Virus
tttggatacattctgttgttgatta

SEQ ID NO: 97514 - DNA, 25 bp, SARS Virus
ttggatacattgcgttgttgattag

SEQ ID NO: 97515 - DNA, 25 bp, SARS Virus
tggatacattgtcttgttgattagt

SEQ ID NO: 97516 - DNA, 25 bp, SARS Virus
ggatacattgtgctgttgattagtc

SEQ ID NO: 97517 - DNA, 25 bp, SARS Virus
gatacattgtgtcgttgattagtcc

SEQ ID NO: 97518 - DNA, 25 bp, SARS Virus
atacattgtgttcttgattagtccc

SEQ ID NO: 97519 - DNA, 25 bp, SARS Virus
tacattgtgttgctgattagtcccg

SEQ ID NO: 97520 - DNA, 25 bp, SARS Virus
acattgtgttgtcgattagtcccga

SEQ ID NO: 97521 - DNA, 25 bp, SARS Virus
cattgtgttgttcattagtcccgac

SEQ ID NO: 97522 - DNA, 25 bp, SARS Virus
attgtgttgttgcttagtcccgacg

SEQ ID NO: 97523 - DNA, 25 bp, SARS Virus
ttgtgttgttgactagtcccgacga

SEQ ID NO: 97524 - DNA, 25 bp, SARS Virus
tgtgttgttgatcagtcccgacgac

SEQ ID NO: 97525 - DNA, 25 bp, SARS Virus
gtgttgttgattcgtcccgacgact

SEQ ID NO: 97526 - DNA, 25 bp, SARS Virus
tgttgttgattactcccgacgactt

SEQ ID NO: 97527 - DNA, 25 bp, SARS Virus
gttgttgattagccccgacgacttt

SEQ ID NO: 97528 - DNA, 25 bp, SARS Virus
ttgttgattagtcccgacgacttta

SEQ ID NO: 97529 - DNA, 25 bp, SARS Virus
tgttgattagtcccgacgactttag

SEQ ID NO: 97530 - DNA, 25 bp, SARS Virus
gttgattagtcccgacgactttagt

SEQ ID NO: 97531 - DNA, 25 bp, SARS Virus
ttgattagtccccacgactttagtc

SEQ ID NO: 97532 - DNA, 25 bp, SARS Virus
tgattagtcccgccgactttagtcc

SEQ ID NO: 97533 - DNA, 25 bp, SARS Virus
gattagtcccgacgactttagtccc

SEQ ID NO: 97534 - DNA, 25 bp, SARS Virus
attagtcccgaccactttagtcccg

SEQ ID NO: 97535 - DNA, 25 bp, SARS Virus
ttagtcccgacgcctttagtcccga

SEQ ID NO: 97536 - DNA, 25 bp, SARS Virus
tagtcccgacgactttagtcccgaa

SEQ ID NO: 97537 - DNA, 25 bp, SARS Virus
agtcccgacgaccttagtcccgaag

SEQ ID NO: 97538 - DNA, 25 bp, SARS Virus
gtcccgacgactctagtcccgaaga

SEQ ID NO: 97539 - DNA, 25 bp, SARS Virus
tcccgacgacttcagtcccgaagac

SEQ ID NO: 97540 - DNA, 25 bp, SARS Virus
cccgacgactttcgtcccgaagacg

SEQ ID NO: 97541 - DNA, 25 bp, SARS Virus
ccgacgactttactcccgaagacga

SEQ ID NO: 97542 - DNA, 25 bp, SARS Virus
cgacgactttagccccgaagacgat

SEQ ID NO: 97543 - DNA, 25 bp, SARS Virus
gacgactttagtcccgaagacgatt

SEQ ID NO: 97544 - DNA, 25 bp, SARS Virus
acgactttagtcccgaagacgatta

SEQ ID NO: 97545 - DNA, 25 bp, SARS Virus
cgactttagtcccgaagacgattag

SEQ ID NO: 97546 - DNA, 25 bp, SARS Virus
gactttagtccccaagacgattaga

SEQ ID NO: 97547 - DNA, 25 bp, SARS Virus
actttagtcccgcagacgattagaa

SEQ ID NO: 97548 - DNA, 25 bp, SARS Virus
ctttagtcccgacgacgattagaac

SEQ ID NO: 97549 - DNA, 25 bp, SARS Virus
tttagtcccgaacacgattagaacg

SEQ ID NO: 97550 - DNA, 25 bp, SARS Virus
ttagtcccgaagccgattagaacga

SEQ ID NO: 97551 - DNA, 25 bp, SARS Virus
tagtcccgaagacgattagaacgac

SEQ ID NO: 97552 - DNA, 25 bp, SARS Virus
agtcccgaagaccattagaacgacg

SEQ ID NO: 97553 - DNA, 25 bp, SARS Virus
gtcccgaagacgcttagaacgacga

SEQ ID NO: 97554 - DNA, 25 bp, SARS Virus
tcccgaagacgactagaacgacgat

SEQ ID NO: 97555 - DNA, 25 bp, SARS Virus
cccgaagacgatcagaacgacgatg

SEQ ID NO: 97556 - DNA, 25 bp, SARS Virus
ccgaagacgattcgaacgacgatga

SEQ ID NO: 97557 - DNA, 25 bp, SARS Virus
cgaagacgattacaacgacgatgat

SEQ ID NO: 97558 - DNA, 25 bp, SARS Virus
gaagacgattagcacgacgatgatt

SEQ ID NO: 97559 - DNA, 25 bp, SARS Virus
aagacgattagaccgacgatgattt

SEQ ID NO: 97560 - DNA, 25 bp, SARS Virus
agacgattagaacgacgatgatttt

SEQ ID NO: 97561 - DNA, 25 bp, SARS Virus
gacgattagaaccacgatgatttta

SEQ ID NO: 97562 - DNA, 25 bp, SARS Virus
acgattagaacgccgatgattttac

SEQ ID NO: 97563 - DNA, 25 bp, SARS Virus
cgattagaacgacgatgattttaca

SEQ ID NO: 97564 - DNA, 25 bp, SARS Virus
gattagaacgaccatgattttacag

SEQ ID NO: 97565 - DNA, 25 bp, SARS Virus
attagaacgacgctgattttacaga

SEQ ID NO: 97566 - DNA, 25 bp, SARS Virus
ttagaacgacgacgattttacagac

SEQ ID NO: 97567 - DNA, 25 bp, SARS Virus
tagaacgacgatcattttacagact

SEQ ID NO: 97568 - DNA, 25 bp, SARS Virus
agaacgacgatgcttttacagactc

SEQ ID NO: 97569 - DNA, 25 bp, SARS Virus
gaacgacgatgactttacagactca

SEQ ID NO: 97570 - DNA, 25 bp, SARS Virus
aacgacgatgatcttacagactcac

SEQ ID NO: 97571 - DNA, 25 bp, SARS Virus
acgacgatgattctacagactcaca

SEQ ID NO: 97572 - DNA, 25 bp, SARS Virus
cgacgatgatttcacagactcacac

SEQ ID NO: 97573 - DNA, 25 bp, SARS Virus
gacgatgattttccagactcacaca

SEQ ID NO: 97574 - DNA, 25 bp, SARS Virus
acgatgattttacagactcacacaa

SEQ ID NO: 97575 - DNA, 25 bp, SARS Virus
cgatgattttaccgactcacacaag

SEQ ID NO: 97576 - DNA, 25 bp, SARS Virus
gatgattttacacactcacacaaga

SEQ ID NO: 97577 - DNA, 25 bp, SARS Virus
atgattttacagcctcacacaagaa

SEQ ID NO: 97578 - DNA, 25 bp, SARS Virus
tgattttacagactcacacaagaac

SEQ ID NO: 97579 - DNA, 25 bp, SARS Virus
gattttacagacccacacaagaacc

SEQ ID NO: 97580 - DNA, 25 bp, SARS Virus
attttacagactcacacaagaacct

SEQ ID NO: 97581 - DNA, 25 bp, SARS Virus
ttttacagactcccacaagaacctg

SEQ ID NO: 97582 - DNA, 25 bp, SARS Virus
tttacagactcacacaagaacctgt

SEQ ID NO: 97583 - DNA, 25 bp, SARS Virus
ttacagactcacccaagaacctgtt

SEQ ID NO: 97584 - DNA, 25 bp, SARS Virus
tacagactcacacaagaacctgtta

SEQ ID NO: 97585 - DNA, 25 bp, SARS Virus
acagactcacaccagaacctgttag

SEQ ID NO: 97586 - DNA, 25 bp, SARS Virus
cagactcacacacgaacctgttagt

SEQ ID NO: 97587 - DNA, 25 bp, SARS Virus
agactcacacaacaacctgttagtt

SEQ ID NO: 97588 - DNA, 25 bp, SARS Virus
gactcacacaagcacctgttagttt

SEQ ID NO: 97589 - DNA, 25 bp, SARS Virus
actcacacaagaccctgttagtttt

SEQ ID NO: 97590 - DNA, 25 bp, SARS Virus
ctcacacaagaacctgttagttttt

SEQ ID NO: 97591 - DNA, 25 bp, SARS Virus
tcacacaagaacctgttagtttttc

SEQ ID NO: 97592 - DNA, 25 bp, SARS Virus
cacacaagaacccgttagtttttct

SEQ ID NO: 97593 - DNA, 25 bp, SARS Virus
acacaagaacctcttagtttttctc

SEQ ID NO: 97594 - DNA, 25 bp, SARS Virus
cacaagaacctgctagtttttctca

SEQ ID NO: 97595 - DNA, 25 bp, SARS Virus
acaagaacctgtcagtttttctcaa

SEQ ID NO: 97596 - DNA, 25 bp, SARS Virus
caagaacctgttcgtttttctcaac

SEQ ID NO: 97597 - DNA, 25 bp, SARS Virus
aagaacctgttactttttctcaact

SEQ ID NO: 97598 - DNA, 25 bp, SARS Virus
agaacctgttagcttttctcaactg

SEQ ID NO: 97599 - DNA, 25 bp, SARS Virus
gaacctgttagtctttctcaactga

SEQ ID NO: 97600 - DNA, 25 bp, SARS Virus
aacctgttagttcttctcaactgaa

SEQ ID NO: 97601 - DNA, 25 bp, SARS Virus
acctgttagtttctctcaactgaaa

SEQ ID NO: 97602 - DNA, 25 bp, SARS Virus
cctgttagttttcctcaactgaaaa

SEQ ID NO: 97603 - DNA, 25 bp, SARS Virus
ctgttagtttttctcaactgaaaac

SEQ ID NO: 97604 - DNA, 25 bp, SARS Virus
tgttagtttttcccaactgaaaaca

SEQ ID NO: 97605 - DNA, 25 bp, SARS Virus
gttagtttttctcaactgaaaacac

SEQ ID NO: 97606 - DNA, 25 bp, SARS Virus
ttagtttttctccactgaaaacacc

SEQ ID NO: 97607 - DNA, 25 bp, SARS Virus
tagtttttctcacctgaaaacacct

SEQ ID NO: 97608 - DNA, 25 bp, SARS Virus
agtttttctcaactgaaaacacctt

SEQ ID NO: 97609 - DNA, 25 bp, SARS Virus
gtttttctcaaccgaaaacaccttt

SEQ ID NO: 97610 - DNA, 25 bp, SARS Virus
tttttctcaactcaaaacacctttc

SEQ ID NO: 97611 - DNA, 25 bp, SARS Virus
ttttctcaactgcaaacacctttcc

SEQ ID NO: 97612 - DNA, 25 bp, SARS Virus
tttctcaactgacaacacctttccc

SEQ ID NO: 97613 - DNA, 25 bp, SARS Virus
ttctcaactgaacacacctttcccg

SEQ ID NO: 97614 - DNA, 25 bp, SARS Virus
tctcaactgaaaccacctttcccga

SEQ ID NO: 97615 - DNA, 25 bp, SARS Virus
ctcaactgaaaacacctttcccgat

SEQ ID NO: 97616 - DNA, 25 bp, SARS Virus
tcaactgaaaacccctttcccgatg

SEQ ID NO: 97617 - DNA, 25 bp, SARS Virus
caactgaaaacacctttcccgatgg

SEQ ID NO: 97618 - DNA, 25 bp, SARS Virus
aactgaaaacacctttcccgatggt

SEQ ID NO: 97619 - DNA, 25 bp, SARS Virus
actgaaaacacccttcccgatggtg

SEQ ID NO: 97620 - DNA, 25 bp, SARS Virus
ctgaaaacacctctcccgatggtgg

SEQ ID NO: 97621 - DNA, 25 bp, SARS Virus
tgaaaacaccttccccgatggtgga

SEQ ID NO: 97622 - DNA, 25 bp, SARS Virus
gaaaacacctttcccgatggtggaa

SEQ ID NO: 97623 - DNA, 25 bp, SARS Virus
aaaacacctttcccgatggtggaat

SEQ ID NO: 97624 - DNA, 25 bp, SARS Virus
aaacacctttcccgatggtggaata

SEQ ID NO: 97625 - DNA, 25 bp, SARS Virus
aacacctttccccatggtggaatac

SEQ ID NO: 97626 - DNA, 25 bp, SARS Virus
acacctttcccgctggtggaataca

SEQ ID NO: 97627 - DNA, 25 bp, SARS Virus
cacctttcccgacggtggaatacag

SEQ ID NO: 97628 - DNA, 25 bp, SARS Virus
acctttcccgatcgtggaatacagg

SEQ ID NO: 97629 - DNA, 25 bp, SARS Virus
cctttcccgatgctggaatacagga

SEQ ID NO: 97630 - DNA, 25 bp, SARS Virus
ctttcccgatggcggaatacaggaa

SEQ ID NO: 97631 - DNA, 25 bp, SARS Virus
tttcccgatggtcgaatacaggaag

SEQ ID NO: 97632 - DNA, 25 bp, SARS Virus
ttcccgatggtgcaatacaggaagg

SEQ ID NO: 97633 - DNA, 25 bp, SARS Virus
tcccgatggtggcatacaggaaggg

SEQ ID NO: 97634 - DNA, 25 bp, SARS Virus
cccgatggtggactacaggaagggt

SEQ ID NO: 97635 - DNA, 25 bp, SARS Virus
ccgatggtggaacacaggaagggtg

SEQ ID NO: 97636 - DNA, 25 bp, SARS Virus
cgatggtggaatccaggaagggtgt

SEQ ID NO: 97637 - DNA, 25 bp, SARS Virus
gatggtggaatacaggaagggtgtt

SEQ ID NO: 97638 - DNA, 25 bp, SARS Virus
atggtggaataccggaagggtgttc

SEQ ID NO: 97639 - DNA, 25 bp, SARS Virus
tggtggaatacacgaagggtgttcg

SEQ ID NO: 97640 - DNA, 25 bp, SARS Virus
ggtggaatacagcaagggtgttcgt

SEQ ID NO: 97641 - DNA, 25 bp, SARS Virus
gtggaatacaggcagggtgttcgtc

SEQ ID NO: 97642 - DNA, 25 bp, SARS Virus
tggaatacaggacgggtgttcgtcg

SEQ ID NO: 97643 - DNA, 25 bp, SARS Virus
ggaatacaggaacggtgttcgtcgg

SEQ ID NO: 97644 - DNA, 25 bp, SARS Virus
gaatacaggaagcgtgttcgtcggg

SEQ ID NO: 97645 - DNA, 25 bp, SARS Virus
aatacaggaaggctgttcgtcgggg

SEQ ID NO: 97646 - DNA, 25 bp, SARS Virus
atacaggaagggcgttcgtcggggc

SEQ ID NO: 97647 - DNA, 25 bp, SARS Virus
tacaggaagggtcttcgtcggggcg

SEQ ID NO: 97648 - DNA, 25 bp, SARS Virus
acaggaagggtgctcgtcggggcgt

SEQ ID NO: 97649 - DNA, 25 bp, SARS Virus
caggaagggtgtccgtcggggcgta

SEQ ID NO: 97650 - DNA, 25 bp, SARS Virus
aggaagggtgttcgtcggggcgtac

SEQ ID NO: 97651 - DNA, 25 bp, SARS Virus
ggaagggtgttcctcggggcgtacc

SEQ ID NO: 97652 - DNA, 25 bp, SARS Virus
gaagggtgttcgccggggcgtacca

SEQ ID NO: 97653 - DNA, 25 bp, SARS Virus
aagggtgttcgtcggggcgtaccac

SEQ ID NO: 97654 - DNA, 25 bp, SARS Virus
agggtgttcgtccgggcgtaccaca

SEQ ID NO: 97655 - DNA, 25 bp, SARS Virus
gggtgttcgtcgcggcgtaccacaa

SEQ ID NO: 97656 - DNA, 25 bp, SARS Virus
ggtgttcgtcggcgcgtaccacaac

SEQ ID NO: 97657 - DNA, 25 bp, SARS Virus
gtgttcgtcgggccgtaccacaaca

SEQ ID NO: 97658 - DNA, 25 bp, SARS Virus
tgttcgtcggggcgtaccacaacag

SEQ ID NO: 97659 - DNA, 25 bp, SARS Virus
gttcgtcggggcctaccacaacaga

SEQ ID NO: 97660 - DNA, 25 bp, SARS Virus
ttcgtcggggcgcaccacaacagaa

SEQ ID NO: 97661 - DNA, 25 bp, SARS Virus
tcgtcggggcgtcccacaacagaag

SEQ ID NO: 97662 - DNA, 25 bp, SARS Virus
cgtcggggcgtaccacaacagaagg

SEQ ID NO: 97663 - DNA, 25 bp, SARS Virus
gtcggggcgtaccacaacagaagga

SEQ ID NO: 97664 - DNA, 25 bp, SARS Virus
tcggggcgtaccccaacagaaggat

SEQ ID NO: 97665 - DNA, 25 bp, SARS Virus
cggggcgtaccacaacagaaggatg

SEQ ID NO: 97666 - DNA, 25 bp, SARS Virus
ggggcgtaccaccacagaaggatgt

SEQ ID NO: 97667 - DNA, 25 bp, SARS Virus
gggcgtaccacaccagaaggatgta

SEQ ID NO: 97668 - DNA, 25 bp, SARS Virus
ggcgtaccacaacagaaggatgtac

SEQ ID NO: 97669 - DNA, 25 bp, SARS Virus
gcgtaccacaaccgaaggatgtaca

SEQ ID NO: 97670 - DNA, 25 bp, SARS Virus
cgtaccacaacacaaggatgtacag

SEQ ID NO: 97671 - DNA, 25 bp, SARS Virus
gtaccacaacagcaggatgtacagt

SEQ ID NO: 97672 - DNA, 25 bp, SARS Virus
taccacaacagacggatgtacagtg

SEQ ID NO: 97673 - DNA, 25 bp, SARS Virus
accacaacagaacgatgtacagtgc

SEQ ID NO: 97674 - DNA, 25 bp, SARS Virus
ccacaacagaagcatgtacagtgca

SEQ ID NO: 97675 - DNA, 25 bp, SARS Virus
cacaacagaaggctgtacagtgcat

SEQ ID NO: 97676 - DNA, 25 bp, SARS Virus
acaacagaaggacgtacagtgcata

SEQ ID NO: 97677 - DNA, 25 bp, SARS Virus
caacagaaggatctacagtgcatac

SEQ ID NO: 97678 - DNA, 25 bp, SARS Virus
aacagaaggatgcacagtgcataca

SEQ ID NO: 97679 - DNA, 25 bp, SARS Virus
acagaaggatgtccagtgcatacac

SEQ ID NO: 97680 - DNA, 25 bp, SARS Virus
cagaaggatgtacagtgcatacacg

SEQ ID NO: 97681 - DNA, 25 bp, SARS Virus
agaaggatgtaccgtgcatacacgg

SEQ ID NO: 97682 - DNA, 25 bp, SARS Virus
gaaggatgtacactgcatacacggt

SEQ ID NO: 97683 - DNA, 25 bp, SARS Virus
aaggatgtacagcgcatacacggta

SEQ ID NO: 97684 - DNA, 25 bp, SARS Virus
aggatgtacagtccatacacggtag

SEQ ID NO: 97685 - DNA, 25 bp, SARS Virus
ggatgtacagtgcatacacggtagg

SEQ ID NO: 97686 - DNA, 25 bp, SARS Virus
gatgtacagtgcctacacggtaggg

SEQ ID NO: 97687 - DNA, 25 bp, SARS Virus
atgtacagtgcacacacggtagggt

SEQ ID NO: 97688 - DNA, 25 bp, SARS Virus
tgtacagtgcatccacggtagggtc

SEQ ID NO: 97689 - DNA, 25 bp, SARS Virus
gtacagtgcatacacggtagggtcc

SEQ ID NO: 97690 - DNA, 25 bp, SARS Virus
tacagtgcatacccggtagggtcct

SEQ ID NO: 97691 - DNA, 25 bp, SARS Virus
acagtgcatacacggtagggtcctc

SEQ ID NO: 97692 - DNA, 25 bp, SARS Virus
cagtgcatacaccgtagggtcctct

SEQ ID NO: 97693 - DNA, 25 bp, SARS Virus
agtgcatacacgctagggtcctctc

SEQ ID NO: 97694 - DNA, 25 bp, SARS Virus
gtgcatacacggcagggtcctctcc

SEQ ID NO: 97695 - DNA, 25 bp, SARS Virus
tgcatacacggtcgggtcctctcct

SEQ ID NO: 97696 - DNA, 25 bp, SARS Virus
gcatacacggtacggtcctctcctt

SEQ ID NO: 97697 - DNA, 25 bp, SARS Virus
catacacggtagcgtcctctccttg

SEQ ID NO: 97698 - DNA, 25 bp, SARS Virus
atacacggtaggctcctctccttga

SEQ ID NO: 97699 - DNA, 25 bp, SARS Virus
tacacggtagggccctctccttgaa

SEQ ID NO: 97700 - DNA, 25 bp, SARS Virus
acacggtagggtcctctccttgaag

SEQ ID NO: 97701 - DNA, 25 bp, SARS Virus
cacggtagggtcctctccttgaagt

SEQ ID NO: 97702 - DNA, 25 bp, SARS Virus
acggtagggtcccctccttgaagtg

SEQ ID NO: 97703 - DNA, 25 bp, SARS Virus
cggtagggtcctctccttgaagtgg

SEQ ID NO: 97704 - DNA, 25 bp, SARS Virus
ggtagggtcctccccttgaagtggt

SEQ ID NO: 97705 - DNA, 25 bp, SARS Virus
gtagggtcctctccttgaagtggtg

SEQ ID NO: 97706 - DNA, 25 bp, SARS Virus
tagggtcctctccttgaagtggtgt

SEQ ID NO: 97707 - DNA, 25 bp, SARS Virus
agggtcctctccctgaagtggtgtc

SEQ ID NO: 97708 - DNA, 25 bp, SARS Virus
gggtcctctcctcgaagtggtgtcg

SEQ ID NO: 97709 - DNA, 25 bp, SARS Virus
ggtcctctccttcaagtggtgtcgc

SEQ ID NO: 97710 - DNA, 25 bp, SARS Virus
gtcctctccttgcagtggtgtcgcg

SEQ ID NO: 97711 - DNA, 25 bp, SARS Virus
tcctctccttgacgtggtgtcgcgg

SEQ ID NO: 97712 - DNA, 25 bp, SARS Virus
cctctccttgaactggtgtcgcggt

SEQ ID NO: 97713 - DNA, 25 bp, SARS Virus
ctctccttgaagcggtgtcgcggtc

SEQ ID NO: 97714 - DNA, 25 bp, SARS Virus
tctccttgaagtcgtgtcgcggtcg

SEQ ID NO: 97715 - DNA, 25 bp, SARS Virus
ctccttgaagtgctgtcgcggtcgt

SEQ ID NO: 97716 - DNA, 25 bp, SARS Virus
tccttgaagtggcgtcgcggtcgtt

SEQ ID NO: 97717 - DNA, 25 bp, SARS Virus
ccttgaagtggtctcgcggtcgtta

SEQ ID NO: 97718 - DNA, 25 bp, SARS Virus
cttgaagtggtgccgcggtcgttaa

SEQ ID NO: 97719 - DNA, 25 bp, SARS Virus
ttgaagtggtgtcgcggtcgttaaa

SEQ ID NO: 97720 - DNA, 25 bp, SARS Virus
tgaagtggtgtcccggtcgttaaac

SEQ ID NO: 97721 - DNA, 25 bp, SARS Virus
gaagtggtgtcgcggtcgttaaaca

SEQ ID NO: 97722 - DNA, 25 bp, SARS Virus
aagtggtgtcgccgtcgttaaacag

SEQ ID NO: 97723 - DNA, 25 bp, SARS Virus
agtggtgtcgcgctcgttaaacagt

SEQ ID NO: 97724 - DNA, 25 bp, SARS Virus
gtggtgtcgcggccgttaaacagta

SEQ ID NO: 97725 - DNA, 25 bp, SARS Virus
tggtgtcgcggtcgttaaacagtac

SEQ ID NO: 97726 - DNA, 25 bp, SARS Virus
ggtgtcgcggtccttaaacagtact

SEQ ID NO: 97727 - DNA, 25 bp, SARS Virus
gtgtcgcggtcgctaaacagtactt

SEQ ID NO: 97728 - DNA, 25 bp, SARS Virus
tgtcgcggtcgtcaaacagtacttc

SEQ ID NO: 97729 - DNA, 25 bp, SARS Virus
acaagagatactgttggtttttgtt

SEQ ID NO: 97730 - DNA, 25 bp, SARS Virus
caagagatactcgtggtttttgttt

SEQ ID NO: 97731 - DNA, 25 bp, SARS Virus
aagagatactctgggtttttgttta

SEQ ID NO: 97732 - DNA, 25 bp, SARS Virus
agagatactcttggtttttgtttag

SEQ ID NO: 97733 - DNA, 25 bp, SARS Virus
gagatactcttggtttttgtttagc

SEQ ID NO: 97734 - DNA, 25 bp, SARS Virus
agatactcttgggttttgtttagcg

SEQ ID NO: 97735 - DNA, 25 bp, SARS Virus
gatactcttggtgtttgtttagcgg

SEQ ID NO: 97736 - DNA, 25 bp, SARS Virus
atactcttggttgttgtttagcggt

SEQ ID NO: 97737 - DNA, 25 bp, SARS Virus
tactcttggtttgtgtttagcggtt

SEQ ID NO: 97738 - DNA, 25 bp, SARS Virus
actcttggttttggtttagcggttg

SEQ ID NO: 97739 - DNA, 25 bp, SARS Virus
ctcttggtttttgtttagcggttgg

SEQ ID NO: 97740 - DNA, 25 bp, SARS Virus
tcttggtttttggttagcggttggt

SEQ ID NO: 97741 - DNA, 25 bp, SARS Virus
cttggtttttgtgtagcggttggtt

SEQ ID NO: 97742 - DNA, 25 bp, SARS Virus
ttggtttttgttgagcggttggtta

SEQ ID NO: 97743 - DNA, 25 bp, SARS Virus
tggtttttgtttggcggttggttaa

SEQ ID NO: 97744 - DNA, 25 bp, SARS Virus
ggtttttgtttagcggttggttaaa

SEQ ID NO: 97745 - DNA, 25 bp, SARS Virus
gtttttgtttaggggttggttaaat

SEQ ID NO: 97746 - DNA, 25 bp, SARS Virus
tttttgtttagcggttggttaaatt

SEQ ID NO: 97747 - DNA, 25 bp, SARS Virus
ttttgtttagcggttggttaaattg

SEQ ID NO: 97748 - DNA, 25 bp, SARS Virus
tttgtttagcgggtggttaaattgt

SEQ ID NO: 97749 - DNA, 25 bp, SARS Virus
ttgtttagcggtgggttaaattgtt

SEQ ID NO: 97750 - DNA, 25 bp, SARS Virus
tgtttagcggttggttaaattgttc

SEQ ID NO: 97751 - DNA, 25 bp, SARS Virus
gtttagcggttggttaaattgttcc

SEQ ID NO: 97752 - DNA, 25 bp, SARS Virus
tttagcggttgggtaaattgttccg

SEQ ID NO: 97753 - DNA, 25 bp, SARS Virus
ttagcggttggtgaaattgttccgc

SEQ ID NO: 97754 - DNA, 25 bp, SARS Virus
tagcggttggttgaattgttccgct

SEQ ID NO: 97755 - DNA, 25 bp, SARS Virus
agcggttggttagattgttccgcta

SEQ ID NO: 97756 - DNA, 25 bp, SARS Virus
gcggttggttaagttgttccgctaa

SEQ ID NO: 97757 - DNA, 25 bp, SARS Virus
cggttggttaaagtgttccgctaat

SEQ ID NO: 97758 - DNA, 25 bp, SARS Virus
ggttggttaaatggttccgctaatc

SEQ ID NO: 97759 - DNA, 25 bp, SARS Virus
gttggttaaattgttccgctaatca

SEQ ID NO: 97760 - DNA, 25 bp, SARS Virus
ttggttaaattggtccgctaatcag

SEQ ID NO: 97761 - DNA, 25 bp, SARS Virus
tggttaaattgtgccgctaatcagt

SEQ ID NO: 97762 - DNA, 25 bp, SARS Virus
ggttaaattgttgcgctaatcagtt

SEQ ID NO: 97763 - DNA, 25 bp, SARS Virus
gttaaattgttcggctaatcagttt

SEQ ID NO: 97764 - DNA, 25 bp, SARS Virus
ttaaattgttccgctaatcagttta

SEQ ID NO: 97765 - DNA, 25 bp, SARS Virus
taaattgttccggtaatcagtttaa

SEQ ID NO: 97766 - DNA, 25 bp, SARS Virus
aaattgttccgcgaatcagtttaag

SEQ ID NO: 97767 - DNA, 25 bp, SARS Virus
aattgttccgctgatcagtttaagt

SEQ ID NO: 97768 - DNA, 25 bp, SARS Virus
attgttccgctagtcagtttaagtt

SEQ ID NO: 97769 - DNA, 25 bp, SARS Virus
ttgttccgctaagcagtttaagttc

SEQ ID NO: 97770 - DNA, 25 bp, SARS Virus
tgttccgctaatgagtttaagttct

SEQ ID NO: 97771 - DNA, 25 bp, SARS Virus
gttccgctaatcggtttaagttctt

SEQ ID NO: 97772 - DNA, 25 bp, SARS Virus
ttccgctaatcagtttaagttctta

SEQ ID NO: 97773 - DNA, 25 bp, SARS Virus
tccgctaatcaggttaagttcttag

SEQ ID NO: 97774 - DNA, 25 bp, SARS Virus
ccgctaatcagtgtaagttcttagt

SEQ ID NO: 97775 - DNA, 25 bp, SARS Virus
cgctaatcagttgaagttcttagtg

SEQ ID NO: 97776 - DNA, 25 bp, SARS Virus
gctaatcagtttgagttcttagtga

SEQ ID NO: 97777 - DNA, 25 bp, SARS Virus
ctaatcagtttaggttcttagtgaa

SEQ ID NO: 97778 - DNA, 25 bp, SARS Virus
taatcagtttaagttcttagtgaat

SEQ ID NO: 97779 - DNA, 25 bp, SARS Virus
aatcagtttaaggtcttagtgaatg

SEQ ID NO: 97780 - DNA, 25 bp, SARS Virus
atcagtttaagtgcttagtgaatgt

SEQ ID NO: 97781 - DNA, 25 bp, SARS Virus
tcagtttaagttgttagtgaatgtt

SEQ ID NO: 97782 - DNA, 25 bp, SARS Virus
cagtttaagttcgtagtgaatgttg

SEQ ID NO: 97783 - DNA, 25 bp, SARS Virus
agtttaagttctgagtgaatgttgt

SEQ ID NO: 97784 - DNA, 25 bp, SARS Virus
gtttaagttcttggtgaatgttgtt

SEQ ID NO: 97785 - DNA, 25 bp, SARS Virus
tttaagttcttagtgaatgttgttg

SEQ ID NO: 97786 - DNA, 25 bp, SARS Virus
ttaagttcttagggaatgttgttgt

SEQ ID NO: 97787 - DNA, 25 bp, SARS Virus
taagttcttagtgaatgttgttgta

SEQ ID NO: 97788 - DNA, 25 bp, SARS Virus
aagttcttagtggatgttgttgtag

SEQ ID NO: 97789 - DNA, 25 bp, SARS Virus
agttcttagtgagtgttgttgtagt

SEQ ID NO: 97790 - DNA, 25 bp, SARS Virus
gttcttagtgaaggttgttgtagtt

SEQ ID NO: 97791 - DNA, 25 bp, SARS Virus
ttcttagtgaatgttgttgtagttg

SEQ ID NO: 97792 - DNA, 25 bp, SARS Virus
tcttagtgaatggtgttgtagttga

SEQ ID NO: 97793 - DNA, 25 bp, SARS Virus
cttagtgaatgtggttgtagttgac

SEQ ID NO: 97794 - DNA, 25 bp, SARS Virus
ttagtgaatgttgttgtagttgacg

SEQ ID NO: 97795 - DNA, 25 bp, SARS Virus
tagtgaatgttggtgtagttgacgt

SEQ ID NO: 97796 - DNA, 25 bp, SARS Virus
agtgaatgttgtggtagttgacgta

SEQ ID NO: 97797 - DNA, 25 bp, SARS Virus
gtgaatgttgttgtagttgacgtaa

SEQ ID NO: 97798 - DNA, 25 bp, SARS Virus
tgaatgttgttggagttgacgtaac

SEQ ID NO: 97799 - DNA, 25 bp, SARS Virus
gaatgttgttgtggttgacgtaacc

SEQ ID NO: 97800 - DNA, 25 bp, SARS Virus
aatgttgttgtagttgacgtaaccc

SEQ ID NO: 97801 - DNA, 25 bp, SARS Virus
atgttgttgtaggtgacgtaacccg

SEQ ID NO: 97802 - DNA, 25 bp, SARS Virus
tgttgttgtagtggacgtaacccgt

SEQ ID NO: 97803 - DNA, 25 bp, SARS Virus
gttgttgtagttgacgtaacccgtt

SEQ ID NO: 97804 - DNA, 25 bp, SARS Virus
ttgttgtagttggcgtaacccgttc

SEQ ID NO: 97805 - DNA, 25 bp, SARS Virus
tgttgtagttgaggtaacccgttcg

SEQ ID NO: 97806 - DNA, 25 bp, SARS Virus
gttgtagttgacgtaacccgttcga

SEQ ID NO: 97807 - DNA, 25 bp, SARS Virus
ttgtagttgacggaacccgttcgac

SEQ ID NO: 97808 - DNA, 25 bp, SARS Virus
tgtagttgacgtgacccgttcgacg

SEQ ID NO: 97809 - DNA, 25 bp, SARS Virus
gtagttgacgtagcccgttcgacgt

SEQ ID NO: 97810 - DNA, 25 bp, SARS Virus
tagttgacgtaagccgttcgacgtt

SEQ ID NO: 97811 - DNA, 25 bp, SARS Virus
agttgacgtaacgcgttcgacgttc

SEQ ID NO: 97812 - DNA, 25 bp, SARS Virus
gttgacgtaaccggttcgacgttct

SEQ ID NO: 97813 - DNA, 25 bp, SARS Virus
ttgacgtaacccgttcgacgttctg

SEQ ID NO: 97814 - DNA, 25 bp, SARS Virus
tgacgtaacccggtcgacgttctgc

SEQ ID NO: 97815 - DNA, 25 bp, SARS Virus
gacgtaacccgtgcgacgttctgca

SEQ ID NO: 97816 - DNA, 25 bp, SARS Virus
acgtaacccgttggacgttctgcaa

SEQ ID NO: 97817 - DNA, 25 bp, SARS Virus
cgtaacccgttcgacgttctgcaac

SEQ ID NO: 97818 - DNA, 25 bp, SARS Virus
gtaacccgttcggcgttctgcaaca

SEQ ID NO: 97819 - DNA, 25 bp, SARS Virus
taacccgttcgaggttctgcaacaa

SEQ ID NO: 97820 - DNA, 25 bp, SARS Virus
aacccgttcgacgttctgcaacaat

SEQ ID NO: 97821 - DNA, 25 bp, SARS Virus
acccgttcgacggtctgcaacaatt

SEQ ID NO: 97822 - DNA, 25 bp, SARS Virus
cccgttcgacgtgctgcaacaattg

SEQ ID NO: 97823 - DNA, 25 bp, SARS Virus
ccgttcgacgttgtgcaacaattgg

SEQ ID NO: 97824 - DNA, 25 bp, SARS Virus
cgttcgacgttcggcaacaattggt

SEQ ID NO: 97825 - DNA, 25 bp, SARS Virus
gttcgacgttctgcaacaattggtc

SEQ ID NO: 97826 - DNA, 25 bp, SARS Virus
ttcgacgttctggaacaattggtct

SEQ ID NO: 97827 - DNA, 25 bp, SARS Virus
tcgacgttctgcgacaattggtctt

SEQ ID NO: 97828 - DNA, 25 bp, SARS Virus
cgacgttctgcagcaattggtctta

SEQ ID NO: 97829 - DNA, 25 bp, SARS Virus
gacgttctgcaagaattggtcttac

SEQ ID NO: 97830 - DNA, 25 bp, SARS Virus
acgttctgcaacgattggtcttacg

SEQ ID NO: 97831 - DNA, 25 bp, SARS Virus
cgttctgcaacagttggtcttacga

SEQ ID NO: 97832 - DNA, 25 bp, SARS Virus
gttctgcaacaagtggtcttacgag

SEQ ID NO: 97833 - DNA, 25 bp, SARS Virus
ttctgcaacaatgggtcttacgagt

SEQ ID NO: 97834 - DNA, 25 bp, SARS Virus
tctgcaacaattggtcttacgagtt

SEQ ID NO: 97835 - DNA, 25 bp, SARS Virus
ctgcaacaattggtcttacgagttc

SEQ ID NO: 97836 - DNA, 25 bp, SARS Virus
tgcaacaattgggcttacgagttcg

SEQ ID NO: 97837 - DNA, 25 bp, SARS Virus
gcaacaattggtgttacgagttcgt

SEQ ID NO: 97838 - DNA, 25 bp, SARS Virus
caacaattggtcgtacgagttcgta

SEQ ID NO: 97839 - DNA, 25 bp, SARS Virus
aacaattggtctgacgagttcgtaa

SEQ ID NO: 97840 - DNA, 25 bp, SARS Virus
acaattggtcttgcgagttcgtaat

SEQ ID NO: 97841 - DNA, 25 bp, SARS Virus
caattggtcttaggagttcgtaatt

SEQ ID NO: 97842 - DNA, 25 bp, SARS Virus
aattggtcttacgagttcgtaattt

SEQ ID NO: 97843 - DNA, 25 bp, SARS Virus
attggtcttacgggttcgtaatttg

SEQ ID NO: 97844 - DNA, 25 bp, SARS Virus
ttggtcttacgagttcgtaatttgt

SEQ ID NO: 97845 - DNA, 25 bp, SARS Virus
tggtcttacgaggtcgtaatttgtg

SEQ ID NO: 97846 - DNA, 25 bp, SARS Virus
ggtcttacgagtgcgtaatttgtgt

SEQ ID NO: 97847 - DNA, 25 bp, SARS Virus
gtcttacgagttggtaatttgtgtg

SEQ ID NO: 97848 - DNA, 25 bp, SARS Virus
tcttacgagttcgtaatttgtgtga

SEQ ID NO: 97849 - DNA, 25 bp, SARS Virus
cttacgagttcggaatttgtgtgaa

SEQ ID NO: 97850 - DNA, 25 bp, SARS Virus
ttacgagttcgtgatttgtgtgaac

SEQ ID NO: 97851 - DNA, 25 bp, SARS Virus
tacgagttcgtagtttgtgtgaaca

SEQ ID NO: 97852 - DNA, 25 bp, SARS Virus
acgagttcgtaagttgtgtgaacaa

SEQ ID NO: 97853 - DNA, 25 bp, SARS Virus
cgagttcgtaatgtgtgtgaacaat

SEQ ID NO: 97854 - DNA, 25 bp, SARS Virus
gagttcgtaattggtgtgaacaatt

SEQ ID NO: 97855 - DNA, 25 bp, SARS Virus
agttcgtaatttgtgtgaacaattt

SEQ ID NO: 97856 - DNA, 25 bp, SARS Virus
gttcgtaatttgggtgaacaatttg

SEQ ID NO: 97857 - DNA, 25 bp, SARS Virus
ttcgtaatttgtgtgaacaatttgt

SEQ ID NO: 97858 - DNA, 25 bp, SARS Virus
tcgtaatttgtgggaacaatttgtt

SEQ ID NO: 97859 - DNA, 25 bp, SARS Virus
cgtaatttgtgtgaacaatttgttg

SEQ ID NO: 97860 - DNA, 25 bp, SARS Virus
gtaatttgtgtggacaatttgttga

SEQ ID NO: 97861 - DNA, 25 bp, SARS Virus
taatttgtgtgagcaatttgttgaa

SEQ ID NO: 97862 - DNA, 25 bp, SARS Virus
aatttgtgtgaagaatttgttgaat

SEQ ID NO: 97863 - DNA, 25 bp, SARS Virus
atttgtgtgaacgatttgttgaatc

SEQ ID NO: 97864 - DNA, 25 bp, SARS Virus
tttgtgtgaacagtttgttgaatcg

SEQ ID NO: 97865 - DNA, 25 bp, SARS Virus
ttgtgtgaacaagttgttgaatcga

SEQ ID NO: 97866 - DNA, 25 bp, SARS Virus
tgtgtgaacaatgtgttgaatcgag

SEQ ID NO: 97867 - DNA, 25 bp, SARS Virus
gtgtgaacaattggttgaatcgaga

SEQ ID NO: 97868 - DNA, 25 bp, SARS Virus
tgtgaacaatttgttgaatcgagat

SEQ ID NO: 97869 - DNA, 25 bp, SARS Virus
gtgaacaatttggtgaatcgagatt

SEQ ID NO: 97870 - DNA, 25 bp, SARS Virus
tgaacaatttgtggaatcgagatta

SEQ ID NO: 97871 - DNA, 25 bp, SARS Virus
gaacaatttgttgaatcgagattaa

SEQ ID NO: 97872 - DNA, 25 bp, SARS Virus
aacaatttgttggatcgagattaaa

SEQ ID NO: 97873 - DNA, 25 bp, SARS Virus
acaatttgttgagtcgagattaaaa

SEQ ID NO: 97874 - DNA, 25 bp, SARS Virus
caatttgttgaagcgagattaaaac

SEQ ID NO: 97875 - DNA, 25 bp, SARS Virus
aatttgttgaatggagattaaaacc

SEQ ID NO: 97876 - DNA, 25 bp, SARS Virus
atttgttgaatcgagattaaaacca

SEQ ID NO: 97877 - DNA, 25 bp, SARS Virus
tttgttgaatcgggattaaaaccac

SEQ ID NO: 97878 - DNA, 25 bp, SARS Virus
ttgttgaatcgagattaaaaccacg

SEQ ID NO: 97879 - DNA, 25 bp, SARS Virus
tgttgaatcgaggttaaaaccacgt

SEQ ID NO: 97880 - DNA, 25 bp, SARS Virus
gttgaatcgagagtaaaaccacgtt

SEQ ID NO: 97881 - DNA, 25 bp, SARS Virus
ttgaatcgagatgaaaaccacgtta

SEQ ID NO: 97882 - DNA, 25 bp, SARS Virus
tgaatcgagattgaaaccacgttaa

SEQ ID NO: 97883 - DNA, 25 bp, SARS Virus
gaatcgagattagaaccacgttaaa

SEQ ID NO: 97884 - DNA, 25 bp, SARS Virus
aatcgagattaagaccacgttaaag

SEQ ID NO: 97885 - DNA, 25 bp, SARS Virus
atcgagattaaagccacgttaaagt

SEQ ID NO: 97886 - DNA, 25 bp, SARS Virus
tcgagattaaaagcacgttaaagtt

SEQ ID NO: 97887 - DNA, 25 bp, SARS Virus
cgagattaaaacgacgttaaagttc

SEQ ID NO: 97888 - DNA, 25 bp, SARS Virus
gagattaaaaccgcgttaaagttca

SEQ ID NO: 97889 - DNA, 25 bp, SARS Virus
agattaaaaccaggttaaagttcac

SEQ ID NO: 97890 - DNA, 25 bp, SARS Virus
gattaaaaccacgttaaagttcaca

SEQ ID NO: 97891 - DNA, 25 bp, SARS Virus
attaaaaccacggtaaagttcacac

SEQ ID NO: 97892 - DNA, 25 bp, SARS Virus
ttaaaaccacgtgaaagttcacacg

SEQ ID NO: 97893 - DNA, 25 bp, SARS Virus
taaaaccacgttgaagttcacacga

SEQ ID NO: 97894 - DNA, 25 bp, SARS Virus
aaaaccacgttagagttcacacgat

SEQ ID NO: 97895 - DNA, 25 bp, SARS Virus
aaaccacgttaaggttcacacgatt

SEQ ID NO: 97896 - DNA, 25 bp, SARS Virus
aaccacgttaaagttcacacgattt

SEQ ID NO: 97897 - DNA, 25 bp, SARS Virus
accacgttaaaggtcacacgattta

SEQ ID NO: 97898 - DNA, 25 bp, SARS Virus
ccacgttaaagtgcacacgatttac

SEQ ID NO: 97899 - DNA, 25 bp, SARS Virus
cacgttaaagttgacacgatttact

SEQ ID NO: 97900 - DNA, 25 bp, SARS Virus
acgttaaagttcgcacgatttacta

SEQ ID NO: 97901 - DNA, 25 bp, SARS Virus
cgttaaagttcagacgatttactat

SEQ ID NO: 97902 - DNA, 25 bp, SARS Virus
gttaaagttcacgcgatttactata

SEQ ID NO: 97903 - DNA, 25 bp, SARS Virus
ttaaagttcacaggatttactatag

SEQ ID NO: 97904 - DNA, 25 bp, SARS Virus
taaagttcacacgatttactatagg

SEQ ID NO: 97905 - DNA, 25 bp, SARS Virus
aaagttcacacggtttactatagga

SEQ ID NO: 97906 - DNA, 25 bp, SARS Virus
aagttcacacgagttactataggaa

SEQ ID NO: 97907 - DNA, 25 bp, SARS Virus
agttcacacgatgtactataggaaa

SEQ ID NO: 97908 - DNA, 25 bp, SARS Virus
gttcacacgattgactataggaaag

SEQ ID NO: 97909 - DNA, 25 bp, SARS Virus
ttcacacgatttgctataggaaagc

SEQ ID NO: 97910 - DNA, 25 bp, SARS Virus
tcacacgatttagtataggaaagcg

SEQ ID NO: 97911 - DNA, 25 bp, SARS Virus
cacacgatttacgataggaaagcgc

SEQ ID NO: 97912 - DNA, 25 bp, SARS Virus
acacgatttactgtaggaaagcgct

SEQ ID NO: 97913 - DNA, 25 bp, SARS Virus
cacgatttactagaggaaagcgctg

SEQ ID NO: 97914 - DNA, 25 bp, SARS Virus
acgatttactatgggaaagcgctga

SEQ ID NO: 97915 - DNA, 25 bp, SARS Virus
cgatttactataggaaagcgctgaa

SEQ ID NO: 97916 - DNA, 25 bp, SARS Virus
gatttactataggaaagcgctgaac

SEQ ID NO: 97917 - DNA, 25 bp, SARS Virus
atttactatagggaagcgctgaact

SEQ ID NO: 97918 - DNA, 25 bp, SARS Virus
tttactataggagagcgctgaacta

SEQ ID NO: 97919 - DNA, 25 bp, SARS Virus
ttactataggaaggcgctgaactat

SEQ ID NO: 97920 - DNA, 25 bp, SARS Virus
tactataggaaagcgctgaactatt

SEQ ID NO: 97921 - DNA, 25 bp, SARS Virus
actataggaaagggctgaactattt

SEQ ID NO: 97922 - DNA, 25 bp, SARS Virus
ctataggaaagcgctgaactatttc

SEQ ID NO: 97923 - DNA, 25 bp, SARS Virus
tataggaaagcggtgaactatttca

SEQ ID NO: 97924 - DNA, 25 bp, SARS Virus
ataggaaagcgcggaactatttcag

SEQ ID NO: 97925 - DNA, 25 bp, SARS Virus
taggaaagcgctgaactatttcagc

SEQ ID NO: 97926 - DNA, 25 bp, SARS Virus
aggaaagcgctggactatttcagct

SEQ ID NO: 97927 - DNA, 25 bp, SARS Virus
ggaaagcgctgagctatttcagctc

SEQ ID NO: 97928 - DNA, 25 bp, SARS Virus
gaaagcgctgaagtatttcagctcc

SEQ ID NO: 97929 - DNA, 25 bp, SARS Virus
aaagcgctgaacgatttcagctccg

SEQ ID NO: 97930 - DNA, 25 bp, SARS Virus
aagcgctgaactgtttcagctccgc

SEQ ID NO: 97931 - DNA, 25 bp, SARS Virus
agcgctgaactagttcagctccgcc

SEQ ID NO: 97932 - DNA, 25 bp, SARS Virus
gcgctgaactatgtcagctccgcct

SEQ ID NO: 97933 - DNA, 25 bp, SARS Virus
cgctgaactattgcagctccgcctc

SEQ ID NO: 97934 - DNA, 25 bp, SARS Virus
gctgaactatttgagctccgcctcc

SEQ ID NO: 97935 - DNA, 25 bp, SARS Virus
ctgaactatttcggctccgcctcca

SEQ ID NO: 97936 - DNA, 25 bp, SARS Virus
tgaactatttcagctccgcctccat

SEQ ID NO: 97937 - DNA, 25 bp, SARS Virus
gaactatttcaggtccgcctccatg

SEQ ID NO: 97938 - DNA, 25 bp, SARS Virus
aactatttcagcgccgcctccatgt

SEQ ID NO: 97939 - DNA, 25 bp, SARS Virus
actatttcagctgcgcctccatgtt

SEQ ID NO: 97940 - DNA, 25 bp, SARS Virus
ctatttcagctcggcctccatgttt

SEQ ID NO: 97941 - DNA, 25 bp, SARS Virus
tatttcagctccgcctccatgttta

SEQ ID NO: 97942 - DNA, 25 bp, SARS Virus
atttcagctccggctccatgtttaa

SEQ ID NO: 97943 - DNA, 25 bp, SARS Virus
tttcagctccgcgtccatgtttaac

SEQ ID NO: 97944 - DNA, 25 bp, SARS Virus
ttcagctccgccgccatgtttaact

SEQ ID NO: 97945 - DNA, 25 bp, SARS Virus
tcagctccgcctgcatgtttaactg

SEQ ID NO: 97946 - DNA, 25 bp, SARS Virus
cagctccgcctcgatgtttaactgt

SEQ ID NO: 97947 - DNA, 25 bp, SARS Virus
agctccgcctccgtgtttaactgtc

SEQ ID NO: 97948 - DNA, 25 bp, SARS Virus
gctccgcctccaggtttaactgtcc

SEQ ID NO: 97949 - DNA, 25 bp, SARS Virus
ctccgcctccatgtttaactgtcca

SEQ ID NO: 97950 - DNA, 25 bp, SARS Virus
tccgcctccatggttaactgtccaa

SEQ ID NO: 97951 - DNA, 25 bp, SARS Virus
ccgcctccatgtgtaactgtccaat

SEQ ID NO: 97952 - DNA, 25 bp, SARS Virus
cgcctccatgttgaactgtccaatt

SEQ ID NO: 97953 - DNA, 25 bp, SARS Virus
gcctccatgtttgactgtccaatta

SEQ ID NO: 97954 - DNA, 25 bp, SARS Virus
cctccatgtttagctgtccaattaa

SEQ ID NO: 97955 - DNA, 25 bp, SARS Virus
ctccatgtttaagtgtccaattaat

SEQ ID NO: 97956 - DNA, 25 bp, SARS Virus
tccatgtttaacggtccaattaatg

SEQ ID NO: 97957 - DNA, 25 bp, SARS Virus
ccatgtttaactgtccaattaatgt

SEQ ID NO: 97958 - DNA, 25 bp, SARS Virus
catgtttaactggccaattaatgtc

SEQ ID NO: 97959 - DNA, 25 bp, SARS Virus
atgtttaactgtgcaattaatgtcc

SEQ ID NO: 97960 - DNA, 25 bp, SARS Virus
tgtttaactgtcgaattaatgtccg

SEQ ID NO: 97961 - DNA, 25 bp, SARS Virus
gtttaactgtccgattaatgtccgt

SEQ ID NO: 97962 - DNA, 25 bp, SARS Virus
tttaactgtccagttaatgtccgtc

SEQ ID NO: 97963 - DNA, 25 bp, SARS Virus
ttaactgtccaagtaatgtccgtct

SEQ ID NO: 97964 - DNA, 25 bp, SARS Virus
taactgtccaatgaatgtccgtctg

SEQ ID NO: 97965 - DNA, 25 bp, SARS Virus
aactgtccaattgatgtccgtctga

SEQ ID NO: 97966 - DNA, 25 bp, SARS Virus
actgtccaattagtgtccgtctgaa

SEQ ID NO: 97967 - DNA, 25 bp, SARS Virus
ctgtccaattaaggtccgtctgaag

SEQ ID NO: 97968 - DNA, 25 bp, SARS Virus
tgtccaattaatgtccgtctgaagt

SEQ ID NO: 97969 - DNA, 25 bp, SARS Virus
gtccaattaatggccgtctgaagtt

SEQ ID NO: 97970 - DNA, 25 bp, SARS Virus
tccaattaatgtgcgtctgaagttt

SEQ ID NO: 97971 - DNA, 25 bp, SARS Virus
ccaattaatgtcggtctgaagtttc

SEQ ID NO: 97972 - DNA, 25 bp, SARS Virus
caattaatgtccgtctgaagtttcg

SEQ ID NO: 97973 - DNA, 25 bp, SARS Virus
aattaatgtccggctgaagtttcgg

SEQ ID NO: 97974 - DNA, 25 bp, SARS Virus
attaatgtccgtgtgaagtttcgga

SEQ ID NO: 97975 - DNA, 25 bp, SARS Virus
ttaatgtccgtcggaagtttcggaa

SEQ ID NO: 97976 - DNA, 25 bp, SARS Virus
taatgtccgtctgaagtttcggaag

SEQ ID NO: 97977 - DNA, 25 bp, SARS Virus
aatgtccgtctggagtttcggaagt

SEQ ID NO: 97978 - DNA, 25 bp, SARS Virus
atgtccgtctgaggtttcggaagtt

SEQ ID NO: 97979 - DNA, 25 bp, SARS Virus
tgtccgtctgaagtttcggaagttt

SEQ ID NO: 97980 - DNA, 25 bp, SARS Virus
gtccgtctgaaggttcggaagtttg

SEQ ID NO: 97981 - DNA, 25 bp, SARS Virus
tccgtctgaagtgtcggaagtttgg

SEQ ID NO: 97982 - DNA, 25 bp, SARS Virus
ccgtctgaagttgcggaagtttgga

SEQ ID NO: 97983 - DNA, 25 bp, SARS Virus
cgtctgaagtttgggaagtttggat

SEQ ID NO: 97984 - DNA, 25 bp, SARS Virus
gtctgaagtttcggaagtttggata

SEQ ID NO: 97985 - DNA, 25 bp, SARS Virus
tctgaagtttcggaagtttggatac

SEQ ID NO: 97986 - DNA, 25 bp, SARS Virus
ctgaagtttcgggagtttggataca

SEQ ID NO: 97987 - DNA, 25 bp, SARS Virus
tgaagtttcggaggtttggatacat

SEQ ID NO: 97988 - DNA, 25 bp, SARS Virus
gaagtttcggaagtttggatacatt

SEQ ID NO: 97989 - DNA, 25 bp, SARS Virus
aagtttcggaaggttggatacattg

SEQ ID NO: 97990 - DNA, 25 bp, SARS Virus
agtttcggaagtgtggatacattgt

SEQ ID NO: 97991 - DNA, 25 bp, SARS Virus
gtttcggaagttgggatacattgtg

SEQ ID NO: 97992 - DNA, 25 bp, SARS Virus
tttcggaagtttggatacattgtgt

SEQ ID NO: 97993 - DNA, 25 bp, SARS Virus
ttcggaagtttggatacattgtgtt

SEQ ID NO: 97994 - DNA, 25 bp, SARS Virus
tcggaagtttgggtacattgtgttg

SEQ ID NO: 97995 - DNA, 25 bp, SARS Virus
cggaagtttggagacattgtgttgt

SEQ ID NO: 97996 - DNA, 25 bp, SARS Virus
ggaagtttggatgcattgtgttgtt

SEQ ID NO: 97997 - DNA, 25 bp, SARS Virus
gaagtttggatagattgtgttgttg

SEQ ID NO: 97998 - DNA, 25 bp, SARS Virus
aagtttggatacgttgtgttgttga

SEQ ID NO: 97999 - DNA, 25 bp, SARS Virus
agtttggatacagtgtgttgttgat

SEQ ID NO: 98000 - DNA, 25 bp, SARS Virus
gtttggatacatggtgttgttgatt

SEQ ID NO: 98001 - DNA, 25 bp, SARS Virus
tttggatacattgtgttgttgatta

SEQ ID NO: 98002 - DNA, 25 bp, SARS Virus
ttggatacattgggttgttgattag

SEQ ID NO: 98003 - DNA, 25 bp, SARS Virus
tggatacattgtgttgttgattagt

SEQ ID NO: 98004 - DNA, 25 bp, SARS Virus
ggatacattgtggtgttgattagtc

SEQ ID NO: 98005 - DNA, 25 bp, SARS Virus
gatacattgtgtggttgattagtcc

SEQ ID NO: 98006 - DNA, 25 bp, SARS Virus
atacattgtgttgttgattagtccc

SEQ ID NO: 98007 - DNA, 25 bp, SARS Virus
tacattgtgttggtgattagtcccg

SEQ ID NO: 98008 - DNA, 25 bp, SARS Virus
acattgtgttgtggattagtcccga

SEQ ID NO: 98009 - DNA, 25 bp, SARS Virus
cattgtgttgttgattagtcccgac

SEQ ID NO: 98010 - DNA, 25 bp, SARS Virus
attgtgttgttggttagtcccgacg

SEQ ID NO: 98011 - DNA, 25 bp, SARS Virus
ttgtgttgttgagtagtcccgacga

SEQ ID NO: 98012 - DNA, 25 bp, SARS Virus
tgtgttgttgatgagtcccgacgac

SEQ ID NO: 98013 - DNA, 25 bp, SARS Virus
gtgttgttgattggtcccgacgact

SEQ ID NO: 98014 - DNA, 25 bp, SARS Virus
tgttgttgattagtcccgacgactt

SEQ ID NO: 98015 - DNA, 25 bp, SARS Virus
gttgttgattaggcccgacgacttt

SEQ ID NO: 98016 - DNA, 25 bp, SARS Virus
ttgttgattagtgccgacgacttta

SEQ ID NO: 98017 - DNA, 25 bp, SARS Virus
tgttgattagtcgcgacgactttag

SEQ ID NO: 98018 - DNA, 25 bp, SARS Virus
gttgattagtccggacgactttagt

SEQ ID NO: 98019 - DNA, 25 bp, SARS Virus
ttgattagtcccgacgactttagtc

SEQ ID NO: 98020 - DNA, 25 bp, SARS Virus
tgattagtcccggcgactttagtcc

SEQ ID NO: 98021 - DNA, 25 bp, SARS Virus
gattagtcccgaggactttagtccc

SEQ ID NO: 98022 - DNA, 25 bp, SARS Virus
attagtcccgacgactttagtcccg

SEQ ID NO: 98023 - DNA, 25 bp, SARS Virus
ttagtcccgacggctttagtcccga

SEQ ID NO: 98024 - DNA, 25 bp, SARS Virus
tagtcccgacgagtttagtcccgaa

SEQ ID NO: 98025 - DNA, 25 bp, SARS Virus
agtcccgacgacgttagtcccgaag

SEQ ID NO: 98026 - DNA, 25 bp, SARS Virus
gtcccgacgactgtagtcccgaaga

SEQ ID NO: 98027 - DNA, 25 bp, SARS Virus
tcccgacgacttgagtcccgaagac

SEQ ID NO: 98028 - DNA, 25 bp, SARS Virus
cccgacgactttggtcccgaagacg

SEQ ID NO: 98029 - DNA, 25 bp, SARS Virus
ccgacgactttagtcccgaagacga

SEQ ID NO: 98030 - DNA, 25 bp, SARS Virus
cgacgactttaggcccgaagacgat

SEQ ID NO: 98031 - DNA, 25 bp, SARS Virus
gacgactttagtgccgaagacgatt

SEQ ID NO: 98032 - DNA, 25 bp, SARS Virus
acgactttagtcgcgaagacgatta

SEQ ID NO: 98033 - DNA, 25 bp, SARS Virus
cgactttagtccggaagacgattag

SEQ ID NO: 98034 - DNA, 25 bp, SARS Virus
gactttagtcccgaagacgattaga

SEQ ID NO: 98035 - DNA, 25 bp, SARS Virus
actttagtcccggagacgattagaa

SEQ ID NO: 98036 - DNA, 25 bp, SARS Virus
ctttagtcccgaggacgattagaac

SEQ ID NO: 98037 - DNA, 25 bp, SARS Virus
tttagtcccgaagacgattagaacg

SEQ ID NO: 98038 - DNA, 25 bp, SARS Virus
ttagtcccgaaggcgattagaacga

SEQ ID NO: 98039 - DNA, 25 bp, SARS Virus
tagtcccgaagaggattagaacgac

SEQ ID NO: 98040 - DNA, 25 bp, SARS Virus
agtcccgaagacgattagaacgacg

SEQ ID NO: 98041 - DNA, 25 bp, SARS Virus
gtcccgaagacggttagaacgacga

SEQ ID NO: 98042 - DNA, 25 bp, SARS Virus
tcccgaagacgagtagaacgacgat

SEQ ID NO: 98043 - DNA, 25 bp, SARS Virus
cccgaagacgatgagaacgacgatg

SEQ ID NO: 98044 - DNA, 25 bp, SARS Virus
ccgaagacgattggaacgacgatga

SEQ ID NO: 98045 - DNA, 25 bp, SARS Virus
cgaagacgattagaacgacgatgat

SEQ ID NO: 98046 - DNA, 25 bp, SARS Virus
gaagacgattaggacgacgatgatt

SEQ ID NO: 98047 - DNA, 25 bp, SARS Virus
aagacgattagagcgacgatgattt

SEQ ID NO: 98048 - DNA, 25 bp, SARS Virus
agacgattagaaggacgatgatttt

SEQ ID NO: 98049 - DNA, 25 bp, SARS Virus
gacgattagaacgacgatgatttta

SEQ ID NO: 98050 - DNA, 25 bp, SARS Virus
acgattagaacggcgatgattttac

SEQ ID NO: 98051 - DNA, 25 bp, SARS Virus
cgattagaacgaggatgattttaca

SEQ ID NO: 98052 - DNA, 25 bp, SARS Virus
gattagaacgacgatgattttacag

SEQ ID NO: 98053 - DNA, 25 bp, SARS Virus
attagaacgacggtgattttacaga

SEQ ID NO: 98054 - DNA, 25 bp, SARS Virus
ttagaacgacgaggattttacagac

SEQ ID NO: 98055 - DNA, 25 bp, SARS Virus
tagaacgacgatgattttacagact

SEQ ID NO: 98056 - DNA, 25 bp, SARS Virus
agaacgacgatggttttacagactc

SEQ ID NO: 98057 - DNA, 25 bp, SARS Virus
gaacgacgatgagtttacagactca

SEQ ID NO: 98058 - DNA, 25 bp, SARS Virus
aacgacgatgatgttacagactcac

SEQ ID NO: 98059 - DNA, 25 bp, SARS Virus
acgacgatgattgtacagactcaca

SEQ ID NO: 98060 - DNA, 25 bp, SARS Virus
cgacgatgatttgacagactcacac

SEQ ID NO: 98061 - DNA, 25 bp, SARS Virus
gacgatgattttgcagactcacaca

SEQ ID NO: 98062 - DNA, 25 bp, SARS Virus
acgatgattttagagactcacacaa

SEQ ID NO: 98063 - DNA, 25 bp, SARS Virus
cgatgattttacggactcacacaag

SEQ ID NO: 98064 - DNA, 25 bp, SARS Virus
gatgattttacagactcacacaaga

SEQ ID NO: 98065 - DNA, 25 bp, SARS Virus
atgattttacaggctcacacaagaa

SEQ ID NO: 98066 - DNA, 25 bp, SARS Virus
tgattttacagagtcacacaagaac

SEQ ID NO: 98067 - DNA, 25 bp, SARS Virus
gattttacagacgcacacaagaacc

SEQ ID NO: 98068 - DNA, 25 bp, SARS Virus
attttacagactgacacaagaacct

SEQ ID NO: 98069 - DNA, 25 bp, SARS Virus
ttttacagactcgcacaagaacctg

SEQ ID NO: 98070 - DNA, 25 bp, SARS Virus
tttacagactcagacaagaacctgt

SEQ ID NO: 98071 - DNA, 25 bp, SARS Virus
ttacagactcacgcaagaacctgtt

SEQ ID NO: 98072 - DNA, 25 bp, SARS Virus
tacagactcacagaagaacctgtta

SEQ ID NO: 98073 - DNA, 25 bp, SARS Virus
acagactcacacgagaacctgttag

SEQ ID NO: 98074 - DNA, 25 bp, SARS Virus
cagactcacacaggaacctgttagt

SEQ ID NO: 98075 - DNA, 25 bp, SARS Virus
agactcacacaagaacctgttagtt

SEQ ID NO: 98076 - DNA, 25 bp, SARS Virus
gactcacacaaggacctgttagttt

SEQ ID NO: 98077 - DNA, 25 bp, SARS Virus
actcacacaagagcctgttagtttt

SEQ ID NO: 98078 - DNA, 25 bp, SARS Virus
ctcacacaagaagctgttagttttt

SEQ ID NO: 98079 - DNA, 25 bp, SARS Virus
tcacacaagaacgtgttagtttttc

SEQ ID NO: 98080 - DNA, 25 bp, SARS Virus
cacacaagaaccggttagtttttct

SEQ ID NO: 98081 - DNA, 25 bp, SARS Virus
acacaagaacctgttagtttttctc

SEQ ID NO: 98082 - DNA, 25 bp, SARS Virus
cacaagaacctggtagtttttctca

SEQ ID NO: 98083 - DNA, 25 bp, SARS Virus
acaagaacctgtgagtttttctcaa

SEQ ID NO: 98084 - DNA, 25 bp, SARS Virus
caagaacctgttggtttttctcaac

SEQ ID NO: 98085 - DNA, 25 bp, SARS Virus
aagaacctgttagtttttctcaact

SEQ ID NO: 98086 - DNA, 25 bp, SARS Virus
agaacctgttaggttttctcaactg

SEQ ID NO: 98087 - DNA, 25 bp, SARS Virus
gaacctgttagtgtttctcaactga

SEQ ID NO: 98088 - DNA, 25 bp, SARS Virus
aacctgttagttgttctcaactgaa

SEQ ID NO: 98089 - DNA, 25 bp, SARS Virus
acctgttagtttgtctcaactgaaa

SEQ ID NO: 98090 - DNA, 25 bp, SARS Virus
cctgttagttttgctcaactgaaaa

SEQ ID NO: 98091 - DNA, 25 bp, SARS Virus
ctgttagtttttgtcaactgaaaac

SEQ ID NO: 98092 - DNA, 25 bp, SARS Virus
tgttagtttttcgcaactgaaaaca

SEQ ID NO: 98093 - DNA, 25 bp, SARS Virus
gttagtttttctgaactgaaaacac

SEQ ID NO: 98094 - DNA, 25 bp, SARS Virus
ttagtttttctcgactgaaaacacc

SEQ ID NO: 98095 - DNA, 25 bp, SARS Virus
tagtttttctcagctgaaaacacct

SEQ ID NO: 98096 - DNA, 25 bp, SARS Virus
agtttttctcaagtgaaaacacctt

SEQ ID NO: 98097 - DNA, 25 bp, SARS Virus
gtttttctcaacggaaaacaccttt

SEQ ID NO: 98098 - DNA, 25 bp, SARS Virus
tttttctcaactgaaaacacctttc

SEQ ID NO: 98099 - DNA, 25 bp, SARS Virus
ttttctcaactggaaacacctttcc

SEQ ID NO: 98100 - DNA, 25 bp, SARS Virus
tttctcaactgagaacacctttccc

SEQ ID NO: 98101 - DNA, 25 bp, SARS Virus
ttctcaactgaagacacctttcccg

SEQ ID NO: 98102 - DNA, 25 bp, SARS Virus
tctcaactgaaagcacctttcccga

SEQ ID NO: 98103 - DNA, 25 bp, SARS Virus
ctcaactgaaaagacctttcccgat

SEQ ID NO: 98104 - DNA, 25 bp, SARS Virus
tcaactgaaaacgcctttcccgatg

SEQ ID NO: 98105 - DNA, 25 bp, SARS Virus
caactgaaaacagctttcccgatgg

SEQ ID NO: 98106 - DNA, 25 bp, SARS Virus
aactgaaaacacgtttcccgatggt

SEQ ID NO: 98107 - DNA, 25 bp, SARS Virus
actgaaaacaccgttcccgatggtg

SEQ ID NO: 98108 - DNA, 25 bp, SARS Virus
ctgaaaacacctgtcccgatggtgg

SEQ ID NO: 98109 - DNA, 25 bp, SARS Virus
tgaaaacaccttgcccgatggtgga

SEQ ID NO: 98110 - DNA, 25 bp, SARS Virus
gaaaacacctttgccgatggtggaa

SEQ ID NO: 98111 - DNA, 25 bp, SARS Virus
aaaacacctttcgcgatggtggaat

SEQ ID NO: 98112 - DNA, 25 bp, SARS Virus
aaacacctttccggatggtggaata

SEQ ID NO: 98113 - DNA, 25 bp, SARS Virus
aacacctttcccgatggtggaatac

SEQ ID NO: 98114 - DNA, 25 bp, SARS Virus
acacctttcccggtggtggaataca

SEQ ID NO: 98115 - DNA, 25 bp, SARS Virus
cacctttcccgagggtggaatacag

SEQ ID NO: 98116 - DNA, 25 bp, SARS Virus
acctttcccgatggtggaatacagg

SEQ ID NO: 98117 - DNA, 25 bp, SARS Virus
cctttcccgatggtggaatacagga

SEQ ID NO: 98118 - DNA, 25 bp, SARS Virus
ctttcccgatgggggaatacaggaa

SEQ ID NO: 98119 - DNA, 25 bp, SARS Virus
tttcccgatggtggaatacaggaag

SEQ ID NO: 98120 - DNA, 25 bp, SARS Virus
ttcccgatggtggaatacaggaagg

SEQ ID NO: 98121 - DNA, 25 bp, SARS Virus
tcccgatggtgggatacaggaaggg

SEQ ID NO: 98122 - DNA, 25 bp, SARS Virus
cccgatggtggagtacaggaagggt

SEQ ID NO: 98123 - DNA, 25 bp, SARS Virus
ccgatggtggaagacaggaagggtg

SEQ ID NO: 98124 - DNA, 25 bp, SARS Virus
cgatggtggaatgcaggaagggtgt

SEQ ID NO: 98125 - DNA, 25 bp, SARS Virus
gatggtggaatagaggaagggtgtt

SEQ ID NO: 98126 - DNA, 25 bp, SARS Virus
atggtggaatacgggaagggtgttc

SEQ ID NO: 98127 - DNA, 25 bp, SARS Virus
tggtggaatacaggaagggtgttcg

SEQ ID NO: 98128 - DNA, 25 bp, SARS Virus
ggtggaatacaggaagggtgttcgt

SEQ ID NO: 98129 - DNA, 25 bp, SARS Virus
gtggaatacagggagggtgttcgtc

SEQ ID NO: 98130 - DNA, 25 bp, SARS Virus
tggaatacaggaggggtgttcgtcg

SEQ ID NO: 98131 - DNA, 25 bp, SARS Virus
ggaatacaggaagggtgttcgtcgg

SEQ ID NO: 98132 - DNA, 25 bp, SARS Virus
gaatacaggaagggtgttcgtcggg

SEQ ID NO: 98133 - DNA, 25 bp, SARS Virus
aatacaggaagggtgttcgtcgggg

SEQ ID NO: 98134 - DNA, 25 bp, SARS Virus
atacaggaagggggttcgtcggggc

SEQ ID NO: 98135 - DNA, 25 bp, SARS Virus
tacaggaagggtgttcgtcggggcg

SEQ ID NO: 98136 - DNA, 25 bp, SARS Virus
acaggaagggtggtcgtcggggcgt

SEQ ID NO: 98137 - DNA, 25 bp, SARS Virus
caggaagggtgtgcgtcggggcgta

SEQ ID NO: 98138 - DNA, 25 bp, SARS Virus
aggaagggtgttggtcggggcgtac

SEQ ID NO: 98139 - DNA, 25 bp, SARS Virus
ggaagggtgttcgtcggggcgtacc

SEQ ID NO: 98140 - DNA, 25 bp, SARS Virus
gaagggtgttcggcggggcgtacca

SEQ ID NO: 98141 - DNA, 25 bp, SARS Virus
aagggtgttcgtgggggcgtaccac

SEQ ID NO: 98142 - DNA, 25 bp, SARS Virus
agggtgttcgtcggggcgtaccaca

SEQ ID NO: 98143 - DNA, 25 bp, SARS Virus
gggtgttcgtcggggcgtaccacaa

SEQ ID NO: 98144 - DNA, 25 bp, SARS Virus
ggtgttcgtcggggcgtaccacaac

SEQ ID NO: 98145 - DNA, 25 bp, SARS Virus
gtgttcgtcggggcgtaccacaaca

SEQ ID NO: 98146 - DNA, 25 bp, SARS Virus
tgttcgtcggggggtaccacaacag

SEQ ID NO: 98147 - DNA, 25 bp, SARS Virus
gttcgtcggggcgtaccacaacaga

SEQ ID NO: 98148 - DNA, 25 bp, SARS Virus
ttcgtcggggcggaccacaacagaa

SEQ ID NO: 98149 - DNA, 25 bp, SARS Virus
tcgtcggggcgtgccacaacagaag

SEQ ID NO: 98150 - DNA, 25 bp, SARS Virus
cgtcggggcgtagcacaacagaagg

SEQ ID NO: 98151 - DNA, 25 bp, SARS Virus
gtcggggcgtacgacaacagaagga

SEQ ID NO: 98152 - DNA, 25 bp, SARS Virus
tcggggcgtaccgcaacagaaggat

SEQ ID NO: 98153 - DNA, 25 bp, SARS Virus
cggggcgtaccagaacagaaggatg

SEQ ID NO: 98154 - DNA, 25 bp, SARS Virus
ggggcgtaccacgacagaaggatgt

SEQ ID NO: 98155 - DNA, 25 bp, SARS Virus
gggcgtaccacagcagaaggatgta

SEQ ID NO: 98156 - DNA, 25 bp, SARS Virus
ggcgtaccacaagagaaggatgtac

SEQ ID NO: 98157 - DNA, 25 bp, SARS Virus
gcgtaccacaacggaaggatgtaca

SEQ ID NO: 98158 - DNA, 25 bp, SARS Virus
cgtaccacaacagaaggatgtacag

SEQ ID NO: 98159 - DNA, 25 bp, SARS Virus
gtaccacaacaggaggatgtacagt

SEQ ID NO: 98160 - DNA, 25 bp, SARS Virus
taccacaacagagggatgtacagtg

SEQ ID NO: 98161 - DNA, 25 bp, SARS Virus
accacaacagaaggatgtacagtgc

SEQ ID NO: 98162 - DNA, 25 bp, SARS Virus
ccacaacagaaggatgtacagtgca

SEQ ID NO: 98163 - DNA, 25 bp, SARS Virus
cacaacagaagggtgtacagtgcat

SEQ ID NO: 98164 - DNA, 25 bp, SARS Virus
acaacagaaggaggtacagtgcata

SEQ ID NO: 98165 - DNA, 25 bp, SARS Virus
caacagaaggatgtacagtgcatac

SEQ ID NO: 98166 - DNA, 25 bp, SARS Virus
aacagaaggatggacagtgcataca

SEQ ID NO: 98167 - DNA, 25 bp, SARS Virus
acagaaggatgtgcagtgcatacac

SEQ ID NO: 98168 - DNA, 25 bp, SARS Virus
cagaaggatgtagagtgcatacacg

SEQ ID NO: 98169 - DNA, 25 bp, SARS Virus
agaaggatgtacggtgcatacacgg

SEQ ID NO: 98170 - DNA, 25 bp, SARS Virus
gaaggatgtacagtgcatacacggt

SEQ ID NO: 98171 - DNA, 25 bp, SARS Virus
aaggatgtacagggcatacacggta

SEQ ID NO: 98172 - DNA, 25 bp, SARS Virus
aggatgtacagtgcatacacggtag

SEQ ID NO: 98173 - DNA, 25 bp, SARS Virus
ggatgtacagtggatacacggtagg

SEQ ID NO: 98174 - DNA, 25 bp, SARS Virus
gatgtacagtgcgtacacggtaggg

SEQ ID NO: 98175 - DNA, 25 bp, SARS Virus
atgtacagtgcagacacggtagggt

SEQ ID NO: 98176 - DNA, 25 bp, SARS Virus
tgtacagtgcatgcacggtagggtc

SEQ ID NO: 98177 - DNA, 25 bp, SARS Virus
gtacagtgcatagacggtagggtcc

SEQ ID NO: 98178 - DNA, 25 bp, SARS Virus
tacagtgcatacgcggtagggtcct

SEQ ID NO: 98179 - DNA, 25 bp, SARS Virus
acagtgcatacagggtagggtcctc

SEQ ID NO: 98180 - DNA, 25 bp, SARS Virus
cagtgcatacacggtagggtcctct

SEQ ID NO: 98181 - DNA, 25 bp, SARS Virus
agtgcatacacggtagggtcctctc

SEQ ID NO: 98182 - DNA, 25 bp, SARS Virus
gtgcatacacgggagggtcctctcc

SEQ ID NO: 98183 - DNA, 25 bp, SARS Virus
tgcatacacggtggggtcctctcct

SEQ ID NO: 98184 - DNA, 25 bp, SARS Virus
gcatacacggtagggtcctctcctt

SEQ ID NO: 98185 - DNA, 25 bp, SARS Virus
catacacggtagggtcctctccttg

SEQ ID NO: 98186 - DNA, 25 bp, SARS Virus
atacacggtagggtcctctccttga

SEQ ID NO: 98187 - DNA, 25 bp, SARS Virus
tacacggtaggggcctctccttgaa

SEQ ID NO: 98188 - DNA, 25 bp, SARS Virus
acacggtagggtgctctccttgaag

SEQ ID NO: 98189 - DNA, 25 bp, SARS Virus
cacggtagggtcgtctccttgaagt

SEQ ID NO: 98190 - DNA, 25 bp, SARS Virus
acggtagggtccgctccttgaagtg

SEQ ID NO: 98191 - DNA, 25 bp, SARS Virus
cggtagggtcctgtccttgaagtgg

SEQ ID NO: 98192 - DNA, 25 bp, SARS Virus
ggtagggtcctcgccttgaagtggt

SEQ ID NO: 98193 - DNA, 25 bp, SARS Virus
gtagggtcctctgcttgaagtggtg

SEQ ID NO: 98194 - DNA, 25 bp, SARS Virus
tagggtcctctcgttgaagtggtgt

SEQ ID NO: 98195 - DNA, 25 bp, SARS Virus
agggtcctctccgtgaagtggtgtc

SEQ ID NO: 98196 - DNA, 25 bp, SARS Virus
gggtcctctcctggaagtggtgtcg

SEQ ID NO: 98197 - DNA, 25 bp, SARS Virus
ggtcctctccttgaagtggtgtcgc

SEQ ID NO: 98198 - DNA, 25 bp, SARS Virus
gtcctctccttggagtggtgtcgcg

SEQ ID NO: 98199 - DNA, 25 bp, SARS Virus
tcctctccttgaggtggtgtcgcgg

SEQ ID NO: 98200 - DNA, 25 bp, SARS Virus
cctctccttgaagtggtgtcgcggt

SEQ ID NO: 98201 - DNA, 25 bp, SARS Virus
ctctccttgaaggggtgtcgcggtc

SEQ ID NO: 98202 - DNA, 25 bp, SARS Virus
tctccttgaagtggtgtcgcggtcg

SEQ ID NO: 98203 - DNA, 25 bp, SARS Virus
ctccttgaagtggtgtcgcggtcgt

SEQ ID NO: 98204 - DNA, 25 bp, SARS Virus
tccttgaagtggggtcgcggtcgtt

SEQ ID NO: 98205 - DNA, 25 bp, SARS Virus
ccttgaagtggtgtcgcggtcgtta

SEQ ID NO: 98206 - DNA, 25 bp, SARS Virus
cttgaagtggtggcgcggtcgttaa

SEQ ID NO: 98207 - DNA, 25 bp, SARS Virus
ttgaagtggtgtggcggtcgttaaa

SEQ ID NO: 98208 - DNA, 25 bp, SARS Virus
tgaagtggtgtcgcggtcgttaaac

SEQ ID NO: 98209 - DNA, 25 bp, SARS Virus
gaagtggtgtcggggtcgttaaaca

SEQ ID NO: 98210 - DNA, 25 bp, SARS Virus
aagtggtgtcgcggtcgttaaacag

SEQ ID NO: 98211 - DNA, 25 bp, SARS Virus
agtggtgtcgcggtcgttaaacagt

SEQ ID NO: 98212 - DNA, 25 bp, SARS Virus
gtggtgtcgcgggcgttaaacagta

SEQ ID NO: 98213 - DNA, 25 bp, SARS Virus
tggtgtcgcggtggttaaacagtac

SEQ ID NO: 98214 - DNA, 25 bp, SARS Virus
ggtgtcgcggtcgttaaacagtact

SEQ ID NO: 98215 - DNA, 25 bp, SARS Virus
gtgtcgcggtcggtaaacagtactt

SEQ ID NO: 98216 - DNA, 25 bp, SARS Virus
tgtcgcggtcgtgaaacagtacttc

SEQ ID NO: 98217 - DNA, 25 bp, SARS Virus
acaagagatacttttggtttttgtt

SEQ ID NO: 98218 - DNA, 25 bp, SARS Virus
caagagatactcttggtttttgttt

SEQ ID NO: 98219 - DNA, 25 bp, SARS Virus
aagagatactcttggtttttgttta

SEQ ID NO: 98220 - DNA, 25 bp, SARS Virus
agagatactctttgtttttgtttag

SEQ ID NO: 98221 - DNA, 25 bp, SARS Virus
gagatactcttgttttttgtttagc

SEQ ID NO: 98222 - DNA, 25 bp, SARS Virus
agatactcttggtttttgtttagcg

SEQ ID NO: 98223 - DNA, 25 bp, SARS Virus
gatactcttggtttttgtttagcgg

SEQ ID NO: 98224 - DNA, 25 bp, SARS Virus
atactcttggtttttgtttagcggt

SEQ ID NO: 98225 - DNA, 25 bp, SARS Virus
tactcttggtttttgtttagcggtt

SEQ ID NO: 98226 - DNA, 25 bp, SARS Virus
actcttggtttttgtttagcggttg

SEQ ID NO: 98227 - DNA, 25 bp, SARS Virus
ctcttggtttttttttagcggttgg

SEQ ID NO: 98228 - DNA, 25 bp, SARS Virus
tcttggtttttgtttagcggttggt

SEQ ID NO: 98229 - DNA, 25 bp, SARS Virus
cttggtttttgtttagcggttggtt

SEQ ID NO: 98230 - DNA, 25 bp, SARS Virus
ttggtttttgtttagcggttggtta

SEQ ID NO: 98231 - DNA, 25 bp, SARS Virus
tggtttttgttttgcggttggttaa

SEQ ID NO: 98232 - DNA, 25 bp, SARS Virus
ggtttttgtttatcggttggttaaa

SEQ ID NO: 98233 - DNA, 25 bp, SARS Virus
gtttttgtttagtggttggttaaat

SEQ ID NO: 98234 - DNA, 25 bp, SARS Virus
tttttgtttagctgttggttaaatt

SEQ ID NO: 98235 - DNA, 25 bp, SARS Virus
ttttgtttagcgtttggttaaattg

SEQ ID NO: 98236 - DNA, 25 bp, SARS Virus
tttgtttagcggttggttaaattgt

SEQ ID NO: 98237 - DNA, 25 bp, SARS Virus
ttgtttagcggttggttaaattgtt

SEQ ID NO: 98238 - DNA, 25 bp, SARS Virus
tgtttagcggtttgttaaattgttc

SEQ ID NO: 98239 - DNA, 25 bp, SARS Virus
gtttagcggttgtttaaattgttcc

SEQ ID NO: 98240 - DNA, 25 bp, SARS Virus
tttagcggttggttaaattgttccg

SEQ ID NO: 98241 - DNA, 25 bp, SARS Virus
ttagcggttggttaaattgttccgc

SEQ ID NO: 98242 - DNA, 25 bp, SARS Virus
tagcggttggtttaattgttccgct

SEQ ID NO: 98243 - DNA, 25 bp, SARS Virus
agcggttggttatattgttccgcta

SEQ ID NO: 98244 - DNA, 25 bp, SARS Virus
gcggttggttaatttgttccgctaa

SEQ ID NO: 98245 - DNA, 25 bp, SARS Virus
cggttggttaaattgttccgctaat

SEQ ID NO: 98246 - DNA, 25 bp, SARS Virus
ggttggttaaattgttccgctaatc

SEQ ID NO: 98247 - DNA, 25 bp, SARS Virus
gttggttaaatttttccgctaatca

SEQ ID NO: 98248 - DNA, 25 bp, SARS Virus
ttggttaaattgttccgctaatcag

SEQ ID NO: 98249 - DNA, 25 bp, SARS Virus
tggttaaattgttccgctaatcagt

SEQ ID NO: 98250 - DNA, 25 bp, SARS Virus
ggttaaattgtttcgctaatcagtt

SEQ ID NO: 98251 - DNA, 25 bp, SARS Virus
gttaaattgttctgctaatcagttt

SEQ ID NO: 98252 - DNA, 25 bp, SARS Virus
ttaaattgttcctctaatcagttta

SEQ ID NO: 98253 - DNA, 25 bp, SARS Virus
taaattgttccgttaatcagtttaa

SEQ ID NO: 98254 - DNA, 25 bp, SARS Virus
aaattgttccgctaatcagtttaag

SEQ ID NO: 98255 - DNA, 25 bp, SARS Virus
aattgttccgcttatcagtttaagt

SEQ ID NO: 98256 - DNA, 25 bp, SARS Virus
attgttccgctattcagtttaagtt

SEQ ID NO: 98257 - DNA, 25 bp, SARS Virus
ttgttccgctaatcagtttaagttc

SEQ ID NO: 98258 - DNA, 25 bp, SARS Virus
tgttccgctaattagtttaagttct

SEQ ID NO: 98259 - DNA, 25 bp, SARS Virus
gttccgctaatctgtttaagttctt

SEQ ID NO: 98260 - DNA, 25 bp, SARS Virus
ttccgctaatcattttaagttctta

SEQ ID NO: 98261 - DNA, 25 bp, SARS Virus
tccgctaatcagtttaagttcttag

SEQ ID NO: 98262 - DNA, 25 bp, SARS Virus
ccgctaatcagtttaagttcttagt

SEQ ID NO: 98263 - DNA, 25 bp, SARS Virus
cgctaatcagtttaagttcttagtg

SEQ ID NO: 98264 - DNA, 25 bp, SARS Virus
gctaatcagttttagttcttagtga

SEQ ID NO: 98265 - DNA, 25 bp, SARS Virus
ctaatcagtttatgttcttagtgaa

SEQ ID NO: 98266 - DNA, 25 bp, SARS Virus
taatcagtttaatttcttagtgaat

SEQ ID NO: 98267 - DNA, 25 bp, SARS Virus
aatcagtttaagttcttagtgaatg

SEQ ID NO: 98268 - DNA, 25 bp, SARS Virus
atcagtttaagttcttagtgaatgt

SEQ ID NO: 98269 - DNA, 25 bp, SARS Virus
tcagtttaagtttttagtgaatgtt

SEQ ID NO: 98270 - DNA, 25 bp, SARS Virus
cagtttaagttcttagtgaatgttg

SEQ ID NO: 98271 - DNA, 25 bp, SARS Virus
agtttaagttcttagtgaatgttgt

SEQ ID NO: 98272 - DNA, 25 bp, SARS Virus
gtttaagttctttgtgaatgttgtt

SEQ ID NO: 98273 - DNA, 25 bp, SARS Virus
tttaagttcttattgaatgttgttg

SEQ ID NO: 98274 - DNA, 25 bp, SARS Virus
ttaagttcttagtgaatgttgttgt

SEQ ID NO: 98275 - DNA, 25 bp, SARS Virus
taagttcttagttaatgttgttgta

SEQ ID NO: 98276 - DNA, 25 bp, SARS Virus
aagttcttagtgtatgttgttgtag

SEQ ID NO: 98277 - DNA, 25 bp, SARS Virus
agttcttagtgattgttgttgtagt

SEQ ID NO: 98278 - DNA, 25 bp, SARS Virus
gttcttagtgaatgttgttgtagtt

SEQ ID NO: 98279 - DNA, 25 bp, SARS Virus
ttcttagtgaattttgttgtagttg

SEQ ID NO: 98280 - DNA, 25 bp, SARS Virus
tcttagtgaatgttgttgtagttga

SEQ ID NO: 98281 - DNA, 25 bp, SARS Virus
cttagtgaatgttgttgtagttgac

SEQ ID NO: 98282 - DNA, 25 bp, SARS Virus
ttagtgaatgtttttgtagttgacg

SEQ ID NO: 98283 - DNA, 25 bp, SARS Virus
tagtgaatgttgttgtagttgacgt

SEQ ID NO: 98284 - DNA, 25 bp, SARS Virus
agtgaatgttgttgtagttgacgta

SEQ ID NO: 98285 - DNA, 25 bp, SARS Virus
gtgaatgttgttttagttgacgtaa

SEQ ID NO: 98286 - DNA, 25 bp, SARS Virus
tgaatgttgttgtagttgacgtaac

SEQ ID NO: 98287 - DNA, 25 bp, SARS Virus
gaatgttgttgttgttgacgtaacc

SEQ ID NO: 98288 - DNA, 25 bp, SARS Virus
aatgttgttgtatttgacgtaaccc

SEQ ID NO: 98289 - DNA, 25 bp, SARS Virus
atgttgttgtagttgacgtaacccg

SEQ ID NO: 98290 - DNA, 25 bp, SARS Virus
tgttgttgtagttgacgtaacccgt

SEQ ID NO: 98291 - DNA, 25 bp, SARS Virus
gttgttgtagtttacgtaacccgtt

SEQ ID NO: 98292 - DNA, 25 bp, SARS Virus
ttgttgtagttgtcgtaacccgttc

SEQ ID NO: 98293 - DNA, 25 bp, SARS Virus
tgttgtagttgatgtaacccgttcg

SEQ ID NO: 98294 - DNA, 25 bp, SARS Virus
gttgtagttgacttaacccgttcga

SEQ ID NO: 98295 - DNA, 25 bp, SARS Virus
ttgtagttgacgtaacccgttcgac

SEQ ID NO: 98296 - DNA, 25 bp, SARS Virus
tgtagttgacgttacccgttcgacg

SEQ ID NO: 98297 - DNA, 25 bp, SARS Virus
gtagttgacgtatcccgttcgacgt

SEQ ID NO: 98298 - DNA, 25 bp, SARS Virus
tagttgacgtaatccgttcgacgtt

SEQ ID NO: 98299 - DNA, 25 bp, SARS Virus
agttgacgtaactcgttcgacgttc

SEQ ID NO: 98300 - DNA, 25 bp, SARS Virus
gttgacgtaacctgttcgacgttct

SEQ ID NO: 98301 - DNA, 25 bp, SARS Virus
ttgacgtaaccctttcgacgttctg

SEQ ID NO: 98302 - DNA, 25 bp, SARS Virus
tgacgtaacccgttcgacgttctgc

SEQ ID NO: 98303 - DNA, 25 bp, SARS Virus
gacgtaacccgttcgacgttctgca

SEQ ID NO: 98304 - DNA, 25 bp, SARS Virus
acgtaacccgtttgacgttctgcaa

SEQ ID NO: 98305 - DNA, 25 bp, SARS Virus
cgtaacccgttctacgttctgcaac

SEQ ID NO: 98306 - DNA, 25 bp, SARS Virus
gtaacccgttcgtcgttctgcaaca

SEQ ID NO: 98307 - DNA, 25 bp, SARS Virus
taacccgttcgatgttctgcaacaa

SEQ ID NO: 98308 - DNA, 25 bp, SARS Virus
aacccgttcgactttctgcaacaat

SEQ ID NO: 98309 - DNA, 25 bp, SARS Virus
acccgttcgacgttctgcaacaatt

SEQ ID NO: 98310 - DNA, 25 bp, SARS Virus
cccgttcgacgttctgcaacaattg

SEQ ID NO: 98311 - DNA, 25 bp, SARS Virus
ccgttcgacgttttgcaacaattgg

SEQ ID NO: 98312 - DNA, 25 bp, SARS Virus
cgttcgacgttctgcaacaattggt

SEQ ID NO: 98313 - DNA, 25 bp, SARS Virus
gttcgacgttcttcaacaattggtc

SEQ ID NO: 98314 - DNA, 25 bp, SARS Virus
ttcgacgttctgtaacaattggtct

SEQ ID NO: 98315 - DNA, 25 bp, SARS Virus
tcgacgttctgctacaattggtctt

SEQ ID NO: 98316 - DNA, 25 bp, SARS Virus
cgacgttctgcatcaattggtctta

SEQ ID NO: 98317 - DNA, 25 bp, SARS Virus
gacgttctgcaataattggtcttac

SEQ ID NO: 98318 - DNA, 25 bp, SARS Virus
acgttctgcaactattggtcttacg

SEQ ID NO: 98319 - DNA, 25 bp, SARS Virus
cgttctgcaacatttggtcttacga

SEQ ID NO: 98320 - DNA, 25 bp, SARS Virus
gttctgcaacaattggtcttacgag

SEQ ID NO: 98321 - DNA, 25 bp, SARS Virus
ttctgcaacaattggtcttacgagt

SEQ ID NO: 98322 - DNA, 25 bp, SARS Virus
tctgcaacaatttgtcttacgagtt

SEQ ID NO: 98323 - DNA, 25 bp, SARS Virus
ctgcaacaattgttcttacgagttc

SEQ ID NO: 98324 - DNA, 25 bp, SARS Virus
tgcaacaattggtcttacgagttcg

SEQ ID NO: 98325 - DNA, 25 bp, SARS Virus
gcaacaattggttttacgagttcgt

SEQ ID NO: 98326 - DNA, 25 bp, SARS Virus
caacaattggtcttacgagttcgta

SEQ ID NO: 98327 - DNA, 25 bp, SARS Virus
aacaattggtcttacgagttcgtaa

SEQ ID NO: 98328 - DNA, 25 bp, SARS Virus
acaattggtctttcgagttcgtaat

SEQ ID NO: 98329 - DNA, 25 bp, SARS Virus
caattggtcttatgagttcgtaatt

SEQ ID NO: 98330 - DNA, 25 bp, SARS Virus
aattggtcttactagttcgtaattt

SEQ ID NO: 98331 - DNA, 25 bp, SARS Virus
attggtcttacgtgttcgtaatttg

SEQ ID NO: 98332 - DNA, 25 bp, SARS Virus
ttggtcttacgatttcgtaatttgt

SEQ ID NO: 98333 - DNA, 25 bp, SARS Virus
tggtcttacgagttcgtaatttgtg

SEQ ID NO: 98334 - DNA, 25 bp, SARS Virus
ggtcttacgagttcgtaatttgtgt

SEQ ID NO: 98335 - DNA, 25 bp, SARS Virus
gtcttacgagtttgtaatttgtgtg

SEQ ID NO: 98336 - DNA, 25 bp, SARS Virus
tcttacgagttcttaatttgtgtga

SEQ ID NO: 98337 - DNA, 25 bp, SARS Virus
cttacgagttcgtaatttgtgtgaa

SEQ ID NO: 98338 - DNA, 25 bp, SARS Virus
ttacgagttcgttatttgtgtgaac

SEQ ID NO: 98339 - DNA, 25 bp, SARS Virus
tacgagttcgtattttgtgtgaaca

SEQ ID NO: 98340 - DNA, 25 bp, SARS Virus
acgagttcgtaatttgtgtgaacaa

SEQ ID NO: 98341 - DNA, 25 bp, SARS Virus
cgagttcgtaatttgtgtgaacaat

SEQ ID NO: 98342 - DNA, 25 bp, SARS Virus
gagttcgtaatttgtgtgaacaatt

SEQ ID NO: 98343 - DNA, 25 bp, SARS Virus
agttcgtaatttttgtgaacaattt

SEQ ID NO: 98344 - DNA, 25 bp, SARS Virus
gttcgtaatttgtgtgaacaatttg

SEQ ID NO: 98345 - DNA, 25 bp, SARS Virus
ttcgtaatttgtttgaacaatttgt

SEQ ID NO: 98346 - DNA, 25 bp, SARS Virus
tcgtaatttgtgtgaacaatttgtt

SEQ ID NO: 98347 - DNA, 25 bp, SARS Virus
cgtaatttgtgttaacaatttgttg

SEQ ID NO: 98348 - DNA, 25 bp, SARS Virus
gtaatttgtgtgtacaatttgttga

SEQ ID NO: 98349 - DNA, 25 bp, SARS Virus
taatttgtgtgatcaatttgttgaa

SEQ ID NO: 98350 - DNA, 25 bp, SARS Virus
aatttgtgtgaataatttgttgaat

SEQ ID NO: 98351 - DNA, 25 bp, SARS Virus
atttgtgtgaactatttgttgaatc

SEQ ID NO: 98352 - DNA, 25 bp, SARS Virus
tttgtgtgaacattttgttgaatcg

SEQ ID NO: 98353 - DNA, 25 bp, SARS Virus
ttgtgtgaacaatttgttgaatcga

SEQ ID NO: 98354 - DNA, 25 bp, SARS Virus
tgtgtgaacaatttgttgaatcgag

SEQ ID NO: 98355 - DNA, 25 bp, SARS Virus
gtgtgaacaatttgttgaatcgaga

SEQ ID NO: 98356 - DNA, 25 bp, SARS Virus
tgtgaacaattttttgaatcgagat

SEQ ID NO: 98357 - DNA, 25 bp, SARS Virus
gtgaacaatttgttgaatcgagatt

SEQ ID NO: 98358 - DNA, 25 bp, SARS Virus
tgaacaatttgttgaatcgagatta

SEQ ID NO: 98359 - DNA, 25 bp, SARS Virus
gaacaatttgtttaatcgagattaa

SEQ ID NO: 98360 - DNA, 25 bp, SARS Virus
aacaatttgttgtatcgagattaaa

SEQ ID NO: 98361 - DNA, 25 bp, SARS Virus
acaatttgttgattcgagattaaaa

SEQ ID NO: 98362 - DNA, 25 bp, SARS Virus
caatttgttgaatcgagattaaaac

SEQ ID NO: 98363 - DNA, 25 bp, SARS Virus
aatttgttgaattgagattaaaacc

SEQ ID NO: 98364 - DNA, 25 bp, SARS Virus
atttgttgaatctagattaaaacca

SEQ ID NO: 98365 - DNA, 25 bp, SARS Virus
tttgttgaatcgtgattaaaaccac

SEQ ID NO: 98366 - DNA, 25 bp, SARS Virus
ttgttgaatcgatattaaaaccacg

SEQ ID NO: 98367 - DNA, 25 bp, SARS Virus
tgttgaatcgagtttaaaaccacgt

SEQ ID NO: 98368 - DNA, 25 bp, SARS Virus
gttgaatcgagattaaaaccacgtt

SEQ ID NO: 98369 - DNA, 25 bp, SARS Virus
ttgaatcgagattaaaaccacgtta

SEQ ID NO: 98370 - DNA, 25 bp, SARS Virus
tgaatcgagatttaaaccacgttaa

SEQ ID NO: 98371 - DNA, 25 bp, SARS Virus
gaatcgagattataaccacgttaaa

SEQ ID NO: 98372 - DNA, 25 bp, SARS Virus
aatcgagattaataccacgttaaag

SEQ ID NO: 98373 - DNA, 25 bp, SARS Virus
atcgagattaaatccacgttaaagt

SEQ ID NO: 98374 - DNA, 25 bp, SARS Virus
tcgagattaaaatcacgttaaagtt

SEQ ID NO: 98375 - DNA, 25 bp, SARS Virus
cgagattaaaactacgttaaagttc

SEQ ID NO: 98376 - DNA, 25 bp, SARS Virus
gagattaaaacctcgttaaagttca

SEQ ID NO: 98377 - DNA, 25 bp, SARS Virus
agattaaaaccatgttaaagttcac

SEQ ID NO: 98378 - DNA, 25 bp, SARS Virus
gattaaaaccactttaaagttcaca

SEQ ID NO: 98379 - DNA, 25 bp, SARS Virus
attaaaaccacgttaaagttcacac

SEQ ID NO: 98380 - DNA, 25 bp, SARS Virus
ttaaaaccacgttaaagttcacacg

SEQ ID NO: 98381 - DNA, 25 bp, SARS Virus
taaaaccacgtttaagttcacacga

SEQ ID NO: 98382 - DNA, 25 bp, SARS Virus
aaaaccacgttatagttcacacgat

SEQ ID NO: 98383 - DNA, 25 bp, SARS Virus
aaaccacgttaatgttcacacgatt

SEQ ID NO: 98384 - DNA, 25 bp, SARS Virus
aaccacgttaaatttcacacgattt

SEQ ID NO: 98385 - DNA, 25 bp, SARS Virus
accacgttaaagttcacacgattta

SEQ ID NO: 98386 - DNA, 25 bp, SARS Virus
ccacgttaaagttcacacgatttac

SEQ ID NO: 98387 - DNA, 25 bp, SARS Virus
cacgttaaagtttacacgatttact

SEQ ID NO: 98388 - DNA, 25 bp, SARS Virus
acgttaaagttctcacgatttacta

SEQ ID NO: 98389 - DNA, 25 bp, SARS Virus
cgttaaagttcatacgatttactat

SEQ ID NO: 98390 - DNA, 25 bp, SARS Virus
gttaaagttcactcgatttactata

SEQ ID NO: 98391 - DNA, 25 bp, SARS Virus
ttaaagttcacatgatttactatag

SEQ ID NO: 98392 - DNA, 25 bp, SARS Virus
taaagttcacactatttactatagg

SEQ ID NO: 98393 - DNA, 25 bp, SARS Virus
aaagttcacacgttttactatagga

SEQ ID NO: 98394 - DNA, 25 bp, SARS Virus
aagttcacacgatttactataggaa

SEQ ID NO: 98395 - DNA, 25 bp, SARS Virus
agttcacacgatttactataggaaa

SEQ ID NO: 98396 - DNA, 25 bp, SARS Virus
gttcacacgatttactataggaaag

SEQ ID NO: 98397 - DNA, 25 bp, SARS Virus
ttcacacgattttctataggaaagc

SEQ ID NO: 98398 - DNA, 25 bp, SARS Virus
tcacacgatttattataggaaagcg

SEQ ID NO: 98399 - DNA, 25 bp, SARS Virus
cacacgatttactataggaaagcgc

SEQ ID NO: 98400 - DNA, 25 bp, SARS Virus
acacgatttactttaggaaagcgct

SEQ ID NO: 98401 - DNA, 25 bp, SARS Virus
cacgatttactataggaaagcgctg

SEQ ID NO: 98402 - DNA, 25 bp, SARS Virus
acgatttactattggaaagcgctga

SEQ ID NO: 98403 - DNA, 25 bp, SARS Virus
cgatttactatatgaaagcgctgaa

SEQ ID NO: 98404 - DNA, 25 bp, SARS Virus
gatttactatagtaaagcgctgaac

SEQ ID NO: 98405 - DNA, 25 bp, SARS Virus
atttactataggtaagcgctgaact

SEQ ID NO: 98406 - DNA, 25 bp, SARS Virus
tttactataggatagcgctgaacta

SEQ ID NO: 98407 - DNA, 25 bp, SARS Virus
ttactataggaatgcgctgaactat

SEQ ID NO: 98408 - DNA, 25 bp, SARS Virus
tactataggaaatcgctgaactatt

SEQ ID NO: 98409 - DNA, 25 bp, SARS Virus
actataggaaagtgctgaactattt

SEQ ID NO: 98410 - DNA, 25 bp, SARS Virus
ctataggaaagctctgaactatttc

SEQ ID NO: 98411 - DNA, 25 bp, SARS Virus
tataggaaagcgttgaactatttca

SEQ ID NO: 98412 - DNA, 25 bp, SARS Virus
ataggaaagcgctgaactatttcag

SEQ ID NO: 98413 - DNA, 25 bp, SARS Virus
taggaaagcgcttaactatttcagc

SEQ ID NO: 98414 - DNA, 25 bp, SARS Virus
aggaaagcgctgtactatttcagct

SEQ ID NO: 98415 - DNA, 25 bp, SARS Virus
ggaaagcgctgatctatttcagctc

SEQ ID NO: 98416 - DNA, 25 bp, SARS Virus
gaaagcgctgaattatttcagctcc

SEQ ID NO: 98417 - DNA, 25 bp, SARS Virus
aaagcgctgaactatttcagctccg

SEQ ID NO: 98418 - DNA, 25 bp, SARS Virus
aagcgctgaactttttcagctccgc

SEQ ID NO: 98419 - DNA, 25 bp, SARS Virus
agcgctgaactatttcagctccgcc

SEQ ID NO: 98420 - DNA, 25 bp, SARS Virus
gcgctgaactatttcagctccgcct

SEQ ID NO: 98421 - DNA, 25 bp, SARS Virus
cgctgaactatttcagctccgcctc

SEQ ID NO: 98422 - DNA, 25 bp, SARS Virus
gctgaactattttagctccgcctcc

SEQ ID NO: 98423 - DNA, 25 bp, SARS Virus
ctgaactatttctgctccgcctcca

SEQ ID NO: 98424 - DNA, 25 bp, SARS Virus
tgaactatttcatctccgcctccat

SEQ ID NO: 98425 - DNA, 25 bp, SARS Virus
gaactatttcagttccgcctccatg

SEQ ID NO: 98426 - DNA, 25 bp, SARS Virus
aactatttcagctccgcctccatgt

SEQ ID NO: 98427 - DNA, 25 bp, SARS Virus
actatttcagcttcgcctccatgtt

SEQ ID NO: 98428 - DNA, 25 bp, SARS Virus
ctatttcagctctgcctccatgttt

SEQ ID NO: 98429 - DNA, 25 bp, SARS Virus
tatttcagctcctcctccatgttta

SEQ ID NO: 98430 - DNA, 25 bp, SARS Virus
atttcagctccgtctccatgtttaa

SEQ ID NO: 98431 - DNA, 25 bp, SARS Virus
tttcagctccgcttccatgtttaac

SEQ ID NO: 98432 - DNA, 25 bp, SARS Virus
ttcagctccgcctccatgtttaact

SEQ ID NO: 98433 - DNA, 25 bp, SARS Virus
tcagctccgccttcatgtttaactg

SEQ ID NO: 98434 - DNA, 25 bp, SARS Virus
cagctccgcctctatgtttaactgt

SEQ ID NO: 98435 - DNA, 25 bp, SARS Virus
agctccgcctccttgtttaactgtc

SEQ ID NO: 98436 - DNA, 25 bp, SARS Virus
gctccgcctccatgtttaactgtcc

SEQ ID NO: 98437 - DNA, 25 bp, SARS Virus
ctccgcctccatttttaactgtcca

SEQ ID NO: 98438 - DNA, 25 bp, SARS Virus
tccgcctccatgtttaactgtccaa

SEQ ID NO: 98439 - DNA, 25 bp, SARS Virus
ccgcctccatgtttaactgtccaat

SEQ ID NO: 98440 - DNA, 25 bp, SARS Virus
cgcctccatgtttaactgtccaatt

SEQ ID NO: 98441 - DNA, 25 bp, SARS Virus
gcctccatgttttactgtccaatta

SEQ ID NO: 98442 - DNA, 25 bp, SARS Virus
cctccatgtttatctgtccaattaa

SEQ ID NO: 98443 - DNA, 25 bp, SARS Virus
ctccatgtttaattgtccaattaat

SEQ ID NO: 98444 - DNA, 25 bp, SARS Virus
tccatgtttaactgtccaattaatg

SEQ ID NO: 98445 - DNA, 25 bp, SARS Virus
ccatgtttaactttccaattaatgt

SEQ ID NO: 98446 - DNA, 25 bp, SARS Virus
catgtttaactgtccaattaatgtc

SEQ ID NO: 98447 - DNA, 25 bp, SARS Virus
atgtttaactgttcaattaatgtcc

SEQ ID NO: 98448 - DNA, 25 bp, SARS Virus
tgtttaactgtctaattaatgtccg

SEQ ID NO: 98449 - DNA, 25 bp, SARS Virus
gtttaactgtcctattaatgtccgt

SEQ ID NO: 98450 - DNA, 25 bp, SARS Virus
tttaactgtccatttaatgtccgtc

SEQ ID NO: 98451 - DNA, 25 bp, SARS Virus
ttaactgtccaattaatgtccgtct

SEQ ID NO: 98452 - DNA, 25 bp, SARS Virus
taactgtccaattaatgtccgtctg

SEQ ID NO: 98453 - DNA, 25 bp, SARS Virus
aactgtccaatttatgtccgtctga

SEQ ID NO: 98454 - DNA, 25 bp, SARS Virus
actgtccaattattgtccgtctgaa

SEQ ID NO: 98455 - DNA, 25 bp, SARS Virus
ctgtccaattaatgtccgtctgaag

SEQ ID NO: 98456 - DNA, 25 bp, SARS Virus
tgtccaattaatttccgtctgaagt

SEQ ID NO: 98457 - DNA, 25 bp, SARS Virus
gtccaattaatgtccgtctgaagtt

SEQ ID NO: 98458 - DNA, 25 bp, SARS Virus
tccaattaatgttcgtctgaagttt

SEQ ID NO: 98459 - DNA, 25 bp, SARS Virus
ccaattaatgtctgtctgaagtttc

SEQ ID NO: 98460 - DNA, 25 bp, SARS Virus
caattaatgtccttctgaagtttcg

SEQ ID NO: 98461 - DNA, 25 bp, SARS Virus
aattaatgtccgtctgaagtttcgg

SEQ ID NO: 98462 - DNA, 25 bp, SARS Virus
attaatgtccgtttgaagtttcgga

SEQ ID NO: 98463 - DNA, 25 bp, SARS Virus
ttaatgtccgtctgaagtttcggaa

SEQ ID NO: 98464 - DNA, 25 bp, SARS Virus
taatgtccgtcttaagtttcggaag

SEQ ID NO: 98465 - DNA, 25 bp, SARS Virus
aatgtccgtctgtagtttcggaagt

SEQ ID NO: 98466 - DNA, 25 bp, SARS Virus
atgtccgtctgatgtttcggaagtt

SEQ ID NO: 98467 - DNA, 25 bp, SARS Virus
tgtccgtctgaattttcggaagttt

SEQ ID NO: 98468 - DNA, 25 bp, SARS Virus
gtccgtctgaagtttcggaagtttg

SEQ ID NO: 98469 - DNA, 25 bp, SARS Virus
tccgtctgaagtttcggaagtttgg

SEQ ID NO: 98470 - DNA, 25 bp, SARS Virus
ccgtctgaagtttcggaagtttgga

SEQ ID NO: 98471 - DNA, 25 bp, SARS Virus
cgtctgaagttttggaagtttggat

SEQ ID NO: 98472 - DNA, 25 bp, SARS Virus
gtctgaagtttctgaagtttggata

SEQ ID NO: 98473 - DNA, 25 bp, SARS Virus
tctgaagtttcgtaagtttggatac

SEQ ID NO: 98474 - DNA, 25 bp, SARS Virus
ctgaagtttcggtagtttggataca

SEQ ID NO: 98475 - DNA, 25 bp, SARS Virus
tgaagtttcggatgtttggatacat

SEQ ID NO: 98476 - DNA, 25 bp, SARS Virus
gaagtttcggaattttggatacatt

SEQ ID NO: 98477 - DNA, 25 bp, SARS Virus
aagtttcggaagtttggatacattg

SEQ ID NO: 98478 - DNA, 25 bp, SARS Virus
agtttcggaagtttggatacattgt

SEQ ID NO: 98479 - DNA, 25 bp, SARS Virus
gtttcggaagtttggatacattgtg

SEQ ID NO: 98480 - DNA, 25 bp, SARS Virus
tttcggaagttttgatacattgtgt

SEQ ID NO: 98481 - DNA, 25 bp, SARS Virus
ttcggaagtttgtatacattgtgtt

SEQ ID NO: 98482 - DNA, 25 bp, SARS Virus
tcggaagtttggttacattgtgttg

SEQ ID NO: 98483 - DNA, 25 bp, SARS Virus
cggaagtttggatacattgtgttgt

SEQ ID NO: 98484 - DNA, 25 bp, SARS Virus
ggaagtttggattcattgtgttgtt

SEQ ID NO: 98485 - DNA, 25 bp, SARS Virus
gaagtttggatatattgtgttgttg

SEQ ID NO: 98486 - DNA, 25 bp, SARS Virus
aagtttggatactttgtgttgttga

SEQ ID NO: 98487 - DNA, 25 bp, SARS Virus
agtttggatacattgtgttgttgat

SEQ ID NO: 98488 - DNA, 25 bp, SARS Virus
gtttggatacattgtgttgttgatt

SEQ ID NO: 98489 - DNA, 25 bp, SARS Virus
tttggatacattttgttgttgatta

SEQ ID NO: 98490 - DNA, 25 bp, SARS Virus
ttggatacattgtgttgttgattag

SEQ ID NO: 98491 - DNA, 25 bp, SARS Virus
tggatacattgttttgttgattagt

SEQ ID NO: 98492 - DNA, 25 bp, SARS Virus
ggatacattgtgttgttgattagtc

SEQ ID NO: 98493 - DNA, 25 bp, SARS Virus
gatacattgtgttgttgattagtcc

SEQ ID NO: 98494 - DNA, 25 bp, SARS Virus
atacattgtgtttttgattagtccc

SEQ ID NO: 98495 - DNA, 25 bp, SARS Virus
tacattgtgttgttgattagtcccg

SEQ ID NO: 98496 - DNA, 25 bp, SARS Virus
acattgtgttgttgattagtcccga

SEQ ID NO: 98497 - DNA, 25 bp, SARS Virus
cattgtgttgtttattagtcccgac

SEQ ID NO: 98498 - DNA, 25 bp, SARS Virus
attgtgttgttgtttagtcccgacg

SEQ ID NO: 98499 - DNA, 25 bp, SARS Virus
ttgtgttgttgattagtcccgacga

SEQ ID NO: 98500 - DNA, 25 bp, SARS Virus
tgtgttgttgattagtcccgacgac

SEQ ID NO: 98501 - DNA, 25 bp, SARS Virus
gtgttgttgatttgtcccgacgact

SEQ ID NO: 98502 - DNA, 25 bp, SARS Virus
tgttgttgattattcccgacgactt

SEQ ID NO: 98503 - DNA, 25 bp, SARS Virus
gttgttgattagtcccgacgacttt

SEQ ID NO: 98504 - DNA, 25 bp, SARS Virus
ttgttgattagttccgacgacttta

SEQ ID NO: 98505 - DNA, 25 bp, SARS Virus
tgttgattagtctcgacgactttag

SEQ ID NO: 98506 - DNA, 25 bp, SARS Virus
gttgattagtcctgacgactttagt

SEQ ID NO: 98507 - DNA, 25 bp, SARS Virus
ttgattagtccctacgactttagtc

SEQ ID NO: 98508 - DNA, 25 bp, SARS Virus
tgattagtcccgtcgactttagtcc

SEQ ID NO: 98509 - DNA, 25 bp, SARS Virus
gattagtcccgatgactttagtccc

SEQ ID NO: 98510 - DNA, 25 bp, SARS Virus
attagtcccgactactttagtcccg

SEQ ID NO: 98511 - DNA, 25 bp, SARS Virus
ttagtcccgacgtctttagtcccga

SEQ ID NO: 98512 - DNA, 25 bp, SARS Virus
tagtcccgacgattttagtcccgaa

SEQ ID NO: 98513 - DNA, 25 bp, SARS Virus
agtcccgacgactttagtcccgaag

SEQ ID NO: 98514 - DNA, 25 bp, SARS Virus
gtcccgacgactttagtcccgaaga

SEQ ID NO: 98515 - DNA, 25 bp, SARS Virus
tcccgacgactttagtcccgaagac

SEQ ID NO: 98516 - DNA, 25 bp, SARS Virus
cccgacgacttttgtcccgaagacg

SEQ ID NO: 98517 - DNA, 25 bp, SARS Virus
ccgacgactttattcccgaagacga

SEQ ID NO: 98518 - DNA, 25 bp, SARS Virus
cgacgactttagtcccgaagacgat

SEQ ID NO: 98519 - DNA, 25 bp, SARS Virus
gacgactttagttccgaagacgatt

SEQ ID NO: 98520 - DNA, 25 bp, SARS Virus
acgactttagtctcgaagacgatta

SEQ ID NO: 98521 - DNA, 25 bp, SARS Virus
cgactttagtcctgaagacgattag

SEQ ID NO: 98522 - DNA, 25 bp, SARS Virus
gactttagtccctaagacgattaga

SEQ ID NO: 98523 - DNA, 25 bp, SARS Virus
actttagtcccgtagacgattagaa

SEQ ID NO: 98524 - DNA, 25 bp, SARS Virus
ctttagtcccgatgacgattagaac

SEQ ID NO: 98525 - DNA, 25 bp, SARS Virus
tttagtcccgaatacgattagaacg

SEQ ID NO: 98526 - DNA, 25 bp, SARS Virus
ttagtcccgaagtcgattagaacga

SEQ ID NO: 98527 - DNA, 25 bp, SARS Virus
tagtcccgaagatgattagaacgac

SEQ ID NO: 98528 - DNA, 25 bp, SARS Virus
agtcccgaagactattagaacgacg

SEQ ID NO: 98529 - DNA, 25 bp, SARS Virus
gtcccgaagacgtttagaacgacga

SEQ ID NO: 98530 - DNA, 25 bp, SARS Virus
tcccgaagacgattagaacgacgat

SEQ ID NO: 98531 - DNA, 25 bp, SARS Virus
cccgaagacgattagaacgacgatg

SEQ ID NO: 98532 - DNA, 25 bp, SARS Virus
ccgaagacgatttgaacgacgatga

SEQ ID NO: 98533 - DNA, 25 bp, SARS Virus
cgaagacgattataacgacgatgat

SEQ ID NO: 98534 - DNA, 25 bp, SARS Virus
gaagacgattagtacgacgatgatt

SEQ ID NO: 98535 - DNA, 25 bp, SARS Virus
aagacgattagatcgacgatgattt

SEQ ID NO: 98536 - DNA, 25 bp, SARS Virus
agacgattagaatgacgatgatttt

SEQ ID NO: 98537 - DNA, 25 bp, SARS Virus
gacgattagaactacgatgatttta

SEQ ID NO: 98538 - DNA, 25 bp, SARS Virus
acgattagaacgtcgatgattttac

SEQ ID NO: 98539 - DNA, 25 bp, SARS Virus
cgattagaacgatgatgattttaca

SEQ ID NO: 98540 - DNA, 25 bp, SARS Virus
gattagaacgactatgattttacag

SEQ ID NO: 98541 - DNA, 25 bp, SARS Virus
attagaacgacgttgattttacaga

SEQ ID NO: 98542 - DNA, 25 bp, SARS Virus
ttagaacgacgatgattttacagac

SEQ ID NO: 98543 - DNA, 25 bp, SARS Virus
tagaacgacgattattttacagact

SEQ ID NO: 98544 - DNA, 25 bp, SARS Virus
agaacgacgatgtttttacagactc

SEQ ID NO: 98545 - DNA, 25 bp, SARS Virus
gaacgacgatgattttacagactca

SEQ ID NO: 98546 - DNA, 25 bp, SARS Virus
aacgacgatgattttacagactcac

SEQ ID NO: 98547 - DNA, 25 bp, SARS Virus
acgacgatgattttacagactcaca

SEQ ID NO: 98548 - DNA, 25 bp, SARS Virus
cgacgatgattttacagactcacac

SEQ ID NO: 98549 - DNA, 25 bp, SARS Virus
gacgatgatttttcagactcacaca

SEQ ID NO: 98550 - DNA, 25 bp, SARS Virus
acgatgattttatagactcacacaa

SEQ ID NO: 98551 - DNA, 25 bp, SARS Virus
cgatgattttactgactcacacaag

SEQ ID NO: 98552 - DNA, 25 bp, SARS Virus
gatgattttacatactcacacaaga

SEQ ID NO: 98553 - DNA, 25 bp, SARS Virus
atgattttacagtctcacacaagaa

SEQ ID NO: 98554 - DNA, 25 bp, SARS Virus
tgattttacagattcacacaagaac

SEQ ID NO: 98555 - DNA, 25 bp, SARS Virus
gattttacagactcacacaagaacc

SEQ ID NO: 98556 - DNA, 25 bp, SARS Virus
attttacagacttacacaagaacct

SEQ ID NO: 98557 - DNA, 25 bp, SARS Virus
ttttacagactctcacaagaacctg

SEQ ID NO: 98558 - DNA, 25 bp, SARS Virus
tttacagactcatacaagaacctgt

SEQ ID NO: 98559 - DNA, 25 bp, SARS Virus
ttacagactcactcaagaacctgtt

SEQ ID NO: 98560 - DNA, 25 bp, SARS Virus
tacagactcacataagaacctgtta

SEQ ID NO: 98561 - DNA, 25 bp, SARS Virus
acagactcacactagaacctgttag

SEQ ID NO: 98562 - DNA, 25 bp, SARS Virus
cagactcacacatgaacctgttagt

SEQ ID NO: 98563 - DNA, 25 bp, SARS Virus
agactcacacaataacctgttagtt

SEQ ID NO: 98564 - DNA, 25 bp, SARS Virus
gactcacacaagtacctgttagttt

SEQ ID NO: 98565 - DNA, 25 bp, SARS Virus
actcacacaagatcctgttagtttt

SEQ ID NO: 98566 - DNA, 25 bp, SARS Virus
ctcacacaagaatctgttagttttt

SEQ ID NO: 98567 - DNA, 25 bp, SARS Virus
tcacacaagaacttgttagtttttc

SEQ ID NO: 98568 - DNA, 25 bp, SARS Virus
cacacaagaacctgttagtttttct

SEQ ID NO: 98569 - DNA, 25 bp, SARS Virus
acacaagaaccttttagtttttctc

SEQ ID NO: 98570 - DNA, 25 bp, SARS Virus
cacaagaacctgttagtttttctca

SEQ ID NO: 98571 - DNA, 25 bp, SARS Virus
acaagaacctgttagtttttctcaa

SEQ ID NO: 98572 - DNA, 25 bp, SARS Virus
caagaacctgtttgtttttctcaac

SEQ ID NO: 98573 - DNA, 25 bp, SARS Virus
aagaacctgttattttttctcaact

SEQ ID NO: 98574 - DNA, 25 bp, SARS Virus
agaacctgttagtttttctcaactg

SEQ ID NO: 98575 - DNA, 25 bp, SARS Virus
gaacctgttagtttttctcaactga

SEQ ID NO: 98576 - DNA, 25 bp, SARS Virus
aacctgttagtttttctcaactgaa

SEQ ID NO: 98577 - DNA, 25 bp, SARS Virus
acctgttagtttttctcaactgaaa

SEQ ID NO: 98578 - DNA, 25 bp, SARS Virus
cctgttagtttttctcaactgaaaa

SEQ ID NO: 98579 - DNA, 25 bp, SARS Virus
ctgttagtttttttcaactgaaaac

SEQ ID NO: 98580 - DNA, 25 bp, SARS Virus
tgttagtttttctcaactgaaaaca

SEQ ID NO: 98581 - DNA, 25 bp, SARS Virus
gttagtttttcttaactgaaaacac

SEQ ID NO: 98582 - DNA, 25 bp, SARS Virus
ttagtttttctctactgaaaacacc

SEQ ID NO: 98583 - DNA, 25 bp, SARS Virus
tagtttttctcatctgaaaacacct

SEQ ID NO: 98584 - DNA, 25 bp, SARS Virus
agtttttctcaattgaaaacacctt

SEQ ID NO: 98585 - DNA, 25 bp, SARS Virus
gtttttctcaactgaaaacaccttt

SEQ ID NO: 98586 - DNA, 25 bp, SARS Virus
tttttctcaacttaaaacacctttc

SEQ ID NO: 98587 - DNA, 25 bp, SARS Virus
ttttctcaactgtaaacacctttcc

SEQ ID NO: 98588 - DNA, 25 bp, SARS Virus
tttctcaactgataacacctttccc

SEQ ID NO: 98589 - DNA, 25 bp, SARS Virus
ttctcaactgaatacacctttcccg

SEQ ID NO: 98590 - DNA, 25 bp, SARS Virus
tctcaactgaaatcacctttcccga

SEQ ID NO: 98591 - DNA, 25 bp, SARS Virus
ctcaactgaaaatacctttcccgat

SEQ ID NO: 98592 - DNA, 25 bp, SARS Virus
tcaactgaaaactcctttcccgatg

SEQ ID NO: 98593 - DNA, 25 bp, SARS Virus
caactgaaaacatctttcccgatgg

SEQ ID NO: 98594 - DNA, 25 bp, SARS Virus
aactgaaaacacttttcccgatggt

SEQ ID NO: 98595 - DNA, 25 bp, SARS Virus
actgaaaacacctttcccgatggtg

SEQ ID NO: 98596 - DNA, 25 bp, SARS Virus
ctgaaaacacctttcccgatggtgg

SEQ ID NO: 98597 - DNA, 25 bp, SARS Virus
tgaaaacacctttcccgatggtgga

SEQ ID NO: 98598 - DNA, 25 bp, SARS Virus
gaaaacaccttttccgatggtggaa

SEQ ID NO: 98599 - DNA, 25 bp, SARS Virus
aaaacacctttctcgatggtggaat

SEQ ID NO: 98600 - DNA, 25 bp, SARS Virus
aaacacctttcctgatggtggaata

SEQ ID NO: 98601 - DNA, 25 bp, SARS Virus
aacacctttccctatggtggaatac

SEQ ID NO: 98602 - DNA, 25 bp, SARS Virus
acacctttcccgttggtggaataca

SEQ ID NO: 98603 - DNA, 25 bp, SARS Virus
cacctttcccgatggtggaatacag

SEQ ID NO: 98604 - DNA, 25 bp, SARS Virus
acctttcccgattgtggaatacagg

SEQ ID NO: 98605 - DNA, 25 bp, SARS Virus
cctttcccgatgttggaatacagga

SEQ ID NO: 98606 - DNA, 25 bp, SARS Virus
ctttcccgatggtggaatacaggaa

SEQ ID NO: 98607 - DNA, 25 bp, SARS Virus
tttcccgatggttgaatacaggaag

SEQ ID NO: 98608 - DNA, 25 bp, SARS Virus
ttcccgatggtgtaatacaggaagg

SEQ ID NO: 98609 - DNA, 25 bp, SARS Virus
tcccgatggtggtatacaggaaggg

SEQ ID NO: 98610 - DNA, 25 bp, SARS Virus
cccgatggtggattacaggaagggt

SEQ ID NO: 98611 - DNA, 25 bp, SARS Virus
ccgatggtggaatacaggaagggtg

SEQ ID NO: 98612 - DNA, 25 bp, SARS Virus
cgatggtggaattcaggaagggtgt

SEQ ID NO: 98613 - DNA, 25 bp, SARS Virus
gatggtggaatataggaagggtgtt

SEQ ID NO: 98614 - DNA, 25 bp, SARS Virus
atggtggaatactggaagggtgttc

SEQ ID NO: 98615 - DNA, 25 bp, SARS Virus
tggtggaatacatgaagggtgttcg

SEQ ID NO: 98616 - DNA, 25 bp, SARS Virus
ggtggaatacagtaagggtgttcgt

SEQ ID NO: 98617 - DNA, 25 bp, SARS Virus
gtggaatacaggtagggtgttcgtc

SEQ ID NO: 98618 - DNA, 25 bp, SARS Virus
tggaatacaggatgggtgttcgtcg

SEQ ID NO: 98619 - DNA, 25 bp, SARS Virus
ggaatacaggaatggtgttcgtcgg

SEQ ID NO: 98620 - DNA, 25 bp, SARS Virus
gaatacaggaagtgtgttcgtcggg

SEQ ID NO: 98621 - DNA, 25 bp, SARS Virus
aatacaggaaggttgttcgtcgggg

SEQ ID NO: 98622 - DNA, 25 bp, SARS Virus
atacaggaagggtgttcgtcggggc

SEQ ID NO: 98623 - DNA, 25 bp, SARS Virus
tacaggaagggttttcgtcggggcg

SEQ ID NO: 98624 - DNA, 25 bp, SARS Virus
acaggaagggtgttcgtcggggcgt

SEQ ID NO: 98625 - DNA, 25 bp, SARS Virus
caggaagggtgttcgtcggggcgta

SEQ ID NO: 98626 - DNA, 25 bp, SARS Virus
aggaagggtgtttgtcggggcgtac

SEQ ID NO: 98627 - DNA, 25 bp, SARS Virus
ggaagggtgttcttcggggcgtacc

SEQ ID NO: 98628 - DNA, 25 bp, SARS Virus
gaagggtgttcgtcggggcgtacca

SEQ ID NO: 98629 - DNA, 25 bp, SARS Virus
aagggtgttcgttggggcgtaccac

SEQ ID NO: 98630 - DNA, 25 bp, SARS Virus
agggtgttcgtctgggcgtaccaca

SEQ ID NO: 98631 - DNA, 25 bp, SARS Virus
gggtgttcgtcgtggcgtaccacaa

SEQ ID NO: 98632 - DNA, 25 bp, SARS Virus
ggtgttcgtcggtgcgtaccacaac

SEQ ID NO: 98633 - DNA, 25 bp, SARS Virus
gtgttcgtcgggtcgtaccacaaca

SEQ ID NO: 98634 - DNA, 25 bp, SARS Virus
tgttcgtcggggtgtaccacaacag

SEQ ID NO: 98635 - DNA, 25 bp, SARS Virus
gttcgtcggggcttaccacaacaga

SEQ ID NO: 98636 - DNA, 25 bp, SARS Virus
ttcgtcggggcgtaccacaacagaa

SEQ ID NO: 98637 - DNA, 25 bp, SARS Virus
tcgtcggggcgttccacaacagaag

SEQ ID NO: 98638 - DNA, 25 bp, SARS Virus
cgtcggggcgtatcacaacagaagg

SEQ ID NO: 98639 - DNA, 25 bp, SARS Virus
gtcggggcgtactacaacagaagga

SEQ ID NO: 98640 - DNA, 25 bp, SARS Virus
tcggggcgtacctcaacagaaggat

SEQ ID NO: 98641 - DNA, 25 bp, SARS Virus
cggggcgtaccataacagaaggatg

SEQ ID NO: 98642 - DNA, 25 bp, SARS Virus
ggggcgtaccactacagaaggatgt

SEQ ID NO: 98643 - DNA, 25 bp, SARS Virus
gggcgtaccacatcagaaggatgta

SEQ ID NO: 98644 - DNA, 25 bp, SARS Virus
ggcgtaccacaatagaaggatgtac

SEQ ID NO: 98645 - DNA, 25 bp, SARS Virus
gcgtaccacaactgaaggatgtaca

SEQ ID NO: 98646 - DNA, 25 bp, SARS Virus
cgtaccacaacataaggatgtacag

SEQ ID NO: 98647 - DNA, 25 bp, SARS Virus
gtaccacaacagtaggatgtacagt

SEQ ID NO: 98648 - DNA, 25 bp, SARS Virus
taccacaacagatggatgtacagtg

SEQ ID NO: 98649 - DNA, 25 bp, SARS Virus
accacaacagaatgatgtacagtgc

SEQ ID NO: 98650 - DNA, 25 bp, SARS Virus
ccacaacagaagtatgtacagtgca

SEQ ID NO: 98651 - DNA, 25 bp, SARS Virus
cacaacagaaggttgtacagtgcat

SEQ ID NO: 98652 - DNA, 25 bp, SARS Virus
acaacagaaggatgtacagtgcata

SEQ ID NO: 98653 - DNA, 25 bp, SARS Virus
caacagaaggatttacagtgcatac

SEQ ID NO: 98654 - DNA, 25 bp, SARS Virus
aacagaaggatgtacagtgcataca

SEQ ID NO: 98655 - DNA, 25 bp, SARS Virus
acagaaggatgttcagtgcatacac

SEQ ID NO: 98656 - DNA, 25 bp, SARS Virus
cagaaggatgtatagtgcatacacg

SEQ ID NO: 98657 - DNA, 25 bp, SARS Virus
agaaggatgtactgtgcatacacgg

SEQ ID NO: 98658 - DNA, 25 bp, SARS Virus
gaaggatgtacattgcatacacggt

SEQ ID NO: 98659 - DNA, 25 bp, SARS Virus
aaggatgtacagtgcatacacggta

SEQ ID NO: 98660 - DNA, 25 bp, SARS Virus
aggatgtacagttcatacacggtag

SEQ ID NO: 98661 - DNA, 25 bp, SARS Virus
ggatgtacagtgtatacacggtagg

SEQ ID NO: 98662 - DNA, 25 bp, SARS Virus
gatgtacagtgcttacacggtaggg

SEQ ID NO: 98663 - DNA, 25 bp, SARS Virus
atgtacagtgcatacacggtagggt

SEQ ID NO: 98664 - DNA, 25 bp, SARS Virus
tgtacagtgcattcacggtagggtc

SEQ ID NO: 98665 - DNA, 25 bp, SARS Virus
gtacagtgcatatacggtagggtcc

SEQ ID NO: 98666 - DNA, 25 bp, SARS Virus
tacagtgcatactcggtagggtcct

SEQ ID NO: 98667 - DNA, 25 bp, SARS Virus
acagtgcatacatggtagggtcctc

SEQ ID NO: 98668 - DNA, 25 bp, SARS Virus
cagtgcatacactgtagggtcctct

SEQ ID NO: 98669 - DNA, 25 bp, SARS Virus
agtgcatacacgttagggtcctctc

SEQ ID NO: 98670 - DNA, 25 bp, SARS Virus
gtgcatacacggtagggtcctctcc

SEQ ID NO: 98671 - DNA, 25 bp, SARS Virus
tgcatacacggttgggtcctctcct

SEQ ID NO: 98672 - DNA, 25 bp, SARS Virus
gcatacacggtatggtcctctcctt

SEQ ID NO: 98673 - DNA, 25 bp, SARS Virus
catacacggtagtgtcctctccttg

SEQ ID NO: 98674 - DNA, 25 bp, SARS Virus
atacacggtaggttcctctccttga

SEQ ID NO: 98675 - DNA, 25 bp, SARS Virus
tacacggtagggtcctctccttgaa

SEQ ID NO: 98676 - DNA, 25 bp, SARS Virus
acacggtagggttctctccttgaag

SEQ ID NO: 98677 - DNA, 25 bp, SARS Virus
cacggtagggtcttctccttgaagt

SEQ ID NO: 98678 - DNA, 25 bp, SARS Virus
acggtagggtcctctccttgaagtg

SEQ ID NO: 98679 - DNA, 25 bp, SARS Virus
cggtagggtcctttccttgaagtgg

SEQ ID NO: 98680 - DNA, 25 bp, SARS Virus
ggtagggtcctctccttgaagtggt

SEQ ID NO: 98681 - DNA, 25 bp, SARS Virus
gtagggtcctcttcttgaagtggtg

SEQ ID NO: 98682 - DNA, 25 bp, SARS Virus
tagggtcctctctttgaagtggtgt

SEQ ID NO: 98683 - DNA, 25 bp, SARS Virus
agggtcctctccttgaagtggtgtc

SEQ ID NO: 98684 - DNA, 25 bp, SARS Virus
gggtcctctccttgaagtggtgtcg

SEQ ID NO: 98685 - DNA, 25 bp, SARS Virus
ggtcctctcctttaagtggtgtcgc

SEQ ID NO: 98686 - DNA, 25 bp, SARS Virus
gtcctctccttgtagtggtgtcgcg

SEQ ID NO: 98687 - DNA, 25 bp, SARS Virus
tcctctccttgatgtggtgtcgcgg

SEQ ID NO: 98688 - DNA, 25 bp, SARS Virus
cctctccttgaattggtgtcgcggt

SEQ ID NO: 98689 - DNA, 25 bp, SARS Virus
ctctccttgaagtggtgtcgcggtc

SEQ ID NO: 98690 - DNA, 25 bp, SARS Virus
tctccttgaagttgtgtcgcggtcg

SEQ ID NO: 98691 - DNA, 25 bp, SARS Virus
ctccttgaagtgttgtcgcggtcgt

SEQ ID NO: 98692 - DNA, 25 bp, SARS Virus
tccttgaagtggtgtcgcggtcgtt

SEQ ID NO: 98693 - DNA, 25 bp, SARS Virus
ccttgaagtggtttcgcggtcgtta

SEQ ID NO: 98694 - DNA, 25 bp, SARS Virus
cttgaagtggtgtcgcggtcgttaa

SEQ ID NO: 98695 - DNA, 25 bp, SARS Virus
ttgaagtggtgttgcggtcgttaaa

SEQ ID NO: 98696 - DNA, 25 bp, SARS Virus
tgaagtggtgtctcggtcgttaaac

SEQ ID NO: 98697 - DNA, 25 bp, SARS Virus
gaagtggtgtcgtggtcgttaaaca

SEQ ID NO: 98698 - DNA, 25 bp, SARS Virus
aagtggtgtcgctgtcgttaaacag

SEQ ID NO: 98699 - DNA, 25 bp, SARS Virus
agtggtgtcgcgttcgttaaacagt

SEQ ID NO: 98700 - DNA, 25 bp, SARS Virus
gtggtgtcgcggtcgttaaacagta

SEQ ID NO: 98701 - DNA, 25 bp, SARS Virus
tggtgtcgcggttgttaaacagtac

SEQ ID NO: 98702 - DNA, 25 bp, SARS Virus
ggtgtcgcggtctttaaacagtact

SEQ ID NO: 98703 - DNA, 25 bp, SARS Virus
gtgtcgcggtcgttaaacagtactt

SEQ ID NO: 98704 - DNA, 25 bp, SARS Virus
tgtcgcggtcgttaaacagtacttc

SEQ ID NO: 98705 - DNA, 25 bp, SARS Virus
gtcgcggtcgttaaacagtacttcc

SEQ ID NO: 98706 - DNA, 25 bp, SARS Virus
tcgcggtcgttaaacagtacttccg

SEQ ID NO: 98707 - DNA, 25 bp, SARS Virus
cgcggtcgttaaacagtacttccgt

SEQ ID NO: 98708 - DNA, 25 bp, SARS Virus
gcggtcgttaaaaagtacttccgtt

SEQ ID NO: 98709 - DNA, 25 bp, SARS Virus
cggtcgttaaacagtacttccgttt

SEQ ID NO: 98710 - DNA, 25 bp, SARS Virus
ggtcgttaaacaatacttccgtttc

SEQ ID NO: 98711 - DNA, 25 bp, SARS Virus
gtcgttaaacagaacttccgtttcg

SEQ ID NO: 98712 - DNA, 25 bp, SARS Virus
tcgttaaacagtacttccgtttcgt

SEQ ID NO: 98713 - DNA, 25 bp, SARS Virus
cgttaaacagtaattccgtttcgta

SEQ ID NO: 98714 - DNA, 25 bp, SARS Virus
gttaaacagtacatccgtttcgtat

SEQ ID NO: 98715 - DNA, 25 bp, SARS Virus
ttaaacagtactaccgtttcgtatg

SEQ ID NO: 98716 - DNA, 25 bp, SARS Virus
taaacagtacttacgtttcgtatga

SEQ ID NO: 98717 - DNA, 25 bp, SARS Virus
aaacagtacttcagtttcgtatgaa

SEQ ID NO: 98718 - DNA, 25 bp, SARS Virus
aacagtacttccatttcgtatgaag

SEQ ID NO: 98719 - DNA, 25 bp, SARS Virus
acagtacttccgattcgtatgaagg

SEQ ID NO: 98720 - DNA, 25 bp, SARS Virus
cagtacttccgtatcgtatgaaggg

SEQ ID NO: 98721 - DNA, 25 bp, SARS Virus
agtacttccgttacgtatgaaggga

SEQ ID NO: 98722 - DNA, 25 bp, SARS Virus
gtacttccgtttagtatgaagggag

SEQ ID NO: 98723 - DNA, 25 bp, SARS Virus
tacttccgtttcatatgaagggagc

SEQ ID NO: 98724 - DNA, 25 bp, SARS Virus
acttccgtttcgaatgaagggagca

SEQ ID NO: 98725 - DNA, 25 bp, SARS Virus
cttccgtttcgtatgaagggagcac

SEQ ID NO: 98726 - DNA, 25 bp, SARS Virus
ttccgtttcgtaagaagggagcact

SEQ ID NO: 98727 - DNA, 25 bp, SARS Virus
tccgtttcgtataaagggagcactt

SEQ ID NO: 98728 - DNA, 25 bp, SARS Virus
ccgtttcgtatgaagggagcacttc

SEQ ID NO: 98729 - DNA, 25 bp, SARS Virus
cgtttcgtatgaagggagcacttcc

SEQ ID NO: 98730 - DNA, 25 bp, SARS Virus
gtttcgtatgaaaggagcacttcca

SEQ ID NO: 98731 - DNA, 25 bp, SARS Virus
tttcgtatgaagagagcacttccac

SEQ ID NO: 98732 - DNA, 25 bp, SARS Virus
ttcgtatgaaggaagcacttccaca

SEQ ID NO: 98733 - DNA, 25 bp, SARS Virus
tcgtatgaagggagcacttccacaa

SEQ ID NO: 98734 - DNA, 25 bp, SARS Virus
cgtatgaagggaacacttccacaaa

SEQ ID NO: 98735 - DNA, 25 bp, SARS Virus
gtatgaagggagaacttccacaaaa

SEQ ID NO: 98736 - DNA, 25 bp, SARS Virus
tatgaagggagcacttccacaaaaa

SEQ ID NO: 98737 - DNA, 25 bp, SARS Virus
atgaagggagcaattccacaaaaac

SEQ ID NO: 98738 - DNA, 25 bp, SARS Virus
tgaagggagcacatccacaaaaaca

SEQ ID NO: 98739 - DNA, 25 bp, SARS Virus
gaagggagcactaccacaaaaacac

SEQ ID NO: 98740 - DNA, 25 bp, SARS Virus
aagggagcacttacacaaaaacaca

SEQ ID NO: 98741 - DNA, 25 bp, SARS Virus
agggagcacttcaacaaaaacacaa

SEQ ID NO: 98742 - DNA, 25 bp, SARS Virus
gggagcacttccacaaaaacacaaa

SEQ ID NO: 98743 - DNA, 25 bp, SARS Virus
ggagcacttccaaaaaaacacaaat

SEQ ID NO: 98744 - DNA, 25 bp, SARS Virus
gagcacttccacaaaaacacaaatt

SEQ ID NO: 98745 - DNA, 25 bp, SARS Virus
agcacttccacaaaaacacaaatta

SEQ ID NO: 98746 - DNA, 25 bp, SARS Virus
gcacttccacaaaaacacaaattac

SEQ ID NO: 98747 - DNA, 25 bp, SARS Virus
cacttccacaaaaacacaaattacc

SEQ ID NO: 98748 - DNA, 25 bp, SARS Virus
acttccacaaaaacacaaattaccg

SEQ ID NO: 98749 - DNA, 25 bp, SARS Virus
cttccacaaaaaaacaaattaccgt

SEQ ID NO: 98750 - DNA, 25 bp, SARS Virus
ttccacaaaaacacaaattaccgtg

SEQ ID NO: 98751 - DNA, 25 bp, SARS Virus
tccacaaaaacaaaaattaccgtga

SEQ ID NO: 98752 - DNA, 25 bp, SARS Virus
ccacaaaaacacaaattaccgtgaa

SEQ ID NO: 98753 - DNA, 25 bp, SARS Virus
cacaaaaacacaaattaccgtgaag

SEQ ID NO: 98754 - DNA, 25 bp, SARS Virus
acaaaaacacaaattaccgtgaaga

SEQ ID NO: 98755 - DNA, 25 bp, SARS Virus
caaaaacacaaaataccgtgaagaa

SEQ ID NO: 98756 - DNA, 25 bp, SARS Virus
aaaaacacaaataaccgtgaagaac

SEQ ID NO: 98757 - DNA, 25 bp, SARS Virus
aaaacacaaattaccgtgaagaacc

SEQ ID NO: 98758 - DNA, 25 bp, SARS Virus
aaacacaaattaacgtgaagaacca

SEQ ID NO: 98759 - DNA, 25 bp, SARS Virus
aacacaaattacagtgaagaaccaa

SEQ ID NO: 98760 - DNA, 25 bp, SARS Virus
acacaaattaccatgaagaaccaaa

SEQ ID NO: 98761 - DNA, 25 bp, SARS Virus
cacaaattaccgagaagaaccaaat

SEQ ID NO: 98762 - DNA, 25 bp, SARS Virus
acaaattaccgtaaagaaccaaata

SEQ ID NO: 98763 - DNA, 25 bp, SARS Virus
caaattaccgtgaagaaccaaataa

SEQ ID NO: 98764 - DNA, 25 bp, SARS Virus
aaattaccgtgaagaaccaaataat

SEQ ID NO: 98765 - DNA, 25 bp, SARS Virus
aattaccgtgaaaaaccaaataatg

SEQ ID NO: 98766 - DNA, 25 bp, SARS Virus
attaccgtgaagaaccaaataatgt

SEQ ID NO: 98767 - DNA, 25 bp, SARS Virus
ttaccgtgaagaaccaaataatgtg

SEQ ID NO: 98768 - DNA, 25 bp, SARS Virus
taccgtgaagaaacaaataatgtgt

SEQ ID NO: 98769 - DNA, 25 bp, SARS Virus
accgtgaagaacaaaataatgtgtc

SEQ ID NO: 98770 - DNA, 25 bp, SARS Virus
ccgtgaagaaccaaataatgtgtct

SEQ ID NO: 98771 - DNA, 25 bp, SARS Virus
cgtgaagaaccaaataatgtgtctc

SEQ ID NO: 98772 - DNA, 25 bp, SARS Virus
gtgaagaaccaaataatgtgtctcc

SEQ ID NO: 98773 - DNA, 25 bp, SARS Virus
tgaagaaccaaaaaatgtgtctcct

SEQ ID NO: 98774 - DNA, 25 bp, SARS Virus
gaagaaccaaataatgtgtctcctt

SEQ ID NO: 98775 - DNA, 25 bp, SARS Virus
aagaaccaaataatgtgtctccttg

SEQ ID NO: 98776 - DNA, 25 bp, SARS Virus
agaaccaaataaagtgtctccttga

SEQ ID NO: 98777 - DNA, 25 bp, SARS Virus
gaaccaaataatatgtctccttgaa

SEQ ID NO: 98778 - DNA, 25 bp, SARS Virus
aaccaaataatgagtctccttgaag

SEQ ID NO: 98779 - DNA, 25 bp, SARS Virus
accaaataatgtatctccttgaaga

SEQ ID NO: 98780 - DNA, 25 bp, SARS Virus
ccaaataatgtgactccttgaagaa

SEQ ID NO: 98781 - DNA, 25 bp, SARS Virus
caaataatgtgtatccttgaagaaa

SEQ ID NO: 98782 - DNA, 25 bp, SARS Virus
aaataatgtgtcaccttgaagaaaa

SEQ ID NO: 98783 - DNA, 25 bp, SARS Virus
aataatgtgtctacttgaagaaaag

SEQ ID NO: 98784 - DNA, 25 bp, SARS Virus
ataatgtgtctcattgaagaaaaga

SEQ ID NO: 98785 - DNA, 25 bp, SARS Virus
taatgtgtctccatgaagaaaagag

SEQ ID NO: 98786 - DNA, 25 bp, SARS Virus
aatgtgtctcctagaagaaaagagg

SEQ ID NO: 98787 - DNA, 25 bp, SARS Virus
atgtgtctccttaaagaaaagaggt

SEQ ID NO: 98788 - DNA, 25 bp, SARS Virus
tgtgtctccttgaagaaaagaggtg

SEQ ID NO: 98789 - DNA, 25 bp, SARS Virus
gtgtctccttgaagaaaagaggtgt

SEQ ID NO: 98790 - DNA, 25 bp, SARS Virus
tgtctccttgaaaaaaagaggtgtt

SEQ ID NO: 98791 - DNA, 25 bp, SARS Virus
gtctccttgaagaaaagaggtgttt

SEQ ID NO: 98792 - DNA, 25 bp, SARS Virus
tctccttgaagaaaagaggtgttta

SEQ ID NO: 98793 - DNA, 25 bp, SARS Virus
ctccttgaagaaaagaggtgtttat

SEQ ID NO: 98794 - DNA, 25 bp, SARS Virus
tccttgaagaaaagaggtgtttatt

SEQ ID NO: 98795 - DNA, 25 bp, SARS Virus
ccttgaagaaaaaaggtgtttatta

SEQ ID NO: 98796 - DNA, 25 bp, SARS Virus
cttgaagaaaagaggtgtttattaa

SEQ ID NO: 98797 - DNA, 25 bp, SARS Virus
ttgaagaaaagaagtgtttattaat

SEQ ID NO: 98798 - DNA, 25 bp, SARS Virus
tgaagaaaagagatgtttattaatg

SEQ ID NO: 98799 - DNA, 25 bp, SARS Virus
gaagaaaagaggagtttattaatga

SEQ ID NO: 98800 - DNA, 25 bp, SARS Virus
aagaaaagaggtatttattaatgat

SEQ ID NO: 98801 - DNA, 25 bp, SARS Virus
agaaaagaggtgattattaatgatg

SEQ ID NO: 98802 - DNA, 25 bp, SARS Virus
gaaaagaggtgtatattaatgatgt

SEQ ID NO: 98803 - DNA, 25 bp, SARS Virus
aaaagaggtgttaattaatgatgtc

SEQ ID NO: 98804 - DNA, 25 bp, SARS Virus
aaagaggtgtttattaatgatgtct

SEQ ID NO: 98805 - DNA, 25 bp, SARS Virus
aagaggtgtttaataatgatgtctg

SEQ ID NO: 98806 - DNA, 25 bp, SARS Virus
agaggtgtttataaatgatgtctgt

SEQ ID NO: 98807 - DNA, 25 bp, SARS Virus
gaggtgtttattaatgatgtctgtt

SEQ ID NO: 98808 - DNA, 25 bp, SARS Virus
aggtgtttattaatgatgtctgtta

SEQ ID NO: 98809 - DNA, 25 bp, SARS Virus
ggtgtttattaaagatgtctgttat

SEQ ID NO: 98810 - DNA, 25 bp, SARS Virus
gtgtttattaataatgtctgttatg

SEQ ID NO: 98811 - DNA, 25 bp, SARS Virus
tgtttattaatgatgtctgttatgt

SEQ ID NO: 98812 - DNA, 25 bp, SARS Virus
gtttattaatgaagtctgttatgta

SEQ ID NO: 98813 - DNA, 25 bp, SARS Virus
tttattaatgatatctgttatgtaa

SEQ ID NO: 98814 - DNA, 25 bp, SARS Virus
ttattaatgatgactgttatgtaaa

SEQ ID NO: 98815 - DNA, 25 bp, SARS Virus
tattaatgatgtatgttatgtaaac

SEQ ID NO: 98816 - DNA, 25 bp, SARS Virus
attaatgatgtcagttatgtaaaca

SEQ ID NO: 98817 - DNA, 25 bp, SARS Virus
ttaatgatgtctattatgtaaacag

SEQ ID NO: 98818 - DNA, 25 bp, SARS Virus
taatgatgtctgatatgtaaacaga

SEQ ID NO: 98819 - DNA, 25 bp, SARS Virus
aatgatgtctgtaatgtaaacagag

SEQ ID NO: 98820 - DNA, 25 bp, SARS Virus
atgatgtctgttatgtaaacagagt

SEQ ID NO: 98821 - DNA, 25 bp, SARS Virus
tgatgtctgttaagtaaacagagtc

SEQ ID NO: 98822 - DNA, 25 bp, SARS Virus
gatgtctgttatataaacagagtcc

SEQ ID NO: 98823 - DNA, 25 bp, SARS Virus
atgtctgttatgaaaacagagtcct

SEQ ID NO: 98824 - DNA, 25 bp, SARS Virus
tgtctgttatgtaaacagagtcctt

SEQ ID NO: 98825 - DNA, 25 bp, SARS Virus
gtctgttatgtaaacagagtccttt

SEQ ID NO: 98826 - DNA, 25 bp, SARS Virus
tctgttatgtaaacagagtccttta

SEQ ID NO: 98827 - DNA, 25 bp, SARS Virus
ctgttatgtaaaaagagtcctttaa

SEQ ID NO: 98828 - DNA, 25 bp, SARS Virus
tgttatgtaaacagagtcctttaac

SEQ ID NO: 98829 - DNA, 25 bp, SARS Virus
gttatgtaaacaaagtcctttaaca

SEQ ID NO: 98830 - DNA, 25 bp, SARS Virus
ttatgtaaacagagtcctttaacac

SEQ ID NO: 98831 - DNA, 25 bp, SARS Virus
tatgtaaacagaatcctttaacact

SEQ ID NO: 98832 - DNA, 25 bp, SARS Virus
atgtaaacagagacctttaacacta

SEQ ID NO: 98833 - DNA, 25 bp, SARS Virus
tgtaaacagagtactttaacactac

SEQ ID NO: 98834 - DNA, 25 bp, SARS Virus
gtaaacagagtcatttaacactaca

SEQ ID NO: 98835 - DNA, 25 bp, SARS Virus
taaacagagtccattaacactacag

SEQ ID NO: 98836 - DNA, 25 bp, SARS Virus
aaacagagtcctataacactacagc

SEQ ID NO: 98837 - DNA, 25 bp, SARS Virus
aacagagtccttaaacactacagca

SEQ ID NO: 98838 - DNA, 25 bp, SARS Virus
acagagtcctttaacactacagcaa

SEQ ID NO: 98839 - DNA, 25 bp, SARS Virus
cagagtcctttaacactacagcaat

SEQ ID NO: 98840 - DNA, 25 bp, SARS Virus
agagtcctttaaaactacagcaata

SEQ ID NO: 98841 - DNA, 25 bp, SARS Virus
gagtcctttaacactacagcaataa

SEQ ID NO: 98842 - DNA, 25 bp, SARS Virus
agtcctttaacaatacagcaataac

SEQ ID NO: 98843 - DNA, 25 bp, SARS Virus
gtcctttaacacaacagcaataacc

SEQ ID NO: 98844 - DNA, 25 bp, SARS Virus
tcctttaacactacagcaataaccg

SEQ ID NO: 98845 - DNA, 25 bp, SARS Virus
cctttaacactaaagcaataaccgt

SEQ ID NO: 98846 - DNA, 25 bp, SARS Virus
ctttaacactacagcaataaccgta

SEQ ID NO: 98847 - DNA, 25 bp, SARS Virus
tttaacactacaacaataaccgtag

SEQ ID NO: 98848 - DNA, 25 bp, SARS Virus
ttaacactacagaaataaccgtagt

SEQ ID NO: 98849 - DNA, 25 bp, SARS Virus
taacactacagcaataaccgtagta

SEQ ID NO: 98850 - DNA, 25 bp, SARS Virus
aacactacagcaataaccgtagtaa

SEQ ID NO: 98851 - DNA, 25 bp, SARS Virus
acactacagcaaaaaccgtagtaat

SEQ ID NO: 98852 - DNA, 25 bp, SARS Virus
cactacagcaataaccgtagtaatt

SEQ ID NO: 98853 - DNA, 25 bp, SARS Virus
actacagcaataaccgtagtaattg

SEQ ID NO: 98854 - DNA, 25 bp, SARS Virus
ctacagcaataaacgtagtaattgt

SEQ ID NO: 98855 - DNA, 25 bp, SARS Virus
tacagcaataacagtagtaattgtt

SEQ ID NO: 98856 - DNA, 25 bp, SARS Virus
acagcaataaccatagtaattgttg

SEQ ID NO: 98857 - DNA, 25 bp, SARS Virus
cagcaataaccgaagtaattgttgt

SEQ ID NO: 98858 - DNA, 25 bp, SARS Virus
agcaataaccgtagtaattgttgtg

SEQ ID NO: 98859 - DNA, 25 bp, SARS Virus
gcaataaccgtaataattgttgtgt

SEQ ID NO: 98860 - DNA, 25 bp, SARS Virus
caataaccgtagaaattgttgtgtc

SEQ ID NO: 98861 - DNA, 25 bp, SARS Virus
aataaccgtagtaattgttgtgtca

SEQ ID NO: 98862 - DNA, 25 bp, SARS Virus
ataaccgtagtaattgttgtgtcaa

SEQ ID NO: 98863 - DNA, 25 bp, SARS Virus
taaccgtagtaaatgttgtgtcaaa

SEQ ID NO: 98864 - DNA, 25 bp, SARS Virus
aaccgtagtaatagttgtgtcaaat

SEQ ID NO: 98865 - DNA, 25 bp, SARS Virus
accgtagtaattattgtgtcaaata

SEQ ID NO: 98866 - DNA, 25 bp, SARS Virus
ccgtagtaattgatgtgtcaaatac

SEQ ID NO: 98867 - DNA, 25 bp, SARS Virus
cgtagtaattgtagtgtcaaatact

SEQ ID NO: 98868 - DNA, 25 bp, SARS Virus
gtagtaattgttatgtcaaatacta

SEQ ID NO: 98869 - DNA, 25 bp, SARS Virus
tagtaattgttgagtcaaatactag

SEQ ID NO: 98870 - DNA, 25 bp, SARS Virus
agtaattgttgtatcaaatactagg

SEQ ID NO: 98871 - DNA, 25 bp, SARS Virus
gtaattgttgtgacaaatactagga

SEQ ID NO: 98872 - DNA, 25 bp, SARS Virus
taattgttgtgtaaaatactaggag

SEQ ID NO: 98873 - DNA, 25 bp, SARS Virus
aattgttgtgtcaaatactaggaga

SEQ ID NO: 98874 - DNA, 25 bp, SARS Virus
attgttgtgtcaaatactaggagac

SEQ ID NO: 98875 - DNA, 25 bp, SARS Virus
ttgttgtgtcaaatactaggagacg

SEQ ID NO: 98876 - DNA, 25 bp, SARS Virus
tgttgtgtcaaaaactaggagacgt

SEQ ID NO: 98877 - DNA, 25 bp, SARS Virus
gttgtgtcaaatactaggagacgtt

SEQ ID NO: 98878 - DNA, 25 bp, SARS Virus
ttgtgtcaaataataggagacgttg

SEQ ID NO: 98879 - DNA, 25 bp, SARS Virus
tgtgtcaaatacaaggagacgttgg

SEQ ID NO: 98880 - DNA, 25 bp, SARS Virus
gtgtcaaatactaggagacgttgga

SEQ ID NO: 98881 - DNA, 25 bp, SARS Virus
tgtcaaatactaagagacgttggac

SEQ ID NO: 98882 - DNA, 25 bp, SARS Virus
gtcaaatactagaagacgttggact

SEQ ID NO: 98883 - DNA, 25 bp, SARS Virus
tcaaatactaggagacgttggactc

SEQ ID NO: 98884 - DNA, 25 bp, SARS Virus
caaatactaggaaacgttggactcg

SEQ ID NO: 98885 - DNA, 25 bp, SARS Virus
aaatactaggagacgttggactcga

SEQ ID NO: 98886 - DNA, 25 bp, SARS Virus
aatactaggagaagttggactcgaa

SEQ ID NO: 98887 - DNA, 25 bp, SARS Virus
atactaggagacattggactcgaac

SEQ ID NO: 98888 - DNA, 25 bp, SARS Virus
tactaggagacgatggactcgaact

SEQ ID NO: 98889 - DNA, 25 bp, SARS Virus
actaggagacgtaggactcgaactg

SEQ ID NO: 98890 - DNA, 25 bp, SARS Virus
ctaggagacgttagactcgaactga

SEQ ID NO: 98891 - DNA, 25 bp, SARS Virus
taggagacgttgaactcgaactgag

SEQ ID NO: 98892 - DNA, 25 bp, SARS Virus
aggagacgttggactcgaactgagt

SEQ ID NO: 98893 - DNA, 25 bp, SARS Virus
ggagacgttggaatcgaactgagta

SEQ ID NO: 98894 - DNA, 25 bp, SARS Virus
gagacgttggacacgaactgagtaa

SEQ ID NO: 98895 - DNA, 25 bp, SARS Virus
agacgttggactagaactgagtaag

SEQ ID NO: 98896 - DNA, 25 bp, SARS Virus
gacgttggactcaaactgagtaagt

SEQ ID NO: 98897 - DNA, 25 bp, SARS Virus
acgttggactcgaactgagtaagtt

SEQ ID NO: 98898 - DNA, 25 bp, SARS Virus
cgttggactcgaactgagtaagttt

SEQ ID NO: 98899 - DNA, 25 bp, SARS Virus
gttggactcgaaatgagtaagtttc

SEQ ID NO: 98900 - DNA, 25 bp, SARS Virus
ttggactcgaacagagtaagtttct

SEQ ID NO: 98901 - DNA, 25 bp, SARS Virus
tggactcgaactaagtaagtttctt

SEQ ID NO: 98902 - DNA, 25 bp, SARS Virus
ggactcgaactgagtaagtttcttc

SEQ ID NO: 98903 - DNA, 25 bp, SARS Virus
gactcgaactgaataagtttcttct

SEQ ID NO: 98904 - DNA, 25 bp, SARS Virus
actcgaactgagaaagtttcttctc

SEQ ID NO: 98905 - DNA, 25 bp, SARS Virus
ctcgaactgagtaagtttcttctcg

SEQ ID NO: 98906 - DNA, 25 bp, SARS Virus
tcgaactgagtaagtttcttctcga

SEQ ID NO: 98907 - DNA, 25 bp, SARS Virus
cgaactgagtaaatttcttctcgac

SEQ ID NO: 98908 - DNA, 25 bp, SARS Virus
gaactgagtaagattcttctcgacc

SEQ ID NO: 98909 - DNA, 25 bp, SARS Virus
aactgagtaagtatcttctcgacct

SEQ ID NO: 98910 - DNA, 25 bp, SARS Virus
actgagtaagttacttctcgacctg

SEQ ID NO: 98911 - DNA, 25 bp, SARS Virus
ctgagtaagtttattctcgacctgt

SEQ ID NO: 98912 - DNA, 25 bp, SARS Virus
tgagtaagtttcatctcgacctgtt

SEQ ID NO: 98913 - DNA, 25 bp, SARS Virus
gagtaagtttctactcgacctgttc

SEQ ID NO: 98914 - DNA, 25 bp, SARS Virus
agtaagtttcttatcgacctgttca

SEQ ID NO: 98915 - DNA, 25 bp, SARS Virus
gtaagtttcttcacgacctgttcat

SEQ ID NO: 98916 - DNA, 25 bp, SARS Virus
taagtttcttctagacctgttcatg

SEQ ID NO: 98917 - DNA, 25 bp, SARS Virus
aagtttcttctcaacctgttcatga

SEQ ID NO: 98918 - DNA, 25 bp, SARS Virus
agtttcttctcgacctgttcatgaa

SEQ ID NO: 98919 - DNA, 25 bp, SARS Virus
gtttcttctcgaactgttcatgaag

SEQ ID NO: 98920 - DNA, 25 bp, SARS Virus
tttcttctcgacatgttcatgaagt

SEQ ID NO: 98921 - DNA, 25 bp, SARS Virus
ttcttctcgaccagttcatgaagtt

SEQ ID NO: 98922 - DNA, 25 bp, SARS Virus
tcttctcgacctattcatgaagttt

SEQ ID NO: 98923 - DNA, 25 bp, SARS Virus
cttctcgacctgatcatgaagtttt

SEQ ID NO: 98924 - DNA, 25 bp, SARS Virus
ttctcgacctgtacatgaagttttt

SEQ ID NO: 98925 - DNA, 25 bp, SARS Virus
tctcgacctgttaatgaagttttta

SEQ ID NO: 98926 - DNA, 25 bp, SARS Virus
ctcgacctgttcatgaagtttttag

SEQ ID NO: 98927 - DNA, 25 bp, SARS Virus
tcgacctgttcaagaagtttttagt

SEQ ID NO: 98928 - DNA, 25 bp, SARS Virus
cgacctgttcataaagtttttagta

SEQ ID NO: 98929 - DNA, 25 bp, SARS Virus
gacctgttcatgaagtttttagtat

SEQ ID NO: 98930 - DNA, 25 bp, SARS Virus
acctgttcatgaagtttttagtatg

SEQ ID NO: 98931 - DNA, 25 bp, SARS Virus
cctgttcatgaaatttttagtatgt

SEQ ID NO: 98932 - DNA, 25 bp, SARS Virus
ctgttcatgaagattttagtatgta

SEQ ID NO: 98933 - DNA, 25 bp, SARS Virus
tgttcatgaagtatttagtatgtag

SEQ ID NO: 98934 - DNA, 25 bp, SARS Virus
gttcatgaagttattagtatgtagt

SEQ ID NO: 98935 - DNA, 25 bp, SARS Virus
ttcatgaagtttatagtatgtagtg

SEQ ID NO: 98936 - DNA, 25 bp, SARS Virus
tcatgaagttttaagtatgtagtgg

SEQ ID NO: 98937 - DNA, 25 bp, SARS Virus
catgaagtttttagtatgtagtggt

SEQ ID NO: 98938 - DNA, 25 bp, SARS Virus
atgaagtttttaatatgtagtggtc

SEQ ID NO: 98939 - DNA, 25 bp, SARS Virus
tgaagtttttagaatgtagtggtct

SEQ ID NO: 98940 - DNA, 25 bp, SARS Virus
gaagtttttagtatgtagtggtcta

SEQ ID NO: 98941 - DNA, 25 bp, SARS Virus
aagtttttagtaagtagtggtctac

SEQ ID NO: 98942 - DNA, 25 bp, SARS Virus
agtttttagtatatagtggtctaca

SEQ ID NO: 98943 - DNA, 25 bp, SARS Virus
gtttttagtatgaagtggtctacaa

SEQ ID NO: 98944 - DNA, 25 bp, SARS Virus
tttttagtatgtagtggtctacaac

SEQ ID NO: 98945 - DNA, 25 bp, SARS Virus
ttttagtatgtaatggtctacaact

SEQ ID NO: 98946 - DNA, 25 bp, SARS Virus
tttagtatgtagaggtctacaacta

SEQ ID NO: 98947 - DNA, 25 bp, SARS Virus
ttagtatgtagtagtctacaactag

SEQ ID NO: 98948 - DNA, 25 bp, SARS Virus
tagtatgtagtgatctacaactaga

SEQ ID NO: 98949 - DNA, 25 bp, SARS Virus
agtatgtagtggactacaactagaa

SEQ ID NO: 98950 - DNA, 25 bp, SARS Virus
gtatgtagtggtatacaactagaac

SEQ ID NO: 98951 - DNA, 25 bp, SARS Virus
tatgtagtggtcaacaactagaacc

SEQ ID NO: 98952 - DNA, 25 bp, SARS Virus
atgtagtggtctacaactagaaccg

SEQ ID NO: 98953 - DNA, 25 bp, SARS Virus
tgtagtggtctaaaactagaaccgc

SEQ ID NO: 98954 - DNA, 25 bp, SARS Virus
gtagtggtctacaactagaaccgct

SEQ ID NO: 98955 - DNA, 25 bp, SARS Virus
tagtggtctacaactagaaccgctg

SEQ ID NO: 98956 - DNA, 25 bp, SARS Virus
agtggtctacaaatagaaccgctgt

SEQ ID NO: 98957 - DNA, 25 bp, SARS Virus
gtggtctacaacaagaaccgctgta

SEQ ID NO: 98958 - DNA, 25 bp, SARS Virus
tggtctacaactagaaccgctgtaa

SEQ ID NO: 98959 - DNA, 25 bp, SARS Virus
ggtctacaactaaaaccgctgtaaa

SEQ ID NO: 98960 - DNA, 25 bp, SARS Virus
gtctacaactagaaccgctgtaaag

SEQ ID NO: 98961 - DNA, 25 bp, SARS Virus
tctacaactagaaccgctgtaaagt

SEQ ID NO: 98962 - DNA, 25 bp, SARS Virus
ctacaactagaaacgctgtaaagtc

SEQ ID NO: 98963 - DNA, 25 bp, SARS Virus
tacaactagaacagctgtaaagtcc

SEQ ID NO: 98964 - DNA, 25 bp, SARS Virus
acaactagaaccactgtaaagtccg

SEQ ID NO: 98965 - DNA, 25 bp, SARS Virus
caactagaaccgatgtaaagtccgt

SEQ ID NO: 98966 - DNA, 25 bp, SARS Virus
aactagaaccgcagtaaagtccgta

SEQ ID NO: 98967 - DNA, 25 bp, SARS Virus
actagaaccgctataaagtccgtaa

SEQ ID NO: 98968 - DNA, 25 bp, SARS Virus
ctagaaccgctgaaaagtccgtaat

SEQ ID NO: 98969 - DNA, 25 bp, SARS Virus
tagaaccgctgtaaagtccgtaatt

SEQ ID NO: 98970 - DNA, 25 bp, SARS Virus
agaaccgctgtaaagtccgtaattg

SEQ ID NO: 98971 - DNA, 25 bp, SARS Virus
gaaccgctgtaaagtccgtaattgc

SEQ ID NO: 98972 - DNA, 25 bp, SARS Virus
aaccgctgtaaaatccgtaattgcg

SEQ ID NO: 98973 - DNA, 25 bp, SARS Virus
accgctgtaaagaccgtaattgcga

SEQ ID NO: 98974 - DNA, 25 bp, SARS Virus
ccgctgtaaagtacgtaattgcgaa

SEQ ID NO: 98975 - DNA, 25 bp, SARS Virus
cgctgtaaagtcagtaattgcgaag

SEQ ID NO: 98976 - DNA, 25 bp, SARS Virus
gctgtaaagtccataattgcgaaga

SEQ ID NO: 98977 - DNA, 25 bp, SARS Virus
ctgtaaagtccgaaattgcgaagac

SEQ ID NO: 98978 - DNA, 25 bp, SARS Virus
tgtaaagtccgtaattgcgaagaca

SEQ ID NO: 98979 - DNA, 25 bp, SARS Virus
gtaaagtccgtaattgcgaagacag

SEQ ID NO: 98980 - DNA, 25 bp, SARS Virus
taaagtccgtaaatgcgaagacagc

SEQ ID NO: 98981 - DNA, 25 bp, SARS Virus
aaagtccgtaatagcgaagacagca

SEQ ID NO: 98982 - DNA, 25 bp, SARS Virus
aagtccgtaattacgaagacagcag

SEQ ID NO: 98983 - DNA, 25 bp, SARS Virus
agtccgtaattgagaagacagcagt

SEQ ID NO: 98984 - DNA, 25 bp, SARS Virus
gtccgtaattgcaaagacagcagtt

SEQ ID NO: 98985 - DNA, 25 bp, SARS Virus
tccgtaattgcgaagacagcagttg

SEQ ID NO: 98986 - DNA, 25 bp, SARS Virus
ccgtaattgcgaagacagcagttgt

SEQ ID NO: 98987 - DNA, 25 bp, SARS Virus
cgtaattgcgaaaacagcagttgta

SEQ ID NO: 98988 - DNA, 25 bp, SARS Virus
gtaattgcgaagacagcagttgtaa

SEQ ID NO: 98989 - DNA, 25 bp, SARS Virus
taattgcgaagaaagcagttgtaag

SEQ ID NO: 98990 - DNA, 25 bp, SARS Virus
aattgcgaagacagcagttgtaagt

SEQ ID NO: 98991 - DNA, 25 bp, SARS Virus
attgcgaagacaacagttgtaagtt

SEQ ID NO: 98992 - DNA, 25 bp, SARS Virus
ttgcgaagacagaagttgtaagttt

SEQ ID NO: 98993 - DNA, 25 bp, SARS Virus
tgcgaagacagcagttgtaagtttt

SEQ ID NO: 98994 - DNA, 25 bp, SARS Virus
gcgaagacagcaattgtaagttttt

SEQ ID NO: 98995 - DNA, 25 bp, SARS Virus
cgaagacagcagatgtaagtttttc

SEQ ID NO: 98996 - DNA, 25 bp, SARS Virus
gaagacagcagtagtaagtttttct

SEQ ID NO: 98997 - DNA, 25 bp, SARS Virus
aagacagcagttataagtttttctt

SEQ ID NO: 98998 - DNA, 25 bp, SARS Virus
agacagcagttgaaagtttttcttt

SEQ ID NO: 98999 - DNA, 25 bp, SARS Virus
gacagcagttgtaagtttttcttta

SEQ ID NO: 99000 - DNA, 25 bp, SARS Virus
acagcagttgtaagtttttctttaa

SEQ ID NO: 99001 - DNA, 25 bp, SARS Virus
cagcagttgtaaatttttctttaac

SEQ ID NO: 99002 - DNA, 25 bp, SARS Virus
agcagttgtaagattttctttaact

SEQ ID NO: 99003 - DNA, 25 bp, SARS Virus
gcagttgtaagtatttctttaactg

SEQ ID NO: 99004 - DNA, 25 bp, SARS Virus
cagttgtaagttattctttaactgg

SEQ ID NO: 99005 - DNA, 25 bp, SARS Virus
agttgtaagtttatctttaactggc

SEQ ID NO: 99006 - DNA, 25 bp, SARS Virus
gttgtaagttttactttaactggcg

SEQ ID NO: 99007 - DNA, 25 bp, SARS Virus
ttgtaagtttttatttaactggcgg

SEQ ID NO: 99008 - DNA, 25 bp, SARS Virus
tgtaagtttttcattaactggcgga

SEQ ID NO: 99009 - DNA, 25 bp, SARS Virus
gtaagtttttctataactggcggag

SEQ ID NO: 99010 - DNA, 25 bp, SARS Virus
taagtttttcttaaactggcggagt

SEQ ID NO: 99011 - DNA, 25 bp, SARS Virus
aagtttttctttaactggcggagtt

SEQ ID NO: 99012 - DNA, 25 bp, SARS Virus
agtttttctttaactggcggagtta

SEQ ID NO: 99013 - DNA, 25 bp, SARS Virus
gtttttctttaaatggcggagttac

SEQ ID NO: 99014 - DNA, 25 bp, SARS Virus
tttttctttaacaggcggagttact

SEQ ID NO: 99015 - DNA, 25 bp, SARS Virus
ttttctttaactagcggagttactc

SEQ ID NO: 99016 - DNA, 25 bp, SARS Virus
tttctttaactgacggagttactcc

SEQ ID NO: 99017 - DNA, 25 bp, SARS Virus
ttctttaactggaggagttactcca

SEQ ID NO: 99018 - DNA, 25 bp, SARS Virus
tctttaactggcagagttactccag

SEQ ID NO: 99019 - DNA, 25 bp, SARS Virus
ctttaactggcgaagttactccagc

SEQ ID NO: 99020 - DNA, 25 bp, SARS Virus
tttaactggcggagttactccagcg

SEQ ID NO: 99021 - DNA, 25 bp, SARS Virus
ttaactggcggaattactccagcga

SEQ ID NO: 99022 - DNA, 25 bp, SARS Virus
taactggcggagatactccagcgat

SEQ ID NO: 99023 - DNA, 25 bp, SARS Virus
aactggcggagtaactccagcgatt

SEQ ID NO: 99024 - DNA, 25 bp, SARS Virus
actggcggagttactccagcgattt

SEQ ID NO: 99025 - DNA, 25 bp, SARS Virus
ctggcggagttaatccagcgatttt

SEQ ID NO: 99026 - DNA, 25 bp, SARS Virus
tggcggagttacaccagcgattttt

SEQ ID NO: 99027 - DNA, 25 bp, SARS Virus
ggcggagttactacagcgattttta

SEQ ID NO: 99028 - DNA, 25 bp, SARS Virus
gcggagttactcaagcgatttttaa

SEQ ID NO: 99029 - DNA, 25 bp, SARS Virus
cggagttactccagcgatttttaaa

SEQ ID NO: 99030 - DNA, 25 bp, SARS Virus
ggagttactccaacgatttttaaat

SEQ ID NO: 99031 - DNA, 25 bp, SARS Virus
gagttactccagagatttttaaatt

SEQ ID NO: 99032 - DNA, 25 bp, SARS Virus
agttactccagcaatttttaaattt

SEQ ID NO: 99033 - DNA, 25 bp, SARS Virus
gttactccagcgatttttaaattta

SEQ ID NO: 99034 - DNA, 25 bp, SARS Virus
ttactccagcgaattttaaatttac

SEQ ID NO: 99035 - DNA, 25 bp, SARS Virus
tactccagcgatatttaaatttact

SEQ ID NO: 99036 - DNA, 25 bp, SARS Virus
actccagcgattattaaatttactt

SEQ ID NO: 99037 - DNA, 25 bp, SARS Virus
ctccagcgatttataaatttactta

SEQ ID NO: 99038 - DNA, 25 bp, SARS Virus
tccagcgattttaaaatttacttag

SEQ ID NO: 99039 - DNA, 25 bp, SARS Virus
ccagcgatttttaaatttacttagt

SEQ ID NO: 99040 - DNA, 25 bp, SARS Virus
cagcgatttttaaatttacttagtg

SEQ ID NO: 99041 - DNA, 25 bp, SARS Virus
agcgatttttaaatttacttagtga

SEQ ID NO: 99042 - DNA, 25 bp, SARS Virus
gcgatttttaaaattacttagtgag

SEQ ID NO: 99043 - DNA, 25 bp, SARS Virus
cgatttttaaatatacttagtgagt

SEQ ID NO: 99044 - DNA, 25 bp, SARS Virus
gatttttaaattaacttagtgagta

SEQ ID NO: 99045 - DNA, 25 bp, SARS Virus
atttttaaatttacttagtgagtaa

SEQ ID NO: 99046 - DNA, 25 bp, SARS Virus
tttttaaatttaattagtgagtaac

SEQ ID NO: 99047 - DNA, 25 bp, SARS Virus
ttttaaatttacatagtgagtaact

SEQ ID NO: 99048 - DNA, 25 bp, SARS Virus
tttaaatttactaagtgagtaactg

SEQ ID NO: 99049 - DNA, 25 bp, SARS Virus
ttaaatttacttagtgagtaactgg

SEQ ID NO: 99050 - DNA, 25 bp, SARS Virus
taaatttacttaatgagtaactgga

SEQ ID NO: 99051 - DNA, 25 bp, SARS Virus
aaatttacttagagagtaactggaa

SEQ ID NO: 99052 - DNA, 25 bp, SARS Virus
aatttacttagtaagtaactggaag

SEQ ID NO: 99053 - DNA, 25 bp, SARS Virus
atttacttagtgagtaactggaagt

SEQ ID NO: 99054 - DNA, 25 bp, SARS Virus
tttacttagtgaataactggaagtt

SEQ ID NO: 99055 - DNA, 25 bp, SARS Virus
ttacttagtgagaaactggaagttc

SEQ ID NO: 99056 - DNA, 25 bp, SARS Virus
tacttagtgagtaactggaagttct

SEQ ID NO: 99057 - DNA, 25 bp, SARS Virus
acttagtgagtaactggaagttctt

SEQ ID NO: 99058 - DNA, 25 bp, SARS Virus
cttagtgagtaaatggaagttctta

SEQ ID NO: 99059 - DNA, 25 bp, SARS Virus
ttagtgagtaacaggaagttcttaa

SEQ ID NO: 99060 - DNA, 25 bp, SARS Virus
tagtgagtaactagaagttcttaac

SEQ ID NO: 99061 - DNA, 25 bp, SARS Virus
agtgagtaactgaaagttcttaacc

SEQ ID NO: 99062 - DNA, 25 bp, SARS Virus
gtgagtaactggaagttcttaaccc

SEQ ID NO: 99063 - DNA, 25 bp, SARS Virus
tgagtaactggaagttcttaaccct

SEQ ID NO: 99064 - DNA, 25 bp, SARS Virus
gagtaactggaaattcttaaccctt

SEQ ID NO: 99065 - DNA, 25 bp, SARS Virus
agtaactggaagatcttaacccttt

SEQ ID NO: 99066 - DNA, 25 bp, SARS Virus
gtaactggaagtacttaaccctttt

SEQ ID NO: 99067 - DNA, 25 bp, SARS Virus
taactggaagttattaaccctttta

SEQ ID NO: 99068 - DNA, 25 bp, SARS Virus
aactggaagttcataacccttttat

SEQ ID NO: 99069 - DNA, 25 bp, SARS Virus
actggaagttctaaacccttttata

SEQ ID NO: 99070 - DNA, 25 bp, SARS Virus
ctggaagttcttaacccttttatac

SEQ ID NO: 99071 - DNA, 25 bp, SARS Virus
tggaagttcttaacccttttatact

SEQ ID NO: 99072 - DNA, 25 bp, SARS Virus
ggaagttcttaaaccttttatactc

SEQ ID NO: 99073 - DNA, 25 bp, SARS Virus
gaagttcttaacacttttatactcg

SEQ ID NO: 99074 - DNA, 25 bp, SARS Virus
aagttcttaaccattttatactcgt

SEQ ID NO: 99075 - DNA, 25 bp, SARS Virus
agttcttaacccatttatactcgtt

SEQ ID NO: 99076 - DNA, 25 bp, SARS Virus
gttcttaaccctattatactcgtta

SEQ ID NO: 99077 - DNA, 25 bp, SARS Virus
ttcttaacccttatatactcgttat

SEQ ID NO: 99078 - DNA, 25 bp, SARS Virus
tcttaaccctttaatactcgttata

SEQ ID NO: 99079 - DNA, 25 bp, SARS Virus
cttaacccttttatactcgttatat

SEQ ID NO: 99080 - DNA, 25 bp, SARS Virus
ttaacccttttaaactcgttatata

SEQ ID NO: 99081 - DNA, 25 bp, SARS Virus
taacccttttatactcgttatataa

SEQ ID NO: 99082 - DNA, 25 bp, SARS Virus
aacccttttataatcgttatataat

SEQ ID NO: 99083 - DNA, 25 bp, SARS Virus
acccttttatacacgttatataatt

SEQ ID NO: 99084 - DNA, 25 bp, SARS Virus
cccttttatactagttatataattt

SEQ ID NO: 99085 - DNA, 25 bp, SARS Virus
ccttttatactcattatataattta

SEQ ID NO: 99086 - DNA, 25 bp, SARS Virus
cttttatactcgatatataatttac

SEQ ID NO: 99087 - DNA, 25 bp, SARS Virus
ttttatactcgtaatataatttacc

SEQ ID NO: 99088 - DNA, 25 bp, SARS Virus
tttatactcgttatataatttaccg

SEQ ID NO: 99089 - DNA, 25 bp, SARS Virus
ttatactcgttaaataatttaccgg

SEQ ID NO: 99090 - DNA, 25 bp, SARS Virus
tatactcgttatataatttaccgga

SEQ ID NO: 99091 - DNA, 25 bp, SARS Virus
atactcgttataaaatttaccggaa

SEQ ID NO: 99092 - DNA, 25 bp, SARS Virus
tactcgttatataatttaccggaac

SEQ ID NO: 99093 - DNA, 25 bp, SARS Virus
actcgttatataatttaccggaacc

SEQ ID NO: 99094 - DNA, 25 bp, SARS Virus
ctcgttatataaattaccggaacca

SEQ ID NO: 99095 - DNA, 25 bp, SARS Virus
tcgttatataatataccggaaccat

SEQ ID NO: 99096 - DNA, 25 bp, SARS Virus
cgttatataattaaccggaaccata

SEQ ID NO: 99097 - DNA, 25 bp, SARS Virus
gttatataatttaccggaaccatac

SEQ ID NO: 99098 - DNA, 25 bp, SARS Virus
ttatataatttaacggaaccataca

SEQ ID NO: 99099 - DNA, 25 bp, SARS Virus
tatataatttacaggaaccatacaa

SEQ ID NO: 99100 - DNA, 25 bp, SARS Virus
atataatttaccagaaccatacaaa

SEQ ID NO: 99101 - DNA, 25 bp, SARS Virus
tataatttaccgaaaccatacaaac

SEQ ID NO: 99102 - DNA, 25 bp, SARS Virus
ataatttaccggaaccatacaaacc

SEQ ID NO: 99103 - DNA, 25 bp, SARS Virus
taatttaccggaaccatacaaaccg

SEQ ID NO: 99104 - DNA, 25 bp, SARS Virus
aatttaccggaaacatacaaaccga

SEQ ID NO: 99105 - DNA, 25 bp, SARS Virus
atttaccggaacaatacaaaccgag

SEQ ID NO: 99106 - DNA, 25 bp, SARS Virus
tttaccggaaccatacaaaccgagc

SEQ ID NO: 99107 - DNA, 25 bp, SARS Virus
ttaccggaaccaaacaaaccgagcc

SEQ ID NO: 99108 - DNA, 25 bp, SARS Virus
taccggaaccatacaaaccgagccg

SEQ ID NO: 99109 - DNA, 25 bp, SARS Virus
accggaaccataaaaaccgagccga

SEQ ID NO: 99110 - DNA, 25 bp, SARS Virus
ccggaaccatacaaaccgagccgaa

SEQ ID NO: 99111 - DNA, 25 bp, SARS Virus
cggaaccatacaaaccgagccgaag

SEQ ID NO: 99112 - DNA, 25 bp, SARS Virus
ggaaccatacaaaccgagccgaagt

SEQ ID NO: 99113 - DNA, 25 bp, SARS Virus
gaaccatacaaaacgagccgaagta

SEQ ID NO: 99114 - DNA, 25 bp, SARS Virus
aaccatacaaacagagccgaagtaa

SEQ ID NO: 99115 - DNA, 25 bp, SARS Virus
accatacaaaccaagccgaagtaac

SEQ ID NO: 99116 - DNA, 25 bp, SARS Virus
ccatacaaaccgagccgaagtaacg

SEQ ID NO: 99117 - DNA, 25 bp, SARS Virus
catacaaaccgaaccgaagtaacga

SEQ ID NO: 99118 - DNA, 25 bp, SARS Virus
atacaaaccgagacgaagtaacgac

SEQ ID NO: 99119 - DNA, 25 bp, SARS Virus
tacaaaccgagcagaagtaacgacc

SEQ ID NO: 99120 - DNA, 25 bp, SARS Virus
acaaaccgagccaaagtaacgacct

SEQ ID NO: 99121 - DNA, 25 bp, SARS Virus
caaaccgagccgaagtaacgacctg

SEQ ID NO: 99122 - DNA, 25 bp, SARS Virus
aaaccgagccgaagtaacgacctga

SEQ ID NO: 99123 - DNA, 25 bp, SARS Virus
aaccgagccgaaataacgacctgat

SEQ ID NO: 99124 - DNA, 25 bp, SARS Virus
accgagccgaagaaacgacctgatt

SEQ ID NO: 99125 - DNA, 25 bp, SARS Virus
ccgagccgaagtaacgacctgatta

SEQ ID NO: 99126 - DNA, 25 bp, SARS Virus
cgagccgaagtaacgacctgattaa

SEQ ID NO: 99127 - DNA, 25 bp, SARS Virus
gagccgaagtaaagacctgattaac

SEQ ID NO: 99128 - DNA, 25 bp, SARS Virus
agccgaagtaacaacctgattaacg

SEQ ID NO: 99129 - DNA, 25 bp, SARS Virus
gccgaagtaacgacctgattaacgg

SEQ ID NO: 99130 - DNA, 25 bp, SARS Virus
ccgaagtaacgaactgattaacggt

SEQ ID NO: 99131 - DNA, 25 bp, SARS Virus
cgaagtaacgacatgattaacggta

SEQ ID NO: 99132 - DNA, 25 bp, SARS Virus
gaagtaacgaccagattaacggtag

SEQ ID NO: 99133 - DNA, 25 bp, SARS Virus
aagtaacgacctaattaacggtagc

SEQ ID NO: 99134 - DNA, 25 bp, SARS Virus
agtaacgacctgattaacggtagca

SEQ ID NO: 99135 - DNA, 25 bp, SARS Virus
gtaacgacctgaataacggtagcag

SEQ ID NO: 99136 - DNA, 25 bp, SARS Virus
taacgacctgataaacggtagcagt

SEQ ID NO: 99137 - DNA, 25 bp, SARS Virus
aacgacctgattaacggtagcagta

SEQ ID NO: 99138 - DNA, 25 bp, SARS Virus
acgacctgattaacggtagcagtac

SEQ ID NO: 99139 - DNA, 25 bp, SARS Virus
cgacctgattaaaggtagcagtacc

SEQ ID NO: 99140 - DNA, 25 bp, SARS Virus
gacctgattaacagtagcagtacca

SEQ ID NO: 99141 - DNA, 25 bp, SARS Virus
acctgattaacgatagcagtaccaa

SEQ ID NO: 99142 - DNA, 25 bp, SARS Virus
cctgattaacggaagcagtaccaat

SEQ ID NO: 99143 - DNA, 25 bp, SARS Virus
ctgattaacggtagcagtaccaatg

SEQ ID NO: 99144 - DNA, 25 bp, SARS Virus
tgattaacggtaacagtaccaatgt

SEQ ID NO: 99145 - DNA, 25 bp, SARS Virus
gattaacggtagaagtaccaatgtt

SEQ ID NO: 99146 - DNA, 25 bp, SARS Virus
attaacggtagcagtaccaatgtta

SEQ ID NO: 99147 - DNA, 25 bp, SARS Virus
ttaacggtagcaataccaatgttag

SEQ ID NO: 99148 - DNA, 25 bp, SARS Virus
taacggtagcagaaccaatgttaga

SEQ ID NO: 99149 - DNA, 25 bp, SARS Virus
aacggtagcagtaccaatgttagaa

SEQ ID NO: 99150 - DNA, 25 bp, SARS Virus
acggtagcagtaacaatgttagaac

SEQ ID NO: 99151 - DNA, 25 bp, SARS Virus
cggtagcagtacaaatgttagaacg

SEQ ID NO: 99152 - DNA, 25 bp, SARS Virus
ggtagcagtaccaatgttagaacga

SEQ ID NO: 99153 - DNA, 25 bp, SARS Virus
gtagcagtaccaatgttagaacgaa

SEQ ID NO: 99154 - DNA, 25 bp, SARS Virus
tagcagtaccaaagttagaacgaaa

SEQ ID NO: 99155 - DNA, 25 bp, SARS Virus
agcagtaccaatattagaacgaaac

SEQ ID NO: 99156 - DNA, 25 bp, SARS Virus
gcagtaccaatgatagaacgaaaca

SEQ ID NO: 99157 - DNA, 25 bp, SARS Virus
cagtaccaatgtaagaacgaaacaa

SEQ ID NO: 99158 - DNA, 25 bp, SARS Virus
agtaccaatgttagaacgaaacaac

SEQ ID NO: 99159 - DNA, 25 bp, SARS Virus
gtaccaatgttaaaacgaaacaacg

SEQ ID NO: 99160 - DNA, 25 bp, SARS Virus
taccaatgttagaacgaaacaacgt

SEQ ID NO: 99161 - DNA, 25 bp, SARS Virus
accaatgttagaacgaaacaacgta

SEQ ID NO: 99162 - DNA, 25 bp, SARS Virus
ccaatgttagaaagaaacaacgtac

SEQ ID NO: 99163 - DNA, 25 bp, SARS Virus
caatgttagaacaaaacaacgtact

SEQ ID NO: 99164 - DNA, 25 bp, SARS Virus
aatgttagaacgaaacaacgtactg

SEQ ID NO: 99165 - DNA, 25 bp, SARS Virus
atgttagaacgaaacaacgtactga

SEQ ID NO: 99166 - DNA, 25 bp, SARS Virus
tgttagaacgaaacaacgtactgat

SEQ ID NO: 99167 - DNA, 25 bp, SARS Virus
gttagaacgaaaaaacgtactgatc

SEQ ID NO: 99168 - DNA, 25 bp, SARS Virus
ttagaacgaaacaacgtactgatca

SEQ ID NO: 99169 - DNA, 25 bp, SARS Virus
tagaacgaaacaacgtactgatcaa

SEQ ID NO: 99170 - DNA, 25 bp, SARS Virus
agaacgaaacaaagtactgatcaac

SEQ ID NO: 99171 - DNA, 25 bp, SARS Virus
gaacgaaacaacatactgatcaaca

SEQ ID NO: 99172 - DNA, 25 bp, SARS Virus
aacgaaacaacgaactgatcaacaa

SEQ ID NO: 99173 - DNA, 25 bp, SARS Virus
acgaaacaacgtactgatcaacaac

SEQ ID NO: 99174 - DNA, 25 bp, SARS Virus
cgaaacaacgtaatgatcaacaacg

SEQ ID NO: 99175 - DNA, 25 bp, SARS Virus
gaaacaacgtacagatcaacaacgt

SEQ ID NO: 99176 - DNA, 25 bp, SARS Virus
aaacaacgtactaatcaacaacgtc

SEQ ID NO: 99177 - DNA, 25 bp, SARS Virus
aacaacgtactgatcaacaacgtca

SEQ ID NO: 99178 - DNA, 25 bp, SARS Virus
acaacgtactgaacaacaacgtcaa

SEQ ID NO: 99179 - DNA, 25 bp, SARS Virus
caacgtactgataaacaacgtcaac

SEQ ID NO: 99180 - DNA, 25 bp, SARS Virus
aacgtactgatcaacaacgtcaacg

SEQ ID NO: 99181 - DNA, 25 bp, SARS Virus
acgtactgatcaacaacgtcaacgg

SEQ ID NO: 99182 - DNA, 25 bp, SARS Virus
cgtactgatcaaaaacgtcaacgga

SEQ ID NO: 99183 - DNA, 25 bp, SARS Virus
gtactgatcaacaacgtcaacggag

SEQ ID NO: 99184 - DNA, 25 bp, SARS Virus
tactgatcaacaacgtcaacggagt

SEQ ID NO: 99185 - DNA, 25 bp, SARS Virus
actgatcaacaaagtcaacggagtt

SEQ ID NO: 99186 - DNA, 25 bp, SARS Virus
ctgatcaacaacatcaacggagttc

SEQ ID NO: 99187 - DNA, 25 bp, SARS Virus
tgatcaacaacgacaacggagttcc

SEQ ID NO: 99188 - DNA, 25 bp, SARS Virus
gatcaacaacgtaaacggagttccc

SEQ ID NO: 99189 - DNA, 25 bp, SARS Virus
atcaacaacgtcaacggagttccca

SEQ ID NO: 99190 - DNA, 25 bp, SARS Virus
tcaacaacgtcaacggagttcccac

SEQ ID NO: 99191 - DNA, 25 bp, SARS Virus
caacaacgtcaaaggagttcccacg

SEQ ID NO: 99192 - DNA, 25 bp, SARS Virus
aacaacgtcaacagagttcccacgt

SEQ ID NO: 99193 - DNA, 25 bp, SARS Virus
gtcgcggtcgttcaacagtacttcc

SEQ ID NO: 99194 - DNA, 25 bp, SARS Virus
tcgcggtcgttacacagtacttccg

SEQ ID NO: 99195 - DNA, 25 bp, SARS Virus
cgcggtcgttaaccagtacttccgt

SEQ ID NO: 99196 - DNA, 25 bp, SARS Virus
gcggtcgttaaacagtacttccgtt

SEQ ID NO: 99197 - DNA, 25 bp, SARS Virus
cggtcgttaaaccgtacttccgttt

SEQ ID NO: 99198 - DNA, 25 bp, SARS Virus
ggtcgttaaacactacttccgtttc

SEQ ID NO: 99199 - DNA, 25 bp, SARS Virus
gtcgttaaacagcacttccgtttcg

SEQ ID NO: 99200 - DNA, 25 bp, SARS Virus
tcgttaaacagtccttccgtttcgt

SEQ ID NO: 99201 - DNA, 25 bp, SARS Virus
cgttaaacagtacttccgtttcgta

SEQ ID NO: 99202 - DNA, 25 bp, SARS Virus
gttaaacagtacctccgtttcgtat

SEQ ID NO: 99203 - DNA, 25 bp, SARS Virus
ttaaacagtactcccgtttcgtatg

SEQ ID NO: 99204 - DNA, 25 bp, SARS Virus
taaacagtacttccgtttcgtatga

SEQ ID NO: 99205 - DNA, 25 bp, SARS Virus
aaacagtacttccgtttcgtatgaa

SEQ ID NO: 99206 - DNA, 25 bp, SARS Virus
aacagtacttccctttcgtatgaag

SEQ ID NO: 99207 - DNA, 25 bp, SARS Virus
acagtacttccgcttcgtatgaagg

SEQ ID NO: 99208 - DNA, 25 bp, SARS Virus
cagtacttccgtctcgtatgaaggg

SEQ ID NO: 99209 - DNA, 25 bp, SARS Virus
agtacttccgttccgtatgaaggga

SEQ ID NO: 99210 - DNA, 25 bp, SARS Virus
gtacttccgtttcgtatgaagggag

SEQ ID NO: 99211 - DNA, 25 bp, SARS Virus
tacttccgtttcctatgaagggagc

SEQ ID NO: 99212 - DNA, 25 bp, SARS Virus
acttccgtttcgcatgaagggagca

SEQ ID NO: 99213 - DNA, 25 bp, SARS Virus
cttccgtttcgtctgaagggagcac

SEQ ID NO: 99214 - DNA, 25 bp, SARS Virus
ttccgtttcgtacgaagggagcact

SEQ ID NO: 99215 - DNA, 25 bp, SARS Virus
tccgtttcgtatcaagggagcactt

SEQ ID NO: 99216 - DNA, 25 bp, SARS Virus
ccgtttcgtatgcagggagcacttc

SEQ ID NO: 99217 - DNA, 25 bp, SARS Virus
cgtttcgtatgacgggagcacttcc

SEQ ID NO: 99218 - DNA, 25 bp, SARS Virus
gtttcgtatgaacggagcacttcca

SEQ ID NO: 99219 - DNA, 25 bp, SARS Virus
tttcgtatgaagcgagcacttccac

SEQ ID NO: 99220 - DNA, 25 bp, SARS Virus
ttcgtatgaaggcagcacttccaca

SEQ ID NO: 99221 - DNA, 25 bp, SARS Virus
tcgtatgaagggcgcacttccacaa

SEQ ID NO: 99222 - DNA, 25 bp, SARS Virus
cgtatgaagggaccacttccacaaa

SEQ ID NO: 99223 - DNA, 25 bp, SARS Virus
gtatgaagggagcacttccacaaaa

SEQ ID NO: 99224 - DNA, 25 bp, SARS Virus
tatgaagggagcccttccacaaaaa

SEQ ID NO: 99225 - DNA, 25 bp, SARS Virus
atgaagggagcacttccacaaaaac

SEQ ID NO: 99226 - DNA, 25 bp, SARS Virus
tgaagggagcacctccacaaaaaca

SEQ ID NO: 99227 - DNA, 25 bp, SARS Virus
gaagggagcactcccacaaaaacac

SEQ ID NO: 99228 - DNA, 25 bp, SARS Virus
aagggagcacttccacaaaaacaca

SEQ ID NO: 99229 - DNA, 25 bp, SARS Virus
agggagcacttccacaaaaacacaa

SEQ ID NO: 99230 - DNA, 25 bp, SARS Virus
gggagcacttccccaaaaacacaaa

SEQ ID NO: 99231 - DNA, 25 bp, SARS Virus
ggagcacttccacaaaaacacaaat

SEQ ID NO: 99232 - DNA, 25 bp, SARS Virus
gagcacttccaccaaaacacaaatt

SEQ ID NO: 99233 - DNA, 25 bp, SARS Virus
agcacttccacacaaacacaaatta

SEQ ID NO: 99234 - DNA, 25 bp, SARS Virus
gcacttccacaacaacacaaattac

SEQ ID NO: 99235 - DNA, 25 bp, SARS Virus
cacttccacaaacacacaaattacc

SEQ ID NO: 99236 - DNA, 25 bp, SARS Virus
acttccacaaaaccacaaattaccg

SEQ ID NO: 99237 - DNA, 25 bp, SARS Virus
cttccacaaaaacacaaattaccgt

SEQ ID NO: 99238 - DNA, 25 bp, SARS Virus
ttccacaaaaacccaaattaccgtg

SEQ ID NO: 99239 - DNA, 25 bp, SARS Virus
tccacaaaaacacaaattaccgtga

SEQ ID NO: 99240 - DNA, 25 bp, SARS Virus
ccacaaaaacaccaattaccgtgaa

SEQ ID NO: 99241 - DNA, 25 bp, SARS Virus
cacaaaaacacacattaccgtgaag

SEQ ID NO: 99242 - DNA, 25 bp, SARS Virus
acaaaaacacaacttaccgtgaaga

SEQ ID NO: 99243 - DNA, 25 bp, SARS Virus
caaaaacacaaactaccgtgaagaa

SEQ ID NO: 99244 - DNA, 25 bp, SARS Virus
aaaaacacaaatcaccgtgaagaac

SEQ ID NO: 99245 - DNA, 25 bp, SARS Virus
aaaacacaaattcccgtgaagaacc

SEQ ID NO: 99246 - DNA, 25 bp, SARS Virus
aaacacaaattaccgtgaagaacca

SEQ ID NO: 99247 - DNA, 25 bp, SARS Virus
aacacaaattaccgtgaagaaccaa

SEQ ID NO: 99248 - DNA, 25 bp, SARS Virus
acacaaattaccctgaagaaccaaa

SEQ ID NO: 99249 - DNA, 25 bp, SARS Virus
cacaaattaccgcgaagaaccaaat

SEQ ID NO: 99250 - DNA, 25 bp, SARS Virus
acaaattaccgtcaagaaccaaata

SEQ ID NO: 99251 - DNA, 25 bp, SARS Virus
caaattaccgtgcagaaccaaataa

SEQ ID NO: 99252 - DNA, 25 bp, SARS Virus
aaattaccgtgacgaaccaaataat

SEQ ID NO: 99253 - DNA, 25 bp, SARS Virus
aattaccgtgaacaaccaaataatg

SEQ ID NO: 99254 - DNA, 25 bp, SARS Virus
attaccgtgaagcaccaaataatgt

SEQ ID NO: 99255 - DNA, 25 bp, SARS Virus
ttaccgtgaagacccaaataatgtg

SEQ ID NO: 99256 - DNA, 25 bp, SARS Virus
taccgtgaagaaccaaataatgtgt

SEQ ID NO: 99257 - DNA, 25 bp, SARS Virus
accgtgaagaaccaaataatgtgtc

SEQ ID NO: 99258 - DNA, 25 bp, SARS Virus
ccgtgaagaacccaataatgtgtct

SEQ ID NO: 99259 - DNA, 25 bp, SARS Virus
cgtgaagaaccacataatgtgtctc

SEQ ID NO: 99260 - DNA, 25 bp, SARS Virus
gtgaagaaccaactaatgtgtctcc

SEQ ID NO: 99261 - DNA, 25 bp, SARS Virus
tgaagaaccaaacaatgtgtctcct

SEQ ID NO: 99262 - DNA, 25 bp, SARS Virus
gaagaaccaaatcatgtgtctcctt

SEQ ID NO: 99263 - DNA, 25 bp, SARS Virus
aagaaccaaatactgtgtctccttg

SEQ ID NO: 99264 - DNA, 25 bp, SARS Virus
agaaccaaataacgtgtctccttga

SEQ ID NO: 99265 - DNA, 25 bp, SARS Virus
gaaccaaataatctgtctccttgaa

SEQ ID NO: 99266 - DNA, 25 bp, SARS Virus
aaccaaataatgcgtctccttgaag

SEQ ID NO: 99267 - DNA, 25 bp, SARS Virus
accaaataatgtctctccttgaaga

SEQ ID NO: 99268 - DNA, 25 bp, SARS Virus
ccaaataatgtgcctccttgaagaa

SEQ ID NO: 99269 - DNA, 25 bp, SARS Virus
caaataatgtgtctccttgaagaaa

SEQ ID NO: 99270 - DNA, 25 bp, SARS Virus
aaataatgtgtccccttgaagaaaa

SEQ ID NO: 99271 - DNA, 25 bp, SARS Virus
aataatgtgtctccttgaagaaaag

SEQ ID NO: 99272 - DNA, 25 bp, SARS Virus
ataatgtgtctccttgaagaaaaga

SEQ ID NO: 99273 - DNA, 25 bp, SARS Virus
taatgtgtctccctgaagaaaagag

SEQ ID NO: 99274 - DNA, 25 bp, SARS Virus
aatgtgtctcctcgaagaaaagagg

SEQ ID NO: 99275 - DNA, 25 bp, SARS Virus
atgtgtctccttcaagaaaagaggt

SEQ ID NO: 99276 - DNA, 25 bp, SARS Virus
tgtgtctccttgcagaaaagaggtg

SEQ ID NO: 99277 - DNA, 25 bp, SARS Virus
gtgtctccttgacgaaaagaggtgt

SEQ ID NO: 99278 - DNA, 25 bp, SARS Virus
tgtctccttgaacaaaagaggtgtt

SEQ ID NO: 99279 - DNA, 25 bp, SARS Virus
gtctccttgaagcaaagaggtgttt

SEQ ID NO: 99280 - DNA, 25 bp, SARS Virus
tctccttgaagacaagaggtgttta

SEQ ID NO: 99281 - DNA, 25 bp, SARS Virus
ctccttgaagaacagaggtgtttat

SEQ ID NO: 99282 - DNA, 25 bp, SARS Virus
tccttgaagaaacgaggtgtttatt

SEQ ID NO: 99283 - DNA, 25 bp, SARS Virus
ccttgaagaaaacaggtgtttatta

SEQ ID NO: 99284 - DNA, 25 bp, SARS Virus
cttgaagaaaagcggtgtttattaa

SEQ ID NO: 99285 - DNA, 25 bp, SARS Virus
ttgaagaaaagacgtgtttattaat

SEQ ID NO: 99286 - DNA, 25 bp, SARS Virus
tgaagaaaagagctgtttattaatg

SEQ ID NO: 99287 - DNA, 25 bp, SARS Virus
gaagaaaagaggcgtttattaatga

SEQ ID NO: 99288 - DNA, 25 bp, SARS Virus
aagaaaagaggtctttattaatgat

SEQ ID NO: 99289 - DNA, 25 bp, SARS Virus
agaaaagaggtgcttattaatgatg

SEQ ID NO: 99290 - DNA, 25 bp, SARS Virus
gaaaagaggtgtctattaatgatgt

SEQ ID NO: 99291 - DNA, 25 bp, SARS Virus
aaaagaggtgttcattaatgatgtc

SEQ ID NO: 99292 - DNA, 25 bp, SARS Virus
aaagaggtgtttcttaatgatgtct

SEQ ID NO: 99293 - DNA, 25 bp, SARS Virus
aagaggtgtttactaatgatgtctg

SEQ ID NO: 99294 - DNA, 25 bp, SARS Virus
agaggtgtttatcaatgatgtctgt

SEQ ID NO: 99295 - DNA, 25 bp, SARS Virus
gaggtgtttattcatgatgtctgtt

SEQ ID NO: 99296 - DNA, 25 bp, SARS Virus
aggtgtttattactgatgtctgtta

SEQ ID NO: 99297 - DNA, 25 bp, SARS Virus
ggtgtttattaacgatgtctgttat

SEQ ID NO: 99298 - DNA, 25 bp, SARS Virus
gtgtttattaatcatgtctgttatg

SEQ ID NO: 99299 - DNA, 25 bp, SARS Virus
tgtttattaatgctgtctgttatgt

SEQ ID NO: 99300 - DNA, 25 bp, SARS Virus
gtttattaatgacgtctgttatgta

SEQ ID NO: 99301 - DNA, 25 bp, SARS Virus
tttattaatgatctctgttatgtaa

SEQ ID NO: 99302 - DNA, 25 bp, SARS Virus
ttattaatgatgcctgttatgtaaa

SEQ ID NO: 99303 - DNA, 25 bp, SARS Virus
tattaatgatgtctgttatgtaaac

SEQ ID NO: 99304 - DNA, 25 bp, SARS Virus
attaatgatgtccgttatgtaaaca

SEQ ID NO: 99305 - DNA, 25 bp, SARS Virus
ttaatgatgtctcttatgtaaacag

SEQ ID NO: 99306 - DNA, 25 bp, SARS Virus
taatgatgtctgctatgtaaacaga

SEQ ID NO: 99307 - DNA, 25 bp, SARS Virus
aatgatgtctgtcatgtaaacagag

SEQ ID NO: 99308 - DNA, 25 bp, SARS Virus
atgatgtctgttctgtaaacagagt

SEQ ID NO: 99309 - DNA, 25 bp, SARS Virus
tgatgtctgttacgtaaacagagtc

SEQ ID NO: 99310 - DNA, 25 bp, SARS Virus
gatgtctgttatctaaacagagtcc

SEQ ID NO: 99311 - DNA, 25 bp, SARS Virus
atgtctgttatgcaaacagagtcct

SEQ ID NO: 99312 - DNA, 25 bp, SARS Virus
tgtctgttatgtcaacagagtcctt

SEQ ID NO: 99313 - DNA, 25 bp, SARS Virus
gtctgttatgtacacagagtccttt

SEQ ID NO: 99314 - DNA, 25 bp, SARS Virus
tctgttatgtaaccagagtccttta

SEQ ID NO: 99315 - DNA, 25 bp, SARS Virus
ctgttatgtaaacagagtcctttaa

SEQ ID NO: 99316 - DNA, 25 bp, SARS Virus
tgttatgtaaaccgagtcctttaac

SEQ ID NO: 99317 - DNA, 25 bp, SARS Virus
gttatgtaaacacagtcctttaaca

SEQ ID NO: 99318 - DNA, 25 bp, SARS Virus
ttatgtaaacagcgtcctttaacac

SEQ ID NO: 99319 - DNA, 25 bp, SARS Virus
tatgtaaacagactcctttaacact

SEQ ID NO: 99320 - DNA, 25 bp, SARS Virus
atgtaaacagagccctttaacacta

SEQ ID NO: 99321 - DNA, 25 bp, SARS Virus
tgtaaacagagtcctttaacactac

SEQ ID NO: 99322 - DNA, 25 bp, SARS Virus
gtaaacagagtcctttaacactaca

SEQ ID NO: 99323 - DNA, 25 bp, SARS Virus
taaacagagtcccttaacactacag

SEQ ID NO: 99324 - DNA, 25 bp, SARS Virus
aaacagagtcctctaacactacagc

SEQ ID NO: 99325 - DNA, 25 bp, SARS Virus
aacagagtccttcaacactacagca

SEQ ID NO: 99326 - DNA, 25 bp, SARS Virus
acagagtcctttcacactacagcaa

SEQ ID NO: 99327 - DNA, 25 bp, SARS Virus
cagagtcctttaccactacagcaat

SEQ ID NO: 99328 - DNA, 25 bp, SARS Virus
agagtcctttaacactacagcaata

SEQ ID NO: 99329 - DNA, 25 bp, SARS Virus
gagtcctttaaccctacagcaataa

SEQ ID NO: 99330 - DNA, 25 bp, SARS Virus
agtcctttaacactacagcaataac

SEQ ID NO: 99331 - DNA, 25 bp, SARS Virus
gtcctttaacaccacagcaataacc

SEQ ID NO: 99332 - DNA, 25 bp, SARS Virus
tcctttaacactccagcaataaccg

SEQ ID NO: 99333 - DNA, 25 bp, SARS Virus
cctttaacactacagcaataaccgt

SEQ ID NO: 99334 - DNA, 25 bp, SARS Virus
ctttaacactaccgcaataaccgta

SEQ ID NO: 99335 - DNA, 25 bp, SARS Virus
tttaacactacaccaataaccgtag

SEQ ID NO: 99336 - DNA, 25 bp, SARS Virus
ttaacactacagcaataaccgtagt

SEQ ID NO: 99337 - DNA, 25 bp, SARS Virus
taacactacagccataaccgtagta

SEQ ID NO: 99338 - DNA, 25 bp, SARS Virus
aacactacagcactaaccgtagtaa

SEQ ID NO: 99339 - DNA, 25 bp, SARS Virus
acactacagcaacaaccgtagtaat

SEQ ID NO: 99340 - DNA, 25 bp, SARS Virus
cactacagcaatcaccgtagtaatt

SEQ ID NO: 99341 - DNA, 25 bp, SARS Virus
actacagcaatacccgtagtaattg

SEQ ID NO: 99342 - DNA, 25 bp, SARS Virus
ctacagcaataaccgtagtaattgt

SEQ ID NO: 99343 - DNA, 25 bp, SARS Virus
tacagcaataaccgtagtaattgtt

SEQ ID NO: 99344 - DNA, 25 bp, SARS Virus
acagcaataaccctagtaattgttg

SEQ ID NO: 99345 - DNA, 25 bp, SARS Virus
cagcaataaccgcagtaattgttgt

SEQ ID NO: 99346 - DNA, 25 bp, SARS Virus
agcaataaccgtcgtaattgttgtg

SEQ ID NO: 99347 - DNA, 25 bp, SARS Virus
gcaataaccgtactaattgttgtgt

SEQ ID NO: 99348 - DNA, 25 bp, SARS Virus
caataaccgtagcaattgttgtgtc

SEQ ID NO: 99349 - DNA, 25 bp, SARS Virus
aataaccgtagtcattgttgtgtca

SEQ ID NO: 99350 - DNA, 25 bp, SARS Virus
ataaccgtagtacttgttgtgtcaa

SEQ ID NO: 99351 - DNA, 25 bp, SARS Virus
taaccgtagtaactgttgtgtcaaa

SEQ ID NO: 99352 - DNA, 25 bp, SARS Virus
aaccgtagtaatcgttgtgtcaaat

SEQ ID NO: 99353 - DNA, 25 bp, SARS Virus
accgtagtaattcttgtgtcaaata

SEQ ID NO: 99354 - DNA, 25 bp, SARS Virus
ccgtagtaattgctgtgtcaaatac

SEQ ID NO: 99355 - DNA, 25 bp, SARS Virus
cgtagtaattgtcgtgtcaaatact

SEQ ID NO: 99356 - DNA, 25 bp, SARS Virus
gtagtaattgttctgtcaaatacta

SEQ ID NO: 99357 - DNA, 25 bp, SARS Virus
tagtaattgttgcgtcaaatactag

SEQ ID NO: 99358 - DNA, 25 bp, SARS Virus
agtaattgttgtctcaaatactagg

SEQ ID NO: 99359 - DNA, 25 bp, SARS Virus
gtaattgttgtgccaaatactagga

SEQ ID NO: 99360 - DNA, 25 bp, SARS Virus
taattgttgtgtcaaatactaggag

SEQ ID NO: 99361 - DNA, 25 bp, SARS Virus
aattgttgtgtccaatactaggaga

SEQ ID NO: 99362 - DNA, 25 bp, SARS Virus
attgttgtgtcacatactaggagac

SEQ ID NO: 99363 - DNA, 25 bp, SARS Virus
ttgttgtgtcaactactaggagacg

SEQ ID NO: 99364 - DNA, 25 bp, SARS Virus
tgttgtgtcaaacactaggagacgt

SEQ ID NO: 99365 - DNA, 25 bp, SARS Virus
gttgtgtcaaatcctaggagacgtt

SEQ ID NO: 99366 - DNA, 25 bp, SARS Virus
ttgtgtcaaatactaggagacgttg

SEQ ID NO: 99367 - DNA, 25 bp, SARS Virus
tgtgtcaaataccaggagacgttgg

SEQ ID NO: 99368 - DNA, 25 bp, SARS Virus
gtgtcaaatactcggagacgttgga

SEQ ID NO: 99369 - DNA, 25 bp, SARS Virus
tgtcaaatactacgagacgttggac

SEQ ID NO: 99370 - DNA, 25 bp, SARS Virus
gtcaaatactagcagacgttggact

SEQ ID NO: 99371 - DNA, 25 bp, SARS Virus
tcaaatactaggcgacgttggactc

SEQ ID NO: 99372 - DNA, 25 bp, SARS Virus
caaatactaggacacgttggactcg

SEQ ID NO: 99373 - DNA, 25 bp, SARS Virus
aaatactaggagccgttggactcga

SEQ ID NO: 99374 - DNA, 25 bp, SARS Virus
aatactaggagacgttggactcgaa

SEQ ID NO: 99375 - DNA, 25 bp, SARS Virus
atactaggagaccttggactcgaac

SEQ ID NO: 99376 - DNA, 25 bp, SARS Virus
tactaggagacgctggactcgaact

SEQ ID NO: 99377 - DNA, 25 bp, SARS Virus
actaggagacgtcggactcgaactg

SEQ ID NO: 99378 - DNA, 25 bp, SARS Virus
ctaggagacgttcgactcgaactga

SEQ ID NO: 99379 - DNA, 25 bp, SARS Virus
taggagacgttgcactcgaactgag

SEQ ID NO: 99380 - DNA, 25 bp, SARS Virus
aggagacgttggcctcgaactgagt

SEQ ID NO: 99381 - DNA, 25 bp, SARS Virus
ggagacgttggactcgaactgagta

SEQ ID NO: 99382 - DNA, 25 bp, SARS Virus
gagacgttggacccgaactgagtaa

SEQ ID NO: 99383 - DNA, 25 bp, SARS Virus
agacgttggactcgaactgagtaag

SEQ ID NO: 99384 - DNA, 25 bp, SARS Virus
gacgttggactccaactgagtaagt

SEQ ID NO: 99385 - DNA, 25 bp, SARS Virus
acgttggactcgcactgagtaagtt

SEQ ID NO: 99386 - DNA, 25 bp, SARS Virus
cgttggactcgacctgagtaagttt

SEQ ID NO: 99387 - DNA, 25 bp, SARS Virus
gttggactcgaactgagtaagtttc

SEQ ID NO: 99388 - DNA, 25 bp, SARS Virus
ttggactcgaaccgagtaagtttct

SEQ ID NO: 99389 - DNA, 25 bp, SARS Virus
tggactcgaactcagtaagtttctt

SEQ ID NO: 99390 - DNA, 25 bp, SARS Virus
ggactcgaactgcgtaagtttcttc

SEQ ID NO: 99391 - DNA, 25 bp, SARS Virus
gactcgaactgactaagtttcttct

SEQ ID NO: 99392 - DNA, 25 bp, SARS Virus
actcgaactgagcaagtttcttctc

SEQ ID NO: 99393 - DNA, 25 bp, SARS Virus
ctcgaactgagtcagtttcttctcg

SEQ ID NO: 99394 - DNA, 25 bp, SARS Virus
tcgaactgagtacgtttcttctcga

SEQ ID NO: 99395 - DNA, 25 bp, SARS Virus
cgaactgagtaactttcttctcgac

SEQ ID NO: 99396 - DNA, 25 bp, SARS Virus
gaactgagtaagcttcttctcgacc

SEQ ID NO: 99397 - DNA, 25 bp, SARS Virus
aactgagtaagtctcttctcgacct

SEQ ID NO: 99398 - DNA, 25 bp, SARS Virus
actgagtaagttccttctcgacctg

SEQ ID NO: 99399 - DNA, 25 bp, SARS Virus
ctgagtaagtttcttctcgacctgt

SEQ ID NO: 99400 - DNA, 25 bp, SARS Virus
tgagtaagtttcctctcgacctgtt

SEQ ID NO: 99401 - DNA, 25 bp, SARS Virus
gagtaagtttctcctcgacctgttc

SEQ ID NO: 99402 - DNA, 25 bp, SARS Virus
agtaagtttcttctcgacctgttca

SEQ ID NO: 99403 - DNA, 25 bp, SARS Virus
gtaagtttcttcccgacctgttcat

SEQ ID NO: 99404 - DNA, 25 bp, SARS Virus
taagtttcttctcgacctgttcatg

SEQ ID NO: 99405 - DNA, 25 bp, SARS Virus
aagtttcttctccacctgttcatga

SEQ ID NO: 99406 - DNA, 25 bp, SARS Virus
agtttcttctcgccctgttcatgaa

SEQ ID NO: 99407 - DNA, 25 bp, SARS Virus
gtttcttctcgacctgttcatgaag

SEQ ID NO: 99408 - DNA, 25 bp, SARS Virus
tttcttctcgacctgttcatgaagt

SEQ ID NO: 99409 - DNA, 25 bp, SARS Virus
ttcttctcgacccgttcatgaagtt

SEQ ID NO: 99410 - DNA, 25 bp, SARS Virus
tcttctcgacctcttcatgaagttt

SEQ ID NO: 99411 - DNA, 25 bp, SARS Virus
cttctcgacctgctcatgaagtttt

SEQ ID NO: 99412 - DNA, 25 bp, SARS Virus
ttctcgacctgtccatgaagttttt

SEQ ID NO: 99413 - DNA, 25 bp, SARS Virus
tctcgacctgttcatgaagttttta

SEQ ID NO: 99414 - DNA, 25 bp, SARS Virus
ctcgacctgttcctgaagtttttag

SEQ ID NO: 99415 - DNA, 25 bp, SARS Virus
tcgacctgttcacgaagtttttagt

SEQ ID NO: 99416 - DNA, 25 bp, SARS Virus
cgacctgttcatcaagtttttagta

SEQ ID NO: 99417 - DNA, 25 bp, SARS Virus
gacctgttcatgcagtttttagtat

SEQ ID NO: 99418 - DNA, 25 bp, SARS Virus
acctgttcatgacgtttttagtatg

SEQ ID NO: 99419 - DNA, 25 bp, SARS Virus
cctgttcatgaactttttagtatgt

SEQ ID NO: 99420 - DNA, 25 bp, SARS Virus
ctgttcatgaagcttttagtatgta

SEQ ID NO: 99421 - DNA, 25 bp, SARS Virus
tgttcatgaagtctttagtatgtag

SEQ ID NO: 99422 - DNA, 25 bp, SARS Virus
gttcatgaagttcttagtatgtagt

SEQ ID NO: 99423 - DNA, 25 bp, SARS Virus
ttcatgaagtttctagtatgtagtg

SEQ ID NO: 99424 - DNA, 25 bp, SARS Virus
tcatgaagttttcagtatgtagtgg

SEQ ID NO: 99425 - DNA, 25 bp, SARS Virus
catgaagtttttcgtatgtagtggt

SEQ ID NO: 99426 - DNA, 25 bp, SARS Virus
atgaagtttttactatgtagtggtc

SEQ ID NO: 99427 - DNA, 25 bp, SARS Virus
tgaagtttttagcatgtagtggtct

SEQ ID NO: 99428 - DNA, 25 bp, SARS Virus
gaagtttttagtctgtagtggtcta

SEQ ID NO: 99429 - DNA, 25 bp, SARS Virus
aagtttttagtacgtagtggtctac

SEQ ID NO: 99430 - DNA, 25 bp, SARS Virus
agtttttagtatctagtggtctaca

SEQ ID NO: 99431 - DNA, 25 bp, SARS Virus
gtttttagtatgcagtggtctacaa

SEQ ID NO: 99432 - DNA, 25 bp, SARS Virus
tttttagtatgtcgtggtctacaac

SEQ ID NO: 99433 - DNA, 25 bp, SARS Virus
ttttagtatgtactggtctacaact

SEQ ID NO: 99434 - DNA, 25 bp, SARS Virus
tttagtatgtagcggtctacaacta

SEQ ID NO: 99435 - DNA, 25 bp, SARS Virus
ttagtatgtagtcgtctacaactag

SEQ ID NO: 99436 - DNA, 25 bp, SARS Virus
tagtatgtagtgctctacaactaga

SEQ ID NO: 99437 - DNA, 25 bp, SARS Virus
agtatgtagtggcctacaactagaa

SEQ ID NO: 99438 - DNA, 25 bp, SARS Virus
gtatgtagtggtctacaactagaac

SEQ ID NO: 99439 - DNA, 25 bp, SARS Virus
tatgtagtggtccacaactagaacc

SEQ ID NO: 99440 - DNA, 25 bp, SARS Virus
atgtagtggtctccaactagaaccg

SEQ ID NO: 99441 - DNA, 25 bp, SARS Virus
tgtagtggtctacaactagaaccgc

SEQ ID NO: 99442 - DNA, 25 bp, SARS Virus
gtagtggtctaccactagaaccgct

SEQ ID NO: 99443 - DNA, 25 bp, SARS Virus
tagtggtctacacctagaaccgctg

SEQ ID NO: 99444 - DNA, 25 bp, SARS Virus
agtggtctacaactagaaccgctgt

SEQ ID NO: 99445 - DNA, 25 bp, SARS Virus
gtggtctacaaccagaaccgctgta

SEQ ID NO: 99446 - DNA, 25 bp, SARS Virus
tggtctacaactcgaaccgctgtaa

SEQ ID NO: 99447 - DNA, 25 bp, SARS Virus
ggtctacaactacaaccgctgtaaa

SEQ ID NO: 99448 - DNA, 25 bp, SARS Virus
gtctacaactagcaccgctgtaaag

SEQ ID NO: 99449 - DNA, 25 bp, SARS Virus
tctacaactagacccgctgtaaagt

SEQ ID NO: 99450 - DNA, 25 bp, SARS Virus
ctacaactagaaccgctgtaaagtc

SEQ ID NO: 99451 - DNA, 25 bp, SARS Virus
tacaactagaaccgctgtaaagtcc

SEQ ID NO: 99452 - DNA, 25 bp, SARS Virus
acaactagaacccctgtaaagtccg

SEQ ID NO: 99453 - DNA, 25 bp, SARS Virus
caactagaaccgctgtaaagtccgt

SEQ ID NO: 99454 - DNA, 25 bp, SARS Virus
aactagaaccgccgtaaagtccgta

SEQ ID NO: 99455 - DNA, 25 bp, SARS Virus
actagaaccgctctaaagtccgtaa

SEQ ID NO: 99456 - DNA, 25 bp, SARS Virus
ctagaaccgctgcaaagtccgtaat

SEQ ID NO: 99457 - DNA, 25 bp, SARS Virus
tagaaccgctgtcaagtccgtaatt

SEQ ID NO: 99458 - DNA, 25 bp, SARS Virus
agaaccgctgtacagtccgtaattg

SEQ ID NO: 99459 - DNA, 25 bp, SARS Virus
gaaccgctgtaacgtccgtaattgc

SEQ ID NO: 99460 - DNA, 25 bp, SARS Virus
aaccgctgtaaactccgtaattgcg

SEQ ID NO: 99461 - DNA, 25 bp, SARS Virus
accgctgtaaagcccgtaattgcga

SEQ ID NO: 99462 - DNA, 25 bp, SARS Virus
ccgctgtaaagtccgtaattgcgaa

SEQ ID NO: 99463 - DNA, 25 bp, SARS Virus
cgctgtaaagtccgtaattgcgaag

SEQ ID NO: 99464 - DNA, 25 bp, SARS Virus
gctgtaaagtccctaattgcgaaga

SEQ ID NO: 99465 - DNA, 25 bp, SARS Virus
ctgtaaagtccgcaattgcgaagac

SEQ ID NO: 99466 - DNA, 25 bp, SARS Virus
tgtaaagtccgtcattgcgaagaca

SEQ ID NO: 99467 - DNA, 25 bp, SARS Virus
gtaaagtccgtacttgcgaagacag

SEQ ID NO: 99468 - DNA, 25 bp, SARS Virus
taaagtccgtaactgcgaagacagc

SEQ ID NO: 99469 - DNA, 25 bp, SARS Virus
aaagtccgtaatcgcgaagacagca

SEQ ID NO: 99470 - DNA, 25 bp, SARS Virus
aagtccgtaattccgaagacagcag

SEQ ID NO: 99471 - DNA, 25 bp, SARS Virus
agtccgtaattgcgaagacagcagt

SEQ ID NO: 99472 - DNA, 25 bp, SARS Virus
gtccgtaattgccaagacagcagtt

SEQ ID NO: 99473 - DNA, 25 bp, SARS Virus
tccgtaattgcgcagacagcagttg

SEQ ID NO: 99474 - DNA, 25 bp, SARS Virus
ccgtaattgcgacgacagcagttgt

SEQ ID NO: 99475 - DNA, 25 bp, SARS Virus
cgtaattgcgaacacagcagttgta

SEQ ID NO: 99476 - DNA, 25 bp, SARS Virus
gtaattgcgaagccagcagttgtaa

SEQ ID NO: 99477 - DNA, 25 bp, SARS Virus
taattgcgaagacagcagttgtaag

SEQ ID NO: 99478 - DNA, 25 bp, SARS Virus
aattgcgaagaccgcagttgtaagt

SEQ ID NO: 99479 - DNA, 25 bp, SARS Virus
attgcgaagacaccagttgtaagtt

SEQ ID NO: 99480 - DNA, 25 bp, SARS Virus
ttgcgaagacagcagttgtaagttt

SEQ ID NO: 99481 - DNA, 25 bp, SARS Virus
tgcgaagacagccgttgtaagtttt

SEQ ID NO: 99482 - DNA, 25 bp, SARS Virus
gcgaagacagcacttgtaagttttt

SEQ ID NO: 99483 - DNA, 25 bp, SARS Virus
cgaagacagcagctgtaagtttttc

SEQ ID NO: 99484 - DNA, 25 bp, SARS Virus
gaagacagcagtcgtaagtttttct

SEQ ID NO: 99485 - DNA, 25 bp, SARS Virus
aagacagcagttctaagtttttctt

SEQ ID NO: 99486 - DNA, 25 bp, SARS Virus
agacagcagttgcaagtttttcttt

SEQ ID NO: 99487 - DNA, 25 bp, SARS Virus
gacagcagttgtcagtttttcttta

SEQ ID NO: 99488 - DNA, 25 bp, SARS Virus
acagcagttgtacgtttttctttaa

SEQ ID NO: 99489 - DNA, 25 bp, SARS Virus
cagcagttgtaactttttctttaac

SEQ ID NO: 99490 - DNA, 25 bp, SARS Virus
agcagttgtaagcttttctttaact

SEQ ID NO: 99491 - DNA, 25 bp, SARS Virus
gcagttgtaagtctttctttaactg

SEQ ID NO: 99492 - DNA, 25 bp, SARS Virus
cagttgtaagttcttctttaactgg

SEQ ID NO: 99493 - DNA, 25 bp, SARS Virus
agttgtaagtttctctttaactggc

SEQ ID NO: 99494 - DNA, 25 bp, SARS Virus
gttgtaagttttcctttaactggcg

SEQ ID NO: 99495 - DNA, 25 bp, SARS Virus
ttgtaagtttttctttaactggcgg

SEQ ID NO: 99496 - DNA, 25 bp, SARS Virus
tgtaagtttttccttaactggcgga

SEQ ID NO: 99497 - DNA, 25 bp, SARS Virus
gtaagtttttctctaactggcggag

SEQ ID NO: 99498 - DNA, 25 bp, SARS Virus
taagtttttcttcaactggcggagt

SEQ ID NO: 99499 - DNA, 25 bp, SARS Virus
aagtttttctttcactggcggagtt

SEQ ID NO: 99500 - DNA, 25 bp, SARS Virus
agtttttctttacctggcggagtta

SEQ ID NO: 99501 - DNA, 25 bp, SARS Virus
gtttttctttaactggcggagttac

SEQ ID NO: 99502 - DNA, 25 bp, SARS Virus
tttttctttaaccggcggagttact

SEQ ID NO: 99503 - DNA, 25 bp, SARS Virus
ttttctttaactcgcggagttactc

SEQ ID NO: 99504 - DNA, 25 bp, SARS Virus
tttctttaactgccggagttactcc

SEQ ID NO: 99505 - DNA, 25 bp, SARS Virus
ttctttaactggcggagttactcca

SEQ ID NO: 99506 - DNA, 25 bp, SARS Virus
tctttaactggccgagttactccag

SEQ ID NO: 99507 - DNA, 25 bp, SARS Virus
ctttaactggcgcagttactccagc

SEQ ID NO: 99508 - DNA, 25 bp, SARS Virus
tttaactggcggcgttactccagcg

SEQ ID NO: 99509 - DNA, 25 bp, SARS Virus
ttaactggcggacttactccagcga

SEQ ID NO: 99510 - DNA, 25 bp, SARS Virus
taactggcggagctactccagcgat

SEQ ID NO: 99511 - DNA, 25 bp, SARS Virus
aactggcggagtcactccagcgatt

SEQ ID NO: 99512 - DNA, 25 bp, SARS Virus
actggcggagttcctccagcgattt

SEQ ID NO: 99513 - DNA, 25 bp, SARS Virus
ctggcggagttactccagcgatttt

SEQ ID NO: 99514 - DNA, 25 bp, SARS Virus
tggcggagttaccccagcgattttt

SEQ ID NO: 99515 - DNA, 25 bp, SARS Virus
ggcggagttactccagcgattttta

SEQ ID NO: 99516 - DNA, 25 bp, SARS Virus
gcggagttactccagcgatttttaa

SEQ ID NO: 99517 - DNA, 25 bp, SARS Virus
cggagttactcccgcgatttttaaa

SEQ ID NO: 99518 - DNA, 25 bp, SARS Virus
ggagttactccaccgatttttaaat

SEQ ID NO: 99519 - DNA, 25 bp, SARS Virus
gagttactccagcgatttttaaatt

SEQ ID NO: 99520 - DNA, 25 bp, SARS Virus
agttactccagccatttttaaattt

SEQ ID NO: 99521 - DNA, 25 bp, SARS Virus
gttactccagcgctttttaaattta

SEQ ID NO: 99522 - DNA, 25 bp, SARS Virus
ttactccagcgacttttaaatttac

SEQ ID NO: 99523 - DNA, 25 bp, SARS Virus
tactccagcgatctttaaatttact

SEQ ID NO: 99524 - DNA, 25 bp, SARS Virus
actccagcgattcttaaatttactt

SEQ ID NO: 99525 - DNA, 25 bp, SARS Virus
ctccagcgatttctaaatttactta

SEQ ID NO: 99526 - DNA, 25 bp, SARS Virus
tccagcgattttcaaatttacttag

SEQ ID NO: 99527 - DNA, 25 bp, SARS Virus
ccagcgatttttcaatttacttagt

SEQ ID NO: 99528 - DNA, 25 bp, SARS Virus
cagcgatttttacatttacttagtg

SEQ ID NO: 99529 - DNA, 25 bp, SARS Virus
agcgatttttaactttacttagtga

SEQ ID NO: 99530 - DNA, 25 bp, SARS Virus
gcgatttttaaacttacttagtgag

SEQ ID NO: 99531 - DNA, 25 bp, SARS Virus
cgatttttaaatctacttagtgagt

SEQ ID NO: 99532 - DNA, 25 bp, SARS Virus
gatttttaaattcacttagtgagta

SEQ ID NO: 99533 - DNA, 25 bp, SARS Virus
atttttaaatttccttagtgagtaa

SEQ ID NO: 99534 - DNA, 25 bp, SARS Virus
tttttaaatttacttagtgagtaac

SEQ ID NO: 99535 - DNA, 25 bp, SARS Virus
ttttaaatttacctagtgagtaact

SEQ ID NO: 99536 - DNA, 25 bp, SARS Virus
tttaaatttactcagtgagtaactg

SEQ ID NO: 99537 - DNA, 25 bp, SARS Virus
ttaaatttacttcgtgagtaactgg

SEQ ID NO: 99538 - DNA, 25 bp, SARS Virus
taaatttacttactgagtaactgga

SEQ ID NO: 99539 - DNA, 25 bp, SARS Virus
aaatttacttagcgagtaactggaa

SEQ ID NO: 99540 - DNA, 25 bp, SARS Virus
aatttacttagtcagtaactggaag

SEQ ID NO: 99541 - DNA, 25 bp, SARS Virus
atttacttagtgcgtaactggaagt

SEQ ID NO: 99542 - DNA, 25 bp, SARS Virus
tttacttagtgactaactggaagtt

SEQ ID NO: 99543 - DNA, 25 bp, SARS Virus
ttacttagtgagcaactggaagttc

SEQ ID NO: 99544 - DNA, 25 bp, SARS Virus
tacttagtgagtcactggaagttct

SEQ ID NO: 99545 - DNA, 25 bp, SARS Virus
acttagtgagtacctggaagttctt

SEQ ID NO: 99546 - DNA, 25 bp, SARS Virus
cttagtgagtaactggaagttctta

SEQ ID NO: 99547 - DNA, 25 bp, SARS Virus
ttagtgagtaaccggaagttcttaa

SEQ ID NO: 99548 - DNA, 25 bp, SARS Virus
tagtgagtaactcgaagttcttaac

SEQ ID NO: 99549 - DNA, 25 bp, SARS Virus
agtgagtaactgcaagttcttaacc

SEQ ID NO: 99550 - DNA, 25 bp, SARS Virus
gtgagtaactggcagttcttaaccc

SEQ ID NO: 99551 - DNA, 25 bp, SARS Virus
tgagtaactggacgttcttaaccct

SEQ ID NO: 99552 - DNA, 25 bp, SARS Virus
gagtaactggaacttcttaaccctt

SEQ ID NO: 99553 - DNA, 25 bp, SARS Virus
agtaactggaagctcttaacccttt

SEQ ID NO: 99554 - DNA, 25 bp, SARS Virus
gtaactggaagtccttaaccctttt

SEQ ID NO: 99555 - DNA, 25 bp, SARS Virus
taactggaagttcttaaccctttta

SEQ ID NO: 99556 - DNA, 25 bp, SARS Virus
aactggaagttcctaacccttttat

SEQ ID NO: 99557 - DNA, 25 bp, SARS Virus
actggaagttctcaacccttttata

SEQ ID NO: 99558 - DNA, 25 bp, SARS Virus
ctggaagttcttcacccttttatac

SEQ ID NO: 99559 - DNA, 25 bp, SARS Virus
tggaagttcttaccccttttatact

SEQ ID NO: 99560 - DNA, 25 bp, SARS Virus
ggaagttcttaacccttttatactc

SEQ ID NO: 99561 - DNA, 25 bp, SARS Virus
gaagttcttaacccttttatactcg

SEQ ID NO: 99562 - DNA, 25 bp, SARS Virus
aagttcttaacccttttatactcgt

SEQ ID NO: 99563 - DNA, 25 bp, SARS Virus
agttcttaacccctttatactcgtt

SEQ ID NO: 99564 - DNA, 25 bp, SARS Virus
gttcttaaccctcttatactcgtta

SEQ ID NO: 99565 - DNA, 25 bp, SARS Virus
ttcttaacccttctatactcgttat

SEQ ID NO: 99566 - DNA, 25 bp, SARS Virus
tcttaaccctttcatactcgttata

SEQ ID NO: 99567 - DNA, 25 bp, SARS Virus
cttaacccttttctactcgttatat

SEQ ID NO: 99568 - DNA, 25 bp, SARS Virus
ttaacccttttacactcgttatata

SEQ ID NO: 99569 - DNA, 25 bp, SARS Virus
taacccttttatcctcgttatataa

SEQ ID NO: 99570 - DNA, 25 bp, SARS Virus
aacccttttatactcgttatataat

SEQ ID NO: 99571 - DNA, 25 bp, SARS Virus
acccttttatacccgttatataatt

SEQ ID NO: 99572 - DNA, 25 bp, SARS Virus
cccttttatactcgttatataattt

SEQ ID NO: 99573 - DNA, 25 bp, SARS Virus
ccttttatactccttatataattta

SEQ ID NO: 99574 - DNA, 25 bp, SARS Virus
cttttatactcgctatataatttac

SEQ ID NO: 99575 - DNA, 25 bp, SARS Virus
ttttatactcgtcatataatttacc

SEQ ID NO: 99576 - DNA, 25 bp, SARS Virus
tttatactcgttctataatttaccg

SEQ ID NO: 99577 - DNA, 25 bp, SARS Virus
ttatactcgttacataatttaccgg

SEQ ID NO: 99578 - DNA, 25 bp, SARS Virus
tatactcgttatctaatttaccgga

SEQ ID NO: 99579 - DNA, 25 bp, SARS Virus
atactcgttatacaatttaccggaa

SEQ ID NO: 99580 - DNA, 25 bp, SARS Virus
tactcgttatatcatttaccggaac

SEQ ID NO: 99581 - DNA, 25 bp, SARS Virus
actcgttatatactttaccggaacc

SEQ ID NO: 99582 - DNA, 25 bp, SARS Virus
ctcgttatataacttaccggaacca

SEQ ID NO: 99583 - DNA, 25 bp, SARS Virus
tcgttatataatctaccggaaccat

SEQ ID NO: 99584 - DNA, 25 bp, SARS Virus
cgttatataattcaccggaaccata

SEQ ID NO: 99585 - DNA, 25 bp, SARS Virus
gttatataatttcccggaaccatac

SEQ ID NO: 99586 - DNA, 25 bp, SARS Virus
ttatataatttaccggaaccataca

SEQ ID NO: 99587 - DNA, 25 bp, SARS Virus
tatataatttaccggaaccatacaa

SEQ ID NO: 99588 - DNA, 25 bp, SARS Virus
atataatttacccgaaccatacaaa

SEQ ID NO: 99589 - DNA, 25 bp, SARS Virus
tataatttaccgcaaccatacaaac

SEQ ID NO: 99590 - DNA, 25 bp, SARS Virus
ataatttaccggcaccatacaaacc

SEQ ID NO: 99591 - DNA, 25 bp, SARS Virus
taatttaccggacccatacaaaccg

SEQ ID NO: 99592 - DNA, 25 bp, SARS Virus
aatttaccggaaccatacaaaccga

SEQ ID NO: 99593 - DNA, 25 bp, SARS Virus
atttaccggaaccatacaaaccgag

SEQ ID NO: 99594 - DNA, 25 bp, SARS Virus
tttaccggaaccctacaaaccgagc

SEQ ID NO: 99595 - DNA, 25 bp, SARS Virus
ttaccggaaccacacaaaccgagcc

SEQ ID NO: 99596 - DNA, 25 bp, SARS Virus
taccggaaccatccaaaccgagccg

SEQ ID NO: 99597 - DNA, 25 bp, SARS Virus
accggaaccatacaaaccgagccga

SEQ ID NO: 99598 - DNA, 25 bp, SARS Virus
ccggaaccataccaaccgagccgaa

SEQ ID NO: 99599 - DNA, 25 bp, SARS Virus
cggaaccatacacaccgagccgaag

SEQ ID NO: 99600 - DNA, 25 bp, SARS Virus
ggaaccatacaacccgagccgaagt

SEQ ID NO: 99601 - DNA, 25 bp, SARS Virus
gaaccatacaaaccgagccgaagta

SEQ ID NO: 99602 - DNA, 25 bp, SARS Virus
aaccatacaaaccgagccgaagtaa

SEQ ID NO: 99603 - DNA, 25 bp, SARS Virus
accatacaaacccagccgaagtaac

SEQ ID NO: 99604 - DNA, 25 bp, SARS Virus
ccatacaaaccgcgccgaagtaacg

SEQ ID NO: 99605 - DNA, 25 bp, SARS Virus
catacaaaccgacccgaagtaacga

SEQ ID NO: 99606 - DNA, 25 bp, SARS Virus
atacaaaccgagccgaagtaacgac

SEQ ID NO: 99607 - DNA, 25 bp, SARS Virus
tacaaaccgagccgaagtaacgacc

SEQ ID NO: 99608 - DNA, 25 bp, SARS Virus
acaaaccgagcccaagtaacgacct

SEQ ID NO: 99609 - DNA, 25 bp, SARS Virus
caaaccgagccgcagtaacgacctg

SEQ ID NO: 99610 - DNA, 25 bp, SARS Virus
aaaccgagccgacgtaacgacctga

SEQ ID NO: 99611 - DNA, 25 bp, SARS Virus
aaccgagccgaactaacgacctgat

SEQ ID NO: 99612 - DNA, 25 bp, SARS Virus
accgagccgaagcaacgacctgatt

SEQ ID NO: 99613 - DNA, 25 bp, SARS Virus
ccgagccgaagtcacgacctgatta

SEQ ID NO: 99614 - DNA, 25 bp, SARS Virus
cgagccgaagtaccgacctgattaa

SEQ ID NO: 99615 - DNA, 25 bp, SARS Virus
gagccgaagtaacgacctgattaac

SEQ ID NO: 99616 - DNA, 25 bp, SARS Virus
agccgaagtaaccacctgattaacg

SEQ ID NO: 99617 - DNA, 25 bp, SARS Virus
gccgaagtaacgccctgattaacgg

SEQ ID NO: 99618 - DNA, 25 bp, SARS Virus
ccgaagtaacgacctgattaacggt

SEQ ID NO: 99619 - DNA, 25 bp, SARS Virus
cgaagtaacgacctgattaacggta

SEQ ID NO: 99620 - DNA, 25 bp, SARS Virus
gaagtaacgacccgattaacggtag

SEQ ID NO: 99621 - DNA, 25 bp, SARS Virus
aagtaacgacctcattaacggtagc

SEQ ID NO: 99622 - DNA, 25 bp, SARS Virus
agtaacgacctgcttaacggtagca

SEQ ID NO: 99623 - DNA, 25 bp, SARS Virus
gtaacgacctgactaacggtagcag

SEQ ID NO: 99624 - DNA, 25 bp, SARS Virus
taacgacctgatcaacggtagcagt

SEQ ID NO: 99625 - DNA, 25 bp, SARS Virus
aacgacctgattcacggtagcagta

SEQ ID NO: 99626 - DNA, 25 bp, SARS Virus
acgacctgattaccggtagcagtac

SEQ ID NO: 99627 - DNA, 25 bp, SARS Virus
cgacctgattaacggtagcagtacc

SEQ ID NO: 99628 - DNA, 25 bp, SARS Virus
gacctgattaaccgtagcagtacca

SEQ ID NO: 99629 - DNA, 25 bp, SARS Virus
acctgattaacgctagcagtaccaa

SEQ ID NO: 99630 - DNA, 25 bp, SARS Virus
cctgattaacggcagcagtaccaat

SEQ ID NO: 99631 - DNA, 25 bp, SARS Virus
ctgattaacggtcgcagtaccaatg

SEQ ID NO: 99632 - DNA, 25 bp, SARS Virus
tgattaacggtaccagtaccaatgt

SEQ ID NO: 99633 - DNA, 25 bp, SARS Virus
gattaacggtagcagtaccaatgtt

SEQ ID NO: 99634 - DNA, 25 bp, SARS Virus
attaacggtagccgtaccaatgtta

SEQ ID NO: 99635 - DNA, 25 bp, SARS Virus
ttaacggtagcactaccaatgttag

SEQ ID NO: 99636 - DNA, 25 bp, SARS Virus
taacggtagcagcaccaatgttaga

SEQ ID NO: 99637 - DNA, 25 bp, SARS Virus
aacggtagcagtcccaatgttagaa

SEQ ID NO: 99638 - DNA, 25 bp, SARS Virus
acggtagcagtaccaatgttagaac

SEQ ID NO: 99639 - DNA, 25 bp, SARS Virus
cggtagcagtaccaatgttagaacg

SEQ ID NO: 99640 - DNA, 25 bp, SARS Virus
ggtagcagtacccatgttagaacga

SEQ ID NO: 99641 - DNA, 25 bp, SARS Virus
gtagcagtaccactgttagaacgaa

SEQ ID NO: 99642 - DNA, 25 bp, SARS Virus
tagcagtaccaacgttagaacgaaa

SEQ ID NO: 99643 - DNA, 25 bp, SARS Virus
agcagtaccaatcttagaacgaaac

SEQ ID NO: 99644 - DNA, 25 bp, SARS Virus
gcagtaccaatgctagaacgaaaca

SEQ ID NO: 99645 - DNA, 25 bp, SARS Virus
cagtaccaatgtcagaacgaaacaa

SEQ ID NO: 99646 - DNA, 25 bp, SARS Virus
agtaccaatgttcgaacgaaacaac

SEQ ID NO: 99647 - DNA, 25 bp, SARS Virus
gtaccaatgttacaacgaaacaacg

SEQ ID NO: 99648 - DNA, 25 bp, SARS Virus
taccaatgttagcacgaaacaacgt

SEQ ID NO: 99649 - DNA, 25 bp, SARS Virus
accaatgttagaccgaaacaacgta

SEQ ID NO: 99650 - DNA, 25 bp, SARS Virus
ccaatgttagaacgaaacaacgtac

SEQ ID NO: 99651 - DNA, 25 bp, SARS Virus
caatgttagaaccaaacaacgtact

SEQ ID NO: 99652 - DNA, 25 bp, SARS Virus
aatgttagaacgcaacaacgtactg

SEQ ID NO: 99653 - DNA, 25 bp, SARS Virus
atgttagaacgacacaacgtactga

SEQ ID NO: 99654 - DNA, 25 bp, SARS Virus
tgttagaacgaaccaacgtactgat

SEQ ID NO: 99655 - DNA, 25 bp, SARS Virus
gttagaacgaaacaacgtactgatc

SEQ ID NO: 99656 - DNA, 25 bp, SARS Virus
ttagaacgaaaccacgtactgatca

SEQ ID NO: 99657 - DNA, 25 bp, SARS Virus
tagaacgaaacaccgtactgatcaa

SEQ ID NO: 99658 - DNA, 25 bp, SARS Virus
agaacgaaacaacgtactgatcaac

SEQ ID NO: 99659 - DNA, 25 bp, SARS Virus
gaacgaaacaacctactgatcaaca

SEQ ID NO: 99660 - DNA, 25 bp, SARS Virus
aacgaaacaacgcactgatcaacaa

SEQ ID NO: 99661 - DNA, 25 bp, SARS Virus
acgaaacaacgtcctgatcaacaac

SEQ ID NO: 99662 - DNA, 25 bp, SARS Virus
cgaaacaacgtactgatcaacaacg

SEQ ID NO: 99663 - DNA, 25 bp, SARS Virus
gaaacaacgtaccgatcaacaacgt

SEQ ID NO: 99664 - DNA, 25 bp, SARS Virus
aaacaacgtactcatcaacaacgtc

SEQ ID NO: 99665 - DNA, 25 bp, SARS Virus
aacaacgtactgctcaacaacgtca

SEQ ID NO: 99666 - DNA, 25 bp, SARS Virus
acaacgtactgaccaacaacgtcaa

SEQ ID NO: 99667 - DNA, 25 bp, SARS Virus
caacgtactgatcaacaacgtcaac

SEQ ID NO: 99668 - DNA, 25 bp, SARS Virus
aacgtactgatccacaacgtcaacg

SEQ ID NO: 99669 - DNA, 25 bp, SARS Virus
acgtactgatcaccaacgtcaacgg

SEQ ID NO: 99670 - DNA, 25 bp, SARS Virus
cgtactgatcaacaacgtcaacgga

SEQ ID NO: 99671 - DNA, 25 bp, SARS Virus
gtactgatcaaccacgtcaacggag

SEQ ID NO: 99672 - DNA, 25 bp, SARS Virus
tactgatcaacaccgtcaacggagt

SEQ ID NO: 99673 - DNA, 25 bp, SARS Virus
actgatcaacaacgtcaacggagtt

SEQ ID NO: 99674 - DNA, 25 bp, SARS Virus
ctgatcaacaacctcaacggagttc

SEQ ID NO: 99675 - DNA, 25 bp, SARS Virus
tgatcaacaacgccaacggagttcc

SEQ ID NO: 99676 - DNA, 25 bp, SARS Virus
gatcaacaacgtcaacggagttccc

SEQ ID NO: 99677 - DNA, 25 bp, SARS Virus
atcaacaacgtccacggagttccca

SEQ ID NO: 99678 - DNA, 25 bp, SARS Virus
tcaacaacgtcaccggagttcccac

SEQ ID NO: 99679 - DNA, 25 bp, SARS Virus
caacaacgtcaacggagttcccacg

SEQ ID NO: 99680 - DNA, 25 bp, SARS Virus
aacaacgtcaaccgagttcccacgt

SEQ ID NO: 99681 - DNA, 25 bp, SARS Virus
gtcgcggtcgttgaacagtacttcc

SEQ ID NO: 99682 - DNA, 25 bp, SARS Virus
tcgcggtcgttagacagtacttccg

SEQ ID NO: 99683 - DNA, 25 bp, SARS Virus
cgcggtcgttaagcagtacttccgt

SEQ ID NO: 99684 - DNA, 25 bp, SARS Virus
gcggtcgttaaagagtacttccgtt

SEQ ID NO: 99685 - DNA, 25 bp, SARS Virus
cggtcgttaaacggtacttccgttt

SEQ ID NO: 99686 - DNA, 25 bp, SARS Virus
ggtcgttaaacagtacttccgtttc

SEQ ID NO: 99687 - DNA, 25 bp, SARS Virus
gtcgttaaacaggacttccgtttcg

SEQ ID NO: 99688 - DNA, 25 bp, SARS Virus
tcgttaaacagtgcttccgtttcgt

SEQ ID NO: 99689 - DNA, 25 bp, SARS Virus
cgttaaacagtagttccgtttcgta

SEQ ID NO: 99690 - DNA, 25 bp, SARS Virus
gttaaacagtacgtccgtttcgtat

SEQ ID NO: 99691 - DNA, 25 bp, SARS Virus
ttaaacagtactgccgtttcgtatg

SEQ ID NO: 99692 - DNA, 25 bp, SARS Virus
taaacagtacttgcgtttcgtatga

SEQ ID NO: 99693 - DNA, 25 bp, SARS Virus
aaacagtacttcggtttcgtatgaa

SEQ ID NO: 99694 - DNA, 25 bp, SARS Virus
aacagtacttccgtttcgtatgaag

SEQ ID NO: 99695 - DNA, 25 bp, SARS Virus
acagtacttccggttcgtatgaagg

SEQ ID NO: 99696 - DNA, 25 bp, SARS Virus
cagtacttccgtgtcgtatgaaggg

SEQ ID NO: 99697 - DNA, 25 bp, SARS Virus
agtacttccgttgcgtatgaaggga

SEQ ID NO: 99698 - DNA, 25 bp, SARS Virus
gtacttccgtttggtatgaagggag

SEQ ID NO: 99699 - DNA, 25 bp, SARS Virus
tacttccgtttcgtatgaagggagc

SEQ ID NO: 99700 - DNA, 25 bp, SARS Virus
acttccgtttcggatgaagggagca

SEQ ID NO: 99701 - DNA, 25 bp, SARS Virus
cttccgtttcgtgtgaagggagcac

SEQ ID NO: 99702 - DNA, 25 bp, SARS Virus
ttccgtttcgtaggaagggagcact

SEQ ID NO: 99703 - DNA, 25 bp, SARS Virus
tccgtttcgtatgaagggagcactt

SEQ ID NO: 99704 - DNA, 25 bp, SARS Virus
ccgtttcgtatggagggagcacttc

SEQ ID NO: 99705 - DNA, 25 bp, SARS Virus
cgtttcgtatgaggggagcacttcc

SEQ ID NO: 99706 - DNA, 25 bp, SARS Virus
gtttcgtatgaagggagcacttcca

SEQ ID NO: 99707 - DNA, 25 bp, SARS Virus
tttcgtatgaagggagcacttccac

SEQ ID NO: 99708 - DNA, 25 bp, SARS Virus
ttcgtatgaagggagcacttccaca

SEQ ID NO: 99709 - DNA, 25 bp, SARS Virus
tcgtatgaagggggcacttccacaa

SEQ ID NO: 99710 - DNA, 25 bp, SARS Virus
cgtatgaagggagcacttccacaaa

SEQ ID NO: 99711 - DNA, 25 bp, SARS Virus
gtatgaagggaggacttccacaaaa

SEQ ID NO: 99712 - DNA, 25 bp, SARS Virus
tatgaagggagcgcttccacaaaaa

SEQ ID NO: 99713 - DNA, 25 bp, SARS Virus
atgaagggagcagttccacaaaaac

SEQ ID NO: 99714 - DNA, 25 bp, SARS Virus
tgaagggagcacgtccacaaaaaca

SEQ ID NO: 99715 - DNA, 25 bp, SARS Virus
gaagggagcactgccacaaaaacac

SEQ ID NO: 99716 - DNA, 25 bp, SARS Virus
aagggagcacttgcacaaaaacaca

SEQ ID NO: 99717 - DNA, 25 bp, SARS Virus
agggagcacttcgacaaaaacacaa

SEQ ID NO: 99718 - DNA, 25 bp, SARS Virus
gggagcacttccgcaaaaacacaaa

SEQ ID NO: 99719 - DNA, 25 bp, SARS Virus
ggagcacttccagaaaaacacaaat

SEQ ID NO: 99720 - DNA, 25 bp, SARS Virus
gagcacttccacgaaaacacaaatt

SEQ ID NO: 99721 - DNA, 25 bp, SARS Virus
agcacttccacagaaacacaaatta

SEQ ID NO: 99722 - DNA, 25 bp, SARS Virus
gcacttccacaagaacacaaattac

SEQ ID NO: 99723 - DNA, 25 bp, SARS Virus
cacttccacaaagacacaaattacc

SEQ ID NO: 99724 - DNA, 25 bp, SARS Virus
acttccacaaaagcacaaattaccg

SEQ ID NO: 99725 - DNA, 25 bp, SARS Virus
cttccacaaaaagacaaattaccgt

SEQ ID NO: 99726 - DNA, 25 bp, SARS Virus
ttccacaaaaacgcaaattaccgtg

SEQ ID NO: 99727 - DNA, 25 bp, SARS Virus
tccacaaaaacagaaattaccgtga

SEQ ID NO: 99728 - DNA, 25 bp, SARS Virus
ccacaaaaacacgaattaccgtgaa

SEQ ID NO: 99729 - DNA, 25 bp, SARS Virus
cacaaaaacacagattaccgtgaag

SEQ ID NO: 99730 - DNA, 25 bp, SARS Virus
acaaaaacacaagttaccgtgaaga

SEQ ID NO: 99731 - DNA, 25 bp, SARS Virus
caaaaacacaaagtaccgtgaagaa

SEQ ID NO: 99732 - DNA, 25 bp, SARS Virus
aaaaacacaaatgaccgtgaagaac

SEQ ID NO: 99733 - DNA, 25 bp, SARS Virus
aaaacacaaattgccgtgaagaacc

SEQ ID NO: 99734 - DNA, 25 bp, SARS Virus
aaacacaaattagcgtgaagaacca

SEQ ID NO: 99735 - DNA, 25 bp, SARS Virus
aacacaaattacggtgaagaaccaa

SEQ ID NO: 99736 - DNA, 25 bp, SARS Virus
acacaaattaccgtgaagaaccaaa

SEQ ID NO: 99737 - DNA, 25 bp, SARS Virus
cacaaattaccgggaagaaccaaat

SEQ ID NO: 99738 - DNA, 25 bp, SARS Virus
acaaattaccgtgaagaaccaaata

SEQ ID NO: 99739 - DNA, 25 bp, SARS Virus
caaattaccgtggagaaccaaataa

SEQ ID NO: 99740 - DNA, 25 bp, SARS Virus
aaattaccgtgaggaaccaaataat

SEQ ID NO: 99741 - DNA, 25 bp, SARS Virus
aattaccgtgaagaaccaaataatg

SEQ ID NO: 99742 - DNA, 25 bp, SARS Virus
attaccgtgaaggaccaaataatgt

SEQ ID NO: 99743 - DNA, 25 bp, SARS Virus
ttaccgtgaagagccaaataatgtg

SEQ ID NO: 99744 - DNA, 25 bp, SARS Virus
taccgtgaagaagcaaataatgtgt

SEQ ID NO: 99745 - DNA, 25 bp, SARS Virus
accgtgaagaacgaaataatgtgtc

SEQ ID NO: 99746 - DNA, 25 bp, SARS Virus
ccgtgaagaaccgaataatgtgtct

SEQ ID NO: 99747 - DNA, 25 bp, SARS Virus
cgtgaagaaccagataatgtgtctc

SEQ ID NO: 99748 - DNA, 25 bp, SARS Virus
gtgaagaaccaagtaatgtgtctcc

SEQ ID NO: 99749 - DNA, 25 bp, SARS Virus
tgaagaaccaaagaatgtgtctcct

SEQ ID NO: 99750 - DNA, 25 bp, SARS Virus
gaagaaccaaatgatgtgtctcctt

SEQ ID NO: 99751 - DNA, 25 bp, SARS Virus
aagaaccaaatagtgtgtctccttg

SEQ ID NO: 99752 - DNA, 25 bp, SARS Virus
agaaccaaataaggtgtctccttga

SEQ ID NO: 99753 - DNA, 25 bp, SARS Virus
gaaccaaataatgtgtctccttgaa

SEQ ID NO: 99754 - DNA, 25 bp, SARS Virus
aaccaaataatgggtctccttgaag

SEQ ID NO: 99755 - DNA, 25 bp, SARS Virus
accaaataatgtgtctccttgaaga

SEQ ID NO: 99756 - DNA, 25 bp, SARS Virus
ccaaataatgtggctccttgaagaa

SEQ ID NO: 99757 - DNA, 25 bp, SARS Virus
caaataatgtgtgtccttgaagaaa

SEQ ID NO: 99758 - DNA, 25 bp, SARS Virus
aaataatgtgtcgccttgaagaaaa

SEQ ID NO: 99759 - DNA, 25 bp, SARS Virus
aataatgtgtctgcttgaagaaaag

SEQ ID NO: 99760 - DNA, 25 bp, SARS Virus
ataatgtgtctcgttgaagaaaaga

SEQ ID NO: 99761 - DNA, 25 bp, SARS Virus
taatgtgtctccgtgaagaaaagag

SEQ ID NO: 99762 - DNA, 25 bp, SARS Virus
aatgtgtctcctggaagaaaagagg

SEQ ID NO: 99763 - DNA, 25 bp, SARS Virus
atgtgtctccttgaagaaaagaggt

SEQ ID NO: 99764 - DNA, 25 bp, SARS Virus
tgtgtctccttggagaaaagaggtg

SEQ ID NO: 99765 - DNA, 25 bp, SARS Virus
gtgtctccttgaggaaaagaggtgt

SEQ ID NO: 99766 - DNA, 25 bp, SARS Virus
tgtctccttgaagaaaagaggtgtt

SEQ ID NO: 99767 - DNA, 25 bp, SARS Virus
gtctccttgaaggaaagaggtgttt

SEQ ID NO: 99768 - DNA, 25 bp, SARS Virus
tctccttgaagagaagaggtgttta

SEQ ID NO: 99769 - DNA, 25 bp, SARS Virus
ctccttgaagaagagaggtgtttat

SEQ ID NO: 99770 - DNA, 25 bp, SARS Virus
tccttgaagaaaggaggtgtttatt

SEQ ID NO: 99771 - DNA, 25 bp, SARS Virus
ccttgaagaaaagaggtgtttatta

SEQ ID NO: 99772 - DNA, 25 bp, SARS Virus
cttgaagaaaaggggtgtttattaa

SEQ ID NO: 99773 - DNA, 25 bp, SARS Virus
ttgaagaaaagaggtgtttattaat

SEQ ID NO: 99774 - DNA, 25 bp, SARS Virus
tgaagaaaagaggtgtttattaatg

SEQ ID NO: 99775 - DNA, 25 bp, SARS Virus
gaagaaaagaggggtttattaatga

SEQ ID NO: 99776 - DNA, 25 bp, SARS Virus
aagaaaagaggtgtttattaatgat

SEQ ID NO: 99777 - DNA, 25 bp, SARS Virus
agaaaagaggtggttattaatgatg

SEQ ID NO: 99778 - DNA, 25 bp, SARS Virus
gaaaagaggtgtgtattaatgatgt

SEQ ID NO: 99779 - DNA, 25 bp, SARS Virus
aaaagaggtgttgattaatgatgtc

SEQ ID NO: 99780 - DNA, 25 bp, SARS Virus
aaagaggtgtttgttaatgatgtct

SEQ ID NO: 99781 - DNA, 25 bp, SARS Virus
aagaggtgtttagtaatgatgtctg

SEQ ID NO: 99782 - DNA, 25 bp, SARS Virus
agaggtgtttatgaatgatgtctgt

SEQ ID NO: 99783 - DNA, 25 bp, SARS Virus
gaggtgtttattgatgatgtctgtt

SEQ ID NO: 99784 - DNA, 25 bp, SARS Virus
aggtgtttattagtgatgtctgtta

SEQ ID NO: 99785 - DNA, 25 bp, SARS Virus
ggtgtttattaaggatgtctgttat

SEQ ID NO: 99786 - DNA, 25 bp, SARS Virus
gtgtttattaatgatgtctgttatg

SEQ ID NO: 99787 - DNA, 25 bp, SARS Virus
tgtttattaatggtgtctgttatgt

SEQ ID NO: 99788 - DNA, 25 bp, SARS Virus
gtttattaatgaggtctgttatgta

SEQ ID NO: 99789 - DNA, 25 bp, SARS Virus
tttattaatgatgtctgttatgtaa

SEQ ID NO: 99790 - DNA, 25 bp, SARS Virus
ttattaatgatggctgttatgtaaa

SEQ ID NO: 99791 - DNA, 25 bp, SARS Virus
tattaatgatgtgtgttatgtaaac

SEQ ID NO: 99792 - DNA, 25 bp, SARS Virus
attaatgatgtcggttatgtaaaca

SEQ ID NO: 99793 - DNA, 25 bp, SARS Virus
ttaatgatgtctgttatgtaaacag

SEQ ID NO: 99794 - DNA, 25 bp, SARS Virus
taatgatgtctggtatgtaaacaga

SEQ ID NO: 99795 - DNA, 25 bp, SARS Virus
aatgatgtctgtgatgtaaacagag

SEQ ID NO: 99796 - DNA, 25 bp, SARS Virus
atgatgtctgttgtgtaaacagagt

SEQ ID NO: 99797 - DNA, 25 bp, SARS Virus
tgatgtctgttaggtaaacagagtc

SEQ ID NO: 99798 - DNA, 25 bp, SARS Virus
gatgtctgttatgtaaacagagtcc

SEQ ID NO: 99799 - DNA, 25 bp, SARS Virus
atgtctgttatggaaacagagtcct

SEQ ID NO: 99800 - DNA, 25 bp, SARS Virus
tgtctgttatgtgaacagagtcctt

SEQ ID NO: 99801 - DNA, 25 bp, SARS Virus
gtctgttatgtagacagagtccttt

SEQ ID NO: 99802 - DNA, 25 bp, SARS Virus
tctgttatgtaagcagagtccttta

SEQ ID NO: 99803 - DNA, 25 bp, SARS Virus
ctgttatgtaaagagagtcctttaa

SEQ ID NO: 99804 - DNA, 25 bp, SARS Virus
tgttatgtaaacggagtcctttaac

SEQ ID NO: 99805 - DNA, 25 bp, SARS Virus
gttatgtaaacagagtcctttaaca

SEQ ID NO: 99806 - DNA, 25 bp, SARS Virus
ttatgtaaacagggtcctttaacac

SEQ ID NO: 99807 - DNA, 25 bp, SARS Virus
tatgtaaacagagtcctttaacact

SEQ ID NO: 99808 - DNA, 25 bp, SARS Virus
atgtaaacagaggcctttaacacta

SEQ ID NO: 99809 - DNA, 25 bp, SARS Virus
tgtaaacagagtgctttaacactac

SEQ ID NO: 99810 - DNA, 25 bp, SARS Virus
gtaaacagagtcgtttaacactaca

SEQ ID NO: 99811 - DNA, 25 bp, SARS Virus
taaacagagtccgttaacactacag

SEQ ID NO: 99812 - DNA, 25 bp, SARS Virus
aaacagagtcctgtaacactacagc

SEQ ID NO: 99813 - DNA, 25 bp, SARS Virus
aacagagtccttgaacactacagca

SEQ ID NO: 99814 - DNA, 25 bp, SARS Virus
acagagtcctttgacactacagcaa

SEQ ID NO: 99815 - DNA, 25 bp, SARS Virus
cagagtcctttagcactacagcaat

SEQ ID NO: 99816 - DNA, 25 bp, SARS Virus
agagtcctttaagactacagcaata

SEQ ID NO: 99817 - DNA, 25 bp, SARS Virus
gagtcctttaacgctacagcaataa

SEQ ID NO: 99818 - DNA, 25 bp, SARS Virus
agtcctttaacagtacagcaataac

SEQ ID NO: 99819 - DNA, 25 bp, SARS Virus
gtcctttaacacgacagcaataacc

SEQ ID NO: 99820 - DNA, 25 bp, SARS Virus
tcctttaacactgcagcaataaccg

SEQ ID NO: 99821 - DNA, 25 bp, SARS Virus
cctttaacactagagcaataaccgt

SEQ ID NO: 99822 - DNA, 25 bp, SARS Virus
ctttaacactacggcaataaccgta

SEQ ID NO: 99823 - DNA, 25 bp, SARS Virus
tttaacactacagcaataaccgtag

SEQ ID NO: 99824 - DNA, 25 bp, SARS Virus
ttaacactacaggaataaccgtagt

SEQ ID NO: 99825 - DNA, 25 bp, SARS Virus
taacactacagcgataaccgtagta

SEQ ID NO: 99826 - DNA, 25 bp, SARS Virus
aacactacagcagtaaccgtagtaa

SEQ ID NO: 99827 - DNA, 25 bp, SARS Virus
acactacagcaagaaccgtagtaat

SEQ ID NO: 99828 - DNA, 25 bp, SARS Virus
cactacagcaatgaccgtagtaatt

SEQ ID NO: 99829 - DNA, 25 bp, SARS Virus
actacagcaatagccgtagtaattg

SEQ ID NO: 99830 - DNA, 25 bp, SARS Virus
ctacagcaataagcgtagtaattgt

SEQ ID NO: 99831 - DNA, 25 bp, SARS Virus
tacagcaataacggtagtaattgtt

SEQ ID NO: 99832 - DNA, 25 bp, SARS Virus
acagcaataaccgtagtaattgttg

SEQ ID NO: 99833 - DNA, 25 bp, SARS Virus
cagcaataaccggagtaattgttgt

SEQ ID NO: 99834 - DNA, 25 bp, SARS Virus
agcaataaccgtggtaattgttgtg

SEQ ID NO: 99835 - DNA, 25 bp, SARS Virus
gcaataaccgtagtaattgttgtgt

SEQ ID NO: 99836 - DNA, 25 bp, SARS Virus
caataaccgtaggaattgttgtgtc

SEQ ID NO: 99837 - DNA, 25 bp, SARS Virus
aataaccgtagtgattgttgtgtca

SEQ ID NO: 99838 - DNA, 25 bp, SARS Virus
ataaccgtagtagttgttgtgtcaa

SEQ ID NO: 99839 - DNA, 25 bp, SARS Virus
taaccgtagtaagtgttgtgtcaaa

SEQ ID NO: 99840 - DNA, 25 bp, SARS Virus
aaccgtagtaatggttgtgtcaaat

SEQ ID NO: 99841 - DNA, 25 bp, SARS Virus
accgtagtaattgttgtgtcaaata

SEQ ID NO: 99842 - DNA, 25 bp, SARS Virus
ccgtagtaattggtgtgtcaaatac

SEQ ID NO: 99843 - DNA, 25 bp, SARS Virus
cgtagtaattgtggtgtcaaatact

SEQ ID NO: 99844 - DNA, 25 bp, SARS Virus
gtagtaattgttgtgtcaaatacta

SEQ ID NO: 99845 - DNA, 25 bp, SARS Virus
tagtaattgttgggtcaaatactag

SEQ ID NO: 99846 - DNA, 25 bp, SARS Virus
agtaattgttgtgtcaaatactagg

SEQ ID NO: 99847 - DNA, 25 bp, SARS Virus
gtaattgttgtggcaaatactagga

SEQ ID NO: 99848 - DNA, 25 bp, SARS Virus
taattgttgtgtgaaatactaggag

SEQ ID NO: 99849 - DNA, 25 bp, SARS Virus
aattgttgtgtcgaatactaggaga

SEQ ID NO: 99850 - DNA, 25 bp, SARS Virus
attgttgtgtcagatactaggagac

SEQ ID NO: 99851 - DNA, 25 bp, SARS Virus
ttgttgtgtcaagtactaggagacg

SEQ ID NO: 99852 - DNA, 25 bp, SARS Virus
tgttgtgtcaaagactaggagacgt

SEQ ID NO: 99853 - DNA, 25 bp, SARS Virus
gttgtgtcaaatgctaggagacgtt

SEQ ID NO: 99854 - DNA, 25 bp, SARS Virus
ttgtgtcaaatagtaggagacgttg

SEQ ID NO: 99855 - DNA, 25 bp, SARS Virus
tgtgtcaaatacgaggagacgttgg

SEQ ID NO: 99856 - DNA, 25 bp, SARS Virus
gtgtcaaatactgggagacgttgga

SEQ ID NO: 99857 - DNA, 25 bp, SARS Virus
tgtcaaatactaggagacgttggac

SEQ ID NO: 99858 - DNA, 25 bp, SARS Virus
gtcaaatactaggagacgttggact

SEQ ID NO: 99859 - DNA, 25 bp, SARS Virus
tcaaatactaggggacgttggactc

SEQ ID NO: 99860 - DNA, 25 bp, SARS Virus
caaatactaggagacgttggactcg

SEQ ID NO: 99861 - DNA, 25 bp, SARS Virus
aaatactaggaggcgttggactcga

SEQ ID NO: 99862 - DNA, 25 bp, SARS Virus
aatactaggagaggttggactcgaa

SEQ ID NO: 99863 - DNA, 25 bp, SARS Virus
atactaggagacgttggactcgaac

SEQ ID NO: 99864 - DNA, 25 bp, SARS Virus
tactaggagacggtggactcgaact

SEQ ID NO: 99865 - DNA, 25 bp, SARS Virus
actaggagacgtgggactcgaactg

SEQ ID NO: 99866 - DNA, 25 bp, SARS Virus
ctaggagacgttggactcgaactga

SEQ ID NO: 99867 - DNA, 25 bp, SARS Virus
taggagacgttggactcgaactgag

SEQ ID NO: 99868 - DNA, 25 bp, SARS Virus
aggagacgttgggctcgaactgagt

SEQ ID NO: 99869 - DNA, 25 bp, SARS Virus
ggagacgttggagtcgaactgagta

SEQ ID NO: 99870 - DNA, 25 bp, SARS Virus
gagacgttggacgcgaactgagtaa

SEQ ID NO: 99871 - DNA, 25 bp, SARS Virus
agacgttggactggaactgagtaag

SEQ ID NO: 99872 - DNA, 25 bp, SARS Virus
gacgttggactcgaactgagtaagt

SEQ ID NO: 99873 - DNA, 25 bp, SARS Virus
acgttggactcggactgagtaagtt

SEQ ID NO: 99874 - DNA, 25 bp, SARS Virus
cgttggactcgagctgagtaagttt

SEQ ID NO: 99875 - DNA, 25 bp, SARS Virus
gttggactcgaagtgagtaagtttc

SEQ ID NO: 99876 - DNA, 25 bp, SARS Virus
ttggactcgaacggagtaagtttct

SEQ ID NO: 99877 - DNA, 25 bp, SARS Virus
tggactcgaactgagtaagtttctt

SEQ ID NO: 99878 - DNA, 25 bp, SARS Virus
ggactcgaactgggtaagtttcttc

SEQ ID NO: 99879 - DNA, 25 bp, SARS Virus
gactcgaactgagtaagtttcttct

SEQ ID NO: 99880 - DNA, 25 bp, SARS Virus
actcgaactgaggaagtttcttctc

SEQ ID NO: 99881 - DNA, 25 bp, SARS Virus
ctcgaactgagtgagtttcttctcg

SEQ ID NO: 99882 - DNA, 25 bp, SARS Virus
tcgaactgagtaggtttcttctcga

SEQ ID NO: 99883 - DNA, 25 bp, SARS Virus
cgaactgagtaagtttcttctcgac

SEQ ID NO: 99884 - DNA, 25 bp, SARS Virus
gaactgagtaaggttcttctcgacc

SEQ ID NO: 99885 - DNA, 25 bp, SARS Virus
aactgagtaagtgtcttctcgacct

SEQ ID NO: 99886 - DNA, 25 bp, SARS Virus
actgagtaagttgcttctcgacctg

SEQ ID NO: 99887 - DNA, 25 bp, SARS Virus
ctgagtaagtttgttctcgacctgt

SEQ ID NO: 99888 - DNA, 25 bp, SARS Virus
tgagtaagtttcgtctcgacctgtt

SEQ ID NO: 99889 - DNA, 25 bp, SARS Virus
gagtaagtttctgctcgacctgttc

SEQ ID NO: 99890 - DNA, 25 bp, SARS Virus
agtaagtttcttgtcgacctgttca

SEQ ID NO: 99891 - DNA, 25 bp, SARS Virus
gtaagtttcttcgcgacctgttcat

SEQ ID NO: 99892 - DNA, 25 bp, SARS Virus
taagtttcttctggacctgttcatg

SEQ ID NO: 99893 - DNA, 25 bp, SARS Virus
aagtttcttctcgacctgttcatga

SEQ ID NO: 99894 - DNA, 25 bp, SARS Virus
agtttcttctcggcctgttcatgaa

SEQ ID NO: 99895 - DNA, 25 bp, SARS Virus
gtttcttctcgagctgttcatgaag

SEQ ID NO: 99896 - DNA, 25 bp, SARS Virus
tttcttctcgacgtgttcatgaagt

SEQ ID NO: 99897 - DNA, 25 bp, SARS Virus
ttcttctcgaccggttcatgaagtt

SEQ ID NO: 99898 - DNA, 25 bp, SARS Virus
tcttctcgacctgttcatgaagttt

SEQ ID NO: 99899 - DNA, 25 bp, SARS Virus
cttctcgacctggtcatgaagtttt

SEQ ID NO: 99900 - DNA, 25 bp, SARS Virus
ttctcgacctgtgcatgaagttttt

SEQ ID NO: 99901 - DNA, 25 bp, SARS Virus
tctcgacctgttgatgaagttttta

SEQ ID NO: 99902 - DNA, 25 bp, SARS Virus
ctcgacctgttcgtgaagtttttag

SEQ ID NO: 99903 - DNA, 25 bp, SARS Virus
tcgacctgttcaggaagtttttagt

SEQ ID NO: 99904 - DNA, 25 bp, SARS Virus
cgacctgttcatgaagtttttagta

SEQ ID NO: 99905 - DNA, 25 bp, SARS Virus
gacctgttcatggagtttttagtat

SEQ ID NO: 99906 - DNA, 25 bp, SARS Virus
acctgttcatgaggtttttagtatg

SEQ ID NO: 99907 - DNA, 25 bp, SARS Virus
cctgttcatgaagtttttagtatgt

SEQ ID NO: 99908 - DNA, 25 bp, SARS Virus
ctgttcatgaaggttttagtatgta

SEQ ID NO: 99909 - DNA, 25 bp, SARS Virus
tgttcatgaagtgtttagtatgtag

SEQ ID NO: 99910 - DNA, 25 bp, SARS Virus
gttcatgaagttgttagtatgtagt

SEQ ID NO: 99911 - DNA, 25 bp, SARS Virus
ttcatgaagtttgtagtatgtagtg

SEQ ID NO: 99912 - DNA, 25 bp, SARS Virus
tcatgaagttttgagtatgtagtgg

SEQ ID NO: 99913 - DNA, 25 bp, SARS Virus
catgaagtttttggtatgtagtggt

SEQ ID NO: 99914 - DNA, 25 bp, SARS Virus
atgaagtttttagtatgtagtggtc

SEQ ID NO: 99915 - DNA, 25 bp, SARS Virus
tgaagtttttaggatgtagtggtct

SEQ ID NO: 99916 - DNA, 25 bp, SARS Virus
gaagtttttagtgtgtagtggtcta

SEQ ID NO: 99917 - DNA, 25 bp, SARS Virus
aagtttttagtaggtagtggtctac

SEQ ID NO: 99918 - DNA, 25 bp, SARS Virus
agtttttagtatgtagtggtctaca

SEQ ID NO: 99919 - DNA, 25 bp, SARS Virus
gtttttagtatggagtggtctacaa

SEQ ID NO: 99920 - DNA, 25 bp, SARS Virus
tttttagtatgtggtggtctacaac

SEQ ID NO: 99921 - DNA, 25 bp, SARS Virus
ttttagtatgtagtggtctacaact

SEQ ID NO: 99922 - DNA, 25 bp, SARS Virus
tttagtatgtaggggtctacaacta

SEQ ID NO: 99923 - DNA, 25 bp, SARS Virus
ttagtatgtagtggtctacaactag

SEQ ID NO: 99924 - DNA, 25 bp, SARS Virus
tagtatgtagtggtctacaactaga

SEQ ID NO: 99925 - DNA, 25 bp, SARS Virus
agtatgtagtgggctacaactagaa

SEQ ID NO: 99926 - DNA, 25 bp, SARS Virus
gtatgtagtggtgtacaactagaac

SEQ ID NO: 99927 - DNA, 25 bp, SARS Virus
tatgtagtggtcgacaactagaacc

SEQ ID NO: 99928 - DNA, 25 bp, SARS Virus
atgtagtggtctgcaactagaaccg

SEQ ID NO: 99929 - DNA, 25 bp, SARS Virus
tgtagtggtctagaactagaaccgc

SEQ ID NO: 99930 - DNA, 25 bp, SARS Virus
gtagtggtctacgactagaaccgct

SEQ ID NO: 99931 - DNA, 25 bp, SARS Virus
tagtggtctacagctagaaccgctg

SEQ ID NO: 99932 - DNA, 25 bp, SARS Virus
agtggtctacaagtagaaccgctgt

SEQ ID NO: 99933 - DNA, 25 bp, SARS Virus
gtggtctacaacgagaaccgctgta

SEQ ID NO: 99934 - DNA, 25 bp, SARS Virus
tggtctacaactggaaccgctgtaa

SEQ ID NO: 99935 - DNA, 25 bp, SARS Virus
ggtctacaactagaaccgctgtaaa

SEQ ID NO: 99936 - DNA, 25 bp, SARS Virus
gtctacaactaggaccgctgtaaag

SEQ ID NO: 99937 - DNA, 25 bp, SARS Virus
tctacaactagagccgctgtaaagt

SEQ ID NO: 99938 - DNA, 25 bp, SARS Virus
ctacaactagaagcgctgtaaagtc

SEQ ID NO: 99939 - DNA, 25 bp, SARS Virus
tacaactagaacggctgtaaagtcc

SEQ ID NO: 99940 - DNA, 25 bp, SARS Virus
acaactagaaccgctgtaaagtccg

SEQ ID NO: 99941 - DNA, 25 bp, SARS Virus
caactagaaccggtgtaaagtccgt

SEQ ID NO: 99942 - DNA, 25 bp, SARS Virus
aactagaaccgcggtaaagtccgta

SEQ ID NO: 99943 - DNA, 25 bp, SARS Virus
actagaaccgctgtaaagtccgtaa

SEQ ID NO: 99944 - DNA, 25 bp, SARS Virus
ctagaaccgctggaaagtccgtaat

SEQ ID NO: 99945 - DNA, 25 bp, SARS Virus
tagaaccgctgtgaagtccgtaatt

SEQ ID NO: 99946 - DNA, 25 bp, SARS Virus
agaaccgctgtagagtccgtaattg

SEQ ID NO: 99947 - DNA, 25 bp, SARS Virus
gaaccgctgtaaggtccgtaattgc

SEQ ID NO: 99948 - DNA, 25 bp, SARS Virus
aaccgctgtaaagtccgtaattgcg

SEQ ID NO: 99949 - DNA, 25 bp, SARS Virus
accgctgtaaaggccgtaattgcga

SEQ ID NO: 99950 - DNA, 25 bp, SARS Virus
ccgctgtaaagtgcgtaattgcgaa

SEQ ID NO: 99951 - DNA, 25 bp, SARS Virus
cgctgtaaagtcggtaattgcgaag

SEQ ID NO: 99952 - DNA, 25 bp, SARS Virus
gctgtaaagtccgtaattgcgaaga

SEQ ID NO: 99953 - DNA, 25 bp, SARS Virus
ctgtaaagtccggaattgcgaagac

SEQ ID NO: 99954 - DNA, 25 bp, SARS Virus
tgtaaagtccgtgattgcgaagaca

SEQ ID NO: 99955 - DNA, 25 bp, SARS Virus
gtaaagtccgtagttgcgaagacag

SEQ ID NO: 99956 - DNA, 25 bp, SARS Virus
taaagtccgtaagtgcgaagacagc

SEQ ID NO: 99957 - DNA, 25 bp, SARS Virus
aaagtccgtaatggcgaagacagca

SEQ ID NO: 99958 - DNA, 25 bp, SARS Virus
aagtccgtaattgcgaagacagcag

SEQ ID NO: 99959 - DNA, 25 bp, SARS Virus
agtccgtaattgggaagacagcagt

SEQ ID NO: 99960 - DNA, 25 bp, SARS Virus
gtccgtaattgcgaagacagcagtt

SEQ ID NO: 99961 - DNA, 25 bp, SARS Virus
tccgtaattgcggagacagcagttg

SEQ ID NO: 99962 - DNA, 25 bp, SARS Virus
ccgtaattgcgaggacagcagttgt

SEQ ID NO: 99963 - DNA, 25 bp, SARS Virus
cgtaattgcgaagacagcagttgta

SEQ ID NO: 99964 - DNA, 25 bp, SARS Virus
gtaattgcgaaggcagcagttgtaa

SEQ ID NO: 99965 - DNA, 25 bp, SARS Virus
taattgcgaagagagcagttgtaag

SEQ ID NO: 99966 - DNA, 25 bp, SARS Virus
aattgcgaagacggcagttgtaagt

SEQ ID NO: 99967 - DNA, 25 bp, SARS Virus
attgcgaagacagcagttgtaagtt

SEQ ID NO: 99968 - DNA, 25 bp, SARS Virus
ttgcgaagacaggagttgtaagttt

SEQ ID NO: 99969 - DNA, 25 bp, SARS Virus
tgcgaagacagcggttgtaagtttt

SEQ ID NO: 99970 - DNA, 25 bp, SARS Virus
gcgaagacagcagttgtaagttttt

SEQ ID NO: 99971 - DNA, 25 bp, SARS Virus
cgaagacagcaggtgtaagtttttc

SEQ ID NO: 99972 - DNA, 25 bp, SARS Virus
gaagacagcagtggtaagtttttct

SEQ ID NO: 99973 - DNA, 25 bp, SARS Virus
aagacagcagttgtaagtttttctt

SEQ ID NO: 99974 - DNA, 25 bp, SARS Virus
agacagcagttggaagtttttcttt

SEQ ID NO: 99975 - DNA, 25 bp, SARS Virus
gacagcagttgtgagtttttcttta

SEQ ID NO: 99976 - DNA, 25 bp, SARS Virus
acagcagttgtaggtttttctttaa

SEQ ID NO: 99977 - DNA, 25 bp, SARS Virus
cagcagttgtaagtttttctttaac

SEQ ID NO: 99978 - DNA, 25 bp, SARS Virus
agcagttgtaaggttttctttaact

SEQ ID NO: 99979 - DNA, 25 bp, SARS Virus
gcagttgtaagtgtttctttaactg

SEQ ID NO: 99980 - DNA, 25 bp, SARS Virus
cagttgtaagttgttctttaactgg

SEQ ID NO: 99981 - DNA, 25 bp, SARS Virus
agttgtaagtttgtctttaactggc

SEQ ID NO: 99982 - DNA, 25 bp, SARS Virus
gttgtaagttttgctttaactggcg

SEQ ID NO: 99983 - DNA, 25 bp, SARS Virus
ttgtaagtttttgtttaactggcgg

SEQ ID NO: 99984 - DNA, 25 bp, SARS Virus
tgtaagtttttcgttaactggcgga

SEQ ID NO: 99985 - DNA, 25 bp, SARS Virus
gtaagtttttctgtaactggcggag

SEQ ID NO: 99986 - DNA, 25 bp, SARS Virus
taagtttttcttgaactggcggagt

SEQ ID NO: 99987 - DNA, 25 bp, SARS Virus
aagtttttctttgactggcggagtt

SEQ ID NO: 99988 - DNA, 25 bp, SARS Virus
agtttttctttagctggcggagtta

SEQ ID NO: 99989 - DNA, 25 bp, SARS Virus
gtttttctttaagtggcggagttac

SEQ ID NO: 99990 - DNA, 25 bp, SARS Virus
tttttctttaacgggcggagttact

SEQ ID NO: 99991 - DNA, 25 bp, SARS Virus
ttttctttaactggcggagttactc

SEQ ID NO: 99992 - DNA, 25 bp, SARS Virus
tttctttaactggcggagttactcc

SEQ ID NO: 99993 - DNA, 25 bp, SARS Virus
ttctttaactgggggagttactcca

SEQ ID NO: 99994 - DNA, 25 bp, SARS Virus
tctttaactggcggagttactccag

SEQ ID NO: 99995 - DNA, 25 bp, SARS Virus
ctttaactggcggagttactccagc

SEQ ID NO: 99996 - DNA, 25 bp, SARS Virus
tttaactggcggggttactccagcg

SEQ ID NO: 99997 - DNA, 25 bp, SARS Virus
ttaactggcggagttactccagcga

SEQ ID NO: 99998 - DNA, 25 bp, SARS Virus
taactggcggaggtactccagcgat

SEQ ID NO: 99999 - DNA, 25 bp, SARS Virus
aactggcggagtgactccagcgatt

SEQ ID NO: 100000 - DNA, 25 bp, SARS Virus
actggcggagttgctccagcgattt

SEQ ID NO: 100001 - DNA, 25 bp, SARS Virus
ctggcggagttagtccagcgatttt

SEQ ID NO: 100002 - DNA, 25 bp, SARS Virus
tggcggagttacgccagcgattttt

SEQ ID NO: 100003 - DNA, 25 bp, SARS Virus
ggcggagttactgcagcgattttta

SEQ ID NO: 100004 - DNA, 25 bp, SARS Virus
gcggagttactcgagcgatttttaa

SEQ ID NO: 100005 - DNA, 25 bp, SARS Virus
cggagttactccggcgatttttaaa

SEQ ID NO: 100006 - DNA, 25 bp, SARS Virus
ggagttactccagcgatttttaaat

SEQ ID NO: 100007 - DNA, 25 bp, SARS Virus
gagttactccagggatttttaaatt

SEQ ID NO: 100008 - DNA, 25 bp, SARS Virus
agttactccagcgatttttaaattt

SEQ ID NO: 100009 - DNA, 25 bp, SARS Virus
gttactccagcggtttttaaattta

SEQ ID NO: 100010 - DNA, 25 bp, SARS Virus
ttactccagcgagttttaaatttac

SEQ ID NO: 100011 - DNA, 25 bp, SARS Virus
tactccagcgatgtttaaatttact

SEQ ID NO: 100012 - DNA, 25 bp, SARS Virus
actccagcgattgttaaatttactt

SEQ ID NO: 100013 - DNA, 25 bp, SARS Virus
ctccagcgatttgtaaatttactta

SEQ ID NO: 100014 - DNA, 25 bp, SARS Virus
tccagcgattttgaaatttacttag

SEQ ID NO: 100015 - DNA, 25 bp, SARS Virus
ccagcgatttttgaatttacttagt

SEQ ID NO: 100016 - DNA, 25 bp, SARS Virus
cagcgatttttagatttacttagtg

SEQ ID NO: 100017 - DNA, 25 bp, SARS Virus
agcgatttttaagtttacttagtga

SEQ ID NO: 100018 - DNA, 25 bp, SARS Virus
gcgatttttaaagttacttagtgag

SEQ ID NO: 100019 - DNA, 25 bp, SARS Virus
cgatttttaaatgtacttagtgagt

SEQ ID NO: 100020 - DNA, 25 bp, SARS Virus
gatttttaaattgacttagtgagta

SEQ ID NO: 100021 - DNA, 25 bp, SARS Virus
atttttaaatttgcttagtgagtaa

SEQ ID NO: 100022 - DNA, 25 bp, SARS Virus
tttttaaatttagttagtgagtaac

SEQ ID NO: 100023 - DNA, 25 bp, SARS Virus
ttttaaatttacgtagtgagtaact

SEQ ID NO: 100024 - DNA, 25 bp, SARS Virus
tttaaatttactgagtgagtaactg

SEQ ID NO: 100025 - DNA, 25 bp, SARS Virus
ttaaatttacttggtgagtaactgg

SEQ ID NO: 100026 - DNA, 25 bp, SARS Virus
taaatttacttagtgagtaactgga

SEQ ID NO: 100027 - DNA, 25 bp, SARS Virus
aaatttacttagggagtaactggaa

SEQ ID NO: 100028 - DNA, 25 bp, SARS Virus
aatttacttagtgagtaactggaag

SEQ ID NO: 100029 - DNA, 25 bp, SARS Virus
atttacttagtgggtaactggaagt

SEQ ID NO: 100030 - DNA, 25 bp, SARS Virus
tttacttagtgagtaactggaagtt

SEQ ID NO: 100031 - DNA, 25 bp, SARS Virus
ttacttagtgaggaactggaagttc

SEQ ID NO: 100032 - DNA, 25 bp, SARS Virus
tacttagtgagtgactggaagttct

SEQ ID NO: 100033 - DNA, 25 bp, SARS Virus
acttagtgagtagctggaagttctt

SEQ ID NO: 100034 - DNA, 25 bp, SARS Virus
cttagtgagtaagtggaagttctta

SEQ ID NO: 100035 - DNA, 25 bp, SARS Virus
ttagtgagtaacgggaagttcttaa

SEQ ID NO: 100036 - DNA, 25 bp, SARS Virus
tagtgagtaactggaagttcttaac

SEQ ID NO: 100037 - DNA, 25 bp, SARS Virus
agtgagtaactggaagttcttaacc

SEQ ID NO: 100038 - DNA, 25 bp, SARS Virus
gtgagtaactgggagttcttaaccc

SEQ ID NO: 100039 - DNA, 25 bp, SARS Virus
tgagtaactggaggttcttaaccct

SEQ ID NO: 100040 - DNA, 25 bp, SARS Virus
gagtaactggaagttcttaaccctt

SEQ ID NO: 100041 - DNA, 25 bp, SARS Virus
agtaactggaaggtcttaacccttt

SEQ ID NO: 100042 - DNA, 25 bp, SARS Virus
gtaactggaagtgcttaaccctttt

SEQ ID NO: 100043 - DNA, 25 bp, SARS Virus
taactggaagttgttaaccctttta

SEQ ID NO: 100044 - DNA, 25 bp, SARS Virus
aactggaagttcgtaacccttttat

SEQ ID NO: 100045 - DNA, 25 bp, SARS Virus
actggaagttctgaacccttttata

SEQ ID NO: 100046 - DNA, 25 bp, SARS Virus
ctggaagttcttgacccttttatac

SEQ ID NO: 100047 - DNA, 25 bp, SARS Virus
tggaagttcttagcccttttatact

SEQ ID NO: 100048 - DNA, 25 bp, SARS Virus
ggaagttcttaagccttttatactc

SEQ ID NO: 100049 - DNA, 25 bp, SARS Virus
gaagttcttaacgcttttatactcg

SEQ ID NO: 100050 - DNA, 25 bp, SARS Virus
aagttcttaaccgttttatactcgt

SEQ ID NO: 100051 - DNA, 25 bp, SARS Virus
agttcttaacccgtttatactcgtt

SEQ ID NO: 100052 - DNA, 25 bp, SARS Virus
gttcttaaccctgttatactcgtta

SEQ ID NO: 100053 - DNA, 25 bp, SARS Virus
ttcttaacccttgtatactcgttat

SEQ ID NO: 100054 - DNA, 25 bp, SARS Virus
tcttaaccctttgatactcgttata

SEQ ID NO: 100055 - DNA, 25 bp, SARS Virus
cttaacccttttgtactcgttatat

SEQ ID NO: 100056 - DNA, 25 bp, SARS Virus
ttaacccttttagactcgttatata

SEQ ID NO: 100057 - DNA, 25 bp, SARS Virus
taacccttttatgctcgttatataa

SEQ ID NO: 100058 - DNA, 25 bp, SARS Virus
aacccttttatagtcgttatataat

SEQ ID NO: 100059 - DNA, 25 bp, SARS Virus
acccttttatacgcgttatataatt

SEQ ID NO: 100060 - DNA, 25 bp, SARS Virus
cccttttatactggttatataattt

SEQ ID NO: 100061 - DNA, 25 bp, SARS Virus
ccttttatactcgttatataattta

SEQ ID NO: 100062 - DNA, 25 bp, SARS Virus
cttttatactcggtatataatttac

SEQ ID NO: 100063 - DNA, 25 bp, SARS Virus
ttttatactcgtgatataatttacc

SEQ ID NO: 100064 - DNA, 25 bp, SARS Virus
tttatactcgttgtataatttaccg

SEQ ID NO: 100065 - DNA, 25 bp, SARS Virus
ttatactcgttagataatttaccgg

SEQ ID NO: 100066 - DNA, 25 bp, SARS Virus
tatactcgttatgtaatttaccgga

SEQ ID NO: 100067 - DNA, 25 bp, SARS Virus
atactcgttatagaatttaccggaa

SEQ ID NO: 100068 - DNA, 25 bp, SARS Virus
tactcgttatatgatttaccggaac

SEQ ID NO: 100069 - DNA, 25 bp, SARS Virus
actcgttatatagtttaccggaacc

SEQ ID NO: 100070 - DNA, 25 bp, SARS Virus
ctcgttatataagttaccggaacca

SEQ ID NO: 100071 - DNA, 25 bp, SARS Virus
tcgttatataatgtaccggaaccat

SEQ ID NO: 100072 - DNA, 25 bp, SARS Virus
cgttatataattgaccggaaccata

SEQ ID NO: 100073 - DNA, 25 bp, SARS Virus
gttatataatttgccggaaccatac

SEQ ID NO: 100074 - DNA, 25 bp, SARS Virus
ttatataatttagcggaaccataca

SEQ ID NO: 100075 - DNA, 25 bp, SARS Virus
tatataatttacgggaaccatacaa

SEQ ID NO: 100076 - DNA, 25 bp, SARS Virus
atataatttaccggaaccatacaaa

SEQ ID NO: 100077 - DNA, 25 bp, SARS Virus
tataatttaccggaaccatacaaac

SEQ ID NO: 100078 - DNA, 25 bp, SARS Virus
ataatttaccgggaccatacaaacc

SEQ ID NO: 100079 - DNA, 25 bp, SARS Virus
taatttaccggagccatacaaaccg

SEQ ID NO: 100080 - DNA, 25 bp, SARS Virus
aatttaccggaagcatacaaaccga

SEQ ID NO: 100081 - DNA, 25 bp, SARS Virus
atttaccggaacgatacaaaccgag

SEQ ID NO: 100082 - DNA, 25 bp, SARS Virus
tttaccggaaccgtacaaaccgagc

SEQ ID NO: 100083 - DNA, 25 bp, SARS Virus
ttaccggaaccagacaaaccgagcc

SEQ ID NO: 100084 - DNA, 25 bp, SARS Virus
taccggaaccatgcaaaccgagccg

SEQ ID NO: 100085 - DNA, 25 bp, SARS Virus
accggaaccatagaaaccgagccga

SEQ ID NO: 100086 - DNA, 25 bp, SARS Virus
ccggaaccatacgaaccgagccgaa

SEQ ID NO: 100087 - DNA, 25 bp, SARS Virus
cggaaccatacagaccgagccgaag

SEQ ID NO: 100088 - DNA, 25 bp, SARS Virus
ggaaccatacaagccgagccgaagt

SEQ ID NO: 100089 - DNA, 25 bp, SARS Virus
gaaccatacaaagcgagccgaagta

SEQ ID NO: 100090 - DNA, 25 bp, SARS Virus
aaccatacaaacggagccgaagtaa

SEQ ID NO: 100091 - DNA, 25 bp, SARS Virus
accatacaaaccgagccgaagtaac

SEQ ID NO: 100092 - DNA, 25 bp, SARS Virus
ccatacaaaccgggccgaagtaacg

SEQ ID NO: 100093 - DNA, 25 bp, SARS Virus
catacaaaccgagccgaagtaacga

SEQ ID NO: 100094 - DNA, 25 bp, SARS Virus
atacaaaccgaggcgaagtaacgac

SEQ ID NO: 100095 - DNA, 25 bp, SARS Virus
tacaaaccgagcggaagtaacgacc

SEQ ID NO: 100096 - DNA, 25 bp, SARS Virus
acaaaccgagccgaagtaacgacct

SEQ ID NO: 100097 - DNA, 25 bp, SARS Virus
caaaccgagccggagtaacgacctg

SEQ ID NO: 100098 - DNA, 25 bp, SARS Virus
aaaccgagccgaggtaacgacctga

SEQ ID NO: 100099 - DNA, 25 bp, SARS Virus
aaccgagccgaagtaacgacctgat

SEQ ID NO: 100100 - DNA, 25 bp, SARS Virus
accgagccgaaggaacgacctgatt

SEQ ID NO: 100101 - DNA, 25 bp, SARS Virus
ccgagccgaagtgacgacctgatta

SEQ ID NO: 100102 - DNA, 25 bp, SARS Virus
cgagccgaagtagcgacctgattaa

SEQ ID NO: 100103 - DNA, 25 bp, SARS Virus
gagccgaagtaaggacctgattaac

SEQ ID NO: 100104 - DNA, 25 bp, SARS Virus
agccgaagtaacgacctgattaacg

SEQ ID NO: 100105 - DNA, 25 bp, SARS Virus
gccgaagtaacggcctgattaacgg

SEQ ID NO: 100106 - DNA, 25 bp, SARS Virus
ccgaagtaacgagctgattaacggt

SEQ ID NO: 100107 - DNA, 25 bp, SARS Virus
cgaagtaacgacgtgattaacggta

SEQ ID NO: 100108 - DNA, 25 bp, SARS Virus
gaagtaacgaccggattaacggtag

SEQ ID NO: 100109 - DNA, 25 bp, SARS Virus
aagtaacgacctgattaacggtagc

SEQ ID NO: 100110 - DNA, 25 bp, SARS Virus
agtaacgacctggttaacggtagca

SEQ ID NO: 100111 - DNA, 25 bp, SARS Virus
gtaacgacctgagtaacggtagcag

SEQ ID NO: 100112 - DNA, 25 bp, SARS Virus
taacgacctgatgaacggtagcagt

SEQ ID NO: 100113 - DNA, 25 bp, SARS Virus
aacgacctgattgacggtagcagta

SEQ ID NO: 100114 - DNA, 25 bp, SARS Virus
acgacctgattagcggtagcagtac

SEQ ID NO: 100115 - DNA, 25 bp, SARS Virus
cgacctgattaagggtagcagtacc

SEQ ID NO: 100116 - DNA, 25 bp, SARS Virus
gacctgattaacggtagcagtacca

SEQ ID NO: 100117 - DNA, 25 bp, SARS Virus
acctgattaacggtagcagtaccaa

SEQ ID NO: 100118 - DNA, 25 bp, SARS Virus
cctgattaacgggagcagtaccaat

SEQ ID NO: 100119 - DNA, 25 bp, SARS Virus
ctgattaacggtggcagtaccaatg

SEQ ID NO: 100120 - DNA, 25 bp, SARS Virus
tgattaacggtagcagtaccaatgt

SEQ ID NO: 100121 - DNA, 25 bp, SARS Virus
gattaacggtaggagtaccaatgtt

SEQ ID NO: 100122 - DNA, 25 bp, SARS Virus
attaacggtagcggtaccaatgtta

SEQ ID NO: 100123 - DNA, 25 bp, SARS Virus
ttaacggtagcagtaccaatgttag

SEQ ID NO: 100124 - DNA, 25 bp, SARS Virus
taacggtagcaggaccaatgttaga

SEQ ID NO: 100125 - DNA, 25 bp, SARS Virus
aacggtagcagtgccaatgttagaa

SEQ ID NO: 100126 - DNA, 25 bp, SARS Virus
acggtagcagtagcaatgttagaac

SEQ ID NO: 100127 - DNA, 25 bp, SARS Virus
cggtagcagtacgaatgttagaacg

SEQ ID NO: 100128 - DNA, 25 bp, SARS Virus
ggtagcagtaccgatgttagaacga

SEQ ID NO: 100129 - DNA, 25 bp, SARS Virus
gtagcagtaccagtgttagaacgaa

SEQ ID NO: 100130 - DNA, 25 bp, SARS Virus
tagcagtaccaaggttagaacgaaa

SEQ ID NO: 100131 - DNA, 25 bp, SARS Virus
agcagtaccaatgttagaacgaaac

SEQ ID NO: 100132 - DNA, 25 bp, SARS Virus
gcagtaccaatggtagaacgaaaca

SEQ ID NO: 100133 - DNA, 25 bp, SARS Virus
cagtaccaatgtgagaacgaaacaa

SEQ ID NO: 100134 - DNA, 25 bp, SARS Virus
agtaccaatgttggaacgaaacaac

SEQ ID NO: 100135 - DNA, 25 bp, SARS Virus
gtaccaatgttagaacgaaacaacg

SEQ ID NO: 100136 - DNA, 25 bp, SARS Virus
taccaatgttaggacgaaacaacgt

SEQ ID NO: 100137 - DNA, 25 bp, SARS Virus
accaatgttagagcgaaacaacgta

SEQ ID NO: 100138 - DNA, 25 bp, SARS Virus
ccaatgttagaaggaaacaacgtac

SEQ ID NO: 100139 - DNA, 25 bp, SARS Virus
caatgttagaacgaaacaacgtact

SEQ ID NO: 100140 - DNA, 25 bp, SARS Virus
aatgttagaacggaacaacgtactg

SEQ ID NO: 100141 - DNA, 25 bp, SARS Virus
atgttagaacgagacaacgtactga

SEQ ID NO: 100142 - DNA, 25 bp, SARS Virus
tgttagaacgaagcaacgtactgat

SEQ ID NO: 100143 - DNA, 25 bp, SARS Virus
gttagaacgaaagaacgtactgatc

SEQ ID NO: 100144 - DNA, 25 bp, SARS Virus
ttagaacgaaacgacgtactgatca

SEQ ID NO: 100145 - DNA, 25 bp, SARS Virus
tagaacgaaacagcgtactgatcaa

SEQ ID NO: 100146 - DNA, 25 bp, SARS Virus
agaacgaaacaaggtactgatcaac

SEQ ID NO: 100147 - DNA, 25 bp, SARS Virus
gaacgaaacaacgtactgatcaaca

SEQ ID NO: 100148 - DNA, 25 bp, SARS Virus
aacgaaacaacggactgatcaacaa

SEQ ID NO: 100149 - DNA, 25 bp, SARS Virus
acgaaacaacgtgctgatcaacaac

SEQ ID NO: 100150 - DNA, 25 bp, SARS Virus
cgaaacaacgtagtgatcaacaacg

SEQ ID NO: 100151 - DNA, 25 bp, SARS Virus
gaaacaacgtacggatcaacaacgt

SEQ ID NO: 100152 - DNA, 25 bp, SARS Virus
aaacaacgtactgatcaacaacgtc

SEQ ID NO: 100153 - DNA, 25 bp, SARS Virus
aacaacgtactggtcaacaacgtca

SEQ ID NO: 100154 - DNA, 25 bp, SARS Virus
acaacgtactgagcaacaacgtcaa

SEQ ID NO: 100155 - DNA, 25 bp, SARS Virus
caacgtactgatgaacaacgtcaac

SEQ ID NO: 100156 - DNA, 25 bp, SARS Virus
aacgtactgatcgacaacgtcaacg

SEQ ID NO: 100157 - DNA, 25 bp, SARS Virus
acgtactgatcagcaacgtcaacgg

SEQ ID NO: 100158 - DNA, 25 bp, SARS Virus
cgtactgatcaagaacgtcaacgga

SEQ ID NO: 100159 - DNA, 25 bp, SARS Virus
gtactgatcaacgacgtcaacggag

SEQ ID NO: 100160 - DNA, 25 bp, SARS Virus
tactgatcaacagcgtcaacggagt

SEQ ID NO: 100161 - DNA, 25 bp, SARS Virus
actgatcaacaaggtcaacggagtt

SEQ ID NO: 100162 - DNA, 25 bp, SARS Virus
ctgatcaacaacgtcaacggagttc

SEQ ID NO: 100163 - DNA, 25 bp, SARS Virus
tgatcaacaacggcaacggagttcc

SEQ ID NO: 100164 - DNA, 25 bp, SARS Virus
gatcaacaacgtgaacggagttccc

SEQ ID NO: 100165 - DNA, 25 bp, SARS Virus
atcaacaacgtcgacggagttccca

SEQ ID NO: 100166 - DNA, 25 bp, SARS Virus
tcaacaacgtcagcggagttcccac

SEQ ID NO: 100167 - DNA, 25 bp, SARS Virus
caacaacgtcaagggagttcccacg

SEQ ID NO: 100168 - DNA, 25 bp, SARS Virus
aacaacgtcaacggagttcccacgt

SEQ ID NO: 100169 - DNA, 25 bp, SARS Virus
gtcgcggtcgtttaacagtacttcc

SEQ ID NO: 100170 - DNA, 25 bp, SARS Virus
tcgcggtcgttatacagtacttccg

SEQ ID NO: 100171 - DNA, 25 bp, SARS Virus
cgcggtcgttaatcagtacttccgt

SEQ ID NO: 100172 - DNA, 25 bp, SARS Virus
gcggtcgttaaatagtacttccgtt

SEQ ID NO: 100173 - DNA, 25 bp, SARS Virus
cggtcgttaaactgtacttccgttt

SEQ ID NO: 100174 - DNA, 25 bp, SARS Virus
ggtcgttaaacattacttccgtttc

SEQ ID NO: 100175 - DNA, 25 bp, SARS Virus
gtcgttaaacagtacttccgtttcg

SEQ ID NO: 100176 - DNA, 25 bp, SARS Virus
tcgttaaacagttcttccgtttcgt

SEQ ID NO: 100177 - DNA, 25 bp, SARS Virus
cgttaaacagtatttccgtttcgta

SEQ ID NO: 100178 - DNA, 25 bp, SARS Virus
gttaaacagtacttccgtttcgtat

SEQ ID NO: 100179 - DNA, 25 bp, SARS Virus
ttaaacagtacttccgtttcgtatg

SEQ ID NO: 100180 - DNA, 25 bp, SARS Virus
taaacagtactttcgtttcgtatga

SEQ ID NO: 100181 - DNA, 25 bp, SARS Virus
aaacagtacttctgtttcgtatgaa

SEQ ID NO: 100182 - DNA, 25 bp, SARS Virus
aacagtacttccttttcgtatgaag

SEQ ID NO: 100183 - DNA, 25 bp, SARS Virus
acagtacttccgtttcgtatgaagg

SEQ ID NO: 100184 - DNA, 25 bp, SARS Virus
cagtacttccgtttcgtatgaaggg

SEQ ID NO: 100185 - DNA, 25 bp, SARS Virus
agtacttccgtttcgtatgaaggga

SEQ ID NO: 100186 - DNA, 25 bp, SARS Virus
gtacttccgttttgtatgaagggag

SEQ ID NO: 100187 - DNA, 25 bp, SARS Virus
tacttccgtttcttatgaagggagc

SEQ ID NO: 100188 - DNA, 25 bp, SARS Virus
acttccgtttcgtatgaagggagca

SEQ ID NO: 100189 - DNA, 25 bp, SARS Virus
cttccgtttcgtttgaagggagcac

SEQ ID NO: 100190 - DNA, 25 bp, SARS Virus
ttccgtttcgtatgaagggagcact

SEQ ID NO: 100191 - DNA, 25 bp, SARS Virus
tccgtttcgtattaagggagcactt

SEQ ID NO: 100192 - DNA, 25 bp, SARS Virus
ccgtttcgtatgtagggagcacttc

SEQ ID NO: 100193 - DNA, 25 bp, SARS Virus
cgtttcgtatgatgggagcacttcc

SEQ ID NO: 100194 - DNA, 25 bp, SARS Virus
gtttcgtatgaatggagcacttcca

SEQ ID NO: 100195 - DNA, 25 bp, SARS Virus
tttcgtatgaagtgagcacttccac

SEQ ID NO: 100196 - DNA, 25 bp, SARS Virus
ttcgtatgaaggtagcacttccaca

SEQ ID NO: 100197 - DNA, 25 bp, SARS Virus
tcgtatgaagggtgcacttccacaa

SEQ ID NO: 100198 - DNA, 25 bp, SARS Virus
cgtatgaagggatcacttccacaaa

SEQ ID NO: 100199 - DNA, 25 bp, SARS Virus
gtatgaagggagtacttccacaaaa

SEQ ID NO: 100200 - DNA, 25 bp, SARS Virus
tatgaagggagctcttccacaaaaa

SEQ ID NO: 100201 - DNA, 25 bp, SARS Virus
atgaagggagcatttccacaaaaac

SEQ ID NO: 100202 - DNA, 25 bp, SARS Virus
tgaagggagcacttccacaaaaaca

SEQ ID NO: 100203 - DNA, 25 bp, SARS Virus
gaagggagcacttccacaaaaacac

SEQ ID NO: 100204 - DNA, 25 bp, SARS Virus
aagggagcactttcacaaaaacaca

SEQ ID NO: 100205 - DNA, 25 bp, SARS Virus
agggagcacttctacaaaaacacaa

SEQ ID NO: 100206 - DNA, 25 bp, SARS Virus
gggagcacttcctcaaaaacacaaa

SEQ ID NO: 100207 - DNA, 25 bp, SARS Virus
ggagcacttccataaaaacacaaat

SEQ ID NO: 100208 - DNA, 25 bp, SARS Virus
gagcacttccactaaaacacaaatt

SEQ ID NO: 100209 - DNA, 25 bp, SARS Virus
agcacttccacataaacacaaatta

SEQ ID NO: 100210 - DNA, 25 bp, SARS Virus
gcacttccacaataacacaaattac

SEQ ID NO: 100211 - DNA, 25 bp, SARS Virus
cacttccacaaatacacaaattacc

SEQ ID NO: 100212 - DNA, 25 bp, SARS Virus
acttccacaaaatcacaaattaccg

SEQ ID NO: 100213 - DNA, 25 bp, SARS Virus
cttccacaaaaatacaaattaccgt

SEQ ID NO: 100214 - DNA, 25 bp, SARS Virus
ttccacaaaaactcaaattaccgtg

SEQ ID NO: 100215 - DNA, 25 bp, SARS Virus
tccacaaaaacataaattaccgtga

SEQ ID NO: 100216 - DNA, 25 bp, SARS Virus
ccacaaaaacactaattaccgtgaa

SEQ ID NO: 100217 - DNA, 25 bp, SARS Virus
cacaaaaacacatattaccgtgaag

SEQ ID NO: 100218 - DNA, 25 bp, SARS Virus
acaaaaacacaatttaccgtgaaga

SEQ ID NO: 100219 - DNA, 25 bp, SARS Virus
caaaaacacaaattaccgtgaagaa

SEQ ID NO: 100220 - DNA, 25 bp, SARS Virus
aaaaacacaaattaccgtgaagaac

SEQ ID NO: 100221 - DNA, 25 bp, SARS Virus
aaaacacaaatttccgtgaagaacc

SEQ ID NO: 100222 - DNA, 25 bp, SARS Virus
aaacacaaattatcgtgaagaacca

SEQ ID NO: 100223 - DNA, 25 bp, SARS Virus
aacacaaattactgtgaagaaccaa

SEQ ID NO: 100224 - DNA, 25 bp, SARS Virus
acacaaattaccttgaagaaccaaa

SEQ ID NO: 100225 - DNA, 25 bp, SARS Virus
cacaaattaccgtgaagaaccaaat

SEQ ID NO: 100226 - DNA, 25 bp, SARS Virus
acaaattaccgttaagaaccaaata

SEQ ID NO: 100227 - DNA, 25 bp, SARS Virus
caaattaccgtgtagaaccaaataa

SEQ ID NO: 100228 - DNA, 25 bp, SARS Virus
aaattaccgtgatgaaccaaataat

SEQ ID NO: 100229 - DNA, 25 bp, SARS Virus
aattaccgtgaataaccaaataatg

SEQ ID NO: 100230 - DNA, 25 bp, SARS Virus
attaccgtgaagtaccaaataatgt

SEQ ID NO: 100231 - DNA, 25 bp, SARS Virus
ttaccgtgaagatccaaataatgtg

SEQ ID NO: 100232 - DNA, 25 bp, SARS Virus
taccgtgaagaatcaaataatgtgt

SEQ ID NO: 100233 - DNA, 25 bp, SARS Virus
accgtgaagaactaaataatgtgtc

SEQ ID NO: 100234 - DNA, 25 bp, SARS Virus
ccgtgaagaacctaataatgtgtct

SEQ ID NO: 100235 - DNA, 25 bp, SARS Virus
cgtgaagaaccatataatgtgtctc

SEQ ID NO: 100236 - DNA, 25 bp, SARS Virus
gtgaagaaccaattaatgtgtctcc

SEQ ID NO: 100237 - DNA, 25 bp, SARS Virus
tgaagaaccaaataatgtgtctcct

SEQ ID NO: 100238 - DNA, 25 bp, SARS Virus
gaagaaccaaattatgtgtctcctt

SEQ ID NO: 100239 - DNA, 25 bp, SARS Virus
aagaaccaaatattgtgtctccttg

SEQ ID NO: 100240 - DNA, 25 bp, SARS Virus
agaaccaaataatgtgtctccttga

SEQ ID NO: 100241 - DNA, 25 bp, SARS Virus
gaaccaaataatttgtctccttgaa

SEQ ID NO: 100242 - DNA, 25 bp, SARS Virus
aaccaaataatgtgtctccttgaag

SEQ ID NO: 100243 - DNA, 25 bp, SARS Virus
accaaataatgtttctccttgaaga

SEQ ID NO: 100244 - DNA, 25 bp, SARS Virus
ccaaataatgtgtctccttgaagaa

SEQ ID NO: 100245 - DNA, 25 bp, SARS Virus
caaataatgtgtttccttgaagaaa

SEQ ID NO: 100246 - DNA, 25 bp, SARS Virus
aaataatgtgtctccttgaagaaaa

SEQ ID NO: 100247 - DNA, 25 bp, SARS Virus
aataatgtgtcttcttgaagaaaag

SEQ ID NO: 100248 - DNA, 25 bp, SARS Virus
ataatgtgtctctttgaagaaaaga

SEQ ID NO: 100249 - DNA, 25 bp, SARS Virus
taatgtgtctccttgaagaaaagag

SEQ ID NO: 100250 - DNA, 25 bp, SARS Virus
aatgtgtctccttgaagaaaagagg

SEQ ID NO: 100251 - DNA, 25 bp, SARS Virus
atgtgtctcctttaagaaaagaggt

SEQ ID NO: 100252 - DNA, 25 bp, SARS Virus
tgtgtctccttgtagaaaagaggtg

SEQ ID NO: 100253 - DNA, 25 bp, SARS Virus
gtgtctccttgatgaaaagaggtgt

SEQ ID NO: 100254 - DNA, 25 bp, SARS Virus
tgtctccttgaataaaagaggtgtt

SEQ ID NO: 100255 - DNA, 25 bp, SARS Virus
gtctccttgaagtaaagaggtgttt

SEQ ID NO: 100256 - DNA, 25 bp, SARS Virus
tctccttgaagataagaggtgttta

SEQ ID NO: 100257 - DNA, 25 bp, SARS Virus
ctccttgaagaatagaggtgtttat

SEQ ID NO: 100258 - DNA, 25 bp, SARS Virus
tccttgaagaaatgaggtgtttatt

SEQ ID NO: 100259 - DNA, 25 bp, SARS Virus
ccttgaagaaaataggtgtttatta

SEQ ID NO: 100260 - DNA, 25 bp, SARS Virus
cttgaagaaaagtggtgtttattaa

SEQ ID NO: 100261 - DNA, 25 bp, SARS Virus
ttgaagaaaagatgtgtttattaat

SEQ ID NO: 100262 - DNA, 25 bp, SARS Virus
tgaagaaaagagttgtttattaatg

SEQ ID NO: 100263 - DNA, 25 bp, SARS Virus
gaagaaaagaggtgtttattaatga

SEQ ID NO: 100264 - DNA, 25 bp, SARS Virus
aagaaaagaggtttttattaatgat

SEQ ID NO: 100265 - DNA, 25 bp, SARS Virus
agaaaagaggtgtttattaatgatg

SEQ ID NO: 100266 - DNA, 25 bp, SARS Virus
gaaaagaggtgtttattaatgatgt

SEQ ID NO: 100267 - DNA, 25 bp, SARS Virus
aaaagaggtgtttattaatgatgtc

SEQ ID NO: 100268 - DNA, 25 bp, SARS Virus
aaagaggtgttttttaatgatgtct

SEQ ID NO: 100269 - DNA, 25 bp, SARS Virus
aagaggtgtttattaatgatgtctg

SEQ ID NO: 100270 - DNA, 25 bp, SARS Virus
agaggtgtttattaatgatgtctgt

SEQ ID NO: 100271 - DNA, 25 bp, SARS Virus
gaggtgtttatttatgatgtctgtt

SEQ ID NO: 100272 - DNA, 25 bp, SARS Virus
aggtgtttattattgatgtctgtta

SEQ ID NO: 100273 - DNA, 25 bp, SARS Virus
ggtgtttattaatgatgtctgttat

SEQ ID NO: 100274 - DNA, 25 bp, SARS Virus
gtgtttattaattatgtctgttatg

SEQ ID NO: 100275 - DNA, 25 bp, SARS Virus
tgtttattaatgttgtctgttatgt

SEQ ID NO: 100276 - DNA, 25 bp, SARS Virus
gtttattaatgatgtctgttatgta

SEQ ID NO: 100277 - DNA, 25 bp, SARS Virus
tttattaatgatttctgttatgtaa

SEQ ID NO: 100278 - DNA, 25 bp, SARS Virus
ttattaatgatgtctgttatgtaaa

SEQ ID NO: 100279 - DNA, 25 bp, SARS Virus
tattaatgatgtttgttatgtaaac

SEQ ID NO: 100280 - DNA, 25 bp, SARS Virus
attaatgatgtctgttatgtaaaca

SEQ ID NO: 100281 - DNA, 25 bp, SARS Virus
ttaatgatgtcttttatgtaaacag

SEQ ID NO: 100282 - DNA, 25 bp, SARS Virus
taatgatgtctgttatgtaaacaga

SEQ ID NO: 100283 - DNA, 25 bp, SARS Virus
aatgatgtctgttatgtaaacagag

SEQ ID NO: 100284 - DNA, 25 bp, SARS Virus
atgatgtctgttttgtaaacagagt

SEQ ID NO: 100285 - DNA, 25 bp, SARS Virus
tgatgtctgttatgtaaacagagtc

SEQ ID NO: 100286 - DNA, 25 bp, SARS Virus
gatgtctgttatttaaacagagtcc

SEQ ID NO: 100287 - DNA, 25 bp, SARS Virus
atgtctgttatgtaaacagagtcct

SEQ ID NO: 100288 - DNA, 25 bp, SARS Virus
tgtctgttatgttaacagagtcctt

SEQ ID NO: 100289 - DNA, 25 bp, SARS Virus
gtctgttatgtatacagagtccttt

SEQ ID NO: 100290 - DNA, 25 bp, SARS Virus
tctgttatgtaatcagagtccttta

SEQ ID NO: 100291 - DNA, 25 bp, SARS Virus
ctgttatgtaaatagagtcctttaa

SEQ ID NO: 100292 - DNA, 25 bp, SARS Virus
tgttatgtaaactgagtcctttaac

SEQ ID NO: 100293 - DNA, 25 bp, SARS Virus
gttatgtaaacatagtcctttaaca

SEQ ID NO: 100294 - DNA, 25 bp, SARS Virus
ttatgtaaacagtgtcctttaacac

SEQ ID NO: 100295 - DNA, 25 bp, SARS Virus
tatgtaaacagattcctttaacact

SEQ ID NO: 100296 - DNA, 25 bp, SARS Virus
atgtaaacagagtcctttaacacta

SEQ ID NO: 100297 - DNA, 25 bp, SARS Virus
tgtaaacagagttctttaacactac

SEQ ID NO: 100298 - DNA, 25 bp, SARS Virus
gtaaacagagtcttttaacactaca

SEQ ID NO: 100299 - DNA, 25 bp, SARS Virus
taaacagagtcctttaacactacag

SEQ ID NO: 100300 - DNA, 25 bp, SARS Virus
aaacagagtcctttaacactacagc

SEQ ID NO: 100301 - DNA, 25 bp, SARS Virus
aacagagtcctttaacactacagca

SEQ ID NO: 100302 - DNA, 25 bp, SARS Virus
acagagtccttttacactacagcaa

SEQ ID NO: 100303 - DNA, 25 bp, SARS Virus
cagagtcctttatcactacagcaat

SEQ ID NO: 100304 - DNA, 25 bp, SARS Virus
agagtcctttaatactacagcaata

SEQ ID NO: 100305 - DNA, 25 bp, SARS Virus
gagtcctttaactctacagcaataa

SEQ ID NO: 100306 - DNA, 25 bp, SARS Virus
agtcctttaacattacagcaataac

SEQ ID NO: 100307 - DNA, 25 bp, SARS Virus
gtcctttaacactacagcaataacc

SEQ ID NO: 100308 - DNA, 25 bp, SARS Virus
tcctttaacacttcagcaataaccg

SEQ ID NO: 100309 - DNA, 25 bp, SARS Virus
cctttaacactatagcaataaccgt

SEQ ID NO: 100310 - DNA, 25 bp, SARS Virus
ctttaacactactgcaataaccgta

SEQ ID NO: 100311 - DNA, 25 bp, SARS Virus
tttaacactacatcaataaccgtag

SEQ ID NO: 100312 - DNA, 25 bp, SARS Virus
ttaacactacagtaataaccgtagt

SEQ ID NO: 100313 - DNA, 25 bp, SARS Virus
taacactacagctataaccgtagta

SEQ ID NO: 100314 - DNA, 25 bp, SARS Virus
aacactacagcattaaccgtagtaa

SEQ ID NO: 100315 - DNA, 25 bp, SARS Virus
acactacagcaataaccgtagtaat

SEQ ID NO: 100316 - DNA, 25 bp, SARS Virus
cactacagcaattaccgtagtaatt

SEQ ID NO: 100317 - DNA, 25 bp, SARS Virus
actacagcaatatccgtagtaattg

SEQ ID NO: 100318 - DNA, 25 bp, SARS Virus
ctacagcaataatcgtagtaattgt

SEQ ID NO: 100319 - DNA, 25 bp, SARS Virus
tacagcaataactgtagtaattgtt

SEQ ID NO: 100320 - DNA, 25 bp, SARS Virus
acagcaataaccttagtaattgttg

SEQ ID NO: 100321 - DNA, 25 bp, SARS Virus
cagcaataaccgtagtaattgttgt

SEQ ID NO: 100322 - DNA, 25 bp, SARS Virus
agcaataaccgttgtaattgttgtg

SEQ ID NO: 100323 - DNA, 25 bp, SARS Virus
gcaataaccgtattaattgttgtgt

SEQ ID NO: 100324 - DNA, 25 bp, SARS Virus
caataaccgtagtaattgttgtgtc

SEQ ID NO: 100325 - DNA, 25 bp, SARS Virus
aataaccgtagttattgttgtgtca

SEQ ID NO: 100326 - DNA, 25 bp, SARS Virus
ataaccgtagtatttgttgtgtcaa

SEQ ID NO: 100327 - DNA, 25 bp, SARS Virus
taaccgtagtaattgttgtgtcaaa

SEQ ID NO: 100328 - DNA, 25 bp, SARS Virus
aaccgtagtaattgttgtgtcaaat

SEQ ID NO: 100329 - DNA, 25 bp, SARS Virus
accgtagtaatttttgtgtcaaata

SEQ ID NO: 100330 - DNA, 25 bp, SARS Virus
ccgtagtaattgttgtgtcaaatac

SEQ ID NO: 100331 - DNA, 25 bp, SARS Virus
cgtagtaattgttgtgtcaaatact

SEQ ID NO: 100332 - DNA, 25 bp, SARS Virus
gtagtaattgttttgtcaaatacta

SEQ ID NO: 100333 - DNA, 25 bp, SARS Virus
tagtaattgttgtgtcaaatactag

SEQ ID NO: 100334 - DNA, 25 bp, SARS Virus
agtaattgttgtttcaaatactagg

SEQ ID NO: 100335 - DNA, 25 bp, SARS Virus
gtaattgttgtgtcaaatactagga

SEQ ID NO: 100336 - DNA, 25 bp, SARS Virus
taattgttgtgttaaatactaggag

SEQ ID NO: 100337 - DNA, 25 bp, SARS Virus
aattgttgtgtctaatactaggaga

SEQ ID NO: 100338 - DNA, 25 bp, SARS Virus
attgttgtgtcatatactaggagac

SEQ ID NO: 100339 - DNA, 25 bp, SARS Virus
ttgttgtgtcaattactaggagacg

SEQ ID NO: 100340 - DNA, 25 bp, SARS Virus
tgttgtgtcaaatactaggagacgt

SEQ ID NO: 100341 - DNA, 25 bp, SARS Virus
gttgtgtcaaattctaggagacgtt

SEQ ID NO: 100342 - DNA, 25 bp, SARS Virus
ttgtgtcaaatattaggagacgttg

SEQ ID NO: 100343 - DNA, 25 bp, SARS Virus
tgtgtcaaatactaggagacgttgg

SEQ ID NO: 100344 - DNA, 25 bp, SARS Virus
gtgtcaaatacttggagacgttgga

SEQ ID NO: 100345 - DNA, 25 bp, SARS Virus
tgtcaaatactatgagacgttggac

SEQ ID NO: 100346 - DNA, 25 bp, SARS Virus
gtcaaatactagtagacgttggact

SEQ ID NO: 100347 - DNA, 25 bp, SARS Virus
tcaaatactaggtgacgttggactc

SEQ ID NO: 100348 - DNA, 25 bp, SARS Virus
caaatactaggatacgttggactcg

SEQ ID NO: 100349 - DNA, 25 bp, SARS Virus
aaatactaggagtcgttggactcga

SEQ ID NO: 100350 - DNA, 25 bp, SARS Virus
aatactaggagatgttggactcgaa

SEQ ID NO: 100351 - DNA, 25 bp, SARS Virus
atactaggagactttggactcgaac

SEQ ID NO: 100352 - DNA, 25 bp, SARS Virus
tactaggagacgttggactcgaact

SEQ ID NO: 100353 - DNA, 25 bp, SARS Virus
actaggagacgttggactcgaactg

SEQ ID NO: 100354 - DNA, 25 bp, SARS Virus
ctaggagacgtttgactcgaactga

SEQ ID NO: 100355 - DNA, 25 bp, SARS Virus
taggagacgttgtactcgaactgag

SEQ ID NO: 100356 - DNA, 25 bp, SARS Virus
aggagacgttggtctcgaactgagt

SEQ ID NO: 100357 - DNA, 25 bp, SARS Virus
ggagacgttggattcgaactgagta

SEQ ID NO: 100358 - DNA, 25 bp, SARS Virus
gagacgttggactcgaactgagtaa

SEQ ID NO: 100359 - DNA, 25 bp, SARS Virus
agacgttggacttgaactgagtaag

SEQ ID NO: 100360 - DNA, 25 bp, SARS Virus
gacgttggactctaactgagtaagt

SEQ ID NO: 100361 - DNA, 25 bp, SARS Virus
acgttggactcgtactgagtaagtt

SEQ ID NO: 100362 - DNA, 25 bp, SARS Virus
cgttggactcgatctgagtaagttt

SEQ ID NO: 100363 - DNA, 25 bp, SARS Virus
gttggactcgaattgagtaagtttc

SEQ ID NO: 100364 - DNA, 25 bp, SARS Virus
ttggactcgaactgagtaagtttct

SEQ ID NO: 100365 - DNA, 25 bp, SARS Virus
tggactcgaacttagtaagtttctt

SEQ ID NO: 100366 - DNA, 25 bp, SARS Virus
ggactcgaactgtgtaagtttcttc

SEQ ID NO: 100367 - DNA, 25 bp, SARS Virus
gactcgaactgattaagtttcttct

SEQ ID NO: 100368 - DNA, 25 bp, SARS Virus
actcgaactgagtaagtttcttctc

SEQ ID NO: 100369 - DNA, 25 bp, SARS Virus
ctcgaactgagttagtttcttctcg

SEQ ID NO: 100370 - DNA, 25 bp, SARS Virus
tcgaactgagtatgtttcttctcga

SEQ ID NO: 100371 - DNA, 25 bp, SARS Virus
cgaactgagtaattttcttctcgac

SEQ ID NO: 100372 - DNA, 25 bp, SARS Virus
gaactgagtaagtttcttctcgacc

SEQ ID NO: 100373 - DNA, 25 bp, SARS Virus
aactgagtaagtttcttctcgacct

SEQ ID NO: 100374 - DNA, 25 bp, SARS Virus
actgagtaagtttcttctcgacctg

SEQ ID NO: 100375 - DNA, 25 bp, SARS Virus
ctgagtaagttttttctcgacctgt

SEQ ID NO: 100376 - DNA, 25 bp, SARS Virus
tgagtaagtttcttctcgacctgtt

SEQ ID NO: 100377 - DNA, 25 bp, SARS Virus
gagtaagtttcttctcgacctgttc

SEQ ID NO: 100378 - DNA, 25 bp, SARS Virus
agtaagtttcttttcgacctgttca

SEQ ID NO: 100379 - DNA, 25 bp, SARS Virus
gtaagtttcttctcgacctgttcat

SEQ ID NO: 100380 - DNA, 25 bp, SARS Virus
taagtttcttcttgacctgttcatg

SEQ ID NO: 100381 - DNA, 25 bp, SARS Virus
aagtttcttctctacctgttcatga

SEQ ID NO: 100382 - DNA, 25 bp, SARS Virus
agtttcttctcgtcctgttcatgaa

SEQ ID NO: 100383 - DNA, 25 bp, SARS Virus
gtttcttctcgatctgttcatgaag

SEQ ID NO: 100384 - DNA, 25 bp, SARS Virus
tttcttctcgacttgttcatgaagt

SEQ ID NO: 100385 - DNA, 25 bp, SARS Virus
ttcttctcgacctgttcatgaagtt

SEQ ID NO: 100386 - DNA, 25 bp, SARS Virus
tcttctcgaccttttcatgaagttt

SEQ ID NO: 100387 - DNA, 25 bp, SARS Virus
cttctcgacctgttcatgaagtttt

SEQ ID NO: 100388 - DNA, 25 bp, SARS Virus
ttctcgacctgttcatgaagttttt

SEQ ID NO: 100389 - DNA, 25 bp, SARS Virus
tctcgacctgtttatgaagttttta

SEQ ID NO: 100390 - DNA, 25 bp, SARS Virus
ctcgacctgttcttgaagtttttag

SEQ ID NO: 100391 - DNA, 25 bp, SARS Virus
tcgacctgttcatgaagtttttagt

SEQ ID NO: 100392 - DNA, 25 bp, SARS Virus
cgacctgttcattaagtttttagta

SEQ ID NO: 100393 - DNA, 25 bp, SARS Virus
gacctgttcatgtagtttttagtat

SEQ ID NO: 100394 - DNA, 25 bp, SARS Virus
acctgttcatgatgtttttagtatg

SEQ ID NO: 100395 - DNA, 25 bp, SARS Virus
cctgttcatgaattttttagtatgt

SEQ ID NO: 100396 - DNA, 25 bp, SARS Virus
ctgttcatgaagtttttagtatgta

SEQ ID NO: 100397 - DNA, 25 bp, SARS Virus
tgttcatgaagtttttagtatgtag

SEQ ID NO: 100398 - DNA, 25 bp, SARS Virus
gttcatgaagtttttagtatgtagt

SEQ ID NO: 100399 - DNA, 25 bp, SARS Virus
ttcatgaagtttttagtatgtagtg

SEQ ID NO: 100400 - DNA, 25 bp, SARS Virus
tcatgaagtttttagtatgtagtgg

SEQ ID NO: 100401 - DNA, 25 bp, SARS Virus
catgaagttttttgtatgtagtggt

SEQ ID NO: 100402 - DNA, 25 bp, SARS Virus
atgaagtttttattatgtagtggtc

SEQ ID NO: 100403 - DNA, 25 bp, SARS Virus
tgaagtttttagtatgtagtggtct

SEQ ID NO: 100404 - DNA, 25 bp, SARS Virus
gaagtttttagtttgtagtggtcta

SEQ ID NO: 100405 - DNA, 25 bp, SARS Virus
aagtttttagtatgtagtggtctac

SEQ ID NO: 100406 - DNA, 25 bp, SARS Virus
agtttttagtatttagtggtctaca

SEQ ID NO: 100407 - DNA, 25 bp, SARS Virus
gtttttagtatgtagtggtctacaa

SEQ ID NO: 100408 - DNA, 25 bp, SARS Virus
tttttagtatgttgtggtctacaac

SEQ ID NO: 100409 - DNA, 25 bp, SARS Virus
ttttagtatgtattggtctacaact

SEQ ID NO: 100410 - DNA, 25 bp, SARS Virus
tttagtatgtagtggtctacaacta

SEQ ID NO: 100411 - DNA, 25 bp, SARS Virus
ttagtatgtagttgtctacaactag

SEQ ID NO: 100412 - DNA, 25 bp, SARS Virus
tagtatgtagtgttctacaactaga

SEQ ID NO: 100413 - DNA, 25 bp, SARS Virus
agtatgtagtggtctacaactagaa

SEQ ID NO: 100414 - DNA, 25 bp, SARS Virus
gtatgtagtggtttacaactagaac

SEQ ID NO: 100415 - DNA, 25 bp, SARS Virus
tatgtagtggtctacaactagaacc

SEQ ID NO: 100416 - DNA, 25 bp, SARS Virus
atgtagtggtcttcaactagaaccg

SEQ ID NO: 100417 - DNA, 25 bp, SARS Virus
tgtagtggtctataactagaaccgc

SEQ ID NO: 100418 - DNA, 25 bp, SARS Virus
gtagtggtctactactagaaccgct

SEQ ID NO: 100419 - DNA, 25 bp, SARS Virus
tagtggtctacatctagaaccgctg

SEQ ID NO: 100420 - DNA, 25 bp, SARS Virus
agtggtctacaattagaaccgctgt

SEQ ID NO: 100421 - DNA, 25 bp, SARS Virus
gtggtctacaactagaaccgctgta

SEQ ID NO: 100422 - DNA, 25 bp, SARS Virus
tggtctacaacttgaaccgctgtaa

SEQ ID NO: 100423 - DNA, 25 bp, SARS Virus
ggtctacaactataaccgctgtaaa

SEQ ID NO: 100424 - DNA, 25 bp, SARS Virus
gtctacaactagtaccgctgtaaag

SEQ ID NO: 100425 - DNA, 25 bp, SARS Virus
tctacaactagatccgctgtaaagt

SEQ ID NO: 100426 - DNA, 25 bp, SARS Virus
ctacaactagaatcgctgtaaagtc

SEQ ID NO: 100427 - DNA, 25 bp, SARS Virus
tacaactagaactgctgtaaagtcc

SEQ ID NO: 100428 - DNA, 25 bp, SARS Virus
acaactagaacctctgtaaagtccg

SEQ ID NO: 100429 - DNA, 25 bp, SARS Virus
caactagaaccgttgtaaagtccgt

SEQ ID NO: 100430 - DNA, 25 bp, SARS Virus
aactagaaccgctgtaaagtccgta

SEQ ID NO: 100431 - DNA, 25 bp, SARS Virus
actagaaccgctttaaagtccgtaa

SEQ ID NO: 100432 - DNA, 25 bp, SARS Virus
ctagaaccgctgtaaagtccgtaat

SEQ ID NO: 100433 - DNA, 25 bp, SARS Virus
tagaaccgctgttaagtccgtaatt

SEQ ID NO: 100434 - DNA, 25 bp, SARS Virus
agaaccgctgtatagtccgtaattg

SEQ ID NO: 100435 - DNA, 25 bp, SARS Virus
gaaccgctgtaatgtccgtaattgc

SEQ ID NO: 100436 - DNA, 25 bp, SARS Virus
aaccgctgtaaattccgtaattgcg

SEQ ID NO: 100437 - DNA, 25 bp, SARS Virus
accgctgtaaagtccgtaattgcga

SEQ ID NO: 100438 - DNA, 25 bp, SARS Virus
ccgctgtaaagttcgtaattgcgaa

SEQ ID NO: 100439 - DNA, 25 bp, SARS Virus
cgctgtaaagtctgtaattgcgaag

SEQ ID NO: 100440 - DNA, 25 bp, SARS Virus
gctgtaaagtccttaattgcgaaga

SEQ ID NO: 100441 - DNA, 25 bp, SARS Virus
ctgtaaagtccgtaattgcgaagac

SEQ ID NO: 100442 - DNA, 25 bp, SARS Virus
tgtaaagtccgttattgcgaagaca

SEQ ID NO: 100443 - DNA, 25 bp, SARS Virus
gtaaagtccgtatttgcgaagacag

SEQ ID NO: 100444 - DNA, 25 bp, SARS Virus
taaagtccgtaattgcgaagacagc

SEQ ID NO: 100445 - DNA, 25 bp, SARS Virus
aaagtccgtaattgcgaagacagca

SEQ ID NO: 100446 - DNA, 25 bp, SARS Virus
aagtccgtaatttcgaagacagcag

SEQ ID NO: 100447 - DNA, 25 bp, SARS Virus
agtccgtaattgtgaagacagcagt

SEQ ID NO: 100448 - DNA, 25 bp, SARS Virus
gtccgtaattgctaagacagcagtt

SEQ ID NO: 100449 - DNA, 25 bp, SARS Virus
tccgtaattgcgtagacagcagttg

SEQ ID NO: 100450 - DNA, 25 bp, SARS Virus
ccgtaattgcgatgacagcagttgt

SEQ ID NO: 100451 - DNA, 25 bp, SARS Virus
cgtaattgcgaatacagcagttgta

SEQ ID NO: 100452 - DNA, 25 bp, SARS Virus
gtaattgcgaagtcagcagttgtaa

SEQ ID NO: 100453 - DNA, 25 bp, SARS Virus
taattgcgaagatagcagttgtaag

SEQ ID NO: 100454 - DNA, 25 bp, SARS Virus
aattgcgaagactgcagttgtaagt

SEQ ID NO: 100455 - DNA, 25 bp, SARS Virus
attgcgaagacatcagttgtaagtt

SEQ ID NO: 100456 - DNA, 25 bp, SARS Virus
ttgcgaagacagtagttgtaagttt

SEQ ID NO: 100457 - DNA, 25 bp, SARS Virus
tgcgaagacagctgttgtaagtttt

SEQ ID NO: 100458 - DNA, 25 bp, SARS Virus
gcgaagacagcatttgtaagttttt

SEQ ID NO: 100459 - DNA, 25 bp, SARS Virus
cgaagacagcagttgtaagtttttc

SEQ ID NO: 100460 - DNA, 25 bp, SARS Virus
gaagacagcagttgtaagtttttct

SEQ ID NO: 100461 - DNA, 25 bp, SARS Virus
aagacagcagttttaagtttttctt

SEQ ID NO: 100462 - DNA, 25 bp, SARS Virus
agacagcagttgtaagtttttcttt

SEQ ID NO: 100463 - DNA, 25 bp, SARS Virus
gacagcagttgttagtttttcttta

SEQ ID NO: 100464 - DNA, 25 bp, SARS Virus
acagcagttgtatgtttttctttaa

SEQ ID NO: 100465 - DNA, 25 bp, SARS Virus
cagcagttgtaattttttctttaac

SEQ ID NO: 100466 - DNA, 25 bp, SARS Virus
agcagttgtaagtttttctttaact

SEQ ID NO: 100467 - DNA, 25 bp, SARS Virus
gcagttgtaagtttttctttaactg

SEQ ID NO: 100468 - DNA, 25 bp, SARS Virus
cagttgtaagtttttctttaactgg

SEQ ID NO: 100469 - DNA, 25 bp, SARS Virus
agttgtaagtttttctttaactggc

SEQ ID NO: 100470 - DNA, 25 bp, SARS Virus
gttgtaagtttttctttaactggcg

SEQ ID NO: 100471 - DNA, 25 bp, SARS Virus
ttgtaagtttttttttaactggcgg

SEQ ID NO: 100472 - DNA, 25 bp, SARS Virus
tgtaagtttttctttaactggcgga

SEQ ID NO: 100473 - DNA, 25 bp, SARS Virus
gtaagtttttctttaactggcggag

SEQ ID NO: 100474 - DNA, 25 bp, SARS Virus
taagtttttctttaactggcggagt

SEQ ID NO: 100475 - DNA, 25 bp, SARS Virus
aagtttttcttttactggcggagtt

SEQ ID NO: 100476 - DNA, 25 bp, SARS Virus
agtttttctttatctggcggagtta

SEQ ID NO: 100477 - DNA, 25 bp, SARS Virus
gtttttctttaattggcggagttac

SEQ ID NO: 100478 - DNA, 25 bp, SARS Virus
tttttctttaactggcggagttact

SEQ ID NO: 100479 - DNA, 25 bp, SARS Virus
ttttctttaacttgcggagttactc

SEQ ID NO: 100480 - DNA, 25 bp, SARS Virus
tttctttaactgtcggagttactcc

SEQ ID NO: 100481 - DNA, 25 bp, SARS Virus
ttctttaactggtggagttactcca

SEQ ID NO: 100482 - DNA, 25 bp, SARS Virus
tctttaactggctgagttactccag

SEQ ID NO: 100483 - DNA, 25 bp, SARS Virus
ctttaactggcgtagttactccagc

SEQ ID NO: 100484 - DNA, 25 bp, SARS Virus
tttaactggcggtgttactccagcg

SEQ ID NO: 100485 - DNA, 25 bp, SARS Virus
ttaactggcggatttactccagcga

SEQ ID NO: 100486 - DNA, 25 bp, SARS Virus
taactggcggagttactccagcgat

SEQ ID NO: 100487 - DNA, 25 bp, SARS Virus
aactggcggagttactccagcgatt

SEQ ID NO: 100488 - DNA, 25 bp, SARS Virus
actggcggagtttctccagcgattt

SEQ ID NO: 100489 - DNA, 25 bp, SARS Virus
ctggcggagttattccagcgatttt

SEQ ID NO: 100490 - DNA, 25 bp, SARS Virus
tggcggagttactccagcgattttt

SEQ ID NO: 100491 - DNA, 25 bp, SARS Virus
ggcggagttacttcagcgattttta

SEQ ID NO: 100492 - DNA, 25 bp, SARS Virus
gcggagttactctagcgatttttaa

SEQ ID NO: 100493 - DNA, 25 bp, SARS Virus
cggagttactcctgcgatttttaaa

SEQ ID NO: 100494 - DNA, 25 bp, SARS Virus
ggagttactccatcgatttttaaat

SEQ ID NO: 100495 - DNA, 25 bp, SARS Virus
gagttactccagtgatttttaaatt

SEQ ID NO: 100496 - DNA, 25 bp, SARS Virus
agttactccagctatttttaaattt

SEQ ID NO: 100497 - DNA, 25 bp, SARS Virus
gttactccagcgttttttaaattta

SEQ ID NO: 100498 - DNA, 25 bp, SARS Virus
ttactccagcgatttttaaatttac

SEQ ID NO: 100499 - DNA, 25 bp, SARS Virus
tactccagcgatttttaaatttact

SEQ ID NO: 100500 - DNA, 25 bp, SARS Virus
actccagcgatttttaaatttactt

SEQ ID NO: 100501 - DNA, 25 bp, SARS Virus
ctccagcgatttttaaatttactta

SEQ ID NO: 100502 - DNA, 25 bp, SARS Virus
tccagcgatttttaaatttacttag

SEQ ID NO: 100503 - DNA, 25 bp, SARS Virus
ccagcgattttttaatttacttagt

SEQ ID NO: 100504 - DNA, 25 bp, SARS Virus
cagcgatttttatatttacttagtg

SEQ ID NO: 100505 - DNA, 25 bp, SARS Virus
agcgatttttaattttacttagtga

SEQ ID NO: 100506 - DNA, 25 bp, SARS Virus
gcgatttttaaatttacttagtgag

SEQ ID NO: 100507 - DNA, 25 bp, SARS Virus
cgatttttaaatttacttagtgagt

SEQ ID NO: 100508 - DNA, 25 bp, SARS Virus
gatttttaaatttacttagtgagta

SEQ ID NO: 100509 - DNA, 25 bp, SARS Virus
atttttaaattttcttagtgagtaa

SEQ ID NO: 100510 - DNA, 25 bp, SARS Virus
tttttaaatttatttagtgagtaac

SEQ ID NO: 100511 - DNA, 25 bp, SARS Virus
ttttaaatttacttagtgagtaact

SEQ ID NO: 100512 - DNA, 25 bp, SARS Virus
tttaaatttacttagtgagtaactg

SEQ ID NO: 100513 - DNA, 25 bp, SARS Virus
ttaaatttactttgtgagtaactgg

SEQ ID NO: 100514 - DNA, 25 bp, SARS Virus
taaatttacttattgagtaactgga

SEQ ID NO: 100515 - DNA, 25 bp, SARS Virus
aaatttacttagtgagtaactggaa

SEQ ID NO: 100516 - DNA, 25 bp, SARS Virus
aatttacttagttagtaactggaag

SEQ ID NO: 100517 - DNA, 25 bp, SARS Virus
atttacttagtgtgtaactggaagt

SEQ ID NO: 100518 - DNA, 25 bp, SARS Virus
tttacttagtgattaactggaagtt

SEQ ID NO: 100519 - DNA, 25 bp, SARS Virus
ttacttagtgagtaactggaagttc

SEQ ID NO: 100520 - DNA, 25 bp, SARS Virus
tacttagtgagttactggaagttct

SEQ ID NO: 100521 - DNA, 25 bp, SARS Virus
acttagtgagtatctggaagttctt

SEQ ID NO: 100522 - DNA, 25 bp, SARS Virus
cttagtgagtaattggaagttctta

SEQ ID NO: 100523 - DNA, 25 bp, SARS Virus
ttagtgagtaactggaagttcttaa

SEQ ID NO: 100524 - DNA, 25 bp, SARS Virus
tagtgagtaacttgaagttcttaac

SEQ ID NO: 100525 - DNA, 25 bp, SARS Virus
agtgagtaactgtaagttcttaacc

SEQ ID NO: 100526 - DNA, 25 bp, SARS Virus
gtgagtaactggtagttcttaaccc

SEQ ID NO: 100527 - DNA, 25 bp, SARS Virus
tgagtaactggatgttcttaaccct

SEQ ID NO: 100528 - DNA, 25 bp, SARS Virus
gagtaactggaatttcttaaccctt

SEQ ID NO: 100529 - DNA, 25 bp, SARS Virus
agtaactggaagttcttaacccttt

SEQ ID NO: 100530 - DNA, 25 bp, SARS Virus
gtaactggaagttcttaaccctttt

SEQ ID NO: 100531 - DNA, 25 bp, SARS Virus
taactggaagtttttaaccctttta

SEQ ID NO: 100532 - DNA, 25 bp, SARS Virus
aactggaagttcttaacccttttat

SEQ ID NO: 100533 - DNA, 25 bp, SARS Virus
actggaagttcttaacccttttata

SEQ ID NO: 100534 - DNA, 25 bp, SARS Virus
ctggaagttctttacccttttatac

SEQ ID NO: 100535 - DNA, 25 bp, SARS Virus
tggaagttcttatcccttttatact

SEQ ID NO: 100536 - DNA, 25 bp, SARS Virus
ggaagttcttaatccttttatactc

SEQ ID NO: 100537 - DNA, 25 bp, SARS Virus
gaagttcttaactcttttatactcg

SEQ ID NO: 100538 - DNA, 25 bp, SARS Virus
aagttcttaacctttttatactcgt

SEQ ID NO: 100539 - DNA, 25 bp, SARS Virus
agttcttaacccttttatactcgtt

SEQ ID NO: 100540 - DNA, 25 bp, SARS Virus
gttcttaacccttttatactcgtta

SEQ ID NO: 100541 - DNA, 25 bp, SARS Virus
ttcttaacccttttatactcgttat

SEQ ID NO: 100542 - DNA, 25 bp, SARS Virus
tcttaacccttttatactcgttata

SEQ ID NO: 100543 - DNA, 25 bp, SARS Virus
cttaacccttttttactcgttatat

SEQ ID NO: 100544 - DNA, 25 bp, SARS Virus
ttaacccttttatactcgttatata

SEQ ID NO: 100545 - DNA, 25 bp, SARS Virus
taacccttttattctcgttatataa

SEQ ID NO: 100546 - DNA, 25 bp, SARS Virus
aacccttttatattcgttatataat

SEQ ID NO: 100547 - DNA, 25 bp, SARS Virus
acccttttatactcgttatataatt

SEQ ID NO: 100548 - DNA, 25 bp, SARS Virus
cccttttatacttgttatataattt

SEQ ID NO: 100549 - DNA, 25 bp, SARS Virus
ccttttatactctttatataattta

SEQ ID NO: 100550 - DNA, 25 bp, SARS Virus
cttttatactcgttatataatttac

SEQ ID NO: 100551 - DNA, 25 bp, SARS Virus
ttttatactcgttatataatttacc

SEQ ID NO: 100552 - DNA, 25 bp, SARS Virus
tttatactcgttttataatttaccg

SEQ ID NO: 100553 - DNA, 25 bp, SARS Virus
ttatactcgttatataatttaccgg

SEQ ID NO: 100554 - DNA, 25 bp, SARS Virus
tatactcgttatttaatttaccgga

SEQ ID NO: 100555 - DNA, 25 bp, SARS Virus
atactcgttatataatttaccggaa

SEQ ID NO: 100556 - DNA, 25 bp, SARS Virus
tactcgttatattatttaccggaac

SEQ ID NO: 100557 - DNA, 25 bp, SARS Virus
actcgttatatattttaccggaacc

SEQ ID NO: 100558 - DNA, 25 bp, SARS Virus
ctcgttatataatttaccggaacca

SEQ ID NO: 100559 - DNA, 25 bp, SARS Virus
tcgttatataatttaccggaaccat

SEQ ID NO: 100560 - DNA, 25 bp, SARS Virus
cgttatataatttaccggaaccata

SEQ ID NO: 100561 - DNA, 25 bp, SARS Virus
gttatataattttccggaaccatac

SEQ ID NO: 100562 - DNA, 25 bp, SARS Virus
ttatataatttatcggaaccataca

SEQ ID NO: 100563 - DNA, 25 bp, SARS Virus
tatataatttactggaaccatacaa

SEQ ID NO: 100564 - DNA, 25 bp, SARS Virus
atataatttacctgaaccatacaaa

SEQ ID NO: 100565 - DNA, 25 bp, SARS Virus
tataatttaccgtaaccatacaaac

SEQ ID NO: 100566 - DNA, 25 bp, SARS Virus
ataatttaccggtaccatacaaacc

SEQ ID NO: 100567 - DNA, 25 bp, SARS Virus
taatttaccggatccatacaaaccg

SEQ ID NO: 100568 - DNA, 25 bp, SARS Virus
aatttaccggaatcatacaaaccga

SEQ ID NO: 100569 - DNA, 25 bp, SARS Virus
atttaccggaactatacaaaccgag

SEQ ID NO: 100570 - DNA, 25 bp, SARS Virus
tttaccggaaccttacaaaccgagc

SEQ ID NO: 100571 - DNA, 25 bp, SARS Virus
ttaccggaaccatacaaaccgagcc

SEQ ID NO: 100572 - DNA, 25 bp, SARS Virus
taccggaaccattcaaaccgagccg

SEQ ID NO: 100573 - DNA, 25 bp, SARS Virus
accggaaccatataaaccgagccga

SEQ ID NO: 100574 - DNA, 25 bp, SARS Virus
ccggaaccatactaaccgagccgaa

SEQ ID NO: 100575 - DNA, 25 bp, SARS Virus
cggaaccatacataccgagccgaag

SEQ ID NO: 100576 - DNA, 25 bp, SARS Virus
ggaaccatacaatccgagccgaagt

SEQ ID NO: 100577 - DNA, 25 bp, SARS Virus
gaaccatacaaatcgagccgaagta

SEQ ID NO: 100578 - DNA, 25 bp, SARS Virus
aaccatacaaactgagccgaagtaa

SEQ ID NO: 100579 - DNA, 25 bp, SARS Virus
accatacaaacctagccgaagtaac

SEQ ID NO: 100580 - DNA, 25 bp, SARS Virus
ccatacaaaccgtgccgaagtaacg

SEQ ID NO: 100581 - DNA, 25 bp, SARS Virus
catacaaaccgatccgaagtaacga

SEQ ID NO: 100582 - DNA, 25 bp, SARS Virus
atacaaaccgagtcgaagtaacgac

SEQ ID NO: 100583 - DNA, 25 bp, SARS Virus
tacaaaccgagctgaagtaacgacc

SEQ ID NO: 100584 - DNA, 25 bp, SARS Virus
acaaaccgagcctaagtaacgacct

SEQ ID NO: 100585 - DNA, 25 bp, SARS Virus
caaaccgagccgtagtaacgacctg

SEQ ID NO: 100586 - DNA, 25 bp, SARS Virus
aaaccgagccgatgtaacgacctga

SEQ ID NO: 100587 - DNA, 25 bp, SARS Virus
aaccgagccgaattaacgacctgat

SEQ ID NO: 100588 - DNA, 25 bp, SARS Virus
accgagccgaagtaacgacctgatt

SEQ ID NO: 100589 - DNA, 25 bp, SARS Virus
ccgagccgaagttacgacctgatta

SEQ ID NO: 100590 - DNA, 25 bp, SARS Virus
cgagccgaagtatcgacctgattaa

SEQ ID NO: 100591 - DNA, 25 bp, SARS Virus
gagccgaagtaatgacctgattaac

SEQ ID NO: 100592 - DNA, 25 bp, SARS Virus
agccgaagtaactacctgattaacg

SEQ ID NO: 100593 - DNA, 25 bp, SARS Virus
gccgaagtaacgtcctgattaacgg

SEQ ID NO: 100594 - DNA, 25 bp, SARS Virus
ccgaagtaacgatctgattaacggt

SEQ ID NO: 100595 - DNA, 25 bp, SARS Virus
cgaagtaacgacttgattaacggta

SEQ ID NO: 100596 - DNA, 25 bp, SARS Virus
gaagtaacgacctgattaacggtag

SEQ ID NO: 100597 - DNA, 25 bp, SARS Virus
aagtaacgaccttattaacggtagc

SEQ ID NO: 100598 - DNA, 25 bp, SARS Virus
agtaacgacctgtttaacggtagca

SEQ ID NO: 100599 - DNA, 25 bp, SARS Virus
gtaacgacctgattaacggtagcag

SEQ ID NO: 100600 - DNA, 25 bp, SARS Virus
taacgacctgattaacggtagcagt

SEQ ID NO: 100601 - DNA, 25 bp, SARS Virus
aacgacctgatttacggtagcagta

SEQ ID NO: 100602 - DNA, 25 bp, SARS Virus
acgacctgattatcggtagcagtac

SEQ ID NO: 100603 - DNA, 25 bp, SARS Virus
cgacctgattaatggtagcagtacc

SEQ ID NO: 100604 - DNA, 25 bp, SARS Virus
gacctgattaactgtagcagtacca

SEQ ID NO: 100605 - DNA, 25 bp, SARS Virus
acctgattaacgttagcagtaccaa

SEQ ID NO: 100606 - DNA, 25 bp, SARS Virus
cctgattaacggtagcagtaccaat

SEQ ID NO: 100607 - DNA, 25 bp, SARS Virus
ctgattaacggttgcagtaccaatg

SEQ ID NO: 100608 - DNA, 25 bp, SARS Virus
tgattaacggtatcagtaccaatgt

SEQ ID NO: 100609 - DNA, 25 bp, SARS Virus
gattaacggtagtagtaccaatgtt

SEQ ID NO: 100610 - DNA, 25 bp, SARS Virus
attaacggtagctgtaccaatgtta

SEQ ID NO: 100611 - DNA, 25 bp, SARS Virus
ttaacggtagcattaccaatgttag

SEQ ID NO: 100612 - DNA, 25 bp, SARS Virus
taacggtagcagtaccaatgttaga

SEQ ID NO: 100613 - DNA, 25 bp, SARS Virus
aacggtagcagttccaatgttagaa

SEQ ID NO: 100614 - DNA, 25 bp, SARS Virus
acggtagcagtatcaatgttagaac

SEQ ID NO: 100615 - DNA, 25 bp, SARS Virus
cggtagcagtactaatgttagaacg

SEQ ID NO: 100616 - DNA, 25 bp, SARS Virus
ggtagcagtacctatgttagaacga

SEQ ID NO: 100617 - DNA, 25 bp, SARS Virus
gtagcagtaccattgttagaacgaa

SEQ ID NO: 100618 - DNA, 25 bp, SARS Virus
tagcagtaccaatgttagaacgaaa

SEQ ID NO: 100619 - DNA, 25 bp, SARS Virus
agcagtaccaattttagaacgaaac

SEQ ID NO: 100620 - DNA, 25 bp, SARS Virus
gcagtaccaatgttagaacgaaaca

SEQ ID NO: 100621 - DNA, 25 bp, SARS Virus
cagtaccaatgttagaacgaaacaa

SEQ ID NO: 100622 - DNA, 25 bp, SARS Virus
agtaccaatgtttgaacgaaacaac

SEQ ID NO: 100623 - DNA, 25 bp, SARS Virus
gtaccaatgttataacgaaacaacg

SEQ ID NO: 100624 - DNA, 25 bp, SARS Virus
taccaatgttagtacgaaacaacgt

SEQ ID NO: 100625 - DNA, 25 bp, SARS Virus
accaatgttagatcgaaacaacgta

SEQ ID NO: 100626 - DNA, 25 bp, SARS Virus
ccaatgttagaatgaaacaacgtac

SEQ ID NO: 100627 - DNA, 25 bp, SARS Virus
caatgttagaactaaacaacgtact

SEQ ID NO: 100628 - DNA, 25 bp, SARS Virus
aatgttagaacgtaacaacgtactg

SEQ ID NO: 100629 - DNA, 25 bp, SARS Virus
atgttagaacgatacaacgtactga

SEQ ID NO: 100630 - DNA, 25 bp, SARS Virus
tgttagaacgaatcaacgtactgat

SEQ ID NO: 100631 - DNA, 25 bp, SARS Virus
gttagaacgaaataacgtactgatc

SEQ ID NO: 100632 - DNA, 25 bp, SARS Virus
ttagaacgaaactacgtactgatca

SEQ ID NO: 100633 - DNA, 25 bp, SARS Virus
tagaacgaaacatcgtactgatcaa

SEQ ID NO: 100634 - DNA, 25 bp, SARS Virus
agaacgaaacaatgtactgatcaac

SEQ ID NO: 100635 - DNA, 25 bp, SARS Virus
gaacgaaacaacttactgatcaaca

SEQ ID NO: 100636 - DNA, 25 bp, SARS Virus
aacgaaacaacgtactgatcaacaa

SEQ ID NO: 100637 - DNA, 25 bp, SARS Virus
acgaaacaacgttctgatcaacaac

SEQ ID NO: 100638 - DNA, 25 bp, SARS Virus
cgaaacaacgtattgatcaacaacg

SEQ ID NO: 100639 - DNA, 25 bp, SARS Virus
gaaacaacgtactgatcaacaacgt

SEQ ID NO: 100640 - DNA, 25 bp, SARS Virus
aaacaacgtacttatcaacaacgtc

SEQ ID NO: 100641 - DNA, 25 bp, SARS Virus
aacaacgtactgttcaacaacgtca

SEQ ID NO: 100642 - DNA, 25 bp, SARS Virus
acaacgtactgatcaacaacgtcaa

SEQ ID NO: 100643 - DNA, 25 bp, SARS Virus
caacgtactgattaacaacgtcaac

SEQ ID NO: 100644 - DNA, 25 bp, SARS Virus
aacgtactgatctacaacgtcaacg

SEQ ID NO: 100645 - DNA, 25 bp, SARS Virus
acgtactgatcatcaacgtcaacgg

SEQ ID NO: 100646 - DNA, 25 bp, SARS Virus
cgtactgatcaataacgtcaacgga

SEQ ID NO: 100647 - DNA, 25 bp, SARS Virus
gtactgatcaactacgtcaacggag

SEQ ID NO: 100648 - DNA, 25 bp, SARS Virus
tactgatcaacatcgtcaacggagt

SEQ ID NO: 100649 - DNA, 25 bp, SARS Virus
actgatcaacaatgtcaacggagtt

SEQ ID NO: 100650 - DNA, 25 bp, SARS Virus
ctgatcaacaacttcaacggagttc

SEQ ID NO: 100651 - DNA, 25 bp, SARS Virus
tgatcaacaacgtcaacggagttcc

SEQ ID NO: 100652 - DNA, 25 bp, SARS Virus
gatcaacaacgttaacggagttccc

SEQ ID NO: 100653 - DNA, 25 bp, SARS Virus
atcaacaacgtctacggagttccca

SEQ ID NO: 100654 - DNA, 25 bp, SARS Virus
tcaacaacgtcatcggagttcccac

SEQ ID NO: 100655 - DNA, 25 bp, SARS Virus
caacaacgtcaatggagttcccacg

SEQ ID NO: 100656 - DNA, 25 bp, SARS Virus
aacaacgtcaactgagttcccacgt

SEQ ID NO: 100657 - DNA, 25 bp, SARS Virus
acaacgtcaacgaagttcccacgta

SEQ ID NO: 100658 - DNA, 25 bp, SARS Virus
caacgtcaacggagttcccacgtac

SEQ ID NO: 100659 - DNA, 25 bp, SARS Virus
aacgtcaacggaattcccacgtacg

SEQ ID NO: 100660 - DNA, 25 bp, SARS Virus
acgtcaacggagatcccacgtacga

SEQ ID NO: 100661 - DNA, 25 bp, SARS Virus
cgtcaacggagtacccacgtacgag

SEQ ID NO: 100662 - DNA, 25 bp, SARS Virus
gtcaacggagttaccacgtacgaga

SEQ ID NO: 100663 - DNA, 25 bp, SARS Virus
tcaacggagttcacacgtacgagaa

SEQ ID NO: 100664 - DNA, 25 bp, SARS Virus
caacggagttccaacgtacgagaac

SEQ ID NO: 100665 - DNA, 25 bp, SARS Virus
aacggagttcccacgtacgagaaca

SEQ ID NO: 100666 - DNA, 25 bp, SARS Virus
acggagttcccaagtacgagaacac

SEQ ID NO: 100667 - DNA, 25 bp, SARS Virus
cggagttcccacatacgagaacacc

SEQ ID NO: 100668 - DNA, 25 bp, SARS Virus
ggagttcccacgaacgagaacacca

SEQ ID NO: 100669 - DNA, 25 bp, SARS Virus
gagttcccacgtacgagaacaccaa

SEQ ID NO: 100670 - DNA, 25 bp, SARS Virus
agttcccacgtaagagaacaccaag

SEQ ID NO: 100671 - DNA, 25 bp, SARS Virus
gttcccacgtacaagaacaccaaga

SEQ ID NO: 100672 - DNA, 25 bp, SARS Virus
ttcccacgtacgagaacaccaagaa

SEQ ID NO: 100673 - DNA, 25 bp, SARS Virus
tcccacgtacgaaaacaccaagaac

SEQ ID NO: 100674 - DNA, 25 bp, SARS Virus
cccacgtacgagaacaccaagaacg

SEQ ID NO: 100675 - DNA, 25 bp, SARS Virus
ccacgtacgagaacaccaagaacga

SEQ ID NO: 100676 - DNA, 25 bp, SARS Virus
cacgtacgagaaaaccaagaacgac

SEQ ID NO: 100677 - DNA, 25 bp, SARS Virus
acgtacgagaacaccaagaacgacg

SEQ ID NO: 100678 - DNA, 25 bp, SARS Virus
cgtacgagaacaacaagaacgacgt

SEQ ID NO: 100679 - DNA, 25 bp, SARS Virus
gtacgagaacacaaagaacgacgtt

SEQ ID NO: 100680 - DNA, 25 bp, SARS Virus
tacgagaacaccaagaacgacgttc

SEQ ID NO: 100681 - DNA, 25 bp, SARS Virus
acgagaacaccaagaacgacgttca

SEQ ID NO: 100682 - DNA, 25 bp, SARS Virus
cgagaacaccaaaaacgacgttcaa

SEQ ID NO: 100683 - DNA, 25 bp, SARS Virus
gagaacaccaagaacgacgttcaaa

SEQ ID NO: 100684 - DNA, 25 bp, SARS Virus
agaacaccaagaacgacgttcaaac

SEQ ID NO: 100685 - DNA, 25 bp, SARS Virus
gaacaccaagaaagacgttcaaact

SEQ ID NO: 100686 - DNA, 25 bp, SARS Virus
aacaccaagaacaacgttcaaacta

SEQ ID NO: 100687 - DNA, 25 bp, SARS Virus
acaccaagaacgacgttcaaactac

SEQ ID NO: 100688 - DNA, 25 bp, SARS Virus
caccaagaacgaagttcaaactact

SEQ ID NO: 100689 - DNA, 25 bp, SARS Virus
accaagaacgacattcaaactactc

SEQ ID NO: 100690 - DNA, 25 bp, SARS Virus
ccaagaacgacgatcaaactactcc

SEQ ID NO: 100691 - DNA, 25 bp, SARS Virus
caagaacgacgtacaaactactcct

SEQ ID NO: 100692 - DNA, 25 bp, SARS Virus
aagaacgacgttaaaactactccta

SEQ ID NO: 100693 - DNA, 25 bp, SARS Virus
agaacgacgttcaaactactcctac

SEQ ID NO: 100694 - DNA, 25 bp, SARS Virus
gaacgacgttcaaactactcctact

SEQ ID NO: 100695 - DNA, 25 bp, SARS Virus
aacgacgttcaaactactcctactg

SEQ ID NO: 100696 - DNA, 25 bp, SARS Virus
acgacgttcaaaatactcctactga

SEQ ID NO: 100697 - DNA, 25 bp, SARS Virus
cgacgttcaaacaactcctactgag

SEQ ID NO: 100698 - DNA, 25 bp, SARS Virus
gacgttcaaactactcctactgaga

SEQ ID NO: 100699 - DNA, 25 bp, SARS Virus
acgttcaaactaatcctactgagac

SEQ ID NO: 100700 - DNA, 25 bp, SARS Virus
cgttcaaactacacctactgagact

SEQ ID NO: 100701 - DNA, 25 bp, SARS Virus
gttcaaactactactactgagactc

SEQ ID NO: 100702 - DNA, 25 bp, SARS Virus
ttcaaactactcatactgagactcg

SEQ ID NO: 100703 - DNA, 25 bp, SARS Virus
tcaaactactccaactgagactcgg

SEQ ID NO: 100704 - DNA, 25 bp, SARS Virus
caaactactcctactgagactcggt

SEQ ID NO: 100705 - DNA, 25 bp, SARS Virus
aaactactcctaatgagactcggtc

SEQ ID NO: 100706 - DNA, 25 bp, SARS Virus
aactactcctacagagactcggtca

SEQ ID NO: 100707 - DNA, 25 bp, SARS Virus
actactcctactaagactcggtcaa

SEQ ID NO: 100708 - DNA, 25 bp, SARS Virus
ctactcctactgagactcggtcaag

SEQ ID NO: 100709 - DNA, 25 bp, SARS Virus
tactcctactgaaactcggtcaaga

SEQ ID NO: 100710 - DNA, 25 bp, SARS Virus
actcctactgagactcggtcaagag

SEQ ID NO: 100711 - DNA, 25 bp, SARS Virus
ctcctactgagaatcggtcaagagt

SEQ ID NO: 100712 - DNA, 25 bp, SARS Virus
tcctactgagacacggtcaagagtt

SEQ ID NO: 100713 - DNA, 25 bp, SARS Virus
cctactgagactaggtcaagagttc

SEQ ID NO: 100714 - DNA, 25 bp, SARS Virus
ctactgagactcagtcaagagttcc

SEQ ID NO: 100715 - DNA, 25 bp, SARS Virus
tactgagactcgatcaagagttccc

SEQ ID NO: 100716 - DNA, 25 bp, SARS Virus
actgagactcggacaagagttccca

SEQ ID NO: 100717 - DNA, 25 bp, SARS Virus
ctgagactcggtaaagagttcccac

SEQ ID NO: 100718 - DNA, 25 bp, SARS Virus
tgagactcggtcaagagttcccaca

SEQ ID NO: 100719 - DNA, 25 bp, SARS Virus
gagactcggtcaagagttcccacag

SEQ ID NO: 100720 - DNA, 25 bp, SARS Virus
agactcggtcaaaagttcccacagt

SEQ ID NO: 100721 - DNA, 25 bp, SARS Virus
gactcggtcaagagttcccacagtt

SEQ ID NO: 100722 - DNA, 25 bp, SARS Virus
actcggtcaagaattcccacagttt

SEQ ID NO: 100723 - DNA, 25 bp, SARS Virus
ctcggtcaagagatcccacagttta

SEQ ID NO: 100724 - DNA, 25 bp, SARS Virus
tcggtcaagagtacccacagtttaa

SEQ ID NO: 100725 - DNA, 25 bp, SARS Virus
cggtcaagagttaccacagtttaat

SEQ ID NO: 100726 - DNA, 25 bp, SARS Virus
ggtcaagagttcacacagtttaatg

SEQ ID NO: 100727 - DNA, 25 bp, SARS Virus
gtcaagagttccaacagtttaatgt

SEQ ID NO: 100728 - DNA, 25 bp, SARS Virus
tcaagagttcccacagtttaatgta

SEQ ID NO: 100729 - DNA, 25 bp, SARS Virus
caagagttcccaaagtttaatgtaa

SEQ ID NO: 100730 - DNA, 25 bp, SARS Virus
aagagttcccacagtttaatgtaat

SEQ ID NO: 100731 - DNA, 25 bp, SARS Virus
agagttcccacaatttaatgtaatg

SEQ ID NO: 100732 - DNA, 25 bp, SARS Virus
gagttcccacagattaatgtaatgt

SEQ ID NO: 100733 - DNA, 25 bp, SARS Virus
agttcccacagtataatgtaatgtg

SEQ ID NO: 100734 - DNA, 25 bp, SARS Virus
gttcccacagttaaatgtaatgtgt

SEQ ID NO: 100735 - DNA, 25 bp, SARS Virus
ttcccacagtttaatgtaatgtgta

SEQ ID NO: 100736 - DNA, 25 bp, SARS Virus
tcccacagtttaatgtaatgtgtat

SEQ ID NO: 100737 - DNA, 25 bp, SARS Virus
cccacagtttaaagtaatgtgtatt

SEQ ID NO: 100738 - DNA, 25 bp, SARS Virus
ccacagtttaatataatgtgtattt

SEQ ID NO: 100739 - DNA, 25 bp, SARS Virus
cacagtttaatgaaatgtgtatttg

SEQ ID NO: 100740 - DNA, 25 bp, SARS Virus
acagtttaatgtaatgtgtatttgc

SEQ ID NO: 100741 - DNA, 25 bp, SARS Virus
cagtttaatgtaatgtgtatttgct

SEQ ID NO: 100742 - DNA, 25 bp, SARS Virus
agtttaatgtaaagtgtatttgctt

SEQ ID NO: 100743 - DNA, 25 bp, SARS Virus
gtttaatgtaatatgtatttgcttg

SEQ ID NO: 100744 - DNA, 25 bp, SARS Virus
tttaatgtaatgagtatttgcttga

SEQ ID NO: 100745 - DNA, 25 bp, SARS Virus
ttaatgtaatgtatatttgcttgaa

SEQ ID NO: 100746 - DNA, 25 bp, SARS Virus
taatgtaatgtgaatttgcttgaat

SEQ ID NO: 100747 - DNA, 25 bp, SARS Virus
aatgtaatgtgtatttgcttgaata

SEQ ID NO: 100748 - DNA, 25 bp, SARS Virus
atgtaatgtgtaattgcttgaatac

SEQ ID NO: 100749 - DNA, 25 bp, SARS Virus
tgtaatgtgtatatgcttgaatacc

SEQ ID NO: 100750 - DNA, 25 bp, SARS Virus
gtaatgtgtattagcttgaatacct

SEQ ID NO: 100751 - DNA, 25 bp, SARS Virus
taatgtgtatttacttgaataccta

SEQ ID NO: 100752 - DNA, 25 bp, SARS Virus
aatgtgtatttgattgaatacctaa

SEQ ID NO: 100753 - DNA, 25 bp, SARS Virus
atgtgtatttgcatgaatacctaaa

SEQ ID NO: 100754 - DNA, 25 bp, SARS Virus
tgtgtatttgctagaatacctaaac

SEQ ID NO: 100755 - DNA, 25 bp, SARS Virus
gtgtatttgcttaaatacctaaaca

SEQ ID NO: 100756 - DNA, 25 bp, SARS Virus
tgtatttgcttgaatacctaaacaa

SEQ ID NO: 100757 - DNA, 25 bp, SARS Virus
gtatttgcttgaatacctaaacaaa

SEQ ID NO: 100758 - DNA, 25 bp, SARS Virus
tatttgcttgaaaacctaaacaaat

SEQ ID NO: 100759 - DNA, 25 bp, SARS Virus
atttgcttgaatacctaaacaaata

SEQ ID NO: 100760 - DNA, 25 bp, SARS Virus
tttgcttgaataactaaacaaatac

SEQ ID NO: 100761 - DNA, 25 bp, SARS Virus
ttgcttgaatacataaacaaatact

SEQ ID NO: 100762 - DNA, 25 bp, SARS Virus
tgcttgaataccaaaacaaatactc

SEQ ID NO: 100763 - DNA, 25 bp, SARS Virus
gcttgaatacctaaacaaatactct

SEQ ID NO: 100764 - DNA, 25 bp, SARS Virus
cttgaatacctaaacaaatactcta

SEQ ID NO: 100765 - DNA, 25 bp, SARS Virus
ttgaatacctaaacaaatactctaa

SEQ ID NO: 100766 - DNA, 25 bp, SARS Virus
tgaatacctaaaaaaatactctaaa

SEQ ID NO: 100767 - DNA, 25 bp, SARS Virus
gaatacctaaacaaatactctaaaa

SEQ ID NO: 100768 - DNA, 25 bp, SARS Virus
aatacctaaacaaatactctaaaaa

SEQ ID NO: 100769 - DNA, 25 bp, SARS Virus
atacctaaacaaatactctaaaaaa

SEQ ID NO: 100770 - DNA, 25 bp, SARS Virus
tacctaaacaaaaactctaaaaaat

SEQ ID NO: 100771 - DNA, 25 bp, SARS Virus
acctaaacaaatactctaaaaaatg

SEQ ID NO: 100772 - DNA, 25 bp, SARS Virus
cctaaacaaataatctaaaaaatga

SEQ ID NO: 100773 - DNA, 25 bp, SARS Virus
ctaaacaaatacactaaaaaatgag

SEQ ID NO: 100774 - DNA, 25 bp, SARS Virus
taaacaaatactataaaaaatgaga

SEQ ID NO: 100775 - DNA, 25 bp, SARS Virus
aaacaaatactcaaaaaaatgagaa

SEQ ID NO: 100776 - DNA, 25 bp, SARS Virus
aacaaatactctaaaaaatgagaat

SEQ ID NO: 100777 - DNA, 25 bp, SARS Virus
acaaatactctaaaaaatgagaatc

SEQ ID NO: 100778 - DNA, 25 bp, SARS Virus
caaatactctaaaaaatgagaatct

SEQ ID NO: 100779 - DNA, 25 bp, SARS Virus
aaatactctaaaaaatgagaatcta

SEQ ID NO: 100780 - DNA, 25 bp, SARS Virus
aatactctaaaaaatgagaatctag

SEQ ID NO: 100781 - DNA, 25 bp, SARS Virus
atactctaaaaaatgagaatctagt

SEQ ID NO: 100782 - DNA, 25 bp, SARS Virus
tactctaaaaaaagagaatctagtt

SEQ ID NO: 100783 - DNA, 25 bp, SARS Virus
actctaaaaaataagaatctagtta

SEQ ID NO: 100784 - DNA, 25 bp, SARS Virus
ctctaaaaaatgagaatctagttaa

SEQ ID NO: 100785 - DNA, 25 bp, SARS Virus
tctaaaaaatgaaaatctagttaat

SEQ ID NO: 100786 - DNA, 25 bp, SARS Virus
ctaaaaaatgagaatctagttaatg

SEQ ID NO: 100787 - DNA, 25 bp, SARS Virus
taaaaaatgagaatctagttaatga

SEQ ID NO: 100788 - DNA, 25 bp, SARS Virus
aaaaaatgagaaactagttaatgac

SEQ ID NO: 100789 - DNA, 25 bp, SARS Virus
aaaaatgagaatatagttaatgacg

SEQ ID NO: 100790 - DNA, 25 bp, SARS Virus
aaaatgagaatcaagttaatgacgt

SEQ ID NO: 100791 - DNA, 25 bp, SARS Virus
aaatgagaatctagttaatgacgtg

SEQ ID NO: 100792 - DNA, 25 bp, SARS Virus
aatgagaatctaattaatgacgtgt

SEQ ID NO: 100793 - DNA, 25 bp, SARS Virus
atgagaatctagataatgacgtgtc

SEQ ID NO: 100794 - DNA, 25 bp, SARS Virus
tgagaatctagtaaatgacgtgtcg

SEQ ID NO: 100795 - DNA, 25 bp, SARS Virus
gagaatctagttaatgacgtgtcgg

SEQ ID NO: 100796 - DNA, 25 bp, SARS Virus
agaatctagttaatgacgtgtcggt

SEQ ID NO: 100797 - DNA, 25 bp, SARS Virus
gaatctagttaaagacgtgtcggtc

SEQ ID NO: 100798 - DNA, 25 bp, SARS Virus
aatctagttaataacgtgtcggtca

SEQ ID NO: 100799 - DNA, 25 bp, SARS Virus
atctagttaatgacgtgtcggtcat

SEQ ID NO: 100800 - DNA, 25 bp, SARS Virus
tctagttaatgaagtgtcggtcatt

SEQ ID NO: 100801 - DNA, 25 bp, SARS Virus
ctagttaatgacatgtcggtcattt

SEQ ID NO: 100802 - DNA, 25 bp, SARS Virus
tagttaatgacgagtcggtcatttt

SEQ ID NO: 100803 - DNA, 25 bp, SARS Virus
agttaatgacgtatcggtcattttt

SEQ ID NO: 100804 - DNA, 25 bp, SARS Virus
gttaatgacgtgacggtcattttta

SEQ ID NO: 100805 - DNA, 25 bp, SARS Virus
ttaatgacgtgtaggtcatttttaa

SEQ ID NO: 100806 - DNA, 25 bp, SARS Virus
taatgacgtgtcagtcatttttaac

SEQ ID NO: 100807 - DNA, 25 bp, SARS Virus
aatgacgtgtcgatcatttttaact

SEQ ID NO: 100808 - DNA, 25 bp, SARS Virus
atgacgtgtcggacatttttaactg

SEQ ID NO: 100809 - DNA, 25 bp, SARS Virus
tgacgtgtcggtaatttttaactgt

SEQ ID NO: 100810 - DNA, 25 bp, SARS Virus
gacgtgtcggtcatttttaactgtt

SEQ ID NO: 100811 - DNA, 25 bp, SARS Virus
acgtgtcggtcaattttaactgtta

SEQ ID NO: 100812 - DNA, 25 bp, SARS Virus
cgtgtcggtcatatttaactgttac

SEQ ID NO: 100813 - DNA, 25 bp, SARS Virus
gtgtcggtcattattaactgttacg

SEQ ID NO: 100814 - DNA, 25 bp, SARS Virus
tgtcggtcatttataactgttacga

SEQ ID NO: 100815 - DNA, 25 bp, SARS Virus
gtcggtcattttaaactgttacgaa

SEQ ID NO: 100816 - DNA, 25 bp, SARS Virus
tcggtcatttttaactgttacgaag

SEQ ID NO: 100817 - DNA, 25 bp, SARS Virus
cggtcatttttaactgttacgaaga

SEQ ID NO: 100818 - DNA, 25 bp, SARS Virus
ggtcatttttaaatgttacgaagag

SEQ ID NO: 100819 - DNA, 25 bp, SARS Virus
gtcatttttaacagttacgaagagg

SEQ ID NO: 100820 - DNA, 25 bp, SARS Virus
tcatttttaactattacgaagagga

SEQ ID NO: 100821 - DNA, 25 bp, SARS Virus
catttttaactgatacgaagaggac

SEQ ID NO: 100822 - DNA, 25 bp, SARS Virus
atttttaactgtaacgaagaggacg

SEQ ID NO: 100823 - DNA, 25 bp, SARS Virus
tttttaactgttacgaagaggacgt

SEQ ID NO: 100824 - DNA, 25 bp, SARS Virus
ttttaactgttaagaagaggacgtt

SEQ ID NO: 100825 - DNA, 25 bp, SARS Virus
tttaactgttacaaagaggacgttc

SEQ ID NO: 100826 - DNA, 25 bp, SARS Virus
ttaactgttacgaagaggacgttca

SEQ ID NO: 100827 - DNA, 25 bp, SARS Virus
taactgttacgaagaggacgttcat

SEQ ID NO: 100828 - DNA, 25 bp, SARS Virus
aactgttacgaaaaggacgttcatg

SEQ ID NO: 100829 - DNA, 25 bp, SARS Virus
actgttacgaagaggacgttcatga

SEQ ID NO: 100830 - DNA, 25 bp, SARS Virus
ctgttacgaagaagacgttcatgac

SEQ ID NO: 100831 - DNA, 25 bp, SARS Virus
tgttacgaagagaacgttcatgaca

SEQ ID NO: 100832 - DNA, 25 bp, SARS Virus
gttacgaagaggacgttcatgacaa

SEQ ID NO: 100833 - DNA, 25 bp, SARS Virus
ttacgaagaggaagttcatgacaag

SEQ ID NO: 100834 - DNA, 25 bp, SARS Virus
tacgaagaggacattcatgacaagt

SEQ ID NO: 100835 - DNA, 25 bp, SARS Virus
acgaagaggacgatcatgacaagta

SEQ ID NO: 100836 - DNA, 25 bp, SARS Virus
cgaagaggacgtacatgacaagtac

SEQ ID NO: 100837 - DNA, 25 bp, SARS Virus
gaagaggacgttaatgacaagtacg

SEQ ID NO: 100838 - DNA, 25 bp, SARS Virus
aagaggacgttcatgacaagtacga

SEQ ID NO: 100839 - DNA, 25 bp, SARS Virus
agaggacgttcaagacaagtacgat

SEQ ID NO: 100840 - DNA, 25 bp, SARS Virus
gaggacgttcataacaagtacgatg

SEQ ID NO: 100841 - DNA, 25 bp, SARS Virus
aggacgttcatgacaagtacgatgt

SEQ ID NO: 100842 - DNA, 25 bp, SARS Virus
ggacgttcatgaaaagtacgatgtc

SEQ ID NO: 100843 - DNA, 25 bp, SARS Virus
gacgttcatgacaagtacgatgtcg

SEQ ID NO: 100844 - DNA, 25 bp, SARS Virus
acgttcatgacaagtacgatgtcgt

SEQ ID NO: 100845 - DNA, 25 bp, SARS Virus
cgttcatgacaaatacgatgtcgtt

SEQ ID NO: 100846 - DNA, 25 bp, SARS Virus
gttcatgacaagaacgatgtcgttg

SEQ ID NO: 100847 - DNA, 25 bp, SARS Virus
ttcatgacaagtacgatgtcgttgc

SEQ ID NO: 100848 - DNA, 25 bp, SARS Virus
tcatgacaagtaagatgtcgttgct

SEQ ID NO: 100849 - DNA, 25 bp, SARS Virus
catgacaagtacaatgtcgttgcta

SEQ ID NO: 100850 - DNA, 25 bp, SARS Virus
atgacaagtacgatgtcgttgctat

SEQ ID NO: 100851 - DNA, 25 bp, SARS Virus
tgacaagtacgaagtcgttgctatg

SEQ ID NO: 100852 - DNA, 25 bp, SARS Virus
gacaagtacgatatcgttgctatgg

SEQ ID NO: 100853 - DNA, 25 bp, SARS Virus
acaagtacgatgacgttgctatggc

SEQ ID NO: 100854 - DNA, 25 bp, SARS Virus
caagtacgatgtagttgctatggcg

SEQ ID NO: 100855 - DNA, 25 bp, SARS Virus
aagtacgatgtcattgctatggcga

SEQ ID NO: 100856 - DNA, 25 bp, SARS Virus
agtacgatgtcgatgctatggcgat

SEQ ID NO: 100857 - DNA, 25 bp, SARS Virus
gtacgatgtcgtagctatggcgatg

SEQ ID NO: 100858 - DNA, 25 bp, SARS Virus
tacgatgtcgttactatggcgatgt

SEQ ID NO: 100859 - DNA, 25 bp, SARS Virus
acgatgtcgttgatatggcgatgtt

SEQ ID NO: 100860 - DNA, 25 bp, SARS Virus
cgatgtcgttgcaatggcgatgttc

SEQ ID NO: 100861 - DNA, 25 bp, SARS Virus
gatgtcgttgctatggcgatgttcg

SEQ ID NO: 100862 - DNA, 25 bp, SARS Virus
atgtcgttgctaaggcgatgttcgg

SEQ ID NO: 100863 - DNA, 25 bp, SARS Virus
tgtcgttgctatagcgatgttcgga

SEQ ID NO: 100864 - DNA, 25 bp, SARS Virus
gtcgttgctatgacgatgttcggag

SEQ ID NO: 100865 - DNA, 25 bp, SARS Virus
tcgttgctatggagatgttcggagt

SEQ ID NO: 100866 - DNA, 25 bp, SARS Virus
cgttgctatggcaatgttcggagtg

SEQ ID NO: 100867 - DNA, 25 bp, SARS Virus
gttgctatggcgatgttcggagtga

SEQ ID NO: 100868 - DNA, 25 bp, SARS Virus
ttgctatggcgaagttcggagtgag

SEQ ID NO: 100869 - DNA, 25 bp, SARS Virus
tgctatggcgatattcggagtgagg

SEQ ID NO: 100870 - DNA, 25 bp, SARS Virus
gctatggcgatgatcggagtgaggg

SEQ ID NO: 100871 - DNA, 25 bp, SARS Virus
ctatggcgatgtacggagtgaggga

SEQ ID NO: 100872 - DNA, 25 bp, SARS Virus
tatggcgatgttaggagtgagggaa

SEQ ID NO: 100873 - DNA, 25 bp, SARS Virus
atggcgatgttcagagtgagggaaa

SEQ ID NO: 100874 - DNA, 25 bp, SARS Virus
tggcgatgttcgaagtgagggaaag

SEQ ID NO: 100875 - DNA, 25 bp, SARS Virus
ggcgatgttcggagtgagggaaagc

SEQ ID NO: 100876 - DNA, 25 bp, SARS Virus
gcgatgttcggaatgagggaaagcc

SEQ ID NO: 100877 - DNA, 25 bp, SARS Virus
cgatgttcggagagagggaaagcct

SEQ ID NO: 100878 - DNA, 25 bp, SARS Virus
gatgttcggagtaagggaaagccta

SEQ ID NO: 100879 - DNA, 25 bp, SARS Virus
atgttcggagtgagggaaagcctac

SEQ ID NO: 100880 - DNA, 25 bp, SARS Virus
tgttcggagtgaaggaaagcctacc

SEQ ID NO: 100881 - DNA, 25 bp, SARS Virus
gttcggagtgagagaaagcctaccg

SEQ ID NO: 100882 - DNA, 25 bp, SARS Virus
ttcggagtgaggaaaagcctaccga

SEQ ID NO: 100883 - DNA, 25 bp, SARS Virus
tcggagtgagggaaagcctaccgaa

SEQ ID NO: 100884 - DNA, 25 bp, SARS Virus
cggagtgagggaaagcctaccgaac

SEQ ID NO: 100885 - DNA, 25 bp, SARS Virus
ggagtgagggaaagcctaccgaaca

SEQ ID NO: 100886 - DNA, 25 bp, SARS Virus
gagtgagggaaaacctaccgaacaa

SEQ ID NO: 100887 - DNA, 25 bp, SARS Virus
agtgagggaaagactaccgaacaat

SEQ ID NO: 100888 - DNA, 25 bp, SARS Virus
gtgagggaaagcataccgaacaata

SEQ ID NO: 100889 - DNA, 25 bp, SARS Virus
tgagggaaagccaaccgaacaataa

SEQ ID NO: 100890 - DNA, 25 bp, SARS Virus
gagggaaagcctaccgaacaataac

SEQ ID NO: 100891 - DNA, 25 bp, SARS Virus
agggaaagcctaacgaacaataacc

SEQ ID NO: 100892 - DNA, 25 bp, SARS Virus
gggaaagcctacagaacaataaccg

SEQ ID NO: 100893 - DNA, 25 bp, SARS Virus
ggaaagcctaccaaacaataaccgc

SEQ ID NO: 100894 - DNA, 25 bp, SARS Virus
gaaagcctaccgaacaataaccgca

SEQ ID NO: 100895 - DNA, 25 bp, SARS Virus
aaagcctaccgaacaataaccgcaa

SEQ ID NO: 100896 - DNA, 25 bp, SARS Virus
aagcctaccgaaaaataaccgcaac

SEQ ID NO: 100897 - DNA, 25 bp, SARS Virus
agcctaccgaacaataaccgcaacg

SEQ ID NO: 100898 - DNA, 25 bp, SARS Virus
gcctaccgaacaataaccgcaacgt

SEQ ID NO: 100899 - DNA, 25 bp, SARS Virus
cctaccgaacaaaaaccgcaacgta

SEQ ID NO: 100900 - DNA, 25 bp, SARS Virus
ctaccgaacaataaccgcaacgtaa

SEQ ID NO: 100901 - DNA, 25 bp, SARS Virus
taccgaacaataaccgcaacgtaaa

SEQ ID NO: 100902 - DNA, 25 bp, SARS Virus
accgaacaataaacgcaacgtaaag

SEQ ID NO: 100903 - DNA, 25 bp, SARS Virus
ccgaacaataacagcaacgtaaaga

SEQ ID NO: 100904 - DNA, 25 bp, SARS Virus
cgaacaataaccacaacgtaaagaa

SEQ ID NO: 100905 - DNA, 25 bp, SARS Virus
gaacaataaccgaaacgtaaagaac

SEQ ID NO: 100906 - DNA, 25 bp, SARS Virus
aacaataaccgcaacgtaaagaacg

SEQ ID NO: 100907 - DNA, 25 bp, SARS Virus
acaataaccgcaacgtaaagaacga

SEQ ID NO: 100908 - DNA, 25 bp, SARS Virus
caataaccgcaaagtaaagaacgac

SEQ ID NO: 100909 - DNA, 25 bp, SARS Virus
aataaccgcaacataaagaacgaca

SEQ ID NO: 100910 - DNA, 25 bp, SARS Virus
ataaccgcaacgaaaagaacgacaa

SEQ ID NO: 100911 - DNA, 25 bp, SARS Virus
taaccgcaacgtaaagaacgacaaa

SEQ ID NO: 100912 - DNA, 25 bp, SARS Virus
aaccgcaacgtaaagaacgacaaaa

SEQ ID NO: 100913 - DNA, 25 bp, SARS Virus
accgcaacgtaaagaacgacaaaaa

SEQ ID NO: 100914 - DNA, 25 bp, SARS Virus
ccgcaacgtaaaaaacgacaaaaag

SEQ ID NO: 100915 - DNA, 25 bp, SARS Virus
cgcaacgtaaagaacgacaaaaagt

SEQ ID NO: 100916 - DNA, 25 bp, SARS Virus
gcaacgtaaagaacgacaaaaagtc

SEQ ID NO: 100917 - DNA, 25 bp, SARS Virus
caacgtaaagaaagacaaaaagtct

SEQ ID NO: 100918 - DNA, 25 bp, SARS Virus
aacgtaaagaacaacaaaaagtctc

SEQ ID NO: 100919 - DNA, 25 bp, SARS Virus
acgtaaagaacgacaaaaagtctcg

SEQ ID NO: 100920 - DNA, 25 bp, SARS Virus
cgtaaagaacgaaaaaaagtctcgc

SEQ ID NO: 100921 - DNA, 25 bp, SARS Virus
gtaaagaacgacaaaaagtctcgcg

SEQ ID NO: 100922 - DNA, 25 bp, SARS Virus
taaagaacgacaaaaagtctcgcga

SEQ ID NO: 100923 - DNA, 25 bp, SARS Virus
aaagaacgacaaaaagtctcgcgat

SEQ ID NO: 100924 - DNA, 25 bp, SARS Virus
aagaacgacaaaaagtctcgcgatg

SEQ ID NO: 100925 - DNA, 25 bp, SARS Virus
agaacgacaaaaagtctcgcgatgg

SEQ ID NO: 100926 - DNA, 25 bp, SARS Virus
gaacgacaaaaaatctcgcgatggt

SEQ ID NO: 100927 - DNA, 25 bp, SARS Virus
aacgacaaaaagactcgcgatggtt

SEQ ID NO: 100928 - DNA, 25 bp, SARS Virus
acgacaaaaagtatcgcgatggttt

SEQ ID NO: 100929 - DNA, 25 bp, SARS Virus
cgacaaaaagtcacgcgatggtttt

SEQ ID NO: 100930 - DNA, 25 bp, SARS Virus
gacaaaaagtctagcgatggtttta

SEQ ID NO: 100931 - DNA, 25 bp, SARS Virus
acaaaaagtctcacgatggttttat

SEQ ID NO: 100932 - DNA, 25 bp, SARS Virus
caaaaagtctcgagatggttttatt

SEQ ID NO: 100933 - DNA, 25 bp, SARS Virus
aaaaagtctcgcaatggttttatta

SEQ ID NO: 100934 - DNA, 25 bp, SARS Virus
aaaagtctcgcgatggttttattaa

SEQ ID NO: 100935 - DNA, 25 bp, SARS Virus
aaagtctcgcgaaggttttattaac

SEQ ID NO: 100936 - DNA, 25 bp, SARS Virus
aagtctcgcgatagttttattaacg

SEQ ID NO: 100937 - DNA, 25 bp, SARS Virus
agtctcgcgatgattttattaacgc

SEQ ID NO: 100938 - DNA, 25 bp, SARS Virus
gtctcgcgatggatttattaacgcg

SEQ ID NO: 100939 - DNA, 25 bp, SARS Virus
tctcgcgatggtattattaacgcga

SEQ ID NO: 100940 - DNA, 25 bp, SARS Virus
ctcgcgatggttatattaacgcgag

SEQ ID NO: 100941 - DNA, 25 bp, SARS Virus
tcgcgatggtttaattaacgcgagt

SEQ ID NO: 100942 - DNA, 25 bp, SARS Virus
cgcgatggttttattaacgcgagtt

SEQ ID NO: 100943 - DNA, 25 bp, SARS Virus
gcgatggttttaataacgcgagtta

SEQ ID NO: 100944 - DNA, 25 bp, SARS Virus
cgatggttttataaacgcgagttat

SEQ ID NO: 100945 - DNA, 25 bp, SARS Virus
gatggttttattaacgcgagttatt

SEQ ID NO: 100946 - DNA, 25 bp, SARS Virus
atggttttattaacgcgagttattt

SEQ ID NO: 100947 - DNA, 25 bp, SARS Virus
tggttttattaaagcgagttatttt

SEQ ID NO: 100948 - DNA, 25 bp, SARS Virus
ggttttattaacacgagttattttc

SEQ ID NO: 100949 - DNA, 25 bp, SARS Virus
gttttattaacgagagttattttct

SEQ ID NO: 100950 - DNA, 25 bp, SARS Virus
ttttattaacgcaagttattttcta

SEQ ID NO: 100951 - DNA, 25 bp, SARS Virus
tttattaacgcgagttattttctac

SEQ ID NO: 100952 - DNA, 25 bp, SARS Virus
ttattaacgcgaattattttctacc

SEQ ID NO: 100953 - DNA, 25 bp, SARS Virus
tattaacgcgagatattttctaccg

SEQ ID NO: 100954 - DNA, 25 bp, SARS Virus
attaacgcgagtaattttctaccgt

SEQ ID NO: 100955 - DNA, 25 bp, SARS Virus
ttaacgcgagttattttctaccgtc

SEQ ID NO: 100956 - DNA, 25 bp, SARS Virus
taacgcgagttaatttctaccgtcg

SEQ ID NO: 100957 - DNA, 25 bp, SARS Virus
aacgcgagttatattctaccgtcga

SEQ ID NO: 100958 - DNA, 25 bp, SARS Virus
acgcgagttattatctaccgtcgat

SEQ ID NO: 100959 - DNA, 25 bp, SARS Virus
cgcgagttatttactaccgtcgatc

SEQ ID NO: 100960 - DNA, 25 bp, SARS Virus
gcgagttattttataccgtcgatcg

SEQ ID NO: 100961 - DNA, 25 bp, SARS Virus
cgagttattttcaaccgtcgatcgg

SEQ ID NO: 100962 - DNA, 25 bp, SARS Virus
gagttattttctaccgtcgatcggg

SEQ ID NO: 100963 - DNA, 25 bp, SARS Virus
agttattttctaacgtcgatcggga

SEQ ID NO: 100964 - DNA, 25 bp, SARS Virus
gttattttctacagtcgatcgggaa

SEQ ID NO: 100965 - DNA, 25 bp, SARS Virus
ttattttctaccatcgatcgggaaa

SEQ ID NO: 100966 - DNA, 25 bp, SARS Virus
tattttctaccgacgatcgggaaat

SEQ ID NO: 100967 - DNA, 25 bp, SARS Virus
attttctaccgtagatcgggaaata

SEQ ID NO: 100968 - DNA, 25 bp, SARS Virus
ttttctaccgtcaatcgggaaatat

SEQ ID NO: 100969 - DNA, 25 bp, SARS Virus
tttctaccgtcgatcgggaaatatt

SEQ ID NO: 100970 - DNA, 25 bp, SARS Virus
ttctaccgtcgaacgggaaatattc

SEQ ID NO: 100971 - DNA, 25 bp, SARS Virus
tctaccgtcgatagggaaatattcc

SEQ ID NO: 100972 - DNA, 25 bp, SARS Virus
ctaccgtcgatcaggaaatattccc

SEQ ID NO: 100973 - DNA, 25 bp, SARS Virus
taccgtcgatcgagaaatattcccg

SEQ ID NO: 100974 - DNA, 25 bp, SARS Virus
accgtcgatcggaaaatattcccga

SEQ ID NO: 100975 - DNA, 25 bp, SARS Virus
ccgtcgatcgggaaatattcccgaa

SEQ ID NO: 100976 - DNA, 25 bp, SARS Virus
cgtcgatcgggaaatattcccgaag

SEQ ID NO: 100977 - DNA, 25 bp, SARS Virus
gtcgatcgggaaatattcccgaagg

SEQ ID NO: 100978 - DNA, 25 bp, SARS Virus
tcgatcgggaaaaattcccgaaggt

SEQ ID NO: 100979 - DNA, 25 bp, SARS Virus
cgatcgggaaatattcccgaaggtc

SEQ ID NO: 100980 - DNA, 25 bp, SARS Virus
gatcgggaaataatcccgaaggtca

SEQ ID NO: 100981 - DNA, 25 bp, SARS Virus
atcgggaaatatacccgaaggtcaa

SEQ ID NO: 100982 - DNA, 25 bp, SARS Virus
tcgggaaatattaccgaaggtcaag

SEQ ID NO: 100983 - DNA, 25 bp, SARS Virus
cgggaaatattcacgaaggtcaagt

SEQ ID NO: 100984 - DNA, 25 bp, SARS Virus
gggaaatattccagaaggtcaagta

SEQ ID NO: 100985 - DNA, 25 bp, SARS Virus
ggaaatattcccaaaggtcaagtaa

SEQ ID NO: 100986 - DNA, 25 bp, SARS Virus
gaaatattcccgaaggtcaagtaaa

SEQ ID NO: 100987 - DNA, 25 bp, SARS Virus
aaatattcccgaaggtcaagtaaac

SEQ ID NO: 100988 - DNA, 25 bp, SARS Virus
aatattcccgaaagtcaagtaaacg

SEQ ID NO: 100989 - DNA, 25 bp, SARS Virus
atattcccgaagatcaagtaaacgt

SEQ ID NO: 100990 - DNA, 25 bp, SARS Virus
tattcccgaaggacaagtaaacgtt

SEQ ID NO: 100991 - DNA, 25 bp, SARS Virus
attcccgaaggtaaagtaaacgtta

SEQ ID NO: 100992 - DNA, 25 bp, SARS Virus
ttcccgaaggtcaagtaaacgttaa

SEQ ID NO: 100993 - DNA, 25 bp, SARS Virus
tcccgaaggtcaagtaaacgttaaa

SEQ ID NO: 100994 - DNA, 25 bp, SARS Virus
cccgaaggtcaaataaacgttaaat

SEQ ID NO: 100995 - DNA, 25 bp, SARS Virus
ccgaaggtcaagaaaacgttaaatg

SEQ ID NO: 100996 - DNA, 25 bp, SARS Virus
cgaaggtcaagtaaacgttaaatga

SEQ ID NO: 100997 - DNA, 25 bp, SARS Virus
gaaggtcaagtaaacgttaaatgac

SEQ ID NO: 100998 - DNA, 25 bp, SARS Virus
aaggtcaagtaaacgttaaatgacg

SEQ ID NO: 100999 - DNA, 25 bp, SARS Virus
aggtcaagtaaaagttaaatgacga

SEQ ID NO: 101000 - DNA, 25 bp, SARS Virus
ggtcaagtaaacattaaatgacgac

SEQ ID NO: 101001 - DNA, 25 bp, SARS Virus
gtcaagtaaacgataaatgacgacg

SEQ ID NO: 101002 - DNA, 25 bp, SARS Virus
tcaagtaaacgtaaaatgacgacga

SEQ ID NO: 101003 - DNA, 25 bp, SARS Virus
caagtaaacgttaaatgacgacgat

SEQ ID NO: 101004 - DNA, 25 bp, SARS Virus
aagtaaacgttaaatgacgacgata

SEQ ID NO: 101005 - DNA, 25 bp, SARS Virus
agtaaacgttaaatgacgacgataa

SEQ ID NO: 101006 - DNA, 25 bp, SARS Virus
gtaaacgttaaaagacgacgataaa

SEQ ID NO: 101007 - DNA, 25 bp, SARS Virus
taaacgttaaataacgacgataaac

SEQ ID NO: 101008 - DNA, 25 bp, SARS Virus
aaacgttaaatgacgacgataaaca

SEQ ID NO: 101009 - DNA, 25 bp, SARS Virus
aacgttaaatgaagacgataaacaa

SEQ ID NO: 101010 - DNA, 25 bp, SARS Virus
acgttaaatgacaacgataaacaat

SEQ ID NO: 101011 - DNA, 25 bp, SARS Virus
cgttaaatgacgacgataaacaatg

SEQ ID NO: 101012 - DNA, 25 bp, SARS Virus
gttaaatgacgaagataaacaatgg

SEQ ID NO: 101013 - DNA, 25 bp, SARS Virus
ttaaatgacgacaataaacaatggt

SEQ ID NO: 101014 - DNA, 25 bp, SARS Virus
taaatgacgacgataaacaatggta

SEQ ID NO: 101015 - DNA, 25 bp, SARS Virus
aaatgacgacgaaaaacaatggtag

SEQ ID NO: 101016 - DNA, 25 bp, SARS Virus
aatgacgacgataaacaatggtaga

SEQ ID NO: 101017 - DNA, 25 bp, SARS Virus
atgacgacgataaacaatggtagat

SEQ ID NO: 101018 - DNA, 25 bp, SARS Virus
tgacgacgataaacaatggtagata

SEQ ID NO: 101019 - DNA, 25 bp, SARS Virus
gacgacgataaaaaatggtagataa

SEQ ID NO: 101020 - DNA, 25 bp, SARS Virus
acgacgataaacaatggtagataag

SEQ ID NO: 101021 - DNA, 25 bp, SARS Virus
cgacgataaacaatggtagataagt

SEQ ID NO: 101022 - DNA, 25 bp, SARS Virus
gacgataaacaaaggtagataagtg

SEQ ID NO: 101023 - DNA, 25 bp, SARS Virus
acgataaacaatagtagataagtgt

SEQ ID NO: 101024 - DNA, 25 bp, SARS Virus
cgataaacaatgatagataagtgta

SEQ ID NO: 101025 - DNA, 25 bp, SARS Virus
gataaacaatggaagataagtgtag

SEQ ID NO: 101026 - DNA, 25 bp, SARS Virus
ataaacaatggtagataagtgtaga

SEQ ID NO: 101027 - DNA, 25 bp, SARS Virus
taaacaatggtaaataagtgtagaa

SEQ ID NO: 101028 - DNA, 25 bp, SARS Virus
aaacaatggtagataagtgtagaaa

SEQ ID NO: 101029 - DNA, 25 bp, SARS Virus
aacaatggtagaaaagtgtagaaaa

SEQ ID NO: 101030 - DNA, 25 bp, SARS Virus
acaatggtagataagtgtagaaaac

SEQ ID NO: 101031 - DNA, 25 bp, SARS Virus
caatggtagataagtgtagaaaacg

SEQ ID NO: 101032 - DNA, 25 bp, SARS Virus
aatggtagataaatgtagaaaacga

SEQ ID NO: 101033 - DNA, 25 bp, SARS Virus
atggtagataagagtagaaaacgaa

SEQ ID NO: 101034 - DNA, 25 bp, SARS Virus
tggtagataagtatagaaaacgaac

SEQ ID NO: 101035 - DNA, 25 bp, SARS Virus
ggtagataagtgaagaaaacgaaca

SEQ ID NO: 101036 - DNA, 25 bp, SARS Virus
gtagataagtgtagaaaacgaacag

SEQ ID NO: 101037 - DNA, 25 bp, SARS Virus
tagataagtgtaaaaaacgaacagc

SEQ ID NO: 101038 - DNA, 25 bp, SARS Virus
agataagtgtagaaaacgaacagcg

SEQ ID NO: 101039 - DNA, 25 bp, SARS Virus
gataagtgtagaaaacgaacagcga

SEQ ID NO: 101040 - DNA, 25 bp, SARS Virus
ataagtgtagaaaacgaacagcgac

SEQ ID NO: 101041 - DNA, 25 bp, SARS Virus
taagtgtagaaaacgaacagcgacg

SEQ ID NO: 101042 - DNA, 25 bp, SARS Virus
aagtgtagaaaaagaacagcgacgt

SEQ ID NO: 101043 - DNA, 25 bp, SARS Virus
agtgtagaaaacaaacagcgacgtc

SEQ ID NO: 101044 - DNA, 25 bp, SARS Virus
gtgtagaaaacgaacagcgacgtcc

SEQ ID NO: 101045 - DNA, 25 bp, SARS Virus
tgtagaaaacgaacagcgacgtcca

SEQ ID NO: 101046 - DNA, 25 bp, SARS Virus
gtagaaaacgaaaagcgacgtccat

SEQ ID NO: 101047 - DNA, 25 bp, SARS Virus
tagaaaacgaacagcgacgtccata

SEQ ID NO: 101048 - DNA, 25 bp, SARS Virus
agaaaacgaacaacgacgtccatac

SEQ ID NO: 101049 - DNA, 25 bp, SARS Virus
gaaaacgaacagagacgtccatacc

SEQ ID NO: 101050 - DNA, 25 bp, SARS Virus
aaaacgaacagcaacgtccatacct

SEQ ID NO: 101051 - DNA, 25 bp, SARS Virus
aaacgaacagcgacgtccatacctc

SEQ ID NO: 101052 - DNA, 25 bp, SARS Virus
aacgaacagcgaagtccatacctcc

SEQ ID NO: 101053 - DNA, 25 bp, SARS Virus
acgaacagcgacatccatacctccg

SEQ ID NO: 101054 - DNA, 25 bp, SARS Virus
cgaacagcgacgaccatacctccgc

SEQ ID NO: 101055 - DNA, 25 bp, SARS Virus
gaacagcgacgtacatacctccgcg

SEQ ID NO: 101056 - DNA, 25 bp, SARS Virus
aacagcgacgtcaatacctccgcgt

SEQ ID NO: 101057 - DNA, 25 bp, SARS Virus
acagcgacgtccatacctccgcgtt

SEQ ID NO: 101058 - DNA, 25 bp, SARS Virus
cagcgacgtccaaacctccgcgtta

SEQ ID NO: 101059 - DNA, 25 bp, SARS Virus
agcgacgtccatacctccgcgttaa

SEQ ID NO: 101060 - DNA, 25 bp, SARS Virus
gcgacgtccataactccgcgttaaa

SEQ ID NO: 101061 - DNA, 25 bp, SARS Virus
cgacgtccatacatccgcgttaaaa

SEQ ID NO: 101062 - DNA, 25 bp, SARS Virus
gacgtccataccaccgcgttaaaaa

SEQ ID NO: 101063 - DNA, 25 bp, SARS Virus
acgtccatacctacgcgttaaaaac

SEQ ID NO: 101064 - DNA, 25 bp, SARS Virus
cgtccatacctcagcgttaaaaaca

SEQ ID NO: 101065 - DNA, 25 bp, SARS Virus
gtccatacctccacgttaaaaacat

SEQ ID NO: 101066 - DNA, 25 bp, SARS Virus
tccatacctccgagttaaaaacatg

SEQ ID NO: 101067 - DNA, 25 bp, SARS Virus
ccatacctccgcattaaaaacatgg

SEQ ID NO: 101068 - DNA, 25 bp, SARS Virus
catacctccgcgataaaaacatgga

SEQ ID NO: 101069 - DNA, 25 bp, SARS Virus
atacctccgcgtaaaaaacatggag

SEQ ID NO: 101070 - DNA, 25 bp, SARS Virus
tacctccgcgttaaaaacatggaga

SEQ ID NO: 101071 - DNA, 25 bp, SARS Virus
acctccgcgttaaaaacatggagat

SEQ ID NO: 101072 - DNA, 25 bp, SARS Virus
cctccgcgttaaaaacatggagata

SEQ ID NO: 101073 - DNA, 25 bp, SARS Virus
ctccgcgttaaaaacatggagatac

SEQ ID NO: 101074 - DNA, 25 bp, SARS Virus
tccgcgttaaaaacatggagatacg

SEQ ID NO: 101075 - DNA, 25 bp, SARS Virus
ccgcgttaaaaaaatggagatacgg

SEQ ID NO: 101076 - DNA, 25 bp, SARS Virus
cgcgttaaaaacatggagatacgga

SEQ ID NO: 101077 - DNA, 25 bp, SARS Virus
gcgttaaaaacaaggagatacggaa

SEQ ID NO: 101078 - DNA, 25 bp, SARS Virus
cgttaaaaacatagagatacggaac

SEQ ID NO: 101079 - DNA, 25 bp, SARS Virus
gttaaaaacatgaagatacggaact

SEQ ID NO: 101080 - DNA, 25 bp, SARS Virus
ttaaaaacatggagatacggaacta

SEQ ID NO: 101081 - DNA, 25 bp, SARS Virus
taaaaacatggaaatacggaactat

SEQ ID NO: 101082 - DNA, 25 bp, SARS Virus
aaaaacatggagatacggaactata

SEQ ID NO: 101083 - DNA, 25 bp, SARS Virus
aaaacatggagaaacggaactatat

SEQ ID NO: 101084 - DNA, 25 bp, SARS Virus
aaacatggagatacggaactatata

SEQ ID NO: 101085 - DNA, 25 bp, SARS Virus
aacatggagataaggaactatataa

SEQ ID NO: 101086 - DNA, 25 bp, SARS Virus
acatggagatacagaactatataaa

SEQ ID NO: 101087 - DNA, 25 bp, SARS Virus
catggagatacgaaactatataaaa

SEQ ID NO: 101088 - DNA, 25 bp, SARS Virus
atggagatacggaactatataaaag

SEQ ID NO: 101089 - DNA, 25 bp, SARS Virus
tggagatacggaactatataaaaga

SEQ ID NO: 101090 - DNA, 25 bp, SARS Virus
ggagatacggaaatatataaaagat

SEQ ID NO: 101091 - DNA, 25 bp, SARS Virus
gagatacggaacaatataaaagatg

SEQ ID NO: 101092 - DNA, 25 bp, SARS Virus
agatacggaactatataaaagatgt

SEQ ID NO: 101093 - DNA, 25 bp, SARS Virus
gatacggaactaaataaaagatgtt

SEQ ID NO: 101094 - DNA, 25 bp, SARS Virus
atacggaactatataaaagatgtta

SEQ ID NO: 101095 - DNA, 25 bp, SARS Virus
tacggaactataaaaaagatgttac

SEQ ID NO: 101096 - DNA, 25 bp, SARS Virus
acggaactatataaaagatgttacg

SEQ ID NO: 101097 - DNA, 25 bp, SARS Virus
cggaactatataaaagatgttacgt

SEQ ID NO: 101098 - DNA, 25 bp, SARS Virus
ggaactatataaaagatgttacgta

SEQ ID NO: 101099 - DNA, 25 bp, SARS Virus
gaactatataaaagatgttacgtag

SEQ ID NO: 101100 - DNA, 25 bp, SARS Virus
aactatataaaaaatgttacgtagt

SEQ ID NO: 101101 - DNA, 25 bp, SARS Virus
actatataaaagatgttacgtagtt

SEQ ID NO: 101102 - DNA, 25 bp, SARS Virus
ctatataaaagaagttacgtagttg

SEQ ID NO: 101103 - DNA, 25 bp, SARS Virus
tatataaaagatattacgtagttgc

SEQ ID NO: 101104 - DNA, 25 bp, SARS Virus
atataaaagatgatacgtagttgcg

SEQ ID NO: 101105 - DNA, 25 bp, SARS Virus
tataaaagatgtaacgtagttgcgt

SEQ ID NO: 101106 - DNA, 25 bp, SARS Virus
ataaaagatgttacgtagttgcgta

SEQ ID NO: 101107 - DNA, 25 bp, SARS Virus
taaaagatgttaagtagttgcgtac

SEQ ID NO: 101108 - DNA, 25 bp, SARS Virus
aaaagatgttacatagttgcgtaca

SEQ ID NO: 101109 - DNA, 25 bp, SARS Virus
aaagatgttacgaagttgcgtacat

SEQ ID NO: 101110 - DNA, 25 bp, SARS Virus
aagatgttacgtagttgcgtacatc

SEQ ID NO: 101111 - DNA, 25 bp, SARS Virus
agatgttacgtaattgcgtacatct

SEQ ID NO: 101112 - DNA, 25 bp, SARS Virus
gatgttacgtagatgcgtacatctt

SEQ ID NO: 101113 - DNA, 25 bp, SARS Virus
atgttacgtagtagcgtacatctta

SEQ ID NO: 101114 - DNA, 25 bp, SARS Virus
tgttacgtagttacgtacatcttaa

SEQ ID NO: 101115 - DNA, 25 bp, SARS Virus
gttacgtagttgagtacatcttaat

SEQ ID NO: 101116 - DNA, 25 bp, SARS Virus
ttacgtagttgcatacatcttaata

SEQ ID NO: 101117 - DNA, 25 bp, SARS Virus
tacgtagttgcgaacatcttaataa

SEQ ID NO: 101118 - DNA, 25 bp, SARS Virus
acgtagttgcgtacatcttaataat

SEQ ID NO: 101119 - DNA, 25 bp, SARS Virus
cgtagttgcgtaaatcttaataata

SEQ ID NO: 101120 - DNA, 25 bp, SARS Virus
gtagttgcgtacatcttaataatac

SEQ ID NO: 101121 - DNA, 25 bp, SARS Virus
tagttgcgtacaacttaataatact

SEQ ID NO: 101122 - DNA, 25 bp, SARS Virus
agttgcgtacatattaataatactc

SEQ ID NO: 101123 - DNA, 25 bp, SARS Virus
gttgcgtacatcataataatactct

SEQ ID NO: 101124 - DNA, 25 bp, SARS Virus
ttgcgtacatctaaataatactcta

SEQ ID NO: 101125 - DNA, 25 bp, SARS Virus
tgcgtacatcttaataatactctac

SEQ ID NO: 101126 - DNA, 25 bp, SARS Virus
gcgtacatcttaataatactctaca

SEQ ID NO: 101127 - DNA, 25 bp, SARS Virus
cgtacatcttaaaaatactctacaa

SEQ ID NO: 101128 - DNA, 25 bp, SARS Virus
gtacatcttaataatactctacaac

SEQ ID NO: 101129 - DNA, 25 bp, SARS Virus
tacatcttaataatactctacaacc

SEQ ID NO: 101130 - DNA, 25 bp, SARS Virus
acatcttaataaaactctacaaccg

SEQ ID NO: 101131 - DNA, 25 bp, SARS Virus
catcttaataatactctacaaccga

SEQ ID NO: 101132 - DNA, 25 bp, SARS Virus
atcttaataataatctacaaccgaa

SEQ ID NO: 101133 - DNA, 25 bp, SARS Virus
tcttaataatacactacaaccgaaa

SEQ ID NO: 101134 - DNA, 25 bp, SARS Virus
cttaataatactatacaaccgaaac

SEQ ID NO: 101135 - DNA, 25 bp, SARS Virus
ttaataatactcaacaaccgaaaca

SEQ ID NO: 101136 - DNA, 25 bp, SARS Virus
taataatactctacaaccgaaacaa

SEQ ID NO: 101137 - DNA, 25 bp, SARS Virus
aataatactctaaaaccgaaacaac

SEQ ID NO: 101138 - DNA, 25 bp, SARS Virus
ataatactctacaaccgaaacaacc

SEQ ID NO: 101139 - DNA, 25 bp, SARS Virus
taatactctacaaccgaaacaacct

SEQ ID NO: 101140 - DNA, 25 bp, SARS Virus
aatactctacaaacgaaacaacctt

SEQ ID NO: 101141 - DNA, 25 bp, SARS Virus
atactctacaacagaaacaaccttc

SEQ ID NO: 101142 - DNA, 25 bp, SARS Virus
tactctacaaccaaaacaaccttca

SEQ ID NO: 101143 - DNA, 25 bp, SARS Virus
actctacaaccgaaacaaccttcac

SEQ ID NO: 101144 - DNA, 25 bp, SARS Virus
ctctacaaccgaaacaaccttcacg

SEQ ID NO: 101145 - DNA, 25 bp, SARS Virus
acaacgtcaacgcagttcccacgta

SEQ ID NO: 101146 - DNA, 25 bp, SARS Virus
caacgtcaacggcgttcccacgtac

SEQ ID NO: 101147 - DNA, 25 bp, SARS Virus
aacgtcaacggacttcccacgtacg

SEQ ID NO: 101148 - DNA, 25 bp, SARS Virus
acgtcaacggagctcccacgtacga

SEQ ID NO: 101149 - DNA, 25 bp, SARS Virus
cgtcaacggagtccccacgtacgag

SEQ ID NO: 101150 - DNA, 25 bp, SARS Virus
gtcaacggagttcccacgtacgaga

SEQ ID NO: 101151 - DNA, 25 bp, SARS Virus
tcaacggagttcccacgtacgagaa

SEQ ID NO: 101152 - DNA, 25 bp, SARS Virus
caacggagttcccacgtacgagaac

SEQ ID NO: 101153 - DNA, 25 bp, SARS Virus
aacggagttcccccgtacgagaaca

SEQ ID NO: 101154 - DNA, 25 bp, SARS Virus
acggagttcccacgtacgagaacac

SEQ ID NO: 101155 - DNA, 25 bp, SARS Virus
cggagttcccacctacgagaacacc

SEQ ID NO: 101156 - DNA, 25 bp, SARS Virus
ggagttcccacgcacgagaacacca

SEQ ID NO: 101157 - DNA, 25 bp, SARS Virus
gagttcccacgtccgagaacaccaa

SEQ ID NO: 101158 - DNA, 25 bp, SARS Virus
agttcccacgtacgagaacaccaag

SEQ ID NO: 101159 - DNA, 25 bp, SARS Virus
gttcccacgtaccagaacaccaaga

SEQ ID NO: 101160 - DNA, 25 bp, SARS Virus
ttcccacgtacgcgaacaccaagaa

SEQ ID NO: 101161 - DNA, 25 bp, SARS Virus
tcccacgtacgacaacaccaagaac

SEQ ID NO: 101162 - DNA, 25 bp, SARS Virus
cccacgtacgagcacaccaagaacg

SEQ ID NO: 101163 - DNA, 25 bp, SARS Virus
ccacgtacgagaccaccaagaacga

SEQ ID NO: 101164 - DNA, 25 bp, SARS Virus
cacgtacgagaacaccaagaacgac

SEQ ID NO: 101165 - DNA, 25 bp, SARS Virus
acgtacgagaaccccaagaacgacg

SEQ ID NO: 101166 - DNA, 25 bp, SARS Virus
cgtacgagaacaccaagaacgacgt

SEQ ID NO: 101167 - DNA, 25 bp, SARS Virus
gtacgagaacaccaagaacgacgtt

SEQ ID NO: 101168 - DNA, 25 bp, SARS Virus
tacgagaacacccagaacgacgttc

SEQ ID NO: 101169 - DNA, 25 bp, SARS Virus
acgagaacaccacgaacgacgttca

SEQ ID NO: 101170 - DNA, 25 bp, SARS Virus
cgagaacaccaacaacgacgttcaa

SEQ ID NO: 101171 - DNA, 25 bp, SARS Virus
gagaacaccaagcacgacgttcaaa

SEQ ID NO: 101172 - DNA, 25 bp, SARS Virus
agaacaccaagaccgacgttcaaac

SEQ ID NO: 101173 - DNA, 25 bp, SARS Virus
gaacaccaagaacgacgttcaaact

SEQ ID NO: 101174 - DNA, 25 bp, SARS Virus
aacaccaagaaccacgttcaaacta

SEQ ID NO: 101175 - DNA, 25 bp, SARS Virus
acaccaagaacgccgttcaaactac

SEQ ID NO: 101176 - DNA, 25 bp, SARS Virus
caccaagaacgacgttcaaactact

SEQ ID NO: 101177 - DNA, 25 bp, SARS Virus
accaagaacgaccttcaaactactc

SEQ ID NO: 101178 - DNA, 25 bp, SARS Virus
ccaagaacgacgctcaaactactcc

SEQ ID NO: 101179 - DNA, 25 bp, SARS Virus
caagaacgacgtccaaactactcct

SEQ ID NO: 101180 - DNA, 25 bp, SARS Virus
aagaacgacgttcaaactactccta

SEQ ID NO: 101181 - DNA, 25 bp, SARS Virus
agaacgacgttccaactactcctac

SEQ ID NO: 101182 - DNA, 25 bp, SARS Virus
gaacgacgttcacactactcctact

SEQ ID NO: 101183 - DNA, 25 bp, SARS Virus
aacgacgttcaacctactcctactg

SEQ ID NO: 101184 - DNA, 25 bp, SARS Virus
acgacgttcaaactactcctactga

SEQ ID NO: 101185 - DNA, 25 bp, SARS Virus
cgacgttcaaaccactcctactgag

SEQ ID NO: 101186 - DNA, 25 bp, SARS Virus
gacgttcaaactcctcctactgaga

SEQ ID NO: 101187 - DNA, 25 bp, SARS Virus
acgttcaaactactcctactgagac

SEQ ID NO: 101188 - DNA, 25 bp, SARS Virus
cgttcaaactacccctactgagact

SEQ ID NO: 101189 - DNA, 25 bp, SARS Virus
gttcaaactactcctactgagactc

SEQ ID NO: 101190 - DNA, 25 bp, SARS Virus
ttcaaactactcctactgagactcg

SEQ ID NO: 101191 - DNA, 25 bp, SARS Virus
tcaaactactcccactgagactcgg

SEQ ID NO: 101192 - DNA, 25 bp, SARS Virus
caaactactcctcctgagactcggt

SEQ ID NO: 101193 - DNA, 25 bp, SARS Virus
aaactactcctactgagactcggtc

SEQ ID NO: 101194 - DNA, 25 bp, SARS Virus
aactactcctaccgagactcggtca

SEQ ID NO: 101195 - DNA, 25 bp, SARS Virus
actactcctactcagactcggtcaa

SEQ ID NO: 101196 - DNA, 25 bp, SARS Virus
ctactcctactgcgactcggtcaag

SEQ ID NO: 101197 - DNA, 25 bp, SARS Virus
tactcctactgacactcggtcaaga

SEQ ID NO: 101198 - DNA, 25 bp, SARS Virus
actcctactgagcctcggtcaagag

SEQ ID NO: 101199 - DNA, 25 bp, SARS Virus
ctcctactgagactcggtcaagagt

SEQ ID NO: 101200 - DNA, 25 bp, SARS Virus
tcctactgagacccggtcaagagtt

SEQ ID NO: 101201 - DNA, 25 bp, SARS Virus
cctactgagactcggtcaagagttc

SEQ ID NO: 101202 - DNA, 25 bp, SARS Virus
ctactgagactccgtcaagagttcc

SEQ ID NO: 101203 - DNA, 25 bp, SARS Virus
tactgagactcgctcaagagttccc

SEQ ID NO: 101204 - DNA, 25 bp, SARS Virus
actgagactcggccaagagttccca

SEQ ID NO: 101205 - DNA, 25 bp, SARS Virus
ctgagactcggtcaagagttcccac

SEQ ID NO: 101206 - DNA, 25 bp, SARS Virus
tgagactcggtccagagttcccaca

SEQ ID NO: 101207 - DNA, 25 bp, SARS Virus
gagactcggtcacgagttcccacag

SEQ ID NO: 101208 - DNA, 25 bp, SARS Virus
agactcggtcaacagttcccacagt

SEQ ID NO: 101209 - DNA, 25 bp, SARS Virus
gactcggtcaagcgttcccacagtt

SEQ ID NO: 101210 - DNA, 25 bp, SARS Virus
actcggtcaagacttcccacagttt

SEQ ID NO: 101211 - DNA, 25 bp, SARS Virus
ctcggtcaagagctcccacagttta

SEQ ID NO: 101212 - DNA, 25 bp, SARS Virus
tcggtcaagagtccccacagtttaa

SEQ ID NO: 101213 - DNA, 25 bp, SARS Virus
cggtcaagagttcccacagtttaat

SEQ ID NO: 101214 - DNA, 25 bp, SARS Virus
ggtcaagagttcccacagtttaatg

SEQ ID NO: 101215 - DNA, 25 bp, SARS Virus
gtcaagagttcccacagtttaatgt

SEQ ID NO: 101216 - DNA, 25 bp, SARS Virus
tcaagagttcccccagtttaatgta

SEQ ID NO: 101217 - DNA, 25 bp, SARS Virus
caagagttcccacagtttaatgtaa

SEQ ID NO: 101218 - DNA, 25 bp, SARS Virus
aagagttcccaccgtttaatgtaat

SEQ ID NO: 101219 - DNA, 25 bp, SARS Virus
agagttcccacactttaatgtaatg

SEQ ID NO: 101220 - DNA, 25 bp, SARS Virus
gagttcccacagcttaatgtaatgt

SEQ ID NO: 101221 - DNA, 25 bp, SARS Virus
agttcccacagtctaatgtaatgtg

SEQ ID NO: 101222 - DNA, 25 bp, SARS Virus
gttcccacagttcaatgtaatgtgt

SEQ ID NO: 101223 - DNA, 25 bp, SARS Virus
ttcccacagtttcatgtaatgtgta

SEQ ID NO: 101224 - DNA, 25 bp, SARS Virus
tcccacagtttactgtaatgtgtat

SEQ ID NO: 101225 - DNA, 25 bp, SARS Virus
cccacagtttaacgtaatgtgtatt

SEQ ID NO: 101226 - DNA, 25 bp, SARS Virus
ccacagtttaatctaatgtgtattt

SEQ ID NO: 101227 - DNA, 25 bp, SARS Virus
cacagtttaatgcaatgtgtatttg

SEQ ID NO: 101228 - DNA, 25 bp, SARS Virus
acagtttaatgtcatgtgtatttgc

SEQ ID NO: 101229 - DNA, 25 bp, SARS Virus
cagtttaatgtactgtgtatttgct

SEQ ID NO: 101230 - DNA, 25 bp, SARS Virus
agtttaatgtaacgtgtatttgctt

SEQ ID NO: 101231 - DNA, 25 bp, SARS Virus
gtttaatgtaatctgtatttgcttg

SEQ ID NO: 101232 - DNA, 25 bp, SARS Virus
tttaatgtaatgcgtatttgcttga

SEQ ID NO: 101233 - DNA, 25 bp, SARS Virus
ttaatgtaatgtctatttgcttgaa

SEQ ID NO: 101234 - DNA, 25 bp, SARS Virus
taatgtaatgtgcatttgcttgaat

SEQ ID NO: 101235 - DNA, 25 bp, SARS Virus
aatgtaatgtgtctttgcttgaata

SEQ ID NO: 101236 - DNA, 25 bp, SARS Virus
atgtaatgtgtacttgcttgaatac

SEQ ID NO: 101237 - DNA, 25 bp, SARS Virus
tgtaatgtgtatctgcttgaatacc

SEQ ID NO: 101238 - DNA, 25 bp, SARS Virus
gtaatgtgtattcgcttgaatacct

SEQ ID NO: 101239 - DNA, 25 bp, SARS Virus
taatgtgtatttccttgaataccta

SEQ ID NO: 101240 - DNA, 25 bp, SARS Virus
aatgtgtatttgcttgaatacctaa

SEQ ID NO: 101241 - DNA, 25 bp, SARS Virus
atgtgtatttgcctgaatacctaaa

SEQ ID NO: 101242 - DNA, 25 bp, SARS Virus
tgtgtatttgctcgaatacctaaac

SEQ ID NO: 101243 - DNA, 25 bp, SARS Virus
gtgtatttgcttcaatacctaaaca

SEQ ID NO: 101244 - DNA, 25 bp, SARS Virus
tgtatttgcttgcatacctaaacaa

SEQ ID NO: 101245 - DNA, 25 bp, SARS Virus
gtatttgcttgactacctaaacaaa

SEQ ID NO: 101246 - DNA, 25 bp, SARS Virus
tatttgcttgaacacctaaacaaat

SEQ ID NO: 101247 - DNA, 25 bp, SARS Virus
atttgcttgaatccctaaacaaata

SEQ ID NO: 101248 - DNA, 25 bp, SARS Virus
tttgcttgaatacctaaacaaatac

SEQ ID NO: 101249 - DNA, 25 bp, SARS Virus
ttgcttgaatacctaaacaaatact

SEQ ID NO: 101250 - DNA, 25 bp, SARS Virus
tgcttgaatacccaaacaaatactc

SEQ ID NO: 101251 - DNA, 25 bp, SARS Virus
gcttgaatacctcaacaaatactct

SEQ ID NO: 101252 - DNA, 25 bp, SARS Virus
cttgaatacctacacaaatactcta

SEQ ID NO: 101253 - DNA, 25 bp, SARS Virus
ttgaatacctaaccaaatactctaa

SEQ ID NO: 101254 - DNA, 25 bp, SARS Virus
tgaatacctaaacaaatactctaaa

SEQ ID NO: 101255 - DNA, 25 bp, SARS Virus
gaatacctaaaccaatactctaaaa

SEQ ID NO: 101256 - DNA, 25 bp, SARS Virus
aatacctaaacacatactctaaaaa

SEQ ID NO: 101257 - DNA, 25 bp, SARS Virus
atacctaaacaactactctaaaaaa

SEQ ID NO: 101258 - DNA, 25 bp, SARS Virus
tacctaaacaaacactctaaaaaat

SEQ ID NO: 101259 - DNA, 25 bp, SARS Virus
acctaaacaaatcctctaaaaaatg

SEQ ID NO: 101260 - DNA, 25 bp, SARS Virus
cctaaacaaatactctaaaaaatga

SEQ ID NO: 101261 - DNA, 25 bp, SARS Virus
ctaaacaaataccctaaaaaatgag

SEQ ID NO: 101262 - DNA, 25 bp, SARS Virus
taaacaaatactctaaaaaatgaga

SEQ ID NO: 101263 - DNA, 25 bp, SARS Virus
aaacaaatactccaaaaaatgagaa

SEQ ID NO: 101264 - DNA, 25 bp, SARS Virus
aacaaatactctcaaaaatgagaat

SEQ ID NO: 101265 - DNA, 25 bp, SARS Virus
acaaatactctacaaaatgagaatc

SEQ ID NO: 101266 - DNA, 25 bp, SARS Virus
caaatactctaacaaatgagaatct

SEQ ID NO: 101267 - DNA, 25 bp, SARS Virus
aaatactctaaacaatgagaatcta

SEQ ID NO: 101268 - DNA, 25 bp, SARS Virus
aatactctaaaacatgagaatctag

SEQ ID NO: 101269 - DNA, 25 bp, SARS Virus
atactctaaaaactgagaatctagt

SEQ ID NO: 101270 - DNA, 25 bp, SARS Virus
tactctaaaaaacgagaatctagtt

SEQ ID NO: 101271 - DNA, 25 bp, SARS Virus
actctaaaaaatcagaatctagtta

SEQ ID NO: 101272 - DNA, 25 bp, SARS Virus
ctctaaaaaatgcgaatctagttaa

SEQ ID NO: 101273 - DNA, 25 bp, SARS Virus
tctaaaaaatgacaatctagttaat

SEQ ID NO: 101274 - DNA, 25 bp, SARS Virus
ctaaaaaatgagcatctagttaatg

SEQ ID NO: 101275 - DNA, 25 bp, SARS Virus
taaaaaatgagactctagttaatga

SEQ ID NO: 101276 - DNA, 25 bp, SARS Virus
aaaaaatgagaacctagttaatgac

SEQ ID NO: 101277 - DNA, 25 bp, SARS Virus
aaaaatgagaatctagttaatgacg

SEQ ID NO: 101278 - DNA, 25 bp, SARS Virus
aaaatgagaatccagttaatgacgt

SEQ ID NO: 101279 - DNA, 25 bp, SARS Virus
aaatgagaatctcgttaatgacgtg

SEQ ID NO: 101280 - DNA, 25 bp, SARS Virus
aatgagaatctacttaatgacgtgt

SEQ ID NO: 101281 - DNA, 25 bp, SARS Virus
atgagaatctagctaatgacgtgtc

SEQ ID NO: 101282 - DNA, 25 bp, SARS Virus
tgagaatctagtcaatgacgtgtcg

SEQ ID NO: 101283 - DNA, 25 bp, SARS Virus
gagaatctagttcatgacgtgtcgg

SEQ ID NO: 101284 - DNA, 25 bp, SARS Virus
agaatctagttactgacgtgtcggt

SEQ ID NO: 101285 - DNA, 25 bp, SARS Virus
gaatctagttaacgacgtgtcggtc

SEQ ID NO: 101286 - DNA, 25 bp, SARS Virus
aatctagttaatcacgtgtcggtca

SEQ ID NO: 101287 - DNA, 25 bp, SARS Virus
atctagttaatgccgtgtcggtcat

SEQ ID NO: 101288 - DNA, 25 bp, SARS Virus
tctagttaatgacgtgtcggtcatt

SEQ ID NO: 101289 - DNA, 25 bp, SARS Virus
ctagttaatgacctgtcggtcattt

SEQ ID NO: 101290 - DNA, 25 bp, SARS Virus
tagttaatgacgcgtcggtcatttt

SEQ ID NO: 101291 - DNA, 25 bp, SARS Virus
agttaatgacgtctcggtcattttt

SEQ ID NO: 101292 - DNA, 25 bp, SARS Virus
gttaatgacgtgccggtcattttta

SEQ ID NO: 101293 - DNA, 25 bp, SARS Virus
ttaatgacgtgtcggtcatttttaa

SEQ ID NO: 101294 - DNA, 25 bp, SARS Virus
taatgacgtgtccgtcatttttaac

SEQ ID NO: 101295 - DNA, 25 bp, SARS Virus
aatgacgtgtcgctcatttttaact

SEQ ID NO: 101296 - DNA, 25 bp, SARS Virus
atgacgtgtcggccatttttaactg

SEQ ID NO: 101297 - DNA, 25 bp, SARS Virus
tgacgtgtcggtcatttttaactgt

SEQ ID NO: 101298 - DNA, 25 bp, SARS Virus
gacgtgtcggtcctttttaactgtt

SEQ ID NO: 101299 - DNA, 25 bp, SARS Virus
acgtgtcggtcacttttaactgtta

SEQ ID NO: 101300 - DNA, 25 bp, SARS Virus
cgtgtcggtcatctttaactgttac

SEQ ID NO: 101301 - DNA, 25 bp, SARS Virus
gtgtcggtcattcttaactgttacg

SEQ ID NO: 101302 - DNA, 25 bp, SARS Virus
tgtcggtcatttctaactgttacga

SEQ ID NO: 101303 - DNA, 25 bp, SARS Virus
gtcggtcattttcaactgttacgaa

SEQ ID NO: 101304 - DNA, 25 bp, SARS Virus
tcggtcatttttcactgttacgaag

SEQ ID NO: 101305 - DNA, 25 bp, SARS Virus
cggtcatttttacctgttacgaaga

SEQ ID NO: 101306 - DNA, 25 bp, SARS Virus
ggtcatttttaactgttacgaagag

SEQ ID NO: 101307 - DNA, 25 bp, SARS Virus
gtcatttttaaccgttacgaagagg

SEQ ID NO: 101308 - DNA, 25 bp, SARS Virus
tcatttttaactcttacgaagagga

SEQ ID NO: 101309 - DNA, 25 bp, SARS Virus
catttttaactgctacgaagaggac

SEQ ID NO: 101310 - DNA, 25 bp, SARS Virus
atttttaactgtcacgaagaggacg

SEQ ID NO: 101311 - DNA, 25 bp, SARS Virus
tttttaactgttccgaagaggacgt

SEQ ID NO: 101312 - DNA, 25 bp, SARS Virus
ttttaactgttacgaagaggacgtt

SEQ ID NO: 101313 - DNA, 25 bp, SARS Virus
tttaactgttaccaagaggacgttc

SEQ ID NO: 101314 - DNA, 25 bp, SARS Virus
ttaactgttacgcagaggacgttca

SEQ ID NO: 101315 - DNA, 25 bp, SARS Virus
taactgttacgacgaggacgttcat

SEQ ID NO: 101316 - DNA, 25 bp, SARS Virus
aactgttacgaacaggacgttcatg

SEQ ID NO: 101317 - DNA, 25 bp, SARS Virus
actgttacgaagcggacgttcatga

SEQ ID NO: 101318 - DNA, 25 bp, SARS Virus
ctgttacgaagacgacgttcatgac

SEQ ID NO: 101319 - DNA, 25 bp, SARS Virus
tgttacgaagagcacgttcatgaca

SEQ ID NO: 101320 - DNA, 25 bp, SARS Virus
gttacgaagaggccgttcatgacaa

SEQ ID NO: 101321 - DNA, 25 bp, SARS Virus
ttacgaagaggacgttcatgacaag

SEQ ID NO: 101322 - DNA, 25 bp, SARS Virus
tacgaagaggaccttcatgacaagt

SEQ ID NO: 101323 - DNA, 25 bp, SARS Virus
acgaagaggacgctcatgacaagta

SEQ ID NO: 101324 - DNA, 25 bp, SARS Virus
cgaagaggacgtccatgacaagtac

SEQ ID NO: 101325 - DNA, 25 bp, SARS Virus
gaagaggacgttcatgacaagtacg

SEQ ID NO: 101326 - DNA, 25 bp, SARS Virus
aagaggacgttcctgacaagtacga

SEQ ID NO: 101327 - DNA, 25 bp, SARS Virus
agaggacgttcacgacaagtacgat

SEQ ID NO: 101328 - DNA, 25 bp, SARS Virus
gaggacgttcatcacaagtacgatg

SEQ ID NO: 101329 - DNA, 25 bp, SARS Virus
aggacgttcatgccaagtacgatgt

SEQ ID NO: 101330 - DNA, 25 bp, SARS Virus
ggacgttcatgacaagtacgatgtc

SEQ ID NO: 101331 - DNA, 25 bp, SARS Virus
gacgttcatgaccagtacgatgtcg

SEQ ID NO: 101332 - DNA, 25 bp, SARS Virus
acgttcatgacacgtacgatgtcgt

SEQ ID NO: 101333 - DNA, 25 bp, SARS Virus
cgttcatgacaactacgatgtcgtt

SEQ ID NO: 101334 - DNA, 25 bp, SARS Virus
gttcatgacaagcacgatgtcgttg

SEQ ID NO: 101335 - DNA, 25 bp, SARS Virus
ttcatgacaagtccgatgtcgttgc

SEQ ID NO: 101336 - DNA, 25 bp, SARS Virus
tcatgacaagtacgatgtcgttgct

SEQ ID NO: 101337 - DNA, 25 bp, SARS Virus
catgacaagtaccatgtcgttgcta

SEQ ID NO: 101338 - DNA, 25 bp, SARS Virus
atgacaagtacgctgtcgttgctat

SEQ ID NO: 101339 - DNA, 25 bp, SARS Virus
tgacaagtacgacgtcgttgctatg

SEQ ID NO: 101340 - DNA, 25 bp, SARS Virus
gacaagtacgatctcgttgctatgg

SEQ ID NO: 101341 - DNA, 25 bp, SARS Virus
acaagtacgatgccgttgctatggc

SEQ ID NO: 101342 - DNA, 25 bp, SARS Virus
caagtacgatgtcgttgctatggcg

SEQ ID NO: 101343 - DNA, 25 bp, SARS Virus
aagtacgatgtccttgctatggcga

SEQ ID NO: 101344 - DNA, 25 bp, SARS Virus
agtacgatgtcgctgctatggcgat

SEQ ID NO: 101345 - DNA, 25 bp, SARS Virus
gtacgatgtcgtcgctatggcgatg

SEQ ID NO: 101346 - DNA, 25 bp, SARS Virus
tacgatgtcgttcctatggcgatgt

SEQ ID NO: 101347 - DNA, 25 bp, SARS Virus
acgatgtcgttgctatggcgatgtt

SEQ ID NO: 101348 - DNA, 25 bp, SARS Virus
cgatgtcgttgccatggcgatgttc

SEQ ID NO: 101349 - DNA, 25 bp, SARS Virus
gatgtcgttgctctggcgatgttcg

SEQ ID NO: 101350 - DNA, 25 bp, SARS Virus
atgtcgttgctacggcgatgttcgg

SEQ ID NO: 101351 - DNA, 25 bp, SARS Virus
tgtcgttgctatcgcgatgttcgga

SEQ ID NO: 101352 - DNA, 25 bp, SARS Virus
gtcgttgctatgccgatgttcggag

SEQ ID NO: 101353 - DNA, 25 bp, SARS Virus
tcgttgctatggcgatgttcggagt

SEQ ID NO: 101354 - DNA, 25 bp, SARS Virus
cgttgctatggccatgttcggagtg

SEQ ID NO: 101355 - DNA, 25 bp, SARS Virus
gttgctatggcgctgttcggagtga

SEQ ID NO: 101356 - DNA, 25 bp, SARS Virus
ttgctatggcgacgttcggagtgag

SEQ ID NO: 101357 - DNA, 25 bp, SARS Virus
tgctatggcgatcttcggagtgagg

SEQ ID NO: 101358 - DNA, 25 bp, SARS Virus
gctatggcgatgctcggagtgaggg

SEQ ID NO: 101359 - DNA, 25 bp, SARS Virus
ctatggcgatgtccggagtgaggga

SEQ ID NO: 101360 - DNA, 25 bp, SARS Virus
tatggcgatgttcggagtgagggaa

SEQ ID NO: 101361 - DNA, 25 bp, SARS Virus
atggcgatgttccgagtgagggaaa

SEQ ID NO: 101362 - DNA, 25 bp, SARS Virus
tggcgatgttcgcagtgagggaaag

SEQ ID NO: 101363 - DNA, 25 bp, SARS Virus
ggcgatgttcggcgtgagggaaagc

SEQ ID NO: 101364 - DNA, 25 bp, SARS Virus
gcgatgttcggactgagggaaagcc

SEQ ID NO: 101365 - DNA, 25 bp, SARS Virus
cgatgttcggagcgagggaaagcct

SEQ ID NO: 101366 - DNA, 25 bp, SARS Virus
gatgttcggagtcagggaaagccta

SEQ ID NO: 101367 - DNA, 25 bp, SARS Virus
atgttcggagtgcgggaaagcctac

SEQ ID NO: 101368 - DNA, 25 bp, SARS Virus
tgttcggagtgacggaaagcctacc

SEQ ID NO: 101369 - DNA, 25 bp, SARS Virus
gttcggagtgagcgaaagcctaccg

SEQ ID NO: 101370 - DNA, 25 bp, SARS Virus
ttcggagtgaggcaaagcctaccga

SEQ ID NO: 101371 - DNA, 25 bp, SARS Virus
tcggagtgagggcaagcctaccgaa

SEQ ID NO: 101372 - DNA, 25 bp, SARS Virus
cggagtgagggacagcctaccgaac

SEQ ID NO: 101373 - DNA, 25 bp, SARS Virus
ggagtgagggaacgcctaccgaaca

SEQ ID NO: 101374 - DNA, 25 bp, SARS Virus
gagtgagggaaaccctaccgaacaa

SEQ ID NO: 101375 - DNA, 25 bp, SARS Virus
agtgagggaaagcctaccgaacaat

SEQ ID NO: 101376 - DNA, 25 bp, SARS Virus
gtgagggaaagcctaccgaacaata

SEQ ID NO: 101377 - DNA, 25 bp, SARS Virus
tgagggaaagcccaccgaacaataa

SEQ ID NO: 101378 - DNA, 25 bp, SARS Virus
gagggaaagcctcccgaacaataac

SEQ ID NO: 101379 - DNA, 25 bp, SARS Virus
agggaaagcctaccgaacaataacc

SEQ ID NO: 101380 - DNA, 25 bp, SARS Virus
gggaaagcctaccgaacaataaccg

SEQ ID NO: 101381 - DNA, 25 bp, SARS Virus
ggaaagcctacccaacaataaccgc

SEQ ID NO: 101382 - DNA, 25 bp, SARS Virus
gaaagcctaccgcacaataaccgca

SEQ ID NO: 101383 - DNA, 25 bp, SARS Virus
aaagcctaccgaccaataaccgcaa

SEQ ID NO: 101384 - DNA, 25 bp, SARS Virus
aagcctaccgaacaataaccgcaac

SEQ ID NO: 101385 - DNA, 25 bp, SARS Virus
agcctaccgaaccataaccgcaacg

SEQ ID NO: 101386 - DNA, 25 bp, SARS Virus
gcctaccgaacactaaccgcaacgt

SEQ ID NO: 101387 - DNA, 25 bp, SARS Virus
cctaccgaacaacaaccgcaacgta

SEQ ID NO: 101388 - DNA, 25 bp, SARS Virus
ctaccgaacaatcaccgcaacgtaa

SEQ ID NO: 101389 - DNA, 25 bp, SARS Virus
taccgaacaatacccgcaacgtaaa

SEQ ID NO: 101390 - DNA, 25 bp, SARS Virus
accgaacaataaccgcaacgtaaag

SEQ ID NO: 101391 - DNA, 25 bp, SARS Virus
ccgaacaataaccgcaacgtaaaga

SEQ ID NO: 101392 - DNA, 25 bp, SARS Virus
cgaacaataaccccaacgtaaagaa

SEQ ID NO: 101393 - DNA, 25 bp, SARS Virus
gaacaataaccgcaacgtaaagaac

SEQ ID NO: 101394 - DNA, 25 bp, SARS Virus
aacaataaccgccacgtaaagaacg

SEQ ID NO: 101395 - DNA, 25 bp, SARS Virus
acaataaccgcaccgtaaagaacga

SEQ ID NO: 101396 - DNA, 25 bp, SARS Virus
caataaccgcaacgtaaagaacgac

SEQ ID NO: 101397 - DNA, 25 bp, SARS Virus
aataaccgcaacctaaagaacgaca

SEQ ID NO: 101398 - DNA, 25 bp, SARS Virus
ataaccgcaacgcaaagaacgacaa

SEQ ID NO: 101399 - DNA, 25 bp, SARS Virus
taaccgcaacgtcaagaacgacaaa

SEQ ID NO: 101400 - DNA, 25 bp, SARS Virus
aaccgcaacgtacagaacgacaaaa

SEQ ID NO: 101401 - DNA, 25 bp, SARS Virus
accgcaacgtaacgaacgacaaaaa

SEQ ID NO: 101402 - DNA, 25 bp, SARS Virus
ccgcaacgtaaacaacgacaaaaag

SEQ ID NO: 101403 - DNA, 25 bp, SARS Virus
cgcaacgtaaagcacgacaaaaagt

SEQ ID NO: 101404 - DNA, 25 bp, SARS Virus
gcaacgtaaagaccgacaaaaagtc

SEQ ID NO: 101405 - DNA, 25 bp, SARS Virus
caacgtaaagaacgacaaaaagtct

SEQ ID NO: 101406 - DNA, 25 bp, SARS Virus
aacgtaaagaaccacaaaaagtctc

SEQ ID NO: 101407 - DNA, 25 bp, SARS Virus
acgtaaagaacgccaaaaagtctcg

SEQ ID NO: 101408 - DNA, 25 bp, SARS Virus
cgtaaagaacgacaaaaagtctcgc

SEQ ID NO: 101409 - DNA, 25 bp, SARS Virus
gtaaagaacgaccaaaagtctcgcg

SEQ ID NO: 101410 - DNA, 25 bp, SARS Virus
taaagaacgacacaaagtctcgcga

SEQ ID NO: 101411 - DNA, 25 bp, SARS Virus
aaagaacgacaacaagtctcgcgat

SEQ ID NO: 101412 - DNA, 25 bp, SARS Virus
aagaacgacaaacagtctcgcgatg

SEQ ID NO: 101413 - DNA, 25 bp, SARS Virus
agaacgacaaaacgtctcgcgatgg

SEQ ID NO: 101414 - DNA, 25 bp, SARS Virus
gaacgacaaaaactctcgcgatggt

SEQ ID NO: 101415 - DNA, 25 bp, SARS Virus
aacgacaaaaagcctcgcgatggtt

SEQ ID NO: 101416 - DNA, 25 bp, SARS Virus
acgacaaaaagtctcgcgatggttt

SEQ ID NO: 101417 - DNA, 25 bp, SARS Virus
cgacaaaaagtcccgcgatggtttt

SEQ ID NO: 101418 - DNA, 25 bp, SARS Virus
gacaaaaagtctcgcgatggtttta

SEQ ID NO: 101419 - DNA, 25 bp, SARS Virus
acaaaaagtctcccgatggttttat

SEQ ID NO: 101420 - DNA, 25 bp, SARS Virus
caaaaagtctcgcgatggttttatt

SEQ ID NO: 101421 - DNA, 25 bp, SARS Virus
aaaaagtctcgccatggttttatta

SEQ ID NO: 101422 - DNA, 25 bp, SARS Virus
aaaagtctcgcgctggttttattaa

SEQ ID NO: 101423 - DNA, 25 bp, SARS Virus
aaagtctcgcgacggttttattaac

SEQ ID NO: 101424 - DNA, 25 bp, SARS Virus
aagtctcgcgatcgttttattaacg

SEQ ID NO: 101425 - DNA, 25 bp, SARS Virus
agtctcgcgatgcttttattaacgc

SEQ ID NO: 101426 - DNA, 25 bp, SARS Virus
gtctcgcgatggctttattaacgcg

SEQ ID NO: 101427 - DNA, 25 bp, SARS Virus
tctcgcgatggtcttattaacgcga

SEQ ID NO: 101428 - DNA, 25 bp, SARS Virus
ctcgcgatggttctattaacgcgag

SEQ ID NO: 101429 - DNA, 25 bp, SARS Virus
tcgcgatggtttcattaacgcgagt

SEQ ID NO: 101430 - DNA, 25 bp, SARS Virus
cgcgatggttttcttaacgcgagtt

SEQ ID NO: 101431 - DNA, 25 bp, SARS Virus
gcgatggttttactaacgcgagtta

SEQ ID NO: 101432 - DNA, 25 bp, SARS Virus
cgatggttttatcaacgcgagttat

SEQ ID NO: 101433 - DNA, 25 bp, SARS Virus
gatggttttattcacgcgagttatt

SEQ ID NO: 101434 - DNA, 25 bp, SARS Virus
atggttttattaccgcgagttattt

SEQ ID NO: 101435 - DNA, 25 bp, SARS Virus
tggttttattaacgcgagttatttt

SEQ ID NO: 101436 - DNA, 25 bp, SARS Virus
ggttttattaacccgagttattttc

SEQ ID NO: 101437 - DNA, 25 bp, SARS Virus
gttttattaacgcgagttattttct

SEQ ID NO: 101438 - DNA, 25 bp, SARS Virus
ttttattaacgccagttattttcta

SEQ ID NO: 101439 - DNA, 25 bp, SARS Virus
tttattaacgcgcgttattttctac

SEQ ID NO: 101440 - DNA, 25 bp, SARS Virus
ttattaacgcgacttattttctacc

SEQ ID NO: 101441 - DNA, 25 bp, SARS Virus
tattaacgcgagctattttctaccg

SEQ ID NO: 101442 - DNA, 25 bp, SARS Virus
attaacgcgagtcattttctaccgt

SEQ ID NO: 101443 - DNA, 25 bp, SARS Virus
ttaacgcgagttcttttctaccgtc

SEQ ID NO: 101444 - DNA, 25 bp, SARS Virus
taacgcgagttactttctaccgtcg

SEQ ID NO: 101445 - DNA, 25 bp, SARS Virus
aacgcgagttatcttctaccgtcga

SEQ ID NO: 101446 - DNA, 25 bp, SARS Virus
acgcgagttattctctaccgtcgat

SEQ ID NO: 101447 - DNA, 25 bp, SARS Virus
cgcgagttatttcctaccgtcgatc

SEQ ID NO: 101448 - DNA, 25 bp, SARS Virus
gcgagttattttctaccgtcgatcg

SEQ ID NO: 101449 - DNA, 25 bp, SARS Virus
cgagttattttccaccgtcgatcgg

SEQ ID NO: 101450 - DNA, 25 bp, SARS Virus
gagttattttctcccgtcgatcggg

SEQ ID NO: 101451 - DNA, 25 bp, SARS Virus
agttattttctaccgtcgatcggga

SEQ ID NO: 101452 - DNA, 25 bp, SARS Virus
gttattttctaccgtcgatcgggaa

SEQ ID NO: 101453 - DNA, 25 bp, SARS Virus
ttattttctaccctcgatcgggaaa

SEQ ID NO: 101454 - DNA, 25 bp, SARS Virus
tattttctaccgccgatcgggaaat

SEQ ID NO: 101455 - DNA, 25 bp, SARS Virus
attttctaccgtcgatcgggaaata

SEQ ID NO: 101456 - DNA, 25 bp, SARS Virus
ttttctaccgtccatcgggaaatat

SEQ ID NO: 101457 - DNA, 25 bp, SARS Virus
tttctaccgtcgctcgggaaatatt

SEQ ID NO: 101458 - DNA, 25 bp, SARS Virus
ttctaccgtcgaccgggaaatattc

SEQ ID NO: 101459 - DNA, 25 bp, SARS Virus
tctaccgtcgatcgggaaatattcc

SEQ ID NO: 101460 - DNA, 25 bp, SARS Virus
ctaccgtcgatccggaaatattccc

SEQ ID NO: 101461 - DNA, 25 bp, SARS Virus
taccgtcgatcgcgaaatattcccg

SEQ ID NO: 101462 - DNA, 25 bp, SARS Virus
accgtcgatcggcaaatattcccga

SEQ ID NO: 101463 - DNA, 25 bp, SARS Virus
ccgtcgatcgggcaatattcccgaa

SEQ ID NO: 101464 - DNA, 25 bp, SARS Virus
cgtcgatcgggacatattcccgaag

SEQ ID NO: 101465 - DNA, 25 bp, SARS Virus
gtcgatcgggaactattcccgaagg

SEQ ID NO: 101466 - DNA, 25 bp, SARS Virus
tcgatcgggaaacattcccgaaggt

SEQ ID NO: 101467 - DNA, 25 bp, SARS Virus
cgatcgggaaatcttcccgaaggtc

SEQ ID NO: 101468 - DNA, 25 bp, SARS Virus
gatcgggaaatactcccgaaggtca

SEQ ID NO: 101469 - DNA, 25 bp, SARS Virus
atcgggaaatatccccgaaggtcaa

SEQ ID NO: 101470 - DNA, 25 bp, SARS Virus
tcgggaaatattcccgaaggtcaag

SEQ ID NO: 101471 - DNA, 25 bp, SARS Virus
cgggaaatattcccgaaggtcaagt

SEQ ID NO: 101472 - DNA, 25 bp, SARS Virus
gggaaatattcccgaaggtcaagta

SEQ ID NO: 101473 - DNA, 25 bp, SARS Virus
ggaaatattccccaaggtcaagtaa

SEQ ID NO: 101474 - DNA, 25 bp, SARS Virus
gaaatattcccgcaggtcaagtaaa

SEQ ID NO: 101475 - DNA, 25 bp, SARS Virus
aaatattcccgacggtcaagtaaac

SEQ ID NO: 101476 - DNA, 25 bp, SARS Virus
aatattcccgaacgtcaagtaaacg

SEQ ID NO: 101477 - DNA, 25 bp, SARS Virus
atattcccgaagctcaagtaaacgt

SEQ ID NO: 101478 - DNA, 25 bp, SARS Virus
tattcccgaaggccaagtaaacgtt

SEQ ID NO: 101479 - DNA, 25 bp, SARS Virus
attcccgaaggtcaagtaaacgtta

SEQ ID NO: 101480 - DNA, 25 bp, SARS Virus
ttcccgaaggtccagtaaacgttaa

SEQ ID NO: 101481 - DNA, 25 bp, SARS Virus
tcccgaaggtcacgtaaacgttaaa

SEQ ID NO: 101482 - DNA, 25 bp, SARS Virus
cccgaaggtcaactaaacgttaaat

SEQ ID NO: 101483 - DNA, 25 bp, SARS Virus
ccgaaggtcaagcaaacgttaaatg

SEQ ID NO: 101484 - DNA, 25 bp, SARS Virus
cgaaggtcaagtcaacgttaaatga

SEQ ID NO: 101485 - DNA, 25 bp, SARS Virus
gaaggtcaagtacacgttaaatgac

SEQ ID NO: 101486 - DNA, 25 bp, SARS Virus
aaggtcaagtaaccgttaaatgacg

SEQ ID NO: 101487 - DNA, 25 bp, SARS Virus
aggtcaagtaaacgttaaatgacga

SEQ ID NO: 101488 - DNA, 25 bp, SARS Virus
ggtcaagtaaaccttaaatgacgac

SEQ ID NO: 101489 - DNA, 25 bp, SARS Virus
gtcaagtaaacgctaaatgacgacg

SEQ ID NO: 101490 - DNA, 25 bp, SARS Virus
tcaagtaaacgtcaaatgacgacga

SEQ ID NO: 101491 - DNA, 25 bp, SARS Virus
caagtaaacgttcaatgacgacgat

SEQ ID NO: 101492 - DNA, 25 bp, SARS Virus
aagtaaacgttacatgacgacgata

SEQ ID NO: 101493 - DNA, 25 bp, SARS Virus
agtaaacgttaactgacgacgataa

SEQ ID NO: 101494 - DNA, 25 bp, SARS Virus
gtaaacgttaaacgacgacgataaa

SEQ ID NO: 101495 - DNA, 25 bp, SARS Virus
taaacgttaaatcacgacgataaac

SEQ ID NO: 101496 - DNA, 25 bp, SARS Virus
aaacgttaaatgccgacgataaaca

SEQ ID NO: 101497 - DNA, 25 bp, SARS Virus
aacgttaaatgacgacgataaacaa

SEQ ID NO: 101498 - DNA, 25 bp, SARS Virus
acgttaaatgaccacgataaacaat

SEQ ID NO: 101499 - DNA, 25 bp, SARS Virus
cgttaaatgacgccgataaacaatg

SEQ ID NO: 101500 - DNA, 25 bp, SARS Virus
gttaaatgacgacgataaacaatgg

SEQ ID NO: 101501 - DNA, 25 bp, SARS Virus
ttaaatgacgaccataaacaatggt

SEQ ID NO: 101502 - DNA, 25 bp, SARS Virus
taaatgacgacgctaaacaatggta

SEQ ID NO: 101503 - DNA, 25 bp, SARS Virus
aaatgacgacgacaaacaatggtag

SEQ ID NO: 101504 - DNA, 25 bp, SARS Virus
aatgacgacgatcaacaatggtaga

SEQ ID NO: 101505 - DNA, 25 bp, SARS Virus
atgacgacgatacacaatggtagat

SEQ ID NO: 101506 - DNA, 25 bp, SARS Virus
tgacgacgataaccaatggtagata

SEQ ID NO: 101507 - DNA, 25 bp, SARS Virus
gacgacgataaacaatggtagataa

SEQ ID NO: 101508 - DNA, 25 bp, SARS Virus
acgacgataaaccatggtagataag

SEQ ID NO: 101509 - DNA, 25 bp, SARS Virus
cgacgataaacactggtagataagt

SEQ ID NO: 101510 - DNA, 25 bp, SARS Virus
gacgataaacaacggtagataagtg

SEQ ID NO: 101511 - DNA, 25 bp, SARS Virus
acgataaacaatcgtagataagtgt

SEQ ID NO: 101512 - DNA, 25 bp, SARS Virus
cgataaacaatgctagataagtgta

SEQ ID NO: 101513 - DNA, 25 bp, SARS Virus
gataaacaatggcagataagtgtag

SEQ ID NO: 101514 - DNA, 25 bp, SARS Virus
ataaacaatggtcgataagtgtaga

SEQ ID NO: 101515 - DNA, 25 bp, SARS Virus
taaacaatggtacataagtgtagaa

SEQ ID NO: 101516 - DNA, 25 bp, SARS Virus
aaacaatggtagctaagtgtagaaa

SEQ ID NO: 101517 - DNA, 25 bp, SARS Virus
aacaatggtagacaagtgtagaaaa

SEQ ID NO: 101518 - DNA, 25 bp, SARS Virus
acaatggtagatcagtgtagaaaac

SEQ ID NO: 101519 - DNA, 25 bp, SARS Virus
caatggtagatacgtgtagaaaacg

SEQ ID NO: 101520 - DNA, 25 bp, SARS Virus
aatggtagataactgtagaaaacga

SEQ ID NO: 101521 - DNA, 25 bp, SARS Virus
atggtagataagcgtagaaaacgaa

SEQ ID NO: 101522 - DNA, 25 bp, SARS Virus
tggtagataagtctagaaaacgaac

SEQ ID NO: 101523 - DNA, 25 bp, SARS Virus
ggtagataagtgcagaaaacgaaca

SEQ ID NO: 101524 - DNA, 25 bp, SARS Virus
gtagataagtgtcgaaaacgaacag

SEQ ID NO: 101525 - DNA, 25 bp, SARS Virus
tagataagtgtacaaaacgaacagc

SEQ ID NO: 101526 - DNA, 25 bp, SARS Virus
agataagtgtagcaaacgaacagcg

SEQ ID NO: 101527 - DNA, 25 bp, SARS Virus
gataagtgtagacaacgaacagcga

SEQ ID NO: 101528 - DNA, 25 bp, SARS Virus
ataagtgtagaacacgaacagcgac

SEQ ID NO: 101529 - DNA, 25 bp, SARS Virus
taagtgtagaaaccgaacagcgacg

SEQ ID NO: 101530 - DNA, 25 bp, SARS Virus
aagtgtagaaaacgaacagcgacgt

SEQ ID NO: 101531 - DNA, 25 bp, SARS Virus
agtgtagaaaaccaacagcgacgtc

SEQ ID NO: 101532 - DNA, 25 bp, SARS Virus
gtgtagaaaacgcacagcgacgtcc

SEQ ID NO: 101533 - DNA, 25 bp, SARS Virus
tgtagaaaacgaccagcgacgtcca

SEQ ID NO: 101534 - DNA, 25 bp, SARS Virus
gtagaaaacgaacagcgacgtccat

SEQ ID NO: 101535 - DNA, 25 bp, SARS Virus
tagaaaacgaaccgcgacgtccata

SEQ ID NO: 101536 - DNA, 25 bp, SARS Virus
agaaaacgaacaccgacgtccatac

SEQ ID NO: 101537 - DNA, 25 bp, SARS Virus
gaaaacgaacagcgacgtccatacc

SEQ ID NO: 101538 - DNA, 25 bp, SARS Virus
aaaacgaacagccacgtccatacct

SEQ ID NO: 101539 - DNA, 25 bp, SARS Virus
aaacgaacagcgccgtccatacctc

SEQ ID NO: 101540 - DNA, 25 bp, SARS Virus
aacgaacagcgacgtccatacctcc

SEQ ID NO: 101541 - DNA, 25 bp, SARS Virus
acgaacagcgacctccatacctccg

SEQ ID NO: 101542 - DNA, 25 bp, SARS Virus
cgaacagcgacgcccatacctccgc

SEQ ID NO: 101543 - DNA, 25 bp, SARS Virus
gaacagcgacgtccatacctccgcg

SEQ ID NO: 101544 - DNA, 25 bp, SARS Virus
aacagcgacgtccatacctccgcgt

SEQ ID NO: 101545 - DNA, 25 bp, SARS Virus
acagcgacgtccctacctccgcgtt

SEQ ID NO: 101546 - DNA, 25 bp, SARS Virus
cagcgacgtccacacctccgcgtta

SEQ ID NO: 101547 - DNA, 25 bp, SARS Virus
agcgacgtccatccctccgcgttaa

SEQ ID NO: 101548 - DNA, 25 bp, SARS Virus
gcgacgtccatacctccgcgttaaa

SEQ ID NO: 101549 - DNA, 25 bp, SARS Virus
cgacgtccatacctccgcgttaaaa

SEQ ID NO: 101550 - DNA, 25 bp, SARS Virus
gacgtccatacccccgcgttaaaaa

SEQ ID NO: 101551 - DNA, 25 bp, SARS Virus
acgtccatacctccgcgttaaaaac

SEQ ID NO: 101552 - DNA, 25 bp, SARS Virus
cgtccatacctccgcgttaaaaaca

SEQ ID NO: 101553 - DNA, 25 bp, SARS Virus
gtccatacctccccgttaaaaacat

SEQ ID NO: 101554 - DNA, 25 bp, SARS Virus
tccatacctccgcgttaaaaacatg

SEQ ID NO: 101555 - DNA, 25 bp, SARS Virus
ccatacctccgccttaaaaacatgg

SEQ ID NO: 101556 - DNA, 25 bp, SARS Virus
catacctccgcgctaaaaacatgga

SEQ ID NO: 101557 - DNA, 25 bp, SARS Virus
atacctccgcgtcaaaaacatggag

SEQ ID NO: 101558 - DNA, 25 bp, SARS Virus
tacctccgcgttcaaaacatggaga

SEQ ID NO: 101559 - DNA, 25 bp, SARS Virus
acctccgcgttacaaacatggagat

SEQ ID NO: 101560 - DNA, 25 bp, SARS Virus
cctccgcgttaacaacatggagata

SEQ ID NO: 101561 - DNA, 25 bp, SARS Virus
ctccgcgttaaacacatggagatac

SEQ ID NO: 101562 - DNA, 25 bp, SARS Virus
tccgcgttaaaaccatggagatacg

SEQ ID NO: 101563 - DNA, 25 bp, SARS Virus
ccgcgttaaaaacatggagatacgg

SEQ ID NO: 101564 - DNA, 25 bp, SARS Virus
cgcgttaaaaacctggagatacgga

SEQ ID NO: 101565 - DNA, 25 bp, SARS Virus
gcgttaaaaacacggagatacggaa

SEQ ID NO: 101566 - DNA, 25 bp, SARS Virus
cgttaaaaacatcgagatacggaac

SEQ ID NO: 101567 - DNA, 25 bp, SARS Virus
gttaaaaacatgcagatacggaact

SEQ ID NO: 101568 - DNA, 25 bp, SARS Virus
ttaaaaacatggcgatacggaacta

SEQ ID NO: 101569 - DNA, 25 bp, SARS Virus
taaaaacatggacatacggaactat

SEQ ID NO: 101570 - DNA, 25 bp, SARS Virus
aaaaacatggagctacggaactata

SEQ ID NO: 101571 - DNA, 25 bp, SARS Virus
aaaacatggagacacggaactatat

SEQ ID NO: 101572 - DNA, 25 bp, SARS Virus
aaacatggagatccggaactatata

SEQ ID NO: 101573 - DNA, 25 bp, SARS Virus
aacatggagatacggaactatataa

SEQ ID NO: 101574 - DNA, 25 bp, SARS Virus
acatggagataccgaactatataaa

SEQ ID NO: 101575 - DNA, 25 bp, SARS Virus
catggagatacgcaactatataaaa

SEQ ID NO: 101576 - DNA, 25 bp, SARS Virus
atggagatacggcactatataaaag

SEQ ID NO: 101577 - DNA, 25 bp, SARS Virus
tggagatacggacctatataaaaga

SEQ ID NO: 101578 - DNA, 25 bp, SARS Virus
ggagatacggaactatataaaagat

SEQ ID NO: 101579 - DNA, 25 bp, SARS Virus
gagatacggaaccatataaaagatg

SEQ ID NO: 101580 - DNA, 25 bp, SARS Virus
agatacggaactctataaaagatgt

SEQ ID NO: 101581 - DNA, 25 bp, SARS Virus
gatacggaactacataaaagatgtt

SEQ ID NO: 101582 - DNA, 25 bp, SARS Virus
atacggaactatctaaaagatgtta

SEQ ID NO: 101583 - DNA, 25 bp, SARS Virus
tacggaactatacaaaagatgttac

SEQ ID NO: 101584 - DNA, 25 bp, SARS Virus
acggaactatatcaaagatgttacg

SEQ ID NO: 101585 - DNA, 25 bp, SARS Virus
cggaactatatacaagatgttacgt

SEQ ID NO: 101586 - DNA, 25 bp, SARS Virus
ggaactatataacagatgttacgta

SEQ ID NO: 101587 - DNA, 25 bp, SARS Virus
gaactatataaacgatgttacgtag

SEQ ID NO: 101588 - DNA, 25 bp, SARS Virus
aactatataaaacatgttacgtagt

SEQ ID NO: 101589 - DNA, 25 bp, SARS Virus
actatataaaagctgttacgtagtt

SEQ ID NO: 101590 - DNA, 25 bp, SARS Virus
ctatataaaagacgttacgtagttg

SEQ ID NO: 101591 - DNA, 25 bp, SARS Virus
tatataaaagatcttacgtagttgc

SEQ ID NO: 101592 - DNA, 25 bp, SARS Virus
atataaaagatgctacgtagttgcg

SEQ ID NO: 101593 - DNA, 25 bp, SARS Virus
tataaaagatgtcacgtagttgcgt

SEQ ID NO: 101594 - DNA, 25 bp, SARS Virus
ataaaagatgttccgtagttgcgta

SEQ ID NO: 101595 - DNA, 25 bp, SARS Virus
taaaagatgttacgtagttgcgtac

SEQ ID NO: 101596 - DNA, 25 bp, SARS Virus
aaaagatgttacctagttgcgtaca

SEQ ID NO: 101597 - DNA, 25 bp, SARS Virus
aaagatgttacgcagttgcgtacat

SEQ ID NO: 101598 - DNA, 25 bp, SARS Virus
aagatgttacgtcgttgcgtacatc

SEQ ID NO: 101599 - DNA, 25 bp, SARS Virus
agatgttacgtacttgcgtacatct

SEQ ID NO: 101600 - DNA, 25 bp, SARS Virus
gatgttacgtagctgcgtacatctt

SEQ ID NO: 101601 - DNA, 25 bp, SARS Virus
atgttacgtagtcgcgtacatctta

SEQ ID NO: 101602 - DNA, 25 bp, SARS Virus
tgttacgtagttccgtacatcttaa

SEQ ID NO: 101603 - DNA, 25 bp, SARS Virus
gttacgtagttgcgtacatcttaat

SEQ ID NO: 101604 - DNA, 25 bp, SARS Virus
ttacgtagttgcctacatcttaata

SEQ ID NO: 101605 - DNA, 25 bp, SARS Virus
tacgtagttgcgcacatcttaataa

SEQ ID NO: 101606 - DNA, 25 bp, SARS Virus
acgtagttgcgtccatcttaataat

SEQ ID NO: 101607 - DNA, 25 bp, SARS Virus
cgtagttgcgtacatcttaataata

SEQ ID NO: 101608 - DNA, 25 bp, SARS Virus
gtagttgcgtacctcttaataatac

SEQ ID NO: 101609 - DNA, 25 bp, SARS Virus
tagttgcgtacaccttaataatact

SEQ ID NO: 101610 - DNA, 25 bp, SARS Virus
agttgcgtacatcttaataatactc

SEQ ID NO: 101611 - DNA, 25 bp, SARS Virus
gttgcgtacatcctaataatactct

SEQ ID NO: 101612 - DNA, 25 bp, SARS Virus
ttgcgtacatctcaataatactcta

SEQ ID NO: 101613 - DNA, 25 bp, SARS Virus
tgcgtacatcttcataatactctac

SEQ ID NO: 101614 - DNA, 25 bp, SARS Virus
gcgtacatcttactaatactctaca

SEQ ID NO: 101615 - DNA, 25 bp, SARS Virus
cgtacatcttaacaatactctacaa

SEQ ID NO: 101616 - DNA, 25 bp, SARS Virus
gtacatcttaatcatactctacaac

SEQ ID NO: 101617 - DNA, 25 bp, SARS Virus
tacatcttaatactactctacaacc

SEQ ID NO: 101618 - DNA, 25 bp, SARS Virus
acatcttaataacactctacaaccg

SEQ ID NO: 101619 - DNA, 25 bp, SARS Virus
catcttaataatcctctacaaccga

SEQ ID NO: 101620 - DNA, 25 bp, SARS Virus
atcttaataatactctacaaccgaa

SEQ ID NO: 101621 - DNA, 25 bp, SARS Virus
tcttaataataccctacaaccgaaa

SEQ ID NO: 101622 - DNA, 25 bp, SARS Virus
cttaataatactctacaaccgaaac

SEQ ID NO: 101623 - DNA, 25 bp, SARS Virus
ttaataatactccacaaccgaaaca

SEQ ID NO: 101624 - DNA, 25 bp, SARS Virus
taataatactctccaaccgaaacaa

SEQ ID NO: 101625 - DNA, 25 bp, SARS Virus
aataatactctacaaccgaaacaac

SEQ ID NO: 101626 - DNA, 25 bp, SARS Virus
ataatactctaccaccgaaacaacc

SEQ ID NO: 101627 - DNA, 25 bp, SARS Virus
taatactctacacccgaaacaacct

SEQ ID NO: 101628 - DNA, 25 bp, SARS Virus
aatactctacaaccgaaacaacctt

SEQ ID NO: 101629 - DNA, 25 bp, SARS Virus
atactctacaaccgaaacaaccttc

SEQ ID NO: 101630 - DNA, 25 bp, SARS Virus
tactctacaacccaaacaaccttca

SEQ ID NO: 101631 - DNA, 25 bp, SARS Virus
actctacaaccgcaacaaccttcac

SEQ ID NO: 101632 - DNA, 25 bp, SARS Virus
ctctacaaccgacacaaccttcacg

SEQ ID NO: 101633 - DNA, 25 bp, SARS Virus
acaacgtcaacggagttcccacgta

SEQ ID NO: 101634 - DNA, 25 bp, SARS Virus
caacgtcaacggggttcccacgtac

SEQ ID NO: 101635 - DNA, 25 bp, SARS Virus
aacgtcaacggagttcccacgtacg

SEQ ID NO: 101636 - DNA, 25 bp, SARS Virus
acgtcaacggaggtcccacgtacga

SEQ ID NO: 101637 - DNA, 25 bp, SARS Virus
cgtcaacggagtgcccacgtacgag

SEQ ID NO: 101638 - DNA, 25 bp, SARS Virus
gtcaacggagttgccacgtacgaga

SEQ ID NO: 101639 - DNA, 25 bp, SARS Virus
tcaacggagttcgcacgtacgagaa

SEQ ID NO: 101640 - DNA, 25 bp, SARS Virus
caacggagttccgacgtacgagaac

SEQ ID NO: 101641 - DNA, 25 bp, SARS Virus
aacggagttcccgcgtacgagaaca

SEQ ID NO: 101642 - DNA, 25 bp, SARS Virus
acggagttcccaggtacgagaacac

SEQ ID NO: 101643 - DNA, 25 bp, SARS Virus
cggagttcccacgtacgagaacacc

SEQ ID NO: 101644 - DNA, 25 bp, SARS Virus
ggagttcccacggacgagaacacca

SEQ ID NO: 101645 - DNA, 25 bp, SARS Virus
gagttcccacgtgcgagaacaccaa

SEQ ID NO: 101646 - DNA, 25 bp, SARS Virus
agttcccacgtaggagaacaccaag

SEQ ID NO: 101647 - DNA, 25 bp, SARS Virus
gttcccacgtacgagaacaccaaga

SEQ ID NO: 101648 - DNA, 25 bp, SARS Virus
ttcccacgtacgggaacaccaagaa

SEQ ID NO: 101649 - DNA, 25 bp, SARS Virus
tcccacgtacgagaacaccaagaac

SEQ ID NO: 101650 - DNA, 25 bp, SARS Virus
cccacgtacgaggacaccaagaacg

SEQ ID NO: 101651 - DNA, 25 bp, SARS Virus
ccacgtacgagagcaccaagaacga

SEQ ID NO: 101652 - DNA, 25 bp, SARS Virus
cacgtacgagaagaccaagaacgac

SEQ ID NO: 101653 - DNA, 25 bp, SARS Virus
acgtacgagaacgccaagaacgacg

SEQ ID NO: 101654 - DNA, 25 bp, SARS Virus
cgtacgagaacagcaagaacgacgt

SEQ ID NO: 101655 - DNA, 25 bp, SARS Virus
gtacgagaacacgaagaacgacgtt

SEQ ID NO: 101656 - DNA, 25 bp, SARS Virus
tacgagaacaccgagaacgacgttc

SEQ ID NO: 101657 - DNA, 25 bp, SARS Virus
acgagaacaccaggaacgacgttca

SEQ ID NO: 101658 - DNA, 25 bp, SARS Virus
cgagaacaccaagaacgacgttcaa

SEQ ID NO: 101659 - DNA, 25 bp, SARS Virus
gagaacaccaaggacgacgttcaaa

SEQ ID NO: 101660 - DNA, 25 bp, SARS Virus
agaacaccaagagcgacgttcaaac

SEQ ID NO: 101661 - DNA, 25 bp, SARS Virus
gaacaccaagaaggacgttcaaact

SEQ ID NO: 101662 - DNA, 25 bp, SARS Virus
aacaccaagaacgacgttcaaacta

SEQ ID NO: 101663 - DNA, 25 bp, SARS Virus
acaccaagaacggcgttcaaactac

SEQ ID NO: 101664 - DNA, 25 bp, SARS Virus
caccaagaacgaggttcaaactact

SEQ ID NO: 101665 - DNA, 25 bp, SARS Virus
accaagaacgacgttcaaactactc

SEQ ID NO: 101666 - DNA, 25 bp, SARS Virus
ccaagaacgacggtcaaactactcc

SEQ ID NO: 101667 - DNA, 25 bp, SARS Virus
caagaacgacgtgcaaactactcct

SEQ ID NO: 101668 - DNA, 25 bp, SARS Virus
aagaacgacgttgaaactactccta

SEQ ID NO: 101669 - DNA, 25 bp, SARS Virus
agaacgacgttcgaactactcctac

SEQ ID NO: 101670 - DNA, 25 bp, SARS Virus
gaacgacgttcagactactcctact

SEQ ID NO: 101671 - DNA, 25 bp, SARS Virus
aacgacgttcaagctactcctactg

SEQ ID NO: 101672 - DNA, 25 bp, SARS Virus
acgacgttcaaagtactcctactga

SEQ ID NO: 101673 - DNA, 25 bp, SARS Virus
cgacgttcaaacgactcctactgag

SEQ ID NO: 101674 - DNA, 25 bp, SARS Virus
gacgttcaaactgctcctactgaga

SEQ ID NO: 101675 - DNA, 25 bp, SARS Virus
acgttcaaactagtcctactgagac

SEQ ID NO: 101676 - DNA, 25 bp, SARS Virus
cgttcaaactacgcctactgagact

SEQ ID NO: 101677 - DNA, 25 bp, SARS Virus
gttcaaactactgctactgagactc

SEQ ID NO: 101678 - DNA, 25 bp, SARS Virus
ttcaaactactcgtactgagactcg

SEQ ID NO: 101679 - DNA, 25 bp, SARS Virus
tcaaactactccgactgagactcgg

SEQ ID NO: 101680 - DNA, 25 bp, SARS Virus
caaactactcctgctgagactcggt

SEQ ID NO: 101681 - DNA, 25 bp, SARS Virus
aaactactcctagtgagactcggtc

SEQ ID NO: 101682 - DNA, 25 bp, SARS Virus
aactactcctacggagactcggtca

SEQ ID NO: 101683 - DNA, 25 bp, SARS Virus
actactcctactgagactcggtcaa

SEQ ID NO: 101684 - DNA, 25 bp, SARS Virus
ctactcctactgggactcggtcaag

SEQ ID NO: 101685 - DNA, 25 bp, SARS Virus
tactcctactgagactcggtcaaga

SEQ ID NO: 101686 - DNA, 25 bp, SARS Virus
actcctactgaggctcggtcaagag

SEQ ID NO: 101687 - DNA, 25 bp, SARS Virus
ctcctactgagagtcggtcaagagt

SEQ ID NO: 101688 - DNA, 25 bp, SARS Virus
tcctactgagacgcggtcaagagtt

SEQ ID NO: 101689 - DNA, 25 bp, SARS Virus
cctactgagactgggtcaagagttc

SEQ ID NO: 101690 - DNA, 25 bp, SARS Virus
ctactgagactcggtcaagagttcc

SEQ ID NO: 101691 - DNA, 25 bp, SARS Virus
tactgagactcggtcaagagttccc

SEQ ID NO: 101692 - DNA, 25 bp, SARS Virus
actgagactcgggcaagagttccca

SEQ ID NO: 101693 - DNA, 25 bp, SARS Virus
ctgagactcggtgaagagttcccac

SEQ ID NO: 101694 - DNA, 25 bp, SARS Virus
tgagactcggtcgagagttcccaca

SEQ ID NO: 101695 - DNA, 25 bp, SARS Virus
gagactcggtcaggagttcccacag

SEQ ID NO: 101696 - DNA, 25 bp, SARS Virus
agactcggtcaagagttcccacagt

SEQ ID NO: 101697 - DNA, 25 bp, SARS Virus
gactcggtcaagggttcccacagtt

SEQ ID NO: 101698 - DNA, 25 bp, SARS Virus
actcggtcaagagttcccacagttt

SEQ ID NO: 101699 - DNA, 25 bp, SARS Virus
ctcggtcaagaggtcccacagttta

SEQ ID NO: 101700 - DNA, 25 bp, SARS Virus
tcggtcaagagtgcccacagtttaa

SEQ ID NO: 101701 - DNA, 25 bp, SARS Virus
cggtcaagagttgccacagtttaat

SEQ ID NO: 101702 - DNA, 25 bp, SARS Virus
ggtcaagagttcgcacagtttaatg

SEQ ID NO: 101703 - DNA, 25 bp, SARS Virus
gtcaagagttccgacagtttaatgt

SEQ ID NO: 101704 - DNA, 25 bp, SARS Virus
tcaagagttcccgcagtttaatgta

SEQ ID NO: 101705 - DNA, 25 bp, SARS Virus
caagagttcccagagtttaatgtaa

SEQ ID NO: 101706 - DNA, 25 bp, SARS Virus
aagagttcccacggtttaatgtaat

SEQ ID NO: 101707 - DNA, 25 bp, SARS Virus
agagttcccacagtttaatgtaatg

SEQ ID NO: 101708 - DNA, 25 bp, SARS Virus
gagttcccacaggttaatgtaatgt

SEQ ID NO: 101709 - DNA, 25 bp, SARS Virus
agttcccacagtgtaatgtaatgtg

SEQ ID NO: 101710 - DNA, 25 bp, SARS Virus
gttcccacagttgaatgtaatgtgt

SEQ ID NO: 101711 - DNA, 25 bp, SARS Virus
ttcccacagtttgatgtaatgtgta

SEQ ID NO: 101712 - DNA, 25 bp, SARS Virus
tcccacagtttagtgtaatgtgtat

SEQ ID NO: 101713 - DNA, 25 bp, SARS Virus
cccacagtttaaggtaatgtgtatt

SEQ ID NO: 101714 - DNA, 25 bp, SARS Virus
ccacagtttaatgtaatgtgtattt

SEQ ID NO: 101715 - DNA, 25 bp, SARS Virus
cacagtttaatggaatgtgtatttg

SEQ ID NO: 101716 - DNA, 25 bp, SARS Virus
acagtttaatgtgatgtgtatttgc

SEQ ID NO: 101717 - DNA, 25 bp, SARS Virus
cagtttaatgtagtgtgtatttgct

SEQ ID NO: 101718 - DNA, 25 bp, SARS Virus
agtttaatgtaaggtgtatttgctt

SEQ ID NO: 101719 - DNA, 25 bp, SARS Virus
gtttaatgtaatgtgtatttgcttg

SEQ ID NO: 101720 - DNA, 25 bp, SARS Virus
tttaatgtaatgggtatttgcttga

SEQ ID NO: 101721 - DNA, 25 bp, SARS Virus
ttaatgtaatgtgtatttgcttgaa

SEQ ID NO: 101722 - DNA, 25 bp, SARS Virus
taatgtaatgtggatttgcttgaat

SEQ ID NO: 101723 - DNA, 25 bp, SARS Virus
aatgtaatgtgtgtttgcttgaata

SEQ ID NO: 101724 - DNA, 25 bp, SARS Virus
atgtaatgtgtagttgcttgaatac

SEQ ID NO: 101725 - DNA, 25 bp, SARS Virus
tgtaatgtgtatgtgcttgaatacc

SEQ ID NO: 101726 - DNA, 25 bp, SARS Virus
gtaatgtgtattggcttgaatacct

SEQ ID NO: 101727 - DNA, 25 bp, SARS Virus
taatgtgtatttgcttgaataccta

SEQ ID NO: 101728 - DNA, 25 bp, SARS Virus
aatgtgtatttggttgaatacctaa

SEQ ID NO: 101729 - DNA, 25 bp, SARS Virus
atgtgtatttgcgtgaatacctaaa

SEQ ID NO: 101730 - DNA, 25 bp, SARS Virus
tgtgtatttgctggaatacctaaac

SEQ ID NO: 101731 - DNA, 25 bp, SARS Virus
gtgtatttgcttgaatacctaaaca

SEQ ID NO: 101732 - DNA, 25 bp, SARS Virus
tgtatttgcttggatacctaaacaa

SEQ ID NO: 101733 - DNA, 25 bp, SARS Virus
gtatttgcttgagtacctaaacaaa

SEQ ID NO: 101734 - DNA, 25 bp, SARS Virus
tatttgcttgaagacctaaacaaat

SEQ ID NO: 101735 - DNA, 25 bp, SARS Virus
atttgcttgaatgcctaaacaaata

SEQ ID NO: 101736 - DNA, 25 bp, SARS Virus
tttgcttgaatagctaaacaaatac

SEQ ID NO: 101737 - DNA, 25 bp, SARS Virus
ttgcttgaatacgtaaacaaatact

SEQ ID NO: 101738 - DNA, 25 bp, SARS Virus
tgcttgaataccgaaacaaatactc

SEQ ID NO: 101739 - DNA, 25 bp, SARS Virus
gcttgaatacctgaacaaatactct

SEQ ID NO: 101740 - DNA, 25 bp, SARS Virus
cttgaatacctagacaaatactcta

SEQ ID NO: 101741 - DNA, 25 bp, SARS Virus
ttgaatacctaagcaaatactctaa

SEQ ID NO: 101742 - DNA, 25 bp, SARS Virus
tgaatacctaaagaaatactctaaa

SEQ ID NO: 101743 - DNA, 25 bp, SARS Virus
gaatacctaaacgaatactctaaaa

SEQ ID NO: 101744 - DNA, 25 bp, SARS Virus
aatacctaaacagatactctaaaaa

SEQ ID NO: 101745 - DNA, 25 bp, SARS Virus
atacctaaacaagtactctaaaaaa

SEQ ID NO: 101746 - DNA, 25 bp, SARS Virus
tacctaaacaaagactctaaaaaat

SEQ ID NO: 101747 - DNA, 25 bp, SARS Virus
acctaaacaaatgctctaaaaaatg

SEQ ID NO: 101748 - DNA, 25 bp, SARS Virus
cctaaacaaatagtctaaaaaatga

SEQ ID NO: 101749 - DNA, 25 bp, SARS Virus
ctaaacaaatacgctaaaaaatgag

SEQ ID NO: 101750 - DNA, 25 bp, SARS Virus
taaacaaatactgtaaaaaatgaga

SEQ ID NO: 101751 - DNA, 25 bp, SARS Virus
aaacaaatactcgaaaaaatgagaa

SEQ ID NO: 101752 - DNA, 25 bp, SARS Virus
aacaaatactctgaaaaatgagaat

SEQ ID NO: 101753 - DNA, 25 bp, SARS Virus
acaaatactctagaaaatgagaatc

SEQ ID NO: 101754 - DNA, 25 bp, SARS Virus
caaatactctaagaaatgagaatct

SEQ ID NO: 101755 - DNA, 25 bp, SARS Virus
aaatactctaaagaatgagaatcta

SEQ ID NO: 101756 - DNA, 25 bp, SARS Virus
aatactctaaaagatgagaatctag

SEQ ID NO: 101757 - DNA, 25 bp, SARS Virus
atactctaaaaagtgagaatctagt

SEQ ID NO: 101758 - DNA, 25 bp, SARS Virus
tactctaaaaaaggagaatctagtt

SEQ ID NO: 101759 - DNA, 25 bp, SARS Virus
actctaaaaaatgagaatctagtta

SEQ ID NO: 101760 - DNA, 25 bp, SARS Virus
ctctaaaaaatgggaatctagttaa

SEQ ID NO: 101761 - DNA, 25 bp, SARS Virus
tctaaaaaatgagaatctagttaat

SEQ ID NO: 101762 - DNA, 25 bp, SARS Virus
ctaaaaaatgaggatctagttaatg

SEQ ID NO: 101763 - DNA, 25 bp, SARS Virus
taaaaaatgagagtctagttaatga

SEQ ID NO: 101764 - DNA, 25 bp, SARS Virus
aaaaaatgagaagctagttaatgac

SEQ ID NO: 101765 - DNA, 25 bp, SARS Virus
aaaaatgagaatgtagttaatgacg

SEQ ID NO: 101766 - DNA, 25 bp, SARS Virus
aaaatgagaatcgagttaatgacgt

SEQ ID NO: 101767 - DNA, 25 bp, SARS Virus
aaatgagaatctggttaatgacgtg

SEQ ID NO: 101768 - DNA, 25 bp, SARS Virus
aatgagaatctagttaatgacgtgt

SEQ ID NO: 101769 - DNA, 25 bp, SARS Virus
atgagaatctaggtaatgacgtgtc

SEQ ID NO: 101770 - DNA, 25 bp, SARS Virus
tgagaatctagtgaatgacgtgtcg

SEQ ID NO: 101771 - DNA, 25 bp, SARS Virus
gagaatctagttgatgacgtgtcgg

SEQ ID NO: 101772 - DNA, 25 bp, SARS Virus
agaatctagttagtgacgtgtcggt

SEQ ID NO: 101773 - DNA, 25 bp, SARS Virus
gaatctagttaaggacgtgtcggtc

SEQ ID NO: 101774 - DNA, 25 bp, SARS Virus
aatctagttaatgacgtgtcggtca

SEQ ID NO: 101775 - DNA, 25 bp, SARS Virus
atctagttaatggcgtgtcggtcat

SEQ ID NO: 101776 - DNA, 25 bp, SARS Virus
tctagttaatgaggtgtcggtcatt

SEQ ID NO: 101777 - DNA, 25 bp, SARS Virus
ctagttaatgacgtgtcggtcattt

SEQ ID NO: 101778 - DNA, 25 bp, SARS Virus
tagttaatgacgggtcggtcatttt

SEQ ID NO: 101779 - DNA, 25 bp, SARS Virus
agttaatgacgtgtcggtcattttt

SEQ ID NO: 101780 - DNA, 25 bp, SARS Virus
gttaatgacgtggcggtcattttta

SEQ ID NO: 101781 - DNA, 25 bp, SARS Virus
ttaatgacgtgtgggtcatttttaa

SEQ ID NO: 101782 - DNA, 25 bp, SARS Virus
taatgacgtgtcggtcatttttaac

SEQ ID NO: 101783 - DNA, 25 bp, SARS Virus
aatgacgtgtcggtcatttttaact

SEQ ID NO: 101784 - DNA, 25 bp, SARS Virus
atgacgtgtcgggcatttttaactg

SEQ ID NO: 101785 - DNA, 25 bp, SARS Virus
tgacgtgtcggtgatttttaactgt

SEQ ID NO: 101786 - DNA, 25 bp, SARS Virus
gacgtgtcggtcgtttttaactgtt

SEQ ID NO: 101787 - DNA, 25 bp, SARS Virus
acgtgtcggtcagttttaactgtta

SEQ ID NO: 101788 - DNA, 25 bp, SARS Virus
cgtgtcggtcatgtttaactgttac

SEQ ID NO: 101789 - DNA, 25 bp, SARS Virus
gtgtcggtcattgttaactgttacg

SEQ ID NO: 101790 - DNA, 25 bp, SARS Virus
tgtcggtcatttgtaactgttacga

SEQ ID NO: 101791 - DNA, 25 bp, SARS Virus
gtcggtcattttgaactgttacgaa

SEQ ID NO: 101792 - DNA, 25 bp, SARS Virus
tcggtcatttttgactgttacgaag

SEQ ID NO: 101793 - DNA, 25 bp, SARS Virus
cggtcatttttagctgttacgaaga

SEQ ID NO: 101794 - DNA, 25 bp, SARS Virus
ggtcatttttaagtgttacgaagag

SEQ ID NO: 101795 - DNA, 25 bp, SARS Virus
gtcatttttaacggttacgaagagg

SEQ ID NO: 101796 - DNA, 25 bp, SARS Virus
tcatttttaactgttacgaagagga

SEQ ID NO: 101797 - DNA, 25 bp, SARS Virus
catttttaactggtacgaagaggac

SEQ ID NO: 101798 - DNA, 25 bp, SARS Virus
atttttaactgtgacgaagaggacg

SEQ ID NO: 101799 - DNA, 25 bp, SARS Virus
tttttaactgttgcgaagaggacgt

SEQ ID NO: 101800 - DNA, 25 bp, SARS Virus
ttttaactgttaggaagaggacgtt

SEQ ID NO: 101801 - DNA, 25 bp, SARS Virus
tttaactgttacgaagaggacgttc

SEQ ID NO: 101802 - DNA, 25 bp, SARS Virus
ttaactgttacggagaggacgttca

SEQ ID NO: 101803 - DNA, 25 bp, SARS Virus
taactgttacgaggaggacgttcat

SEQ ID NO: 101804 - DNA, 25 bp, SARS Virus
aactgttacgaagaggacgttcatg

SEQ ID NO: 101805 - DNA, 25 bp, SARS Virus
actgttacgaaggggacgttcatga

SEQ ID NO: 101806 - DNA, 25 bp, SARS Virus
ctgttacgaagaggacgttcatgac

SEQ ID NO: 101807 - DNA, 25 bp, SARS Virus
tgttacgaagaggacgttcatgaca

SEQ ID NO: 101808 - DNA, 25 bp, SARS Virus
gttacgaagagggcgttcatgacaa

SEQ ID NO: 101809 - DNA, 25 bp, SARS Virus
ttacgaagaggaggttcatgacaag

SEQ ID NO: 101810 - DNA, 25 bp, SARS Virus
tacgaagaggacgttcatgacaagt

SEQ ID NO: 101811 - DNA, 25 bp, SARS Virus
acgaagaggacggtcatgacaagta

SEQ ID NO: 101812 - DNA, 25 bp, SARS Virus
cgaagaggacgtgcatgacaagtac

SEQ ID NO: 101813 - DNA, 25 bp, SARS Virus
gaagaggacgttgatgacaagtacg

SEQ ID NO: 101814 - DNA, 25 bp, SARS Virus
aagaggacgttcgtgacaagtacga

SEQ ID NO: 101815 - DNA, 25 bp, SARS Virus
agaggacgttcaggacaagtacgat

SEQ ID NO: 101816 - DNA, 25 bp, SARS Virus
gaggacgttcatgacaagtacgatg

SEQ ID NO: 101817 - DNA, 25 bp, SARS Virus
aggacgttcatggcaagtacgatgt

SEQ ID NO: 101818 - DNA, 25 bp, SARS Virus
ggacgttcatgagaagtacgatgtc

SEQ ID NO: 101819 - DNA, 25 bp, SARS Virus
gacgttcatgacgagtacgatgtcg

SEQ ID NO: 101820 - DNA, 25 bp, SARS Virus
acgttcatgacaggtacgatgtcgt

SEQ ID NO: 101821 - DNA, 25 bp, SARS Virus
cgttcatgacaagtacgatgtcgtt

SEQ ID NO: 101822 - DNA, 25 bp, SARS Virus
gttcatgacaaggacgatgtcgttg

SEQ ID NO: 101823 - DNA, 25 bp, SARS Virus
ttcatgacaagtgcgatgtcgttgc

SEQ ID NO: 101824 - DNA, 25 bp, SARS Virus
tcatgacaagtaggatgtcgttgct

SEQ ID NO: 101825 - DNA, 25 bp, SARS Virus
catgacaagtacgatgtcgttgcta

SEQ ID NO: 101826 - DNA, 25 bp, SARS Virus
atgacaagtacggtgtcgttgctat

SEQ ID NO: 101827 - DNA, 25 bp, SARS Virus
tgacaagtacgaggtcgttgctatg

SEQ ID NO: 101828 - DNA, 25 bp, SARS Virus
gacaagtacgatgtcgttgctatgg

SEQ ID NO: 101829 - DNA, 25 bp, SARS Virus
acaagtacgatggcgttgctatggc

SEQ ID NO: 101830 - DNA, 25 bp, SARS Virus
caagtacgatgtggttgctatggcg

SEQ ID NO: 101831 - DNA, 25 bp, SARS Virus
aagtacgatgtcgttgctatggcga

SEQ ID NO: 101832 - DNA, 25 bp, SARS Virus
agtacgatgtcggtgctatggcgat

SEQ ID NO: 101833 - DNA, 25 bp, SARS Virus
gtacgatgtcgtggctatggcgatg

SEQ ID NO: 101834 - DNA, 25 bp, SARS Virus
tacgatgtcgttgctatggcgatgt

SEQ ID NO: 101835 - DNA, 25 bp, SARS Virus
acgatgtcgttggtatggcgatgtt

SEQ ID NO: 101836 - DNA, 25 bp, SARS Virus
cgatgtcgttgcgatggcgatgttc

SEQ ID NO: 101837 - DNA, 25 bp, SARS Virus
gatgtcgttgctgtggcgatgttcg

SEQ ID NO: 101838 - DNA, 25 bp, SARS Virus
atgtcgttgctagggcgatgttcgg

SEQ ID NO: 101839 - DNA, 25 bp, SARS Virus
tgtcgttgctatggcgatgttcgga

SEQ ID NO: 101840 - DNA, 25 bp, SARS Virus
gtcgttgctatggcgatgttcggag

SEQ ID NO: 101841 - DNA, 25 bp, SARS Virus
tcgttgctatggggatgttcggagt

SEQ ID NO: 101842 - DNA, 25 bp, SARS Virus
cgttgctatggcgatgttcggagtg

SEQ ID NO: 101843 - DNA, 25 bp, SARS Virus
gttgctatggcggtgttcggagtga

SEQ ID NO: 101844 - DNA, 25 bp, SARS Virus
ttgctatggcgaggttcggagtgag

SEQ ID NO: 101845 - DNA, 25 bp, SARS Virus
tgctatggcgatgttcggagtgagg

SEQ ID NO: 101846 - DNA, 25 bp, SARS Virus
gctatggcgatggtcggagtgaggg

SEQ ID NO: 101847 - DNA, 25 bp, SARS Virus
ctatggcgatgtgcggagtgaggga

SEQ ID NO: 101848 - DNA, 25 bp, SARS Virus
tatggcgatgttgggagtgagggaa

SEQ ID NO: 101849 - DNA, 25 bp, SARS Virus
atggcgatgttcggagtgagggaaa

SEQ ID NO: 101850 - DNA, 25 bp, SARS Virus
tggcgatgttcggagtgagggaaag

SEQ ID NO: 101851 - DNA, 25 bp, SARS Virus
ggcgatgttcggggtgagggaaagc

SEQ ID NO: 101852 - DNA, 25 bp, SARS Virus
gcgatgttcggagtgagggaaagcc

SEQ ID NO: 101853 - DNA, 25 bp, SARS Virus
cgatgttcggagggagggaaagcct

SEQ ID NO: 101854 - DNA, 25 bp, SARS Virus
gatgttcggagtgagggaaagccta

SEQ ID NO: 101855 - DNA, 25 bp, SARS Virus
atgttcggagtgggggaaagcctac

SEQ ID NO: 101856 - DNA, 25 bp, SARS Virus
tgttcggagtgagggaaagcctacc

SEQ ID NO: 101857 - DNA, 25 bp, SARS Virus
gttcggagtgagggaaagcctaccg

SEQ ID NO: 101858 - DNA, 25 bp, SARS Virus
ttcggagtgagggaaagcctaccga

SEQ ID NO: 101859 - DNA, 25 bp, SARS Virus
tcggagtgaggggaagcctaccgaa

SEQ ID NO: 101860 - DNA, 25 bp, SARS Virus
cggagtgagggagagcctaccgaac

SEQ ID NO: 101861 - DNA, 25 bp, SARS Virus
ggagtgagggaaggcctaccgaaca

SEQ ID NO: 101862 - DNA, 25 bp, SARS Virus
gagtgagggaaagcctaccgaacaa

SEQ ID NO: 101863 - DNA, 25 bp, SARS Virus
agtgagggaaaggctaccgaacaat

SEQ ID NO: 101864 - DNA, 25 bp, SARS Virus
gtgagggaaagcgtaccgaacaata

SEQ ID NO: 101865 - DNA, 25 bp, SARS Virus
tgagggaaagccgaccgaacaataa

SEQ ID NO: 101866 - DNA, 25 bp, SARS Virus
gagggaaagcctgccgaacaataac

SEQ ID NO: 101867 - DNA, 25 bp, SARS Virus
agggaaagcctagcgaacaataacc

SEQ ID NO: 101868 - DNA, 25 bp, SARS Virus
gggaaagcctacggaacaataaccg

SEQ ID NO: 101869 - DNA, 25 bp, SARS Virus
ggaaagcctaccgaacaataaccgc

SEQ ID NO: 101870 - DNA, 25 bp, SARS Virus
gaaagcctaccggacaataaccgca

SEQ ID NO: 101871 - DNA, 25 bp, SARS Virus
aaagcctaccgagcaataaccgcaa

SEQ ID NO: 101872 - DNA, 25 bp, SARS Virus
aagcctaccgaagaataaccgcaac

SEQ ID NO: 101873 - DNA, 25 bp, SARS Virus
agcctaccgaacgataaccgcaacg

SEQ ID NO: 101874 - DNA, 25 bp, SARS Virus
gcctaccgaacagtaaccgcaacgt

SEQ ID NO: 101875 - DNA, 25 bp, SARS Virus
cctaccgaacaagaaccgcaacgta

SEQ ID NO: 101876 - DNA, 25 bp, SARS Virus
ctaccgaacaatgaccgcaacgtaa

SEQ ID NO: 101877 - DNA, 25 bp, SARS Virus
taccgaacaatagccgcaacgtaaa

SEQ ID NO: 101878 - DNA, 25 bp, SARS Virus
accgaacaataagcgcaacgtaaag

SEQ ID NO: 101879 - DNA, 25 bp, SARS Virus
ccgaacaataacggcaacgtaaaga

SEQ ID NO: 101880 - DNA, 25 bp, SARS Virus
cgaacaataaccgcaacgtaaagaa

SEQ ID NO: 101881 - DNA, 25 bp, SARS Virus
gaacaataaccggaacgtaaagaac

SEQ ID NO: 101882 - DNA, 25 bp, SARS Virus
aacaataaccgcgacgtaaagaacg

SEQ ID NO: 101883 - DNA, 25 bp, SARS Virus
acaataaccgcagcgtaaagaacga

SEQ ID NO: 101884 - DNA, 25 bp, SARS Virus
caataaccgcaaggtaaagaacgac

SEQ ID NO: 101885 - DNA, 25 bp, SARS Virus
aataaccgcaacgtaaagaacgaca

SEQ ID NO: 101886 - DNA, 25 bp, SARS Virus
ataaccgcaacggaaagaacgacaa

SEQ ID NO: 101887 - DNA, 25 bp, SARS Virus
taaccgcaacgtgaagaacgacaaa

SEQ ID NO: 101888 - DNA, 25 bp, SARS Virus
aaccgcaacgtagagaacgacaaaa

SEQ ID NO: 101889 - DNA, 25 bp, SARS Virus
accgcaacgtaaggaacgacaaaaa

SEQ ID NO: 101890 - DNA, 25 bp, SARS Virus
ccgcaacgtaaagaacgacaaaaag

SEQ ID NO: 101891 - DNA, 25 bp, SARS Virus
cgcaacgtaaaggacgacaaaaagt

SEQ ID NO: 101892 - DNA, 25 bp, SARS Virus
gcaacgtaaagagcgacaaaaagtc

SEQ ID NO: 101893 - DNA, 25 bp, SARS Virus
caacgtaaagaaggacaaaaagtct

SEQ ID NO: 101894 - DNA, 25 bp, SARS Virus
aacgtaaagaacgacaaaaagtctc

SEQ ID NO: 101895 - DNA, 25 bp, SARS Virus
acgtaaagaacggcaaaaagtctcg

SEQ ID NO: 101896 - DNA, 25 bp, SARS Virus
cgtaaagaacgagaaaaagtctcgc

SEQ ID NO: 101897 - DNA, 25 bp, SARS Virus
gtaaagaacgacgaaaagtctcgcg

SEQ ID NO: 101898 - DNA, 25 bp, SARS Virus
taaagaacgacagaaagtctcgcga

SEQ ID NO: 101899 - DNA, 25 bp, SARS Virus
aaagaacgacaagaagtctcgcgat

SEQ ID NO: 101900 - DNA, 25 bp, SARS Virus
aagaacgacaaagagtctcgcgatg

SEQ ID NO: 101901 - DNA, 25 bp, SARS Virus
agaacgacaaaaggtctcgcgatgg

SEQ ID NO: 101902 - DNA, 25 bp, SARS Virus
gaacgacaaaaagtctcgcgatggt

SEQ ID NO: 101903 - DNA, 25 bp, SARS Virus
aacgacaaaaaggctcgcgatggtt

SEQ ID NO: 101904 - DNA, 25 bp, SARS Virus
acgacaaaaagtgtcgcgatggttt

SEQ ID NO: 101905 - DNA, 25 bp, SARS Virus
cgacaaaaagtcgcgcgatggtttt

SEQ ID NO: 101906 - DNA, 25 bp, SARS Virus
gacaaaaagtctggcgatggtttta

SEQ ID NO: 101907 - DNA, 25 bp, SARS Virus
acaaaaagtctcgcgatggttttat

SEQ ID NO: 101908 - DNA, 25 bp, SARS Virus
caaaaagtctcgggatggttttatt

SEQ ID NO: 101909 - DNA, 25 bp, SARS Virus
aaaaagtctcgcgatggttttatta

SEQ ID NO: 101910 - DNA, 25 bp, SARS Virus
aaaagtctcgcggtggttttattaa

SEQ ID NO: 101911 - DNA, 25 bp, SARS Virus
aaagtctcgcgagggttttattaac

SEQ ID NO: 101912 - DNA, 25 bp, SARS Virus
aagtctcgcgatggttttattaacg

SEQ ID NO: 101913 - DNA, 25 bp, SARS Virus
agtctcgcgatggttttattaacgc

SEQ ID NO: 101914 - DNA, 25 bp, SARS Virus
gtctcgcgatgggtttattaacgcg

SEQ ID NO: 101915 - DNA, 25 bp, SARS Virus
tctcgcgatggtgttattaacgcga

SEQ ID NO: 101916 - DNA, 25 bp, SARS Virus
ctcgcgatggttgtattaacgcgag

SEQ ID NO: 101917 - DNA, 25 bp, SARS Virus
tcgcgatggtttgattaacgcgagt

SEQ ID NO: 101918 - DNA, 25 bp, SARS Virus
cgcgatggttttgttaacgcgagtt

SEQ ID NO: 101919 - DNA, 25 bp, SARS Virus
gcgatggttttagtaacgcgagtta

SEQ ID NO: 101920 - DNA, 25 bp, SARS Virus
cgatggttttatgaacgcgagttat

SEQ ID NO: 101921 - DNA, 25 bp, SARS Virus
gatggttttattgacgcgagttatt

SEQ ID NO: 101922 - DNA, 25 bp, SARS Virus
atggttttattagcgcgagttattt

SEQ ID NO: 101923 - DNA, 25 bp, SARS Virus
tggttttattaaggcgagttatttt

SEQ ID NO: 101924 - DNA, 25 bp, SARS Virus
ggttttattaacgcgagttattttc

SEQ ID NO: 101925 - DNA, 25 bp, SARS Virus
gttttattaacgggagttattttct

SEQ ID NO: 101926 - DNA, 25 bp, SARS Virus
ttttattaacgcgagttattttcta

SEQ ID NO: 101927 - DNA, 25 bp, SARS Virus
tttattaacgcgggttattttctac

SEQ ID NO: 101928 - DNA, 25 bp, SARS Virus
ttattaacgcgagttattttctacc

SEQ ID NO: 101929 - DNA, 25 bp, SARS Virus
tattaacgcgaggtattttctaccg

SEQ ID NO: 101930 - DNA, 25 bp, SARS Virus
attaacgcgagtgattttctaccgt

SEQ ID NO: 101931 - DNA, 25 bp, SARS Virus
ttaacgcgagttgttttctaccgtc

SEQ ID NO: 101932 - DNA, 25 bp, SARS Virus
taacgcgagttagtttctaccgtcg

SEQ ID NO: 101933 - DNA, 25 bp, SARS Virus
aacgcgagttatgttctaccgtcga

SEQ ID NO: 101934 - DNA, 25 bp, SARS Virus
acgcgagttattgtctaccgtcgat

SEQ ID NO: 101935 - DNA, 25 bp, SARS Virus
cgcgagttatttgctaccgtcgatc

SEQ ID NO: 101936 - DNA, 25 bp, SARS Virus
gcgagttattttgtaccgtcgatcg

SEQ ID NO: 101937 - DNA, 25 bp, SARS Virus
cgagttattttcgaccgtcgatcgg

SEQ ID NO: 101938 - DNA, 25 bp, SARS Virus
gagttattttctgccgtcgatcggg

SEQ ID NO: 101939 - DNA, 25 bp, SARS Virus
agttattttctagcgtcgatcggga

SEQ ID NO: 101940 - DNA, 25 bp, SARS Virus
gttattttctacggtcgatcgggaa

SEQ ID NO: 101941 - DNA, 25 bp, SARS Virus
ttattttctaccgtcgatcgggaaa

SEQ ID NO: 101942 - DNA, 25 bp, SARS Virus
tattttctaccggcgatcgggaaat

SEQ ID NO: 101943 - DNA, 25 bp, SARS Virus
attttctaccgtggatcgggaaata

SEQ ID NO: 101944 - DNA, 25 bp, SARS Virus
ttttctaccgtcgatcgggaaatat

SEQ ID NO: 101945 - DNA, 25 bp, SARS Virus
tttctaccgtcggtcgggaaatatt

SEQ ID NO: 101946 - DNA, 25 bp, SARS Virus
ttctaccgtcgagcgggaaatattc

SEQ ID NO: 101947 - DNA, 25 bp, SARS Virus
tctaccgtcgatggggaaatattcc

SEQ ID NO: 101948 - DNA, 25 bp, SARS Virus
ctaccgtcgatcgggaaatattccc

SEQ ID NO: 101949 - DNA, 25 bp, SARS Virus
taccgtcgatcgggaaatattcccg

SEQ ID NO: 101950 - DNA, 25 bp, SARS Virus
accgtcgatcgggaaatattcccga

SEQ ID NO: 101951 - DNA, 25 bp, SARS Virus
ccgtcgatcggggaatattcccgaa

SEQ ID NO: 101952 - DNA, 25 bp, SARS Virus
cgtcgatcgggagatattcccgaag

SEQ ID NO: 101953 - DNA, 25 bp, SARS Virus
gtcgatcgggaagtattcccgaagg

SEQ ID NO: 101954 - DNA, 25 bp, SARS Virus
tcgatcgggaaagattcccgaaggt

SEQ ID NO: 101955 - DNA, 25 bp, SARS Virus
cgatcgggaaatgttcccgaaggtc

SEQ ID NO: 101956 - DNA, 25 bp, SARS Virus
gatcgggaaatagtcccgaaggtca

SEQ ID NO: 101957 - DNA, 25 bp, SARS Virus
atcgggaaatatgcccgaaggtcaa

SEQ ID NO: 101958 - DNA, 25 bp, SARS Virus
tcgggaaatattgccgaaggtcaag

SEQ ID NO: 101959 - DNA, 25 bp, SARS Virus
cgggaaatattcgcgaaggtcaagt

SEQ ID NO: 101960 - DNA, 25 bp, SARS Virus
gggaaatattccggaaggtcaagta

SEQ ID NO: 101961 - DNA, 25 bp, SARS Virus
ggaaatattcccgaaggtcaagtaa

SEQ ID NO: 101962 - DNA, 25 bp, SARS Virus
gaaatattcccggaggtcaagtaaa

SEQ ID NO: 101963 - DNA, 25 bp, SARS Virus
aaatattcccgagggtcaagtaaac

SEQ ID NO: 101964 - DNA, 25 bp, SARS Virus
aatattcccgaaggtcaagtaaacg

SEQ ID NO: 101965 - DNA, 25 bp, SARS Virus
atattcccgaaggtcaagtaaacgt

SEQ ID NO: 101966 - DNA, 25 bp, SARS Virus
tattcccgaagggcaagtaaacgtt

SEQ ID NO: 101967 - DNA, 25 bp, SARS Virus
attcccgaaggtgaagtaaacgtta

SEQ ID NO: 101968 - DNA, 25 bp, SARS Virus
ttcccgaaggtcgagtaaacgttaa

SEQ ID NO: 101969 - DNA, 25 bp, SARS Virus
tcccgaaggtcaggtaaacgttaaa

SEQ ID NO: 101970 - DNA, 25 bp, SARS Virus
cccgaaggtcaagtaaacgttaaat

SEQ ID NO: 101971 - DNA, 25 bp, SARS Virus
ccgaaggtcaaggaaacgttaaatg

SEQ ID NO: 101972 - DNA, 25 bp, SARS Virus
cgaaggtcaagtgaacgttaaatga

SEQ ID NO: 101973 - DNA, 25 bp, SARS Virus
gaaggtcaagtagacgttaaatgac

SEQ ID NO: 101974 - DNA, 25 bp, SARS Virus
aaggtcaagtaagcgttaaatgacg

SEQ ID NO: 101975 - DNA, 25 bp, SARS Virus
aggtcaagtaaaggttaaatgacga

SEQ ID NO: 101976 - DNA, 25 bp, SARS Virus
ggtcaagtaaacgttaaatgacgac

SEQ ID NO: 101977 - DNA, 25 bp, SARS Virus
gtcaagtaaacggtaaatgacgacg

SEQ ID NO: 101978 - DNA, 25 bp, SARS Virus
tcaagtaaacgtgaaatgacgacga

SEQ ID NO: 101979 - DNA, 25 bp, SARS Virus
caagtaaacgttgaatgacgacgat

SEQ ID NO: 101980 - DNA, 25 bp, SARS Virus
aagtaaacgttagatgacgacgata

SEQ ID NO: 101981 - DNA, 25 bp, SARS Virus
agtaaacgttaagtgacgacgataa

SEQ ID NO: 101982 - DNA, 25 bp, SARS Virus
gtaaacgttaaaggacgacgataaa

SEQ ID NO: 101983 - DNA, 25 bp, SARS Virus
taaacgttaaatgacgacgataaac

SEQ ID NO: 101984 - DNA, 25 bp, SARS Virus
aaacgttaaatggcgacgataaaca

SEQ ID NO: 101985 - DNA, 25 bp, SARS Virus
aacgttaaatgaggacgataaacaa

SEQ ID NO: 101986 - DNA, 25 bp, SARS Virus
acgttaaatgacgacgataaacaat

SEQ ID NO: 101987 - DNA, 25 bp, SARS Virus
cgttaaatgacggcgataaacaatg

SEQ ID NO: 101988 - DNA, 25 bp, SARS Virus
gttaaatgacgaggataaacaatgg

SEQ ID NO: 101989 - DNA, 25 bp, SARS Virus
ttaaatgacgacgataaacaatggt

SEQ ID NO: 101990 - DNA, 25 bp, SARS Virus
taaatgacgacggtaaacaatggta

SEQ ID NO: 101991 - DNA, 25 bp, SARS Virus
aaatgacgacgagaaacaatggtag

SEQ ID NO: 101992 - DNA, 25 bp, SARS Virus
aatgacgacgatgaacaatggtaga

SEQ ID NO: 101993 - DNA, 25 bp, SARS Virus
atgacgacgatagacaatggtagat

SEQ ID NO: 101994 - DNA, 25 bp, SARS Virus
tgacgacgataagcaatggtagata

SEQ ID NO: 101995 - DNA, 25 bp, SARS Virus
gacgacgataaagaatggtagataa

SEQ ID NO: 101996 - DNA, 25 bp, SARS Virus
acgacgataaacgatggtagataag

SEQ ID NO: 101997 - DNA, 25 bp, SARS Virus
cgacgataaacagtggtagataagt

SEQ ID NO: 101998 - DNA, 25 bp, SARS Virus
gacgataaacaagggtagataagtg

SEQ ID NO: 101999 - DNA, 25 bp, SARS Virus
acgataaacaatggtagataagtgt

SEQ ID NO: 102000 - DNA, 25 bp, SARS Virus
cgataaacaatggtagataagtgta

SEQ ID NO: 102001 - DNA, 25 bp, SARS Virus
gataaacaatgggagataagtgtag

SEQ ID NO: 102002 - DNA, 25 bp, SARS Virus
ataaacaatggtggataagtgtaga

SEQ ID NO: 102003 - DNA, 25 bp, SARS Virus
taaacaatggtagataagtgtagaa

SEQ ID NO: 102004 - DNA, 25 bp, SARS Virus
aaacaatggtaggtaagtgtagaaa

SEQ ID NO: 102005 - DNA, 25 bp, SARS Virus
aacaatggtagagaagtgtagaaaa

SEQ ID NO: 102006 - DNA, 25 bp, SARS Virus
acaatggtagatgagtgtagaaaac

SEQ ID NO: 102007 - DNA, 25 bp, SARS Virus
caatggtagataggtgtagaaaacg

SEQ ID NO: 102008 - DNA, 25 bp, SARS Virus
aatggtagataagtgtagaaaacga

SEQ ID NO: 102009 - DNA, 25 bp, SARS Virus
atggtagataagggtagaaaacgaa

SEQ ID NO: 102010 - DNA, 25 bp, SARS Virus
tggtagataagtgtagaaaacgaac

SEQ ID NO: 102011 - DNA, 25 bp, SARS Virus
ggtagataagtggagaaaacgaaca

SEQ ID NO: 102012 - DNA, 25 bp, SARS Virus
gtagataagtgtggaaaacgaacag

SEQ ID NO: 102013 - DNA, 25 bp, SARS Virus
tagataagtgtagaaaacgaacagc

SEQ ID NO: 102014 - DNA, 25 bp, SARS Virus
agataagtgtaggaaacgaacagcg

SEQ ID NO: 102015 - DNA, 25 bp, SARS Virus
gataagtgtagagaacgaacagcga

SEQ ID NO: 102016 - DNA, 25 bp, SARS Virus
ataagtgtagaagacgaacagcgac

SEQ ID NO: 102017 - DNA, 25 bp, SARS Virus
taagtgtagaaagcgaacagcgacg

SEQ ID NO: 102018 - DNA, 25 bp, SARS Virus
aagtgtagaaaaggaacagcgacgt

SEQ ID NO: 102019 - DNA, 25 bp, SARS Virus
agtgtagaaaacgaacagcgacgtc

SEQ ID NO: 102020 - DNA, 25 bp, SARS Virus
gtgtagaaaacggacagcgacgtcc

SEQ ID NO: 102021 - DNA, 25 bp, SARS Virus
tgtagaaaacgagcagcgacgtcca

SEQ ID NO: 102022 - DNA, 25 bp, SARS Virus
gtagaaaacgaagagcgacgtccat

SEQ ID NO: 102023 - DNA, 25 bp, SARS Virus
tagaaaacgaacggcgacgtccata

SEQ ID NO: 102024 - DNA, 25 bp, SARS Virus
agaaaacgaacagcgacgtccatac

SEQ ID NO: 102025 - DNA, 25 bp, SARS Virus
gaaaacgaacagggacgtccatacc

SEQ ID NO: 102026 - DNA, 25 bp, SARS Virus
aaaacgaacagcgacgtccatacct

SEQ ID NO: 102027 - DNA, 25 bp, SARS Virus
aaacgaacagcggcgtccatacctc

SEQ ID NO: 102028 - DNA, 25 bp, SARS Virus
aacgaacagcgaggtccatacctcc

SEQ ID NO: 102029 - DNA, 25 bp, SARS Virus
acgaacagcgacgtccatacctccg

SEQ ID NO: 102030 - DNA, 25 bp, SARS Virus
cgaacagcgacggccatacctccgc

SEQ ID NO: 102031 - DNA, 25 bp, SARS Virus
gaacagcgacgtgcatacctccgcg

SEQ ID NO: 102032 - DNA, 25 bp, SARS Virus
aacagcgacgtcgatacctccgcgt

SEQ ID NO: 102033 - DNA, 25 bp, SARS Virus
acagcgacgtccgtacctccgcgtt

SEQ ID NO: 102034 - DNA, 25 bp, SARS Virus
cagcgacgtccagacctccgcgtta

SEQ ID NO: 102035 - DNA, 25 bp, SARS Virus
agcgacgtccatgcctccgcgttaa

SEQ ID NO: 102036 - DNA, 25 bp, SARS Virus
gcgacgtccatagctccgcgttaaa

SEQ ID NO: 102037 - DNA, 25 bp, SARS Virus
cgacgtccatacgtccgcgttaaaa

SEQ ID NO: 102038 - DNA, 25 bp, SARS Virus
gacgtccataccgccgcgttaaaaa

SEQ ID NO: 102039 - DNA, 25 bp, SARS Virus
acgtccatacctgcgcgttaaaaac

SEQ ID NO: 102040 - DNA, 25 bp, SARS Virus
cgtccatacctcggcgttaaaaaca

SEQ ID NO: 102041 - DNA, 25 bp, SARS Virus
gtccatacctccgcgttaaaaacat

SEQ ID NO: 102042 - DNA, 25 bp, SARS Virus
tccatacctccgggttaaaaacatg

SEQ ID NO: 102043 - DNA, 25 bp, SARS Virus
ccatacctccgcgttaaaaacatgg

SEQ ID NO: 102044 - DNA, 25 bp, SARS Virus
catacctccgcggtaaaaacatgga

SEQ ID NO: 102045 - DNA, 25 bp, SARS Virus
atacctccgcgtgaaaaacatggag

SEQ ID NO: 102046 - DNA, 25 bp, SARS Virus
tacctccgcgttgaaaacatggaga

SEQ ID NO: 102047 - DNA, 25 bp, SARS Virus
acctccgcgttagaaacatggagat

SEQ ID NO: 102048 - DNA, 25 bp, SARS Virus
cctccgcgttaagaacatggagata

SEQ ID NO: 102049 - DNA, 25 bp, SARS Virus
ctccgcgttaaagacatggagatac

SEQ ID NO: 102050 - DNA, 25 bp, SARS Virus
tccgcgttaaaagcatggagatacg

SEQ ID NO: 102051 - DNA, 25 bp, SARS Virus
ccgcgttaaaaagatggagatacgg

SEQ ID NO: 102052 - DNA, 25 bp, SARS Virus
cgcgttaaaaacgtggagatacgga

SEQ ID NO: 102053 - DNA, 25 bp, SARS Virus
gcgttaaaaacagggagatacggaa

SEQ ID NO: 102054 - DNA, 25 bp, SARS Virus
cgttaaaaacatggagatacggaac

SEQ ID NO: 102055 - DNA, 25 bp, SARS Virus
gttaaaaacatggagatacggaact

SEQ ID NO: 102056 - DNA, 25 bp, SARS Virus
ttaaaaacatggggatacggaacta

SEQ ID NO: 102057 - DNA, 25 bp, SARS Virus
taaaaacatggagatacggaactat

SEQ ID NO: 102058 - DNA, 25 bp, SARS Virus
aaaaacatggaggtacggaactata

SEQ ID NO: 102059 - DNA, 25 bp, SARS Virus
aaaacatggagagacggaactatat

SEQ ID NO: 102060 - DNA, 25 bp, SARS Virus
aaacatggagatgcggaactatata

SEQ ID NO: 102061 - DNA, 25 bp, SARS Virus
aacatggagatagggaactatataa

SEQ ID NO: 102062 - DNA, 25 bp, SARS Virus
acatggagatacggaactatataaa

SEQ ID NO: 102063 - DNA, 25 bp, SARS Virus
catggagatacggaactatataaaa

SEQ ID NO: 102064 - DNA, 25 bp, SARS Virus
atggagatacgggactatataaaag

SEQ ID NO: 102065 - DNA, 25 bp, SARS Virus
tggagatacggagctatataaaaga

SEQ ID NO: 102066 - DNA, 25 bp, SARS Virus
ggagatacggaagtatataaaagat

SEQ ID NO: 102067 - DNA, 25 bp, SARS Virus
gagatacggaacgatataaaagatg

SEQ ID NO: 102068 - DNA, 25 bp, SARS Virus
agatacggaactgtataaaagatgt

SEQ ID NO: 102069 - DNA, 25 bp, SARS Virus
gatacggaactagataaaagatgtt

SEQ ID NO: 102070 - DNA, 25 bp, SARS Virus
atacggaactatgtaaaagatgtta

SEQ ID NO: 102071 - DNA, 25 bp, SARS Virus
tacggaactatagaaaagatgttac

SEQ ID NO: 102072 - DNA, 25 bp, SARS Virus
acggaactatatgaaagatgttacg

SEQ ID NO: 102073 - DNA, 25 bp, SARS Virus
cggaactatatagaagatgttacgt

SEQ ID NO: 102074 - DNA, 25 bp, SARS Virus
ggaactatataagagatgttacgta

SEQ ID NO: 102075 - DNA, 25 bp, SARS Virus
gaactatataaaggatgttacgtag

SEQ ID NO: 102076 - DNA, 25 bp, SARS Virus
aactatataaaagatgttacgtagt

SEQ ID NO: 102077 - DNA, 25 bp, SARS Virus
actatataaaaggtgttacgtagtt

SEQ ID NO: 102078 - DNA, 25 bp, SARS Virus
ctatataaaagaggttacgtagttg

SEQ ID NO: 102079 - DNA, 25 bp, SARS Virus
tatataaaagatgttacgtagttgc

SEQ ID NO: 102080 - DNA, 25 bp, SARS Virus
atataaaagatggtacgtagttgcg

SEQ ID NO: 102081 - DNA, 25 bp, SARS Virus
tataaaagatgtgacgtagttgcgt

SEQ ID NO: 102082 - DNA, 25 bp, SARS Virus
ataaaagatgttgcgtagttgcgta

SEQ ID NO: 102083 - DNA, 25 bp, SARS Virus
taaaagatgttaggtagttgcgtac

SEQ ID NO: 102084 - DNA, 25 bp, SARS Virus
aaaagatgttacgtagttgcgtaca

SEQ ID NO: 102085 - DNA, 25 bp, SARS Virus
aaagatgttacggagttgcgtacat

SEQ ID NO: 102086 - DNA, 25 bp, SARS Virus
aagatgttacgtggttgcgtacatc

SEQ ID NO: 102087 - DNA, 25 bp, SARS Virus
agatgttacgtagttgcgtacatct

SEQ ID NO: 102088 - DNA, 25 bp, SARS Virus
gatgttacgtaggtgcgtacatctt

SEQ ID NO: 102089 - DNA, 25 bp, SARS Virus
atgttacgtagtggcgtacatctta

SEQ ID NO: 102090 - DNA, 25 bp, SARS Virus
tgttacgtagttgcgtacatcttaa

SEQ ID NO: 102091 - DNA, 25 bp, SARS Virus
gttacgtagttgggtacatcttaat

SEQ ID NO: 102092 - DNA, 25 bp, SARS Virus
ttacgtagttgcgtacatcttaata

SEQ ID NO: 102093 - DNA, 25 bp, SARS Virus
tacgtagttgcggacatcttaataa

SEQ ID NO: 102094 - DNA, 25 bp, SARS Virus
acgtagttgcgtgcatcttaataat

SEQ ID NO: 102095 - DNA, 25 bp, SARS Virus
cgtagttgcgtagatcttaataata

SEQ ID NO: 102096 - DNA, 25 bp, SARS Virus
gtagttgcgtacgtcttaataatac

SEQ ID NO: 102097 - DNA, 25 bp, SARS Virus
tagttgcgtacagcttaataatact

SEQ ID NO: 102098 - DNA, 25 bp, SARS Virus
agttgcgtacatgttaataatactc

SEQ ID NO: 102099 - DNA, 25 bp, SARS Virus
gttgcgtacatcgtaataatactct

SEQ ID NO: 102100 - DNA, 25 bp, SARS Virus
ttgcgtacatctgaataatactcta

SEQ ID NO: 102101 - DNA, 25 bp, SARS Virus
tgcgtacatcttgataatactctac

SEQ ID NO: 102102 - DNA, 25 bp, SARS Virus
gcgtacatcttagtaatactctaca

SEQ ID NO: 102103 - DNA, 25 bp, SARS Virus
cgtacatcttaagaatactctacaa

SEQ ID NO: 102104 - DNA, 25 bp, SARS Virus
gtacatcttaatgatactctacaac

SEQ ID NO: 102105 - DNA, 25 bp, SARS Virus
tacatcttaatagtactctacaacc

SEQ ID NO: 102106 - DNA, 25 bp, SARS Virus
acatcttaataagactctacaaccg

SEQ ID NO: 102107 - DNA, 25 bp, SARS Virus
catcttaataatgctctacaaccga

SEQ ID NO: 102108 - DNA, 25 bp, SARS Virus
atcttaataatagtctacaaccgaa

SEQ ID NO: 102109 - DNA, 25 bp, SARS Virus
tcttaataatacgctacaaccgaaa

SEQ ID NO: 102110 - DNA, 25 bp, SARS Virus
cttaataatactgtacaaccgaaac

SEQ ID NO: 102111 - DNA, 25 bp, SARS Virus
ttaataatactcgacaaccgaaaca

SEQ ID NO: 102112 - DNA, 25 bp, SARS Virus
taataatactctgcaaccgaaacaa

SEQ ID NO: 102113 - DNA, 25 bp, SARS Virus
aataatactctagaaccgaaacaac

SEQ ID NO: 102114 - DNA, 25 bp, SARS Virus
ataatactctacgaccgaaacaacc

SEQ ID NO: 102115 - DNA, 25 bp, SARS Virus
taatactctacagccgaaacaacct

SEQ ID NO: 102116 - DNA, 25 bp, SARS Virus
aatactctacaagcgaaacaacctt

SEQ ID NO: 102117 - DNA, 25 bp, SARS Virus
atactctacaacggaaacaaccttc

SEQ ID NO: 102118 - DNA, 25 bp, SARS Virus
tactctacaaccgaaacaaccttca

SEQ ID NO: 102119 - DNA, 25 bp, SARS Virus
actctacaaccggaacaaccttcac

SEQ ID NO: 102120 - DNA, 25 bp, SARS Virus
ctctacaaccgagacaaccttcacg

SEQ ID NO: 102121 - DNA, 25 bp, SARS Virus
acaacgtcaacgtagttcccacgta

SEQ ID NO: 102122 - DNA, 25 bp, SARS Virus
caacgtcaacggtgttcccacgtac

SEQ ID NO: 102123 - DNA, 25 bp, SARS Virus
aacgtcaacggatttcccacgtacg

SEQ ID NO: 102124 - DNA, 25 bp, SARS Virus
acgtcaacggagttcccacgtacga

SEQ ID NO: 102125 - DNA, 25 bp, SARS Virus
cgtcaacggagttcccacgtacgag

SEQ ID NO: 102126 - DNA, 25 bp, SARS Virus
gtcaacggagtttccacgtacgaga

SEQ ID NO: 102127 - DNA, 25 bp, SARS Virus
tcaacggagttctcacgtacgagaa

SEQ ID NO: 102128 - DNA, 25 bp, SARS Virus
caacggagttcctacgtacgagaac

SEQ ID NO: 102129 - DNA, 25 bp, SARS Virus
aacggagttccctcgtacgagaaca

SEQ ID NO: 102130 - DNA, 25 bp, SARS Virus
acggagttcccatgtacgagaacac

SEQ ID NO: 102131 - DNA, 25 bp, SARS Virus
cggagttcccacttacgagaacacc

SEQ ID NO: 102132 - DNA, 25 bp, SARS Virus
ggagttcccacgtacgagaacacca

SEQ ID NO: 102133 - DNA, 25 bp, SARS Virus
gagttcccacgttcgagaacaccaa

SEQ ID NO: 102134 - DNA, 25 bp, SARS Virus
agttcccacgtatgagaacaccaag

SEQ ID NO: 102135 - DNA, 25 bp, SARS Virus
gttcccacgtactagaacaccaaga

SEQ ID NO: 102136 - DNA, 25 bp, SARS Virus
ttcccacgtacgtgaacaccaagaa

SEQ ID NO: 102137 - DNA, 25 bp, SARS Virus
tcccacgtacgataacaccaagaac

SEQ ID NO: 102138 - DNA, 25 bp, SARS Virus
cccacgtacgagtacaccaagaacg

SEQ ID NO: 102139 - DNA, 25 bp, SARS Virus
ccacgtacgagatcaccaagaacga

SEQ ID NO: 102140 - DNA, 25 bp, SARS Virus
cacgtacgagaataccaagaacgac

SEQ ID NO: 102141 - DNA, 25 bp, SARS Virus
acgtacgagaactccaagaacgacg

SEQ ID NO: 102142 - DNA, 25 bp, SARS Virus
cgtacgagaacatcaagaacgacgt

SEQ ID NO: 102143 - DNA, 25 bp, SARS Virus
gtacgagaacactaagaacgacgtt

SEQ ID NO: 102144 - DNA, 25 bp, SARS Virus
tacgagaacacctagaacgacgttc

SEQ ID NO: 102145 - DNA, 25 bp, SARS Virus
acgagaacaccatgaacgacgttca

SEQ ID NO: 102146 - DNA, 25 bp, SARS Virus
cgagaacaccaataacgacgttcaa

SEQ ID NO: 102147 - DNA, 25 bp, SARS Virus
gagaacaccaagtacgacgttcaaa

SEQ ID NO: 102148 - DNA, 25 bp, SARS Virus
agaacaccaagatcgacgttcaaac

SEQ ID NO: 102149 - DNA, 25 bp, SARS Virus
gaacaccaagaatgacgttcaaact

SEQ ID NO: 102150 - DNA, 25 bp, SARS Virus
aacaccaagaactacgttcaaacta

SEQ ID NO: 102151 - DNA, 25 bp, SARS Virus
acaccaagaacgtcgttcaaactac

SEQ ID NO: 102152 - DNA, 25 bp, SARS Virus
caccaagaacgatgttcaaactact

SEQ ID NO: 102153 - DNA, 25 bp, SARS Virus
accaagaacgactttcaaactactc

SEQ ID NO: 102154 - DNA, 25 bp, SARS Virus
ccaagaacgacgttcaaactactcc

SEQ ID NO: 102155 - DNA, 25 bp, SARS Virus
caagaacgacgttcaaactactcct

SEQ ID NO: 102156 - DNA, 25 bp, SARS Virus
aagaacgacgtttaaactactccta

SEQ ID NO: 102157 - DNA, 25 bp, SARS Virus
agaacgacgttctaactactcctac

SEQ ID NO: 102158 - DNA, 25 bp, SARS Virus
gaacgacgttcatactactcctact

SEQ ID NO: 102159 - DNA, 25 bp, SARS Virus
aacgacgttcaatctactcctactg

SEQ ID NO: 102160 - DNA, 25 bp, SARS Virus
acgacgttcaaattactcctactga

SEQ ID NO: 102161 - DNA, 25 bp, SARS Virus
cgacgttcaaactactcctactgag

SEQ ID NO: 102162 - DNA, 25 bp, SARS Virus
gacgttcaaacttctcctactgaga

SEQ ID NO: 102163 - DNA, 25 bp, SARS Virus
acgttcaaactattcctactgagac

SEQ ID NO: 102164 - DNA, 25 bp, SARS Virus
cgttcaaactactcctactgagact

SEQ ID NO: 102165 - DNA, 25 bp, SARS Virus
gttcaaactacttctactgagactc

SEQ ID NO: 102166 - DNA, 25 bp, SARS Virus
ttcaaactactcttactgagactcg

SEQ ID NO: 102167 - DNA, 25 bp, SARS Virus
tcaaactactcctactgagactcgg

SEQ ID NO: 102168 - DNA, 25 bp, SARS Virus
caaactactccttctgagactcggt

SEQ ID NO: 102169 - DNA, 25 bp, SARS Virus
aaactactcctattgagactcggtc

SEQ ID NO: 102170 - DNA, 25 bp, SARS Virus
aactactcctactgagactcggtca

SEQ ID NO: 102171 - DNA, 25 bp, SARS Virus
actactcctacttagactcggtcaa

SEQ ID NO: 102172 - DNA, 25 bp, SARS Virus
ctactcctactgtgactcggtcaag

SEQ ID NO: 102173 - DNA, 25 bp, SARS Virus
tactcctactgatactcggtcaaga

SEQ ID NO: 102174 - DNA, 25 bp, SARS Virus
actcctactgagtctcggtcaagag

SEQ ID NO: 102175 - DNA, 25 bp, SARS Virus
ctcctactgagattcggtcaagagt

SEQ ID NO: 102176 - DNA, 25 bp, SARS Virus
tcctactgagactcggtcaagagtt

SEQ ID NO: 102177 - DNA, 25 bp, SARS Virus
cctactgagacttggtcaagagttc

SEQ ID NO: 102178 - DNA, 25 bp, SARS Virus
ctactgagactctgtcaagagttcc

SEQ ID NO: 102179 - DNA, 25 bp, SARS Virus
tactgagactcgttcaagagttccc

SEQ ID NO: 102180 - DNA, 25 bp, SARS Virus
actgagactcggtcaagagttccca

SEQ ID NO: 102181 - DNA, 25 bp, SARS Virus
ctgagactcggttaagagttcccac

SEQ ID NO: 102182 - DNA, 25 bp, SARS Virus
tgagactcggtctagagttcccaca

SEQ ID NO: 102183 - DNA, 25 bp, SARS Virus
gagactcggtcatgagttcccacag

SEQ ID NO: 102184 - DNA, 25 bp, SARS Virus
agactcggtcaatagttcccacagt

SEQ ID NO: 102185 - DNA, 25 bp, SARS Virus
gactcggtcaagtgttcccacagtt

SEQ ID NO: 102186 - DNA, 25 bp, SARS Virus
actcggtcaagatttcccacagttt

SEQ ID NO: 102187 - DNA, 25 bp, SARS Virus
ctcggtcaagagttcccacagttta

SEQ ID NO: 102188 - DNA, 25 bp, SARS Virus
tcggtcaagagttcccacagtttaa

SEQ ID NO: 102189 - DNA, 25 bp, SARS Virus
cggtcaagagtttccacagtttaat

SEQ ID NO: 102190 - DNA, 25 bp, SARS Virus
ggtcaagagttctcacagtttaatg

SEQ ID NO: 102191 - DNA, 25 bp, SARS Virus
gtcaagagttcctacagtttaatgt

SEQ ID NO: 102192 - DNA, 25 bp, SARS Virus
tcaagagttccctcagtttaatgta

SEQ ID NO: 102193 - DNA, 25 bp, SARS Virus
caagagttcccatagtttaatgtaa

SEQ ID NO: 102194 - DNA, 25 bp, SARS Virus
aagagttcccactgtttaatgtaat

SEQ ID NO: 102195 - DNA, 25 bp, SARS Virus
agagttcccacattttaatgtaatg

SEQ ID NO: 102196 - DNA, 25 bp, SARS Virus
gagttcccacagtttaatgtaatgt

SEQ ID NO: 102197 - DNA, 25 bp, SARS Virus
agttcccacagtttaatgtaatgtg

SEQ ID NO: 102198 - DNA, 25 bp, SARS Virus
gttcccacagtttaatgtaatgtgt

SEQ ID NO: 102199 - DNA, 25 bp, SARS Virus
ttcccacagttttatgtaatgtgta

SEQ ID NO: 102200 - DNA, 25 bp, SARS Virus
tcccacagtttattgtaatgtgtat

SEQ ID NO: 102201 - DNA, 25 bp, SARS Virus
cccacagtttaatgtaatgtgtatt

SEQ ID NO: 102202 - DNA, 25 bp, SARS Virus
ccacagtttaatttaatgtgtattt

SEQ ID NO: 102203 - DNA, 25 bp, SARS Virus
cacagtttaatgtaatgtgtatttg

SEQ ID NO: 102204 - DNA, 25 bp, SARS Virus
acagtttaatgttatgtgtatttgc

SEQ ID NO: 102205 - DNA, 25 bp, SARS Virus
cagtttaatgtattgtgtatttgct

SEQ ID NO: 102206 - DNA, 25 bp, SARS Virus
agtttaatgtaatgtgtatttgctt

SEQ ID NO: 102207 - DNA, 25 bp, SARS Virus
gtttaatgtaatttgtatttgcttg

SEQ ID NO: 102208 - DNA, 25 bp, SARS Virus
tttaatgtaatgtgtatttgcttga

SEQ ID NO: 102209 - DNA, 25 bp, SARS Virus
ttaatgtaatgtttatttgcttgaa

SEQ ID NO: 102210 - DNA, 25 bp, SARS Virus
taatgtaatgtgtatttgcttgaat

SEQ ID NO: 102211 - DNA, 25 bp, SARS Virus
aatgtaatgtgtttttgcttgaata

SEQ ID NO: 102212 - DNA, 25 bp, SARS Virus
atgtaatgtgtatttgcttgaatac

SEQ ID NO: 102213 - DNA, 25 bp, SARS Virus
tgtaatgtgtatttgcttgaatacc

SEQ ID NO: 102214 - DNA, 25 bp, SARS Virus
gtaatgtgtatttgcttgaatacct

SEQ ID NO: 102215 - DNA, 25 bp, SARS Virus
taatgtgtattttcttgaataccta

SEQ ID NO: 102216 - DNA, 25 bp, SARS Virus
aatgtgtatttgtttgaatacctaa

SEQ ID NO: 102217 - DNA, 25 bp, SARS Virus
atgtgtatttgcttgaatacctaaa

SEQ ID NO: 102218 - DNA, 25 bp, SARS Virus
tgtgtatttgcttgaatacctaaac

SEQ ID NO: 102219 - DNA, 25 bp, SARS Virus
gtgtatttgctttaatacctaaaca

SEQ ID NO: 102220 - DNA, 25 bp, SARS Virus
tgtatttgcttgtatacctaaacaa

SEQ ID NO: 102221 - DNA, 25 bp, SARS Virus
gtatttgcttgattacctaaacaaa

SEQ ID NO: 102222 - DNA, 25 bp, SARS Virus
tatttgcttgaatacctaaacaaat

SEQ ID NO: 102223 - DNA, 25 bp, SARS Virus
atttgcttgaattcctaaacaaata

SEQ ID NO: 102224 - DNA, 25 bp, SARS Virus
tttgcttgaatatctaaacaaatac

SEQ ID NO: 102225 - DNA, 25 bp, SARS Virus
ttgcttgaatacttaaacaaatact

SEQ ID NO: 102226 - DNA, 25 bp, SARS Virus
tgcttgaatacctaaacaaatactc

SEQ ID NO: 102227 - DNA, 25 bp, SARS Virus
gcttgaataccttaacaaatactct

SEQ ID NO: 102228 - DNA, 25 bp, SARS Virus
cttgaatacctatacaaatactcta

SEQ ID NO: 102229 - DNA, 25 bp, SARS Virus
ttgaatacctaatcaaatactctaa

SEQ ID NO: 102230 - DNA, 25 bp, SARS Virus
tgaatacctaaataaatactctaaa

SEQ ID NO: 102231 - DNA, 25 bp, SARS Virus
gaatacctaaactaatactctaaaa

SEQ ID NO: 102232 - DNA, 25 bp, SARS Virus
aatacctaaacatatactctaaaaa

SEQ ID NO: 102233 - DNA, 25 bp, SARS Virus
atacctaaacaattactctaaaaaa

SEQ ID NO: 102234 - DNA, 25 bp, SARS Virus
tacctaaacaaatactctaaaaaat

SEQ ID NO: 102235 - DNA, 25 bp, SARS Virus
acctaaacaaattctctaaaaaatg

SEQ ID NO: 102236 - DNA, 25 bp, SARS Virus
cctaaacaaatattctaaaaaatga

SEQ ID NO: 102237 - DNA, 25 bp, SARS Virus
ctaaacaaatactctaaaaaatgag

SEQ ID NO: 102238 - DNA, 25 bp, SARS Virus
taaacaaatactttaaaaaatgaga

SEQ ID NO: 102239 - DNA, 25 bp, SARS Virus
aaacaaatactctaaaaaatgagaa

SEQ ID NO: 102240 - DNA, 25 bp, SARS Virus
aacaaatactcttaaaaatgagaat

SEQ ID NO: 102241 - DNA, 25 bp, SARS Virus
acaaatactctataaaatgagaatc

SEQ ID NO: 102242 - DNA, 25 bp, SARS Virus
caaatactctaataaatgagaatct

SEQ ID NO: 102243 - DNA, 25 bp, SARS Virus
aaatactctaaataatgagaatcta

SEQ ID NO: 102244 - DNA, 25 bp, SARS Virus
aatactctaaaatatgagaatctag

SEQ ID NO: 102245 - DNA, 25 bp, SARS Virus
atactctaaaaattgagaatctagt

SEQ ID NO: 102246 - DNA, 25 bp, SARS Virus
tactctaaaaaatgagaatctagtt

SEQ ID NO: 102247 - DNA, 25 bp, SARS Virus
actctaaaaaattagaatctagtta

SEQ ID NO: 102248 - DNA, 25 bp, SARS Virus
ctctaaaaaatgtgaatctagttaa

SEQ ID NO: 102249 - DNA, 25 bp, SARS Virus
tctaaaaaatgataatctagttaat

SEQ ID NO: 102250 - DNA, 25 bp, SARS Virus
ctaaaaaatgagtatctagttaatg

SEQ ID NO: 102251 - DNA, 25 bp, SARS Virus
taaaaaatgagattctagttaatga

SEQ ID NO: 102252 - DNA, 25 bp, SARS Virus
aaaaaatgagaatctagttaatgac

SEQ ID NO: 102253 - DNA, 25 bp, SARS Virus
aaaaatgagaatttagttaatgacg

SEQ ID NO: 102254 - DNA, 25 bp, SARS Virus
aaaatgagaatctagttaatgacgt

SEQ ID NO: 102255 - DNA, 25 bp, SARS Virus
aaatgagaatcttgttaatgacgtg

SEQ ID NO: 102256 - DNA, 25 bp, SARS Virus
aatgagaatctatttaatgacgtgt

SEQ ID NO: 102257 - DNA, 25 bp, SARS Virus
atgagaatctagttaatgacgtgtc

SEQ ID NO: 102258 - DNA, 25 bp, SARS Virus
tgagaatctagttaatgacgtgtcg

SEQ ID NO: 102259 - DNA, 25 bp, SARS Virus
gagaatctagtttatgacgtgtcgg

SEQ ID NO: 102260 - DNA, 25 bp, SARS Virus
agaatctagttattgacgtgtcggt

SEQ ID NO: 102261 - DNA, 25 bp, SARS Virus
gaatctagttaatgacgtgtcggtc

SEQ ID NO: 102262 - DNA, 25 bp, SARS Virus
aatctagttaattacgtgtcggtca

SEQ ID NO: 102263 - DNA, 25 bp, SARS Virus
atctagttaatgtcgtgtcggtcat

SEQ ID NO: 102264 - DNA, 25 bp, SARS Virus
tctagttaatgatgtgtcggtcatt

SEQ ID NO: 102265 - DNA, 25 bp, SARS Virus
ctagttaatgacttgtcggtcattt

SEQ ID NO: 102266 - DNA, 25 bp, SARS Virus
tagttaatgacgtgtcggtcatttt

SEQ ID NO: 102267 - DNA, 25 bp, SARS Virus
agttaatgacgtttcggtcattttt

SEQ ID NO: 102268 - DNA, 25 bp, SARS Virus
gttaatgacgtgtcggtcattttta

SEQ ID NO: 102269 - DNA, 25 bp, SARS Virus
ttaatgacgtgttggtcatttttaa

SEQ ID NO: 102270 - DNA, 25 bp, SARS Virus
taatgacgtgtctgtcatttttaac

SEQ ID NO: 102271 - DNA, 25 bp, SARS Virus
aatgacgtgtcgttcatttttaact

SEQ ID NO: 102272 - DNA, 25 bp, SARS Virus
atgacgtgtcggtcatttttaactg

SEQ ID NO: 102273 - DNA, 25 bp, SARS Virus
tgacgtgtcggttatttttaactgt

SEQ ID NO: 102274 - DNA, 25 bp, SARS Virus
gacgtgtcggtcttttttaactgtt

SEQ ID NO: 102275 - DNA, 25 bp, SARS Virus
acgtgtcggtcatttttaactgtta

SEQ ID NO: 102276 - DNA, 25 bp, SARS Virus
cgtgtcggtcatttttaactgttac

SEQ ID NO: 102277 - DNA, 25 bp, SARS Virus
gtgtcggtcatttttaactgttacg

SEQ ID NO: 102278 - DNA, 25 bp, SARS Virus
tgtcggtcatttttaactgttacga

SEQ ID NO: 102279 - DNA, 25 bp, SARS Virus
gtcggtcatttttaactgttacgaa

SEQ ID NO: 102280 - DNA, 25 bp, SARS Virus
tcggtcattttttactgttacgaag

SEQ ID NO: 102281 - DNA, 25 bp, SARS Virus
cggtcatttttatctgttacgaaga

SEQ ID NO: 102282 - DNA, 25 bp, SARS Virus
ggtcatttttaattgttacgaagag

SEQ ID NO: 102283 - DNA, 25 bp, SARS Virus
gtcatttttaactgttacgaagagg

SEQ ID NO: 102284 - DNA, 25 bp, SARS Virus
tcatttttaacttttacgaagagga

SEQ ID NO: 102285 - DNA, 25 bp, SARS Virus
catttttaactgttacgaagaggac

SEQ ID NO: 102286 - DNA, 25 bp, SARS Virus
atttttaactgttacgaagaggacg

SEQ ID NO: 102287 - DNA, 25 bp, SARS Virus
tttttaactgtttcgaagaggacgt

SEQ ID NO: 102288 - DNA, 25 bp, SARS Virus
ttttaactgttatgaagaggacgtt

SEQ ID NO: 102289 - DNA, 25 bp, SARS Virus
tttaactgttactaagaggacgttc

SEQ ID NO: 102290 - DNA, 25 bp, SARS Virus
ttaactgttacgtagaggacgttca

SEQ ID NO: 102291 - DNA, 25 bp, SARS Virus
taactgttacgatgaggacgttcat

SEQ ID NO: 102292 - DNA, 25 bp, SARS Virus
aactgttacgaataggacgttcatg

SEQ ID NO: 102293 - DNA, 25 bp, SARS Virus
actgttacgaagtggacgttcatga

SEQ ID NO: 102294 - DNA, 25 bp, SARS Virus
ctgttacgaagatgacgttcatgac

SEQ ID NO: 102295 - DNA, 25 bp, SARS Virus
tgttacgaagagtacgttcatgaca

SEQ ID NO: 102296 - DNA, 25 bp, SARS Virus
gttacgaagaggtcgttcatgacaa

SEQ ID NO: 102297 - DNA, 25 bp, SARS Virus
ttacgaagaggatgttcatgacaag

SEQ ID NO: 102298 - DNA, 25 bp, SARS Virus
tacgaagaggactttcatgacaagt

SEQ ID NO: 102299 - DNA, 25 bp, SARS Virus
acgaagaggacgttcatgacaagta

SEQ ID NO: 102300 - DNA, 25 bp, SARS Virus
cgaagaggacgttcatgacaagtac

SEQ ID NO: 102301 - DNA, 25 bp, SARS Virus
gaagaggacgtttatgacaagtacg

SEQ ID NO: 102302 - DNA, 25 bp, SARS Virus
aagaggacgttcttgacaagtacga

SEQ ID NO: 102303 - DNA, 25 bp, SARS Virus
agaggacgttcatgacaagtacgat

SEQ ID NO: 102304 - DNA, 25 bp, SARS Virus
gaggacgttcattacaagtacgatg

SEQ ID NO: 102305 - DNA, 25 bp, SARS Virus
aggacgttcatgtcaagtacgatgt

SEQ ID NO: 102306 - DNA, 25 bp, SARS Virus
ggacgttcatgataagtacgatgtc

SEQ ID NO: 102307 - DNA, 25 bp, SARS Virus
gacgttcatgactagtacgatgtcg

SEQ ID NO: 102308 - DNA, 25 bp, SARS Virus
acgttcatgacatgtacgatgtcgt

SEQ ID NO: 102309 - DNA, 25 bp, SARS Virus
cgttcatgacaattacgatgtcgtt

SEQ ID NO: 102310 - DNA, 25 bp, SARS Virus
gttcatgacaagtacgatgtcgttg

SEQ ID NO: 102311 - DNA, 25 bp, SARS Virus
ttcatgacaagttcgatgtcgttgc

SEQ ID NO: 102312 - DNA, 25 bp, SARS Virus
tcatgacaagtatgatgtcgttgct

SEQ ID NO: 102313 - DNA, 25 bp, SARS Virus
catgacaagtactatgtcgttgcta

SEQ ID NO: 102314 - DNA, 25 bp, SARS Virus
atgacaagtacgttgtcgttgctat

SEQ ID NO: 102315 - DNA, 25 bp, SARS Virus
tgacaagtacgatgtcgttgctatg

SEQ ID NO: 102316 - DNA, 25 bp, SARS Virus
gacaagtacgatttcgttgctatgg

SEQ ID NO: 102317 - DNA, 25 bp, SARS Virus
acaagtacgatgtcgttgctatggc

SEQ ID NO: 102318 - DNA, 25 bp, SARS Virus
caagtacgatgttgttgctatggcg

SEQ ID NO: 102319 - DNA, 25 bp, SARS Virus
aagtacgatgtctttgctatggcga

SEQ ID NO: 102320 - DNA, 25 bp, SARS Virus
agtacgatgtcgttgctatggcgat

SEQ ID NO: 102321 - DNA, 25 bp, SARS Virus
gtacgatgtcgttgctatggcgatg

SEQ ID NO: 102322 - DNA, 25 bp, SARS Virus
tacgatgtcgtttctatggcgatgt

SEQ ID NO: 102323 - DNA, 25 bp, SARS Virus
acgatgtcgttgttatggcgatgtt

SEQ ID NO: 102324 - DNA, 25 bp, SARS Virus
cgatgtcgttgctatggcgatgttc

SEQ ID NO: 102325 - DNA, 25 bp, SARS Virus
gatgtcgttgctttggcgatgttcg

SEQ ID NO: 102326 - DNA, 25 bp, SARS Virus
atgtcgttgctatggcgatgttcgg

SEQ ID NO: 102327 - DNA, 25 bp, SARS Virus
tgtcgttgctattgcgatgttcgga

SEQ ID NO: 102328 - DNA, 25 bp, SARS Virus
gtcgttgctatgtcgatgttcggag

SEQ ID NO: 102329 - DNA, 25 bp, SARS Virus
tcgttgctatggtgatgttcggagt

SEQ ID NO: 102330 - DNA, 25 bp, SARS Virus
cgttgctatggctatgttcggagtg

SEQ ID NO: 102331 - DNA, 25 bp, SARS Virus
gttgctatggcgttgttcggagtga

SEQ ID NO: 102332 - DNA, 25 bp, SARS Virus
ttgctatggcgatgttcggagtgag

SEQ ID NO: 102333 - DNA, 25 bp, SARS Virus
tgctatggcgattttcggagtgagg

SEQ ID NO: 102334 - DNA, 25 bp, SARS Virus
gctatggcgatgttcggagtgaggg

SEQ ID NO: 102335 - DNA, 25 bp, SARS Virus
ctatggcgatgttcggagtgaggga

SEQ ID NO: 102336 - DNA, 25 bp, SARS Virus
tatggcgatgtttggagtgagggaa

SEQ ID NO: 102337 - DNA, 25 bp, SARS Virus
atggcgatgttctgagtgagggaaa

SEQ ID NO: 102338 - DNA, 25 bp, SARS Virus
tggcgatgttcgtagtgagggaaag

SEQ ID NO: 102339 - DNA, 25 bp, SARS Virus
ggcgatgttcggtgtgagggaaagc

SEQ ID NO: 102340 - DNA, 25 bp, SARS Virus
gcgatgttcggattgagggaaagcc

SEQ ID NO: 102341 - DNA, 25 bp, SARS Virus
cgatgttcggagtgagggaaagcct

SEQ ID NO: 102342 - DNA, 25 bp, SARS Virus
gatgttcggagttagggaaagccta

SEQ ID NO: 102343 - DNA, 25 bp, SARS Virus
atgttcggagtgtgggaaagcctac

SEQ ID NO: 102344 - DNA, 25 bp, SARS Virus
tgttcggagtgatggaaagcctacc

SEQ ID NO: 102345 - DNA, 25 bp, SARS Virus
gttcggagtgagtgaaagcctaccg

SEQ ID NO: 102346 - DNA, 25 bp, SARS Virus
ttcggagtgaggtaaagcctaccga

SEQ ID NO: 102347 - DNA, 25 bp, SARS Virus
tcggagtgagggtaagcctaccgaa

SEQ ID NO: 102348 - DNA, 25 bp, SARS Virus
cggagtgagggatagcctaccgaac

SEQ ID NO: 102349 - DNA, 25 bp, SARS Virus
ggagtgagggaatgcctaccgaaca

SEQ ID NO: 102350 - DNA, 25 bp, SARS Virus
gagtgagggaaatcctaccgaacaa

SEQ ID NO: 102351 - DNA, 25 bp, SARS Virus
agtgagggaaagtctaccgaacaat

SEQ ID NO: 102352 - DNA, 25 bp, SARS Virus
gtgagggaaagcttaccgaacaata

SEQ ID NO: 102353 - DNA, 25 bp, SARS Virus
tgagggaaagcctaccgaacaataa

SEQ ID NO: 102354 - DNA, 25 bp, SARS Virus
gagggaaagccttccgaacaataac

SEQ ID NO: 102355 - DNA, 25 bp, SARS Virus
agggaaagcctatcgaacaataacc

SEQ ID NO: 102356 - DNA, 25 bp, SARS Virus
gggaaagcctactgaacaataaccg

SEQ ID NO: 102357 - DNA, 25 bp, SARS Virus
ggaaagcctacctaacaataaccgc

SEQ ID NO: 102358 - DNA, 25 bp, SARS Virus
gaaagcctaccgtacaataaccgca

SEQ ID NO: 102359 - DNA, 25 bp, SARS Virus
aaagcctaccgatcaataaccgcaa

SEQ ID NO: 102360 - DNA, 25 bp, SARS Virus
aagcctaccgaataataaccgcaac

SEQ ID NO: 102361 - DNA, 25 bp, SARS Virus
agcctaccgaactataaccgcaacg

SEQ ID NO: 102362 - DNA, 25 bp, SARS Virus
gcctaccgaacattaaccgcaacgt

SEQ ID NO: 102363 - DNA, 25 bp, SARS Virus
cctaccgaacaataaccgcaacgta

SEQ ID NO: 102364 - DNA, 25 bp, SARS Virus
ctaccgaacaattaccgcaacgtaa

SEQ ID NO: 102365 - DNA, 25 bp, SARS Virus
taccgaacaatatccgcaacgtaaa

SEQ ID NO: 102366 - DNA, 25 bp, SARS Virus
accgaacaataatcgcaacgtaaag

SEQ ID NO: 102367 - DNA, 25 bp, SARS Virus
ccgaacaataactgcaacgtaaaga

SEQ ID NO: 102368 - DNA, 25 bp, SARS Virus
cgaacaataacctcaacgtaaagaa

SEQ ID NO: 102369 - DNA, 25 bp, SARS Virus
gaacaataaccgtaacgtaaagaac

SEQ ID NO: 102370 - DNA, 25 bp, SARS Virus
aacaataaccgctacgtaaagaacg

SEQ ID NO: 102371 - DNA, 25 bp, SARS Virus
acaataaccgcatcgtaaagaacga

SEQ ID NO: 102372 - DNA, 25 bp, SARS Virus
caataaccgcaatgtaaagaacgac

SEQ ID NO: 102373 - DNA, 25 bp, SARS Virus
aataaccgcaacttaaagaacgaca

SEQ ID NO: 102374 - DNA, 25 bp, SARS Virus
ataaccgcaacgtaaagaacgacaa

SEQ ID NO: 102375 - DNA, 25 bp, SARS Virus
taaccgcaacgttaagaacgacaaa

SEQ ID NO: 102376 - DNA, 25 bp, SARS Virus
aaccgcaacgtatagaacgacaaaa

SEQ ID NO: 102377 - DNA, 25 bp, SARS Virus
accgcaacgtaatgaacgacaaaaa

SEQ ID NO: 102378 - DNA, 25 bp, SARS Virus
ccgcaacgtaaataacgacaaaaag

SEQ ID NO: 102379 - DNA, 25 bp, SARS Virus
cgcaacgtaaagtacgacaaaaagt

SEQ ID NO: 102380 - DNA, 25 bp, SARS Virus
gcaacgtaaagatcgacaaaaagtc

SEQ ID NO: 102381 - DNA, 25 bp, SARS Virus
caacgtaaagaatgacaaaaagtct

SEQ ID NO: 102382 - DNA, 25 bp, SARS Virus
aacgtaaagaactacaaaaagtctc

SEQ ID NO: 102383 - DNA, 25 bp, SARS Virus
acgtaaagaacgtcaaaaagtctcg

SEQ ID NO: 102384 - DNA, 25 bp, SARS Virus
cgtaaagaacgataaaaagtctcgc

SEQ ID NO: 102385 - DNA, 25 bp, SARS Virus
gtaaagaacgactaaaagtctcgcg

SEQ ID NO: 102386 - DNA, 25 bp, SARS Virus
taaagaacgacataaagtctcgcga

SEQ ID NO: 102387 - DNA, 25 bp, SARS Virus
aaagaacgacaataagtctcgcgat

SEQ ID NO: 102388 - DNA, 25 bp, SARS Virus
aagaacgacaaatagtctcgcgatg

SEQ ID NO: 102389 - DNA, 25 bp, SARS Virus
agaacgacaaaatgtctcgcgatgg

SEQ ID NO: 102390 - DNA, 25 bp, SARS Virus
gaacgacaaaaattctcgcgatggt

SEQ ID NO: 102391 - DNA, 25 bp, SARS Virus
aacgacaaaaagtctcgcgatggtt

SEQ ID NO: 102392 - DNA, 25 bp, SARS Virus
acgacaaaaagtttcgcgatggttt

SEQ ID NO: 102393 - DNA, 25 bp, SARS Virus
cgacaaaaagtctcgcgatggtttt

SEQ ID NO: 102394 - DNA, 25 bp, SARS Virus
gacaaaaagtcttgcgatggtttta

SEQ ID NO: 102395 - DNA, 25 bp, SARS Virus
acaaaaagtctctcgatggttttat

SEQ ID NO: 102396 - DNA, 25 bp, SARS Virus
caaaaagtctcgtgatggttttatt

SEQ ID NO: 102397 - DNA, 25 bp, SARS Virus
aaaaagtctcgctatggttttatta

SEQ ID NO: 102398 - DNA, 25 bp, SARS Virus
aaaagtctcgcgttggttttattaa

SEQ ID NO: 102399 - DNA, 25 bp, SARS Virus
aaagtctcgcgatggttttattaac

SEQ ID NO: 102400 - DNA, 25 bp, SARS Virus
aagtctcgcgattgttttattaacg

SEQ ID NO: 102401 - DNA, 25 bp, SARS Virus
agtctcgcgatgtttttattaacgc

SEQ ID NO: 102402 - DNA, 25 bp, SARS Virus
gtctcgcgatggttttattaacgcg

SEQ ID NO: 102403 - DNA, 25 bp, SARS Virus
tctcgcgatggttttattaacgcga

SEQ ID NO: 102404 - DNA, 25 bp, SARS Virus
ctcgcgatggttttattaacgcgag

SEQ ID NO: 102405 - DNA, 25 bp, SARS Virus
tcgcgatggttttattaacgcgagt

SEQ ID NO: 102406 - DNA, 25 bp, SARS Virus
cgcgatggtttttttaacgcgagtt

SEQ ID NO: 102407 - DNA, 25 bp, SARS Virus
gcgatggttttattaacgcgagtta

SEQ ID NO: 102408 - DNA, 25 bp, SARS Virus
cgatggttttattaacgcgagttat

SEQ ID NO: 102409 - DNA, 25 bp, SARS Virus
gatggttttatttacgcgagttatt

SEQ ID NO: 102410 - DNA, 25 bp, SARS Virus
atggttttattatcgcgagttattt

SEQ ID NO: 102411 - DNA, 25 bp, SARS Virus
tggttttattaatgcgagttatttt

SEQ ID NO: 102412 - DNA, 25 bp, SARS Virus
ggttttattaactcgagttattttc

SEQ ID NO: 102413 - DNA, 25 bp, SARS Virus
gttttattaacgtgagttattttct

SEQ ID NO: 102414 - DNA, 25 bp, SARS Virus
ttttattaacgctagttattttcta

SEQ ID NO: 102415 - DNA, 25 bp, SARS Virus
tttattaacgcgtgttattttctac

SEQ ID NO: 102416 - DNA, 25 bp, SARS Virus
ttattaacgcgatttattttctacc

SEQ ID NO: 102417 - DNA, 25 bp, SARS Virus
tattaacgcgagttattttctaccg

SEQ ID NO: 102418 - DNA, 25 bp, SARS Virus
attaacgcgagttattttctaccgt

SEQ ID NO: 102419 - DNA, 25 bp, SARS Virus
ttaacgcgagtttttttctaccgtc

SEQ ID NO: 102420 - DNA, 25 bp, SARS Virus
taacgcgagttattttctaccgtcg

SEQ ID NO: 102421 - DNA, 25 bp, SARS Virus
aacgcgagttattttctaccgtcga

SEQ ID NO: 102422 - DNA, 25 bp, SARS Virus
acgcgagttattttctaccgtcgat

SEQ ID NO: 102423 - DNA, 25 bp, SARS Virus
cgcgagttattttctaccgtcgatc

SEQ ID NO: 102424 - DNA, 25 bp, SARS Virus
gcgagttattttttaccgtcgatcg

SEQ ID NO: 102425 - DNA, 25 bp, SARS Virus
cgagttattttctaccgtcgatcgg

SEQ ID NO: 102426 - DNA, 25 bp, SARS Virus
gagttattttcttccgtcgatcggg

SEQ ID NO: 102427 - DNA, 25 bp, SARS Virus
agttattttctatcgtcgatcggga

SEQ ID NO: 102428 - DNA, 25 bp, SARS Virus
gttattttctactgtcgatcgggaa

SEQ ID NO: 102429 - DNA, 25 bp, SARS Virus
ttattttctaccttcgatcgggaaa

SEQ ID NO: 102430 - DNA, 25 bp, SARS Virus
tattttctaccgtcgatcgggaaat

SEQ ID NO: 102431 - DNA, 25 bp, SARS Virus
attttctaccgttgatcgggaaata

SEQ ID NO: 102432 - DNA, 25 bp, SARS Virus
ttttctaccgtctatcgggaaatat

SEQ ID NO: 102433 - DNA, 25 bp, SARS Virus
tttctaccgtcgttcgggaaatatt

SEQ ID NO: 102434 - DNA, 25 bp, SARS Virus
ttctaccgtcgatcgggaaatattc

SEQ ID NO: 102435 - DNA, 25 bp, SARS Virus
tctaccgtcgattgggaaatattcc

SEQ ID NO: 102436 - DNA, 25 bp, SARS Virus
ctaccgtcgatctggaaatattccc

SEQ ID NO: 102437 - DNA, 25 bp, SARS Virus
taccgtcgatcgtgaaatattcccg

SEQ ID NO: 102438 - DNA, 25 bp, SARS Virus
accgtcgatcggtaaatattcccga

SEQ ID NO: 102439 - DNA, 25 bp, SARS Virus
ccgtcgatcgggtaatattcccgaa

SEQ ID NO: 102440 - DNA, 25 bp, SARS Virus
cgtcgatcgggatatattcccgaag

SEQ ID NO: 102441 - DNA, 25 bp, SARS Virus
gtcgatcgggaattattcccgaagg

SEQ ID NO: 102442 - DNA, 25 bp, SARS Virus
tcgatcgggaaatattcccgaaggt

SEQ ID NO: 102443 - DNA, 25 bp, SARS Virus
cgatcgggaaattttcccgaaggtc

SEQ ID NO: 102444 - DNA, 25 bp, SARS Virus
gatcgggaaatattcccgaaggtca

SEQ ID NO: 102445 - DNA, 25 bp, SARS Virus
atcgggaaatattcccgaaggtcaa

SEQ ID NO: 102446 - DNA, 25 bp, SARS Virus
tcgggaaatatttccgaaggtcaag

SEQ ID NO: 102447 - DNA, 25 bp, SARS Virus
cgggaaatattctcgaaggtcaagt

SEQ ID NO: 102448 - DNA, 25 bp, SARS Virus
gggaaatattcctgaaggtcaagta

SEQ ID NO: 102449 - DNA, 25 bp, SARS Virus
ggaaatattccctaaggtcaagtaa

SEQ ID NO: 102450 - DNA, 25 bp, SARS Virus
gaaatattcccgtaggtcaagtaaa

SEQ ID NO: 102451 - DNA, 25 bp, SARS Virus
aaatattcccgatggtcaagtaaac

SEQ ID NO: 102452 - DNA, 25 bp, SARS Virus
aatattcccgaatgtcaagtaaacg

SEQ ID NO: 102453 - DNA, 25 bp, SARS Virus
atattcccgaagttcaagtaaacgt

SEQ ID NO: 102454 - DNA, 25 bp, SARS Virus
tattcccgaaggtcaagtaaacgtt

SEQ ID NO: 102455 - DNA, 25 bp, SARS Virus
attcccgaaggttaagtaaacgtta

SEQ ID NO: 102456 - DNA, 25 bp, SARS Virus
ttcccgaaggtctagtaaacgttaa

SEQ ID NO: 102457 - DNA, 25 bp, SARS Virus
tcccgaaggtcatgtaaacgttaaa

SEQ ID NO: 102458 - DNA, 25 bp, SARS Virus
cccgaaggtcaattaaacgttaaat

SEQ ID NO: 102459 - DNA, 25 bp, SARS Virus
ccgaaggtcaagtaaacgttaaatg

SEQ ID NO: 102460 - DNA, 25 bp, SARS Virus
cgaaggtcaagttaacgttaaatga

SEQ ID NO: 102461 - DNA, 25 bp, SARS Virus
gaaggtcaagtatacgttaaatgac

SEQ ID NO: 102462 - DNA, 25 bp, SARS Virus
aaggtcaagtaatcgttaaatgacg

SEQ ID NO: 102463 - DNA, 25 bp, SARS Virus
aggtcaagtaaatgttaaatgacga

SEQ ID NO: 102464 - DNA, 25 bp, SARS Virus
ggtcaagtaaactttaaatgacgac

SEQ ID NO: 102465 - DNA, 25 bp, SARS Virus
gtcaagtaaacgttaaatgacgacg

SEQ ID NO: 102466 - DNA, 25 bp, SARS Virus
tcaagtaaacgttaaatgacgacga

SEQ ID NO: 102467 - DNA, 25 bp, SARS Virus
caagtaaacgtttaatgacgacgat

SEQ ID NO: 102468 - DNA, 25 bp, SARS Virus
aagtaaacgttatatgacgacgata

SEQ ID NO: 102469 - DNA, 25 bp, SARS Virus
agtaaacgttaattgacgacgataa

SEQ ID NO: 102470 - DNA, 25 bp, SARS Virus
gtaaacgttaaatgacgacgataaa

SEQ ID NO: 102471 - DNA, 25 bp, SARS Virus
taaacgttaaattacgacgataaac

SEQ ID NO: 102472 - DNA, 25 bp, SARS Virus
aaacgttaaatgtcgacgataaaca

SEQ ID NO: 102473 - DNA, 25 bp, SARS Virus
aacgttaaatgatgacgataaacaa

SEQ ID NO: 102474 - DNA, 25 bp, SARS Virus
acgttaaatgactacgataaacaat

SEQ ID NO: 102475 - DNA, 25 bp, SARS Virus
cgttaaatgacgtcgataaacaatg

SEQ ID NO: 102476 - DNA, 25 bp, SARS Virus
gttaaatgacgatgataaacaatgg

SEQ ID NO: 102477 - DNA, 25 bp, SARS Virus
ttaaatgacgactataaacaatggt

SEQ ID NO: 102478 - DNA, 25 bp, SARS Virus
taaatgacgacgttaaacaatggta

SEQ ID NO: 102479 - DNA, 25 bp, SARS Virus
aaatgacgacgataaacaatggtag

SEQ ID NO: 102480 - DNA, 25 bp, SARS Virus
aatgacgacgattaacaatggtaga

SEQ ID NO: 102481 - DNA, 25 bp, SARS Virus
atgacgacgatatacaatggtagat

SEQ ID NO: 102482 - DNA, 25 bp, SARS Virus
tgacgacgataatcaatggtagata

SEQ ID NO: 102483 - DNA, 25 bp, SARS Virus
gacgacgataaataatggtagataa

SEQ ID NO: 102484 - DNA, 25 bp, SARS Virus
acgacgataaactatggtagataag

SEQ ID NO: 102485 - DNA, 25 bp, SARS Virus
cgacgataaacattggtagataagt

SEQ ID NO: 102486 - DNA, 25 bp, SARS Virus
gacgataaacaatggtagataagtg

SEQ ID NO: 102487 - DNA, 25 bp, SARS Virus
acgataaacaattgtagataagtgt

SEQ ID NO: 102488 - DNA, 25 bp, SARS Virus
cgataaacaatgttagataagtgta

SEQ ID NO: 102489 - DNA, 25 bp, SARS Virus
gataaacaatggtagataagtgtag

SEQ ID NO: 102490 - DNA, 25 bp, SARS Virus
ataaacaatggttgataagtgtaga

SEQ ID NO: 102491 - DNA, 25 bp, SARS Virus
taaacaatggtatataagtgtagaa

SEQ ID NO: 102492 - DNA, 25 bp, SARS Virus
aaacaatggtagttaagtgtagaaa

SEQ ID NO: 102493 - DNA, 25 bp, SARS Virus
aacaatggtagataagtgtagaaaa

SEQ ID NO: 102494 - DNA, 25 bp, SARS Virus
acaatggtagattagtgtagaaaac

SEQ ID NO: 102495 - DNA, 25 bp, SARS Virus
caatggtagatatgtgtagaaaacg

SEQ ID NO: 102496 - DNA, 25 bp, SARS Virus
aatggtagataattgtagaaaacga

SEQ ID NO: 102497 - DNA, 25 bp, SARS Virus
atggtagataagtgtagaaaacgaa

SEQ ID NO: 102498 - DNA, 25 bp, SARS Virus
tggtagataagtttagaaaacgaac

SEQ ID NO: 102499 - DNA, 25 bp, SARS Virus
ggtagataagtgtagaaaacgaaca

SEQ ID NO: 102500 - DNA, 25 bp, SARS Virus
gtagataagtgttgaaaacgaacag

SEQ ID NO: 102501 - DNA, 25 bp, SARS Virus
tagataagtgtataaaacgaacagc

SEQ ID NO: 102502 - DNA, 25 bp, SARS Virus
agataagtgtagtaaacgaacagcg

SEQ ID NO: 102503 - DNA, 25 bp, SARS Virus
gataagtgtagataacgaacagcga

SEQ ID NO: 102504 - DNA, 25 bp, SARS Virus
ataagtgtagaatacgaacagcgac

SEQ ID NO: 102505 - DNA, 25 bp, SARS Virus
taagtgtagaaatcgaacagcgacg

SEQ ID NO: 102506 - DNA, 25 bp, SARS Virus
aagtgtagaaaatgaacagcgacgt

SEQ ID NO: 102507 - DNA, 25 bp, SARS Virus
agtgtagaaaactaacagcgacgtc

SEQ ID NO: 102508 - DNA, 25 bp, SARS Virus
gtgtagaaaacgtacagcgacgtcc

SEQ ID NO: 102509 - DNA, 25 bp, SARS Virus
tgtagaaaacgatcagcgacgtcca

SEQ ID NO: 102510 - DNA, 25 bp, SARS Virus
gtagaaaacgaatagcgacgtccat

SEQ ID NO: 102511 - DNA, 25 bp, SARS Virus
tagaaaacgaactgcgacgtccata

SEQ ID NO: 102512 - DNA, 25 bp, SARS Virus
agaaaacgaacatcgacgtccatac

SEQ ID NO: 102513 - DNA, 25 bp, SARS Virus
gaaaacgaacagtgacgtccatacc

SEQ ID NO: 102514 - DNA, 25 bp, SARS Virus
aaaacgaacagctacgtccatacct

SEQ ID NO: 102515 - DNA, 25 bp, SARS Virus
aaacgaacagcgtcgtccatacctc

SEQ ID NO: 102516 - DNA, 25 bp, SARS Virus
aacgaacagcgatgtccatacctcc

SEQ ID NO: 102517 - DNA, 25 bp, SARS Virus
acgaacagcgacttccatacctccg

SEQ ID NO: 102518 - DNA, 25 bp, SARS Virus
cgaacagcgacgtccatacctccgc

SEQ ID NO: 102519 - DNA, 25 bp, SARS Virus
gaacagcgacgttcatacctccgcg

SEQ ID NO: 102520 - DNA, 25 bp, SARS Virus
aacagcgacgtctatacctccgcgt

SEQ ID NO: 102521 - DNA, 25 bp, SARS Virus
acagcgacgtccttacctccgcgtt

SEQ ID NO: 102522 - DNA, 25 bp, SARS Virus
cagcgacgtccatacctccgcgtta

SEQ ID NO: 102523 - DNA, 25 bp, SARS Virus
agcgacgtccattcctccgcgttaa

SEQ ID NO: 102524 - DNA, 25 bp, SARS Virus
gcgacgtccatatctccgcgttaaa

SEQ ID NO: 102525 - DNA, 25 bp, SARS Virus
cgacgtccatacttccgcgttaaaa

SEQ ID NO: 102526 - DNA, 25 bp, SARS Virus
gacgtccatacctccgcgttaaaaa

SEQ ID NO: 102527 - DNA, 25 bp, SARS Virus
acgtccataccttcgcgttaaaaac

SEQ ID NO: 102528 - DNA, 25 bp, SARS Virus
cgtccatacctctgcgttaaaaaca

SEQ ID NO: 102529 - DNA, 25 bp, SARS Virus
gtccatacctcctcgttaaaaacat

SEQ ID NO: 102530 - DNA, 25 bp, SARS Virus
tccatacctccgtgttaaaaacatg

SEQ ID NO: 102531 - DNA, 25 bp, SARS Virus
ccatacctccgctttaaaaacatgg

SEQ ID NO: 102532 - DNA, 25 bp, SARS Virus
catacctccgcgttaaaaacatgga

SEQ ID NO: 102533 - DNA, 25 bp, SARS Virus
atacctccgcgttaaaaacatggag

SEQ ID NO: 102534 - DNA, 25 bp, SARS Virus
tacctccgcgtttaaaacatggaga

SEQ ID NO: 102535 - DNA, 25 bp, SARS Virus
acctccgcgttataaacatggagat

SEQ ID NO: 102536 - DNA, 25 bp, SARS Virus
cctccgcgttaataacatggagata

SEQ ID NO: 102537 - DNA, 25 bp, SARS Virus
ctccgcgttaaatacatggagatac

SEQ ID NO: 102538 - DNA, 25 bp, SARS Virus
tccgcgttaaaatcatggagatacg

SEQ ID NO: 102539 - DNA, 25 bp, SARS Virus
ccgcgttaaaaatatggagatacgg

SEQ ID NO: 102540 - DNA, 25 bp, SARS Virus
cgcgttaaaaacttggagatacgga

SEQ ID NO: 102541 - DNA, 25 bp, SARS Virus
gcgttaaaaacatggagatacggaa

SEQ ID NO: 102542 - DNA, 25 bp, SARS Virus
cgttaaaaacattgagatacggaac

SEQ ID NO: 102543 - DNA, 25 bp, SARS Virus
gttaaaaacatgtagatacggaact

SEQ ID NO: 102544 - DNA, 25 bp, SARS Virus
ttaaaaacatggtgatacggaacta

SEQ ID NO: 102545 - DNA, 25 bp, SARS Virus
taaaaacatggatatacggaactat

SEQ ID NO: 102546 - DNA, 25 bp, SARS Virus
aaaaacatggagttacggaactata

SEQ ID NO: 102547 - DNA, 25 bp, SARS Virus
aaaacatggagatacggaactatat

SEQ ID NO: 102548 - DNA, 25 bp, SARS Virus
aaacatggagattcggaactatata

SEQ ID NO: 102549 - DNA, 25 bp, SARS Virus
aacatggagatatggaactatataa

SEQ ID NO: 102550 - DNA, 25 bp, SARS Virus
acatggagatactgaactatataaa

SEQ ID NO: 102551 - DNA, 25 bp, SARS Virus
catggagatacgtaactatataaaa

SEQ ID NO: 102552 - DNA, 25 bp, SARS Virus
atggagatacggtactatataaaag

SEQ ID NO: 102553 - DNA, 25 bp, SARS Virus
tggagatacggatctatataaaaga

SEQ ID NO: 102554 - DNA, 25 bp, SARS Virus
ggagatacggaattatataaaagat

SEQ ID NO: 102555 - DNA, 25 bp, SARS Virus
gagatacggaactatataaaagatg

SEQ ID NO: 102556 - DNA, 25 bp, SARS Virus
agatacggaactttataaaagatgt

SEQ ID NO: 102557 - DNA, 25 bp, SARS Virus
gatacggaactatataaaagatgtt

SEQ ID NO: 102558 - DNA, 25 bp, SARS Virus
atacggaactatttaaaagatgtta

SEQ ID NO: 102559 - DNA, 25 bp, SARS Virus
tacggaactatataaaagatgttac

SEQ ID NO: 102560 - DNA, 25 bp, SARS Virus
acggaactatattaaagatgttacg

SEQ ID NO: 102561 - DNA, 25 bp, SARS Virus
cggaactatatataagatgttacgt

SEQ ID NO: 102562 - DNA, 25 bp, SARS Virus
ggaactatataatagatgttacgta

SEQ ID NO: 102563 - DNA, 25 bp, SARS Virus
gaactatataaatgatgttacgtag

SEQ ID NO: 102564 - DNA, 25 bp, SARS Virus
aactatataaaatatgttacgtagt

SEQ ID NO: 102565 - DNA, 25 bp, SARS Virus
actatataaaagttgttacgtagtt

SEQ ID NO: 102566 - DNA, 25 bp, SARS Virus
ctatataaaagatgttacgtagttg

SEQ ID NO: 102567 - DNA, 25 bp, SARS Virus
tatataaaagattttacgtagttgc

SEQ ID NO: 102568 - DNA, 25 bp, SARS Virus
atataaaagatgttacgtagttgcg

SEQ ID NO: 102569 - DNA, 25 bp, SARS Virus
tataaaagatgttacgtagttgcgt

SEQ ID NO: 102570 - DNA, 25 bp, SARS Virus
ataaaagatgtttcgtagttgcgta

SEQ ID NO: 102571 - DNA, 25 bp, SARS Virus
taaaagatgttatgtagttgcgtac

SEQ ID NO: 102572 - DNA, 25 bp, SARS Virus
aaaagatgttacttagttgcgtaca

SEQ ID NO: 102573 - DNA, 25 bp, SARS Virus
aaagatgttacgtagttgcgtacat

SEQ ID NO: 102574 - DNA, 25 bp, SARS Virus
aagatgttacgttgttgcgtacatc

SEQ ID NO: 102575 - DNA, 25 bp, SARS Virus
agatgttacgtatttgcgtacatct

SEQ ID NO: 102576 - DNA, 25 bp, SARS Virus
gatgttacgtagttgcgtacatctt

SEQ ID NO: 102577 - DNA, 25 bp, SARS Virus
atgttacgtagttgcgtacatctta

SEQ ID NO: 102578 - DNA, 25 bp, SARS Virus
tgttacgtagtttcgtacatcttaa

SEQ ID NO: 102579 - DNA, 25 bp, SARS Virus
gttacgtagttgtgtacatcttaat

SEQ ID NO: 102580 - DNA, 25 bp, SARS Virus
ttacgtagttgcttacatcttaata

SEQ ID NO: 102581 - DNA, 25 bp, SARS Virus
tacgtagttgcgtacatcttaataa

SEQ ID NO: 102582 - DNA, 25 bp, SARS Virus
acgtagttgcgttcatcttaataat

SEQ ID NO: 102583 - DNA, 25 bp, SARS Virus
cgtagttgcgtatatcttaataata

SEQ ID NO: 102584 - DNA, 25 bp, SARS Virus
gtagttgcgtacttcttaataatac

SEQ ID NO: 102585 - DNA, 25 bp, SARS Virus
tagttgcgtacatcttaataatact

SEQ ID NO: 102586 - DNA, 25 bp, SARS Virus
agttgcgtacattttaataatactc

SEQ ID NO: 102587 - DNA, 25 bp, SARS Virus
gttgcgtacatcttaataatactct

SEQ ID NO: 102588 - DNA, 25 bp, SARS Virus
ttgcgtacatcttaataatactcta

SEQ ID NO: 102589 - DNA, 25 bp, SARS Virus
tgcgtacatctttataatactctac

SEQ ID NO: 102590 - DNA, 25 bp, SARS Virus
gcgtacatcttattaatactctaca

SEQ ID NO: 102591 - DNA, 25 bp, SARS Virus
cgtacatcttaataatactctacaa

SEQ ID NO: 102592 - DNA, 25 bp, SARS Virus
gtacatcttaattatactctacaac

SEQ ID NO: 102593 - DNA, 25 bp, SARS Virus
tacatcttaatattactctacaacc

SEQ ID NO: 102594 - DNA, 25 bp, SARS Virus
acatcttaataatactctacaaccg

SEQ ID NO: 102595 - DNA, 25 bp, SARS Virus
catcttaataattctctacaaccga

SEQ ID NO: 102596 - DNA, 25 bp, SARS Virus
atcttaataatattctacaaccgaa

SEQ ID NO: 102597 - DNA, 25 bp, SARS Virus
tcttaataatactctacaaccgaaa

SEQ ID NO: 102598 - DNA, 25 bp, SARS Virus
cttaataatactttacaaccgaaac

SEQ ID NO: 102599 - DNA, 25 bp, SARS Virus
ttaataatactctacaaccgaaaca

SEQ ID NO: 102600 - DNA, 25 bp, SARS Virus
taataatactcttcaaccgaaacaa

SEQ ID NO: 102601 - DNA, 25 bp, SARS Virus
aataatactctataaccgaaacaac

SEQ ID NO: 102602 - DNA, 25 bp, SARS Virus
ataatactctactaccgaaacaacc

SEQ ID NO: 102603 - DNA, 25 bp, SARS Virus
taatactctacatccgaaacaacct

SEQ ID NO: 102604 - DNA, 25 bp, SARS Virus
aatactctacaatcgaaacaacctt

SEQ ID NO: 102605 - DNA, 25 bp, SARS Virus
atactctacaactgaaacaaccttc

SEQ ID NO: 102606 - DNA, 25 bp, SARS Virus
tactctacaacctaaacaaccttca

SEQ ID NO: 102607 - DNA, 25 bp, SARS Virus
actctacaaccgtaacaaccttcac

SEQ ID NO: 102608 - DNA, 25 bp, SARS Virus
ctctacaaccgatacaaccttcacg

SEQ ID NO: 102609 - DNA, 25 bp, SARS Virus
tctacaaccgaaacaaccttcacgt

SEQ ID NO: 102610 - DNA, 25 bp, SARS Virus
ctacaaccgaaaaaaccttcacgtt

SEQ ID NO: 102611 - DNA, 25 bp, SARS Virus
tacaaccgaaacaaccttcacgttt

SEQ ID NO: 102612 - DNA, 25 bp, SARS Virus
acaaccgaaacaaccttcacgttta

SEQ ID NO: 102613 - DNA, 25 bp, SARS Virus
caaccgaaacaaacttcacgtttag

SEQ ID NO: 102614 - DNA, 25 bp, SARS Virus
aaccgaaacaacattcacgtttagg

SEQ ID NO: 102615 - DNA, 25 bp, SARS Virus
accgaaacaaccatcacgtttaggt

SEQ ID NO: 102616 - DNA, 25 bp, SARS Virus
ccgaaacaacctacacgtttaggtt

SEQ ID NO: 102617 - DNA, 25 bp, SARS Virus
cgaaacaaccttaacgtttaggttc

SEQ ID NO: 102618 - DNA, 25 bp, SARS Virus
gaaacaaccttcacgtttaggttct

SEQ ID NO: 102619 - DNA, 25 bp, SARS Virus
aaacaaccttcaagtttaggttctt

SEQ ID NO: 102620 - DNA, 25 bp, SARS Virus
aacaaccttcacatttaggttcttg

SEQ ID NO: 102621 - DNA, 25 bp, SARS Virus
acaaccttcacgattaggttcttgg

SEQ ID NO: 102622 - DNA, 25 bp, SARS Virus
caaccttcacgtataggttcttggg

SEQ ID NO: 102623 - DNA, 25 bp, SARS Virus
aaccttcacgttaaggttcttgggt

SEQ ID NO: 102624 - DNA, 25 bp, SARS Virus
accttcacgtttaggttcttgggta

SEQ ID NO: 102625 - DNA, 25 bp, SARS Virus
ccttcacgtttaagttcttgggtaa

SEQ ID NO: 102626 - DNA, 25 bp, SARS Virus
cttcacgtttagattcttgggtaat

SEQ ID NO: 102627 - DNA, 25 bp, SARS Virus
ttcacgtttaggatcttgggtaatg

SEQ ID NO: 102628 - DNA, 25 bp, SARS Virus
tcacgtttaggtacttgggtaatga

SEQ ID NO: 102629 - DNA, 25 bp, SARS Virus
cacgtttaggttattgggtaatgaa

SEQ ID NO: 102630 - DNA, 25 bp, SARS Virus
acgtttaggttcatgggtaatgaaa

SEQ ID NO: 102631 - DNA, 25 bp, SARS Virus
cgtttaggttctagggtaatgaaat

SEQ ID NO: 102632 - DNA, 25 bp, SARS Virus
gtttaggttcttaggtaatgaaata

SEQ ID NO: 102633 - DNA, 25 bp, SARS Virus
tttaggttcttgagtaatgaaatac

SEQ ID NO: 102634 - DNA, 25 bp, SARS Virus
ttaggttcttggataatgaaatact

SEQ ID NO: 102635 - DNA, 25 bp, SARS Virus
taggttcttgggaaatgaaatacta

SEQ ID NO: 102636 - DNA, 25 bp, SARS Virus
aggttcttgggtaatgaaatactac

SEQ ID NO: 102637 - DNA, 25 bp, SARS Virus
ggttcttgggtaatgaaatactacg

SEQ ID NO: 102638 - DNA, 25 bp, SARS Virus
gttcttgggtaaagaaatactacgg

SEQ ID NO: 102639 - DNA, 25 bp, SARS Virus
ttcttgggtaataaaatactacggt

SEQ ID NO: 102640 - DNA, 25 bp, SARS Virus
tcttgggtaatgaaatactacggtt

SEQ ID NO: 102641 - DNA, 25 bp, SARS Virus
cttgggtaatgaaatactacggttg

SEQ ID NO: 102642 - DNA, 25 bp, SARS Virus
ttgggtaatgaaatactacggttga

SEQ ID NO: 102643 - DNA, 25 bp, SARS Virus
tgggtaatgaaaaactacggttgat

SEQ ID NO: 102644 - DNA, 25 bp, SARS Virus
gggtaatgaaatactacggttgatg

SEQ ID NO: 102645 - DNA, 25 bp, SARS Virus
ggtaatgaaataatacggttgatga

SEQ ID NO: 102646 - DNA, 25 bp, SARS Virus
gtaatgaaatacaacggttgatgaa

SEQ ID NO: 102647 - DNA, 25 bp, SARS Virus
taatgaaatactacggttgatgaaa

SEQ ID NO: 102648 - DNA, 25 bp, SARS Virus
aatgaaatactaaggttgatgaaac

SEQ ID NO: 102649 - DNA, 25 bp, SARS Virus
atgaaatactacagttgatgaaaca

SEQ ID NO: 102650 - DNA, 25 bp, SARS Virus
tgaaatactacgattgatgaaacaa

SEQ ID NO: 102651 - DNA, 25 bp, SARS Virus
gaaatactacggatgatgaaacaaa

SEQ ID NO: 102652 - DNA, 25 bp, SARS Virus
aaatactacggtagatgaaacaaac

SEQ ID NO: 102653 - DNA, 25 bp, SARS Virus
aatactacggttaatgaaacaaacg

SEQ ID NO: 102654 - DNA, 25 bp, SARS Virus
atactacggttgatgaaacaaacga

SEQ ID NO: 102655 - DNA, 25 bp, SARS Virus
tactacggttgaagaaacaaacgac

SEQ ID NO: 102656 - DNA, 25 bp, SARS Virus
actacggttgataaaacaaacgacc

SEQ ID NO: 102657 - DNA, 25 bp, SARS Virus
ctacggttgatgaaacaaacgaccg

SEQ ID NO: 102658 - DNA, 25 bp, SARS Virus
tacggttgatgaaacaaacgaccgt

SEQ ID NO: 102659 - DNA, 25 bp, SARS Virus
acggttgatgaaacaaacgaccgtg

SEQ ID NO: 102660 - DNA, 25 bp, SARS Virus
cggttgatgaaaaaaacgaccgtgt

SEQ ID NO: 102661 - DNA, 25 bp, SARS Virus
ggttgatgaaacaaacgaccgtgtg

SEQ ID NO: 102662 - DNA, 25 bp, SARS Virus
gttgatgaaacaaacgaccgtgtgt

SEQ ID NO: 102663 - DNA, 25 bp, SARS Virus
ttgatgaaacaaacgaccgtgtgtg

SEQ ID NO: 102664 - DNA, 25 bp, SARS Virus
tgatgaaacaaaagaccgtgtgtgt

SEQ ID NO: 102665 - DNA, 25 bp, SARS Virus
gatgaaacaaacaaccgtgtgtgta

SEQ ID NO: 102666 - DNA, 25 bp, SARS Virus
atgaaacaaacgaccgtgtgtgtat

SEQ ID NO: 102667 - DNA, 25 bp, SARS Virus
tgaaacaaacgaacgtgtgtgtatt

SEQ ID NO: 102668 - DNA, 25 bp, SARS Virus
gaaacaaacgacagtgtgtgtattg

SEQ ID NO: 102669 - DNA, 25 bp, SARS Virus
aaacaaacgaccatgtgtgtattga

SEQ ID NO: 102670 - DNA, 25 bp, SARS Virus
aacaaacgaccgagtgtgtattgat

SEQ ID NO: 102671 - DNA, 25 bp, SARS Virus
acaaacgaccgtatgtgtattgata

SEQ ID NO: 102672 - DNA, 25 bp, SARS Virus
caaacgaccgtgagtgtattgatac

SEQ ID NO: 102673 - DNA, 25 bp, SARS Virus
aaacgaccgtgtatgtattgatact

SEQ ID NO: 102674 - DNA, 25 bp, SARS Virus
aacgaccgtgtgagtattgatactg

SEQ ID NO: 102675 - DNA, 25 bp, SARS Virus
acgaccgtgtgtatattgatactga

SEQ ID NO: 102676 - DNA, 25 bp, SARS Virus
cgaccgtgtgtgaattgatactgat

SEQ ID NO: 102677 - DNA, 25 bp, SARS Virus
gaccgtgtgtgtattgatactgatg

SEQ ID NO: 102678 - DNA, 25 bp, SARS Virus
accgtgtgtgtaatgatactgatga

SEQ ID NO: 102679 - DNA, 25 bp, SARS Virus
ccgtgtgtgtatagatactgatgac

SEQ ID NO: 102680 - DNA, 25 bp, SARS Virus
cgtgtgtgtattaatactgatgaca

SEQ ID NO: 102681 - DNA, 25 bp, SARS Virus
gtgtgtgtattgatactgatgacat

SEQ ID NO: 102682 - DNA, 25 bp, SARS Virus
tgtgtgtattgaaactgatgacata

SEQ ID NO: 102683 - DNA, 25 bp, SARS Virus
gtgtgtattgatactgatgacatat

SEQ ID NO: 102684 - DNA, 25 bp, SARS Virus
tgtgtattgataatgatgacatatg

SEQ ID NO: 102685 - DNA, 25 bp, SARS Virus
gtgtattgatacagatgacatatgg

SEQ ID NO: 102686 - DNA, 25 bp, SARS Virus
tgtattgatactaatgacatatggt

SEQ ID NO: 102687 - DNA, 25 bp, SARS Virus
gtattgatactgatgacatatggta

SEQ ID NO: 102688 - DNA, 25 bp, SARS Virus
tattgatactgaagacatatggtat

SEQ ID NO: 102689 - DNA, 25 bp, SARS Virus
attgatactgataacatatggtata

SEQ ID NO: 102690 - DNA, 25 bp, SARS Virus
ttgatactgatgacatatggtatat

SEQ ID NO: 102691 - DNA, 25 bp, SARS Virus
tgatactgatgaaatatggtatatt

SEQ ID NO: 102692 - DNA, 25 bp, SARS Virus
gatactgatgacatatggtatattg

SEQ ID NO: 102693 - DNA, 25 bp, SARS Virus
atactgatgacaaatggtatattgt

SEQ ID NO: 102694 - DNA, 25 bp, SARS Virus
tactgatgacatatggtatattgtc

SEQ ID NO: 102695 - DNA, 25 bp, SARS Virus
actgatgacataaggtatattgtca

SEQ ID NO: 102696 - DNA, 25 bp, SARS Virus
ctgatgacatatagtatattgtcac

SEQ ID NO: 102697 - DNA, 25 bp, SARS Virus
tgatgacatatgatatattgtcaca

SEQ ID NO: 102698 - DNA, 25 bp, SARS Virus
gatgacatatggaatattgtcacag

SEQ ID NO: 102699 - DNA, 25 bp, SARS Virus
atgacatatggtatattgtcacagt

SEQ ID NO: 102700 - DNA, 25 bp, SARS Virus
tgacatatggtaaattgtcacagtg

SEQ ID NO: 102701 - DNA, 25 bp, SARS Virus
gacatatggtatattgtcacagtgt

SEQ ID NO: 102702 - DNA, 25 bp, SARS Virus
acatatggtataatgtcacagtgtc

SEQ ID NO: 102703 - DNA, 25 bp, SARS Virus
catatggtatatagtcacagtgtct

SEQ ID NO: 102704 - DNA, 25 bp, SARS Virus
atatggtatattatcacagtgtcta

SEQ ID NO: 102705 - DNA, 25 bp, SARS Virus
tatggtatattgacacagtgtctat

SEQ ID NO: 102706 - DNA, 25 bp, SARS Virus
atggtatattgtaacagtgtctatg

SEQ ID NO: 102707 - DNA, 25 bp, SARS Virus
tggtatattgtcacagtgtctatgt

SEQ ID NO: 102708 - DNA, 25 bp, SARS Virus
ggtatattgtcaaagtgtctatgtt

SEQ ID NO: 102709 - DNA, 25 bp, SARS Virus
gtatattgtcacagtgtctatgtta

SEQ ID NO: 102710 - DNA, 25 bp, SARS Virus
tatattgtcacaatgtctatgttaa

SEQ ID NO: 102711 - DNA, 25 bp, SARS Virus
atattgtcacagagtctatgttaac

SEQ ID NO: 102712 - DNA, 25 bp, SARS Virus
tattgtcacagtatctatgttaaca

SEQ ID NO: 102713 - DNA, 25 bp, SARS Virus
attgtcacagtgactatgttaacag

SEQ ID NO: 102714 - DNA, 25 bp, SARS Virus
ttgtcacagtgtatatgttaacagc

SEQ ID NO: 102715 - DNA, 25 bp, SARS Virus
tgtcacagtgtcaatgttaacagca

SEQ ID NO: 102716 - DNA, 25 bp, SARS Virus
gtcacagtgtctatgttaacagcaa

SEQ ID NO: 102717 - DNA, 25 bp, SARS Virus
tcacagtgtctaagttaacagcaat

SEQ ID NO: 102718 - DNA, 25 bp, SARS Virus
cacagtgtctatattaacagcaatg

SEQ ID NO: 102719 - DNA, 25 bp, SARS Virus
acagtgtctatgataacagcaatga

SEQ ID NO: 102720 - DNA, 25 bp, SARS Virus
cagtgtctatgtaaacagcaatgac

SEQ ID NO: 102721 - DNA, 25 bp, SARS Virus
agtgtctatgttaacagcaatgact

SEQ ID NO: 102722 - DNA, 25 bp, SARS Virus
gtgtctatgttaacagcaatgactt

SEQ ID NO: 102723 - DNA, 25 bp, SARS Virus
tgtctatgttaaaagcaatgacttc

SEQ ID NO: 102724 - DNA, 25 bp, SARS Virus
gtctatgttaacagcaatgacttcc

SEQ ID NO: 102725 - DNA, 25 bp, SARS Virus
tctatgttaacaacaatgacttcca

SEQ ID NO: 102726 - DNA, 25 bp, SARS Virus
ctatgttaacagaaatgacttccac

SEQ ID NO: 102727 - DNA, 25 bp, SARS Virus
tatgttaacagcaatgacttccact

SEQ ID NO: 102728 - DNA, 25 bp, SARS Virus
atgttaacagcaatgacttccactg

SEQ ID NO: 102729 - DNA, 25 bp, SARS Virus
tgttaacagcaaagacttccactgc

SEQ ID NO: 102730 - DNA, 25 bp, SARS Virus
gttaacagcaataacttccactgcc

SEQ ID NO: 102731 - DNA, 25 bp, SARS Virus
ttaacagcaatgacttccactgccg

SEQ ID NO: 102732 - DNA, 25 bp, SARS Virus
taacagcaatgaattccactgccgt

SEQ ID NO: 102733 - DNA, 25 bp, SARS Virus
aacagcaatgacatccactgccgta

SEQ ID NO: 102734 - DNA, 25 bp, SARS Virus
acagcaatgactaccactgccgtaa

SEQ ID NO: 102735 - DNA, 25 bp, SARS Virus
cagcaatgacttacactgccgtaaa

SEQ ID NO: 102736 - DNA, 25 bp, SARS Virus
agcaatgacttcaactgccgtaaag

SEQ ID NO: 102737 - DNA, 25 bp, SARS Virus
gcaatgacttccactgccgtaaagt

SEQ ID NO: 102738 - DNA, 25 bp, SARS Virus
caatgacttccaatgccgtaaagtt

SEQ ID NO: 102739 - DNA, 25 bp, SARS Virus
aatgacttccacagccgtaaagttg

SEQ ID NO: 102740 - DNA, 25 bp, SARS Virus
atgacttccactaccgtaaagttgt

SEQ ID NO: 102741 - DNA, 25 bp, SARS Virus
tgacttccactgacgtaaagttgtg

SEQ ID NO: 102742 - DNA, 25 bp, SARS Virus
gacttccactgcagtaaagttgtgg

SEQ ID NO: 102743 - DNA, 25 bp, SARS Virus
acttccactgccataaagttgtggt

SEQ ID NO: 102744 - DNA, 25 bp, SARS Virus
cttccactgccgaaaagttgtggtt

SEQ ID NO: 102745 - DNA, 25 bp, SARS Virus
ttccactgccgtaaagttgtggttt

SEQ ID NO: 102746 - DNA, 25 bp, SARS Virus
tccactgccgtaaagttgtggtttt

SEQ ID NO: 102747 - DNA, 25 bp, SARS Virus
ccactgccgtaaagttgtggttttg

SEQ ID NO: 102748 - DNA, 25 bp, SARS Virus
cactgccgtaaaattgtggttttga

SEQ ID NO: 102749 - DNA, 25 bp, SARS Virus
actgccgtaaagatgtggttttgag

SEQ ID NO: 102750 - DNA, 25 bp, SARS Virus
ctgccgtaaagtagtggttttgagt

SEQ ID NO: 102751 - DNA, 25 bp, SARS Virus
tgccgtaaagttatggttttgagtt

SEQ ID NO: 102752 - DNA, 25 bp, SARS Virus
gccgtaaagttgaggttttgagttt

SEQ ID NO: 102753 - DNA, 25 bp, SARS Virus
ccgtaaagttgtagttttgagtttc

SEQ ID NO: 102754 - DNA, 25 bp, SARS Virus
cgtaaagttgtgattttgagtttct

SEQ ID NO: 102755 - DNA, 25 bp, SARS Virus
gtaaagttgtggatttgagtttctt

SEQ ID NO: 102756 - DNA, 25 bp, SARS Virus
taaagttgtggtattgagtttcttc

SEQ ID NO: 102757 - DNA, 25 bp, SARS Virus
aaagttgtggttatgagtttcttct

SEQ ID NO: 102758 - DNA, 25 bp, SARS Virus
aagttgtggtttagagtttcttctg

SEQ ID NO: 102759 - DNA, 25 bp, SARS Virus
agttgtggttttaagtttcttctga

SEQ ID NO: 102760 - DNA, 25 bp, SARS Virus
gttgtggttttgagtttcttctgat

SEQ ID NO: 102761 - DNA, 25 bp, SARS Virus
ttgtggttttgaatttcttctgatg

SEQ ID NO: 102762 - DNA, 25 bp, SARS Virus
tgtggttttgagattcttctgatgg

SEQ ID NO: 102763 - DNA, 25 bp, SARS Virus
gtggttttgagtatcttctgatggt

SEQ ID NO: 102764 - DNA, 25 bp, SARS Virus
tggttttgagttacttctgatggtt

SEQ ID NO: 102765 - DNA, 25 bp, SARS Virus
ggttttgagtttattctgatggttt

SEQ ID NO: 102766 - DNA, 25 bp, SARS Virus
gttttgagtttcatctgatggttta

SEQ ID NO: 102767 - DNA, 25 bp, SARS Virus
ttttgagtttctactgatggtttaa

SEQ ID NO: 102768 - DNA, 25 bp, SARS Virus
tttgagtttcttatgatggtttaac

SEQ ID NO: 102769 - DNA, 25 bp, SARS Virus
ttgagtttcttcagatggtttaacc

SEQ ID NO: 102770 - DNA, 25 bp, SARS Virus
tgagtttcttctaatggtttaacca

SEQ ID NO: 102771 - DNA, 25 bp, SARS Virus
gagtttcttctgatggtttaaccac

SEQ ID NO: 102772 - DNA, 25 bp, SARS Virus
agtttcttctgaaggtttaaccacc

SEQ ID NO: 102773 - DNA, 25 bp, SARS Virus
gtttcttctgatagtttaaccacca

SEQ ID NO: 102774 - DNA, 25 bp, SARS Virus
tttcttctgatgatttaaccaccaa

SEQ ID NO: 102775 - DNA, 25 bp, SARS Virus
ttcttctgatggattaaccaccaat

SEQ ID NO: 102776 - DNA, 25 bp, SARS Virus
tcttctgatggtataaccaccaata

SEQ ID NO: 102777 - DNA, 25 bp, SARS Virus
cttctgatggttaaaccaccaataa

SEQ ID NO: 102778 - DNA, 25 bp, SARS Virus
ttctgatggtttaaccaccaataag

SEQ ID NO: 102779 - DNA, 25 bp, SARS Virus
tctgatggtttaaccaccaataaga

SEQ ID NO: 102780 - DNA, 25 bp, SARS Virus
ctgatggtttaaacaccaataagac

SEQ ID NO: 102781 - DNA, 25 bp, SARS Virus
tgatggtttaacaaccaataagact

SEQ ID NO: 102782 - DNA, 25 bp, SARS Virus
gatggtttaaccaccaataagactc

SEQ ID NO: 102783 - DNA, 25 bp, SARS Virus
atggtttaaccaacaataagactcc

SEQ ID NO: 102784 - DNA, 25 bp, SARS Virus
tggtttaaccacaaataagactcct

SEQ ID NO: 102785 - DNA, 25 bp, SARS Virus
ggtttaaccaccaataagactccta

SEQ ID NO: 102786 - DNA, 25 bp, SARS Virus
gtttaaccaccaataagactcctat

SEQ ID NO: 102787 - DNA, 25 bp, SARS Virus
tttaaccaccaaaaagactcctatc

SEQ ID NO: 102788 - DNA, 25 bp, SARS Virus
ttaaccaccaataagactcctatcc

SEQ ID NO: 102789 - DNA, 25 bp, SARS Virus
taaccaccaataagactcctatccg

SEQ ID NO: 102790 - DNA, 25 bp, SARS Virus
aaccaccaataaaactcctatccgt

SEQ ID NO: 102791 - DNA, 25 bp, SARS Virus
accaccaataagactcctatccgtg

SEQ ID NO: 102792 - DNA, 25 bp, SARS Virus
ccaccaataagaatcctatccgtga

SEQ ID NO: 102793 - DNA, 25 bp, SARS Virus
caccaataagacacctatccgtgag

SEQ ID NO: 102794 - DNA, 25 bp, SARS Virus
accaataagactactatccgtgagt

SEQ ID NO: 102795 - DNA, 25 bp, SARS Virus
ccaataagactcatatccgtgagtc

SEQ ID NO: 102796 - DNA, 25 bp, SARS Virus
caataagactccaatccgtgagtcc

SEQ ID NO: 102797 - DNA, 25 bp, SARS Virus
aataagactcctatccgtgagtcca

SEQ ID NO: 102798 - DNA, 25 bp, SARS Virus
ataagactcctaaccgtgagtccac

SEQ ID NO: 102799 - DNA, 25 bp, SARS Virus
taagactcctatacgtgagtccaca

SEQ ID NO: 102800 - DNA, 25 bp, SARS Virus
aagactcctatcagtgagtccacaa

SEQ ID NO: 102801 - DNA, 25 bp, SARS Virus
agactcctatccatgagtccacaat

SEQ ID NO: 102802 - DNA, 25 bp, SARS Virus
gactcctatccgagagtccacaatt

SEQ ID NO: 102803 - DNA, 25 bp, SARS Virus
actcctatccgtaagtccacaattt

SEQ ID NO: 102804 - DNA, 25 bp, SARS Virus
ctcctatccgtgagtccacaatttc

SEQ ID NO: 102805 - DNA, 25 bp, SARS Virus
tcctatccgtgaatccacaatttct

SEQ ID NO: 102806 - DNA, 25 bp, SARS Virus
cctatccgtgagaccacaatttctg

SEQ ID NO: 102807 - DNA, 25 bp, SARS Virus
ctatccgtgagtacacaatttctga

SEQ ID NO: 102808 - DNA, 25 bp, SARS Virus
tatccgtgagtcaacaatttctgat

SEQ ID NO: 102809 - DNA, 25 bp, SARS Virus
atccgtgagtccacaatttctgata

SEQ ID NO: 102810 - DNA, 25 bp, SARS Virus
tccgtgagtccaaaatttctgatac

SEQ ID NO: 102811 - DNA, 25 bp, SARS Virus
ccgtgagtccacaatttctgataca

SEQ ID NO: 102812 - DNA, 25 bp, SARS Virus
cgtgagtccacaatttctgatacag

SEQ ID NO: 102813 - DNA, 25 bp, SARS Virus
gtgagtccacaaattctgatacagc

SEQ ID NO: 102814 - DNA, 25 bp, SARS Virus
tgagtccacaatatctgatacagca

SEQ ID NO: 102815 - DNA, 25 bp, SARS Virus
gagtccacaattactgatacagcaa

SEQ ID NO: 102816 - DNA, 25 bp, SARS Virus
agtccacaatttatgatacagcaac

SEQ ID NO: 102817 - DNA, 25 bp, SARS Virus
gtccacaatttcagatacagcaaca

SEQ ID NO: 102818 - DNA, 25 bp, SARS Virus
tccacaatttctaatacagcaacat

SEQ ID NO: 102819 - DNA, 25 bp, SARS Virus
ccacaatttctgatacagcaacatg

SEQ ID NO: 102820 - DNA, 25 bp, SARS Virus
cacaatttctgaaacagcaacatgt

SEQ ID NO: 102821 - DNA, 25 bp, SARS Virus
acaatttctgatacagcaacatgta

SEQ ID NO: 102822 - DNA, 25 bp, SARS Virus
caatttctgataaagcaacatgtac

SEQ ID NO: 102823 - DNA, 25 bp, SARS Virus
aatttctgatacagcaacatgtacc

SEQ ID NO: 102824 - DNA, 25 bp, SARS Virus
atttctgatacaacaacatgtaccg

SEQ ID NO: 102825 - DNA, 25 bp, SARS Virus
tttctgatacagaaacatgtaccga

SEQ ID NO: 102826 - DNA, 25 bp, SARS Virus
ttctgatacagcaacatgtaccgat

SEQ ID NO: 102827 - DNA, 25 bp, SARS Virus
tctgatacagcaacatgtaccgata

SEQ ID NO: 102828 - DNA, 25 bp, SARS Virus
ctgatacagcaaaatgtaccgataa

SEQ ID NO: 102829 - DNA, 25 bp, SARS Virus
tgatacagcaacatgtaccgataaa

SEQ ID NO: 102830 - DNA, 25 bp, SARS Virus
gatacagcaacaagtaccgataaag

SEQ ID NO: 102831 - DNA, 25 bp, SARS Virus
atacagcaacatataccgataaagt

SEQ ID NO: 102832 - DNA, 25 bp, SARS Virus
tacagcaacatgaaccgataaagtg

SEQ ID NO: 102833 - DNA, 25 bp, SARS Virus
acagcaacatgtaccgataaagtgg

SEQ ID NO: 102834 - DNA, 25 bp, SARS Virus
cagcaacatgtaacgataaagtggc

SEQ ID NO: 102835 - DNA, 25 bp, SARS Virus
agcaacatgtacagataaagtggct

SEQ ID NO: 102836 - DNA, 25 bp, SARS Virus
gcaacatgtaccaataaagtggctt

SEQ ID NO: 102837 - DNA, 25 bp, SARS Virus
caacatgtaccgataaagtggcttc

SEQ ID NO: 102838 - DNA, 25 bp, SARS Virus
aacatgtaccgaaaaagtggcttca

SEQ ID NO: 102839 - DNA, 25 bp, SARS Virus
acatgtaccgataaagtggcttcaa

SEQ ID NO: 102840 - DNA, 25 bp, SARS Virus
catgtaccgataaagtggcttcaaa

SEQ ID NO: 102841 - DNA, 25 bp, SARS Virus
atgtaccgataaagtggcttcaaat

SEQ ID NO: 102842 - DNA, 25 bp, SARS Virus
tgtaccgataaaatggcttcaaatg

SEQ ID NO: 102843 - DNA, 25 bp, SARS Virus
gtaccgataaagaggcttcaaatga

SEQ ID NO: 102844 - DNA, 25 bp, SARS Virus
taccgataaagtagcttcaaatgat

SEQ ID NO: 102845 - DNA, 25 bp, SARS Virus
accgataaagtgacttcaaatgatg

SEQ ID NO: 102846 - DNA, 25 bp, SARS Virus
ccgataaagtggattcaaatgatgg

SEQ ID NO: 102847 - DNA, 25 bp, SARS Virus
cgataaagtggcatcaaatgatggt

SEQ ID NO: 102848 - DNA, 25 bp, SARS Virus
gataaagtggctacaaatgatggtc

SEQ ID NO: 102849 - DNA, 25 bp, SARS Virus
ataaagtggcttaaaatgatggtcg

SEQ ID NO: 102850 - DNA, 25 bp, SARS Virus
taaagtggcttcaaatgatggtcga

SEQ ID NO: 102851 - DNA, 25 bp, SARS Virus
aaagtggcttcaaatgatggtcgaa

SEQ ID NO: 102852 - DNA, 25 bp, SARS Virus
aagtggcttcaaatgatggtcgaac

SEQ ID NO: 102853 - DNA, 25 bp, SARS Virus
agtggcttcaaaagatggtcgaact

SEQ ID NO: 102854 - DNA, 25 bp, SARS Virus
gtggcttcaaataatggtcgaactc

SEQ ID NO: 102855 - DNA, 25 bp, SARS Virus
tggcttcaaatgatggtcgaactca

SEQ ID NO: 102856 - DNA, 25 bp, SARS Virus
ggcttcaaatgaaggtcgaactcag

SEQ ID NO: 102857 - DNA, 25 bp, SARS Virus
gcttcaaatgatagtcgaactcaga

SEQ ID NO: 102858 - DNA, 25 bp, SARS Virus
cttcaaatgatgatcgaactcagat

SEQ ID NO: 102859 - DNA, 25 bp, SARS Virus
ttcaaatgatggacgaactcagatg

SEQ ID NO: 102860 - DNA, 25 bp, SARS Virus
tcaaatgatggtagaactcagatgt

SEQ ID NO: 102861 - DNA, 25 bp, SARS Virus
caaatgatggtcaaactcagatgtg

SEQ ID NO: 102862 - DNA, 25 bp, SARS Virus
aaatgatggtcgaactcagatgtgt

SEQ ID NO: 102863 - DNA, 25 bp, SARS Virus
aatgatggtcgaactcagatgtgtt

SEQ ID NO: 102864 - DNA, 25 bp, SARS Virus
atgatggtcgaaatcagatgtgttt

SEQ ID NO: 102865 - DNA, 25 bp, SARS Virus
tgatggtcgaacacagatgtgttta

SEQ ID NO: 102866 - DNA, 25 bp, SARS Virus
gatggtcgaactaagatgtgtttaa

SEQ ID NO: 102867 - DNA, 25 bp, SARS Virus
atggtcgaactcagatgtgtttaat

SEQ ID NO: 102868 - DNA, 25 bp, SARS Virus
tggtcgaactcaaatgtgtttaatg

SEQ ID NO: 102869 - DNA, 25 bp, SARS Virus
ggtcgaactcagatgtgtttaatga

SEQ ID NO: 102870 - DNA, 25 bp, SARS Virus
gtcgaactcagaagtgtttaatgat

SEQ ID NO: 102871 - DNA, 25 bp, SARS Virus
tcgaactcagatatgtttaatgatg

SEQ ID NO: 102872 - DNA, 25 bp, SARS Virus
cgaactcagatgagtttaatgatgt

SEQ ID NO: 102873 - DNA, 25 bp, SARS Virus
gaactcagatgtatttaatgatgtc

SEQ ID NO: 102874 - DNA, 25 bp, SARS Virus
aactcagatgtgattaatgatgtct

SEQ ID NO: 102875 - DNA, 25 bp, SARS Virus
actcagatgtgtataatgatgtctg

SEQ ID NO: 102876 - DNA, 25 bp, SARS Virus
ctcagatgtgttaaatgatgtctgt

SEQ ID NO: 102877 - DNA, 25 bp, SARS Virus
tcagatgtgtttaatgatgtctgtg

SEQ ID NO: 102878 - DNA, 25 bp, SARS Virus
cagatgtgtttaatgatgtctgtga

SEQ ID NO: 102879 - DNA, 25 bp, SARS Virus
agatgtgtttaaagatgtctgtgac

SEQ ID NO: 102880 - DNA, 25 bp, SARS Virus
gatgtgtttaataatgtctgtgacc

SEQ ID NO: 102881 - DNA, 25 bp, SARS Virus
atgtgtttaatgatgtctgtgacca

SEQ ID NO: 102882 - DNA, 25 bp, SARS Virus
tgtgtttaatgaagtctgtgaccat

SEQ ID NO: 102883 - DNA, 25 bp, SARS Virus
gtgtttaatgatatctgtgaccata

SEQ ID NO: 102884 - DNA, 25 bp, SARS Virus
tgtttaatgatgactgtgaccataa

SEQ ID NO: 102885 - DNA, 25 bp, SARS Virus
gtttaatgatgtatgtgaccataac

SEQ ID NO: 102886 - DNA, 25 bp, SARS Virus
tttaatgatgtcagtgaccataact

SEQ ID NO: 102887 - DNA, 25 bp, SARS Virus
ttaatgatgtctatgaccataactt

SEQ ID NO: 102888 - DNA, 25 bp, SARS Virus
taatgatgtctgagaccataacttt

SEQ ID NO: 102889 - DNA, 25 bp, SARS Virus
aatgatgtctgtaaccataactttt

SEQ ID NO: 102890 - DNA, 25 bp, SARS Virus
atgatgtctgtgaccataactttta

SEQ ID NO: 102891 - DNA, 25 bp, SARS Virus
tgatgtctgtgaacataacttttac

SEQ ID NO: 102892 - DNA, 25 bp, SARS Virus
gatgtctgtgacaataacttttacg

SEQ ID NO: 102893 - DNA, 25 bp, SARS Virus
atgtctgtgaccataacttttacga

SEQ ID NO: 102894 - DNA, 25 bp, SARS Virus
tgtctgtgaccaaaacttttacgat

SEQ ID NO: 102895 - DNA, 25 bp, SARS Virus
gtctgtgaccataacttttacgatg

SEQ ID NO: 102896 - DNA, 25 bp, SARS Virus
tctgtgaccataacttttacgatgt

SEQ ID NO: 102897 - DNA, 25 bp, SARS Virus
ctgtgaccataaattttacgatgta

SEQ ID NO: 102898 - DNA, 25 bp, SARS Virus
tgtgaccataacatttacgatgtaa

SEQ ID NO: 102899 - DNA, 25 bp, SARS Virus
gtgaccataactattacgatgtaag

SEQ ID NO: 102900 - DNA, 25 bp, SARS Virus
tgaccataacttatacgatgtaaga

SEQ ID NO: 102901 - DNA, 25 bp, SARS Virus
gaccataactttaacgatgtaagaa

SEQ ID NO: 102902 - DNA, 25 bp, SARS Virus
accataacttttacgatgtaagaag

SEQ ID NO: 102903 - DNA, 25 bp, SARS Virus
ccataacttttaagatgtaagaagt

SEQ ID NO: 102904 - DNA, 25 bp, SARS Virus
cataacttttacaatgtaagaagta

SEQ ID NO: 102905 - DNA, 25 bp, SARS Virus
ataacttttacgatgtaagaagtag

SEQ ID NO: 102906 - DNA, 25 bp, SARS Virus
taacttttacgaagtaagaagtaga

SEQ ID NO: 102907 - DNA, 25 bp, SARS Virus
aacttttacgatataagaagtagaa

SEQ ID NO: 102908 - DNA, 25 bp, SARS Virus
acttttacgatgaaagaagtagaaa

SEQ ID NO: 102909 - DNA, 25 bp, SARS Virus
cttttacgatgtaagaagtagaaat

SEQ ID NO: 102910 - DNA, 25 bp, SARS Virus
ttttacgatgtaagaagtagaaatt

SEQ ID NO: 102911 - DNA, 25 bp, SARS Virus
tttacgatgtaaaaagtagaaattg

SEQ ID NO: 102912 - DNA, 25 bp, SARS Virus
ttacgatgtaagaagtagaaattgt

SEQ ID NO: 102913 - DNA, 25 bp, SARS Virus
tacgatgtaagaagtagaaattgtt

SEQ ID NO: 102914 - DNA, 25 bp, SARS Virus
acgatgtaagaaatagaaattgttc

SEQ ID NO: 102915 - DNA, 25 bp, SARS Virus
cgatgtaagaagaagaaattgttcg

SEQ ID NO: 102916 - DNA, 25 bp, SARS Virus
gatgtaagaagtagaaattgttcga

SEQ ID NO: 102917 - DNA, 25 bp, SARS Virus
atgtaagaagtaaaaattgttcgaa

SEQ ID NO: 102918 - DNA, 25 bp, SARS Virus
tgtaagaagtagaaattgttcgaac

SEQ ID NO: 102919 - DNA, 25 bp, SARS Virus
gtaagaagtagaaattgttcgaaca

SEQ ID NO: 102920 - DNA, 25 bp, SARS Virus
taagaagtagaaattgttcgaacaa

SEQ ID NO: 102921 - DNA, 25 bp, SARS Virus
aagaagtagaaaatgttcgaacaat

SEQ ID NO: 102922 - DNA, 25 bp, SARS Virus
agaagtagaaatagttcgaacaatt

SEQ ID NO: 102923 - DNA, 25 bp, SARS Virus
gaagtagaaattattcgaacaattt

SEQ ID NO: 102924 - DNA, 25 bp, SARS Virus
aagtagaaattgatcgaacaatttc

SEQ ID NO: 102925 - DNA, 25 bp, SARS Virus
agtagaaattgtacgaacaatttct

SEQ ID NO: 102926 - DNA, 25 bp, SARS Virus
gtagaaattgttagaacaatttctg

SEQ ID NO: 102927 - DNA, 25 bp, SARS Virus
tagaaattgttcaaacaatttctgg

SEQ ID NO: 102928 - DNA, 25 bp, SARS Virus
agaaattgttcgaacaatttctggg

SEQ ID NO: 102929 - DNA, 25 bp, SARS Virus
gaaattgttcgaacaatttctgggt

SEQ ID NO: 102930 - DNA, 25 bp, SARS Virus
aaattgttcgaaaaatttctgggtg

SEQ ID NO: 102931 - DNA, 25 bp, SARS Virus
aattgttcgaacaatttctgggtgg

SEQ ID NO: 102932 - DNA, 25 bp, SARS Virus
attgttcgaacaatttctgggtggc

SEQ ID NO: 102933 - DNA, 25 bp, SARS Virus
ttgttcgaacaaattctgggtggct

SEQ ID NO: 102934 - DNA, 25 bp, SARS Virus
tgttcgaacaatatctgggtggctt

SEQ ID NO: 102935 - DNA, 25 bp, SARS Virus
gttcgaacaattactgggtggctta

SEQ ID NO: 102936 - DNA, 25 bp, SARS Virus
ttcgaacaatttatgggtggcttac

SEQ ID NO: 102937 - DNA, 25 bp, SARS Virus
tcgaacaatttcagggtggcttaca

SEQ ID NO: 102938 - DNA, 25 bp, SARS Virus
cgaacaatttctaggtggcttacac

SEQ ID NO: 102939 - DNA, 25 bp, SARS Virus
gaacaatttctgagtggcttacacg

SEQ ID NO: 102940 - DNA, 25 bp, SARS Virus
aacaatttctggatggcttacacgt

SEQ ID NO: 102941 - DNA, 25 bp, SARS Virus
acaatttctgggaggcttacacgtt

SEQ ID NO: 102942 - DNA, 25 bp, SARS Virus
caatttctgggtagcttacacgttt

SEQ ID NO: 102943 - DNA, 25 bp, SARS Virus
aatttctgggtgacttacacgttta

SEQ ID NO: 102944 - DNA, 25 bp, SARS Virus
atttctgggtggattacacgtttat

SEQ ID NO: 102945 - DNA, 25 bp, SARS Virus
tttctgggtggcatacacgtttatg

SEQ ID NO: 102946 - DNA, 25 bp, SARS Virus
ttctgggtggctaacacgtttatgt

SEQ ID NO: 102947 - DNA, 25 bp, SARS Virus
tctgggtggcttacacgtttatgtg

SEQ ID NO: 102948 - DNA, 25 bp, SARS Virus
ctgggtggcttaaacgtttatgtgt

SEQ ID NO: 102949 - DNA, 25 bp, SARS Virus
tgggtggcttacacgtttatgtgtg

SEQ ID NO: 102950 - DNA, 25 bp, SARS Virus
gggtggcttacaagtttatgtgtgt

SEQ ID NO: 102951 - DNA, 25 bp, SARS Virus
ggtggcttacacatttatgtgtgtt

SEQ ID NO: 102952 - DNA, 25 bp, SARS Virus
gtggcttacacgattatgtgtgtta

SEQ ID NO: 102953 - DNA, 25 bp, SARS Virus
tggcttacacgtatatgtgtgttag

SEQ ID NO: 102954 - DNA, 25 bp, SARS Virus
ggcttacacgttaatgtgtgttagc

SEQ ID NO: 102955 - DNA, 25 bp, SARS Virus
gcttacacgtttatgtgtgttagct

SEQ ID NO: 102956 - DNA, 25 bp, SARS Virus
cttacacgtttaagtgtgttagctg

SEQ ID NO: 102957 - DNA, 25 bp, SARS Virus
ttacacgtttatatgtgttagctgc

SEQ ID NO: 102958 - DNA, 25 bp, SARS Virus
tacacgtttatgagtgttagctgcc

SEQ ID NO: 102959 - DNA, 25 bp, SARS Virus
acacgtttatgtatgttagctgccg

SEQ ID NO: 102960 - DNA, 25 bp, SARS Virus
cacgtttatgtgagttagctgccga

SEQ ID NO: 102961 - DNA, 25 bp, SARS Virus
acgtttatgtgtattagctgccgag

SEQ ID NO: 102962 - DNA, 25 bp, SARS Virus
cgtttatgtgtgatagctgccgaga

SEQ ID NO: 102963 - DNA, 25 bp, SARS Virus
gtttatgtgtgtaagctgccgagaa

SEQ ID NO: 102964 - DNA, 25 bp, SARS Virus
tttatgtgtgttagctgccgagaag

SEQ ID NO: 102965 - DNA, 25 bp, SARS Virus
ttatgtgtgttaactgccgagaagt

SEQ ID NO: 102966 - DNA, 25 bp, SARS Virus
tatgtgtgttagatgccgagaagtc

SEQ ID NO: 102967 - DNA, 25 bp, SARS Virus
atgtgtgttagcagccgagaagtcc

SEQ ID NO: 102968 - DNA, 25 bp, SARS Virus
tgtgtgttagctaccgagaagtcct

SEQ ID NO: 102969 - DNA, 25 bp, SARS Virus
gtgtgttagctgacgagaagtcctc

SEQ ID NO: 102970 - DNA, 25 bp, SARS Virus
tgtgttagctgcagagaagtcctca

SEQ ID NO: 102971 - DNA, 25 bp, SARS Virus
gtgttagctgccaagaagtcctcaa

SEQ ID NO: 102972 - DNA, 25 bp, SARS Virus
tgttagctgccgagaagtcctcaac

SEQ ID NO: 102973 - DNA, 25 bp, SARS Virus
gttagctgccgaaaagtcctcaacg

SEQ ID NO: 102974 - DNA, 25 bp, SARS Virus
ttagctgccgagaagtcctcaacga

SEQ ID NO: 102975 - DNA, 25 bp, SARS Virus
tagctgccgagaagtcctcaacgat

SEQ ID NO: 102976 - DNA, 25 bp, SARS Virus
agctgccgagaaatcctcaacgatt

SEQ ID NO: 102977 - DNA, 25 bp, SARS Virus
gctgccgagaagacctcaacgatta

SEQ ID NO: 102978 - DNA, 25 bp, SARS Virus
ctgccgagaagtactcaacgattag

SEQ ID NO: 102979 - DNA, 25 bp, SARS Virus
tgccgagaagtcatcaacgattagg

SEQ ID NO: 102980 - DNA, 25 bp, SARS Virus
gccgagaagtccacaacgattaggt

SEQ ID NO: 102981 - DNA, 25 bp, SARS Virus
ccgagaagtcctaaacgattaggtc

SEQ ID NO: 102982 - DNA, 25 bp, SARS Virus
cgagaagtcctcaacgattaggtcg

SEQ ID NO: 102983 - DNA, 25 bp, SARS Virus
gagaagtcctcaacgattaggtcgt

SEQ ID NO: 102984 - DNA, 25 bp, SARS Virus
agaagtcctcaaagattaggtcgtt

SEQ ID NO: 102985 - DNA, 25 bp, SARS Virus
gaagtcctcaacaattaggtcgtta

SEQ ID NO: 102986 - DNA, 25 bp, SARS Virus
aagtcctcaacgattaggtcgttac

SEQ ID NO: 102987 - DNA, 25 bp, SARS Virus
agtcctcaacgaataggtcgttacc

SEQ ID NO: 102988 - DNA, 25 bp, SARS Virus
gtcctcaacgataaggtcgttacct

SEQ ID NO: 102989 - DNA, 25 bp, SARS Virus
tcctcaacgattaggtcgttaccta

SEQ ID NO: 102990 - DNA, 25 bp, SARS Virus
cctcaacgattaagtcgttacctag

SEQ ID NO: 102991 - DNA, 25 bp, SARS Virus
ctcaacgattagatcgttacctagg

SEQ ID NO: 102992 - DNA, 25 bp, SARS Virus
tcaacgattaggacgttacctaggt

SEQ ID NO: 102993 - DNA, 25 bp, SARS Virus
caacgattaggtagttacctaggtt

SEQ ID NO: 102994 - DNA, 25 bp, SARS Virus
aacgattaggtcattacctaggtta

SEQ ID NO: 102995 - DNA, 25 bp, SARS Virus
acgattaggtcgatacctaggttaa

SEQ ID NO: 102996 - DNA, 25 bp, SARS Virus
cgattaggtcgtaacctaggttaaa

SEQ ID NO: 102997 - DNA, 25 bp, SARS Virus
gattaggtcgttacctaggttaaat

SEQ ID NO: 102998 - DNA, 25 bp, SARS Virus
attaggtcgttaactaggttaaata

SEQ ID NO: 102999 - DNA, 25 bp, SARS Virus
ttaggtcgttacataggttaaatac

SEQ ID NO: 103000 - DNA, 25 bp, SARS Virus
taggtcgttaccaaggttaaatact

SEQ ID NO: 103001 - DNA, 25 bp, SARS Virus
aggtcgttacctaggttaaatacta

SEQ ID NO: 103002 - DNA, 25 bp, SARS Virus
ggtcgttacctaagttaaatactac

SEQ ID NO: 103003 - DNA, 25 bp, SARS Virus
gtcgttacctagattaaatactact

SEQ ID NO: 103004 - DNA, 25 bp, SARS Virus
tcgttacctaggataaatactactc

SEQ ID NO: 103005 - DNA, 25 bp, SARS Virus
cgttacctaggtaaaatactactcg

SEQ ID NO: 103006 - DNA, 25 bp, SARS Virus
gttacctaggttaaatactactcgg

SEQ ID NO: 103007 - DNA, 25 bp, SARS Virus
ttacctaggttaaatactactcggc

SEQ ID NO: 103008 - DNA, 25 bp, SARS Virus
tacctaggttaaatactactcggct

SEQ ID NO: 103009 - DNA, 25 bp, SARS Virus
acctaggttaaaaactactcggctg

SEQ ID NO: 103010 - DNA, 25 bp, SARS Virus
cctaggttaaatactactcggctgc

SEQ ID NO: 103011 - DNA, 25 bp, SARS Virus
ctaggttaaataatactcggctgct

SEQ ID NO: 103012 - DNA, 25 bp, SARS Virus
taggttaaatacaactcggctgctg

SEQ ID NO: 103013 - DNA, 25 bp, SARS Virus
aggttaaatactactcggctgctgc

SEQ ID NO: 103014 - DNA, 25 bp, SARS Virus
ggttaaatactaatcggctgctgct

SEQ ID NO: 103015 - DNA, 25 bp, SARS Virus
gttaaatactacacggctgctgctg

SEQ ID NO: 103016 - DNA, 25 bp, SARS Virus
ttaaatactactaggctgctgctga

SEQ ID NO: 103017 - DNA, 25 bp, SARS Virus
taaatactactcagctgctgctgat

SEQ ID NO: 103018 - DNA, 25 bp, SARS Virus
aaatactactcgactgctgctgatg

SEQ ID NO: 103019 - DNA, 25 bp, SARS Virus
aatactactcggatgctgctgatga

SEQ ID NO: 103020 - DNA, 25 bp, SARS Virus
atactactcggcagctgctgatgat

SEQ ID NO: 103021 - DNA, 25 bp, SARS Virus
tactactcggctactgctgatgatc

SEQ ID NO: 103022 - DNA, 25 bp, SARS Virus
actactcggctgatgctgatgatcg

SEQ ID NO: 103023 - DNA, 25 bp, SARS Virus
ctactcggctgcagctgatgatcgc

SEQ ID NO: 103024 - DNA, 25 bp, SARS Virus
tactcggctgctactgatgatcgca

SEQ ID NO: 103025 - DNA, 25 bp, SARS Virus
actcggctgctgatgatgatcgcac

SEQ ID NO: 103026 - DNA, 25 bp, SARS Virus
ctcggctgctgcagatgatcgcacg

SEQ ID NO: 103027 - DNA, 25 bp, SARS Virus
tcggctgctgctaatgatcgcacgg

SEQ ID NO: 103028 - DNA, 25 bp, SARS Virus
cggctgctgctgatgatcgcacgga

SEQ ID NO: 103029 - DNA, 25 bp, SARS Virus
ggctgctgctgaagatcgcacggaa

SEQ ID NO: 103030 - DNA, 25 bp, SARS Virus
gctgctgctgataatcgcacggaaa

SEQ ID NO: 103031 - DNA, 25 bp, SARS Virus
ctgctgctgatgatcgcacggaaac

SEQ ID NO: 103032 - DNA, 25 bp, SARS Virus
tgctgctgatgaacgcacggaaaca

SEQ ID NO: 103033 - DNA, 25 bp, SARS Virus
gctgctgatgatagcacggaaacat

SEQ ID NO: 103034 - DNA, 25 bp, SARS Virus
ctgctgatgatcacacggaaacatt

SEQ ID NO: 103035 - DNA, 25 bp, SARS Virus
tgctgatgatcgaacggaaacattc

SEQ ID NO: 103036 - DNA, 25 bp, SARS Virus
gctgatgatcgcacggaaacattcg

SEQ ID NO: 103037 - DNA, 25 bp, SARS Virus
ctgatgatcgcaaggaaacattcgt

SEQ ID NO: 103038 - DNA, 25 bp, SARS Virus
tgatgatcgcacagaaacattcgtg

SEQ ID NO: 103039 - DNA, 25 bp, SARS Virus
gatgatcgcacgaaaacattcgtgt

SEQ ID NO: 103040 - DNA, 25 bp, SARS Virus
atgatcgcacggaaacattcgtgtt

SEQ ID NO: 103041 - DNA, 25 bp, SARS Virus
tgatcgcacggaaacattcgtgttc

SEQ ID NO: 103042 - DNA, 25 bp, SARS Virus
gatcgcacggaaacattcgtgttct

SEQ ID NO: 103043 - DNA, 25 bp, SARS Virus
atcgcacggaaaaattcgtgttctt

SEQ ID NO: 103044 - DNA, 25 bp, SARS Virus
tcgcacggaaacattcgtgttcttt

SEQ ID NO: 103045 - DNA, 25 bp, SARS Virus
cgcacggaaacaatcgtgttctttc

SEQ ID NO: 103046 - DNA, 25 bp, SARS Virus
gcacggaaacatacgtgttctttca

SEQ ID NO: 103047 - DNA, 25 bp, SARS Virus
cacggaaacattagtgttctttcac

SEQ ID NO: 103048 - DNA, 25 bp, SARS Virus
acggaaacattcatgttctttcact

SEQ ID NO: 103049 - DNA, 25 bp, SARS Virus
cggaaacattcgagttctttcactc

SEQ ID NO: 103050 - DNA, 25 bp, SARS Virus
ggaaacattcgtattctttcactca

SEQ ID NO: 103051 - DNA, 25 bp, SARS Virus
gaaacattcgtgatctttcactcat

SEQ ID NO: 103052 - DNA, 25 bp, SARS Virus
aaacattcgtgtactttcactcatg

SEQ ID NO: 103053 - DNA, 25 bp, SARS Virus
aacattcgtgttatttcactcatgc

SEQ ID NO: 103054 - DNA, 25 bp, SARS Virus
acattcgtgttcattcactcatgct

SEQ ID NO: 103055 - DNA, 25 bp, SARS Virus
cattcgtgttctatcactcatgctt

SEQ ID NO: 103056 - DNA, 25 bp, SARS Virus
attcgtgttcttacactcatgcttg

SEQ ID NO: 103057 - DNA, 25 bp, SARS Virus
ttcgtgttctttaactcatgcttga

SEQ ID NO: 103058 - DNA, 25 bp, SARS Virus
tcgtgttctttcactcatgcttgaa

SEQ ID NO: 103059 - DNA, 25 bp, SARS Virus
cgtgttctttcaatcatgcttgaat

SEQ ID NO: 103060 - DNA, 25 bp, SARS Virus
gtgttctttcacacatgcttgaata

SEQ ID NO: 103061 - DNA, 25 bp, SARS Virus
tgttctttcactaatgcttgaatac

SEQ ID NO: 103062 - DNA, 25 bp, SARS Virus
gttctttcactcatgcttgaataca

SEQ ID NO: 103063 - DNA, 25 bp, SARS Virus
ttctttcactcaagcttgaatacat

SEQ ID NO: 103064 - DNA, 25 bp, SARS Virus
tctttcactcatacttgaatacatg

SEQ ID NO: 103065 - DNA, 25 bp, SARS Virus
ctttcactcatgattgaatacatga

SEQ ID NO: 103066 - DNA, 25 bp, SARS Virus
tttcactcatgcatgaatacatgag

SEQ ID NO: 103067 - DNA, 25 bp, SARS Virus
ttcactcatgctagaatacatgagt

SEQ ID NO: 103068 - DNA, 25 bp, SARS Virus
tcactcatgcttaaatacatgagta

SEQ ID NO: 103069 - DNA, 25 bp, SARS Virus
cactcatgcttgaatacatgagtaa

SEQ ID NO: 103070 - DNA, 25 bp, SARS Virus
actcatgcttgaatacatgagtaag

SEQ ID NO: 103071 - DNA, 25 bp, SARS Virus
ctcatgcttgaaaacatgagtaagc

SEQ ID NO: 103072 - DNA, 25 bp, SARS Virus
tcatgcttgaatacatgagtaagca

SEQ ID NO: 103073 - DNA, 25 bp, SARS Virus
catgcttgaataaatgagtaagcaa

SEQ ID NO: 103074 - DNA, 25 bp, SARS Virus
atgcttgaatacatgagtaagcaaa

SEQ ID NO: 103075 - DNA, 25 bp, SARS Virus
tgcttgaatacaagagtaagcaaag

SEQ ID NO: 103076 - DNA, 25 bp, SARS Virus
gcttgaatacataagtaagcaaagc

SEQ ID NO: 103077 - DNA, 25 bp, SARS Virus
cttgaatacatgagtaagcaaagcc

SEQ ID NO: 103078 - DNA, 25 bp, SARS Virus
ttgaatacatgaataagcaaagcct

SEQ ID NO: 103079 - DNA, 25 bp, SARS Virus
tgaatacatgagaaagcaaagcctt

SEQ ID NO: 103080 - DNA, 25 bp, SARS Virus
gaatacatgagtaagcaaagccttc

SEQ ID NO: 103081 - DNA, 25 bp, SARS Virus
aatacatgagtaagcaaagccttct

SEQ ID NO: 103082 - DNA, 25 bp, SARS Virus
atacatgagtaaacaaagccttctt

SEQ ID NO: 103083 - DNA, 25 bp, SARS Virus
tacatgagtaagaaaagccttcttt

SEQ ID NO: 103084 - DNA, 25 bp, SARS Virus
acatgagtaagcaaagccttctttg

SEQ ID NO: 103085 - DNA, 25 bp, SARS Virus
catgagtaagcaaagccttctttgt

SEQ ID NO: 103086 - DNA, 25 bp, SARS Virus
atgagtaagcaaagccttctttgtc

SEQ ID NO: 103087 - DNA, 25 bp, SARS Virus
tgagtaagcaaaaccttctttgtcc

SEQ ID NO: 103088 - DNA, 25 bp, SARS Virus
gagtaagcaaagacttctttgtcca

SEQ ID NO: 103089 - DNA, 25 bp, SARS Virus
agtaagcaaagcattctttgtccat

SEQ ID NO: 103090 - DNA, 25 bp, SARS Virus
gtaagcaaagccatctttgtccatg

SEQ ID NO: 103091 - DNA, 25 bp, SARS Virus
taagcaaagcctactttgtccatgc

SEQ ID NO: 103092 - DNA, 25 bp, SARS Virus
aagcaaagccttatttgtccatgca

SEQ ID NO: 103093 - DNA, 25 bp, SARS Virus
agcaaagccttcattgtccatgcaa

SEQ ID NO: 103094 - DNA, 25 bp, SARS Virus
gcaaagccttctatgtccatgcaat

SEQ ID NO: 103095 - DNA, 25 bp, SARS Virus
caaagccttcttagtccatgcaatt

SEQ ID NO: 103096 - DNA, 25 bp, SARS Virus
aaagccttctttatccatgcaatta

SEQ ID NO: 103097 - DNA, 25 bp, SARS Virus
tctacaaccgaaccaaccttcacgt

SEQ ID NO: 103098 - DNA, 25 bp, SARS Virus
ctacaaccgaaacaaccttcacgtt

SEQ ID NO: 103099 - DNA, 25 bp, SARS Virus
tacaaccgaaaccaccttcacgttt

SEQ ID NO: 103100 - DNA, 25 bp, SARS Virus
acaaccgaaacacccttcacgttta

SEQ ID NO: 103101 - DNA, 25 bp, SARS Virus
caaccgaaacaaccttcacgtttag

SEQ ID NO: 103102 - DNA, 25 bp, SARS Virus
aaccgaaacaaccttcacgtttagg

SEQ ID NO: 103103 - DNA, 25 bp, SARS Virus
accgaaacaaccctcacgtttaggt

SEQ ID NO: 103104 - DNA, 25 bp, SARS Virus
ccgaaacaacctccacgtttaggtt

SEQ ID NO: 103105 - DNA, 25 bp, SARS Virus
cgaaacaaccttcacgtttaggttc

SEQ ID NO: 103106 - DNA, 25 bp, SARS Virus
gaaacaaccttcccgtttaggttct

SEQ ID NO: 103107 - DNA, 25 bp, SARS Virus
aaacaaccttcacgtttaggttctt

SEQ ID NO: 103108 - DNA, 25 bp, SARS Virus
aacaaccttcacctttaggttcttg

SEQ ID NO: 103109 - DNA, 25 bp, SARS Virus
acaaccttcacgcttaggttcttgg

SEQ ID NO: 103110 - DNA, 25 bp, SARS Virus
caaccttcacgtctaggttcttggg

SEQ ID NO: 103111 - DNA, 25 bp, SARS Virus
aaccttcacgttcaggttcttgggt

SEQ ID NO: 103112 - DNA, 25 bp, SARS Virus
accttcacgtttcggttcttgggta

SEQ ID NO: 103113 - DNA, 25 bp, SARS Virus
ccttcacgtttacgttcttgggtaa

SEQ ID NO: 103114 - DNA, 25 bp, SARS Virus
cttcacgtttagcttcttgggtaat

SEQ ID NO: 103115 - DNA, 25 bp, SARS Virus
ttcacgtttaggctcttgggtaatg

SEQ ID NO: 103116 - DNA, 25 bp, SARS Virus
tcacgtttaggtccttgggtaatga

SEQ ID NO: 103117 - DNA, 25 bp, SARS Virus
cacgtttaggttcttgggtaatgaa

SEQ ID NO: 103118 - DNA, 25 bp, SARS Virus
acgtttaggttcctgggtaatgaaa

SEQ ID NO: 103119 - DNA, 25 bp, SARS Virus
cgtttaggttctcgggtaatgaaat

SEQ ID NO: 103120 - DNA, 25 bp, SARS Virus
gtttaggttcttcggtaatgaaata

SEQ ID NO: 103121 - DNA, 25 bp, SARS Virus
tttaggttcttgcgtaatgaaatac

SEQ ID NO: 103122 - DNA, 25 bp, SARS Virus
ttaggttcttggctaatgaaatact

SEQ ID NO: 103123 - DNA, 25 bp, SARS Virus
taggttcttgggcaatgaaatacta

SEQ ID NO: 103124 - DNA, 25 bp, SARS Virus
aggttcttgggtcatgaaatactac

SEQ ID NO: 103125 - DNA, 25 bp, SARS Virus
ggttcttgggtactgaaatactacg

SEQ ID NO: 103126 - DNA, 25 bp, SARS Virus
gttcttgggtaacgaaatactacgg

SEQ ID NO: 103127 - DNA, 25 bp, SARS Virus
ttcttgggtaatcaaatactacggt

SEQ ID NO: 103128 - DNA, 25 bp, SARS Virus
tcttgggtaatgcaatactacggtt

SEQ ID NO: 103129 - DNA, 25 bp, SARS Virus
cttgggtaatgacatactacggttg

SEQ ID NO: 103130 - DNA, 25 bp, SARS Virus
ttgggtaatgaactactacggttga

SEQ ID NO: 103131 - DNA, 25 bp, SARS Virus
tgggtaatgaaacactacggttgat

SEQ ID NO: 103132 - DNA, 25 bp, SARS Virus
gggtaatgaaatcctacggttgatg

SEQ ID NO: 103133 - DNA, 25 bp, SARS Virus
ggtaatgaaatactacggttgatga

SEQ ID NO: 103134 - DNA, 25 bp, SARS Virus
gtaatgaaataccacggttgatgaa

SEQ ID NO: 103135 - DNA, 25 bp, SARS Virus
taatgaaatactccggttgatgaaa

SEQ ID NO: 103136 - DNA, 25 bp, SARS Virus
aatgaaatactacggttgatgaaac

SEQ ID NO: 103137 - DNA, 25 bp, SARS Virus
atgaaatactaccgttgatgaaaca

SEQ ID NO: 103138 - DNA, 25 bp, SARS Virus
tgaaatactacgcttgatgaaacaa

SEQ ID NO: 103139 - DNA, 25 bp, SARS Virus
gaaatactacggctgatgaaacaaa

SEQ ID NO: 103140 - DNA, 25 bp, SARS Virus
aaatactacggtcgatgaaacaaac

SEQ ID NO: 103141 - DNA, 25 bp, SARS Virus
aatactacggttcatgaaacaaacg

SEQ ID NO: 103142 - DNA, 25 bp, SARS Virus
atactacggttgctgaaacaaacga

SEQ ID NO: 103143 - DNA, 25 bp, SARS Virus
tactacggttgacgaaacaaacgac

SEQ ID NO: 103144 - DNA, 25 bp, SARS Virus
actacggttgatcaaacaaacgacc

SEQ ID NO: 103145 - DNA, 25 bp, SARS Virus
ctacggttgatgcaacaaacgaccg

SEQ ID NO: 103146 - DNA, 25 bp, SARS Virus
tacggttgatgacacaaacgaccgt

SEQ ID NO: 103147 - DNA, 25 bp, SARS Virus
acggttgatgaaccaaacgaccgtg

SEQ ID NO: 103148 - DNA, 25 bp, SARS Virus
cggttgatgaaacaaacgaccgtgt

SEQ ID NO: 103149 - DNA, 25 bp, SARS Virus
ggttgatgaaaccaacgaccgtgtg

SEQ ID NO: 103150 - DNA, 25 bp, SARS Virus
gttgatgaaacacacgaccgtgtgt

SEQ ID NO: 103151 - DNA, 25 bp, SARS Virus
ttgatgaaacaaccgaccgtgtgtg

SEQ ID NO: 103152 - DNA, 25 bp, SARS Virus
tgatgaaacaaacgaccgtgtgtgt

SEQ ID NO: 103153 - DNA, 25 bp, SARS Virus
gatgaaacaaaccaccgtgtgtgta

SEQ ID NO: 103154 - DNA, 25 bp, SARS Virus
atgaaacaaacgcccgtgtgtgtat

SEQ ID NO: 103155 - DNA, 25 bp, SARS Virus
tgaaacaaacgaccgtgtgtgtatt

SEQ ID NO: 103156 - DNA, 25 bp, SARS Virus
gaaacaaacgaccgtgtgtgtattg

SEQ ID NO: 103157 - DNA, 25 bp, SARS Virus
aaacaaacgaccctgtgtgtattga

SEQ ID NO: 103158 - DNA, 25 bp, SARS Virus
aacaaacgaccgcgtgtgtattgat

SEQ ID NO: 103159 - DNA, 25 bp, SARS Virus
acaaacgaccgtctgtgtattgata

SEQ ID NO: 103160 - DNA, 25 bp, SARS Virus
caaacgaccgtgcgtgtattgatac

SEQ ID NO: 103161 - DNA, 25 bp, SARS Virus
aaacgaccgtgtctgtattgatact

SEQ ID NO: 103162 - DNA, 25 bp, SARS Virus
aacgaccgtgtgcgtattgatactg

SEQ ID NO: 103163 - DNA, 25 bp, SARS Virus
acgaccgtgtgtctattgatactga

SEQ ID NO: 103164 - DNA, 25 bp, SARS Virus
cgaccgtgtgtgcattgatactgat

SEQ ID NO: 103165 - DNA, 25 bp, SARS Virus
gaccgtgtgtgtcttgatactgatg

SEQ ID NO: 103166 - DNA, 25 bp, SARS Virus
accgtgtgtgtactgatactgatga

SEQ ID NO: 103167 - DNA, 25 bp, SARS Virus
ccgtgtgtgtatcgatactgatgac

SEQ ID NO: 103168 - DNA, 25 bp, SARS Virus
cgtgtgtgtattcatactgatgaca

SEQ ID NO: 103169 - DNA, 25 bp, SARS Virus
gtgtgtgtattgctactgatgacat

SEQ ID NO: 103170 - DNA, 25 bp, SARS Virus
tgtgtgtattgacactgatgacata

SEQ ID NO: 103171 - DNA, 25 bp, SARS Virus
gtgtgtattgatcctgatgacatat

SEQ ID NO: 103172 - DNA, 25 bp, SARS Virus
tgtgtattgatactgatgacatatg

SEQ ID NO: 103173 - DNA, 25 bp, SARS Virus
gtgtattgataccgatgacatatgg

SEQ ID NO: 103174 - DNA, 25 bp, SARS Virus
tgtattgatactcatgacatatggt

SEQ ID NO: 103175 - DNA, 25 bp, SARS Virus
gtattgatactgctgacatatggta

SEQ ID NO: 103176 - DNA, 25 bp, SARS Virus
tattgatactgacgacatatggtat

SEQ ID NO: 103177 - DNA, 25 bp, SARS Virus
attgatactgatcacatatggtata

SEQ ID NO: 103178 - DNA, 25 bp, SARS Virus
ttgatactgatgccatatggtatat

SEQ ID NO: 103179 - DNA, 25 bp, SARS Virus
tgatactgatgacatatggtatatt

SEQ ID NO: 103180 - DNA, 25 bp, SARS Virus
gatactgatgacctatggtatattg

SEQ ID NO: 103181 - DNA, 25 bp, SARS Virus
atactgatgacacatggtatattgt

SEQ ID NO: 103182 - DNA, 25 bp, SARS Virus
tactgatgacatctggtatattgtc

SEQ ID NO: 103183 - DNA, 25 bp, SARS Virus
actgatgacatacggtatattgtca

SEQ ID NO: 103184 - DNA, 25 bp, SARS Virus
ctgatgacatatcgtatattgtcac

SEQ ID NO: 103185 - DNA, 25 bp, SARS Virus
tgatgacatatgctatattgtcaca

SEQ ID NO: 103186 - DNA, 25 bp, SARS Virus
gatgacatatggcatattgtcacag

SEQ ID NO: 103187 - DNA, 25 bp, SARS Virus
atgacatatggtctattgtcacagt

SEQ ID NO: 103188 - DNA, 25 bp, SARS Virus
tgacatatggtacattgtcacagtg

SEQ ID NO: 103189 - DNA, 25 bp, SARS Virus
gacatatggtatcttgtcacagtgt

SEQ ID NO: 103190 - DNA, 25 bp, SARS Virus
acatatggtatactgtcacagtgtc

SEQ ID NO: 103191 - DNA, 25 bp, SARS Virus
catatggtatatcgtcacagtgtct

SEQ ID NO: 103192 - DNA, 25 bp, SARS Virus
atatggtatattctcacagtgtcta

SEQ ID NO: 103193 - DNA, 25 bp, SARS Virus
tatggtatattgccacagtgtctat

SEQ ID NO: 103194 - DNA, 25 bp, SARS Virus
atggtatattgtcacagtgtctatg

SEQ ID NO: 103195 - DNA, 25 bp, SARS Virus
tggtatattgtcccagtgtctatgt

SEQ ID NO: 103196 - DNA, 25 bp, SARS Virus
ggtatattgtcacagtgtctatgtt

SEQ ID NO: 103197 - DNA, 25 bp, SARS Virus
gtatattgtcaccgtgtctatgtta

SEQ ID NO: 103198 - DNA, 25 bp, SARS Virus
tatattgtcacactgtctatgttaa

SEQ ID NO: 103199 - DNA, 25 bp, SARS Virus
atattgtcacagcgtctatgttaac

SEQ ID NO: 103200 - DNA, 25 bp, SARS Virus
tattgtcacagtctctatgttaaca

SEQ ID NO: 103201 - DNA, 25 bp, SARS Virus
attgtcacagtgcctatgttaacag

SEQ ID NO: 103202 - DNA, 25 bp, SARS Virus
ttgtcacagtgtctatgttaacagc

SEQ ID NO: 103203 - DNA, 25 bp, SARS Virus
tgtcacagtgtccatgttaacagca

SEQ ID NO: 103204 - DNA, 25 bp, SARS Virus
gtcacagtgtctctgttaacagcaa

SEQ ID NO: 103205 - DNA, 25 bp, SARS Virus
tcacagtgtctacgttaacagcaat

SEQ ID NO: 103206 - DNA, 25 bp, SARS Virus
cacagtgtctatcttaacagcaatg

SEQ ID NO: 103207 - DNA, 25 bp, SARS Virus
acagtgtctatgctaacagcaatga

SEQ ID NO: 103208 - DNA, 25 bp, SARS Virus
cagtgtctatgtcaacagcaatgac

SEQ ID NO: 103209 - DNA, 25 bp, SARS Virus
agtgtctatgttcacagcaatgact

SEQ ID NO: 103210 - DNA, 25 bp, SARS Virus
gtgtctatgttaccagcaatgactt

SEQ ID NO: 103211 - DNA, 25 bp, SARS Virus
tgtctatgttaacagcaatgacttc

SEQ ID NO: 103212 - DNA, 25 bp, SARS Virus
gtctatgttaaccgcaatgacttcc

SEQ ID NO: 103213 - DNA, 25 bp, SARS Virus
tctatgttaacaccaatgacttcca

SEQ ID NO: 103214 - DNA, 25 bp, SARS Virus
ctatgttaacagcaatgacttccac

SEQ ID NO: 103215 - DNA, 25 bp, SARS Virus
tatgttaacagccatgacttccact

SEQ ID NO: 103216 - DNA, 25 bp, SARS Virus
atgttaacagcactgacttccactg

SEQ ID NO: 103217 - DNA, 25 bp, SARS Virus
tgttaacagcaacgacttccactgc

SEQ ID NO: 103218 - DNA, 25 bp, SARS Virus
gttaacagcaatcacttccactgcc

SEQ ID NO: 103219 - DNA, 25 bp, SARS Virus
ttaacagcaatgccttccactgccg

SEQ ID NO: 103220 - DNA, 25 bp, SARS Virus
taacagcaatgacttccactgccgt

SEQ ID NO: 103221 - DNA, 25 bp, SARS Virus
aacagcaatgacctccactgccgta

SEQ ID NO: 103222 - DNA, 25 bp, SARS Virus
acagcaatgactcccactgccgtaa

SEQ ID NO: 103223 - DNA, 25 bp, SARS Virus
cagcaatgacttccactgccgtaaa

SEQ ID NO: 103224 - DNA, 25 bp, SARS Virus
agcaatgacttccactgccgtaaag

SEQ ID NO: 103225 - DNA, 25 bp, SARS Virus
gcaatgacttcccctgccgtaaagt

SEQ ID NO: 103226 - DNA, 25 bp, SARS Virus
caatgacttccactgccgtaaagtt

SEQ ID NO: 103227 - DNA, 25 bp, SARS Virus
aatgacttccaccgccgtaaagttg

SEQ ID NO: 103228 - DNA, 25 bp, SARS Virus
atgacttccactcccgtaaagttgt

SEQ ID NO: 103229 - DNA, 25 bp, SARS Virus
tgacttccactgccgtaaagttgtg

SEQ ID NO: 103230 - DNA, 25 bp, SARS Virus
gacttccactgccgtaaagttgtgg

SEQ ID NO: 103231 - DNA, 25 bp, SARS Virus
acttccactgccctaaagttgtggt

SEQ ID NO: 103232 - DNA, 25 bp, SARS Virus
cttccactgccgcaaagttgtggtt

SEQ ID NO: 103233 - DNA, 25 bp, SARS Virus
ttccactgccgtcaagttgtggttt

SEQ ID NO: 103234 - DNA, 25 bp, SARS Virus
tccactgccgtacagttgtggtttt

SEQ ID NO: 103235 - DNA, 25 bp, SARS Virus
ccactgccgtaacgttgtggttttg

SEQ ID NO: 103236 - DNA, 25 bp, SARS Virus
cactgccgtaaacttgtggttttga

SEQ ID NO: 103237 - DNA, 25 bp, SARS Virus
actgccgtaaagctgtggttttgag

SEQ ID NO: 103238 - DNA, 25 bp, SARS Virus
ctgccgtaaagtcgtggttttgagt

SEQ ID NO: 103239 - DNA, 25 bp, SARS Virus
tgccgtaaagttctggttttgagtt

SEQ ID NO: 103240 - DNA, 25 bp, SARS Virus
gccgtaaagttgcggttttgagttt

SEQ ID NO: 103241 - DNA, 25 bp, SARS Virus
ccgtaaagttgtcgttttgagtttc

SEQ ID NO: 103242 - DNA, 25 bp, SARS Virus
cgtaaagttgtgcttttgagtttct

SEQ ID NO: 103243 - DNA, 25 bp, SARS Virus
gtaaagttgtggctttgagtttctt

SEQ ID NO: 103244 - DNA, 25 bp, SARS Virus
taaagttgtggtcttgagtttcttc

SEQ ID NO: 103245 - DNA, 25 bp, SARS Virus
aaagttgtggttctgagtttcttct

SEQ ID NO: 103246 - DNA, 25 bp, SARS Virus
aagttgtggtttcgagtttcttctg

SEQ ID NO: 103247 - DNA, 25 bp, SARS Virus
agttgtggttttcagtttcttctga

SEQ ID NO: 103248 - DNA, 25 bp, SARS Virus
gttgtggttttgcgtttcttctgat

SEQ ID NO: 103249 - DNA, 25 bp, SARS Virus
ttgtggttttgactttcttctgatg

SEQ ID NO: 103250 - DNA, 25 bp, SARS Virus
tgtggttttgagcttcttctgatgg

SEQ ID NO: 103251 - DNA, 25 bp, SARS Virus
gtggttttgagtctcttctgatggt

SEQ ID NO: 103252 - DNA, 25 bp, SARS Virus
tggttttgagttccttctgatggtt

SEQ ID NO: 103253 - DNA, 25 bp, SARS Virus
ggttttgagtttcttctgatggttt

SEQ ID NO: 103254 - DNA, 25 bp, SARS Virus
gttttgagtttcctctgatggttta

SEQ ID NO: 103255 - DNA, 25 bp, SARS Virus
ttttgagtttctcctgatggtttaa

SEQ ID NO: 103256 - DNA, 25 bp, SARS Virus
tttgagtttcttctgatggtttaac

SEQ ID NO: 103257 - DNA, 25 bp, SARS Virus
ttgagtttcttccgatggtttaacc

SEQ ID NO: 103258 - DNA, 25 bp, SARS Virus
tgagtttcttctcatggtttaacca

SEQ ID NO: 103259 - DNA, 25 bp, SARS Virus
gagtttcttctgctggtttaaccac

SEQ ID NO: 103260 - DNA, 25 bp, SARS Virus
agtttcttctgacggtttaaccacc

SEQ ID NO: 103261 - DNA, 25 bp, SARS Virus
gtttcttctgatcgtttaaccacca

SEQ ID NO: 103262 - DNA, 25 bp, SARS Virus
tttcttctgatgctttaaccaccaa

SEQ ID NO: 103263 - DNA, 25 bp, SARS Virus
ttcttctgatggcttaaccaccaat

SEQ ID NO: 103264 - DNA, 25 bp, SARS Virus
tcttctgatggtctaaccaccaata

SEQ ID NO: 103265 - DNA, 25 bp, SARS Virus
cttctgatggttcaaccaccaataa

SEQ ID NO: 103266 - DNA, 25 bp, SARS Virus
ttctgatggtttcaccaccaataag

SEQ ID NO: 103267 - DNA, 25 bp, SARS Virus
tctgatggtttacccaccaataaga

SEQ ID NO: 103268 - DNA, 25 bp, SARS Virus
ctgatggtttaaccaccaataagac

SEQ ID NO: 103269 - DNA, 25 bp, SARS Virus
tgatggtttaaccaccaataagact

SEQ ID NO: 103270 - DNA, 25 bp, SARS Virus
gatggtttaacccccaataagactc

SEQ ID NO: 103271 - DNA, 25 bp, SARS Virus
atggtttaaccaccaataagactcc

SEQ ID NO: 103272 - DNA, 25 bp, SARS Virus
tggtttaaccaccaataagactcct

SEQ ID NO: 103273 - DNA, 25 bp, SARS Virus
ggtttaaccacccataagactccta

SEQ ID NO: 103274 - DNA, 25 bp, SARS Virus
gtttaaccaccactaagactcctat

SEQ ID NO: 103275 - DNA, 25 bp, SARS Virus
tttaaccaccaacaagactcctatc

SEQ ID NO: 103276 - DNA, 25 bp, SARS Virus
ttaaccaccaatcagactcctatcc

SEQ ID NO: 103277 - DNA, 25 bp, SARS Virus
taaccaccaatacgactcctatccg

SEQ ID NO: 103278 - DNA, 25 bp, SARS Virus
aaccaccaataacactcctatccgt

SEQ ID NO: 103279 - DNA, 25 bp, SARS Virus
accaccaataagcctcctatccgtg

SEQ ID NO: 103280 - DNA, 25 bp, SARS Virus
ccaccaataagactcctatccgtga

SEQ ID NO: 103281 - DNA, 25 bp, SARS Virus
caccaataagacccctatccgtgag

SEQ ID NO: 103282 - DNA, 25 bp, SARS Virus
accaataagactcctatccgtgagt

SEQ ID NO: 103283 - DNA, 25 bp, SARS Virus
ccaataagactcctatccgtgagtc

SEQ ID NO: 103284 - DNA, 25 bp, SARS Virus
caataagactcccatccgtgagtcc

SEQ ID NO: 103285 - DNA, 25 bp, SARS Virus
aataagactcctctccgtgagtcca

SEQ ID NO: 103286 - DNA, 25 bp, SARS Virus
ataagactcctacccgtgagtccac

SEQ ID NO: 103287 - DNA, 25 bp, SARS Virus
taagactcctatccgtgagtccaca

SEQ ID NO: 103288 - DNA, 25 bp, SARS Virus
aagactcctatccgtgagtccacaa

SEQ ID NO: 103289 - DNA, 25 bp, SARS Virus
agactcctatccctgagtccacaat

SEQ ID NO: 103290 - DNA, 25 bp, SARS Virus
gactcctatccgcgagtccacaatt

SEQ ID NO: 103291 - DNA, 25 bp, SARS Virus
actcctatccgtcagtccacaattt

SEQ ID NO: 103292 - DNA, 25 bp, SARS Virus
ctcctatccgtgcgtccacaatttc

SEQ ID NO: 103293 - DNA, 25 bp, SARS Virus
tcctatccgtgactccacaatttct

SEQ ID NO: 103294 - DNA, 25 bp, SARS Virus
cctatccgtgagcccacaatttctg

SEQ ID NO: 103295 - DNA, 25 bp, SARS Virus
ctatccgtgagtccacaatttctga

SEQ ID NO: 103296 - DNA, 25 bp, SARS Virus
tatccgtgagtccacaatttctgat

SEQ ID NO: 103297 - DNA, 25 bp, SARS Virus
atccgtgagtccccaatttctgata

SEQ ID NO: 103298 - DNA, 25 bp, SARS Virus
tccgtgagtccacaatttctgatac

SEQ ID NO: 103299 - DNA, 25 bp, SARS Virus
ccgtgagtccaccatttctgataca

SEQ ID NO: 103300 - DNA, 25 bp, SARS Virus
cgtgagtccacactttctgatacag

SEQ ID NO: 103301 - DNA, 25 bp, SARS Virus
gtgagtccacaacttctgatacagc

SEQ ID NO: 103302 - DNA, 25 bp, SARS Virus
tgagtccacaatctctgatacagca

SEQ ID NO: 103303 - DNA, 25 bp, SARS Virus
gagtccacaattcctgatacagcaa

SEQ ID NO: 103304 - DNA, 25 bp, SARS Virus
agtccacaatttctgatacagcaac

SEQ ID NO: 103305 - DNA, 25 bp, SARS Virus
gtccacaatttccgatacagcaaca

SEQ ID NO: 103306 - DNA, 25 bp, SARS Virus
tccacaatttctcatacagcaacat

SEQ ID NO: 103307 - DNA, 25 bp, SARS Virus
ccacaatttctgctacagcaacatg

SEQ ID NO: 103308 - DNA, 25 bp, SARS Virus
cacaatttctgacacagcaacatgt

SEQ ID NO: 103309 - DNA, 25 bp, SARS Virus
acaatttctgatccagcaacatgta

SEQ ID NO: 103310 - DNA, 25 bp, SARS Virus
caatttctgatacagcaacatgtac

SEQ ID NO: 103311 - DNA, 25 bp, SARS Virus
aatttctgataccgcaacatgtacc

SEQ ID NO: 103312 - DNA, 25 bp, SARS Virus
atttctgatacaccaacatgtaccg

SEQ ID NO: 103313 - DNA, 25 bp, SARS Virus
tttctgatacagcaacatgtaccga

SEQ ID NO: 103314 - DNA, 25 bp, SARS Virus
ttctgatacagccacatgtaccgat

SEQ ID NO: 103315 - DNA, 25 bp, SARS Virus
tctgatacagcaccatgtaccgata

SEQ ID NO: 103316 - DNA, 25 bp, SARS Virus
ctgatacagcaacatgtaccgataa

SEQ ID NO: 103317 - DNA, 25 bp, SARS Virus
tgatacagcaacctgtaccgataaa

SEQ ID NO: 103318 - DNA, 25 bp, SARS Virus
gatacagcaacacgtaccgataaag

SEQ ID NO: 103319 - DNA, 25 bp, SARS Virus
atacagcaacatctaccgataaagt

SEQ ID NO: 103320 - DNA, 25 bp, SARS Virus
tacagcaacatgcaccgataaagtg

SEQ ID NO: 103321 - DNA, 25 bp, SARS Virus
acagcaacatgtcccgataaagtgg

SEQ ID NO: 103322 - DNA, 25 bp, SARS Virus
cagcaacatgtaccgataaagtggc

SEQ ID NO: 103323 - DNA, 25 bp, SARS Virus
agcaacatgtaccgataaagtggct

SEQ ID NO: 103324 - DNA, 25 bp, SARS Virus
gcaacatgtacccataaagtggctt

SEQ ID NO: 103325 - DNA, 25 bp, SARS Virus
caacatgtaccgctaaagtggcttc

SEQ ID NO: 103326 - DNA, 25 bp, SARS Virus
aacatgtaccgacaaagtggcttca

SEQ ID NO: 103327 - DNA, 25 bp, SARS Virus
acatgtaccgatcaagtggcttcaa

SEQ ID NO: 103328 - DNA, 25 bp, SARS Virus
catgtaccgatacagtggcttcaaa

SEQ ID NO: 103329 - DNA, 25 bp, SARS Virus
atgtaccgataacgtggcttcaaat

SEQ ID NO: 103330 - DNA, 25 bp, SARS Virus
tgtaccgataaactggcttcaaatg

SEQ ID NO: 103331 - DNA, 25 bp, SARS Virus
gtaccgataaagcggcttcaaatga

SEQ ID NO: 103332 - DNA, 25 bp, SARS Virus
taccgataaagtcgcttcaaatgat

SEQ ID NO: 103333 - DNA, 25 bp, SARS Virus
accgataaagtgccttcaaatgatg

SEQ ID NO: 103334 - DNA, 25 bp, SARS Virus
ccgataaagtggcttcaaatgatgg

SEQ ID NO: 103335 - DNA, 25 bp, SARS Virus
cgataaagtggcctcaaatgatggt

SEQ ID NO: 103336 - DNA, 25 bp, SARS Virus
gataaagtggctccaaatgatggtc

SEQ ID NO: 103337 - DNA, 25 bp, SARS Virus
ataaagtggcttcaaatgatggtcg

SEQ ID NO: 103338 - DNA, 25 bp, SARS Virus
taaagtggcttccaatgatggtcga

SEQ ID NO: 103339 - DNA, 25 bp, SARS Virus
aaagtggcttcacatgatggtcgaa

SEQ ID NO: 103340 - DNA, 25 bp, SARS Virus
aagtggcttcaactgatggtcgaac

SEQ ID NO: 103341 - DNA, 25 bp, SARS Virus
agtggcttcaaacgatggtcgaact

SEQ ID NO: 103342 - DNA, 25 bp, SARS Virus
gtggcttcaaatcatggtcgaactc

SEQ ID NO: 103343 - DNA, 25 bp, SARS Virus
tggcttcaaatgctggtcgaactca

SEQ ID NO: 103344 - DNA, 25 bp, SARS Virus
ggcttcaaatgacggtcgaactcag

SEQ ID NO: 103345 - DNA, 25 bp, SARS Virus
gcttcaaatgatcgtcgaactcaga

SEQ ID NO: 103346 - DNA, 25 bp, SARS Virus
cttcaaatgatgctcgaactcagat

SEQ ID NO: 103347 - DNA, 25 bp, SARS Virus
ttcaaatgatggccgaactcagatg

SEQ ID NO: 103348 - DNA, 25 bp, SARS Virus
tcaaatgatggtcgaactcagatgt

SEQ ID NO: 103349 - DNA, 25 bp, SARS Virus
caaatgatggtccaactcagatgtg

SEQ ID NO: 103350 - DNA, 25 bp, SARS Virus
aaatgatggtcgcactcagatgtgt

SEQ ID NO: 103351 - DNA, 25 bp, SARS Virus
aatgatggtcgacctcagatgtgtt

SEQ ID NO: 103352 - DNA, 25 bp, SARS Virus
atgatggtcgaactcagatgtgttt

SEQ ID NO: 103353 - DNA, 25 bp, SARS Virus
tgatggtcgaacccagatgtgttta

SEQ ID NO: 103354 - DNA, 25 bp, SARS Virus
gatggtcgaactcagatgtgtttaa

SEQ ID NO: 103355 - DNA, 25 bp, SARS Virus
atggtcgaactccgatgtgtttaat

SEQ ID NO: 103356 - DNA, 25 bp, SARS Virus
tggtcgaactcacatgtgtttaatg

SEQ ID NO: 103357 - DNA, 25 bp, SARS Virus
ggtcgaactcagctgtgtttaatga

SEQ ID NO: 103358 - DNA, 25 bp, SARS Virus
gtcgaactcagacgtgtttaatgat

SEQ ID NO: 103359 - DNA, 25 bp, SARS Virus
tcgaactcagatctgtttaatgatg

SEQ ID NO: 103360 - DNA, 25 bp, SARS Virus
cgaactcagatgcgtttaatgatgt

SEQ ID NO: 103361 - DNA, 25 bp, SARS Virus
gaactcagatgtctttaatgatgtc

SEQ ID NO: 103362 - DNA, 25 bp, SARS Virus
aactcagatgtgcttaatgatgtct

SEQ ID NO: 103363 - DNA, 25 bp, SARS Virus
actcagatgtgtctaatgatgtctg

SEQ ID NO: 103364 - DNA, 25 bp, SARS Virus
ctcagatgtgttcaatgatgtctgt

SEQ ID NO: 103365 - DNA, 25 bp, SARS Virus
tcagatgtgtttcatgatgtctgtg

SEQ ID NO: 103366 - DNA, 25 bp, SARS Virus
cagatgtgtttactgatgtctgtga

SEQ ID NO: 103367 - DNA, 25 bp, SARS Virus
agatgtgtttaacgatgtctgtgac

SEQ ID NO: 103368 - DNA, 25 bp, SARS Virus
gatgtgtttaatcatgtctgtgacc

SEQ ID NO: 103369 - DNA, 25 bp, SARS Virus
atgtgtttaatgctgtctgtgacca

SEQ ID NO: 103370 - DNA, 25 bp, SARS Virus
tgtgtttaatgacgtctgtgaccat

SEQ ID NO: 103371 - DNA, 25 bp, SARS Virus
gtgtttaatgatctctgtgaccata

SEQ ID NO: 103372 - DNA, 25 bp, SARS Virus
tgtttaatgatgcctgtgaccataa

SEQ ID NO: 103373 - DNA, 25 bp, SARS Virus
gtttaatgatgtctgtgaccataac

SEQ ID NO: 103374 - DNA, 25 bp, SARS Virus
tttaatgatgtccgtgaccataact

SEQ ID NO: 103375 - DNA, 25 bp, SARS Virus
ttaatgatgtctctgaccataactt

SEQ ID NO: 103376 - DNA, 25 bp, SARS Virus
taatgatgtctgcgaccataacttt

SEQ ID NO: 103377 - DNA, 25 bp, SARS Virus
aatgatgtctgtcaccataactttt

SEQ ID NO: 103378 - DNA, 25 bp, SARS Virus
atgatgtctgtgcccataactttta

SEQ ID NO: 103379 - DNA, 25 bp, SARS Virus
tgatgtctgtgaccataacttttac

SEQ ID NO: 103380 - DNA, 25 bp, SARS Virus
gatgtctgtgaccataacttttacg

SEQ ID NO: 103381 - DNA, 25 bp, SARS Virus
atgtctgtgaccctaacttttacga

SEQ ID NO: 103382 - DNA, 25 bp, SARS Virus
tgtctgtgaccacaacttttacgat

SEQ ID NO: 103383 - DNA, 25 bp, SARS Virus
gtctgtgaccatcacttttacgatg

SEQ ID NO: 103384 - DNA, 25 bp, SARS Virus
tctgtgaccataccttttacgatgt

SEQ ID NO: 103385 - DNA, 25 bp, SARS Virus
ctgtgaccataacttttacgatgta

SEQ ID NO: 103386 - DNA, 25 bp, SARS Virus
tgtgaccataacctttacgatgtaa

SEQ ID NO: 103387 - DNA, 25 bp, SARS Virus
gtgaccataactcttacgatgtaag

SEQ ID NO: 103388 - DNA, 25 bp, SARS Virus
tgaccataacttctacgatgtaaga

SEQ ID NO: 103389 - DNA, 25 bp, SARS Virus
gaccataactttcacgatgtaagaa

SEQ ID NO: 103390 - DNA, 25 bp, SARS Virus
accataacttttccgatgtaagaag

SEQ ID NO: 103391 - DNA, 25 bp, SARS Virus
ccataacttttacgatgtaagaagt

SEQ ID NO: 103392 - DNA, 25 bp, SARS Virus
cataacttttaccatgtaagaagta

SEQ ID NO: 103393 - DNA, 25 bp, SARS Virus
ataacttttacgctgtaagaagtag

SEQ ID NO: 103394 - DNA, 25 bp, SARS Virus
taacttttacgacgtaagaagtaga

SEQ ID NO: 103395 - DNA, 25 bp, SARS Virus
aacttttacgatctaagaagtagaa

SEQ ID NO: 103396 - DNA, 25 bp, SARS Virus
acttttacgatgcaagaagtagaaa

SEQ ID NO: 103397 - DNA, 25 bp, SARS Virus
cttttacgatgtcagaagtagaaat

SEQ ID NO: 103398 - DNA, 25 bp, SARS Virus
ttttacgatgtacgaagtagaaatt

SEQ ID NO: 103399 - DNA, 25 bp, SARS Virus
tttacgatgtaacaagtagaaattg

SEQ ID NO: 103400 - DNA, 25 bp, SARS Virus
ttacgatgtaagcagtagaaattgt

SEQ ID NO: 103401 - DNA, 25 bp, SARS Virus
tacgatgtaagacgtagaaattgtt

SEQ ID NO: 103402 - DNA, 25 bp, SARS Virus
acgatgtaagaactagaaattgttc

SEQ ID NO: 103403 - DNA, 25 bp, SARS Virus
cgatgtaagaagcagaaattgttcg

SEQ ID NO: 103404 - DNA, 25 bp, SARS Virus
gatgtaagaagtcgaaattgttcga

SEQ ID NO: 103405 - DNA, 25 bp, SARS Virus
atgtaagaagtacaaattgttcgaa

SEQ ID NO: 103406 - DNA, 25 bp, SARS Virus
tgtaagaagtagcaattgttcgaac

SEQ ID NO: 103407 - DNA, 25 bp, SARS Virus
gtaagaagtagacattgttcgaaca

SEQ ID NO: 103408 - DNA, 25 bp, SARS Virus
taagaagtagaacttgttcgaacaa

SEQ ID NO: 103409 - DNA, 25 bp, SARS Virus
aagaagtagaaactgttcgaacaat

SEQ ID NO: 103410 - DNA, 25 bp, SARS Virus
agaagtagaaatcgttcgaacaatt

SEQ ID NO: 103411 - DNA, 25 bp, SARS Virus
gaagtagaaattcttcgaacaattt

SEQ ID NO: 103412 - DNA, 25 bp, SARS Virus
aagtagaaattgctcgaacaatttc

SEQ ID NO: 103413 - DNA, 25 bp, SARS Virus
agtagaaattgtccgaacaatttct

SEQ ID NO: 103414 - DNA, 25 bp, SARS Virus
gtagaaattgttcgaacaatttctg

SEQ ID NO: 103415 - DNA, 25 bp, SARS Virus
tagaaattgttccaacaatttctgg

SEQ ID NO: 103416 - DNA, 25 bp, SARS Virus
agaaattgttcgcacaatttctggg

SEQ ID NO: 103417 - DNA, 25 bp, SARS Virus
gaaattgttcgaccaatttctgggt

SEQ ID NO: 103418 - DNA, 25 bp, SARS Virus
aaattgttcgaacaatttctgggtg

SEQ ID NO: 103419 - DNA, 25 bp, SARS Virus
aattgttcgaaccatttctgggtgg

SEQ ID NO: 103420 - DNA, 25 bp, SARS Virus
attgttcgaacactttctgggtggc

SEQ ID NO: 103421 - DNA, 25 bp, SARS Virus
ttgttcgaacaacttctgggtggct

SEQ ID NO: 103422 - DNA, 25 bp, SARS Virus
tgttcgaacaatctctgggtggctt

SEQ ID NO: 103423 - DNA, 25 bp, SARS Virus
gttcgaacaattcctgggtggctta

SEQ ID NO: 103424 - DNA, 25 bp, SARS Virus
ttcgaacaatttctgggtggcttac

SEQ ID NO: 103425 - DNA, 25 bp, SARS Virus
tcgaacaatttccgggtggcttaca

SEQ ID NO: 103426 - DNA, 25 bp, SARS Virus
cgaacaatttctcggtggcttacac

SEQ ID NO: 103427 - DNA, 25 bp, SARS Virus
gaacaatttctgcgtggcttacacg

SEQ ID NO: 103428 - DNA, 25 bp, SARS Virus
aacaatttctggctggcttacacgt

SEQ ID NO: 103429 - DNA, 25 bp, SARS Virus
acaatttctgggcggcttacacgtt

SEQ ID NO: 103430 - DNA, 25 bp, SARS Virus
caatttctgggtcgcttacacgttt

SEQ ID NO: 103431 - DNA, 25 bp, SARS Virus
aatttctgggtgccttacacgttta

SEQ ID NO: 103432 - DNA, 25 bp, SARS Virus
atttctgggtggcttacacgtttat

SEQ ID NO: 103433 - DNA, 25 bp, SARS Virus
tttctgggtggcctacacgtttatg

SEQ ID NO: 103434 - DNA, 25 bp, SARS Virus
ttctgggtggctcacacgtttatgt

SEQ ID NO: 103435 - DNA, 25 bp, SARS Virus
tctgggtggcttccacgtttatgtg

SEQ ID NO: 103436 - DNA, 25 bp, SARS Virus
ctgggtggcttacacgtttatgtgt

SEQ ID NO: 103437 - DNA, 25 bp, SARS Virus
tgggtggcttacccgtttatgtgtg

SEQ ID NO: 103438 - DNA, 25 bp, SARS Virus
gggtggcttacacgtttatgtgtgt

SEQ ID NO: 103439 - DNA, 25 bp, SARS Virus
ggtggcttacacctttatgtgtgtt

SEQ ID NO: 103440 - DNA, 25 bp, SARS Virus
gtggcttacacgcttatgtgtgtta

SEQ ID NO: 103441 - DNA, 25 bp, SARS Virus
tggcttacacgtctatgtgtgttag

SEQ ID NO: 103442 - DNA, 25 bp, SARS Virus
ggcttacacgttcatgtgtgttagc

SEQ ID NO: 103443 - DNA, 25 bp, SARS Virus
gcttacacgtttctgtgtgttagct

SEQ ID NO: 103444 - DNA, 25 bp, SARS Virus
cttacacgtttacgtgtgttagctg

SEQ ID NO: 103445 - DNA, 25 bp, SARS Virus
ttacacgtttatctgtgttagctgc

SEQ ID NO: 103446 - DNA, 25 bp, SARS Virus
tacacgtttatgcgtgttagctgcc

SEQ ID NO: 103447 - DNA, 25 bp, SARS Virus
acacgtttatgtctgttagctgccg

SEQ ID NO: 103448 - DNA, 25 bp, SARS Virus
cacgtttatgtgcgttagctgccga

SEQ ID NO: 103449 - DNA, 25 bp, SARS Virus
acgtttatgtgtcttagctgccgag

SEQ ID NO: 103450 - DNA, 25 bp, SARS Virus
cgtttatgtgtgctagctgccgaga

SEQ ID NO: 103451 - DNA, 25 bp, SARS Virus
gtttatgtgtgtcagctgccgagaa

SEQ ID NO: 103452 - DNA, 25 bp, SARS Virus
tttatgtgtgttcgctgccgagaag

SEQ ID NO: 103453 - DNA, 25 bp, SARS Virus
ttatgtgtgttacctgccgagaagt

SEQ ID NO: 103454 - DNA, 25 bp, SARS Virus
tatgtgtgttagctgccgagaagtc

SEQ ID NO: 103455 - DNA, 25 bp, SARS Virus
atgtgtgttagccgccgagaagtcc

SEQ ID NO: 103456 - DNA, 25 bp, SARS Virus
tgtgtgttagctcccgagaagtcct

SEQ ID NO: 103457 - DNA, 25 bp, SARS Virus
gtgtgttagctgccgagaagtcctc

SEQ ID NO: 103458 - DNA, 25 bp, SARS Virus
tgtgttagctgccgagaagtcctca

SEQ ID NO: 103459 - DNA, 25 bp, SARS Virus
gtgttagctgcccagaagtcctcaa

SEQ ID NO: 103460 - DNA, 25 bp, SARS Virus
tgttagctgccgcgaagtcctcaac

SEQ ID NO: 103461 - DNA, 25 bp, SARS Virus
gttagctgccgacaagtcctcaacg

SEQ ID NO: 103462 - DNA, 25 bp, SARS Virus
ttagctgccgagcagtcctcaacga

SEQ ID NO: 103463 - DNA, 25 bp, SARS Virus
tagctgccgagacgtcctcaacgat

SEQ ID NO: 103464 - DNA, 25 bp, SARS Virus
agctgccgagaactcctcaacgatt

SEQ ID NO: 103465 - DNA, 25 bp, SARS Virus
gctgccgagaagccctcaacgatta

SEQ ID NO: 103466 - DNA, 25 bp, SARS Virus
ctgccgagaagtcctcaacgattag

SEQ ID NO: 103467 - DNA, 25 bp, SARS Virus
tgccgagaagtcctcaacgattagg

SEQ ID NO: 103468 - DNA, 25 bp, SARS Virus
gccgagaagtccccaacgattaggt

SEQ ID NO: 103469 - DNA, 25 bp, SARS Virus
ccgagaagtcctcaacgattaggtc

SEQ ID NO: 103470 - DNA, 25 bp, SARS Virus
cgagaagtcctccacgattaggtcg

SEQ ID NO: 103471 - DNA, 25 bp, SARS Virus
gagaagtcctcaccgattaggtcgt

SEQ ID NO: 103472 - DNA, 25 bp, SARS Virus
agaagtcctcaacgattaggtcgtt

SEQ ID NO: 103473 - DNA, 25 bp, SARS Virus
gaagtcctcaaccattaggtcgtta

SEQ ID NO: 103474 - DNA, 25 bp, SARS Virus
aagtcctcaacgcttaggtcgttac

SEQ ID NO: 103475 - DNA, 25 bp, SARS Virus
agtcctcaacgactaggtcgttacc

SEQ ID NO: 103476 - DNA, 25 bp, SARS Virus
gtcctcaacgatcaggtcgttacct

SEQ ID NO: 103477 - DNA, 25 bp, SARS Virus
tcctcaacgattcggtcgttaccta

SEQ ID NO: 103478 - DNA, 25 bp, SARS Virus
cctcaacgattacgtcgttacctag

SEQ ID NO: 103479 - DNA, 25 bp, SARS Virus
ctcaacgattagctcgttacctagg

SEQ ID NO: 103480 - DNA, 25 bp, SARS Virus
tcaacgattaggccgttacctaggt

SEQ ID NO: 103481 - DNA, 25 bp, SARS Virus
caacgattaggtcgttacctaggtt

SEQ ID NO: 103482 - DNA, 25 bp, SARS Virus
aacgattaggtccttacctaggtta

SEQ ID NO: 103483 - DNA, 25 bp, SARS Virus
acgattaggtcgctacctaggttaa

SEQ ID NO: 103484 - DNA, 25 bp, SARS Virus
cgattaggtcgtcacctaggttaaa

SEQ ID NO: 103485 - DNA, 25 bp, SARS Virus
gattaggtcgttccctaggttaaat

SEQ ID NO: 103486 - DNA, 25 bp, SARS Virus
attaggtcgttacctaggttaaata

SEQ ID NO: 103487 - DNA, 25 bp, SARS Virus
ttaggtcgttacctaggttaaatac

SEQ ID NO: 103488 - DNA, 25 bp, SARS Virus
taggtcgttacccaggttaaatact

SEQ ID NO: 103489 - DNA, 25 bp, SARS Virus
aggtcgttacctcggttaaatacta

SEQ ID NO: 103490 - DNA, 25 bp, SARS Virus
ggtcgttacctacgttaaatactac

SEQ ID NO: 103491 - DNA, 25 bp, SARS Virus
gtcgttacctagcttaaatactact

SEQ ID NO: 103492 - DNA, 25 bp, SARS Virus
tcgttacctaggctaaatactactc

SEQ ID NO: 103493 - DNA, 25 bp, SARS Virus
cgttacctaggtcaaatactactcg

SEQ ID NO: 103494 - DNA, 25 bp, SARS Virus
gttacctaggttcaatactactcgg

SEQ ID NO: 103495 - DNA, 25 bp, SARS Virus
ttacctaggttacatactactcggc

SEQ ID NO: 103496 - DNA, 25 bp, SARS Virus
tacctaggttaactactactcggct

SEQ ID NO: 103497 - DNA, 25 bp, SARS Virus
acctaggttaaacactactcggctg

SEQ ID NO: 103498 - DNA, 25 bp, SARS Virus
cctaggttaaatcctactcggctgc

SEQ ID NO: 103499 - DNA, 25 bp, SARS Virus
ctaggttaaatactactcggctgct

SEQ ID NO: 103500 - DNA, 25 bp, SARS Virus
taggttaaataccactcggctgctg

SEQ ID NO: 103501 - DNA, 25 bp, SARS Virus
aggttaaatactcctcggctgctgc

SEQ ID NO: 103502 - DNA, 25 bp, SARS Virus
ggttaaatactactcggctgctgct

SEQ ID NO: 103503 - DNA, 25 bp, SARS Virus
gttaaatactacccggctgctgctg

SEQ ID NO: 103504 - DNA, 25 bp, SARS Virus
ttaaatactactcggctgctgctga

SEQ ID NO: 103505 - DNA, 25 bp, SARS Virus
taaatactactccgctgctgctgat

SEQ ID NO: 103506 - DNA, 25 bp, SARS Virus
aaatactactcgcctgctgctgatg

SEQ ID NO: 103507 - DNA, 25 bp, SARS Virus
aatactactcggctgctgctgatga

SEQ ID NO: 103508 - DNA, 25 bp, SARS Virus
atactactcggccgctgctgatgat

SEQ ID NO: 103509 - DNA, 25 bp, SARS Virus
tactactcggctcctgctgatgatc

SEQ ID NO: 103510 - DNA, 25 bp, SARS Virus
actactcggctgctgctgatgatcg

SEQ ID NO: 103511 - DNA, 25 bp, SARS Virus
ctactcggctgccgctgatgatcgc

SEQ ID NO: 103512 - DNA, 25 bp, SARS Virus
tactcggctgctcctgatgatcgca

SEQ ID NO: 103513 - DNA, 25 bp, SARS Virus
actcggctgctgctgatgatcgcac

SEQ ID NO: 103514 - DNA, 25 bp, SARS Virus
ctcggctgctgccgatgatcgcacg

SEQ ID NO: 103515 - DNA, 25 bp, SARS Virus
tcggctgctgctcatgatcgcacgg

SEQ ID NO: 103516 - DNA, 25 bp, SARS Virus
cggctgctgctgctgatcgcacgga

SEQ ID NO: 103517 - DNA, 25 bp, SARS Virus
ggctgctgctgacgatcgcacggaa

SEQ ID NO: 103518 - DNA, 25 bp, SARS Virus
gctgctgctgatcatcgcacggaaa

SEQ ID NO: 103519 - DNA, 25 bp, SARS Virus
ctgctgctgatgctcgcacggaaac

SEQ ID NO: 103520 - DNA, 25 bp, SARS Virus
tgctgctgatgaccgcacggaaaca

SEQ ID NO: 103521 - DNA, 25 bp, SARS Virus
gctgctgatgatcgcacggaaacat

SEQ ID NO: 103522 - DNA, 25 bp, SARS Virus
ctgctgatgatcccacggaaacatt

SEQ ID NO: 103523 - DNA, 25 bp, SARS Virus
tgctgatgatcgcacggaaacattc

SEQ ID NO: 103524 - DNA, 25 bp, SARS Virus
gctgatgatcgcccggaaacattcg

SEQ ID NO: 103525 - DNA, 25 bp, SARS Virus
ctgatgatcgcacggaaacattcgt

SEQ ID NO: 103526 - DNA, 25 bp, SARS Virus
tgatgatcgcaccgaaacattcgtg

SEQ ID NO: 103527 - DNA, 25 bp, SARS Virus
gatgatcgcacgcaaacattcgtgt

SEQ ID NO: 103528 - DNA, 25 bp, SARS Virus
atgatcgcacggcaacattcgtgtt

SEQ ID NO: 103529 - DNA, 25 bp, SARS Virus
tgatcgcacggacacattcgtgttc

SEQ ID NO: 103530 - DNA, 25 bp, SARS Virus
gatcgcacggaaccattcgtgttct

SEQ ID NO: 103531 - DNA, 25 bp, SARS Virus
atcgcacggaaacattcgtgttctt

SEQ ID NO: 103532 - DNA, 25 bp, SARS Virus
tcgcacggaaaccttcgtgttcttt

SEQ ID NO: 103533 - DNA, 25 bp, SARS Virus
cgcacggaaacactcgtgttctttc

SEQ ID NO: 103534 - DNA, 25 bp, SARS Virus
gcacggaaacatccgtgttctttca

SEQ ID NO: 103535 - DNA, 25 bp, SARS Virus
cacggaaacattcgtgttctttcac

SEQ ID NO: 103536 - DNA, 25 bp, SARS Virus
acggaaacattcctgttctttcact

SEQ ID NO: 103537 - DNA, 25 bp, SARS Virus
cggaaacattcgcgttctttcactc

SEQ ID NO: 103538 - DNA, 25 bp, SARS Virus
ggaaacattcgtcttctttcactca

SEQ ID NO: 103539 - DNA, 25 bp, SARS Virus
gaaacattcgtgctctttcactcat

SEQ ID NO: 103540 - DNA, 25 bp, SARS Virus
aaacattcgtgtcctttcactcatg

SEQ ID NO: 103541 - DNA, 25 bp, SARS Virus
aacattcgtgttctttcactcatgc

SEQ ID NO: 103542 - DNA, 25 bp, SARS Virus
acattcgtgttccttcactcatgct

SEQ ID NO: 103543 - DNA, 25 bp, SARS Virus
cattcgtgttctctcactcatgctt

SEQ ID NO: 103544 - DNA, 25 bp, SARS Virus
attcgtgttcttccactcatgcttg

SEQ ID NO: 103545 - DNA, 25 bp, SARS Virus
ttcgtgttctttcactcatgcttga

SEQ ID NO: 103546 - DNA, 25 bp, SARS Virus
tcgtgttctttccctcatgcttgaa

SEQ ID NO: 103547 - DNA, 25 bp, SARS Virus
cgtgttctttcactcatgcttgaat

SEQ ID NO: 103548 - DNA, 25 bp, SARS Virus
gtgttctttcacccatgcttgaata

SEQ ID NO: 103549 - DNA, 25 bp, SARS Virus
tgttctttcactcatgcttgaatac

SEQ ID NO: 103550 - DNA, 25 bp, SARS Virus
gttctttcactcctgcttgaataca

SEQ ID NO: 103551 - DNA, 25 bp, SARS Virus
ttctttcactcacgcttgaatacat

SEQ ID NO: 103552 - DNA, 25 bp, SARS Virus
tctttcactcatccttgaatacatg

SEQ ID NO: 103553 - DNA, 25 bp, SARS Virus
ctttcactcatgcttgaatacatga

SEQ ID NO: 103554 - DNA, 25 bp, SARS Virus
tttcactcatgcctgaatacatgag

SEQ ID NO: 103555 - DNA, 25 bp, SARS Virus
ttcactcatgctcgaatacatgagt

SEQ ID NO: 103556 - DNA, 25 bp, SARS Virus
tcactcatgcttcaatacatgagta

SEQ ID NO: 103557 - DNA, 25 bp, SARS Virus
cactcatgcttgcatacatgagtaa

SEQ ID NO: 103558 - DNA, 25 bp, SARS Virus
actcatgcttgactacatgagtaag

SEQ ID NO: 103559 - DNA, 25 bp, SARS Virus
ctcatgcttgaacacatgagtaagc

SEQ ID NO: 103560 - DNA, 25 bp, SARS Virus
tcatgcttgaatccatgagtaagca

SEQ ID NO: 103561 - DNA, 25 bp, SARS Virus
catgcttgaatacatgagtaagcaa

SEQ ID NO: 103562 - DNA, 25 bp, SARS Virus
atgcttgaatacctgagtaagcaaa

SEQ ID NO: 103563 - DNA, 25 bp, SARS Virus
tgcttgaatacacgagtaagcaaag

SEQ ID NO: 103564 - DNA, 25 bp, SARS Virus
gcttgaatacatcagtaagcaaagc

SEQ ID NO: 103565 - DNA, 25 bp, SARS Virus
cttgaatacatgcgtaagcaaagcc

SEQ ID NO: 103566 - DNA, 25 bp, SARS Virus
ttgaatacatgactaagcaaagcct

SEQ ID NO: 103567 - DNA, 25 bp, SARS Virus
tgaatacatgagcaagcaaagcctt

SEQ ID NO: 103568 - DNA, 25 bp, SARS Virus
gaatacatgagtcagcaaagccttc

SEQ ID NO: 103569 - DNA, 25 bp, SARS Virus
aatacatgagtacgcaaagccttct

SEQ ID NO: 103570 - DNA, 25 bp, SARS Virus
atacatgagtaaccaaagccttctt

SEQ ID NO: 103571 - DNA, 25 bp, SARS Virus
tacatgagtaagcaaagccttcttt

SEQ ID NO: 103572 - DNA, 25 bp, SARS Virus
acatgagtaagccaagccttctttg

SEQ ID NO: 103573 - DNA, 25 bp, SARS Virus
catgagtaagcacagccttctttgt

SEQ ID NO: 103574 - DNA, 25 bp, SARS Virus
atgagtaagcaacgccttctttgtc

SEQ ID NO: 103575 - DNA, 25 bp, SARS Virus
tgagtaagcaaacccttctttgtcc

SEQ ID NO: 103576 - DNA, 25 bp, SARS Virus
gagtaagcaaagccttctttgtcca

SEQ ID NO: 103577 - DNA, 25 bp, SARS Virus
agtaagcaaagccttctttgtccat

SEQ ID NO: 103578 - DNA, 25 bp, SARS Virus
gtaagcaaagccctctttgtccatg

SEQ ID NO: 103579 - DNA, 25 bp, SARS Virus
taagcaaagcctcctttgtccatgc

SEQ ID NO: 103580 - DNA, 25 bp, SARS Virus
aagcaaagccttctttgtccatgca

SEQ ID NO: 103581 - DNA, 25 bp, SARS Virus
agcaaagccttccttgtccatgcaa

SEQ ID NO: 103582 - DNA, 25 bp, SARS Virus
gcaaagccttctctgtccatgcaat

SEQ ID NO: 103583 - DNA, 25 bp, SARS Virus
caaagccttcttcgtccatgcaatt

SEQ ID NO: 103584 - DNA, 25 bp, SARS Virus
aaagccttctttctccatgcaatta

SEQ ID NO: 103585 - DNA, 25 bp, SARS Virus
tctacaaccgaagcaaccttcacgt

SEQ ID NO: 103586 - DNA, 25 bp, SARS Virus
ctacaaccgaaagaaccttcacgtt

SEQ ID NO: 103587 - DNA, 25 bp, SARS Virus
tacaaccgaaacgaccttcacgttt

SEQ ID NO: 103588 - DNA, 25 bp, SARS Virus
acaaccgaaacagccttcacgttta

SEQ ID NO: 103589 - DNA, 25 bp, SARS Virus
caaccgaaacaagcttcacgtttag

SEQ ID NO: 103590 - DNA, 25 bp, SARS Virus
aaccgaaacaacgttcacgtttagg

SEQ ID NO: 103591 - DNA, 25 bp, SARS Virus
accgaaacaaccgtcacgtttaggt

SEQ ID NO: 103592 - DNA, 25 bp, SARS Virus
ccgaaacaacctgcacgtttaggtt

SEQ ID NO: 103593 - DNA, 25 bp, SARS Virus
cgaaacaaccttgacgtttaggttc

SEQ ID NO: 103594 - DNA, 25 bp, SARS Virus
gaaacaaccttcgcgtttaggttct

SEQ ID NO: 103595 - DNA, 25 bp, SARS Virus
aaacaaccttcaggtttaggttctt

SEQ ID NO: 103596 - DNA, 25 bp, SARS Virus
aacaaccttcacgtttaggttcttg

SEQ ID NO: 103597 - DNA, 25 bp, SARS Virus
acaaccttcacggttaggttcttgg

SEQ ID NO: 103598 - DNA, 25 bp, SARS Virus
caaccttcacgtgtaggttcttggg

SEQ ID NO: 103599 - DNA, 25 bp, SARS Virus
aaccttcacgttgaggttcttgggt

SEQ ID NO: 103600 - DNA, 25 bp, SARS Virus
accttcacgtttgggttcttgggta

SEQ ID NO: 103601 - DNA, 25 bp, SARS Virus
ccttcacgtttaggttcttgggtaa

SEQ ID NO: 103602 - DNA, 25 bp, SARS Virus
cttcacgtttaggttcttgggtaat

SEQ ID NO: 103603 - DNA, 25 bp, SARS Virus
ttcacgtttagggtcttgggtaatg

SEQ ID NO: 103604 - DNA, 25 bp, SARS Virus
tcacgtttaggtgcttgggtaatga

SEQ ID NO: 103605 - DNA, 25 bp, SARS Virus
cacgtttaggttgttgggtaatgaa

SEQ ID NO: 103606 - DNA, 25 bp, SARS Virus
acgtttaggttcgtgggtaatgaaa

SEQ ID NO: 103607 - DNA, 25 bp, SARS Virus
cgtttaggttctggggtaatgaaat

SEQ ID NO: 103608 - DNA, 25 bp, SARS Virus
gtttaggttcttgggtaatgaaata

SEQ ID NO: 103609 - DNA, 25 bp, SARS Virus
tttaggttcttgggtaatgaaatac

SEQ ID NO: 103610 - DNA, 25 bp, SARS Virus
ttaggttcttgggtaatgaaatact

SEQ ID NO: 103611 - DNA, 25 bp, SARS Virus
taggttcttggggaatgaaatacta

SEQ ID NO: 103612 - DNA, 25 bp, SARS Virus
aggttcttgggtgatgaaatactac

SEQ ID NO: 103613 - DNA, 25 bp, SARS Virus
ggttcttgggtagtgaaatactacg

SEQ ID NO: 103614 - DNA, 25 bp, SARS Virus
gttcttgggtaaggaaatactacgg

SEQ ID NO: 103615 - DNA, 25 bp, SARS Virus
ttcttgggtaatgaaatactacggt

SEQ ID NO: 103616 - DNA, 25 bp, SARS Virus
tcttgggtaatggaatactacggtt

SEQ ID NO: 103617 - DNA, 25 bp, SARS Virus
cttgggtaatgagatactacggttg

SEQ ID NO: 103618 - DNA, 25 bp, SARS Virus
ttgggtaatgaagtactacggttga

SEQ ID NO: 103619 - DNA, 25 bp, SARS Virus
tgggtaatgaaagactacggttgat

SEQ ID NO: 103620 - DNA, 25 bp, SARS Virus
gggtaatgaaatgctacggttgatg

SEQ ID NO: 103621 - DNA, 25 bp, SARS Virus
ggtaatgaaatagtacggttgatga

SEQ ID NO: 103622 - DNA, 25 bp, SARS Virus
gtaatgaaatacgacggttgatgaa

SEQ ID NO: 103623 - DNA, 25 bp, SARS Virus
taatgaaatactgcggttgatgaaa

SEQ ID NO: 103624 - DNA, 25 bp, SARS Virus
aatgaaatactagggttgatgaaac

SEQ ID NO: 103625 - DNA, 25 bp, SARS Virus
atgaaatactacggttgatgaaaca

SEQ ID NO: 103626 - DNA, 25 bp, SARS Virus
tgaaatactacggttgatgaaacaa

SEQ ID NO: 103627 - DNA, 25 bp, SARS Virus
gaaatactacgggtgatgaaacaaa

SEQ ID NO: 103628 - DNA, 25 bp, SARS Virus
aaatactacggtggatgaaacaaac

SEQ ID NO: 103629 - DNA, 25 bp, SARS Virus
aatactacggttgatgaaacaaacg

SEQ ID NO: 103630 - DNA, 25 bp, SARS Virus
atactacggttggtgaaacaaacga

SEQ ID NO: 103631 - DNA, 25 bp, SARS Virus
tactacggttgaggaaacaaacgac

SEQ ID NO: 103632 - DNA, 25 bp, SARS Virus
actacggttgatgaaacaaacgacc

SEQ ID NO: 103633 - DNA, 25 bp, SARS Virus
ctacggttgatggaacaaacgaccg

SEQ ID NO: 103634 - DNA, 25 bp, SARS Virus
tacggttgatgagacaaacgaccgt

SEQ ID NO: 103635 - DNA, 25 bp, SARS Virus
acggttgatgaagcaaacgaccgtg

SEQ ID NO: 103636 - DNA, 25 bp, SARS Virus
cggttgatgaaagaaacgaccgtgt

SEQ ID NO: 103637 - DNA, 25 bp, SARS Virus
ggttgatgaaacgaacgaccgtgtg

SEQ ID NO: 103638 - DNA, 25 bp, SARS Virus
gttgatgaaacagacgaccgtgtgt

SEQ ID NO: 103639 - DNA, 25 bp, SARS Virus
ttgatgaaacaagcgaccgtgtgtg

SEQ ID NO: 103640 - DNA, 25 bp, SARS Virus
tgatgaaacaaaggaccgtgtgtgt

SEQ ID NO: 103641 - DNA, 25 bp, SARS Virus
gatgaaacaaacgaccgtgtgtgta

SEQ ID NO: 103642 - DNA, 25 bp, SARS Virus
atgaaacaaacggccgtgtgtgtat

SEQ ID NO: 103643 - DNA, 25 bp, SARS Virus
tgaaacaaacgagcgtgtgtgtatt

SEQ ID NO: 103644 - DNA, 25 bp, SARS Virus
gaaacaaacgacggtgtgtgtattg

SEQ ID NO: 103645 - DNA, 25 bp, SARS Virus
aaacaaacgaccgtgtgtgtattga

SEQ ID NO: 103646 - DNA, 25 bp, SARS Virus
aacaaacgaccgggtgtgtattgat

SEQ ID NO: 103647 - DNA, 25 bp, SARS Virus
acaaacgaccgtgtgtgtattgata

SEQ ID NO: 103648 - DNA, 25 bp, SARS Virus
caaacgaccgtgggtgtattgatac

SEQ ID NO: 103649 - DNA, 25 bp, SARS Virus
aaacgaccgtgtgtgtattgatact

SEQ ID NO: 103650 - DNA, 25 bp, SARS Virus
aacgaccgtgtgggtattgatactg

SEQ ID NO: 103651 - DNA, 25 bp, SARS Virus
acgaccgtgtgtgtattgatactga

SEQ ID NO: 103652 - DNA, 25 bp, SARS Virus
cgaccgtgtgtggattgatactgat

SEQ ID NO: 103653 - DNA, 25 bp, SARS Virus
gaccgtgtgtgtgttgatactgatg

SEQ ID NO: 103654 - DNA, 25 bp, SARS Virus
accgtgtgtgtagtgatactgatga

SEQ ID NO: 103655 - DNA, 25 bp, SARS Virus
ccgtgtgtgtatggatactgatgac

SEQ ID NO: 103656 - DNA, 25 bp, SARS Virus
cgtgtgtgtattgatactgatgaca

SEQ ID NO: 103657 - DNA, 25 bp, SARS Virus
gtgtgtgtattggtactgatgacat

SEQ ID NO: 103658 - DNA, 25 bp, SARS Virus
tgtgtgtattgagactgatgacata

SEQ ID NO: 103659 - DNA, 25 bp, SARS Virus
gtgtgtattgatgctgatgacatat

SEQ ID NO: 103660 - DNA, 25 bp, SARS Virus
tgtgtattgatagtgatgacatatg

SEQ ID NO: 103661 - DNA, 25 bp, SARS Virus
gtgtattgatacggatgacatatgg

SEQ ID NO: 103662 - DNA, 25 bp, SARS Virus
tgtattgatactgatgacatatggt

SEQ ID NO: 103663 - DNA, 25 bp, SARS Virus
gtattgatactggtgacatatggta

SEQ ID NO: 103664 - DNA, 25 bp, SARS Virus
tattgatactgaggacatatggtat

SEQ ID NO: 103665 - DNA, 25 bp, SARS Virus
attgatactgatgacatatggtata

SEQ ID NO: 103666 - DNA, 25 bp, SARS Virus
ttgatactgatggcatatggtatat

SEQ ID NO: 103667 - DNA, 25 bp, SARS Virus
tgatactgatgagatatggtatatt

SEQ ID NO: 103668 - DNA, 25 bp, SARS Virus
gatactgatgacgtatggtatattg

SEQ ID NO: 103669 - DNA, 25 bp, SARS Virus
atactgatgacagatggtatattgt

SEQ ID NO: 103670 - DNA, 25 bp, SARS Virus
tactgatgacatgtggtatattgtc

SEQ ID NO: 103671 - DNA, 25 bp, SARS Virus
actgatgacatagggtatattgtca

SEQ ID NO: 103672 - DNA, 25 bp, SARS Virus
ctgatgacatatggtatattgtcac

SEQ ID NO: 103673 - DNA, 25 bp, SARS Virus
tgatgacatatggtatattgtcaca

SEQ ID NO: 103674 - DNA, 25 bp, SARS Virus
gatgacatatgggatattgtcacag

SEQ ID NO: 103675 - DNA, 25 bp, SARS Virus
atgacatatggtgtattgtcacagt

SEQ ID NO: 103676 - DNA, 25 bp, SARS Virus
tgacatatggtagattgtcacagtg

SEQ ID NO: 103677 - DNA, 25 bp, SARS Virus
gacatatggtatgttgtcacagtgt

SEQ ID NO: 103678 - DNA, 25 bp, SARS Virus
acatatggtatagtgtcacagtgtc

SEQ ID NO: 103679 - DNA, 25 bp, SARS Virus
catatggtatatggtcacagtgtct

SEQ ID NO: 103680 - DNA, 25 bp, SARS Virus
atatggtatattgtcacagtgtcta

SEQ ID NO: 103681 - DNA, 25 bp, SARS Virus
tatggtatattggcacagtgtctat

SEQ ID NO: 103682 - DNA, 25 bp, SARS Virus
atggtatattgtgacagtgtctatg

SEQ ID NO: 103683 - DNA, 25 bp, SARS Virus
tggtatattgtcgcagtgtctatgt

SEQ ID NO: 103684 - DNA, 25 bp, SARS Virus
ggtatattgtcagagtgtctatgtt

SEQ ID NO: 103685 - DNA, 25 bp, SARS Virus
gtatattgtcacggtgtctatgtta

SEQ ID NO: 103686 - DNA, 25 bp, SARS Virus
tatattgtcacagtgtctatgttaa

SEQ ID NO: 103687 - DNA, 25 bp, SARS Virus
atattgtcacagggtctatgttaac

SEQ ID NO: 103688 - DNA, 25 bp, SARS Virus
tattgtcacagtgtctatgttaaca

SEQ ID NO: 103689 - DNA, 25 bp, SARS Virus
attgtcacagtggctatgttaacag

SEQ ID NO: 103690 - DNA, 25 bp, SARS Virus
ttgtcacagtgtgtatgttaacagc

SEQ ID NO: 103691 - DNA, 25 bp, SARS Virus
tgtcacagtgtcgatgttaacagca

SEQ ID NO: 103692 - DNA, 25 bp, SARS Virus
gtcacagtgtctgtgttaacagcaa

SEQ ID NO: 103693 - DNA, 25 bp, SARS Virus
tcacagtgtctaggttaacagcaat

SEQ ID NO: 103694 - DNA, 25 bp, SARS Virus
cacagtgtctatgttaacagcaatg

SEQ ID NO: 103695 - DNA, 25 bp, SARS Virus
acagtgtctatggtaacagcaatga

SEQ ID NO: 103696 - DNA, 25 bp, SARS Virus
cagtgtctatgtgaacagcaatgac

SEQ ID NO: 103697 - DNA, 25 bp, SARS Virus
agtgtctatgttgacagcaatgact

SEQ ID NO: 103698 - DNA, 25 bp, SARS Virus
gtgtctatgttagcagcaatgactt

SEQ ID NO: 103699 - DNA, 25 bp, SARS Virus
tgtctatgttaagagcaatgacttc

SEQ ID NO: 103700 - DNA, 25 bp, SARS Virus
gtctatgttaacggcaatgacttcc

SEQ ID NO: 103701 - DNA, 25 bp, SARS Virus
tctatgttaacagcaatgacttcca

SEQ ID NO: 103702 - DNA, 25 bp, SARS Virus
ctatgttaacaggaatgacttccac

SEQ ID NO: 103703 - DNA, 25 bp, SARS Virus
tatgttaacagcgatgacttccact

SEQ ID NO: 103704 - DNA, 25 bp, SARS Virus
atgttaacagcagtgacttccactg

SEQ ID NO: 103705 - DNA, 25 bp, SARS Virus
tgttaacagcaaggacttccactgc

SEQ ID NO: 103706 - DNA, 25 bp, SARS Virus
gttaacagcaatgacttccactgcc

SEQ ID NO: 103707 - DNA, 25 bp, SARS Virus
ttaacagcaatggcttccactgccg

SEQ ID NO: 103708 - DNA, 25 bp, SARS Virus
taacagcaatgagttccactgccgt

SEQ ID NO: 103709 - DNA, 25 bp, SARS Virus
aacagcaatgacgtccactgccgta

SEQ ID NO: 103710 - DNA, 25 bp, SARS Virus
acagcaatgactgccactgccgtaa

SEQ ID NO: 103711 - DNA, 25 bp, SARS Virus
cagcaatgacttgcactgccgtaaa

SEQ ID NO: 103712 - DNA, 25 bp, SARS Virus
agcaatgacttcgactgccgtaaag

SEQ ID NO: 103713 - DNA, 25 bp, SARS Virus
gcaatgacttccgctgccgtaaagt

SEQ ID NO: 103714 - DNA, 25 bp, SARS Virus
caatgacttccagtgccgtaaagtt

SEQ ID NO: 103715 - DNA, 25 bp, SARS Virus
aatgacttccacggccgtaaagttg

SEQ ID NO: 103716 - DNA, 25 bp, SARS Virus
atgacttccactgccgtaaagttgt

SEQ ID NO: 103717 - DNA, 25 bp, SARS Virus
tgacttccactggcgtaaagttgtg

SEQ ID NO: 103718 - DNA, 25 bp, SARS Virus
gacttccactgcggtaaagttgtgg

SEQ ID NO: 103719 - DNA, 25 bp, SARS Virus
acttccactgccgtaaagttgtggt

SEQ ID NO: 103720 - DNA, 25 bp, SARS Virus
cttccactgccggaaagttgtggtt

SEQ ID NO: 103721 - DNA, 25 bp, SARS Virus
ttccactgccgtgaagttgtggttt

SEQ ID NO: 103722 - DNA, 25 bp, SARS Virus
tccactgccgtagagttgtggtttt

SEQ ID NO: 103723 - DNA, 25 bp, SARS Virus
ccactgccgtaaggttgtggttttg

SEQ ID NO: 103724 - DNA, 25 bp, SARS Virus
cactgccgtaaagttgtggttttga

SEQ ID NO: 103725 - DNA, 25 bp, SARS Virus
actgccgtaaaggtgtggttttgag

SEQ ID NO: 103726 - DNA, 25 bp, SARS Virus
ctgccgtaaagtggtggttttgagt

SEQ ID NO: 103727 - DNA, 25 bp, SARS Virus
tgccgtaaagttgtggttttgagtt

SEQ ID NO: 103728 - DNA, 25 bp, SARS Virus
gccgtaaagttggggttttgagttt

SEQ ID NO: 103729 - DNA, 25 bp, SARS Virus
ccgtaaagttgtggttttgagtttc

SEQ ID NO: 103730 - DNA, 25 bp, SARS Virus
cgtaaagttgtggttttgagtttct

SEQ ID NO: 103731 - DNA, 25 bp, SARS Virus
gtaaagttgtgggtttgagtttctt

SEQ ID NO: 103732 - DNA, 25 bp, SARS Virus
taaagttgtggtgttgagtttcttc

SEQ ID NO: 103733 - DNA, 25 bp, SARS Virus
aaagttgtggttgtgagtttcttct

SEQ ID NO: 103734 - DNA, 25 bp, SARS Virus
aagttgtggtttggagtttcttctg

SEQ ID NO: 103735 - DNA, 25 bp, SARS Virus
agttgtggttttgagtttcttctga

SEQ ID NO: 103736 - DNA, 25 bp, SARS Virus
gttgtggttttgggtttcttctgat

SEQ ID NO: 103737 - DNA, 25 bp, SARS Virus
ttgtggttttgagtttcttctgatg

SEQ ID NO: 103738 - DNA, 25 bp, SARS Virus
tgtggttttgaggttcttctgatgg

SEQ ID NO: 103739 - DNA, 25 bp, SARS Virus
gtggttttgagtgtcttctgatggt

SEQ ID NO: 103740 - DNA, 25 bp, SARS Virus
tggttttgagttgcttctgatggtt

SEQ ID NO: 103741 - DNA, 25 bp, SARS Virus
ggttttgagtttgttctgatggttt

SEQ ID NO: 103742 - DNA, 25 bp, SARS Virus
gttttgagtttcgtctgatggttta

SEQ ID NO: 103743 - DNA, 25 bp, SARS Virus
ttttgagtttctgctgatggtttaa

SEQ ID NO: 103744 - DNA, 25 bp, SARS Virus
tttgagtttcttgtgatggtttaac

SEQ ID NO: 103745 - DNA, 25 bp, SARS Virus
ttgagtttcttcggatggtttaacc

SEQ ID NO: 103746 - DNA, 25 bp, SARS Virus
tgagtttcttctgatggtttaacca

SEQ ID NO: 103747 - DNA, 25 bp, SARS Virus
gagtttcttctggtggtttaaccac

SEQ ID NO: 103748 - DNA, 25 bp, SARS Virus
agtttcttctgagggtttaaccacc

SEQ ID NO: 103749 - DNA, 25 bp, SARS Virus
gtttcttctgatggtttaaccacca

SEQ ID NO: 103750 - DNA, 25 bp, SARS Virus
tttcttctgatggtttaaccaccaa

SEQ ID NO: 103751 - DNA, 25 bp, SARS Virus
ttcttctgatgggttaaccaccaat

SEQ ID NO: 103752 - DNA, 25 bp, SARS Virus
tcttctgatggtgtaaccaccaata

SEQ ID NO: 103753 - DNA, 25 bp, SARS Virus
cttctgatggttgaaccaccaataa

SEQ ID NO: 103754 - DNA, 25 bp, SARS Virus
ttctgatggtttgaccaccaataag

SEQ ID NO: 103755 - DNA, 25 bp, SARS Virus
tctgatggtttagccaccaataaga

SEQ ID NO: 103756 - DNA, 25 bp, SARS Virus
ctgatggtttaagcaccaataagac

SEQ ID NO: 103757 - DNA, 25 bp, SARS Virus
tgatggtttaacgaccaataagact

SEQ ID NO: 103758 - DNA, 25 bp, SARS Virus
gatggtttaaccgccaataagactc

SEQ ID NO: 103759 - DNA, 25 bp, SARS Virus
atggtttaaccagcaataagactcc

SEQ ID NO: 103760 - DNA, 25 bp, SARS Virus
tggtttaaccacgaataagactcct

SEQ ID NO: 103761 - DNA, 25 bp, SARS Virus
ggtttaaccaccgataagactccta

SEQ ID NO: 103762 - DNA, 25 bp, SARS Virus
gtttaaccaccagtaagactcctat

SEQ ID NO: 103763 - DNA, 25 bp, SARS Virus
tttaaccaccaagaagactcctatc

SEQ ID NO: 103764 - DNA, 25 bp, SARS Virus
ttaaccaccaatgagactcctatcc

SEQ ID NO: 103765 - DNA, 25 bp, SARS Virus
taaccaccaataggactcctatccg

SEQ ID NO: 103766 - DNA, 25 bp, SARS Virus
aaccaccaataagactcctatccgt

SEQ ID NO: 103767 - DNA, 25 bp, SARS Virus
accaccaataaggctcctatccgtg

SEQ ID NO: 103768 - DNA, 25 bp, SARS Virus
ccaccaataagagtcctatccgtga

SEQ ID NO: 103769 - DNA, 25 bp, SARS Virus
caccaataagacgcctatccgtgag

SEQ ID NO: 103770 - DNA, 25 bp, SARS Virus
accaataagactgctatccgtgagt

SEQ ID NO: 103771 - DNA, 25 bp, SARS Virus
ccaataagactcgtatccgtgagtc

SEQ ID NO: 103772 - DNA, 25 bp, SARS Virus
caataagactccgatccgtgagtcc

SEQ ID NO: 103773 - DNA, 25 bp, SARS Virus
aataagactcctgtccgtgagtcca

SEQ ID NO: 103774 - DNA, 25 bp, SARS Virus
ataagactcctagccgtgagtccac

SEQ ID NO: 103775 - DNA, 25 bp, SARS Virus
taagactcctatgcgtgagtccaca

SEQ ID NO: 103776 - DNA, 25 bp, SARS Virus
aagactcctatcggtgagtccacaa

SEQ ID NO: 103777 - DNA, 25 bp, SARS Virus
agactcctatccgtgagtccacaat

SEQ ID NO: 103778 - DNA, 25 bp, SARS Virus
gactcctatccgggagtccacaatt

SEQ ID NO: 103779 - DNA, 25 bp, SARS Virus
actcctatccgtgagtccacaattt

SEQ ID NO: 103780 - DNA, 25 bp, SARS Virus
ctcctatccgtgggtccacaatttc

SEQ ID NO: 103781 - DNA, 25 bp, SARS Virus
tcctatccgtgagtccacaatttct

SEQ ID NO: 103782 - DNA, 25 bp, SARS Virus
cctatccgtgaggccacaatttctg

SEQ ID NO: 103783 - DNA, 25 bp, SARS Virus
ctatccgtgagtgcacaatttctga

SEQ ID NO: 103784 - DNA, 25 bp, SARS Virus
tatccgtgagtcgacaatttctgat

SEQ ID NO: 103785 - DNA, 25 bp, SARS Virus
atccgtgagtccgcaatttctgata

SEQ ID NO: 103786 - DNA, 25 bp, SARS Virus
tccgtgagtccagaatttctgatac

SEQ ID NO: 103787 - DNA, 25 bp, SARS Virus
ccgtgagtccacgatttctgataca

SEQ ID NO: 103788 - DNA, 25 bp, SARS Virus
cgtgagtccacagtttctgatacag

SEQ ID NO: 103789 - DNA, 25 bp, SARS Virus
gtgagtccacaagttctgatacagc

SEQ ID NO: 103790 - DNA, 25 bp, SARS Virus
tgagtccacaatgtctgatacagca

SEQ ID NO: 103791 - DNA, 25 bp, SARS Virus
gagtccacaattgctgatacagcaa

SEQ ID NO: 103792 - DNA, 25 bp, SARS Virus
agtccacaatttgtgatacagcaac

SEQ ID NO: 103793 - DNA, 25 bp, SARS Virus
gtccacaatttcggatacagcaaca

SEQ ID NO: 103794 - DNA, 25 bp, SARS Virus
tccacaatttctgatacagcaacat

SEQ ID NO: 103795 - DNA, 25 bp, SARS Virus
ccacaatttctggtacagcaacatg

SEQ ID NO: 103796 - DNA, 25 bp, SARS Virus
cacaatttctgagacagcaacatgt

SEQ ID NO: 103797 - DNA, 25 bp, SARS Virus
acaatttctgatgcagcaacatgta

SEQ ID NO: 103798 - DNA, 25 bp, SARS Virus
caatttctgatagagcaacatgtac

SEQ ID NO: 103799 - DNA, 25 bp, SARS Virus
aatttctgatacggcaacatgtacc

SEQ ID NO: 103800 - DNA, 25 bp, SARS Virus
atttctgatacagcaacatgtaccg

SEQ ID NO: 103801 - DNA, 25 bp, SARS Virus
tttctgatacaggaacatgtaccga

SEQ ID NO: 103802 - DNA, 25 bp, SARS Virus
ttctgatacagcgacatgtaccgat

SEQ ID NO: 103803 - DNA, 25 bp, SARS Virus
tctgatacagcagcatgtaccgata

SEQ ID NO: 103804 - DNA, 25 bp, SARS Virus
ctgatacagcaagatgtaccgataa

SEQ ID NO: 103805 - DNA, 25 bp, SARS Virus
tgatacagcaacgtgtaccgataaa

SEQ ID NO: 103806 - DNA, 25 bp, SARS Virus
gatacagcaacaggtaccgataaag

SEQ ID NO: 103807 - DNA, 25 bp, SARS Virus
atacagcaacatgtaccgataaagt

SEQ ID NO: 103808 - DNA, 25 bp, SARS Virus
tacagcaacatggaccgataaagtg

SEQ ID NO: 103809 - DNA, 25 bp, SARS Virus
acagcaacatgtgccgataaagtgg

SEQ ID NO: 103810 - DNA, 25 bp, SARS Virus
cagcaacatgtagcgataaagtggc

SEQ ID NO: 103811 - DNA, 25 bp, SARS Virus
agcaacatgtacggataaagtggct

SEQ ID NO: 103812 - DNA, 25 bp, SARS Virus
gcaacatgtaccgataaagtggctt

SEQ ID NO: 103813 - DNA, 25 bp, SARS Virus
caacatgtaccggtaaagtggcttc

SEQ ID NO: 103814 - DNA, 25 bp, SARS Virus
aacatgtaccgagaaagtggcttca

SEQ ID NO: 103815 - DNA, 25 bp, SARS Virus
acatgtaccgatgaagtggcttcaa

SEQ ID NO: 103816 - DNA, 25 bp, SARS Virus
catgtaccgatagagtggcttcaaa

SEQ ID NO: 103817 - DNA, 25 bp, SARS Virus
atgtaccgataaggtggcttcaaat

SEQ ID NO: 103818 - DNA, 25 bp, SARS Virus
tgtaccgataaagtggcttcaaatg

SEQ ID NO: 103819 - DNA, 25 bp, SARS Virus
gtaccgataaaggggcttcaaatga

SEQ ID NO: 103820 - DNA, 25 bp, SARS Virus
taccgataaagtggcttcaaatgat

SEQ ID NO: 103821 - DNA, 25 bp, SARS Virus
accgataaagtggcttcaaatgatg

SEQ ID NO: 103822 - DNA, 25 bp, SARS Virus
ccgataaagtgggttcaaatgatgg

SEQ ID NO: 103823 - DNA, 25 bp, SARS Virus
cgataaagtggcgtcaaatgatggt

SEQ ID NO: 103824 - DNA, 25 bp, SARS Virus
gataaagtggctgcaaatgatggtc

SEQ ID NO: 103825 - DNA, 25 bp, SARS Virus
ataaagtggcttgaaatgatggtcg

SEQ ID NO: 103826 - DNA, 25 bp, SARS Virus
taaagtggcttcgaatgatggtcga

SEQ ID NO: 103827 - DNA, 25 bp, SARS Virus
aaagtggcttcagatgatggtcgaa

SEQ ID NO: 103828 - DNA, 25 bp, SARS Virus
aagtggcttcaagtgatggtcgaac

SEQ ID NO: 103829 - DNA, 25 bp, SARS Virus
agtggcttcaaaggatggtcgaact

SEQ ID NO: 103830 - DNA, 25 bp, SARS Virus
gtggcttcaaatgatggtcgaactc

SEQ ID NO: 103831 - DNA, 25 bp, SARS Virus
tggcttcaaatggtggtcgaactca

SEQ ID NO: 103832 - DNA, 25 bp, SARS Virus
ggcttcaaatgagggtcgaactcag

SEQ ID NO: 103833 - DNA, 25 bp, SARS Virus
gcttcaaatgatggtcgaactcaga

SEQ ID NO: 103834 - DNA, 25 bp, SARS Virus
cttcaaatgatggtcgaactcagat

SEQ ID NO: 103835 - DNA, 25 bp, SARS Virus
ttcaaatgatgggcgaactcagatg

SEQ ID NO: 103836 - DNA, 25 bp, SARS Virus
tcaaatgatggtggaactcagatgt

SEQ ID NO: 103837 - DNA, 25 bp, SARS Virus
caaatgatggtcgaactcagatgtg

SEQ ID NO: 103838 - DNA, 25 bp, SARS Virus
aaatgatggtcggactcagatgtgt

SEQ ID NO: 103839 - DNA, 25 bp, SARS Virus
aatgatggtcgagctcagatgtgtt

SEQ ID NO: 103840 - DNA, 25 bp, SARS Virus
atgatggtcgaagtcagatgtgttt

SEQ ID NO: 103841 - DNA, 25 bp, SARS Virus
tgatggtcgaacgcagatgtgttta

SEQ ID NO: 103842 - DNA, 25 bp, SARS Virus
gatggtcgaactgagatgtgtttaa

SEQ ID NO: 103843 - DNA, 25 bp, SARS Virus
atggtcgaactcggatgtgtttaat

SEQ ID NO: 103844 - DNA, 25 bp, SARS Virus
tggtcgaactcagatgtgtttaatg

SEQ ID NO: 103845 - DNA, 25 bp, SARS Virus
ggtcgaactcaggtgtgtttaatga

SEQ ID NO: 103846 - DNA, 25 bp, SARS Virus
gtcgaactcagaggtgtttaatgat

SEQ ID NO: 103847 - DNA, 25 bp, SARS Virus
tcgaactcagatgtgtttaatgatg

SEQ ID NO: 103848 - DNA, 25 bp, SARS Virus
cgaactcagatgggtttaatgatgt

SEQ ID NO: 103849 - DNA, 25 bp, SARS Virus
gaactcagatgtgtttaatgatgtc

SEQ ID NO: 103850 - DNA, 25 bp, SARS Virus
aactcagatgtggttaatgatgtct

SEQ ID NO: 103851 - DNA, 25 bp, SARS Virus
actcagatgtgtgtaatgatgtctg

SEQ ID NO: 103852 - DNA, 25 bp, SARS Virus
ctcagatgtgttgaatgatgtctgt

SEQ ID NO: 103853 - DNA, 25 bp, SARS Virus
tcagatgtgtttgatgatgtctgtg

SEQ ID NO: 103854 - DNA, 25 bp, SARS Virus
cagatgtgtttagtgatgtctgtga

SEQ ID NO: 103855 - DNA, 25 bp, SARS Virus
agatgtgtttaaggatgtctgtgac

SEQ ID NO: 103856 - DNA, 25 bp, SARS Virus
gatgtgtttaatgatgtctgtgacc

SEQ ID NO: 103857 - DNA, 25 bp, SARS Virus
atgtgtttaatggtgtctgtgacca

SEQ ID NO: 103858 - DNA, 25 bp, SARS Virus
tgtgtttaatgaggtctgtgaccat

SEQ ID NO: 103859 - DNA, 25 bp, SARS Virus
gtgtttaatgatgtctgtgaccata

SEQ ID NO: 103860 - DNA, 25 bp, SARS Virus
tgtttaatgatggctgtgaccataa

SEQ ID NO: 103861 - DNA, 25 bp, SARS Virus
gtttaatgatgtgtgtgaccataac

SEQ ID NO: 103862 - DNA, 25 bp, SARS Virus
tttaatgatgtcggtgaccataact

SEQ ID NO: 103863 - DNA, 25 bp, SARS Virus
ttaatgatgtctgtgaccataactt

SEQ ID NO: 103864 - DNA, 25 bp, SARS Virus
taatgatgtctgggaccataacttt

SEQ ID NO: 103865 - DNA, 25 bp, SARS Virus
aatgatgtctgtgaccataactttt

SEQ ID NO: 103866 - DNA, 25 bp, SARS Virus
atgatgtctgtggccataactttta

SEQ ID NO: 103867 - DNA, 25 bp, SARS Virus
tgatgtctgtgagcataacttttac

SEQ ID NO: 103868 - DNA, 25 bp, SARS Virus
gatgtctgtgacgataacttttacg

SEQ ID NO: 103869 - DNA, 25 bp, SARS Virus
atgtctgtgaccgtaacttttacga

SEQ ID NO: 103870 - DNA, 25 bp, SARS Virus
tgtctgtgaccagaacttttacgat

SEQ ID NO: 103871 - DNA, 25 bp, SARS Virus
gtctgtgaccatgacttttacgatg

SEQ ID NO: 103872 - DNA, 25 bp, SARS Virus
tctgtgaccatagcttttacgatgt

SEQ ID NO: 103873 - DNA, 25 bp, SARS Virus
ctgtgaccataagttttacgatgta

SEQ ID NO: 103874 - DNA, 25 bp, SARS Virus
tgtgaccataacgtttacgatgtaa

SEQ ID NO: 103875 - DNA, 25 bp, SARS Virus
gtgaccataactgttacgatgtaag

SEQ ID NO: 103876 - DNA, 25 bp, SARS Virus
tgaccataacttgtacgatgtaaga

SEQ ID NO: 103877 - DNA, 25 bp, SARS Virus
gaccataactttgacgatgtaagaa

SEQ ID NO: 103878 - DNA, 25 bp, SARS Virus
accataacttttgcgatgtaagaag

SEQ ID NO: 103879 - DNA, 25 bp, SARS Virus
ccataacttttaggatgtaagaagt

SEQ ID NO: 103880 - DNA, 25 bp, SARS Virus
cataacttttacgatgtaagaagta

SEQ ID NO: 103881 - DNA, 25 bp, SARS Virus
ataacttttacggtgtaagaagtag

SEQ ID NO: 103882 - DNA, 25 bp, SARS Virus
taacttttacgaggtaagaagtaga

SEQ ID NO: 103883 - DNA, 25 bp, SARS Virus
aacttttacgatgtaagaagtagaa

SEQ ID NO: 103884 - DNA, 25 bp, SARS Virus
acttttacgatggaagaagtagaaa

SEQ ID NO: 103885 - DNA, 25 bp, SARS Virus
cttttacgatgtgagaagtagaaat

SEQ ID NO: 103886 - DNA, 25 bp, SARS Virus
ttttacgatgtaggaagtagaaatt

SEQ ID NO: 103887 - DNA, 25 bp, SARS Virus
tttacgatgtaagaagtagaaattg

SEQ ID NO: 103888 - DNA, 25 bp, SARS Virus
ttacgatgtaaggagtagaaattgt

SEQ ID NO: 103889 - DNA, 25 bp, SARS Virus
tacgatgtaagaggtagaaattgtt

SEQ ID NO: 103890 - DNA, 25 bp, SARS Virus
acgatgtaagaagtagaaattgttc

SEQ ID NO: 103891 - DNA, 25 bp, SARS Virus
cgatgtaagaaggagaaattgttcg

SEQ ID NO: 103892 - DNA, 25 bp, SARS Virus
gatgtaagaagtggaaattgttcga

SEQ ID NO: 103893 - DNA, 25 bp, SARS Virus
atgtaagaagtagaaattgttcgaa

SEQ ID NO: 103894 - DNA, 25 bp, SARS Virus
tgtaagaagtaggaattgttcgaac

SEQ ID NO: 103895 - DNA, 25 bp, SARS Virus
gtaagaagtagagattgttcgaaca

SEQ ID NO: 103896 - DNA, 25 bp, SARS Virus
taagaagtagaagttgttcgaacaa

SEQ ID NO: 103897 - DNA, 25 bp, SARS Virus
aagaagtagaaagtgttcgaacaat

SEQ ID NO: 103898 - DNA, 25 bp, SARS Virus
agaagtagaaatggttcgaacaatt

SEQ ID NO: 103899 - DNA, 25 bp, SARS Virus
gaagtagaaattgttcgaacaattt

SEQ ID NO: 103900 - DNA, 25 bp, SARS Virus
aagtagaaattggtcgaacaatttc

SEQ ID NO: 103901 - DNA, 25 bp, SARS Virus
agtagaaattgtgcgaacaatttct

SEQ ID NO: 103902 - DNA, 25 bp, SARS Virus
gtagaaattgttggaacaatttctg

SEQ ID NO: 103903 - DNA, 25 bp, SARS Virus
tagaaattgttcgaacaatttctgg

SEQ ID NO: 103904 - DNA, 25 bp, SARS Virus
agaaattgttcggacaatttctggg

SEQ ID NO: 103905 - DNA, 25 bp, SARS Virus
gaaattgttcgagcaatttctgggt

SEQ ID NO: 103906 - DNA, 25 bp, SARS Virus
aaattgttcgaagaatttctgggtg

SEQ ID NO: 103907 - DNA, 25 bp, SARS Virus
aattgttcgaacgatttctgggtgg

SEQ ID NO: 103908 - DNA, 25 bp, SARS Virus
attgttcgaacagtttctgggtggc

SEQ ID NO: 103909 - DNA, 25 bp, SARS Virus
ttgttcgaacaagttctgggtggct

SEQ ID NO: 103910 - DNA, 25 bp, SARS Virus
tgttcgaacaatgtctgggtggctt

SEQ ID NO: 103911 - DNA, 25 bp, SARS Virus
gttcgaacaattgctgggtggctta

SEQ ID NO: 103912 - DNA, 25 bp, SARS Virus
ttcgaacaatttgtgggtggcttac

SEQ ID NO: 103913 - DNA, 25 bp, SARS Virus
tcgaacaatttcggggtggcttaca

SEQ ID NO: 103914 - DNA, 25 bp, SARS Virus
cgaacaatttctgggtggcttacac

SEQ ID NO: 103915 - DNA, 25 bp, SARS Virus
gaacaatttctgggtggcttacacg

SEQ ID NO: 103916 - DNA, 25 bp, SARS Virus
aacaatttctgggtggcttacacgt

SEQ ID NO: 103917 - DNA, 25 bp, SARS Virus
acaatttctggggggcttacacgtt

SEQ ID NO: 103918 - DNA, 25 bp, SARS Virus
caatttctgggtggcttacacgttt

SEQ ID NO: 103919 - DNA, 25 bp, SARS Virus
aatttctgggtggcttacacgttta

SEQ ID NO: 103920 - DNA, 25 bp, SARS Virus
atttctgggtgggttacacgtttat

SEQ ID NO: 103921 - DNA, 25 bp, SARS Virus
tttctgggtggcgtacacgtttatg

SEQ ID NO: 103922 - DNA, 25 bp, SARS Virus
ttctgggtggctgacacgtttatgt

SEQ ID NO: 103923 - DNA, 25 bp, SARS Virus
tctgggtggcttgcacgtttatgtg

SEQ ID NO: 103924 - DNA, 25 bp, SARS Virus
ctgggtggcttagacgtttatgtgt

SEQ ID NO: 103925 - DNA, 25 bp, SARS Virus
tgggtggcttacgcgtttatgtgtg

SEQ ID NO: 103926 - DNA, 25 bp, SARS Virus
gggtggcttacaggtttatgtgtgt

SEQ ID NO: 103927 - DNA, 25 bp, SARS Virus
ggtggcttacacgtttatgtgtgtt

SEQ ID NO: 103928 - DNA, 25 bp, SARS Virus
gtggcttacacggttatgtgtgtta

SEQ ID NO: 103929 - DNA, 25 bp, SARS Virus
tggcttacacgtgtatgtgtgttag

SEQ ID NO: 103930 - DNA, 25 bp, SARS Virus
ggcttacacgttgatgtgtgttagc

SEQ ID NO: 103931 - DNA, 25 bp, SARS Virus
gcttacacgtttgtgtgtgttagct

SEQ ID NO: 103932 - DNA, 25 bp, SARS Virus
cttacacgtttaggtgtgttagctg

SEQ ID NO: 103933 - DNA, 25 bp, SARS Virus
ttacacgtttatgtgtgttagctgc

SEQ ID NO: 103934 - DNA, 25 bp, SARS Virus
tacacgtttatgggtgttagctgcc

SEQ ID NO: 103935 - DNA, 25 bp, SARS Virus
acacgtttatgtgtgttagctgccg

SEQ ID NO: 103936 - DNA, 25 bp, SARS Virus
cacgtttatgtgggttagctgccga

SEQ ID NO: 103937 - DNA, 25 bp, SARS Virus
acgtttatgtgtgttagctgccgag

SEQ ID NO: 103938 - DNA, 25 bp, SARS Virus
cgtttatgtgtggtagctgccgaga

SEQ ID NO: 103939 - DNA, 25 bp, SARS Virus
gtttatgtgtgtgagctgccgagaa

SEQ ID NO: 103940 - DNA, 25 bp, SARS Virus
tttatgtgtgttggctgccgagaag

SEQ ID NO: 103941 - DNA, 25 bp, SARS Virus
ttatgtgtgttagctgccgagaagt

SEQ ID NO: 103942 - DNA, 25 bp, SARS Virus
tatgtgtgttaggtgccgagaagtc

SEQ ID NO: 103943 - DNA, 25 bp, SARS Virus
atgtgtgttagcggccgagaagtcc

SEQ ID NO: 103944 - DNA, 25 bp, SARS Virus
tgtgtgttagctgccgagaagtcct

SEQ ID NO: 103945 - DNA, 25 bp, SARS Virus
gtgtgttagctggcgagaagtcctc

SEQ ID NO: 103946 - DNA, 25 bp, SARS Virus
tgtgttagctgcggagaagtcctca

SEQ ID NO: 103947 - DNA, 25 bp, SARS Virus
gtgttagctgccgagaagtcctcaa

SEQ ID NO: 103948 - DNA, 25 bp, SARS Virus
tgttagctgccgggaagtcctcaac

SEQ ID NO: 103949 - DNA, 25 bp, SARS Virus
gttagctgccgagaagtcctcaacg

SEQ ID NO: 103950 - DNA, 25 bp, SARS Virus
ttagctgccgaggagtcctcaacga

SEQ ID NO: 103951 - DNA, 25 bp, SARS Virus
tagctgccgagaggtcctcaacgat

SEQ ID NO: 103952 - DNA, 25 bp, SARS Virus
agctgccgagaagtcctcaacgatt

SEQ ID NO: 103953 - DNA, 25 bp, SARS Virus
gctgccgagaaggcctcaacgatta

SEQ ID NO: 103954 - DNA, 25 bp, SARS Virus
ctgccgagaagtgctcaacgattag

SEQ ID NO: 103955 - DNA, 25 bp, SARS Virus
tgccgagaagtcgtcaacgattagg

SEQ ID NO: 103956 - DNA, 25 bp, SARS Virus
gccgagaagtccgcaacgattaggt

SEQ ID NO: 103957 - DNA, 25 bp, SARS Virus
ccgagaagtcctgaacgattaggtc

SEQ ID NO: 103958 - DNA, 25 bp, SARS Virus
cgagaagtcctcgacgattaggtcg

SEQ ID NO: 103959 - DNA, 25 bp, SARS Virus
gagaagtcctcagcgattaggtcgt

SEQ ID NO: 103960 - DNA, 25 bp, SARS Virus
agaagtcctcaaggattaggtcgtt

SEQ ID NO: 103961 - DNA, 25 bp, SARS Virus
gaagtcctcaacgattaggtcgtta

SEQ ID NO: 103962 - DNA, 25 bp, SARS Virus
aagtcctcaacggttaggtcgttac

SEQ ID NO: 103963 - DNA, 25 bp, SARS Virus
agtcctcaacgagtaggtcgttacc

SEQ ID NO: 103964 - DNA, 25 bp, SARS Virus
gtcctcaacgatgaggtcgttacct

SEQ ID NO: 103965 - DNA, 25 bp, SARS Virus
tcctcaacgattgggtcgttaccta

SEQ ID NO: 103966 - DNA, 25 bp, SARS Virus
cctcaacgattaggtcgttacctag

SEQ ID NO: 103967 - DNA, 25 bp, SARS Virus
ctcaacgattaggtcgttacctagg

SEQ ID NO: 103968 - DNA, 25 bp, SARS Virus
tcaacgattagggcgttacctaggt

SEQ ID NO: 103969 - DNA, 25 bp, SARS Virus
caacgattaggtggttacctaggtt

SEQ ID NO: 103970 - DNA, 25 bp, SARS Virus
aacgattaggtcgttacctaggtta

SEQ ID NO: 103971 - DNA, 25 bp, SARS Virus
acgattaggtcggtacctaggttaa

SEQ ID NO: 103972 - DNA, 25 bp, SARS Virus
cgattaggtcgtgacctaggttaaa

SEQ ID NO: 103973 - DNA, 25 bp, SARS Virus
gattaggtcgttgcctaggttaaat

SEQ ID NO: 103974 - DNA, 25 bp, SARS Virus
attaggtcgttagctaggttaaata

SEQ ID NO: 103975 - DNA, 25 bp, SARS Virus
ttaggtcgttacgtaggttaaatac

SEQ ID NO: 103976 - DNA, 25 bp, SARS Virus
taggtcgttaccgaggttaaatact

SEQ ID NO: 103977 - DNA, 25 bp, SARS Virus
aggtcgttacctgggttaaatacta

SEQ ID NO: 103978 - DNA, 25 bp, SARS Virus
ggtcgttacctaggttaaatactac

SEQ ID NO: 103979 - DNA, 25 bp, SARS Virus
gtcgttacctaggttaaatactact

SEQ ID NO: 103980 - DNA, 25 bp, SARS Virus
tcgttacctagggtaaatactactc

SEQ ID NO: 103981 - DNA, 25 bp, SARS Virus
cgttacctaggtgaaatactactcg

SEQ ID NO: 103982 - DNA, 25 bp, SARS Virus
gttacctaggttgaatactactcgg

SEQ ID NO: 103983 - DNA, 25 bp, SARS Virus
ttacctaggttagatactactcggc

SEQ ID NO: 103984 - DNA, 25 bp, SARS Virus
tacctaggttaagtactactcggct

SEQ ID NO: 103985 - DNA, 25 bp, SARS Virus
acctaggttaaagactactcggctg

SEQ ID NO: 103986 - DNA, 25 bp, SARS Virus
cctaggttaaatgctactcggctgc

SEQ ID NO: 103987 - DNA, 25 bp, SARS Virus
ctaggttaaatagtactcggctgct

SEQ ID NO: 103988 - DNA, 25 bp, SARS Virus
taggttaaatacgactcggctgctg

SEQ ID NO: 103989 - DNA, 25 bp, SARS Virus
aggttaaatactgctcggctgctgc

SEQ ID NO: 103990 - DNA, 25 bp, SARS Virus
ggttaaatactagtcggctgctgct

SEQ ID NO: 103991 - DNA, 25 bp, SARS Virus
gttaaatactacgcggctgctgctg

SEQ ID NO: 103992 - DNA, 25 bp, SARS Virus
ttaaatactactgggctgctgctga

SEQ ID NO: 103993 - DNA, 25 bp, SARS Virus
taaatactactcggctgctgctgat

SEQ ID NO: 103994 - DNA, 25 bp, SARS Virus
aaatactactcggctgctgctgatg

SEQ ID NO: 103995 - DNA, 25 bp, SARS Virus
aatactactcgggtgctgctgatga

SEQ ID NO: 103996 - DNA, 25 bp, SARS Virus
atactactcggcggctgctgatgat

SEQ ID NO: 103997 - DNA, 25 bp, SARS Virus
tactactcggctgctgctgatgatc

SEQ ID NO: 103998 - DNA, 25 bp, SARS Virus
actactcggctggtgctgatgatcg

SEQ ID NO: 103999 - DNA, 25 bp, SARS Virus
ctactcggctgcggctgatgatcgc

SEQ ID NO: 104000 - DNA, 25 bp, SARS Virus
tactcggctgctgctgatgatcgca

SEQ ID NO: 104001 - DNA, 25 bp, SARS Virus
actcggctgctggtgatgatcgcac

SEQ ID NO: 104002 - DNA, 25 bp, SARS Virus
ctcggctgctgcggatgatcgcacg

SEQ ID NO: 104003 - DNA, 25 bp, SARS Virus
tcggctgctgctgatgatcgcacgg

SEQ ID NO: 104004 - DNA, 25 bp, SARS Virus
cggctgctgctggtgatcgcacgga

SEQ ID NO: 104005 - DNA, 25 bp, SARS Virus
ggctgctgctgaggatcgcacggaa

SEQ ID NO: 104006 - DNA, 25 bp, SARS Virus
gctgctgctgatgatcgcacggaaa

SEQ ID NO: 104007 - DNA, 25 bp, SARS Virus
ctgctgctgatggtcgcacggaaac

SEQ ID NO: 104008 - DNA, 25 bp, SARS Virus
tgctgctgatgagcgcacggaaaca

SEQ ID NO: 104009 - DNA, 25 bp, SARS Virus
gctgctgatgatggcacggaaacat

SEQ ID NO: 104010 - DNA, 25 bp, SARS Virus
ctgctgatgatcgcacggaaacatt

SEQ ID NO: 104011 - DNA, 25 bp, SARS Virus
tgctgatgatcggacggaaacattc

SEQ ID NO: 104012 - DNA, 25 bp, SARS Virus
gctgatgatcgcgcggaaacattcg

SEQ ID NO: 104013 - DNA, 25 bp, SARS Virus
ctgatgatcgcagggaaacattcgt

SEQ ID NO: 104014 - DNA, 25 bp, SARS Virus
tgatgatcgcacggaaacattcgtg

SEQ ID NO: 104015 - DNA, 25 bp, SARS Virus
gatgatcgcacggaaacattcgtgt

SEQ ID NO: 104016 - DNA, 25 bp, SARS Virus
atgatcgcacgggaacattcgtgtt

SEQ ID NO: 104017 - DNA, 25 bp, SARS Virus
tgatcgcacggagacattcgtgttc

SEQ ID NO: 104018 - DNA, 25 bp, SARS Virus
gatcgcacggaagcattcgtgttct

SEQ ID NO: 104019 - DNA, 25 bp, SARS Virus
atcgcacggaaagattcgtgttctt

SEQ ID NO: 104020 - DNA, 25 bp, SARS Virus
tcgcacggaaacgttcgtgttcttt

SEQ ID NO: 104021 - DNA, 25 bp, SARS Virus
cgcacggaaacagtcgtgttctttc

SEQ ID NO: 104022 - DNA, 25 bp, SARS Virus
gcacggaaacatgcgtgttctttca

SEQ ID NO: 104023 - DNA, 25 bp, SARS Virus
cacggaaacattggtgttctttcac

SEQ ID NO: 104024 - DNA, 25 bp, SARS Virus
acggaaacattcgtgttctttcact

SEQ ID NO: 104025 - DNA, 25 bp, SARS Virus
cggaaacattcgggttctttcactc

SEQ ID NO: 104026 - DNA, 25 bp, SARS Virus
ggaaacattcgtgttctttcactca

SEQ ID NO: 104027 - DNA, 25 bp, SARS Virus
gaaacattcgtggtctttcactcat

SEQ ID NO: 104028 - DNA, 25 bp, SARS Virus
aaacattcgtgtgctttcactcatg

SEQ ID NO: 104029 - DNA, 25 bp, SARS Virus
aacattcgtgttgtttcactcatgc

SEQ ID NO: 104030 - DNA, 25 bp, SARS Virus
acattcgtgttcgttcactcatgct

SEQ ID NO: 104031 - DNA, 25 bp, SARS Virus
cattcgtgttctgtcactcatgctt

SEQ ID NO: 104032 - DNA, 25 bp, SARS Virus
attcgtgttcttgcactcatgcttg

SEQ ID NO: 104033 - DNA, 25 bp, SARS Virus
ttcgtgttctttgactcatgcttga

SEQ ID NO: 104034 - DNA, 25 bp, SARS Virus
tcgtgttctttcgctcatgcttgaa

SEQ ID NO: 104035 - DNA, 25 bp, SARS Virus
cgtgttctttcagtcatgcttgaat

SEQ ID NO: 104036 - DNA, 25 bp, SARS Virus
gtgttctttcacgcatgcttgaata

SEQ ID NO: 104037 - DNA, 25 bp, SARS Virus
tgttctttcactgatgcttgaatac

SEQ ID NO: 104038 - DNA, 25 bp, SARS Virus
gttctttcactcgtgcttgaataca

SEQ ID NO: 104039 - DNA, 25 bp, SARS Virus
ttctttcactcaggcttgaatacat

SEQ ID NO: 104040 - DNA, 25 bp, SARS Virus
tctttcactcatgcttgaatacatg

SEQ ID NO: 104041 - DNA, 25 bp, SARS Virus
ctttcactcatggttgaatacatga

SEQ ID NO: 104042 - DNA, 25 bp, SARS Virus
tttcactcatgcgtgaatacatgag

SEQ ID NO: 104043 - DNA, 25 bp, SARS Virus
ttcactcatgctggaatacatgagt

SEQ ID NO: 104044 - DNA, 25 bp, SARS Virus
tcactcatgcttgaatacatgagta

SEQ ID NO: 104045 - DNA, 25 bp, SARS Virus
cactcatgcttggatacatgagtaa

SEQ ID NO: 104046 - DNA, 25 bp, SARS Virus
actcatgcttgagtacatgagtaag

SEQ ID NO: 104047 - DNA, 25 bp, SARS Virus
ctcatgcttgaagacatgagtaagc

SEQ ID NO: 104048 - DNA, 25 bp, SARS Virus
tcatgcttgaatgcatgagtaagca

SEQ ID NO: 104049 - DNA, 25 bp, SARS Virus
catgcttgaatagatgagtaagcaa

SEQ ID NO: 104050 - DNA, 25 bp, SARS Virus
atgcttgaatacgtgagtaagcaaa

SEQ ID NO: 104051 - DNA, 25 bp, SARS Virus
tgcttgaatacaggagtaagcaaag

SEQ ID NO: 104052 - DNA, 25 bp, SARS Virus
gcttgaatacatgagtaagcaaagc

SEQ ID NO: 104053 - DNA, 25 bp, SARS Virus
cttgaatacatgggtaagcaaagcc

SEQ ID NO: 104054 - DNA, 25 bp, SARS Virus
ttgaatacatgagtaagcaaagcct

SEQ ID NO: 104055 - DNA, 25 bp, SARS Virus
tgaatacatgaggaagcaaagcctt

SEQ ID NO: 104056 - DNA, 25 bp, SARS Virus
gaatacatgagtgagcaaagccttc

SEQ ID NO: 104057 - DNA, 25 bp, SARS Virus
aatacatgagtaggcaaagccttct

SEQ ID NO: 104058 - DNA, 25 bp, SARS Virus
atacatgagtaagcaaagccttctt

SEQ ID NO: 104059 - DNA, 25 bp, SARS Virus
tacatgagtaaggaaagccttcttt

SEQ ID NO: 104060 - DNA, 25 bp, SARS Virus
acatgagtaagcgaagccttctttg

SEQ ID NO: 104061 - DNA, 25 bp, SARS Virus
catgagtaagcagagccttctttgt

SEQ ID NO: 104062 - DNA, 25 bp, SARS Virus
atgagtaagcaaggccttctttgtc

SEQ ID NO: 104063 - DNA, 25 bp, SARS Virus
tgagtaagcaaagccttctttgtcc

SEQ ID NO: 104064 - DNA, 25 bp, SARS Virus
gagtaagcaaaggcttctttgtcca

SEQ ID NO: 104065 - DNA, 25 bp, SARS Virus
agtaagcaaagcgttctttgtccat

SEQ ID NO: 104066 - DNA, 25 bp, SARS Virus
gtaagcaaagccgtctttgtccatg

SEQ ID NO: 104067 - DNA, 25 bp, SARS Virus
taagcaaagcctgctttgtccatgc

SEQ ID NO: 104068 - DNA, 25 bp, SARS Virus
aagcaaagccttgtttgtccatgca

SEQ ID NO: 104069 - DNA, 25 bp, SARS Virus
agcaaagccttcgttgtccatgcaa

SEQ ID NO: 104070 - DNA, 25 bp, SARS Virus
gcaaagccttctgtgtccatgcaat

SEQ ID NO: 104071 - DNA, 25 bp, SARS Virus
caaagccttcttggtccatgcaatt

SEQ ID NO: 104072 - DNA, 25 bp, SARS Virus
aaagccttctttgtccatgcaatta

SEQ ID NO: 104073 - DNA, 25 bp, SARS Virus
tctacaaccgaatcaaccttcacgt

SEQ ID NO: 104074 - DNA, 25 bp, SARS Virus
ctacaaccgaaataaccttcacgtt

SEQ ID NO: 104075 - DNA, 25 bp, SARS Virus
tacaaccgaaactaccttcacgttt

SEQ ID NO: 104076 - DNA, 25 bp, SARS Virus
acaaccgaaacatccttcacgttta

SEQ ID NO: 104077 - DNA, 25 bp, SARS Virus
caaccgaaacaatcttcacgtttag

SEQ ID NO: 104078 - DNA, 25 bp, SARS Virus
aaccgaaacaactttcacgtttagg

SEQ ID NO: 104079 - DNA, 25 bp, SARS Virus
accgaaacaaccttcacgtttaggt

SEQ ID NO: 104080 - DNA, 25 bp, SARS Virus
ccgaaacaaccttcacgtttaggtt

SEQ ID NO: 104081 - DNA, 25 bp, SARS Virus
cgaaacaacctttacgtttaggttc

SEQ ID NO: 104082 - DNA, 25 bp, SARS Virus
gaaacaaccttctcgtttaggttct

SEQ ID NO: 104083 - DNA, 25 bp, SARS Virus
aaacaaccttcatgtttaggttctt

SEQ ID NO: 104084 - DNA, 25 bp, SARS Virus
aacaaccttcacttttaggttcttg

SEQ ID NO: 104085 - DNA, 25 bp, SARS Virus
acaaccttcacgtttaggttcttgg

SEQ ID NO: 104086 - DNA, 25 bp, SARS Virus
caaccttcacgtttaggttcttggg

SEQ ID NO: 104087 - DNA, 25 bp, SARS Virus
aaccttcacgtttaggttcttgggt

SEQ ID NO: 104088 - DNA, 25 bp, SARS Virus
accttcacgttttggttcttgggta

SEQ ID NO: 104089 - DNA, 25 bp, SARS Virus
ccttcacgtttatgttcttgggtaa

SEQ ID NO: 104090 - DNA, 25 bp, SARS Virus
cttcacgtttagtttcttgggtaat

SEQ ID NO: 104091 - DNA, 25 bp, SARS Virus
ttcacgtttaggttcttgggtaatg

SEQ ID NO: 104092 - DNA, 25 bp, SARS Virus
tcacgtttaggttcttgggtaatga

SEQ ID NO: 104093 - DNA, 25 bp, SARS Virus
cacgtttaggtttttgggtaatgaa

SEQ ID NO: 104094 - DNA, 25 bp, SARS Virus
acgtttaggttcttgggtaatgaaa

SEQ ID NO: 104095 - DNA, 25 bp, SARS Virus
cgtttaggttcttgggtaatgaaat

SEQ ID NO: 104096 - DNA, 25 bp, SARS Virus
gtttaggttctttggtaatgaaata

SEQ ID NO: 104097 - DNA, 25 bp, SARS Virus
tttaggttcttgtgtaatgaaatac

SEQ ID NO: 104098 - DNA, 25 bp, SARS Virus
ttaggttcttggttaatgaaatact

SEQ ID NO: 104099 - DNA, 25 bp, SARS Virus
taggttcttgggtaatgaaatacta

SEQ ID NO: 104100 - DNA, 25 bp, SARS Virus
aggttcttgggttatgaaatactac

SEQ ID NO: 104101 - DNA, 25 bp, SARS Virus
ggttcttgggtattgaaatactacg

SEQ ID NO: 104102 - DNA, 25 bp, SARS Virus
gttcttgggtaatgaaatactacgg

SEQ ID NO: 104103 - DNA, 25 bp, SARS Virus
ttcttgggtaattaaatactacggt

SEQ ID NO: 104104 - DNA, 25 bp, SARS Virus
tcttgggtaatgtaatactacggtt

SEQ ID NO: 104105 - DNA, 25 bp, SARS Virus
cttgggtaatgatatactacggttg

SEQ ID NO: 104106 - DNA, 25 bp, SARS Virus
ttgggtaatgaattactacggttga

SEQ ID NO: 104107 - DNA, 25 bp, SARS Virus
tgggtaatgaaatactacggttgat

SEQ ID NO: 104108 - DNA, 25 bp, SARS Virus
gggtaatgaaattctacggttgatg

SEQ ID NO: 104109 - DNA, 25 bp, SARS Virus
ggtaatgaaatattacggttgatga

SEQ ID NO: 104110 - DNA, 25 bp, SARS Virus
gtaatgaaatactacggttgatgaa

SEQ ID NO: 104111 - DNA, 25 bp, SARS Virus
taatgaaatacttcggttgatgaaa

SEQ ID NO: 104112 - DNA, 25 bp, SARS Virus
aatgaaatactatggttgatgaaac

SEQ ID NO: 104113 - DNA, 25 bp, SARS Virus
atgaaatactactgttgatgaaaca

SEQ ID NO: 104114 - DNA, 25 bp, SARS Virus
tgaaatactacgtttgatgaaacaa

SEQ ID NO: 104115 - DNA, 25 bp, SARS Virus
gaaatactacggttgatgaaacaaa

SEQ ID NO: 104116 - DNA, 25 bp, SARS Virus
aaatactacggttgatgaaacaaac

SEQ ID NO: 104117 - DNA, 25 bp, SARS Virus
aatactacggtttatgaaacaaacg

SEQ ID NO: 104118 - DNA, 25 bp, SARS Virus
atactacggttgttgaaacaaacga

SEQ ID NO: 104119 - DNA, 25 bp, SARS Virus
tactacggttgatgaaacaaacgac

SEQ ID NO: 104120 - DNA, 25 bp, SARS Virus
actacggttgattaaacaaacgacc

SEQ ID NO: 104121 - DNA, 25 bp, SARS Virus
ctacggttgatgtaacaaacgaccg

SEQ ID NO: 104122 - DNA, 25 bp, SARS Virus
tacggttgatgatacaaacgaccgt

SEQ ID NO: 104123 - DNA, 25 bp, SARS Virus
acggttgatgaatcaaacgaccgtg

SEQ ID NO: 104124 - DNA, 25 bp, SARS Virus
cggttgatgaaataaacgaccgtgt

SEQ ID NO: 104125 - DNA, 25 bp, SARS Virus
ggttgatgaaactaacgaccgtgtg

SEQ ID NO: 104126 - DNA, 25 bp, SARS Virus
gttgatgaaacatacgaccgtgtgt

SEQ ID NO: 104127 - DNA, 25 bp, SARS Virus
ttgatgaaacaatcgaccgtgtgtg

SEQ ID NO: 104128 - DNA, 25 bp, SARS Virus
tgatgaaacaaatgaccgtgtgtgt

SEQ ID NO: 104129 - DNA, 25 bp, SARS Virus
gatgaaacaaactaccgtgtgtgta

SEQ ID NO: 104130 - DNA, 25 bp, SARS Virus
atgaaacaaacgtccgtgtgtgtat

SEQ ID NO: 104131 - DNA, 25 bp, SARS Virus
tgaaacaaacgatcgtgtgtgtatt

SEQ ID NO: 104132 - DNA, 25 bp, SARS Virus
gaaacaaacgactgtgtgtgtattg

SEQ ID NO: 104133 - DNA, 25 bp, SARS Virus
aaacaaacgaccttgtgtgtattga

SEQ ID NO: 104134 - DNA, 25 bp, SARS Virus
aacaaacgaccgtgtgtgtattgat

SEQ ID NO: 104135 - DNA, 25 bp, SARS Virus
acaaacgaccgtttgtgtattgata

SEQ ID NO: 104136 - DNA, 25 bp, SARS Virus
caaacgaccgtgtgtgtattgatac

SEQ ID NO: 104137 - DNA, 25 bp, SARS Virus
aaacgaccgtgtttgtattgatact

SEQ ID NO: 104138 - DNA, 25 bp, SARS Virus
aacgaccgtgtgtgtattgatactg

SEQ ID NO: 104139 - DNA, 25 bp, SARS Virus
acgaccgtgtgtttattgatactga

SEQ ID NO: 104140 - DNA, 25 bp, SARS Virus
cgaccgtgtgtgtattgatactgat

SEQ ID NO: 104141 - DNA, 25 bp, SARS Virus
gaccgtgtgtgttttgatactgatg

SEQ ID NO: 104142 - DNA, 25 bp, SARS Virus
accgtgtgtgtattgatactgatga

SEQ ID NO: 104143 - DNA, 25 bp, SARS Virus
ccgtgtgtgtattgatactgatgac

SEQ ID NO: 104144 - DNA, 25 bp, SARS Virus
cgtgtgtgtatttatactgatgaca

SEQ ID NO: 104145 - DNA, 25 bp, SARS Virus
gtgtgtgtattgttactgatgacat

SEQ ID NO: 104146 - DNA, 25 bp, SARS Virus
tgtgtgtattgatactgatgacata

SEQ ID NO: 104147 - DNA, 25 bp, SARS Virus
gtgtgtattgattctgatgacatat

SEQ ID NO: 104148 - DNA, 25 bp, SARS Virus
tgtgtattgatattgatgacatatg

SEQ ID NO: 104149 - DNA, 25 bp, SARS Virus
gtgtattgatactgatgacatatgg

SEQ ID NO: 104150 - DNA, 25 bp, SARS Virus
tgtattgatacttatgacatatggt

SEQ ID NO: 104151 - DNA, 25 bp, SARS Virus
gtattgatactgttgacatatggta

SEQ ID NO: 104152 - DNA, 25 bp, SARS Virus
tattgatactgatgacatatggtat

SEQ ID NO: 104153 - DNA, 25 bp, SARS Virus
attgatactgattacatatggtata

SEQ ID NO: 104154 - DNA, 25 bp, SARS Virus
ttgatactgatgtcatatggtatat

SEQ ID NO: 104155 - DNA, 25 bp, SARS Virus
tgatactgatgatatatggtatatt

SEQ ID NO: 104156 - DNA, 25 bp, SARS Virus
gatactgatgacttatggtatattg

SEQ ID NO: 104157 - DNA, 25 bp, SARS Virus
atactgatgacatatggtatattgt

SEQ ID NO: 104158 - DNA, 25 bp, SARS Virus
tactgatgacatttggtatattgtc

SEQ ID NO: 104159 - DNA, 25 bp, SARS Virus
actgatgacatatggtatattgtca

SEQ ID NO: 104160 - DNA, 25 bp, SARS Virus
ctgatgacatattgtatattgtcac

SEQ ID NO: 104161 - DNA, 25 bp, SARS Virus
tgatgacatatgttatattgtcaca

SEQ ID NO: 104162 - DNA, 25 bp, SARS Virus
gatgacatatggtatattgtcacag

SEQ ID NO: 104163 - DNA, 25 bp, SARS Virus
atgacatatggtttattgtcacagt

SEQ ID NO: 104164 - DNA, 25 bp, SARS Virus
tgacatatggtatattgtcacagtg

SEQ ID NO: 104165 - DNA, 25 bp, SARS Virus
gacatatggtattttgtcacagtgt

SEQ ID NO: 104166 - DNA, 25 bp, SARS Virus
acatatggtatattgtcacagtgtc

SEQ ID NO: 104167 - DNA, 25 bp, SARS Virus
catatggtatattgtcacagtgtct

SEQ ID NO: 104168 - DNA, 25 bp, SARS Virus
atatggtatattttcacagtgtcta

SEQ ID NO: 104169 - DNA, 25 bp, SARS Virus
tatggtatattgtcacagtgtctat

SEQ ID NO: 104170 - DNA, 25 bp, SARS Virus
atggtatattgttacagtgtctatg

SEQ ID NO: 104171 - DNA, 25 bp, SARS Virus
tggtatattgtctcagtgtctatgt

SEQ ID NO: 104172 - DNA, 25 bp, SARS Virus
ggtatattgtcatagtgtctatgtt

SEQ ID NO: 104173 - DNA, 25 bp, SARS Virus
gtatattgtcactgtgtctatgtta

SEQ ID NO: 104174 - DNA, 25 bp, SARS Virus
tatattgtcacattgtctatgttaa

SEQ ID NO: 104175 - DNA, 25 bp, SARS Virus
atattgtcacagtgtctatgttaac

SEQ ID NO: 104176 - DNA, 25 bp, SARS Virus
tattgtcacagtttctatgttaaca

SEQ ID NO: 104177 - DNA, 25 bp, SARS Virus
attgtcacagtgtctatgttaacag

SEQ ID NO: 104178 - DNA, 25 bp, SARS Virus
ttgtcacagtgtttatgttaacagc

SEQ ID NO: 104179 - DNA, 25 bp, SARS Virus
tgtcacagtgtctatgttaacagca

SEQ ID NO: 104180 - DNA, 25 bp, SARS Virus
gtcacagtgtctttgttaacagcaa

SEQ ID NO: 104181 - DNA, 25 bp, SARS Virus
tcacagtgtctatgttaacagcaat

SEQ ID NO: 104182 - DNA, 25 bp, SARS Virus
cacagtgtctattttaacagcaatg

SEQ ID NO: 104183 - DNA, 25 bp, SARS Virus
acagtgtctatgttaacagcaatga

SEQ ID NO: 104184 - DNA, 25 bp, SARS Virus
cagtgtctatgttaacagcaatgac

SEQ ID NO: 104185 - DNA, 25 bp, SARS Virus
agtgtctatgtttacagcaatgact

SEQ ID NO: 104186 - DNA, 25 bp, SARS Virus
gtgtctatgttatcagcaatgactt

SEQ ID NO: 104187 - DNA, 25 bp, SARS Virus
tgtctatgttaatagcaatgacttc

SEQ ID NO: 104188 - DNA, 25 bp, SARS Virus
gtctatgttaactgcaatgacttcc

SEQ ID NO: 104189 - DNA, 25 bp, SARS Virus
tctatgttaacatcaatgacttcca

SEQ ID NO: 104190 - DNA, 25 bp, SARS Virus
ctatgttaacagtaatgacttccac

SEQ ID NO: 104191 - DNA, 25 bp, SARS Virus
tatgttaacagctatgacttccact

SEQ ID NO: 104192 - DNA, 25 bp, SARS Virus
atgttaacagcattgacttccactg

SEQ ID NO: 104193 - DNA, 25 bp, SARS Virus
tgttaacagcaatgacttccactgc

SEQ ID NO: 104194 - DNA, 25 bp, SARS Virus
gttaacagcaattacttccactgcc

SEQ ID NO: 104195 - DNA, 25 bp, SARS Virus
ttaacagcaatgtcttccactgccg

SEQ ID NO: 104196 - DNA, 25 bp, SARS Virus
taacagcaatgatttccactgccgt

SEQ ID NO: 104197 - DNA, 25 bp, SARS Virus
aacagcaatgacttccactgccgta

SEQ ID NO: 104198 - DNA, 25 bp, SARS Virus
acagcaatgacttccactgccgtaa

SEQ ID NO: 104199 - DNA, 25 bp, SARS Virus
cagcaatgactttcactgccgtaaa

SEQ ID NO: 104200 - DNA, 25 bp, SARS Virus
agcaatgacttctactgccgtaaag

SEQ ID NO: 104201 - DNA, 25 bp, SARS Virus
gcaatgacttcctctgccgtaaagt

SEQ ID NO: 104202 - DNA, 25 bp, SARS Virus
caatgacttccattgccgtaaagtt

SEQ ID NO: 104203 - DNA, 25 bp, SARS Virus
aatgacttccactgccgtaaagttg

SEQ ID NO: 104204 - DNA, 25 bp, SARS Virus
atgacttccacttccgtaaagttgt

SEQ ID NO: 104205 - DNA, 25 bp, SARS Virus
tgacttccactgtcgtaaagttgtg

SEQ ID NO: 104206 - DNA, 25 bp, SARS Virus
gacttccactgctgtaaagttgtgg

SEQ ID NO: 104207 - DNA, 25 bp, SARS Virus
acttccactgccttaaagttgtggt

SEQ ID NO: 104208 - DNA, 25 bp, SARS Virus
cttccactgccgtaaagttgtggtt

SEQ ID NO: 104209 - DNA, 25 bp, SARS Virus
ttccactgccgttaagttgtggttt

SEQ ID NO: 104210 - DNA, 25 bp, SARS Virus
tccactgccgtatagttgtggtttt

SEQ ID NO: 104211 - DNA, 25 bp, SARS Virus
ccactgccgtaatgttgtggttttg

SEQ ID NO: 104212 - DNA, 25 bp, SARS Virus
cactgccgtaaatttgtggttttga

SEQ ID NO: 104213 - DNA, 25 bp, SARS Virus
actgccgtaaagttgtggttttgag

SEQ ID NO: 104214 - DNA, 25 bp, SARS Virus
ctgccgtaaagttgtggttttgagt

SEQ ID NO: 104215 - DNA, 25 bp, SARS Virus
tgccgtaaagttttggttttgagtt

SEQ ID NO: 104216 - DNA, 25 bp, SARS Virus
gccgtaaagttgtggttttgagttt

SEQ ID NO: 104217 - DNA, 25 bp, SARS Virus
ccgtaaagttgttgttttgagtttc

SEQ ID NO: 104218 - DNA, 25 bp, SARS Virus
cgtaaagttgtgtttttgagtttct

SEQ ID NO: 104219 - DNA, 25 bp, SARS Virus
gtaaagttgtggttttgagtttctt

SEQ ID NO: 104220 - DNA, 25 bp, SARS Virus
taaagttgtggttttgagtttcttc

SEQ ID NO: 104221 - DNA, 25 bp, SARS Virus
aaagttgtggttttgagtttcttct

SEQ ID NO: 104222 - DNA, 25 bp, SARS Virus
aagttgtggttttgagtttcttctg

SEQ ID NO: 104223 - DNA, 25 bp, SARS Virus
agttgtggtttttagtttcttctga

SEQ ID NO: 104224 - DNA, 25 bp, SARS Virus
gttgtggttttgtgtttcttctgat

SEQ ID NO: 104225 - DNA, 25 bp, SARS Virus
ttgtggttttgattttcttctgatg

SEQ ID NO: 104226 - DNA, 25 bp, SARS Virus
tgtggttttgagtttcttctgatgg

SEQ ID NO: 104227 - DNA, 25 bp, SARS Virus
gtggttttgagtttcttctgatggt

SEQ ID NO: 104228 - DNA, 25 bp, SARS Virus
tggttttgagtttcttctgatggtt

SEQ ID NO: 104229 - DNA, 25 bp, SARS Virus
ggttttgagttttttctgatggttt

SEQ ID NO: 104230 - DNA, 25 bp, SARS Virus
gttttgagtttcttctgatggttta

SEQ ID NO: 104231 - DNA, 25 bp, SARS Virus
ttttgagtttcttctgatggtttaa

SEQ ID NO: 104232 - DNA, 25 bp, SARS Virus
tttgagtttcttttgatggtttaac

SEQ ID NO: 104233 - DNA, 25 bp, SARS Virus
ttgagtttcttctgatggtttaacc

SEQ ID NO: 104234 - DNA, 25 bp, SARS Virus
tgagtttcttcttatggtttaacca

SEQ ID NO: 104235 - DNA, 25 bp, SARS Virus
gagtttcttctgttggtttaaccac

SEQ ID NO: 104236 - DNA, 25 bp, SARS Virus
agtttcttctgatggtttaaccacc

SEQ ID NO: 104237 - DNA, 25 bp, SARS Virus
gtttcttctgattgtttaaccacca

SEQ ID NO: 104238 - DNA, 25 bp, SARS Virus
tttcttctgatgttttaaccaccaa

SEQ ID NO: 104239 - DNA, 25 bp, SARS Virus
ttcttctgatggtttaaccaccaat

SEQ ID NO: 104240 - DNA, 25 bp, SARS Virus
tcttctgatggtttaaccaccaata

SEQ ID NO: 104241 - DNA, 25 bp, SARS Virus
cttctgatggtttaaccaccaataa

SEQ ID NO: 104242 - DNA, 25 bp, SARS Virus
ttctgatggttttaccaccaataag

SEQ ID NO: 104243 - DNA, 25 bp, SARS Virus
tctgatggtttatccaccaataaga

SEQ ID NO: 104244 - DNA, 25 bp, SARS Virus
ctgatggtttaatcaccaataagac

SEQ ID NO: 104245 - DNA, 25 bp, SARS Virus
tgatggtttaactaccaataagact

SEQ ID NO: 104246 - DNA, 25 bp, SARS Virus
gatggtttaacctccaataagactc

SEQ ID NO: 104247 - DNA, 25 bp, SARS Virus
atggtttaaccatcaataagactcc

SEQ ID NO: 104248 - DNA, 25 bp, SARS Virus
tggtttaaccactaataagactcct

SEQ ID NO: 104249 - DNA, 25 bp, SARS Virus
ggtttaaccacctataagactccta

SEQ ID NO: 104250 - DNA, 25 bp, SARS Virus
gtttaaccaccattaagactcctat

SEQ ID NO: 104251 - DNA, 25 bp, SARS Virus
tttaaccaccaataagactcctatc

SEQ ID NO: 104252 - DNA, 25 bp, SARS Virus
ttaaccaccaattagactcctatcc

SEQ ID NO: 104253 - DNA, 25 bp, SARS Virus
taaccaccaatatgactcctatccg

SEQ ID NO: 104254 - DNA, 25 bp, SARS Virus
aaccaccaataatactcctatccgt

SEQ ID NO: 104255 - DNA, 25 bp, SARS Virus
accaccaataagtctcctatccgtg

SEQ ID NO: 104256 - DNA, 25 bp, SARS Virus
ccaccaataagattcctatccgtga

SEQ ID NO: 104257 - DNA, 25 bp, SARS Virus
caccaataagactcctatccgtgag

SEQ ID NO: 104258 - DNA, 25 bp, SARS Virus
accaataagacttctatccgtgagt

SEQ ID NO: 104259 - DNA, 25 bp, SARS Virus
ccaataagactcttatccgtgagtc

SEQ ID NO: 104260 - DNA, 25 bp, SARS Virus
caataagactcctatccgtgagtcc

SEQ ID NO: 104261 - DNA, 25 bp, SARS Virus
aataagactcctttccgtgagtcca

SEQ ID NO: 104262 - DNA, 25 bp, SARS Virus
ataagactcctatccgtgagtccac

SEQ ID NO: 104263 - DNA, 25 bp, SARS Virus
taagactcctattcgtgagtccaca

SEQ ID NO: 104264 - DNA, 25 bp, SARS Virus
aagactcctatctgtgagtccacaa

SEQ ID NO: 104265 - DNA, 25 bp, SARS Virus
agactcctatccttgagtccacaat

SEQ ID NO: 104266 - DNA, 25 bp, SARS Virus
gactcctatccgtgagtccacaatt

SEQ ID NO: 104267 - DNA, 25 bp, SARS Virus
actcctatccgttagtccacaattt

SEQ ID NO: 104268 - DNA, 25 bp, SARS Virus
ctcctatccgtgtgtccacaatttc

SEQ ID NO: 104269 - DNA, 25 bp, SARS Virus
tcctatccgtgattccacaatttct

SEQ ID NO: 104270 - DNA, 25 bp, SARS Virus
cctatccgtgagtccacaatttctg

SEQ ID NO: 104271 - DNA, 25 bp, SARS Virus
ctatccgtgagttcacaatttctga

SEQ ID NO: 104272 - DNA, 25 bp, SARS Virus
tatccgtgagtctacaatttctgat

SEQ ID NO: 104273 - DNA, 25 bp, SARS Virus
atccgtgagtcctcaatttctgata

SEQ ID NO: 104274 - DNA, 25 bp, SARS Virus
tccgtgagtccataatttctgatac

SEQ ID NO: 104275 - DNA, 25 bp, SARS Virus
ccgtgagtccactatttctgataca

SEQ ID NO: 104276 - DNA, 25 bp, SARS Virus
cgtgagtccacattttctgatacag

SEQ ID NO: 104277 - DNA, 25 bp, SARS Virus
gtgagtccacaatttctgatacagc

SEQ ID NO: 104278 - DNA, 25 bp, SARS Virus
tgagtccacaatttctgatacagca

SEQ ID NO: 104279 - DNA, 25 bp, SARS Virus
gagtccacaatttctgatacagcaa

SEQ ID NO: 104280 - DNA, 25 bp, SARS Virus
agtccacaatttttgatacagcaac

SEQ ID NO: 104281 - DNA, 25 bp, SARS Virus
gtccacaatttctgatacagcaaca

SEQ ID NO: 104282 - DNA, 25 bp, SARS Virus
tccacaatttcttatacagcaacat

SEQ ID NO: 104283 - DNA, 25 bp, SARS Virus
ccacaatttctgttacagcaacatg

SEQ ID NO: 104284 - DNA, 25 bp, SARS Virus
cacaatttctgatacagcaacatgt

SEQ ID NO: 104285 - DNA, 25 bp, SARS Virus
acaatttctgattcagcaacatgta

SEQ ID NO: 104286 - DNA, 25 bp, SARS Virus
caatttctgatatagcaacatgtac

SEQ ID NO: 104287 - DNA, 25 bp, SARS Virus
aatttctgatactgcaacatgtacc

SEQ ID NO: 104288 - DNA, 25 bp, SARS Virus
atttctgatacatcaacatgtaccg

SEQ ID NO: 104289 - DNA, 25 bp, SARS Virus
tttctgatacagtaacatgtaccga

SEQ ID NO: 104290 - DNA, 25 bp, SARS Virus
ttctgatacagctacatgtaccgat

SEQ ID NO: 104291 - DNA, 25 bp, SARS Virus
tctgatacagcatcatgtaccgata

SEQ ID NO: 104292 - DNA, 25 bp, SARS Virus
ctgatacagcaatatgtaccgataa

SEQ ID NO: 104293 - DNA, 25 bp, SARS Virus
tgatacagcaacttgtaccgataaa

SEQ ID NO: 104294 - DNA, 25 bp, SARS Virus
gatacagcaacatgtaccgataaag

SEQ ID NO: 104295 - DNA, 25 bp, SARS Virus
atacagcaacatttaccgataaagt

SEQ ID NO: 104296 - DNA, 25 bp, SARS Virus
tacagcaacatgtaccgataaagtg

SEQ ID NO: 104297 - DNA, 25 bp, SARS Virus
acagcaacatgttccgataaagtgg

SEQ ID NO: 104298 - DNA, 25 bp, SARS Virus
cagcaacatgtatcgataaagtggc

SEQ ID NO: 104299 - DNA, 25 bp, SARS Virus
agcaacatgtactgataaagtggct

SEQ ID NO: 104300 - DNA, 25 bp, SARS Virus
gcaacatgtacctataaagtggctt

SEQ ID NO: 104301 - DNA, 25 bp, SARS Virus
caacatgtaccgttaaagtggcttc

SEQ ID NO: 104302 - DNA, 25 bp, SARS Virus
aacatgtaccgataaagtggcttca

SEQ ID NO: 104303 - DNA, 25 bp, SARS Virus
acatgtaccgattaagtggcttcaa

SEQ ID NO: 104304 - DNA, 25 bp, SARS Virus
catgtaccgatatagtggcttcaaa

SEQ ID NO: 104305 - DNA, 25 bp, SARS Virus
atgtaccgataatgtggcttcaaat

SEQ ID NO: 104306 - DNA, 25 bp, SARS Virus
tgtaccgataaattggcttcaaatg

SEQ ID NO: 104307 - DNA, 25 bp, SARS Virus
gtaccgataaagtggcttcaaatga

SEQ ID NO: 104308 - DNA, 25 bp, SARS Virus
taccgataaagttgcttcaaatgat

SEQ ID NO: 104309 - DNA, 25 bp, SARS Virus
accgataaagtgtcttcaaatgatg

SEQ ID NO: 104310 - DNA, 25 bp, SARS Virus
ccgataaagtggtttcaaatgatgg

SEQ ID NO: 104311 - DNA, 25 bp, SARS Virus
cgataaagtggcttcaaatgatggt

SEQ ID NO: 104312 - DNA, 25 bp, SARS Virus
gataaagtggcttcaaatgatggtc

SEQ ID NO: 104313 - DNA, 25 bp, SARS Virus
ataaagtggctttaaatgatggtcg

SEQ ID NO: 104314 - DNA, 25 bp, SARS Virus
taaagtggcttctaatgatggtcga

SEQ ID NO: 104315 - DNA, 25 bp, SARS Virus
aaagtggcttcatatgatggtcgaa

SEQ ID NO: 104316 - DNA, 25 bp, SARS Virus
aagtggcttcaattgatggtcgaac

SEQ ID NO: 104317 - DNA, 25 bp, SARS Virus
agtggcttcaaatgatggtcgaact

SEQ ID NO: 104318 - DNA, 25 bp, SARS Virus
gtggcttcaaattatggtcgaactc

SEQ ID NO: 104319 - DNA, 25 bp, SARS Virus
tggcttcaaatgttggtcgaactca

SEQ ID NO: 104320 - DNA, 25 bp, SARS Virus
ggcttcaaatgatggtcgaactcag

SEQ ID NO: 104321 - DNA, 25 bp, SARS Virus
gcttcaaatgattgtcgaactcaga

SEQ ID NO: 104322 - DNA, 25 bp, SARS Virus
cttcaaatgatgttcgaactcagat

SEQ ID NO: 104323 - DNA, 25 bp, SARS Virus
ttcaaatgatggtcgaactcagatg

SEQ ID NO: 104324 - DNA, 25 bp, SARS Virus
tcaaatgatggttgaactcagatgt

SEQ ID NO: 104325 - DNA, 25 bp, SARS Virus
caaatgatggtctaactcagatgtg

SEQ ID NO: 104326 - DNA, 25 bp, SARS Virus
aaatgatggtcgtactcagatgtgt

SEQ ID NO: 104327 - DNA, 25 bp, SARS Virus
aatgatggtcgatctcagatgtgtt

SEQ ID NO: 104328 - DNA, 25 bp, SARS Virus
atgatggtcgaattcagatgtgttt

SEQ ID NO: 104329 - DNA, 25 bp, SARS Virus
tgatggtcgaactcagatgtgttta

SEQ ID NO: 104330 - DNA, 25 bp, SARS Virus
gatggtcgaacttagatgtgtttaa

SEQ ID NO: 104331 - DNA, 25 bp, SARS Virus
atggtcgaactctgatgtgtttaat

SEQ ID NO: 104332 - DNA, 25 bp, SARS Virus
tggtcgaactcatatgtgtttaatg

SEQ ID NO: 104333 - DNA, 25 bp, SARS Virus
ggtcgaactcagttgtgtttaatga

SEQ ID NO: 104334 - DNA, 25 bp, SARS Virus
gtcgaactcagatgtgtttaatgat

SEQ ID NO: 104335 - DNA, 25 bp, SARS Virus
tcgaactcagatttgtttaatgatg

SEQ ID NO: 104336 - DNA, 25 bp, SARS Virus
cgaactcagatgtgtttaatgatgt

SEQ ID NO: 104337 - DNA, 25 bp, SARS Virus
gaactcagatgtttttaatgatgtc

SEQ ID NO: 104338 - DNA, 25 bp, SARS Virus
aactcagatgtgtttaatgatgtct

SEQ ID NO: 104339 - DNA, 25 bp, SARS Virus
actcagatgtgtttaatgatgtctg

SEQ ID NO: 104340 - DNA, 25 bp, SARS Virus
ctcagatgtgtttaatgatgtctgt

SEQ ID NO: 104341 - DNA, 25 bp, SARS Virus
tcagatgtgttttatgatgtctgtg

SEQ ID NO: 104342 - DNA, 25 bp, SARS Virus
cagatgtgtttattgatgtctgtga

SEQ ID NO: 104343 - DNA, 25 bp, SARS Virus
agatgtgtttaatgatgtctgtgac

SEQ ID NO: 104344 - DNA, 25 bp, SARS Virus
gatgtgtttaattatgtctgtgacc

SEQ ID NO: 104345 - DNA, 25 bp, SARS Virus
atgtgtttaatgttgtctgtgacca

SEQ ID NO: 104346 - DNA, 25 bp, SARS Virus
tgtgtttaatgatgtctgtgaccat

SEQ ID NO: 104347 - DNA, 25 bp, SARS Virus
gtgtttaatgatttctgtgaccata

SEQ ID NO: 104348 - DNA, 25 bp, SARS Virus
tgtttaatgatgtctgtgaccataa

SEQ ID NO: 104349 - DNA, 25 bp, SARS Virus
gtttaatgatgtttgtgaccataac

SEQ ID NO: 104350 - DNA, 25 bp, SARS Virus
tttaatgatgtctgtgaccataact

SEQ ID NO: 104351 - DNA, 25 bp, SARS Virus
ttaatgatgtctttgaccataactt

SEQ ID NO: 104352 - DNA, 25 bp, SARS Virus
taatgatgtctgtgaccataacttt

SEQ ID NO: 104353 - DNA, 25 bp, SARS Virus
aatgatgtctgttaccataactttt

SEQ ID NO: 104354 - DNA, 25 bp, SARS Virus
atgatgtctgtgtccataactttta

SEQ ID NO: 104355 - DNA, 25 bp, SARS Virus
tgatgtctgtgatcataacttttac

SEQ ID NO: 104356 - DNA, 25 bp, SARS Virus
gatgtctgtgactataacttttacg

SEQ ID NO: 104357 - DNA, 25 bp, SARS Virus
atgtctgtgaccttaacttttacga

SEQ ID NO: 104358 - DNA, 25 bp, SARS Virus
tgtctgtgaccataacttttacgat

SEQ ID NO: 104359 - DNA, 25 bp, SARS Virus
gtctgtgaccattacttttacgatg

SEQ ID NO: 104360 - DNA, 25 bp, SARS Virus
tctgtgaccatatcttttacgatgt

SEQ ID NO: 104361 - DNA, 25 bp, SARS Virus
ctgtgaccataatttttacgatgta

SEQ ID NO: 104362 - DNA, 25 bp, SARS Virus
tgtgaccataacttttacgatgtaa

SEQ ID NO: 104363 - DNA, 25 bp, SARS Virus
gtgaccataacttttacgatgtaag

SEQ ID NO: 104364 - DNA, 25 bp, SARS Virus
tgaccataacttttacgatgtaaga

SEQ ID NO: 104365 - DNA, 25 bp, SARS Virus
gaccataacttttacgatgtaagaa

SEQ ID NO: 104366 - DNA, 25 bp, SARS Virus
accataactttttcgatgtaagaag

SEQ ID NO: 104367 - DNA, 25 bp, SARS Virus
ccataacttttatgatgtaagaagt

SEQ ID NO: 104368 - DNA, 25 bp, SARS Virus
cataacttttactatgtaagaagta

SEQ ID NO: 104369 - DNA, 25 bp, SARS Virus
ataacttttacgttgtaagaagtag

SEQ ID NO: 104370 - DNA, 25 bp, SARS Virus
taacttttacgatgtaagaagtaga

SEQ ID NO: 104371 - DNA, 25 bp, SARS Virus
aacttttacgatttaagaagtagaa

SEQ ID NO: 104372 - DNA, 25 bp, SARS Virus
acttttacgatgtaagaagtagaaa

SEQ ID NO: 104373 - DNA, 25 bp, SARS Virus
cttttacgatgttagaagtagaaat

SEQ ID NO: 104374 - DNA, 25 bp, SARS Virus
ttttacgatgtatgaagtagaaatt

SEQ ID NO: 104375 - DNA, 25 bp, SARS Virus
tttacgatgtaataagtagaaattg

SEQ ID NO: 104376 - DNA, 25 bp, SARS Virus
ttacgatgtaagtagtagaaattgt

SEQ ID NO: 104377 - DNA, 25 bp, SARS Virus
tacgatgtaagatgtagaaattgtt

SEQ ID NO: 104378 - DNA, 25 bp, SARS Virus
acgatgtaagaattagaaattgttc

SEQ ID NO: 104379 - DNA, 25 bp, SARS Virus
cgatgtaagaagtagaaattgttcg

SEQ ID NO: 104380 - DNA, 25 bp, SARS Virus
gatgtaagaagttgaaattgttcga

SEQ ID NO: 104381 - DNA, 25 bp, SARS Virus
atgtaagaagtataaattgttcgaa

SEQ ID NO: 104382 - DNA, 25 bp, SARS Virus
tgtaagaagtagtaattgttcgaac

SEQ ID NO: 104383 - DNA, 25 bp, SARS Virus
gtaagaagtagatattgttcgaaca

SEQ ID NO: 104384 - DNA, 25 bp, SARS Virus
taagaagtagaatttgttcgaacaa

SEQ ID NO: 104385 - DNA, 25 bp, SARS Virus
aagaagtagaaattgttcgaacaat

SEQ ID NO: 104386 - DNA, 25 bp, SARS Virus
agaagtagaaattgttcgaacaatt

SEQ ID NO: 104387 - DNA, 25 bp, SARS Virus
gaagtagaaatttttcgaacaattt

SEQ ID NO: 104388 - DNA, 25 bp, SARS Virus
aagtagaaattgttcgaacaatttc

SEQ ID NO: 104389 - DNA, 25 bp, SARS Virus
agtagaaattgttcgaacaatttct

SEQ ID NO: 104390 - DNA, 25 bp, SARS Virus
gtagaaattgtttgaacaatttctg

SEQ ID NO: 104391 - DNA, 25 bp, SARS Virus
tagaaattgttctaacaatttctgg

SEQ ID NO: 104392 - DNA, 25 bp, SARS Virus
agaaattgttcgtacaatttctggg

SEQ ID NO: 104393 - DNA, 25 bp, SARS Virus
gaaattgttcgatcaatttctgggt

SEQ ID NO: 104394 - DNA, 25 bp, SARS Virus
aaattgttcgaataatttctgggtg

SEQ ID NO: 104395 - DNA, 25 bp, SARS Virus
aattgttcgaactatttctgggtgg

SEQ ID NO: 104396 - DNA, 25 bp, SARS Virus
attgttcgaacattttctgggtggc

SEQ ID NO: 104397 - DNA, 25 bp, SARS Virus
ttgttcgaacaatttctgggtggct

SEQ ID NO: 104398 - DNA, 25 bp, SARS Virus
tgttcgaacaatttctgggtggctt

SEQ ID NO: 104399 - DNA, 25 bp, SARS Virus
gttcgaacaatttctgggtggctta

SEQ ID NO: 104400 - DNA, 25 bp, SARS Virus
ttcgaacaatttttgggtggcttac

SEQ ID NO: 104401 - DNA, 25 bp, SARS Virus
tcgaacaatttctgggtggcttaca

SEQ ID NO: 104402 - DNA, 25 bp, SARS Virus
cgaacaatttcttggtggcttacac

SEQ ID NO: 104403 - DNA, 25 bp, SARS Virus
gaacaatttctgtgtggcttacacg

SEQ ID NO: 104404 - DNA, 25 bp, SARS Virus
aacaatttctggttggcttacacgt

SEQ ID NO: 104405 - DNA, 25 bp, SARS Virus
acaatttctgggtggcttacacgtt

SEQ ID NO: 104406 - DNA, 25 bp, SARS Virus
caatttctgggttgcttacacgttt

SEQ ID NO: 104407 - DNA, 25 bp, SARS Virus
aatttctgggtgtcttacacgttta

SEQ ID NO: 104408 - DNA, 25 bp, SARS Virus
atttctgggtggtttacacgtttat

SEQ ID NO: 104409 - DNA, 25 bp, SARS Virus
tttctgggtggcttacacgtttatg

SEQ ID NO: 104410 - DNA, 25 bp, SARS Virus
ttctgggtggcttacacgtttatgt

SEQ ID NO: 104411 - DNA, 25 bp, SARS Virus
tctgggtggctttcacgtttatgtg

SEQ ID NO: 104412 - DNA, 25 bp, SARS Virus
ctgggtggcttatacgtttatgtgt

SEQ ID NO: 104413 - DNA, 25 bp, SARS Virus
tgggtggcttactcgtttatgtgtg

SEQ ID NO: 104414 - DNA, 25 bp, SARS Virus
gggtggcttacatgtttatgtgtgt

SEQ ID NO: 104415 - DNA, 25 bp, SARS Virus
ggtggcttacacttttatgtgtgtt

SEQ ID NO: 104416 - DNA, 25 bp, SARS Virus
gtggcttacacgtttatgtgtgtta

SEQ ID NO: 104417 - DNA, 25 bp, SARS Virus
tggcttacacgtttatgtgtgttag

SEQ ID NO: 104418 - DNA, 25 bp, SARS Virus
ggcttacacgtttatgtgtgttagc

SEQ ID NO: 104419 - DNA, 25 bp, SARS Virus
gcttacacgtttttgtgtgttagct

SEQ ID NO: 104420 - DNA, 25 bp, SARS Virus
cttacacgtttatgtgtgttagctg

SEQ ID NO: 104421 - DNA, 25 bp, SARS Virus
ttacacgtttatttgtgttagctgc

SEQ ID NO: 104422 - DNA, 25 bp, SARS Virus
tacacgtttatgtgtgttagctgcc

SEQ ID NO: 104423 - DNA, 25 bp, SARS Virus
acacgtttatgtttgttagctgccg

SEQ ID NO: 104424 - DNA, 25 bp, SARS Virus
cacgtttatgtgtgttagctgccga

SEQ ID NO: 104425 - DNA, 25 bp, SARS Virus
acgtttatgtgttttagctgccgag

SEQ ID NO: 104426 - DNA, 25 bp, SARS Virus
cgtttatgtgtgttagctgccgaga

SEQ ID NO: 104427 - DNA, 25 bp, SARS Virus
gtttatgtgtgttagctgccgagaa

SEQ ID NO: 104428 - DNA, 25 bp, SARS Virus
tttatgtgtgtttgctgccgagaag

SEQ ID NO: 104429 - DNA, 25 bp, SARS Virus
ttatgtgtgttatctgccgagaagt

SEQ ID NO: 104430 - DNA, 25 bp, SARS Virus
tatgtgtgttagttgccgagaagtc

SEQ ID NO: 104431 - DNA, 25 bp, SARS Virus
atgtgtgttagctgccgagaagtcc

SEQ ID NO: 104432 - DNA, 25 bp, SARS Virus
tgtgtgttagcttccgagaagtcct

SEQ ID NO: 104433 - DNA, 25 bp, SARS Virus
gtgtgttagctgtcgagaagtcctc

SEQ ID NO: 104434 - DNA, 25 bp, SARS Virus
tgtgttagctgctgagaagtcctca

SEQ ID NO: 104435 - DNA, 25 bp, SARS Virus
gtgttagctgcctagaagtcctcaa

SEQ ID NO: 104436 - DNA, 25 bp, SARS Virus
tgttagctgccgtgaagtcctcaac

SEQ ID NO: 104437 - DNA, 25 bp, SARS Virus
gttagctgccgataagtcctcaacg

SEQ ID NO: 104438 - DNA, 25 bp, SARS Virus
ttagctgccgagtagtcctcaacga

SEQ ID NO: 104439 - DNA, 25 bp, SARS Virus
tagctgccgagatgtcctcaacgat

SEQ ID NO: 104440 - DNA, 25 bp, SARS Virus
agctgccgagaattcctcaacgatt

SEQ ID NO: 104441 - DNA, 25 bp, SARS Virus
gctgccgagaagtcctcaacgatta

SEQ ID NO: 104442 - DNA, 25 bp, SARS Virus
ctgccgagaagttctcaacgattag

SEQ ID NO: 104443 - DNA, 25 bp, SARS Virus
tgccgagaagtcttcaacgattagg

SEQ ID NO: 104444 - DNA, 25 bp, SARS Virus
gccgagaagtcctcaacgattaggt

SEQ ID NO: 104445 - DNA, 25 bp, SARS Virus
ccgagaagtccttaacgattaggtc

SEQ ID NO: 104446 - DNA, 25 bp, SARS Virus
cgagaagtcctctacgattaggtcg

SEQ ID NO: 104447 - DNA, 25 bp, SARS Virus
gagaagtcctcatcgattaggtcgt

SEQ ID NO: 104448 - DNA, 25 bp, SARS Virus
agaagtcctcaatgattaggtcgtt

SEQ ID NO: 104449 - DNA, 25 bp, SARS Virus
gaagtcctcaactattaggtcgtta

SEQ ID NO: 104450 - DNA, 25 bp, SARS Virus
aagtcctcaacgtttaggtcgttac

SEQ ID NO: 104451 - DNA, 25 bp, SARS Virus
agtcctcaacgattaggtcgttacc

SEQ ID NO: 104452 - DNA, 25 bp, SARS Virus
gtcctcaacgattaggtcgttacct

SEQ ID NO: 104453 - DNA, 25 bp, SARS Virus
tcctcaacgatttggtcgttaccta

SEQ ID NO: 104454 - DNA, 25 bp, SARS Virus
cctcaacgattatgtcgttacctag

SEQ ID NO: 104455 - DNA, 25 bp, SARS Virus
ctcaacgattagttcgttacctagg

SEQ ID NO: 104456 - DNA, 25 bp, SARS Virus
tcaacgattaggtcgttacctaggt

SEQ ID NO: 104457 - DNA, 25 bp, SARS Virus
caacgattaggttgttacctaggtt

SEQ ID NO: 104458 - DNA, 25 bp, SARS Virus
aacgattaggtctttacctaggtta

SEQ ID NO: 104459 - DNA, 25 bp, SARS Virus
acgattaggtcgttacctaggttaa

SEQ ID NO: 104460 - DNA, 25 bp, SARS Virus
cgattaggtcgttacctaggttaaa

SEQ ID NO: 104461 - DNA, 25 bp, SARS Virus
gattaggtcgtttcctaggttaaat

SEQ ID NO: 104462 - DNA, 25 bp, SARS Virus
attaggtcgttatctaggttaaata

SEQ ID NO: 104463 - DNA, 25 bp, SARS Virus
ttaggtcgttacttaggttaaatac

SEQ ID NO: 104464 - DNA, 25 bp, SARS Virus
taggtcgttacctaggttaaatact

SEQ ID NO: 104465 - DNA, 25 bp, SARS Virus
aggtcgttaccttggttaaatacta

SEQ ID NO: 104466 - DNA, 25 bp, SARS Virus
ggtcgttacctatgttaaatactac

SEQ ID NO: 104467 - DNA, 25 bp, SARS Virus
gtcgttacctagtttaaatactact

SEQ ID NO: 104468 - DNA, 25 bp, SARS Virus
tcgttacctaggttaaatactactc

SEQ ID NO: 104469 - DNA, 25 bp, SARS Virus
cgttacctaggttaaatactactcg

SEQ ID NO: 104470 - DNA, 25 bp, SARS Virus
gttacctaggtttaatactactcgg

SEQ ID NO: 104471 - DNA, 25 bp, SARS Virus
ttacctaggttatatactactcggc

SEQ ID NO: 104472 - DNA, 25 bp, SARS Virus
tacctaggttaattactactcggct

SEQ ID NO: 104473 - DNA, 25 bp, SARS Virus
acctaggttaaatactactcggctg

SEQ ID NO: 104474 - DNA, 25 bp, SARS Virus
cctaggttaaattctactcggctgc

SEQ ID NO: 104475 - DNA, 25 bp, SARS Virus
ctaggttaaatattactcggctgct

SEQ ID NO: 104476 - DNA, 25 bp, SARS Virus
taggttaaatactactcggctgctg

SEQ ID NO: 104477 - DNA, 25 bp, SARS Virus
aggttaaatacttctcggctgctgc

SEQ ID NO: 104478 - DNA, 25 bp, SARS Virus
ggttaaatactattcggctgctgct

SEQ ID NO: 104479 - DNA, 25 bp, SARS Virus
gttaaatactactcggctgctgctg

SEQ ID NO: 104480 - DNA, 25 bp, SARS Virus
ttaaatactacttggctgctgctga

SEQ ID NO: 104481 - DNA, 25 bp, SARS Virus
taaatactactctgctgctgctgat

SEQ ID NO: 104482 - DNA, 25 bp, SARS Virus
aaatactactcgtctgctgctgatg

SEQ ID NO: 104483 - DNA, 25 bp, SARS Virus
aatactactcggttgctgctgatga

SEQ ID NO: 104484 - DNA, 25 bp, SARS Virus
atactactcggctgctgctgatgat

SEQ ID NO: 104485 - DNA, 25 bp, SARS Virus
tactactcggcttctgctgatgatc

SEQ ID NO: 104486 - DNA, 25 bp, SARS Virus
actactcggctgttgctgatgatcg

SEQ ID NO: 104487 - DNA, 25 bp, SARS Virus
ctactcggctgctgctgatgatcgc

SEQ ID NO: 104488 - DNA, 25 bp, SARS Virus
tactcggctgcttctgatgatcgca

SEQ ID NO: 104489 - DNA, 25 bp, SARS Virus
actcggctgctgttgatgatcgcac

SEQ ID NO: 104490 - DNA, 25 bp, SARS Virus
ctcggctgctgctgatgatcgcacg

SEQ ID NO: 104491 - DNA, 25 bp, SARS Virus
tcggctgctgcttatgatcgcacgg

SEQ ID NO: 104492 - DNA, 25 bp, SARS Virus
cggctgctgctgttgatcgcacgga

SEQ ID NO: 104493 - DNA, 25 bp, SARS Virus
ggctgctgctgatgatcgcacggaa

SEQ ID NO: 104494 - DNA, 25 bp, SARS Virus
gctgctgctgattatcgcacggaaa

SEQ ID NO: 104495 - DNA, 25 bp, SARS Virus
ctgctgctgatgttcgcacggaaac

SEQ ID NO: 104496 - DNA, 25 bp, SARS Virus
tgctgctgatgatcgcacggaaaca

SEQ ID NO: 104497 - DNA, 25 bp, SARS Virus
gctgctgatgattgcacggaaacat

SEQ ID NO: 104498 - DNA, 25 bp, SARS Virus
ctgctgatgatctcacggaaacatt

SEQ ID NO: 104499 - DNA, 25 bp, SARS Virus
tgctgatgatcgtacggaaacattc

SEQ ID NO: 104500 - DNA, 25 bp, SARS Virus
gctgatgatcgctcggaaacattcg

SEQ ID NO: 104501 - DNA, 25 bp, SARS Virus
ctgatgatcgcatggaaacattcgt

SEQ ID NO: 104502 - DNA, 25 bp, SARS Virus
tgatgatcgcactgaaacattcgtg

SEQ ID NO: 104503 - DNA, 25 bp, SARS Virus
gatgatcgcacgtaaacattcgtgt

SEQ ID NO: 104504 - DNA, 25 bp, SARS Virus
atgatcgcacggtaacattcgtgtt

SEQ ID NO: 104505 - DNA, 25 bp, SARS Virus
tgatcgcacggatacattcgtgttc

SEQ ID NO: 104506 - DNA, 25 bp, SARS Virus
gatcgcacggaatcattcgtgttct

SEQ ID NO: 104507 - DNA, 25 bp, SARS Virus
atcgcacggaaatattcgtgttctt

SEQ ID NO: 104508 - DNA, 25 bp, SARS Virus
tcgcacggaaactttcgtgttcttt

SEQ ID NO: 104509 - DNA, 25 bp, SARS Virus
cgcacggaaacattcgtgttctttc

SEQ ID NO: 104510 - DNA, 25 bp, SARS Virus
gcacggaaacattcgtgttctttca

SEQ ID NO: 104511 - DNA, 25 bp, SARS Virus
cacggaaacatttgtgttctttcac

SEQ ID NO: 104512 - DNA, 25 bp, SARS Virus
acggaaacattcttgttctttcact

SEQ ID NO: 104513 - DNA, 25 bp, SARS Virus
cggaaacattcgtgttctttcactc

SEQ ID NO: 104514 - DNA, 25 bp, SARS Virus
ggaaacattcgttttctttcactca

SEQ ID NO: 104515 - DNA, 25 bp, SARS Virus
gaaacattcgtgttctttcactcat

SEQ ID NO: 104516 - DNA, 25 bp, SARS Virus
aaacattcgtgttctttcactcatg

SEQ ID NO: 104517 - DNA, 25 bp, SARS Virus
aacattcgtgttttttcactcatgc

SEQ ID NO: 104518 - DNA, 25 bp, SARS Virus
acattcgtgttctttcactcatgct

SEQ ID NO: 104519 - DNA, 25 bp, SARS Virus
cattcgtgttctttcactcatgctt

SEQ ID NO: 104520 - DNA, 25 bp, SARS Virus
attcgtgttctttcactcatgcttg

SEQ ID NO: 104521 - DNA, 25 bp, SARS Virus
ttcgtgttcttttactcatgcttga

SEQ ID NO: 104522 - DNA, 25 bp, SARS Virus
tcgtgttctttctctcatgcttgaa

SEQ ID NO: 104523 - DNA, 25 bp, SARS Virus
cgtgttctttcattcatgcttgaat

SEQ ID NO: 104524 - DNA, 25 bp, SARS Virus
gtgttctttcactcatgcttgaata

SEQ ID NO: 104525 - DNA, 25 bp, SARS Virus
tgttctttcacttatgcttgaatac

SEQ ID NO: 104526 - DNA, 25 bp, SARS Virus
gttctttcactcttgcttgaataca

SEQ ID NO: 104527 - DNA, 25 bp, SARS Virus
ttctttcactcatgcttgaatacat

SEQ ID NO: 104528 - DNA, 25 bp, SARS Virus
tctttcactcattcttgaatacatg

SEQ ID NO: 104529 - DNA, 25 bp, SARS Virus
ctttcactcatgtttgaatacatga

SEQ ID NO: 104530 - DNA, 25 bp, SARS Virus
tttcactcatgcttgaatacatgag

SEQ ID NO: 104531 - DNA, 25 bp, SARS Virus
ttcactcatgcttgaatacatgagt

SEQ ID NO: 104532 - DNA, 25 bp, SARS Virus
tcactcatgctttaatacatgagta

SEQ ID NO: 104533 - DNA, 25 bp, SARS Virus
cactcatgcttgtatacatgagtaa

SEQ ID NO: 104534 - DNA, 25 bp, SARS Virus
actcatgcttgattacatgagtaag

SEQ ID NO: 104535 - DNA, 25 bp, SARS Virus
ctcatgcttgaatacatgagtaagc

SEQ ID NO: 104536 - DNA, 25 bp, SARS Virus
tcatgcttgaattcatgagtaagca

SEQ ID NO: 104537 - DNA, 25 bp, SARS Virus
catgcttgaatatatgagtaagcaa

SEQ ID NO: 104538 - DNA, 25 bp, SARS Virus
atgcttgaatacttgagtaagcaaa

SEQ ID NO: 104539 - DNA, 25 bp, SARS Virus
tgcttgaatacatgagtaagcaaag

SEQ ID NO: 104540 - DNA, 25 bp, SARS Virus
gcttgaatacattagtaagcaaagc

SEQ ID NO: 104541 - DNA, 25 bp, SARS Virus
cttgaatacatgtgtaagcaaagcc

SEQ ID NO: 104542 - DNA, 25 bp, SARS Virus
ttgaatacatgattaagcaaagcct

SEQ ID NO: 104543 - DNA, 25 bp, SARS Virus
tgaatacatgagtaagcaaagcctt

SEQ ID NO: 104544 - DNA, 25 bp, SARS Virus
gaatacatgagttagcaaagccttc

SEQ ID NO: 104545 - DNA, 25 bp, SARS Virus
aatacatgagtatgcaaagccttct

SEQ ID NO: 104546 - DNA, 25 bp, SARS Virus
atacatgagtaatcaaagccttctt

SEQ ID NO: 104547 - DNA, 25 bp, SARS Virus
tacatgagtaagtaaagccttcttt

SEQ ID NO: 104548 - DNA, 25 bp, SARS Virus
acatgagtaagctaagccttctttg

SEQ ID NO: 104549 - DNA, 25 bp, SARS Virus
catgagtaagcatagccttctttgt

SEQ ID NO: 104550 - DNA, 25 bp, SARS Virus
atgagtaagcaatgccttctttgtc

SEQ ID NO: 104551 - DNA, 25 bp, SARS Virus
tgagtaagcaaatccttctttgtcc

SEQ ID NO: 104552 - DNA, 25 bp, SARS Virus
gagtaagcaaagtcttctttgtcca

SEQ ID NO: 104553 - DNA, 25 bp, SARS Virus
agtaagcaaagctttctttgtccat

SEQ ID NO: 104554 - DNA, 25 bp, SARS Virus
gtaagcaaagccttctttgtccatg

SEQ ID NO: 104555 - DNA, 25 bp, SARS Virus
taagcaaagccttctttgtccatgc

SEQ ID NO: 104556 - DNA, 25 bp, SARS Virus
aagcaaagccttttttgtccatgca

SEQ ID NO: 104557 - DNA, 25 bp, SARS Virus
agcaaagccttctttgtccatgcaa

SEQ ID NO: 104558 - DNA, 25 bp, SARS Virus
gcaaagccttctttgtccatgcaat

SEQ ID NO: 104559 - DNA, 25 bp, SARS Virus
caaagccttctttgtccatgcaatt

SEQ ID NO: 104560 - DNA, 25 bp, SARS Virus
aaagccttctttttccatgcaatta

SEQ ID NO: 104561 - DNA, 25 bp, SARS Virus
aagccttctttgaccatgcaattat

SEQ ID NO: 104562 - DNA, 25 bp, SARS Virus
agccttctttgtacatgcaattatc

SEQ ID NO: 104563 - DNA, 25 bp, SARS Virus
gccttctttgtcaatgcaattatca

SEQ ID NO: 104564 - DNA, 25 bp, SARS Virus
ccttctttgtccatgcaattatcaa

SEQ ID NO: 104565 - DNA, 25 bp, SARS Virus
cttctttgtccaagcaattatcaat

SEQ ID NO: 104566 - DNA, 25 bp, SARS Virus
ttctttgtccatacaattatcaatt

SEQ ID NO: 104567 - DNA, 25 bp, SARS Virus
tctttgtccatgaaattatcaatta

SEQ ID NO: 104568 - DNA, 25 bp, SARS Virus
ctttgtccatgcaattatcaattat

SEQ ID NO: 104569 - DNA, 25 bp, SARS Virus
tttgtccatgcaattatcaattatc

SEQ ID NO: 104570 - DNA, 25 bp, SARS Virus
ttgtccatgcaaatatcaattatcg

SEQ ID NO: 104571 - DNA, 25 bp, SARS Virus
tgtccatgcaataatcaattatcgc

SEQ ID NO: 104572 - DNA, 25 bp, SARS Virus
gtccatgcaattatcaattatcgca

SEQ ID NO: 104573 - DNA, 25 bp, SARS Virus
tccatgcaattaacaattatcgcat

SEQ ID NO: 104574 - DNA, 25 bp, SARS Virus
ccatgcaattataaattatcgcatg

SEQ ID NO: 104575 - DNA, 25 bp, SARS Virus
catgcaattatcaattatcgcatga

SEQ ID NO: 104576 - DNA, 25 bp, SARS Virus
atgcaattatcaattatcgcatgaa

SEQ ID NO: 104577 - DNA, 25 bp, SARS Virus
tgcaattatcaaatatcgcatgaag

SEQ ID NO: 104578 - DNA, 25 bp, SARS Virus
gcaattatcaataatcgcatgaaga

SEQ ID NO: 104579 - DNA, 25 bp, SARS Virus
caattatcaattatcgcatgaagaa

SEQ ID NO: 104580 - DNA, 25 bp, SARS Virus
aattatcaattaacgcatgaagaaa

SEQ ID NO: 104581 - DNA, 25 bp, SARS Virus
attatcaattatagcatgaagaaaa

SEQ ID NO: 104582 - DNA, 25 bp, SARS Virus
ttatcaattatcacatgaagaaaaa

SEQ ID NO: 104583 - DNA, 25 bp, SARS Virus
tatcaattatcgaatgaagaaaaag

SEQ ID NO: 104584 - DNA, 25 bp, SARS Virus
atcaattatcgcatgaagaaaaaga

SEQ ID NO: 104585 - DNA, 25 bp, SARS Virus
tcaattatcgcaagaagaaaaagaa

SEQ ID NO: 104586 - DNA, 25 bp, SARS Virus
caattatcgcataaagaaaaagaac

SEQ ID NO: 104587 - DNA, 25 bp, SARS Virus
aattatcgcatgaagaaaaagaacg

SEQ ID NO: 104588 - DNA, 25 bp, SARS Virus
attatcgcatgaagaaaaagaacga

SEQ ID NO: 104589 - DNA, 25 bp, SARS Virus
ttatcgcatgaaaaaaaagaacgaa

SEQ ID NO: 104590 - DNA, 25 bp, SARS Virus
tatcgcatgaagaaaaagaacgaaa

SEQ ID NO: 104591 - DNA, 25 bp, SARS Virus
atcgcatgaagaaaaagaacgaaag

SEQ ID NO: 104592 - DNA, 25 bp, SARS Virus
tcgcatgaagaaaaagaacgaaagc

SEQ ID NO: 104593 - DNA, 25 bp, SARS Virus
cgcatgaagaaaaagaacgaaagca

SEQ ID NO: 104594 - DNA, 25 bp, SARS Virus
gcatgaagaaaaagaacgaaagcac

SEQ ID NO: 104595 - DNA, 25 bp, SARS Virus
catgaagaaaaaaaacgaaagcacc

SEQ ID NO: 104596 - DNA, 25 bp, SARS Virus
atgaagaaaaagaacgaaagcacca

SEQ ID NO: 104597 - DNA, 25 bp, SARS Virus
tgaagaaaaagaacgaaagcaccat

SEQ ID NO: 104598 - DNA, 25 bp, SARS Virus
gaagaaaaagaaagaaagcaccata

SEQ ID NO: 104599 - DNA, 25 bp, SARS Virus
aagaaaaagaacaaaagcaccataa

SEQ ID NO: 104600 - DNA, 25 bp, SARS Virus
agaaaaagaacgaaagcaccataag

SEQ ID NO: 104601 - DNA, 25 bp, SARS Virus
gaaaaagaacgaaagcaccataaga

SEQ ID NO: 104602 - DNA, 25 bp, SARS Virus
aaaaagaacgaaagcaccataagaa

SEQ ID NO: 104603 - DNA, 25 bp, SARS Virus
aaaagaacgaaaacaccataagaac

SEQ ID NO: 104604 - DNA, 25 bp, SARS Virus
aaagaacgaaagaaccataagaacg

SEQ ID NO: 104605 - DNA, 25 bp, SARS Virus
aagaacgaaagcaccataagaacga

SEQ ID NO: 104606 - DNA, 25 bp, SARS Virus
agaacgaaagcaacataagaacgat

SEQ ID NO: 104607 - DNA, 25 bp, SARS Virus
gaacgaaagcacaataagaacgatc

SEQ ID NO: 104608 - DNA, 25 bp, SARS Virus
aacgaaagcaccataagaacgatca

SEQ ID NO: 104609 - DNA, 25 bp, SARS Virus
acgaaagcaccaaaagaacgatcag

SEQ ID NO: 104610 - DNA, 25 bp, SARS Virus
cgaaagcaccataagaacgatcagt

SEQ ID NO: 104611 - DNA, 25 bp, SARS Virus
gaaagcaccataagaacgatcagtg

SEQ ID NO: 104612 - DNA, 25 bp, SARS Virus
aaagcaccataaaaacgatcagtgt

SEQ ID NO: 104613 - DNA, 25 bp, SARS Virus
aagcaccataagaacgatcagtgtg

SEQ ID NO: 104614 - DNA, 25 bp, SARS Virus
agcaccataagaacgatcagtgtga

SEQ ID NO: 104615 - DNA, 25 bp, SARS Virus
gcaccataagaaagatcagtgtgat

SEQ ID NO: 104616 - DNA, 25 bp, SARS Virus
caccataagaacaatcagtgtgatc

SEQ ID NO: 104617 - DNA, 25 bp, SARS Virus
accataagaacgatcagtgtgatcg

SEQ ID NO: 104618 - DNA, 25 bp, SARS Virus
ccataagaacgaacagtgtgatcgg

SEQ ID NO: 104619 - DNA, 25 bp, SARS Virus
cataagaacgataagtgtgatcggt

SEQ ID NO: 104620 - DNA, 25 bp, SARS Virus
ataagaacgatcagtgtgatcggta

SEQ ID NO: 104621 - DNA, 25 bp, SARS Virus
taagaacgatcaatgtgatcggtag

SEQ ID NO: 104622 - DNA, 25 bp, SARS Virus
aagaacgatcagagtgatcggtagg

SEQ ID NO: 104623 - DNA, 25 bp, SARS Virus
agaacgatcagtatgatcggtagga

SEQ ID NO: 104624 - DNA, 25 bp, SARS Virus
gaacgatcagtgagatcggtaggaa

SEQ ID NO: 104625 - DNA, 25 bp, SARS Virus
aacgatcagtgtaatcggtaggaat

SEQ ID NO: 104626 - DNA, 25 bp, SARS Virus
acgatcagtgtgatcggtaggaatg

SEQ ID NO: 104627 - DNA, 25 bp, SARS Virus
cgatcagtgtgaacggtaggaatga

SEQ ID NO: 104628 - DNA, 25 bp, SARS Virus
gatcagtgtgataggtaggaatgac

SEQ ID NO: 104629 - DNA, 25 bp, SARS Virus
atcagtgtgatcagtaggaatgacg

SEQ ID NO: 104630 - DNA, 25 bp, SARS Virus
tcagtgtgatcgataggaatgacgc

SEQ ID NO: 104631 - DNA, 25 bp, SARS Virus
cagtgtgatcggaaggaatgacgcg

SEQ ID NO: 104632 - DNA, 25 bp, SARS Virus
agtgtgatcggtaggaatgacgcga

SEQ ID NO: 104633 - DNA, 25 bp, SARS Virus
gtgtgatcggtaagaatgacgcgaa

SEQ ID NO: 104634 - DNA, 25 bp, SARS Virus
tgtgatcggtagaaatgacgcgaag

SEQ ID NO: 104635 - DNA, 25 bp, SARS Virus
gtgatcggtaggaatgacgcgaagc

SEQ ID NO: 104636 - DNA, 25 bp, SARS Virus
tgatcggtaggaatgacgcgaagct

SEQ ID NO: 104637 - DNA, 25 bp, SARS Virus
gatcggtaggaaagacgcgaagcta

SEQ ID NO: 104638 - DNA, 25 bp, SARS Virus
atcggtaggaataacgcgaagctaa

SEQ ID NO: 104639 - DNA, 25 bp, SARS Virus
tcggtaggaatgacgcgaagctaac

SEQ ID NO: 104640 - DNA, 25 bp, SARS Virus
cggtaggaatgaagcgaagctaaca

SEQ ID NO: 104641 - DNA, 25 bp, SARS Virus
ggtaggaatgacacgaagctaacac

SEQ ID NO: 104642 - DNA, 25 bp, SARS Virus
gtaggaatgacgagaagctaacaca

SEQ ID NO: 104643 - DNA, 25 bp, SARS Virus
taggaatgacgcaaagctaacacac

SEQ ID NO: 104644 - DNA, 25 bp, SARS Virus
aggaatgacgcgaagctaacacacg

SEQ ID NO: 104645 - DNA, 25 bp, SARS Virus
ggaatgacgcgaagctaacacacgc

SEQ ID NO: 104646 - DNA, 25 bp, SARS Virus
gaatgacgcgaaactaacacacgca

SEQ ID NO: 104647 - DNA, 25 bp, SARS Virus
aatgacgcgaagataacacacgcat

SEQ ID NO: 104648 - DNA, 25 bp, SARS Virus
atgacgcgaagcaaacacacgcatg

SEQ ID NO: 104649 - DNA, 25 bp, SARS Virus
tgacgcgaagctaacacacgcatga

SEQ ID NO: 104650 - DNA, 25 bp, SARS Virus
gacgcgaagctaacacacgcatgac

SEQ ID NO: 104651 - DNA, 25 bp, SARS Virus
acgcgaagctaaaacacgcatgacg

SEQ ID NO: 104652 - DNA, 25 bp, SARS Virus
cgcgaagctaacacacgcatgacga

SEQ ID NO: 104653 - DNA, 25 bp, SARS Virus
gcgaagctaacaaacgcatgacgac

SEQ ID NO: 104654 - DNA, 25 bp, SARS Virus
cgaagctaacacacgcatgacgacg

SEQ ID NO: 104655 - DNA, 25 bp, SARS Virus
gaagctaacacaagcatgacgacgt

SEQ ID NO: 104656 - DNA, 25 bp, SARS Virus
aagctaacacacacatgacgacgtt

SEQ ID NO: 104657 - DNA, 25 bp, SARS Virus
agctaacacacgaatgacgacgtta

SEQ ID NO: 104658 - DNA, 25 bp, SARS Virus
gctaacacacgcatgacgacgttat

SEQ ID NO: 104659 - DNA, 25 bp, SARS Virus
ctaacacacgcaagacgacgttata

SEQ ID NO: 104660 - DNA, 25 bp, SARS Virus
taacacacgcataacgacgttataa

SEQ ID NO: 104661 - DNA, 25 bp, SARS Virus
aacacacgcatgacgacgttataac

SEQ ID NO: 104662 - DNA, 25 bp, SARS Virus
acacacgcatgaagacgttataaca

SEQ ID NO: 104663 - DNA, 25 bp, SARS Virus
cacacgcatgacaacgttataacaa

SEQ ID NO: 104664 - DNA, 25 bp, SARS Virus
acacgcatgacgacgttataacaat

SEQ ID NO: 104665 - DNA, 25 bp, SARS Virus
cacgcatgacgaagttataacaatt

SEQ ID NO: 104666 - DNA, 25 bp, SARS Virus
acgcatgacgacattataacaattg

SEQ ID NO: 104667 - DNA, 25 bp, SARS Virus
cgcatgacgacgatataacaattgc

SEQ ID NO: 104668 - DNA, 25 bp, SARS Virus
gcatgacgacgtaataacaattgca

SEQ ID NO: 104669 - DNA, 25 bp, SARS Virus
catgacgacgttataacaattgcac

SEQ ID NO: 104670 - DNA, 25 bp, SARS Virus
atgacgacgttaaaacaattgcact

SEQ ID NO: 104671 - DNA, 25 bp, SARS Virus
tgacgacgttataacaattgcactc

SEQ ID NO: 104672 - DNA, 25 bp, SARS Virus
gacgacgttataacaattgcactca

SEQ ID NO: 104673 - DNA, 25 bp, SARS Virus
acgacgttataaaaattgcactcaa

SEQ ID NO: 104674 - DNA, 25 bp, SARS Virus
cgacgttataacaattgcactcaaa

SEQ ID NO: 104675 - DNA, 25 bp, SARS Virus
gacgttataacaattgcactcaaat

SEQ ID NO: 104676 - DNA, 25 bp, SARS Virus
acgttataacaaatgcactcaaatc

SEQ ID NO: 104677 - DNA, 25 bp, SARS Virus
cgttataacaatagcactcaaatca

SEQ ID NO: 104678 - DNA, 25 bp, SARS Virus
gttataacaattacactcaaatcat

SEQ ID NO: 104679 - DNA, 25 bp, SARS Virus
ttataacaattgaactcaaatcatt

SEQ ID NO: 104680 - DNA, 25 bp, SARS Virus
tataacaattgcactcaaatcattt

SEQ ID NO: 104681 - DNA, 25 bp, SARS Virus
ataacaattgcaatcaaatcatttt

SEQ ID NO: 104682 - DNA, 25 bp, SARS Virus
taacaattgcacacaaatcattttg

SEQ ID NO: 104683 - DNA, 25 bp, SARS Virus
aacaattgcactaaaatcattttgg

SEQ ID NO: 104684 - DNA, 25 bp, SARS Virus
acaattgcactcaaatcattttggt

SEQ ID NO: 104685 - DNA, 25 bp, SARS Virus
caattgcactcaaatcattttggtt

SEQ ID NO: 104686 - DNA, 25 bp, SARS Virus
aattgcactcaaatcattttggttg

SEQ ID NO: 104687 - DNA, 25 bp, SARS Virus
attgcactcaaaacattttggttgc

SEQ ID NO: 104688 - DNA, 25 bp, SARS Virus
ttgcactcaaataattttggttgcc

SEQ ID NO: 104689 - DNA, 25 bp, SARS Virus
tgcactcaaatcattttggttgcca

SEQ ID NO: 104690 - DNA, 25 bp, SARS Virus
gcactcaaatcaatttggttgccaa

SEQ ID NO: 104691 - DNA, 25 bp, SARS Virus
cactcaaatcatattggttgccaaa

SEQ ID NO: 104692 - DNA, 25 bp, SARS Virus
actcaaatcattatggttgccaaat

SEQ ID NO: 104693 - DNA, 25 bp, SARS Virus
ctcaaatcatttaggttgccaaatg

SEQ ID NO: 104694 - DNA, 25 bp, SARS Virus
tcaaatcattttagttgccaaatgc

SEQ ID NO: 104695 - DNA, 25 bp, SARS Virus
caaatcattttgattgccaaatgca

SEQ ID NO: 104696 - DNA, 25 bp, SARS Virus
aaatcattttggatgccaaatgcag

SEQ ID NO: 104697 - DNA, 25 bp, SARS Virus
aatcattttggtagccaaatgcaga

SEQ ID NO: 104698 - DNA, 25 bp, SARS Virus
atcattttggttaccaaatgcagat

SEQ ID NO: 104699 - DNA, 25 bp, SARS Virus
tcattttggttgacaaatgcagatg

SEQ ID NO: 104700 - DNA, 25 bp, SARS Virus
cattttggttgcaaaatgcagatga

SEQ ID NO: 104701 - DNA, 25 bp, SARS Virus
attttggttgccaaatgcagatgag

SEQ ID NO: 104702 - DNA, 25 bp, SARS Virus
ttttggttgccaaatgcagatgagc

SEQ ID NO: 104703 - DNA, 25 bp, SARS Virus
tttggttgccaaatgcagatgagcg

SEQ ID NO: 104704 - DNA, 25 bp, SARS Virus
ttggttgccaaaagcagatgagcgc

SEQ ID NO: 104705 - DNA, 25 bp, SARS Virus
tggttgccaaatacagatgagcgca

SEQ ID NO: 104706 - DNA, 25 bp, SARS Virus
ggttgccaaatgaagatgagcgcac

SEQ ID NO: 104707 - DNA, 25 bp, SARS Virus
gttgccaaatgcagatgagcgcaca

SEQ ID NO: 104708 - DNA, 25 bp, SARS Virus
ttgccaaatgcaaatgagcgcacaa

SEQ ID NO: 104709 - DNA, 25 bp, SARS Virus
tgccaaatgcagatgagcgcacaat

SEQ ID NO: 104710 - DNA, 25 bp, SARS Virus
gccaaatgcagaagagcgcacaatt

SEQ ID NO: 104711 - DNA, 25 bp, SARS Virus
ccaaatgcagataagcgcacaattt

SEQ ID NO: 104712 - DNA, 25 bp, SARS Virus
caaatgcagatgagcgcacaatttt

SEQ ID NO: 104713 - DNA, 25 bp, SARS Virus
aaatgcagatgaacgcacaattttt

SEQ ID NO: 104714 - DNA, 25 bp, SARS Virus
aatgcagatgagagcacaattttta

SEQ ID NO: 104715 - DNA, 25 bp, SARS Virus
atgcagatgagcacacaatttttag

SEQ ID NO: 104716 - DNA, 25 bp, SARS Virus
tgcagatgagcgaacaatttttaga

SEQ ID NO: 104717 - DNA, 25 bp, SARS Virus
gcagatgagcgcacaatttttagac

SEQ ID NO: 104718 - DNA, 25 bp, SARS Virus
cagatgagcgcaaaatttttagact

SEQ ID NO: 104719 - DNA, 25 bp, SARS Virus
agatgagcgcacaatttttagactt

SEQ ID NO: 104720 - DNA, 25 bp, SARS Virus
gatgagcgcacaatttttagacttg

SEQ ID NO: 104721 - DNA, 25 bp, SARS Virus
atgagcgcacaaattttagacttga

SEQ ID NO: 104722 - DNA, 25 bp, SARS Virus
tgagcgcacaatatttagacttgag

SEQ ID NO: 104723 - DNA, 25 bp, SARS Virus
gagcgcacaattattagacttgaga

SEQ ID NO: 104724 - DNA, 25 bp, SARS Virus
agcgcacaatttatagacttgagaa

SEQ ID NO: 104725 - DNA, 25 bp, SARS Virus
gcgcacaattttaagacttgagaag

SEQ ID NO: 104726 - DNA, 25 bp, SARS Virus
cgcacaatttttagacttgagaaga

SEQ ID NO: 104727 - DNA, 25 bp, SARS Virus
gcacaatttttaaacttgagaagac

SEQ ID NO: 104728 - DNA, 25 bp, SARS Virus
cacaatttttagacttgagaagact

SEQ ID NO: 104729 - DNA, 25 bp, SARS Virus
acaatttttagaattgagaagactt

SEQ ID NO: 104730 - DNA, 25 bp, SARS Virus
caatttttagacatgagaagacttc

SEQ ID NO: 104731 - DNA, 25 bp, SARS Virus
aatttttagactagagaagacttcc

SEQ ID NO: 104732 - DNA, 25 bp, SARS Virus
atttttagacttaagaagacttcct

SEQ ID NO: 104733 - DNA, 25 bp, SARS Virus
tttttagacttgagaagacttcctc

SEQ ID NO: 104734 - DNA, 25 bp, SARS Virus
ttttagacttgaaaagacttcctca

SEQ ID NO: 104735 - DNA, 25 bp, SARS Virus
tttagacttgagaagacttcctcaa

SEQ ID NO: 104736 - DNA, 25 bp, SARS Virus
ttagacttgagaagacttcctcaag

SEQ ID NO: 104737 - DNA, 25 bp, SARS Virus
tagacttgagaaaacttcctcaagg

SEQ ID NO: 104738 - DNA, 25 bp, SARS Virus
agacttgagaagacttcctcaagga

SEQ ID NO: 104739 - DNA, 25 bp, SARS Virus
gacttgagaagaattcctcaaggac

SEQ ID NO: 104740 - DNA, 25 bp, SARS Virus
acttgagaagacatcctcaaggact

SEQ ID NO: 104741 - DNA, 25 bp, SARS Virus
cttgagaagactacctcaaggacta

SEQ ID NO: 104742 - DNA, 25 bp, SARS Virus
ttgagaagacttactcaaggactag

SEQ ID NO: 104743 - DNA, 25 bp, SARS Virus
tgagaagacttcatcaaggactaga

SEQ ID NO: 104744 - DNA, 25 bp, SARS Virus
gagaagacttccacaaggactagaa

SEQ ID NO: 104745 - DNA, 25 bp, SARS Virus
agaagacttcctaaaggactagaag

SEQ ID NO: 104746 - DNA, 25 bp, SARS Virus
gaagacttcctcaaggactagaaga

SEQ ID NO: 104747 - DNA, 25 bp, SARS Virus
aagacttcctcaaggactagaagac

SEQ ID NO: 104748 - DNA, 25 bp, SARS Virus
agacttcctcaaagactagaagacc

SEQ ID NO: 104749 - DNA, 25 bp, SARS Virus
gacttcctcaagaactagaagacca

SEQ ID NO: 104750 - DNA, 25 bp, SARS Virus
acttcctcaaggactagaagaccag

SEQ ID NO: 104751 - DNA, 25 bp, SARS Virus
cttcctcaaggaatagaagaccaga

SEQ ID NO: 104752 - DNA, 25 bp, SARS Virus
ttcctcaaggacaagaagaccagat

SEQ ID NO: 104753 - DNA, 25 bp, SARS Virus
tcctcaaggactagaagaccagatt

SEQ ID NO: 104754 - DNA, 25 bp, SARS Virus
cctcaaggactaaaagaccagattt

SEQ ID NO: 104755 - DNA, 25 bp, SARS Virus
ctcaaggactagaagaccagatttg

SEQ ID NO: 104756 - DNA, 25 bp, SARS Virus
tcaaggactagaagaccagatttgc

SEQ ID NO: 104757 - DNA, 25 bp, SARS Virus
caaggactagaaaaccagatttgct

SEQ ID NO: 104758 - DNA, 25 bp, SARS Virus
aaggactagaagaccagatttgctt

SEQ ID NO: 104759 - DNA, 25 bp, SARS Virus
aggactagaagaacagatttgcttg

SEQ ID NO: 104760 - DNA, 25 bp, SARS Virus
ggactagaagacaagatttgcttga

SEQ ID NO: 104761 - DNA, 25 bp, SARS Virus
gactagaagaccagatttgcttgat

SEQ ID NO: 104762 - DNA, 25 bp, SARS Virus
actagaagaccaaatttgcttgatt

SEQ ID NO: 104763 - DNA, 25 bp, SARS Virus
ctagaagaccagatttgcttgattg

SEQ ID NO: 104764 - DNA, 25 bp, SARS Virus
tagaagaccagaattgcttgattga

SEQ ID NO: 104765 - DNA, 25 bp, SARS Virus
agaagaccagatatgcttgattgat

SEQ ID NO: 104766 - DNA, 25 bp, SARS Virus
gaagaccagattagcttgattgata

SEQ ID NO: 104767 - DNA, 25 bp, SARS Virus
aagaccagatttacttgattgataa

SEQ ID NO: 104768 - DNA, 25 bp, SARS Virus
agaccagatttgattgattgataat

SEQ ID NO: 104769 - DNA, 25 bp, SARS Virus
gaccagatttgcatgattgataata

SEQ ID NO: 104770 - DNA, 25 bp, SARS Virus
accagatttgctagattgataataa

SEQ ID NO: 104771 - DNA, 25 bp, SARS Virus
ccagatttgcttaattgataataat

SEQ ID NO: 104772 - DNA, 25 bp, SARS Virus
cagatttgcttgattgataataata

SEQ ID NO: 104773 - DNA, 25 bp, SARS Virus
agatttgcttgaatgataataataa

SEQ ID NO: 104774 - DNA, 25 bp, SARS Virus
gatttgcttgatagataataataat

SEQ ID NO: 104775 - DNA, 25 bp, SARS Virus
atttgcttgattaataataataata

SEQ ID NO: 104776 - DNA, 25 bp, SARS Virus
tttgcttgattgataataataataa

SEQ ID NO: 104777 - DNA, 25 bp, SARS Virus
ttgcttgattgaaaataataataag

SEQ ID NO: 104778 - DNA, 25 bp, SARS Virus
tgcttgattgataataataataaga

SEQ ID NO: 104779 - DNA, 25 bp, SARS Virus
gcttgattgataataataataagac

SEQ ID NO: 104780 - DNA, 25 bp, SARS Virus
cttgattgataaaaataataagaca

SEQ ID NO: 104781 - DNA, 25 bp, SARS Virus
ttgattgataataataataagacaa

SEQ ID NO: 104782 - DNA, 25 bp, SARS Virus
tgattgataataataataagacaaa

SEQ ID NO: 104783 - DNA, 25 bp, SARS Virus
gattgataataaaaataagacaaac

SEQ ID NO: 104784 - DNA, 25 bp, SARS Virus
attgataataataataagacaaacc

SEQ ID NO: 104785 - DNA, 25 bp, SARS Virus
ttgataataataataagacaaacct

SEQ ID NO: 104786 - DNA, 25 bp, SARS Virus
tgataataataaaaagacaaacctt

SEQ ID NO: 104787 - DNA, 25 bp, SARS Virus
gataataataataagacaaaccttg

SEQ ID NO: 104788 - DNA, 25 bp, SARS Virus
ataataataataagacaaaccttga

SEQ ID NO: 104789 - DNA, 25 bp, SARS Virus
taataataataaaacaaaccttgaa

SEQ ID NO: 104790 - DNA, 25 bp, SARS Virus
aataataataagacaaaccttgaaa

SEQ ID NO: 104791 - DNA, 25 bp, SARS Virus
ataataataagaaaaaccttgaaat

SEQ ID NO: 104792 - DNA, 25 bp, SARS Virus
taataataagacaaaccttgaaatt

SEQ ID NO: 104793 - DNA, 25 bp, SARS Virus
aataataagacaaaccttgaaattg

SEQ ID NO: 104794 - DNA, 25 bp, SARS Virus
ataataagacaaaccttgaaattgt

SEQ ID NO: 104795 - DNA, 25 bp, SARS Virus
taataagacaaaacttgaaattgta

SEQ ID NO: 104796 - DNA, 25 bp, SARS Virus
aataagacaaacattgaaattgtaa

SEQ ID NO: 104797 - DNA, 25 bp, SARS Virus
ataagacaaaccatgaaattgtaac

SEQ ID NO: 104798 - DNA, 25 bp, SARS Virus
taagacaaacctagaaattgtaacg

SEQ ID NO: 104799 - DNA, 25 bp, SARS Virus
aagacaaaccttaaaattgtaacga

SEQ ID NO: 104800 - DNA, 25 bp, SARS Virus
agacaaaccttgaaattgtaacgaa

SEQ ID NO: 104801 - DNA, 25 bp, SARS Virus
gacaaaccttgaaattgtaacgaat

SEQ ID NO: 104802 - DNA, 25 bp, SARS Virus
acaaaccttgaaattgtaacgaata

SEQ ID NO: 104803 - DNA, 25 bp, SARS Virus
caaaccttgaaaatgtaacgaatag

SEQ ID NO: 104804 - DNA, 25 bp, SARS Virus
aaaccttgaaatagtaacgaatagt

SEQ ID NO: 104805 - DNA, 25 bp, SARS Virus
aaccttgaaattataacgaatagta

SEQ ID NO: 104806 - DNA, 25 bp, SARS Virus
accttgaaattgaaacgaatagtac

SEQ ID NO: 104807 - DNA, 25 bp, SARS Virus
ccttgaaattgtaacgaatagtacc

SEQ ID NO: 104808 - DNA, 25 bp, SARS Virus
cttgaaattgtaacgaatagtaccg

SEQ ID NO: 104809 - DNA, 25 bp, SARS Virus
ttgaaattgtaaagaatagtaccgt

SEQ ID NO: 104810 - DNA, 25 bp, SARS Virus
tgaaattgtaacaaatagtaccgtc

SEQ ID NO: 104811 - DNA, 25 bp, SARS Virus
gaaattgtaacgaatagtaccgtct

SEQ ID NO: 104812 - DNA, 25 bp, SARS Virus
aaattgtaacgaatagtaccgtctg

SEQ ID NO: 104813 - DNA, 25 bp, SARS Virus
aattgtaacgaaaagtaccgtctgt

SEQ ID NO: 104814 - DNA, 25 bp, SARS Virus
attgtaacgaatagtaccgtctgtt

SEQ ID NO: 104815 - DNA, 25 bp, SARS Virus
ttgtaacgaataataccgtctgttg

SEQ ID NO: 104816 - DNA, 25 bp, SARS Virus
tgtaacgaatagaaccgtctgttgc

SEQ ID NO: 104817 - DNA, 25 bp, SARS Virus
gtaacgaatagtaccgtctgttgcc

SEQ ID NO: 104818 - DNA, 25 bp, SARS Virus
taacgaatagtaacgtctgttgcca

SEQ ID NO: 104819 - DNA, 25 bp, SARS Virus
aacgaatagtacagtctgttgccat

SEQ ID NO: 104820 - DNA, 25 bp, SARS Virus
acgaatagtaccatctgttgccatg

SEQ ID NO: 104821 - DNA, 25 bp, SARS Virus
cgaatagtaccgactgttgccatga

SEQ ID NO: 104822 - DNA, 25 bp, SARS Virus
gaatagtaccgtatgttgccatgat

SEQ ID NO: 104823 - DNA, 25 bp, SARS Virus
aatagtaccgtcagttgccatgata

SEQ ID NO: 104824 - DNA, 25 bp, SARS Virus
atagtaccgtctattgccatgataa

SEQ ID NO: 104825 - DNA, 25 bp, SARS Virus
tagtaccgtctgatgccatgataat

SEQ ID NO: 104826 - DNA, 25 bp, SARS Virus
agtaccgtctgtagccatgataatg

SEQ ID NO: 104827 - DNA, 25 bp, SARS Virus
gtaccgtctgttaccatgataatgg

SEQ ID NO: 104828 - DNA, 25 bp, SARS Virus
taccgtctgttgacatgataatggc

SEQ ID NO: 104829 - DNA, 25 bp, SARS Virus
accgtctgttgcaatgataatggca

SEQ ID NO: 104830 - DNA, 25 bp, SARS Virus
ccgtctgttgccatgataatggcaa

SEQ ID NO: 104831 - DNA, 25 bp, SARS Virus
cgtctgttgccaagataatggcaac

SEQ ID NO: 104832 - DNA, 25 bp, SARS Virus
gtctgttgccataataatggcaact

SEQ ID NO: 104833 - DNA, 25 bp, SARS Virus
tctgttgccatgataatggcaactc

SEQ ID NO: 104834 - DNA, 25 bp, SARS Virus
ctgttgccatgaaaatggcaactcc

SEQ ID NO: 104835 - DNA, 25 bp, SARS Virus
tgttgccatgataatggcaactcct

SEQ ID NO: 104836 - DNA, 25 bp, SARS Virus
gttgccatgataatggcaactcctc

SEQ ID NO: 104837 - DNA, 25 bp, SARS Virus
ttgccatgataaaggcaactcctcg

SEQ ID NO: 104838 - DNA, 25 bp, SARS Virus
tgccatgataatagcaactcctcga

SEQ ID NO: 104839 - DNA, 25 bp, SARS Virus
gccatgataatgacaactcctcgaa

SEQ ID NO: 104840 - DNA, 25 bp, SARS Virus
ccatgataatggaaactcctcgaat

SEQ ID NO: 104841 - DNA, 25 bp, SARS Virus
catgataatggcaactcctcgaatt

SEQ ID NO: 104842 - DNA, 25 bp, SARS Virus
atgataatggcaactcctcgaattt

SEQ ID NO: 104843 - DNA, 25 bp, SARS Virus
tgataatggcaaatcctcgaatttg

SEQ ID NO: 104844 - DNA, 25 bp, SARS Virus
gataatggcaacacctcgaatttgt

SEQ ID NO: 104845 - DNA, 25 bp, SARS Virus
ataatggcaactactcgaatttgtt

SEQ ID NO: 104846 - DNA, 25 bp, SARS Virus
taatggcaactcatcgaatttgttg

SEQ ID NO: 104847 - DNA, 25 bp, SARS Virus
aatggcaactccacgaatttgttga

SEQ ID NO: 104848 - DNA, 25 bp, SARS Virus
atggcaactcctagaatttgttgag

SEQ ID NO: 104849 - DNA, 25 bp, SARS Virus
tggcaactcctcaaatttgttgagg

SEQ ID NO: 104850 - DNA, 25 bp, SARS Virus
ggcaactcctcgaatttgttgagga

SEQ ID NO: 104851 - DNA, 25 bp, SARS Virus
gcaactcctcgaatttgttgaggac

SEQ ID NO: 104852 - DNA, 25 bp, SARS Virus
caactcctcgaaattgttgaggacc

SEQ ID NO: 104853 - DNA, 25 bp, SARS Virus
aactcctcgaatatgttgaggacct

SEQ ID NO: 104854 - DNA, 25 bp, SARS Virus
actcctcgaattagttgaggacctt

SEQ ID NO: 104855 - DNA, 25 bp, SARS Virus
ctcctcgaatttattgaggaccttg

SEQ ID NO: 104856 - DNA, 25 bp, SARS Virus
tcctcgaatttgatgaggaccttgt

SEQ ID NO: 104857 - DNA, 25 bp, SARS Virus
cctcgaatttgtagaggaccttgtt

SEQ ID NO: 104858 - DNA, 25 bp, SARS Virus
ctcgaatttgttaaggaccttgtta

SEQ ID NO: 104859 - DNA, 25 bp, SARS Virus
tcgaatttgttgaggaccttgttac

SEQ ID NO: 104860 - DNA, 25 bp, SARS Virus
cgaatttgttgaagaccttgttacc

SEQ ID NO: 104861 - DNA, 25 bp, SARS Virus
gaatttgttgagaaccttgttacct

SEQ ID NO: 104862 - DNA, 25 bp, SARS Virus
aatttgttgaggaccttgttacctt

SEQ ID NO: 104863 - DNA, 25 bp, SARS Virus
atttgttgaggaacttgttaccttg

SEQ ID NO: 104864 - DNA, 25 bp, SARS Virus
tttgttgaggacattgttaccttgg

SEQ ID NO: 104865 - DNA, 25 bp, SARS Virus
ttgttgaggaccatgttaccttgga

SEQ ID NO: 104866 - DNA, 25 bp, SARS Virus
tgttgaggacctagttaccttggat

SEQ ID NO: 104867 - DNA, 25 bp, SARS Virus
gttgaggaccttattaccttggatc

SEQ ID NO: 104868 - DNA, 25 bp, SARS Virus
ttgaggaccttgataccttggatca

SEQ ID NO: 104869 - DNA, 25 bp, SARS Virus
tgaggaccttgtaaccttggatcat

SEQ ID NO: 104870 - DNA, 25 bp, SARS Virus
gaggaccttgttaccttggatcatt

SEQ ID NO: 104871 - DNA, 25 bp, SARS Virus
aggaccttgttaacttggatcatta

SEQ ID NO: 104872 - DNA, 25 bp, SARS Virus
ggaccttgttacattggatcattat

SEQ ID NO: 104873 - DNA, 25 bp, SARS Virus
gaccttgttaccatggatcattatc

SEQ ID NO: 104874 - DNA, 25 bp, SARS Virus
accttgttacctaggatcattatcc

SEQ ID NO: 104875 - DNA, 25 bp, SARS Virus
ccttgttaccttagatcattatcca

SEQ ID NO: 104876 - DNA, 25 bp, SARS Virus
cttgttaccttgaatcattatccaa

SEQ ID NO: 104877 - DNA, 25 bp, SARS Virus
ttgttaccttggatcattatccaaa

SEQ ID NO: 104878 - DNA, 25 bp, SARS Virus
tgttaccttggaacattatccaaag

SEQ ID NO: 104879 - DNA, 25 bp, SARS Virus
gttaccttggataattatccaaagg

SEQ ID NO: 104880 - DNA, 25 bp, SARS Virus
ttaccttggatcattatccaaagga

SEQ ID NO: 104881 - DNA, 25 bp, SARS Virus
taccttggatcaatatccaaaggat

SEQ ID NO: 104882 - DNA, 25 bp, SARS Virus
accttggatcataatccaaaggata

SEQ ID NO: 104883 - DNA, 25 bp, SARS Virus
ccttggatcattatccaaaggataa

SEQ ID NO: 104884 - DNA, 25 bp, SARS Virus
cttggatcattaaccaaaggataag

SEQ ID NO: 104885 - DNA, 25 bp, SARS Virus
ttggatcattatacaaaggataagg

SEQ ID NO: 104886 - DNA, 25 bp, SARS Virus
tggatcattatcaaaaggataagga

SEQ ID NO: 104887 - DNA, 25 bp, SARS Virus
ggatcattatccaaaggataaggat

SEQ ID NO: 104888 - DNA, 25 bp, SARS Virus
gatcattatccaaaggataaggatc

SEQ ID NO: 104889 - DNA, 25 bp, SARS Virus
atcattatccaaaggataaggatcg

SEQ ID NO: 104890 - DNA, 25 bp, SARS Virus
tcattatccaaaagataaggatcgg

SEQ ID NO: 104891 - DNA, 25 bp, SARS Virus
cattatccaaagaataaggatcgga

SEQ ID NO: 104892 - DNA, 25 bp, SARS Virus
attatccaaaggataaggatcggac

SEQ ID NO: 104893 - DNA, 25 bp, SARS Virus
ttatccaaaggaaaaggatcggacc

SEQ ID NO: 104894 - DNA, 25 bp, SARS Virus
tatccaaaggataaggatcggacct

SEQ ID NO: 104895 - DNA, 25 bp, SARS Virus
atccaaaggataaggatcggaccta

SEQ ID NO: 104896 - DNA, 25 bp, SARS Virus
tccaaaggataaagatcggacctaa

SEQ ID NO: 104897 - DNA, 25 bp, SARS Virus
ccaaaggataagaatcggacctaat

SEQ ID NO: 104898 - DNA, 25 bp, SARS Virus
caaaggataaggatcggacctaata

SEQ ID NO: 104899 - DNA, 25 bp, SARS Virus
aaaggataaggaacggacctaatac

SEQ ID NO: 104900 - DNA, 25 bp, SARS Virus
aaggataaggataggacctaataca

SEQ ID NO: 104901 - DNA, 25 bp, SARS Virus
aggataaggatcagacctaatacaa

SEQ ID NO: 104902 - DNA, 25 bp, SARS Virus
ggataaggatcgaacctaatacaat

SEQ ID NO: 104903 - DNA, 25 bp, SARS Virus
gataaggatcggacctaatacaatg

SEQ ID NO: 104904 - DNA, 25 bp, SARS Virus
ataaggatcggaactaatacaatga

SEQ ID NO: 104905 - DNA, 25 bp, SARS Virus
taaggatcggacataatacaatgat

SEQ ID NO: 104906 - DNA, 25 bp, SARS Virus
aaggatcggaccaaatacaatgatg

SEQ ID NO: 104907 - DNA, 25 bp, SARS Virus
aggatcggacctaatacaatgatgt

SEQ ID NO: 104908 - DNA, 25 bp, SARS Virus
ggatcggacctaatacaatgatgtt

SEQ ID NO: 104909 - DNA, 25 bp, SARS Virus
gatcggacctaaaacaatgatgtta

SEQ ID NO: 104910 - DNA, 25 bp, SARS Virus
atcggacctaatacaatgatgttaa

SEQ ID NO: 104911 - DNA, 25 bp, SARS Virus
tcggacctaataaaatgatgttaaa

SEQ ID NO: 104912 - DNA, 25 bp, SARS Virus
cggacctaatacaatgatgttaaac

SEQ ID NO: 104913 - DNA, 25 bp, SARS Virus
ggacctaatacaatgatgttaaacg

SEQ ID NO: 104914 - DNA, 25 bp, SARS Virus
gacctaatacaaagatgttaaacgg

SEQ ID NO: 104915 - DNA, 25 bp, SARS Virus
acctaatacaataatgttaaacgga

SEQ ID NO: 104916 - DNA, 25 bp, SARS Virus
cctaatacaatgatgttaaacggat

SEQ ID NO: 104917 - DNA, 25 bp, SARS Virus
ctaatacaatgaagttaaacggata

SEQ ID NO: 104918 - DNA, 25 bp, SARS Virus
taatacaatgatattaaacggataa

SEQ ID NO: 104919 - DNA, 25 bp, SARS Virus
aatacaatgatgataaacggataag

SEQ ID NO: 104920 - DNA, 25 bp, SARS Virus
atacaatgatgtaaaacggataaga

SEQ ID NO: 104921 - DNA, 25 bp, SARS Virus
tacaatgatgttaaacggataagat

SEQ ID NO: 104922 - DNA, 25 bp, SARS Virus
acaatgatgttaaacggataagatt

SEQ ID NO: 104923 - DNA, 25 bp, SARS Virus
caatgatgttaaacggataagatta

SEQ ID NO: 104924 - DNA, 25 bp, SARS Virus
aatgatgttaaaaggataagattag

SEQ ID NO: 104925 - DNA, 25 bp, SARS Virus
atgatgttaaacagataagattagc

SEQ ID NO: 104926 - DNA, 25 bp, SARS Virus
tgatgttaaacgaataagattagcc

SEQ ID NO: 104927 - DNA, 25 bp, SARS Virus
gatgttaaacggataagattagcct

SEQ ID NO: 104928 - DNA, 25 bp, SARS Virus
atgttaaacggaaaagattagcctt

SEQ ID NO: 104929 - DNA, 25 bp, SARS Virus
tgttaaacggataagattagccttg

SEQ ID NO: 104930 - DNA, 25 bp, SARS Virus
gttaaacggataagattagccttgt

SEQ ID NO: 104931 - DNA, 25 bp, SARS Virus
ttaaacggataaaattagccttgtc

SEQ ID NO: 104932 - DNA, 25 bp, SARS Virus
taaacggataagattagccttgtcc

SEQ ID NO: 104933 - DNA, 25 bp, SARS Virus
aaacggataagaatagccttgtcca

SEQ ID NO: 104934 - DNA, 25 bp, SARS Virus
aacggataagataagccttgtccaa

SEQ ID NO: 104935 - DNA, 25 bp, SARS Virus
acggataagattagccttgtccaaa

SEQ ID NO: 104936 - DNA, 25 bp, SARS Virus
cggataagattaaccttgtccaaaa

SEQ ID NO: 104937 - DNA, 25 bp, SARS Virus
ggataagattagacttgtccaaaaa

SEQ ID NO: 104938 - DNA, 25 bp, SARS Virus
gataagattagcattgtccaaaaac

SEQ ID NO: 104939 - DNA, 25 bp, SARS Virus
ataagattagccatgtccaaaaaca

SEQ ID NO: 104940 - DNA, 25 bp, SARS Virus
taagattagcctagtccaaaaacat

SEQ ID NO: 104941 - DNA, 25 bp, SARS Virus
aagattagccttatccaaaaacatg

SEQ ID NO: 104942 - DNA, 25 bp, SARS Virus
agattagccttgaccaaaaacatgt

SEQ ID NO: 104943 - DNA, 25 bp, SARS Virus
gattagccttgtacaaaaacatgta

SEQ ID NO: 104944 - DNA, 25 bp, SARS Virus
attagccttgtcaaaaaacatgtat

SEQ ID NO: 104945 - DNA, 25 bp, SARS Virus
ttagccttgtccaaaaacatgtatt

SEQ ID NO: 104946 - DNA, 25 bp, SARS Virus
tagccttgtccaaaaacatgtatta

SEQ ID NO: 104947 - DNA, 25 bp, SARS Virus
agccttgtccaaaaacatgtattat

SEQ ID NO: 104948 - DNA, 25 bp, SARS Virus
gccttgtccaaaaacatgtattatt

SEQ ID NO: 104949 - DNA, 25 bp, SARS Virus
ccttgtccaaaaacatgtattattt

SEQ ID NO: 104950 - DNA, 25 bp, SARS Virus
cttgtccaaaaaaatgtattatttc

SEQ ID NO: 104951 - DNA, 25 bp, SARS Virus
ttgtccaaaaacatgtattatttcg

SEQ ID NO: 104952 - DNA, 25 bp, SARS Virus
tgtccaaaaacaagtattatttcga

SEQ ID NO: 104953 - DNA, 25 bp, SARS Virus
gtccaaaaacatatattatttcgaa

SEQ ID NO: 104954 - DNA, 25 bp, SARS Virus
tccaaaaacatgaattatttcgaac

SEQ ID NO: 104955 - DNA, 25 bp, SARS Virus
ccaaaaacatgtattatttcgaaca

SEQ ID NO: 104956 - DNA, 25 bp, SARS Virus
caaaaacatgtaatatttcgaacaa

SEQ ID NO: 104957 - DNA, 25 bp, SARS Virus
aaaaacatgtataatttcgaacaaa

SEQ ID NO: 104958 - DNA, 25 bp, SARS Virus
aaaacatgtattatttcgaacaaaa

SEQ ID NO: 104959 - DNA, 25 bp, SARS Virus
aaacatgtattaattcgaacaaaag

SEQ ID NO: 104960 - DNA, 25 bp, SARS Virus
aacatgtattatatcgaacaaaagg

SEQ ID NO: 104961 - DNA, 25 bp, SARS Virus
acatgtattattacgaacaaaagga

SEQ ID NO: 104962 - DNA, 25 bp, SARS Virus
catgtattatttagaacaaaaggag

SEQ ID NO: 104963 - DNA, 25 bp, SARS Virus
atgtattatttcaaacaaaaggaga

SEQ ID NO: 104964 - DNA, 25 bp, SARS Virus
tgtattatttcgaacaaaaggagac

SEQ ID NO: 104965 - DNA, 25 bp, SARS Virus
gtattatttcgaacaaaaggagacc

SEQ ID NO: 104966 - DNA, 25 bp, SARS Virus
tattatttcgaaaaaaaggagaccg

SEQ ID NO: 104967 - DNA, 25 bp, SARS Virus
attatttcgaacaaaaggagaccga

SEQ ID NO: 104968 - DNA, 25 bp, SARS Virus
ttatttcgaacaaaaggagaccgag

SEQ ID NO: 104969 - DNA, 25 bp, SARS Virus
tatttcgaacaaaaggagaccgaga

SEQ ID NO: 104970 - DNA, 25 bp, SARS Virus
atttcgaacaaaaggagaccgagaa

SEQ ID NO: 104971 - DNA, 25 bp, SARS Virus
tttcgaacaaaaagagaccgagaac

SEQ ID NO: 104972 - DNA, 25 bp, SARS Virus
ttcgaacaaaagaagaccgagaaca

SEQ ID NO: 104973 - DNA, 25 bp, SARS Virus
tcgaacaaaaggagaccgagaacac

SEQ ID NO: 104974 - DNA, 25 bp, SARS Virus
cgaacaaaaggaaaccgagaacacc

SEQ ID NO: 104975 - DNA, 25 bp, SARS Virus
gaacaaaaggagaccgagaacaccg

SEQ ID NO: 104976 - DNA, 25 bp, SARS Virus
aacaaaaggagaacgagaacaccgg

SEQ ID NO: 104977 - DNA, 25 bp, SARS Virus
acaaaaggagacagagaacaccggt

SEQ ID NO: 104978 - DNA, 25 bp, SARS Virus
caaaaggagaccaagaacaccggtc

SEQ ID NO: 104979 - DNA, 25 bp, SARS Virus
aaaaggagaccgagaacaccggtca

SEQ ID NO: 104980 - DNA, 25 bp, SARS Virus
aaaggagaccgaaaacaccggtcat

SEQ ID NO: 104981 - DNA, 25 bp, SARS Virus
aaggagaccgagaacaccggtcatt

SEQ ID NO: 104982 - DNA, 25 bp, SARS Virus
aggagaccgagaacaccggtcattg

SEQ ID NO: 104983 - DNA, 25 bp, SARS Virus
ggagaccgagaaaaccggtcattgt

SEQ ID NO: 104984 - DNA, 25 bp, SARS Virus
gagaccgagaacaccggtcattgtg

SEQ ID NO: 104985 - DNA, 25 bp, SARS Virus
agaccgagaacaacggtcattgtga

SEQ ID NO: 104986 - DNA, 25 bp, SARS Virus
gaccgagaacacaggtcattgtgaa

SEQ ID NO: 104987 - DNA, 25 bp, SARS Virus
accgagaacaccagtcattgtgaac

SEQ ID NO: 104988 - DNA, 25 bp, SARS Virus
ccgagaacaccgatcattgtgaacg

SEQ ID NO: 104989 - DNA, 25 bp, SARS Virus
cgagaacaccggacattgtgaacga

SEQ ID NO: 104990 - DNA, 25 bp, SARS Virus
gagaacaccggtaattgtgaacgaa

SEQ ID NO: 104991 - DNA, 25 bp, SARS Virus
agaacaccggtcattgtgaacgaac

SEQ ID NO: 104992 - DNA, 25 bp, SARS Virus
gaacaccggtcaatgtgaacgaaca

SEQ ID NO: 104993 - DNA, 25 bp, SARS Virus
aacaccggtcatagtgaacgaacaa

SEQ ID NO: 104994 - DNA, 25 bp, SARS Virus
acaccggtcattatgaacgaacaaa

SEQ ID NO: 104995 - DNA, 25 bp, SARS Virus
caccggtcattgagaacgaacaaaa

SEQ ID NO: 104996 - DNA, 25 bp, SARS Virus
accggtcattgtaaacgaacaaaac

SEQ ID NO: 104997 - DNA, 25 bp, SARS Virus
ccggtcattgtgaacgaacaaaaca

SEQ ID NO: 104998 - DNA, 25 bp, SARS Virus
cggtcattgtgaacgaacaaaacac

SEQ ID NO: 104999 - DNA, 25 bp, SARS Virus
ggtcattgtgaaagaacaaaacacg

SEQ ID NO: 105000 - DNA, 25 bp, SARS Virus
gtcattgtgaacaaacaaaacacga

SEQ ID NO: 105001 - DNA, 25 bp, SARS Virus
tcattgtgaacgaacaaaacacgaa

SEQ ID NO: 105002 - DNA, 25 bp, SARS Virus
cattgtgaacgaacaaaacacgaac

SEQ ID NO: 105003 - DNA, 25 bp, SARS Virus
attgtgaacgaaaaaaacacgaacg

SEQ ID NO: 105004 - DNA, 25 bp, SARS Virus
ttgtgaacgaacaaaacacgaacga

SEQ ID NO: 105005 - DNA, 25 bp, SARS Virus
tgtgaacgaacaaaacacgaacgac

SEQ ID NO: 105006 - DNA, 25 bp, SARS Virus
gtgaacgaacaaaacacgaacgacg

SEQ ID NO: 105007 - DNA, 25 bp, SARS Virus
tgaacgaacaaaacacgaacgacga

SEQ ID NO: 105008 - DNA, 25 bp, SARS Virus
gaacgaacaaaaaacgaacgacgac

SEQ ID NO: 105009 - DNA, 25 bp, SARS Virus
aacgaacaaaacacgaacgacgaca

SEQ ID NO: 105010 - DNA, 25 bp, SARS Virus
acgaacaaaacaagaacgacgacag

SEQ ID NO: 105011 - DNA, 25 bp, SARS Virus
cgaacaaaacacaaacgacgacaga

SEQ ID NO: 105012 - DNA, 25 bp, SARS Virus
gaacaaaacacgaacgacgacagat

SEQ ID NO: 105013 - DNA, 25 bp, SARS Virus
aacaaaacacgaacgacgacagatg

SEQ ID NO: 105014 - DNA, 25 bp, SARS Virus
acaaaacacgaaagacgacagatgt

SEQ ID NO: 105015 - DNA, 25 bp, SARS Virus
caaaacacgaacaacgacagatgtc

SEQ ID NO: 105016 - DNA, 25 bp, SARS Virus
aaaacacgaacgacgacagatgtct

SEQ ID NO: 105017 - DNA, 25 bp, SARS Virus
aaacacgaacgaagacagatgtctt

SEQ ID NO: 105018 - DNA, 25 bp, SARS Virus
aacacgaacgacaacagatgtctta

SEQ ID NO: 105019 - DNA, 25 bp, SARS Virus
acacgaacgacgacagatgtcttaa

SEQ ID NO: 105020 - DNA, 25 bp, SARS Virus
cacgaacgacgaaagatgtcttaat

SEQ ID NO: 105021 - DNA, 25 bp, SARS Virus
acgaacgacgacagatgtcttaatt

SEQ ID NO: 105022 - DNA, 25 bp, SARS Virus
cgaacgacgacaaatgtcttaatta

SEQ ID NO: 105023 - DNA, 25 bp, SARS Virus
gaacgacgacagatgtcttaattaa

SEQ ID NO: 105024 - DNA, 25 bp, SARS Virus
aacgacgacagaagtcttaattaac

SEQ ID NO: 105025 - DNA, 25 bp, SARS Virus
acgacgacagatatcttaattaacc

SEQ ID NO: 105026 - DNA, 25 bp, SARS Virus
cgacgacagatgacttaattaaccc

SEQ ID NO: 105027 - DNA, 25 bp, SARS Virus
gacgacagatgtattaattaaccca

SEQ ID NO: 105028 - DNA, 25 bp, SARS Virus
acgacagatgtcataattaacccac

SEQ ID NO: 105029 - DNA, 25 bp, SARS Virus
cgacagatgtctaaattaacccact

SEQ ID NO: 105030 - DNA, 25 bp, SARS Virus
gacagatgtcttaattaacccactg

SEQ ID NO: 105031 - DNA, 25 bp, SARS Virus
acagatgtcttaattaacccactga

SEQ ID NO: 105032 - DNA, 25 bp, SARS Virus
cagatgtcttaaataacccactgac

SEQ ID NO: 105033 - DNA, 25 bp, SARS Virus
agatgtcttaataaacccactgacc

SEQ ID NO: 105034 - DNA, 25 bp, SARS Virus
gatgtcttaattaacccactgaccg

SEQ ID NO: 105035 - DNA, 25 bp, SARS Virus
atgtcttaattaacccactgaccgc

SEQ ID NO: 105036 - DNA, 25 bp, SARS Virus
tgtcttaattaaaccactgaccgcc

SEQ ID NO: 105037 - DNA, 25 bp, SARS Virus
gtcttaattaacacactgaccgccc

SEQ ID NO: 105038 - DNA, 25 bp, SARS Virus
tcttaattaaccaactgaccgccct

SEQ ID NO: 105039 - DNA, 25 bp, SARS Virus
cttaattaacccactgaccgcccta

SEQ ID NO: 105040 - DNA, 25 bp, SARS Virus
ttaattaacccaatgaccgccctaa

SEQ ID NO: 105041 - DNA, 25 bp, SARS Virus
taattaacccacagaccgccctaac

SEQ ID NO: 105042 - DNA, 25 bp, SARS Virus
aattaacccactaaccgccctaacg

SEQ ID NO: 105043 - DNA, 25 bp, SARS Virus
attaacccactgaccgccctaacgc

SEQ ID NO: 105044 - DNA, 25 bp, SARS Virus
ttaacccactgaacgccctaacgct

SEQ ID NO: 105045 - DNA, 25 bp, SARS Virus
taacccactgacagccctaacgcta

SEQ ID NO: 105046 - DNA, 25 bp, SARS Virus
aacccactgaccaccctaacgctaa

SEQ ID NO: 105047 - DNA, 25 bp, SARS Virus
acccactgaccgacctaacgctaac

SEQ ID NO: 105048 - DNA, 25 bp, SARS Virus
cccactgaccgcactaacgctaacg

SEQ ID NO: 105049 - DNA, 25 bp, SARS Virus
aagccttctttgcccatgcaattat

SEQ ID NO: 105050 - DNA, 25 bp, SARS Virus
agccttctttgtccatgcaattatc

SEQ ID NO: 105051 - DNA, 25 bp, SARS Virus
gccttctttgtccatgcaattatca

SEQ ID NO: 105052 - DNA, 25 bp, SARS Virus
ccttctttgtccctgcaattatcaa

SEQ ID NO: 105053 - DNA, 25 bp, SARS Virus
cttctttgtccacgcaattatcaat

SEQ ID NO: 105054 - DNA, 25 bp, SARS Virus
ttctttgtccatccaattatcaatt

SEQ ID NO: 105055 - DNA, 25 bp, SARS Virus
tctttgtccatgcaattatcaatta

SEQ ID NO: 105056 - DNA, 25 bp, SARS Virus
ctttgtccatgccattatcaattat

SEQ ID NO: 105057 - DNA, 25 bp, SARS Virus
tttgtccatgcacttatcaattatc

SEQ ID NO: 105058 - DNA, 25 bp, SARS Virus
ttgtccatgcaactatcaattatcg

SEQ ID NO: 105059 - DNA, 25 bp, SARS Virus
tgtccatgcaatcatcaattatcgc

SEQ ID NO: 105060 - DNA, 25 bp, SARS Virus
gtccatgcaattctcaattatcgca

SEQ ID NO: 105061 - DNA, 25 bp, SARS Virus
tccatgcaattaccaattatcgcat

SEQ ID NO: 105062 - DNA, 25 bp, SARS Virus
ccatgcaattatcaattatcgcatg

SEQ ID NO: 105063 - DNA, 25 bp, SARS Virus
catgcaattatccattatcgcatga

SEQ ID NO: 105064 - DNA, 25 bp, SARS Virus
atgcaattatcacttatcgcatgaa

SEQ ID NO: 105065 - DNA, 25 bp, SARS Virus
tgcaattatcaactatcgcatgaag

SEQ ID NO: 105066 - DNA, 25 bp, SARS Virus
gcaattatcaatcatcgcatgaaga

SEQ ID NO: 105067 - DNA, 25 bp, SARS Virus
caattatcaattctcgcatgaagaa

SEQ ID NO: 105068 - DNA, 25 bp, SARS Virus
aattatcaattaccgcatgaagaaa

SEQ ID NO: 105069 - DNA, 25 bp, SARS Virus
attatcaattatcgcatgaagaaaa

SEQ ID NO: 105070 - DNA, 25 bp, SARS Virus
ttatcaattatcccatgaagaaaaa

SEQ ID NO: 105071 - DNA, 25 bp, SARS Virus
tatcaattatcgcatgaagaaaaag

SEQ ID NO: 105072 - DNA, 25 bp, SARS Virus
atcaattatcgcctgaagaaaaaga

SEQ ID NO: 105073 - DNA, 25 bp, SARS Virus
tcaattatcgcacgaagaaaaagaa

SEQ ID NO: 105074 - DNA, 25 bp, SARS Virus
caattatcgcatcaagaaaaagaac

SEQ ID NO: 105075 - DNA, 25 bp, SARS Virus
aattatcgcatgcagaaaaagaacg

SEQ ID NO: 105076 - DNA, 25 bp, SARS Virus
attatcgcatgacgaaaaagaacga

SEQ ID NO: 105077 - DNA, 25 bp, SARS Virus
ttatcgcatgaacaaaaagaacgaa

SEQ ID NO: 105078 - DNA, 25 bp, SARS Virus
tatcgcatgaagcaaaagaacgaaa

SEQ ID NO: 105079 - DNA, 25 bp, SARS Virus
atcgcatgaagacaaagaacgaaag

SEQ ID NO: 105080 - DNA, 25 bp, SARS Virus
tcgcatgaagaacaagaacgaaagc

SEQ ID NO: 105081 - DNA, 25 bp, SARS Virus
cgcatgaagaaacagaacgaaagca

SEQ ID NO: 105082 - DNA, 25 bp, SARS Virus
gcatgaagaaaacgaacgaaagcac

SEQ ID NO: 105083 - DNA, 25 bp, SARS Virus
catgaagaaaaacaacgaaagcacc

SEQ ID NO: 105084 - DNA, 25 bp, SARS Virus
atgaagaaaaagcacgaaagcacca

SEQ ID NO: 105085 - DNA, 25 bp, SARS Virus
tgaagaaaaagaccgaaagcaccat

SEQ ID NO: 105086 - DNA, 25 bp, SARS Virus
gaagaaaaagaacgaaagcaccata

SEQ ID NO: 105087 - DNA, 25 bp, SARS Virus
aagaaaaagaaccaaagcaccataa

SEQ ID NO: 105088 - DNA, 25 bp, SARS Virus
agaaaaagaacgcaagcaccataag

SEQ ID NO: 105089 - DNA, 25 bp, SARS Virus
gaaaaagaacgacagcaccataaga

SEQ ID NO: 105090 - DNA, 25 bp, SARS Virus
aaaaagaacgaacgcaccataagaa

SEQ ID NO: 105091 - DNA, 25 bp, SARS Virus
aaaagaacgaaaccaccataagaac

SEQ ID NO: 105092 - DNA, 25 bp, SARS Virus
aaagaacgaaagcaccataagaacg

SEQ ID NO: 105093 - DNA, 25 bp, SARS Virus
aagaacgaaagccccataagaacga

SEQ ID NO: 105094 - DNA, 25 bp, SARS Virus
agaacgaaagcaccataagaacgat

SEQ ID NO: 105095 - DNA, 25 bp, SARS Virus
gaacgaaagcaccataagaacgatc

SEQ ID NO: 105096 - DNA, 25 bp, SARS Virus
aacgaaagcaccctaagaacgatca

SEQ ID NO: 105097 - DNA, 25 bp, SARS Virus
acgaaagcaccacaagaacgatcag

SEQ ID NO: 105098 - DNA, 25 bp, SARS Virus
cgaaagcaccatcagaacgatcagt

SEQ ID NO: 105099 - DNA, 25 bp, SARS Virus
gaaagcaccatacgaacgatcagtg

SEQ ID NO: 105100 - DNA, 25 bp, SARS Virus
aaagcaccataacaacgatcagtgt

SEQ ID NO: 105101 - DNA, 25 bp, SARS Virus
aagcaccataagcacgatcagtgtg

SEQ ID NO: 105102 - DNA, 25 bp, SARS Virus
agcaccataagaccgatcagtgtga

SEQ ID NO: 105103 - DNA, 25 bp, SARS Virus
gcaccataagaacgatcagtgtgat

SEQ ID NO: 105104 - DNA, 25 bp, SARS Virus
caccataagaaccatcagtgtgatc

SEQ ID NO: 105105 - DNA, 25 bp, SARS Virus
accataagaacgctcagtgtgatcg

SEQ ID NO: 105106 - DNA, 25 bp, SARS Virus
ccataagaacgaccagtgtgatcgg

SEQ ID NO: 105107 - DNA, 25 bp, SARS Virus
cataagaacgatcagtgtgatcggt

SEQ ID NO: 105108 - DNA, 25 bp, SARS Virus
ataagaacgatccgtgtgatcggta

SEQ ID NO: 105109 - DNA, 25 bp, SARS Virus
taagaacgatcactgtgatcggtag

SEQ ID NO: 105110 - DNA, 25 bp, SARS Virus
aagaacgatcagcgtgatcggtagg

SEQ ID NO: 105111 - DNA, 25 bp, SARS Virus
agaacgatcagtctgatcggtagga

SEQ ID NO: 105112 - DNA, 25 bp, SARS Virus
gaacgatcagtgcgatcggtaggaa

SEQ ID NO: 105113 - DNA, 25 bp, SARS Virus
aacgatcagtgtcatcggtaggaat

SEQ ID NO: 105114 - DNA, 25 bp, SARS Virus
acgatcagtgtgctcggtaggaatg

SEQ ID NO: 105115 - DNA, 25 bp, SARS Virus
cgatcagtgtgaccggtaggaatga

SEQ ID NO: 105116 - DNA, 25 bp, SARS Virus
gatcagtgtgatcggtaggaatgac

SEQ ID NO: 105117 - DNA, 25 bp, SARS Virus
atcagtgtgatccgtaggaatgacg

SEQ ID NO: 105118 - DNA, 25 bp, SARS Virus
tcagtgtgatcgctaggaatgacgc

SEQ ID NO: 105119 - DNA, 25 bp, SARS Virus
cagtgtgatcggcaggaatgacgcg

SEQ ID NO: 105120 - DNA, 25 bp, SARS Virus
agtgtgatcggtcggaatgacgcga

SEQ ID NO: 105121 - DNA, 25 bp, SARS Virus
gtgtgatcggtacgaatgacgcgaa

SEQ ID NO: 105122 - DNA, 25 bp, SARS Virus
tgtgatcggtagcaatgacgcgaag

SEQ ID NO: 105123 - DNA, 25 bp, SARS Virus
gtgatcggtaggcatgacgcgaagc

SEQ ID NO: 105124 - DNA, 25 bp, SARS Virus
tgatcggtaggactgacgcgaagct

SEQ ID NO: 105125 - DNA, 25 bp, SARS Virus
gatcggtaggaacgacgcgaagcta

SEQ ID NO: 105126 - DNA, 25 bp, SARS Virus
atcggtaggaatcacgcgaagctaa

SEQ ID NO: 105127 - DNA, 25 bp, SARS Virus
tcggtaggaatgccgcgaagctaac

SEQ ID NO: 105128 - DNA, 25 bp, SARS Virus
cggtaggaatgacgcgaagctaaca

SEQ ID NO: 105129 - DNA, 25 bp, SARS Virus
ggtaggaatgacccgaagctaacac

SEQ ID NO: 105130 - DNA, 25 bp, SARS Virus
gtaggaatgacgcgaagctaacaca

SEQ ID NO: 105131 - DNA, 25 bp, SARS Virus
taggaatgacgccaagctaacacac

SEQ ID NO: 105132 - DNA, 25 bp, SARS Virus
aggaatgacgcgcagctaacacacg

SEQ ID NO: 105133 - DNA, 25 bp, SARS Virus
ggaatgacgcgacgctaacacacgc

SEQ ID NO: 105134 - DNA, 25 bp, SARS Virus
gaatgacgcgaacctaacacacgca

SEQ ID NO: 105135 - DNA, 25 bp, SARS Virus
aatgacgcgaagctaacacacgcat

SEQ ID NO: 105136 - DNA, 25 bp, SARS Virus
atgacgcgaagccaacacacgcatg

SEQ ID NO: 105137 - DNA, 25 bp, SARS Virus
tgacgcgaagctcacacacgcatga

SEQ ID NO: 105138 - DNA, 25 bp, SARS Virus
gacgcgaagctaccacacgcatgac

SEQ ID NO: 105139 - DNA, 25 bp, SARS Virus
acgcgaagctaacacacgcatgacg

SEQ ID NO: 105140 - DNA, 25 bp, SARS Virus
cgcgaagctaacccacgcatgacga

SEQ ID NO: 105141 - DNA, 25 bp, SARS Virus
gcgaagctaacacacgcatgacgac

SEQ ID NO: 105142 - DNA, 25 bp, SARS Virus
cgaagctaacacccgcatgacgacg

SEQ ID NO: 105143 - DNA, 25 bp, SARS Virus
gaagctaacacacgcatgacgacgt

SEQ ID NO: 105144 - DNA, 25 bp, SARS Virus
aagctaacacacccatgacgacgtt

SEQ ID NO: 105145 - DNA, 25 bp, SARS Virus
agctaacacacgcatgacgacgtta

SEQ ID NO: 105146 - DNA, 25 bp, SARS Virus
gctaacacacgcctgacgacgttat

SEQ ID NO: 105147 - DNA, 25 bp, SARS Virus
ctaacacacgcacgacgacgttata

SEQ ID NO: 105148 - DNA, 25 bp, SARS Virus
taacacacgcatcacgacgttataa

SEQ ID NO: 105149 - DNA, 25 bp, SARS Virus
aacacacgcatgccgacgttataac

SEQ ID NO: 105150 - DNA, 25 bp, SARS Virus
acacacgcatgacgacgttataaca

SEQ ID NO: 105151 - DNA, 25 bp, SARS Virus
cacacgcatgaccacgttataacaa

SEQ ID NO: 105152 - DNA, 25 bp, SARS Virus
acacgcatgacgccgttataacaat

SEQ ID NO: 105153 - DNA, 25 bp, SARS Virus
cacgcatgacgacgttataacaatt

SEQ ID NO: 105154 - DNA, 25 bp, SARS Virus
acgcatgacgaccttataacaattg

SEQ ID NO: 105155 - DNA, 25 bp, SARS Virus
cgcatgacgacgctataacaattgc

SEQ ID NO: 105156 - DNA, 25 bp, SARS Virus
gcatgacgacgtcataacaattgca

SEQ ID NO: 105157 - DNA, 25 bp, SARS Virus
catgacgacgttctaacaattgcac

SEQ ID NO: 105158 - DNA, 25 bp, SARS Virus
atgacgacgttacaacaattgcact

SEQ ID NO: 105159 - DNA, 25 bp, SARS Virus
tgacgacgttatcacaattgcactc

SEQ ID NO: 105160 - DNA, 25 bp, SARS Virus
gacgacgttataccaattgcactca

SEQ ID NO: 105161 - DNA, 25 bp, SARS Virus
acgacgttataacaattgcactcaa

SEQ ID NO: 105162 - DNA, 25 bp, SARS Virus
cgacgttataaccattgcactcaaa

SEQ ID NO: 105163 - DNA, 25 bp, SARS Virus
gacgttataacacttgcactcaaat

SEQ ID NO: 105164 - DNA, 25 bp, SARS Virus
acgttataacaactgcactcaaatc

SEQ ID NO: 105165 - DNA, 25 bp, SARS Virus
cgttataacaatcgcactcaaatca

SEQ ID NO: 105166 - DNA, 25 bp, SARS Virus
gttataacaattccactcaaatcat

SEQ ID NO: 105167 - DNA, 25 bp, SARS Virus
ttataacaattgcactcaaatcatt

SEQ ID NO: 105168 - DNA, 25 bp, SARS Virus
tataacaattgccctcaaatcattt

SEQ ID NO: 105169 - DNA, 25 bp, SARS Virus
ataacaattgcactcaaatcatttt

SEQ ID NO: 105170 - DNA, 25 bp, SARS Virus
taacaattgcacccaaatcattttg

SEQ ID NO: 105171 - DNA, 25 bp, SARS Virus
aacaattgcactcaaatcattttgg

SEQ ID NO: 105172 - DNA, 25 bp, SARS Virus
acaattgcactccaatcattttggt

SEQ ID NO: 105173 - DNA, 25 bp, SARS Virus
caattgcactcacatcattttggtt

SEQ ID NO: 105174 - DNA, 25 bp, SARS Virus
aattgcactcaactcattttggttg

SEQ ID NO: 105175 - DNA, 25 bp, SARS Virus
attgcactcaaaccattttggttgc

SEQ ID NO: 105176 - DNA, 25 bp, SARS Virus
ttgcactcaaatcattttggttgcc

SEQ ID NO: 105177 - DNA, 25 bp, SARS Virus
tgcactcaaatccttttggttgcca

SEQ ID NO: 105178 - DNA, 25 bp, SARS Virus
gcactcaaatcactttggttgccaa

SEQ ID NO: 105179 - DNA, 25 bp, SARS Virus
cactcaaatcatcttggttgccaaa

SEQ ID NO: 105180 - DNA, 25 bp, SARS Virus
actcaaatcattctggttgccaaat

SEQ ID NO: 105181 - DNA, 25 bp, SARS Virus
ctcaaatcatttcggttgccaaatg

SEQ ID NO: 105182 - DNA, 25 bp, SARS Virus
tcaaatcattttcgttgccaaatgc

SEQ ID NO: 105183 - DNA, 25 bp, SARS Virus
caaatcattttgcttgccaaatgca

SEQ ID NO: 105184 - DNA, 25 bp, SARS Virus
aaatcattttggctgccaaatgcag

SEQ ID NO: 105185 - DNA, 25 bp, SARS Virus
aatcattttggtcgccaaatgcaga

SEQ ID NO: 105186 - DNA, 25 bp, SARS Virus
atcattttggttcccaaatgcagat

SEQ ID NO: 105187 - DNA, 25 bp, SARS Virus
tcattttggttgccaaatgcagatg

SEQ ID NO: 105188 - DNA, 25 bp, SARS Virus
cattttggttgccaaatgcagatga

SEQ ID NO: 105189 - DNA, 25 bp, SARS Virus
attttggttgcccaatgcagatgag

SEQ ID NO: 105190 - DNA, 25 bp, SARS Virus
ttttggttgccacatgcagatgagc

SEQ ID NO: 105191 - DNA, 25 bp, SARS Virus
tttggttgccaactgcagatgagcg

SEQ ID NO: 105192 - DNA, 25 bp, SARS Virus
ttggttgccaaacgcagatgagcgc

SEQ ID NO: 105193 - DNA, 25 bp, SARS Virus
tggttgccaaatccagatgagcgca

SEQ ID NO: 105194 - DNA, 25 bp, SARS Virus
ggttgccaaatgcagatgagcgcac

SEQ ID NO: 105195 - DNA, 25 bp, SARS Virus
gttgccaaatgccgatgagcgcaca

SEQ ID NO: 105196 - DNA, 25 bp, SARS Virus
ttgccaaatgcacatgagcgcacaa

SEQ ID NO: 105197 - DNA, 25 bp, SARS Virus
tgccaaatgcagctgagcgcacaat

SEQ ID NO: 105198 - DNA, 25 bp, SARS Virus
gccaaatgcagacgagcgcacaatt

SEQ ID NO: 105199 - DNA, 25 bp, SARS Virus
ccaaatgcagatcagcgcacaattt

SEQ ID NO: 105200 - DNA, 25 bp, SARS Virus
caaatgcagatgcgcgcacaatttt

SEQ ID NO: 105201 - DNA, 25 bp, SARS Virus
aaatgcagatgaccgcacaattttt

SEQ ID NO: 105202 - DNA, 25 bp, SARS Virus
aatgcagatgagcgcacaattttta

SEQ ID NO: 105203 - DNA, 25 bp, SARS Virus
atgcagatgagcccacaatttttag

SEQ ID NO: 105204 - DNA, 25 bp, SARS Virus
tgcagatgagcgcacaatttttaga

SEQ ID NO: 105205 - DNA, 25 bp, SARS Virus
gcagatgagcgcccaatttttagac

SEQ ID NO: 105206 - DNA, 25 bp, SARS Virus
cagatgagcgcacaatttttagact

SEQ ID NO: 105207 - DNA, 25 bp, SARS Virus
agatgagcgcaccatttttagactt

SEQ ID NO: 105208 - DNA, 25 bp, SARS Virus
gatgagcgcacactttttagacttg

SEQ ID NO: 105209 - DNA, 25 bp, SARS Virus
atgagcgcacaacttttagacttga

SEQ ID NO: 105210 - DNA, 25 bp, SARS Virus
tgagcgcacaatctttagacttgag

SEQ ID NO: 105211 - DNA, 25 bp, SARS Virus
gagcgcacaattcttagacttgaga

SEQ ID NO: 105212 - DNA, 25 bp, SARS Virus
agcgcacaatttctagacttgagaa

SEQ ID NO: 105213 - DNA, 25 bp, SARS Virus
gcgcacaattttcagacttgagaag

SEQ ID NO: 105214 - DNA, 25 bp, SARS Virus
cgcacaatttttcgacttgagaaga

SEQ ID NO: 105215 - DNA, 25 bp, SARS Virus
gcacaatttttacacttgagaagac

SEQ ID NO: 105216 - DNA, 25 bp, SARS Virus
cacaatttttagccttgagaagact

SEQ ID NO: 105217 - DNA, 25 bp, SARS Virus
acaatttttagacttgagaagactt

SEQ ID NO: 105218 - DNA, 25 bp, SARS Virus
caatttttagacctgagaagacttc

SEQ ID NO: 105219 - DNA, 25 bp, SARS Virus
aatttttagactcgagaagacttcc

SEQ ID NO: 105220 - DNA, 25 bp, SARS Virus
atttttagacttcagaagacttcct

SEQ ID NO: 105221 - DNA, 25 bp, SARS Virus
tttttagacttgcgaagacttcctc

SEQ ID NO: 105222 - DNA, 25 bp, SARS Virus
ttttagacttgacaagacttcctca

SEQ ID NO: 105223 - DNA, 25 bp, SARS Virus
tttagacttgagcagacttcctcaa

SEQ ID NO: 105224 - DNA, 25 bp, SARS Virus
ttagacttgagacgacttcctcaag

SEQ ID NO: 105225 - DNA, 25 bp, SARS Virus
tagacttgagaacacttcctcaagg

SEQ ID NO: 105226 - DNA, 25 bp, SARS Virus
agacttgagaagccttcctcaagga

SEQ ID NO: 105227 - DNA, 25 bp, SARS Virus
gacttgagaagacttcctcaaggac

SEQ ID NO: 105228 - DNA, 25 bp, SARS Virus
acttgagaagacctcctcaaggact

SEQ ID NO: 105229 - DNA, 25 bp, SARS Virus
cttgagaagactccctcaaggacta

SEQ ID NO: 105230 - DNA, 25 bp, SARS Virus
ttgagaagacttcctcaaggactag

SEQ ID NO: 105231 - DNA, 25 bp, SARS Virus
tgagaagacttcctcaaggactaga

SEQ ID NO: 105232 - DNA, 25 bp, SARS Virus
gagaagacttccccaaggactagaa

SEQ ID NO: 105233 - DNA, 25 bp, SARS Virus
agaagacttcctcaaggactagaag

SEQ ID NO: 105234 - DNA, 25 bp, SARS Virus
gaagacttcctccaggactagaaga

SEQ ID NO: 105235 - DNA, 25 bp, SARS Virus
aagacttcctcacggactagaagac

SEQ ID NO: 105236 - DNA, 25 bp, SARS Virus
agacttcctcaacgactagaagacc

SEQ ID NO: 105237 - DNA, 25 bp, SARS Virus
gacttcctcaagcactagaagacca

SEQ ID NO: 105238 - DNA, 25 bp, SARS Virus
acttcctcaaggcctagaagaccag

SEQ ID NO: 105239 - DNA, 25 bp, SARS Virus
cttcctcaaggactagaagaccaga

SEQ ID NO: 105240 - DNA, 25 bp, SARS Virus
ttcctcaaggaccagaagaccagat

SEQ ID NO: 105241 - DNA, 25 bp, SARS Virus
tcctcaaggactcgaagaccagatt

SEQ ID NO: 105242 - DNA, 25 bp, SARS Virus
cctcaaggactacaagaccagattt

SEQ ID NO: 105243 - DNA, 25 bp, SARS Virus
ctcaaggactagcagaccagatttg

SEQ ID NO: 105244 - DNA, 25 bp, SARS Virus
tcaaggactagacgaccagatttgc

SEQ ID NO: 105245 - DNA, 25 bp, SARS Virus
caaggactagaacaccagatttgct

SEQ ID NO: 105246 - DNA, 25 bp, SARS Virus
aaggactagaagcccagatttgctt

SEQ ID NO: 105247 - DNA, 25 bp, SARS Virus
aggactagaagaccagatttgcttg

SEQ ID NO: 105248 - DNA, 25 bp, SARS Virus
ggactagaagaccagatttgcttga

SEQ ID NO: 105249 - DNA, 25 bp, SARS Virus
gactagaagacccgatttgcttgat

SEQ ID NO: 105250 - DNA, 25 bp, SARS Virus
actagaagaccacatttgcttgatt

SEQ ID NO: 105251 - DNA, 25 bp, SARS Virus
ctagaagaccagctttgcttgattg

SEQ ID NO: 105252 - DNA, 25 bp, SARS Virus
tagaagaccagacttgcttgattga

SEQ ID NO: 105253 - DNA, 25 bp, SARS Virus
agaagaccagatctgcttgattgat

SEQ ID NO: 105254 - DNA, 25 bp, SARS Virus
gaagaccagattcgcttgattgata

SEQ ID NO: 105255 - DNA, 25 bp, SARS Virus
aagaccagatttccttgattgataa

SEQ ID NO: 105256 - DNA, 25 bp, SARS Virus
agaccagatttgcttgattgataat

SEQ ID NO: 105257 - DNA, 25 bp, SARS Virus
gaccagatttgcctgattgataata

SEQ ID NO: 105258 - DNA, 25 bp, SARS Virus
accagatttgctcgattgataataa

SEQ ID NO: 105259 - DNA, 25 bp, SARS Virus
ccagatttgcttcattgataataat

SEQ ID NO: 105260 - DNA, 25 bp, SARS Virus
cagatttgcttgcttgataataata

SEQ ID NO: 105261 - DNA, 25 bp, SARS Virus
agatttgcttgactgataataataa

SEQ ID NO: 105262 - DNA, 25 bp, SARS Virus
gatttgcttgatcgataataataat

SEQ ID NO: 105263 - DNA, 25 bp, SARS Virus
atttgcttgattcataataataata

SEQ ID NO: 105264 - DNA, 25 bp, SARS Virus
tttgcttgattgctaataataataa

SEQ ID NO: 105265 - DNA, 25 bp, SARS Virus
ttgcttgattgacaataataataag

SEQ ID NO: 105266 - DNA, 25 bp, SARS Virus
tgcttgattgatcataataataaga

SEQ ID NO: 105267 - DNA, 25 bp, SARS Virus
gcttgattgatactaataataagac

SEQ ID NO: 105268 - DNA, 25 bp, SARS Virus
cttgattgataacaataataagaca

SEQ ID NO: 105269 - DNA, 25 bp, SARS Virus
ttgattgataatcataataagacaa

SEQ ID NO: 105270 - DNA, 25 bp, SARS Virus
tgattgataatactaataagacaaa

SEQ ID NO: 105271 - DNA, 25 bp, SARS Virus
gattgataataacaataagacaaac

SEQ ID NO: 105272 - DNA, 25 bp, SARS Virus
attgataataatcataagacaaacc

SEQ ID NO: 105273 - DNA, 25 bp, SARS Virus
ttgataataatactaagacaaacct

SEQ ID NO: 105274 - DNA, 25 bp, SARS Virus
tgataataataacaagacaaacctt

SEQ ID NO: 105275 - DNA, 25 bp, SARS Virus
gataataataatcagacaaaccttg

SEQ ID NO: 105276 - DNA, 25 bp, SARS Virus
ataataataatacgacaaaccttga

SEQ ID NO: 105277 - DNA, 25 bp, SARS Virus
taataataataacacaaaccttgaa

SEQ ID NO: 105278 - DNA, 25 bp, SARS Virus
aataataataagccaaaccttgaaa

SEQ ID NO: 105279 - DNA, 25 bp, SARS Virus
ataataataagacaaaccttgaaat

SEQ ID NO: 105280 - DNA, 25 bp, SARS Virus
taataataagaccaaccttgaaatt

SEQ ID NO: 105281 - DNA, 25 bp, SARS Virus
aataataagacacaccttgaaattg

SEQ ID NO: 105282 - DNA, 25 bp, SARS Virus
ataataagacaacccttgaaattgt

SEQ ID NO: 105283 - DNA, 25 bp, SARS Virus
taataagacaaaccttgaaattgta

SEQ ID NO: 105284 - DNA, 25 bp, SARS Virus
aataagacaaaccttgaaattgtaa

SEQ ID NO: 105285 - DNA, 25 bp, SARS Virus
ataagacaaaccctgaaattgtaac

SEQ ID NO: 105286 - DNA, 25 bp, SARS Virus
taagacaaacctcgaaattgtaacg

SEQ ID NO: 105287 - DNA, 25 bp, SARS Virus
aagacaaaccttcaaattgtaacga

SEQ ID NO: 105288 - DNA, 25 bp, SARS Virus
agacaaaccttgcaattgtaacgaa

SEQ ID NO: 105289 - DNA, 25 bp, SARS Virus
gacaaaccttgacattgtaacgaat

SEQ ID NO: 105290 - DNA, 25 bp, SARS Virus
acaaaccttgaacttgtaacgaata

SEQ ID NO: 105291 - DNA, 25 bp, SARS Virus
caaaccttgaaactgtaacgaatag

SEQ ID NO: 105292 - DNA, 25 bp, SARS Virus
aaaccttgaaatcgtaacgaatagt

SEQ ID NO: 105293 - DNA, 25 bp, SARS Virus
aaccttgaaattctaacgaatagta

SEQ ID NO: 105294 - DNA, 25 bp, SARS Virus
accttgaaattgcaacgaatagtac

SEQ ID NO: 105295 - DNA, 25 bp, SARS Virus
ccttgaaattgtcacgaatagtacc

SEQ ID NO: 105296 - DNA, 25 bp, SARS Virus
cttgaaattgtaccgaatagtaccg

SEQ ID NO: 105297 - DNA, 25 bp, SARS Virus
ttgaaattgtaacgaatagtaccgt

SEQ ID NO: 105298 - DNA, 25 bp, SARS Virus
tgaaattgtaaccaatagtaccgtc

SEQ ID NO: 105299 - DNA, 25 bp, SARS Virus
gaaattgtaacgcatagtaccgtct

SEQ ID NO: 105300 - DNA, 25 bp, SARS Virus
aaattgtaacgactagtaccgtctg

SEQ ID NO: 105301 - DNA, 25 bp, SARS Virus
aattgtaacgaacagtaccgtctgt

SEQ ID NO: 105302 - DNA, 25 bp, SARS Virus
attgtaacgaatcgtaccgtctgtt

SEQ ID NO: 105303 - DNA, 25 bp, SARS Virus
ttgtaacgaatactaccgtctgttg

SEQ ID NO: 105304 - DNA, 25 bp, SARS Virus
tgtaacgaatagcaccgtctgttgc

SEQ ID NO: 105305 - DNA, 25 bp, SARS Virus
gtaacgaatagtcccgtctgttgcc

SEQ ID NO: 105306 - DNA, 25 bp, SARS Virus
taacgaatagtaccgtctgttgcca

SEQ ID NO: 105307 - DNA, 25 bp, SARS Virus
aacgaatagtaccgtctgttgccat

SEQ ID NO: 105308 - DNA, 25 bp, SARS Virus
acgaatagtaccctctgttgccatg

SEQ ID NO: 105309 - DNA, 25 bp, SARS Virus
cgaatagtaccgcctgttgccatga

SEQ ID NO: 105310 - DNA, 25 bp, SARS Virus
gaatagtaccgtctgttgccatgat

SEQ ID NO: 105311 - DNA, 25 bp, SARS Virus
aatagtaccgtccgttgccatgata

SEQ ID NO: 105312 - DNA, 25 bp, SARS Virus
atagtaccgtctcttgccatgataa

SEQ ID NO: 105313 - DNA, 25 bp, SARS Virus
tagtaccgtctgctgccatgataat

SEQ ID NO: 105314 - DNA, 25 bp, SARS Virus
agtaccgtctgtcgccatgataatg

SEQ ID NO: 105315 - DNA, 25 bp, SARS Virus
gtaccgtctgttcccatgataatgg

SEQ ID NO: 105316 - DNA, 25 bp, SARS Virus
taccgtctgttgccatgataatggc

SEQ ID NO: 105317 - DNA, 25 bp, SARS Virus
accgtctgttgccatgataatggca

SEQ ID NO: 105318 - DNA, 25 bp, SARS Virus
ccgtctgttgccctgataatggcaa

SEQ ID NO: 105319 - DNA, 25 bp, SARS Virus
cgtctgttgccacgataatggcaac

SEQ ID NO: 105320 - DNA, 25 bp, SARS Virus
gtctgttgccatcataatggcaact

SEQ ID NO: 105321 - DNA, 25 bp, SARS Virus
tctgttgccatgctaatggcaactc

SEQ ID NO: 105322 - DNA, 25 bp, SARS Virus
ctgttgccatgacaatggcaactcc

SEQ ID NO: 105323 - DNA, 25 bp, SARS Virus
tgttgccatgatcatggcaactcct

SEQ ID NO: 105324 - DNA, 25 bp, SARS Virus
gttgccatgatactggcaactcctc

SEQ ID NO: 105325 - DNA, 25 bp, SARS Virus
ttgccatgataacggcaactcctcg

SEQ ID NO: 105326 - DNA, 25 bp, SARS Virus
tgccatgataatcgcaactcctcga

SEQ ID NO: 105327 - DNA, 25 bp, SARS Virus
gccatgataatgccaactcctcgaa

SEQ ID NO: 105328 - DNA, 25 bp, SARS Virus
ccatgataatggcaactcctcgaat

SEQ ID NO: 105329 - DNA, 25 bp, SARS Virus
catgataatggccactcctcgaatt

SEQ ID NO: 105330 - DNA, 25 bp, SARS Virus
atgataatggcacctcctcgaattt

SEQ ID NO: 105331 - DNA, 25 bp, SARS Virus
tgataatggcaactcctcgaatttg

SEQ ID NO: 105332 - DNA, 25 bp, SARS Virus
gataatggcaacccctcgaatttgt

SEQ ID NO: 105333 - DNA, 25 bp, SARS Virus
ataatggcaactcctcgaatttgtt

SEQ ID NO: 105334 - DNA, 25 bp, SARS Virus
taatggcaactcctcgaatttgttg

SEQ ID NO: 105335 - DNA, 25 bp, SARS Virus
aatggcaactccccgaatttgttga

SEQ ID NO: 105336 - DNA, 25 bp, SARS Virus
atggcaactcctcgaatttgttgag

SEQ ID NO: 105337 - DNA, 25 bp, SARS Virus
tggcaactcctccaatttgttgagg

SEQ ID NO: 105338 - DNA, 25 bp, SARS Virus
ggcaactcctcgcatttgttgagga

SEQ ID NO: 105339 - DNA, 25 bp, SARS Virus
gcaactcctcgactttgttgaggac

SEQ ID NO: 105340 - DNA, 25 bp, SARS Virus
caactcctcgaacttgttgaggacc

SEQ ID NO: 105341 - DNA, 25 bp, SARS Virus
aactcctcgaatctgttgaggacct

SEQ ID NO: 105342 - DNA, 25 bp, SARS Virus
actcctcgaattcgttgaggacctt

SEQ ID NO: 105343 - DNA, 25 bp, SARS Virus
ctcctcgaatttcttgaggaccttg

SEQ ID NO: 105344 - DNA, 25 bp, SARS Virus
tcctcgaatttgctgaggaccttgt

SEQ ID NO: 105345 - DNA, 25 bp, SARS Virus
cctcgaatttgtcgaggaccttgtt

SEQ ID NO: 105346 - DNA, 25 bp, SARS Virus
ctcgaatttgttcaggaccttgtta

SEQ ID NO: 105347 - DNA, 25 bp, SARS Virus
tcgaatttgttgcggaccttgttac

SEQ ID NO: 105348 - DNA, 25 bp, SARS Virus
cgaatttgttgacgaccttgttacc

SEQ ID NO: 105349 - DNA, 25 bp, SARS Virus
gaatttgttgagcaccttgttacct

SEQ ID NO: 105350 - DNA, 25 bp, SARS Virus
aatttgttgaggcccttgttacctt

SEQ ID NO: 105351 - DNA, 25 bp, SARS Virus
atttgttgaggaccttgttaccttg

SEQ ID NO: 105352 - DNA, 25 bp, SARS Virus
tttgttgaggaccttgttaccttgg

SEQ ID NO: 105353 - DNA, 25 bp, SARS Virus
ttgttgaggaccctgttaccttgga

SEQ ID NO: 105354 - DNA, 25 bp, SARS Virus
tgttgaggacctcgttaccttggat

SEQ ID NO: 105355 - DNA, 25 bp, SARS Virus
gttgaggaccttcttaccttggatc

SEQ ID NO: 105356 - DNA, 25 bp, SARS Virus
ttgaggaccttgctaccttggatca

SEQ ID NO: 105357 - DNA, 25 bp, SARS Virus
tgaggaccttgtcaccttggatcat

SEQ ID NO: 105358 - DNA, 25 bp, SARS Virus
gaggaccttgttcccttggatcatt

SEQ ID NO: 105359 - DNA, 25 bp, SARS Virus
aggaccttgttaccttggatcatta

SEQ ID NO: 105360 - DNA, 25 bp, SARS Virus
ggaccttgttaccttggatcattat

SEQ ID NO: 105361 - DNA, 25 bp, SARS Virus
gaccttgttaccctggatcattatc

SEQ ID NO: 105362 - DNA, 25 bp, SARS Virus
accttgttacctcggatcattatcc

SEQ ID NO: 105363 - DNA, 25 bp, SARS Virus
ccttgttaccttcgatcattatcca

SEQ ID NO: 105364 - DNA, 25 bp, SARS Virus
cttgttaccttgcatcattatccaa

SEQ ID NO: 105365 - DNA, 25 bp, SARS Virus
ttgttaccttggctcattatccaaa

SEQ ID NO: 105366 - DNA, 25 bp, SARS Virus
tgttaccttggaccattatccaaag

SEQ ID NO: 105367 - DNA, 25 bp, SARS Virus
gttaccttggatcattatccaaagg

SEQ ID NO: 105368 - DNA, 25 bp, SARS Virus
ttaccttggatccttatccaaagga

SEQ ID NO: 105369 - DNA, 25 bp, SARS Virus
taccttggatcactatccaaaggat

SEQ ID NO: 105370 - DNA, 25 bp, SARS Virus
accttggatcatcatccaaaggata

SEQ ID NO: 105371 - DNA, 25 bp, SARS Virus
ccttggatcattctccaaaggataa

SEQ ID NO: 105372 - DNA, 25 bp, SARS Virus
cttggatcattacccaaaggataag

SEQ ID NO: 105373 - DNA, 25 bp, SARS Virus
ttggatcattatccaaaggataagg

SEQ ID NO: 105374 - DNA, 25 bp, SARS Virus
tggatcattatccaaaggataagga

SEQ ID NO: 105375 - DNA, 25 bp, SARS Virus
ggatcattatcccaaggataaggat

SEQ ID NO: 105376 - DNA, 25 bp, SARS Virus
gatcattatccacaggataaggatc

SEQ ID NO: 105377 - DNA, 25 bp, SARS Virus
atcattatccaacggataaggatcg

SEQ ID NO: 105378 - DNA, 25 bp, SARS Virus
tcattatccaaacgataaggatcgg

SEQ ID NO: 105379 - DNA, 25 bp, SARS Virus
cattatccaaagcataaggatcgga

SEQ ID NO: 105380 - DNA, 25 bp, SARS Virus
attatccaaaggctaaggatcggac

SEQ ID NO: 105381 - DNA, 25 bp, SARS Virus
ttatccaaaggacaaggatcggacc

SEQ ID NO: 105382 - DNA, 25 bp, SARS Virus
tatccaaaggatcaggatcggacct

SEQ ID NO: 105383 - DNA, 25 bp, SARS Virus
atccaaaggatacggatcggaccta

SEQ ID NO: 105384 - DNA, 25 bp, SARS Virus
tccaaaggataacgatcggacctaa

SEQ ID NO: 105385 - DNA, 25 bp, SARS Virus
ccaaaggataagcatcggacctaat

SEQ ID NO: 105386 - DNA, 25 bp, SARS Virus
caaaggataaggctcggacctaata

SEQ ID NO: 105387 - DNA, 25 bp, SARS Virus
aaaggataaggaccggacctaatac

SEQ ID NO: 105388 - DNA, 25 bp, SARS Virus
aaggataaggatcggacctaataca

SEQ ID NO: 105389 - DNA, 25 bp, SARS Virus
aggataaggatccgacctaatacaa

SEQ ID NO: 105390 - DNA, 25 bp, SARS Virus
ggataaggatcgcacctaatacaat

SEQ ID NO: 105391 - DNA, 25 bp, SARS Virus
gataaggatcggccctaatacaatg

SEQ ID NO: 105392 - DNA, 25 bp, SARS Virus
ataaggatcggacctaatacaatga

SEQ ID NO: 105393 - DNA, 25 bp, SARS Virus
taaggatcggacctaatacaatgat

SEQ ID NO: 105394 - DNA, 25 bp, SARS Virus
aaggatcggacccaatacaatgatg

SEQ ID NO: 105395 - DNA, 25 bp, SARS Virus
aggatcggacctcatacaatgatgt

SEQ ID NO: 105396 - DNA, 25 bp, SARS Virus
ggatcggacctactacaatgatgtt

SEQ ID NO: 105397 - DNA, 25 bp, SARS Virus
gatcggacctaacacaatgatgtta

SEQ ID NO: 105398 - DNA, 25 bp, SARS Virus
atcggacctaatccaatgatgttaa

SEQ ID NO: 105399 - DNA, 25 bp, SARS Virus
tcggacctaatacaatgatgttaaa

SEQ ID NO: 105400 - DNA, 25 bp, SARS Virus
cggacctaataccatgatgttaaac

SEQ ID NO: 105401 - DNA, 25 bp, SARS Virus
ggacctaatacactgatgttaaacg

SEQ ID NO: 105402 - DNA, 25 bp, SARS Virus
gacctaatacaacgatgttaaacgg

SEQ ID NO: 105403 - DNA, 25 bp, SARS Virus
acctaatacaatcatgttaaacgga

SEQ ID NO: 105404 - DNA, 25 bp, SARS Virus
cctaatacaatgctgttaaacggat

SEQ ID NO: 105405 - DNA, 25 bp, SARS Virus
ctaatacaatgacgttaaacggata

SEQ ID NO: 105406 - DNA, 25 bp, SARS Virus
taatacaatgatcttaaacggataa

SEQ ID NO: 105407 - DNA, 25 bp, SARS Virus
aatacaatgatgctaaacggataag

SEQ ID NO: 105408 - DNA, 25 bp, SARS Virus
atacaatgatgtcaaacggataaga

SEQ ID NO: 105409 - DNA, 25 bp, SARS Virus
tacaatgatgttcaacggataagat

SEQ ID NO: 105410 - DNA, 25 bp, SARS Virus
acaatgatgttacacggataagatt

SEQ ID NO: 105411 - DNA, 25 bp, SARS Virus
caatgatgttaaccggataagatta

SEQ ID NO: 105412 - DNA, 25 bp, SARS Virus
aatgatgttaaacggataagattag

SEQ ID NO: 105413 - DNA, 25 bp, SARS Virus
atgatgttaaaccgataagattagc

SEQ ID NO: 105414 - DNA, 25 bp, SARS Virus
tgatgttaaacgcataagattagcc

SEQ ID NO: 105415 - DNA, 25 bp, SARS Virus
gatgttaaacggctaagattagcct

SEQ ID NO: 105416 - DNA, 25 bp, SARS Virus
atgttaaacggacaagattagcctt

SEQ ID NO: 105417 - DNA, 25 bp, SARS Virus
tgttaaacggatcagattagccttg

SEQ ID NO: 105418 - DNA, 25 bp, SARS Virus
gttaaacggatacgattagccttgt

SEQ ID NO: 105419 - DNA, 25 bp, SARS Virus
ttaaacggataacattagccttgtc

SEQ ID NO: 105420 - DNA, 25 bp, SARS Virus
taaacggataagcttagccttgtcc

SEQ ID NO: 105421 - DNA, 25 bp, SARS Virus
aaacggataagactagccttgtcca

SEQ ID NO: 105422 - DNA, 25 bp, SARS Virus
aacggataagatcagccttgtccaa

SEQ ID NO: 105423 - DNA, 25 bp, SARS Virus
acggataagattcgccttgtccaaa

SEQ ID NO: 105424 - DNA, 25 bp, SARS Virus
cggataagattacccttgtccaaaa

SEQ ID NO: 105425 - DNA, 25 bp, SARS Virus
ggataagattagccttgtccaaaaa

SEQ ID NO: 105426 - DNA, 25 bp, SARS Virus
gataagattagccttgtccaaaaac

SEQ ID NO: 105427 - DNA, 25 bp, SARS Virus
ataagattagccctgtccaaaaaca

SEQ ID NO: 105428 - DNA, 25 bp, SARS Virus
taagattagcctcgtccaaaaacat

SEQ ID NO: 105429 - DNA, 25 bp, SARS Virus
aagattagccttctccaaaaacatg

SEQ ID NO: 105430 - DNA, 25 bp, SARS Virus
agattagccttgcccaaaaacatgt

SEQ ID NO: 105431 - DNA, 25 bp, SARS Virus
gattagccttgtccaaaaacatgta

SEQ ID NO: 105432 - DNA, 25 bp, SARS Virus
attagccttgtccaaaaacatgtat

SEQ ID NO: 105433 - DNA, 25 bp, SARS Virus
ttagccttgtcccaaaacatgtatt

SEQ ID NO: 105434 - DNA, 25 bp, SARS Virus
tagccttgtccacaaacatgtatta

SEQ ID NO: 105435 - DNA, 25 bp, SARS Virus
agccttgtccaacaacatgtattat

SEQ ID NO: 105436 - DNA, 25 bp, SARS Virus
gccttgtccaaacacatgtattatt

SEQ ID NO: 105437 - DNA, 25 bp, SARS Virus
ccttgtccaaaaccatgtattattt

SEQ ID NO: 105438 - DNA, 25 bp, SARS Virus
cttgtccaaaaacatgtattatttc

SEQ ID NO: 105439 - DNA, 25 bp, SARS Virus
ttgtccaaaaacctgtattatttcg

SEQ ID NO: 105440 - DNA, 25 bp, SARS Virus
tgtccaaaaacacgtattatttcga

SEQ ID NO: 105441 - DNA, 25 bp, SARS Virus
gtccaaaaacatctattatttcgaa

SEQ ID NO: 105442 - DNA, 25 bp, SARS Virus
tccaaaaacatgcattatttcgaac

SEQ ID NO: 105443 - DNA, 25 bp, SARS Virus
ccaaaaacatgtcttatttcgaaca

SEQ ID NO: 105444 - DNA, 25 bp, SARS Virus
caaaaacatgtactatttcgaacaa

SEQ ID NO: 105445 - DNA, 25 bp, SARS Virus
aaaaacatgtatcatttcgaacaaa

SEQ ID NO: 105446 - DNA, 25 bp, SARS Virus
aaaacatgtattctttcgaacaaaa

SEQ ID NO: 105447 - DNA, 25 bp, SARS Virus
aaacatgtattacttcgaacaaaag

SEQ ID NO: 105448 - DNA, 25 bp, SARS Virus
aacatgtattatctcgaacaaaagg

SEQ ID NO: 105449 - DNA, 25 bp, SARS Virus
acatgtattattccgaacaaaagga

SEQ ID NO: 105450 - DNA, 25 bp, SARS Virus
catgtattatttcgaacaaaaggag

SEQ ID NO: 105451 - DNA, 25 bp, SARS Virus
atgtattatttccaacaaaaggaga

SEQ ID NO: 105452 - DNA, 25 bp, SARS Virus
tgtattatttcgcacaaaaggagac

SEQ ID NO: 105453 - DNA, 25 bp, SARS Virus
gtattatttcgaccaaaaggagacc

SEQ ID NO: 105454 - DNA, 25 bp, SARS Virus
tattatttcgaacaaaaggagaccg

SEQ ID NO: 105455 - DNA, 25 bp, SARS Virus
attatttcgaaccaaaggagaccga

SEQ ID NO: 105456 - DNA, 25 bp, SARS Virus
ttatttcgaacacaaggagaccgag

SEQ ID NO: 105457 - DNA, 25 bp, SARS Virus
tatttcgaacaacaggagaccgaga

SEQ ID NO: 105458 - DNA, 25 bp, SARS Virus
atttcgaacaaacggagaccgagaa

SEQ ID NO: 105459 - DNA, 25 bp, SARS Virus
tttcgaacaaaacgagaccgagaac

SEQ ID NO: 105460 - DNA, 25 bp, SARS Virus
ttcgaacaaaagcagaccgagaaca

SEQ ID NO: 105461 - DNA, 25 bp, SARS Virus
tcgaacaaaaggcgaccgagaacac

SEQ ID NO: 105462 - DNA, 25 bp, SARS Virus
cgaacaaaaggacaccgagaacacc

SEQ ID NO: 105463 - DNA, 25 bp, SARS Virus
gaacaaaaggagcccgagaacaccg

SEQ ID NO: 105464 - DNA, 25 bp, SARS Virus
aacaaaaggagaccgagaacaccgg

SEQ ID NO: 105465 - DNA, 25 bp, SARS Virus
acaaaaggagaccgagaacaccggt

SEQ ID NO: 105466 - DNA, 25 bp, SARS Virus
caaaaggagacccagaacaccggtc

SEQ ID NO: 105467 - DNA, 25 bp, SARS Virus
aaaaggagaccgcgaacaccggtca

SEQ ID NO: 105468 - DNA, 25 bp, SARS Virus
aaaggagaccgacaacaccggtcat

SEQ ID NO: 105469 - DNA, 25 bp, SARS Virus
aaggagaccgagcacaccggtcatt

SEQ ID NO: 105470 - DNA, 25 bp, SARS Virus
aggagaccgagaccaccggtcattg

SEQ ID NO: 105471 - DNA, 25 bp, SARS Virus
ggagaccgagaacaccggtcattgt

SEQ ID NO: 105472 - DNA, 25 bp, SARS Virus
gagaccgagaaccccggtcattgtg

SEQ ID NO: 105473 - DNA, 25 bp, SARS Virus
agaccgagaacaccggtcattgtga

SEQ ID NO: 105474 - DNA, 25 bp, SARS Virus
gaccgagaacaccggtcattgtgaa

SEQ ID NO: 105475 - DNA, 25 bp, SARS Virus
accgagaacacccgtcattgtgaac

SEQ ID NO: 105476 - DNA, 25 bp, SARS Virus
ccgagaacaccgctcattgtgaacg

SEQ ID NO: 105477 - DNA, 25 bp, SARS Virus
cgagaacaccggccattgtgaacga

SEQ ID NO: 105478 - DNA, 25 bp, SARS Virus
gagaacaccggtcattgtgaacgaa

SEQ ID NO: 105479 - DNA, 25 bp, SARS Virus
agaacaccggtccttgtgaacgaac

SEQ ID NO: 105480 - DNA, 25 bp, SARS Virus
gaacaccggtcactgtgaacgaaca

SEQ ID NO: 105481 - DNA, 25 bp, SARS Virus
aacaccggtcatcgtgaacgaacaa

SEQ ID NO: 105482 - DNA, 25 bp, SARS Virus
acaccggtcattctgaacgaacaaa

SEQ ID NO: 105483 - DNA, 25 bp, SARS Virus
caccggtcattgcgaacgaacaaaa

SEQ ID NO: 105484 - DNA, 25 bp, SARS Virus
accggtcattgtcaacgaacaaaac

SEQ ID NO: 105485 - DNA, 25 bp, SARS Virus
ccggtcattgtgcacgaacaaaaca

SEQ ID NO: 105486 - DNA, 25 bp, SARS Virus
cggtcattgtgaccgaacaaaacac

SEQ ID NO: 105487 - DNA, 25 bp, SARS Virus
ggtcattgtgaacgaacaaaacacg

SEQ ID NO: 105488 - DNA, 25 bp, SARS Virus
gtcattgtgaaccaacaaaacacga

SEQ ID NO: 105489 - DNA, 25 bp, SARS Virus
tcattgtgaacgcacaaaacacgaa

SEQ ID NO: 105490 - DNA, 25 bp, SARS Virus
cattgtgaacgaccaaaacacgaac

SEQ ID NO: 105491 - DNA, 25 bp, SARS Virus
attgtgaacgaacaaaacacgaacg

SEQ ID NO: 105492 - DNA, 25 bp, SARS Virus
ttgtgaacgaaccaaacacgaacga

SEQ ID NO: 105493 - DNA, 25 bp, SARS Virus
tgtgaacgaacacaacacgaacgac

SEQ ID NO: 105494 - DNA, 25 bp, SARS Virus
gtgaacgaacaacacacgaacgacg

SEQ ID NO: 105495 - DNA, 25 bp, SARS Virus
tgaacgaacaaaccacgaacgacga

SEQ ID NO: 105496 - DNA, 25 bp, SARS Virus
gaacgaacaaaacacgaacgacgac

SEQ ID NO: 105497 - DNA, 25 bp, SARS Virus
aacgaacaaaacccgaacgacgaca

SEQ ID NO: 105498 - DNA, 25 bp, SARS Virus
acgaacaaaacacgaacgacgacag

SEQ ID NO: 105499 - DNA, 25 bp, SARS Virus
cgaacaaaacaccaacgacgacaga

SEQ ID NO: 105500 - DNA, 25 bp, SARS Virus
gaacaaaacacgcacgacgacagat

SEQ ID NO: 105501 - DNA, 25 bp, SARS Virus
aacaaaacacgaccgacgacagatg

SEQ ID NO: 105502 - DNA, 25 bp, SARS Virus
acaaaacacgaacgacgacagatgt

SEQ ID NO: 105503 - DNA, 25 bp, SARS Virus
caaaacacgaaccacgacagatgtc

SEQ ID NO: 105504 - DNA, 25 bp, SARS Virus
aaaacacgaacgccgacagatgtct

SEQ ID NO: 105505 - DNA, 25 bp, SARS Virus
aaacacgaacgacgacagatgtctt

SEQ ID NO: 105506 - DNA, 25 bp, SARS Virus
aacacgaacgaccacagatgtctta

SEQ ID NO: 105507 - DNA, 25 bp, SARS Virus
acacgaacgacgccagatgtcttaa

SEQ ID NO: 105508 - DNA, 25 bp, SARS Virus
cacgaacgacgacagatgtcttaat

SEQ ID NO: 105509 - DNA, 25 bp, SARS Virus
acgaacgacgaccgatgtcttaatt

SEQ ID NO: 105510 - DNA, 25 bp, SARS Virus
cgaacgacgacacatgtcttaatta

SEQ ID NO: 105511 - DNA, 25 bp, SARS Virus
gaacgacgacagctgtcttaattaa

SEQ ID NO: 105512 - DNA, 25 bp, SARS Virus
aacgacgacagacgtcttaattaac

SEQ ID NO: 105513 - DNA, 25 bp, SARS Virus
acgacgacagatctcttaattaacc

SEQ ID NO: 105514 - DNA, 25 bp, SARS Virus
cgacgacagatgccttaattaaccc

SEQ ID NO: 105515 - DNA, 25 bp, SARS Virus
gacgacagatgtcttaattaaccca

SEQ ID NO: 105516 - DNA, 25 bp, SARS Virus
acgacagatgtcctaattaacccac

SEQ ID NO: 105517 - DNA, 25 bp, SARS Virus
cgacagatgtctcaattaacccact

SEQ ID NO: 105518 - DNA, 25 bp, SARS Virus
gacagatgtcttcattaacccactg

SEQ ID NO: 105519 - DNA, 25 bp, SARS Virus
acagatgtcttacttaacccactga

SEQ ID NO: 105520 - DNA, 25 bp, SARS Virus
cagatgtcttaactaacccactgac

SEQ ID NO: 105521 - DNA, 25 bp, SARS Virus
agatgtcttaatcaacccactgacc

SEQ ID NO: 105522 - DNA, 25 bp, SARS Virus
gatgtcttaattcacccactgaccg

SEQ ID NO: 105523 - DNA, 25 bp, SARS Virus
atgtcttaattaccccactgaccgc

SEQ ID NO: 105524 - DNA, 25 bp, SARS Virus
tgtcttaattaacccactgaccgcc

SEQ ID NO: 105525 - DNA, 25 bp, SARS Virus
gtcttaattaacccactgaccgccc

SEQ ID NO: 105526 - DNA, 25 bp, SARS Virus
tcttaattaacccactgaccgccct

SEQ ID NO: 105527 - DNA, 25 bp, SARS Virus
cttaattaaccccctgaccgcccta

SEQ ID NO: 105528 - DNA, 25 bp, SARS Virus
ttaattaacccactgaccgccctaa

SEQ ID NO: 105529 - DNA, 25 bp, SARS Virus
taattaacccaccgaccgccctaac

SEQ ID NO: 105530 - DNA, 25 bp, SARS Virus
aattaacccactcaccgccctaacg

SEQ ID NO: 105531 - DNA, 25 bp, SARS Virus
attaacccactgcccgccctaacgc

SEQ ID NO: 105532 - DNA, 25 bp, SARS Virus
ttaacccactgaccgccctaacgct

SEQ ID NO: 105533 - DNA, 25 bp, SARS Virus
taacccactgaccgccctaacgcta

SEQ ID NO: 105534 - DNA, 25 bp, SARS Virus
aacccactgacccccctaacgctaa

SEQ ID NO: 105535 - DNA, 25 bp, SARS Virus
acccactgaccgccctaacgctaac

SEQ ID NO: 105536 - DNA, 25 bp, SARS Virus
cccactgaccgccctaacgctaacg

SEQ ID NO: 105537 - DNA, 25 bp, SARS Virus
aagccttctttggccatgcaattat

SEQ ID NO: 105538 - DNA, 25 bp, SARS Virus
agccttctttgtgcatgcaattatc

SEQ ID NO: 105539 - DNA, 25 bp, SARS Virus
gccttctttgtcgatgcaattatca

SEQ ID NO: 105540 - DNA, 25 bp, SARS Virus
ccttctttgtccgtgcaattatcaa

SEQ ID NO: 105541 - DNA, 25 bp, SARS Virus
cttctttgtccaggcaattatcaat

SEQ ID NO: 105542 - DNA, 25 bp, SARS Virus
ttctttgtccatgcaattatcaatt

SEQ ID NO: 105543 - DNA, 25 bp, SARS Virus
tctttgtccatggaattatcaatta

SEQ ID NO: 105544 - DNA, 25 bp, SARS Virus
ctttgtccatgcgattatcaattat

SEQ ID NO: 105545 - DNA, 25 bp, SARS Virus
tttgtccatgcagttatcaattatc

SEQ ID NO: 105546 - DNA, 25 bp, SARS Virus
ttgtccatgcaagtatcaattatcg

SEQ ID NO: 105547 - DNA, 25 bp, SARS Virus
tgtccatgcaatgatcaattatcgc

SEQ ID NO: 105548 - DNA, 25 bp, SARS Virus
gtccatgcaattgtcaattatcgca

SEQ ID NO: 105549 - DNA, 25 bp, SARS Virus
tccatgcaattagcaattatcgcat

SEQ ID NO: 105550 - DNA, 25 bp, SARS Virus
ccatgcaattatgaattatcgcatg

SEQ ID NO: 105551 - DNA, 25 bp, SARS Virus
catgcaattatcgattatcgcatga

SEQ ID NO: 105552 - DNA, 25 bp, SARS Virus
atgcaattatcagttatcgcatgaa

SEQ ID NO: 105553 - DNA, 25 bp, SARS Virus
tgcaattatcaagtatcgcatgaag

SEQ ID NO: 105554 - DNA, 25 bp, SARS Virus
gcaattatcaatgatcgcatgaaga

SEQ ID NO: 105555 - DNA, 25 bp, SARS Virus
caattatcaattgtcgcatgaagaa

SEQ ID NO: 105556 - DNA, 25 bp, SARS Virus
aattatcaattagcgcatgaagaaa

SEQ ID NO: 105557 - DNA, 25 bp, SARS Virus
attatcaattatggcatgaagaaaa

SEQ ID NO: 105558 - DNA, 25 bp, SARS Virus
ttatcaattatcgcatgaagaaaaa

SEQ ID NO: 105559 - DNA, 25 bp, SARS Virus
tatcaattatcggatgaagaaaaag

SEQ ID NO: 105560 - DNA, 25 bp, SARS Virus
atcaattatcgcgtgaagaaaaaga

SEQ ID NO: 105561 - DNA, 25 bp, SARS Virus
tcaattatcgcaggaagaaaaagaa

SEQ ID NO: 105562 - DNA, 25 bp, SARS Virus
caattatcgcatgaagaaaaagaac

SEQ ID NO: 105563 - DNA, 25 bp, SARS Virus
aattatcgcatggagaaaaagaacg

SEQ ID NO: 105564 - DNA, 25 bp, SARS Virus
attatcgcatgaggaaaaagaacga

SEQ ID NO: 105565 - DNA, 25 bp, SARS Virus
ttatcgcatgaagaaaaagaacgaa

SEQ ID NO: 105566 - DNA, 25 bp, SARS Virus
tatcgcatgaaggaaaagaacgaaa

SEQ ID NO: 105567 - DNA, 25 bp, SARS Virus
atcgcatgaagagaaagaacgaaag

SEQ ID NO: 105568 - DNA, 25 bp, SARS Virus
tcgcatgaagaagaagaacgaaagc

SEQ ID NO: 105569 - DNA, 25 bp, SARS Virus
cgcatgaagaaagagaacgaaagca

SEQ ID NO: 105570 - DNA, 25 bp, SARS Virus
gcatgaagaaaaggaacgaaagcac

SEQ ID NO: 105571 - DNA, 25 bp, SARS Virus
catgaagaaaaagaacgaaagcacc

SEQ ID NO: 105572 - DNA, 25 bp, SARS Virus
atgaagaaaaaggacgaaagcacca

SEQ ID NO: 105573 - DNA, 25 bp, SARS Virus
tgaagaaaaagagcgaaagcaccat

SEQ ID NO: 105574 - DNA, 25 bp, SARS Virus
gaagaaaaagaaggaaagcaccata

SEQ ID NO: 105575 - DNA, 25 bp, SARS Virus
aagaaaaagaacgaaagcaccataa

SEQ ID NO: 105576 - DNA, 25 bp, SARS Virus
agaaaaagaacggaagcaccataag

SEQ ID NO: 105577 - DNA, 25 bp, SARS Virus
gaaaaagaacgagagcaccataaga

SEQ ID NO: 105578 - DNA, 25 bp, SARS Virus
aaaaagaacgaaggcaccataagaa

SEQ ID NO: 105579 - DNA, 25 bp, SARS Virus
aaaagaacgaaagcaccataagaac

SEQ ID NO: 105580 - DNA, 25 bp, SARS Virus
aaagaacgaaaggaccataagaacg

SEQ ID NO: 105581 - DNA, 25 bp, SARS Virus
aagaacgaaagcgccataagaacga

SEQ ID NO: 105582 - DNA, 25 bp, SARS Virus
agaacgaaagcagcataagaacgat

SEQ ID NO: 105583 - DNA, 25 bp, SARS Virus
gaacgaaagcacgataagaacgatc

SEQ ID NO: 105584 - DNA, 25 bp, SARS Virus
aacgaaagcaccgtaagaacgatca

SEQ ID NO: 105585 - DNA, 25 bp, SARS Virus
acgaaagcaccagaagaacgatcag

SEQ ID NO: 105586 - DNA, 25 bp, SARS Virus
cgaaagcaccatgagaacgatcagt

SEQ ID NO: 105587 - DNA, 25 bp, SARS Virus
gaaagcaccataggaacgatcagtg

SEQ ID NO: 105588 - DNA, 25 bp, SARS Virus
aaagcaccataagaacgatcagtgt

SEQ ID NO: 105589 - DNA, 25 bp, SARS Virus
aagcaccataaggacgatcagtgtg

SEQ ID NO: 105590 - DNA, 25 bp, SARS Virus
agcaccataagagcgatcagtgtga

SEQ ID NO: 105591 - DNA, 25 bp, SARS Virus
gcaccataagaaggatcagtgtgat

SEQ ID NO: 105592 - DNA, 25 bp, SARS Virus
caccataagaacgatcagtgtgatc

SEQ ID NO: 105593 - DNA, 25 bp, SARS Virus
accataagaacggtcagtgtgatcg

SEQ ID NO: 105594 - DNA, 25 bp, SARS Virus
ccataagaacgagcagtgtgatcgg

SEQ ID NO: 105595 - DNA, 25 bp, SARS Virus
cataagaacgatgagtgtgatcggt

SEQ ID NO: 105596 - DNA, 25 bp, SARS Virus
ataagaacgatcggtgtgatcggta

SEQ ID NO: 105597 - DNA, 25 bp, SARS Virus
taagaacgatcagtgtgatcggtag

SEQ ID NO: 105598 - DNA, 25 bp, SARS Virus
aagaacgatcagggtgatcggtagg

SEQ ID NO: 105599 - DNA, 25 bp, SARS Virus
agaacgatcagtgtgatcggtagga

SEQ ID NO: 105600 - DNA, 25 bp, SARS Virus
gaacgatcagtgggatcggtaggaa

SEQ ID NO: 105601 - DNA, 25 bp, SARS Virus
aacgatcagtgtgatcggtaggaat

SEQ ID NO: 105602 - DNA, 25 bp, SARS Virus
acgatcagtgtggtcggtaggaatg

SEQ ID NO: 105603 - DNA, 25 bp, SARS Virus
cgatcagtgtgagcggtaggaatga

SEQ ID NO: 105604 - DNA, 25 bp, SARS Virus
gatcagtgtgatgggtaggaatgac

SEQ ID NO: 105605 - DNA, 25 bp, SARS Virus
atcagtgtgatcggtaggaatgacg

SEQ ID NO: 105606 - DNA, 25 bp, SARS Virus
tcagtgtgatcggtaggaatgacgc

SEQ ID NO: 105607 - DNA, 25 bp, SARS Virus
cagtgtgatcgggaggaatgacgcg

SEQ ID NO: 105608 - DNA, 25 bp, SARS Virus
agtgtgatcggtgggaatgacgcga

SEQ ID NO: 105609 - DNA, 25 bp, SARS Virus
gtgtgatcggtaggaatgacgcgaa

SEQ ID NO: 105610 - DNA, 25 bp, SARS Virus
tgtgatcggtaggaatgacgcgaag

SEQ ID NO: 105611 - DNA, 25 bp, SARS Virus
gtgatcggtagggatgacgcgaagc

SEQ ID NO: 105612 - DNA, 25 bp, SARS Virus
tgatcggtaggagtgacgcgaagct

SEQ ID NO: 105613 - DNA, 25 bp, SARS Virus
gatcggtaggaaggacgcgaagcta

SEQ ID NO: 105614 - DNA, 25 bp, SARS Virus
atcggtaggaatgacgcgaagctaa

SEQ ID NO: 105615 - DNA, 25 bp, SARS Virus
tcggtaggaatggcgcgaagctaac

SEQ ID NO: 105616 - DNA, 25 bp, SARS Virus
cggtaggaatgaggcgaagctaaca

SEQ ID NO: 105617 - DNA, 25 bp, SARS Virus
ggtaggaatgacgcgaagctaacac

SEQ ID NO: 105618 - DNA, 25 bp, SARS Virus
gtaggaatgacgggaagctaacaca

SEQ ID NO: 105619 - DNA, 25 bp, SARS Virus
taggaatgacgcgaagctaacacac

SEQ ID NO: 105620 - DNA, 25 bp, SARS Virus
aggaatgacgcggagctaacacacg

SEQ ID NO: 105621 - DNA, 25 bp, SARS Virus
ggaatgacgcgaggctaacacacgc

SEQ ID NO: 105622 - DNA, 25 bp, SARS Virus
gaatgacgcgaagctaacacacgca

SEQ ID NO: 105623 - DNA, 25 bp, SARS Virus
aatgacgcgaaggtaacacacgcat

SEQ ID NO: 105624 - DNA, 25 bp, SARS Virus
atgacgcgaagcgaacacacgcatg

SEQ ID NO: 105625 - DNA, 25 bp, SARS Virus
tgacgcgaagctgacacacgcatga

SEQ ID NO: 105626 - DNA, 25 bp, SARS Virus
gacgcgaagctagcacacgcatgac

SEQ ID NO: 105627 - DNA, 25 bp, SARS Virus
acgcgaagctaagacacgcatgacg

SEQ ID NO: 105628 - DNA, 25 bp, SARS Virus
cgcgaagctaacgcacgcatgacga

SEQ ID NO: 105629 - DNA, 25 bp, SARS Virus
gcgaagctaacagacgcatgacgac

SEQ ID NO: 105630 - DNA, 25 bp, SARS Virus
cgaagctaacacgcgcatgacgacg

SEQ ID NO: 105631 - DNA, 25 bp, SARS Virus
gaagctaacacaggcatgacgacgt

SEQ ID NO: 105632 - DNA, 25 bp, SARS Virus
aagctaacacacgcatgacgacgtt

SEQ ID NO: 105633 - DNA, 25 bp, SARS Virus
agctaacacacggatgacgacgtta

SEQ ID NO: 105634 - DNA, 25 bp, SARS Virus
gctaacacacgcgtgacgacgttat

SEQ ID NO: 105635 - DNA, 25 bp, SARS Virus
ctaacacacgcaggacgacgttata

SEQ ID NO: 105636 - DNA, 25 bp, SARS Virus
taacacacgcatgacgacgttataa

SEQ ID NO: 105637 - DNA, 25 bp, SARS Virus
aacacacgcatggcgacgttataac

SEQ ID NO: 105638 - DNA, 25 bp, SARS Virus
acacacgcatgaggacgttataaca

SEQ ID NO: 105639 - DNA, 25 bp, SARS Virus
cacacgcatgacgacgttataacaa

SEQ ID NO: 105640 - DNA, 25 bp, SARS Virus
acacgcatgacggcgttataacaat

SEQ ID NO: 105641 - DNA, 25 bp, SARS Virus
cacgcatgacgaggttataacaatt

SEQ ID NO: 105642 - DNA, 25 bp, SARS Virus
acgcatgacgacgttataacaattg

SEQ ID NO: 105643 - DNA, 25 bp, SARS Virus
cgcatgacgacggtataacaattgc

SEQ ID NO: 105644 - DNA, 25 bp, SARS Virus
gcatgacgacgtgataacaattgca

SEQ ID NO: 105645 - DNA, 25 bp, SARS Virus
catgacgacgttgtaacaattgcac

SEQ ID NO: 105646 - DNA, 25 bp, SARS Virus
atgacgacgttagaacaattgcact

SEQ ID NO: 105647 - DNA, 25 bp, SARS Virus
tgacgacgttatgacaattgcactc

SEQ ID NO: 105648 - DNA, 25 bp, SARS Virus
gacgacgttatagcaattgcactca

SEQ ID NO: 105649 - DNA, 25 bp, SARS Virus
acgacgttataagaattgcactcaa

SEQ ID NO: 105650 - DNA, 25 bp, SARS Virus
cgacgttataacgattgcactcaaa

SEQ ID NO: 105651 - DNA, 25 bp, SARS Virus
gacgttataacagttgcactcaaat

SEQ ID NO: 105652 - DNA, 25 bp, SARS Virus
acgttataacaagtgcactcaaatc

SEQ ID NO: 105653 - DNA, 25 bp, SARS Virus
cgttataacaatggcactcaaatca

SEQ ID NO: 105654 - DNA, 25 bp, SARS Virus
gttataacaattgcactcaaatcat

SEQ ID NO: 105655 - DNA, 25 bp, SARS Virus
ttataacaattggactcaaatcatt

SEQ ID NO: 105656 - DNA, 25 bp, SARS Virus
tataacaattgcgctcaaatcattt

SEQ ID NO: 105657 - DNA, 25 bp, SARS Virus
ataacaattgcagtcaaatcatttt

SEQ ID NO: 105658 - DNA, 25 bp, SARS Virus
taacaattgcacgcaaatcattttg

SEQ ID NO: 105659 - DNA, 25 bp, SARS Virus
aacaattgcactgaaatcattttgg

SEQ ID NO: 105660 - DNA, 25 bp, SARS Virus
acaattgcactcgaatcattttggt

SEQ ID NO: 105661 - DNA, 25 bp, SARS Virus
caattgcactcagatcattttggtt

SEQ ID NO: 105662 - DNA, 25 bp, SARS Virus
aattgcactcaagtcattttggttg

SEQ ID NO: 105663 - DNA, 25 bp, SARS Virus
attgcactcaaagcattttggttgc

SEQ ID NO: 105664 - DNA, 25 bp, SARS Virus
ttgcactcaaatgattttggttgcc

SEQ ID NO: 105665 - DNA, 25 bp, SARS Virus
tgcactcaaatcgttttggttgcca

SEQ ID NO: 105666 - DNA, 25 bp, SARS Virus
gcactcaaatcagtttggttgccaa

SEQ ID NO: 105667 - DNA, 25 bp, SARS Virus
cactcaaatcatgttggttgccaaa

SEQ ID NO: 105668 - DNA, 25 bp, SARS Virus
actcaaatcattgtggttgccaaat

SEQ ID NO: 105669 - DNA, 25 bp, SARS Virus
ctcaaatcatttgggttgccaaatg

SEQ ID NO: 105670 - DNA, 25 bp, SARS Virus
tcaaatcattttggttgccaaatgc

SEQ ID NO: 105671 - DNA, 25 bp, SARS Virus
caaatcattttggttgccaaatgca

SEQ ID NO: 105672 - DNA, 25 bp, SARS Virus
aaatcattttgggtgccaaatgcag

SEQ ID NO: 105673 - DNA, 25 bp, SARS Virus
aatcattttggtggccaaatgcaga

SEQ ID NO: 105674 - DNA, 25 bp, SARS Virus
atcattttggttgccaaatgcagat

SEQ ID NO: 105675 - DNA, 25 bp, SARS Virus
tcattttggttggcaaatgcagatg

SEQ ID NO: 105676 - DNA, 25 bp, SARS Virus
cattttggttgcgaaatgcagatga

SEQ ID NO: 105677 - DNA, 25 bp, SARS Virus
attttggttgccgaatgcagatgag

SEQ ID NO: 105678 - DNA, 25 bp, SARS Virus
ttttggttgccagatgcagatgagc

SEQ ID NO: 105679 - DNA, 25 bp, SARS Virus
tttggttgccaagtgcagatgagcg

SEQ ID NO: 105680 - DNA, 25 bp, SARS Virus
ttggttgccaaaggcagatgagcgc

SEQ ID NO: 105681 - DNA, 25 bp, SARS Virus
tggttgccaaatgcagatgagcgca

SEQ ID NO: 105682 - DNA, 25 bp, SARS Virus
ggttgccaaatggagatgagcgcac

SEQ ID NO: 105683 - DNA, 25 bp, SARS Virus
gttgccaaatgcggatgagcgcaca

SEQ ID NO: 105684 - DNA, 25 bp, SARS Virus
ttgccaaatgcagatgagcgcacaa

SEQ ID NO: 105685 - DNA, 25 bp, SARS Virus
tgccaaatgcaggtgagcgcacaat

SEQ ID NO: 105686 - DNA, 25 bp, SARS Virus
gccaaatgcagaggagcgcacaatt

SEQ ID NO: 105687 - DNA, 25 bp, SARS Virus
ccaaatgcagatgagcgcacaattt

SEQ ID NO: 105688 - DNA, 25 bp, SARS Virus
caaatgcagatgggcgcacaatttt

SEQ ID NO: 105689 - DNA, 25 bp, SARS Virus
aaatgcagatgagcgcacaattttt

SEQ ID NO: 105690 - DNA, 25 bp, SARS Virus
aatgcagatgagggcacaattttta

SEQ ID NO: 105691 - DNA, 25 bp, SARS Virus
atgcagatgagcgcacaatttttag

SEQ ID NO: 105692 - DNA, 25 bp, SARS Virus
tgcagatgagcggacaatttttaga

SEQ ID NO: 105693 - DNA, 25 bp, SARS Virus
gcagatgagcgcgcaatttttagac

SEQ ID NO: 105694 - DNA, 25 bp, SARS Virus
cagatgagcgcagaatttttagact

SEQ ID NO: 105695 - DNA, 25 bp, SARS Virus
agatgagcgcacgatttttagactt

SEQ ID NO: 105696 - DNA, 25 bp, SARS Virus
gatgagcgcacagtttttagacttg

SEQ ID NO: 105697 - DNA, 25 bp, SARS Virus
atgagcgcacaagttttagacttga

SEQ ID NO: 105698 - DNA, 25 bp, SARS Virus
tgagcgcacaatgtttagacttgag

SEQ ID NO: 105699 - DNA, 25 bp, SARS Virus
gagcgcacaattgttagacttgaga

SEQ ID NO: 105700 - DNA, 25 bp, SARS Virus
agcgcacaatttgtagacttgagaa

SEQ ID NO: 105701 - DNA, 25 bp, SARS Virus
gcgcacaattttgagacttgagaag

SEQ ID NO: 105702 - DNA, 25 bp, SARS Virus
cgcacaatttttggacttgagaaga

SEQ ID NO: 105703 - DNA, 25 bp, SARS Virus
gcacaatttttagacttgagaagac

SEQ ID NO: 105704 - DNA, 25 bp, SARS Virus
cacaatttttaggcttgagaagact

SEQ ID NO: 105705 - DNA, 25 bp, SARS Virus
acaatttttagagttgagaagactt

SEQ ID NO: 105706 - DNA, 25 bp, SARS Virus
caatttttagacgtgagaagacttc

SEQ ID NO: 105707 - DNA, 25 bp, SARS Virus
aatttttagactggagaagacttcc

SEQ ID NO: 105708 - DNA, 25 bp, SARS Virus
atttttagacttgagaagacttcct

SEQ ID NO: 105709 - DNA, 25 bp, SARS Virus
tttttagacttgggaagacttcctc

SEQ ID NO: 105710 - DNA, 25 bp, SARS Virus
ttttagacttgagaagacttcctca

SEQ ID NO: 105711 - DNA, 25 bp, SARS Virus
tttagacttgaggagacttcctcaa

SEQ ID NO: 105712 - DNA, 25 bp, SARS Virus
ttagacttgagaggacttcctcaag

SEQ ID NO: 105713 - DNA, 25 bp, SARS Virus
tagacttgagaagacttcctcaagg

SEQ ID NO: 105714 - DNA, 25 bp, SARS Virus
agacttgagaaggcttcctcaagga

SEQ ID NO: 105715 - DNA, 25 bp, SARS Virus
gacttgagaagagttcctcaaggac

SEQ ID NO: 105716 - DNA, 25 bp, SARS Virus
acttgagaagacgtcctcaaggact

SEQ ID NO: 105717 - DNA, 25 bp, SARS Virus
cttgagaagactgcctcaaggacta

SEQ ID NO: 105718 - DNA, 25 bp, SARS Virus
ttgagaagacttgctcaaggactag

SEQ ID NO: 105719 - DNA, 25 bp, SARS Virus
tgagaagacttcgtcaaggactaga

SEQ ID NO: 105720 - DNA, 25 bp, SARS Virus
gagaagacttccgcaaggactagaa

SEQ ID NO: 105721 - DNA, 25 bp, SARS Virus
agaagacttcctgaaggactagaag

SEQ ID NO: 105722 - DNA, 25 bp, SARS Virus
gaagacttcctcgaggactagaaga

SEQ ID NO: 105723 - DNA, 25 bp, SARS Virus
aagacttcctcagggactagaagac

SEQ ID NO: 105724 - DNA, 25 bp, SARS Virus
agacttcctcaaggactagaagacc

SEQ ID NO: 105725 - DNA, 25 bp, SARS Virus
gacttcctcaaggactagaagacca

SEQ ID NO: 105726 - DNA, 25 bp, SARS Virus
acttcctcaagggctagaagaccag

SEQ ID NO: 105727 - DNA, 25 bp, SARS Virus
cttcctcaaggagtagaagaccaga

SEQ ID NO: 105728 - DNA, 25 bp, SARS Virus
ttcctcaaggacgagaagaccagat

SEQ ID NO: 105729 - DNA, 25 bp, SARS Virus
tcctcaaggactggaagaccagatt

SEQ ID NO: 105730 - DNA, 25 bp, SARS Virus
cctcaaggactagaagaccagattt

SEQ ID NO: 105731 - DNA, 25 bp, SARS Virus
ctcaaggactaggagaccagatttg

SEQ ID NO: 105732 - DNA, 25 bp, SARS Virus
tcaaggactagaggaccagatttgc

SEQ ID NO: 105733 - DNA, 25 bp, SARS Virus
caaggactagaagaccagatttgct

SEQ ID NO: 105734 - DNA, 25 bp, SARS Virus
aaggactagaaggccagatttgctt

SEQ ID NO: 105735 - DNA, 25 bp, SARS Virus
aggactagaagagcagatttgcttg

SEQ ID NO: 105736 - DNA, 25 bp, SARS Virus
ggactagaagacgagatttgcttga

SEQ ID NO: 105737 - DNA, 25 bp, SARS Virus
gactagaagaccggatttgcttgat

SEQ ID NO: 105738 - DNA, 25 bp, SARS Virus
actagaagaccagatttgcttgatt

SEQ ID NO: 105739 - DNA, 25 bp, SARS Virus
ctagaagaccaggtttgcttgattg

SEQ ID NO: 105740 - DNA, 25 bp, SARS Virus
tagaagaccagagttgcttgattga

SEQ ID NO: 105741 - DNA, 25 bp, SARS Virus
agaagaccagatgtgcttgattgat

SEQ ID NO: 105742 - DNA, 25 bp, SARS Virus
gaagaccagattggcttgattgata

SEQ ID NO: 105743 - DNA, 25 bp, SARS Virus
aagaccagatttgcttgattgataa

SEQ ID NO: 105744 - DNA, 25 bp, SARS Virus
agaccagatttggttgattgataat

SEQ ID NO: 105745 - DNA, 25 bp, SARS Virus
gaccagatttgcgtgattgataata

SEQ ID NO: 105746 - DNA, 25 bp, SARS Virus
accagatttgctggattgataataa

SEQ ID NO: 105747 - DNA, 25 bp, SARS Virus
ccagatttgcttgattgataataat

SEQ ID NO: 105748 - DNA, 25 bp, SARS Virus
cagatttgcttggttgataataata

SEQ ID NO: 105749 - DNA, 25 bp, SARS Virus
agatttgcttgagtgataataataa

SEQ ID NO: 105750 - DNA, 25 bp, SARS Virus
gatttgcttgatggataataataat

SEQ ID NO: 105751 - DNA, 25 bp, SARS Virus
atttgcttgattgataataataata

SEQ ID NO: 105752 - DNA, 25 bp, SARS Virus
tttgcttgattggtaataataataa

SEQ ID NO: 105753 - DNA, 25 bp, SARS Virus
ttgcttgattgagaataataataag

SEQ ID NO: 105754 - DNA, 25 bp, SARS Virus
tgcttgattgatgataataataaga

SEQ ID NO: 105755 - DNA, 25 bp, SARS Virus
gcttgattgatagtaataataagac

SEQ ID NO: 105756 - DNA, 25 bp, SARS Virus
cttgattgataagaataataagaca

SEQ ID NO: 105757 - DNA, 25 bp, SARS Virus
ttgattgataatgataataagacaa

SEQ ID NO: 105758 - DNA, 25 bp, SARS Virus
tgattgataatagtaataagacaaa

SEQ ID NO: 105759 - DNA, 25 bp, SARS Virus
gattgataataagaataagacaaac

SEQ ID NO: 105760 - DNA, 25 bp, SARS Virus
attgataataatgataagacaaacc

SEQ ID NO: 105761 - DNA, 25 bp, SARS Virus
ttgataataatagtaagacaaacct

SEQ ID NO: 105762 - DNA, 25 bp, SARS Virus
tgataataataagaagacaaacctt

SEQ ID NO: 105763 - DNA, 25 bp, SARS Virus
gataataataatgagacaaaccttg

SEQ ID NO: 105764 - DNA, 25 bp, SARS Virus
ataataataataggacaaaccttga

SEQ ID NO: 105765 - DNA, 25 bp, SARS Virus
taataataataagacaaaccttgaa

SEQ ID NO: 105766 - DNA, 25 bp, SARS Virus
aataataataaggcaaaccttgaaa

SEQ ID NO: 105767 - DNA, 25 bp, SARS Virus
ataataataagagaaaccttgaaat

SEQ ID NO: 105768 - DNA, 25 bp, SARS Virus
taataataagacgaaccttgaaatt

SEQ ID NO: 105769 - DNA, 25 bp, SARS Virus
aataataagacagaccttgaaattg

SEQ ID NO: 105770 - DNA, 25 bp, SARS Virus
ataataagacaagccttgaaattgt

SEQ ID NO: 105771 - DNA, 25 bp, SARS Virus
taataagacaaagcttgaaattgta

SEQ ID NO: 105772 - DNA, 25 bp, SARS Virus
aataagacaaacgttgaaattgtaa

SEQ ID NO: 105773 - DNA, 25 bp, SARS Virus
ataagacaaaccgtgaaattgtaac

SEQ ID NO: 105774 - DNA, 25 bp, SARS Virus
taagacaaacctggaaattgtaacg

SEQ ID NO: 105775 - DNA, 25 bp, SARS Virus
aagacaaaccttgaaattgtaacga

SEQ ID NO: 105776 - DNA, 25 bp, SARS Virus
agacaaaccttggaattgtaacgaa

SEQ ID NO: 105777 - DNA, 25 bp, SARS Virus
gacaaaccttgagattgtaacgaat

SEQ ID NO: 105778 - DNA, 25 bp, SARS Virus
acaaaccttgaagttgtaacgaata

SEQ ID NO: 105779 - DNA, 25 bp, SARS Virus
caaaccttgaaagtgtaacgaatag

SEQ ID NO: 105780 - DNA, 25 bp, SARS Virus
aaaccttgaaatggtaacgaatagt

SEQ ID NO: 105781 - DNA, 25 bp, SARS Virus
aaccttgaaattgtaacgaatagta

SEQ ID NO: 105782 - DNA, 25 bp, SARS Virus
accttgaaattggaacgaatagtac

SEQ ID NO: 105783 - DNA, 25 bp, SARS Virus
ccttgaaattgtgacgaatagtacc

SEQ ID NO: 105784 - DNA, 25 bp, SARS Virus
cttgaaattgtagcgaatagtaccg

SEQ ID NO: 105785 - DNA, 25 bp, SARS Virus
ttgaaattgtaaggaatagtaccgt

SEQ ID NO: 105786 - DNA, 25 bp, SARS Virus
tgaaattgtaacgaatagtaccgtc

SEQ ID NO: 105787 - DNA, 25 bp, SARS Virus
gaaattgtaacggatagtaccgtct

SEQ ID NO: 105788 - DNA, 25 bp, SARS Virus
aaattgtaacgagtagtaccgtctg

SEQ ID NO: 105789 - DNA, 25 bp, SARS Virus
aattgtaacgaagagtaccgtctgt

SEQ ID NO: 105790 - DNA, 25 bp, SARS Virus
attgtaacgaatggtaccgtctgtt

SEQ ID NO: 105791 - DNA, 25 bp, SARS Virus
ttgtaacgaatagtaccgtctgttg

SEQ ID NO: 105792 - DNA, 25 bp, SARS Virus
tgtaacgaataggaccgtctgttgc

SEQ ID NO: 105793 - DNA, 25 bp, SARS Virus
gtaacgaatagtgccgtctgttgcc

SEQ ID NO: 105794 - DNA, 25 bp, SARS Virus
taacgaatagtagcgtctgttgcca

SEQ ID NO: 105795 - DNA, 25 bp, SARS Virus
aacgaatagtacggtctgttgccat

SEQ ID NO: 105796 - DNA, 25 bp, SARS Virus
acgaatagtaccgtctgttgccatg

SEQ ID NO: 105797 - DNA, 25 bp, SARS Virus
cgaatagtaccggctgttgccatga

SEQ ID NO: 105798 - DNA, 25 bp, SARS Virus
gaatagtaccgtgtgttgccatgat

SEQ ID NO: 105799 - DNA, 25 bp, SARS Virus
aatagtaccgtcggttgccatgata

SEQ ID NO: 105800 - DNA, 25 bp, SARS Virus
atagtaccgtctgttgccatgataa

SEQ ID NO: 105801 - DNA, 25 bp, SARS Virus
tagtaccgtctggtgccatgataat

SEQ ID NO: 105802 - DNA, 25 bp, SARS Virus
agtaccgtctgtggccatgataatg

SEQ ID NO: 105803 - DNA, 25 bp, SARS Virus
gtaccgtctgttgccatgataatgg

SEQ ID NO: 105804 - DNA, 25 bp, SARS Virus
taccgtctgttggcatgataatggc

SEQ ID NO: 105805 - DNA, 25 bp, SARS Virus
accgtctgttgcgatgataatggca

SEQ ID NO: 105806 - DNA, 25 bp, SARS Virus
ccgtctgttgccgtgataatggcaa

SEQ ID NO: 105807 - DNA, 25 bp, SARS Virus
cgtctgttgccaggataatggcaac

SEQ ID NO: 105808 - DNA, 25 bp, SARS Virus
gtctgttgccatgataatggcaact

SEQ ID NO: 105809 - DNA, 25 bp, SARS Virus
tctgttgccatggtaatggcaactc

SEQ ID NO: 105810 - DNA, 25 bp, SARS Virus
ctgttgccatgagaatggcaactcc

SEQ ID NO: 105811 - DNA, 25 bp, SARS Virus
tgttgccatgatgatggcaactcct

SEQ ID NO: 105812 - DNA, 25 bp, SARS Virus
gttgccatgatagtggcaactcctc

SEQ ID NO: 105813 - DNA, 25 bp, SARS Virus
ttgccatgataagggcaactcctcg

SEQ ID NO: 105814 - DNA, 25 bp, SARS Virus
tgccatgataatggcaactcctcga

SEQ ID NO: 105815 - DNA, 25 bp, SARS Virus
gccatgataatggcaactcctcgaa

SEQ ID NO: 105816 - DNA, 25 bp, SARS Virus
ccatgataatgggaactcctcgaat

SEQ ID NO: 105817 - DNA, 25 bp, SARS Virus
catgataatggcgactcctcgaatt

SEQ ID NO: 105818 - DNA, 25 bp, SARS Virus
atgataatggcagctcctcgaattt

SEQ ID NO: 105819 - DNA, 25 bp, SARS Virus
tgataatggcaagtcctcgaatttg

SEQ ID NO: 105820 - DNA, 25 bp, SARS Virus
gataatggcaacgcctcgaatttgt

SEQ ID NO: 105821 - DNA, 25 bp, SARS Virus
ataatggcaactgctcgaatttgtt

SEQ ID NO: 105822 - DNA, 25 bp, SARS Virus
taatggcaactcgtcgaatttgttg

SEQ ID NO: 105823 - DNA, 25 bp, SARS Virus
aatggcaactccgcgaatttgttga

SEQ ID NO: 105824 - DNA, 25 bp, SARS Virus
atggcaactcctggaatttgttgag

SEQ ID NO: 105825 - DNA, 25 bp, SARS Virus
tggcaactcctcgaatttgttgagg

SEQ ID NO: 105826 - DNA, 25 bp, SARS Virus
ggcaactcctcggatttgttgagga

SEQ ID NO: 105827 - DNA, 25 bp, SARS Virus
gcaactcctcgagtttgttgaggac

SEQ ID NO: 105828 - DNA, 25 bp, SARS Virus
caactcctcgaagttgttgaggacc

SEQ ID NO: 105829 - DNA, 25 bp, SARS Virus
aactcctcgaatgtgttgaggacct

SEQ ID NO: 105830 - DNA, 25 bp, SARS Virus
actcctcgaattggttgaggacctt

SEQ ID NO: 105831 - DNA, 25 bp, SARS Virus
ctcctcgaatttgttgaggaccttg

SEQ ID NO: 105832 - DNA, 25 bp, SARS Virus
tcctcgaatttggtgaggaccttgt

SEQ ID NO: 105833 - DNA, 25 bp, SARS Virus
cctcgaatttgtggaggaccttgtt

SEQ ID NO: 105834 - DNA, 25 bp, SARS Virus
ctcgaatttgttgaggaccttgtta

SEQ ID NO: 105835 - DNA, 25 bp, SARS Virus
tcgaatttgttggggaccttgttac

SEQ ID NO: 105836 - DNA, 25 bp, SARS Virus
cgaatttgttgaggaccttgttacc

SEQ ID NO: 105837 - DNA, 25 bp, SARS Virus
gaatttgttgaggaccttgttacct

SEQ ID NO: 105838 - DNA, 25 bp, SARS Virus
aatttgttgagggccttgttacctt

SEQ ID NO: 105839 - DNA, 25 bp, SARS Virus
atttgttgaggagcttgttaccttg

SEQ ID NO: 105840 - DNA, 25 bp, SARS Virus
tttgttgaggacgttgttaccttgg

SEQ ID NO: 105841 - DNA, 25 bp, SARS Virus
ttgttgaggaccgtgttaccttgga

SEQ ID NO: 105842 - DNA, 25 bp, SARS Virus
tgttgaggacctggttaccttggat

SEQ ID NO: 105843 - DNA, 25 bp, SARS Virus
gttgaggaccttgttaccttggatc

SEQ ID NO: 105844 - DNA, 25 bp, SARS Virus
ttgaggaccttggtaccttggatca

SEQ ID NO: 105845 - DNA, 25 bp, SARS Virus
tgaggaccttgtgaccttggatcat

SEQ ID NO: 105846 - DNA, 25 bp, SARS Virus
gaggaccttgttgccttggatcatt

SEQ ID NO: 105847 - DNA, 25 bp, SARS Virus
aggaccttgttagcttggatcatta

SEQ ID NO: 105848 - DNA, 25 bp, SARS Virus
ggaccttgttacgttggatcattat

SEQ ID NO: 105849 - DNA, 25 bp, SARS Virus
gaccttgttaccgtggatcattatc

SEQ ID NO: 105850 - DNA, 25 bp, SARS Virus
accttgttacctgggatcattatcc

SEQ ID NO: 105851 - DNA, 25 bp, SARS Virus
ccttgttaccttggatcattatcca

SEQ ID NO: 105852 - DNA, 25 bp, SARS Virus
cttgttaccttggatcattatccaa

SEQ ID NO: 105853 - DNA, 25 bp, SARS Virus
ttgttaccttgggtcattatccaaa

SEQ ID NO: 105854 - DNA, 25 bp, SARS Virus
tgttaccttggagcattatccaaag

SEQ ID NO: 105855 - DNA, 25 bp, SARS Virus
gttaccttggatgattatccaaagg

SEQ ID NO: 105856 - DNA, 25 bp, SARS Virus
ttaccttggatcgttatccaaagga

SEQ ID NO: 105857 - DNA, 25 bp, SARS Virus
taccttggatcagtatccaaaggat

SEQ ID NO: 105858 - DNA, 25 bp, SARS Virus
accttggatcatgatccaaaggata

SEQ ID NO: 105859 - DNA, 25 bp, SARS Virus
ccttggatcattgtccaaaggataa

SEQ ID NO: 105860 - DNA, 25 bp, SARS Virus
cttggatcattagccaaaggataag

SEQ ID NO: 105861 - DNA, 25 bp, SARS Virus
ttggatcattatgcaaaggataagg

SEQ ID NO: 105862 - DNA, 25 bp, SARS Virus
tggatcattatcgaaaggataagga

SEQ ID NO: 105863 - DNA, 25 bp, SARS Virus
ggatcattatccgaaggataaggat

SEQ ID NO: 105864 - DNA, 25 bp, SARS Virus
gatcattatccagaggataaggatc

SEQ ID NO: 105865 - DNA, 25 bp, SARS Virus
atcattatccaagggataaggatcg

SEQ ID NO: 105866 - DNA, 25 bp, SARS Virus
tcattatccaaaggataaggatcgg

SEQ ID NO: 105867 - DNA, 25 bp, SARS Virus
cattatccaaaggataaggatcgga

SEQ ID NO: 105868 - DNA, 25 bp, SARS Virus
attatccaaagggtaaggatcggac

SEQ ID NO: 105869 - DNA, 25 bp, SARS Virus
ttatccaaaggagaaggatcggacc

SEQ ID NO: 105870 - DNA, 25 bp, SARS Virus
tatccaaaggatgaggatcggacct

SEQ ID NO: 105871 - DNA, 25 bp, SARS Virus
atccaaaggatagggatcggaccta

SEQ ID NO: 105872 - DNA, 25 bp, SARS Virus
tccaaaggataaggatcggacctaa

SEQ ID NO: 105873 - DNA, 25 bp, SARS Virus
ccaaaggataaggatcggacctaat

SEQ ID NO: 105874 - DNA, 25 bp, SARS Virus
caaaggataagggtcggacctaata

SEQ ID NO: 105875 - DNA, 25 bp, SARS Virus
aaaggataaggagcggacctaatac

SEQ ID NO: 105876 - DNA, 25 bp, SARS Virus
aaggataaggatgggacctaataca

SEQ ID NO: 105877 - DNA, 25 bp, SARS Virus
aggataaggatcggacctaatacaa

SEQ ID NO: 105878 - DNA, 25 bp, SARS Virus
ggataaggatcggacctaatacaat

SEQ ID NO: 105879 - DNA, 25 bp, SARS Virus
gataaggatcgggcctaatacaatg

SEQ ID NO: 105880 - DNA, 25 bp, SARS Virus
ataaggatcggagctaatacaatga

SEQ ID NO: 105881 - DNA, 25 bp, SARS Virus
taaggatcggacgtaatacaatgat

SEQ ID NO: 105882 - DNA, 25 bp, SARS Virus
aaggatcggaccgaatacaatgatg

SEQ ID NO: 105883 - DNA, 25 bp, SARS Virus
aggatcggacctgatacaatgatgt

SEQ ID NO: 105884 - DNA, 25 bp, SARS Virus
ggatcggacctagtacaatgatgtt

SEQ ID NO: 105885 - DNA, 25 bp, SARS Virus
gatcggacctaagacaatgatgtta

SEQ ID NO: 105886 - DNA, 25 bp, SARS Virus
atcggacctaatgcaatgatgttaa

SEQ ID NO: 105887 - DNA, 25 bp, SARS Virus
tcggacctaatagaatgatgttaaa

SEQ ID NO: 105888 - DNA, 25 bp, SARS Virus
cggacctaatacgatgatgttaaac

SEQ ID NO: 105889 - DNA, 25 bp, SARS Virus
ggacctaatacagtgatgttaaacg

SEQ ID NO: 105890 - DNA, 25 bp, SARS Virus
gacctaatacaaggatgttaaacgg

SEQ ID NO: 105891 - DNA, 25 bp, SARS Virus
acctaatacaatgatgttaaacgga

SEQ ID NO: 105892 - DNA, 25 bp, SARS Virus
cctaatacaatggtgttaaacggat

SEQ ID NO: 105893 - DNA, 25 bp, SARS Virus
ctaatacaatgaggttaaacggata

SEQ ID NO: 105894 - DNA, 25 bp, SARS Virus
taatacaatgatgttaaacggataa

SEQ ID NO: 105895 - DNA, 25 bp, SARS Virus
aatacaatgatggtaaacggataag

SEQ ID NO: 105896 - DNA, 25 bp, SARS Virus
atacaatgatgtgaaacggataaga

SEQ ID NO: 105897 - DNA, 25 bp, SARS Virus
tacaatgatgttgaacggataagat

SEQ ID NO: 105898 - DNA, 25 bp, SARS Virus
acaatgatgttagacggataagatt

SEQ ID NO: 105899 - DNA, 25 bp, SARS Virus
caatgatgttaagcggataagatta

SEQ ID NO: 105900 - DNA, 25 bp, SARS Virus
aatgatgttaaagggataagattag

SEQ ID NO: 105901 - DNA, 25 bp, SARS Virus
atgatgttaaacggataagattagc

SEQ ID NO: 105902 - DNA, 25 bp, SARS Virus
tgatgttaaacggataagattagcc

SEQ ID NO: 105903 - DNA, 25 bp, SARS Virus
gatgttaaacgggtaagattagcct

SEQ ID NO: 105904 - DNA, 25 bp, SARS Virus
atgttaaacggagaagattagcctt

SEQ ID NO: 105905 - DNA, 25 bp, SARS Virus
tgttaaacggatgagattagccttg

SEQ ID NO: 105906 - DNA, 25 bp, SARS Virus
gttaaacggataggattagccttgt

SEQ ID NO: 105907 - DNA, 25 bp, SARS Virus
ttaaacggataagattagccttgtc

SEQ ID NO: 105908 - DNA, 25 bp, SARS Virus
taaacggataaggttagccttgtcc

SEQ ID NO: 105909 - DNA, 25 bp, SARS Virus
aaacggataagagtagccttgtcca

SEQ ID NO: 105910 - DNA, 25 bp, SARS Virus
aacggataagatgagccttgtccaa

SEQ ID NO: 105911 - DNA, 25 bp, SARS Virus
acggataagattggccttgtccaaa

SEQ ID NO: 105912 - DNA, 25 bp, SARS Virus
cggataagattagccttgtccaaaa

SEQ ID NO: 105913 - DNA, 25 bp, SARS Virus
ggataagattaggcttgtccaaaaa

SEQ ID NO: 105914 - DNA, 25 bp, SARS Virus
gataagattagcgttgtccaaaaac

SEQ ID NO: 105915 - DNA, 25 bp, SARS Virus
ataagattagccgtgtccaaaaaca

SEQ ID NO: 105916 - DNA, 25 bp, SARS Virus
taagattagcctggtccaaaaacat

SEQ ID NO: 105917 - DNA, 25 bp, SARS Virus
aagattagccttgtccaaaaacatg

SEQ ID NO: 105918 - DNA, 25 bp, SARS Virus
agattagccttggccaaaaacatgt

SEQ ID NO: 105919 - DNA, 25 bp, SARS Virus
gattagccttgtgcaaaaacatgta

SEQ ID NO: 105920 - DNA, 25 bp, SARS Virus
attagccttgtcgaaaaacatgtat

SEQ ID NO: 105921 - DNA, 25 bp, SARS Virus
ttagccttgtccgaaaacatgtatt

SEQ ID NO: 105922 - DNA, 25 bp, SARS Virus
tagccttgtccagaaacatgtatta

SEQ ID NO: 105923 - DNA, 25 bp, SARS Virus
agccttgtccaagaacatgtattat

SEQ ID NO: 105924 - DNA, 25 bp, SARS Virus
gccttgtccaaagacatgtattatt

SEQ ID NO: 105925 - DNA, 25 bp, SARS Virus
ccttgtccaaaagcatgtattattt

SEQ ID NO: 105926 - DNA, 25 bp, SARS Virus
cttgtccaaaaagatgtattatttc

SEQ ID NO: 105927 - DNA, 25 bp, SARS Virus
ttgtccaaaaacgtgtattatttcg

SEQ ID NO: 105928 - DNA, 25 bp, SARS Virus
tgtccaaaaacaggtattatttcga

SEQ ID NO: 105929 - DNA, 25 bp, SARS Virus
gtccaaaaacatgtattatttcgaa

SEQ ID NO: 105930 - DNA, 25 bp, SARS Virus
tccaaaaacatggattatttcgaac

SEQ ID NO: 105931 - DNA, 25 bp, SARS Virus
ccaaaaacatgtgttatttcgaaca

SEQ ID NO: 105932 - DNA, 25 bp, SARS Virus
caaaaacatgtagtatttcgaacaa

SEQ ID NO: 105933 - DNA, 25 bp, SARS Virus
aaaaacatgtatgatttcgaacaaa

SEQ ID NO: 105934 - DNA, 25 bp, SARS Virus
aaaacatgtattgtttcgaacaaaa

SEQ ID NO: 105935 - DNA, 25 bp, SARS Virus
aaacatgtattagttcgaacaaaag

SEQ ID NO: 105936 - DNA, 25 bp, SARS Virus
aacatgtattatgtcgaacaaaagg

SEQ ID NO: 105937 - DNA, 25 bp, SARS Virus
acatgtattattgcgaacaaaagga

SEQ ID NO: 105938 - DNA, 25 bp, SARS Virus
catgtattatttggaacaaaaggag

SEQ ID NO: 105939 - DNA, 25 bp, SARS Virus
atgtattatttcgaacaaaaggaga

SEQ ID NO: 105940 - DNA, 25 bp, SARS Virus
tgtattatttcggacaaaaggagac

SEQ ID NO: 105941 - DNA, 25 bp, SARS Virus
gtattatttcgagcaaaaggagacc

SEQ ID NO: 105942 - DNA, 25 bp, SARS Virus
tattatttcgaagaaaaggagaccg

SEQ ID NO: 105943 - DNA, 25 bp, SARS Virus
attatttcgaacgaaaggagaccga

SEQ ID NO: 105944 - DNA, 25 bp, SARS Virus
ttatttcgaacagaaggagaccgag

SEQ ID NO: 105945 - DNA, 25 bp, SARS Virus
tatttcgaacaagaggagaccgaga

SEQ ID NO: 105946 - DNA, 25 bp, SARS Virus
atttcgaacaaagggagaccgagaa

SEQ ID NO: 105947 - DNA, 25 bp, SARS Virus
tttcgaacaaaaggagaccgagaac

SEQ ID NO: 105948 - DNA, 25 bp, SARS Virus
ttcgaacaaaaggagaccgagaaca

SEQ ID NO: 105949 - DNA, 25 bp, SARS Virus
tcgaacaaaaggggaccgagaacac

SEQ ID NO: 105950 - DNA, 25 bp, SARS Virus
cgaacaaaaggagaccgagaacacc

SEQ ID NO: 105951 - DNA, 25 bp, SARS Virus
gaacaaaaggaggccgagaacaccg

SEQ ID NO: 105952 - DNA, 25 bp, SARS Virus
aacaaaaggagagcgagaacaccgg

SEQ ID NO: 105953 - DNA, 25 bp, SARS Virus
acaaaaggagacggagaacaccggt

SEQ ID NO: 105954 - DNA, 25 bp, SARS Virus
caaaaggagaccgagaacaccggtc

SEQ ID NO: 105955 - DNA, 25 bp, SARS Virus
aaaaggagaccgggaacaccggtca

SEQ ID NO: 105956 - DNA, 25 bp, SARS Virus
aaaggagaccgagaacaccggtcat

SEQ ID NO: 105957 - DNA, 25 bp, SARS Virus
aaggagaccgaggacaccggtcatt

SEQ ID NO: 105958 - DNA, 25 bp, SARS Virus
aggagaccgagagcaccggtcattg

SEQ ID NO: 105959 - DNA, 25 bp, SARS Virus
ggagaccgagaagaccggtcattgt

SEQ ID NO: 105960 - DNA, 25 bp, SARS Virus
gagaccgagaacgccggtcattgtg

SEQ ID NO: 105961 - DNA, 25 bp, SARS Virus
agaccgagaacagcggtcattgtga

SEQ ID NO: 105962 - DNA, 25 bp, SARS Virus
gaccgagaacacgggtcattgtgaa

SEQ ID NO: 105963 - DNA, 25 bp, SARS Virus
accgagaacaccggtcattgtgaac

SEQ ID NO: 105964 - DNA, 25 bp, SARS Virus
ccgagaacaccggtcattgtgaacg

SEQ ID NO: 105965 - DNA, 25 bp, SARS Virus
cgagaacaccgggcattgtgaacga

SEQ ID NO: 105966 - DNA, 25 bp, SARS Virus
gagaacaccggtgattgtgaacgaa

SEQ ID NO: 105967 - DNA, 25 bp, SARS Virus
agaacaccggtcgttgtgaacgaac

SEQ ID NO: 105968 - DNA, 25 bp, SARS Virus
gaacaccggtcagtgtgaacgaaca

SEQ ID NO: 105969 - DNA, 25 bp, SARS Virus
aacaccggtcatggtgaacgaacaa

SEQ ID NO: 105970 - DNA, 25 bp, SARS Virus
acaccggtcattgtgaacgaacaaa

SEQ ID NO: 105971 - DNA, 25 bp, SARS Virus
caccggtcattgggaacgaacaaaa

SEQ ID NO: 105972 - DNA, 25 bp, SARS Virus
accggtcattgtgaacgaacaaaac

SEQ ID NO: 105973 - DNA, 25 bp, SARS Virus
ccggtcattgtggacgaacaaaaca

SEQ ID NO: 105974 - DNA, 25 bp, SARS Virus
cggtcattgtgagcgaacaaaacac

SEQ ID NO: 105975 - DNA, 25 bp, SARS Virus
ggtcattgtgaaggaacaaaacacg

SEQ ID NO: 105976 - DNA, 25 bp, SARS Virus
gtcattgtgaacgaacaaaacacga

SEQ ID NO: 105977 - DNA, 25 bp, SARS Virus
tcattgtgaacggacaaaacacgaa

SEQ ID NO: 105978 - DNA, 25 bp, SARS Virus
cattgtgaacgagcaaaacacgaac

SEQ ID NO: 105979 - DNA, 25 bp, SARS Virus
attgtgaacgaagaaaacacgaacg

SEQ ID NO: 105980 - DNA, 25 bp, SARS Virus
ttgtgaacgaacgaaacacgaacga

SEQ ID NO: 105981 - DNA, 25 bp, SARS Virus
tgtgaacgaacagaacacgaacgac

SEQ ID NO: 105982 - DNA, 25 bp, SARS Virus
gtgaacgaacaagacacgaacgacg

SEQ ID NO: 105983 - DNA, 25 bp, SARS Virus
tgaacgaacaaagcacgaacgacga

SEQ ID NO: 105984 - DNA, 25 bp, SARS Virus
gaacgaacaaaagacgaacgacgac

SEQ ID NO: 105985 - DNA, 25 bp, SARS Virus
aacgaacaaaacgcgaacgacgaca

SEQ ID NO: 105986 - DNA, 25 bp, SARS Virus
acgaacaaaacaggaacgacgacag

SEQ ID NO: 105987 - DNA, 25 bp, SARS Virus
cgaacaaaacacgaacgacgacaga

SEQ ID NO: 105988 - DNA, 25 bp, SARS Virus
gaacaaaacacggacgacgacagat

SEQ ID NO: 105989 - DNA, 25 bp, SARS Virus
aacaaaacacgagcgacgacagatg

SEQ ID NO: 105990 - DNA, 25 bp, SARS Virus
acaaaacacgaaggacgacagatgt

SEQ ID NO: 105991 - DNA, 25 bp, SARS Virus
caaaacacgaacgacgacagatgtc

SEQ ID NO: 105992 - DNA, 25 bp, SARS Virus
aaaacacgaacggcgacagatgtct

SEQ ID NO: 105993 - DNA, 25 bp, SARS Virus
aaacacgaacgaggacagatgtctt

SEQ ID NO: 105994 - DNA, 25 bp, SARS Virus
aacacgaacgacgacagatgtctta

SEQ ID NO: 105995 - DNA, 25 bp, SARS Virus
acacgaacgacggcagatgtcttaa

SEQ ID NO: 105996 - DNA, 25 bp, SARS Virus
cacgaacgacgagagatgtcttaat

SEQ ID NO: 105997 - DNA, 25 bp, SARS Virus
acgaacgacgacggatgtcttaatt

SEQ ID NO: 105998 - DNA, 25 bp, SARS Virus
cgaacgacgacagatgtcttaatta

SEQ ID NO: 105999 - DNA, 25 bp, SARS Virus
gaacgacgacaggtgtcttaattaa

SEQ ID NO: 106000 - DNA, 25 bp, SARS Virus
aacgacgacagaggtcttaattaac

SEQ ID NO: 106001 - DNA, 25 bp, SARS Virus
acgacgacagatgtcttaattaacc

SEQ ID NO: 106002 - DNA, 25 bp, SARS Virus
cgacgacagatggcttaattaaccc

SEQ ID NO: 106003 - DNA, 25 bp, SARS Virus
gacgacagatgtgttaattaaccca

SEQ ID NO: 106004 - DNA, 25 bp, SARS Virus
acgacagatgtcgtaattaacccac

SEQ ID NO: 106005 - DNA, 25 bp, SARS Virus
cgacagatgtctgaattaacccact

SEQ ID NO: 106006 - DNA, 25 bp, SARS Virus
gacagatgtcttgattaacccactg

SEQ ID NO: 106007 - DNA, 25 bp, SARS Virus
acagatgtcttagttaacccactga

SEQ ID NO: 106008 - DNA, 25 bp, SARS Virus
cagatgtcttaagtaacccactgac

SEQ ID NO: 106009 - DNA, 25 bp, SARS Virus
agatgtcttaatgaacccactgacc

SEQ ID NO: 106010 - DNA, 25 bp, SARS Virus
gatgtcttaattgacccactgaccg

SEQ ID NO: 106011 - DNA, 25 bp, SARS Virus
atgtcttaattagcccactgaccgc

SEQ ID NO: 106012 - DNA, 25 bp, SARS Virus
tgtcttaattaagccactgaccgcc

SEQ ID NO: 106013 - DNA, 25 bp, SARS Virus
gtcttaattaacgcactgaccgccc

SEQ ID NO: 106014 - DNA, 25 bp, SARS Virus
tcttaattaaccgactgaccgccct

SEQ ID NO: 106015 - DNA, 25 bp, SARS Virus
cttaattaacccgctgaccgcccta

SEQ ID NO: 106016 - DNA, 25 bp, SARS Virus
ttaattaacccagtgaccgccctaa

SEQ ID NO: 106017 - DNA, 25 bp, SARS Virus
taattaacccacggaccgccctaac

SEQ ID NO: 106018 - DNA, 25 bp, SARS Virus
aattaacccactgaccgccctaacg

SEQ ID NO: 106019 - DNA, 25 bp, SARS Virus
attaacccactggccgccctaacgc

SEQ ID NO: 106020 - DNA, 25 bp, SARS Virus
ttaacccactgagcgccctaacgct

SEQ ID NO: 106021 - DNA, 25 bp, SARS Virus
taacccactgacggccctaacgcta

SEQ ID NO: 106022 - DNA, 25 bp, SARS Virus
aacccactgaccgccctaacgctaa

SEQ ID NO: 106023 - DNA, 25 bp, SARS Virus
acccactgaccggcctaacgctaac

SEQ ID NO: 106024 - DNA, 25 bp, SARS Virus
cccactgaccgcgctaacgctaacg

SEQ ID NO: 106025 - DNA, 25 bp, SARS Virus
aagccttctttgtccatgcaattat

SEQ ID NO: 106026 - DNA, 25 bp, SARS Virus
agccttctttgttcatgcaattatc

SEQ ID NO: 106027 - DNA, 25 bp, SARS Virus
gccttctttgtctatgcaattatca

SEQ ID NO: 106028 - DNA, 25 bp, SARS Virus
ccttctttgtccttgcaattatcaa

SEQ ID NO: 106029 - DNA, 25 bp, SARS Virus
cttctttgtccatgcaattatcaat

SEQ ID NO: 106030 - DNA, 25 bp, SARS Virus
ttctttgtccattcaattatcaatt

SEQ ID NO: 106031 - DNA, 25 bp, SARS Virus
tctttgtccatgtaattatcaatta

SEQ ID NO: 106032 - DNA, 25 bp, SARS Virus
ctttgtccatgctattatcaattat

SEQ ID NO: 106033 - DNA, 25 bp, SARS Virus
tttgtccatgcatttatcaattatc

SEQ ID NO: 106034 - DNA, 25 bp, SARS Virus
ttgtccatgcaattatcaattatcg

SEQ ID NO: 106035 - DNA, 25 bp, SARS Virus
tgtccatgcaattatcaattatcgc

SEQ ID NO: 106036 - DNA, 25 bp, SARS Virus
gtccatgcaattttcaattatcgca

SEQ ID NO: 106037 - DNA, 25 bp, SARS Virus
tccatgcaattatcaattatcgcat

SEQ ID NO: 106038 - DNA, 25 bp, SARS Virus
ccatgcaattattaattatcgcatg

SEQ ID NO: 106039 - DNA, 25 bp, SARS Virus
catgcaattatctattatcgcatga

SEQ ID NO: 106040 - DNA, 25 bp, SARS Virus
atgcaattatcatttatcgcatgaa

SEQ ID NO: 106041 - DNA, 25 bp, SARS Virus
tgcaattatcaattatcgcatgaag

SEQ ID NO: 106042 - DNA, 25 bp, SARS Virus
gcaattatcaattatcgcatgaaga

SEQ ID NO: 106043 - DNA, 25 bp, SARS Virus
caattatcaattttcgcatgaagaa

SEQ ID NO: 106044 - DNA, 25 bp, SARS Virus
aattatcaattatcgcatgaagaaa

SEQ ID NO: 106045 - DNA, 25 bp, SARS Virus
attatcaattattgcatgaagaaaa

SEQ ID NO: 106046 - DNA, 25 bp, SARS Virus
ttatcaattatctcatgaagaaaaa

SEQ ID NO: 106047 - DNA, 25 bp, SARS Virus
tatcaattatcgtatgaagaaaaag

SEQ ID NO: 106048 - DNA, 25 bp, SARS Virus
atcaattatcgcttgaagaaaaaga

SEQ ID NO: 106049 - DNA, 25 bp, SARS Virus
tcaattatcgcatgaagaaaaagaa

SEQ ID NO: 106050 - DNA, 25 bp, SARS Virus
caattatcgcattaagaaaaagaac

SEQ ID NO: 106051 - DNA, 25 bp, SARS Virus
aattatcgcatgtagaaaaagaacg

SEQ ID NO: 106052 - DNA, 25 bp, SARS Virus
attatcgcatgatgaaaaagaacga

SEQ ID NO: 106053 - DNA, 25 bp, SARS Virus
ttatcgcatgaataaaaagaacgaa

SEQ ID NO: 106054 - DNA, 25 bp, SARS Virus
tatcgcatgaagtaaaagaacgaaa

SEQ ID NO: 106055 - DNA, 25 bp, SARS Virus
atcgcatgaagataaagaacgaaag

SEQ ID NO: 106056 - DNA, 25 bp, SARS Virus
tcgcatgaagaataagaacgaaagc

SEQ ID NO: 106057 - DNA, 25 bp, SARS Virus
cgcatgaagaaatagaacgaaagca

SEQ ID NO: 106058 - DNA, 25 bp, SARS Virus
gcatgaagaaaatgaacgaaagcac

SEQ ID NO: 106059 - DNA, 25 bp, SARS Virus
catgaagaaaaataacgaaagcacc

SEQ ID NO: 106060 - DNA, 25 bp, SARS Virus
atgaagaaaaagtacgaaagcacca

SEQ ID NO: 106061 - DNA, 25 bp, SARS Virus
tgaagaaaaagatcgaaagcaccat

SEQ ID NO: 106062 - DNA, 25 bp, SARS Virus
gaagaaaaagaatgaaagcaccata

SEQ ID NO: 106063 - DNA, 25 bp, SARS Virus
aagaaaaagaactaaagcaccataa

SEQ ID NO: 106064 - DNA, 25 bp, SARS Virus
agaaaaagaacgtaagcaccataag

SEQ ID NO: 106065 - DNA, 25 bp, SARS Virus
gaaaaagaacgatagcaccataaga

SEQ ID NO: 106066 - DNA, 25 bp, SARS Virus
aaaaagaacgaatgcaccataagaa

SEQ ID NO: 106067 - DNA, 25 bp, SARS Virus
aaaagaacgaaatcaccataagaac

SEQ ID NO: 106068 - DNA, 25 bp, SARS Virus
aaagaacgaaagtaccataagaacg

SEQ ID NO: 106069 - DNA, 25 bp, SARS Virus
aagaacgaaagctccataagaacga

SEQ ID NO: 106070 - DNA, 25 bp, SARS Virus
agaacgaaagcatcataagaacgat

SEQ ID NO: 106071 - DNA, 25 bp, SARS Virus
gaacgaaagcactataagaacgatc

SEQ ID NO: 106072 - DNA, 25 bp, SARS Virus
aacgaaagcaccttaagaacgatca

SEQ ID NO: 106073 - DNA, 25 bp, SARS Virus
acgaaagcaccataagaacgatcag

SEQ ID NO: 106074 - DNA, 25 bp, SARS Virus
cgaaagcaccattagaacgatcagt

SEQ ID NO: 106075 - DNA, 25 bp, SARS Virus
gaaagcaccatatgaacgatcagtg

SEQ ID NO: 106076 - DNA, 25 bp, SARS Virus
aaagcaccataataacgatcagtgt

SEQ ID NO: 106077 - DNA, 25 bp, SARS Virus
aagcaccataagtacgatcagtgtg

SEQ ID NO: 106078 - DNA, 25 bp, SARS Virus
agcaccataagatcgatcagtgtga

SEQ ID NO: 106079 - DNA, 25 bp, SARS Virus
gcaccataagaatgatcagtgtgat

SEQ ID NO: 106080 - DNA, 25 bp, SARS Virus
caccataagaactatcagtgtgatc

SEQ ID NO: 106081 - DNA, 25 bp, SARS Virus
accataagaacgttcagtgtgatcg

SEQ ID NO: 106082 - DNA, 25 bp, SARS Virus
ccataagaacgatcagtgtgatcgg

SEQ ID NO: 106083 - DNA, 25 bp, SARS Virus
cataagaacgattagtgtgatcggt

SEQ ID NO: 106084 - DNA, 25 bp, SARS Virus
ataagaacgatctgtgtgatcggta

SEQ ID NO: 106085 - DNA, 25 bp, SARS Virus
taagaacgatcattgtgatcggtag

SEQ ID NO: 106086 - DNA, 25 bp, SARS Virus
aagaacgatcagtgtgatcggtagg

SEQ ID NO: 106087 - DNA, 25 bp, SARS Virus
agaacgatcagtttgatcggtagga

SEQ ID NO: 106088 - DNA, 25 bp, SARS Virus
gaacgatcagtgtgatcggtaggaa

SEQ ID NO: 106089 - DNA, 25 bp, SARS Virus
aacgatcagtgttatcggtaggaat

SEQ ID NO: 106090 - DNA, 25 bp, SARS Virus
acgatcagtgtgttcggtaggaatg

SEQ ID NO: 106091 - DNA, 25 bp, SARS Virus
cgatcagtgtgatcggtaggaatga

SEQ ID NO: 106092 - DNA, 25 bp, SARS Virus
gatcagtgtgattggtaggaatgac

SEQ ID NO: 106093 - DNA, 25 bp, SARS Virus
atcagtgtgatctgtaggaatgacg

SEQ ID NO: 106094 - DNA, 25 bp, SARS Virus
tcagtgtgatcgttaggaatgacgc

SEQ ID NO: 106095 - DNA, 25 bp, SARS Virus
cagtgtgatcggtaggaatgacgcg

SEQ ID NO: 106096 - DNA, 25 bp, SARS Virus
agtgtgatcggttggaatgacgcga

SEQ ID NO: 106097 - DNA, 25 bp, SARS Virus
gtgtgatcggtatgaatgacgcgaa

SEQ ID NO: 106098 - DNA, 25 bp, SARS Virus
tgtgatcggtagtaatgacgcgaag

SEQ ID NO: 106099 - DNA, 25 bp, SARS Virus
gtgatcggtaggtatgacgcgaagc

SEQ ID NO: 106100 - DNA, 25 bp, SARS Virus
tgatcggtaggattgacgcgaagct

SEQ ID NO: 106101 - DNA, 25 bp, SARS Virus
gatcggtaggaatgacgcgaagcta

SEQ ID NO: 106102 - DNA, 25 bp, SARS Virus
atcggtaggaattacgcgaagctaa

SEQ ID NO: 106103 - DNA, 25 bp, SARS Virus
tcggtaggaatgtcgcgaagctaac

SEQ ID NO: 106104 - DNA, 25 bp, SARS Virus
cggtaggaatgatgcgaagctaaca

SEQ ID NO: 106105 - DNA, 25 bp, SARS Virus
ggtaggaatgactcgaagctaacac

SEQ ID NO: 106106 - DNA, 25 bp, SARS Virus
gtaggaatgacgtgaagctaacaca

SEQ ID NO: 106107 - DNA, 25 bp, SARS Virus
taggaatgacgctaagctaacacac

SEQ ID NO: 106108 - DNA, 25 bp, SARS Virus
aggaatgacgcgtagctaacacacg

SEQ ID NO: 106109 - DNA, 25 bp, SARS Virus
ggaatgacgcgatgctaacacacgc

SEQ ID NO: 106110 - DNA, 25 bp, SARS Virus
gaatgacgcgaatctaacacacgca

SEQ ID NO: 106111 - DNA, 25 bp, SARS Virus
aatgacgcgaagttaacacacgcat

SEQ ID NO: 106112 - DNA, 25 bp, SARS Virus
atgacgcgaagctaacacacgcatg

SEQ ID NO: 106113 - DNA, 25 bp, SARS Virus
tgacgcgaagcttacacacgcatga

SEQ ID NO: 106114 - DNA, 25 bp, SARS Virus
gacgcgaagctatcacacgcatgac

SEQ ID NO: 106115 - DNA, 25 bp, SARS Virus
acgcgaagctaatacacgcatgacg

SEQ ID NO: 106116 - DNA, 25 bp, SARS Virus
cgcgaagctaactcacgcatgacga

SEQ ID NO: 106117 - DNA, 25 bp, SARS Virus
gcgaagctaacatacgcatgacgac

SEQ ID NO: 106118 - DNA, 25 bp, SARS Virus
cgaagctaacactcgcatgacgacg

SEQ ID NO: 106119 - DNA, 25 bp, SARS Virus
gaagctaacacatgcatgacgacgt

SEQ ID NO: 106120 - DNA, 25 bp, SARS Virus
aagctaacacactcatgacgacgtt

SEQ ID NO: 106121 - DNA, 25 bp, SARS Virus
agctaacacacgtatgacgacgtta

SEQ ID NO: 106122 - DNA, 25 bp, SARS Virus
gctaacacacgcttgacgacgttat

SEQ ID NO: 106123 - DNA, 25 bp, SARS Virus
ctaacacacgcatgacgacgttata

SEQ ID NO: 106124 - DNA, 25 bp, SARS Virus
taacacacgcattacgacgttataa

SEQ ID NO: 106125 - DNA, 25 bp, SARS Virus
aacacacgcatgtcgacgttataac

SEQ ID NO: 106126 - DNA, 25 bp, SARS Virus
acacacgcatgatgacgttataaca

SEQ ID NO: 106127 - DNA, 25 bp, SARS Virus
cacacgcatgactacgttataacaa

SEQ ID NO: 106128 - DNA, 25 bp, SARS Virus
acacgcatgacgtcgttataacaat

SEQ ID NO: 106129 - DNA, 25 bp, SARS Virus
cacgcatgacgatgttataacaatt

SEQ ID NO: 106130 - DNA, 25 bp, SARS Virus
acgcatgacgactttataacaattg

SEQ ID NO: 106131 - DNA, 25 bp, SARS Virus
cgcatgacgacgttataacaattgc

SEQ ID NO: 106132 - DNA, 25 bp, SARS Virus
gcatgacgacgttataacaattgca

SEQ ID NO: 106133 - DNA, 25 bp, SARS Virus
catgacgacgttttaacaattgcac

SEQ ID NO: 106134 - DNA, 25 bp, SARS Virus
atgacgacgttataacaattgcact

SEQ ID NO: 106135 - DNA, 25 bp, SARS Virus
tgacgacgttattacaattgcactc

SEQ ID NO: 106136 - DNA, 25 bp, SARS Virus
gacgacgttatatcaattgcactca

SEQ ID NO: 106137 - DNA, 25 bp, SARS Virus
acgacgttataataattgcactcaa

SEQ ID NO: 106138 - DNA, 25 bp, SARS Virus
cgacgttataactattgcactcaaa

SEQ ID NO: 106139 - DNA, 25 bp, SARS Virus
gacgttataacatttgcactcaaat

SEQ ID NO: 106140 - DNA, 25 bp, SARS Virus
acgttataacaattgcactcaaatc

SEQ ID NO: 106141 - DNA, 25 bp, SARS Virus
cgttataacaattgcactcaaatca

SEQ ID NO: 106142 - DNA, 25 bp, SARS Virus
gttataacaatttcactcaaatcat

SEQ ID NO: 106143 - DNA, 25 bp, SARS Virus
ttataacaattgtactcaaatcatt

SEQ ID NO: 106144 - DNA, 25 bp, SARS Virus
tataacaattgctctcaaatcattt

SEQ ID NO: 106145 - DNA, 25 bp, SARS Virus
ataacaattgcattcaaatcatttt

SEQ ID NO: 106146 - DNA, 25 bp, SARS Virus
taacaattgcactcaaatcattttg

SEQ ID NO: 106147 - DNA, 25 bp, SARS Virus
aacaattgcacttaaatcattttgg

SEQ ID NO: 106148 - DNA, 25 bp, SARS Virus
acaattgcactctaatcattttggt

SEQ ID NO: 106149 - DNA, 25 bp, SARS Virus
caattgcactcatatcattttggtt

SEQ ID NO: 106150 - DNA, 25 bp, SARS Virus
aattgcactcaattcattttggttg

SEQ ID NO: 106151 - DNA, 25 bp, SARS Virus
attgcactcaaatcattttggttgc

SEQ ID NO: 106152 - DNA, 25 bp, SARS Virus
ttgcactcaaattattttggttgcc

SEQ ID NO: 106153 - DNA, 25 bp, SARS Virus
tgcactcaaatctttttggttgcca

SEQ ID NO: 106154 - DNA, 25 bp, SARS Virus
gcactcaaatcattttggttgccaa

SEQ ID NO: 106155 - DNA, 25 bp, SARS Virus
cactcaaatcattttggttgccaaa

SEQ ID NO: 106156 - DNA, 25 bp, SARS Virus
actcaaatcattttggttgccaaat

SEQ ID NO: 106157 - DNA, 25 bp, SARS Virus
ctcaaatcattttggttgccaaatg

SEQ ID NO: 106158 - DNA, 25 bp, SARS Virus
tcaaatcatttttgttgccaaatgc

SEQ ID NO: 106159 - DNA, 25 bp, SARS Virus
caaatcattttgtttgccaaatgca

SEQ ID NO: 106160 - DNA, 25 bp, SARS Virus
aaatcattttggttgccaaatgcag

SEQ ID NO: 106161 - DNA, 25 bp, SARS Virus
aatcattttggttgccaaatgcaga

SEQ ID NO: 106162 - DNA, 25 bp, SARS Virus
atcattttggtttccaaatgcagat

SEQ ID NO: 106163 - DNA, 25 bp, SARS Virus
tcattttggttgtcaaatgcagatg

SEQ ID NO: 106164 - DNA, 25 bp, SARS Virus
cattttggttgctaaatgcagatga

SEQ ID NO: 106165 - DNA, 25 bp, SARS Virus
attttggttgcctaatgcagatgag

SEQ ID NO: 106166 - DNA, 25 bp, SARS Virus
ttttggttgccatatgcagatgagc

SEQ ID NO: 106167 - DNA, 25 bp, SARS Virus
tttggttgccaattgcagatgagcg

SEQ ID NO: 106168 - DNA, 25 bp, SARS Virus
ttggttgccaaatgcagatgagcgc

SEQ ID NO: 106169 - DNA, 25 bp, SARS Virus
tggttgccaaattcagatgagcgca

SEQ ID NO: 106170 - DNA, 25 bp, SARS Virus
ggttgccaaatgtagatgagcgcac

SEQ ID NO: 106171 - DNA, 25 bp, SARS Virus
gttgccaaatgctgatgagcgcaca

SEQ ID NO: 106172 - DNA, 25 bp, SARS Virus
ttgccaaatgcatatgagcgcacaa

SEQ ID NO: 106173 - DNA, 25 bp, SARS Virus
tgccaaatgcagttgagcgcacaat

SEQ ID NO: 106174 - DNA, 25 bp, SARS Virus
gccaaatgcagatgagcgcacaatt

SEQ ID NO: 106175 - DNA, 25 bp, SARS Virus
ccaaatgcagattagcgcacaattt

SEQ ID NO: 106176 - DNA, 25 bp, SARS Virus
caaatgcagatgtgcgcacaatttt

SEQ ID NO: 106177 - DNA, 25 bp, SARS Virus
aaatgcagatgatcgcacaattttt

SEQ ID NO: 106178 - DNA, 25 bp, SARS Virus
aatgcagatgagtgcacaattttta

SEQ ID NO: 106179 - DNA, 25 bp, SARS Virus
atgcagatgagctcacaatttttag

SEQ ID NO: 106180 - DNA, 25 bp, SARS Virus
tgcagatgagcgtacaatttttaga

SEQ ID NO: 106181 - DNA, 25 bp, SARS Virus
gcagatgagcgctcaatttttagac

SEQ ID NO: 106182 - DNA, 25 bp, SARS Virus
cagatgagcgcataatttttagact

SEQ ID NO: 106183 - DNA, 25 bp, SARS Virus
agatgagcgcactatttttagactt

SEQ ID NO: 106184 - DNA, 25 bp, SARS Virus
gatgagcgcacattttttagacttg

SEQ ID NO: 106185 - DNA, 25 bp, SARS Virus
atgagcgcacaatttttagacttga

SEQ ID NO: 106186 - DNA, 25 bp, SARS Virus
tgagcgcacaatttttagacttgag

SEQ ID NO: 106187 - DNA, 25 bp, SARS Virus
gagcgcacaatttttagacttgaga

SEQ ID NO: 106188 - DNA, 25 bp, SARS Virus
agcgcacaatttttagacttgagaa

SEQ ID NO: 106189 - DNA, 25 bp, SARS Virus
gcgcacaatttttagacttgagaag

SEQ ID NO: 106190 - DNA, 25 bp, SARS Virus
cgcacaattttttgacttgagaaga

SEQ ID NO: 106191 - DNA, 25 bp, SARS Virus
gcacaatttttatacttgagaagac

SEQ ID NO: 106192 - DNA, 25 bp, SARS Virus
cacaatttttagtcttgagaagact

SEQ ID NO: 106193 - DNA, 25 bp, SARS Virus
acaatttttagatttgagaagactt

SEQ ID NO: 106194 - DNA, 25 bp, SARS Virus
caatttttagacttgagaagacttc

SEQ ID NO: 106195 - DNA, 25 bp, SARS Virus
aatttttagacttgagaagacttcc

SEQ ID NO: 106196 - DNA, 25 bp, SARS Virus
atttttagactttagaagacttcct

SEQ ID NO: 106197 - DNA, 25 bp, SARS Virus
tttttagacttgtgaagacttcctc

SEQ ID NO: 106198 - DNA, 25 bp, SARS Virus
ttttagacttgataagacttcctca

SEQ ID NO: 106199 - DNA, 25 bp, SARS Virus
tttagacttgagtagacttcctcaa

SEQ ID NO: 106200 - DNA, 25 bp, SARS Virus
ttagacttgagatgacttcctcaag

SEQ ID NO: 106201 - DNA, 25 bp, SARS Virus
tagacttgagaatacttcctcaagg

SEQ ID NO: 106202 - DNA, 25 bp, SARS Virus
agacttgagaagtcttcctcaagga

SEQ ID NO: 106203 - DNA, 25 bp, SARS Virus
gacttgagaagatttcctcaaggac

SEQ ID NO: 106204 - DNA, 25 bp, SARS Virus
acttgagaagacttcctcaaggact

SEQ ID NO: 106205 - DNA, 25 bp, SARS Virus
cttgagaagacttcctcaaggacta

SEQ ID NO: 106206 - DNA, 25 bp, SARS Virus
ttgagaagactttctcaaggactag

SEQ ID NO: 106207 - DNA, 25 bp, SARS Virus
tgagaagacttcttcaaggactaga

SEQ ID NO: 106208 - DNA, 25 bp, SARS Virus
gagaagacttcctcaaggactagaa

SEQ ID NO: 106209 - DNA, 25 bp, SARS Virus
agaagacttccttaaggactagaag

SEQ ID NO: 106210 - DNA, 25 bp, SARS Virus
gaagacttcctctaggactagaaga

SEQ ID NO: 106211 - DNA, 25 bp, SARS Virus
aagacttcctcatggactagaagac

SEQ ID NO: 106212 - DNA, 25 bp, SARS Virus
agacttcctcaatgactagaagacc

SEQ ID NO: 106213 - DNA, 25 bp, SARS Virus
gacttcctcaagtactagaagacca

SEQ ID NO: 106214 - DNA, 25 bp, SARS Virus
acttcctcaaggtctagaagaccag

SEQ ID NO: 106215 - DNA, 25 bp, SARS Virus
cttcctcaaggattagaagaccaga

SEQ ID NO: 106216 - DNA, 25 bp, SARS Virus
ttcctcaaggactagaagaccagat

SEQ ID NO: 106217 - DNA, 25 bp, SARS Virus
tcctcaaggacttgaagaccagatt

SEQ ID NO: 106218 - DNA, 25 bp, SARS Virus
cctcaaggactataagaccagattt

SEQ ID NO: 106219 - DNA, 25 bp, SARS Virus
ctcaaggactagtagaccagatttg

SEQ ID NO: 106220 - DNA, 25 bp, SARS Virus
tcaaggactagatgaccagatttgc

SEQ ID NO: 106221 - DNA, 25 bp, SARS Virus
caaggactagaataccagatttgct

SEQ ID NO: 106222 - DNA, 25 bp, SARS Virus
aaggactagaagtccagatttgctt

SEQ ID NO: 106223 - DNA, 25 bp, SARS Virus
aggactagaagatcagatttgcttg

SEQ ID NO: 106224 - DNA, 25 bp, SARS Virus
ggactagaagactagatttgcttga

SEQ ID NO: 106225 - DNA, 25 bp, SARS Virus
gactagaagacctgatttgcttgat

SEQ ID NO: 106226 - DNA, 25 bp, SARS Virus
actagaagaccatatttgcttgatt

SEQ ID NO: 106227 - DNA, 25 bp, SARS Virus
ctagaagaccagttttgcttgattg

SEQ ID NO: 106228 - DNA, 25 bp, SARS Virus
tagaagaccagatttgcttgattga

SEQ ID NO: 106229 - DNA, 25 bp, SARS Virus
agaagaccagatttgcttgattgat

SEQ ID NO: 106230 - DNA, 25 bp, SARS Virus
gaagaccagatttgcttgattgata

SEQ ID NO: 106231 - DNA, 25 bp, SARS Virus
aagaccagattttcttgattgataa

SEQ ID NO: 106232 - DNA, 25 bp, SARS Virus
agaccagatttgtttgattgataat

SEQ ID NO: 106233 - DNA, 25 bp, SARS Virus
gaccagatttgcttgattgataata

SEQ ID NO: 106234 - DNA, 25 bp, SARS Virus
accagatttgcttgattgataataa

SEQ ID NO: 106235 - DNA, 25 bp, SARS Virus
ccagatttgctttattgataataat

SEQ ID NO: 106236 - DNA, 25 bp, SARS Virus
cagatttgcttgtttgataataata

SEQ ID NO: 106237 - DNA, 25 bp, SARS Virus
agatttgcttgattgataataataa

SEQ ID NO: 106238 - DNA, 25 bp, SARS Virus
gatttgcttgattgataataataat

SEQ ID NO: 106239 - DNA, 25 bp, SARS Virus
atttgcttgatttataataataata

SEQ ID NO: 106240 - DNA, 25 bp, SARS Virus
tttgcttgattgttaataataataa

SEQ ID NO: 106241 - DNA, 25 bp, SARS Virus
ttgcttgattgataataataataag

SEQ ID NO: 106242 - DNA, 25 bp, SARS Virus
tgcttgattgattataataataaga

SEQ ID NO: 106243 - DNA, 25 bp, SARS Virus
gcttgattgatattaataataagac

SEQ ID NO: 106244 - DNA, 25 bp, SARS Virus
cttgattgataataataataagaca

SEQ ID NO: 106245 - DNA, 25 bp, SARS Virus
ttgattgataattataataagacaa

SEQ ID NO: 106246 - DNA, 25 bp, SARS Virus
tgattgataatattaataagacaaa

SEQ ID NO: 106247 - DNA, 25 bp, SARS Virus
gattgataataataataagacaaac

SEQ ID NO: 106248 - DNA, 25 bp, SARS Virus
attgataataattataagacaaacc

SEQ ID NO: 106249 - DNA, 25 bp, SARS Virus
ttgataataatattaagacaaacct

SEQ ID NO: 106250 - DNA, 25 bp, SARS Virus
tgataataataataagacaaacctt

SEQ ID NO: 106251 - DNA, 25 bp, SARS Virus
gataataataattagacaaaccttg

SEQ ID NO: 106252 - DNA, 25 bp, SARS Virus
ataataataatatgacaaaccttga

SEQ ID NO: 106253 - DNA, 25 bp, SARS Virus
taataataataatacaaaccttgaa

SEQ ID NO: 106254 - DNA, 25 bp, SARS Virus
aataataataagtcaaaccttgaaa

SEQ ID NO: 106255 - DNA, 25 bp, SARS Virus
ataataataagataaaccttgaaat

SEQ ID NO: 106256 - DNA, 25 bp, SARS Virus
taataataagactaaccttgaaatt

SEQ ID NO: 106257 - DNA, 25 bp, SARS Virus
aataataagacataccttgaaattg

SEQ ID NO: 106258 - DNA, 25 bp, SARS Virus
ataataagacaatccttgaaattgt

SEQ ID NO: 106259 - DNA, 25 bp, SARS Virus
taataagacaaatcttgaaattgta

SEQ ID NO: 106260 - DNA, 25 bp, SARS Virus
aataagacaaactttgaaattgtaa

SEQ ID NO: 106261 - DNA, 25 bp, SARS Virus
ataagacaaaccttgaaattgtaac

SEQ ID NO: 106262 - DNA, 25 bp, SARS Virus
taagacaaaccttgaaattgtaacg

SEQ ID NO: 106263 - DNA, 25 bp, SARS Virus
aagacaaacctttaaattgtaacga

SEQ ID NO: 106264 - DNA, 25 bp, SARS Virus
agacaaaccttgtaattgtaacgaa

SEQ ID NO: 106265 - DNA, 25 bp, SARS Virus
gacaaaccttgatattgtaacgaat

SEQ ID NO: 106266 - DNA, 25 bp, SARS Virus
acaaaccttgaatttgtaacgaata

SEQ ID NO: 106267 - DNA, 25 bp, SARS Virus
caaaccttgaaattgtaacgaatag

SEQ ID NO: 106268 - DNA, 25 bp, SARS Virus
aaaccttgaaattgtaacgaatagt

SEQ ID NO: 106269 - DNA, 25 bp, SARS Virus
aaccttgaaattttaacgaatagta

SEQ ID NO: 106270 - DNA, 25 bp, SARS Virus
accttgaaattgtaacgaatagtac

SEQ ID NO: 106271 - DNA, 25 bp, SARS Virus
ccttgaaattgttacgaatagtacc

SEQ ID NO: 106272 - DNA, 25 bp, SARS Virus
cttgaaattgtatcgaatagtaccg

SEQ ID NO: 106273 - DNA, 25 bp, SARS Virus
ttgaaattgtaatgaatagtaccgt

SEQ ID NO: 106274 - DNA, 25 bp, SARS Virus
tgaaattgtaactaatagtaccgtc

SEQ ID NO: 106275 - DNA, 25 bp, SARS Virus
gaaattgtaacgtatagtaccgtct

SEQ ID NO: 106276 - DNA, 25 bp, SARS Virus
aaattgtaacgattagtaccgtctg

SEQ ID NO: 106277 - DNA, 25 bp, SARS Virus
aattgtaacgaatagtaccgtctgt

SEQ ID NO: 106278 - DNA, 25 bp, SARS Virus
attgtaacgaattgtaccgtctgtt

SEQ ID NO: 106279 - DNA, 25 bp, SARS Virus
ttgtaacgaatattaccgtctgttg

SEQ ID NO: 106280 - DNA, 25 bp, SARS Virus
tgtaacgaatagtaccgtctgttgc

SEQ ID NO: 106281 - DNA, 25 bp, SARS Virus
gtaacgaatagttccgtctgttgcc

SEQ ID NO: 106282 - DNA, 25 bp, SARS Virus
taacgaatagtatcgtctgttgcca

SEQ ID NO: 106283 - DNA, 25 bp, SARS Virus
aacgaatagtactgtctgttgccat

SEQ ID NO: 106284 - DNA, 25 bp, SARS Virus
acgaatagtaccttctgttgccatg

SEQ ID NO: 106285 - DNA, 25 bp, SARS Virus
cgaatagtaccgtctgttgccatga

SEQ ID NO: 106286 - DNA, 25 bp, SARS Virus
gaatagtaccgtttgttgccatgat

SEQ ID NO: 106287 - DNA, 25 bp, SARS Virus
aatagtaccgtctgttgccatgata

SEQ ID NO: 106288 - DNA, 25 bp, SARS Virus
atagtaccgtcttttgccatgataa

SEQ ID NO: 106289 - DNA, 25 bp, SARS Virus
tagtaccgtctgttgccatgataat

SEQ ID NO: 106290 - DNA, 25 bp, SARS Virus
agtaccgtctgttgccatgataatg

SEQ ID NO: 106291 - DNA, 25 bp, SARS Virus
gtaccgtctgtttccatgataatgg

SEQ ID NO: 106292 - DNA, 25 bp, SARS Virus
taccgtctgttgtcatgataatggc

SEQ ID NO: 106293 - DNA, 25 bp, SARS Virus
accgtctgttgctatgataatggca

SEQ ID NO: 106294 - DNA, 25 bp, SARS Virus
ccgtctgttgccttgataatggcaa

SEQ ID NO: 106295 - DNA, 25 bp, SARS Virus
cgtctgttgccatgataatggcaac

SEQ ID NO: 106296 - DNA, 25 bp, SARS Virus
gtctgttgccattataatggcaact

SEQ ID NO: 106297 - DNA, 25 bp, SARS Virus
tctgttgccatgttaatggcaactc

SEQ ID NO: 106298 - DNA, 25 bp, SARS Virus
ctgttgccatgataatggcaactcc

SEQ ID NO: 106299 - DNA, 25 bp, SARS Virus
tgttgccatgattatggcaactcct

SEQ ID NO: 106300 - DNA, 25 bp, SARS Virus
gttgccatgatattggcaactcctc

SEQ ID NO: 106301 - DNA, 25 bp, SARS Virus
ttgccatgataatggcaactcctcg

SEQ ID NO: 106302 - DNA, 25 bp, SARS Virus
tgccatgataattgcaactcctcga

SEQ ID NO: 106303 - DNA, 25 bp, SARS Virus
gccatgataatgtcaactcctcgaa

SEQ ID NO: 106304 - DNA, 25 bp, SARS Virus
ccatgataatggtaactcctcgaat

SEQ ID NO: 106305 - DNA, 25 bp, SARS Virus
catgataatggctactcctcgaatt

SEQ ID NO: 106306 - DNA, 25 bp, SARS Virus
atgataatggcatctcctcgaattt

SEQ ID NO: 106307 - DNA, 25 bp, SARS Virus
tgataatggcaattcctcgaatttg

SEQ ID NO: 106308 - DNA, 25 bp, SARS Virus
gataatggcaactcctcgaatttgt

SEQ ID NO: 106309 - DNA, 25 bp, SARS Virus
ataatggcaacttctcgaatttgtt

SEQ ID NO: 106310 - DNA, 25 bp, SARS Virus
taatggcaactcttcgaatttgttg

SEQ ID NO: 106311 - DNA, 25 bp, SARS Virus
aatggcaactcctcgaatttgttga

SEQ ID NO: 106312 - DNA, 25 bp, SARS Virus
atggcaactccttgaatttgttgag

SEQ ID NO: 106313 - DNA, 25 bp, SARS Virus
tggcaactcctctaatttgttgagg

SEQ ID NO: 106314 - DNA, 25 bp, SARS Virus
ggcaactcctcgtatttgttgagga

SEQ ID NO: 106315 - DNA, 25 bp, SARS Virus
gcaactcctcgattttgttgaggac

SEQ ID NO: 106316 - DNA, 25 bp, SARS Virus
caactcctcgaatttgttgaggacc

SEQ ID NO: 106317 - DNA, 25 bp, SARS Virus
aactcctcgaatttgttgaggacct

SEQ ID NO: 106318 - DNA, 25 bp, SARS Virus
actcctcgaatttgttgaggacctt

SEQ ID NO: 106319 - DNA, 25 bp, SARS Virus
ctcctcgaattttttgaggaccttg

SEQ ID NO: 106320 - DNA, 25 bp, SARS Virus
tcctcgaatttgttgaggaccttgt

SEQ ID NO: 106321 - DNA, 25 bp, SARS Virus
cctcgaatttgttgaggaccttgtt

SEQ ID NO: 106322 - DNA, 25 bp, SARS Virus
ctcgaatttgtttaggaccttgtta

SEQ ID NO: 106323 - DNA, 25 bp, SARS Virus
tcgaatttgttgtggaccttgttac

SEQ ID NO: 106324 - DNA, 25 bp, SARS Virus
cgaatttgttgatgaccttgttacc

SEQ ID NO: 106325 - DNA, 25 bp, SARS Virus
gaatttgttgagtaccttgttacct

SEQ ID NO: 106326 - DNA, 25 bp, SARS Virus
aatttgttgaggtccttgttacctt

SEQ ID NO: 106327 - DNA, 25 bp, SARS Virus
atttgttgaggatcttgttaccttg

SEQ ID NO: 106328 - DNA, 25 bp, SARS Virus
tttgttgaggactttgttaccttgg

SEQ ID NO: 106329 - DNA, 25 bp, SARS Virus
ttgttgaggaccttgttaccttgga

SEQ ID NO: 106330 - DNA, 25 bp, SARS Virus
tgttgaggaccttgttaccttggat

SEQ ID NO: 106331 - DNA, 25 bp, SARS Virus
gttgaggacctttttaccttggatc

SEQ ID NO: 106332 - DNA, 25 bp, SARS Virus
ttgaggaccttgttaccttggatca

SEQ ID NO: 106333 - DNA, 25 bp, SARS Virus
tgaggaccttgttaccttggatcat

SEQ ID NO: 106334 - DNA, 25 bp, SARS Virus
gaggaccttgtttccttggatcatt

SEQ ID NO: 106335 - DNA, 25 bp, SARS Virus
aggaccttgttatcttggatcatta

SEQ ID NO: 106336 - DNA, 25 bp, SARS Virus
ggaccttgttactttggatcattat

SEQ ID NO: 106337 - DNA, 25 bp, SARS Virus
gaccttgttaccttggatcattatc

SEQ ID NO: 106338 - DNA, 25 bp, SARS Virus
accttgttaccttggatcattatcc

SEQ ID NO: 106339 - DNA, 25 bp, SARS Virus
ccttgttacctttgatcattatcca

SEQ ID NO: 106340 - DNA, 25 bp, SARS Virus
cttgttaccttgtatcattatccaa

SEQ ID NO: 106341 - DNA, 25 bp, SARS Virus
ttgttaccttggttcattatccaaa

SEQ ID NO: 106342 - DNA, 25 bp, SARS Virus
tgttaccttggatcattatccaaag

SEQ ID NO: 106343 - DNA, 25 bp, SARS Virus
gttaccttggattattatccaaagg

SEQ ID NO: 106344 - DNA, 25 bp, SARS Virus
ttaccttggatctttatccaaagga

SEQ ID NO: 106345 - DNA, 25 bp, SARS Virus
taccttggatcattatccaaaggat

SEQ ID NO: 106346 - DNA, 25 bp, SARS Virus
accttggatcattatccaaaggata

SEQ ID NO: 106347 - DNA, 25 bp, SARS Virus
ccttggatcattttccaaaggataa

SEQ ID NO: 106348 - DNA, 25 bp, SARS Virus
cttggatcattatccaaaggataag

SEQ ID NO: 106349 - DNA, 25 bp, SARS Virus
ttggatcattattcaaaggataagg

SEQ ID NO: 106350 - DNA, 25 bp, SARS Virus
tggatcattatctaaaggataagga

SEQ ID NO: 106351 - DNA, 25 bp, SARS Virus
ggatcattatcctaaggataaggat

SEQ ID NO: 106352 - DNA, 25 bp, SARS Virus
gatcattatccataggataaggatc

SEQ ID NO: 106353 - DNA, 25 bp, SARS Virus
atcattatccaatggataaggatcg

SEQ ID NO: 106354 - DNA, 25 bp, SARS Virus
tcattatccaaatgataaggatcgg

SEQ ID NO: 106355 - DNA, 25 bp, SARS Virus
cattatccaaagtataaggatcgga

SEQ ID NO: 106356 - DNA, 25 bp, SARS Virus
attatccaaaggttaaggatcggac

SEQ ID NO: 106357 - DNA, 25 bp, SARS Virus
ttatccaaaggataaggatcggacc

SEQ ID NO: 106358 - DNA, 25 bp, SARS Virus
tatccaaaggattaggatcggacct

SEQ ID NO: 106359 - DNA, 25 bp, SARS Virus
atccaaaggatatggatcggaccta

SEQ ID NO: 106360 - DNA, 25 bp, SARS Virus
tccaaaggataatgatcggacctaa

SEQ ID NO: 106361 - DNA, 25 bp, SARS Virus
ccaaaggataagtatcggacctaat

SEQ ID NO: 106362 - DNA, 25 bp, SARS Virus
caaaggataaggttcggacctaata

SEQ ID NO: 106363 - DNA, 25 bp, SARS Virus
aaaggataaggatcggacctaatac

SEQ ID NO: 106364 - DNA, 25 bp, SARS Virus
aaggataaggattggacctaataca

SEQ ID NO: 106365 - DNA, 25 bp, SARS Virus
aggataaggatctgacctaatacaa

SEQ ID NO: 106366 - DNA, 25 bp, SARS Virus
ggataaggatcgtacctaatacaat

SEQ ID NO: 106367 - DNA, 25 bp, SARS Virus
gataaggatcggtcctaatacaatg

SEQ ID NO: 106368 - DNA, 25 bp, SARS Virus
ataaggatcggatctaatacaatga

SEQ ID NO: 106369 - DNA, 25 bp, SARS Virus
taaggatcggacttaatacaatgat

SEQ ID NO: 106370 - DNA, 25 bp, SARS Virus
aaggatcggacctaatacaatgatg

SEQ ID NO: 106371 - DNA, 25 bp, SARS Virus
aggatcggaccttatacaatgatgt

SEQ ID NO: 106372 - DNA, 25 bp, SARS Virus
ggatcggacctattacaatgatgtt

SEQ ID NO: 106373 - DNA, 25 bp, SARS Virus
gatcggacctaatacaatgatgtta

SEQ ID NO: 106374 - DNA, 25 bp, SARS Virus
atcggacctaattcaatgatgttaa

SEQ ID NO: 106375 - DNA, 25 bp, SARS Virus
tcggacctaatataatgatgttaaa

SEQ ID NO: 106376 - DNA, 25 bp, SARS Virus
cggacctaatactatgatgttaaac

SEQ ID NO: 106377 - DNA, 25 bp, SARS Virus
ggacctaatacattgatgttaaacg

SEQ ID NO: 106378 - DNA, 25 bp, SARS Virus
gacctaatacaatgatgttaaacgg

SEQ ID NO: 106379 - DNA, 25 bp, SARS Virus
acctaatacaattatgttaaacgga

SEQ ID NO: 106380 - DNA, 25 bp, SARS Virus
cctaatacaatgttgttaaacggat

SEQ ID NO: 106381 - DNA, 25 bp, SARS Virus
ctaatacaatgatgttaaacggata

SEQ ID NO: 106382 - DNA, 25 bp, SARS Virus
taatacaatgattttaaacggataa

SEQ ID NO: 106383 - DNA, 25 bp, SARS Virus
aatacaatgatgttaaacggataag

SEQ ID NO: 106384 - DNA, 25 bp, SARS Virus
atacaatgatgttaaacggataaga

SEQ ID NO: 106385 - DNA, 25 bp, SARS Virus
tacaatgatgtttaacggataagat

SEQ ID NO: 106386 - DNA, 25 bp, SARS Virus
acaatgatgttatacggataagatt

SEQ ID NO: 106387 - DNA, 25 bp, SARS Virus
caatgatgttaatcggataagatta

SEQ ID NO: 106388 - DNA, 25 bp, SARS Virus
aatgatgttaaatggataagattag

SEQ ID NO: 106389 - DNA, 25 bp, SARS Virus
atgatgttaaactgataagattagc

SEQ ID NO: 106390 - DNA, 25 bp, SARS Virus
tgatgttaaacgtataagattagcc

SEQ ID NO: 106391 - DNA, 25 bp, SARS Virus
gatgttaaacggttaagattagcct

SEQ ID NO: 106392 - DNA, 25 bp, SARS Virus
atgttaaacggataagattagcctt

SEQ ID NO: 106393 - DNA, 25 bp, SARS Virus
tgttaaacggattagattagccttg

SEQ ID NO: 106394 - DNA, 25 bp, SARS Virus
gttaaacggatatgattagccttgt

SEQ ID NO: 106395 - DNA, 25 bp, SARS Virus
ttaaacggataatattagccttgtc

SEQ ID NO: 106396 - DNA, 25 bp, SARS Virus
taaacggataagtttagccttgtcc

SEQ ID NO: 106397 - DNA, 25 bp, SARS Virus
aaacggataagattagccttgtcca

SEQ ID NO: 106398 - DNA, 25 bp, SARS Virus
aacggataagattagccttgtccaa

SEQ ID NO: 106399 - DNA, 25 bp, SARS Virus
acggataagatttgccttgtccaaa

SEQ ID NO: 106400 - DNA, 25 bp, SARS Virus
cggataagattatccttgtccaaaa

SEQ ID NO: 106401 - DNA, 25 bp, SARS Virus
ggataagattagtcttgtccaaaaa

SEQ ID NO: 106402 - DNA, 25 bp, SARS Virus
gataagattagctttgtccaaaaac

SEQ ID NO: 106403 - DNA, 25 bp, SARS Virus
ataagattagccttgtccaaaaaca

SEQ ID NO: 106404 - DNA, 25 bp, SARS Virus
taagattagccttgtccaaaaacat

SEQ ID NO: 106405 - DNA, 25 bp, SARS Virus
aagattagccttttccaaaaacatg

SEQ ID NO: 106406 - DNA, 25 bp, SARS Virus
agattagccttgtccaaaaacatgt

SEQ ID NO: 106407 - DNA, 25 bp, SARS Virus
gattagccttgttcaaaaacatgta

SEQ ID NO: 106408 - DNA, 25 bp, SARS Virus
attagccttgtctaaaaacatgtat

SEQ ID NO: 106409 - DNA, 25 bp, SARS Virus
ttagccttgtcctaaaacatgtatt

SEQ ID NO: 106410 - DNA, 25 bp, SARS Virus
tagccttgtccataaacatgtatta

SEQ ID NO: 106411 - DNA, 25 bp, SARS Virus
agccttgtccaataacatgtattat

SEQ ID NO: 106412 - DNA, 25 bp, SARS Virus
gccttgtccaaatacatgtattatt

SEQ ID NO: 106413 - DNA, 25 bp, SARS Virus
ccttgtccaaaatcatgtattattt

SEQ ID NO: 106414 - DNA, 25 bp, SARS Virus
cttgtccaaaaatatgtattatttc

SEQ ID NO: 106415 - DNA, 25 bp, SARS Virus
ttgtccaaaaacttgtattatttcg

SEQ ID NO: 106416 - DNA, 25 bp, SARS Virus
tgtccaaaaacatgtattatttcga

SEQ ID NO: 106417 - DNA, 25 bp, SARS Virus
gtccaaaaacatttattatttcgaa

SEQ ID NO: 106418 - DNA, 25 bp, SARS Virus
tccaaaaacatgtattatttcgaac

SEQ ID NO: 106419 - DNA, 25 bp, SARS Virus
ccaaaaacatgttttatttcgaaca

SEQ ID NO: 106420 - DNA, 25 bp, SARS Virus
caaaaacatgtattatttcgaacaa

SEQ ID NO: 106421 - DNA, 25 bp, SARS Virus
aaaaacatgtattatttcgaacaaa

SEQ ID NO: 106422 - DNA, 25 bp, SARS Virus
aaaacatgtattttttcgaacaaaa

SEQ ID NO: 106423 - DNA, 25 bp, SARS Virus
aaacatgtattatttcgaacaaaag

SEQ ID NO: 106424 - DNA, 25 bp, SARS Virus
aacatgtattatttcgaacaaaagg

SEQ ID NO: 106425 - DNA, 25 bp, SARS Virus
acatgtattatttcgaacaaaagga

SEQ ID NO: 106426 - DNA, 25 bp, SARS Virus
catgtattattttgaacaaaaggag

SEQ ID NO: 106427 - DNA, 25 bp, SARS Virus
atgtattatttctaacaaaaggaga

SEQ ID NO: 106428 - DNA, 25 bp, SARS Virus
tgtattatttcgtacaaaaggagac

SEQ ID NO: 106429 - DNA, 25 bp, SARS Virus
gtattatttcgatcaaaaggagacc

SEQ ID NO: 106430 - DNA, 25 bp, SARS Virus
tattatttcgaataaaaggagaccg

SEQ ID NO: 106431 - DNA, 25 bp, SARS Virus
attatttcgaactaaaggagaccga

SEQ ID NO: 106432 - DNA, 25 bp, SARS Virus
ttatttcgaacataaggagaccgag

SEQ ID NO: 106433 - DNA, 25 bp, SARS Virus
tatttcgaacaataggagaccgaga

SEQ ID NO: 106434 - DNA, 25 bp, SARS Virus
atttcgaacaaatggagaccgagaa

SEQ ID NO: 106435 - DNA, 25 bp, SARS Virus
tttcgaacaaaatgagaccgagaac

SEQ ID NO: 106436 - DNA, 25 bp, SARS Virus
ttcgaacaaaagtagaccgagaaca

SEQ ID NO: 106437 - DNA, 25 bp, SARS Virus
tcgaacaaaaggtgaccgagaacac

SEQ ID NO: 106438 - DNA, 25 bp, SARS Virus
cgaacaaaaggataccgagaacacc

SEQ ID NO: 106439 - DNA, 25 bp, SARS Virus
gaacaaaaggagtccgagaacaccg

SEQ ID NO: 106440 - DNA, 25 bp, SARS Virus
aacaaaaggagatcgagaacaccgg

SEQ ID NO: 106441 - DNA, 25 bp, SARS Virus
acaaaaggagactgagaacaccggt

SEQ ID NO: 106442 - DNA, 25 bp, SARS Virus
caaaaggagacctagaacaccggtc

SEQ ID NO: 106443 - DNA, 25 bp, SARS Virus
aaaaggagaccgtgaacaccggtca

SEQ ID NO: 106444 - DNA, 25 bp, SARS Virus
aaaggagaccgataacaccggtcat

SEQ ID NO: 106445 - DNA, 25 bp, SARS Virus
aaggagaccgagtacaccggtcatt

SEQ ID NO: 106446 - DNA, 25 bp, SARS Virus
aggagaccgagatcaccggtcattg

SEQ ID NO: 106447 - DNA, 25 bp, SARS Virus
ggagaccgagaataccggtcattgt

SEQ ID NO: 106448 - DNA, 25 bp, SARS Virus
gagaccgagaactccggtcattgtg

SEQ ID NO: 106449 - DNA, 25 bp, SARS Virus
agaccgagaacatcggtcattgtga

SEQ ID NO: 106450 - DNA, 25 bp, SARS Virus
gaccgagaacactggtcattgtgaa

SEQ ID NO: 106451 - DNA, 25 bp, SARS Virus
accgagaacacctgtcattgtgaac

SEQ ID NO: 106452 - DNA, 25 bp, SARS Virus
ccgagaacaccgttcattgtgaacg

SEQ ID NO: 106453 - DNA, 25 bp, SARS Virus
cgagaacaccggtcattgtgaacga

SEQ ID NO: 106454 - DNA, 25 bp, SARS Virus
gagaacaccggttattgtgaacgaa

SEQ ID NO: 106455 - DNA, 25 bp, SARS Virus
agaacaccggtctttgtgaacgaac

SEQ ID NO: 106456 - DNA, 25 bp, SARS Virus
gaacaccggtcattgtgaacgaaca

SEQ ID NO: 106457 - DNA, 25 bp, SARS Virus
aacaccggtcattgtgaacgaacaa

SEQ ID NO: 106458 - DNA, 25 bp, SARS Virus
acaccggtcattttgaacgaacaaa

SEQ ID NO: 106459 - DNA, 25 bp, SARS Virus
caccggtcattgtgaacgaacaaaa

SEQ ID NO: 106460 - DNA, 25 bp, SARS Virus
accggtcattgttaacgaacaaaac

SEQ ID NO: 106461 - DNA, 25 bp, SARS Virus
ccggtcattgtgtacgaacaaaaca

SEQ ID NO: 106462 - DNA, 25 bp, SARS Virus
cggtcattgtgatcgaacaaaacac

SEQ ID NO: 106463 - DNA, 25 bp, SARS Virus
ggtcattgtgaatgaacaaaacacg

SEQ ID NO: 106464 - DNA, 25 bp, SARS Virus
gtcattgtgaactaacaaaacacga

SEQ ID NO: 106465 - DNA, 25 bp, SARS Virus
tcattgtgaacgtacaaaacacgaa

SEQ ID NO: 106466 - DNA, 25 bp, SARS Virus
cattgtgaacgatcaaaacacgaac

SEQ ID NO: 106467 - DNA, 25 bp, SARS Virus
attgtgaacgaataaaacacgaacg

SEQ ID NO: 106468 - DNA, 25 bp, SARS Virus
ttgtgaacgaactaaacacgaacga

SEQ ID NO: 106469 - DNA, 25 bp, SARS Virus
tgtgaacgaacataacacgaacgac

SEQ ID NO: 106470 - DNA, 25 bp, SARS Virus
gtgaacgaacaatacacgaacgacg

SEQ ID NO: 106471 - DNA, 25 bp, SARS Virus
tgaacgaacaaatcacgaacgacga

SEQ ID NO: 106472 - DNA, 25 bp, SARS Virus
gaacgaacaaaatacgaacgacgac

SEQ ID NO: 106473 - DNA, 25 bp, SARS Virus
aacgaacaaaactcgaacgacgaca

SEQ ID NO: 106474 - DNA, 25 bp, SARS Virus
acgaacaaaacatgaacgacgacag

SEQ ID NO: 106475 - DNA, 25 bp, SARS Virus
cgaacaaaacactaacgacgacaga

SEQ ID NO: 106476 - DNA, 25 bp, SARS Virus
gaacaaaacacgtacgacgacagat

SEQ ID NO: 106477 - DNA, 25 bp, SARS Virus
aacaaaacacgatcgacgacagatg

SEQ ID NO: 106478 - DNA, 25 bp, SARS Virus
acaaaacacgaatgacgacagatgt

SEQ ID NO: 106479 - DNA, 25 bp, SARS Virus
caaaacacgaactacgacagatgtc

SEQ ID NO: 106480 - DNA, 25 bp, SARS Virus
aaaacacgaacgtcgacagatgtct

SEQ ID NO: 106481 - DNA, 25 bp, SARS Virus
aaacacgaacgatgacagatgtctt

SEQ ID NO: 106482 - DNA, 25 bp, SARS Virus
aacacgaacgactacagatgtctta

SEQ ID NO: 106483 - DNA, 25 bp, SARS Virus
acacgaacgacgtcagatgtcttaa

SEQ ID NO: 106484 - DNA, 25 bp, SARS Virus
cacgaacgacgatagatgtcttaat

SEQ ID NO: 106485 - DNA, 25 bp, SARS Virus
acgaacgacgactgatgtcttaatt

SEQ ID NO: 106486 - DNA, 25 bp, SARS Virus
cgaacgacgacatatgtcttaatta

SEQ ID NO: 106487 - DNA, 25 bp, SARS Virus
gaacgacgacagttgtcttaattaa

SEQ ID NO: 106488 - DNA, 25 bp, SARS Virus
aacgacgacagatgtcttaattaac

SEQ ID NO: 106489 - DNA, 25 bp, SARS Virus
acgacgacagatttcttaattaacc

SEQ ID NO: 106490 - DNA, 25 bp, SARS Virus
cgacgacagatgtcttaattaaccc

SEQ ID NO: 106491 - DNA, 25 bp, SARS Virus
gacgacagatgttttaattaaccca

SEQ ID NO: 106492 - DNA, 25 bp, SARS Virus
acgacagatgtcttaattaacccac

SEQ ID NO: 106493 - DNA, 25 bp, SARS Virus
cgacagatgtcttaattaacccact

SEQ ID NO: 106494 - DNA, 25 bp, SARS Virus
gacagatgtctttattaacccactg

SEQ ID NO: 106495 - DNA, 25 bp, SARS Virus
acagatgtcttatttaacccactga

SEQ ID NO: 106496 - DNA, 25 bp, SARS Virus
cagatgtcttaattaacccactgac

SEQ ID NO: 106497 - DNA, 25 bp, SARS Virus
agatgtcttaattaacccactgacc

SEQ ID NO: 106498 - DNA, 25 bp, SARS Virus
gatgtcttaatttacccactgaccg

SEQ ID NO: 106499 - DNA, 25 bp, SARS Virus
atgtcttaattatcccactgaccgc

SEQ ID NO: 106500 - DNA, 25 bp, SARS Virus
tgtcttaattaatccactgaccgcc

SEQ ID NO: 106501 - DNA, 25 bp, SARS Virus
gtcttaattaactcactgaccgccc

SEQ ID NO: 106502 - DNA, 25 bp, SARS Virus
tcttaattaacctactgaccgccct

SEQ ID NO: 106503 - DNA, 25 bp, SARS Virus
cttaattaaccctctgaccgcccta

SEQ ID NO: 106504 - DNA, 25 bp, SARS Virus
ttaattaacccattgaccgccctaa

SEQ ID NO: 106505 - DNA, 25 bp, SARS Virus
taattaacccactgaccgccctaac

SEQ ID NO: 106506 - DNA, 25 bp, SARS Virus
aattaacccacttaccgccctaacg

SEQ ID NO: 106507 - DNA, 25 bp, SARS Virus
attaacccactgtccgccctaacgc

SEQ ID NO: 106508 - DNA, 25 bp, SARS Virus
ttaacccactgatcgccctaacgct

SEQ ID NO: 106509 - DNA, 25 bp, SARS Virus
taacccactgactgccctaacgcta

SEQ ID NO: 106510 - DNA, 25 bp, SARS Virus
aacccactgacctccctaacgctaa

SEQ ID NO: 106511 - DNA, 25 bp, SARS Virus
acccactgaccgtcctaacgctaac

SEQ ID NO: 106512 - DNA, 25 bp, SARS Virus
cccactgaccgctctaacgctaacg

SEQ ID NO: 106513 - DNA, 25 bp, SARS Virus
ccactgaccgccataacgctaacgt

SEQ ID NO: 106514 - DNA, 25 bp, SARS Virus
cactgaccgcccaaacgctaacgtt

SEQ ID NO: 106515 - DNA, 25 bp, SARS Virus
actgaccgccctaacgctaacgtta

SEQ ID NO: 106516 - DNA, 25 bp, SARS Virus
ctgaccgccctaacgctaacgttac

SEQ ID NO: 106517 - DNA, 25 bp, SARS Virus
tgaccgccctaaagctaacgttacc

SEQ ID NO: 106518 - DNA, 25 bp, SARS Virus
gaccgccctaacactaacgttaccg

SEQ ID NO: 106519 - DNA, 25 bp, SARS Virus
accgccctaacgataacgttaccga

SEQ ID NO: 106520 - DNA, 25 bp, SARS Virus
ccgccctaacgcaaacgttaccgaa

SEQ ID NO: 106521 - DNA, 25 bp, SARS Virus
cgccctaacgctaacgttaccgaac

SEQ ID NO: 106522 - DNA, 25 bp, SARS Virus
gccctaacgctaacgttaccgaaca

SEQ ID NO: 106523 - DNA, 25 bp, SARS Virus
ccctaacgctaaagttaccgaacat

SEQ ID NO: 106524 - DNA, 25 bp, SARS Virus
cctaacgctaacattaccgaacata

SEQ ID NO: 106525 - DNA, 25 bp, SARS Virus
ctaacgctaacgataccgaacataa

SEQ ID NO: 106526 - DNA, 25 bp, SARS Virus
taacgctaacgtaaccgaacataac

SEQ ID NO: 106527 - DNA, 25 bp, SARS Virus
aacgctaacgttaccgaacataaca

SEQ ID NO: 106528 - DNA, 25 bp, SARS Virus
acgctaacgttaacgaacataacat

SEQ ID NO: 106529 - DNA, 25 bp, SARS Virus
cgctaacgttacagaacataacatc

SEQ ID NO: 106530 - DNA, 25 bp, SARS Virus
gctaacgttaccaaacataacatcc

SEQ ID NO: 106531 - DNA, 25 bp, SARS Virus
ctaacgttaccgaacataacatccg

SEQ ID NO: 106532 - DNA, 25 bp, SARS Virus
taacgttaccgaacataacatccga

SEQ ID NO: 106533 - DNA, 25 bp, SARS Virus
aacgttaccgaaaataacatccgaa

SEQ ID NO: 106534 - DNA, 25 bp, SARS Virus
acgttaccgaacataacatccgaac

SEQ ID NO: 106535 - DNA, 25 bp, SARS Virus
cgttaccgaacaaaacatccgaact

SEQ ID NO: 106536 - DNA, 25 bp, SARS Virus
gttaccgaacataacatccgaacta

SEQ ID NO: 106537 - DNA, 25 bp, SARS Virus
ttaccgaacataacatccgaactac

SEQ ID NO: 106538 - DNA, 25 bp, SARS Virus
taccgaacataaaatccgaactaca

SEQ ID NO: 106539 - DNA, 25 bp, SARS Virus
accgaacataacatccgaactacac

SEQ ID NO: 106540 - DNA, 25 bp, SARS Virus
ccgaacataacaaccgaactacacc

SEQ ID NO: 106541 - DNA, 25 bp, SARS Virus
cgaacataacatacgaactacaccg

SEQ ID NO: 106542 - DNA, 25 bp, SARS Virus
gaacataacatcagaactacaccga

SEQ ID NO: 106543 - DNA, 25 bp, SARS Virus
aacataacatccaaactacaccgaa

SEQ ID NO: 106544 - DNA, 25 bp, SARS Virus
acataacatccgaactacaccgaat

SEQ ID NO: 106545 - DNA, 25 bp, SARS Virus
cataacatccgaactacaccgaatc

SEQ ID NO: 106546 - DNA, 25 bp, SARS Virus
ataacatccgaaatacaccgaatcg

SEQ ID NO: 106547 - DNA, 25 bp, SARS Virus
taacatccgaacaacaccgaatcga

SEQ ID NO: 106548 - DNA, 25 bp, SARS Virus
aacatccgaactacaccgaatcgat

SEQ ID NO: 106549 - DNA, 25 bp, SARS Virus
acatccgaactaaaccgaatcgatg

SEQ ID NO: 106550 - DNA, 25 bp, SARS Virus
catccgaactacaccgaatcgatga

SEQ ID NO: 106551 - DNA, 25 bp, SARS Virus
atccgaactacaacgaatcgatgaa

SEQ ID NO: 106552 - DNA, 25 bp, SARS Virus
tccgaactacacagaatcgatgaag

SEQ ID NO: 106553 - DNA, 25 bp, SARS Virus
ccgaactacaccaaatcgatgaagc

SEQ ID NO: 106554 - DNA, 25 bp, SARS Virus
cgaactacaccgaatcgatgaagca

SEQ ID NO: 106555 - DNA, 25 bp, SARS Virus
gaactacaccgaatcgatgaagcaa

SEQ ID NO: 106556 - DNA, 25 bp, SARS Virus
aactacaccgaaacgatgaagcaac

SEQ ID NO: 106557 - DNA, 25 bp, SARS Virus
actacaccgaatagatgaagcaacg

SEQ ID NO: 106558 - DNA, 25 bp, SARS Virus
ctacaccgaatcaatgaagcaacga

SEQ ID NO: 106559 - DNA, 25 bp, SARS Virus
tacaccgaatcgatgaagcaacgaa

SEQ ID NO: 106560 - DNA, 25 bp, SARS Virus
acaccgaatcgaagaagcaacgaag

SEQ ID NO: 106561 - DNA, 25 bp, SARS Virus
caccgaatcgataaagcaacgaagg

SEQ ID NO: 106562 - DNA, 25 bp, SARS Virus
accgaatcgatgaagcaacgaagga

SEQ ID NO: 106563 - DNA, 25 bp, SARS Virus
ccgaatcgatgaagcaacgaaggaa

SEQ ID NO: 106564 - DNA, 25 bp, SARS Virus
cgaatcgatgaaacaacgaaggaag

SEQ ID NO: 106565 - DNA, 25 bp, SARS Virus
gaatcgatgaagaaacgaaggaagt

SEQ ID NO: 106566 - DNA, 25 bp, SARS Virus
aatcgatgaagcaacgaaggaagtc

SEQ ID NO: 106567 - DNA, 25 bp, SARS Virus
atcgatgaagcaacgaaggaagtcc

SEQ ID NO: 106568 - DNA, 25 bp, SARS Virus
tcgatgaagcaaagaaggaagtccg

SEQ ID NO: 106569 - DNA, 25 bp, SARS Virus
cgatgaagcaacaaaggaagtccga

SEQ ID NO: 106570 - DNA, 25 bp, SARS Virus
gatgaagcaacgaaggaagtccgac

SEQ ID NO: 106571 - DNA, 25 bp, SARS Virus
atgaagcaacgaaggaagtccgaca

SEQ ID NO: 106572 - DNA, 25 bp, SARS Virus
tgaagcaacgaaagaagtccgacaa

SEQ ID NO: 106573 - DNA, 25 bp, SARS Virus
gaagcaacgaagaaagtccgacaaa

SEQ ID NO: 106574 - DNA, 25 bp, SARS Virus
aagcaacgaaggaagtccgacaaac

SEQ ID NO: 106575 - DNA, 25 bp, SARS Virus
agcaacgaaggaagtccgacaaacg

SEQ ID NO: 106576 - DNA, 25 bp, SARS Virus
gcaacgaaggaaatccgacaaacga

SEQ ID NO: 106577 - DNA, 25 bp, SARS Virus
caacgaaggaagaccgacaaacgag

SEQ ID NO: 106578 - DNA, 25 bp, SARS Virus
aacgaaggaagtacgacaaacgagc

SEQ ID NO: 106579 - DNA, 25 bp, SARS Virus
acgaaggaagtcagacaaacgagca

SEQ ID NO: 106580 - DNA, 25 bp, SARS Virus
cgaaggaagtccaacaaacgagcat

SEQ ID NO: 106581 - DNA, 25 bp, SARS Virus
gaaggaagtccgacaaacgagcatg

SEQ ID NO: 106582 - DNA, 25 bp, SARS Virus
aaggaagtccgaaaaacgagcatgg

SEQ ID NO: 106583 - DNA, 25 bp, SARS Virus
aggaagtccgacaaacgagcatggg

SEQ ID NO: 106584 - DNA, 25 bp, SARS Virus
ggaagtccgacaaacgagcatgggc

SEQ ID NO: 106585 - DNA, 25 bp, SARS Virus
gaagtccgacaaacgagcatgggcg

SEQ ID NO: 106586 - DNA, 25 bp, SARS Virus
aagtccgacaaaagagcatgggcga

SEQ ID NO: 106587 - DNA, 25 bp, SARS Virus
agtccgacaaacaagcatgggcgag

SEQ ID NO: 106588 - DNA, 25 bp, SARS Virus
gtccgacaaacgagcatgggcgagt

SEQ ID NO: 106589 - DNA, 25 bp, SARS Virus
tccgacaaacgaacatgggcgagtt

SEQ ID NO: 106590 - DNA, 25 bp, SARS Virus
ccgacaaacgagaatgggcgagtta

SEQ ID NO: 106591 - DNA, 25 bp, SARS Virus
cgacaaacgagcatgggcgagttac

SEQ ID NO: 106592 - DNA, 25 bp, SARS Virus
gacaaacgagcaagggcgagttaca

SEQ ID NO: 106593 - DNA, 25 bp, SARS Virus
acaaacgagcataggcgagttacac

SEQ ID NO: 106594 - DNA, 25 bp, SARS Virus
caaacgagcatgagcgagttacacc

SEQ ID NO: 106595 - DNA, 25 bp, SARS Virus
aaacgagcatggacgagttacacca

SEQ ID NO: 106596 - DNA, 25 bp, SARS Virus
aacgagcatgggagagttacaccag

SEQ ID NO: 106597 - DNA, 25 bp, SARS Virus
acgagcatgggcaagttacaccagt

SEQ ID NO: 106598 - DNA, 25 bp, SARS Virus
cgagcatgggcgagttacaccagta

SEQ ID NO: 106599 - DNA, 25 bp, SARS Virus
gagcatgggcgaattacaccagtaa

SEQ ID NO: 106600 - DNA, 25 bp, SARS Virus
agcatgggcgagatacaccagtaag

SEQ ID NO: 106601 - DNA, 25 bp, SARS Virus
gcatgggcgagtaacaccagtaagt

SEQ ID NO: 106602 - DNA, 25 bp, SARS Virus
catgggcgagttacaccagtaagtt

SEQ ID NO: 106603 - DNA, 25 bp, SARS Virus
atgggcgagttaaaccagtaagttg

SEQ ID NO: 106604 - DNA, 25 bp, SARS Virus
tgggcgagttacaccagtaagttgg

SEQ ID NO: 106605 - DNA, 25 bp, SARS Virus
gggcgagttacaacagtaagttggg

SEQ ID NO: 106606 - DNA, 25 bp, SARS Virus
ggcgagttacacaagtaagttgggt

SEQ ID NO: 106607 - DNA, 25 bp, SARS Virus
gcgagttacaccagtaagttgggtc

SEQ ID NO: 106608 - DNA, 25 bp, SARS Virus
cgagttacaccaataagttgggtct

SEQ ID NO: 106609 - DNA, 25 bp, SARS Virus
gagttacaccagaaagttgggtctt

SEQ ID NO: 106610 - DNA, 25 bp, SARS Virus
agttacaccagtaagttgggtcttt

SEQ ID NO: 106611 - DNA, 25 bp, SARS Virus
gttacaccagtaagttgggtctttg

SEQ ID NO: 106612 - DNA, 25 bp, SARS Virus
ttacaccagtaaattgggtctttgt

SEQ ID NO: 106613 - DNA, 25 bp, SARS Virus
tacaccagtaagatgggtctttgtt

SEQ ID NO: 106614 - DNA, 25 bp, SARS Virus
acaccagtaagtagggtctttgttt

SEQ ID NO: 106615 - DNA, 25 bp, SARS Virus
caccagtaagttaggtctttgtttg

SEQ ID NO: 106616 - DNA, 25 bp, SARS Virus
accagtaagttgagtctttgtttgt

SEQ ID NO: 106617 - DNA, 25 bp, SARS Virus
ccagtaagttggatctttgtttgta

SEQ ID NO: 106618 - DNA, 25 bp, SARS Virus
cagtaagttgggactttgtttgtaa

SEQ ID NO: 106619 - DNA, 25 bp, SARS Virus
agtaagttgggtatttgtttgtaag

SEQ ID NO: 106620 - DNA, 25 bp, SARS Virus
gtaagttgggtcattgtttgtaaga

SEQ ID NO: 106621 - DNA, 25 bp, SARS Virus
taagttgggtctatgtttgtaagaa

SEQ ID NO: 106622 - DNA, 25 bp, SARS Virus
aagttgggtcttagtttgtaagaag

SEQ ID NO: 106623 - DNA, 25 bp, SARS Virus
agttgggtctttatttgtaagaaga

SEQ ID NO: 106624 - DNA, 25 bp, SARS Virus
gttgggtctttgattgtaagaagag

SEQ ID NO: 106625 - DNA, 25 bp, SARS Virus
ttgggtctttgtatgtaagaagagt

SEQ ID NO: 106626 - DNA, 25 bp, SARS Virus
tgggtctttgttagtaagaagagtt

SEQ ID NO: 106627 - DNA, 25 bp, SARS Virus
gggtctttgtttataagaagagtta

SEQ ID NO: 106628 - DNA, 25 bp, SARS Virus
ggtctttgtttgaaagaagagttac

SEQ ID NO: 106629 - DNA, 25 bp, SARS Virus
gtctttgtttgtaagaagagttaca

SEQ ID NO: 106630 - DNA, 25 bp, SARS Virus
tctttgtttgtaagaagagttacac

SEQ ID NO: 106631 - DNA, 25 bp, SARS Virus
ctttgtttgtaaaaagagttacacg

SEQ ID NO: 106632 - DNA, 25 bp, SARS Virus
tttgtttgtaagaagagttacacgg

SEQ ID NO: 106633 - DNA, 25 bp, SARS Virus
ttgtttgtaagaagagttacacgga

SEQ ID NO: 106634 - DNA, 25 bp, SARS Virus
tgtttgtaagaaaagttacacggag

SEQ ID NO: 106635 - DNA, 25 bp, SARS Virus
gtttgtaagaagagttacacggaga

SEQ ID NO: 106636 - DNA, 25 bp, SARS Virus
tttgtaagaagaattacacggagag

SEQ ID NO: 106637 - DNA, 25 bp, SARS Virus
ttgtaagaagagatacacggagagg

SEQ ID NO: 106638 - DNA, 25 bp, SARS Virus
tgtaagaagagtaacacggagaggc

SEQ ID NO: 106639 - DNA, 25 bp, SARS Virus
gtaagaagagttacacggagaggcc

SEQ ID NO: 106640 - DNA, 25 bp, SARS Virus
taagaagagttaaacggagaggccc

SEQ ID NO: 106641 - DNA, 25 bp, SARS Virus
aagaagagttacacggagaggcccc

SEQ ID NO: 106642 - DNA, 25 bp, SARS Virus
agaagagttacaaggagaggccccc

SEQ ID NO: 106643 - DNA, 25 bp, SARS Virus
gaagagttacacagagaggccccct

SEQ ID NO: 106644 - DNA, 25 bp, SARS Virus
aagagttacacgaagaggccccctg

SEQ ID NO: 106645 - DNA, 25 bp, SARS Virus
agagttacacggagaggccccctgt

SEQ ID NO: 106646 - DNA, 25 bp, SARS Virus
gagttacacggaaaggccccctgtt

SEQ ID NO: 106647 - DNA, 25 bp, SARS Virus
agttacacggagaggccccctgtta

SEQ ID NO: 106648 - DNA, 25 bp, SARS Virus
gttacacggagaagccccctgttaa

SEQ ID NO: 106649 - DNA, 25 bp, SARS Virus
ttacacggagagaccccctgttaac

SEQ ID NO: 106650 - DNA, 25 bp, SARS Virus
tacacggagaggacccctgttaaca

SEQ ID NO: 106651 - DNA, 25 bp, SARS Virus
acacggagaggcaccctgttaacac

SEQ ID NO: 106652 - DNA, 25 bp, SARS Virus
cacggagaggccacctgttaacact

SEQ ID NO: 106653 - DNA, 25 bp, SARS Virus
acggagaggcccactgttaacactg

SEQ ID NO: 106654 - DNA, 25 bp, SARS Virus
cggagaggccccatgttaacactgg

SEQ ID NO: 106655 - DNA, 25 bp, SARS Virus
ggagaggcccccagttaacactggt

SEQ ID NO: 106656 - DNA, 25 bp, SARS Virus
gagaggccccctattaacactggtc

SEQ ID NO: 106657 - DNA, 25 bp, SARS Virus
agaggccccctgataacactggtct

SEQ ID NO: 106658 - DNA, 25 bp, SARS Virus
gaggccccctgtaaacactggtctg

SEQ ID NO: 106659 - DNA, 25 bp, SARS Virus
aggccccctgttaacactggtctgg

SEQ ID NO: 106660 - DNA, 25 bp, SARS Virus
ggccccctgttaacactggtctggc

SEQ ID NO: 106661 - DNA, 25 bp, SARS Virus
gccccctgttaaaactggtctggcg

SEQ ID NO: 106662 - DNA, 25 bp, SARS Virus
ccccctgttaacactggtctggcga

SEQ ID NO: 106663 - DNA, 25 bp, SARS Virus
cccctgttaacaatggtctggcgag

SEQ ID NO: 106664 - DNA, 25 bp, SARS Virus
ccctgttaacacaggtctggcgagt

SEQ ID NO: 106665 - DNA, 25 bp, SARS Virus
cctgttaacactagtctggcgagta

SEQ ID NO: 106666 - DNA, 25 bp, SARS Virus
ctgttaacactgatctggcgagtac

SEQ ID NO: 106667 - DNA, 25 bp, SARS Virus
tgttaacactggactggcgagtacc

SEQ ID NO: 106668 - DNA, 25 bp, SARS Virus
gttaacactggtatggcgagtacct

SEQ ID NO: 106669 - DNA, 25 bp, SARS Virus
ttaacactggtcaggcgagtacctt

SEQ ID NO: 106670 - DNA, 25 bp, SARS Virus
taacactggtctagcgagtaccttt

SEQ ID NO: 106671 - DNA, 25 bp, SARS Virus
aacactggtctgacgagtacctttc

SEQ ID NO: 106672 - DNA, 25 bp, SARS Virus
acactggtctggagagtacctttca

SEQ ID NO: 106673 - DNA, 25 bp, SARS Virus
cactggtctggcaagtacctttcac

SEQ ID NO: 106674 - DNA, 25 bp, SARS Virus
actggtctggcgagtacctttcact

SEQ ID NO: 106675 - DNA, 25 bp, SARS Virus
ctggtctggcgaatacctttcactt

SEQ ID NO: 106676 - DNA, 25 bp, SARS Virus
tggtctggcgagaacctttcacttg

SEQ ID NO: 106677 - DNA, 25 bp, SARS Virus
ggtctggcgagtacctttcacttga

SEQ ID NO: 106678 - DNA, 25 bp, SARS Virus
gtctggcgagtaactttcacttgaa

SEQ ID NO: 106679 - DNA, 25 bp, SARS Virus
tctggcgagtacatttcacttgaac

SEQ ID NO: 106680 - DNA, 25 bp, SARS Virus
ctggcgagtaccattcacttgaaca

SEQ ID NO: 106681 - DNA, 25 bp, SARS Virus
tggcgagtacctatcacttgaacag

SEQ ID NO: 106682 - DNA, 25 bp, SARS Virus
ggcgagtaccttacacttgaacagt

SEQ ID NO: 106683 - DNA, 25 bp, SARS Virus
gcgagtacctttaacttgaacagta

SEQ ID NO: 106684 - DNA, 25 bp, SARS Virus
cgagtacctttcacttgaacagtaa

SEQ ID NO: 106685 - DNA, 25 bp, SARS Virus
gagtacctttcaattgaacagtaac

SEQ ID NO: 106686 - DNA, 25 bp, SARS Virus
agtacctttcacatgaacagtaacc

SEQ ID NO: 106687 - DNA, 25 bp, SARS Virus
gtacctttcactagaacagtaacca

SEQ ID NO: 106688 - DNA, 25 bp, SARS Virus
tacctttcacttaaacagtaaccac

SEQ ID NO: 106689 - DNA, 25 bp, SARS Virus
acctttcacttgaacagtaaccacg

SEQ ID NO: 106690 - DNA, 25 bp, SARS Virus
cctttcacttgaacagtaaccacga

SEQ ID NO: 106691 - DNA, 25 bp, SARS Virus
ctttcacttgaaaagtaaccacgac

SEQ ID NO: 106692 - DNA, 25 bp, SARS Virus
tttcacttgaacagtaaccacgaca

SEQ ID NO: 106693 - DNA, 25 bp, SARS Virus
ttcacttgaacaataaccacgacac

SEQ ID NO: 106694 - DNA, 25 bp, SARS Virus
tcacttgaacagaaaccacgacact

SEQ ID NO: 106695 - DNA, 25 bp, SARS Virus
cacttgaacagtaaccacgacacta

SEQ ID NO: 106696 - DNA, 25 bp, SARS Virus
acttgaacagtaaccacgacactag

SEQ ID NO: 106697 - DNA, 25 bp, SARS Virus
cttgaacagtaaacacgacactagt

SEQ ID NO: 106698 - DNA, 25 bp, SARS Virus
ttgaacagtaacaacgacactagta

SEQ ID NO: 106699 - DNA, 25 bp, SARS Virus
tgaacagtaaccacgacactagtaa

SEQ ID NO: 106700 - DNA, 25 bp, SARS Virus
gaacagtaaccaagacactagtaag

SEQ ID NO: 106701 - DNA, 25 bp, SARS Virus
aacagtaaccacaacactagtaagc

SEQ ID NO: 106702 - DNA, 25 bp, SARS Virus
acagtaaccacgacactagtaagca

SEQ ID NO: 106703 - DNA, 25 bp, SARS Virus
cagtaaccacgaaactagtaagcac

SEQ ID NO: 106704 - DNA, 25 bp, SARS Virus
agtaaccacgacactagtaagcacc

SEQ ID NO: 106705 - DNA, 25 bp, SARS Virus
gtaaccacgacaatagtaagcacca

SEQ ID NO: 106706 - DNA, 25 bp, SARS Virus
taaccacgacacaagtaagcaccag

SEQ ID NO: 106707 - DNA, 25 bp, SARS Virus
aaccacgacactagtaagcaccagt

SEQ ID NO: 106708 - DNA, 25 bp, SARS Virus
accacgacactaataagcaccagtg

SEQ ID NO: 106709 - DNA, 25 bp, SARS Virus
ccacgacactagaaagcaccagtga

SEQ ID NO: 106710 - DNA, 25 bp, SARS Virus
cacgacactagtaagcaccagtgaa

SEQ ID NO: 106711 - DNA, 25 bp, SARS Virus
acgacactagtaagcaccagtgaac

SEQ ID NO: 106712 - DNA, 25 bp, SARS Virus
cgacactagtaaacaccagtgaacg

SEQ ID NO: 106713 - DNA, 25 bp, SARS Virus
gacactagtaagaaccagtgaacgc

SEQ ID NO: 106714 - DNA, 25 bp, SARS Virus
acactagtaagcaccagtgaacgct

SEQ ID NO: 106715 - DNA, 25 bp, SARS Virus
cactagtaagcaacagtgaacgctt

SEQ ID NO: 106716 - DNA, 25 bp, SARS Virus
actagtaagcacaagtgaacgctta

SEQ ID NO: 106717 - DNA, 25 bp, SARS Virus
ctagtaagcaccagtgaacgcttac

SEQ ID NO: 106718 - DNA, 25 bp, SARS Virus
tagtaagcaccaatgaacgcttacc

SEQ ID NO: 106719 - DNA, 25 bp, SARS Virus
agtaagcaccagagaacgcttaccg

SEQ ID NO: 106720 - DNA, 25 bp, SARS Virus
gtaagcaccagtaaacgcttaccgg

SEQ ID NO: 106721 - DNA, 25 bp, SARS Virus
taagcaccagtgaacgcttaccggc

SEQ ID NO: 106722 - DNA, 25 bp, SARS Virus
aagcaccagtgaacgcttaccggcc

SEQ ID NO: 106723 - DNA, 25 bp, SARS Virus
agcaccagtgaaagcttaccggcct

SEQ ID NO: 106724 - DNA, 25 bp, SARS Virus
gcaccagtgaacacttaccggcctg

SEQ ID NO: 106725 - DNA, 25 bp, SARS Virus
caccagtgaacgattaccggcctgt

SEQ ID NO: 106726 - DNA, 25 bp, SARS Virus
accagtgaacgcataccggcctgtg

SEQ ID NO: 106727 - DNA, 25 bp, SARS Virus
ccagtgaacgctaaccggcctgtga

SEQ ID NO: 106728 - DNA, 25 bp, SARS Virus
cagtgaacgcttaccggcctgtgag

SEQ ID NO: 106729 - DNA, 25 bp, SARS Virus
agtgaacgcttaacggcctgtgagg

SEQ ID NO: 106730 - DNA, 25 bp, SARS Virus
gtgaacgcttacaggcctgtgaggg

SEQ ID NO: 106731 - DNA, 25 bp, SARS Virus
tgaacgcttaccagcctgtgaggga

SEQ ID NO: 106732 - DNA, 25 bp, SARS Virus
gaacgcttaccgacctgtgagggat

SEQ ID NO: 106733 - DNA, 25 bp, SARS Virus
aacgcttaccggactgtgagggatc

SEQ ID NO: 106734 - DNA, 25 bp, SARS Virus
acgcttaccggcatgtgagggatcc

SEQ ID NO: 106735 - DNA, 25 bp, SARS Virus
cgcttaccggccagtgagggatccc

SEQ ID NO: 106736 - DNA, 25 bp, SARS Virus
gcttaccggcctatgagggatcccg

SEQ ID NO: 106737 - DNA, 25 bp, SARS Virus
cttaccggcctgagagggatcccgc

SEQ ID NO: 106738 - DNA, 25 bp, SARS Virus
ttaccggcctgtaagggatcccgcg

SEQ ID NO: 106739 - DNA, 25 bp, SARS Virus
taccggcctgtgagggatcccgcga

SEQ ID NO: 106740 - DNA, 25 bp, SARS Virus
accggcctgtgaaggatcccgcgac

SEQ ID NO: 106741 - DNA, 25 bp, SARS Virus
ccggcctgtgagagatcccgcgaca

SEQ ID NO: 106742 - DNA, 25 bp, SARS Virus
cggcctgtgaggaatcccgcgacac

SEQ ID NO: 106743 - DNA, 25 bp, SARS Virus
ggcctgtgagggatcccgcgacact

SEQ ID NO: 106744 - DNA, 25 bp, SARS Virus
gcctgtgagggaacccgcgacactg

SEQ ID NO: 106745 - DNA, 25 bp, SARS Virus
cctgtgagggataccgcgacactgt

SEQ ID NO: 106746 - DNA, 25 bp, SARS Virus
ctgtgagggatcacgcgacactgta

SEQ ID NO: 106747 - DNA, 25 bp, SARS Virus
tgtgagggatccagcgacactgtaa

SEQ ID NO: 106748 - DNA, 25 bp, SARS Virus
gtgagggatcccacgacactgtaat

SEQ ID NO: 106749 - DNA, 25 bp, SARS Virus
tgagggatcccgagacactgtaatt

SEQ ID NO: 106750 - DNA, 25 bp, SARS Virus
gagggatcccgcaacactgtaattc

SEQ ID NO: 106751 - DNA, 25 bp, SARS Virus
agggatcccgcgacactgtaattcc

SEQ ID NO: 106752 - DNA, 25 bp, SARS Virus
gggatcccgcgaaactgtaattcct

SEQ ID NO: 106753 - DNA, 25 bp, SARS Virus
ggatcccgcgacactgtaattcctg

SEQ ID NO: 106754 - DNA, 25 bp, SARS Virus
gatcccgcgacaatgtaattcctgg

SEQ ID NO: 106755 - DNA, 25 bp, SARS Virus
atcccgcgacacagtaattcctgga

SEQ ID NO: 106756 - DNA, 25 bp, SARS Virus
tcccgcgacactataattcctggac

SEQ ID NO: 106757 - DNA, 25 bp, SARS Virus
cccgcgacactgaaattcctggacg

SEQ ID NO: 106758 - DNA, 25 bp, SARS Virus
ccgcgacactgtaattcctggacgg

SEQ ID NO: 106759 - DNA, 25 bp, SARS Virus
cgcgacactgtaattcctggacggt

SEQ ID NO: 106760 - DNA, 25 bp, SARS Virus
gcgacactgtaaatcctggacggtt

SEQ ID NO: 106761 - DNA, 25 bp, SARS Virus
cgacactgtaatacctggacggttt

SEQ ID NO: 106762 - DNA, 25 bp, SARS Virus
gacactgtaattactggacggtttt

SEQ ID NO: 106763 - DNA, 25 bp, SARS Virus
acactgtaattcatggacggttttc

SEQ ID NO: 106764 - DNA, 25 bp, SARS Virus
cactgtaattccaggacggttttct

SEQ ID NO: 106765 - DNA, 25 bp, SARS Virus
actgtaattcctagacggttttctc

SEQ ID NO: 106766 - DNA, 25 bp, SARS Virus
ctgtaattcctgaacggttttctct

SEQ ID NO: 106767 - DNA, 25 bp, SARS Virus
tgtaattcctggacggttttctcta

SEQ ID NO: 106768 - DNA, 25 bp, SARS Virus
gtaattcctggaaggttttctctag

SEQ ID NO: 106769 - DNA, 25 bp, SARS Virus
taattcctggacagttttctctagt

SEQ ID NO: 106770 - DNA, 25 bp, SARS Virus
aattcctggacgattttctctagtg

SEQ ID NO: 106771 - DNA, 25 bp, SARS Virus
attcctggacggatttctctagtga

SEQ ID NO: 106772 - DNA, 25 bp, SARS Virus
ttcctggacggtattctctagtgac

SEQ ID NO: 106773 - DNA, 25 bp, SARS Virus
tcctggacggttatctctagtgaca

SEQ ID NO: 106774 - DNA, 25 bp, SARS Virus
cctggacggtttactctagtgacac

SEQ ID NO: 106775 - DNA, 25 bp, SARS Virus
ctggacggttttatctagtgacacc

SEQ ID NO: 106776 - DNA, 25 bp, SARS Virus
tggacggttttcactagtgacaccg

SEQ ID NO: 106777 - DNA, 25 bp, SARS Virus
ggacggttttctatagtgacaccga

SEQ ID NO: 106778 - DNA, 25 bp, SARS Virus
gacggttttctcaagtgacaccgat

SEQ ID NO: 106779 - DNA, 25 bp, SARS Virus
acggttttctctagtgacaccgatg

SEQ ID NO: 106780 - DNA, 25 bp, SARS Virus
cggttttctctaatgacaccgatgt

SEQ ID NO: 106781 - DNA, 25 bp, SARS Virus
ggttttctctagagacaccgatgta

SEQ ID NO: 106782 - DNA, 25 bp, SARS Virus
gttttctctagtaacaccgatgtag

SEQ ID NO: 106783 - DNA, 25 bp, SARS Virus
ttttctctagtgacaccgatgtagt

SEQ ID NO: 106784 - DNA, 25 bp, SARS Virus
tttctctagtgaaaccgatgtagtg

SEQ ID NO: 106785 - DNA, 25 bp, SARS Virus
ttctctagtgacaccgatgtagtgc

SEQ ID NO: 106786 - DNA, 25 bp, SARS Virus
tctctagtgacaacgatgtagtgct

SEQ ID NO: 106787 - DNA, 25 bp, SARS Virus
ctctagtgacacagatgtagtgctt

SEQ ID NO: 106788 - DNA, 25 bp, SARS Virus
tctagtgacaccaatgtagtgcttg

SEQ ID NO: 106789 - DNA, 25 bp, SARS Virus
ctagtgacaccgatgtagtgcttgc

SEQ ID NO: 106790 - DNA, 25 bp, SARS Virus
tagtgacaccgaagtagtgcttgcg

SEQ ID NO: 106791 - DNA, 25 bp, SARS Virus
agtgacaccgatatagtgcttgcga

SEQ ID NO: 106792 - DNA, 25 bp, SARS Virus
gtgacaccgatgaagtgcttgcgaa

SEQ ID NO: 106793 - DNA, 25 bp, SARS Virus
tgacaccgatgtagtgcttgcgaaa

SEQ ID NO: 106794 - DNA, 25 bp, SARS Virus
gacaccgatgtaatgcttgcgaaag

SEQ ID NO: 106795 - DNA, 25 bp, SARS Virus
acaccgatgtagagcttgcgaaaga

SEQ ID NO: 106796 - DNA, 25 bp, SARS Virus
caccgatgtagtacttgcgaaagaa

SEQ ID NO: 106797 - DNA, 25 bp, SARS Virus
accgatgtagtgattgcgaaagaat

SEQ ID NO: 106798 - DNA, 25 bp, SARS Virus
ccgatgtagtgcatgcgaaagaata

SEQ ID NO: 106799 - DNA, 25 bp, SARS Virus
cgatgtagtgctagcgaaagaataa

SEQ ID NO: 106800 - DNA, 25 bp, SARS Virus
gatgtagtgcttacgaaagaataat

SEQ ID NO: 106801 - DNA, 25 bp, SARS Virus
atgtagtgcttgagaaagaataatg

SEQ ID NO: 106802 - DNA, 25 bp, SARS Virus
tgtagtgcttgcaaaagaataatgt

SEQ ID NO: 106803 - DNA, 25 bp, SARS Virus
gtagtgcttgcgaaagaataatgtt

SEQ ID NO: 106804 - DNA, 25 bp, SARS Virus
tagtgcttgcgaaagaataatgttt

SEQ ID NO: 106805 - DNA, 25 bp, SARS Virus
agtgcttgcgaaagaataatgttta

SEQ ID NO: 106806 - DNA, 25 bp, SARS Virus
gtgcttgcgaaaaaataatgtttaa

SEQ ID NO: 106807 - DNA, 25 bp, SARS Virus
tgcttgcgaaagaataatgtttaat

SEQ ID NO: 106808 - DNA, 25 bp, SARS Virus
gcttgcgaaagaataatgtttaatc

SEQ ID NO: 106809 - DNA, 25 bp, SARS Virus
cttgcgaaagaaaaatgtttaatcc

SEQ ID NO: 106810 - DNA, 25 bp, SARS Virus
ttgcgaaagaataatgtttaatcct

SEQ ID NO: 106811 - DNA, 25 bp, SARS Virus
tgcgaaagaataatgtttaatcctc

SEQ ID NO: 106812 - DNA, 25 bp, SARS Virus
gcgaaagaataaagtttaatcctcg

SEQ ID NO: 106813 - DNA, 25 bp, SARS Virus
cgaaagaataatatttaatcctcgc

SEQ ID NO: 106814 - DNA, 25 bp, SARS Virus
gaaagaataatgattaatcctcgca

SEQ ID NO: 106815 - DNA, 25 bp, SARS Virus
aaagaataatgtataatcctcgcag

SEQ ID NO: 106816 - DNA, 25 bp, SARS Virus
aagaataatgttaaatcctcgcagc

SEQ ID NO: 106817 - DNA, 25 bp, SARS Virus
agaataatgtttaatcctcgcagcg

SEQ ID NO: 106818 - DNA, 25 bp, SARS Virus
gaataatgtttaatcctcgcagcgt

SEQ ID NO: 106819 - DNA, 25 bp, SARS Virus
aataatgtttaaacctcgcagcgtc

SEQ ID NO: 106820 - DNA, 25 bp, SARS Virus
ataatgtttaatactcgcagcgtcg

SEQ ID NO: 106821 - DNA, 25 bp, SARS Virus
taatgtttaatcatcgcagcgtcgc

SEQ ID NO: 106822 - DNA, 25 bp, SARS Virus
aatgtttaatccacgcagcgtcgca

SEQ ID NO: 106823 - DNA, 25 bp, SARS Virus
atgtttaatcctagcagcgtcgcac

SEQ ID NO: 106824 - DNA, 25 bp, SARS Virus
tgtttaatcctcacagcgtcgcaca

SEQ ID NO: 106825 - DNA, 25 bp, SARS Virus
gtttaatcctcgaagcgtcgcacat

SEQ ID NO: 106826 - DNA, 25 bp, SARS Virus
tttaatcctcgcagcgtcgcacatc

SEQ ID NO: 106827 - DNA, 25 bp, SARS Virus
ttaatcctcgcaacgtcgcacatcc

SEQ ID NO: 106828 - DNA, 25 bp, SARS Virus
taatcctcgcagagtcgcacatccg

SEQ ID NO: 106829 - DNA, 25 bp, SARS Virus
aatcctcgcagcatcgcacatccgt

SEQ ID NO: 106830 - DNA, 25 bp, SARS Virus
atcctcgcagcgacgcacatccgtg

SEQ ID NO: 106831 - DNA, 25 bp, SARS Virus
tcctcgcagcgtagcacatccgtga

SEQ ID NO: 106832 - DNA, 25 bp, SARS Virus
cctcgcagcgtcacacatccgtgac

SEQ ID NO: 106833 - DNA, 25 bp, SARS Virus
ctcgcagcgtcgaacatccgtgact

SEQ ID NO: 106834 - DNA, 25 bp, SARS Virus
tcgcagcgtcgcacatccgtgacta

SEQ ID NO: 106835 - DNA, 25 bp, SARS Virus
cgcagcgtcgcaaatccgtgactaa

SEQ ID NO: 106836 - DNA, 25 bp, SARS Virus
gcagcgtcgcacatccgtgactaag

SEQ ID NO: 106837 - DNA, 25 bp, SARS Virus
cagcgtcgcacaaccgtgactaagt

SEQ ID NO: 106838 - DNA, 25 bp, SARS Virus
agcgtcgcacatacgtgactaagtc

SEQ ID NO: 106839 - DNA, 25 bp, SARS Virus
gcgtcgcacatcagtgactaagtcc

SEQ ID NO: 106840 - DNA, 25 bp, SARS Virus
cgtcgcacatccatgactaagtcca

SEQ ID NO: 106841 - DNA, 25 bp, SARS Virus
gtcgcacatccgagactaagtccaa

SEQ ID NO: 106842 - DNA, 25 bp, SARS Virus
tcgcacatccgtaactaagtccaaa

SEQ ID NO: 106843 - DNA, 25 bp, SARS Virus
cgcacatccgtgactaagtccaaaa

SEQ ID NO: 106844 - DNA, 25 bp, SARS Virus
gcacatccgtgaataagtccaaaac

SEQ ID NO: 106845 - DNA, 25 bp, SARS Virus
cacatccgtgacaaagtccaaaacg

SEQ ID NO: 106846 - DNA, 25 bp, SARS Virus
acatccgtgactaagtccaaaacga

SEQ ID NO: 106847 - DNA, 25 bp, SARS Virus
catccgtgactaagtccaaaacgac

SEQ ID NO: 106848 - DNA, 25 bp, SARS Virus
atccgtgactaaatccaaaacgacg

SEQ ID NO: 106849 - DNA, 25 bp, SARS Virus
tccgtgactaagaccaaaacgacgt

SEQ ID NO: 106850 - DNA, 25 bp, SARS Virus
ccgtgactaagtacaaaacgacgta

SEQ ID NO: 106851 - DNA, 25 bp, SARS Virus
cgtgactaagtcaaaaacgacgtat

SEQ ID NO: 106852 - DNA, 25 bp, SARS Virus
gtgactaagtccaaaacgacgtatg

SEQ ID NO: 106853 - DNA, 25 bp, SARS Virus
tgactaagtccaaaacgacgtatgt

SEQ ID NO: 106854 - DNA, 25 bp, SARS Virus
gactaagtccaaaacgacgtatgtt

SEQ ID NO: 106855 - DNA, 25 bp, SARS Virus
actaagtccaaaacgacgtatgttg

SEQ ID NO: 106856 - DNA, 25 bp, SARS Virus
ctaagtccaaaaagacgtatgttgg

SEQ ID NO: 106857 - DNA, 25 bp, SARS Virus
taagtccaaaacaacgtatgttggc

SEQ ID NO: 106858 - DNA, 25 bp, SARS Virus
aagtccaaaacgacgtatgttggcg

SEQ ID NO: 106859 - DNA, 25 bp, SARS Virus
agtccaaaacgaagtatgttggcga

SEQ ID NO: 106860 - DNA, 25 bp, SARS Virus
gtccaaaacgacatatgttggcgat

SEQ ID NO: 106861 - DNA, 25 bp, SARS Virus
tccaaaacgacgaatgttggcgatg

SEQ ID NO: 106862 - DNA, 25 bp, SARS Virus
ccaaaacgacgtatgttggcgatgg

SEQ ID NO: 106863 - DNA, 25 bp, SARS Virus
caaaacgacgtaagttggcgatggc

SEQ ID NO: 106864 - DNA, 25 bp, SARS Virus
aaaacgacgtatattggcgatggca

SEQ ID NO: 106865 - DNA, 25 bp, SARS Virus
aaacgacgtatgatggcgatggcat

SEQ ID NO: 106866 - DNA, 25 bp, SARS Virus
aacgacgtatgtaggcgatggcata

SEQ ID NO: 106867 - DNA, 25 bp, SARS Virus
acgacgtatgttagcgatggcataa

SEQ ID NO: 106868 - DNA, 25 bp, SARS Virus
cgacgtatgttgacgatggcataac

SEQ ID NO: 106869 - DNA, 25 bp, SARS Virus
gacgtatgttggagatggcataacc

SEQ ID NO: 106870 - DNA, 25 bp, SARS Virus
acgtatgttggcaatggcataacct

SEQ ID NO: 106871 - DNA, 25 bp, SARS Virus
cgtatgttggcgatggcataacctt

SEQ ID NO: 106872 - DNA, 25 bp, SARS Virus
gtatgttggcgaaggcataaccttt

SEQ ID NO: 106873 - DNA, 25 bp, SARS Virus
tatgttggcgatagcataacctttg

SEQ ID NO: 106874 - DNA, 25 bp, SARS Virus
atgttggcgatgacataacctttga

SEQ ID NO: 106875 - DNA, 25 bp, SARS Virus
tgttggcgatggaataacctttgat

SEQ ID NO: 106876 - DNA, 25 bp, SARS Virus
gttggcgatggcataacctttgata

SEQ ID NO: 106877 - DNA, 25 bp, SARS Virus
ttggcgatggcaaaacctttgatat

SEQ ID NO: 106878 - DNA, 25 bp, SARS Virus
tggcgatggcataacctttgatatt

SEQ ID NO: 106879 - DNA, 25 bp, SARS Virus
ggcgatggcataacctttgatattt

SEQ ID NO: 106880 - DNA, 25 bp, SARS Virus
gcgatggcataaactttgatattta

SEQ ID NO: 106881 - DNA, 25 bp, SARS Virus
cgatggcataacatttgatatttaa

SEQ ID NO: 106882 - DNA, 25 bp, SARS Virus
gatggcataaccattgatatttaat

SEQ ID NO: 106883 - DNA, 25 bp, SARS Virus
atggcataacctatgatatttaatt

SEQ ID NO: 106884 - DNA, 25 bp, SARS Virus
tggcataaccttagatatttaattt

SEQ ID NO: 106885 - DNA, 25 bp, SARS Virus
ggcataacctttaatatttaattta

SEQ ID NO: 106886 - DNA, 25 bp, SARS Virus
gcataacctttgatatttaatttat

SEQ ID NO: 106887 - DNA, 25 bp, SARS Virus
cataacctttgaaatttaatttatg

SEQ ID NO: 106888 - DNA, 25 bp, SARS Virus
ataacctttgatatttaatttatgt

SEQ ID NO: 106889 - DNA, 25 bp, SARS Virus
taacctttgataattaatttatgtc

SEQ ID NO: 106890 - DNA, 25 bp, SARS Virus
aacctttgatatataatttatgtct

SEQ ID NO: 106891 - DNA, 25 bp, SARS Virus
acctttgatattaaatttatgtctg

SEQ ID NO: 106892 - DNA, 25 bp, SARS Virus
cctttgatatttaatttatgtctgg

SEQ ID NO: 106893 - DNA, 25 bp, SARS Virus
ctttgatatttaatttatgtctggt

SEQ ID NO: 106894 - DNA, 25 bp, SARS Virus
tttgatatttaaattatgtctggtg

SEQ ID NO: 106895 - DNA, 25 bp, SARS Virus
ttgatatttaatatatgtctggtgc

SEQ ID NO: 106896 - DNA, 25 bp, SARS Virus
tgatatttaattaatgtctggtgcg

SEQ ID NO: 106897 - DNA, 25 bp, SARS Virus
gatatttaatttatgtctggtgcgg

SEQ ID NO: 106898 - DNA, 25 bp, SARS Virus
atatttaatttaagtctggtgcggc

SEQ ID NO: 106899 - DNA, 25 bp, SARS Virus
tatttaatttatatctggtgcggcc

SEQ ID NO: 106900 - DNA, 25 bp, SARS Virus
atttaatttatgactggtgcggcca

SEQ ID NO: 106901 - DNA, 25 bp, SARS Virus
tttaatttatgtatggtgcggccat

SEQ ID NO: 106902 - DNA, 25 bp, SARS Virus
ttaatttatgtcaggtgcggccatc

SEQ ID NO: 106903 - DNA, 25 bp, SARS Virus
taatttatgtctagtgcggccatcg

SEQ ID NO: 106904 - DNA, 25 bp, SARS Virus
aatttatgtctgatgcggccatcgt

SEQ ID NO: 106905 - DNA, 25 bp, SARS Virus
atttatgtctggagcggccatcgtt

SEQ ID NO: 106906 - DNA, 25 bp, SARS Virus
tttatgtctggtacggccatcgttg

SEQ ID NO: 106907 - DNA, 25 bp, SARS Virus
ttatgtctggtgaggccatcgttgc

SEQ ID NO: 106908 - DNA, 25 bp, SARS Virus
tatgtctggtgcagccatcgttgct

SEQ ID NO: 106909 - DNA, 25 bp, SARS Virus
atgtctggtgcgaccatcgttgctg

SEQ ID NO: 106910 - DNA, 25 bp, SARS Virus
tgtctggtgcggacatcgttgctgt

SEQ ID NO: 106911 - DNA, 25 bp, SARS Virus
gtctggtgcggcaatcgttgctgtt

SEQ ID NO: 106912 - DNA, 25 bp, SARS Virus
tctggtgcggccatcgttgctgtta

SEQ ID NO: 106913 - DNA, 25 bp, SARS Virus
ctggtgcggccaacgttgctgttat

SEQ ID NO: 106914 - DNA, 25 bp, SARS Virus
tggtgcggccatagttgctgttata

SEQ ID NO: 106915 - DNA, 25 bp, SARS Virus
ggtgcggccatcattgctgttataa

SEQ ID NO: 106916 - DNA, 25 bp, SARS Virus
gtgcggccatcgatgctgttataac

SEQ ID NO: 106917 - DNA, 25 bp, SARS Virus
tgcggccatcgtagctgttataacg

SEQ ID NO: 106918 - DNA, 25 bp, SARS Virus
gcggccatcgttactgttataacga

SEQ ID NO: 106919 - DNA, 25 bp, SARS Virus
cggccatcgttgatgttataacgaa

SEQ ID NO: 106920 - DNA, 25 bp, SARS Virus
ggccatcgttgcagttataacgaaa

SEQ ID NO: 106921 - DNA, 25 bp, SARS Virus
gccatcgttgctattataacgaaac

SEQ ID NO: 106922 - DNA, 25 bp, SARS Virus
ccatcgttgctgatataacgaaacg

SEQ ID NO: 106923 - DNA, 25 bp, SARS Virus
catcgttgctgtaataacgaaacga

SEQ ID NO: 106924 - DNA, 25 bp, SARS Virus
atcgttgctgttataacgaaacgat

SEQ ID NO: 106925 - DNA, 25 bp, SARS Virus
tcgttgctgttaaaacgaaacgatc

SEQ ID NO: 106926 - DNA, 25 bp, SARS Virus
cgttgctgttataacgaaacgatca

SEQ ID NO: 106927 - DNA, 25 bp, SARS Virus
gttgctgttataacgaaacgatcat

SEQ ID NO: 106928 - DNA, 25 bp, SARS Virus
ttgctgttataaagaaacgatcatg

SEQ ID NO: 106929 - DNA, 25 bp, SARS Virus
tgctgttataacaaaacgatcatgt

SEQ ID NO: 106930 - DNA, 25 bp, SARS Virus
gctgttataacgaaacgatcatgtc

SEQ ID NO: 106931 - DNA, 25 bp, SARS Virus
ctgttataacgaaacgatcatgtca

SEQ ID NO: 106932 - DNA, 25 bp, SARS Virus
tgttataacgaaacgatcatgtcat

SEQ ID NO: 106933 - DNA, 25 bp, SARS Virus
gttataacgaaaagatcatgtcatt

SEQ ID NO: 106934 - DNA, 25 bp, SARS Virus
ttataacgaaacaatcatgtcattc

SEQ ID NO: 106935 - DNA, 25 bp, SARS Virus
tataacgaaacgatcatgtcattca

SEQ ID NO: 106936 - DNA, 25 bp, SARS Virus
ataacgaaacgaacatgtcattcac

SEQ ID NO: 106937 - DNA, 25 bp, SARS Virus
taacgaaacgataatgtcattcact

SEQ ID NO: 106938 - DNA, 25 bp, SARS Virus
aacgaaacgatcatgtcattcactg

SEQ ID NO: 106939 - DNA, 25 bp, SARS Virus
acgaaacgatcaagtcattcactgt

SEQ ID NO: 106940 - DNA, 25 bp, SARS Virus
cgaaacgatcatatcattcactgtt

SEQ ID NO: 106941 - DNA, 25 bp, SARS Virus
gaaacgatcatgacattcactgttg

SEQ ID NO: 106942 - DNA, 25 bp, SARS Virus
aaacgatcatgtaattcactgttgt

SEQ ID NO: 106943 - DNA, 25 bp, SARS Virus
aacgatcatgtcattcactgttgtc

SEQ ID NO: 106944 - DNA, 25 bp, SARS Virus
acgatcatgtcaatcactgttgtct

SEQ ID NO: 106945 - DNA, 25 bp, SARS Virus
cgatcatgtcatacactgttgtcta

SEQ ID NO: 106946 - DNA, 25 bp, SARS Virus
gatcatgtcattaactgttgtctac

SEQ ID NO: 106947 - DNA, 25 bp, SARS Virus
atcatgtcattcactgttgtctaca

SEQ ID NO: 106948 - DNA, 25 bp, SARS Virus
tcatgtcattcaatgttgtctacaa

SEQ ID NO: 106949 - DNA, 25 bp, SARS Virus
catgtcattcacagttgtctacaaa

SEQ ID NO: 106950 - DNA, 25 bp, SARS Virus
atgtcattcactattgtctacaaag

SEQ ID NO: 106951 - DNA, 25 bp, SARS Virus
tgtcattcactgatgtctacaaagt

SEQ ID NO: 106952 - DNA, 25 bp, SARS Virus
gtcattcactgtagtctacaaagta

SEQ ID NO: 106953 - DNA, 25 bp, SARS Virus
tcattcactgttatctacaaagtag

SEQ ID NO: 106954 - DNA, 25 bp, SARS Virus
cattcactgttgactacaaagtaga

SEQ ID NO: 106955 - DNA, 25 bp, SARS Virus
attcactgttgtatacaaagtagaa

SEQ ID NO: 106956 - DNA, 25 bp, SARS Virus
ttcactgttgtcaacaaagtagaac

SEQ ID NO: 106957 - DNA, 25 bp, SARS Virus
tcactgttgtctacaaagtagaaca

SEQ ID NO: 106958 - DNA, 25 bp, SARS Virus
cactgttgtctaaaaagtagaacaa

SEQ ID NO: 106959 - DNA, 25 bp, SARS Virus
actgttgtctacaaagtagaacaac

SEQ ID NO: 106960 - DNA, 25 bp, SARS Virus
ctgttgtctacaaagtagaacaact

SEQ ID NO: 106961 - DNA, 25 bp, SARS Virus
tgttgtctacaaagtagaacaactg

SEQ ID NO: 106962 - DNA, 25 bp, SARS Virus
gttgtctacaaaatagaacaactga

SEQ ID NO: 106963 - DNA, 25 bp, SARS Virus
ttgtctacaaagaagaacaactgaa

SEQ ID NO: 106964 - DNA, 25 bp, SARS Virus
tgtctacaaagtagaacaactgaag

SEQ ID NO: 106965 - DNA, 25 bp, SARS Virus
gtctacaaagtaaaacaactgaagg

SEQ ID NO: 106966 - DNA, 25 bp, SARS Virus
tctacaaagtagaacaactgaaggt

SEQ ID NO: 106967 - DNA, 25 bp, SARS Virus
ctacaaagtagaacaactgaaggtc

SEQ ID NO: 106968 - DNA, 25 bp, SARS Virus
tacaaagtagaaaaactgaaggtcc

SEQ ID NO: 106969 - DNA, 25 bp, SARS Virus
acaaagtagaacaactgaaggtcca

SEQ ID NO: 106970 - DNA, 25 bp, SARS Virus
caaagtagaacaactgaaggtccaa

SEQ ID NO: 106971 - DNA, 25 bp, SARS Virus
aaagtagaacaaatgaaggtccaat

SEQ ID NO: 106972 - DNA, 25 bp, SARS Virus
aagtagaacaacagaaggtccaatg

SEQ ID NO: 106973 - DNA, 25 bp, SARS Virus
agtagaacaactaaaggtccaatgt

SEQ ID NO: 106974 - DNA, 25 bp, SARS Virus
gtagaacaactgaaggtccaatgtt

SEQ ID NO: 106975 - DNA, 25 bp, SARS Virus
tagaacaactgaaggtccaatgtta

SEQ ID NO: 106976 - DNA, 25 bp, SARS Virus
agaacaactgaaagtccaatgttat

SEQ ID NO: 106977 - DNA, 25 bp, SARS Virus
gaacaactgaagatccaatgttatc

SEQ ID NO: 106978 - DNA, 25 bp, SARS Virus
aacaactgaaggaccaatgttatcg

SEQ ID NO: 106979 - DNA, 25 bp, SARS Virus
acaactgaaggtacaatgttatcgt

SEQ ID NO: 106980 - DNA, 25 bp, SARS Virus
caactgaaggtcaaatgttatcgtc

SEQ ID NO: 106981 - DNA, 25 bp, SARS Virus
aactgaaggtccaatgttatcgtct

SEQ ID NO: 106982 - DNA, 25 bp, SARS Virus
actgaaggtccaatgttatcgtctc

SEQ ID NO: 106983 - DNA, 25 bp, SARS Virus
ctgaaggtccaaagttatcgtctct

SEQ ID NO: 106984 - DNA, 25 bp, SARS Virus
tgaaggtccaatattatcgtctcta

SEQ ID NO: 106985 - DNA, 25 bp, SARS Virus
gaaggtccaatgatatcgtctctat

SEQ ID NO: 106986 - DNA, 25 bp, SARS Virus
aaggtccaatgtaatcgtctctata

SEQ ID NO: 106987 - DNA, 25 bp, SARS Virus
aggtccaatgttatcgtctctataa

SEQ ID NO: 106988 - DNA, 25 bp, SARS Virus
ggtccaatgttaacgtctctataac

SEQ ID NO: 106989 - DNA, 25 bp, SARS Virus
gtccaatgttatagtctctataact

SEQ ID NO: 106990 - DNA, 25 bp, SARS Virus
tccaatgttatcatctctataacta

SEQ ID NO: 106991 - DNA, 25 bp, SARS Virus
ccaatgttatcgactctataactaa

SEQ ID NO: 106992 - DNA, 25 bp, SARS Virus
caatgttatcgtatctataactaat

SEQ ID NO: 106993 - DNA, 25 bp, SARS Virus
aatgttatcgtcactataactaata

SEQ ID NO: 106994 - DNA, 25 bp, SARS Virus
atgttatcgtctatataactaatag

SEQ ID NO: 106995 - DNA, 25 bp, SARS Virus
tgttatcgtctcaataactaatagt

SEQ ID NO: 106996 - DNA, 25 bp, SARS Virus
gttatcgtctctataactaatagta

SEQ ID NO: 106997 - DNA, 25 bp, SARS Virus
ttatcgtctctaaaactaatagtaa

SEQ ID NO: 106998 - DNA, 25 bp, SARS Virus
tatcgtctctataactaatagtaat

SEQ ID NO: 106999 - DNA, 25 bp, SARS Virus
atcgtctctataactaatagtaata

SEQ ID NO: 107000 - DNA, 25 bp, SARS Virus
tcgtctctataaataatagtaatac

SEQ ID NO: 107001 - DNA, 25 bp, SARS Virus
ccactgaccgccctaacgctaacgt

SEQ ID NO: 107002 - DNA, 25 bp, SARS Virus
cactgaccgccccaacgctaacgtt

SEQ ID NO: 107003 - DNA, 25 bp, SARS Virus
actgaccgccctcacgctaacgtta

SEQ ID NO: 107004 - DNA, 25 bp, SARS Virus
ctgaccgccctaccgctaacgttac

SEQ ID NO: 107005 - DNA, 25 bp, SARS Virus
tgaccgccctaacgctaacgttacc

SEQ ID NO: 107006 - DNA, 25 bp, SARS Virus
gaccgccctaaccctaacgttaccg

SEQ ID NO: 107007 - DNA, 25 bp, SARS Virus
accgccctaacgctaacgttaccga

SEQ ID NO: 107008 - DNA, 25 bp, SARS Virus
ccgccctaacgccaacgttaccgaa

SEQ ID NO: 107009 - DNA, 25 bp, SARS Virus
cgccctaacgctcacgttaccgaac

SEQ ID NO: 107010 - DNA, 25 bp, SARS Virus
gccctaacgctaccgttaccgaaca

SEQ ID NO: 107011 - DNA, 25 bp, SARS Virus
ccctaacgctaacgttaccgaacat

SEQ ID NO: 107012 - DNA, 25 bp, SARS Virus
cctaacgctaaccttaccgaacata

SEQ ID NO: 107013 - DNA, 25 bp, SARS Virus
ctaacgctaacgctaccgaacataa

SEQ ID NO: 107014 - DNA, 25 bp, SARS Virus
taacgctaacgtcaccgaacataac

SEQ ID NO: 107015 - DNA, 25 bp, SARS Virus
aacgctaacgttcccgaacataaca

SEQ ID NO: 107016 - DNA, 25 bp, SARS Virus
acgctaacgttaccgaacataacat

SEQ ID NO: 107017 - DNA, 25 bp, SARS Virus
cgctaacgttaccgaacataacatc

SEQ ID NO: 107018 - DNA, 25 bp, SARS Virus
gctaacgttacccaacataacatcc

SEQ ID NO: 107019 - DNA, 25 bp, SARS Virus
ctaacgttaccgcacataacatccg

SEQ ID NO: 107020 - DNA, 25 bp, SARS Virus
taacgttaccgaccataacatccga

SEQ ID NO: 107021 - DNA, 25 bp, SARS Virus
aacgttaccgaacataacatccgaa

SEQ ID NO: 107022 - DNA, 25 bp, SARS Virus
acgttaccgaacctaacatccgaac

SEQ ID NO: 107023 - DNA, 25 bp, SARS Virus
cgttaccgaacacaacatccgaact

SEQ ID NO: 107024 - DNA, 25 bp, SARS Virus
gttaccgaacatcacatccgaacta

SEQ ID NO: 107025 - DNA, 25 bp, SARS Virus
ttaccgaacataccatccgaactac

SEQ ID NO: 107026 - DNA, 25 bp, SARS Virus
taccgaacataacatccgaactaca

SEQ ID NO: 107027 - DNA, 25 bp, SARS Virus
accgaacataacctccgaactacac

SEQ ID NO: 107028 - DNA, 25 bp, SARS Virus
ccgaacataacacccgaactacacc

SEQ ID NO: 107029 - DNA, 25 bp, SARS Virus
cgaacataacatccgaactacaccg

SEQ ID NO: 107030 - DNA, 25 bp, SARS Virus
gaacataacatccgaactacaccga

SEQ ID NO: 107031 - DNA, 25 bp, SARS Virus
aacataacatcccaactacaccgaa

SEQ ID NO: 107032 - DNA, 25 bp, SARS Virus
acataacatccgcactacaccgaat

SEQ ID NO: 107033 - DNA, 25 bp, SARS Virus
cataacatccgacctacaccgaatc

SEQ ID NO: 107034 - DNA, 25 bp, SARS Virus
ataacatccgaactacaccgaatcg

SEQ ID NO: 107035 - DNA, 25 bp, SARS Virus
taacatccgaaccacaccgaatcga

SEQ ID NO: 107036 - DNA, 25 bp, SARS Virus
aacatccgaactccaccgaatcgat

SEQ ID NO: 107037 - DNA, 25 bp, SARS Virus
acatccgaactacaccgaatcgatg

SEQ ID NO: 107038 - DNA, 25 bp, SARS Virus
catccgaactaccccgaatcgatga

SEQ ID NO: 107039 - DNA, 25 bp, SARS Virus
atccgaactacaccgaatcgatgaa

SEQ ID NO: 107040 - DNA, 25 bp, SARS Virus
tccgaactacaccgaatcgatgaag

SEQ ID NO: 107041 - DNA, 25 bp, SARS Virus
ccgaactacacccaatcgatgaagc

SEQ ID NO: 107042 - DNA, 25 bp, SARS Virus
cgaactacaccgcatcgatgaagca

SEQ ID NO: 107043 - DNA, 25 bp, SARS Virus
gaactacaccgactcgatgaagcaa

SEQ ID NO: 107044 - DNA, 25 bp, SARS Virus
aactacaccgaaccgatgaagcaac

SEQ ID NO: 107045 - DNA, 25 bp, SARS Virus
actacaccgaatcgatgaagcaacg

SEQ ID NO: 107046 - DNA, 25 bp, SARS Virus
ctacaccgaatccatgaagcaacga

SEQ ID NO: 107047 - DNA, 25 bp, SARS Virus
tacaccgaatcgctgaagcaacgaa

SEQ ID NO: 107048 - DNA, 25 bp, SARS Virus
acaccgaatcgacgaagcaacgaag

SEQ ID NO: 107049 - DNA, 25 bp, SARS Virus
caccgaatcgatcaagcaacgaagg

SEQ ID NO: 107050 - DNA, 25 bp, SARS Virus
accgaatcgatgcagcaacgaagga

SEQ ID NO: 107051 - DNA, 25 bp, SARS Virus
ccgaatcgatgacgcaacgaaggaa

SEQ ID NO: 107052 - DNA, 25 bp, SARS Virus
cgaatcgatgaaccaacgaaggaag

SEQ ID NO: 107053 - DNA, 25 bp, SARS Virus
gaatcgatgaagcaacgaaggaagt

SEQ ID NO: 107054 - DNA, 25 bp, SARS Virus
aatcgatgaagccacgaaggaagtc

SEQ ID NO: 107055 - DNA, 25 bp, SARS Virus
atcgatgaagcaccgaaggaagtcc

SEQ ID NO: 107056 - DNA, 25 bp, SARS Virus
tcgatgaagcaacgaaggaagtccg

SEQ ID NO: 107057 - DNA, 25 bp, SARS Virus
cgatgaagcaaccaaggaagtccga

SEQ ID NO: 107058 - DNA, 25 bp, SARS Virus
gatgaagcaacgcaggaagtccgac

SEQ ID NO: 107059 - DNA, 25 bp, SARS Virus
atgaagcaacgacggaagtccgaca

SEQ ID NO: 107060 - DNA, 25 bp, SARS Virus
tgaagcaacgaacgaagtccgacaa

SEQ ID NO: 107061 - DNA, 25 bp, SARS Virus
gaagcaacgaagcaagtccgacaaa

SEQ ID NO: 107062 - DNA, 25 bp, SARS Virus
aagcaacgaaggcagtccgacaaac

SEQ ID NO: 107063 - DNA, 25 bp, SARS Virus
agcaacgaaggacgtccgacaaacg

SEQ ID NO: 107064 - DNA, 25 bp, SARS Virus
gcaacgaaggaactccgacaaacga

SEQ ID NO: 107065 - DNA, 25 bp, SARS Virus
caacgaaggaagcccgacaaacgag

SEQ ID NO: 107066 - DNA, 25 bp, SARS Virus
aacgaaggaagtccgacaaacgagc

SEQ ID NO: 107067 - DNA, 25 bp, SARS Virus
acgaaggaagtccgacaaacgagca

SEQ ID NO: 107068 - DNA, 25 bp, SARS Virus
cgaaggaagtcccacaaacgagcat

SEQ ID NO: 107069 - DNA, 25 bp, SARS Virus
gaaggaagtccgccaaacgagcatg

SEQ ID NO: 107070 - DNA, 25 bp, SARS Virus
aaggaagtccgacaaacgagcatgg

SEQ ID NO: 107071 - DNA, 25 bp, SARS Virus
aggaagtccgaccaacgagcatggg

SEQ ID NO: 107072 - DNA, 25 bp, SARS Virus
ggaagtccgacacacgagcatgggc

SEQ ID NO: 107073 - DNA, 25 bp, SARS Virus
gaagtccgacaaccgagcatgggcg

SEQ ID NO: 107074 - DNA, 25 bp, SARS Virus
aagtccgacaaacgagcatgggcga

SEQ ID NO: 107075 - DNA, 25 bp, SARS Virus
agtccgacaaaccagcatgggcgag

SEQ ID NO: 107076 - DNA, 25 bp, SARS Virus
gtccgacaaacgcgcatgggcgagt

SEQ ID NO: 107077 - DNA, 25 bp, SARS Virus
tccgacaaacgaccatgggcgagtt

SEQ ID NO: 107078 - DNA, 25 bp, SARS Virus
ccgacaaacgagcatgggcgagtta

SEQ ID NO: 107079 - DNA, 25 bp, SARS Virus
cgacaaacgagcctgggcgagttac

SEQ ID NO: 107080 - DNA, 25 bp, SARS Virus
gacaaacgagcacgggcgagttaca

SEQ ID NO: 107081 - DNA, 25 bp, SARS Virus
acaaacgagcatcggcgagttacac

SEQ ID NO: 107082 - DNA, 25 bp, SARS Virus
caaacgagcatgcgcgagttacacc

SEQ ID NO: 107083 - DNA, 25 bp, SARS Virus
aaacgagcatggccgagttacacca

SEQ ID NO: 107084 - DNA, 25 bp, SARS Virus
aacgagcatgggcgagttacaccag

SEQ ID NO: 107085 - DNA, 25 bp, SARS Virus
acgagcatgggccagttacaccagt

SEQ ID NO: 107086 - DNA, 25 bp, SARS Virus
cgagcatgggcgcgttacaccagta

SEQ ID NO: 107087 - DNA, 25 bp, SARS Virus
gagcatgggcgacttacaccagtaa

SEQ ID NO: 107088 - DNA, 25 bp, SARS Virus
agcatgggcgagctacaccagtaag

SEQ ID NO: 107089 - DNA, 25 bp, SARS Virus
gcatgggcgagtcacaccagtaagt

SEQ ID NO: 107090 - DNA, 25 bp, SARS Virus
catgggcgagttccaccagtaagtt

SEQ ID NO: 107091 - DNA, 25 bp, SARS Virus
atgggcgagttacaccagtaagttg

SEQ ID NO: 107092 - DNA, 25 bp, SARS Virus
tgggcgagttaccccagtaagttgg

SEQ ID NO: 107093 - DNA, 25 bp, SARS Virus
gggcgagttacaccagtaagttggg

SEQ ID NO: 107094 - DNA, 25 bp, SARS Virus
ggcgagttacaccagtaagttgggt

SEQ ID NO: 107095 - DNA, 25 bp, SARS Virus
gcgagttacacccgtaagttgggtc

SEQ ID NO: 107096 - DNA, 25 bp, SARS Virus
cgagttacaccactaagttgggtct

SEQ ID NO: 107097 - DNA, 25 bp, SARS Virus
gagttacaccagcaagttgggtctt

SEQ ID NO: 107098 - DNA, 25 bp, SARS Virus
agttacaccagtcagttgggtcttt

SEQ ID NO: 107099 - DNA, 25 bp, SARS Virus
gttacaccagtacgttgggtctttg

SEQ ID NO: 107100 - DNA, 25 bp, SARS Virus
ttacaccagtaacttgggtctttgt

SEQ ID NO: 107101 - DNA, 25 bp, SARS Virus
tacaccagtaagctgggtctttgtt

SEQ ID NO: 107102 - DNA, 25 bp, SARS Virus
acaccagtaagtcgggtctttgttt

SEQ ID NO: 107103 - DNA, 25 bp, SARS Virus
caccagtaagttcggtctttgtttg

SEQ ID NO: 107104 - DNA, 25 bp, SARS Virus
accagtaagttgcgtctttgtttgt

SEQ ID NO: 107105 - DNA, 25 bp, SARS Virus
ccagtaagttggctctttgtttgta

SEQ ID NO: 107106 - DNA, 25 bp, SARS Virus
cagtaagttgggcctttgtttgtaa

SEQ ID NO: 107107 - DNA, 25 bp, SARS Virus
agtaagttgggtctttgtttgtaag

SEQ ID NO: 107108 - DNA, 25 bp, SARS Virus
gtaagttgggtccttgtttgtaaga

SEQ ID NO: 107109 - DNA, 25 bp, SARS Virus
taagttgggtctctgtttgtaagaa

SEQ ID NO: 107110 - DNA, 25 bp, SARS Virus
aagttgggtcttcgtttgtaagaag

SEQ ID NO: 107111 - DNA, 25 bp, SARS Virus
agttgggtctttctttgtaagaaga

SEQ ID NO: 107112 - DNA, 25 bp, SARS Virus
gttgggtctttgcttgtaagaagag

SEQ ID NO: 107113 - DNA, 25 bp, SARS Virus
ttgggtctttgtctgtaagaagagt

SEQ ID NO: 107114 - DNA, 25 bp, SARS Virus
tgggtctttgttcgtaagaagagtt

SEQ ID NO: 107115 - DNA, 25 bp, SARS Virus
gggtctttgtttctaagaagagtta

SEQ ID NO: 107116 - DNA, 25 bp, SARS Virus
ggtctttgtttgcaagaagagttac

SEQ ID NO: 107117 - DNA, 25 bp, SARS Virus
gtctttgtttgtcagaagagttaca

SEQ ID NO: 107118 - DNA, 25 bp, SARS Virus
tctttgtttgtacgaagagttacac

SEQ ID NO: 107119 - DNA, 25 bp, SARS Virus
ctttgtttgtaacaagagttacacg

SEQ ID NO: 107120 - DNA, 25 bp, SARS Virus
tttgtttgtaagcagagttacacgg

SEQ ID NO: 107121 - DNA, 25 bp, SARS Virus
ttgtttgtaagacgagttacacgga

SEQ ID NO: 107122 - DNA, 25 bp, SARS Virus
tgtttgtaagaacagttacacggag

SEQ ID NO: 107123 - DNA, 25 bp, SARS Virus
gtttgtaagaagcgttacacggaga

SEQ ID NO: 107124 - DNA, 25 bp, SARS Virus
tttgtaagaagacttacacggagag

SEQ ID NO: 107125 - DNA, 25 bp, SARS Virus
ttgtaagaagagctacacggagagg

SEQ ID NO: 107126 - DNA, 25 bp, SARS Virus
tgtaagaagagtcacacggagaggc

SEQ ID NO: 107127 - DNA, 25 bp, SARS Virus
gtaagaagagttccacggagaggcc

SEQ ID NO: 107128 - DNA, 25 bp, SARS Virus
taagaagagttacacggagaggccc

SEQ ID NO: 107129 - DNA, 25 bp, SARS Virus
aagaagagttacccggagaggcccc

SEQ ID NO: 107130 - DNA, 25 bp, SARS Virus
agaagagttacacggagaggccccc

SEQ ID NO: 107131 - DNA, 25 bp, SARS Virus
gaagagttacaccgagaggccccct

SEQ ID NO: 107132 - DNA, 25 bp, SARS Virus
aagagttacacgcagaggccccctg

SEQ ID NO: 107133 - DNA, 25 bp, SARS Virus
agagttacacggcgaggccccctgt

SEQ ID NO: 107134 - DNA, 25 bp, SARS Virus
gagttacacggacaggccccctgtt

SEQ ID NO: 107135 - DNA, 25 bp, SARS Virus
agttacacggagcggccccctgtta

SEQ ID NO: 107136 - DNA, 25 bp, SARS Virus
gttacacggagacgccccctgttaa

SEQ ID NO: 107137 - DNA, 25 bp, SARS Virus
ttacacggagagcccccctgttaac

SEQ ID NO: 107138 - DNA, 25 bp, SARS Virus
tacacggagaggccccctgttaaca

SEQ ID NO: 107139 - DNA, 25 bp, SARS Virus
acacggagaggccccctgttaacac

SEQ ID NO: 107140 - DNA, 25 bp, SARS Virus
cacggagaggccccctgttaacact

SEQ ID NO: 107141 - DNA, 25 bp, SARS Virus
acggagaggccccctgttaacactg

SEQ ID NO: 107142 - DNA, 25 bp, SARS Virus
cggagaggccccctgttaacactgg

SEQ ID NO: 107143 - DNA, 25 bp, SARS Virus
ggagaggccccccgttaacactggt

SEQ ID NO: 107144 - DNA, 25 bp, SARS Virus
gagaggccccctcttaacactggtc

SEQ ID NO: 107145 - DNA, 25 bp, SARS Virus
agaggccccctgctaacactggtct

SEQ ID NO: 107146 - DNA, 25 bp, SARS Virus
gaggccccctgtcaacactggtctg

SEQ ID NO: 107147 - DNA, 25 bp, SARS Virus
aggccccctgttcacactggtctgg

SEQ ID NO: 107148 - DNA, 25 bp, SARS Virus
ggccccctgttaccactggtctggc

SEQ ID NO: 107149 - DNA, 25 bp, SARS Virus
gccccctgttaacactggtctggcg

SEQ ID NO: 107150 - DNA, 25 bp, SARS Virus
ccccctgttaaccctggtctggcga

SEQ ID NO: 107151 - DNA, 25 bp, SARS Virus
cccctgttaacactggtctggcgag

SEQ ID NO: 107152 - DNA, 25 bp, SARS Virus
ccctgttaacaccggtctggcgagt

SEQ ID NO: 107153 - DNA, 25 bp, SARS Virus
cctgttaacactcgtctggcgagta

SEQ ID NO: 107154 - DNA, 25 bp, SARS Virus
ctgttaacactgctctggcgagtac

SEQ ID NO: 107155 - DNA, 25 bp, SARS Virus
tgttaacactggcctggcgagtacc

SEQ ID NO: 107156 - DNA, 25 bp, SARS Virus
gttaacactggtctggcgagtacct

SEQ ID NO: 107157 - DNA, 25 bp, SARS Virus
ttaacactggtccggcgagtacctt

SEQ ID NO: 107158 - DNA, 25 bp, SARS Virus
taacactggtctcgcgagtaccttt

SEQ ID NO: 107159 - DNA, 25 bp, SARS Virus
aacactggtctgccgagtacctttc

SEQ ID NO: 107160 - DNA, 25 bp, SARS Virus
acactggtctggcgagtacctttca

SEQ ID NO: 107161 - DNA, 25 bp, SARS Virus
cactggtctggccagtacctttcac

SEQ ID NO: 107162 - DNA, 25 bp, SARS Virus
actggtctggcgcgtacctttcact

SEQ ID NO: 107163 - DNA, 25 bp, SARS Virus
ctggtctggcgactacctttcactt

SEQ ID NO: 107164 - DNA, 25 bp, SARS Virus
tggtctggcgagcacctttcacttg

SEQ ID NO: 107165 - DNA, 25 bp, SARS Virus
ggtctggcgagtccctttcacttga

SEQ ID NO: 107166 - DNA, 25 bp, SARS Virus
gtctggcgagtacctttcacttgaa

SEQ ID NO: 107167 - DNA, 25 bp, SARS Virus
tctggcgagtacctttcacttgaac

SEQ ID NO: 107168 - DNA, 25 bp, SARS Virus
ctggcgagtacccttcacttgaaca

SEQ ID NO: 107169 - DNA, 25 bp, SARS Virus
tggcgagtacctctcacttgaacag

SEQ ID NO: 107170 - DNA, 25 bp, SARS Virus
ggcgagtaccttccacttgaacagt

SEQ ID NO: 107171 - DNA, 25 bp, SARS Virus
gcgagtacctttcacttgaacagta

SEQ ID NO: 107172 - DNA, 25 bp, SARS Virus
cgagtacctttcccttgaacagtaa

SEQ ID NO: 107173 - DNA, 25 bp, SARS Virus
gagtacctttcacttgaacagtaac

SEQ ID NO: 107174 - DNA, 25 bp, SARS Virus
agtacctttcacctgaacagtaacc

SEQ ID NO: 107175 - DNA, 25 bp, SARS Virus
gtacctttcactcgaacagtaacca

SEQ ID NO: 107176 - DNA, 25 bp, SARS Virus
tacctttcacttcaacagtaaccac

SEQ ID NO: 107177 - DNA, 25 bp, SARS Virus
acctttcacttgcacagtaaccacg

SEQ ID NO: 107178 - DNA, 25 bp, SARS Virus
cctttcacttgaccagtaaccacga

SEQ ID NO: 107179 - DNA, 25 bp, SARS Virus
ctttcacttgaacagtaaccacgac

SEQ ID NO: 107180 - DNA, 25 bp, SARS Virus
tttcacttgaaccgtaaccacgaca

SEQ ID NO: 107181 - DNA, 25 bp, SARS Virus
ttcacttgaacactaaccacgacac

SEQ ID NO: 107182 - DNA, 25 bp, SARS Virus
tcacttgaacagcaaccacgacact

SEQ ID NO: 107183 - DNA, 25 bp, SARS Virus
cacttgaacagtcaccacgacacta

SEQ ID NO: 107184 - DNA, 25 bp, SARS Virus
acttgaacagtacccacgacactag

SEQ ID NO: 107185 - DNA, 25 bp, SARS Virus
cttgaacagtaaccacgacactagt

SEQ ID NO: 107186 - DNA, 25 bp, SARS Virus
ttgaacagtaaccacgacactagta

SEQ ID NO: 107187 - DNA, 25 bp, SARS Virus
tgaacagtaaccccgacactagtaa

SEQ ID NO: 107188 - DNA, 25 bp, SARS Virus
gaacagtaaccacgacactagtaag

SEQ ID NO: 107189 - DNA, 25 bp, SARS Virus
aacagtaaccaccacactagtaagc

SEQ ID NO: 107190 - DNA, 25 bp, SARS Virus
acagtaaccacgccactagtaagca

SEQ ID NO: 107191 - DNA, 25 bp, SARS Virus
cagtaaccacgacactagtaagcac

SEQ ID NO: 107192 - DNA, 25 bp, SARS Virus
agtaaccacgaccctagtaagcacc

SEQ ID NO: 107193 - DNA, 25 bp, SARS Virus
gtaaccacgacactagtaagcacca

SEQ ID NO: 107194 - DNA, 25 bp, SARS Virus
taaccacgacaccagtaagcaccag

SEQ ID NO: 107195 - DNA, 25 bp, SARS Virus
aaccacgacactcgtaagcaccagt

SEQ ID NO: 107196 - DNA, 25 bp, SARS Virus
accacgacactactaagcaccagtg

SEQ ID NO: 107197 - DNA, 25 bp, SARS Virus
ccacgacactagcaagcaccagtga

SEQ ID NO: 107198 - DNA, 25 bp, SARS Virus
cacgacactagtcagcaccagtgaa

SEQ ID NO: 107199 - DNA, 25 bp, SARS Virus
acgacactagtacgcaccagtgaac

SEQ ID NO: 107200 - DNA, 25 bp, SARS Virus
cgacactagtaaccaccagtgaacg

SEQ ID NO: 107201 - DNA, 25 bp, SARS Virus
gacactagtaagcaccagtgaacgc

SEQ ID NO: 107202 - DNA, 25 bp, SARS Virus
acactagtaagccccagtgaacgct

SEQ ID NO: 107203 - DNA, 25 bp, SARS Virus
cactagtaagcaccagtgaacgctt

SEQ ID NO: 107204 - DNA, 25 bp, SARS Virus
actagtaagcaccagtgaacgctta

SEQ ID NO: 107205 - DNA, 25 bp, SARS Virus
ctagtaagcacccgtgaacgcttac

SEQ ID NO: 107206 - DNA, 25 bp, SARS Virus
tagtaagcaccactgaacgcttacc

SEQ ID NO: 107207 - DNA, 25 bp, SARS Virus
agtaagcaccagcgaacgcttaccg

SEQ ID NO: 107208 - DNA, 25 bp, SARS Virus
gtaagcaccagtcaacgcttaccgg

SEQ ID NO: 107209 - DNA, 25 bp, SARS Virus
taagcaccagtgcacgcttaccggc

SEQ ID NO: 107210 - DNA, 25 bp, SARS Virus
aagcaccagtgaccgcttaccggcc

SEQ ID NO: 107211 - DNA, 25 bp, SARS Virus
agcaccagtgaacgcttaccggcct

SEQ ID NO: 107212 - DNA, 25 bp, SARS Virus
gcaccagtgaacccttaccggcctg

SEQ ID NO: 107213 - DNA, 25 bp, SARS Virus
caccagtgaacgcttaccggcctgt

SEQ ID NO: 107214 - DNA, 25 bp, SARS Virus
accagtgaacgcctaccggcctgtg

SEQ ID NO: 107215 - DNA, 25 bp, SARS Virus
ccagtgaacgctcaccggcctgtga

SEQ ID NO: 107216 - DNA, 25 bp, SARS Virus
cagtgaacgcttcccggcctgtgag

SEQ ID NO: 107217 - DNA, 25 bp, SARS Virus
agtgaacgcttaccggcctgtgagg

SEQ ID NO: 107218 - DNA, 25 bp, SARS Virus
gtgaacgcttaccggcctgtgaggg

SEQ ID NO: 107219 - DNA, 25 bp, SARS Virus
tgaacgcttacccgcctgtgaggga

SEQ ID NO: 107220 - DNA, 25 bp, SARS Virus
gaacgcttaccgccctgtgagggat

SEQ ID NO: 107221 - DNA, 25 bp, SARS Virus
aacgcttaccggcctgtgagggatc

SEQ ID NO: 107222 - DNA, 25 bp, SARS Virus
acgcttaccggcctgtgagggatcc

SEQ ID NO: 107223 - DNA, 25 bp, SARS Virus
cgcttaccggcccgtgagggatccc

SEQ ID NO: 107224 - DNA, 25 bp, SARS Virus
gcttaccggcctctgagggatcccg

SEQ ID NO: 107225 - DNA, 25 bp, SARS Virus
cttaccggcctgcgagggatcccgc

SEQ ID NO: 107226 - DNA, 25 bp, SARS Virus
ttaccggcctgtcagggatcccgcg

SEQ ID NO: 107227 - DNA, 25 bp, SARS Virus
taccggcctgtgcgggatcccgcga

SEQ ID NO: 107228 - DNA, 25 bp, SARS Virus
accggcctgtgacggatcccgcgac

SEQ ID NO: 107229 - DNA, 25 bp, SARS Virus
ccggcctgtgagcgatcccgcgaca

SEQ ID NO: 107230 - DNA, 25 bp, SARS Virus
cggcctgtgaggcatcccgcgacac

SEQ ID NO: 107231 - DNA, 25 bp, SARS Virus
ggcctgtgagggctcccgcgacact

SEQ ID NO: 107232 - DNA, 25 bp, SARS Virus
gcctgtgagggaccccgcgacactg

SEQ ID NO: 107233 - DNA, 25 bp, SARS Virus
cctgtgagggatcccgcgacactgt

SEQ ID NO: 107234 - DNA, 25 bp, SARS Virus
ctgtgagggatcccgcgacactgta

SEQ ID NO: 107235 - DNA, 25 bp, SARS Virus
tgtgagggatcccgcgacactgtaa

SEQ ID NO: 107236 - DNA, 25 bp, SARS Virus
gtgagggatcccccgacactgtaat

SEQ ID NO: 107237 - DNA, 25 bp, SARS Virus
tgagggatcccgcgacactgtaatt

SEQ ID NO: 107238 - DNA, 25 bp, SARS Virus
gagggatcccgccacactgtaattc

SEQ ID NO: 107239 - DNA, 25 bp, SARS Virus
agggatcccgcgccactgtaattcc

SEQ ID NO: 107240 - DNA, 25 bp, SARS Virus
gggatcccgcgacactgtaattcct

SEQ ID NO: 107241 - DNA, 25 bp, SARS Virus
ggatcccgcgaccctgtaattcctg

SEQ ID NO: 107242 - DNA, 25 bp, SARS Virus
gatcccgcgacactgtaattcctgg

SEQ ID NO: 107243 - DNA, 25 bp, SARS Virus
atcccgcgacaccgtaattcctgga

SEQ ID NO: 107244 - DNA, 25 bp, SARS Virus
tcccgcgacactctaattcctggac

SEQ ID NO: 107245 - DNA, 25 bp, SARS Virus
cccgcgacactgcaattcctggacg

SEQ ID NO: 107246 - DNA, 25 bp, SARS Virus
ccgcgacactgtcattcctggacgg

SEQ ID NO: 107247 - DNA, 25 bp, SARS Virus
cgcgacactgtacttcctggacggt

SEQ ID NO: 107248 - DNA, 25 bp, SARS Virus
gcgacactgtaactcctggacggtt

SEQ ID NO: 107249 - DNA, 25 bp, SARS Virus
cgacactgtaatccctggacggttt

SEQ ID NO: 107250 - DNA, 25 bp, SARS Virus
gacactgtaattcctggacggtttt

SEQ ID NO: 107251 - DNA, 25 bp, SARS Virus
acactgtaattcctggacggttttc

SEQ ID NO: 107252 - DNA, 25 bp, SARS Virus
cactgtaattcccggacggttttct

SEQ ID NO: 107253 - DNA, 25 bp, SARS Virus
actgtaattcctcgacggttttctc

SEQ ID NO: 107254 - DNA, 25 bp, SARS Virus
ctgtaattcctgcacggttttctct

SEQ ID NO: 107255 - DNA, 25 bp, SARS Virus
tgtaattcctggccggttttctcta

SEQ ID NO: 107256 - DNA, 25 bp, SARS Virus
gtaattcctggacggttttctctag

SEQ ID NO: 107257 - DNA, 25 bp, SARS Virus
taattcctggaccgttttctctagt

SEQ ID NO: 107258 - DNA, 25 bp, SARS Virus
aattcctggacgcttttctctagtg

SEQ ID NO: 107259 - DNA, 25 bp, SARS Virus
attcctggacggctttctctagtga

SEQ ID NO: 107260 - DNA, 25 bp, SARS Virus
ttcctggacggtcttctctagtgac

SEQ ID NO: 107261 - DNA, 25 bp, SARS Virus
tcctggacggttctctctagtgaca

SEQ ID NO: 107262 - DNA, 25 bp, SARS Virus
cctggacggtttcctctagtgacac

SEQ ID NO: 107263 - DNA, 25 bp, SARS Virus
ctggacggttttctctagtgacacc

SEQ ID NO: 107264 - DNA, 25 bp, SARS Virus
tggacggttttccctagtgacaccg

SEQ ID NO: 107265 - DNA, 25 bp, SARS Virus
ggacggttttctctagtgacaccga

SEQ ID NO: 107266 - DNA, 25 bp, SARS Virus
gacggttttctccagtgacaccgat

SEQ ID NO: 107267 - DNA, 25 bp, SARS Virus
acggttttctctcgtgacaccgatg

SEQ ID NO: 107268 - DNA, 25 bp, SARS Virus
cggttttctctactgacaccgatgt

SEQ ID NO: 107269 - DNA, 25 bp, SARS Virus
ggttttctctagcgacaccgatgta

SEQ ID NO: 107270 - DNA, 25 bp, SARS Virus
gttttctctagtcacaccgatgtag

SEQ ID NO: 107271 - DNA, 25 bp, SARS Virus
ttttctctagtgccaccgatgtagt

SEQ ID NO: 107272 - DNA, 25 bp, SARS Virus
tttctctagtgacaccgatgtagtg

SEQ ID NO: 107273 - DNA, 25 bp, SARS Virus
ttctctagtgaccccgatgtagtgc

SEQ ID NO: 107274 - DNA, 25 bp, SARS Virus
tctctagtgacaccgatgtagtgct

SEQ ID NO: 107275 - DNA, 25 bp, SARS Virus
ctctagtgacaccgatgtagtgctt

SEQ ID NO: 107276 - DNA, 25 bp, SARS Virus
tctagtgacacccatgtagtgcttg

SEQ ID NO: 107277 - DNA, 25 bp, SARS Virus
ctagtgacaccgctgtagtgcttgc

SEQ ID NO: 107278 - DNA, 25 bp, SARS Virus
tagtgacaccgacgtagtgcttgcg

SEQ ID NO: 107279 - DNA, 25 bp, SARS Virus
agtgacaccgatctagtgcttgcga

SEQ ID NO: 107280 - DNA, 25 bp, SARS Virus
gtgacaccgatgcagtgcttgcgaa

SEQ ID NO: 107281 - DNA, 25 bp, SARS Virus
tgacaccgatgtcgtgcttgcgaaa

SEQ ID NO: 107282 - DNA, 25 bp, SARS Virus
gacaccgatgtactgcttgcgaaag

SEQ ID NO: 107283 - DNA, 25 bp, SARS Virus
acaccgatgtagcgcttgcgaaaga

SEQ ID NO: 107284 - DNA, 25 bp, SARS Virus
caccgatgtagtccttgcgaaagaa

SEQ ID NO: 107285 - DNA, 25 bp, SARS Virus
accgatgtagtgcttgcgaaagaat

SEQ ID NO: 107286 - DNA, 25 bp, SARS Virus
ccgatgtagtgcctgcgaaagaata

SEQ ID NO: 107287 - DNA, 25 bp, SARS Virus
cgatgtagtgctcgcgaaagaataa

SEQ ID NO: 107288 - DNA, 25 bp, SARS Virus
gatgtagtgcttccgaaagaataat

SEQ ID NO: 107289 - DNA, 25 bp, SARS Virus
atgtagtgcttgcgaaagaataatg

SEQ ID NO: 107290 - DNA, 25 bp, SARS Virus
tgtagtgcttgccaaagaataatgt

SEQ ID NO: 107291 - DNA, 25 bp, SARS Virus
gtagtgcttgcgcaagaataatgtt

SEQ ID NO: 107292 - DNA, 25 bp, SARS Virus
tagtgcttgcgacagaataatgttt

SEQ ID NO: 107293 - DNA, 25 bp, SARS Virus
agtgcttgcgaacgaataatgttta

SEQ ID NO: 107294 - DNA, 25 bp, SARS Virus
gtgcttgcgaaacaataatgtttaa

SEQ ID NO: 107295 - DNA, 25 bp, SARS Virus
tgcttgcgaaagcataatgtttaat

SEQ ID NO: 107296 - DNA, 25 bp, SARS Virus
gcttgcgaaagactaatgtttaatc

SEQ ID NO: 107297 - DNA, 25 bp, SARS Virus
cttgcgaaagaacaatgtttaatcc

SEQ ID NO: 107298 - DNA, 25 bp, SARS Virus
ttgcgaaagaatcatgtttaatcct

SEQ ID NO: 107299 - DNA, 25 bp, SARS Virus
tgcgaaagaatactgtttaatcctc

SEQ ID NO: 107300 - DNA, 25 bp, SARS Virus
gcgaaagaataacgtttaatcctcg

SEQ ID NO: 107301 - DNA, 25 bp, SARS Virus
cgaaagaataatctttaatcctcgc

SEQ ID NO: 107302 - DNA, 25 bp, SARS Virus
gaaagaataatgcttaatcctcgca

SEQ ID NO: 107303 - DNA, 25 bp, SARS Virus
aaagaataatgtctaatcctcgcag

SEQ ID NO: 107304 - DNA, 25 bp, SARS Virus
aagaataatgttcaatcctcgcagc

SEQ ID NO: 107305 - DNA, 25 bp, SARS Virus
agaataatgtttcatcctcgcagcg

SEQ ID NO: 107306 - DNA, 25 bp, SARS Virus
gaataatgtttactcctcgcagcgt

SEQ ID NO: 107307 - DNA, 25 bp, SARS Virus
aataatgtttaaccctcgcagcgtc

SEQ ID NO: 107308 - DNA, 25 bp, SARS Virus
ataatgtttaatcctcgcagcgtcg

SEQ ID NO: 107309 - DNA, 25 bp, SARS Virus
taatgtttaatcctcgcagcgtcgc

SEQ ID NO: 107310 - DNA, 25 bp, SARS Virus
aatgtttaatccccgcagcgtcgca

SEQ ID NO: 107311 - DNA, 25 bp, SARS Virus
atgtttaatcctcgcagcgtcgcac

SEQ ID NO: 107312 - DNA, 25 bp, SARS Virus
tgtttaatcctcccagcgtcgcaca

SEQ ID NO: 107313 - DNA, 25 bp, SARS Virus
gtttaatcctcgcagcgtcgcacat

SEQ ID NO: 107314 - DNA, 25 bp, SARS Virus
tttaatcctcgccgcgtcgcacatc

SEQ ID NO: 107315 - DNA, 25 bp, SARS Virus
ttaatcctcgcaccgtcgcacatcc

SEQ ID NO: 107316 - DNA, 25 bp, SARS Virus
taatcctcgcagcgtcgcacatccg

SEQ ID NO: 107317 - DNA, 25 bp, SARS Virus
aatcctcgcagcctcgcacatccgt

SEQ ID NO: 107318 - DNA, 25 bp, SARS Virus
atcctcgcagcgccgcacatccgtg

SEQ ID NO: 107319 - DNA, 25 bp, SARS Virus
tcctcgcagcgtcgcacatccgtga

SEQ ID NO: 107320 - DNA, 25 bp, SARS Virus
cctcgcagcgtcccacatccgtgac

SEQ ID NO: 107321 - DNA, 25 bp, SARS Virus
ctcgcagcgtcgcacatccgtgact

SEQ ID NO: 107322 - DNA, 25 bp, SARS Virus
tcgcagcgtcgcccatccgtgacta

SEQ ID NO: 107323 - DNA, 25 bp, SARS Virus
cgcagcgtcgcacatccgtgactaa

SEQ ID NO: 107324 - DNA, 25 bp, SARS Virus
gcagcgtcgcacctccgtgactaag

SEQ ID NO: 107325 - DNA, 25 bp, SARS Virus
cagcgtcgcacacccgtgactaagt

SEQ ID NO: 107326 - DNA, 25 bp, SARS Virus
agcgtcgcacatccgtgactaagtc

SEQ ID NO: 107327 - DNA, 25 bp, SARS Virus
gcgtcgcacatccgtgactaagtcc

SEQ ID NO: 107328 - DNA, 25 bp, SARS Virus
cgtcgcacatccctgactaagtcca

SEQ ID NO: 107329 - DNA, 25 bp, SARS Virus
gtcgcacatccgcgactaagtccaa

SEQ ID NO: 107330 - DNA, 25 bp, SARS Virus
tcgcacatccgtcactaagtccaaa

SEQ ID NO: 107331 - DNA, 25 bp, SARS Virus
cgcacatccgtgcctaagtccaaaa

SEQ ID NO: 107332 - DNA, 25 bp, SARS Virus
gcacatccgtgactaagtccaaaac

SEQ ID NO: 107333 - DNA, 25 bp, SARS Virus
cacatccgtgaccaagtccaaaacg

SEQ ID NO: 107334 - DNA, 25 bp, SARS Virus
acatccgtgactcagtccaaaacga

SEQ ID NO: 107335 - DNA, 25 bp, SARS Virus
catccgtgactacgtccaaaacgac

SEQ ID NO: 107336 - DNA, 25 bp, SARS Virus
atccgtgactaactccaaaacgacg

SEQ ID NO: 107337 - DNA, 25 bp, SARS Virus
tccgtgactaagcccaaaacgacgt

SEQ ID NO: 107338 - DNA, 25 bp, SARS Virus
ccgtgactaagtccaaaacgacgta

SEQ ID NO: 107339 - DNA, 25 bp, SARS Virus
cgtgactaagtccaaaacgacgtat

SEQ ID NO: 107340 - DNA, 25 bp, SARS Virus
gtgactaagtcccaaacgacgtatg

SEQ ID NO: 107341 - DNA, 25 bp, SARS Virus
tgactaagtccacaacgacgtatgt

SEQ ID NO: 107342 - DNA, 25 bp, SARS Virus
gactaagtccaacacgacgtatgtt

SEQ ID NO: 107343 - DNA, 25 bp, SARS Virus
actaagtccaaaccgacgtatgttg

SEQ ID NO: 107344 - DNA, 25 bp, SARS Virus
ctaagtccaaaacgacgtatgttgg

SEQ ID NO: 107345 - DNA, 25 bp, SARS Virus
taagtccaaaaccacgtatgttggc

SEQ ID NO: 107346 - DNA, 25 bp, SARS Virus
aagtccaaaacgccgtatgttggcg

SEQ ID NO: 107347 - DNA, 25 bp, SARS Virus
agtccaaaacgacgtatgttggcga

SEQ ID NO: 107348 - DNA, 25 bp, SARS Virus
gtccaaaacgacctatgttggcgat

SEQ ID NO: 107349 - DNA, 25 bp, SARS Virus
tccaaaacgacgcatgttggcgatg

SEQ ID NO: 107350 - DNA, 25 bp, SARS Virus
ccaaaacgacgtctgttggcgatgg

SEQ ID NO: 107351 - DNA, 25 bp, SARS Virus
caaaacgacgtacgttggcgatggc

SEQ ID NO: 107352 - DNA, 25 bp, SARS Virus
aaaacgacgtatcttggcgatggca

SEQ ID NO: 107353 - DNA, 25 bp, SARS Virus
aaacgacgtatgctggcgatggcat

SEQ ID NO: 107354 - DNA, 25 bp, SARS Virus
aacgacgtatgtcggcgatggcata

SEQ ID NO: 107355 - DNA, 25 bp, SARS Virus
acgacgtatgttcgcgatggcataa

SEQ ID NO: 107356 - DNA, 25 bp, SARS Virus
cgacgtatgttgccgatggcataac

SEQ ID NO: 107357 - DNA, 25 bp, SARS Virus
gacgtatgttggcgatggcataacc

SEQ ID NO: 107358 - DNA, 25 bp, SARS Virus
acgtatgttggccatggcataacct

SEQ ID NO: 107359 - DNA, 25 bp, SARS Virus
cgtatgttggcgctggcataacctt

SEQ ID NO: 107360 - DNA, 25 bp, SARS Virus
gtatgttggcgacggcataaccttt

SEQ ID NO: 107361 - DNA, 25 bp, SARS Virus
tatgttggcgatcgcataacctttg

SEQ ID NO: 107362 - DNA, 25 bp, SARS Virus
atgttggcgatgccataacctttga

SEQ ID NO: 107363 - DNA, 25 bp, SARS Virus
tgttggcgatggcataacctttgat

SEQ ID NO: 107364 - DNA, 25 bp, SARS Virus
gttggcgatggcctaacctttgata

SEQ ID NO: 107365 - DNA, 25 bp, SARS Virus
ttggcgatggcacaacctttgatat

SEQ ID NO: 107366 - DNA, 25 bp, SARS Virus
tggcgatggcatcacctttgatatt

SEQ ID NO: 107367 - DNA, 25 bp, SARS Virus
ggcgatggcataccctttgatattt

SEQ ID NO: 107368 - DNA, 25 bp, SARS Virus
gcgatggcataacctttgatattta

SEQ ID NO: 107369 - DNA, 25 bp, SARS Virus
cgatggcataacctttgatatttaa

SEQ ID NO: 107370 - DNA, 25 bp, SARS Virus
gatggcataacccttgatatttaat

SEQ ID NO: 107371 - DNA, 25 bp, SARS Virus
atggcataacctctgatatttaatt

SEQ ID NO: 107372 - DNA, 25 bp, SARS Virus
tggcataaccttcgatatttaattt

SEQ ID NO: 107373 - DNA, 25 bp, SARS Virus
ggcataacctttcatatttaattta

SEQ ID NO: 107374 - DNA, 25 bp, SARS Virus
gcataacctttgctatttaatttat

SEQ ID NO: 107375 - DNA, 25 bp, SARS Virus
cataacctttgacatttaatttatg

SEQ ID NO: 107376 - DNA, 25 bp, SARS Virus
ataacctttgatctttaatttatgt

SEQ ID NO: 107377 - DNA, 25 bp, SARS Virus
taacctttgatacttaatttatgtc

SEQ ID NO: 107378 - DNA, 25 bp, SARS Virus
aacctttgatatctaatttatgtct

SEQ ID NO: 107379 - DNA, 25 bp, SARS Virus
acctttgatattcaatttatgtctg

SEQ ID NO: 107380 - DNA, 25 bp, SARS Virus
cctttgatatttcatttatgtctgg

SEQ ID NO: 107381 - DNA, 25 bp, SARS Virus
ctttgatatttactttatgtctggt

SEQ ID NO: 107382 - DNA, 25 bp, SARS Virus
tttgatatttaacttatgtctggtg

SEQ ID NO: 107383 - DNA, 25 bp, SARS Virus
ttgatatttaatctatgtctggtgc

SEQ ID NO: 107384 - DNA, 25 bp, SARS Virus
tgatatttaattcatgtctggtgcg

SEQ ID NO: 107385 - DNA, 25 bp, SARS Virus
gatatttaatttctgtctggtgcgg

SEQ ID NO: 107386 - DNA, 25 bp, SARS Virus
atatttaatttacgtctggtgcggc

SEQ ID NO: 107387 - DNA, 25 bp, SARS Virus
tatttaatttatctctggtgcggcc

SEQ ID NO: 107388 - DNA, 25 bp, SARS Virus
atttaatttatgcctggtgcggcca

SEQ ID NO: 107389 - DNA, 25 bp, SARS Virus
tttaatttatgtctggtgcggccat

SEQ ID NO: 107390 - DNA, 25 bp, SARS Virus
ttaatttatgtccggtgcggccatc

SEQ ID NO: 107391 - DNA, 25 bp, SARS Virus
taatttatgtctcgtgcggccatcg

SEQ ID NO: 107392 - DNA, 25 bp, SARS Virus
aatttatgtctgctgcggccatcgt

SEQ ID NO: 107393 - DNA, 25 bp, SARS Virus
atttatgtctggcgcggccatcgtt

SEQ ID NO: 107394 - DNA, 25 bp, SARS Virus
tttatgtctggtccggccatcgttg

SEQ ID NO: 107395 - DNA, 25 bp, SARS Virus
ttatgtctggtgcggccatcgttgc

SEQ ID NO: 107396 - DNA, 25 bp, SARS Virus
tatgtctggtgccgccatcgttgct

SEQ ID NO: 107397 - DNA, 25 bp, SARS Virus
atgtctggtgcgcccatcgttgctg

SEQ ID NO: 107398 - DNA, 25 bp, SARS Virus
tgtctggtgcggccatcgttgctgt

SEQ ID NO: 107399 - DNA, 25 bp, SARS Virus
gtctggtgcggccatcgttgctgtt

SEQ ID NO: 107400 - DNA, 25 bp, SARS Virus
tctggtgcggccctcgttgctgtta

SEQ ID NO: 107401 - DNA, 25 bp, SARS Virus
ctggtgcggccaccgttgctgttat

SEQ ID NO: 107402 - DNA, 25 bp, SARS Virus
tggtgcggccatcgttgctgttata

SEQ ID NO: 107403 - DNA, 25 bp, SARS Virus
ggtgcggccatccttgctgttataa

SEQ ID NO: 107404 - DNA, 25 bp, SARS Virus
gtgcggccatcgctgctgttataac

SEQ ID NO: 107405 - DNA, 25 bp, SARS Virus
tgcggccatcgtcgctgttataacg

SEQ ID NO: 107406 - DNA, 25 bp, SARS Virus
gcggccatcgttcctgttataacga

SEQ ID NO: 107407 - DNA, 25 bp, SARS Virus
cggccatcgttgctgttataacgaa

SEQ ID NO: 107408 - DNA, 25 bp, SARS Virus
ggccatcgttgccgttataacgaaa

SEQ ID NO: 107409 - DNA, 25 bp, SARS Virus
gccatcgttgctcttataacgaaac

SEQ ID NO: 107410 - DNA, 25 bp, SARS Virus
ccatcgttgctgctataacgaaacg

SEQ ID NO: 107411 - DNA, 25 bp, SARS Virus
catcgttgctgtcataacgaaacga

SEQ ID NO: 107412 - DNA, 25 bp, SARS Virus
atcgttgctgttctaacgaaacgat

SEQ ID NO: 107413 - DNA, 25 bp, SARS Virus
tcgttgctgttacaacgaaacgatc

SEQ ID NO: 107414 - DNA, 25 bp, SARS Virus
cgttgctgttatcacgaaacgatca

SEQ ID NO: 107415 - DNA, 25 bp, SARS Virus
gttgctgttataccgaaacgatcat

SEQ ID NO: 107416 - DNA, 25 bp, SARS Virus
ttgctgttataacgaaacgatcatg

SEQ ID NO: 107417 - DNA, 25 bp, SARS Virus
tgctgttataaccaaacgatcatgt

SEQ ID NO: 107418 - DNA, 25 bp, SARS Virus
gctgttataacgcaacgatcatgtc

SEQ ID NO: 107419 - DNA, 25 bp, SARS Virus
ctgttataacgacacgatcatgtca

SEQ ID NO: 107420 - DNA, 25 bp, SARS Virus
tgttataacgaaccgatcatgtcat

SEQ ID NO: 107421 - DNA, 25 bp, SARS Virus
gttataacgaaacgatcatgtcatt

SEQ ID NO: 107422 - DNA, 25 bp, SARS Virus
ttataacgaaaccatcatgtcattc

SEQ ID NO: 107423 - DNA, 25 bp, SARS Virus
tataacgaaacgctcatgtcattca

SEQ ID NO: 107424 - DNA, 25 bp, SARS Virus
ataacgaaacgaccatgtcattcac

SEQ ID NO: 107425 - DNA, 25 bp, SARS Virus
taacgaaacgatcatgtcattcact

SEQ ID NO: 107426 - DNA, 25 bp, SARS Virus
aacgaaacgatcctgtcattcactg

SEQ ID NO: 107427 - DNA, 25 bp, SARS Virus
acgaaacgatcacgtcattcactgt

SEQ ID NO: 107428 - DNA, 25 bp, SARS Virus
cgaaacgatcatctcattcactgtt

SEQ ID NO: 107429 - DNA, 25 bp, SARS Virus
gaaacgatcatgccattcactgttg

SEQ ID NO: 107430 - DNA, 25 bp, SARS Virus
aaacgatcatgtcattcactgttgt

SEQ ID NO: 107431 - DNA, 25 bp, SARS Virus
aacgatcatgtccttcactgttgtc

SEQ ID NO: 107432 - DNA, 25 bp, SARS Virus
acgatcatgtcactcactgttgtct

SEQ ID NO: 107433 - DNA, 25 bp, SARS Virus
cgatcatgtcatccactgttgtcta

SEQ ID NO: 107434 - DNA, 25 bp, SARS Virus
gatcatgtcattcactgttgtctac

SEQ ID NO: 107435 - DNA, 25 bp, SARS Virus
atcatgtcattccctgttgtctaca

SEQ ID NO: 107436 - DNA, 25 bp, SARS Virus
tcatgtcattcactgttgtctacaa

SEQ ID NO: 107437 - DNA, 25 bp, SARS Virus
catgtcattcaccgttgtctacaaa

SEQ ID NO: 107438 - DNA, 25 bp, SARS Virus
atgtcattcactcttgtctacaaag

SEQ ID NO: 107439 - DNA, 25 bp, SARS Virus
tgtcattcactgctgtctacaaagt

SEQ ID NO: 107440 - DNA, 25 bp, SARS Virus
gtcattcactgtcgtctacaaagta

SEQ ID NO: 107441 - DNA, 25 bp, SARS Virus
tcattcactgttctctacaaagtag

SEQ ID NO: 107442 - DNA, 25 bp, SARS Virus
cattcactgttgcctacaaagtaga

SEQ ID NO: 107443 - DNA, 25 bp, SARS Virus
attcactgttgtctacaaagtagaa

SEQ ID NO: 107444 - DNA, 25 bp, SARS Virus
ttcactgttgtccacaaagtagaac

SEQ ID NO: 107445 - DNA, 25 bp, SARS Virus
tcactgttgtctccaaagtagaaca

SEQ ID NO: 107446 - DNA, 25 bp, SARS Virus
cactgttgtctacaaagtagaacaa

SEQ ID NO: 107447 - DNA, 25 bp, SARS Virus
actgttgtctaccaagtagaacaac

SEQ ID NO: 107448 - DNA, 25 bp, SARS Virus
ctgttgtctacacagtagaacaact

SEQ ID NO: 107449 - DNA, 25 bp, SARS Virus
tgttgtctacaacgtagaacaactg

SEQ ID NO: 107450 - DNA, 25 bp, SARS Virus
gttgtctacaaactagaacaactga

SEQ ID NO: 107451 - DNA, 25 bp, SARS Virus
ttgtctacaaagcagaacaactgaa

SEQ ID NO: 107452 - DNA, 25 bp, SARS Virus
tgtctacaaagtcgaacaactgaag

SEQ ID NO: 107453 - DNA, 25 bp, SARS Virus
gtctacaaagtacaacaactgaagg

SEQ ID NO: 107454 - DNA, 25 bp, SARS Virus
tctacaaagtagcacaactgaaggt

SEQ ID NO: 107455 - DNA, 25 bp, SARS Virus
ctacaaagtagaccaactgaaggtc

SEQ ID NO: 107456 - DNA, 25 bp, SARS Virus
tacaaagtagaacaactgaaggtcc

SEQ ID NO: 107457 - DNA, 25 bp, SARS Virus
acaaagtagaaccactgaaggtcca

SEQ ID NO: 107458 - DNA, 25 bp, SARS Virus
caaagtagaacacctgaaggtccaa

SEQ ID NO: 107459 - DNA, 25 bp, SARS Virus
aaagtagaacaactgaaggtccaat

SEQ ID NO: 107460 - DNA, 25 bp, SARS Virus
aagtagaacaaccgaaggtccaatg

SEQ ID NO: 107461 - DNA, 25 bp, SARS Virus
agtagaacaactcaaggtccaatgt

SEQ ID NO: 107462 - DNA, 25 bp, SARS Virus
gtagaacaactgcaggtccaatgtt

SEQ ID NO: 107463 - DNA, 25 bp, SARS Virus
tagaacaactgacggtccaatgtta

SEQ ID NO: 107464 - DNA, 25 bp, SARS Virus
agaacaactgaacgtccaatgttat

SEQ ID NO: 107465 - DNA, 25 bp, SARS Virus
gaacaactgaagctccaatgttatc

SEQ ID NO: 107466 - DNA, 25 bp, SARS Virus
aacaactgaaggcccaatgttatcg

SEQ ID NO: 107467 - DNA, 25 bp, SARS Virus
acaactgaaggtccaatgttatcgt

SEQ ID NO: 107468 - DNA, 25 bp, SARS Virus
caactgaaggtccaatgttatcgtc

SEQ ID NO: 107469 - DNA, 25 bp, SARS Virus
aactgaaggtcccatgttatcgtct

SEQ ID NO: 107470 - DNA, 25 bp, SARS Virus
actgaaggtccactgttatcgtctc

SEQ ID NO: 107471 - DNA, 25 bp, SARS Virus
ctgaaggtccaacgttatcgtctct

SEQ ID NO: 107472 - DNA, 25 bp, SARS Virus
tgaaggtccaatcttatcgtctcta

SEQ ID NO: 107473 - DNA, 25 bp, SARS Virus
gaaggtccaatgctatcgtctctat

SEQ ID NO: 107474 - DNA, 25 bp, SARS Virus
aaggtccaatgtcatcgtctctata

SEQ ID NO: 107475 - DNA, 25 bp, SARS Virus
aggtccaatgttctcgtctctataa

SEQ ID NO: 107476 - DNA, 25 bp, SARS Virus
ggtccaatgttaccgtctctataac

SEQ ID NO: 107477 - DNA, 25 bp, SARS Virus
gtccaatgttatcgtctctataact

SEQ ID NO: 107478 - DNA, 25 bp, SARS Virus
tccaatgttatcctctctataacta

SEQ ID NO: 107479 - DNA, 25 bp, SARS Virus
ccaatgttatcgcctctataactaa

SEQ ID NO: 107480 - DNA, 25 bp, SARS Virus
caatgttatcgtctctataactaat

SEQ ID NO: 107481 - DNA, 25 bp, SARS Virus
aatgttatcgtccctataactaata

SEQ ID NO: 107482 - DNA, 25 bp, SARS Virus
atgttatcgtctctataactaatag

SEQ ID NO: 107483 - DNA, 25 bp, SARS Virus
tgttatcgtctccataactaatagt

SEQ ID NO: 107484 - DNA, 25 bp, SARS Virus
gttatcgtctctctaactaatagta

SEQ ID NO: 107485 - DNA, 25 bp, SARS Virus
ttatcgtctctacaactaatagtaa

SEQ ID NO: 107486 - DNA, 25 bp, SARS Virus
tatcgtctctatcactaatagtaat

SEQ ID NO: 107487 - DNA, 25 bp, SARS Virus
atcgtctctatacctaatagtaata

SEQ ID NO: 107488 - DNA, 25 bp, SARS Virus
tcgtctctataactaatagtaatac

SEQ ID NO: 107489 - DNA, 25 bp, SARS Virus
ccactgaccgccgtaacgctaacgt

SEQ ID NO: 107490 - DNA, 25 bp, SARS Virus
cactgaccgcccgaacgctaacgtt

SEQ ID NO: 107491 - DNA, 25 bp, SARS Virus
actgaccgccctgacgctaacgtta

SEQ ID NO: 107492 - DNA, 25 bp, SARS Virus
ctgaccgccctagcgctaacgttac

SEQ ID NO: 107493 - DNA, 25 bp, SARS Virus
tgaccgccctaaggctaacgttacc

SEQ ID NO: 107494 - DNA, 25 bp, SARS Virus
gaccgccctaacgctaacgttaccg

SEQ ID NO: 107495 - DNA, 25 bp, SARS Virus
accgccctaacggtaacgttaccga

SEQ ID NO: 107496 - DNA, 25 bp, SARS Virus
ccgccctaacgcgaacgttaccgaa

SEQ ID NO: 107497 - DNA, 25 bp, SARS Virus
cgccctaacgctgacgttaccgaac

SEQ ID NO: 107498 - DNA, 25 bp, SARS Virus
gccctaacgctagcgttaccgaaca

SEQ ID NO: 107499 - DNA, 25 bp, SARS Virus
ccctaacgctaaggttaccgaacat

SEQ ID NO: 107500 - DNA, 25 bp, SARS Virus
cctaacgctaacgttaccgaacata

SEQ ID NO: 107501 - DNA, 25 bp, SARS Virus
ctaacgctaacggtaccgaacataa

SEQ ID NO: 107502 - DNA, 25 bp, SARS Virus
taacgctaacgtgaccgaacataac

SEQ ID NO: 107503 - DNA, 25 bp, SARS Virus
aacgctaacgttgccgaacataaca

SEQ ID NO: 107504 - DNA, 25 bp, SARS Virus
acgctaacgttagcgaacataacat

SEQ ID NO: 107505 - DNA, 25 bp, SARS Virus
cgctaacgttacggaacataacatc

SEQ ID NO: 107506 - DNA, 25 bp, SARS Virus
gctaacgttaccgaacataacatcc

SEQ ID NO: 107507 - DNA, 25 bp, SARS Virus
ctaacgttaccggacataacatccg

SEQ ID NO: 107508 - DNA, 25 bp, SARS Virus
taacgttaccgagcataacatccga

SEQ ID NO: 107509 - DNA, 25 bp, SARS Virus
aacgttaccgaagataacatccgaa

SEQ ID NO: 107510 - DNA, 25 bp, SARS Virus
acgttaccgaacgtaacatccgaac

SEQ ID NO: 107511 - DNA, 25 bp, SARS Virus
cgttaccgaacagaacatccgaact

SEQ ID NO: 107512 - DNA, 25 bp, SARS Virus
gttaccgaacatgacatccgaacta

SEQ ID NO: 107513 - DNA, 25 bp, SARS Virus
ttaccgaacatagcatccgaactac

SEQ ID NO: 107514 - DNA, 25 bp, SARS Virus
taccgaacataagatccgaactaca

SEQ ID NO: 107515 - DNA, 25 bp, SARS Virus
accgaacataacgtccgaactacac

SEQ ID NO: 107516 - DNA, 25 bp, SARS Virus
ccgaacataacagccgaactacacc

SEQ ID NO: 107517 - DNA, 25 bp, SARS Virus
cgaacataacatgcgaactacaccg

SEQ ID NO: 107518 - DNA, 25 bp, SARS Virus
gaacataacatcggaactacaccga

SEQ ID NO: 107519 - DNA, 25 bp, SARS Virus
aacataacatccgaactacaccgaa

SEQ ID NO: 107520 - DNA, 25 bp, SARS Virus
acataacatccggactacaccgaat

SEQ ID NO: 107521 - DNA, 25 bp, SARS Virus
cataacatccgagctacaccgaatc

SEQ ID NO: 107522 - DNA, 25 bp, SARS Virus
ataacatccgaagtacaccgaatcg

SEQ ID NO: 107523 - DNA, 25 bp, SARS Virus
taacatccgaacgacaccgaatcga

SEQ ID NO: 107524 - DNA, 25 bp, SARS Virus
aacatccgaactgcaccgaatcgat

SEQ ID NO: 107525 - DNA, 25 bp, SARS Virus
acatccgaactagaccgaatcgatg

SEQ ID NO: 107526 - DNA, 25 bp, SARS Virus
catccgaactacgccgaatcgatga

SEQ ID NO: 107527 - DNA, 25 bp, SARS Virus
atccgaactacagcgaatcgatgaa

SEQ ID NO: 107528 - DNA, 25 bp, SARS Virus
tccgaactacacggaatcgatgaag

SEQ ID NO: 107529 - DNA, 25 bp, SARS Virus
ccgaactacaccgaatcgatgaagc

SEQ ID NO: 107530 - DNA, 25 bp, SARS Virus
cgaactacaccggatcgatgaagca

SEQ ID NO: 107531 - DNA, 25 bp, SARS Virus
gaactacaccgagtcgatgaagcaa

SEQ ID NO: 107532 - DNA, 25 bp, SARS Virus
aactacaccgaagcgatgaagcaac

SEQ ID NO: 107533 - DNA, 25 bp, SARS Virus
actacaccgaatggatgaagcaacg

SEQ ID NO: 107534 - DNA, 25 bp, SARS Virus
ctacaccgaatcgatgaagcaacga

SEQ ID NO: 107535 - DNA, 25 bp, SARS Virus
tacaccgaatcggtgaagcaacgaa

SEQ ID NO: 107536 - DNA, 25 bp, SARS Virus
acaccgaatcgaggaagcaacgaag

SEQ ID NO: 107537 - DNA, 25 bp, SARS Virus
caccgaatcgatgaagcaacgaagg

SEQ ID NO: 107538 - DNA, 25 bp, SARS Virus
accgaatcgatggagcaacgaagga

SEQ ID NO: 107539 - DNA, 25 bp, SARS Virus
ccgaatcgatgaggcaacgaaggaa

SEQ ID NO: 107540 - DNA, 25 bp, SARS Virus
cgaatcgatgaagcaacgaaggaag

SEQ ID NO: 107541 - DNA, 25 bp, SARS Virus
gaatcgatgaaggaacgaaggaagt

SEQ ID NO: 107542 - DNA, 25 bp, SARS Virus
aatcgatgaagcgacgaaggaagtc

SEQ ID NO: 107543 - DNA, 25 bp, SARS Virus
atcgatgaagcagcgaaggaagtcc

SEQ ID NO: 107544 - DNA, 25 bp, SARS Virus
tcgatgaagcaaggaaggaagtccg

SEQ ID NO: 107545 - DNA, 25 bp, SARS Virus
cgatgaagcaacgaaggaagtccga

SEQ ID NO: 107546 - DNA, 25 bp, SARS Virus
gatgaagcaacggaggaagtccgac

SEQ ID NO: 107547 - DNA, 25 bp, SARS Virus
atgaagcaacgagggaagtccgaca

SEQ ID NO: 107548 - DNA, 25 bp, SARS Virus
tgaagcaacgaaggaagtccgacaa

SEQ ID NO: 107549 - DNA, 25 bp, SARS Virus
gaagcaacgaaggaagtccgacaaa

SEQ ID NO: 107550 - DNA, 25 bp, SARS Virus
aagcaacgaagggagtccgacaaac

SEQ ID NO: 107551 - DNA, 25 bp, SARS Virus
agcaacgaaggaggtccgacaaacg

SEQ ID NO: 107552 - DNA, 25 bp, SARS Virus
gcaacgaaggaagtccgacaaacga

SEQ ID NO: 107553 - DNA, 25 bp, SARS Virus
caacgaaggaaggccgacaaacgag

SEQ ID NO: 107554 - DNA, 25 bp, SARS Virus
aacgaaggaagtgcgacaaacgagc

SEQ ID NO: 107555 - DNA, 25 bp, SARS Virus
acgaaggaagtcggacaaacgagca

SEQ ID NO: 107556 - DNA, 25 bp, SARS Virus
cgaaggaagtccgacaaacgagcat

SEQ ID NO: 107557 - DNA, 25 bp, SARS Virus
gaaggaagtccggcaaacgagcatg

SEQ ID NO: 107558 - DNA, 25 bp, SARS Virus
aaggaagtccgagaaacgagcatgg

SEQ ID NO: 107559 - DNA, 25 bp, SARS Virus
aggaagtccgacgaacgagcatggg

SEQ ID NO: 107560 - DNA, 25 bp, SARS Virus
ggaagtccgacagacgagcatgggc

SEQ ID NO: 107561 - DNA, 25 bp, SARS Virus
gaagtccgacaagcgagcatgggcg

SEQ ID NO: 107562 - DNA, 25 bp, SARS Virus
aagtccgacaaaggagcatgggcga

SEQ ID NO: 107563 - DNA, 25 bp, SARS Virus
agtccgacaaacgagcatgggcgag

SEQ ID NO: 107564 - DNA, 25 bp, SARS Virus
gtccgacaaacgggcatgggcgagt

SEQ ID NO: 107565 - DNA, 25 bp, SARS Virus
tccgacaaacgagcatgggcgagtt

SEQ ID NO: 107566 - DNA, 25 bp, SARS Virus
ccgacaaacgaggatgggcgagtta

SEQ ID NO: 107567 - DNA, 25 bp, SARS Virus
cgacaaacgagcgtgggcgagttac

SEQ ID NO: 107568 - DNA, 25 bp, SARS Virus
gacaaacgagcaggggcgagttaca

SEQ ID NO: 107569 - DNA, 25 bp, SARS Virus
acaaacgagcatgggcgagttacac

SEQ ID NO: 107570 - DNA, 25 bp, SARS Virus
caaacgagcatgggcgagttacacc

SEQ ID NO: 107571 - DNA, 25 bp, SARS Virus
aaacgagcatgggcgagttacacca

SEQ ID NO: 107572 - DNA, 25 bp, SARS Virus
aacgagcatgggggagttacaccag

SEQ ID NO: 107573 - DNA, 25 bp, SARS Virus
acgagcatgggcgagttacaccagt

SEQ ID NO: 107574 - DNA, 25 bp, SARS Virus
cgagcatgggcgggttacaccagta

SEQ ID NO: 107575 - DNA, 25 bp, SARS Virus
gagcatgggcgagttacaccagtaa

SEQ ID NO: 107576 - DNA, 25 bp, SARS Virus
agcatgggcgaggtacaccagtaag

SEQ ID NO: 107577 - DNA, 25 bp, SARS Virus
gcatgggcgagtgacaccagtaagt

SEQ ID NO: 107578 - DNA, 25 bp, SARS Virus
catgggcgagttgcaccagtaagtt

SEQ ID NO: 107579 - DNA, 25 bp, SARS Virus
atgggcgagttagaccagtaagttg

SEQ ID NO: 107580 - DNA, 25 bp, SARS Virus
tgggcgagttacgccagtaagttgg

SEQ ID NO: 107581 - DNA, 25 bp, SARS Virus
gggcgagttacagcagtaagttggg

SEQ ID NO: 107582 - DNA, 25 bp, SARS Virus
ggcgagttacacgagtaagttgggt

SEQ ID NO: 107583 - DNA, 25 bp, SARS Virus
gcgagttacaccggtaagttgggtc

SEQ ID NO: 107584 - DNA, 25 bp, SARS Virus
cgagttacaccagtaagttgggtct

SEQ ID NO: 107585 - DNA, 25 bp, SARS Virus
gagttacaccaggaagttgggtctt

SEQ ID NO: 107586 - DNA, 25 bp, SARS Virus
agttacaccagtgagttgggtcttt

SEQ ID NO: 107587 - DNA, 25 bp, SARS Virus
gttacaccagtaggttgggtctttg

SEQ ID NO: 107588 - DNA, 25 bp, SARS Virus
ttacaccagtaagttgggtctttgt

SEQ ID NO: 107589 - DNA, 25 bp, SARS Virus
tacaccagtaaggtgggtctttgtt

SEQ ID NO: 107590 - DNA, 25 bp, SARS Virus
acaccagtaagtggggtctttgttt

SEQ ID NO: 107591 - DNA, 25 bp, SARS Virus
caccagtaagttgggtctttgtttg

SEQ ID NO: 107592 - DNA, 25 bp, SARS Virus
accagtaagttgggtctttgtttgt

SEQ ID NO: 107593 - DNA, 25 bp, SARS Virus
ccagtaagttgggtctttgtttgta

SEQ ID NO: 107594 - DNA, 25 bp, SARS Virus
cagtaagttggggctttgtttgtaa

SEQ ID NO: 107595 - DNA, 25 bp, SARS Virus
agtaagttgggtgtttgtttgtaag

SEQ ID NO: 107596 - DNA, 25 bp, SARS Virus
gtaagttgggtcgttgtttgtaaga

SEQ ID NO: 107597 - DNA, 25 bp, SARS Virus
taagttgggtctgtgtttgtaagaa

SEQ ID NO: 107598 - DNA, 25 bp, SARS Virus
aagttgggtcttggtttgtaagaag

SEQ ID NO: 107599 - DNA, 25 bp, SARS Virus
agttgggtctttgtttgtaagaaga

SEQ ID NO: 107600 - DNA, 25 bp, SARS Virus
gttgggtctttggttgtaagaagag

SEQ ID NO: 107601 - DNA, 25 bp, SARS Virus
ttgggtctttgtgtgtaagaagagt

SEQ ID NO: 107602 - DNA, 25 bp, SARS Virus
tgggtctttgttggtaagaagagtt

SEQ ID NO: 107603 - DNA, 25 bp, SARS Virus
gggtctttgtttgtaagaagagtta

SEQ ID NO: 107604 - DNA, 25 bp, SARS Virus
ggtctttgtttggaagaagagttac

SEQ ID NO: 107605 - DNA, 25 bp, SARS Virus
gtctttgtttgtgagaagagttaca

SEQ ID NO: 107606 - DNA, 25 bp, SARS Virus
tctttgtttgtaggaagagttacac

SEQ ID NO: 107607 - DNA, 25 bp, SARS Virus
ctttgtttgtaagaagagttacacg

SEQ ID NO: 107608 - DNA, 25 bp, SARS Virus
tttgtttgtaaggagagttacacgg

SEQ ID NO: 107609 - DNA, 25 bp, SARS Virus
ttgtttgtaagaggagttacacgga

SEQ ID NO: 107610 - DNA, 25 bp, SARS Virus
tgtttgtaagaagagttacacggag

SEQ ID NO: 107611 - DNA, 25 bp, SARS Virus
gtttgtaagaagggttacacggaga

SEQ ID NO: 107612 - DNA, 25 bp, SARS Virus
tttgtaagaagagttacacggagag

SEQ ID NO: 107613 - DNA, 25 bp, SARS Virus
ttgtaagaagaggtacacggagagg

SEQ ID NO: 107614 - DNA, 25 bp, SARS Virus
tgtaagaagagtgacacggagaggc

SEQ ID NO: 107615 - DNA, 25 bp, SARS Virus
gtaagaagagttgcacggagaggcc

SEQ ID NO: 107616 - DNA, 25 bp, SARS Virus
taagaagagttagacggagaggccc

SEQ ID NO: 107617 - DNA, 25 bp, SARS Virus
aagaagagttacgcggagaggcccc

SEQ ID NO: 107618 - DNA, 25 bp, SARS Virus
agaagagttacagggagaggccccc

SEQ ID NO: 107619 - DNA, 25 bp, SARS Virus
gaagagttacacggagaggccccct

SEQ ID NO: 107620 - DNA, 25 bp, SARS Virus
aagagttacacggagaggccccctg

SEQ ID NO: 107621 - DNA, 25 bp, SARS Virus
agagttacacggggaggccccctgt

SEQ ID NO: 107622 - DNA, 25 bp, SARS Virus
gagttacacggagaggccccctgtt

SEQ ID NO: 107623 - DNA, 25 bp, SARS Virus
agttacacggaggggccccctgtta

SEQ ID NO: 107624 - DNA, 25 bp, SARS Virus
gttacacggagaggccccctgttaa

SEQ ID NO: 107625 - DNA, 25 bp, SARS Virus
ttacacggagaggccccctgttaac

SEQ ID NO: 107626 - DNA, 25 bp, SARS Virus
tacacggagagggcccctgttaaca

SEQ ID NO: 107627 - DNA, 25 bp, SARS Virus
acacggagaggcgccctgttaacac

SEQ ID NO: 107628 - DNA, 25 bp, SARS Virus
cacggagaggccgcctgttaacact

SEQ ID NO: 107629 - DNA, 25 bp, SARS Virus
acggagaggcccgctgttaacactg

SEQ ID NO: 107630 - DNA, 25 bp, SARS Virus
cggagaggccccgtgttaacactgg

SEQ ID NO: 107631 - DNA, 25 bp, SARS Virus
ggagaggcccccggttaacactggt

SEQ ID NO: 107632 - DNA, 25 bp, SARS Virus
gagaggccccctgttaacactggtc

SEQ ID NO: 107633 - DNA, 25 bp, SARS Virus
agaggccccctggtaacactggtct

SEQ ID NO: 107634 - DNA, 25 bp, SARS Virus
gaggccccctgtgaacactggtctg

SEQ ID NO: 107635 - DNA, 25 bp, SARS Virus
aggccccctgttgacactggtctgg

SEQ ID NO: 107636 - DNA, 25 bp, SARS Virus
ggccccctgttagcactggtctggc

SEQ ID NO: 107637 - DNA, 25 bp, SARS Virus
gccccctgttaagactggtctggcg

SEQ ID NO: 107638 - DNA, 25 bp, SARS Virus
ccccctgttaacgctggtctggcga

SEQ ID NO: 107639 - DNA, 25 bp, SARS Virus
cccctgttaacagtggtctggcgag

SEQ ID NO: 107640 - DNA, 25 bp, SARS Virus
ccctgttaacacgggtctggcgagt

SEQ ID NO: 107641 - DNA, 25 bp, SARS Virus
cctgttaacactggtctggcgagta

SEQ ID NO: 107642 - DNA, 25 bp, SARS Virus
ctgttaacactggtctggcgagtac

SEQ ID NO: 107643 - DNA, 25 bp, SARS Virus
tgttaacactgggctggcgagtacc

SEQ ID NO: 107644 - DNA, 25 bp, SARS Virus
gttaacactggtgtggcgagtacct

SEQ ID NO: 107645 - DNA, 25 bp, SARS Virus
ttaacactggtcgggcgagtacctt

SEQ ID NO: 107646 - DNA, 25 bp, SARS Virus
taacactggtctggcgagtaccttt

SEQ ID NO: 107647 - DNA, 25 bp, SARS Virus
aacactggtctggcgagtacctttc

SEQ ID NO: 107648 - DNA, 25 bp, SARS Virus
acactggtctggggagtacctttca

SEQ ID NO: 107649 - DNA, 25 bp, SARS Virus
cactggtctggcgagtacctttcac

SEQ ID NO: 107650 - DNA, 25 bp, SARS Virus
actggtctggcgggtacctttcact

SEQ ID NO: 107651 - DNA, 25 bp, SARS Virus
ctggtctggcgagtacctttcactt

SEQ ID NO: 107652 - DNA, 25 bp, SARS Virus
tggtctggcgaggacctttcacttg

SEQ ID NO: 107653 - DNA, 25 bp, SARS Virus
ggtctggcgagtgcctttcacttga

SEQ ID NO: 107654 - DNA, 25 bp, SARS Virus
gtctggcgagtagctttcacttgaa

SEQ ID NO: 107655 - DNA, 25 bp, SARS Virus
tctggcgagtacgtttcacttgaac

SEQ ID NO: 107656 - DNA, 25 bp, SARS Virus
ctggcgagtaccgttcacttgaaca

SEQ ID NO: 107657 - DNA, 25 bp, SARS Virus
tggcgagtacctgtcacttgaacag

SEQ ID NO: 107658 - DNA, 25 bp, SARS Virus
ggcgagtaccttgcacttgaacagt

SEQ ID NO: 107659 - DNA, 25 bp, SARS Virus
gcgagtacctttgacttgaacagta

SEQ ID NO: 107660 - DNA, 25 bp, SARS Virus
cgagtacctttcgcttgaacagtaa

SEQ ID NO: 107661 - DNA, 25 bp, SARS Virus
gagtacctttcagttgaacagtaac

SEQ ID NO: 107662 - DNA, 25 bp, SARS Virus
agtacctttcacgtgaacagtaacc

SEQ ID NO: 107663 - DNA, 25 bp, SARS Virus
gtacctttcactggaacagtaacca

SEQ ID NO: 107664 - DNA, 25 bp, SARS Virus
tacctttcacttgaacagtaaccac

SEQ ID NO: 107665 - DNA, 25 bp, SARS Virus
acctttcacttggacagtaaccacg

SEQ ID NO: 107666 - DNA, 25 bp, SARS Virus
cctttcacttgagcagtaaccacga

SEQ ID NO: 107667 - DNA, 25 bp, SARS Virus
ctttcacttgaagagtaaccacgac

SEQ ID NO: 107668 - DNA, 25 bp, SARS Virus
tttcacttgaacggtaaccacgaca

SEQ ID NO: 107669 - DNA, 25 bp, SARS Virus
ttcacttgaacagtaaccacgacac

SEQ ID NO: 107670 - DNA, 25 bp, SARS Virus
tcacttgaacaggaaccacgacact

SEQ ID NO: 107671 - DNA, 25 bp, SARS Virus
cacttgaacagtgaccacgacacta

SEQ ID NO: 107672 - DNA, 25 bp, SARS Virus
acttgaacagtagccacgacactag

SEQ ID NO: 107673 - DNA, 25 bp, SARS Virus
cttgaacagtaagcacgacactagt

SEQ ID NO: 107674 - DNA, 25 bp, SARS Virus
ttgaacagtaacgacgacactagta

SEQ ID NO: 107675 - DNA, 25 bp, SARS Virus
tgaacagtaaccgcgacactagtaa

SEQ ID NO: 107676 - DNA, 25 bp, SARS Virus
gaacagtaaccaggacactagtaag

SEQ ID NO: 107677 - DNA, 25 bp, SARS Virus
aacagtaaccacgacactagtaagc

SEQ ID NO: 107678 - DNA, 25 bp, SARS Virus
acagtaaccacggcactagtaagca

SEQ ID NO: 107679 - DNA, 25 bp, SARS Virus
cagtaaccacgagactagtaagcac

SEQ ID NO: 107680 - DNA, 25 bp, SARS Virus
agtaaccacgacgctagtaagcacc

SEQ ID NO: 107681 - DNA, 25 bp, SARS Virus
gtaaccacgacagtagtaagcacca

SEQ ID NO: 107682 - DNA, 25 bp, SARS Virus
taaccacgacacgagtaagcaccag

SEQ ID NO: 107683 - DNA, 25 bp, SARS Virus
aaccacgacactggtaagcaccagt

SEQ ID NO: 107684 - DNA, 25 bp, SARS Virus
accacgacactagtaagcaccagtg

SEQ ID NO: 107685 - DNA, 25 bp, SARS Virus
ccacgacactaggaagcaccagtga

SEQ ID NO: 107686 - DNA, 25 bp, SARS Virus
cacgacactagtgagcaccagtgaa

SEQ ID NO: 107687 - DNA, 25 bp, SARS Virus
acgacactagtaggcaccagtgaac

SEQ ID NO: 107688 - DNA, 25 bp, SARS Virus
cgacactagtaagcaccagtgaacg

SEQ ID NO: 107689 - DNA, 25 bp, SARS Virus
gacactagtaaggaccagtgaacgc

SEQ ID NO: 107690 - DNA, 25 bp, SARS Virus
acactagtaagcgccagtgaacgct

SEQ ID NO: 107691 - DNA, 25 bp, SARS Virus
cactagtaagcagcagtgaacgctt

SEQ ID NO: 107692 - DNA, 25 bp, SARS Virus
actagtaagcacgagtgaacgctta

SEQ ID NO: 107693 - DNA, 25 bp, SARS Virus
ctagtaagcaccggtgaacgcttac

SEQ ID NO: 107694 - DNA, 25 bp, SARS Virus
tagtaagcaccagtgaacgcttacc

SEQ ID NO: 107695 - DNA, 25 bp, SARS Virus
agtaagcaccagggaacgcttaccg

SEQ ID NO: 107696 - DNA, 25 bp, SARS Virus
gtaagcaccagtgaacgcttaccgg

SEQ ID NO: 107697 - DNA, 25 bp, SARS Virus
taagcaccagtggacgcttaccggc

SEQ ID NO: 107698 - DNA, 25 bp, SARS Virus
aagcaccagtgagcgcttaccggcc

SEQ ID NO: 107699 - DNA, 25 bp, SARS Virus
agcaccagtgaaggcttaccggcct

SEQ ID NO: 107700 - DNA, 25 bp, SARS Virus
gcaccagtgaacgcttaccggcctg

SEQ ID NO: 107701 - DNA, 25 bp, SARS Virus
caccagtgaacggttaccggcctgt

SEQ ID NO: 107702 - DNA, 25 bp, SARS Virus
accagtgaacgcgtaccggcctgtg

SEQ ID NO: 107703 - DNA, 25 bp, SARS Virus
ccagtgaacgctgaccggcctgtga

SEQ ID NO: 107704 - DNA, 25 bp, SARS Virus
cagtgaacgcttgccggcctgtgag

SEQ ID NO: 107705 - DNA, 25 bp, SARS Virus
agtgaacgcttagcggcctgtgagg

SEQ ID NO: 107706 - DNA, 25 bp, SARS Virus
gtgaacgcttacgggcctgtgaggg

SEQ ID NO: 107707 - DNA, 25 bp, SARS Virus
tgaacgcttaccggcctgtgaggga

SEQ ID NO: 107708 - DNA, 25 bp, SARS Virus
gaacgcttaccggcctgtgagggat

SEQ ID NO: 107709 - DNA, 25 bp, SARS Virus
aacgcttaccgggctgtgagggatc

SEQ ID NO: 107710 - DNA, 25 bp, SARS Virus
acgcttaccggcgtgtgagggatcc

SEQ ID NO: 107711 - DNA, 25 bp, SARS Virus
cgcttaccggccggtgagggatccc

SEQ ID NO: 107712 - DNA, 25 bp, SARS Virus
gcttaccggcctgtgagggatcccg

SEQ ID NO: 107713 - DNA, 25 bp, SARS Virus
cttaccggcctgggagggatcccgc

SEQ ID NO: 107714 - DNA, 25 bp, SARS Virus
ttaccggcctgtgagggatcccgcg

SEQ ID NO: 107715 - DNA, 25 bp, SARS Virus
taccggcctgtgggggatcccgcga

SEQ ID NO: 107716 - DNA, 25 bp, SARS Virus
accggcctgtgagggatcccgcgac

SEQ ID NO: 107717 - DNA, 25 bp, SARS Virus
ccggcctgtgagggatcccgcgaca

SEQ ID NO: 107718 - DNA, 25 bp, SARS Virus
cggcctgtgagggatcccgcgacac

SEQ ID NO: 107719 - DNA, 25 bp, SARS Virus
ggcctgtgaggggtcccgcgacact

SEQ ID NO: 107720 - DNA, 25 bp, SARS Virus
gcctgtgagggagcccgcgacactg

SEQ ID NO: 107721 - DNA, 25 bp, SARS Virus
cctgtgagggatgccgcgacactgt

SEQ ID NO: 107722 - DNA, 25 bp, SARS Virus
ctgtgagggatcgcgcgacactgta

SEQ ID NO: 107723 - DNA, 25 bp, SARS Virus
tgtgagggatccggcgacactgtaa

SEQ ID NO: 107724 - DNA, 25 bp, SARS Virus
gtgagggatcccgcgacactgtaat

SEQ ID NO: 107725 - DNA, 25 bp, SARS Virus
tgagggatcccgggacactgtaatt

SEQ ID NO: 107726 - DNA, 25 bp, SARS Virus
gagggatcccgcgacactgtaattc

SEQ ID NO: 107727 - DNA, 25 bp, SARS Virus
agggatcccgcggcactgtaattcc

SEQ ID NO: 107728 - DNA, 25 bp, SARS Virus
gggatcccgcgagactgtaattcct

SEQ ID NO: 107729 - DNA, 25 bp, SARS Virus
ggatcccgcgacgctgtaattcctg

SEQ ID NO: 107730 - DNA, 25 bp, SARS Virus
gatcccgcgacagtgtaattcctgg

SEQ ID NO: 107731 - DNA, 25 bp, SARS Virus
atcccgcgacacggtaattcctgga

SEQ ID NO: 107732 - DNA, 25 bp, SARS Virus
tcccgcgacactgtaattcctggac

SEQ ID NO: 107733 - DNA, 25 bp, SARS Virus
cccgcgacactggaattcctggacg

SEQ ID NO: 107734 - DNA, 25 bp, SARS Virus
ccgcgacactgtgattcctggacgg

SEQ ID NO: 107735 - DNA, 25 bp, SARS Virus
cgcgacactgtagttcctggacggt

SEQ ID NO: 107736 - DNA, 25 bp, SARS Virus
gcgacactgtaagtcctggacggtt

SEQ ID NO: 107737 - DNA, 25 bp, SARS Virus
cgacactgtaatgcctggacggttt

SEQ ID NO: 107738 - DNA, 25 bp, SARS Virus
gacactgtaattgctggacggtttt

SEQ ID NO: 107739 - DNA, 25 bp, SARS Virus
acactgtaattcgtggacggttttc

SEQ ID NO: 107740 - DNA, 25 bp, SARS Virus
cactgtaattccgggacggttttct

SEQ ID NO: 107741 - DNA, 25 bp, SARS Virus
actgtaattcctggacggttttctc

SEQ ID NO: 107742 - DNA, 25 bp, SARS Virus
ctgtaattcctggacggttttctct

SEQ ID NO: 107743 - DNA, 25 bp, SARS Virus
tgtaattcctgggcggttttctcta

SEQ ID NO: 107744 - DNA, 25 bp, SARS Virus
gtaattcctggagggttttctctag

SEQ ID NO: 107745 - DNA, 25 bp, SARS Virus
taattcctggacggttttctctagt

SEQ ID NO: 107746 - DNA, 25 bp, SARS Virus
aattcctggacggttttctctagtg

SEQ ID NO: 107747 - DNA, 25 bp, SARS Virus
attcctggacgggtttctctagtga

SEQ ID NO: 107748 - DNA, 25 bp, SARS Virus
ttcctggacggtgttctctagtgac

SEQ ID NO: 107749 - DNA, 25 bp, SARS Virus
tcctggacggttgtctctagtgaca

SEQ ID NO: 107750 - DNA, 25 bp, SARS Virus
cctggacggtttgctctagtgacac

SEQ ID NO: 107751 - DNA, 25 bp, SARS Virus
ctggacggttttgtctagtgacacc

SEQ ID NO: 107752 - DNA, 25 bp, SARS Virus
tggacggttttcgctagtgacaccg

SEQ ID NO: 107753 - DNA, 25 bp, SARS Virus
ggacggttttctgtagtgacaccga

SEQ ID NO: 107754 - DNA, 25 bp, SARS Virus
gacggttttctcgagtgacaccgat

SEQ ID NO: 107755 - DNA, 25 bp, SARS Virus
acggttttctctggtgacaccgatg

SEQ ID NO: 107756 - DNA, 25 bp, SARS Virus
cggttttctctagtgacaccgatgt

SEQ ID NO: 107757 - DNA, 25 bp, SARS Virus
ggttttctctagggacaccgatgta

SEQ ID NO: 107758 - DNA, 25 bp, SARS Virus
gttttctctagtgacaccgatgtag

SEQ ID NO: 107759 - DNA, 25 bp, SARS Virus
ttttctctagtggcaccgatgtagt

SEQ ID NO: 107760 - DNA, 25 bp, SARS Virus
tttctctagtgagaccgatgtagtg

SEQ ID NO: 107761 - DNA, 25 bp, SARS Virus
ttctctagtgacgccgatgtagtgc

SEQ ID NO: 107762 - DNA, 25 bp, SARS Virus
tctctagtgacagcgatgtagtgct

SEQ ID NO: 107763 - DNA, 25 bp, SARS Virus
ctctagtgacacggatgtagtgctt

SEQ ID NO: 107764 - DNA, 25 bp, SARS Virus
tctagtgacaccgatgtagtgcttg

SEQ ID NO: 107765 - DNA, 25 bp, SARS Virus
ctagtgacaccggtgtagtgcttgc

SEQ ID NO: 107766 - DNA, 25 bp, SARS Virus
tagtgacaccgaggtagtgcttgcg

SEQ ID NO: 107767 - DNA, 25 bp, SARS Virus
agtgacaccgatgtagtgcttgcga

SEQ ID NO: 107768 - DNA, 25 bp, SARS Virus
gtgacaccgatggagtgcttgcgaa

SEQ ID NO: 107769 - DNA, 25 bp, SARS Virus
tgacaccgatgtggtgcttgcgaaa

SEQ ID NO: 107770 - DNA, 25 bp, SARS Virus
gacaccgatgtagtgcttgcgaaag

SEQ ID NO: 107771 - DNA, 25 bp, SARS Virus
acaccgatgtagggcttgcgaaaga

SEQ ID NO: 107772 - DNA, 25 bp, SARS Virus
caccgatgtagtgcttgcgaaagaa

SEQ ID NO: 107773 - DNA, 25 bp, SARS Virus
accgatgtagtggttgcgaaagaat

SEQ ID NO: 107774 - DNA, 25 bp, SARS Virus
ccgatgtagtgcgtgcgaaagaata

SEQ ID NO: 107775 - DNA, 25 bp, SARS Virus
cgatgtagtgctggcgaaagaataa

SEQ ID NO: 107776 - DNA, 25 bp, SARS Virus
gatgtagtgcttgcgaaagaataat

SEQ ID NO: 107777 - DNA, 25 bp, SARS Virus
atgtagtgcttgggaaagaataatg

SEQ ID NO: 107778 - DNA, 25 bp, SARS Virus
tgtagtgcttgcgaaagaataatgt

SEQ ID NO: 107779 - DNA, 25 bp, SARS Virus
gtagtgcttgcggaagaataatgtt

SEQ ID NO: 107780 - DNA, 25 bp, SARS Virus
tagtgcttgcgagagaataatgttt

SEQ ID NO: 107781 - DNA, 25 bp, SARS Virus
agtgcttgcgaaggaataatgttta

SEQ ID NO: 107782 - DNA, 25 bp, SARS Virus
gtgcttgcgaaagaataatgtttaa

SEQ ID NO: 107783 - DNA, 25 bp, SARS Virus
tgcttgcgaaaggataatgtttaat

SEQ ID NO: 107784 - DNA, 25 bp, SARS Virus
gcttgcgaaagagtaatgtttaatc

SEQ ID NO: 107785 - DNA, 25 bp, SARS Virus
cttgcgaaagaagaatgtttaatcc

SEQ ID NO: 107786 - DNA, 25 bp, SARS Virus
ttgcgaaagaatgatgtttaatcct

SEQ ID NO: 107787 - DNA, 25 bp, SARS Virus
tgcgaaagaatagtgtttaatcctc

SEQ ID NO: 107788 - DNA, 25 bp, SARS Virus
gcgaaagaataaggtttaatcctcg

SEQ ID NO: 107789 - DNA, 25 bp, SARS Virus
cgaaagaataatgtttaatcctcgc

SEQ ID NO: 107790 - DNA, 25 bp, SARS Virus
gaaagaataatggttaatcctcgca

SEQ ID NO: 107791 - DNA, 25 bp, SARS Virus
aaagaataatgtgtaatcctcgcag

SEQ ID NO: 107792 - DNA, 25 bp, SARS Virus
aagaataatgttgaatcctcgcagc

SEQ ID NO: 107793 - DNA, 25 bp, SARS Virus
agaataatgtttgatcctcgcagcg

SEQ ID NO: 107794 - DNA, 25 bp, SARS Virus
gaataatgtttagtcctcgcagcgt

SEQ ID NO: 107795 - DNA, 25 bp, SARS Virus
aataatgtttaagcctcgcagcgtc

SEQ ID NO: 107796 - DNA, 25 bp, SARS Virus
ataatgtttaatgctcgcagcgtcg

SEQ ID NO: 107797 - DNA, 25 bp, SARS Virus
taatgtttaatcgtcgcagcgtcgc

SEQ ID NO: 107798 - DNA, 25 bp, SARS Virus
aatgtttaatccgcgcagcgtcgca

SEQ ID NO: 107799 - DNA, 25 bp, SARS Virus
atgtttaatcctggcagcgtcgcac

SEQ ID NO: 107800 - DNA, 25 bp, SARS Virus
tgtttaatcctcgcagcgtcgcaca

SEQ ID NO: 107801 - DNA, 25 bp, SARS Virus
gtttaatcctcggagcgtcgcacat

SEQ ID NO: 107802 - DNA, 25 bp, SARS Virus
tttaatcctcgcggcgtcgcacatc

SEQ ID NO: 107803 - DNA, 25 bp, SARS Virus
ttaatcctcgcagcgtcgcacatcc

SEQ ID NO: 107804 - DNA, 25 bp, SARS Virus
taatcctcgcagggtcgcacatccg

SEQ ID NO: 107805 - DNA, 25 bp, SARS Virus
aatcctcgcagcgtcgcacatccgt

SEQ ID NO: 107806 - DNA, 25 bp, SARS Virus
atcctcgcagcggcgcacatccgtg

SEQ ID NO: 107807 - DNA, 25 bp, SARS Virus
tcctcgcagcgtggcacatccgtga

SEQ ID NO: 107808 - DNA, 25 bp, SARS Virus
cctcgcagcgtcgcacatccgtgac

SEQ ID NO: 107809 - DNA, 25 bp, SARS Virus
ctcgcagcgtcggacatccgtgact

SEQ ID NO: 107810 - DNA, 25 bp, SARS Virus
tcgcagcgtcgcgcatccgtgacta

SEQ ID NO: 107811 - DNA, 25 bp, SARS Virus
cgcagcgtcgcagatccgtgactaa

SEQ ID NO: 107812 - DNA, 25 bp, SARS Virus
gcagcgtcgcacgtccgtgactaag

SEQ ID NO: 107813 - DNA, 25 bp, SARS Virus
cagcgtcgcacagccgtgactaagt

SEQ ID NO: 107814 - DNA, 25 bp, SARS Virus
agcgtcgcacatgcgtgactaagtc

SEQ ID NO: 107815 - DNA, 25 bp, SARS Virus
gcgtcgcacatcggtgactaagtcc

SEQ ID NO: 107816 - DNA, 25 bp, SARS Virus
cgtcgcacatccgtgactaagtcca

SEQ ID NO: 107817 - DNA, 25 bp, SARS Virus
gtcgcacatccgggactaagtccaa

SEQ ID NO: 107818 - DNA, 25 bp, SARS Virus
tcgcacatccgtgactaagtccaaa

SEQ ID NO: 107819 - DNA, 25 bp, SARS Virus
cgcacatccgtggctaagtccaaaa

SEQ ID NO: 107820 - DNA, 25 bp, SARS Virus
gcacatccgtgagtaagtccaaaac

SEQ ID NO: 107821 - DNA, 25 bp, SARS Virus
cacatccgtgacgaagtccaaaacg

SEQ ID NO: 107822 - DNA, 25 bp, SARS Virus
acatccgtgactgagtccaaaacga

SEQ ID NO: 107823 - DNA, 25 bp, SARS Virus
catccgtgactaggtccaaaacgac

SEQ ID NO: 107824 - DNA, 25 bp, SARS Virus
atccgtgactaagtccaaaacgacg

SEQ ID NO: 107825 - DNA, 25 bp, SARS Virus
tccgtgactaaggccaaaacgacgt

SEQ ID NO: 107826 - DNA, 25 bp, SARS Virus
ccgtgactaagtgcaaaacgacgta

SEQ ID NO: 107827 - DNA, 25 bp, SARS Virus
cgtgactaagtcgaaaacgacgtat

SEQ ID NO: 107828 - DNA, 25 bp, SARS Virus
gtgactaagtccgaaacgacgtatg

SEQ ID NO: 107829 - DNA, 25 bp, SARS Virus
tgactaagtccagaacgacgtatgt

SEQ ID NO: 107830 - DNA, 25 bp, SARS Virus
gactaagtccaagacgacgtatgtt

SEQ ID NO: 107831 - DNA, 25 bp, SARS Virus
actaagtccaaagcgacgtatgttg

SEQ ID NO: 107832 - DNA, 25 bp, SARS Virus
ctaagtccaaaaggacgtatgttgg

SEQ ID NO: 107833 - DNA, 25 bp, SARS Virus
taagtccaaaacgacgtatgttggc

SEQ ID NO: 107834 - DNA, 25 bp, SARS Virus
aagtccaaaacggcgtatgttggcg

SEQ ID NO: 107835 - DNA, 25 bp, SARS Virus
agtccaaaacgaggtatgttggcga

SEQ ID NO: 107836 - DNA, 25 bp, SARS Virus
gtccaaaacgacgtatgttggcgat

SEQ ID NO: 107837 - DNA, 25 bp, SARS Virus
tccaaaacgacggatgttggcgatg

SEQ ID NO: 107838 - DNA, 25 bp, SARS Virus
ccaaaacgacgtgtgttggcgatgg

SEQ ID NO: 107839 - DNA, 25 bp, SARS Virus
caaaacgacgtaggttggcgatggc

SEQ ID NO: 107840 - DNA, 25 bp, SARS Virus
aaaacgacgtatgttggcgatggca

SEQ ID NO: 107841 - DNA, 25 bp, SARS Virus
aaacgacgtatggtggcgatggcat

SEQ ID NO: 107842 - DNA, 25 bp, SARS Virus
aacgacgtatgtgggcgatggcata

SEQ ID NO: 107843 - DNA, 25 bp, SARS Virus
acgacgtatgttggcgatggcataa

SEQ ID NO: 107844 - DNA, 25 bp, SARS Virus
cgacgtatgttggcgatggcataac

SEQ ID NO: 107845 - DNA, 25 bp, SARS Virus
gacgtatgttggggatggcataacc

SEQ ID NO: 107846 - DNA, 25 bp, SARS Virus
acgtatgttggcgatggcataacct

SEQ ID NO: 107847 - DNA, 25 bp, SARS Virus
cgtatgttggcggtggcataacctt

SEQ ID NO: 107848 - DNA, 25 bp, SARS Virus
gtatgttggcgagggcataaccttt

SEQ ID NO: 107849 - DNA, 25 bp, SARS Virus
tatgttggcgatggcataacctttg

SEQ ID NO: 107850 - DNA, 25 bp, SARS Virus
atgttggcgatggcataacctttga

SEQ ID NO: 107851 - DNA, 25 bp, SARS Virus
tgttggcgatgggataacctttgat

SEQ ID NO: 107852 - DNA, 25 bp, SARS Virus
gttggcgatggcgtaacctttgata

SEQ ID NO: 107853 - DNA, 25 bp, SARS Virus
ttggcgatggcagaacctttgatat

SEQ ID NO: 107854 - DNA, 25 bp, SARS Virus
tggcgatggcatgacctttgatatt

SEQ ID NO: 107855 - DNA, 25 bp, SARS Virus
ggcgatggcatagcctttgatattt

SEQ ID NO: 107856 - DNA, 25 bp, SARS Virus
gcgatggcataagctttgatattta

SEQ ID NO: 107857 - DNA, 25 bp, SARS Virus
cgatggcataacgtttgatatttaa

SEQ ID NO: 107858 - DNA, 25 bp, SARS Virus
gatggcataaccgttgatatttaat

SEQ ID NO: 107859 - DNA, 25 bp, SARS Virus
atggcataacctgtgatatttaatt

SEQ ID NO: 107860 - DNA, 25 bp, SARS Virus
tggcataaccttggatatttaattt

SEQ ID NO: 107861 - DNA, 25 bp, SARS Virus
ggcataacctttgatatttaattta

SEQ ID NO: 107862 - DNA, 25 bp, SARS Virus
gcataacctttggtatttaatttat

SEQ ID NO: 107863 - DNA, 25 bp, SARS Virus
cataacctttgagatttaatttatg

SEQ ID NO: 107864 - DNA, 25 bp, SARS Virus
ataacctttgatgtttaatttatgt

SEQ ID NO: 107865 - DNA, 25 bp, SARS Virus
taacctttgatagttaatttatgtc

SEQ ID NO: 107866 - DNA, 25 bp, SARS Virus
aacctttgatatgtaatttatgtct

SEQ ID NO: 107867 - DNA, 25 bp, SARS Virus
acctttgatattgaatttatgtctg

SEQ ID NO: 107868 - DNA, 25 bp, SARS Virus
cctttgatatttgatttatgtctgg

SEQ ID NO: 107869 - DNA, 25 bp, SARS Virus
ctttgatatttagtttatgtctggt

SEQ ID NO: 107870 - DNA, 25 bp, SARS Virus
tttgatatttaagttatgtctggtg

SEQ ID NO: 107871 - DNA, 25 bp, SARS Virus
ttgatatttaatgtatgtctggtgc

SEQ ID NO: 107872 - DNA, 25 bp, SARS Virus
tgatatttaattgatgtctggtgcg

SEQ ID NO: 107873 - DNA, 25 bp, SARS Virus
gatatttaatttgtgtctggtgcgg

SEQ ID NO: 107874 - DNA, 25 bp, SARS Virus
atatttaatttaggtctggtgcggc

SEQ ID NO: 107875 - DNA, 25 bp, SARS Virus
tatttaatttatgtctggtgcggcc

SEQ ID NO: 107876 - DNA, 25 bp, SARS Virus
atttaatttatggctggtgcggcca

SEQ ID NO: 107877 - DNA, 25 bp, SARS Virus
tttaatttatgtgtggtgcggccat

SEQ ID NO: 107878 - DNA, 25 bp, SARS Virus
ttaatttatgtcgggtgcggccatc

SEQ ID NO: 107879 - DNA, 25 bp, SARS Virus
taatttatgtctggtgcggccatcg

SEQ ID NO: 107880 - DNA, 25 bp, SARS Virus
aatttatgtctggtgcggccatcgt

SEQ ID NO: 107881 - DNA, 25 bp, SARS Virus
atttatgtctggggcggccatcgtt

SEQ ID NO: 107882 - DNA, 25 bp, SARS Virus
tttatgtctggtgcggccatcgttg

SEQ ID NO: 107883 - DNA, 25 bp, SARS Virus
ttatgtctggtggggccatcgttgc

SEQ ID NO: 107884 - DNA, 25 bp, SARS Virus
tatgtctggtgcggccatcgttgct

SEQ ID NO: 107885 - DNA, 25 bp, SARS Virus
atgtctggtgcggccatcgttgctg

SEQ ID NO: 107886 - DNA, 25 bp, SARS Virus
tgtctggtgcgggcatcgttgctgt

SEQ ID NO: 107887 - DNA, 25 bp, SARS Virus
gtctggtgcggcgatcgttgctgtt

SEQ ID NO: 107888 - DNA, 25 bp, SARS Virus
tctggtgcggccgtcgttgctgtta

SEQ ID NO: 107889 - DNA, 25 bp, SARS Virus
ctggtgcggccagcgttgctgttat

SEQ ID NO: 107890 - DNA, 25 bp, SARS Virus
tggtgcggccatggttgctgttata

SEQ ID NO: 107891 - DNA, 25 bp, SARS Virus
ggtgcggccatcgttgctgttataa

SEQ ID NO: 107892 - DNA, 25 bp, SARS Virus
gtgcggccatcggtgctgttataac

SEQ ID NO: 107893 - DNA, 25 bp, SARS Virus
tgcggccatcgtggctgttataacg

SEQ ID NO: 107894 - DNA, 25 bp, SARS Virus
gcggccatcgttgctgttataacga

SEQ ID NO: 107895 - DNA, 25 bp, SARS Virus
cggccatcgttggtgttataacgaa

SEQ ID NO: 107896 - DNA, 25 bp, SARS Virus
ggccatcgttgcggttataacgaaa

SEQ ID NO: 107897 - DNA, 25 bp, SARS Virus
gccatcgttgctgttataacgaaac

SEQ ID NO: 107898 - DNA, 25 bp, SARS Virus
ccatcgttgctggtataacgaaacg

SEQ ID NO: 107899 - DNA, 25 bp, SARS Virus
catcgttgctgtgataacgaaacga

SEQ ID NO: 107900 - DNA, 25 bp, SARS Virus
atcgttgctgttgtaacgaaacgat

SEQ ID NO: 107901 - DNA, 25 bp, SARS Virus
tcgttgctgttagaacgaaacgatc

SEQ ID NO: 107902 - DNA, 25 bp, SARS Virus
cgttgctgttatgacgaaacgatca

SEQ ID NO: 107903 - DNA, 25 bp, SARS Virus
gttgctgttatagcgaaacgatcat

SEQ ID NO: 107904 - DNA, 25 bp, SARS Virus
ttgctgttataaggaaacgatcatg

SEQ ID NO: 107905 - DNA, 25 bp, SARS Virus
tgctgttataacgaaacgatcatgt

SEQ ID NO: 107906 - DNA, 25 bp, SARS Virus
gctgttataacggaacgatcatgtc

SEQ ID NO: 107907 - DNA, 25 bp, SARS Virus
ctgttataacgagacgatcatgtca

SEQ ID NO: 107908 - DNA, 25 bp, SARS Virus
tgttataacgaagcgatcatgtcat

SEQ ID NO: 107909 - DNA, 25 bp, SARS Virus
gttataacgaaaggatcatgtcatt

SEQ ID NO: 107910 - DNA, 25 bp, SARS Virus
ttataacgaaacgatcatgtcattc

SEQ ID NO: 107911 - DNA, 25 bp, SARS Virus
tataacgaaacggtcatgtcattca

SEQ ID NO: 107912 - DNA, 25 bp, SARS Virus
ataacgaaacgagcatgtcattcac

SEQ ID NO: 107913 - DNA, 25 bp, SARS Virus
taacgaaacgatgatgtcattcact

SEQ ID NO: 107914 - DNA, 25 bp, SARS Virus
aacgaaacgatcgtgtcattcactg

SEQ ID NO: 107915 - DNA, 25 bp, SARS Virus
acgaaacgatcaggtcattcactgt

SEQ ID NO: 107916 - DNA, 25 bp, SARS Virus
cgaaacgatcatgtcattcactgtt

SEQ ID NO: 107917 - DNA, 25 bp, SARS Virus
gaaacgatcatggcattcactgttg

SEQ ID NO: 107918 - DNA, 25 bp, SARS Virus
aaacgatcatgtgattcactgttgt

SEQ ID NO: 107919 - DNA, 25 bp, SARS Virus
aacgatcatgtcgttcactgttgtc

SEQ ID NO: 107920 - DNA, 25 bp, SARS Virus
acgatcatgtcagtcactgttgtct

SEQ ID NO: 107921 - DNA, 25 bp, SARS Virus
cgatcatgtcatgcactgttgtcta

SEQ ID NO: 107922 - DNA, 25 bp, SARS Virus
gatcatgtcattgactgttgtctac

SEQ ID NO: 107923 - DNA, 25 bp, SARS Virus
atcatgtcattcgctgttgtctaca

SEQ ID NO: 107924 - DNA, 25 bp, SARS Virus
tcatgtcattcagtgttgtctacaa

SEQ ID NO: 107925 - DNA, 25 bp, SARS Virus
catgtcattcacggttgtctacaaa

SEQ ID NO: 107926 - DNA, 25 bp, SARS Virus
atgtcattcactgttgtctacaaag

SEQ ID NO: 107927 - DNA, 25 bp, SARS Virus
tgtcattcactggtgtctacaaagt

SEQ ID NO: 107928 - DNA, 25 bp, SARS Virus
gtcattcactgtggtctacaaagta

SEQ ID NO: 107929 - DNA, 25 bp, SARS Virus
tcattcactgttgtctacaaagtag

SEQ ID NO: 107930 - DNA, 25 bp, SARS Virus
cattcactgttggctacaaagtaga

SEQ ID NO: 107931 - DNA, 25 bp, SARS Virus
attcactgttgtgtacaaagtagaa

SEQ ID NO: 107932 - DNA, 25 bp, SARS Virus
ttcactgttgtcgacaaagtagaac

SEQ ID NO: 107933 - DNA, 25 bp, SARS Virus
tcactgttgtctgcaaagtagaaca

SEQ ID NO: 107934 - DNA, 25 bp, SARS Virus
cactgttgtctagaaagtagaacaa

SEQ ID NO: 107935 - DNA, 25 bp, SARS Virus
actgttgtctacgaagtagaacaac

SEQ ID NO: 107936 - DNA, 25 bp, SARS Virus
ctgttgtctacagagtagaacaact

SEQ ID NO: 107937 - DNA, 25 bp, SARS Virus
tgttgtctacaaggtagaacaactg

SEQ ID NO: 107938 - DNA, 25 bp, SARS Virus
gttgtctacaaagtagaacaactga

SEQ ID NO: 107939 - DNA, 25 bp, SARS Virus
ttgtctacaaaggagaacaactgaa

SEQ ID NO: 107940 - DNA, 25 bp, SARS Virus
tgtctacaaagtggaacaactgaag

SEQ ID NO: 107941 - DNA, 25 bp, SARS Virus
gtctacaaagtagaacaactgaagg

SEQ ID NO: 107942 - DNA, 25 bp, SARS Virus
tctacaaagtaggacaactgaaggt

SEQ ID NO: 107943 - DNA, 25 bp, SARS Virus
ctacaaagtagagcaactgaaggtc

SEQ ID NO: 107944 - DNA, 25 bp, SARS Virus
tacaaagtagaagaactgaaggtcc

SEQ ID NO: 107945 - DNA, 25 bp, SARS Virus
acaaagtagaacgactgaaggtcca

SEQ ID NO: 107946 - DNA, 25 bp, SARS Virus
caaagtagaacagctgaaggtccaa

SEQ ID NO: 107947 - DNA, 25 bp, SARS Virus
aaagtagaacaagtgaaggtccaat

SEQ ID NO: 107948 - DNA, 25 bp, SARS Virus
aagtagaacaacggaaggtccaatg

SEQ ID NO: 107949 - DNA, 25 bp, SARS Virus
agtagaacaactgaaggtccaatgt

SEQ ID NO: 107950 - DNA, 25 bp, SARS Virus
gtagaacaactggaggtccaatgtt

SEQ ID NO: 107951 - DNA, 25 bp, SARS Virus
tagaacaactgagggtccaatgtta

SEQ ID NO: 107952 - DNA, 25 bp, SARS Virus
agaacaactgaaggtccaatgttat

SEQ ID NO: 107953 - DNA, 25 bp, SARS Virus
gaacaactgaaggtccaatgttatc

SEQ ID NO: 107954 - DNA, 25 bp, SARS Virus
aacaactgaagggccaatgttatcg

SEQ ID NO: 107955 - DNA, 25 bp, SARS Virus
acaactgaaggtgcaatgttatcgt

SEQ ID NO: 107956 - DNA, 25 bp, SARS Virus
caactgaaggtcgaatgttatcgtc

SEQ ID NO: 107957 - DNA, 25 bp, SARS Virus
aactgaaggtccgatgttatcgtct

SEQ ID NO: 107958 - DNA, 25 bp, SARS Virus
actgaaggtccagtgttatcgtctc

SEQ ID NO: 107959 - DNA, 25 bp, SARS Virus
ctgaaggtccaaggttatcgtctct

SEQ ID NO: 107960 - DNA, 25 bp, SARS Virus
tgaaggtccaatgttatcgtctcta

SEQ ID NO: 107961 - DNA, 25 bp, SARS Virus
gaaggtccaatggtatcgtctctat

SEQ ID NO: 107962 - DNA, 25 bp, SARS Virus
aaggtccaatgtgatcgtctctata

SEQ ID NO: 107963 - DNA, 25 bp, SARS Virus
aggtccaatgttgtcgtctctataa

SEQ ID NO: 107964 - DNA, 25 bp, SARS Virus
ggtccaatgttagcgtctctataac

SEQ ID NO: 107965 - DNA, 25 bp, SARS Virus
gtccaatgttatggtctctataact

SEQ ID NO: 107966 - DNA, 25 bp, SARS Virus
tccaatgttatcgtctctataacta

SEQ ID NO: 107967 - DNA, 25 bp, SARS Virus
ccaatgttatcggctctataactaa

SEQ ID NO: 107968 - DNA, 25 bp, SARS Virus
caatgttatcgtgtctataactaat

SEQ ID NO: 107969 - DNA, 25 bp, SARS Virus
aatgttatcgtcgctataactaata

SEQ ID NO: 107970 - DNA, 25 bp, SARS Virus
atgttatcgtctgtataactaatag

SEQ ID NO: 107971 - DNA, 25 bp, SARS Virus
tgttatcgtctcgataactaatagt

SEQ ID NO: 107972 - DNA, 25 bp, SARS Virus
gttatcgtctctgtaactaatagta

SEQ ID NO: 107973 - DNA, 25 bp, SARS Virus
ttatcgtctctagaactaatagtaa

SEQ ID NO: 107974 - DNA, 25 bp, SARS Virus
tatcgtctctatgactaatagtaat

SEQ ID NO: 107975 - DNA, 25 bp, SARS Virus
atcgtctctatagctaatagtaata

SEQ ID NO: 107976 - DNA, 25 bp, SARS Virus
tcgtctctataagtaatagtaatac

SEQ ID NO: 107977 - DNA, 25 bp, SARS Virus
ccactgaccgccttaacgctaacgt

SEQ ID NO: 107978 - DNA, 25 bp, SARS Virus
cactgaccgccctaacgctaacgtt

SEQ ID NO: 107979 - DNA, 25 bp, SARS Virus
actgaccgcccttacgctaacgtta

SEQ ID NO: 107980 - DNA, 25 bp, SARS Virus
ctgaccgccctatcgctaacgttac

SEQ ID NO: 107981 - DNA, 25 bp, SARS Virus
tgaccgccctaatgctaacgttacc

SEQ ID NO: 107982 - DNA, 25 bp, SARS Virus
gaccgccctaactctaacgttaccg

SEQ ID NO: 107983 - DNA, 25 bp, SARS Virus
accgccctaacgttaacgttaccga

SEQ ID NO: 107984 - DNA, 25 bp, SARS Virus
ccgccctaacgctaacgttaccgaa

SEQ ID NO: 107985 - DNA, 25 bp, SARS Virus
cgccctaacgcttacgttaccgaac

SEQ ID NO: 107986 - DNA, 25 bp, SARS Virus
gccctaacgctatcgttaccgaaca

SEQ ID NO: 107987 - DNA, 25 bp, SARS Virus
ccctaacgctaatgttaccgaacat

SEQ ID NO: 107988 - DNA, 25 bp, SARS Virus
cctaacgctaactttaccgaacata

SEQ ID NO: 107989 - DNA, 25 bp, SARS Virus
ctaacgctaacgttaccgaacataa

SEQ ID NO: 107990 - DNA, 25 bp, SARS Virus
taacgctaacgttaccgaacataac

SEQ ID NO: 107991 - DNA, 25 bp, SARS Virus
aacgctaacgtttccgaacataaca

SEQ ID NO: 107992 - DNA, 25 bp, SARS Virus
acgctaacgttatcgaacataacat

SEQ ID NO: 107993 - DNA, 25 bp, SARS Virus
cgctaacgttactgaacataacatc

SEQ ID NO: 107994 - DNA, 25 bp, SARS Virus
gctaacgttacctaacataacatcc

SEQ ID NO: 107995 - DNA, 25 bp, SARS Virus
ctaacgttaccgtacataacatccg

SEQ ID NO: 107996 - DNA, 25 bp, SARS Virus
taacgttaccgatcataacatccga

SEQ ID NO: 107997 - DNA, 25 bp, SARS Virus
aacgttaccgaatataacatccgaa

SEQ ID NO: 107998 - DNA, 25 bp, SARS Virus
acgttaccgaacttaacatccgaac

SEQ ID NO: 107999 - DNA, 25 bp, SARS Virus
cgttaccgaacataacatccgaact

SEQ ID NO: 108000 - DNA, 25 bp, SARS Virus
gttaccgaacattacatccgaacta

SEQ ID NO: 108001 - DNA, 25 bp, SARS Virus
ttaccgaacatatcatccgaactac

SEQ ID NO: 108002 - DNA, 25 bp, SARS Virus
taccgaacataatatccgaactaca

SEQ ID NO: 108003 - DNA, 25 bp, SARS Virus
accgaacataacttccgaactacac

SEQ ID NO: 108004 - DNA, 25 bp, SARS Virus
ccgaacataacatccgaactacacc

SEQ ID NO: 108005 - DNA, 25 bp, SARS Virus
cgaacataacattcgaactacaccg

SEQ ID NO: 108006 - DNA, 25 bp, SARS Virus
gaacataacatctgaactacaccga

SEQ ID NO: 108007 - DNA, 25 bp, SARS Virus
aacataacatcctaactacaccgaa

SEQ ID NO: 108008 - DNA, 25 bp, SARS Virus
acataacatccgtactacaccgaat

SEQ ID NO: 108009 - DNA, 25 bp, SARS Virus
cataacatccgatctacaccgaatc

SEQ ID NO: 108010 - DNA, 25 bp, SARS Virus
ataacatccgaattacaccgaatcg

SEQ ID NO: 108011 - DNA, 25 bp, SARS Virus
taacatccgaactacaccgaatcga

SEQ ID NO: 108012 - DNA, 25 bp, SARS Virus
aacatccgaacttcaccgaatcgat

SEQ ID NO: 108013 - DNA, 25 bp, SARS Virus
acatccgaactataccgaatcgatg

SEQ ID NO: 108014 - DNA, 25 bp, SARS Virus
catccgaactactccgaatcgatga

SEQ ID NO: 108015 - DNA, 25 bp, SARS Virus
atccgaactacatcgaatcgatgaa

SEQ ID NO: 108016 - DNA, 25 bp, SARS Virus
tccgaactacactgaatcgatgaag

SEQ ID NO: 108017 - DNA, 25 bp, SARS Virus
ccgaactacacctaatcgatgaagc

SEQ ID NO: 108018 - DNA, 25 bp, SARS Virus
cgaactacaccgtatcgatgaagca

SEQ ID NO: 108019 - DNA, 25 bp, SARS Virus
gaactacaccgattcgatgaagcaa

SEQ ID NO: 108020 - DNA, 25 bp, SARS Virus
aactacaccgaatcgatgaagcaac

SEQ ID NO: 108021 - DNA, 25 bp, SARS Virus
actacaccgaattgatgaagcaacg

SEQ ID NO: 108022 - DNA, 25 bp, SARS Virus
ctacaccgaatctatgaagcaacga

SEQ ID NO: 108023 - DNA, 25 bp, SARS Virus
tacaccgaatcgttgaagcaacgaa

SEQ ID NO: 108024 - DNA, 25 bp, SARS Virus
acaccgaatcgatgaagcaacgaag

SEQ ID NO: 108025 - DNA, 25 bp, SARS Virus
caccgaatcgattaagcaacgaagg

SEQ ID NO: 108026 - DNA, 25 bp, SARS Virus
accgaatcgatgtagcaacgaagga

SEQ ID NO: 108027 - DNA, 25 bp, SARS Virus
ccgaatcgatgatgcaacgaaggaa

SEQ ID NO: 108028 - DNA, 25 bp, SARS Virus
cgaatcgatgaatcaacgaaggaag

SEQ ID NO: 108029 - DNA, 25 bp, SARS Virus
gaatcgatgaagtaacgaaggaagt

SEQ ID NO: 108030 - DNA, 25 bp, SARS Virus
aatcgatgaagctacgaaggaagtc

SEQ ID NO: 108031 - DNA, 25 bp, SARS Virus
atcgatgaagcatcgaaggaagtcc

SEQ ID NO: 108032 - DNA, 25 bp, SARS Virus
tcgatgaagcaatgaaggaagtccg

SEQ ID NO: 108033 - DNA, 25 bp, SARS Virus
cgatgaagcaactaaggaagtccga

SEQ ID NO: 108034 - DNA, 25 bp, SARS Virus
gatgaagcaacgtaggaagtccgac

SEQ ID NO: 108035 - DNA, 25 bp, SARS Virus
atgaagcaacgatggaagtccgaca

SEQ ID NO: 108036 - DNA, 25 bp, SARS Virus
tgaagcaacgaatgaagtccgacaa

SEQ ID NO: 108037 - DNA, 25 bp, SARS Virus
gaagcaacgaagtaagtccgacaaa

SEQ ID NO: 108038 - DNA, 25 bp, SARS Virus
aagcaacgaaggtagtccgacaaac

SEQ ID NO: 108039 - DNA, 25 bp, SARS Virus
agcaacgaaggatgtccgacaaacg

SEQ ID NO: 108040 - DNA, 25 bp, SARS Virus
gcaacgaaggaattccgacaaacga

SEQ ID NO: 108041 - DNA, 25 bp, SARS Virus
caacgaaggaagtccgacaaacgag

SEQ ID NO: 108042 - DNA, 25 bp, SARS Virus
aacgaaggaagttcgacaaacgagc

SEQ ID NO: 108043 - DNA, 25 bp, SARS Virus
acgaaggaagtctgacaaacgagca

SEQ ID NO: 108044 - DNA, 25 bp, SARS Virus
cgaaggaagtcctacaaacgagcat

SEQ ID NO: 108045 - DNA, 25 bp, SARS Virus
gaaggaagtccgtcaaacgagcatg

SEQ ID NO: 108046 - DNA, 25 bp, SARS Virus
aaggaagtccgataaacgagcatgg

SEQ ID NO: 108047 - DNA, 25 bp, SARS Virus
aggaagtccgactaacgagcatggg

SEQ ID NO: 108048 - DNA, 25 bp, SARS Virus
ggaagtccgacatacgagcatgggc

SEQ ID NO: 108049 - DNA, 25 bp, SARS Virus
gaagtccgacaatcgagcatgggcg

SEQ ID NO: 108050 - DNA, 25 bp, SARS Virus
aagtccgacaaatgagcatgggcga

SEQ ID NO: 108051 - DNA, 25 bp, SARS Virus
agtccgacaaactagcatgggcgag

SEQ ID NO: 108052 - DNA, 25 bp, SARS Virus
gtccgacaaacgtgcatgggcgagt

SEQ ID NO: 108053 - DNA, 25 bp, SARS Virus
tccgacaaacgatcatgggcgagtt

SEQ ID NO: 108054 - DNA, 25 bp, SARS Virus
ccgacaaacgagtatgggcgagtta

SEQ ID NO: 108055 - DNA, 25 bp, SARS Virus
cgacaaacgagcttgggcgagttac

SEQ ID NO: 108056 - DNA, 25 bp, SARS Virus
gacaaacgagcatgggcgagttaca

SEQ ID NO: 108057 - DNA, 25 bp, SARS Virus
acaaacgagcattggcgagttacac

SEQ ID NO: 108058 - DNA, 25 bp, SARS Virus
caaacgagcatgtgcgagttacacc

SEQ ID NO: 108059 - DNA, 25 bp, SARS Virus
aaacgagcatggtcgagttacacca

SEQ ID NO: 108060 - DNA, 25 bp, SARS Virus
aacgagcatgggtgagttacaccag

SEQ ID NO: 108061 - DNA, 25 bp, SARS Virus
acgagcatgggctagttacaccagt

SEQ ID NO: 108062 - DNA, 25 bp, SARS Virus
cgagcatgggcgtgttacaccagta

SEQ ID NO: 108063 - DNA, 25 bp, SARS Virus
gagcatgggcgatttacaccagtaa

SEQ ID NO: 108064 - DNA, 25 bp, SARS Virus
agcatgggcgagttacaccagtaag

SEQ ID NO: 108065 - DNA, 25 bp, SARS Virus
gcatgggcgagttacaccagtaagt

SEQ ID NO: 108066 - DNA, 25 bp, SARS Virus
catgggcgagtttcaccagtaagtt

SEQ ID NO: 108067 - DNA, 25 bp, SARS Virus
atgggcgagttataccagtaagttg

SEQ ID NO: 108068 - DNA, 25 bp, SARS Virus
tgggcgagttactccagtaagttgg

SEQ ID NO: 108069 - DNA, 25 bp, SARS Virus
gggcgagttacatcagtaagttggg

SEQ ID NO: 108070 - DNA, 25 bp, SARS Virus
ggcgagttacactagtaagttgggt

SEQ ID NO: 108071 - DNA, 25 bp, SARS Virus
gcgagttacacctgtaagttgggtc

SEQ ID NO: 108072 - DNA, 25 bp, SARS Virus
cgagttacaccattaagttgggtct

SEQ ID NO: 108073 - DNA, 25 bp, SARS Virus
gagttacaccagtaagttgggtctt

SEQ ID NO: 108074 - DNA, 25 bp, SARS Virus
agttacaccagttagttgggtcttt

SEQ ID NO: 108075 - DNA, 25 bp, SARS Virus
gttacaccagtatgttgggtctttg

SEQ ID NO: 108076 - DNA, 25 bp, SARS Virus
ttacaccagtaatttgggtctttgt

SEQ ID NO: 108077 - DNA, 25 bp, SARS Virus
tacaccagtaagttgggtctttgtt

SEQ ID NO: 108078 - DNA, 25 bp, SARS Virus
acaccagtaagttgggtctttgttt

SEQ ID NO: 108079 - DNA, 25 bp, SARS Virus
caccagtaagtttggtctttgtttg

SEQ ID NO: 108080 - DNA, 25 bp, SARS Virus
accagtaagttgtgtctttgtttgt

SEQ ID NO: 108081 - DNA, 25 bp, SARS Virus
ccagtaagttggttctttgtttgta

SEQ ID NO: 108082 - DNA, 25 bp, SARS Virus
cagtaagttgggtctttgtttgtaa

SEQ ID NO: 108083 - DNA, 25 bp, SARS Virus
agtaagttgggtttttgtttgtaag

SEQ ID NO: 108084 - DNA, 25 bp, SARS Virus
gtaagttgggtctttgtttgtaaga

SEQ ID NO: 108085 - DNA, 25 bp, SARS Virus
taagttgggtctttgtttgtaagaa

SEQ ID NO: 108086 - DNA, 25 bp, SARS Virus
aagttgggtctttgtttgtaagaag

SEQ ID NO: 108087 - DNA, 25 bp, SARS Virus
agttgggtctttttttgtaagaaga

SEQ ID NO: 108088 - DNA, 25 bp, SARS Virus
gttgggtctttgtttgtaagaagag

SEQ ID NO: 108089 - DNA, 25 bp, SARS Virus
ttgggtctttgtttgtaagaagagt

SEQ ID NO: 108090 - DNA, 25 bp, SARS Virus
tgggtctttgtttgtaagaagagtt

SEQ ID NO: 108091 - DNA, 25 bp, SARS Virus
gggtctttgtttttaagaagagtta

SEQ ID NO: 108092 - DNA, 25 bp, SARS Virus
ggtctttgtttgtaagaagagttac

SEQ ID NO: 108093 - DNA, 25 bp, SARS Virus
gtctttgtttgttagaagagttaca

SEQ ID NO: 108094 - DNA, 25 bp, SARS Virus
tctttgtttgtatgaagagttacac

SEQ ID NO: 108095 - DNA, 25 bp, SARS Virus
ctttgtttgtaataagagttacacg

SEQ ID NO: 108096 - DNA, 25 bp, SARS Virus
tttgtttgtaagtagagttacacgg

SEQ ID NO: 108097 - DNA, 25 bp, SARS Virus
ttgtttgtaagatgagttacacgga

SEQ ID NO: 108098 - DNA, 25 bp, SARS Virus
tgtttgtaagaatagttacacggag

SEQ ID NO: 108099 - DNA, 25 bp, SARS Virus
gtttgtaagaagtgttacacggaga

SEQ ID NO: 108100 - DNA, 25 bp, SARS Virus
tttgtaagaagatttacacggagag

SEQ ID NO: 108101 - DNA, 25 bp, SARS Virus
ttgtaagaagagttacacggagagg

SEQ ID NO: 108102 - DNA, 25 bp, SARS Virus
tgtaagaagagttacacggagaggc

SEQ ID NO: 108103 - DNA, 25 bp, SARS Virus
gtaagaagagtttcacggagaggcc

SEQ ID NO: 108104 - DNA, 25 bp, SARS Virus
taagaagagttatacggagaggccc

SEQ ID NO: 108105 - DNA, 25 bp, SARS Virus
aagaagagttactcggagaggcccc

SEQ ID NO: 108106 - DNA, 25 bp, SARS Virus
agaagagttacatggagaggccccc

SEQ ID NO: 108107 - DNA, 25 bp, SARS Virus
gaagagttacactgagaggccccct

SEQ ID NO: 108108 - DNA, 25 bp, SARS Virus
aagagttacacgtagaggccccctg

SEQ ID NO: 108109 - DNA, 25 bp, SARS Virus
agagttacacggtgaggccccctgt

SEQ ID NO: 108110 - DNA, 25 bp, SARS Virus
gagttacacggataggccccctgtt

SEQ ID NO: 108111 - DNA, 25 bp, SARS Virus
agttacacggagtggccccctgtta

SEQ ID NO: 108112 - DNA, 25 bp, SARS Virus
gttacacggagatgccccctgttaa

SEQ ID NO: 108113 - DNA, 25 bp, SARS Virus
ttacacggagagtccccctgttaac

SEQ ID NO: 108114 - DNA, 25 bp, SARS Virus
tacacggagaggtcccctgttaaca

SEQ ID NO: 108115 - DNA, 25 bp, SARS Virus
acacggagaggctccctgttaacac

SEQ ID NO: 108116 - DNA, 25 bp, SARS Virus
cacggagaggcctcctgttaacact

SEQ ID NO: 108117 - DNA, 25 bp, SARS Virus
acggagaggccctctgttaacactg

SEQ ID NO: 108118 - DNA, 25 bp, SARS Virus
cggagaggccccttgttaacactgg

SEQ ID NO: 108119 - DNA, 25 bp, SARS Virus
ggagaggccccctgttaacactggt

SEQ ID NO: 108120 - DNA, 25 bp, SARS Virus
gagaggcccccttttaacactggtc

SEQ ID NO: 108121 - DNA, 25 bp, SARS Virus
agaggccccctgttaacactggtct

SEQ ID NO: 108122 - DNA, 25 bp, SARS Virus
gaggccccctgttaacactggtctg

SEQ ID NO: 108123 - DNA, 25 bp, SARS Virus
aggccccctgtttacactggtctgg

SEQ ID NO: 108124 - DNA, 25 bp, SARS Virus
ggccccctgttatcactggtctggc

SEQ ID NO: 108125 - DNA, 25 bp, SARS Virus
gccccctgttaatactggtctggcg

SEQ ID NO: 108126 - DNA, 25 bp, SARS Virus
ccccctgttaactctggtctggcga

SEQ ID NO: 108127 - DNA, 25 bp, SARS Virus
cccctgttaacattggtctggcgag

SEQ ID NO: 108128 - DNA, 25 bp, SARS Virus
ccctgttaacactggtctggcgagt

SEQ ID NO: 108129 - DNA, 25 bp, SARS Virus
cctgttaacacttgtctggcgagta

SEQ ID NO: 108130 - DNA, 25 bp, SARS Virus
ctgttaacactgttctggcgagtac

SEQ ID NO: 108131 - DNA, 25 bp, SARS Virus
tgttaacactggtctggcgagtacc

SEQ ID NO: 108132 - DNA, 25 bp, SARS Virus
gttaacactggtttggcgagtacct

SEQ ID NO: 108133 - DNA, 25 bp, SARS Virus
ttaacactggtctggcgagtacctt

SEQ ID NO: 108134 - DNA, 25 bp, SARS Virus
taacactggtcttgcgagtaccttt

SEQ ID NO: 108135 - DNA, 25 bp, SARS Virus
aacactggtctgtcgagtacctttc

SEQ ID NO: 108136 - DNA, 25 bp, SARS Virus
acactggtctggtgagtacctttca

SEQ ID NO: 108137 - DNA, 25 bp, SARS Virus
cactggtctggctagtacctttcac

SEQ ID NO: 108138 - DNA, 25 bp, SARS Virus
actggtctggcgtgtacctttcact

SEQ ID NO: 108139 - DNA, 25 bp, SARS Virus
ctggtctggcgattacctttcactt

SEQ ID NO: 108140 - DNA, 25 bp, SARS Virus
tggtctggcgagtacctttcacttg

SEQ ID NO: 108141 - DNA, 25 bp, SARS Virus
ggtctggcgagttcctttcacttga

SEQ ID NO: 108142 - DNA, 25 bp, SARS Virus
gtctggcgagtatctttcacttgaa

SEQ ID NO: 108143 - DNA, 25 bp, SARS Virus
tctggcgagtacttttcacttgaac

SEQ ID NO: 108144 - DNA, 25 bp, SARS Virus
ctggcgagtacctttcacttgaaca

SEQ ID NO: 108145 - DNA, 25 bp, SARS Virus
tggcgagtacctttcacttgaacag

SEQ ID NO: 108146 - DNA, 25 bp, SARS Virus
ggcgagtacctttcacttgaacagt

SEQ ID NO: 108147 - DNA, 25 bp, SARS Virus
gcgagtaccttttacttgaacagta

SEQ ID NO: 108148 - DNA, 25 bp, SARS Virus
cgagtacctttctcttgaacagtaa

SEQ ID NO: 108149 - DNA, 25 bp, SARS Virus
gagtacctttcatttgaacagtaac

SEQ ID NO: 108150 - DNA, 25 bp, SARS Virus
agtacctttcacttgaacagtaacc

SEQ ID NO: 108151 - DNA, 25 bp, SARS Virus
gtacctttcacttgaacagtaacca

SEQ ID NO: 108152 - DNA, 25 bp, SARS Virus
tacctttcactttaacagtaaccac

SEQ ID NO: 108153 - DNA, 25 bp, SARS Virus
acctttcacttgtacagtaaccacg

SEQ ID NO: 108154 - DNA, 25 bp, SARS Virus
cctttcacttgatcagtaaccacga

SEQ ID NO: 108155 - DNA, 25 bp, SARS Virus
ctttcacttgaatagtaaccacgac

SEQ ID NO: 108156 - DNA, 25 bp, SARS Virus
tttcacttgaactgtaaccacgaca

SEQ ID NO: 108157 - DNA, 25 bp, SARS Virus
ttcacttgaacattaaccacgacac

SEQ ID NO: 108158 - DNA, 25 bp, SARS Virus
tcacttgaacagtaaccacgacact

SEQ ID NO: 108159 - DNA, 25 bp, SARS Virus
cacttgaacagttaccacgacacta

SEQ ID NO: 108160 - DNA, 25 bp, SARS Virus
acttgaacagtatccacgacactag

SEQ ID NO: 108161 - DNA, 25 bp, SARS Virus
cttgaacagtaatcacgacactagt

SEQ ID NO: 108162 - DNA, 25 bp, SARS Virus
ttgaacagtaactacgacactagta

SEQ ID NO: 108163 - DNA, 25 bp, SARS Virus
tgaacagtaacctcgacactagtaa

SEQ ID NO: 108164 - DNA, 25 bp, SARS Virus
gaacagtaaccatgacactagtaag

SEQ ID NO: 108165 - DNA, 25 bp, SARS Virus
aacagtaaccactacactagtaagc

SEQ ID NO: 108166 - DNA, 25 bp, SARS Virus
acagtaaccacgtcactagtaagca

SEQ ID NO: 108167 - DNA, 25 bp, SARS Virus
cagtaaccacgatactagtaagcac

SEQ ID NO: 108168 - DNA, 25 bp, SARS Virus
agtaaccacgactctagtaagcacc

SEQ ID NO: 108169 - DNA, 25 bp, SARS Virus
gtaaccacgacattagtaagcacca

SEQ ID NO: 108170 - DNA, 25 bp, SARS Virus
taaccacgacactagtaagcaccag

SEQ ID NO: 108171 - DNA, 25 bp, SARS Virus
aaccacgacacttgtaagcaccagt

SEQ ID NO: 108172 - DNA, 25 bp, SARS Virus
accacgacactattaagcaccagtg

SEQ ID NO: 108173 - DNA, 25 bp, SARS Virus
ccacgacactagtaagcaccagtga

SEQ ID NO: 108174 - DNA, 25 bp, SARS Virus
cacgacactagttagcaccagtgaa

SEQ ID NO: 108175 - DNA, 25 bp, SARS Virus
acgacactagtatgcaccagtgaac

SEQ ID NO: 108176 - DNA, 25 bp, SARS Virus
cgacactagtaatcaccagtgaacg

SEQ ID NO: 108177 - DNA, 25 bp, SARS Virus
gacactagtaagtaccagtgaacgc

SEQ ID NO: 108178 - DNA, 25 bp, SARS Virus
acactagtaagctccagtgaacgct

SEQ ID NO: 108179 - DNA, 25 bp, SARS Virus
cactagtaagcatcagtgaacgctt

SEQ ID NO: 108180 - DNA, 25 bp, SARS Virus
actagtaagcactagtgaacgctta

SEQ ID NO: 108181 - DNA, 25 bp, SARS Virus
ctagtaagcacctgtgaacgcttac

SEQ ID NO: 108182 - DNA, 25 bp, SARS Virus
tagtaagcaccattgaacgcttacc

SEQ ID NO: 108183 - DNA, 25 bp, SARS Virus
agtaagcaccagtgaacgcttaccg

SEQ ID NO: 108184 - DNA, 25 bp, SARS Virus
gtaagcaccagttaacgcttaccgg

SEQ ID NO: 108185 - DNA, 25 bp, SARS Virus
taagcaccagtgtacgcttaccggc

SEQ ID NO: 108186 - DNA, 25 bp, SARS Virus
aagcaccagtgatcgcttaccggcc

SEQ ID NO: 108187 - DNA, 25 bp, SARS Virus
agcaccagtgaatgcttaccggcct

SEQ ID NO: 108188 - DNA, 25 bp, SARS Virus
gcaccagtgaactcttaccggcctg

SEQ ID NO: 108189 - DNA, 25 bp, SARS Virus
caccagtgaacgtttaccggcctgt

SEQ ID NO: 108190 - DNA, 25 bp, SARS Virus
accagtgaacgcttaccggcctgtg

SEQ ID NO: 108191 - DNA, 25 bp, SARS Virus
ccagtgaacgcttaccggcctgtga

SEQ ID NO: 108192 - DNA, 25 bp, SARS Virus
cagtgaacgctttccggcctgtgag

SEQ ID NO: 108193 - DNA, 25 bp, SARS Virus
agtgaacgcttatcggcctgtgagg

SEQ ID NO: 108194 - DNA, 25 bp, SARS Virus
gtgaacgcttactggcctgtgaggg

SEQ ID NO: 108195 - DNA, 25 bp, SARS Virus
tgaacgcttacctgcctgtgaggga

SEQ ID NO: 108196 - DNA, 25 bp, SARS Virus
gaacgcttaccgtcctgtgagggat

SEQ ID NO: 108197 - DNA, 25 bp, SARS Virus
aacgcttaccggtctgtgagggatc

SEQ ID NO: 108198 - DNA, 25 bp, SARS Virus
acgcttaccggcttgtgagggatcc

SEQ ID NO: 108199 - DNA, 25 bp, SARS Virus
cgcttaccggcctgtgagggatccc

SEQ ID NO: 108200 - DNA, 25 bp, SARS Virus
gcttaccggcctttgagggatcccg

SEQ ID NO: 108201 - DNA, 25 bp, SARS Virus
cttaccggcctgtgagggatcccgc

SEQ ID NO: 108202 - DNA, 25 bp, SARS Virus
ttaccggcctgttagggatcccgcg

SEQ ID NO: 108203 - DNA, 25 bp, SARS Virus
taccggcctgtgtgggatcccgcga

SEQ ID NO: 108204 - DNA, 25 bp, SARS Virus
accggcctgtgatggatcccgcgac

SEQ ID NO: 108205 - DNA, 25 bp, SARS Virus
ccggcctgtgagtgatcccgcgaca

SEQ ID NO: 108206 - DNA, 25 bp, SARS Virus
cggcctgtgaggtatcccgcgacac

SEQ ID NO: 108207 - DNA, 25 bp, SARS Virus
ggcctgtgagggttcccgcgacact

SEQ ID NO: 108208 - DNA, 25 bp, SARS Virus
gcctgtgagggatcccgcgacactg

SEQ ID NO: 108209 - DNA, 25 bp, SARS Virus
cctgtgagggattccgcgacactgt

SEQ ID NO: 108210 - DNA, 25 bp, SARS Virus
ctgtgagggatctcgcgacactgta

SEQ ID NO: 108211 - DNA, 25 bp, SARS Virus
tgtgagggatcctgcgacactgtaa

SEQ ID NO: 108212 - DNA, 25 bp, SARS Virus
gtgagggatccctcgacactgtaat

SEQ ID NO: 108213 - DNA, 25 bp, SARS Virus
tgagggatcccgtgacactgtaatt

SEQ ID NO: 108214 - DNA, 25 bp, SARS Virus
gagggatcccgctacactgtaattc

SEQ ID NO: 108215 - DNA, 25 bp, SARS Virus
agggatcccgcgtcactgtaattcc

SEQ ID NO: 108216 - DNA, 25 bp, SARS Virus
gggatcccgcgatactgtaattcct

SEQ ID NO: 108217 - DNA, 25 bp, SARS Virus
ggatcccgcgactctgtaattcctg

SEQ ID NO: 108218 - DNA, 25 bp, SARS Virus
gatcccgcgacattgtaattcctgg

SEQ ID NO: 108219 - DNA, 25 bp, SARS Virus
atcccgcgacactgtaattcctgga

SEQ ID NO: 108220 - DNA, 25 bp, SARS Virus
tcccgcgacactttaattcctggac

SEQ ID NO: 108221 - DNA, 25 bp, SARS Virus
cccgcgacactgtaattcctggacg

SEQ ID NO: 108222 - DNA, 25 bp, SARS Virus
ccgcgacactgttattcctggacgg

SEQ ID NO: 108223 - DNA, 25 bp, SARS Virus
cgcgacactgtatttcctggacggt

SEQ ID NO: 108224 - DNA, 25 bp, SARS Virus
gcgacactgtaattcctggacggtt

SEQ ID NO: 108225 - DNA, 25 bp, SARS Virus
cgacactgtaattcctggacggttt

SEQ ID NO: 108226 - DNA, 25 bp, SARS Virus
gacactgtaatttctggacggtttt

SEQ ID NO: 108227 - DNA, 25 bp, SARS Virus
acactgtaattcttggacggttttc

SEQ ID NO: 108228 - DNA, 25 bp, SARS Virus
cactgtaattcctggacggttttct

SEQ ID NO: 108229 - DNA, 25 bp, SARS Virus
actgtaattccttgacggttttctc

SEQ ID NO: 108230 - DNA, 25 bp, SARS Virus
ctgtaattcctgtacggttttctct

SEQ ID NO: 108231 - DNA, 25 bp, SARS Virus
tgtaattcctggtcggttttctcta

SEQ ID NO: 108232 - DNA, 25 bp, SARS Virus
gtaattcctggatggttttctctag

SEQ ID NO: 108233 - DNA, 25 bp, SARS Virus
taattcctggactgttttctctagt

SEQ ID NO: 108234 - DNA, 25 bp, SARS Virus
aattcctggacgtttttctctagtg

SEQ ID NO: 108235 - DNA, 25 bp, SARS Virus
attcctggacggttttctctagtga

SEQ ID NO: 108236 - DNA, 25 bp, SARS Virus
ttcctggacggttttctctagtgac

SEQ ID NO: 108237 - DNA, 25 bp, SARS Virus
tcctggacggttttctctagtgaca

SEQ ID NO: 108238 - DNA, 25 bp, SARS Virus
cctggacggttttctctagtgacac

SEQ ID NO: 108239 - DNA, 25 bp, SARS Virus
ctggacggttttttctagtgacacc

SEQ ID NO: 108240 - DNA, 25 bp, SARS Virus
tggacggttttctctagtgacaccg

SEQ ID NO: 108241 - DNA, 25 bp, SARS Virus
ggacggttttctttagtgacaccga

SEQ ID NO: 108242 - DNA, 25 bp, SARS Virus
gacggttttctctagtgacaccgat

SEQ ID NO: 108243 - DNA, 25 bp, SARS Virus
acggttttctcttgtgacaccgatg

SEQ ID NO: 108244 - DNA, 25 bp, SARS Virus
cggttttctctattgacaccgatgt

SEQ ID NO: 108245 - DNA, 25 bp, SARS Virus
ggttttctctagtgacaccgatgta

SEQ ID NO: 108246 - DNA, 25 bp, SARS Virus
gttttctctagttacaccgatgtag

SEQ ID NO: 108247 - DNA, 25 bp, SARS Virus
ttttctctagtgtcaccgatgtagt

SEQ ID NO: 108248 - DNA, 25 bp, SARS Virus
tttctctagtgataccgatgtagtg

SEQ ID NO: 108249 - DNA, 25 bp, SARS Virus
ttctctagtgactccgatgtagtgc

SEQ ID NO: 108250 - DNA, 25 bp, SARS Virus
tctctagtgacatcgatgtagtgct

SEQ ID NO: 108251 - DNA, 25 bp, SARS Virus
ctctagtgacactgatgtagtgctt

SEQ ID NO: 108252 - DNA, 25 bp, SARS Virus
tctagtgacacctatgtagtgcttg

SEQ ID NO: 108253 - DNA, 25 bp, SARS Virus
ctagtgacaccgttgtagtgcttgc

SEQ ID NO: 108254 - DNA, 25 bp, SARS Virus
tagtgacaccgatgtagtgcttgcg

SEQ ID NO: 108255 - DNA, 25 bp, SARS Virus
agtgacaccgatttagtgcttgcga

SEQ ID NO: 108256 - DNA, 25 bp, SARS Virus
gtgacaccgatgtagtgcttgcgaa

SEQ ID NO: 108257 - DNA, 25 bp, SARS Virus
tgacaccgatgttgtgcttgcgaaa

SEQ ID NO: 108258 - DNA, 25 bp, SARS Virus
gacaccgatgtattgcttgcgaaag

SEQ ID NO: 108259 - DNA, 25 bp, SARS Virus
acaccgatgtagtgcttgcgaaaga

SEQ ID NO: 108260 - DNA, 25 bp, SARS Virus
caccgatgtagttcttgcgaaagaa

SEQ ID NO: 108261 - DNA, 25 bp, SARS Virus
accgatgtagtgtttgcgaaagaat

SEQ ID NO: 108262 - DNA, 25 bp, SARS Virus
ccgatgtagtgcttgcgaaagaata

SEQ ID NO: 108263 - DNA, 25 bp, SARS Virus
cgatgtagtgcttgcgaaagaataa

SEQ ID NO: 108264 - DNA, 25 bp, SARS Virus
gatgtagtgctttcgaaagaataat

SEQ ID NO: 108265 - DNA, 25 bp, SARS Virus
atgtagtgcttgtgaaagaataatg

SEQ ID NO: 108266 - DNA, 25 bp, SARS Virus
tgtagtgcttgctaaagaataatgt

SEQ ID NO: 108267 - DNA, 25 bp, SARS Virus
gtagtgcttgcgtaagaataatgtt

SEQ ID NO: 108268 - DNA, 25 bp, SARS Virus
tagtgcttgcgatagaataatgttt

SEQ ID NO: 108269 - DNA, 25 bp, SARS Virus
agtgcttgcgaatgaataatgttta

SEQ ID NO: 108270 - DNA, 25 bp, SARS Virus
gtgcttgcgaaataataatgtttaa

SEQ ID NO: 108271 - DNA, 25 bp, SARS Virus
tgcttgcgaaagtataatgtttaat

SEQ ID NO: 108272 - DNA, 25 bp, SARS Virus
gcttgcgaaagattaatgtttaatc

SEQ ID NO: 108273 - DNA, 25 bp, SARS Virus
cttgcgaaagaataatgtttaatcc

SEQ ID NO: 108274 - DNA, 25 bp, SARS Virus
ttgcgaaagaattatgtttaatcct

SEQ ID NO: 108275 - DNA, 25 bp, SARS Virus
tgcgaaagaatattgtttaatcctc

SEQ ID NO: 108276 - DNA, 25 bp, SARS Virus
gcgaaagaataatgtttaatcctcg

SEQ ID NO: 108277 - DNA, 25 bp, SARS Virus
cgaaagaataatttttaatcctcgc

SEQ ID NO: 108278 - DNA, 25 bp, SARS Virus
gaaagaataatgtttaatcctcgca

SEQ ID NO: 108279 - DNA, 25 bp, SARS Virus
aaagaataatgtttaatcctcgcag

SEQ ID NO: 108280 - DNA, 25 bp, SARS Virus
aagaataatgtttaatcctcgcagc

SEQ ID NO: 108281 - DNA, 25 bp, SARS Virus
agaataatgttttatcctcgcagcg

SEQ ID NO: 108282 - DNA, 25 bp, SARS Virus
gaataatgtttattcctcgcagcgt

SEQ ID NO: 108283 - DNA, 25 bp, SARS Virus
aataatgtttaatcctcgcagcgtc

SEQ ID NO: 108284 - DNA, 25 bp, SARS Virus
ataatgtttaattctcgcagcgtcg

SEQ ID NO: 108285 - DNA, 25 bp, SARS Virus
taatgtttaatcttcgcagcgtcgc

SEQ ID NO: 108286 - DNA, 25 bp, SARS Virus
aatgtttaatcctcgcagcgtcgca

SEQ ID NO: 108287 - DNA, 25 bp, SARS Virus
atgtttaatccttgcagcgtcgcac

SEQ ID NO: 108288 - DNA, 25 bp, SARS Virus
tgtttaatcctctcagcgtcgcaca

SEQ ID NO: 108289 - DNA, 25 bp, SARS Virus
gtttaatcctcgtagcgtcgcacat

SEQ ID NO: 108290 - DNA, 25 bp, SARS Virus
tttaatcctcgctgcgtcgcacatc

SEQ ID NO: 108291 - DNA, 25 bp, SARS Virus
ttaatcctcgcatcgtcgcacatcc

SEQ ID NO: 108292 - DNA, 25 bp, SARS Virus
taatcctcgcagtgtcgcacatccg

SEQ ID NO: 108293 - DNA, 25 bp, SARS Virus
aatcctcgcagcttcgcacatccgt

SEQ ID NO: 108294 - DNA, 25 bp, SARS Virus
atcctcgcagcgtcgcacatccgtg

SEQ ID NO: 108295 - DNA, 25 bp, SARS Virus
tcctcgcagcgttgcacatccgtga

SEQ ID NO: 108296 - DNA, 25 bp, SARS Virus
cctcgcagcgtctcacatccgtgac

SEQ ID NO: 108297 - DNA, 25 bp, SARS Virus
ctcgcagcgtcgtacatccgtgact

SEQ ID NO: 108298 - DNA, 25 bp, SARS Virus
tcgcagcgtcgctcatccgtgacta

SEQ ID NO: 108299 - DNA, 25 bp, SARS Virus
cgcagcgtcgcatatccgtgactaa

SEQ ID NO: 108300 - DNA, 25 bp, SARS Virus
gcagcgtcgcacttccgtgactaag

SEQ ID NO: 108301 - DNA, 25 bp, SARS Virus
cagcgtcgcacatccgtgactaagt

SEQ ID NO: 108302 - DNA, 25 bp, SARS Virus
agcgtcgcacattcgtgactaagtc

SEQ ID NO: 108303 - DNA, 25 bp, SARS Virus
gcgtcgcacatctgtgactaagtcc

SEQ ID NO: 108304 - DNA, 25 bp, SARS Virus
cgtcgcacatccttgactaagtcca

SEQ ID NO: 108305 - DNA, 25 bp, SARS Virus
gtcgcacatccgtgactaagtccaa

SEQ ID NO: 108306 - DNA, 25 bp, SARS Virus
tcgcacatccgttactaagtccaaa

SEQ ID NO: 108307 - DNA, 25 bp, SARS Virus
cgcacatccgtgtctaagtccaaaa

SEQ ID NO: 108308 - DNA, 25 bp, SARS Virus
gcacatccgtgattaagtccaaaac

SEQ ID NO: 108309 - DNA, 25 bp, SARS Virus
cacatccgtgactaagtccaaaacg

SEQ ID NO: 108310 - DNA, 25 bp, SARS Virus
acatccgtgacttagtccaaaacga

SEQ ID NO: 108311 - DNA, 25 bp, SARS Virus
catccgtgactatgtccaaaacgac

SEQ ID NO: 108312 - DNA, 25 bp, SARS Virus
atccgtgactaattccaaaacgacg

SEQ ID NO: 108313 - DNA, 25 bp, SARS Virus
tccgtgactaagtccaaaacgacgt

SEQ ID NO: 108314 - DNA, 25 bp, SARS Virus
ccgtgactaagttcaaaacgacgta

SEQ ID NO: 108315 - DNA, 25 bp, SARS Virus
cgtgactaagtctaaaacgacgtat

SEQ ID NO: 108316 - DNA, 25 bp, SARS Virus
gtgactaagtcctaaacgacgtatg

SEQ ID NO: 108317 - DNA, 25 bp, SARS Virus
tgactaagtccataacgacgtatgt

SEQ ID NO: 108318 - DNA, 25 bp, SARS Virus
gactaagtccaatacgacgtatgtt

SEQ ID NO: 108319 - DNA, 25 bp, SARS Virus
actaagtccaaatcgacgtatgttg

SEQ ID NO: 108320 - DNA, 25 bp, SARS Virus
ctaagtccaaaatgacgtatgttgg

SEQ ID NO: 108321 - DNA, 25 bp, SARS Virus
taagtccaaaactacgtatgttggc

SEQ ID NO: 108322 - DNA, 25 bp, SARS Virus
aagtccaaaacgtcgtatgttggcg

SEQ ID NO: 108323 - DNA, 25 bp, SARS Virus
agtccaaaacgatgtatgttggcga

SEQ ID NO: 108324 - DNA, 25 bp, SARS Virus
gtccaaaacgacttatgttggcgat

SEQ ID NO: 108325 - DNA, 25 bp, SARS Virus
tccaaaacgacgtatgttggcgatg

SEQ ID NO: 108326 - DNA, 25 bp, SARS Virus
ccaaaacgacgtttgttggcgatgg

SEQ ID NO: 108327 - DNA, 25 bp, SARS Virus
caaaacgacgtatgttggcgatggc

SEQ ID NO: 108328 - DNA, 25 bp, SARS Virus
aaaacgacgtattttggcgatggca

SEQ ID NO: 108329 - DNA, 25 bp, SARS Virus
aaacgacgtatgttggcgatggcat

SEQ ID NO: 108330 - DNA, 25 bp, SARS Virus
aacgacgtatgttggcgatggcata

SEQ ID NO: 108331 - DNA, 25 bp, SARS Virus
acgacgtatgtttgcgatggcataa

SEQ ID NO: 108332 - DNA, 25 bp, SARS Virus
cgacgtatgttgtcgatggcataac

SEQ ID NO: 108333 - DNA, 25 bp, SARS Virus
gacgtatgttggtgatggcataacc

SEQ ID NO: 108334 - DNA, 25 bp, SARS Virus
acgtatgttggctatggcataacct

SEQ ID NO: 108335 - DNA, 25 bp, SARS Virus
cgtatgttggcgttggcataacctt

SEQ ID NO: 108336 - DNA, 25 bp, SARS Virus
gtatgttggcgatggcataaccttt

SEQ ID NO: 108337 - DNA, 25 bp, SARS Virus
tatgttggcgattgcataacctttg

SEQ ID NO: 108338 - DNA, 25 bp, SARS Virus
atgttggcgatgtcataacctttga

SEQ ID NO: 108339 - DNA, 25 bp, SARS Virus
tgttggcgatggtataacctttgat

SEQ ID NO: 108340 - DNA, 25 bp, SARS Virus
gttggcgatggcttaacctttgata

SEQ ID NO: 108341 - DNA, 25 bp, SARS Virus
ttggcgatggcataacctttgatat

SEQ ID NO: 108342 - DNA, 25 bp, SARS Virus
tggcgatggcattacctttgatatt

SEQ ID NO: 108343 - DNA, 25 bp, SARS Virus
ggcgatggcatatcctttgatattt

SEQ ID NO: 108344 - DNA, 25 bp, SARS Virus
gcgatggcataatctttgatattta

SEQ ID NO: 108345 - DNA, 25 bp, SARS Virus
cgatggcataacttttgatatttaa

SEQ ID NO: 108346 - DNA, 25 bp, SARS Virus
gatggcataacctttgatatttaat

SEQ ID NO: 108347 - DNA, 25 bp, SARS Virus
atggcataacctttgatatttaatt

SEQ ID NO: 108348 - DNA, 25 bp, SARS Virus
tggcataacctttgatatttaattt

SEQ ID NO: 108349 - DNA, 25 bp, SARS Virus
ggcataaccttttatatttaattta

SEQ ID NO: 108350 - DNA, 25 bp, SARS Virus
gcataacctttgttatttaatttat

SEQ ID NO: 108351 - DNA, 25 bp, SARS Virus
cataacctttgatatttaatttatg

SEQ ID NO: 108352 - DNA, 25 bp, SARS Virus
ataacctttgatttttaatttatgt

SEQ ID NO: 108353 - DNA, 25 bp, SARS Virus
taacctttgatatttaatttatgtc

SEQ ID NO: 108354 - DNA, 25 bp, SARS Virus
aacctttgatatttaatttatgtct

SEQ ID NO: 108355 - DNA, 25 bp, SARS Virus
acctttgatatttaatttatgtctg

SEQ ID NO: 108356 - DNA, 25 bp, SARS Virus
cctttgatattttatttatgtctgg

SEQ ID NO: 108357 - DNA, 25 bp, SARS Virus
ctttgatatttattttatgtctggt

SEQ ID NO: 108358 - DNA, 25 bp, SARS Virus
tttgatatttaatttatgtctggtg

SEQ ID NO: 108359 - DNA, 25 bp, SARS Virus
ttgatatttaatttatgtctggtgc

SEQ ID NO: 108360 - DNA, 25 bp, SARS Virus
tgatatttaatttatgtctggtgcg

SEQ ID NO: 108361 - DNA, 25 bp, SARS Virus
gatatttaatttttgtctggtgcgg

SEQ ID NO: 108362 - DNA, 25 bp, SARS Virus
atatttaatttatgtctggtgcggc

SEQ ID NO: 108363 - DNA, 25 bp, SARS Virus
tatttaatttatttctggtgcggcc

SEQ ID NO: 108364 - DNA, 25 bp, SARS Virus
atttaatttatgtctggtgcggcca

SEQ ID NO: 108365 - DNA, 25 bp, SARS Virus
tttaatttatgtttggtgcggccat

SEQ ID NO: 108366 - DNA, 25 bp, SARS Virus
ttaatttatgtctggtgcggccatc

SEQ ID NO: 108367 - DNA, 25 bp, SARS Virus
taatttatgtcttgtgcggccatcg

SEQ ID NO: 108368 - DNA, 25 bp, SARS Virus
aatttatgtctgttgcggccatcgt

SEQ ID NO: 108369 - DNA, 25 bp, SARS Virus
atttatgtctggtgcggccatcgtt

SEQ ID NO: 108370 - DNA, 25 bp, SARS Virus
tttatgtctggttcggccatcgttg

SEQ ID NO: 108371 - DNA, 25 bp, SARS Virus
ttatgtctggtgtggccatcgttgc

SEQ ID NO: 108372 - DNA, 25 bp, SARS Virus
tatgtctggtgctgccatcgttgct

SEQ ID NO: 108373 - DNA, 25 bp, SARS Virus
atgtctggtgcgtccatcgttgctg

SEQ ID NO: 108374 - DNA, 25 bp, SARS Virus
tgtctggtgcggtcatcgttgctgt

SEQ ID NO: 108375 - DNA, 25 bp, SARS Virus
gtctggtgcggctatcgttgctgtt

SEQ ID NO: 108376 - DNA, 25 bp, SARS Virus
tctggtgcggccttcgttgctgtta

SEQ ID NO: 108377 - DNA, 25 bp, SARS Virus
ctggtgcggccatcgttgctgttat

SEQ ID NO: 108378 - DNA, 25 bp, SARS Virus
tggtgcggccattgttgctgttata

SEQ ID NO: 108379 - DNA, 25 bp, SARS Virus
ggtgcggccatctttgctgttataa

SEQ ID NO: 108380 - DNA, 25 bp, SARS Virus
gtgcggccatcgttgctgttataac

SEQ ID NO: 108381 - DNA, 25 bp, SARS Virus
tgcggccatcgttgctgttataacg

SEQ ID NO: 108382 - DNA, 25 bp, SARS Virus
gcggccatcgtttctgttataacga

SEQ ID NO: 108383 - DNA, 25 bp, SARS Virus
cggccatcgttgttgttataacgaa

SEQ ID NO: 108384 - DNA, 25 bp, SARS Virus
ggccatcgttgctgttataacgaaa

SEQ ID NO: 108385 - DNA, 25 bp, SARS Virus
gccatcgttgcttttataacgaaac

SEQ ID NO: 108386 - DNA, 25 bp, SARS Virus
ccatcgttgctgttataacgaaacg

SEQ ID NO: 108387 - DNA, 25 bp, SARS Virus
catcgttgctgttataacgaaacga

SEQ ID NO: 108388 - DNA, 25 bp, SARS Virus
atcgttgctgttttaacgaaacgat

SEQ ID NO: 108389 - DNA, 25 bp, SARS Virus
tcgttgctgttataacgaaacgatc

SEQ ID NO: 108390 - DNA, 25 bp, SARS Virus
cgttgctgttattacgaaacgatca

SEQ ID NO: 108391 - DNA, 25 bp, SARS Virus
gttgctgttatatcgaaacgatcat

SEQ ID NO: 108392 - DNA, 25 bp, SARS Virus
ttgctgttataatgaaacgatcatg

SEQ ID NO: 108393 - DNA, 25 bp, SARS Virus
tgctgttataactaaacgatcatgt

SEQ ID NO: 108394 - DNA, 25 bp, SARS Virus
gctgttataacgtaacgatcatgtc

SEQ ID NO: 108395 - DNA, 25 bp, SARS Virus
ctgttataacgatacgatcatgtca

SEQ ID NO: 108396 - DNA, 25 bp, SARS Virus
tgttataacgaatcgatcatgtcat

SEQ ID NO: 108397 - DNA, 25 bp, SARS Virus
gttataacgaaatgatcatgtcatt

SEQ ID NO: 108398 - DNA, 25 bp, SARS Virus
ttataacgaaactatcatgtcattc

SEQ ID NO: 108399 - DNA, 25 bp, SARS Virus
tataacgaaacgttcatgtcattca

SEQ ID NO: 108400 - DNA, 25 bp, SARS Virus
ataacgaaacgatcatgtcattcac

SEQ ID NO: 108401 - DNA, 25 bp, SARS Virus
taacgaaacgattatgtcattcact

SEQ ID NO: 108402 - DNA, 25 bp, SARS Virus
aacgaaacgatcttgtcattcactg

SEQ ID NO: 108403 - DNA, 25 bp, SARS Virus
acgaaacgatcatgtcattcactgt

SEQ ID NO: 108404 - DNA, 25 bp, SARS Virus
cgaaacgatcatttcattcactgtt

SEQ ID NO: 108405 - DNA, 25 bp, SARS Virus
gaaacgatcatgtcattcactgttg

SEQ ID NO: 108406 - DNA, 25 bp, SARS Virus
aaacgatcatgttattcactgttgt

SEQ ID NO: 108407 - DNA, 25 bp, SARS Virus
aacgatcatgtctttcactgttgtc

SEQ ID NO: 108408 - DNA, 25 bp, SARS Virus
acgatcatgtcattcactgttgtct

SEQ ID NO: 108409 - DNA, 25 bp, SARS Virus
cgatcatgtcattcactgttgtcta

SEQ ID NO: 108410 - DNA, 25 bp, SARS Virus
gatcatgtcatttactgttgtctac

SEQ ID NO: 108411 - DNA, 25 bp, SARS Virus
atcatgtcattctctgttgtctaca

SEQ ID NO: 108412 - DNA, 25 bp, SARS Virus
tcatgtcattcattgttgtctacaa

SEQ ID NO: 108413 - DNA, 25 bp, SARS Virus
catgtcattcactgttgtctacaaa

SEQ ID NO: 108414 - DNA, 25 bp, SARS Virus
atgtcattcacttttgtctacaaag

SEQ ID NO: 108415 - DNA, 25 bp, SARS Virus
tgtcattcactgttgtctacaaagt

SEQ ID NO: 108416 - DNA, 25 bp, SARS Virus
gtcattcactgttgtctacaaagta

SEQ ID NO: 108417 - DNA, 25 bp, SARS Virus
tcattcactgttttctacaaagtag

SEQ ID NO: 108418 - DNA, 25 bp, SARS Virus
cattcactgttgtctacaaagtaga

SEQ ID NO: 108419 - DNA, 25 bp, SARS Virus
attcactgttgtttacaaagtagaa

SEQ ID NO: 108420 - DNA, 25 bp, SARS Virus
ttcactgttgtctacaaagtagaac

SEQ ID NO: 108421 - DNA, 25 bp, SARS Virus
tcactgttgtcttcaaagtagaaca

SEQ ID NO: 108422 - DNA, 25 bp, SARS Virus
cactgttgtctataaagtagaacaa

SEQ ID NO: 108423 - DNA, 25 bp, SARS Virus
actgttgtctactaagtagaacaac

SEQ ID NO: 108424 - DNA, 25 bp, SARS Virus
ctgttgtctacatagtagaacaact

SEQ ID NO: 108425 - DNA, 25 bp, SARS Virus
tgttgtctacaatgtagaacaactg

SEQ ID NO: 108426 - DNA, 25 bp, SARS Virus
gttgtctacaaattagaacaactga

SEQ ID NO: 108427 - DNA, 25 bp, SARS Virus
ttgtctacaaagtagaacaactgaa

SEQ ID NO: 108428 - DNA, 25 bp, SARS Virus
tgtctacaaagttgaacaactgaag

SEQ ID NO: 108429 - DNA, 25 bp, SARS Virus
gtctacaaagtataacaactgaagg

SEQ ID NO: 108430 - DNA, 25 bp, SARS Virus
tctacaaagtagtacaactgaaggt

SEQ ID NO: 108431 - DNA, 25 bp, SARS Virus
ctacaaagtagatcaactgaaggtc

SEQ ID NO: 108432 - DNA, 25 bp, SARS Virus
tacaaagtagaataactgaaggtcc

SEQ ID NO: 108433 - DNA, 25 bp, SARS Virus
acaaagtagaactactgaaggtcca

SEQ ID NO: 108434 - DNA, 25 bp, SARS Virus
caaagtagaacatctgaaggtccaa

SEQ ID NO: 108435 - DNA, 25 bp, SARS Virus
aaagtagaacaattgaaggtccaat

SEQ ID NO: 108436 - DNA, 25 bp, SARS Virus
aagtagaacaactgaaggtccaatg

SEQ ID NO: 108437 - DNA, 25 bp, SARS Virus
agtagaacaacttaaggtccaatgt

SEQ ID NO: 108438 - DNA, 25 bp, SARS Virus
gtagaacaactgtaggtccaatgtt

SEQ ID NO: 108439 - DNA, 25 bp, SARS Virus
tagaacaactgatggtccaatgtta

SEQ ID NO: 108440 - DNA, 25 bp, SARS Virus
agaacaactgaatgtccaatgttat

SEQ ID NO: 108441 - DNA, 25 bp, SARS Virus
gaacaactgaagttccaatgttatc

SEQ ID NO: 108442 - DNA, 25 bp, SARS Virus
aacaactgaaggtccaatgttatcg

SEQ ID NO: 108443 - DNA, 25 bp, SARS Virus
acaactgaaggttcaatgttatcgt

SEQ ID NO: 108444 - DNA, 25 bp, SARS Virus
caactgaaggtctaatgttatcgtc

SEQ ID NO: 108445 - DNA, 25 bp, SARS Virus
aactgaaggtcctatgttatcgtct

SEQ ID NO: 108446 - DNA, 25 bp, SARS Virus
actgaaggtccattgttatcgtctc

SEQ ID NO: 108447 - DNA, 25 bp, SARS Virus
ctgaaggtccaatgttatcgtctct

SEQ ID NO: 108448 - DNA, 25 bp, SARS Virus
tgaaggtccaattttatcgtctcta

SEQ ID NO: 108449 - DNA, 25 bp, SARS Virus
gaaggtccaatgttatcgtctctat

SEQ ID NO: 108450 - DNA, 25 bp, SARS Virus
aaggtccaatgttatcgtctctata

SEQ ID NO: 108451 - DNA, 25 bp, SARS Virus
aggtccaatgttttcgtctctataa

SEQ ID NO: 108452 - DNA, 25 bp, SARS Virus
ggtccaatgttatcgtctctataac

SEQ ID NO: 108453 - DNA, 25 bp, SARS Virus
gtccaatgttattgtctctataact

SEQ ID NO: 108454 - DNA, 25 bp, SARS Virus
tccaatgttatcttctctataacta

SEQ ID NO: 108455 - DNA, 25 bp, SARS Virus
ccaatgttatcgtctctataactaa

SEQ ID NO: 108456 - DNA, 25 bp, SARS Virus
caatgttatcgtttctataactaat

SEQ ID NO: 108457 - DNA, 25 bp, SARS Virus
aatgttatcgtctctataactaata

SEQ ID NO: 108458 - DNA, 25 bp, SARS Virus
atgttatcgtctttataactaatag

SEQ ID NO: 108459 - DNA, 25 bp, SARS Virus
tgttatcgtctctataactaatagt

SEQ ID NO: 108460 - DNA, 25 bp, SARS Virus
gttatcgtctctttaactaatagta

SEQ ID NO: 108461 - DNA, 25 bp, SARS Virus
ttatcgtctctataactaatagtaa

SEQ ID NO: 108462 - DNA, 25 bp, SARS Virus
tatcgtctctattactaatagtaat

SEQ ID NO: 108463 - DNA, 25 bp, SARS Virus
atcgtctctatatctaatagtaata

SEQ ID NO: 108464 - DNA, 25 bp, SARS Virus
tcgtctctataattaatagtaatac

SEQ ID NO: 108465 - DNA, 25 bp, SARS Virus
cgtctctataacaaatagtaatact

SEQ ID NO: 108466 - DNA, 25 bp, SARS Virus
gtctctataactaatagtaatactc

SEQ ID NO: 108467 - DNA, 25 bp, SARS Virus
tctctataactaatagtaatactcc

SEQ ID NO: 108468 - DNA, 25 bp, SARS Virus
ctctataactaaaagtaatactcct

SEQ ID NO: 108469 - DNA, 25 bp, SARS Virus
tctataactaatagtaatactcctg

SEQ ID NO: 108470 - DNA, 25 bp, SARS Virus
ctataactaataataatactcctga

SEQ ID NO: 108471 - DNA, 25 bp, SARS Virus
tataactaatagaaatactcctgaa

SEQ ID NO: 108472 - DNA, 25 bp, SARS Virus
ataactaatagtaatactcctgaaa

SEQ ID NO: 108473 - DNA, 25 bp, SARS Virus
taactaatagtaatactcctgaaag

SEQ ID NO: 108474 - DNA, 25 bp, SARS Virus
aactaatagtaaaactcctgaaagt

SEQ ID NO: 108475 - DNA, 25 bp, SARS Virus
actaatagtaatactcctgaaagtc

SEQ ID NO: 108476 - DNA, 25 bp, SARS Virus
ctaatagtaataatcctgaaagtcc

SEQ ID NO: 108477 - DNA, 25 bp, SARS Virus
taatagtaatacacctgaaagtcct

SEQ ID NO: 108478 - DNA, 25 bp, SARS Virus
aatagtaatactactgaaagtccta

SEQ ID NO: 108479 - DNA, 25 bp, SARS Virus
atagtaatactcatgaaagtcctaa

SEQ ID NO: 108480 - DNA, 25 bp, SARS Virus
tagtaatactccagaaagtcctaac

SEQ ID NO: 108481 - DNA, 25 bp, SARS Virus
agtaatactcctaaaagtcctaacg

SEQ ID NO: 108482 - DNA, 25 bp, SARS Virus
gtaatactcctgaaagtcctaacga

SEQ ID NO: 108483 - DNA, 25 bp, SARS Virus
taatactcctgaaagtcctaacgat

SEQ ID NO: 108484 - DNA, 25 bp, SARS Virus
aatactcctgaaagtcctaacgata

SEQ ID NO: 108485 - DNA, 25 bp, SARS Virus
atactcctgaaaatcctaacgataa

SEQ ID NO: 108486 - DNA, 25 bp, SARS Virus
tactcctgaaagacctaacgataaa

SEQ ID NO: 108487 - DNA, 25 bp, SARS Virus
actcctgaaagtactaacgataaac

SEQ ID NO: 108488 - DNA, 25 bp, SARS Virus
ctcctgaaagtcataacgataaacc

SEQ ID NO: 108489 - DNA, 25 bp, SARS Virus
tcctgaaagtccaaacgataaacct

SEQ ID NO: 108490 - DNA, 25 bp, SARS Virus
cctgaaagtcctaacgataaacctt

SEQ ID NO: 108491 - DNA, 25 bp, SARS Virus
ctgaaagtcctaacgataaacctta

SEQ ID NO: 108492 - DNA, 25 bp, SARS Virus
tgaaagtcctaaagataaaccttag

SEQ ID NO: 108493 - DNA, 25 bp, SARS Virus
gaaagtcctaacaataaaccttaga

SEQ ID NO: 108494 - DNA, 25 bp, SARS Virus
aaagtcctaacgataaaccttagaa

SEQ ID NO: 108495 - DNA, 25 bp, SARS Virus
aagtcctaacgaaaaaccttagaac

SEQ ID NO: 108496 - DNA, 25 bp, SARS Virus
agtcctaacgataaaccttagaact

SEQ ID NO: 108497 - DNA, 25 bp, SARS Virus
gtcctaacgataaaccttagaactg

SEQ ID NO: 108498 - DNA, 25 bp, SARS Virus
tcctaacgataaaccttagaactgc

SEQ ID NO: 108499 - DNA, 25 bp, SARS Virus
cctaacgataaaacttagaactgca

SEQ ID NO: 108500 - DNA, 25 bp, SARS Virus
ctaacgataaacattagaactgcaa

SEQ ID NO: 108501 - DNA, 25 bp, SARS Virus
taacgataaaccatagaactgcaat

SEQ ID NO: 108502 - DNA, 25 bp, SARS Virus
aacgataaacctaagaactgcaata

SEQ ID NO: 108503 - DNA, 25 bp, SARS Virus
acgataaaccttagaactgcaatat

SEQ ID NO: 108504 - DNA, 25 bp, SARS Virus
cgataaaccttaaaactgcaatatt

SEQ ID NO: 108505 - DNA, 25 bp, SARS Virus
gataaaccttagaactgcaatatta

SEQ ID NO: 108506 - DNA, 25 bp, SARS Virus
ataaaccttagaactgcaatattat

SEQ ID NO: 108507 - DNA, 25 bp, SARS Virus
taaaccttagaaatgcaatattatt

SEQ ID NO: 108508 - DNA, 25 bp, SARS Virus
aaaccttagaacagcaatattattc

SEQ ID NO: 108509 - DNA, 25 bp, SARS Virus
aaccttagaactacaatattattca

SEQ ID NO: 108510 - DNA, 25 bp, SARS Virus
accttagaactgaaatattattcaa

SEQ ID NO: 108511 - DNA, 25 bp, SARS Virus
ccttagaactgcaatattattcaag

SEQ ID NO: 108512 - DNA, 25 bp, SARS Virus
cttagaactgcaatattattcaagt

SEQ ID NO: 108513 - DNA, 25 bp, SARS Virus
ttagaactgcaaaattattcaagtt

SEQ ID NO: 108514 - DNA, 25 bp, SARS Virus
tagaactgcaatattattcaagtta

SEQ ID NO: 108515 - DNA, 25 bp, SARS Virus
agaactgcaataatattcaagttat

SEQ ID NO: 108516 - DNA, 25 bp, SARS Virus
gaactgcaatataattcaagttatc

SEQ ID NO: 108517 - DNA, 25 bp, SARS Virus
aactgcaatattattcaagttatca

SEQ ID NO: 108518 - DNA, 25 bp, SARS Virus
actgcaatattaatcaagttatcac

SEQ ID NO: 108519 - DNA, 25 bp, SARS Virus
ctgcaatattatacaagttatcact

SEQ ID NO: 108520 - DNA, 25 bp, SARS Virus
tgcaatattattaaagttatcactc

SEQ ID NO: 108521 - DNA, 25 bp, SARS Virus
gcaatattattcaagttatcactct

SEQ ID NO: 108522 - DNA, 25 bp, SARS Virus
caatattattcaagttatcactctg

SEQ ID NO: 108523 - DNA, 25 bp, SARS Virus
aatattattcaaattatcactctgt

SEQ ID NO: 108524 - DNA, 25 bp, SARS Virus
atattattcaagatatcactctgtt

SEQ ID NO: 108525 - DNA, 25 bp, SARS Virus
tattattcaagtaatcactctgtta

SEQ ID NO: 108526 - DNA, 25 bp, SARS Virus
attattcaagttatcactctgttaa

SEQ ID NO: 108527 - DNA, 25 bp, SARS Virus
ttattcaagttaacactctgttaat

SEQ ID NO: 108528 - DNA, 25 bp, SARS Virus
tattcaagttataactctgttaata

SEQ ID NO: 108529 - DNA, 25 bp, SARS Virus
attcaagttatcactctgttaataa

SEQ ID NO: 108530 - DNA, 25 bp, SARS Virus
ttcaagttatcaatctgttaataaa

SEQ ID NO: 108531 - DNA, 25 bp, SARS Virus
tcaagttatcacactgttaataaat

SEQ ID NO: 108532 - DNA, 25 bp, SARS Virus
caagttatcactatgttaataaatt

SEQ ID NO: 108533 - DNA, 25 bp, SARS Virus
aagttatcactcagttaataaattc

SEQ ID NO: 108534 - DNA, 25 bp, SARS Virus
agttatcactctattaataaattcg

SEQ ID NO: 108535 - DNA, 25 bp, SARS Virus
gttatcactctgataataaattcgg

SEQ ID NO: 108536 - DNA, 25 bp, SARS Virus
ttatcactctgtaaataaattcgga

SEQ ID NO: 108537 - DNA, 25 bp, SARS Virus
tatcactctgttaataaattcggag

SEQ ID NO: 108538 - DNA, 25 bp, SARS Virus
atcactctgttaataaattcggaga

SEQ ID NO: 108539 - DNA, 25 bp, SARS Virus
tcactctgttaaaaaattcggagat

SEQ ID NO: 108540 - DNA, 25 bp, SARS Virus
cactctgttaataaattcggagatt

SEQ ID NO: 108541 - DNA, 25 bp, SARS Virus
actctgttaataaattcggagattg

SEQ ID NO: 108542 - DNA, 25 bp, SARS Virus
ctctgttaataaattcggagattga

SEQ ID NO: 108543 - DNA, 25 bp, SARS Virus
tctgttaataaaatcggagattgat

SEQ ID NO: 108544 - DNA, 25 bp, SARS Virus
ctgttaataaatacggagattgatt

SEQ ID NO: 108545 - DNA, 25 bp, SARS Virus
tgttaataaattaggagattgattc

SEQ ID NO: 108546 - DNA, 25 bp, SARS Virus
gttaataaattcagagattgattct

SEQ ID NO: 108547 - DNA, 25 bp, SARS Virus
ttaataaattcgaagattgattctt

SEQ ID NO: 108548 - DNA, 25 bp, SARS Virus
taataaattcggagattgattcttc

SEQ ID NO: 108549 - DNA, 25 bp, SARS Virus
aataaattcggaaattgattcttct

SEQ ID NO: 108550 - DNA, 25 bp, SARS Virus
ataaattcggagattgattcttctt

SEQ ID NO: 108551 - DNA, 25 bp, SARS Virus
taaattcggagaatgattcttctta

SEQ ID NO: 108552 - DNA, 25 bp, SARS Virus
aaattcggagatagattcttcttaa

SEQ ID NO: 108553 - DNA, 25 bp, SARS Virus
aattcggagattaattcttcttaat

SEQ ID NO: 108554 - DNA, 25 bp, SARS Virus
attcggagattgattcttcttaata

SEQ ID NO: 108555 - DNA, 25 bp, SARS Virus
ttcggagattgaatcttcttaataa

SEQ ID NO: 108556 - DNA, 25 bp, SARS Virus
tcggagattgatacttcttaataag

SEQ ID NO: 108557 - DNA, 25 bp, SARS Virus
cggagattgattattcttaataagc

SEQ ID NO: 108558 - DNA, 25 bp, SARS Virus
ggagattgattcatcttaataagcc

SEQ ID NO: 108559 - DNA, 25 bp, SARS Virus
gagattgattctacttaataagcct

SEQ ID NO: 108560 - DNA, 25 bp, SARS Virus
agattgattcttattaataagcctc

SEQ ID NO: 108561 - DNA, 25 bp, SARS Virus
gattgattcttcataataagcctca

SEQ ID NO: 108562 - DNA, 25 bp, SARS Virus
attgattcttctaaataagcctcaa

SEQ ID NO: 108563 - DNA, 25 bp, SARS Virus
ttgattcttcttaataagcctcaat

SEQ ID NO: 108564 - DNA, 25 bp, SARS Virus
tgattcttcttaataagcctcaatc

SEQ ID NO: 108565 - DNA, 25 bp, SARS Virus
gattcttcttaaaaagcctcaatct

SEQ ID NO: 108566 - DNA, 25 bp, SARS Virus
attcttcttaataagcctcaatcta

SEQ ID NO: 108567 - DNA, 25 bp, SARS Virus
ttcttcttaataagcctcaatctac

SEQ ID NO: 108568 - DNA, 25 bp, SARS Virus
tcttcttaataaacctcaatctact

SEQ ID NO: 108569 - DNA, 25 bp, SARS Virus
cttcttaataagactcaatctacta

SEQ ID NO: 108570 - DNA, 25 bp, SARS Virus
ttcttaataagcatcaatctactac

SEQ ID NO: 108571 - DNA, 25 bp, SARS Virus
tcttaataagccacaatctactact

SEQ ID NO: 108572 - DNA, 25 bp, SARS Virus
cttaataagcctaaatctactactt

SEQ ID NO: 108573 - DNA, 25 bp, SARS Virus
ttaataagcctcaatctactacttc

SEQ ID NO: 108574 - DNA, 25 bp, SARS Virus
taataagcctcaatctactacttct

SEQ ID NO: 108575 - DNA, 25 bp, SARS Virus
aataagcctcaaactactacttctt

SEQ ID NO: 108576 - DNA, 25 bp, SARS Virus
ataagcctcaatatactacttcttg

SEQ ID NO: 108577 - DNA, 25 bp, SARS Virus
taagcctcaatcaactacttcttgg

SEQ ID NO: 108578 - DNA, 25 bp, SARS Virus
aagcctcaatctactacttcttgga

SEQ ID NO: 108579 - DNA, 25 bp, SARS Virus
agcctcaatctaatacttcttggat

SEQ ID NO: 108580 - DNA, 25 bp, SARS Virus
gcctcaatctacaacttcttggata

SEQ ID NO: 108581 - DNA, 25 bp, SARS Virus
cctcaatctactacttcttggatac

SEQ ID NO: 108582 - DNA, 25 bp, SARS Virus
ctcaatctactaattcttggatacc

SEQ ID NO: 108583 - DNA, 25 bp, SARS Virus
tcaatctactacatcttggatacct

SEQ ID NO: 108584 - DNA, 25 bp, SARS Virus
caatctactactacttggatacctc

SEQ ID NO: 108585 - DNA, 25 bp, SARS Virus
aatctactacttattggatacctca

SEQ ID NO: 108586 - DNA, 25 bp, SARS Virus
atctactacttcatggatacctcaa

SEQ ID NO: 108587 - DNA, 25 bp, SARS Virus
tctactacttctaggatacctcaat

SEQ ID NO: 108588 - DNA, 25 bp, SARS Virus
ctactacttcttagatacctcaatc

SEQ ID NO: 108589 - DNA, 25 bp, SARS Virus
tactacttcttgaatacctcaatct

SEQ ID NO: 108590 - DNA, 25 bp, SARS Virus
actacttcttggatacctcaatcta

SEQ ID NO: 108591 - DNA, 25 bp, SARS Virus
ctacttcttggaaacctcaatctaa

SEQ ID NO: 108592 - DNA, 25 bp, SARS Virus
tacttcttggatacctcaatctaat

SEQ ID NO: 108593 - DNA, 25 bp, SARS Virus
acttcttggataactcaatctaata

SEQ ID NO: 108594 - DNA, 25 bp, SARS Virus
cttcttggatacatcaatctaatag

SEQ ID NO: 108595 - DNA, 25 bp, SARS Virus
ttcttggataccacaatctaatagg

SEQ ID NO: 108596 - DNA, 25 bp, SARS Virus
tcttggatacctaaatctaataggt

SEQ ID NO: 108597 - DNA, 25 bp, SARS Virus
cttggatacctcaatctaataggta

SEQ ID NO: 108598 - DNA, 25 bp, SARS Virus
ttggatacctcaatctaataggtat

SEQ ID NO: 108599 - DNA, 25 bp, SARS Virus
tggatacctcaaactaataggtatt

SEQ ID NO: 108600 - DNA, 25 bp, SARS Virus
ggatacctcaatataataggtattt

SEQ ID NO: 108601 - DNA, 25 bp, SARS Virus
gatacctcaatcaaataggtatttt

SEQ ID NO: 108602 - DNA, 25 bp, SARS Virus
atacctcaatctaataggtattttg

SEQ ID NO: 108603 - DNA, 25 bp, SARS Virus
tacctcaatctaataggtattttgc

SEQ ID NO: 108604 - DNA, 25 bp, SARS Virus
acctcaatctaaaaggtattttgct

SEQ ID NO: 108605 - DNA, 25 bp, SARS Virus
cctcaatctaataggtattttgctt

SEQ ID NO: 108606 - DNA, 25 bp, SARS Virus
ctcaatctaataagtattttgcttg

SEQ ID NO: 108607 - DNA, 25 bp, SARS Virus
tcaatctaatagatattttgcttgt

SEQ ID NO: 108608 - DNA, 25 bp, SARS Virus
caatctaataggaattttgcttgta

SEQ ID NO: 108609 - DNA, 25 bp, SARS Virus
aatctaataggtattttgcttgtac

SEQ ID NO: 108610 - DNA, 25 bp, SARS Virus
atctaataggtaatttgcttgtact

SEQ ID NO: 108611 - DNA, 25 bp, SARS Virus
tctaataggtatattgcttgtactt

SEQ ID NO: 108612 - DNA, 25 bp, SARS Virus
ctaataggtattatgcttgtacttt

SEQ ID NO: 108613 - DNA, 25 bp, SARS Virus
taataggtatttagcttgtactttt

SEQ ID NO: 108614 - DNA, 25 bp, SARS Virus
aataggtattttacttgtactttta

SEQ ID NO: 108615 - DNA, 25 bp, SARS Virus
ataggtattttgattgtacttttaa

SEQ ID NO: 108616 - DNA, 25 bp, SARS Virus
taggtattttgcatgtacttttaat

SEQ ID NO: 108617 - DNA, 25 bp, SARS Virus
aggtattttgctagtacttttaata

SEQ ID NO: 108618 - DNA, 25 bp, SARS Virus
ggtattttgcttatacttttaataa

SEQ ID NO: 108619 - DNA, 25 bp, SARS Virus
gtattttgcttgaacttttaataag

SEQ ID NO: 108620 - DNA, 25 bp, SARS Virus
tattttgcttgtacttttaataaga

SEQ ID NO: 108621 - DNA, 25 bp, SARS Virus
attttgcttgtaattttaataagag

SEQ ID NO: 108622 - DNA, 25 bp, SARS Virus
ttttgcttgtacatttaataagaga

SEQ ID NO: 108623 - DNA, 25 bp, SARS Virus
tttgcttgtactattaataagagaa

SEQ ID NO: 108624 - DNA, 25 bp, SARS Virus
ttgcttgtacttataataagagaag

SEQ ID NO: 108625 - DNA, 25 bp, SARS Virus
tgcttgtactttaaataagagaagg

SEQ ID NO: 108626 - DNA, 25 bp, SARS Virus
gcttgtacttttaataagagaagga

SEQ ID NO: 108627 - DNA, 25 bp, SARS Virus
cttgtacttttaataagagaaggac

SEQ ID NO: 108628 - DNA, 25 bp, SARS Virus
ttgtacttttaaaaagagaaggact

SEQ ID NO: 108629 - DNA, 25 bp, SARS Virus
tgtacttttaataagagaaggactg

SEQ ID NO: 108630 - DNA, 25 bp, SARS Virus
gtacttttaataagagaaggactgt

SEQ ID NO: 108631 - DNA, 25 bp, SARS Virus
tacttttaataaaagaaggactgta

SEQ ID NO: 108632 - DNA, 25 bp, SARS Virus
acttttaataagagaaggactgtaa

SEQ ID NO: 108633 - DNA, 25 bp, SARS Virus
cttttaataagaaaaggactgtaac

SEQ ID NO: 108634 - DNA, 25 bp, SARS Virus
ttttaataagagaaggactgtaact

SEQ ID NO: 108635 - DNA, 25 bp, SARS Virus
tttaataagagaaggactgtaacta

SEQ ID NO: 108636 - DNA, 25 bp, SARS Virus
ttaataagagaaagactgtaactaa

SEQ ID NO: 108637 - DNA, 25 bp, SARS Virus
taataagagaagaactgtaactaac

SEQ ID NO: 108638 - DNA, 25 bp, SARS Virus
aataagagaaggactgtaactaaca

SEQ ID NO: 108639 - DNA, 25 bp, SARS Virus
ataagagaaggaatgtaactaacat

SEQ ID NO: 108640 - DNA, 25 bp, SARS Virus
taagagaaggacagtaactaacata

SEQ ID NO: 108641 - DNA, 25 bp, SARS Virus
aagagaaggactataactaacataa

SEQ ID NO: 108642 - DNA, 25 bp, SARS Virus
agagaaggactgaaactaacataaa

SEQ ID NO: 108643 - DNA, 25 bp, SARS Virus
gagaaggactgtaactaacataaat

SEQ ID NO: 108644 - DNA, 25 bp, SARS Virus
agaaggactgtaactaacataaatg

SEQ ID NO: 108645 - DNA, 25 bp, SARS Virus
gaaggactgtaaataacataaatgt

SEQ ID NO: 108646 - DNA, 25 bp, SARS Virus
aaggactgtaacaaacataaatgta

SEQ ID NO: 108647 - DNA, 25 bp, SARS Virus
aggactgtaactaacataaatgtag

SEQ ID NO: 108648 - DNA, 25 bp, SARS Virus
ggactgtaactaacataaatgtaga

SEQ ID NO: 108649 - DNA, 25 bp, SARS Virus
gactgtaactaaaataaatgtagaa

SEQ ID NO: 108650 - DNA, 25 bp, SARS Virus
actgtaactaacataaatgtagaac

SEQ ID NO: 108651 - DNA, 25 bp, SARS Virus
ctgtaactaacaaaaatgtagaacg

SEQ ID NO: 108652 - DNA, 25 bp, SARS Virus
tgtaactaacataaatgtagaacgc

SEQ ID NO: 108653 - DNA, 25 bp, SARS Virus
gtaactaacataaatgtagaacgct

SEQ ID NO: 108654 - DNA, 25 bp, SARS Virus
taactaacataaatgtagaacgctc

SEQ ID NO: 108655 - DNA, 25 bp, SARS Virus
aactaacataaaagtagaacgctcg

SEQ ID NO: 108656 - DNA, 25 bp, SARS Virus
actaacataaatatagaacgctcga

SEQ ID NO: 108657 - DNA, 25 bp, SARS Virus
ctaacataaatgaagaacgctcgat

SEQ ID NO: 108658 - DNA, 25 bp, SARS Virus
taacataaatgtagaacgctcgata

SEQ ID NO: 108659 - DNA, 25 bp, SARS Virus
aacataaatgtaaaacgctcgatat

SEQ ID NO: 108660 - DNA, 25 bp, SARS Virus
acataaatgtagaacgctcgatata

SEQ ID NO: 108661 - DNA, 25 bp, SARS Virus
cataaatgtagaacgctcgatatag

SEQ ID NO: 108662 - DNA, 25 bp, SARS Virus
ataaatgtagaaagctcgatatagt

SEQ ID NO: 108663 - DNA, 25 bp, SARS Virus
taaatgtagaacactcgatatagtg

SEQ ID NO: 108664 - DNA, 25 bp, SARS Virus
aaatgtagaacgatcgatatagtga

SEQ ID NO: 108665 - DNA, 25 bp, SARS Virus
aatgtagaacgcacgatatagtgat

SEQ ID NO: 108666 - DNA, 25 bp, SARS Virus
atgtagaacgctagatatagtgata

SEQ ID NO: 108667 - DNA, 25 bp, SARS Virus
tgtagaacgctcaatatagtgatag

SEQ ID NO: 108668 - DNA, 25 bp, SARS Virus
gtagaacgctcgatatagtgatagt

SEQ ID NO: 108669 - DNA, 25 bp, SARS Virus
tagaacgctcgaaatagtgatagtc

SEQ ID NO: 108670 - DNA, 25 bp, SARS Virus
agaacgctcgatatagtgatagtcc

SEQ ID NO: 108671 - DNA, 25 bp, SARS Virus
gaacgctcgataaagtgatagtcct

SEQ ID NO: 108672 - DNA, 25 bp, SARS Virus
aacgctcgatatagtgatagtcctc

SEQ ID NO: 108673 - DNA, 25 bp, SARS Virus
acgctcgatataatgatagtcctca

SEQ ID NO: 108674 - DNA, 25 bp, SARS Virus
cgctcgatatagagatagtcctcac

SEQ ID NO: 108675 - DNA, 25 bp, SARS Virus
gctcgatatagtaatagtcctcaca

SEQ ID NO: 108676 - DNA, 25 bp, SARS Virus
ctcgatatagtgatagtcctcacac

SEQ ID NO: 108677 - DNA, 25 bp, SARS Virus
tcgatatagtgaaagtcctcacaca

SEQ ID NO: 108678 - DNA, 25 bp, SARS Virus
cgatatagtgatagtcctcacacaa

SEQ ID NO: 108679 - DNA, 25 bp, SARS Virus
gatatagtgataatcctcacacaat

SEQ ID NO: 108680 - DNA, 25 bp, SARS Virus
atatagtgatagacctcacacaatc

SEQ ID NO: 108681 - DNA, 25 bp, SARS Virus
tatagtgatagtactcacacaatct

SEQ ID NO: 108682 - DNA, 25 bp, SARS Virus
atagtgatagtcatcacacaatctc

SEQ ID NO: 108683 - DNA, 25 bp, SARS Virus
tagtgatagtccacacacaatctcc

SEQ ID NO: 108684 - DNA, 25 bp, SARS Virus
agtgatagtcctaacacaatctcca

SEQ ID NO: 108685 - DNA, 25 bp, SARS Virus
gtgatagtcctcacacaatctccat

SEQ ID NO: 108686 - DNA, 25 bp, SARS Virus
tgatagtcctcaaacaatctccatg

SEQ ID NO: 108687 - DNA, 25 bp, SARS Virus
gatagtcctcacacaatctccatgc

SEQ ID NO: 108688 - DNA, 25 bp, SARS Virus
atagtcctcacaaaatctccatgct

SEQ ID NO: 108689 - DNA, 25 bp, SARS Virus
tagtcctcacacaatctccatgctg

SEQ ID NO: 108690 - DNA, 25 bp, SARS Virus
agtcctcacacaatctccatgctga

SEQ ID NO: 108691 - DNA, 25 bp, SARS Virus
gtcctcacacaaactccatgctgac

SEQ ID NO: 108692 - DNA, 25 bp, SARS Virus
tcctcacacaatatccatgctgaca

SEQ ID NO: 108693 - DNA, 25 bp, SARS Virus
cctcacacaatcaccatgctgacat

SEQ ID NO: 108694 - DNA, 25 bp, SARS Virus
ctcacacaatctacatgctgacatg

SEQ ID NO: 108695 - DNA, 25 bp, SARS Virus
tcacacaatctcaatgctgacatga

SEQ ID NO: 108696 - DNA, 25 bp, SARS Virus
cacacaatctccatgctgacatgat

SEQ ID NO: 108697 - DNA, 25 bp, SARS Virus
acacaatctccaagctgacatgatg

SEQ ID NO: 108698 - DNA, 25 bp, SARS Virus
cacaatctccatactgacatgatga

SEQ ID NO: 108699 - DNA, 25 bp, SARS Virus
acaatctccatgatgacatgatgat

SEQ ID NO: 108700 - DNA, 25 bp, SARS Virus
caatctccatgcagacatgatgatt

SEQ ID NO: 108701 - DNA, 25 bp, SARS Virus
aatctccatgctaacatgatgattt

SEQ ID NO: 108702 - DNA, 25 bp, SARS Virus
atctccatgctgacatgatgatttt

SEQ ID NO: 108703 - DNA, 25 bp, SARS Virus
tctccatgctgaaatgatgattttc

SEQ ID NO: 108704 - DNA, 25 bp, SARS Virus
ctccatgctgacatgatgattttct

SEQ ID NO: 108705 - DNA, 25 bp, SARS Virus
tccatgctgacaagatgattttctt

SEQ ID NO: 108706 - DNA, 25 bp, SARS Virus
ccatgctgacataatgattttcttg

SEQ ID NO: 108707 - DNA, 25 bp, SARS Virus
catgctgacatgatgattttcttgg

SEQ ID NO: 108708 - DNA, 25 bp, SARS Virus
atgctgacatgaagattttcttgga

SEQ ID NO: 108709 - DNA, 25 bp, SARS Virus
tgctgacatgataattttcttggaa

SEQ ID NO: 108710 - DNA, 25 bp, SARS Virus
gctgacatgatgattttcttggaac

SEQ ID NO: 108711 - DNA, 25 bp, SARS Virus
ctgacatgatgaatttcttggaacg

SEQ ID NO: 108712 - DNA, 25 bp, SARS Virus
tgacatgatgatattcttggaacgg

SEQ ID NO: 108713 - DNA, 25 bp, SARS Virus
gacatgatgattatcttggaacggg

SEQ ID NO: 108714 - DNA, 25 bp, SARS Virus
acatgatgatttacttggaacgggt

SEQ ID NO: 108715 - DNA, 25 bp, SARS Virus
catgatgattttattggaacgggta

SEQ ID NO: 108716 - DNA, 25 bp, SARS Virus
atgatgattttcatggaacgggtag

SEQ ID NO: 108717 - DNA, 25 bp, SARS Virus
tgatgattttctaggaacgggtagt

SEQ ID NO: 108718 - DNA, 25 bp, SARS Virus
gatgattttcttagaacgggtagtc

SEQ ID NO: 108719 - DNA, 25 bp, SARS Virus
atgattttcttgaaacgggtagtcc

SEQ ID NO: 108720 - DNA, 25 bp, SARS Virus
tgattttcttggaacgggtagtcct

SEQ ID NO: 108721 - DNA, 25 bp, SARS Virus
gattttcttggaacgggtagtcctt

SEQ ID NO: 108722 - DNA, 25 bp, SARS Virus
attttcttggaaagggtagtccttg

SEQ ID NO: 108723 - DNA, 25 bp, SARS Virus
ttttcttggaacaggtagtccttgt

SEQ ID NO: 108724 - DNA, 25 bp, SARS Virus
tttcttggaacgagtagtccttgta

SEQ ID NO: 108725 - DNA, 25 bp, SARS Virus
ttcttggaacggatagtccttgtat

SEQ ID NO: 108726 - DNA, 25 bp, SARS Virus
tcttggaacgggaagtccttgtatg

SEQ ID NO: 108727 - DNA, 25 bp, SARS Virus
cttggaacgggtagtccttgtatgc

SEQ ID NO: 108728 - DNA, 25 bp, SARS Virus
ttggaacgggtaatccttgtatgct

SEQ ID NO: 108729 - DNA, 25 bp, SARS Virus
tggaacgggtagaccttgtatgctc

SEQ ID NO: 108730 - DNA, 25 bp, SARS Virus
ggaacgggtagtacttgtatgctcc

SEQ ID NO: 108731 - DNA, 25 bp, SARS Virus
gaacgggtagtcattgtatgctccc

SEQ ID NO: 108732 - DNA, 25 bp, SARS Virus
aacgggtagtccatgtatgctcccg

SEQ ID NO: 108733 - DNA, 25 bp, SARS Virus
acgggtagtcctagtatgctcccgt

SEQ ID NO: 108734 - DNA, 25 bp, SARS Virus
cgggtagtccttatatgctcccgtt

SEQ ID NO: 108735 - DNA, 25 bp, SARS Virus
gggtagtccttgaatgctcccgtta

SEQ ID NO: 108736 - DNA, 25 bp, SARS Virus
ggtagtccttgtatgctcccgttaa

SEQ ID NO: 108737 - DNA, 25 bp, SARS Virus
gtagtccttgtaagctcccgttaag

SEQ ID NO: 108738 - DNA, 25 bp, SARS Virus
tagtccttgtatactcccgttaagt

SEQ ID NO: 108739 - DNA, 25 bp, SARS Virus
agtccttgtatgatcccgttaagtg

SEQ ID NO: 108740 - DNA, 25 bp, SARS Virus
gtccttgtatgcacccgttaagtgg

SEQ ID NO: 108741 - DNA, 25 bp, SARS Virus
tccttgtatgctaccgttaagtggt

SEQ ID NO: 108742 - DNA, 25 bp, SARS Virus
ccttgtatgctcacgttaagtggta

SEQ ID NO: 108743 - DNA, 25 bp, SARS Virus
cttgtatgctccagttaagtggtaa

SEQ ID NO: 108744 - DNA, 25 bp, SARS Virus
ttgtatgctcccattaagtggtaaa

SEQ ID NO: 108745 - DNA, 25 bp, SARS Virus
tgtatgctcccgataagtggtaaag

SEQ ID NO: 108746 - DNA, 25 bp, SARS Virus
gtatgctcccgtaaagtggtaaagt

SEQ ID NO: 108747 - DNA, 25 bp, SARS Virus
tatgctcccgttaagtggtaaagtg

SEQ ID NO: 108748 - DNA, 25 bp, SARS Virus
atgctcccgttaagtggtaaagtgg

SEQ ID NO: 108749 - DNA, 25 bp, SARS Virus
tgctcccgttaaatggtaaagtggg

SEQ ID NO: 108750 - DNA, 25 bp, SARS Virus
gctcccgttaagaggtaaagtggga

SEQ ID NO: 108751 - DNA, 25 bp, SARS Virus
ctcccgttaagtagtaaagtgggag

SEQ ID NO: 108752 - DNA, 25 bp, SARS Virus
tcccgttaagtgataaagtgggaga

SEQ ID NO: 108753 - DNA, 25 bp, SARS Virus
cccgttaagtggaaaagtgggagaa

SEQ ID NO: 108754 - DNA, 25 bp, SARS Virus
ccgttaagtggtaaagtgggagaac

SEQ ID NO: 108755 - DNA, 25 bp, SARS Virus
cgttaagtggtaaagtgggagaacg

SEQ ID NO: 108756 - DNA, 25 bp, SARS Virus
gttaagtggtaaagtgggagaacga

SEQ ID NO: 108757 - DNA, 25 bp, SARS Virus
ttaagtggtaaaatgggagaacgac

SEQ ID NO: 108758 - DNA, 25 bp, SARS Virus
taagtggtaaagagggagaacgact

SEQ ID NO: 108759 - DNA, 25 bp, SARS Virus
aagtggtaaagtaggagaacgactg

SEQ ID NO: 108760 - DNA, 25 bp, SARS Virus
agtggtaaagtgagagaacgactgt

SEQ ID NO: 108761 - DNA, 25 bp, SARS Virus
gtggtaaagtggaagaacgactgtt

SEQ ID NO: 108762 - DNA, 25 bp, SARS Virus
tggtaaagtgggagaacgactgtta

SEQ ID NO: 108763 - DNA, 25 bp, SARS Virus
ggtaaagtgggaaaacgactgttat

SEQ ID NO: 108764 - DNA, 25 bp, SARS Virus
gtaaagtgggagaacgactgttatt

SEQ ID NO: 108765 - DNA, 25 bp, SARS Virus
taaagtgggagaacgactgttattt

SEQ ID NO: 108766 - DNA, 25 bp, SARS Virus
aaagtgggagaaagactgttattta

SEQ ID NO: 108767 - DNA, 25 bp, SARS Virus
aagtgggagaacaactgttatttaa

SEQ ID NO: 108768 - DNA, 25 bp, SARS Virus
agtgggagaacgactgttatttaaa

SEQ ID NO: 108769 - DNA, 25 bp, SARS Virus
gtgggagaacgaatgttatttaaac

SEQ ID NO: 108770 - DNA, 25 bp, SARS Virus
tgggagaacgacagttatttaaacg

SEQ ID NO: 108771 - DNA, 25 bp, SARS Virus
gggagaacgactattatttaaacgt

SEQ ID NO: 108772 - DNA, 25 bp, SARS Virus
ggagaacgactgatatttaaacgtg

SEQ ID NO: 108773 - DNA, 25 bp, SARS Virus
gagaacgactgtaatttaaacgtga

SEQ ID NO: 108774 - DNA, 25 bp, SARS Virus
agaacgactgttatttaaacgtgat

SEQ ID NO: 108775 - DNA, 25 bp, SARS Virus
gaacgactgttaattaaacgtgatt

SEQ ID NO: 108776 - DNA, 25 bp, SARS Virus
aacgactgttatataaacgtgattg

SEQ ID NO: 108777 - DNA, 25 bp, SARS Virus
acgactgttattaaaacgtgattga

SEQ ID NO: 108778 - DNA, 25 bp, SARS Virus
cgactgttatttaaacgtgattgaa

SEQ ID NO: 108779 - DNA, 25 bp, SARS Virus
gactgttatttaaacgtgattgaac

SEQ ID NO: 108780 - DNA, 25 bp, SARS Virus
actgttatttaaacgtgattgaacg

SEQ ID NO: 108781 - DNA, 25 bp, SARS Virus
ctgttatttaaaagtgattgaacgt

SEQ ID NO: 108782 - DNA, 25 bp, SARS Virus
tgttatttaaacatgattgaacgtg

SEQ ID NO: 108783 - DNA, 25 bp, SARS Virus
gttatttaaacgagattgaacgtga

SEQ ID NO: 108784 - DNA, 25 bp, SARS Virus
ttatttaaacgtaattgaacgtgat

SEQ ID NO: 108785 - DNA, 25 bp, SARS Virus
tatttaaacgtgattgaacgtgatc

SEQ ID NO: 108786 - DNA, 25 bp, SARS Virus
atttaaacgtgaatgaacgtgatcg

SEQ ID NO: 108787 - DNA, 25 bp, SARS Virus
tttaaacgtgatagaacgtgatcgt

SEQ ID NO: 108788 - DNA, 25 bp, SARS Virus
ttaaacgtgattaaacgtgatcgtg

SEQ ID NO: 108789 - DNA, 25 bp, SARS Virus
taaacgtgattgaacgtgatcgtgt

SEQ ID NO: 108790 - DNA, 25 bp, SARS Virus
aaacgtgattgaacgtgatcgtgtg

SEQ ID NO: 108791 - DNA, 25 bp, SARS Virus
aacgtgattgaaagtgatcgtgtgt

SEQ ID NO: 108792 - DNA, 25 bp, SARS Virus
acgtgattgaacatgatcgtgtgtg

SEQ ID NO: 108793 - DNA, 25 bp, SARS Virus
cgtgattgaacgagatcgtgtgtga

SEQ ID NO: 108794 - DNA, 25 bp, SARS Virus
gtgattgaacgtaatcgtgtgtgaa

SEQ ID NO: 108795 - DNA, 25 bp, SARS Virus
tgattgaacgtgatcgtgtgtgaaa

SEQ ID NO: 108796 - DNA, 25 bp, SARS Virus
gattgaacgtgaacgtgtgtgaaac

SEQ ID NO: 108797 - DNA, 25 bp, SARS Virus
attgaacgtgatagtgtgtgaaacg

SEQ ID NO: 108798 - DNA, 25 bp, SARS Virus
ttgaacgtgatcatgtgtgaaacga

SEQ ID NO: 108799 - DNA, 25 bp, SARS Virus
tgaacgtgatcgagtgtgaaacgaa

SEQ ID NO: 108800 - DNA, 25 bp, SARS Virus
gaacgtgatcgtatgtgaaacgaaa

SEQ ID NO: 108801 - DNA, 25 bp, SARS Virus
aacgtgatcgtgagtgaaacgaaaa

SEQ ID NO: 108802 - DNA, 25 bp, SARS Virus
acgtgatcgtgtatgaaacgaaaac

SEQ ID NO: 108803 - DNA, 25 bp, SARS Virus
cgtgatcgtgtgagaaacgaaaacg

SEQ ID NO: 108804 - DNA, 25 bp, SARS Virus
gtgatcgtgtgtaaaacgaaaacga

SEQ ID NO: 108805 - DNA, 25 bp, SARS Virus
tgatcgtgtgtgaaacgaaaacgaa

SEQ ID NO: 108806 - DNA, 25 bp, SARS Virus
gatcgtgtgtgaaacgaaaacgaac

SEQ ID NO: 108807 - DNA, 25 bp, SARS Virus
atcgtgtgtgaaacgaaaacgaaca

SEQ ID NO: 108808 - DNA, 25 bp, SARS Virus
tcgtgtgtgaaaagaaaacgaacac

SEQ ID NO: 108809 - DNA, 25 bp, SARS Virus
cgtgtgtgaaacaaaaacgaacacg

SEQ ID NO: 108810 - DNA, 25 bp, SARS Virus
gtgtgtgaaacgaaaacgaacacga

SEQ ID NO: 108811 - DNA, 25 bp, SARS Virus
tgtgtgaaacgaaaacgaacacgac

SEQ ID NO: 108812 - DNA, 25 bp, SARS Virus
gtgtgaaacgaaaacgaacacgact

SEQ ID NO: 108813 - DNA, 25 bp, SARS Virus
tgtgaaacgaaaacgaacacgactg

SEQ ID NO: 108814 - DNA, 25 bp, SARS Virus
gtgaaacgaaaaagaacacgactgc

SEQ ID NO: 108815 - DNA, 25 bp, SARS Virus
tgaaacgaaaacaaacacgactgcc

SEQ ID NO: 108816 - DNA, 25 bp, SARS Virus
gaaacgaaaacgaacacgactgcca

SEQ ID NO: 108817 - DNA, 25 bp, SARS Virus
aaacgaaaacgaacacgactgccat

SEQ ID NO: 108818 - DNA, 25 bp, SARS Virus
aacgaaaacgaaaacgactgccatg

SEQ ID NO: 108819 - DNA, 25 bp, SARS Virus
acgaaaacgaacacgactgccatga

SEQ ID NO: 108820 - DNA, 25 bp, SARS Virus
cgaaaacgaacaagactgccatgag

SEQ ID NO: 108821 - DNA, 25 bp, SARS Virus
gaaaacgaacacaactgccatgagc

SEQ ID NO: 108822 - DNA, 25 bp, SARS Virus
aaaacgaacacgactgccatgagct

SEQ ID NO: 108823 - DNA, 25 bp, SARS Virus
aaacgaacacgaatgccatgagctg

SEQ ID NO: 108824 - DNA, 25 bp, SARS Virus
aacgaacacgacagccatgagctgt

SEQ ID NO: 108825 - DNA, 25 bp, SARS Virus
acgaacacgactaccatgagctgta

SEQ ID NO: 108826 - DNA, 25 bp, SARS Virus
cgaacacgactgacatgagctgtat

SEQ ID NO: 108827 - DNA, 25 bp, SARS Virus
gaacacgactgcaatgagctgtatg

SEQ ID NO: 108828 - DNA, 25 bp, SARS Virus
aacacgactgccatgagctgtatgg

SEQ ID NO: 108829 - DNA, 25 bp, SARS Virus
acacgactgccaagagctgtatgga

SEQ ID NO: 108830 - DNA, 25 bp, SARS Virus
cacgactgccataagctgtatggat

SEQ ID NO: 108831 - DNA, 25 bp, SARS Virus
acgactgccatgagctgtatggata

SEQ ID NO: 108832 - DNA, 25 bp, SARS Virus
cgactgccatgaactgtatggatag

SEQ ID NO: 108833 - DNA, 25 bp, SARS Virus
gactgccatgagatgtatggatagt

SEQ ID NO: 108834 - DNA, 25 bp, SARS Virus
actgccatgagcagtatggatagtc

SEQ ID NO: 108835 - DNA, 25 bp, SARS Virus
ctgccatgagctatatggatagtcg

SEQ ID NO: 108836 - DNA, 25 bp, SARS Virus
tgccatgagctgaatggatagtcga

SEQ ID NO: 108837 - DNA, 25 bp, SARS Virus
gccatgagctgtatggatagtcgac

SEQ ID NO: 108838 - DNA, 25 bp, SARS Virus
ccatgagctgtaaggatagtcgacg

SEQ ID NO: 108839 - DNA, 25 bp, SARS Virus
catgagctgtatagatagtcgacgc

SEQ ID NO: 108840 - DNA, 25 bp, SARS Virus
atgagctgtatgaatagtcgacgca

SEQ ID NO: 108841 - DNA, 25 bp, SARS Virus
tgagctgtatggatagtcgacgcac

SEQ ID NO: 108842 - DNA, 25 bp, SARS Virus
gagctgtatggaaagtcgacgcacg

SEQ ID NO: 108843 - DNA, 25 bp, SARS Virus
agctgtatggatagtcgacgcacgt

SEQ ID NO: 108844 - DNA, 25 bp, SARS Virus
gctgtatggataatcgacgcacgtt

SEQ ID NO: 108845 - DNA, 25 bp, SARS Virus
ctgtatggatagacgacgcacgttc

SEQ ID NO: 108846 - DNA, 25 bp, SARS Virus
tgtatggatagtagacgcacgttct

SEQ ID NO: 108847 - DNA, 25 bp, SARS Virus
gtatggatagtcaacgcacgttcta

SEQ ID NO: 108848 - DNA, 25 bp, SARS Virus
tatggatagtcgacgcacgttctag

SEQ ID NO: 108849 - DNA, 25 bp, SARS Virus
atggatagtcgaagcacgttctagt

SEQ ID NO: 108850 - DNA, 25 bp, SARS Virus
tggatagtcgacacacgttctagtc

SEQ ID NO: 108851 - DNA, 25 bp, SARS Virus
ggatagtcgacgaacgttctagtca

SEQ ID NO: 108852 - DNA, 25 bp, SARS Virus
gatagtcgacgcacgttctagtcaa

SEQ ID NO: 108853 - DNA, 25 bp, SARS Virus
atagtcgacgcaagttctagtcaaa

SEQ ID NO: 108854 - DNA, 25 bp, SARS Virus
tagtcgacgcacattctagtcaaag

SEQ ID NO: 108855 - DNA, 25 bp, SARS Virus
agtcgacgcacgatctagtcaaagt

SEQ ID NO: 108856 - DNA, 25 bp, SARS Virus
gtcgacgcacgtactagtcaaagtg

SEQ ID NO: 108857 - DNA, 25 bp, SARS Virus
tcgacgcacgttatagtcaaagtgg

SEQ ID NO: 108858 - DNA, 25 bp, SARS Virus
cgacgcacgttcaagtcaaagtggt

SEQ ID NO: 108859 - DNA, 25 bp, SARS Virus
gacgcacgttctagtcaaagtggtt

SEQ ID NO: 108860 - DNA, 25 bp, SARS Virus
acgcacgttctaatcaaagtggttt

SEQ ID NO: 108861 - DNA, 25 bp, SARS Virus
cgcacgttctagacaaagtggtttt

SEQ ID NO: 108862 - DNA, 25 bp, SARS Virus
gcacgttctagtaaaagtggttttg

SEQ ID NO: 108863 - DNA, 25 bp, SARS Virus
cacgttctagtcaaagtggttttga

SEQ ID NO: 108864 - DNA, 25 bp, SARS Virus
acgttctagtcaaagtggttttgaa

SEQ ID NO: 108865 - DNA, 25 bp, SARS Virus
cgttctagtcaaagtggttttgaaa

SEQ ID NO: 108866 - DNA, 25 bp, SARS Virus
gttctagtcaaaatggttttgaaaa

SEQ ID NO: 108867 - DNA, 25 bp, SARS Virus
ttctagtcaaagaggttttgaaaag

SEQ ID NO: 108868 - DNA, 25 bp, SARS Virus
tctagtcaaagtagttttgaaaagt

SEQ ID NO: 108869 - DNA, 25 bp, SARS Virus
ctagtcaaagtgattttgaaaagta

SEQ ID NO: 108870 - DNA, 25 bp, SARS Virus
tagtcaaagtggatttgaaaagtag

SEQ ID NO: 108871 - DNA, 25 bp, SARS Virus
agtcaaagtggtattgaaaagtagt

SEQ ID NO: 108872 - DNA, 25 bp, SARS Virus
gtcaaagtggttatgaaaagtagtc

SEQ ID NO: 108873 - DNA, 25 bp, SARS Virus
tcaaagtggtttagaaaagtagtct

SEQ ID NO: 108874 - DNA, 25 bp, SARS Virus
caaagtggttttaaaaagtagtctg

SEQ ID NO: 108875 - DNA, 25 bp, SARS Virus
aaagtggttttgaaaagtagtctgt

SEQ ID NO: 108876 - DNA, 25 bp, SARS Virus
aagtggttttgaaaagtagtctgtt

SEQ ID NO: 108877 - DNA, 25 bp, SARS Virus
agtggttttgaaaagtagtctgttc

SEQ ID NO: 108878 - DNA, 25 bp, SARS Virus
gtggttttgaaaagtagtctgttct

SEQ ID NO: 108879 - DNA, 25 bp, SARS Virus
tggttttgaaaaatagtctgttctc

SEQ ID NO: 108880 - DNA, 25 bp, SARS Virus
ggttttgaaaagaagtctgttctcc

SEQ ID NO: 108881 - DNA, 25 bp, SARS Virus
gttttgaaaagtagtctgttctcct

SEQ ID NO: 108882 - DNA, 25 bp, SARS Virus
ttttgaaaagtaatctgttctcctc

SEQ ID NO: 108883 - DNA, 25 bp, SARS Virus
tttgaaaagtagactgttctcctcc

SEQ ID NO: 108884 - DNA, 25 bp, SARS Virus
ttgaaaagtagtatgttctcctcca

SEQ ID NO: 108885 - DNA, 25 bp, SARS Virus
tgaaaagtagtcagttctcctccaa

SEQ ID NO: 108886 - DNA, 25 bp, SARS Virus
gaaaagtagtctattctcctccaag

SEQ ID NO: 108887 - DNA, 25 bp, SARS Virus
aaaagtagtctgatctcctccaagt

SEQ ID NO: 108888 - DNA, 25 bp, SARS Virus
aaagtagtctgtactcctccaagtt

SEQ ID NO: 108889 - DNA, 25 bp, SARS Virus
aagtagtctgttatcctccaagttg

SEQ ID NO: 108890 - DNA, 25 bp, SARS Virus
agtagtctgttcacctccaagttgt

SEQ ID NO: 108891 - DNA, 25 bp, SARS Virus
gtagtctgttctactccaagttgtt

SEQ ID NO: 108892 - DNA, 25 bp, SARS Virus
tagtctgttctcatccaagttgttc

SEQ ID NO: 108893 - DNA, 25 bp, SARS Virus
agtctgttctccaccaagttgttct

SEQ ID NO: 108894 - DNA, 25 bp, SARS Virus
gtctgttctcctacaagttgttctc

SEQ ID NO: 108895 - DNA, 25 bp, SARS Virus
tctgttctcctcaaagttgttctcg

SEQ ID NO: 108896 - DNA, 25 bp, SARS Virus
ctgttctcctccaagttgttctcga

SEQ ID NO: 108897 - DNA, 25 bp, SARS Virus
tgttctcctccaagttgttctcgag

SEQ ID NO: 108898 - DNA, 25 bp, SARS Virus
gttctcctccaaattgttctcgaga

SEQ ID NO: 108899 - DNA, 25 bp, SARS Virus
ttctcctccaagatgttctcgagat

SEQ ID NO: 108900 - DNA, 25 bp, SARS Virus
tctcctccaagtagttctcgagatg

SEQ ID NO: 108901 - DNA, 25 bp, SARS Virus
ctcctccaagttattctcgagatga

SEQ ID NO: 108902 - DNA, 25 bp, SARS Virus
tcctccaagttgatctcgagatgag

SEQ ID NO: 108903 - DNA, 25 bp, SARS Virus
cctccaagttgtactcgagatgagc

SEQ ID NO: 108904 - DNA, 25 bp, SARS Virus
ctccaagttgttatcgagatgagcg

SEQ ID NO: 108905 - DNA, 25 bp, SARS Virus
tccaagttgttcacgagatgagcgg

SEQ ID NO: 108906 - DNA, 25 bp, SARS Virus
ccaagttgttctagagatgagcggt

SEQ ID NO: 108907 - DNA, 25 bp, SARS Virus
caagttgttctcaagatgagcggtg

SEQ ID NO: 108908 - DNA, 25 bp, SARS Virus
aagttgttctcgagatgagcggtga

SEQ ID NO: 108909 - DNA, 25 bp, SARS Virus
agttgttctcgaaatgagcggtgaa

SEQ ID NO: 108910 - DNA, 25 bp, SARS Virus
gttgttctcgagatgagcggtgaaa

SEQ ID NO: 108911 - DNA, 25 bp, SARS Virus
ttgttctcgagaagagcggtgaaaa

SEQ ID NO: 108912 - DNA, 25 bp, SARS Virus
tgttctcgagataagcggtgaaaaa

SEQ ID NO: 108913 - DNA, 25 bp, SARS Virus
gttctcgagatgagcggtgaaaaag

SEQ ID NO: 108914 - DNA, 25 bp, SARS Virus
ttctcgagatgaacggtgaaaaaga

SEQ ID NO: 108915 - DNA, 25 bp, SARS Virus
tctcgagatgagaggtgaaaaagag

SEQ ID NO: 108916 - DNA, 25 bp, SARS Virus
ctcgagatgagcagtgaaaaagagt

SEQ ID NO: 108917 - DNA, 25 bp, SARS Virus
tcgagatgagcgatgaaaaagagta

SEQ ID NO: 108918 - DNA, 25 bp, SARS Virus
cgagatgagcggagaaaaagagtaa

SEQ ID NO: 108919 - DNA, 25 bp, SARS Virus
gagatgagcggtaaaaaagagtaac

SEQ ID NO: 108920 - DNA, 25 bp, SARS Virus
agatgagcggtgaaaaagagtaaca

SEQ ID NO: 108921 - DNA, 25 bp, SARS Virus
gatgagcggtgaaaaagagtaacaa

SEQ ID NO: 108922 - DNA, 25 bp, SARS Virus
atgagcggtgaaaaagagtaacaac

SEQ ID NO: 108923 - DNA, 25 bp, SARS Virus
tgagcggtgaaaaagagtaacaacg

SEQ ID NO: 108924 - DNA, 25 bp, SARS Virus
gagcggtgaaaaagagtaacaacga

SEQ ID NO: 108925 - DNA, 25 bp, SARS Virus
agcggtgaaaaaaagtaacaacgac

SEQ ID NO: 108926 - DNA, 25 bp, SARS Virus
gcggtgaaaaagagtaacaacgacg

SEQ ID NO: 108927 - DNA, 25 bp, SARS Virus
cggtgaaaaagaataacaacgacga

SEQ ID NO: 108928 - DNA, 25 bp, SARS Virus
ggtgaaaaagagaaacaacgacgag

SEQ ID NO: 108929 - DNA, 25 bp, SARS Virus
gtgaaaaagagtaacaacgacgaga

SEQ ID NO: 108930 - DNA, 25 bp, SARS Virus
tgaaaaagagtaacaacgacgagat

SEQ ID NO: 108931 - DNA, 25 bp, SARS Virus
gaaaaagagtaaaaacgacgagatc

SEQ ID NO: 108932 - DNA, 25 bp, SARS Virus
aaaaagagtaacaacgacgagatca

SEQ ID NO: 108933 - DNA, 25 bp, SARS Virus
aaaagagtaacaacgacgagatcat

SEQ ID NO: 108934 - DNA, 25 bp, SARS Virus
aaagagtaacaaagacgagatcata

SEQ ID NO: 108935 - DNA, 25 bp, SARS Virus
aagagtaacaacaacgagatcataa

SEQ ID NO: 108936 - DNA, 25 bp, SARS Virus
agagtaacaacgacgagatcataaa

SEQ ID NO: 108937 - DNA, 25 bp, SARS Virus
gagtaacaacgaagagatcataaaa

SEQ ID NO: 108938 - DNA, 25 bp, SARS Virus
agtaacaacgacaagatcataaaaa

SEQ ID NO: 108939 - DNA, 25 bp, SARS Virus
gtaacaacgacgagatcataaaaat

SEQ ID NO: 108940 - DNA, 25 bp, SARS Virus
taacaacgacgaaatcataaaaatt

SEQ ID NO: 108941 - DNA, 25 bp, SARS Virus
aacaacgacgagatcataaaaatta

SEQ ID NO: 108942 - DNA, 25 bp, SARS Virus
acaacgacgagaacataaaaattat

SEQ ID NO: 108943 - DNA, 25 bp, SARS Virus
caacgacgagataataaaaattatg

SEQ ID NO: 108944 - DNA, 25 bp, SARS Virus
aacgacgagatcataaaaattatga

SEQ ID NO: 108945 - DNA, 25 bp, SARS Virus
acgacgagatcaaaaaaattatgaa

SEQ ID NO: 108946 - DNA, 25 bp, SARS Virus
cgacgagatcataaaaattatgaaa

SEQ ID NO: 108947 - DNA, 25 bp, SARS Virus
gacgagatcataaaaattatgaaac

SEQ ID NO: 108948 - DNA, 25 bp, SARS Virus
acgagatcataaaaattatgaaacg

SEQ ID NO: 108949 - DNA, 25 bp, SARS Virus
cgagatcataaaaattatgaaacga

SEQ ID NO: 108950 - DNA, 25 bp, SARS Virus
gagatcataaaaattatgaaacgaa

SEQ ID NO: 108951 - DNA, 25 bp, SARS Virus
agatcataaaaaatatgaaacgaag

SEQ ID NO: 108952 - DNA, 25 bp, SARS Virus
gatcataaaaataatgaaacgaagt

SEQ ID NO: 108953 - DNA, 25 bp, SARS Virus
cgtctctataaccaatagtaatact

SEQ ID NO: 108954 - DNA, 25 bp, SARS Virus
gtctctataactcatagtaatactc

SEQ ID NO: 108955 - DNA, 25 bp, SARS Virus
tctctataactactagtaatactcc

SEQ ID NO: 108956 - DNA, 25 bp, SARS Virus
ctctataactaacagtaatactcct

SEQ ID NO: 108957 - DNA, 25 bp, SARS Virus
tctataactaatcgtaatactcctg

SEQ ID NO: 108958 - DNA, 25 bp, SARS Virus
ctataactaatactaatactcctga

SEQ ID NO: 108959 - DNA, 25 bp, SARS Virus
tataactaatagcaatactcctgaa

SEQ ID NO: 108960 - DNA, 25 bp, SARS Virus
ataactaatagtcatactcctgaaa

SEQ ID NO: 108961 - DNA, 25 bp, SARS Virus
taactaatagtactactcctgaaag

SEQ ID NO: 108962 - DNA, 25 bp, SARS Virus
aactaatagtaacactcctgaaagt

SEQ ID NO: 108963 - DNA, 25 bp, SARS Virus
actaatagtaatcctcctgaaagtc

SEQ ID NO: 108964 - DNA, 25 bp, SARS Virus
ctaatagtaatactcctgaaagtcc

SEQ ID NO: 108965 - DNA, 25 bp, SARS Virus
taatagtaatacccctgaaagtcct

SEQ ID NO: 108966 - DNA, 25 bp, SARS Virus
aatagtaatactcctgaaagtccta

SEQ ID NO: 108967 - DNA, 25 bp, SARS Virus
atagtaatactcctgaaagtcctaa

SEQ ID NO: 108968 - DNA, 25 bp, SARS Virus
tagtaatactcccgaaagtcctaac

SEQ ID NO: 108969 - DNA, 25 bp, SARS Virus
agtaatactcctcaaagtcctaacg

SEQ ID NO: 108970 - DNA, 25 bp, SARS Virus
gtaatactcctgcaagtcctaacga

SEQ ID NO: 108971 - DNA, 25 bp, SARS Virus
taatactcctgacagtcctaacgat

SEQ ID NO: 108972 - DNA, 25 bp, SARS Virus
aatactcctgaacgtcctaacgata

SEQ ID NO: 108973 - DNA, 25 bp, SARS Virus
atactcctgaaactcctaacgataa

SEQ ID NO: 108974 - DNA, 25 bp, SARS Virus
tactcctgaaagccctaacgataaa

SEQ ID NO: 108975 - DNA, 25 bp, SARS Virus
actcctgaaagtcctaacgataaac

SEQ ID NO: 108976 - DNA, 25 bp, SARS Virus
ctcctgaaagtcctaacgataaacc

SEQ ID NO: 108977 - DNA, 25 bp, SARS Virus
tcctgaaagtcccaacgataaacct

SEQ ID NO: 108978 - DNA, 25 bp, SARS Virus
cctgaaagtcctcacgataaacctt

SEQ ID NO: 108979 - DNA, 25 bp, SARS Virus
ctgaaagtcctaccgataaacctta

SEQ ID NO: 108980 - DNA, 25 bp, SARS Virus
tgaaagtcctaacgataaaccttag

SEQ ID NO: 108981 - DNA, 25 bp, SARS Virus
gaaagtcctaaccataaaccttaga

SEQ ID NO: 108982 - DNA, 25 bp, SARS Virus
aaagtcctaacgctaaaccttagaa

SEQ ID NO: 108983 - DNA, 25 bp, SARS Virus
aagtcctaacgacaaaccttagaac

SEQ ID NO: 108984 - DNA, 25 bp, SARS Virus
agtcctaacgatcaaccttagaact

SEQ ID NO: 108985 - DNA, 25 bp, SARS Virus
gtcctaacgatacaccttagaactg

SEQ ID NO: 108986 - DNA, 25 bp, SARS Virus
tcctaacgataacccttagaactgc

SEQ ID NO: 108987 - DNA, 25 bp, SARS Virus
cctaacgataaaccttagaactgca

SEQ ID NO: 108988 - DNA, 25 bp, SARS Virus
ctaacgataaaccttagaactgcaa

SEQ ID NO: 108989 - DNA, 25 bp, SARS Virus
taacgataaaccctagaactgcaat

SEQ ID NO: 108990 - DNA, 25 bp, SARS Virus
aacgataaacctcagaactgcaata

SEQ ID NO: 108991 - DNA, 25 bp, SARS Virus
acgataaaccttcgaactgcaatat

SEQ ID NO: 108992 - DNA, 25 bp, SARS Virus
cgataaaccttacaactgcaatatt

SEQ ID NO: 108993 - DNA, 25 bp, SARS Virus
gataaaccttagcactgcaatatta

SEQ ID NO: 108994 - DNA, 25 bp, SARS Virus
ataaaccttagacctgcaatattat

SEQ ID NO: 108995 - DNA, 25 bp, SARS Virus
taaaccttagaactgcaatattatt

SEQ ID NO: 108996 - DNA, 25 bp, SARS Virus
aaaccttagaaccgcaatattattc

SEQ ID NO: 108997 - DNA, 25 bp, SARS Virus
aaccttagaactccaatattattca

SEQ ID NO: 108998 - DNA, 25 bp, SARS Virus
accttagaactgcaatattattcaa

SEQ ID NO: 108999 - DNA, 25 bp, SARS Virus
ccttagaactgccatattattcaag

SEQ ID NO: 109000 - DNA, 25 bp, SARS Virus
cttagaactgcactattattcaagt

SEQ ID NO: 109001 - DNA, 25 bp, SARS Virus
ttagaactgcaacattattcaagtt

SEQ ID NO: 109002 - DNA, 25 bp, SARS Virus
tagaactgcaatcttattcaagtta

SEQ ID NO: 109003 - DNA, 25 bp, SARS Virus
agaactgcaatactattcaagttat

SEQ ID NO: 109004 - DNA, 25 bp, SARS Virus
gaactgcaatatcattcaagttatc

SEQ ID NO: 109005 - DNA, 25 bp, SARS Virus
aactgcaatattcttcaagttatca

SEQ ID NO: 109006 - DNA, 25 bp, SARS Virus
actgcaatattactcaagttatcac

SEQ ID NO: 109007 - DNA, 25 bp, SARS Virus
ctgcaatattatccaagttatcact

SEQ ID NO: 109008 - DNA, 25 bp, SARS Virus
tgcaatattattcaagttatcactc

SEQ ID NO: 109009 - DNA, 25 bp, SARS Virus
gcaatattattccagttatcactct

SEQ ID NO: 109010 - DNA, 25 bp, SARS Virus
caatattattcacgttatcactctg

SEQ ID NO: 109011 - DNA, 25 bp, SARS Virus
aatattattcaacttatcactctgt

SEQ ID NO: 109012 - DNA, 25 bp, SARS Virus
atattattcaagctatcactctgtt

SEQ ID NO: 109013 - DNA, 25 bp, SARS Virus
tattattcaagtcatcactctgtta

SEQ ID NO: 109014 - DNA, 25 bp, SARS Virus
attattcaagttctcactctgttaa

SEQ ID NO: 109015 - DNA, 25 bp, SARS Virus
ttattcaagttaccactctgttaat

SEQ ID NO: 109016 - DNA, 25 bp, SARS Virus
tattcaagttatcactctgttaata

SEQ ID NO: 109017 - DNA, 25 bp, SARS Virus
attcaagttatccctctgttaataa

SEQ ID NO: 109018 - DNA, 25 bp, SARS Virus
ttcaagttatcactctgttaataaa

SEQ ID NO: 109019 - DNA, 25 bp, SARS Virus
tcaagttatcaccctgttaataaat

SEQ ID NO: 109020 - DNA, 25 bp, SARS Virus
caagttatcactctgttaataaatt

SEQ ID NO: 109021 - DNA, 25 bp, SARS Virus
aagttatcactccgttaataaattc

SEQ ID NO: 109022 - DNA, 25 bp, SARS Virus
agttatcactctcttaataaattcg

SEQ ID NO: 109023 - DNA, 25 bp, SARS Virus
gttatcactctgctaataaattcgg

SEQ ID NO: 109024 - DNA, 25 bp, SARS Virus
ttatcactctgtcaataaattcgga

SEQ ID NO: 109025 - DNA, 25 bp, SARS Virus
tatcactctgttcataaattcggag

SEQ ID NO: 109026 - DNA, 25 bp, SARS Virus
atcactctgttactaaattcggaga

SEQ ID NO: 109027 - DNA, 25 bp, SARS Virus
tcactctgttaacaaattcggagat

SEQ ID NO: 109028 - DNA, 25 bp, SARS Virus
cactctgttaatcaattcggagatt

SEQ ID NO: 109029 - DNA, 25 bp, SARS Virus
actctgttaatacattcggagattg

SEQ ID NO: 109030 - DNA, 25 bp, SARS Virus
ctctgttaataacttcggagattga

SEQ ID NO: 109031 - DNA, 25 bp, SARS Virus
tctgttaataaactcggagattgat

SEQ ID NO: 109032 - DNA, 25 bp, SARS Virus
ctgttaataaatccggagattgatt

SEQ ID NO: 109033 - DNA, 25 bp, SARS Virus
tgttaataaattcggagattgattc

SEQ ID NO: 109034 - DNA, 25 bp, SARS Virus
gttaataaattccgagattgattct

SEQ ID NO: 109035 - DNA, 25 bp, SARS Virus
ttaataaattcgcagattgattctt

SEQ ID NO: 109036 - DNA, 25 bp, SARS Virus
taataaattcggcgattgattcttc

SEQ ID NO: 109037 - DNA, 25 bp, SARS Virus
aataaattcggacattgattcttct

SEQ ID NO: 109038 - DNA, 25 bp, SARS Virus
ataaattcggagcttgattcttctt

SEQ ID NO: 109039 - DNA, 25 bp, SARS Virus
taaattcggagactgattcttctta

SEQ ID NO: 109040 - DNA, 25 bp, SARS Virus
aaattcggagatcgattcttcttaa

SEQ ID NO: 109041 - DNA, 25 bp, SARS Virus
aattcggagattcattcttcttaat

SEQ ID NO: 109042 - DNA, 25 bp, SARS Virus
attcggagattgcttcttcttaata

SEQ ID NO: 109043 - DNA, 25 bp, SARS Virus
ttcggagattgactcttcttaataa

SEQ ID NO: 109044 - DNA, 25 bp, SARS Virus
tcggagattgatccttcttaataag

SEQ ID NO: 109045 - DNA, 25 bp, SARS Virus
cggagattgattcttcttaataagc

SEQ ID NO: 109046 - DNA, 25 bp, SARS Virus
ggagattgattcctcttaataagcc

SEQ ID NO: 109047 - DNA, 25 bp, SARS Virus
gagattgattctccttaataagcct

SEQ ID NO: 109048 - DNA, 25 bp, SARS Virus
agattgattcttcttaataagcctc

SEQ ID NO: 109049 - DNA, 25 bp, SARS Virus
gattgattcttcctaataagcctca

SEQ ID NO: 109050 - DNA, 25 bp, SARS Virus
attgattcttctcaataagcctcaa

SEQ ID NO: 109051 - DNA, 25 bp, SARS Virus
ttgattcttcttcataagcctcaat

SEQ ID NO: 109052 - DNA, 25 bp, SARS Virus
tgattcttcttactaagcctcaatc

SEQ ID NO: 109053 - DNA, 25 bp, SARS Virus
gattcttcttaacaagcctcaatct

SEQ ID NO: 109054 - DNA, 25 bp, SARS Virus
attcttcttaatcagcctcaatcta

SEQ ID NO: 109055 - DNA, 25 bp, SARS Virus
ttcttcttaatacgcctcaatctac

SEQ ID NO: 109056 - DNA, 25 bp, SARS Virus
tcttcttaataaccctcaatctact

SEQ ID NO: 109057 - DNA, 25 bp, SARS Virus
cttcttaataagcctcaatctacta

SEQ ID NO: 109058 - DNA, 25 bp, SARS Virus
ttcttaataagcctcaatctactac

SEQ ID NO: 109059 - DNA, 25 bp, SARS Virus
tcttaataagccccaatctactact

SEQ ID NO: 109060 - DNA, 25 bp, SARS Virus
cttaataagcctcaatctactactt

SEQ ID NO: 109061 - DNA, 25 bp, SARS Virus
ttaataagcctccatctactacttc

SEQ ID NO: 109062 - DNA, 25 bp, SARS Virus
taataagcctcactctactacttct

SEQ ID NO: 109063 - DNA, 25 bp, SARS Virus
aataagcctcaacctactacttctt

SEQ ID NO: 109064 - DNA, 25 bp, SARS Virus
ataagcctcaatctactacttcttg

SEQ ID NO: 109065 - DNA, 25 bp, SARS Virus
taagcctcaatccactacttcttgg

SEQ ID NO: 109066 - DNA, 25 bp, SARS Virus
aagcctcaatctcctacttcttgga

SEQ ID NO: 109067 - DNA, 25 bp, SARS Virus
agcctcaatctactacttcttggat

SEQ ID NO: 109068 - DNA, 25 bp, SARS Virus
gcctcaatctaccacttcttggata

SEQ ID NO: 109069 - DNA, 25 bp, SARS Virus
cctcaatctactccttcttggatac

SEQ ID NO: 109070 - DNA, 25 bp, SARS Virus
ctcaatctactacttcttggatacc

SEQ ID NO: 109071 - DNA, 25 bp, SARS Virus
tcaatctactacctcttggatacct

SEQ ID NO: 109072 - DNA, 25 bp, SARS Virus
caatctactactccttggatacctc

SEQ ID NO: 109073 - DNA, 25 bp, SARS Virus
aatctactacttcttggatacctca

SEQ ID NO: 109074 - DNA, 25 bp, SARS Virus
atctactacttcctggatacctcaa

SEQ ID NO: 109075 - DNA, 25 bp, SARS Virus
tctactacttctcggatacctcaat

SEQ ID NO: 109076 - DNA, 25 bp, SARS Virus
ctactacttcttcgatacctcaatc

SEQ ID NO: 109077 - DNA, 25 bp, SARS Virus
tactacttcttgcatacctcaatct

SEQ ID NO: 109078 - DNA, 25 bp, SARS Virus
actacttcttggctacctcaatcta

SEQ ID NO: 109079 - DNA, 25 bp, SARS Virus
ctacttcttggacacctcaatctaa

SEQ ID NO: 109080 - DNA, 25 bp, SARS Virus
tacttcttggatccctcaatctaat

SEQ ID NO: 109081 - DNA, 25 bp, SARS Virus
acttcttggatacctcaatctaata

SEQ ID NO: 109082 - DNA, 25 bp, SARS Virus
cttcttggatacctcaatctaatag

SEQ ID NO: 109083 - DNA, 25 bp, SARS Virus
ttcttggataccccaatctaatagg

SEQ ID NO: 109084 - DNA, 25 bp, SARS Virus
tcttggatacctcaatctaataggt

SEQ ID NO: 109085 - DNA, 25 bp, SARS Virus
cttggatacctccatctaataggta

SEQ ID NO: 109086 - DNA, 25 bp, SARS Virus
ttggatacctcactctaataggtat

SEQ ID NO: 109087 - DNA, 25 bp, SARS Virus
tggatacctcaacctaataggtatt

SEQ ID NO: 109088 - DNA, 25 bp, SARS Virus
ggatacctcaatctaataggtattt

SEQ ID NO: 109089 - DNA, 25 bp, SARS Virus
gatacctcaatccaataggtatttt

SEQ ID NO: 109090 - DNA, 25 bp, SARS Virus
atacctcaatctcataggtattttg

SEQ ID NO: 109091 - DNA, 25 bp, SARS Virus
tacctcaatctactaggtattttgc

SEQ ID NO: 109092 - DNA, 25 bp, SARS Virus
acctcaatctaacaggtattttgct

SEQ ID NO: 109093 - DNA, 25 bp, SARS Virus
cctcaatctaatcggtattttgctt

SEQ ID NO: 109094 - DNA, 25 bp, SARS Virus
ctcaatctaatacgtattttgcttg

SEQ ID NO: 109095 - DNA, 25 bp, SARS Virus
tcaatctaatagctattttgcttgt

SEQ ID NO: 109096 - DNA, 25 bp, SARS Virus
caatctaataggcattttgcttgta

SEQ ID NO: 109097 - DNA, 25 bp, SARS Virus
aatctaataggtcttttgcttgtac

SEQ ID NO: 109098 - DNA, 25 bp, SARS Virus
atctaataggtactttgcttgtact

SEQ ID NO: 109099 - DNA, 25 bp, SARS Virus
tctaataggtatcttgcttgtactt

SEQ ID NO: 109100 - DNA, 25 bp, SARS Virus
ctaataggtattctgcttgtacttt

SEQ ID NO: 109101 - DNA, 25 bp, SARS Virus
taataggtatttcgcttgtactttt

SEQ ID NO: 109102 - DNA, 25 bp, SARS Virus
aataggtattttccttgtactttta

SEQ ID NO: 109103 - DNA, 25 bp, SARS Virus
ataggtattttgcttgtacttttaa

SEQ ID NO: 109104 - DNA, 25 bp, SARS Virus
taggtattttgcctgtacttttaat

SEQ ID NO: 109105 - DNA, 25 bp, SARS Virus
aggtattttgctcgtacttttaata

SEQ ID NO: 109106 - DNA, 25 bp, SARS Virus
ggtattttgcttctacttttaataa

SEQ ID NO: 109107 - DNA, 25 bp, SARS Virus
gtattttgcttgcacttttaataag

SEQ ID NO: 109108 - DNA, 25 bp, SARS Virus
tattttgcttgtccttttaataaga

SEQ ID NO: 109109 - DNA, 25 bp, SARS Virus
attttgcttgtacttttaataagag

SEQ ID NO: 109110 - DNA, 25 bp, SARS Virus
ttttgcttgtacctttaataagaga

SEQ ID NO: 109111 - DNA, 25 bp, SARS Virus
tttgcttgtactcttaataagagaa

SEQ ID NO: 109112 - DNA, 25 bp, SARS Virus
ttgcttgtacttctaataagagaag

SEQ ID NO: 109113 - DNA, 25 bp, SARS Virus
tgcttgtactttcaataagagaagg

SEQ ID NO: 109114 - DNA, 25 bp, SARS Virus
gcttgtacttttcataagagaagga

SEQ ID NO: 109115 - DNA, 25 bp, SARS Virus
cttgtacttttactaagagaaggac

SEQ ID NO: 109116 - DNA, 25 bp, SARS Virus
ttgtacttttaacaagagaaggact

SEQ ID NO: 109117 - DNA, 25 bp, SARS Virus
tgtacttttaatcagagaaggactg

SEQ ID NO: 109118 - DNA, 25 bp, SARS Virus
gtacttttaatacgagaaggactgt

SEQ ID NO: 109119 - DNA, 25 bp, SARS Virus
tacttttaataacagaaggactgta

SEQ ID NO: 109120 - DNA, 25 bp, SARS Virus
acttttaataagcgaaggactgtaa

SEQ ID NO: 109121 - DNA, 25 bp, SARS Virus
cttttaataagacaaggactgtaac

SEQ ID NO: 109122 - DNA, 25 bp, SARS Virus
ttttaataagagcaggactgtaact

SEQ ID NO: 109123 - DNA, 25 bp, SARS Virus
tttaataagagacggactgtaacta

SEQ ID NO: 109124 - DNA, 25 bp, SARS Virus
ttaataagagaacgactgtaactaa

SEQ ID NO: 109125 - DNA, 25 bp, SARS Virus
taataagagaagcactgtaactaac

SEQ ID NO: 109126 - DNA, 25 bp, SARS Virus
aataagagaaggcctgtaactaaca

SEQ ID NO: 109127 - DNA, 25 bp, SARS Virus
ataagagaaggactgtaactaacat

SEQ ID NO: 109128 - DNA, 25 bp, SARS Virus
taagagaaggaccgtaactaacata

SEQ ID NO: 109129 - DNA, 25 bp, SARS Virus
aagagaaggactctaactaacataa

SEQ ID NO: 109130 - DNA, 25 bp, SARS Virus
agagaaggactgcaactaacataaa

SEQ ID NO: 109131 - DNA, 25 bp, SARS Virus
gagaaggactgtcactaacataaat

SEQ ID NO: 109132 - DNA, 25 bp, SARS Virus
agaaggactgtacctaacataaatg

SEQ ID NO: 109133 - DNA, 25 bp, SARS Virus
gaaggactgtaactaacataaatgt

SEQ ID NO: 109134 - DNA, 25 bp, SARS Virus
aaggactgtaaccaacataaatgta

SEQ ID NO: 109135 - DNA, 25 bp, SARS Virus
aggactgtaactcacataaatgtag

SEQ ID NO: 109136 - DNA, 25 bp, SARS Virus
ggactgtaactaccataaatgtaga

SEQ ID NO: 109137 - DNA, 25 bp, SARS Virus
gactgtaactaacataaatgtagaa

SEQ ID NO: 109138 - DNA, 25 bp, SARS Virus
actgtaactaacctaaatgtagaac

SEQ ID NO: 109139 - DNA, 25 bp, SARS Virus
ctgtaactaacacaaatgtagaacg

SEQ ID NO: 109140 - DNA, 25 bp, SARS Virus
tgtaactaacatcaatgtagaacgc

SEQ ID NO: 109141 - DNA, 25 bp, SARS Virus
gtaactaacatacatgtagaacgct

SEQ ID NO: 109142 - DNA, 25 bp, SARS Virus
taactaacataactgtagaacgctc

SEQ ID NO: 109143 - DNA, 25 bp, SARS Virus
aactaacataaacgtagaacgctcg

SEQ ID NO: 109144 - DNA, 25 bp, SARS Virus
actaacataaatctagaacgctcga

SEQ ID NO: 109145 - DNA, 25 bp, SARS Virus
ctaacataaatgcagaacgctcgat

SEQ ID NO: 109146 - DNA, 25 bp, SARS Virus
taacataaatgtcgaacgctcgata

SEQ ID NO: 109147 - DNA, 25 bp, SARS Virus
aacataaatgtacaacgctcgatat

SEQ ID NO: 109148 - DNA, 25 bp, SARS Virus
acataaatgtagcacgctcgatata

SEQ ID NO: 109149 - DNA, 25 bp, SARS Virus
cataaatgtagaccgctcgatatag

SEQ ID NO: 109150 - DNA, 25 bp, SARS Virus
ataaatgtagaacgctcgatatagt

SEQ ID NO: 109151 - DNA, 25 bp, SARS Virus
taaatgtagaaccctcgatatagtg

SEQ ID NO: 109152 - DNA, 25 bp, SARS Virus
aaatgtagaacgctcgatatagtga

SEQ ID NO: 109153 - DNA, 25 bp, SARS Virus
aatgtagaacgcccgatatagtgat

SEQ ID NO: 109154 - DNA, 25 bp, SARS Virus
atgtagaacgctcgatatagtgata

SEQ ID NO: 109155 - DNA, 25 bp, SARS Virus
tgtagaacgctccatatagtgatag

SEQ ID NO: 109156 - DNA, 25 bp, SARS Virus
gtagaacgctcgctatagtgatagt

SEQ ID NO: 109157 - DNA, 25 bp, SARS Virus
tagaacgctcgacatagtgatagtc

SEQ ID NO: 109158 - DNA, 25 bp, SARS Virus
agaacgctcgatctagtgatagtcc

SEQ ID NO: 109159 - DNA, 25 bp, SARS Virus
gaacgctcgatacagtgatagtcct

SEQ ID NO: 109160 - DNA, 25 bp, SARS Virus
aacgctcgatatcgtgatagtcctc

SEQ ID NO: 109161 - DNA, 25 bp, SARS Virus
acgctcgatatactgatagtcctca

SEQ ID NO: 109162 - DNA, 25 bp, SARS Virus
cgctcgatatagcgatagtcctcac

SEQ ID NO: 109163 - DNA, 25 bp, SARS Virus
gctcgatatagtcatagtcctcaca

SEQ ID NO: 109164 - DNA, 25 bp, SARS Virus
ctcgatatagtgctagtcctcacac

SEQ ID NO: 109165 - DNA, 25 bp, SARS Virus
tcgatatagtgacagtcctcacaca

SEQ ID NO: 109166 - DNA, 25 bp, SARS Virus
cgatatagtgatcgtcctcacacaa

SEQ ID NO: 109167 - DNA, 25 bp, SARS Virus
gatatagtgatactcctcacacaat

SEQ ID NO: 109168 - DNA, 25 bp, SARS Virus
atatagtgatagccctcacacaatc

SEQ ID NO: 109169 - DNA, 25 bp, SARS Virus
tatagtgatagtcctcacacaatct

SEQ ID NO: 109170 - DNA, 25 bp, SARS Virus
atagtgatagtcctcacacaatctc

SEQ ID NO: 109171 - DNA, 25 bp, SARS Virus
tagtgatagtccccacacaatctcc

SEQ ID NO: 109172 - DNA, 25 bp, SARS Virus
agtgatagtcctcacacaatctcca

SEQ ID NO: 109173 - DNA, 25 bp, SARS Virus
gtgatagtcctcccacaatctccat

SEQ ID NO: 109174 - DNA, 25 bp, SARS Virus
tgatagtcctcacacaatctccatg

SEQ ID NO: 109175 - DNA, 25 bp, SARS Virus
gatagtcctcacccaatctccatgc

SEQ ID NO: 109176 - DNA, 25 bp, SARS Virus
atagtcctcacacaatctccatgct

SEQ ID NO: 109177 - DNA, 25 bp, SARS Virus
tagtcctcacaccatctccatgctg

SEQ ID NO: 109178 - DNA, 25 bp, SARS Virus
agtcctcacacactctccatgctga

SEQ ID NO: 109179 - DNA, 25 bp, SARS Virus
gtcctcacacaacctccatgctgac

SEQ ID NO: 109180 - DNA, 25 bp, SARS Virus
tcctcacacaatctccatgctgaca

SEQ ID NO: 109181 - DNA, 25 bp, SARS Virus
cctcacacaatccccatgctgacat

SEQ ID NO: 109182 - DNA, 25 bp, SARS Virus
ctcacacaatctccatgctgacatg

SEQ ID NO: 109183 - DNA, 25 bp, SARS Virus
tcacacaatctccatgctgacatga

SEQ ID NO: 109184 - DNA, 25 bp, SARS Virus
cacacaatctccctgctgacatgat

SEQ ID NO: 109185 - DNA, 25 bp, SARS Virus
acacaatctccacgctgacatgatg

SEQ ID NO: 109186 - DNA, 25 bp, SARS Virus
cacaatctccatcctgacatgatga

SEQ ID NO: 109187 - DNA, 25 bp, SARS Virus
acaatctccatgctgacatgatgat

SEQ ID NO: 109188 - DNA, 25 bp, SARS Virus
caatctccatgccgacatgatgatt

SEQ ID NO: 109189 - DNA, 25 bp, SARS Virus
aatctccatgctcacatgatgattt

SEQ ID NO: 109190 - DNA, 25 bp, SARS Virus
atctccatgctgccatgatgatttt

SEQ ID NO: 109191 - DNA, 25 bp, SARS Virus
tctccatgctgacatgatgattttc

SEQ ID NO: 109192 - DNA, 25 bp, SARS Virus
ctccatgctgacctgatgattttct

SEQ ID NO: 109193 - DNA, 25 bp, SARS Virus
tccatgctgacacgatgattttctt

SEQ ID NO: 109194 - DNA, 25 bp, SARS Virus
ccatgctgacatcatgattttcttg

SEQ ID NO: 109195 - DNA, 25 bp, SARS Virus
catgctgacatgctgattttcttgg

SEQ ID NO: 109196 - DNA, 25 bp, SARS Virus
atgctgacatgacgattttcttgga

SEQ ID NO: 109197 - DNA, 25 bp, SARS Virus
tgctgacatgatcattttcttggaa

SEQ ID NO: 109198 - DNA, 25 bp, SARS Virus
gctgacatgatgcttttcttggaac

SEQ ID NO: 109199 - DNA, 25 bp, SARS Virus
ctgacatgatgactttcttggaacg

SEQ ID NO: 109200 - DNA, 25 bp, SARS Virus
tgacatgatgatcttcttggaacgg

SEQ ID NO: 109201 - DNA, 25 bp, SARS Virus
gacatgatgattctcttggaacggg

SEQ ID NO: 109202 - DNA, 25 bp, SARS Virus
acatgatgatttccttggaacgggt

SEQ ID NO: 109203 - DNA, 25 bp, SARS Virus
catgatgattttcttggaacgggta

SEQ ID NO: 109204 - DNA, 25 bp, SARS Virus
atgatgattttcctggaacgggtag

SEQ ID NO: 109205 - DNA, 25 bp, SARS Virus
tgatgattttctcggaacgggtagt

SEQ ID NO: 109206 - DNA, 25 bp, SARS Virus
gatgattttcttcgaacgggtagtc

SEQ ID NO: 109207 - DNA, 25 bp, SARS Virus
atgattttcttgcaacgggtagtcc

SEQ ID NO: 109208 - DNA, 25 bp, SARS Virus
tgattttcttggcacgggtagtcct

SEQ ID NO: 109209 - DNA, 25 bp, SARS Virus
gattttcttggaccgggtagtcctt

SEQ ID NO: 109210 - DNA, 25 bp, SARS Virus
attttcttggaacgggtagtccttg

SEQ ID NO: 109211 - DNA, 25 bp, SARS Virus
ttttcttggaaccggtagtccttgt

SEQ ID NO: 109212 - DNA, 25 bp, SARS Virus
tttcttggaacgcgtagtccttgta

SEQ ID NO: 109213 - DNA, 25 bp, SARS Virus
ttcttggaacggctagtccttgtat

SEQ ID NO: 109214 - DNA, 25 bp, SARS Virus
tcttggaacgggcagtccttgtatg

SEQ ID NO: 109215 - DNA, 25 bp, SARS Virus
cttggaacgggtcgtccttgtatgc

SEQ ID NO: 109216 - DNA, 25 bp, SARS Virus
ttggaacgggtactccttgtatgct

SEQ ID NO: 109217 - DNA, 25 bp, SARS Virus
tggaacgggtagcccttgtatgctc

SEQ ID NO: 109218 - DNA, 25 bp, SARS Virus
ggaacgggtagtccttgtatgctcc

SEQ ID NO: 109219 - DNA, 25 bp, SARS Virus
gaacgggtagtccttgtatgctccc

SEQ ID NO: 109220 - DNA, 25 bp, SARS Virus
aacgggtagtccctgtatgctcccg

SEQ ID NO: 109221 - DNA, 25 bp, SARS Virus
acgggtagtcctcgtatgctcccgt

SEQ ID NO: 109222 - DNA, 25 bp, SARS Virus
cgggtagtccttctatgctcccgtt

SEQ ID NO: 109223 - DNA, 25 bp, SARS Virus
gggtagtccttgcatgctcccgtta

SEQ ID NO: 109224 - DNA, 25 bp, SARS Virus
ggtagtccttgtctgctcccgttaa

SEQ ID NO: 109225 - DNA, 25 bp, SARS Virus
gtagtccttgtacgctcccgttaag

SEQ ID NO: 109226 - DNA, 25 bp, SARS Virus
tagtccttgtatcctcccgttaagt

SEQ ID NO: 109227 - DNA, 25 bp, SARS Virus
agtccttgtatgctcccgttaagtg

SEQ ID NO: 109228 - DNA, 25 bp, SARS Virus
gtccttgtatgcccccgttaagtgg

SEQ ID NO: 109229 - DNA, 25 bp, SARS Virus
tccttgtatgctcccgttaagtggt

SEQ ID NO: 109230 - DNA, 25 bp, SARS Virus
ccttgtatgctcccgttaagtggta

SEQ ID NO: 109231 - DNA, 25 bp, SARS Virus
cttgtatgctcccgttaagtggtaa

SEQ ID NO: 109232 - DNA, 25 bp, SARS Virus
ttgtatgctccccttaagtggtaaa

SEQ ID NO: 109233 - DNA, 25 bp, SARS Virus
tgtatgctcccgctaagtggtaaag

SEQ ID NO: 109234 - DNA, 25 bp, SARS Virus
gtatgctcccgtcaagtggtaaagt

SEQ ID NO: 109235 - DNA, 25 bp, SARS Virus
tatgctcccgttcagtggtaaagtg

SEQ ID NO: 109236 - DNA, 25 bp, SARS Virus
atgctcccgttacgtggtaaagtgg

SEQ ID NO: 109237 - DNA, 25 bp, SARS Virus
tgctcccgttaactggtaaagtggg

SEQ ID NO: 109238 - DNA, 25 bp, SARS Virus
gctcccgttaagcggtaaagtggga

SEQ ID NO: 109239 - DNA, 25 bp, SARS Virus
ctcccgttaagtcgtaaagtgggag

SEQ ID NO: 109240 - DNA, 25 bp, SARS Virus
tcccgttaagtgctaaagtgggaga

SEQ ID NO: 109241 - DNA, 25 bp, SARS Virus
cccgttaagtggcaaagtgggagaa

SEQ ID NO: 109242 - DNA, 25 bp, SARS Virus
ccgttaagtggtcaagtgggagaac

SEQ ID NO: 109243 - DNA, 25 bp, SARS Virus
cgttaagtggtacagtgggagaacg

SEQ ID NO: 109244 - DNA, 25 bp, SARS Virus
gttaagtggtaacgtgggagaacga

SEQ ID NO: 109245 - DNA, 25 bp, SARS Virus
ttaagtggtaaactgggagaacgac

SEQ ID NO: 109246 - DNA, 25 bp, SARS Virus
taagtggtaaagcgggagaacgact

SEQ ID NO: 109247 - DNA, 25 bp, SARS Virus
aagtggtaaagtcggagaacgactg

SEQ ID NO: 109248 - DNA, 25 bp, SARS Virus
agtggtaaagtgcgagaacgactgt

SEQ ID NO: 109249 - DNA, 25 bp, SARS Virus
gtggtaaagtggcagaacgactgtt

SEQ ID NO: 109250 - DNA, 25 bp, SARS Virus
tggtaaagtgggcgaacgactgtta

SEQ ID NO: 109251 - DNA, 25 bp, SARS Virus
ggtaaagtgggacaacgactgttat

SEQ ID NO: 109252 - DNA, 25 bp, SARS Virus
gtaaagtgggagcacgactgttatt

SEQ ID NO: 109253 - DNA, 25 bp, SARS Virus
taaagtgggagaccgactgttattt

SEQ ID NO: 109254 - DNA, 25 bp, SARS Virus
aaagtgggagaacgactgttattta

SEQ ID NO: 109255 - DNA, 25 bp, SARS Virus
aagtgggagaaccactgttatttaa

SEQ ID NO: 109256 - DNA, 25 bp, SARS Virus
agtgggagaacgcctgttatttaaa

SEQ ID NO: 109257 - DNA, 25 bp, SARS Virus
gtgggagaacgactgttatttaaac

SEQ ID NO: 109258 - DNA, 25 bp, SARS Virus
tgggagaacgaccgttatttaaacg

SEQ ID NO: 109259 - DNA, 25 bp, SARS Virus
gggagaacgactcttatttaaacgt

SEQ ID NO: 109260 - DNA, 25 bp, SARS Virus
ggagaacgactgctatttaaacgtg

SEQ ID NO: 109261 - DNA, 25 bp, SARS Virus
gagaacgactgtcatttaaacgtga

SEQ ID NO: 109262 - DNA, 25 bp, SARS Virus
agaacgactgttctttaaacgtgat

SEQ ID NO: 109263 - DNA, 25 bp, SARS Virus
gaacgactgttacttaaacgtgatt

SEQ ID NO: 109264 - DNA, 25 bp, SARS Virus
aacgactgttatctaaacgtgattg

SEQ ID NO: 109265 - DNA, 25 bp, SARS Virus
acgactgttattcaaacgtgattga

SEQ ID NO: 109266 - DNA, 25 bp, SARS Virus
cgactgttatttcaacgtgattgaa

SEQ ID NO: 109267 - DNA, 25 bp, SARS Virus
gactgttatttacacgtgattgaac

SEQ ID NO: 109268 - DNA, 25 bp, SARS Virus
actgttatttaaccgtgattgaacg

SEQ ID NO: 109269 - DNA, 25 bp, SARS Virus
ctgttatttaaacgtgattgaacgt

SEQ ID NO: 109270 - DNA, 25 bp, SARS Virus
tgttatttaaacctgattgaacgtg

SEQ ID NO: 109271 - DNA, 25 bp, SARS Virus
gttatttaaacgcgattgaacgtga

SEQ ID NO: 109272 - DNA, 25 bp, SARS Virus
ttatttaaacgtcattgaacgtgat

SEQ ID NO: 109273 - DNA, 25 bp, SARS Virus
tatttaaacgtgcttgaacgtgatc

SEQ ID NO: 109274 - DNA, 25 bp, SARS Virus
atttaaacgtgactgaacgtgatcg

SEQ ID NO: 109275 - DNA, 25 bp, SARS Virus
tttaaacgtgatcgaacgtgatcgt

SEQ ID NO: 109276 - DNA, 25 bp, SARS Virus
ttaaacgtgattcaacgtgatcgtg

SEQ ID NO: 109277 - DNA, 25 bp, SARS Virus
taaacgtgattgcacgtgatcgtgt

SEQ ID NO: 109278 - DNA, 25 bp, SARS Virus
aaacgtgattgaccgtgatcgtgtg

SEQ ID NO: 109279 - DNA, 25 bp, SARS Virus
aacgtgattgaacgtgatcgtgtgt

SEQ ID NO: 109280 - DNA, 25 bp, SARS Virus
acgtgattgaacctgatcgtgtgtg

SEQ ID NO: 109281 - DNA, 25 bp, SARS Virus
cgtgattgaacgcgatcgtgtgtga

SEQ ID NO: 109282 - DNA, 25 bp, SARS Virus
gtgattgaacgtcatcgtgtgtgaa

SEQ ID NO: 109283 - DNA, 25 bp, SARS Virus
tgattgaacgtgctcgtgtgtgaaa

SEQ ID NO: 109284 - DNA, 25 bp, SARS Virus
gattgaacgtgaccgtgtgtgaaac

SEQ ID NO: 109285 - DNA, 25 bp, SARS Virus
attgaacgtgatcgtgtgtgaaacg

SEQ ID NO: 109286 - DNA, 25 bp, SARS Virus
ttgaacgtgatcctgtgtgaaacga

SEQ ID NO: 109287 - DNA, 25 bp, SARS Virus
tgaacgtgatcgcgtgtgaaacgaa

SEQ ID NO: 109288 - DNA, 25 bp, SARS Virus
gaacgtgatcgtctgtgaaacgaaa

SEQ ID NO: 109289 - DNA, 25 bp, SARS Virus
aacgtgatcgtgcgtgaaacgaaaa

SEQ ID NO: 109290 - DNA, 25 bp, SARS Virus
acgtgatcgtgtctgaaacgaaaac

SEQ ID NO: 109291 - DNA, 25 bp, SARS Virus
cgtgatcgtgtgcgaaacgaaaacg

SEQ ID NO: 109292 - DNA, 25 bp, SARS Virus
gtgatcgtgtgtcaaacgaaaacga

SEQ ID NO: 109293 - DNA, 25 bp, SARS Virus
tgatcgtgtgtgcaacgaaaacgaa

SEQ ID NO: 109294 - DNA, 25 bp, SARS Virus
gatcgtgtgtgacacgaaaacgaac

SEQ ID NO: 109295 - DNA, 25 bp, SARS Virus
atcgtgtgtgaaccgaaaacgaaca

SEQ ID NO: 109296 - DNA, 25 bp, SARS Virus
tcgtgtgtgaaacgaaaacgaacac

SEQ ID NO: 109297 - DNA, 25 bp, SARS Virus
cgtgtgtgaaaccaaaacgaacacg

SEQ ID NO: 109298 - DNA, 25 bp, SARS Virus
gtgtgtgaaacgcaaacgaacacga

SEQ ID NO: 109299 - DNA, 25 bp, SARS Virus
tgtgtgaaacgacaacgaacacgac

SEQ ID NO: 109300 - DNA, 25 bp, SARS Virus
gtgtgaaacgaacacgaacacgact

SEQ ID NO: 109301 - DNA, 25 bp, SARS Virus
tgtgaaacgaaaccgaacacgactg

SEQ ID NO: 109302 - DNA, 25 bp, SARS Virus
gtgaaacgaaaacgaacacgactgc

SEQ ID NO: 109303 - DNA, 25 bp, SARS Virus
tgaaacgaaaaccaacacgactgcc

SEQ ID NO: 109304 - DNA, 25 bp, SARS Virus
gaaacgaaaacgcacacgactgcca

SEQ ID NO: 109305 - DNA, 25 bp, SARS Virus
aaacgaaaacgaccacgactgccat

SEQ ID NO: 109306 - DNA, 25 bp, SARS Virus
aacgaaaacgaacacgactgccatg

SEQ ID NO: 109307 - DNA, 25 bp, SARS Virus
acgaaaacgaacccgactgccatga

SEQ ID NO: 109308 - DNA, 25 bp, SARS Virus
cgaaaacgaacacgactgccatgag

SEQ ID NO: 109309 - DNA, 25 bp, SARS Virus
gaaaacgaacaccactgccatgagc

SEQ ID NO: 109310 - DNA, 25 bp, SARS Virus
aaaacgaacacgcctgccatgagct

SEQ ID NO: 109311 - DNA, 25 bp, SARS Virus
aaacgaacacgactgccatgagctg

SEQ ID NO: 109312 - DNA, 25 bp, SARS Virus
aacgaacacgaccgccatgagctgt

SEQ ID NO: 109313 - DNA, 25 bp, SARS Virus
acgaacacgactcccatgagctgta

SEQ ID NO: 109314 - DNA, 25 bp, SARS Virus
cgaacacgactgccatgagctgtat

SEQ ID NO: 109315 - DNA, 25 bp, SARS Virus
gaacacgactgccatgagctgtatg

SEQ ID NO: 109316 - DNA, 25 bp, SARS Virus
aacacgactgccctgagctgtatgg

SEQ ID NO: 109317 - DNA, 25 bp, SARS Virus
acacgactgccacgagctgtatgga

SEQ ID NO: 109318 - DNA, 25 bp, SARS Virus
cacgactgccatcagctgtatggat

SEQ ID NO: 109319 - DNA, 25 bp, SARS Virus
acgactgccatgcgctgtatggata

SEQ ID NO: 109320 - DNA, 25 bp, SARS Virus
cgactgccatgacctgtatggatag

SEQ ID NO: 109321 - DNA, 25 bp, SARS Virus
gactgccatgagctgtatggatagt

SEQ ID NO: 109322 - DNA, 25 bp, SARS Virus
actgccatgagccgtatggatagtc

SEQ ID NO: 109323 - DNA, 25 bp, SARS Virus
ctgccatgagctctatggatagtcg

SEQ ID NO: 109324 - DNA, 25 bp, SARS Virus
tgccatgagctgcatggatagtcga

SEQ ID NO: 109325 - DNA, 25 bp, SARS Virus
gccatgagctgtctggatagtcgac

SEQ ID NO: 109326 - DNA, 25 bp, SARS Virus
ccatgagctgtacggatagtcgacg

SEQ ID NO: 109327 - DNA, 25 bp, SARS Virus
catgagctgtatcgatagtcgacgc

SEQ ID NO: 109328 - DNA, 25 bp, SARS Virus
atgagctgtatgcatagtcgacgca

SEQ ID NO: 109329 - DNA, 25 bp, SARS Virus
tgagctgtatggctagtcgacgcac

SEQ ID NO: 109330 - DNA, 25 bp, SARS Virus
gagctgtatggacagtcgacgcacg

SEQ ID NO: 109331 - DNA, 25 bp, SARS Virus
agctgtatggatcgtcgacgcacgt

SEQ ID NO: 109332 - DNA, 25 bp, SARS Virus
gctgtatggatactcgacgcacgtt

SEQ ID NO: 109333 - DNA, 25 bp, SARS Virus
ctgtatggatagccgacgcacgttc

SEQ ID NO: 109334 - DNA, 25 bp, SARS Virus
tgtatggatagtcgacgcacgttct

SEQ ID NO: 109335 - DNA, 25 bp, SARS Virus
gtatggatagtccacgcacgttcta

SEQ ID NO: 109336 - DNA, 25 bp, SARS Virus
tatggatagtcgccgcacgttctag

SEQ ID NO: 109337 - DNA, 25 bp, SARS Virus
atggatagtcgacgcacgttctagt

SEQ ID NO: 109338 - DNA, 25 bp, SARS Virus
tggatagtcgacccacgttctagtc

SEQ ID NO: 109339 - DNA, 25 bp, SARS Virus
ggatagtcgacgcacgttctagtca

SEQ ID NO: 109340 - DNA, 25 bp, SARS Virus
gatagtcgacgcccgttctagtcaa

SEQ ID NO: 109341 - DNA, 25 bp, SARS Virus
atagtcgacgcacgttctagtcaaa

SEQ ID NO: 109342 - DNA, 25 bp, SARS Virus
tagtcgacgcaccttctagtcaaag

SEQ ID NO: 109343 - DNA, 25 bp, SARS Virus
agtcgacgcacgctctagtcaaagt

SEQ ID NO: 109344 - DNA, 25 bp, SARS Virus
gtcgacgcacgtcctagtcaaagtg

SEQ ID NO: 109345 - DNA, 25 bp, SARS Virus
tcgacgcacgttctagtcaaagtgg

SEQ ID NO: 109346 - DNA, 25 bp, SARS Virus
cgacgcacgttccagtcaaagtggt

SEQ ID NO: 109347 - DNA, 25 bp, SARS Virus
gacgcacgttctcgtcaaagtggtt

SEQ ID NO: 109348 - DNA, 25 bp, SARS Virus
acgcacgttctactcaaagtggttt

SEQ ID NO: 109349 - DNA, 25 bp, SARS Virus
cgcacgttctagccaaagtggtttt

SEQ ID NO: 109350 - DNA, 25 bp, SARS Virus
gcacgttctagtcaaagtggttttg

SEQ ID NO: 109351 - DNA, 25 bp, SARS Virus
cacgttctagtccaagtggttttga

SEQ ID NO: 109352 - DNA, 25 bp, SARS Virus
acgttctagtcacagtggttttgaa

SEQ ID NO: 109353 - DNA, 25 bp, SARS Virus
cgttctagtcaacgtggttttgaaa

SEQ ID NO: 109354 - DNA, 25 bp, SARS Virus
gttctagtcaaactggttttgaaaa

SEQ ID NO: 109355 - DNA, 25 bp, SARS Virus
ttctagtcaaagcggttttgaaaag

SEQ ID NO: 109356 - DNA, 25 bp, SARS Virus
tctagtcaaagtcgttttgaaaagt

SEQ ID NO: 109357 - DNA, 25 bp, SARS Virus
ctagtcaaagtgcttttgaaaagta

SEQ ID NO: 109358 - DNA, 25 bp, SARS Virus
tagtcaaagtggctttgaaaagtag

SEQ ID NO: 109359 - DNA, 25 bp, SARS Virus
agtcaaagtggtcttgaaaagtagt

SEQ ID NO: 109360 - DNA, 25 bp, SARS Virus
gtcaaagtggttctgaaaagtagtc

SEQ ID NO: 109361 - DNA, 25 bp, SARS Virus
tcaaagtggtttcgaaaagtagtct

SEQ ID NO: 109362 - DNA, 25 bp, SARS Virus
caaagtggttttcaaaagtagtctg

SEQ ID NO: 109363 - DNA, 25 bp, SARS Virus
aaagtggttttgcaaagtagtctgt

SEQ ID NO: 109364 - DNA, 25 bp, SARS Virus
aagtggttttgacaagtagtctgtt

SEQ ID NO: 109365 - DNA, 25 bp, SARS Virus
agtggttttgaacagtagtctgttc

SEQ ID NO: 109366 - DNA, 25 bp, SARS Virus
gtggttttgaaacgtagtctgttct

SEQ ID NO: 109367 - DNA, 25 bp, SARS Virus
tggttttgaaaactagtctgttctc

SEQ ID NO: 109368 - DNA, 25 bp, SARS Virus
ggttttgaaaagcagtctgttctcc

SEQ ID NO: 109369 - DNA, 25 bp, SARS Virus
gttttgaaaagtcgtctgttctcct

SEQ ID NO: 109370 - DNA, 25 bp, SARS Virus
ttttgaaaagtactctgttctcctc

SEQ ID NO: 109371 - DNA, 25 bp, SARS Virus
tttgaaaagtagcctgttctcctcc

SEQ ID NO: 109372 - DNA, 25 bp, SARS Virus
ttgaaaagtagtctgttctcctcca

SEQ ID NO: 109373 - DNA, 25 bp, SARS Virus
tgaaaagtagtccgttctcctccaa

SEQ ID NO: 109374 - DNA, 25 bp, SARS Virus
gaaaagtagtctcttctcctccaag

SEQ ID NO: 109375 - DNA, 25 bp, SARS Virus
aaaagtagtctgctctcctccaagt

SEQ ID NO: 109376 - DNA, 25 bp, SARS Virus
aaagtagtctgtcctcctccaagtt

SEQ ID NO: 109377 - DNA, 25 bp, SARS Virus
aagtagtctgttctcctccaagttg

SEQ ID NO: 109378 - DNA, 25 bp, SARS Virus
agtagtctgttcccctccaagttgt

SEQ ID NO: 109379 - DNA, 25 bp, SARS Virus
gtagtctgttctcctccaagttgtt

SEQ ID NO: 109380 - DNA, 25 bp, SARS Virus
tagtctgttctcctccaagttgttc

SEQ ID NO: 109381 - DNA, 25 bp, SARS Virus
agtctgttctcccccaagttgttct

SEQ ID NO: 109382 - DNA, 25 bp, SARS Virus
gtctgttctcctccaagttgttctc

SEQ ID NO: 109383 - DNA, 25 bp, SARS Virus
tctgttctcctccaagttgttctcg

SEQ ID NO: 109384 - DNA, 25 bp, SARS Virus
ctgttctcctcccagttgttctcga

SEQ ID NO: 109385 - DNA, 25 bp, SARS Virus
tgttctcctccacgttgttctcgag

SEQ ID NO: 109386 - DNA, 25 bp, SARS Virus
gttctcctccaacttgttctcgaga

SEQ ID NO: 109387 - DNA, 25 bp, SARS Virus
ttctcctccaagctgttctcgagat

SEQ ID NO: 109388 - DNA, 25 bp, SARS Virus
tctcctccaagtcgttctcgagatg

SEQ ID NO: 109389 - DNA, 25 bp, SARS Virus
ctcctccaagttcttctcgagatga

SEQ ID NO: 109390 - DNA, 25 bp, SARS Virus
tcctccaagttgctctcgagatgag

SEQ ID NO: 109391 - DNA, 25 bp, SARS Virus
cctccaagttgtcctcgagatgagc

SEQ ID NO: 109392 - DNA, 25 bp, SARS Virus
ctccaagttgttctcgagatgagcg

SEQ ID NO: 109393 - DNA, 25 bp, SARS Virus
tccaagttgttcccgagatgagcgg

SEQ ID NO: 109394 - DNA, 25 bp, SARS Virus
ccaagttgttctcgagatgagcggt

SEQ ID NO: 109395 - DNA, 25 bp, SARS Virus
caagttgttctccagatgagcggtg

SEQ ID NO: 109396 - DNA, 25 bp, SARS Virus
aagttgttctcgcgatgagcggtga

SEQ ID NO: 109397 - DNA, 25 bp, SARS Virus
agttgttctcgacatgagcggtgaa

SEQ ID NO: 109398 - DNA, 25 bp, SARS Virus
gttgttctcgagctgagcggtgaaa

SEQ ID NO: 109399 - DNA, 25 bp, SARS Virus
ttgttctcgagacgagcggtgaaaa

SEQ ID NO: 109400 - DNA, 25 bp, SARS Virus
tgttctcgagatcagcggtgaaaaa

SEQ ID NO: 109401 - DNA, 25 bp, SARS Virus
gttctcgagatgcgcggtgaaaaag

SEQ ID NO: 109402 - DNA, 25 bp, SARS Virus
ttctcgagatgaccggtgaaaaaga

SEQ ID NO: 109403 - DNA, 25 bp, SARS Virus
tctcgagatgagcggtgaaaaagag

SEQ ID NO: 109404 - DNA, 25 bp, SARS Virus
ctcgagatgagccgtgaaaaagagt

SEQ ID NO: 109405 - DNA, 25 bp, SARS Virus
tcgagatgagcgctgaaaaagagta

SEQ ID NO: 109406 - DNA, 25 bp, SARS Virus
cgagatgagcggcgaaaaagagtaa

SEQ ID NO: 109407 - DNA, 25 bp, SARS Virus
gagatgagcggtcaaaaagagtaac

SEQ ID NO: 109408 - DNA, 25 bp, SARS Virus
agatgagcggtgcaaaagagtaaca

SEQ ID NO: 109409 - DNA, 25 bp, SARS Virus
gatgagcggtgacaaagagtaacaa

SEQ ID NO: 109410 - DNA, 25 bp, SARS Virus
atgagcggtgaacaagagtaacaac

SEQ ID NO: 109411 - DNA, 25 bp, SARS Virus
tgagcggtgaaacagagtaacaacg

SEQ ID NO: 109412 - DNA, 25 bp, SARS Virus
gagcggtgaaaacgagtaacaacga

SEQ ID NO: 109413 - DNA, 25 bp, SARS Virus
agcggtgaaaaacagtaacaacgac

SEQ ID NO: 109414 - DNA, 25 bp, SARS Virus
gcggtgaaaaagcgtaacaacgacg

SEQ ID NO: 109415 - DNA, 25 bp, SARS Virus
cggtgaaaaagactaacaacgacga

SEQ ID NO: 109416 - DNA, 25 bp, SARS Virus
ggtgaaaaagagcaacaacgacgag

SEQ ID NO: 109417 - DNA, 25 bp, SARS Virus
gtgaaaaagagtcacaacgacgaga

SEQ ID NO: 109418 - DNA, 25 bp, SARS Virus
tgaaaaagagtaccaacgacgagat

SEQ ID NO: 109419 - DNA, 25 bp, SARS Virus
gaaaaagagtaacaacgacgagatc

SEQ ID NO: 109420 - DNA, 25 bp, SARS Virus
aaaaagagtaaccacgacgagatca

SEQ ID NO: 109421 - DNA, 25 bp, SARS Virus
aaaagagtaacaccgacgagatcat

SEQ ID NO: 109422 - DNA, 25 bp, SARS Virus
aaagagtaacaacgacgagatcata

SEQ ID NO: 109423 - DNA, 25 bp, SARS Virus
aagagtaacaaccacgagatcataa

SEQ ID NO: 109424 - DNA, 25 bp, SARS Virus
agagtaacaacgccgagatcataaa

SEQ ID NO: 109425 - DNA, 25 bp, SARS Virus
gagtaacaacgacgagatcataaaa

SEQ ID NO: 109426 - DNA, 25 bp, SARS Virus
agtaacaacgaccagatcataaaaa

SEQ ID NO: 109427 - DNA, 25 bp, SARS Virus
gtaacaacgacgcgatcataaaaat

SEQ ID NO: 109428 - DNA, 25 bp, SARS Virus
taacaacgacgacatcataaaaatt

SEQ ID NO: 109429 - DNA, 25 bp, SARS Virus
aacaacgacgagctcataaaaatta

SEQ ID NO: 109430 - DNA, 25 bp, SARS Virus
acaacgacgagaccataaaaattat

SEQ ID NO: 109431 - DNA, 25 bp, SARS Virus
caacgacgagatcataaaaattatg

SEQ ID NO: 109432 - DNA, 25 bp, SARS Virus
aacgacgagatcctaaaaattatga

SEQ ID NO: 109433 - DNA, 25 bp, SARS Virus
acgacgagatcacaaaaattatgaa

SEQ ID NO: 109434 - DNA, 25 bp, SARS Virus
cgacgagatcatcaaaattatgaaa

SEQ ID NO: 109435 - DNA, 25 bp, SARS Virus
gacgagatcatacaaattatgaaac

SEQ ID NO: 109436 - DNA, 25 bp, SARS Virus
acgagatcataacaattatgaaacg

SEQ ID NO: 109437 - DNA, 25 bp, SARS Virus
cgagatcataaacattatgaaacga

SEQ ID NO: 109438 - DNA, 25 bp, SARS Virus
gagatcataaaacttatgaaacgaa

SEQ ID NO: 109439 - DNA, 25 bp, SARS Virus
agatcataaaaactatgaaacgaag

SEQ ID NO: 109440 - DNA, 25 bp, SARS Virus
gatcataaaaatcatgaaacgaagt

SEQ ID NO: 109441 - DNA, 25 bp, SARS Virus
cgtctctataacgaatagtaatact

SEQ ID NO: 109442 - DNA, 25 bp, SARS Virus
gtctctataactgatagtaatactc

SEQ ID NO: 109443 - DNA, 25 bp, SARS Virus
tctctataactagtagtaatactcc

SEQ ID NO: 109444 - DNA, 25 bp, SARS Virus
ctctataactaagagtaatactcct

SEQ ID NO: 109445 - DNA, 25 bp, SARS Virus
tctataactaatggtaatactcctg

SEQ ID NO: 109446 - DNA, 25 bp, SARS Virus
ctataactaatagtaatactcctga

SEQ ID NO: 109447 - DNA, 25 bp, SARS Virus
tataactaataggaatactcctgaa

SEQ ID NO: 109448 - DNA, 25 bp, SARS Virus
ataactaatagtgatactcctgaaa

SEQ ID NO: 109449 - DNA, 25 bp, SARS Virus
taactaatagtagtactcctgaaag

SEQ ID NO: 109450 - DNA, 25 bp, SARS Virus
aactaatagtaagactcctgaaagt

SEQ ID NO: 109451 - DNA, 25 bp, SARS Virus
actaatagtaatgctcctgaaagtc

SEQ ID NO: 109452 - DNA, 25 bp, SARS Virus
ctaatagtaatagtcctgaaagtcc

SEQ ID NO: 109453 - DNA, 25 bp, SARS Virus
taatagtaatacgcctgaaagtcct

SEQ ID NO: 109454 - DNA, 25 bp, SARS Virus
aatagtaatactgctgaaagtccta

SEQ ID NO: 109455 - DNA, 25 bp, SARS Virus
atagtaatactcgtgaaagtcctaa

SEQ ID NO: 109456 - DNA, 25 bp, SARS Virus
tagtaatactccggaaagtcctaac

SEQ ID NO: 109457 - DNA, 25 bp, SARS Virus
agtaatactcctgaaagtcctaacg

SEQ ID NO: 109458 - DNA, 25 bp, SARS Virus
gtaatactcctggaagtcctaacga

SEQ ID NO: 109459 - DNA, 25 bp, SARS Virus
taatactcctgagagtcctaacgat

SEQ ID NO: 109460 - DNA, 25 bp, SARS Virus
aatactcctgaaggtcctaacgata

SEQ ID NO: 109461 - DNA, 25 bp, SARS Virus
atactcctgaaagtcctaacgataa

SEQ ID NO: 109462 - DNA, 25 bp, SARS Virus
tactcctgaaaggcctaacgataaa

SEQ ID NO: 109463 - DNA, 25 bp, SARS Virus
actcctgaaagtgctaacgataaac

SEQ ID NO: 109464 - DNA, 25 bp, SARS Virus
ctcctgaaagtcgtaacgataaacc

SEQ ID NO: 109465 - DNA, 25 bp, SARS Virus
tcctgaaagtccgaacgataaacct

SEQ ID NO: 109466 - DNA, 25 bp, SARS Virus
cctgaaagtcctgacgataaacctt

SEQ ID NO: 109467 - DNA, 25 bp, SARS Virus
ctgaaagtcctagcgataaacctta

SEQ ID NO: 109468 - DNA, 25 bp, SARS Virus
tgaaagtcctaaggataaaccttag

SEQ ID NO: 109469 - DNA, 25 bp, SARS Virus
gaaagtcctaacgataaaccttaga

SEQ ID NO: 109470 - DNA, 25 bp, SARS Virus
aaagtcctaacggtaaaccttagaa

SEQ ID NO: 109471 - DNA, 25 bp, SARS Virus
aagtcctaacgagaaaccttagaac

SEQ ID NO: 109472 - DNA, 25 bp, SARS Virus
agtcctaacgatgaaccttagaact

SEQ ID NO: 109473 - DNA, 25 bp, SARS Virus
gtcctaacgatagaccttagaactg

SEQ ID NO: 109474 - DNA, 25 bp, SARS Virus
tcctaacgataagccttagaactgc

SEQ ID NO: 109475 - DNA, 25 bp, SARS Virus
cctaacgataaagcttagaactgca

SEQ ID NO: 109476 - DNA, 25 bp, SARS Virus
ctaacgataaacgttagaactgcaa

SEQ ID NO: 109477 - DNA, 25 bp, SARS Virus
taacgataaaccgtagaactgcaat

SEQ ID NO: 109478 - DNA, 25 bp, SARS Virus
aacgataaacctgagaactgcaata

SEQ ID NO: 109479 - DNA, 25 bp, SARS Virus
acgataaaccttggaactgcaatat

SEQ ID NO: 109480 - DNA, 25 bp, SARS Virus
cgataaaccttagaactgcaatatt

SEQ ID NO: 109481 - DNA, 25 bp, SARS Virus
gataaaccttaggactgcaatatta

SEQ ID NO: 109482 - DNA, 25 bp, SARS Virus
ataaaccttagagctgcaatattat

SEQ ID NO: 109483 - DNA, 25 bp, SARS Virus
taaaccttagaagtgcaatattatt

SEQ ID NO: 109484 - DNA, 25 bp, SARS Virus
aaaccttagaacggcaatattattc

SEQ ID NO: 109485 - DNA, 25 bp, SARS Virus
aaccttagaactgcaatattattca

SEQ ID NO: 109486 - DNA, 25 bp, SARS Virus
accttagaactggaatattattcaa

SEQ ID NO: 109487 - DNA, 25 bp, SARS Virus
ccttagaactgcgatattattcaag

SEQ ID NO: 109488 - DNA, 25 bp, SARS Virus
cttagaactgcagtattattcaagt

SEQ ID NO: 109489 - DNA, 25 bp, SARS Virus
ttagaactgcaagattattcaagtt

SEQ ID NO: 109490 - DNA, 25 bp, SARS Virus
tagaactgcaatgttattcaagtta

SEQ ID NO: 109491 - DNA, 25 bp, SARS Virus
agaactgcaatagtattcaagttat

SEQ ID NO: 109492 - DNA, 25 bp, SARS Virus
gaactgcaatatgattcaagttatc

SEQ ID NO: 109493 - DNA, 25 bp, SARS Virus
aactgcaatattgttcaagttatca

SEQ ID NO: 109494 - DNA, 25 bp, SARS Virus
actgcaatattagtcaagttatcac

SEQ ID NO: 109495 - DNA, 25 bp, SARS Virus
ctgcaatattatgcaagttatcact

SEQ ID NO: 109496 - DNA, 25 bp, SARS Virus
tgcaatattattgaagttatcactc

SEQ ID NO: 109497 - DNA, 25 bp, SARS Virus
gcaatattattcgagttatcactct

SEQ ID NO: 109498 - DNA, 25 bp, SARS Virus
caatattattcaggttatcactctg

SEQ ID NO: 109499 - DNA, 25 bp, SARS Virus
aatattattcaagttatcactctgt

SEQ ID NO: 109500 - DNA, 25 bp, SARS Virus
atattattcaaggtatcactctgtt

SEQ ID NO: 109501 - DNA, 25 bp, SARS Virus
tattattcaagtgatcactctgtta

SEQ ID NO: 109502 - DNA, 25 bp, SARS Virus
attattcaagttgtcactctgttaa

SEQ ID NO: 109503 - DNA, 25 bp, SARS Virus
ttattcaagttagcactctgttaat

SEQ ID NO: 109504 - DNA, 25 bp, SARS Virus
tattcaagttatgactctgttaata

SEQ ID NO: 109505 - DNA, 25 bp, SARS Virus
attcaagttatcgctctgttaataa

SEQ ID NO: 109506 - DNA, 25 bp, SARS Virus
ttcaagttatcagtctgttaataaa

SEQ ID NO: 109507 - DNA, 25 bp, SARS Virus
tcaagttatcacgctgttaataaat

SEQ ID NO: 109508 - DNA, 25 bp, SARS Virus
caagttatcactgtgttaataaatt

SEQ ID NO: 109509 - DNA, 25 bp, SARS Virus
aagttatcactcggttaataaattc

SEQ ID NO: 109510 - DNA, 25 bp, SARS Virus
agttatcactctgttaataaattcg

SEQ ID NO: 109511 - DNA, 25 bp, SARS Virus
gttatcactctggtaataaattcgg

SEQ ID NO: 109512 - DNA, 25 bp, SARS Virus
ttatcactctgtgaataaattcgga

SEQ ID NO: 109513 - DNA, 25 bp, SARS Virus
tatcactctgttgataaattcggag

SEQ ID NO: 109514 - DNA, 25 bp, SARS Virus
atcactctgttagtaaattcggaga

SEQ ID NO: 109515 - DNA, 25 bp, SARS Virus
tcactctgttaagaaattcggagat

SEQ ID NO: 109516 - DNA, 25 bp, SARS Virus
cactctgttaatgaattcggagatt

SEQ ID NO: 109517 - DNA, 25 bp, SARS Virus
actctgttaatagattcggagattg

SEQ ID NO: 109518 - DNA, 25 bp, SARS Virus
ctctgttaataagttcggagattga

SEQ ID NO: 109519 - DNA, 25 bp, SARS Virus
tctgttaataaagtcggagattgat

SEQ ID NO: 109520 - DNA, 25 bp, SARS Virus
ctgttaataaatgcggagattgatt

SEQ ID NO: 109521 - DNA, 25 bp, SARS Virus
tgttaataaattgggagattgattc

SEQ ID NO: 109522 - DNA, 25 bp, SARS Virus
gttaataaattcggagattgattct

SEQ ID NO: 109523 - DNA, 25 bp, SARS Virus
ttaataaattcggagattgattctt

SEQ ID NO: 109524 - DNA, 25 bp, SARS Virus
taataaattcggggattgattcttc

SEQ ID NO: 109525 - DNA, 25 bp, SARS Virus
aataaattcggagattgattcttct

SEQ ID NO: 109526 - DNA, 25 bp, SARS Virus
ataaattcggaggttgattcttctt

SEQ ID NO: 109527 - DNA, 25 bp, SARS Virus
taaattcggagagtgattcttctta

SEQ ID NO: 109528 - DNA, 25 bp, SARS Virus
aaattcggagatggattcttcttaa

SEQ ID NO: 109529 - DNA, 25 bp, SARS Virus
aattcggagattgattcttcttaat

SEQ ID NO: 109530 - DNA, 25 bp, SARS Virus
attcggagattggttcttcttaata

SEQ ID NO: 109531 - DNA, 25 bp, SARS Virus
ttcggagattgagtcttcttaataa

SEQ ID NO: 109532 - DNA, 25 bp, SARS Virus
tcggagattgatgcttcttaataag

SEQ ID NO: 109533 - DNA, 25 bp, SARS Virus
cggagattgattgttcttaataagc

SEQ ID NO: 109534 - DNA, 25 bp, SARS Virus
ggagattgattcgtcttaataagcc

SEQ ID NO: 109535 - DNA, 25 bp, SARS Virus
gagattgattctgcttaataagcct

SEQ ID NO: 109536 - DNA, 25 bp, SARS Virus
agattgattcttgttaataagcctc

SEQ ID NO: 109537 - DNA, 25 bp, SARS Virus
gattgattcttcgtaataagcctca

SEQ ID NO: 109538 - DNA, 25 bp, SARS Virus
attgattcttctgaataagcctcaa

SEQ ID NO: 109539 - DNA, 25 bp, SARS Virus
ttgattcttcttgataagcctcaat

SEQ ID NO: 109540 - DNA, 25 bp, SARS Virus
tgattcttcttagtaagcctcaatc

SEQ ID NO: 109541 - DNA, 25 bp, SARS Virus
gattcttcttaagaagcctcaatct

SEQ ID NO: 109542 - DNA, 25 bp, SARS Virus
attcttcttaatgagcctcaatcta

SEQ ID NO: 109543 - DNA, 25 bp, SARS Virus
ttcttcttaataggcctcaatctac

SEQ ID NO: 109544 - DNA, 25 bp, SARS Virus
tcttcttaataagcctcaatctact

SEQ ID NO: 109545 - DNA, 25 bp, SARS Virus
cttcttaataaggctcaatctacta

SEQ ID NO: 109546 - DNA, 25 bp, SARS Virus
ttcttaataagcgtcaatctactac

SEQ ID NO: 109547 - DNA, 25 bp, SARS Virus
tcttaataagccgcaatctactact

SEQ ID NO: 109548 - DNA, 25 bp, SARS Virus
cttaataagcctgaatctactactt

SEQ ID NO: 109549 - DNA, 25 bp, SARS Virus
ttaataagcctcgatctactacttc

SEQ ID NO: 109550 - DNA, 25 bp, SARS Virus
taataagcctcagtctactacttct

SEQ ID NO: 109551 - DNA, 25 bp, SARS Virus
aataagcctcaagctactacttctt

SEQ ID NO: 109552 - DNA, 25 bp, SARS Virus
ataagcctcaatgtactacttcttg

SEQ ID NO: 109553 - DNA, 25 bp, SARS Virus
taagcctcaatcgactacttcttgg

SEQ ID NO: 109554 - DNA, 25 bp, SARS Virus
aagcctcaatctgctacttcttgga

SEQ ID NO: 109555 - DNA, 25 bp, SARS Virus
agcctcaatctagtacttcttggat

SEQ ID NO: 109556 - DNA, 25 bp, SARS Virus
gcctcaatctacgacttcttggata

SEQ ID NO: 109557 - DNA, 25 bp, SARS Virus
cctcaatctactgcttcttggatac

SEQ ID NO: 109558 - DNA, 25 bp, SARS Virus
ctcaatctactagttcttggatacc

SEQ ID NO: 109559 - DNA, 25 bp, SARS Virus
tcaatctactacgtcttggatacct

SEQ ID NO: 109560 - DNA, 25 bp, SARS Virus
caatctactactgcttggatacctc

SEQ ID NO: 109561 - DNA, 25 bp, SARS Virus
aatctactacttgttggatacctca

SEQ ID NO: 109562 - DNA, 25 bp, SARS Virus
atctactacttcgtggatacctcaa

SEQ ID NO: 109563 - DNA, 25 bp, SARS Virus
tctactacttctgggatacctcaat

SEQ ID NO: 109564 - DNA, 25 bp, SARS Virus
ctactacttcttggatacctcaatc

SEQ ID NO: 109565 - DNA, 25 bp, SARS Virus
tactacttcttggatacctcaatct

SEQ ID NO: 109566 - DNA, 25 bp, SARS Virus
actacttcttgggtacctcaatcta

SEQ ID NO: 109567 - DNA, 25 bp, SARS Virus
ctacttcttggagacctcaatctaa

SEQ ID NO: 109568 - DNA, 25 bp, SARS Virus
tacttcttggatgcctcaatctaat

SEQ ID NO: 109569 - DNA, 25 bp, SARS Virus
acttcttggatagctcaatctaata

SEQ ID NO: 109570 - DNA, 25 bp, SARS Virus
cttcttggatacgtcaatctaatag

SEQ ID NO: 109571 - DNA, 25 bp, SARS Virus
ttcttggataccgcaatctaatagg

SEQ ID NO: 109572 - DNA, 25 bp, SARS Virus
tcttggatacctgaatctaataggt

SEQ ID NO: 109573 - DNA, 25 bp, SARS Virus
cttggatacctcgatctaataggta

SEQ ID NO: 109574 - DNA, 25 bp, SARS Virus
ttggatacctcagtctaataggtat

SEQ ID NO: 109575 - DNA, 25 bp, SARS Virus
tggatacctcaagctaataggtatt

SEQ ID NO: 109576 - DNA, 25 bp, SARS Virus
ggatacctcaatgtaataggtattt

SEQ ID NO: 109577 - DNA, 25 bp, SARS Virus
gatacctcaatcgaataggtatttt

SEQ ID NO: 109578 - DNA, 25 bp, SARS Virus
atacctcaatctgataggtattttg

SEQ ID NO: 109579 - DNA, 25 bp, SARS Virus
tacctcaatctagtaggtattttgc

SEQ ID NO: 109580 - DNA, 25 bp, SARS Virus
acctcaatctaagaggtattttgct

SEQ ID NO: 109581 - DNA, 25 bp, SARS Virus
cctcaatctaatgggtattttgctt

SEQ ID NO: 109582 - DNA, 25 bp, SARS Virus
ctcaatctaataggtattttgcttg

SEQ ID NO: 109583 - DNA, 25 bp, SARS Virus
tcaatctaataggtattttgcttgt

SEQ ID NO: 109584 - DNA, 25 bp, SARS Virus
caatctaatagggattttgcttgta

SEQ ID NO: 109585 - DNA, 25 bp, SARS Virus
aatctaataggtgttttgcttgtac

SEQ ID NO: 109586 - DNA, 25 bp, SARS Virus
atctaataggtagtttgcttgtact

SEQ ID NO: 109587 - DNA, 25 bp, SARS Virus
tctaataggtatgttgcttgtactt

SEQ ID NO: 109588 - DNA, 25 bp, SARS Virus
ctaataggtattgtgcttgtacttt

SEQ ID NO: 109589 - DNA, 25 bp, SARS Virus
taataggtatttggcttgtactttt

SEQ ID NO: 109590 - DNA, 25 bp, SARS Virus
aataggtattttgcttgtactttta

SEQ ID NO: 109591 - DNA, 25 bp, SARS Virus
ataggtattttggttgtacttttaa

SEQ ID NO: 109592 - DNA, 25 bp, SARS Virus
taggtattttgcgtgtacttttaat

SEQ ID NO: 109593 - DNA, 25 bp, SARS Virus
aggtattttgctggtacttttaata

SEQ ID NO: 109594 - DNA, 25 bp, SARS Virus
ggtattttgcttgtacttttaataa

SEQ ID NO: 109595 - DNA, 25 bp, SARS Virus
gtattttgcttggacttttaataag

SEQ ID NO: 109596 - DNA, 25 bp, SARS Virus
tattttgcttgtgcttttaataaga

SEQ ID NO: 109597 - DNA, 25 bp, SARS Virus
attttgcttgtagttttaataagag

SEQ ID NO: 109598 - DNA, 25 bp, SARS Virus
ttttgcttgtacgtttaataagaga

SEQ ID NO: 109599 - DNA, 25 bp, SARS Virus
tttgcttgtactgttaataagagaa

SEQ ID NO: 109600 - DNA, 25 bp, SARS Virus
ttgcttgtacttgtaataagagaag

SEQ ID NO: 109601 - DNA, 25 bp, SARS Virus
tgcttgtactttgaataagagaagg

SEQ ID NO: 109602 - DNA, 25 bp, SARS Virus
gcttgtacttttgataagagaagga

SEQ ID NO: 109603 - DNA, 25 bp, SARS Virus
cttgtacttttagtaagagaaggac

SEQ ID NO: 109604 - DNA, 25 bp, SARS Virus
ttgtacttttaagaagagaaggact

SEQ ID NO: 109605 - DNA, 25 bp, SARS Virus
tgtacttttaatgagagaaggactg

SEQ ID NO: 109606 - DNA, 25 bp, SARS Virus
gtacttttaataggagaaggactgt

SEQ ID NO: 109607 - DNA, 25 bp, SARS Virus
tacttttaataagagaaggactgta

SEQ ID NO: 109608 - DNA, 25 bp, SARS Virus
acttttaataagggaaggactgtaa

SEQ ID NO: 109609 - DNA, 25 bp, SARS Virus
cttttaataagagaaggactgtaac

SEQ ID NO: 109610 - DNA, 25 bp, SARS Virus
ttttaataagaggaggactgtaact

SEQ ID NO: 109611 - DNA, 25 bp, SARS Virus
tttaataagagagggactgtaacta

SEQ ID NO: 109612 - DNA, 25 bp, SARS Virus
ttaataagagaaggactgtaactaa

SEQ ID NO: 109613 - DNA, 25 bp, SARS Virus
taataagagaaggactgtaactaac

SEQ ID NO: 109614 - DNA, 25 bp, SARS Virus
aataagagaagggctgtaactaaca

SEQ ID NO: 109615 - DNA, 25 bp, SARS Virus
ataagagaaggagtgtaactaacat

SEQ ID NO: 109616 - DNA, 25 bp, SARS Virus
taagagaaggacggtaactaacata

SEQ ID NO: 109617 - DNA, 25 bp, SARS Virus
aagagaaggactgtaactaacataa

SEQ ID NO: 109618 - DNA, 25 bp, SARS Virus
agagaaggactggaactaacataaa

SEQ ID NO: 109619 - DNA, 25 bp, SARS Virus
gagaaggactgtgactaacataaat

SEQ ID NO: 109620 - DNA, 25 bp, SARS Virus
agaaggactgtagctaacataaatg

SEQ ID NO: 109621 - DNA, 25 bp, SARS Virus
gaaggactgtaagtaacataaatgt

SEQ ID NO: 109622 - DNA, 25 bp, SARS Virus
aaggactgtaacgaacataaatgta

SEQ ID NO: 109623 - DNA, 25 bp, SARS Virus
aggactgtaactgacataaatgtag

SEQ ID NO: 109624 - DNA, 25 bp, SARS Virus
ggactgtaactagcataaatgtaga

SEQ ID NO: 109625 - DNA, 25 bp, SARS Virus
gactgtaactaagataaatgtagaa

SEQ ID NO: 109626 - DNA, 25 bp, SARS Virus
actgtaactaacgtaaatgtagaac

SEQ ID NO: 109627 - DNA, 25 bp, SARS Virus
ctgtaactaacagaaatgtagaacg

SEQ ID NO: 109628 - DNA, 25 bp, SARS Virus
tgtaactaacatgaatgtagaacgc

SEQ ID NO: 109629 - DNA, 25 bp, SARS Virus
gtaactaacatagatgtagaacgct

SEQ ID NO: 109630 - DNA, 25 bp, SARS Virus
taactaacataagtgtagaacgctc

SEQ ID NO: 109631 - DNA, 25 bp, SARS Virus
aactaacataaaggtagaacgctcg

SEQ ID NO: 109632 - DNA, 25 bp, SARS Virus
actaacataaatgtagaacgctcga

SEQ ID NO: 109633 - DNA, 25 bp, SARS Virus
ctaacataaatggagaacgctcgat

SEQ ID NO: 109634 - DNA, 25 bp, SARS Virus
taacataaatgtggaacgctcgata

SEQ ID NO: 109635 - DNA, 25 bp, SARS Virus
aacataaatgtagaacgctcgatat

SEQ ID NO: 109636 - DNA, 25 bp, SARS Virus
acataaatgtaggacgctcgatata

SEQ ID NO: 109637 - DNA, 25 bp, SARS Virus
cataaatgtagagcgctcgatatag

SEQ ID NO: 109638 - DNA, 25 bp, SARS Virus
ataaatgtagaaggctcgatatagt

SEQ ID NO: 109639 - DNA, 25 bp, SARS Virus
taaatgtagaacgctcgatatagtg

SEQ ID NO: 109640 - DNA, 25 bp, SARS Virus
aaatgtagaacggtcgatatagtga

SEQ ID NO: 109641 - DNA, 25 bp, SARS Virus
aatgtagaacgcgcgatatagtgat

SEQ ID NO: 109642 - DNA, 25 bp, SARS Virus
atgtagaacgctggatatagtgata

SEQ ID NO: 109643 - DNA, 25 bp, SARS Virus
tgtagaacgctcgatatagtgatag

SEQ ID NO: 109644 - DNA, 25 bp, SARS Virus
gtagaacgctcggtatagtgatagt

SEQ ID NO: 109645 - DNA, 25 bp, SARS Virus
tagaacgctcgagatagtgatagtc

SEQ ID NO: 109646 - DNA, 25 bp, SARS Virus
agaacgctcgatgtagtgatagtcc

SEQ ID NO: 109647 - DNA, 25 bp, SARS Virus
gaacgctcgatagagtgatagtcct

SEQ ID NO: 109648 - DNA, 25 bp, SARS Virus
aacgctcgatatggtgatagtcctc

SEQ ID NO: 109649 - DNA, 25 bp, SARS Virus
acgctcgatatagtgatagtcctca

SEQ ID NO: 109650 - DNA, 25 bp, SARS Virus
cgctcgatatagggatagtcctcac

SEQ ID NO: 109651 - DNA, 25 bp, SARS Virus
gctcgatatagtgatagtcctcaca

SEQ ID NO: 109652 - DNA, 25 bp, SARS Virus
ctcgatatagtggtagtcctcacac

SEQ ID NO: 109653 - DNA, 25 bp, SARS Virus
tcgatatagtgagagtcctcacaca

SEQ ID NO: 109654 - DNA, 25 bp, SARS Virus
cgatatagtgatggtcctcacacaa

SEQ ID NO: 109655 - DNA, 25 bp, SARS Virus
gatatagtgatagtcctcacacaat

SEQ ID NO: 109656 - DNA, 25 bp, SARS Virus
atatagtgataggcctcacacaatc

SEQ ID NO: 109657 - DNA, 25 bp, SARS Virus
tatagtgatagtgctcacacaatct

SEQ ID NO: 109658 - DNA, 25 bp, SARS Virus
atagtgatagtcgtcacacaatctc

SEQ ID NO: 109659 - DNA, 25 bp, SARS Virus
tagtgatagtccgcacacaatctcc

SEQ ID NO: 109660 - DNA, 25 bp, SARS Virus
agtgatagtcctgacacaatctcca

SEQ ID NO: 109661 - DNA, 25 bp, SARS Virus
gtgatagtcctcgcacaatctccat

SEQ ID NO: 109662 - DNA, 25 bp, SARS Virus
tgatagtcctcagacaatctccatg

SEQ ID NO: 109663 - DNA, 25 bp, SARS Virus
gatagtcctcacgcaatctccatgc

SEQ ID NO: 109664 - DNA, 25 bp, SARS Virus
atagtcctcacagaatctccatgct

SEQ ID NO: 109665 - DNA, 25 bp, SARS Virus
tagtcctcacacgatctccatgctg

SEQ ID NO: 109666 - DNA, 25 bp, SARS Virus
agtcctcacacagtctccatgctga

SEQ ID NO: 109667 - DNA, 25 bp, SARS Virus
gtcctcacacaagctccatgctgac

SEQ ID NO: 109668 - DNA, 25 bp, SARS Virus
tcctcacacaatgtccatgctgaca

SEQ ID NO: 109669 - DNA, 25 bp, SARS Virus
cctcacacaatcgccatgctgacat

SEQ ID NO: 109670 - DNA, 25 bp, SARS Virus
ctcacacaatctgcatgctgacatg

SEQ ID NO: 109671 - DNA, 25 bp, SARS Virus
tcacacaatctcgatgctgacatga

SEQ ID NO: 109672 - DNA, 25 bp, SARS Virus
cacacaatctccgtgctgacatgat

SEQ ID NO: 109673 - DNA, 25 bp, SARS Virus
acacaatctccaggctgacatgatg

SEQ ID NO: 109674 - DNA, 25 bp, SARS Virus
cacaatctccatgctgacatgatga

SEQ ID NO: 109675 - DNA, 25 bp, SARS Virus
acaatctccatggtgacatgatgat

SEQ ID NO: 109676 - DNA, 25 bp, SARS Virus
caatctccatgcggacatgatgatt

SEQ ID NO: 109677 - DNA, 25 bp, SARS Virus
aatctccatgctgacatgatgattt

SEQ ID NO: 109678 - DNA, 25 bp, SARS Virus
atctccatgctggcatgatgatttt

SEQ ID NO: 109679 - DNA, 25 bp, SARS Virus
tctccatgctgagatgatgattttc

SEQ ID NO: 109680 - DNA, 25 bp, SARS Virus
ctccatgctgacgtgatgattttct

SEQ ID NO: 109681 - DNA, 25 bp, SARS Virus
tccatgctgacaggatgattttctt

SEQ ID NO: 109682 - DNA, 25 bp, SARS Virus
ccatgctgacatgatgattttcttg

SEQ ID NO: 109683 - DNA, 25 bp, SARS Virus
catgctgacatggtgattttcttgg

SEQ ID NO: 109684 - DNA, 25 bp, SARS Virus
atgctgacatgaggattttcttgga

SEQ ID NO: 109685 - DNA, 25 bp, SARS Virus
tgctgacatgatgattttcttggaa

SEQ ID NO: 109686 - DNA, 25 bp, SARS Virus
gctgacatgatggttttcttggaac

SEQ ID NO: 109687 - DNA, 25 bp, SARS Virus
ctgacatgatgagtttcttggaacg

SEQ ID NO: 109688 - DNA, 25 bp, SARS Virus
tgacatgatgatgttcttggaacgg

SEQ ID NO: 109689 - DNA, 25 bp, SARS Virus
gacatgatgattgtcttggaacggg

SEQ ID NO: 109690 - DNA, 25 bp, SARS Virus
acatgatgatttgcttggaacgggt

SEQ ID NO: 109691 - DNA, 25 bp, SARS Virus
catgatgattttgttggaacgggta

SEQ ID NO: 109692 - DNA, 25 bp, SARS Virus
atgatgattttcgtggaacgggtag

SEQ ID NO: 109693 - DNA, 25 bp, SARS Virus
tgatgattttctgggaacgggtagt

SEQ ID NO: 109694 - DNA, 25 bp, SARS Virus
gatgattttcttggaacgggtagtc

SEQ ID NO: 109695 - DNA, 25 bp, SARS Virus
atgattttcttggaacgggtagtcc

SEQ ID NO: 109696 - DNA, 25 bp, SARS Virus
tgattttcttgggacgggtagtcct

SEQ ID NO: 109697 - DNA, 25 bp, SARS Virus
gattttcttggagcgggtagtcctt

SEQ ID NO: 109698 - DNA, 25 bp, SARS Virus
attttcttggaaggggtagtccttg

SEQ ID NO: 109699 - DNA, 25 bp, SARS Virus
ttttcttggaacgggtagtccttgt

SEQ ID NO: 109700 - DNA, 25 bp, SARS Virus
tttcttggaacgggtagtccttgta

SEQ ID NO: 109701 - DNA, 25 bp, SARS Virus
ttcttggaacgggtagtccttgtat

SEQ ID NO: 109702 - DNA, 25 bp, SARS Virus
tcttggaacggggagtccttgtatg

SEQ ID NO: 109703 - DNA, 25 bp, SARS Virus
cttggaacgggtggtccttgtatgc

SEQ ID NO: 109704 - DNA, 25 bp, SARS Virus
ttggaacgggtagtccttgtatgct

SEQ ID NO: 109705 - DNA, 25 bp, SARS Virus
tggaacgggtaggccttgtatgctc

SEQ ID NO: 109706 - DNA, 25 bp, SARS Virus
ggaacgggtagtgcttgtatgctcc

SEQ ID NO: 109707 - DNA, 25 bp, SARS Virus
gaacgggtagtcgttgtatgctccc

SEQ ID NO: 109708 - DNA, 25 bp, SARS Virus
aacgggtagtccgtgtatgctcccg

SEQ ID NO: 109709 - DNA, 25 bp, SARS Virus
acgggtagtcctggtatgctcccgt

SEQ ID NO: 109710 - DNA, 25 bp, SARS Virus
cgggtagtccttgtatgctcccgtt

SEQ ID NO: 109711 - DNA, 25 bp, SARS Virus
gggtagtccttggatgctcccgtta

SEQ ID NO: 109712 - DNA, 25 bp, SARS Virus
ggtagtccttgtgtgctcccgttaa

SEQ ID NO: 109713 - DNA, 25 bp, SARS Virus
gtagtccttgtaggctcccgttaag

SEQ ID NO: 109714 - DNA, 25 bp, SARS Virus
tagtccttgtatgctcccgttaagt

SEQ ID NO: 109715 - DNA, 25 bp, SARS Virus
agtccttgtatggtcccgttaagtg

SEQ ID NO: 109716 - DNA, 25 bp, SARS Virus
gtccttgtatgcgcccgttaagtgg

SEQ ID NO: 109717 - DNA, 25 bp, SARS Virus
tccttgtatgctgccgttaagtggt

SEQ ID NO: 109718 - DNA, 25 bp, SARS Virus
ccttgtatgctcgcgttaagtggta

SEQ ID NO: 109719 - DNA, 25 bp, SARS Virus
cttgtatgctccggttaagtggtaa

SEQ ID NO: 109720 - DNA, 25 bp, SARS Virus
ttgtatgctcccgttaagtggtaaa

SEQ ID NO: 109721 - DNA, 25 bp, SARS Virus
tgtatgctcccggtaagtggtaaag

SEQ ID NO: 109722 - DNA, 25 bp, SARS Virus
gtatgctcccgtgaagtggtaaagt

SEQ ID NO: 109723 - DNA, 25 bp, SARS Virus
tatgctcccgttgagtggtaaagtg

SEQ ID NO: 109724 - DNA, 25 bp, SARS Virus
atgctcccgttaggtggtaaagtgg

SEQ ID NO: 109725 - DNA, 25 bp, SARS Virus
tgctcccgttaagtggtaaagtggg

SEQ ID NO: 109726 - DNA, 25 bp, SARS Virus
gctcccgttaaggggtaaagtggga

SEQ ID NO: 109727 - DNA, 25 bp, SARS Virus
ctcccgttaagtggtaaagtgggag

SEQ ID NO: 109728 - DNA, 25 bp, SARS Virus
tcccgttaagtggtaaagtgggaga

SEQ ID NO: 109729 - DNA, 25 bp, SARS Virus
cccgttaagtgggaaagtgggagaa

SEQ ID NO: 109730 - DNA, 25 bp, SARS Virus
ccgttaagtggtgaagtgggagaac

SEQ ID NO: 109731 - DNA, 25 bp, SARS Virus
cgttaagtggtagagtgggagaacg

SEQ ID NO: 109732 - DNA, 25 bp, SARS Virus
gttaagtggtaaggtgggagaacga

SEQ ID NO: 109733 - DNA, 25 bp, SARS Virus
ttaagtggtaaagtgggagaacgac

SEQ ID NO: 109734 - DNA, 25 bp, SARS Virus
taagtggtaaagggggagaacgact

SEQ ID NO: 109735 - DNA, 25 bp, SARS Virus
aagtggtaaagtgggagaacgactg

SEQ ID NO: 109736 - DNA, 25 bp, SARS Virus
agtggtaaagtgggagaacgactgt

SEQ ID NO: 109737 - DNA, 25 bp, SARS Virus
gtggtaaagtgggagaacgactgtt

SEQ ID NO: 109738 - DNA, 25 bp, SARS Virus
tggtaaagtgggggaacgactgtta

SEQ ID NO: 109739 - DNA, 25 bp, SARS Virus
ggtaaagtgggagaacgactgttat

SEQ ID NO: 109740 - DNA, 25 bp, SARS Virus
gtaaagtgggaggacgactgttatt

SEQ ID NO: 109741 - DNA, 25 bp, SARS Virus
taaagtgggagagcgactgttattt

SEQ ID NO: 109742 - DNA, 25 bp, SARS Virus
aaagtgggagaaggactgttattta

SEQ ID NO: 109743 - DNA, 25 bp, SARS Virus
aagtgggagaacgactgttatttaa

SEQ ID NO: 109744 - DNA, 25 bp, SARS Virus
agtgggagaacggctgttatttaaa

SEQ ID NO: 109745 - DNA, 25 bp, SARS Virus
gtgggagaacgagtgttatttaaac

SEQ ID NO: 109746 - DNA, 25 bp, SARS Virus
tgggagaacgacggttatttaaacg

SEQ ID NO: 109747 - DNA, 25 bp, SARS Virus
gggagaacgactgttatttaaacgt

SEQ ID NO: 109748 - DNA, 25 bp, SARS Virus
ggagaacgactggtatttaaacgtg

SEQ ID NO: 109749 - DNA, 25 bp, SARS Virus
gagaacgactgtgatttaaacgtga

SEQ ID NO: 109750 - DNA, 25 bp, SARS Virus
agaacgactgttgtttaaacgtgat

SEQ ID NO: 109751 - DNA, 25 bp, SARS Virus
gaacgactgttagttaaacgtgatt

SEQ ID NO: 109752 - DNA, 25 bp, SARS Virus
aacgactgttatgtaaacgtgattg

SEQ ID NO: 109753 - DNA, 25 bp, SARS Virus
acgactgttattgaaacgtgattga

SEQ ID NO: 109754 - DNA, 25 bp, SARS Virus
cgactgttatttgaacgtgattgaa

SEQ ID NO: 109755 - DNA, 25 bp, SARS Virus
gactgttatttagacgtgattgaac

SEQ ID NO: 109756 - DNA, 25 bp, SARS Virus
actgttatttaagcgtgattgaacg

SEQ ID NO: 109757 - DNA, 25 bp, SARS Virus
ctgttatttaaaggtgattgaacgt

SEQ ID NO: 109758 - DNA, 25 bp, SARS Virus
tgttatttaaacgtgattgaacgtg

SEQ ID NO: 109759 - DNA, 25 bp, SARS Virus
gttatttaaacgggattgaacgtga

SEQ ID NO: 109760 - DNA, 25 bp, SARS Virus
ttatttaaacgtgattgaacgtgat

SEQ ID NO: 109761 - DNA, 25 bp, SARS Virus
tatttaaacgtggttgaacgtgatc

SEQ ID NO: 109762 - DNA, 25 bp, SARS Virus
atttaaacgtgagtgaacgtgatcg

SEQ ID NO: 109763 - DNA, 25 bp, SARS Virus
tttaaacgtgatggaacgtgatcgt

SEQ ID NO: 109764 - DNA, 25 bp, SARS Virus
ttaaacgtgattgaacgtgatcgtg

SEQ ID NO: 109765 - DNA, 25 bp, SARS Virus
taaacgtgattggacgtgatcgtgt

SEQ ID NO: 109766 - DNA, 25 bp, SARS Virus
aaacgtgattgagcgtgatcgtgtg

SEQ ID NO: 109767 - DNA, 25 bp, SARS Virus
aacgtgattgaaggtgatcgtgtgt

SEQ ID NO: 109768 - DNA, 25 bp, SARS Virus
acgtgattgaacgtgatcgtgtgtg

SEQ ID NO: 109769 - DNA, 25 bp, SARS Virus
cgtgattgaacgggatcgtgtgtga

SEQ ID NO: 109770 - DNA, 25 bp, SARS Virus
gtgattgaacgtgatcgtgtgtgaa

SEQ ID NO: 109771 - DNA, 25 bp, SARS Virus
tgattgaacgtggtcgtgtgtgaaa

SEQ ID NO: 109772 - DNA, 25 bp, SARS Virus
gattgaacgtgagcgtgtgtgaaac

SEQ ID NO: 109773 - DNA, 25 bp, SARS Virus
attgaacgtgatggtgtgtgaaacg

SEQ ID NO: 109774 - DNA, 25 bp, SARS Virus
ttgaacgtgatcgtgtgtgaaacga

SEQ ID NO: 109775 - DNA, 25 bp, SARS Virus
tgaacgtgatcgggtgtgaaacgaa

SEQ ID NO: 109776 - DNA, 25 bp, SARS Virus
gaacgtgatcgtgtgtgaaacgaaa

SEQ ID NO: 109777 - DNA, 25 bp, SARS Virus
aacgtgatcgtgggtgaaacgaaaa

SEQ ID NO: 109778 - DNA, 25 bp, SARS Virus
acgtgatcgtgtgtgaaacgaaaac

SEQ ID NO: 109779 - DNA, 25 bp, SARS Virus
cgtgatcgtgtgggaaacgaaaacg

SEQ ID NO: 109780 - DNA, 25 bp, SARS Virus
gtgatcgtgtgtgaaacgaaaacga

SEQ ID NO: 109781 - DNA, 25 bp, SARS Virus
tgatcgtgtgtggaacgaaaacgaa

SEQ ID NO: 109782 - DNA, 25 bp, SARS Virus
gatcgtgtgtgagacgaaaacgaac

SEQ ID NO: 109783 - DNA, 25 bp, SARS Virus
atcgtgtgtgaagcgaaaacgaaca

SEQ ID NO: 109784 - DNA, 25 bp, SARS Virus
tcgtgtgtgaaaggaaaacgaacac

SEQ ID NO: 109785 - DNA, 25 bp, SARS Virus
cgtgtgtgaaacgaaaacgaacacg

SEQ ID NO: 109786 - DNA, 25 bp, SARS Virus
gtgtgtgaaacggaaacgaacacga

SEQ ID NO: 109787 - DNA, 25 bp, SARS Virus
tgtgtgaaacgagaacgaacacgac

SEQ ID NO: 109788 - DNA, 25 bp, SARS Virus
gtgtgaaacgaagacgaacacgact

SEQ ID NO: 109789 - DNA, 25 bp, SARS Virus
tgtgaaacgaaagcgaacacgactg

SEQ ID NO: 109790 - DNA, 25 bp, SARS Virus
gtgaaacgaaaaggaacacgactgc

SEQ ID NO: 109791 - DNA, 25 bp, SARS Virus
tgaaacgaaaacgaacacgactgcc

SEQ ID NO: 109792 - DNA, 25 bp, SARS Virus
gaaacgaaaacggacacgactgcca

SEQ ID NO: 109793 - DNA, 25 bp, SARS Virus
aaacgaaaacgagcacgactgccat

SEQ ID NO: 109794 - DNA, 25 bp, SARS Virus
aacgaaaacgaagacgactgccatg

SEQ ID NO: 109795 - DNA, 25 bp, SARS Virus
acgaaaacgaacgcgactgccatga

SEQ ID NO: 109796 - DNA, 25 bp, SARS Virus
cgaaaacgaacaggactgccatgag

SEQ ID NO: 109797 - DNA, 25 bp, SARS Virus
gaaaacgaacacgactgccatgagc

SEQ ID NO: 109798 - DNA, 25 bp, SARS Virus
aaaacgaacacggctgccatgagct

SEQ ID NO: 109799 - DNA, 25 bp, SARS Virus
aaacgaacacgagtgccatgagctg

SEQ ID NO: 109800 - DNA, 25 bp, SARS Virus
aacgaacacgacggccatgagctgt

SEQ ID NO: 109801 - DNA, 25 bp, SARS Virus
acgaacacgactgccatgagctgta

SEQ ID NO: 109802 - DNA, 25 bp, SARS Virus
cgaacacgactggcatgagctgtat

SEQ ID NO: 109803 - DNA, 25 bp, SARS Virus
gaacacgactgcgatgagctgtatg

SEQ ID NO: 109804 - DNA, 25 bp, SARS Virus
aacacgactgccgtgagctgtatgg

SEQ ID NO: 109805 - DNA, 25 bp, SARS Virus
acacgactgccaggagctgtatgga

SEQ ID NO: 109806 - DNA, 25 bp, SARS Virus
cacgactgccatgagctgtatggat

SEQ ID NO: 109807 - DNA, 25 bp, SARS Virus
acgactgccatgggctgtatggata

SEQ ID NO: 109808 - DNA, 25 bp, SARS Virus
cgactgccatgagctgtatggatag

SEQ ID NO: 109809 - DNA, 25 bp, SARS Virus
gactgccatgaggtgtatggatagt

SEQ ID NO: 109810 - DNA, 25 bp, SARS Virus
actgccatgagcggtatggatagtc

SEQ ID NO: 109811 - DNA, 25 bp, SARS Virus
ctgccatgagctgtatggatagtcg

SEQ ID NO: 109812 - DNA, 25 bp, SARS Virus
tgccatgagctggatggatagtcga

SEQ ID NO: 109813 - DNA, 25 bp, SARS Virus
gccatgagctgtgtggatagtcgac

SEQ ID NO: 109814 - DNA, 25 bp, SARS Virus
ccatgagctgtagggatagtcgacg

SEQ ID NO: 109815 - DNA, 25 bp, SARS Virus
catgagctgtatggatagtcgacgc

SEQ ID NO: 109816 - DNA, 25 bp, SARS Virus
atgagctgtatggatagtcgacgca

SEQ ID NO: 109817 - DNA, 25 bp, SARS Virus
tgagctgtatgggtagtcgacgcac

SEQ ID NO: 109818 - DNA, 25 bp, SARS Virus
gagctgtatggagagtcgacgcacg

SEQ ID NO: 109819 - DNA, 25 bp, SARS Virus
agctgtatggatggtcgacgcacgt

SEQ ID NO: 109820 - DNA, 25 bp, SARS Virus
gctgtatggatagtcgacgcacgtt

SEQ ID NO: 109821 - DNA, 25 bp, SARS Virus
ctgtatggataggcgacgcacgttc

SEQ ID NO: 109822 - DNA, 25 bp, SARS Virus
tgtatggatagtggacgcacgttct

SEQ ID NO: 109823 - DNA, 25 bp, SARS Virus
gtatggatagtcgacgcacgttcta

SEQ ID NO: 109824 - DNA, 25 bp, SARS Virus
tatggatagtcggcgcacgttctag

SEQ ID NO: 109825 - DNA, 25 bp, SARS Virus
atggatagtcgaggcacgttctagt

SEQ ID NO: 109826 - DNA, 25 bp, SARS Virus
tggatagtcgacgcacgttctagtc

SEQ ID NO: 109827 - DNA, 25 bp, SARS Virus
ggatagtcgacggacgttctagtca

SEQ ID NO: 109828 - DNA, 25 bp, SARS Virus
gatagtcgacgcgcgttctagtcaa

SEQ ID NO: 109829 - DNA, 25 bp, SARS Virus
atagtcgacgcaggttctagtcaaa

SEQ ID NO: 109830 - DNA, 25 bp, SARS Virus
tagtcgacgcacgttctagtcaaag

SEQ ID NO: 109831 - DNA, 25 bp, SARS Virus
agtcgacgcacggtctagtcaaagt

SEQ ID NO: 109832 - DNA, 25 bp, SARS Virus
gtcgacgcacgtgctagtcaaagtg

SEQ ID NO: 109833 - DNA, 25 bp, SARS Virus
tcgacgcacgttgtagtcaaagtgg

SEQ ID NO: 109834 - DNA, 25 bp, SARS Virus
cgacgcacgttcgagtcaaagtggt

SEQ ID NO: 109835 - DNA, 25 bp, SARS Virus
gacgcacgttctggtcaaagtggtt

SEQ ID NO: 109836 - DNA, 25 bp, SARS Virus
acgcacgttctagtcaaagtggttt

SEQ ID NO: 109837 - DNA, 25 bp, SARS Virus
cgcacgttctaggcaaagtggtttt

SEQ ID NO: 109838 - DNA, 25 bp, SARS Virus
gcacgttctagtgaaagtggttttg

SEQ ID NO: 109839 - DNA, 25 bp, SARS Virus
cacgttctagtcgaagtggttttga

SEQ ID NO: 109840 - DNA, 25 bp, SARS Virus
acgttctagtcagagtggttttgaa

SEQ ID NO: 109841 - DNA, 25 bp, SARS Virus
cgttctagtcaaggtggttttgaaa

SEQ ID NO: 109842 - DNA, 25 bp, SARS Virus
gttctagtcaaagtggttttgaaaa

SEQ ID NO: 109843 - DNA, 25 bp, SARS Virus
ttctagtcaaaggggttttgaaaag

SEQ ID NO: 109844 - DNA, 25 bp, SARS Virus
tctagtcaaagtggttttgaaaagt

SEQ ID NO: 109845 - DNA, 25 bp, SARS Virus
ctagtcaaagtggttttgaaaagta

SEQ ID NO: 109846 - DNA, 25 bp, SARS Virus
tagtcaaagtgggtttgaaaagtag

SEQ ID NO: 109847 - DNA, 25 bp, SARS Virus
agtcaaagtggtgttgaaaagtagt

SEQ ID NO: 109848 - DNA, 25 bp, SARS Virus
gtcaaagtggttgtgaaaagtagtc

SEQ ID NO: 109849 - DNA, 25 bp, SARS Virus
tcaaagtggtttggaaaagtagtct

SEQ ID NO: 109850 - DNA, 25 bp, SARS Virus
caaagtggttttgaaaagtagtctg

SEQ ID NO: 109851 - DNA, 25 bp, SARS Virus
aaagtggttttggaaagtagtctgt

SEQ ID NO: 109852 - DNA, 25 bp, SARS Virus
aagtggttttgagaagtagtctgtt

SEQ ID NO: 109853 - DNA, 25 bp, SARS Virus
agtggttttgaagagtagtctgttc

SEQ ID NO: 109854 - DNA, 25 bp, SARS Virus
gtggttttgaaaggtagtctgttct

SEQ ID NO: 109855 - DNA, 25 bp, SARS Virus
tggttttgaaaagtagtctgttctc

SEQ ID NO: 109856 - DNA, 25 bp, SARS Virus
ggttttgaaaaggagtctgttctcc

SEQ ID NO: 109857 - DNA, 25 bp, SARS Virus
gttttgaaaagtggtctgttctcct

SEQ ID NO: 109858 - DNA, 25 bp, SARS Virus
ttttgaaaagtagtctgttctcctc

SEQ ID NO: 109859 - DNA, 25 bp, SARS Virus
tttgaaaagtaggctgttctcctcc

SEQ ID NO: 109860 - DNA, 25 bp, SARS Virus
ttgaaaagtagtgtgttctcctcca

SEQ ID NO: 109861 - DNA, 25 bp, SARS Virus
tgaaaagtagtcggttctcctccaa

SEQ ID NO: 109862 - DNA, 25 bp, SARS Virus
gaaaagtagtctgttctcctccaag

SEQ ID NO: 109863 - DNA, 25 bp, SARS Virus
aaaagtagtctggtctcctccaagt

SEQ ID NO: 109864 - DNA, 25 bp, SARS Virus
aaagtagtctgtgctcctccaagtt

SEQ ID NO: 109865 - DNA, 25 bp, SARS Virus
aagtagtctgttgtcctccaagttg

SEQ ID NO: 109866 - DNA, 25 bp, SARS Virus
agtagtctgttcgcctccaagttgt

SEQ ID NO: 109867 - DNA, 25 bp, SARS Virus
gtagtctgttctgctccaagttgtt

SEQ ID NO: 109868 - DNA, 25 bp, SARS Virus
tagtctgttctcgtccaagttgttc

SEQ ID NO: 109869 - DNA, 25 bp, SARS Virus
agtctgttctccgccaagttgttct

SEQ ID NO: 109870 - DNA, 25 bp, SARS Virus
gtctgttctcctgcaagttgttctc

SEQ ID NO: 109871 - DNA, 25 bp, SARS Virus
tctgttctcctcgaagttgttctcg

SEQ ID NO: 109872 - DNA, 25 bp, SARS Virus
ctgttctcctccgagttgttctcga

SEQ ID NO: 109873 - DNA, 25 bp, SARS Virus
tgttctcctccaggttgttctcgag

SEQ ID NO: 109874 - DNA, 25 bp, SARS Virus
gttctcctccaagttgttctcgaga

SEQ ID NO: 109875 - DNA, 25 bp, SARS Virus
ttctcctccaaggtgttctcgagat

SEQ ID NO: 109876 - DNA, 25 bp, SARS Virus
tctcctccaagtggttctcgagatg

SEQ ID NO: 109877 - DNA, 25 bp, SARS Virus
ctcctccaagttgttctcgagatga

SEQ ID NO: 109878 - DNA, 25 bp, SARS Virus
tcctccaagttggtctcgagatgag

SEQ ID NO: 109879 - DNA, 25 bp, SARS Virus
cctccaagttgtgctcgagatgagc

SEQ ID NO: 109880 - DNA, 25 bp, SARS Virus
ctccaagttgttgtcgagatgagcg

SEQ ID NO: 109881 - DNA, 25 bp, SARS Virus
tccaagttgttcgcgagatgagcgg

SEQ ID NO: 109882 - DNA, 25 bp, SARS Virus
ccaagttgttctggagatgagcggt

SEQ ID NO: 109883 - DNA, 25 bp, SARS Virus
caagttgttctcgagatgagcggtg

SEQ ID NO: 109884 - DNA, 25 bp, SARS Virus
aagttgttctcgggatgagcggtga

SEQ ID NO: 109885 - DNA, 25 bp, SARS Virus
agttgttctcgagatgagcggtgaa

SEQ ID NO: 109886 - DNA, 25 bp, SARS Virus
gttgttctcgaggtgagcggtgaaa

SEQ ID NO: 109887 - DNA, 25 bp, SARS Virus
ttgttctcgagaggagcggtgaaaa

SEQ ID NO: 109888 - DNA, 25 bp, SARS Virus
tgttctcgagatgagcggtgaaaaa

SEQ ID NO: 109889 - DNA, 25 bp, SARS Virus
gttctcgagatgggcggtgaaaaag

SEQ ID NO: 109890 - DNA, 25 bp, SARS Virus
ttctcgagatgagcggtgaaaaaga

SEQ ID NO: 109891 - DNA, 25 bp, SARS Virus
tctcgagatgaggggtgaaaaagag

SEQ ID NO: 109892 - DNA, 25 bp, SARS Virus
ctcgagatgagcggtgaaaaagagt

SEQ ID NO: 109893 - DNA, 25 bp, SARS Virus
tcgagatgagcggtgaaaaagagta

SEQ ID NO: 109894 - DNA, 25 bp, SARS Virus
cgagatgagcggggaaaaagagtaa

SEQ ID NO: 109895 - DNA, 25 bp, SARS Virus
gagatgagcggtgaaaaagagtaac

SEQ ID NO: 109896 - DNA, 25 bp, SARS Virus
agatgagcggtggaaaagagtaaca

SEQ ID NO: 109897 - DNA, 25 bp, SARS Virus
gatgagcggtgagaaagagtaacaa

SEQ ID NO: 109898 - DNA, 25 bp, SARS Virus
atgagcggtgaagaagagtaacaac

SEQ ID NO: 109899 - DNA, 25 bp, SARS Virus
tgagcggtgaaagagagtaacaacg

SEQ ID NO: 109900 - DNA, 25 bp, SARS Virus
gagcggtgaaaaggagtaacaacga

SEQ ID NO: 109901 - DNA, 25 bp, SARS Virus
agcggtgaaaaagagtaacaacgac

SEQ ID NO: 109902 - DNA, 25 bp, SARS Virus
gcggtgaaaaagggtaacaacgacg

SEQ ID NO: 109903 - DNA, 25 bp, SARS Virus
cggtgaaaaagagtaacaacgacga

SEQ ID NO: 109904 - DNA, 25 bp, SARS Virus
ggtgaaaaagaggaacaacgacgag

SEQ ID NO: 109905 - DNA, 25 bp, SARS Virus
gtgaaaaagagtgacaacgacgaga

SEQ ID NO: 109906 - DNA, 25 bp, SARS Virus
tgaaaaagagtagcaacgacgagat

SEQ ID NO: 109907 - DNA, 25 bp, SARS Virus
gaaaaagagtaagaacgacgagatc

SEQ ID NO: 109908 - DNA, 25 bp, SARS Virus
aaaaagagtaacgacgacgagatca

SEQ ID NO: 109909 - DNA, 25 bp, SARS Virus
aaaagagtaacagcgacgagatcat

SEQ ID NO: 109910 - DNA, 25 bp, SARS Virus
aaagagtaacaaggacgagatcata

SEQ ID NO: 109911 - DNA, 25 bp, SARS Virus
aagagtaacaacgacgagatcataa

SEQ ID NO: 109912 - DNA, 25 bp, SARS Virus
agagtaacaacggcgagatcataaa

SEQ ID NO: 109913 - DNA, 25 bp, SARS Virus
gagtaacaacgaggagatcataaaa

SEQ ID NO: 109914 - DNA, 25 bp, SARS Virus
agtaacaacgacgagatcataaaaa

SEQ ID NO: 109915 - DNA, 25 bp, SARS Virus
gtaacaacgacgggatcataaaaat

SEQ ID NO: 109916 - DNA, 25 bp, SARS Virus
taacaacgacgagatcataaaaatt

SEQ ID NO: 109917 - DNA, 25 bp, SARS Virus
aacaacgacgaggtcataaaaatta

SEQ ID NO: 109918 - DNA, 25 bp, SARS Virus
acaacgacgagagcataaaaattat

SEQ ID NO: 109919 - DNA, 25 bp, SARS Virus
caacgacgagatgataaaaattatg

SEQ ID NO: 109920 - DNA, 25 bp, SARS Virus
aacgacgagatcgtaaaaattatga

SEQ ID NO: 109921 - DNA, 25 bp, SARS Virus
acgacgagatcagaaaaattatgaa

SEQ ID NO: 109922 - DNA, 25 bp, SARS Virus
cgacgagatcatgaaaattatgaaa

SEQ ID NO: 109923 - DNA, 25 bp, SARS Virus
gacgagatcatagaaattatgaaac

SEQ ID NO: 109924 - DNA, 25 bp, SARS Virus
acgagatcataagaattatgaaacg

SEQ ID NO: 109925 - DNA, 25 bp, SARS Virus
cgagatcataaagattatgaaacga

SEQ ID NO: 109926 - DNA, 25 bp, SARS Virus
gagatcataaaagttatgaaacgaa

SEQ ID NO: 109927 - DNA, 25 bp, SARS Virus
agatcataaaaagtatgaaacgaag

SEQ ID NO: 109928 - DNA, 25 bp, SARS Virus
gatcataaaaatgatgaaacgaagt

SEQ ID NO: 109929 - DNA, 25 bp, SARS Virus
cgtctctataactaatagtaatact

SEQ ID NO: 109930 - DNA, 25 bp, SARS Virus
gtctctataacttatagtaatactc

SEQ ID NO: 109931 - DNA, 25 bp, SARS Virus
tctctataactattagtaatactcc

SEQ ID NO: 109932 - DNA, 25 bp, SARS Virus
ctctataactaatagtaatactcct

SEQ ID NO: 109933 - DNA, 25 bp, SARS Virus
tctataactaattgtaatactcctg

SEQ ID NO: 109934 - DNA, 25 bp, SARS Virus
ctataactaatattaatactcctga

SEQ ID NO: 109935 - DNA, 25 bp, SARS Virus
tataactaatagtaatactcctgaa

SEQ ID NO: 109936 - DNA, 25 bp, SARS Virus
ataactaatagttatactcctgaaa

SEQ ID NO: 109937 - DNA, 25 bp, SARS Virus
taactaatagtattactcctgaaag

SEQ ID NO: 109938 - DNA, 25 bp, SARS Virus
aactaatagtaatactcctgaaagt

SEQ ID NO: 109939 - DNA, 25 bp, SARS Virus
actaatagtaattctcctgaaagtc

SEQ ID NO: 109940 - DNA, 25 bp, SARS Virus
ctaatagtaatattcctgaaagtcc

SEQ ID NO: 109941 - DNA, 25 bp, SARS Virus
taatagtaatactcctgaaagtcct

SEQ ID NO: 109942 - DNA, 25 bp, SARS Virus
aatagtaatacttctgaaagtccta

SEQ ID NO: 109943 - DNA, 25 bp, SARS Virus
atagtaatactcttgaaagtcctaa

SEQ ID NO: 109944 - DNA, 25 bp, SARS Virus
tagtaatactcctgaaagtcctaac

SEQ ID NO: 109945 - DNA, 25 bp, SARS Virus
agtaatactccttaaagtcctaacg

SEQ ID NO: 109946 - DNA, 25 bp, SARS Virus
gtaatactcctgtaagtcctaacga

SEQ ID NO: 109947 - DNA, 25 bp, SARS Virus
taatactcctgatagtcctaacgat

SEQ ID NO: 109948 - DNA, 25 bp, SARS Virus
aatactcctgaatgtcctaacgata

SEQ ID NO: 109949 - DNA, 25 bp, SARS Virus
atactcctgaaattcctaacgataa

SEQ ID NO: 109950 - DNA, 25 bp, SARS Virus
tactcctgaaagtcctaacgataaa

SEQ ID NO: 109951 - DNA, 25 bp, SARS Virus
actcctgaaagttctaacgataaac

SEQ ID NO: 109952 - DNA, 25 bp, SARS Virus
ctcctgaaagtcttaacgataaacc

SEQ ID NO: 109953 - DNA, 25 bp, SARS Virus
tcctgaaagtcctaacgataaacct

SEQ ID NO: 109954 - DNA, 25 bp, SARS Virus
cctgaaagtccttacgataaacctt

SEQ ID NO: 109955 - DNA, 25 bp, SARS Virus
ctgaaagtcctatcgataaacctta

SEQ ID NO: 109956 - DNA, 25 bp, SARS Virus
tgaaagtcctaatgataaaccttag

SEQ ID NO: 109957 - DNA, 25 bp, SARS Virus
gaaagtcctaactataaaccttaga

SEQ ID NO: 109958 - DNA, 25 bp, SARS Virus
aaagtcctaacgttaaaccttagaa

SEQ ID NO: 109959 - DNA, 25 bp, SARS Virus
aagtcctaacgataaaccttagaac

SEQ ID NO: 109960 - DNA, 25 bp, SARS Virus
agtcctaacgattaaccttagaact

SEQ ID NO: 109961 - DNA, 25 bp, SARS Virus
gtcctaacgatataccttagaactg

SEQ ID NO: 109962 - DNA, 25 bp, SARS Virus
tcctaacgataatccttagaactgc

SEQ ID NO: 109963 - DNA, 25 bp, SARS Virus
cctaacgataaatcttagaactgca

SEQ ID NO: 109964 - DNA, 25 bp, SARS Virus
ctaacgataaactttagaactgcaa

SEQ ID NO: 109965 - DNA, 25 bp, SARS Virus
taacgataaaccttagaactgcaat

SEQ ID NO: 109966 - DNA, 25 bp, SARS Virus
aacgataaaccttagaactgcaata

SEQ ID NO: 109967 - DNA, 25 bp, SARS Virus
acgataaacctttgaactgcaatat

SEQ ID NO: 109968 - DNA, 25 bp, SARS Virus
cgataaaccttataactgcaatatt

SEQ ID NO: 109969 - DNA, 25 bp, SARS Virus
gataaaccttagtactgcaatatta

SEQ ID NO: 109970 - DNA, 25 bp, SARS Virus
ataaaccttagatctgcaatattat

SEQ ID NO: 109971 - DNA, 25 bp, SARS Virus
taaaccttagaattgcaatattatt

SEQ ID NO: 109972 - DNA, 25 bp, SARS Virus
aaaccttagaactgcaatattattc

SEQ ID NO: 109973 - DNA, 25 bp, SARS Virus
aaccttagaacttcaatattattca

SEQ ID NO: 109974 - DNA, 25 bp, SARS Virus
accttagaactgtaatattattcaa

SEQ ID NO: 109975 - DNA, 25 bp, SARS Virus
ccttagaactgctatattattcaag

SEQ ID NO: 109976 - DNA, 25 bp, SARS Virus
cttagaactgcattattattcaagt

SEQ ID NO: 109977 - DNA, 25 bp, SARS Virus
ttagaactgcaatattattcaagtt

SEQ ID NO: 109978 - DNA, 25 bp, SARS Virus
tagaactgcaattttattcaagtta

SEQ ID NO: 109979 - DNA, 25 bp, SARS Virus
agaactgcaatattattcaagttat

SEQ ID NO: 109980 - DNA, 25 bp, SARS Virus
gaactgcaatattattcaagttatc

SEQ ID NO: 109981 - DNA, 25 bp, SARS Virus
aactgcaatatttttcaagttatca

SEQ ID NO: 109982 - DNA, 25 bp, SARS Virus
actgcaatattattcaagttatcac

SEQ ID NO: 109983 - DNA, 25 bp, SARS Virus
ctgcaatattattcaagttatcact

SEQ ID NO: 109984 - DNA, 25 bp, SARS Virus
tgcaatattatttaagttatcactc

SEQ ID NO: 109985 - DNA, 25 bp, SARS Virus
gcaatattattctagttatcactct

SEQ ID NO: 109986 - DNA, 25 bp, SARS Virus
caatattattcatgttatcactctg

SEQ ID NO: 109987 - DNA, 25 bp, SARS Virus
aatattattcaatttatcactctgt

SEQ ID NO: 109988 - DNA, 25 bp, SARS Virus
atattattcaagttatcactctgtt

SEQ ID NO: 109989 - DNA, 25 bp, SARS Virus
tattattcaagttatcactctgtta

SEQ ID NO: 109990 - DNA, 25 bp, SARS Virus
attattcaagttttcactctgttaa

SEQ ID NO: 109991 - DNA, 25 bp, SARS Virus
ttattcaagttatcactctgttaat

SEQ ID NO: 109992 - DNA, 25 bp, SARS Virus
tattcaagttattactctgttaata

SEQ ID NO: 109993 - DNA, 25 bp, SARS Virus
attcaagttatctctctgttaataa

SEQ ID NO: 109994 - DNA, 25 bp, SARS Virus
ttcaagttatcattctgttaataaa

SEQ ID NO: 109995 - DNA, 25 bp, SARS Virus
tcaagttatcactctgttaataaat

SEQ ID NO: 109996 - DNA, 25 bp, SARS Virus
caagttatcactttgttaataaatt

SEQ ID NO: 109997 - DNA, 25 bp, SARS Virus
aagttatcactctgttaataaattc

SEQ ID NO: 109998 - DNA, 25 bp, SARS Virus
agttatcactcttttaataaattcg

SEQ ID NO: 109999 - DNA, 25 bp, SARS Virus
gttatcactctgttaataaattcgg

SEQ ID NO: 110000 - DNA, 25 bp, SARS Virus
ttatcactctgttaataaattcgga

SEQ ID NO: 110001 - DNA, 25 bp, SARS Virus
tatcactctgtttataaattcggag

SEQ ID NO: 110002 - DNA, 25 bp, SARS Virus
atcactctgttattaaattcggaga

SEQ ID NO: 110003 - DNA, 25 bp, SARS Virus
tcactctgttaataaattcggagat

SEQ ID NO: 110004 - DNA, 25 bp, SARS Virus
cactctgttaattaattcggagatt

SEQ ID NO: 110005 - DNA, 25 bp, SARS Virus
actctgttaatatattcggagattg

SEQ ID NO: 110006 - DNA, 25 bp, SARS Virus
ctctgttaataatttcggagattga

SEQ ID NO: 110007 - DNA, 25 bp, SARS Virus
tctgttaataaattcggagattgat

SEQ ID NO: 110008 - DNA, 25 bp, SARS Virus
ctgttaataaattcggagattgatt

SEQ ID NO: 110009 - DNA, 25 bp, SARS Virus
tgttaataaatttggagattgattc

SEQ ID NO: 110010 - DNA, 25 bp, SARS Virus
gttaataaattctgagattgattct

SEQ ID NO: 110011 - DNA, 25 bp, SARS Virus
ttaataaattcgtagattgattctt

SEQ ID NO: 110012 - DNA, 25 bp, SARS Virus
taataaattcggtgattgattcttc

SEQ ID NO: 110013 - DNA, 25 bp, SARS Virus
aataaattcggatattgattcttct

SEQ ID NO: 110014 - DNA, 25 bp, SARS Virus
ataaattcggagtttgattcttctt

SEQ ID NO: 110015 - DNA, 25 bp, SARS Virus
taaattcggagattgattcttctta

SEQ ID NO: 110016 - DNA, 25 bp, SARS Virus
aaattcggagattgattcttcttaa

SEQ ID NO: 110017 - DNA, 25 bp, SARS Virus
aattcggagatttattcttcttaat

SEQ ID NO: 110018 - DNA, 25 bp, SARS Virus
attcggagattgtttcttcttaata

SEQ ID NO: 110019 - DNA, 25 bp, SARS Virus
ttcggagattgattcttcttaataa

SEQ ID NO: 110020 - DNA, 25 bp, SARS Virus
tcggagattgattcttcttaataag

SEQ ID NO: 110021 - DNA, 25 bp, SARS Virus
cggagattgatttttcttaataagc

SEQ ID NO: 110022 - DNA, 25 bp, SARS Virus
ggagattgattcttcttaataagcc

SEQ ID NO: 110023 - DNA, 25 bp, SARS Virus
gagattgattcttcttaataagcct

SEQ ID NO: 110024 - DNA, 25 bp, SARS Virus
agattgattctttttaataagcctc

SEQ ID NO: 110025 - DNA, 25 bp, SARS Virus
gattgattcttcttaataagcctca

SEQ ID NO: 110026 - DNA, 25 bp, SARS Virus
attgattcttcttaataagcctcaa

SEQ ID NO: 110027 - DNA, 25 bp, SARS Virus
ttgattcttctttataagcctcaat

SEQ ID NO: 110028 - DNA, 25 bp, SARS Virus
tgattcttcttattaagcctcaatc

SEQ ID NO: 110029 - DNA, 25 bp, SARS Virus
gattcttcttaataagcctcaatct

SEQ ID NO: 110030 - DNA, 25 bp, SARS Virus
attcttcttaattagcctcaatcta

SEQ ID NO: 110031 - DNA, 25 bp, SARS Virus
ttcttcttaatatgcctcaatctac

SEQ ID NO: 110032 - DNA, 25 bp, SARS Virus
tcttcttaataatcctcaatctact

SEQ ID NO: 110033 - DNA, 25 bp, SARS Virus
cttcttaataagtctcaatctacta

SEQ ID NO: 110034 - DNA, 25 bp, SARS Virus
ttcttaataagcttcaatctactac

SEQ ID NO: 110035 - DNA, 25 bp, SARS Virus
tcttaataagcctcaatctactact

SEQ ID NO: 110036 - DNA, 25 bp, SARS Virus
cttaataagccttaatctactactt

SEQ ID NO: 110037 - DNA, 25 bp, SARS Virus
ttaataagcctctatctactacttc

SEQ ID NO: 110038 - DNA, 25 bp, SARS Virus
taataagcctcattctactacttct

SEQ ID NO: 110039 - DNA, 25 bp, SARS Virus
aataagcctcaatctactacttctt

SEQ ID NO: 110040 - DNA, 25 bp, SARS Virus
ataagcctcaatttactacttcttg

SEQ ID NO: 110041 - DNA, 25 bp, SARS Virus
taagcctcaatctactacttcttgg

SEQ ID NO: 110042 - DNA, 25 bp, SARS Virus
aagcctcaatcttctacttcttgga

SEQ ID NO: 110043 - DNA, 25 bp, SARS Virus
agcctcaatctattacttcttggat

SEQ ID NO: 110044 - DNA, 25 bp, SARS Virus
gcctcaatctactacttcttggata

SEQ ID NO: 110045 - DNA, 25 bp, SARS Virus
cctcaatctacttcttcttggatac

SEQ ID NO: 110046 - DNA, 25 bp, SARS Virus
ctcaatctactatttcttggatacc

SEQ ID NO: 110047 - DNA, 25 bp, SARS Virus
tcaatctactacttcttggatacct

SEQ ID NO: 110048 - DNA, 25 bp, SARS Virus
caatctactacttcttggatacctc

SEQ ID NO: 110049 - DNA, 25 bp, SARS Virus
aatctactactttttggatacctca

SEQ ID NO: 110050 - DNA, 25 bp, SARS Virus
atctactacttcttggatacctcaa

SEQ ID NO: 110051 - DNA, 25 bp, SARS Virus
tctactacttcttggatacctcaat

SEQ ID NO: 110052 - DNA, 25 bp, SARS Virus
ctactacttctttgatacctcaatc

SEQ ID NO: 110053 - DNA, 25 bp, SARS Virus
tactacttcttgtatacctcaatct

SEQ ID NO: 110054 - DNA, 25 bp, SARS Virus
actacttcttggttacctcaatcta

SEQ ID NO: 110055 - DNA, 25 bp, SARS Virus
ctacttcttggatacctcaatctaa

SEQ ID NO: 110056 - DNA, 25 bp, SARS Virus
tacttcttggattcctcaatctaat

SEQ ID NO: 110057 - DNA, 25 bp, SARS Virus
acttcttggatatctcaatctaata

SEQ ID NO: 110058 - DNA, 25 bp, SARS Virus
cttcttggatacttcaatctaatag

SEQ ID NO: 110059 - DNA, 25 bp, SARS Virus
ttcttggatacctcaatctaatagg

SEQ ID NO: 110060 - DNA, 25 bp, SARS Virus
tcttggataccttaatctaataggt

SEQ ID NO: 110061 - DNA, 25 bp, SARS Virus
cttggatacctctatctaataggta

SEQ ID NO: 110062 - DNA, 25 bp, SARS Virus
ttggatacctcattctaataggtat

SEQ ID NO: 110063 - DNA, 25 bp, SARS Virus
tggatacctcaatctaataggtatt

SEQ ID NO: 110064 - DNA, 25 bp, SARS Virus
ggatacctcaatttaataggtattt

SEQ ID NO: 110065 - DNA, 25 bp, SARS Virus
gatacctcaatctaataggtatttt

SEQ ID NO: 110066 - DNA, 25 bp, SARS Virus
atacctcaatcttataggtattttg

SEQ ID NO: 110067 - DNA, 25 bp, SARS Virus
tacctcaatctattaggtattttgc

SEQ ID NO: 110068 - DNA, 25 bp, SARS Virus
acctcaatctaataggtattttgct

SEQ ID NO: 110069 - DNA, 25 bp, SARS Virus
cctcaatctaattggtattttgctt

SEQ ID NO: 110070 - DNA, 25 bp, SARS Virus
ctcaatctaatatgtattttgcttg

SEQ ID NO: 110071 - DNA, 25 bp, SARS Virus
tcaatctaatagttattttgcttgt

SEQ ID NO: 110072 - DNA, 25 bp, SARS Virus
caatctaataggtattttgcttgta

SEQ ID NO: 110073 - DNA, 25 bp, SARS Virus
aatctaataggttttttgcttgtac

SEQ ID NO: 110074 - DNA, 25 bp, SARS Virus
atctaataggtattttgcttgtact

SEQ ID NO: 110075 - DNA, 25 bp, SARS Virus
tctaataggtattttgcttgtactt

SEQ ID NO: 110076 - DNA, 25 bp, SARS Virus
ctaataggtattttgcttgtacttt

SEQ ID NO: 110077 - DNA, 25 bp, SARS Virus
taataggtattttgcttgtactttt

SEQ ID NO: 110078 - DNA, 25 bp, SARS Virus
aataggtatttttcttgtactttta

SEQ ID NO: 110079 - DNA, 25 bp, SARS Virus
ataggtattttgtttgtacttttaa

SEQ ID NO: 110080 - DNA, 25 bp, SARS Virus
taggtattttgcttgtacttttaat

SEQ ID NO: 110081 - DNA, 25 bp, SARS Virus
aggtattttgcttgtacttttaata

SEQ ID NO: 110082 - DNA, 25 bp, SARS Virus
ggtattttgcttttacttttaataa

SEQ ID NO: 110083 - DNA, 25 bp, SARS Virus
gtattttgcttgtacttttaataag

SEQ ID NO: 110084 - DNA, 25 bp, SARS Virus
tattttgcttgttcttttaataaga

SEQ ID NO: 110085 - DNA, 25 bp, SARS Virus
attttgcttgtatttttaataagag

SEQ ID NO: 110086 - DNA, 25 bp, SARS Virus
ttttgcttgtacttttaataagaga

SEQ ID NO: 110087 - DNA, 25 bp, SARS Virus
tttgcttgtacttttaataagagaa

SEQ ID NO: 110088 - DNA, 25 bp, SARS Virus
ttgcttgtacttttaataagagaag

SEQ ID NO: 110089 - DNA, 25 bp, SARS Virus
tgcttgtacttttaataagagaagg

SEQ ID NO: 110090 - DNA, 25 bp, SARS Virus
gcttgtactttttataagagaagga

SEQ ID NO: 110091 - DNA, 25 bp, SARS Virus
cttgtacttttattaagagaaggac

SEQ ID NO: 110092 - DNA, 25 bp, SARS Virus
ttgtacttttaataagagaaggact

SEQ ID NO: 110093 - DNA, 25 bp, SARS Virus
tgtacttttaattagagaaggactg

SEQ ID NO: 110094 - DNA, 25 bp, SARS Virus
gtacttttaatatgagaaggactgt

SEQ ID NO: 110095 - DNA, 25 bp, SARS Virus
tacttttaataatagaaggactgta

SEQ ID NO: 110096 - DNA, 25 bp, SARS Virus
acttttaataagtgaaggactgtaa

SEQ ID NO: 110097 - DNA, 25 bp, SARS Virus
cttttaataagataaggactgtaac

SEQ ID NO: 110098 - DNA, 25 bp, SARS Virus
ttttaataagagtaggactgtaact

SEQ ID NO: 110099 - DNA, 25 bp, SARS Virus
tttaataagagatggactgtaacta

SEQ ID NO: 110100 - DNA, 25 bp, SARS Virus
ttaataagagaatgactgtaactaa

SEQ ID NO: 110101 - DNA, 25 bp, SARS Virus
taataagagaagtactgtaactaac

SEQ ID NO: 110102 - DNA, 25 bp, SARS Virus
aataagagaaggtctgtaactaaca

SEQ ID NO: 110103 - DNA, 25 bp, SARS Virus
ataagagaaggattgtaactaacat

SEQ ID NO: 110104 - DNA, 25 bp, SARS Virus
taagagaaggactgtaactaacata

SEQ ID NO: 110105 - DNA, 25 bp, SARS Virus
aagagaaggactttaactaacataa

SEQ ID NO: 110106 - DNA, 25 bp, SARS Virus
agagaaggactgtaactaacataaa

SEQ ID NO: 110107 - DNA, 25 bp, SARS Virus
gagaaggactgttactaacataaat

SEQ ID NO: 110108 - DNA, 25 bp, SARS Virus
agaaggactgtatctaacataaatg

SEQ ID NO: 110109 - DNA, 25 bp, SARS Virus
gaaggactgtaattaacataaatgt

SEQ ID NO: 110110 - DNA, 25 bp, SARS Virus
aaggactgtaactaacataaatgta

SEQ ID NO: 110111 - DNA, 25 bp, SARS Virus
aggactgtaacttacataaatgtag

SEQ ID NO: 110112 - DNA, 25 bp, SARS Virus
ggactgtaactatcataaatgtaga

SEQ ID NO: 110113 - DNA, 25 bp, SARS Virus
gactgtaactaatataaatgtagaa

SEQ ID NO: 110114 - DNA, 25 bp, SARS Virus
actgtaactaacttaaatgtagaac

SEQ ID NO: 110115 - DNA, 25 bp, SARS Virus
ctgtaactaacataaatgtagaacg

SEQ ID NO: 110116 - DNA, 25 bp, SARS Virus
tgtaactaacattaatgtagaacgc

SEQ ID NO: 110117 - DNA, 25 bp, SARS Virus
gtaactaacatatatgtagaacgct

SEQ ID NO: 110118 - DNA, 25 bp, SARS Virus
taactaacataattgtagaacgctc

SEQ ID NO: 110119 - DNA, 25 bp, SARS Virus
aactaacataaatgtagaacgctcg

SEQ ID NO: 110120 - DNA, 25 bp, SARS Virus
actaacataaatttagaacgctcga

SEQ ID NO: 110121 - DNA, 25 bp, SARS Virus
ctaacataaatgtagaacgctcgat

SEQ ID NO: 110122 - DNA, 25 bp, SARS Virus
taacataaatgttgaacgctcgata

SEQ ID NO: 110123 - DNA, 25 bp, SARS Virus
aacataaatgtataacgctcgatat

SEQ ID NO: 110124 - DNA, 25 bp, SARS Virus
acataaatgtagtacgctcgatata

SEQ ID NO: 110125 - DNA, 25 bp, SARS Virus
cataaatgtagatcgctcgatatag

SEQ ID NO: 110126 - DNA, 25 bp, SARS Virus
ataaatgtagaatgctcgatatagt

SEQ ID NO: 110127 - DNA, 25 bp, SARS Virus
taaatgtagaactctcgatatagtg

SEQ ID NO: 110128 - DNA, 25 bp, SARS Virus
aaatgtagaacgttcgatatagtga

SEQ ID NO: 110129 - DNA, 25 bp, SARS Virus
aatgtagaacgctcgatatagtgat

SEQ ID NO: 110130 - DNA, 25 bp, SARS Virus
atgtagaacgcttgatatagtgata

SEQ ID NO: 110131 - DNA, 25 bp, SARS Virus
tgtagaacgctctatatagtgatag

SEQ ID NO: 110132 - DNA, 25 bp, SARS Virus
gtagaacgctcgttatagtgatagt

SEQ ID NO: 110133 - DNA, 25 bp, SARS Virus
tagaacgctcgatatagtgatagtc

SEQ ID NO: 110134 - DNA, 25 bp, SARS Virus
agaacgctcgatttagtgatagtcc

SEQ ID NO: 110135 - DNA, 25 bp, SARS Virus
gaacgctcgatatagtgatagtcct

SEQ ID NO: 110136 - DNA, 25 bp, SARS Virus
aacgctcgatattgtgatagtcctc

SEQ ID NO: 110137 - DNA, 25 bp, SARS Virus
acgctcgatatattgatagtcctca

SEQ ID NO: 110138 - DNA, 25 bp, SARS Virus
cgctcgatatagtgatagtcctcac

SEQ ID NO: 110139 - DNA, 25 bp, SARS Virus
gctcgatatagttatagtcctcaca

SEQ ID NO: 110140 - DNA, 25 bp, SARS Virus
ctcgatatagtgttagtcctcacac

SEQ ID NO: 110141 - DNA, 25 bp, SARS Virus
tcgatatagtgatagtcctcacaca

SEQ ID NO: 110142 - DNA, 25 bp, SARS Virus
cgatatagtgattgtcctcacacaa

SEQ ID NO: 110143 - DNA, 25 bp, SARS Virus
gatatagtgatattcctcacacaat

SEQ ID NO: 110144 - DNA, 25 bp, SARS Virus
atatagtgatagtcctcacacaatc

SEQ ID NO: 110145 - DNA, 25 bp, SARS Virus
tatagtgatagttctcacacaatct

SEQ ID NO: 110146 - DNA, 25 bp, SARS Virus
atagtgatagtcttcacacaatctc

SEQ ID NO: 110147 - DNA, 25 bp, SARS Virus
tagtgatagtcctcacacaatctcc

SEQ ID NO: 110148 - DNA, 25 bp, SARS Virus
agtgatagtccttacacaatctcca

SEQ ID NO: 110149 - DNA, 25 bp, SARS Virus
gtgatagtcctctcacaatctccat

SEQ ID NO: 110150 - DNA, 25 bp, SARS Virus
tgatagtcctcatacaatctccatg

SEQ ID NO: 110151 - DNA, 25 bp, SARS Virus
gatagtcctcactcaatctccatgc

SEQ ID NO: 110152 - DNA, 25 bp, SARS Virus
atagtcctcacataatctccatgct

SEQ ID NO: 110153 - DNA, 25 bp, SARS Virus
tagtcctcacactatctccatgctg

SEQ ID NO: 110154 - DNA, 25 bp, SARS Virus
agtcctcacacattctccatgctga

SEQ ID NO: 110155 - DNA, 25 bp, SARS Virus
gtcctcacacaatctccatgctgac

SEQ ID NO: 110156 - DNA, 25 bp, SARS Virus
tcctcacacaatttccatgctgaca

SEQ ID NO: 110157 - DNA, 25 bp, SARS Virus
cctcacacaatctccatgctgacat

SEQ ID NO: 110158 - DNA, 25 bp, SARS Virus
ctcacacaatcttcatgctgacatg

SEQ ID NO: 110159 - DNA, 25 bp, SARS Virus
tcacacaatctctatgctgacatga

SEQ ID NO: 110160 - DNA, 25 bp, SARS Virus
cacacaatctccttgctgacatgat

SEQ ID NO: 110161 - DNA, 25 bp, SARS Virus
acacaatctccatgctgacatgatg

SEQ ID NO: 110162 - DNA, 25 bp, SARS Virus
cacaatctccattctgacatgatga

SEQ ID NO: 110163 - DNA, 25 bp, SARS Virus
acaatctccatgttgacatgatgat

SEQ ID NO: 110164 - DNA, 25 bp, SARS Virus
caatctccatgctgacatgatgatt

SEQ ID NO: 110165 - DNA, 25 bp, SARS Virus
aatctccatgcttacatgatgattt

SEQ ID NO: 110166 - DNA, 25 bp, SARS Virus
atctccatgctgtcatgatgatttt

SEQ ID NO: 110167 - DNA, 25 bp, SARS Virus
tctccatgctgatatgatgattttc

SEQ ID NO: 110168 - DNA, 25 bp, SARS Virus
ctccatgctgacttgatgattttct

SEQ ID NO: 110169 - DNA, 25 bp, SARS Virus
tccatgctgacatgatgattttctt

SEQ ID NO: 110170 - DNA, 25 bp, SARS Virus
ccatgctgacattatgattttcttg

SEQ ID NO: 110171 - DNA, 25 bp, SARS Virus
catgctgacatgttgattttcttgg

SEQ ID NO: 110172 - DNA, 25 bp, SARS Virus
atgctgacatgatgattttcttgga

SEQ ID NO: 110173 - DNA, 25 bp, SARS Virus
tgctgacatgattattttcttggaa

SEQ ID NO: 110174 - DNA, 25 bp, SARS Virus
gctgacatgatgtttttcttggaac

SEQ ID NO: 110175 - DNA, 25 bp, SARS Virus
ctgacatgatgattttcttggaacg

SEQ ID NO: 110176 - DNA, 25 bp, SARS Virus
tgacatgatgattttcttggaacgg

SEQ ID NO: 110177 - DNA, 25 bp, SARS Virus
gacatgatgattttcttggaacggg

SEQ ID NO: 110178 - DNA, 25 bp, SARS Virus
acatgatgattttcttggaacgggt

SEQ ID NO: 110179 - DNA, 25 bp, SARS Virus
catgatgatttttttggaacgggta

SEQ ID NO: 110180 - DNA, 25 bp, SARS Virus
atgatgattttcttggaacgggtag

SEQ ID NO: 110181 - DNA, 25 bp, SARS Virus
tgatgattttcttggaacgggtagt

SEQ ID NO: 110182 - DNA, 25 bp, SARS Virus
gatgattttctttgaacgggtagtc

SEQ ID NO: 110183 - DNA, 25 bp, SARS Virus
atgattttcttgtaacgggtagtcc

SEQ ID NO: 110184 - DNA, 25 bp, SARS Virus
tgattttcttggtacgggtagtcct

SEQ ID NO: 110185 - DNA, 25 bp, SARS Virus
gattttcttggatcgggtagtcctt

SEQ ID NO: 110186 - DNA, 25 bp, SARS Virus
attttcttggaatgggtagtccttg

SEQ ID NO: 110187 - DNA, 25 bp, SARS Virus
ttttcttggaactggtagtccttgt

SEQ ID NO: 110188 - DNA, 25 bp, SARS Virus
tttcttggaacgtgtagtccttgta

SEQ ID NO: 110189 - DNA, 25 bp, SARS Virus
ttcttggaacggttagtccttgtat

SEQ ID NO: 110190 - DNA, 25 bp, SARS Virus
tcttggaacgggtagtccttgtatg

SEQ ID NO: 110191 - DNA, 25 bp, SARS Virus
cttggaacgggttgtccttgtatgc

SEQ ID NO: 110192 - DNA, 25 bp, SARS Virus
ttggaacgggtattccttgtatgct

SEQ ID NO: 110193 - DNA, 25 bp, SARS Virus
tggaacgggtagtccttgtatgctc

SEQ ID NO: 110194 - DNA, 25 bp, SARS Virus
ggaacgggtagttcttgtatgctcc

SEQ ID NO: 110195 - DNA, 25 bp, SARS Virus
gaacgggtagtctttgtatgctccc

SEQ ID NO: 110196 - DNA, 25 bp, SARS Virus
aacgggtagtccttgtatgctcccg

SEQ ID NO: 110197 - DNA, 25 bp, SARS Virus
acgggtagtccttgtatgctcccgt

SEQ ID NO: 110198 - DNA, 25 bp, SARS Virus
cgggtagtccttttatgctcccgtt

SEQ ID NO: 110199 - DNA, 25 bp, SARS Virus
gggtagtccttgtatgctcccgtta

SEQ ID NO: 110200 - DNA, 25 bp, SARS Virus
ggtagtccttgtttgctcccgttaa

SEQ ID NO: 110201 - DNA, 25 bp, SARS Virus
gtagtccttgtatgctcccgttaag

SEQ ID NO: 110202 - DNA, 25 bp, SARS Virus
tagtccttgtattctcccgttaagt

SEQ ID NO: 110203 - DNA, 25 bp, SARS Virus
agtccttgtatgttcccgttaagtg

SEQ ID NO: 110204 - DNA, 25 bp, SARS Virus
gtccttgtatgctcccgttaagtgg

SEQ ID NO: 110205 - DNA, 25 bp, SARS Virus
tccttgtatgcttccgttaagtggt

SEQ ID NO: 110206 - DNA, 25 bp, SARS Virus
ccttgtatgctctcgttaagtggta

SEQ ID NO: 110207 - DNA, 25 bp, SARS Virus
cttgtatgctcctgttaagtggtaa

SEQ ID NO: 110208 - DNA, 25 bp, SARS Virus
ttgtatgctccctttaagtggtaaa

SEQ ID NO: 110209 - DNA, 25 bp, SARS Virus
tgtatgctcccgttaagtggtaaag

SEQ ID NO: 110210 - DNA, 25 bp, SARS Virus
gtatgctcccgttaagtggtaaagt

SEQ ID NO: 110211 - DNA, 25 bp, SARS Virus
tatgctcccgtttagtggtaaagtg

SEQ ID NO: 110212 - DNA, 25 bp, SARS Virus
atgctcccgttatgtggtaaagtgg

SEQ ID NO: 110213 - DNA, 25 bp, SARS Virus
tgctcccgttaattggtaaagtggg

SEQ ID NO: 110214 - DNA, 25 bp, SARS Virus
gctcccgttaagtggtaaagtggga

SEQ ID NO: 110215 - DNA, 25 bp, SARS Virus
ctcccgttaagttgtaaagtgggag

SEQ ID NO: 110216 - DNA, 25 bp, SARS Virus
tcccgttaagtgttaaagtgggaga

SEQ ID NO: 110217 - DNA, 25 bp, SARS Virus
cccgttaagtggtaaagtgggagaa

SEQ ID NO: 110218 - DNA, 25 bp, SARS Virus
ccgttaagtggttaagtgggagaac

SEQ ID NO: 110219 - DNA, 25 bp, SARS Virus
cgttaagtggtatagtgggagaacg

SEQ ID NO: 110220 - DNA, 25 bp, SARS Virus
gttaagtggtaatgtgggagaacga

SEQ ID NO: 110221 - DNA, 25 bp, SARS Virus
ttaagtggtaaattgggagaacgac

SEQ ID NO: 110222 - DNA, 25 bp, SARS Virus
taagtggtaaagtgggagaacgact

SEQ ID NO: 110223 - DNA, 25 bp, SARS Virus
aagtggtaaagttggagaacgactg

SEQ ID NO: 110224 - DNA, 25 bp, SARS Virus
agtggtaaagtgtgagaacgactgt

SEQ ID NO: 110225 - DNA, 25 bp, SARS Virus
gtggtaaagtggtagaacgactgtt

SEQ ID NO: 110226 - DNA, 25 bp, SARS Virus
tggtaaagtgggtgaacgactgtta

SEQ ID NO: 110227 - DNA, 25 bp, SARS Virus
ggtaaagtgggataacgactgttat

SEQ ID NO: 110228 - DNA, 25 bp, SARS Virus
gtaaagtgggagtacgactgttatt

SEQ ID NO: 110229 - DNA, 25 bp, SARS Virus
taaagtgggagatcgactgttattt

SEQ ID NO: 110230 - DNA, 25 bp, SARS Virus
aaagtgggagaatgactgttattta

SEQ ID NO: 110231 - DNA, 25 bp, SARS Virus
aagtgggagaactactgttatttaa

SEQ ID NO: 110232 - DNA, 25 bp, SARS Virus
agtgggagaacgtctgttatttaaa

SEQ ID NO: 110233 - DNA, 25 bp, SARS Virus
gtgggagaacgattgttatttaaac

SEQ ID NO: 110234 - DNA, 25 bp, SARS Virus
tgggagaacgactgttatttaaacg

SEQ ID NO: 110235 - DNA, 25 bp, SARS Virus
gggagaacgacttttatttaaacgt

SEQ ID NO: 110236 - DNA, 25 bp, SARS Virus
ggagaacgactgttatttaaacgtg

SEQ ID NO: 110237 - DNA, 25 bp, SARS Virus
gagaacgactgttatttaaacgtga

SEQ ID NO: 110238 - DNA, 25 bp, SARS Virus
agaacgactgttttttaaacgtgat

SEQ ID NO: 110239 - DNA, 25 bp, SARS Virus
gaacgactgttatttaaacgtgatt

SEQ ID NO: 110240 - DNA, 25 bp, SARS Virus
aacgactgttatttaaacgtgattg

SEQ ID NO: 110241 - DNA, 25 bp, SARS Virus
acgactgttatttaaacgtgattga

SEQ ID NO: 110242 - DNA, 25 bp, SARS Virus
cgactgttattttaacgtgattgaa

SEQ ID NO: 110243 - DNA, 25 bp, SARS Virus
gactgttatttatacgtgattgaac

SEQ ID NO: 110244 - DNA, 25 bp, SARS Virus
actgttatttaatcgtgattgaacg

SEQ ID NO: 110245 - DNA, 25 bp, SARS Virus
ctgttatttaaatgtgattgaacgt

SEQ ID NO: 110246 - DNA, 25 bp, SARS Virus
tgttatttaaacttgattgaacgtg

SEQ ID NO: 110247 - DNA, 25 bp, SARS Virus
gttatttaaacgtgattgaacgtga

SEQ ID NO: 110248 - DNA, 25 bp, SARS Virus
ttatttaaacgttattgaacgtgat

SEQ ID NO: 110249 - DNA, 25 bp, SARS Virus
tatttaaacgtgtttgaacgtgatc

SEQ ID NO: 110250 - DNA, 25 bp, SARS Virus
atttaaacgtgattgaacgtgatcg

SEQ ID NO: 110251 - DNA, 25 bp, SARS Virus
tttaaacgtgattgaacgtgatcgt

SEQ ID NO: 110252 - DNA, 25 bp, SARS Virus
ttaaacgtgatttaacgtgatcgtg

SEQ ID NO: 110253 - DNA, 25 bp, SARS Virus
taaacgtgattgtacgtgatcgtgt

SEQ ID NO: 110254 - DNA, 25 bp, SARS Virus
aaacgtgattgatcgtgatcgtgtg

SEQ ID NO: 110255 - DNA, 25 bp, SARS Virus
aacgtgattgaatgtgatcgtgtgt

SEQ ID NO: 110256 - DNA, 25 bp, SARS Virus
acgtgattgaacttgatcgtgtgtg

SEQ ID NO: 110257 - DNA, 25 bp, SARS Virus
cgtgattgaacgtgatcgtgtgtga

SEQ ID NO: 110258 - DNA, 25 bp, SARS Virus
gtgattgaacgttatcgtgtgtgaa

SEQ ID NO: 110259 - DNA, 25 bp, SARS Virus
tgattgaacgtgttcgtgtgtgaaa

SEQ ID NO: 110260 - DNA, 25 bp, SARS Virus
gattgaacgtgatcgtgtgtgaaac

SEQ ID NO: 110261 - DNA, 25 bp, SARS Virus
attgaacgtgattgtgtgtgaaacg

SEQ ID NO: 110262 - DNA, 25 bp, SARS Virus
ttgaacgtgatcttgtgtgaaacga

SEQ ID NO: 110263 - DNA, 25 bp, SARS Virus
tgaacgtgatcgtgtgtgaaacgaa

SEQ ID NO: 110264 - DNA, 25 bp, SARS Virus
gaacgtgatcgtttgtgaaacgaaa

SEQ ID NO: 110265 - DNA, 25 bp, SARS Virus
aacgtgatcgtgtgtgaaacgaaaa

SEQ ID NO: 110266 - DNA, 25 bp, SARS Virus
acgtgatcgtgtttgaaacgaaaac

SEQ ID NO: 110267 - DNA, 25 bp, SARS Virus
cgtgatcgtgtgtgaaacgaaaacg

SEQ ID NO: 110268 - DNA, 25 bp, SARS Virus
gtgatcgtgtgttaaacgaaaacga

SEQ ID NO: 110269 - DNA, 25 bp, SARS Virus
tgatcgtgtgtgtaacgaaaacgaa

SEQ ID NO: 110270 - DNA, 25 bp, SARS Virus
gatcgtgtgtgatacgaaaacgaac

SEQ ID NO: 110271 - DNA, 25 bp, SARS Virus
atcgtgtgtgaatcgaaaacgaaca

SEQ ID NO: 110272 - DNA, 25 bp, SARS Virus
tcgtgtgtgaaatgaaaacgaacac

SEQ ID NO: 110273 - DNA, 25 bp, SARS Virus
cgtgtgtgaaactaaaacgaacacg

SEQ ID NO: 110274 - DNA, 25 bp, SARS Virus
gtgtgtgaaacgtaaacgaacacga

SEQ ID NO: 110275 - DNA, 25 bp, SARS Virus
tgtgtgaaacgataacgaacacgac

SEQ ID NO: 110276 - DNA, 25 bp, SARS Virus
gtgtgaaacgaatacgaacacgact

SEQ ID NO: 110277 - DNA, 25 bp, SARS Virus
tgtgaaacgaaatcgaacacgactg

SEQ ID NO: 110278 - DNA, 25 bp, SARS Virus
gtgaaacgaaaatgaacacgactgc

SEQ ID NO: 110279 - DNA, 25 bp, SARS Virus
tgaaacgaaaactaacacgactgcc

SEQ ID NO: 110280 - DNA, 25 bp, SARS Virus
gaaacgaaaacgtacacgactgcca

SEQ ID NO: 110281 - DNA, 25 bp, SARS Virus
aaacgaaaacgatcacgactgccat

SEQ ID NO: 110282 - DNA, 25 bp, SARS Virus
aacgaaaacgaatacgactgccatg

SEQ ID NO: 110283 - DNA, 25 bp, SARS Virus
acgaaaacgaactcgactgccatga

SEQ ID NO: 110284 - DNA, 25 bp, SARS Virus
cgaaaacgaacatgactgccatgag

SEQ ID NO: 110285 - DNA, 25 bp, SARS Virus
gaaaacgaacactactgccatgagc

SEQ ID NO: 110286 - DNA, 25 bp, SARS Virus
aaaacgaacacgtctgccatgagct

SEQ ID NO: 110287 - DNA, 25 bp, SARS Virus
aaacgaacacgattgccatgagctg

SEQ ID NO: 110288 - DNA, 25 bp, SARS Virus
aacgaacacgactgccatgagctgt

SEQ ID NO: 110289 - DNA, 25 bp, SARS Virus
acgaacacgacttccatgagctgta

SEQ ID NO: 110290 - DNA, 25 bp, SARS Virus
cgaacacgactgtcatgagctgtat

SEQ ID NO: 110291 - DNA, 25 bp, SARS Virus
gaacacgactgctatgagctgtatg

SEQ ID NO: 110292 - DNA, 25 bp, SARS Virus
aacacgactgccttgagctgtatgg

SEQ ID NO: 110293 - DNA, 25 bp, SARS Virus
acacgactgccatgagctgtatgga

SEQ ID NO: 110294 - DNA, 25 bp, SARS Virus
cacgactgccattagctgtatggat

SEQ ID NO: 110295 - DNA, 25 bp, SARS Virus
acgactgccatgtgctgtatggata

SEQ ID NO: 110296 - DNA, 25 bp, SARS Virus
cgactgccatgatctgtatggatag

SEQ ID NO: 110297 - DNA, 25 bp, SARS Virus
gactgccatgagttgtatggatagt

SEQ ID NO: 110298 - DNA, 25 bp, SARS Virus
actgccatgagctgtatggatagtc

SEQ ID NO: 110299 - DNA, 25 bp, SARS Virus
ctgccatgagctttatggatagtcg

SEQ ID NO: 110300 - DNA, 25 bp, SARS Virus
tgccatgagctgtatggatagtcga

SEQ ID NO: 110301 - DNA, 25 bp, SARS Virus
gccatgagctgtttggatagtcgac

SEQ ID NO: 110302 - DNA, 25 bp, SARS Virus
ccatgagctgtatggatagtcgacg

SEQ ID NO: 110303 - DNA, 25 bp, SARS Virus
catgagctgtattgatagtcgacgc

SEQ ID NO: 110304 - DNA, 25 bp, SARS Virus
atgagctgtatgtatagtcgacgca

SEQ ID NO: 110305 - DNA, 25 bp, SARS Virus
tgagctgtatggttagtcgacgcac

SEQ ID NO: 110306 - DNA, 25 bp, SARS Virus
gagctgtatggatagtcgacgcacg

SEQ ID NO: 110307 - DNA, 25 bp, SARS Virus
agctgtatggattgtcgacgcacgt

SEQ ID NO: 110308 - DNA, 25 bp, SARS Virus
gctgtatggatattcgacgcacgtt

SEQ ID NO: 110309 - DNA, 25 bp, SARS Virus
ctgtatggatagtcgacgcacgttc

SEQ ID NO: 110310 - DNA, 25 bp, SARS Virus
tgtatggatagttgacgcacgttct

SEQ ID NO: 110311 - DNA, 25 bp, SARS Virus
gtatggatagtctacgcacgttcta

SEQ ID NO: 110312 - DNA, 25 bp, SARS Virus
tatggatagtcgtcgcacgttctag

SEQ ID NO: 110313 - DNA, 25 bp, SARS Virus
atggatagtcgatgcacgttctagt

SEQ ID NO: 110314 - DNA, 25 bp, SARS Virus
tggatagtcgactcacgttctagtc

SEQ ID NO: 110315 - DNA, 25 bp, SARS Virus
ggatagtcgacgtacgttctagtca

SEQ ID NO: 110316 - DNA, 25 bp, SARS Virus
gatagtcgacgctcgttctagtcaa

SEQ ID NO: 110317 - DNA, 25 bp, SARS Virus
atagtcgacgcatgttctagtcaaa

SEQ ID NO: 110318 - DNA, 25 bp, SARS Virus
tagtcgacgcactttctagtcaaag

SEQ ID NO: 110319 - DNA, 25 bp, SARS Virus
agtcgacgcacgttctagtcaaagt

SEQ ID NO: 110320 - DNA, 25 bp, SARS Virus
gtcgacgcacgttctagtcaaagtg

SEQ ID NO: 110321 - DNA, 25 bp, SARS Virus
tcgacgcacgttttagtcaaagtgg

SEQ ID NO: 110322 - DNA, 25 bp, SARS Virus
cgacgcacgttctagtcaaagtggt

SEQ ID NO: 110323 - DNA, 25 bp, SARS Virus
gacgcacgttcttgtcaaagtggtt

SEQ ID NO: 110324 - DNA, 25 bp, SARS Virus
acgcacgttctattcaaagtggttt

SEQ ID NO: 110325 - DNA, 25 bp, SARS Virus
cgcacgttctagtcaaagtggtttt

SEQ ID NO: 110326 - DNA, 25 bp, SARS Virus
gcacgttctagttaaagtggttttg

SEQ ID NO: 110327 - DNA, 25 bp, SARS Virus
cacgttctagtctaagtggttttga

SEQ ID NO: 110328 - DNA, 25 bp, SARS Virus
acgttctagtcatagtggttttgaa

SEQ ID NO: 110329 - DNA, 25 bp, SARS Virus
cgttctagtcaatgtggttttgaaa

SEQ ID NO: 110330 - DNA, 25 bp, SARS Virus
gttctagtcaaattggttttgaaaa

SEQ ID NO: 110331 - DNA, 25 bp, SARS Virus
ttctagtcaaagtggttttgaaaag

SEQ ID NO: 110332 - DNA, 25 bp, SARS Virus
tctagtcaaagttgttttgaaaagt

SEQ ID NO: 110333 - DNA, 25 bp, SARS Virus
ctagtcaaagtgtttttgaaaagta

SEQ ID NO: 110334 - DNA, 25 bp, SARS Virus
tagtcaaagtggttttgaaaagtag

SEQ ID NO: 110335 - DNA, 25 bp, SARS Virus
agtcaaagtggttttgaaaagtagt

SEQ ID NO: 110336 - DNA, 25 bp, SARS Virus
gtcaaagtggttttgaaaagtagtc

SEQ ID NO: 110337 - DNA, 25 bp, SARS Virus
tcaaagtggttttgaaaagtagtct

SEQ ID NO: 110338 - DNA, 25 bp, SARS Virus
caaagtggtttttaaaagtagtctg

SEQ ID NO: 110339 - DNA, 25 bp, SARS Virus
aaagtggttttgtaaagtagtctgt

SEQ ID NO: 110340 - DNA, 25 bp, SARS Virus
aagtggttttgataagtagtctgtt

SEQ ID NO: 110341 - DNA, 25 bp, SARS Virus
agtggttttgaatagtagtctgttc

SEQ ID NO: 110342 - DNA, 25 bp, SARS Virus
gtggttttgaaatgtagtctgttct

SEQ ID NO: 110343 - DNA, 25 bp, SARS Virus
tggttttgaaaattagtctgttctc

SEQ ID NO: 110344 - DNA, 25 bp, SARS Virus
ggttttgaaaagtagtctgttctcc

SEQ ID NO: 110345 - DNA, 25 bp, SARS Virus
gttttgaaaagttgtctgttctcct

SEQ ID NO: 110346 - DNA, 25 bp, SARS Virus
ttttgaaaagtattctgttctcctc

SEQ ID NO: 110347 - DNA, 25 bp, SARS Virus
tttgaaaagtagtctgttctcctcc

SEQ ID NO: 110348 - DNA, 25 bp, SARS Virus
ttgaaaagtagtttgttctcctcca

SEQ ID NO: 110349 - DNA, 25 bp, SARS Virus
tgaaaagtagtctgttctcctccaa

SEQ ID NO: 110350 - DNA, 25 bp, SARS Virus
gaaaagtagtcttttctcctccaag

SEQ ID NO: 110351 - DNA, 25 bp, SARS Virus
aaaagtagtctgttctcctccaagt

SEQ ID NO: 110352 - DNA, 25 bp, SARS Virus
aaagtagtctgttctcctccaagtt

SEQ ID NO: 110353 - DNA, 25 bp, SARS Virus
aagtagtctgttttcctccaagttg

SEQ ID NO: 110354 - DNA, 25 bp, SARS Virus
agtagtctgttctcctccaagttgt

SEQ ID NO: 110355 - DNA, 25 bp, SARS Virus
gtagtctgttcttctccaagttgtt

SEQ ID NO: 110356 - DNA, 25 bp, SARS Virus
tagtctgttctcttccaagttgttc

SEQ ID NO: 110357 - DNA, 25 bp, SARS Virus
agtctgttctcctccaagttgttct

SEQ ID NO: 110358 - DNA, 25 bp, SARS Virus
gtctgttctccttcaagttgttctc

SEQ ID NO: 110359 - DNA, 25 bp, SARS Virus
tctgttctcctctaagttgttctcg

SEQ ID NO: 110360 - DNA, 25 bp, SARS Virus
ctgttctcctcctagttgttctcga

SEQ ID NO: 110361 - DNA, 25 bp, SARS Virus
tgttctcctccatgttgttctcgag

SEQ ID NO: 110362 - DNA, 25 bp, SARS Virus
gttctcctccaatttgttctcgaga

SEQ ID NO: 110363 - DNA, 25 bp, SARS Virus
ttctcctccaagttgttctcgagat

SEQ ID NO: 110364 - DNA, 25 bp, SARS Virus
tctcctccaagttgttctcgagatg

SEQ ID NO: 110365 - DNA, 25 bp, SARS Virus
ctcctccaagtttttctcgagatga

SEQ ID NO: 110366 - DNA, 25 bp, SARS Virus
tcctccaagttgttctcgagatgag

SEQ ID NO: 110367 - DNA, 25 bp, SARS Virus
cctccaagttgttctcgagatgagc

SEQ ID NO: 110368 - DNA, 25 bp, SARS Virus
ctccaagttgttttcgagatgagcg

SEQ ID NO: 110369 - DNA, 25 bp, SARS Virus
tccaagttgttctcgagatgagcgg

SEQ ID NO: 110370 - DNA, 25 bp, SARS Virus
ccaagttgttcttgagatgagcggt

SEQ ID NO: 110371 - DNA, 25 bp, SARS Virus
caagttgttctctagatgagcggtg

SEQ ID NO: 110372 - DNA, 25 bp, SARS Virus
aagttgttctcgtgatgagcggtga

SEQ ID NO: 110373 - DNA, 25 bp, SARS Virus
agttgttctcgatatgagcggtgaa

SEQ ID NO: 110374 - DNA, 25 bp, SARS Virus
gttgttctcgagttgagcggtgaaa

SEQ ID NO: 110375 - DNA, 25 bp, SARS Virus
ttgttctcgagatgagcggtgaaaa

SEQ ID NO: 110376 - DNA, 25 bp, SARS Virus
tgttctcgagattagcggtgaaaaa

SEQ ID NO: 110377 - DNA, 25 bp, SARS Virus
gttctcgagatgtgcggtgaaaaag

SEQ ID NO: 110378 - DNA, 25 bp, SARS Virus
ttctcgagatgatcggtgaaaaaga

SEQ ID NO: 110379 - DNA, 25 bp, SARS Virus
tctcgagatgagtggtgaaaaagag

SEQ ID NO: 110380 - DNA, 25 bp, SARS Virus
ctcgagatgagctgtgaaaaagagt

SEQ ID NO: 110381 - DNA, 25 bp, SARS Virus
tcgagatgagcgttgaaaaagagta

SEQ ID NO: 110382 - DNA, 25 bp, SARS Virus
cgagatgagcggtgaaaaagagtaa

SEQ ID NO: 110383 - DNA, 25 bp, SARS Virus
gagatgagcggttaaaaagagtaac

SEQ ID NO: 110384 - DNA, 25 bp, SARS Virus
agatgagcggtgtaaaagagtaaca

SEQ ID NO: 110385 - DNA, 25 bp, SARS Virus
gatgagcggtgataaagagtaacaa

SEQ ID NO: 110386 - DNA, 25 bp, SARS Virus
atgagcggtgaataagagtaacaac

SEQ ID NO: 110387 - DNA, 25 bp, SARS Virus
tgagcggtgaaatagagtaacaacg

SEQ ID NO: 110388 - DNA, 25 bp, SARS Virus
gagcggtgaaaatgagtaacaacga

SEQ ID NO: 110389 - DNA, 25 bp, SARS Virus
agcggtgaaaaatagtaacaacgac

SEQ ID NO: 110390 - DNA, 25 bp, SARS Virus
gcggtgaaaaagtgtaacaacgacg

SEQ ID NO: 110391 - DNA, 25 bp, SARS Virus
cggtgaaaaagattaacaacgacga

SEQ ID NO: 110392 - DNA, 25 bp, SARS Virus
ggtgaaaaagagtaacaacgacgag

SEQ ID NO: 110393 - DNA, 25 bp, SARS Virus
gtgaaaaagagttacaacgacgaga

SEQ ID NO: 110394 - DNA, 25 bp, SARS Virus
tgaaaaagagtatcaacgacgagat

SEQ ID NO: 110395 - DNA, 25 bp, SARS Virus
gaaaaagagtaataacgacgagatc

SEQ ID NO: 110396 - DNA, 25 bp, SARS Virus
aaaaagagtaactacgacgagatca

SEQ ID NO: 110397 - DNA, 25 bp, SARS Virus
aaaagagtaacatcgacgagatcat

SEQ ID NO: 110398 - DNA, 25 bp, SARS Virus
aaagagtaacaatgacgagatcata

SEQ ID NO: 110399 - DNA, 25 bp, SARS Virus
aagagtaacaactacgagatcataa

SEQ ID NO: 110400 - DNA, 25 bp, SARS Virus
agagtaacaacgtcgagatcataaa

SEQ ID NO: 110401 - DNA, 25 bp, SARS Virus
gagtaacaacgatgagatcataaaa

SEQ ID NO: 110402 - DNA, 25 bp, SARS Virus
agtaacaacgactagatcataaaaa

SEQ ID NO: 110403 - DNA, 25 bp, SARS Virus
gtaacaacgacgtgatcataaaaat

SEQ ID NO: 110404 - DNA, 25 bp, SARS Virus
taacaacgacgatatcataaaaatt

SEQ ID NO: 110405 - DNA, 25 bp, SARS Virus
aacaacgacgagttcataaaaatta

SEQ ID NO: 110406 - DNA, 25 bp, SARS Virus
acaacgacgagatcataaaaattat

SEQ ID NO: 110407 - DNA, 25 bp, SARS Virus
caacgacgagattataaaaattatg

SEQ ID NO: 110408 - DNA, 25 bp, SARS Virus
aacgacgagatcttaaaaattatga

SEQ ID NO: 110409 - DNA, 25 bp, SARS Virus
acgacgagatcataaaaattatgaa

SEQ ID NO: 110410 - DNA, 25 bp, SARS Virus
cgacgagatcattaaaattatgaaa

SEQ ID NO: 110411 - DNA, 25 bp, SARS Virus
gacgagatcatataaattatgaaac

SEQ ID NO: 110412 - DNA, 25 bp, SARS Virus
acgagatcataataattatgaaacg

SEQ ID NO: 110413 - DNA, 25 bp, SARS Virus
cgagatcataaatattatgaaacga

SEQ ID NO: 110414 - DNA, 25 bp, SARS Virus
gagatcataaaatttatgaaacgaa

SEQ ID NO: 110415 - DNA, 25 bp, SARS Virus
agatcataaaaattatgaaacgaag

SEQ ID NO: 110416 - DNA, 25 bp, SARS Virus
gatcataaaaattatgaaacgaagt

SEQ ID NO: 110417 - DNA, 25 bp, SARS Virus
atcataaaaattatgaaacgaagtg

SEQ ID NO: 110418 - DNA, 25 bp, SARS Virus
tcataaaaattaagaaacgaagtgg

SEQ ID NO: 110419 - DNA, 25 bp, SARS Virus
cataaaaattataaaacgaagtggt

SEQ ID NO: 110420 - DNA, 25 bp, SARS Virus
ataaaaattatgaaacgaagtggta

SEQ ID NO: 110421 - DNA, 25 bp, SARS Virus
taaaaattatgaaacgaagtggtaa

SEQ ID NO: 110422 - DNA, 25 bp, SARS Virus
aaaaattatgaaacgaagtggtaat

SEQ ID NO: 110423 - DNA, 25 bp, SARS Virus
aaaattatgaaaagaagtggtaatt

SEQ ID NO: 110424 - DNA, 25 bp, SARS Virus
aaattatgaaacaaagtggtaattc

SEQ ID NO: 110425 - DNA, 25 bp, SARS Virus
aattatgaaacgaagtggtaattct

SEQ ID NO: 110426 - DNA, 25 bp, SARS Virus
attatgaaacgaagtggtaattctc

SEQ ID NO: 110427 - DNA, 25 bp, SARS Virus
ttatgaaacgaaatggtaattctct

SEQ ID NO: 110428 - DNA, 25 bp, SARS Virus
tatgaaacgaagaggtaattctctt

SEQ ID NO: 110429 - DNA, 25 bp, SARS Virus
atgaaacgaagtagtaattctcttt

SEQ ID NO: 110430 - DNA, 25 bp, SARS Virus
tgaaacgaagtgataattctctttc

SEQ ID NO: 110431 - DNA, 25 bp, SARS Virus
gaaacgaagtggaaattctctttct

SEQ ID NO: 110432 - DNA, 25 bp, SARS Virus
aaacgaagtggtaattctctttctg

SEQ ID NO: 110433 - DNA, 25 bp, SARS Virus
aacgaagtggtaattctctttctgt

SEQ ID NO: 110434 - DNA, 25 bp, SARS Virus
acgaagtggtaaatctctttctgtc

SEQ ID NO: 110435 - DNA, 25 bp, SARS Virus
cgaagtggtaatactctttctgtct

SEQ ID NO: 110436 - DNA, 25 bp, SARS Virus
gaagtggtaattatctttctgtctt

SEQ ID NO: 110437 - DNA, 25 bp, SARS Virus
aagtggtaattcactttctgtctta

SEQ ID NO: 110438 - DNA, 25 bp, SARS Virus
agtggtaattctatttctgtcttac

SEQ ID NO: 110439 - DNA, 25 bp, SARS Virus
gtggtaattctcattctgtcttact

SEQ ID NO: 110440 - DNA, 25 bp, SARS Virus
tggtaattctctatctgtcttactt

SEQ ID NO: 110441 - DNA, 25 bp, SARS Virus
ggtaattctcttactgtcttactta

SEQ ID NO: 110442 - DNA, 25 bp, SARS Virus
gtaattctctttatgtcttacttac

SEQ ID NO: 110443 - DNA, 25 bp, SARS Virus
taattctctttcagtcttacttact

SEQ ID NO: 110444 - DNA, 25 bp, SARS Virus
aattctctttctatcttacttactc

SEQ ID NO: 110445 - DNA, 25 bp, SARS Virus
attctctttctgacttacttactcg

SEQ ID NO: 110446 - DNA, 25 bp, SARS Virus
ttctctttctgtattacttactcga

SEQ ID NO: 110447 - DNA, 25 bp, SARS Virus
tctctttctgtcatacttactcgag

SEQ ID NO: 110448 - DNA, 25 bp, SARS Virus
ctctttctgtctaacttactcgagt

SEQ ID NO: 110449 - DNA, 25 bp, SARS Virus
tctttctgtcttacttactcgagtg

SEQ ID NO: 110450 - DNA, 25 bp, SARS Virus
ctttctgtcttaattactcgagtga

SEQ ID NO: 110451 - DNA, 25 bp, SARS Virus
tttctgtcttacatactcgagtgaa

SEQ ID NO: 110452 - DNA, 25 bp, SARS Virus
ttctgtcttactaactcgagtgaaa

SEQ ID NO: 110453 - DNA, 25 bp, SARS Virus
tctgtcttacttactcgagtgaaat

SEQ ID NO: 110454 - DNA, 25 bp, SARS Virus
ctgtcttacttaatcgagtgaaatt

SEQ ID NO: 110455 - DNA, 25 bp, SARS Virus
tgtcttacttacacgagtgaaatta

SEQ ID NO: 110456 - DNA, 25 bp, SARS Virus
gtcttacttactagagtgaaattaa

SEQ ID NO: 110457 - DNA, 25 bp, SARS Virus
tcttacttactcaagtgaaattaac

SEQ ID NO: 110458 - DNA, 25 bp, SARS Virus
cttacttactcgagtgaaattaact

SEQ ID NO: 110459 - DNA, 25 bp, SARS Virus
ttacttactcgaatgaaattaactg

SEQ ID NO: 110460 - DNA, 25 bp, SARS Virus
tacttactcgagagaaattaactga

SEQ ID NO: 110461 - DNA, 25 bp, SARS Virus
acttactcgagtaaaattaactgaa

SEQ ID NO: 110462 - DNA, 25 bp, SARS Virus
cttactcgagtgaaattaactgaag

SEQ ID NO: 110463 - DNA, 25 bp, SARS Virus
ttactcgagtgaaattaactgaaga

SEQ ID NO: 110464 - DNA, 25 bp, SARS Virus
tactcgagtgaaattaactgaagat

SEQ ID NO: 110465 - DNA, 25 bp, SARS Virus
actcgagtgaaaataactgaagata

SEQ ID NO: 110466 - DNA, 25 bp, SARS Virus
ctcgagtgaaataaactgaagataa

SEQ ID NO: 110467 - DNA, 25 bp, SARS Virus
tcgagtgaaattaactgaagataaa

SEQ ID NO: 110468 - DNA, 25 bp, SARS Virus
cgagtgaaattaactgaagataaac

SEQ ID NO: 110469 - DNA, 25 bp, SARS Virus
gagtgaaattaaatgaagataaaca

SEQ ID NO: 110470 - DNA, 25 bp, SARS Virus
agtgaaattaacagaagataaacac

SEQ ID NO: 110471 - DNA, 25 bp, SARS Virus
gtgaaattaactaaagataaacacg

SEQ ID NO: 110472 - DNA, 25 bp, SARS Virus
tgaaattaactgaagataaacacga

SEQ ID NO: 110473 - DNA, 25 bp, SARS Virus
gaaattaactgaagataaacacgaa

SEQ ID NO: 110474 - DNA, 25 bp, SARS Virus
aaattaactgaaaataaacacgaaa

SEQ ID NO: 110475 - DNA, 25 bp, SARS Virus
aattaactgaagataaacacgaaaa

SEQ ID NO: 110476 - DNA, 25 bp, SARS Virus
attaactgaagaaaaacacgaaaaa

SEQ ID NO: 110477 - DNA, 25 bp, SARS Virus
ttaactgaagataaacacgaaaaat

SEQ ID NO: 110478 - DNA, 25 bp, SARS Virus
taactgaagataaacacgaaaaatc

SEQ ID NO: 110479 - DNA, 25 bp, SARS Virus
aactgaagataaacacgaaaaatcg

SEQ ID NO: 110480 - DNA, 25 bp, SARS Virus
actgaagataaaaacgaaaaatcgg

SEQ ID NO: 110481 - DNA, 25 bp, SARS Virus
ctgaagataaacacgaaaaatcgga

SEQ ID NO: 110482 - DNA, 25 bp, SARS Virus
tgaagataaacaagaaaaatcggaa

SEQ ID NO: 110483 - DNA, 25 bp, SARS Virus
gaagataaacacaaaaaatcggaaa

SEQ ID NO: 110484 - DNA, 25 bp, SARS Virus
aagataaacacgaaaaatcggaaag

SEQ ID NO: 110485 - DNA, 25 bp, SARS Virus
agataaacacgaaaaatcggaaaga

SEQ ID NO: 110486 - DNA, 25 bp, SARS Virus
gataaacacgaaaaatcggaaagac

SEQ ID NO: 110487 - DNA, 25 bp, SARS Virus
ataaacacgaaaaatcggaaagacg

SEQ ID NO: 110488 - DNA, 25 bp, SARS Virus
taaacacgaaaaatcggaaagacga

SEQ ID NO: 110489 - DNA, 25 bp, SARS Virus
aaacacgaaaaaacggaaagacgat

SEQ ID NO: 110490 - DNA, 25 bp, SARS Virus
aacacgaaaaataggaaagacgata

SEQ ID NO: 110491 - DNA, 25 bp, SARS Virus
acacgaaaaatcagaaagacgataa

SEQ ID NO: 110492 - DNA, 25 bp, SARS Virus
cacgaaaaatcgaaaagacgataag

SEQ ID NO: 110493 - DNA, 25 bp, SARS Virus
acgaaaaatcggaaagacgataagg

SEQ ID NO: 110494 - DNA, 25 bp, SARS Virus
cgaaaaatcggaaagacgataagga

SEQ ID NO: 110495 - DNA, 25 bp, SARS Virus
gaaaaatcggaaagacgataaggaa

SEQ ID NO: 110496 - DNA, 25 bp, SARS Virus
aaaaatcggaaaaacgataaggaac

SEQ ID NO: 110497 - DNA, 25 bp, SARS Virus
aaaatcggaaagacgataaggaaca

SEQ ID NO: 110498 - DNA, 25 bp, SARS Virus
aaatcggaaagaagataaggaacaa

SEQ ID NO: 110499 - DNA, 25 bp, SARS Virus
aatcggaaagacaataaggaacaaa

SEQ ID NO: 110500 - DNA, 25 bp, SARS Virus
atcggaaagacgataaggaacaaaa

SEQ ID NO: 110501 - DNA, 25 bp, SARS Virus
tcggaaagacgaaaaggaacaaaat

SEQ ID NO: 110502 - DNA, 25 bp, SARS Virus
cggaaagacgataaggaacaaaatt

SEQ ID NO: 110503 - DNA, 25 bp, SARS Virus
ggaaagacgataaggaacaaaatta

SEQ ID NO: 110504 - DNA, 25 bp, SARS Virus
gaaagacgataaagaacaaaattat

SEQ ID NO: 110505 - DNA, 25 bp, SARS Virus
aaagacgataagaaacaaaattatt

SEQ ID NO: 110506 - DNA, 25 bp, SARS Virus
aagacgataaggaacaaaattatta

SEQ ID NO: 110507 - DNA, 25 bp, SARS Virus
agacgataaggaacaaaattattac

SEQ ID NO: 110508 - DNA, 25 bp, SARS Virus
gacgataaggaaaaaaattattacg

SEQ ID NO: 110509 - DNA, 25 bp, SARS Virus
acgataaggaacaaaattattacga

SEQ ID NO: 110510 - DNA, 25 bp, SARS Virus
cgataaggaacaaaattattacgaa

SEQ ID NO: 110511 - DNA, 25 bp, SARS Virus
gataaggaacaaaattattacgaat

SEQ ID NO: 110512 - DNA, 25 bp, SARS Virus
ataaggaacaaaattattacgaata

SEQ ID NO: 110513 - DNA, 25 bp, SARS Virus
taaggaacaaaaatattacgaataa

SEQ ID NO: 110514 - DNA, 25 bp, SARS Virus
aaggaacaaaataattacgaataat

SEQ ID NO: 110515 - DNA, 25 bp, SARS Virus
aggaacaaaattattacgaataata

SEQ ID NO: 110516 - DNA, 25 bp, SARS Virus
ggaacaaaattaatacgaataatat

SEQ ID NO: 110517 - DNA, 25 bp, SARS Virus
gaacaaaattataacgaataatata

SEQ ID NO: 110518 - DNA, 25 bp, SARS Virus
aacaaaattattacgaataatataa

SEQ ID NO: 110519 - DNA, 25 bp, SARS Virus
acaaaattattaagaataatataaa

SEQ ID NO: 110520 - DNA, 25 bp, SARS Virus
caaaattattacaaataatataaaa

SEQ ID NO: 110521 - DNA, 25 bp, SARS Virus
aaaattattacgaataatataaaac

SEQ ID NO: 110522 - DNA, 25 bp, SARS Virus
aaattattacgaataatataaaacc

SEQ ID NO: 110523 - DNA, 25 bp, SARS Virus
aattattacgaaaaatataaaacca

SEQ ID NO: 110524 - DNA, 25 bp, SARS Virus
attattacgaataatataaaaccaa

SEQ ID NO: 110525 - DNA, 25 bp, SARS Virus
ttattacgaataatataaaaccaaa

SEQ ID NO: 110526 - DNA, 25 bp, SARS Virus
tattacgaataaaataaaaccaaaa

SEQ ID NO: 110527 - DNA, 25 bp, SARS Virus
attacgaataatataaaaccaaaag

SEQ ID NO: 110528 - DNA, 25 bp, SARS Virus
ttacgaataataaaaaaccaaaagt

SEQ ID NO: 110529 - DNA, 25 bp, SARS Virus
tacgaataatataaaaccaaaagtg

SEQ ID NO: 110530 - DNA, 25 bp, SARS Virus
acgaataatataaaaccaaaagtga

SEQ ID NO: 110531 - DNA, 25 bp, SARS Virus
cgaataatataaaaccaaaagtgag

SEQ ID NO: 110532 - DNA, 25 bp, SARS Virus
gaataatataaaaccaaaagtgagc

SEQ ID NO: 110533 - DNA, 25 bp, SARS Virus
aataatataaaaacaaaagtgagct

SEQ ID NO: 110534 - DNA, 25 bp, SARS Virus
ataatataaaacaaaaagtgagctt

SEQ ID NO: 110535 - DNA, 25 bp, SARS Virus
taatataaaaccaaaagtgagcttt

SEQ ID NO: 110536 - DNA, 25 bp, SARS Virus
aatataaaaccaaaagtgagcttta

SEQ ID NO: 110537 - DNA, 25 bp, SARS Virus
atataaaaccaaaagtgagctttag

SEQ ID NO: 110538 - DNA, 25 bp, SARS Virus
tataaaaccaaaagtgagctttagg

SEQ ID NO: 110539 - DNA, 25 bp, SARS Virus
ataaaaccaaaaatgagctttaggt

SEQ ID NO: 110540 - DNA, 25 bp, SARS Virus
taaaaccaaaagagagctttaggtc

SEQ ID NO: 110541 - DNA, 25 bp, SARS Virus
aaaaccaaaagtaagctttaggtcc

SEQ ID NO: 110542 - DNA, 25 bp, SARS Virus
aaaccaaaagtgagctttaggtcct

SEQ ID NO: 110543 - DNA, 25 bp, SARS Virus
aaccaaaagtgaactttaggtccta

SEQ ID NO: 110544 - DNA, 25 bp, SARS Virus
accaaaagtgagatttaggtcctag

SEQ ID NO: 110545 - DNA, 25 bp, SARS Virus
ccaaaagtgagcattaggtcctaga

SEQ ID NO: 110546 - DNA, 25 bp, SARS Virus
caaaagtgagctataggtcctagat

SEQ ID NO: 110547 - DNA, 25 bp, SARS Virus
aaaagtgagcttaaggtcctagatc

SEQ ID NO: 110548 - DNA, 25 bp, SARS Virus
aaagtgagctttaggtcctagatct

SEQ ID NO: 110549 - DNA, 25 bp, SARS Virus
aagtgagctttaagtcctagatctt

SEQ ID NO: 110550 - DNA, 25 bp, SARS Virus
agtgagctttagatcctagatcttc

SEQ ID NO: 110551 - DNA, 25 bp, SARS Virus
gtgagctttaggacctagatcttct

SEQ ID NO: 110552 - DNA, 25 bp, SARS Virus
tgagctttaggtactagatcttctt

SEQ ID NO: 110553 - DNA, 25 bp, SARS Virus
gagctttaggtcatagatcttcttg

SEQ ID NO: 110554 - DNA, 25 bp, SARS Virus
agctttaggtccaagatcttcttgg

SEQ ID NO: 110555 - DNA, 25 bp, SARS Virus
gctttaggtcctagatcttcttgga

SEQ ID NO: 110556 - DNA, 25 bp, SARS Virus
ctttaggtcctaaatcttcttggaa

SEQ ID NO: 110557 - DNA, 25 bp, SARS Virus
tttaggtcctagatcttcttggaac

SEQ ID NO: 110558 - DNA, 25 bp, SARS Virus
ttaggtcctagaacttcttggaaca

SEQ ID NO: 110559 - DNA, 25 bp, SARS Virus
taggtcctagatattcttggaacat

SEQ ID NO: 110560 - DNA, 25 bp, SARS Virus
aggtcctagatcatcttggaacatg

SEQ ID NO: 110561 - DNA, 25 bp, SARS Virus
ggtcctagatctacttggaacatgg

SEQ ID NO: 110562 - DNA, 25 bp, SARS Virus
gtcctagatcttattggaacatggt

SEQ ID NO: 110563 - DNA, 25 bp, SARS Virus
tcctagatcttcatggaacatggtt

SEQ ID NO: 110564 - DNA, 25 bp, SARS Virus
cctagatcttctaggaacatggttt

SEQ ID NO: 110565 - DNA, 25 bp, SARS Virus
ctagatcttcttagaacatggtttc

SEQ ID NO: 110566 - DNA, 25 bp, SARS Virus
tagatcttcttgaaacatggtttca

SEQ ID NO: 110567 - DNA, 25 bp, SARS Virus
agatcttcttggaacatggtttcag

SEQ ID NO: 110568 - DNA, 25 bp, SARS Virus
gatcttcttggaacatggtttcaga

SEQ ID NO: 110569 - DNA, 25 bp, SARS Virus
atcttcttggaaaatggtttcagat

SEQ ID NO: 110570 - DNA, 25 bp, SARS Virus
tcttcttggaacatggtttcagatt

SEQ ID NO: 110571 - DNA, 25 bp, SARS Virus
cttcttggaacaaggtttcagattt

SEQ ID NO: 110572 - DNA, 25 bp, SARS Virus
ttcttggaacatagtttcagatttg

SEQ ID NO: 110573 - DNA, 25 bp, SARS Virus
tcttggaacatgatttcagatttgc

SEQ ID NO: 110574 - DNA, 25 bp, SARS Virus
cttggaacatggattcagatttgct

SEQ ID NO: 110575 - DNA, 25 bp, SARS Virus
ttggaacatggtatcagatttgctt

SEQ ID NO: 110576 - DNA, 25 bp, SARS Virus
tggaacatggttacagatttgcttg

SEQ ID NO: 110577 - DNA, 25 bp, SARS Virus
ggaacatggtttaagatttgcttgt

SEQ ID NO: 110578 - DNA, 25 bp, SARS Virus
gaacatggtttcagatttgcttgta

SEQ ID NO: 110579 - DNA, 25 bp, SARS Virus
aacatggtttcaaatttgcttgtac

SEQ ID NO: 110580 - DNA, 25 bp, SARS Virus
acatggtttcagatttgcttgtact

SEQ ID NO: 110581 - DNA, 25 bp, SARS Virus
catggtttcagaattgcttgtactt

SEQ ID NO: 110582 - DNA, 25 bp, SARS Virus
atggtttcagatatgcttgtacttt

SEQ ID NO: 110583 - DNA, 25 bp, SARS Virus
tggtttcagattagcttgtactttg

SEQ ID NO: 110584 - DNA, 25 bp, SARS Virus
ggtttcagatttacttgtactttga

SEQ ID NO: 110585 - DNA, 25 bp, SARS Virus
gtttcagatttgattgtactttgaa

SEQ ID NO: 110586 - DNA, 25 bp, SARS Virus
tttcagatttgcatgtactttgaag

SEQ ID NO: 110587 - DNA, 25 bp, SARS Virus
ttcagatttgctagtactttgaaga

SEQ ID NO: 110588 - DNA, 25 bp, SARS Virus
tcagatttgcttatactttgaagag

SEQ ID NO: 110589 - DNA, 25 bp, SARS Virus
cagatttgcttgaactttgaagagt

SEQ ID NO: 110590 - DNA, 25 bp, SARS Virus
agatttgcttgtactttgaagagta

SEQ ID NO: 110591 - DNA, 25 bp, SARS Virus
gatttgcttgtaatttgaagagtaa

SEQ ID NO: 110592 - DNA, 25 bp, SARS Virus
atttgcttgtacattgaagagtaac

SEQ ID NO: 110593 - DNA, 25 bp, SARS Virus
tttgcttgtactatgaagagtaaca

SEQ ID NO: 110594 - DNA, 25 bp, SARS Virus
ttgcttgtacttagaagagtaacaa

SEQ ID NO: 110595 - DNA, 25 bp, SARS Virus
tgcttgtactttaaagagtaacaaa

SEQ ID NO: 110596 - DNA, 25 bp, SARS Virus
gcttgtactttgaagagtaacaaaa

SEQ ID NO: 110597 - DNA, 25 bp, SARS Virus
cttgtactttgaagagtaacaaaac

SEQ ID NO: 110598 - DNA, 25 bp, SARS Virus
ttgtactttgaaaagtaacaaaact

SEQ ID NO: 110599 - DNA, 25 bp, SARS Virus
tgtactttgaagagtaacaaaactg

SEQ ID NO: 110600 - DNA, 25 bp, SARS Virus
gtactttgaagaataacaaaactga

SEQ ID NO: 110601 - DNA, 25 bp, SARS Virus
tactttgaagagaaacaaaactgaa

SEQ ID NO: 110602 - DNA, 25 bp, SARS Virus
actttgaagagtaacaaaactgaac

SEQ ID NO: 110603 - DNA, 25 bp, SARS Virus
ctttgaagagtaacaaaactgaaca

SEQ ID NO: 110604 - DNA, 25 bp, SARS Virus
tttgaagagtaaaaaaactgaacat

SEQ ID NO: 110605 - DNA, 25 bp, SARS Virus
ttgaagagtaacaaaactgaacata

SEQ ID NO: 110606 - DNA, 25 bp, SARS Virus
tgaagagtaacaaaactgaacataa

SEQ ID NO: 110607 - DNA, 25 bp, SARS Virus
gaagagtaacaaaactgaacataaa

SEQ ID NO: 110608 - DNA, 25 bp, SARS Virus
aagagtaacaaaactgaacataaag

SEQ ID NO: 110609 - DNA, 25 bp, SARS Virus
agagtaacaaaaatgaacataaaga

SEQ ID NO: 110610 - DNA, 25 bp, SARS Virus
gagtaacaaaacagaacataaagag

SEQ ID NO: 110611 - DNA, 25 bp, SARS Virus
agtaacaaaactaaacataaagaga

SEQ ID NO: 110612 - DNA, 25 bp, SARS Virus
gtaacaaaactgaacataaagagat

SEQ ID NO: 110613 - DNA, 25 bp, SARS Virus
taacaaaactgaacataaagagata

SEQ ID NO: 110614 - DNA, 25 bp, SARS Virus
aacaaaactgaaaataaagagatac

SEQ ID NO: 110615 - DNA, 25 bp, SARS Virus
acaaaactgaacataaagagatacg

SEQ ID NO: 110616 - DNA, 25 bp, SARS Virus
caaaactgaacaaaaagagatacgt

SEQ ID NO: 110617 - DNA, 25 bp, SARS Virus
aaaactgaacataaagagatacgtc

SEQ ID NO: 110618 - DNA, 25 bp, SARS Virus
aaactgaacataaagagatacgtca

SEQ ID NO: 110619 - DNA, 25 bp, SARS Virus
aactgaacataaagagatacgtcaa

SEQ ID NO: 110620 - DNA, 25 bp, SARS Virus
actgaacataaaaagatacgtcaac

SEQ ID NO: 110621 - DNA, 25 bp, SARS Virus
ctgaacataaagagatacgtcaacg

SEQ ID NO: 110622 - DNA, 25 bp, SARS Virus
tgaacataaagaaatacgtcaacgt

SEQ ID NO: 110623 - DNA, 25 bp, SARS Virus
gaacataaagagatacgtcaacgta

SEQ ID NO: 110624 - DNA, 25 bp, SARS Virus
aacataaagagaaacgtcaacgtat

SEQ ID NO: 110625 - DNA, 25 bp, SARS Virus
acataaagagatacgtcaacgtata

SEQ ID NO: 110626 - DNA, 25 bp, SARS Virus
cataaagagataagtcaacgtatac

SEQ ID NO: 110627 - DNA, 25 bp, SARS Virus
ataaagagatacatcaacgtatacg

SEQ ID NO: 110628 - DNA, 25 bp, SARS Virus
taaagagatacgacaacgtatacgt

SEQ ID NO: 110629 - DNA, 25 bp, SARS Virus
aaagagatacgtaaacgtatacgtg

SEQ ID NO: 110630 - DNA, 25 bp, SARS Virus
aagagatacgtcaacgtatacgtga

SEQ ID NO: 110631 - DNA, 25 bp, SARS Virus
agagatacgtcaacgtatacgtgac

SEQ ID NO: 110632 - DNA, 25 bp, SARS Virus
gagatacgtcaaagtatacgtgaca

SEQ ID NO: 110633 - DNA, 25 bp, SARS Virus
agatacgtcaacatatacgtgacat

SEQ ID NO: 110634 - DNA, 25 bp, SARS Virus
gatacgtcaacgaatacgtgacatc

SEQ ID NO: 110635 - DNA, 25 bp, SARS Virus
atacgtcaacgtatacgtgacatca

SEQ ID NO: 110636 - DNA, 25 bp, SARS Virus
tacgtcaacgtaaacgtgacatcat

SEQ ID NO: 110637 - DNA, 25 bp, SARS Virus
acgtcaacgtatacgtgacatcatg

SEQ ID NO: 110638 - DNA, 25 bp, SARS Virus
cgtcaacgtataagtgacatcatgt

SEQ ID NO: 110639 - DNA, 25 bp, SARS Virus
gtcaacgtatacatgacatcatgtc

SEQ ID NO: 110640 - DNA, 25 bp, SARS Virus
tcaacgtatacgagacatcatgtcg

SEQ ID NO: 110641 - DNA, 25 bp, SARS Virus
caacgtatacgtaacatcatgtcgc

SEQ ID NO: 110642 - DNA, 25 bp, SARS Virus
aacgtatacgtgacatcatgtcgcg

SEQ ID NO: 110643 - DNA, 25 bp, SARS Virus
acgtatacgtgaaatcatgtcgcga

SEQ ID NO: 110644 - DNA, 25 bp, SARS Virus
cgtatacgtgacatcatgtcgcgac

SEQ ID NO: 110645 - DNA, 25 bp, SARS Virus
gtatacgtgacaacatgtcgcgaca

SEQ ID NO: 110646 - DNA, 25 bp, SARS Virus
tatacgtgacataatgtcgcgacac

SEQ ID NO: 110647 - DNA, 25 bp, SARS Virus
atacgtgacatcatgtcgcgacacg

SEQ ID NO: 110648 - DNA, 25 bp, SARS Virus
tacgtgacatcaagtcgcgacacgt

SEQ ID NO: 110649 - DNA, 25 bp, SARS Virus
acgtgacatcatatcgcgacacgta

SEQ ID NO: 110650 - DNA, 25 bp, SARS Virus
cgtgacatcatgacgcgacacgtag

SEQ ID NO: 110651 - DNA, 25 bp, SARS Virus
gtgacatcatgtagcgacacgtaga

SEQ ID NO: 110652 - DNA, 25 bp, SARS Virus
tgacatcatgtcacgacacgtagat

SEQ ID NO: 110653 - DNA, 25 bp, SARS Virus
gacatcatgtcgagacacgtagatt

SEQ ID NO: 110654 - DNA, 25 bp, SARS Virus
acatcatgtcgcaacacgtagatta

SEQ ID NO: 110655 - DNA, 25 bp, SARS Virus
catcatgtcgcgacacgtagattat

SEQ ID NO: 110656 - DNA, 25 bp, SARS Virus
atcatgtcgcgaaacgtagattatt

SEQ ID NO: 110657 - DNA, 25 bp, SARS Virus
tcatgtcgcgacacgtagattattt

SEQ ID NO: 110658 - DNA, 25 bp, SARS Virus
catgtcgcgacaagtagattatttg

SEQ ID NO: 110659 - DNA, 25 bp, SARS Virus
atgtcgcgacacatagattatttgg

SEQ ID NO: 110660 - DNA, 25 bp, SARS Virus
tgtcgcgacacgaagattatttgga

SEQ ID NO: 110661 - DNA, 25 bp, SARS Virus
gtcgcgacacgtagattatttggag

SEQ ID NO: 110662 - DNA, 25 bp, SARS Virus
tcgcgacacgtaaattatttggagt

SEQ ID NO: 110663 - DNA, 25 bp, SARS Virus
cgcgacacgtagattatttggagta

SEQ ID NO: 110664 - DNA, 25 bp, SARS Virus
gcgacacgtagaatatttggagtac

SEQ ID NO: 110665 - DNA, 25 bp, SARS Virus
cgacacgtagataatttggagtaca

SEQ ID NO: 110666 - DNA, 25 bp, SARS Virus
gacacgtagattatttggagtacac

SEQ ID NO: 110667 - DNA, 25 bp, SARS Virus
acacgtagattaattggagtacacg

SEQ ID NO: 110668 - DNA, 25 bp, SARS Virus
cacgtagattatatggagtacacga

SEQ ID NO: 110669 - DNA, 25 bp, SARS Virus
acgtagattattaggagtacacgaa

SEQ ID NO: 110670 - DNA, 25 bp, SARS Virus
cgtagattatttagagtacacgaac

SEQ ID NO: 110671 - DNA, 25 bp, SARS Virus
gtagattatttgaagtacacgaact

SEQ ID NO: 110672 - DNA, 25 bp, SARS Virus
tagattatttggagtacacgaactt

SEQ ID NO: 110673 - DNA, 25 bp, SARS Virus
agattatttggaatacacgaacttc

SEQ ID NO: 110674 - DNA, 25 bp, SARS Virus
gattatttggagaacacgaacttct

SEQ ID NO: 110675 - DNA, 25 bp, SARS Virus
attatttggagtacacgaacttcta

SEQ ID NO: 110676 - DNA, 25 bp, SARS Virus
ttatttggagtaaacgaacttctag

SEQ ID NO: 110677 - DNA, 25 bp, SARS Virus
tatttggagtacacgaacttctagg

SEQ ID NO: 110678 - DNA, 25 bp, SARS Virus
atttggagtacaagaacttctagga

SEQ ID NO: 110679 - DNA, 25 bp, SARS Virus
tttggagtacacaaacttctaggaa

SEQ ID NO: 110680 - DNA, 25 bp, SARS Virus
ttggagtacacgaacttctaggaac

SEQ ID NO: 110681 - DNA, 25 bp, SARS Virus
tggagtacacgaacttctaggaaca

SEQ ID NO: 110682 - DNA, 25 bp, SARS Virus
ggagtacacgaaattctaggaacat

SEQ ID NO: 110683 - DNA, 25 bp, SARS Virus
gagtacacgaacatctaggaacatt

SEQ ID NO: 110684 - DNA, 25 bp, SARS Virus
agtacacgaactactaggaacattc

SEQ ID NO: 110685 - DNA, 25 bp, SARS Virus
gtacacgaacttataggaacattcc

SEQ ID NO: 110686 - DNA, 25 bp, SARS Virus
tacacgaacttcaaggaacattcca

SEQ ID NO: 110687 - DNA, 25 bp, SARS Virus
acacgaacttctaggaacattccat

SEQ ID NO: 110688 - DNA, 25 bp, SARS Virus
cacgaacttctaagaacattccatg

SEQ ID NO: 110689 - DNA, 25 bp, SARS Virus
acgaacttctagaaacattccatgt

SEQ ID NO: 110690 - DNA, 25 bp, SARS Virus
cgaacttctaggaacattccatgtt

SEQ ID NO: 110691 - DNA, 25 bp, SARS Virus
gaacttctaggaacattccatgttg

SEQ ID NO: 110692 - DNA, 25 bp, SARS Virus
aacttctaggaaaattccatgttgt

SEQ ID NO: 110693 - DNA, 25 bp, SARS Virus
acttctaggaacattccatgttgtg

SEQ ID NO: 110694 - DNA, 25 bp, SARS Virus
cttctaggaacaatccatgttgtga

SEQ ID NO: 110695 - DNA, 25 bp, SARS Virus
ttctaggaacataccatgttgtgat

SEQ ID NO: 110696 - DNA, 25 bp, SARS Virus
tctaggaacattacatgttgtgatc

SEQ ID NO: 110697 - DNA, 25 bp, SARS Virus
ctaggaacattcaatgttgtgatcc

SEQ ID NO: 110698 - DNA, 25 bp, SARS Virus
taggaacattccatgttgtgatccc

SEQ ID NO: 110699 - DNA, 25 bp, SARS Virus
aggaacattccaagttgtgatcccc

SEQ ID NO: 110700 - DNA, 25 bp, SARS Virus
ggaacattccatattgtgatcccca

SEQ ID NO: 110701 - DNA, 25 bp, SARS Virus
gaacattccatgatgtgatccccat

SEQ ID NO: 110702 - DNA, 25 bp, SARS Virus
aacattccatgtagtgatccccatt

SEQ ID NO: 110703 - DNA, 25 bp, SARS Virus
acattccatgttatgatccccatta

SEQ ID NO: 110704 - DNA, 25 bp, SARS Virus
cattccatgttgagatccccattat

SEQ ID NO: 110705 - DNA, 25 bp, SARS Virus
attccatgttgtaatccccattatg

SEQ ID NO: 110706 - DNA, 25 bp, SARS Virus
ttccatgttgtgatccccattatga

SEQ ID NO: 110707 - DNA, 25 bp, SARS Virus
tccatgttgtgaaccccattatgaa

SEQ ID NO: 110708 - DNA, 25 bp, SARS Virus
ccatgttgtgatacccattatgaat

SEQ ID NO: 110709 - DNA, 25 bp, SARS Virus
catgttgtgatcaccattatgaata

SEQ ID NO: 110710 - DNA, 25 bp, SARS Virus
atgttgtgatccacattatgaatat

SEQ ID NO: 110711 - DNA, 25 bp, SARS Virus
tgttgtgatcccaattatgaatatc

SEQ ID NO: 110712 - DNA, 25 bp, SARS Virus
gttgtgatccccattatgaatatcg

SEQ ID NO: 110713 - DNA, 25 bp, SARS Virus
ttgtgatccccaatatgaatatcgt

SEQ ID NO: 110714 - DNA, 25 bp, SARS Virus
tgtgatccccataatgaatatcgtg

SEQ ID NO: 110715 - DNA, 25 bp, SARS Virus
gtgatccccattatgaatatcgtga

SEQ ID NO: 110716 - DNA, 25 bp, SARS Virus
tgatccccattaagaatatcgtgac

SEQ ID NO: 110717 - DNA, 25 bp, SARS Virus
gatccccattataaatatcgtgacg

SEQ ID NO: 110718 - DNA, 25 bp, SARS Virus
atccccattatgaatatcgtgacga

SEQ ID NO: 110719 - DNA, 25 bp, SARS Virus
tccccattatgaatatcgtgacgaa

SEQ ID NO: 110720 - DNA, 25 bp, SARS Virus
ccccattatgaaaatcgtgacgaac

SEQ ID NO: 110721 - DNA, 25 bp, SARS Virus
cccattatgaatatcgtgacgaacc

SEQ ID NO: 110722 - DNA, 25 bp, SARS Virus
ccattatgaataacgtgacgaaccg

SEQ ID NO: 110723 - DNA, 25 bp, SARS Virus
cattatgaatatagtgacgaaccga

SEQ ID NO: 110724 - DNA, 25 bp, SARS Virus
attatgaatatcatgacgaaccgaa

SEQ ID NO: 110725 - DNA, 25 bp, SARS Virus
ttatgaatatcgagacgaaccgaaa

SEQ ID NO: 110726 - DNA, 25 bp, SARS Virus
tatgaatatcgtaacgaaccgaaac

SEQ ID NO: 110727 - DNA, 25 bp, SARS Virus
atgaatatcgtgacgaaccgaaaca

SEQ ID NO: 110728 - DNA, 25 bp, SARS Virus
tgaatatcgtgaagaaccgaaacac

SEQ ID NO: 110729 - DNA, 25 bp, SARS Virus
gaatatcgtgacaaaccgaaacacg

SEQ ID NO: 110730 - DNA, 25 bp, SARS Virus
aatatcgtgacgaaccgaaacacga

SEQ ID NO: 110731 - DNA, 25 bp, SARS Virus
atatcgtgacgaaccgaaacacgag

SEQ ID NO: 110732 - DNA, 25 bp, SARS Virus
tatcgtgacgaaacgaaacacgaga

SEQ ID NO: 110733 - DNA, 25 bp, SARS Virus
atcgtgacgaacagaaacacgagat

SEQ ID NO: 110734 - DNA, 25 bp, SARS Virus
tcgtgacgaaccaaaacacgagatc

SEQ ID NO: 110735 - DNA, 25 bp, SARS Virus
cgtgacgaaccgaaacacgagatcc

SEQ ID NO: 110736 - DNA, 25 bp, SARS Virus
gtgacgaaccgaaacacgagatcct

SEQ ID NO: 110737 - DNA, 25 bp, SARS Virus
tgacgaaccgaaacacgagatcctt

SEQ ID NO: 110738 - DNA, 25 bp, SARS Virus
gacgaaccgaaaaacgagatccttt

SEQ ID NO: 110739 - DNA, 25 bp, SARS Virus
acgaaccgaaacacgagatcctttc

SEQ ID NO: 110740 - DNA, 25 bp, SARS Virus
cgaaccgaaacaagagatcctttcc

SEQ ID NO: 110741 - DNA, 25 bp, SARS Virus
gaaccgaaacacaagatcctttcca

SEQ ID NO: 110742 - DNA, 25 bp, SARS Virus
aaccgaaacacgagatcctttccaa

SEQ ID NO: 110743 - DNA, 25 bp, SARS Virus
accgaaacacgaaatcctttccaaa

SEQ ID NO: 110744 - DNA, 25 bp, SARS Virus
ccgaaacacgagatcctttccaaaa

SEQ ID NO: 110745 - DNA, 25 bp, SARS Virus
cgaaacacgagaacctttccaaaat

SEQ ID NO: 110746 - DNA, 25 bp, SARS Virus
gaaacacgagatactttccaaaatg

SEQ ID NO: 110747 - DNA, 25 bp, SARS Virus
aaacacgagatcatttccaaaatgg

SEQ ID NO: 110748 - DNA, 25 bp, SARS Virus
aacacgagatccattccaaaatgga

SEQ ID NO: 110749 - DNA, 25 bp, SARS Virus
acacgagatcctatccaaaatggaa

SEQ ID NO: 110750 - DNA, 25 bp, SARS Virus
cacgagatccttaccaaaatggaaa

SEQ ID NO: 110751 - DNA, 25 bp, SARS Virus
acgagatcctttacaaaatggaaaa

SEQ ID NO: 110752 - DNA, 25 bp, SARS Virus
cgagatcctttcaaaaatggaaaag

SEQ ID NO: 110753 - DNA, 25 bp, SARS Virus
gagatcctttccaaaatggaaaagt

SEQ ID NO: 110754 - DNA, 25 bp, SARS Virus
agatcctttccaaaatggaaaagta

SEQ ID NO: 110755 - DNA, 25 bp, SARS Virus
gatcctttccaaaatggaaaagtat

SEQ ID NO: 110756 - DNA, 25 bp, SARS Virus
atcctttccaaaatggaaaagtatc

SEQ ID NO: 110757 - DNA, 25 bp, SARS Virus
tcctttccaaaaaggaaaagtatct

SEQ ID NO: 110758 - DNA, 25 bp, SARS Virus
cctttccaaaatagaaaagtatcta

SEQ ID NO: 110759 - DNA, 25 bp, SARS Virus
ctttccaaaatgaaaaagtatctac

SEQ ID NO: 110760 - DNA, 25 bp, SARS Virus
tttccaaaatggaaaagtatctacc

SEQ ID NO: 110761 - DNA, 25 bp, SARS Virus
ttccaaaatggaaaagtatctaccg

SEQ ID NO: 110762 - DNA, 25 bp, SARS Virus
tccaaaatggaaaagtatctaccgt

SEQ ID NO: 110763 - DNA, 25 bp, SARS Virus
ccaaaatggaaaagtatctaccgtg

SEQ ID NO: 110764 - DNA, 25 bp, SARS Virus
caaaatggaaaaatatctaccgtgt

SEQ ID NO: 110765 - DNA, 25 bp, SARS Virus
aaaatggaaaagaatctaccgtgtg

SEQ ID NO: 110766 - DNA, 25 bp, SARS Virus
aaatggaaaagtatctaccgtgtga

SEQ ID NO: 110767 - DNA, 25 bp, SARS Virus
aatggaaaagtaactaccgtgtgat

SEQ ID NO: 110768 - DNA, 25 bp, SARS Virus
atggaaaagtatataccgtgtgata

SEQ ID NO: 110769 - DNA, 25 bp, SARS Virus
tggaaaagtatcaaccgtgtgatac

SEQ ID NO: 110770 - DNA, 25 bp, SARS Virus
ggaaaagtatctaccgtgtgatacc

SEQ ID NO: 110771 - DNA, 25 bp, SARS Virus
gaaaagtatctaacgtgtgatacca

SEQ ID NO: 110772 - DNA, 25 bp, SARS Virus
aaaagtatctacagtgtgataccaa

SEQ ID NO: 110773 - DNA, 25 bp, SARS Virus
aaagtatctaccatgtgataccaag

SEQ ID NO: 110774 - DNA, 25 bp, SARS Virus
aagtatctaccgagtgataccaagt

SEQ ID NO: 110775 - DNA, 25 bp, SARS Virus
agtatctaccgtatgataccaagtt

SEQ ID NO: 110776 - DNA, 25 bp, SARS Virus
gtatctaccgtgagataccaagttt

SEQ ID NO: 110777 - DNA, 25 bp, SARS Virus
tatctaccgtgtaataccaagtttg

SEQ ID NO: 110778 - DNA, 25 bp, SARS Virus
atctaccgtgtgataccaagtttgt

SEQ ID NO: 110779 - DNA, 25 bp, SARS Virus
tctaccgtgtgaaaccaagtttgta

SEQ ID NO: 110780 - DNA, 25 bp, SARS Virus
ctaccgtgtgataccaagtttgtac

SEQ ID NO: 110781 - DNA, 25 bp, SARS Virus
taccgtgtgataacaagtttgtacg

SEQ ID NO: 110782 - DNA, 25 bp, SARS Virus
accgtgtgatacaaagtttgtacgt

SEQ ID NO: 110783 - DNA, 25 bp, SARS Virus
ccgtgtgataccaagtttgtacgtg

SEQ ID NO: 110784 - DNA, 25 bp, SARS Virus
cgtgtgataccaagtttgtacgtgt

SEQ ID NO: 110785 - DNA, 25 bp, SARS Virus
gtgtgataccaaatttgtacgtgtg

SEQ ID NO: 110786 - DNA, 25 bp, SARS Virus
tgtgataccaagattgtacgtgtgg

SEQ ID NO: 110787 - DNA, 25 bp, SARS Virus
gtgataccaagtatgtacgtgtgga

SEQ ID NO: 110788 - DNA, 25 bp, SARS Virus
tgataccaagttagtacgtgtggat

SEQ ID NO: 110789 - DNA, 25 bp, SARS Virus
gataccaagtttatacgtgtggatt

SEQ ID NO: 110790 - DNA, 25 bp, SARS Virus
ataccaagtttgaacgtgtggatta

SEQ ID NO: 110791 - DNA, 25 bp, SARS Virus
taccaagtttgtacgtgtggattac

SEQ ID NO: 110792 - DNA, 25 bp, SARS Virus
accaagtttgtaagtgtggattaca

SEQ ID NO: 110793 - DNA, 25 bp, SARS Virus
ccaagtttgtacatgtggattacaa

SEQ ID NO: 110794 - DNA, 25 bp, SARS Virus
caagtttgtacgagtggattacaat

SEQ ID NO: 110795 - DNA, 25 bp, SARS Virus
aagtttgtacgtatggattacaatg

SEQ ID NO: 110796 - DNA, 25 bp, SARS Virus
agtttgtacgtgaggattacaatga

SEQ ID NO: 110797 - DNA, 25 bp, SARS Virus
gtttgtacgtgtagattacaatgat

SEQ ID NO: 110798 - DNA, 25 bp, SARS Virus
tttgtacgtgtgaattacaatgata

SEQ ID NO: 110799 - DNA, 25 bp, SARS Virus
ttgtacgtgtggattacaatgatag

SEQ ID NO: 110800 - DNA, 25 bp, SARS Virus
tgtacgtgtggaatacaatgatagt

SEQ ID NO: 110801 - DNA, 25 bp, SARS Virus
gtacgtgtggataacaatgatagtt

SEQ ID NO: 110802 - DNA, 25 bp, SARS Virus
tacgtgtggattacaatgatagttg

SEQ ID NO: 110803 - DNA, 25 bp, SARS Virus
acgtgtggattaaaatgatagttga

SEQ ID NO: 110804 - DNA, 25 bp, SARS Virus
cgtgtggattacaatgatagttgac

SEQ ID NO: 110805 - DNA, 25 bp, SARS Virus
gtgtggattacaatgatagttgaca

SEQ ID NO: 110806 - DNA, 25 bp, SARS Virus
tgtggattacaaagatagttgacag

SEQ ID NO: 110807 - DNA, 25 bp, SARS Virus
gtggattacaataatagttgacagt

SEQ ID NO: 110808 - DNA, 25 bp, SARS Virus
tggattacaatgatagttgacagtt

SEQ ID NO: 110809 - DNA, 25 bp, SARS Virus
ggattacaatgaaagttgacagttc

SEQ ID NO: 110810 - DNA, 25 bp, SARS Virus
gattacaatgatagttgacagttct

SEQ ID NO: 110811 - DNA, 25 bp, SARS Virus
attacaatgataattgacagttcta

SEQ ID NO: 110812 - DNA, 25 bp, SARS Virus
ttacaatgatagatgacagttctag

SEQ ID NO: 110813 - DNA, 25 bp, SARS Virus
tacaatgatagtagacagttctagg

SEQ ID NO: 110814 - DNA, 25 bp, SARS Virus
acaatgatagttaacagttctaggt

SEQ ID NO: 110815 - DNA, 25 bp, SARS Virus
caatgatagttgacagttctaggtc

SEQ ID NO: 110816 - DNA, 25 bp, SARS Virus
aatgatagttgaaagttctaggtcg

SEQ ID NO: 110817 - DNA, 25 bp, SARS Virus
atgatagttgacagttctaggtcga

SEQ ID NO: 110818 - DNA, 25 bp, SARS Virus
tgatagttgacaattctaggtcgac

SEQ ID NO: 110819 - DNA, 25 bp, SARS Virus
gatagttgacagatctaggtcgacc

SEQ ID NO: 110820 - DNA, 25 bp, SARS Virus
atagttgacagtactaggtcgacca

SEQ ID NO: 110821 - DNA, 25 bp, SARS Virus
tagttgacagttataggtcgaccac

SEQ ID NO: 110822 - DNA, 25 bp, SARS Virus
agttgacagttcaaggtcgaccacc

SEQ ID NO: 110823 - DNA, 25 bp, SARS Virus
gttgacagttctaggtcgaccacca

SEQ ID NO: 110824 - DNA, 25 bp, SARS Virus
ttgacagttctaagtcgaccaccac

SEQ ID NO: 110825 - DNA, 25 bp, SARS Virus
tgacagttctagatcgaccaccacg

SEQ ID NO: 110826 - DNA, 25 bp, SARS Virus
gacagttctaggacgaccaccacgc

SEQ ID NO: 110827 - DNA, 25 bp, SARS Virus
acagttctaggtagaccaccacgcg

SEQ ID NO: 110828 - DNA, 25 bp, SARS Virus
cagttctaggtcaaccaccacgcga

SEQ ID NO: 110829 - DNA, 25 bp, SARS Virus
agttctaggtcgaccaccacgcgaa

SEQ ID NO: 110830 - DNA, 25 bp, SARS Virus
gttctaggtcgaacaccacgcgaat

SEQ ID NO: 110831 - DNA, 25 bp, SARS Virus
ttctaggtcgacaaccacgcgaata

SEQ ID NO: 110832 - DNA, 25 bp, SARS Virus
tctaggtcgaccaccacgcgaatat

SEQ ID NO: 110833 - DNA, 25 bp, SARS Virus
ctaggtcgaccaacacgcgaatatc

SEQ ID NO: 110834 - DNA, 25 bp, SARS Virus
taggtcgaccacaacgcgaatatcg

SEQ ID NO: 110835 - DNA, 25 bp, SARS Virus
aggtcgaccaccacgcgaatatcga

SEQ ID NO: 110836 - DNA, 25 bp, SARS Virus
ggtcgaccaccaagcgaatatcgat

SEQ ID NO: 110837 - DNA, 25 bp, SARS Virus
gtcgaccaccacacgaatatcgatc

SEQ ID NO: 110838 - DNA, 25 bp, SARS Virus
tcgaccaccacgagaatatcgatcc

SEQ ID NO: 110839 - DNA, 25 bp, SARS Virus
cgaccaccacgcaaatatcgatcca

SEQ ID NO: 110840 - DNA, 25 bp, SARS Virus
gaccaccacgcgaatatcgatccac

SEQ ID NO: 110841 - DNA, 25 bp, SARS Virus
accaccacgcgaatatcgatccaca

SEQ ID NO: 110842 - DNA, 25 bp, SARS Virus
ccaccacgcgaaaatcgatccacaa

SEQ ID NO: 110843 - DNA, 25 bp, SARS Virus
caccacgcgaatatcgatccacaac

SEQ ID NO: 110844 - DNA, 25 bp, SARS Virus
accacgcgaataacgatccacaacc

SEQ ID NO: 110845 - DNA, 25 bp, SARS Virus
ccacgcgaatatagatccacaacca

SEQ ID NO: 110846 - DNA, 25 bp, SARS Virus
cacgcgaatatcaatccacaaccat

SEQ ID NO: 110847 - DNA, 25 bp, SARS Virus
acgcgaatatcgatccacaaccatg

SEQ ID NO: 110848 - DNA, 25 bp, SARS Virus
cgcgaatatcgaaccacaaccatgg

SEQ ID NO: 110849 - DNA, 25 bp, SARS Virus
gcgaatatcgatacacaaccatgga

SEQ ID NO: 110850 - DNA, 25 bp, SARS Virus
cgaatatcgatcaacaaccatggaa

SEQ ID NO: 110851 - DNA, 25 bp, SARS Virus
gaatatcgatccacaaccatggaag

SEQ ID NO: 110852 - DNA, 25 bp, SARS Virus
aatatcgatccaaaaccatggaagt

SEQ ID NO: 110853 - DNA, 25 bp, SARS Virus
atatcgatccacaaccatggaagta

SEQ ID NO: 110854 - DNA, 25 bp, SARS Virus
tatcgatccacaaccatggaagtac

SEQ ID NO: 110855 - DNA, 25 bp, SARS Virus
atcgatccacaaacatggaagtact

SEQ ID NO: 110856 - DNA, 25 bp, SARS Virus
tcgatccacaacaatggaagtactt

SEQ ID NO: 110857 - DNA, 25 bp, SARS Virus
cgatccacaaccatggaagtacttc

SEQ ID NO: 110858 - DNA, 25 bp, SARS Virus
gatccacaaccaaggaagtacttcc

SEQ ID NO: 110859 - DNA, 25 bp, SARS Virus
atccacaaccatagaagtacttcca

SEQ ID NO: 110860 - DNA, 25 bp, SARS Virus
tccacaaccatgaaagtacttccag

SEQ ID NO: 110861 - DNA, 25 bp, SARS Virus
ccacaaccatggaagtacttccagt

SEQ ID NO: 110862 - DNA, 25 bp, SARS Virus
cacaaccatggaagtacttccagtg

SEQ ID NO: 110863 - DNA, 25 bp, SARS Virus
acaaccatggaaatacttccagtgg

SEQ ID NO: 110864 - DNA, 25 bp, SARS Virus
caaccatggaagaacttccagtggt

SEQ ID NO: 110865 - DNA, 25 bp, SARS Virus
aaccatggaagtacttccagtggtt

SEQ ID NO: 110866 - DNA, 25 bp, SARS Virus
accatggaagtaattccagtggttt

SEQ ID NO: 110867 - DNA, 25 bp, SARS Virus
ccatggaagtacatccagtggtttg

SEQ ID NO: 110868 - DNA, 25 bp, SARS Virus
catggaagtactaccagtggtttga

SEQ ID NO: 110869 - DNA, 25 bp, SARS Virus
atggaagtacttacagtggtttgac

SEQ ID NO: 110870 - DNA, 25 bp, SARS Virus
tggaagtacttcaagtggtttgacg

SEQ ID NO: 110871 - DNA, 25 bp, SARS Virus
ggaagtacttccagtggtttgacga

SEQ ID NO: 110872 - DNA, 25 bp, SARS Virus
gaagtacttccaatggtttgacgac

SEQ ID NO: 110873 - DNA, 25 bp, SARS Virus
aagtacttccagaggtttgacgacg

SEQ ID NO: 110874 - DNA, 25 bp, SARS Virus
agtacttccagtagtttgacgacgt

SEQ ID NO: 110875 - DNA, 25 bp, SARS Virus
gtacttccagtgatttgacgacgta

SEQ ID NO: 110876 - DNA, 25 bp, SARS Virus
tacttccagtggattgacgacgtaa

SEQ ID NO: 110877 - DNA, 25 bp, SARS Virus
acttccagtggtatgacgacgtaaa

SEQ ID NO: 110878 - DNA, 25 bp, SARS Virus
cttccagtggttagacgacgtaaat

SEQ ID NO: 110879 - DNA, 25 bp, SARS Virus
ttccagtggtttaacgacgtaaatc

SEQ ID NO: 110880 - DNA, 25 bp, SARS Virus
tccagtggtttgacgacgtaaatct

SEQ ID NO: 110881 - DNA, 25 bp, SARS Virus
ccagtggtttgaagacgtaaatctc

SEQ ID NO: 110882 - DNA, 25 bp, SARS Virus
cagtggtttgacaacgtaaatctct

SEQ ID NO: 110883 - DNA, 25 bp, SARS Virus
agtggtttgacgacgtaaatctctg

SEQ ID NO: 110884 - DNA, 25 bp, SARS Virus
gtggtttgacgaagtaaatctctgc

SEQ ID NO: 110885 - DNA, 25 bp, SARS Virus
tggtttgacgacataaatctctgca

SEQ ID NO: 110886 - DNA, 25 bp, SARS Virus
ggtttgacgacgaaaatctctgcat

SEQ ID NO: 110887 - DNA, 25 bp, SARS Virus
gtttgacgacgtaaatctctgcatg

SEQ ID NO: 110888 - DNA, 25 bp, SARS Virus
tttgacgacgtaaatctctgcatga

SEQ ID NO: 110889 - DNA, 25 bp, SARS Virus
ttgacgacgtaaatctctgcatgaa

SEQ ID NO: 110890 - DNA, 25 bp, SARS Virus
tgacgacgtaaaactctgcatgaac

SEQ ID NO: 110891 - DNA, 25 bp, SARS Virus
gacgacgtaaatatctgcatgaaca

SEQ ID NO: 110892 - DNA, 25 bp, SARS Virus
acgacgtaaatcactgcatgaacaa

SEQ ID NO: 110893 - DNA, 25 bp, SARS Virus
cgacgtaaatctatgcatgaacaac

SEQ ID NO: 110894 - DNA, 25 bp, SARS Virus
gacgtaaatctcagcatgaacaaca

SEQ ID NO: 110895 - DNA, 25 bp, SARS Virus
acgtaaatctctacatgaacaacaa

SEQ ID NO: 110896 - DNA, 25 bp, SARS Virus
cgtaaatctctgaatgaacaacaaa

SEQ ID NO: 110897 - DNA, 25 bp, SARS Virus
gtaaatctctgcatgaacaacaaaa

SEQ ID NO: 110898 - DNA, 25 bp, SARS Virus
taaatctctgcaagaacaacaaaat

SEQ ID NO: 110899 - DNA, 25 bp, SARS Virus
aaatctctgcataaacaacaaaatt

SEQ ID NO: 110900 - DNA, 25 bp, SARS Virus
aatctctgcatgaacaacaaaattt

SEQ ID NO: 110901 - DNA, 25 bp, SARS Virus
atctctgcatgaacaacaaaattta

SEQ ID NO: 110902 - DNA, 25 bp, SARS Virus
tctctgcatgaaaaacaaaatttat

SEQ ID NO: 110903 - DNA, 25 bp, SARS Virus
ctctgcatgaacaacaaaatttatt

SEQ ID NO: 110904 - DNA, 25 bp, SARS Virus
tctgcatgaacaacaaaatttattt

SEQ ID NO: 110905 - DNA, 25 bp, SARS Virus
atcataaaaattctgaaacgaagtg

SEQ ID NO: 110906 - DNA, 25 bp, SARS Virus
tcataaaaattacgaaacgaagtgg

SEQ ID NO: 110907 - DNA, 25 bp, SARS Virus
cataaaaattatcaaacgaagtggt

SEQ ID NO: 110908 - DNA, 25 bp, SARS Virus
ataaaaattatgcaacgaagtggta

SEQ ID NO: 110909 - DNA, 25 bp, SARS Virus
taaaaattatgacacgaagtggtaa

SEQ ID NO: 110910 - DNA, 25 bp, SARS Virus
aaaaattatgaaccgaagtggtaat

SEQ ID NO: 110911 - DNA, 25 bp, SARS Virus
aaaattatgaaacgaagtggtaatt

SEQ ID NO: 110912 - DNA, 25 bp, SARS Virus
aaattatgaaaccaagtggtaattc

SEQ ID NO: 110913 - DNA, 25 bp, SARS Virus
aattatgaaacgcagtggtaattct

SEQ ID NO: 110914 - DNA, 25 bp, SARS Virus
attatgaaacgacgtggtaattctc

SEQ ID NO: 110915 - DNA, 25 bp, SARS Virus
ttatgaaacgaactggtaattctct

SEQ ID NO: 110916 - DNA, 25 bp, SARS Virus
tatgaaacgaagcggtaattctctt

SEQ ID NO: 110917 - DNA, 25 bp, SARS Virus
atgaaacgaagtcgtaattctcttt

SEQ ID NO: 110918 - DNA, 25 bp, SARS Virus
tgaaacgaagtgctaattctctttc

SEQ ID NO: 110919 - DNA, 25 bp, SARS Virus
gaaacgaagtggcaattctctttct

SEQ ID NO: 110920 - DNA, 25 bp, SARS Virus
aaacgaagtggtcattctctttctg

SEQ ID NO: 110921 - DNA, 25 bp, SARS Virus
aacgaagtggtacttctctttctgt

SEQ ID NO: 110922 - DNA, 25 bp, SARS Virus
acgaagtggtaactctctttctgtc

SEQ ID NO: 110923 - DNA, 25 bp, SARS Virus
cgaagtggtaatcctctttctgtct

SEQ ID NO: 110924 - DNA, 25 bp, SARS Virus
gaagtggtaattctctttctgtctt

SEQ ID NO: 110925 - DNA, 25 bp, SARS Virus
aagtggtaattccctttctgtctta

SEQ ID NO: 110926 - DNA, 25 bp, SARS Virus
agtggtaattctctttctgtcttac

SEQ ID NO: 110927 - DNA, 25 bp, SARS Virus
gtggtaattctccttctgtcttact

SEQ ID NO: 110928 - DNA, 25 bp, SARS Virus
tggtaattctctctctgtcttactt

SEQ ID NO: 110929 - DNA, 25 bp, SARS Virus
ggtaattctcttcctgtcttactta

SEQ ID NO: 110930 - DNA, 25 bp, SARS Virus
gtaattctctttctgtcttacttac

SEQ ID NO: 110931 - DNA, 25 bp, SARS Virus
taattctctttccgtcttacttact

SEQ ID NO: 110932 - DNA, 25 bp, SARS Virus
aattctctttctctcttacttactc

SEQ ID NO: 110933 - DNA, 25 bp, SARS Virus
attctctttctgccttacttactcg

SEQ ID NO: 110934 - DNA, 25 bp, SARS Virus
ttctctttctgtcttacttactcga

SEQ ID NO: 110935 - DNA, 25 bp, SARS Virus
tctctttctgtcctacttactcgag

SEQ ID NO: 110936 - DNA, 25 bp, SARS Virus
ctctttctgtctcacttactcgagt

SEQ ID NO: 110937 - DNA, 25 bp, SARS Virus
tctttctgtcttccttactcgagtg

SEQ ID NO: 110938 - DNA, 25 bp, SARS Virus
ctttctgtcttacttactcgagtga

SEQ ID NO: 110939 - DNA, 25 bp, SARS Virus
tttctgtcttacctactcgagtgaa

SEQ ID NO: 110940 - DNA, 25 bp, SARS Virus
ttctgtcttactcactcgagtgaaa

SEQ ID NO: 110941 - DNA, 25 bp, SARS Virus
tctgtcttacttcctcgagtgaaat

SEQ ID NO: 110942 - DNA, 25 bp, SARS Virus
ctgtcttacttactcgagtgaaatt

SEQ ID NO: 110943 - DNA, 25 bp, SARS Virus
tgtcttacttacccgagtgaaatta

SEQ ID NO: 110944 - DNA, 25 bp, SARS Virus
gtcttacttactcgagtgaaattaa

SEQ ID NO: 110945 - DNA, 25 bp, SARS Virus
tcttacttactccagtgaaattaac

SEQ ID NO: 110946 - DNA, 25 bp, SARS Virus
cttacttactcgcgtgaaattaact

SEQ ID NO: 110947 - DNA, 25 bp, SARS Virus
ttacttactcgactgaaattaactg

SEQ ID NO: 110948 - DNA, 25 bp, SARS Virus
tacttactcgagcgaaattaactga

SEQ ID NO: 110949 - DNA, 25 bp, SARS Virus
acttactcgagtcaaattaactgaa

SEQ ID NO: 110950 - DNA, 25 bp, SARS Virus
cttactcgagtgcaattaactgaag

SEQ ID NO: 110951 - DNA, 25 bp, SARS Virus
ttactcgagtgacattaactgaaga

SEQ ID NO: 110952 - DNA, 25 bp, SARS Virus
tactcgagtgaacttaactgaagat

SEQ ID NO: 110953 - DNA, 25 bp, SARS Virus
actcgagtgaaactaactgaagata

SEQ ID NO: 110954 - DNA, 25 bp, SARS Virus
ctcgagtgaaatcaactgaagataa

SEQ ID NO: 110955 - DNA, 25 bp, SARS Virus
tcgagtgaaattcactgaagataaa

SEQ ID NO: 110956 - DNA, 25 bp, SARS Virus
cgagtgaaattacctgaagataaac

SEQ ID NO: 110957 - DNA, 25 bp, SARS Virus
gagtgaaattaactgaagataaaca

SEQ ID NO: 110958 - DNA, 25 bp, SARS Virus
agtgaaattaaccgaagataaacac

SEQ ID NO: 110959 - DNA, 25 bp, SARS Virus
gtgaaattaactcaagataaacacg

SEQ ID NO: 110960 - DNA, 25 bp, SARS Virus
tgaaattaactgcagataaacacga

SEQ ID NO: 110961 - DNA, 25 bp, SARS Virus
gaaattaactgacgataaacacgaa

SEQ ID NO: 110962 - DNA, 25 bp, SARS Virus
aaattaactgaacataaacacgaaa

SEQ ID NO: 110963 - DNA, 25 bp, SARS Virus
aattaactgaagctaaacacgaaaa

SEQ ID NO: 110964 - DNA, 25 bp, SARS Virus
attaactgaagacaaacacgaaaaa

SEQ ID NO: 110965 - DNA, 25 bp, SARS Virus
ttaactgaagatcaacacgaaaaat

SEQ ID NO: 110966 - DNA, 25 bp, SARS Virus
taactgaagatacacacgaaaaatc

SEQ ID NO: 110967 - DNA, 25 bp, SARS Virus
aactgaagataaccacgaaaaatcg

SEQ ID NO: 110968 - DNA, 25 bp, SARS Virus
actgaagataaacacgaaaaatcgg

SEQ ID NO: 110969 - DNA, 25 bp, SARS Virus
ctgaagataaacccgaaaaatcgga

SEQ ID NO: 110970 - DNA, 25 bp, SARS Virus
tgaagataaacacgaaaaatcggaa

SEQ ID NO: 110971 - DNA, 25 bp, SARS Virus
gaagataaacaccaaaaatcggaaa

SEQ ID NO: 110972 - DNA, 25 bp, SARS Virus
aagataaacacgcaaaatcggaaag

SEQ ID NO: 110973 - DNA, 25 bp, SARS Virus
agataaacacgacaaatcggaaaga

SEQ ID NO: 110974 - DNA, 25 bp, SARS Virus
gataaacacgaacaatcggaaagac

SEQ ID NO: 110975 - DNA, 25 bp, SARS Virus
ataaacacgaaacatcggaaagacg

SEQ ID NO: 110976 - DNA, 25 bp, SARS Virus
taaacacgaaaactcggaaagacga

SEQ ID NO: 110977 - DNA, 25 bp, SARS Virus
aaacacgaaaaaccggaaagacgat

SEQ ID NO: 110978 - DNA, 25 bp, SARS Virus
aacacgaaaaatcggaaagacgata

SEQ ID NO: 110979 - DNA, 25 bp, SARS Virus
acacgaaaaatccgaaagacgataa

SEQ ID NO: 110980 - DNA, 25 bp, SARS Virus
cacgaaaaatcgcaaagacgataag

SEQ ID NO: 110981 - DNA, 25 bp, SARS Virus
acgaaaaatcggcaagacgataagg

SEQ ID NO: 110982 - DNA, 25 bp, SARS Virus
cgaaaaatcggacagacgataagga

SEQ ID NO: 110983 - DNA, 25 bp, SARS Virus
gaaaaatcggaacgacgataaggaa

SEQ ID NO: 110984 - DNA, 25 bp, SARS Virus
aaaaatcggaaacacgataaggaac

SEQ ID NO: 110985 - DNA, 25 bp, SARS Virus
aaaatcggaaagccgataaggaaca

SEQ ID NO: 110986 - DNA, 25 bp, SARS Virus
aaatcggaaagacgataaggaacaa

SEQ ID NO: 110987 - DNA, 25 bp, SARS Virus
aatcggaaagaccataaggaacaaa

SEQ ID NO: 110988 - DNA, 25 bp, SARS Virus
atcggaaagacgctaaggaacaaaa

SEQ ID NO: 110989 - DNA, 25 bp, SARS Virus
tcggaaagacgacaaggaacaaaat

SEQ ID NO: 110990 - DNA, 25 bp, SARS Virus
cggaaagacgatcaggaacaaaatt

SEQ ID NO: 110991 - DNA, 25 bp, SARS Virus
ggaaagacgatacggaacaaaatta

SEQ ID NO: 110992 - DNA, 25 bp, SARS Virus
gaaagacgataacgaacaaaattat

SEQ ID NO: 110993 - DNA, 25 bp, SARS Virus
aaagacgataagcaacaaaattatt

SEQ ID NO: 110994 - DNA, 25 bp, SARS Virus
aagacgataaggcacaaaattatta

SEQ ID NO: 110995 - DNA, 25 bp, SARS Virus
agacgataaggaccaaaattattac

SEQ ID NO: 110996 - DNA, 25 bp, SARS Virus
gacgataaggaacaaaattattacg

SEQ ID NO: 110997 - DNA, 25 bp, SARS Virus
acgataaggaaccaaattattacga

SEQ ID NO: 110998 - DNA, 25 bp, SARS Virus
cgataaggaacacaattattacgaa

SEQ ID NO: 110999 - DNA, 25 bp, SARS Virus
gataaggaacaacattattacgaat

SEQ ID NO: 111000 - DNA, 25 bp, SARS Virus
ataaggaacaaacttattacgaata

SEQ ID NO: 111001 - DNA, 25 bp, SARS Virus
taaggaacaaaactattacgaataa

SEQ ID NO: 111002 - DNA, 25 bp, SARS Virus
aaggaacaaaatcattacgaataat

SEQ ID NO: 111003 - DNA, 25 bp, SARS Virus
aggaacaaaattcttacgaataata

SEQ ID NO: 111004 - DNA, 25 bp, SARS Virus
ggaacaaaattactacgaataatat

SEQ ID NO: 111005 - DNA, 25 bp, SARS Virus
gaacaaaattatcacgaataatata

SEQ ID NO: 111006 - DNA, 25 bp, SARS Virus
aacaaaattattccgaataatataa

SEQ ID NO: 111007 - DNA, 25 bp, SARS Virus
acaaaattattacgaataatataaa

SEQ ID NO: 111008 - DNA, 25 bp, SARS Virus
caaaattattaccaataatataaaa

SEQ ID NO: 111009 - DNA, 25 bp, SARS Virus
aaaattattacgcataatataaaac

SEQ ID NO: 111010 - DNA, 25 bp, SARS Virus
aaattattacgactaatataaaacc

SEQ ID NO: 111011 - DNA, 25 bp, SARS Virus
aattattacgaacaatataaaacca

SEQ ID NO: 111012 - DNA, 25 bp, SARS Virus
attattacgaatcatataaaaccaa

SEQ ID NO: 111013 - DNA, 25 bp, SARS Virus
ttattacgaatactataaaaccaaa

SEQ ID NO: 111014 - DNA, 25 bp, SARS Virus
tattacgaataacataaaaccaaaa

SEQ ID NO: 111015 - DNA, 25 bp, SARS Virus
attacgaataatctaaaaccaaaag

SEQ ID NO: 111016 - DNA, 25 bp, SARS Virus
ttacgaataatacaaaaccaaaagt

SEQ ID NO: 111017 - DNA, 25 bp, SARS Virus
tacgaataatatcaaaccaaaagtg

SEQ ID NO: 111018 - DNA, 25 bp, SARS Virus
acgaataatatacaaccaaaagtga

SEQ ID NO: 111019 - DNA, 25 bp, SARS Virus
cgaataatataacaccaaaagtgag

SEQ ID NO: 111020 - DNA, 25 bp, SARS Virus
gaataatataaacccaaaagtgagc

SEQ ID NO: 111021 - DNA, 25 bp, SARS Virus
aataatataaaaccaaaagtgagct

SEQ ID NO: 111022 - DNA, 25 bp, SARS Virus
ataatataaaaccaaaagtgagctt

SEQ ID NO: 111023 - DNA, 25 bp, SARS Virus
taatataaaacccaaagtgagcttt

SEQ ID NO: 111024 - DNA, 25 bp, SARS Virus
aatataaaaccacaagtgagcttta

SEQ ID NO: 111025 - DNA, 25 bp, SARS Virus
atataaaaccaacagtgagctttag

SEQ ID NO: 111026 - DNA, 25 bp, SARS Virus
tataaaaccaaacgtgagctttagg

SEQ ID NO: 111027 - DNA, 25 bp, SARS Virus
ataaaaccaaaactgagctttaggt

SEQ ID NO: 111028 - DNA, 25 bp, SARS Virus
taaaaccaaaagcgagctttaggtc

SEQ ID NO: 111029 - DNA, 25 bp, SARS Virus
aaaaccaaaagtcagctttaggtcc

SEQ ID NO: 111030 - DNA, 25 bp, SARS Virus
aaaccaaaagtgcgctttaggtcct

SEQ ID NO: 111031 - DNA, 25 bp, SARS Virus
aaccaaaagtgacctttaggtccta

SEQ ID NO: 111032 - DNA, 25 bp, SARS Virus
accaaaagtgagctttaggtcctag

SEQ ID NO: 111033 - DNA, 25 bp, SARS Virus
ccaaaagtgagccttaggtcctaga

SEQ ID NO: 111034 - DNA, 25 bp, SARS Virus
caaaagtgagctctaggtcctagat

SEQ ID NO: 111035 - DNA, 25 bp, SARS Virus
aaaagtgagcttcaggtcctagatc

SEQ ID NO: 111036 - DNA, 25 bp, SARS Virus
aaagtgagctttcggtcctagatct

SEQ ID NO: 111037 - DNA, 25 bp, SARS Virus
aagtgagctttacgtcctagatctt

SEQ ID NO: 111038 - DNA, 25 bp, SARS Virus
agtgagctttagctcctagatcttc

SEQ ID NO: 111039 - DNA, 25 bp, SARS Virus
gtgagctttaggccctagatcttct

SEQ ID NO: 111040 - DNA, 25 bp, SARS Virus
tgagctttaggtcctagatcttctt

SEQ ID NO: 111041 - DNA, 25 bp, SARS Virus
gagctttaggtcctagatcttcttg

SEQ ID NO: 111042 - DNA, 25 bp, SARS Virus
agctttaggtcccagatcttcttgg

SEQ ID NO: 111043 - DNA, 25 bp, SARS Virus
gctttaggtcctcgatcttcttgga

SEQ ID NO: 111044 - DNA, 25 bp, SARS Virus
ctttaggtcctacatcttcttggaa

SEQ ID NO: 111045 - DNA, 25 bp, SARS Virus
tttaggtcctagctcttcttggaac

SEQ ID NO: 111046 - DNA, 25 bp, SARS Virus
ttaggtcctagaccttcttggaaca

SEQ ID NO: 111047 - DNA, 25 bp, SARS Virus
taggtcctagatcttcttggaacat

SEQ ID NO: 111048 - DNA, 25 bp, SARS Virus
aggtcctagatcctcttggaacatg

SEQ ID NO: 111049 - DNA, 25 bp, SARS Virus
ggtcctagatctccttggaacatgg

SEQ ID NO: 111050 - DNA, 25 bp, SARS Virus
gtcctagatcttcttggaacatggt

SEQ ID NO: 111051 - DNA, 25 bp, SARS Virus
tcctagatcttcctggaacatggtt

SEQ ID NO: 111052 - DNA, 25 bp, SARS Virus
cctagatcttctcggaacatggttt

SEQ ID NO: 111053 - DNA, 25 bp, SARS Virus
ctagatcttcttcgaacatggtttc

SEQ ID NO: 111054 - DNA, 25 bp, SARS Virus
tagatcttcttgcaacatggtttca

SEQ ID NO: 111055 - DNA, 25 bp, SARS Virus
agatcttcttggcacatggtttcag

SEQ ID NO: 111056 - DNA, 25 bp, SARS Virus
gatcttcttggaccatggtttcaga

SEQ ID NO: 111057 - DNA, 25 bp, SARS Virus
atcttcttggaacatggtttcagat

SEQ ID NO: 111058 - DNA, 25 bp, SARS Virus
tcttcttggaacctggtttcagatt

SEQ ID NO: 111059 - DNA, 25 bp, SARS Virus
cttcttggaacacggtttcagattt

SEQ ID NO: 111060 - DNA, 25 bp, SARS Virus
ttcttggaacatcgtttcagatttg

SEQ ID NO: 111061 - DNA, 25 bp, SARS Virus
tcttggaacatgctttcagatttgc

SEQ ID NO: 111062 - DNA, 25 bp, SARS Virus
cttggaacatggcttcagatttgct

SEQ ID NO: 111063 - DNA, 25 bp, SARS Virus
ttggaacatggtctcagatttgctt

SEQ ID NO: 111064 - DNA, 25 bp, SARS Virus
tggaacatggttccagatttgcttg

SEQ ID NO: 111065 - DNA, 25 bp, SARS Virus
ggaacatggtttcagatttgcttgt

SEQ ID NO: 111066 - DNA, 25 bp, SARS Virus
gaacatggtttccgatttgcttgta

SEQ ID NO: 111067 - DNA, 25 bp, SARS Virus
aacatggtttcacatttgcttgtac

SEQ ID NO: 111068 - DNA, 25 bp, SARS Virus
acatggtttcagctttgcttgtact

SEQ ID NO: 111069 - DNA, 25 bp, SARS Virus
catggtttcagacttgcttgtactt

SEQ ID NO: 111070 - DNA, 25 bp, SARS Virus
atggtttcagatctgcttgtacttt

SEQ ID NO: 111071 - DNA, 25 bp, SARS Virus
tggtttcagattcgcttgtactttg

SEQ ID NO: 111072 - DNA, 25 bp, SARS Virus
ggtttcagatttccttgtactttga

SEQ ID NO: 111073 - DNA, 25 bp, SARS Virus
gtttcagatttgcttgtactttgaa

SEQ ID NO: 111074 - DNA, 25 bp, SARS Virus
tttcagatttgcctgtactttgaag

SEQ ID NO: 111075 - DNA, 25 bp, SARS Virus
ttcagatttgctcgtactttgaaga

SEQ ID NO: 111076 - DNA, 25 bp, SARS Virus
tcagatttgcttctactttgaagag

SEQ ID NO: 111077 - DNA, 25 bp, SARS Virus
cagatttgcttgcactttgaagagt

SEQ ID NO: 111078 - DNA, 25 bp, SARS Virus
agatttgcttgtcctttgaagagta

SEQ ID NO: 111079 - DNA, 25 bp, SARS Virus
gatttgcttgtactttgaagagtaa

SEQ ID NO: 111080 - DNA, 25 bp, SARS Virus
atttgcttgtaccttgaagagtaac

SEQ ID NO: 111081 - DNA, 25 bp, SARS Virus
tttgcttgtactctgaagagtaaca

SEQ ID NO: 111082 - DNA, 25 bp, SARS Virus
ttgcttgtacttcgaagagtaacaa

SEQ ID NO: 111083 - DNA, 25 bp, SARS Virus
tgcttgtactttcaagagtaacaaa

SEQ ID NO: 111084 - DNA, 25 bp, SARS Virus
gcttgtactttgcagagtaacaaaa

SEQ ID NO: 111085 - DNA, 25 bp, SARS Virus
cttgtactttgacgagtaacaaaac

SEQ ID NO: 111086 - DNA, 25 bp, SARS Virus
ttgtactttgaacagtaacaaaact

SEQ ID NO: 111087 - DNA, 25 bp, SARS Virus
tgtactttgaagcgtaacaaaactg

SEQ ID NO: 111088 - DNA, 25 bp, SARS Virus
gtactttgaagactaacaaaactga

SEQ ID NO: 111089 - DNA, 25 bp, SARS Virus
tactttgaagagcaacaaaactgaa

SEQ ID NO: 111090 - DNA, 25 bp, SARS Virus
actttgaagagtcacaaaactgaac

SEQ ID NO: 111091 - DNA, 25 bp, SARS Virus
ctttgaagagtaccaaaactgaaca

SEQ ID NO: 111092 - DNA, 25 bp, SARS Virus
tttgaagagtaacaaaactgaacat

SEQ ID NO: 111093 - DNA, 25 bp, SARS Virus
ttgaagagtaaccaaactgaacata

SEQ ID NO: 111094 - DNA, 25 bp, SARS Virus
tgaagagtaacacaactgaacataa

SEQ ID NO: 111095 - DNA, 25 bp, SARS Virus
gaagagtaacaacactgaacataaa

SEQ ID NO: 111096 - DNA, 25 bp, SARS Virus
aagagtaacaaacctgaacataaag

SEQ ID NO: 111097 - DNA, 25 bp, SARS Virus
agagtaacaaaactgaacataaaga

SEQ ID NO: 111098 - DNA, 25 bp, SARS Virus
gagtaacaaaaccgaacataaagag

SEQ ID NO: 111099 - DNA, 25 bp, SARS Virus
agtaacaaaactcaacataaagaga

SEQ ID NO: 111100 - DNA, 25 bp, SARS Virus
gtaacaaaactgcacataaagagat

SEQ ID NO: 111101 - DNA, 25 bp, SARS Virus
taacaaaactgaccataaagagata

SEQ ID NO: 111102 - DNA, 25 bp, SARS Virus
aacaaaactgaacataaagagatac

SEQ ID NO: 111103 - DNA, 25 bp, SARS Virus
acaaaactgaacctaaagagatacg

SEQ ID NO: 111104 - DNA, 25 bp, SARS Virus
caaaactgaacacaaagagatacgt

SEQ ID NO: 111105 - DNA, 25 bp, SARS Virus
aaaactgaacatcaagagatacgtc

SEQ ID NO: 111106 - DNA, 25 bp, SARS Virus
aaactgaacatacagagatacgtca

SEQ ID NO: 111107 - DNA, 25 bp, SARS Virus
aactgaacataacgagatacgtcaa

SEQ ID NO: 111108 - DNA, 25 bp, SARS Virus
actgaacataaacagatacgtcaac

SEQ ID NO: 111109 - DNA, 25 bp, SARS Virus
ctgaacataaagcgatacgtcaacg

SEQ ID NO: 111110 - DNA, 25 bp, SARS Virus
tgaacataaagacatacgtcaacgt

SEQ ID NO: 111111 - DNA, 25 bp, SARS Virus
gaacataaagagctacgtcaacgta

SEQ ID NO: 111112 - DNA, 25 bp, SARS Virus
aacataaagagacacgtcaacgtat

SEQ ID NO: 111113 - DNA, 25 bp, SARS Virus
acataaagagatccgtcaacgtata

SEQ ID NO: 111114 - DNA, 25 bp, SARS Virus
cataaagagatacgtcaacgtatac

SEQ ID NO: 111115 - DNA, 25 bp, SARS Virus
ataaagagatacctcaacgtatacg

SEQ ID NO: 111116 - DNA, 25 bp, SARS Virus
taaagagatacgccaacgtatacgt

SEQ ID NO: 111117 - DNA, 25 bp, SARS Virus
aaagagatacgtcaacgtatacgtg

SEQ ID NO: 111118 - DNA, 25 bp, SARS Virus
aagagatacgtccacgtatacgtga

SEQ ID NO: 111119 - DNA, 25 bp, SARS Virus
agagatacgtcaccgtatacgtgac

SEQ ID NO: 111120 - DNA, 25 bp, SARS Virus
gagatacgtcaacgtatacgtgaca

SEQ ID NO: 111121 - DNA, 25 bp, SARS Virus
agatacgtcaacctatacgtgacat

SEQ ID NO: 111122 - DNA, 25 bp, SARS Virus
gatacgtcaacgcatacgtgacatc

SEQ ID NO: 111123 - DNA, 25 bp, SARS Virus
atacgtcaacgtctacgtgacatca

SEQ ID NO: 111124 - DNA, 25 bp, SARS Virus
tacgtcaacgtacacgtgacatcat

SEQ ID NO: 111125 - DNA, 25 bp, SARS Virus
acgtcaacgtatccgtgacatcatg

SEQ ID NO: 111126 - DNA, 25 bp, SARS Virus
cgtcaacgtatacgtgacatcatgt

SEQ ID NO: 111127 - DNA, 25 bp, SARS Virus
gtcaacgtatacctgacatcatgtc

SEQ ID NO: 111128 - DNA, 25 bp, SARS Virus
tcaacgtatacgcgacatcatgtcg

SEQ ID NO: 111129 - DNA, 25 bp, SARS Virus
caacgtatacgtcacatcatgtcgc

SEQ ID NO: 111130 - DNA, 25 bp, SARS Virus
aacgtatacgtgccatcatgtcgcg

SEQ ID NO: 111131 - DNA, 25 bp, SARS Virus
acgtatacgtgacatcatgtcgcga

SEQ ID NO: 111132 - DNA, 25 bp, SARS Virus
cgtatacgtgacctcatgtcgcgac

SEQ ID NO: 111133 - DNA, 25 bp, SARS Virus
gtatacgtgacaccatgtcgcgaca

SEQ ID NO: 111134 - DNA, 25 bp, SARS Virus
tatacgtgacatcatgtcgcgacac

SEQ ID NO: 111135 - DNA, 25 bp, SARS Virus
atacgtgacatcctgtcgcgacacg

SEQ ID NO: 111136 - DNA, 25 bp, SARS Virus
tacgtgacatcacgtcgcgacacgt

SEQ ID NO: 111137 - DNA, 25 bp, SARS Virus
acgtgacatcatctcgcgacacgta

SEQ ID NO: 111138 - DNA, 25 bp, SARS Virus
cgtgacatcatgccgcgacacgtag

SEQ ID NO: 111139 - DNA, 25 bp, SARS Virus
gtgacatcatgtcgcgacacgtaga

SEQ ID NO: 111140 - DNA, 25 bp, SARS Virus
tgacatcatgtcccgacacgtagat

SEQ ID NO: 111141 - DNA, 25 bp, SARS Virus
gacatcatgtcgcgacacgtagatt

SEQ ID NO: 111142 - DNA, 25 bp, SARS Virus
acatcatgtcgccacacgtagatta

SEQ ID NO: 111143 - DNA, 25 bp, SARS Virus
catcatgtcgcgccacgtagattat

SEQ ID NO: 111144 - DNA, 25 bp, SARS Virus
atcatgtcgcgacacgtagattatt

SEQ ID NO: 111145 - DNA, 25 bp, SARS Virus
tcatgtcgcgacccgtagattattt

SEQ ID NO: 111146 - DNA, 25 bp, SARS Virus
catgtcgcgacacgtagattatttg

SEQ ID NO: 111147 - DNA, 25 bp, SARS Virus
atgtcgcgacacctagattatttgg

SEQ ID NO: 111148 - DNA, 25 bp, SARS Virus
tgtcgcgacacgcagattatttgga

SEQ ID NO: 111149 - DNA, 25 bp, SARS Virus
gtcgcgacacgtcgattatttggag

SEQ ID NO: 111150 - DNA, 25 bp, SARS Virus
tcgcgacacgtacattatttggagt

SEQ ID NO: 111151 - DNA, 25 bp, SARS Virus
cgcgacacgtagcttatttggagta

SEQ ID NO: 111152 - DNA, 25 bp, SARS Virus
gcgacacgtagactatttggagtac

SEQ ID NO: 111153 - DNA, 25 bp, SARS Virus
cgacacgtagatcatttggagtaca

SEQ ID NO: 111154 - DNA, 25 bp, SARS Virus
gacacgtagattctttggagtacac

SEQ ID NO: 111155 - DNA, 25 bp, SARS Virus
acacgtagattacttggagtacacg

SEQ ID NO: 111156 - DNA, 25 bp, SARS Virus
cacgtagattatctggagtacacga

SEQ ID NO: 111157 - DNA, 25 bp, SARS Virus
acgtagattattcggagtacacgaa

SEQ ID NO: 111158 - DNA, 25 bp, SARS Virus
cgtagattatttcgagtacacgaac

SEQ ID NO: 111159 - DNA, 25 bp, SARS Virus
gtagattatttgcagtacacgaact

SEQ ID NO: 111160 - DNA, 25 bp, SARS Virus
tagattatttggcgtacacgaactt

SEQ ID NO: 111161 - DNA, 25 bp, SARS Virus
agattatttggactacacgaacttc

SEQ ID NO: 111162 - DNA, 25 bp, SARS Virus
gattatttggagcacacgaacttct

SEQ ID NO: 111163 - DNA, 25 bp, SARS Virus
attatttggagtccacgaacttcta

SEQ ID NO: 111164 - DNA, 25 bp, SARS Virus
ttatttggagtacacgaacttctag

SEQ ID NO: 111165 - DNA, 25 bp, SARS Virus
tatttggagtacccgaacttctagg

SEQ ID NO: 111166 - DNA, 25 bp, SARS Virus
atttggagtacacgaacttctagga

SEQ ID NO: 111167 - DNA, 25 bp, SARS Virus
tttggagtacaccaacttctaggaa

SEQ ID NO: 111168 - DNA, 25 bp, SARS Virus
ttggagtacacgcacttctaggaac

SEQ ID NO: 111169 - DNA, 25 bp, SARS Virus
tggagtacacgaccttctaggaaca

SEQ ID NO: 111170 - DNA, 25 bp, SARS Virus
ggagtacacgaacttctaggaacat

SEQ ID NO: 111171 - DNA, 25 bp, SARS Virus
gagtacacgaacctctaggaacatt

SEQ ID NO: 111172 - DNA, 25 bp, SARS Virus
agtacacgaactcctaggaacattc

SEQ ID NO: 111173 - DNA, 25 bp, SARS Virus
gtacacgaacttctaggaacattcc

SEQ ID NO: 111174 - DNA, 25 bp, SARS Virus
tacacgaacttccaggaacattcca

SEQ ID NO: 111175 - DNA, 25 bp, SARS Virus
acacgaacttctcggaacattccat

SEQ ID NO: 111176 - DNA, 25 bp, SARS Virus
cacgaacttctacgaacattccatg

SEQ ID NO: 111177 - DNA, 25 bp, SARS Virus
acgaacttctagcaacattccatgt

SEQ ID NO: 111178 - DNA, 25 bp, SARS Virus
cgaacttctaggcacattccatgtt

SEQ ID NO: 111179 - DNA, 25 bp, SARS Virus
gaacttctaggaccattccatgttg

SEQ ID NO: 111180 - DNA, 25 bp, SARS Virus
aacttctaggaacattccatgttgt

SEQ ID NO: 111181 - DNA, 25 bp, SARS Virus
acttctaggaaccttccatgttgtg

SEQ ID NO: 111182 - DNA, 25 bp, SARS Virus
cttctaggaacactccatgttgtga

SEQ ID NO: 111183 - DNA, 25 bp, SARS Virus
ttctaggaacatcccatgttgtgat

SEQ ID NO: 111184 - DNA, 25 bp, SARS Virus
tctaggaacattccatgttgtgatc

SEQ ID NO: 111185 - DNA, 25 bp, SARS Virus
ctaggaacattccatgttgtgatcc

SEQ ID NO: 111186 - DNA, 25 bp, SARS Virus
taggaacattccctgttgtgatccc

SEQ ID NO: 111187 - DNA, 25 bp, SARS Virus
aggaacattccacgttgtgatcccc

SEQ ID NO: 111188 - DNA, 25 bp, SARS Virus
ggaacattccatcttgtgatcccca

SEQ ID NO: 111189 - DNA, 25 bp, SARS Virus
gaacattccatgctgtgatccccat

SEQ ID NO: 111190 - DNA, 25 bp, SARS Virus
aacattccatgtcgtgatccccatt

SEQ ID NO: 111191 - DNA, 25 bp, SARS Virus
acattccatgttctgatccccatta

SEQ ID NO: 111192 - DNA, 25 bp, SARS Virus
cattccatgttgcgatccccattat

SEQ ID NO: 111193 - DNA, 25 bp, SARS Virus
attccatgttgtcatccccattatg

SEQ ID NO: 111194 - DNA, 25 bp, SARS Virus
ttccatgttgtgctccccattatga

SEQ ID NO: 111195 - DNA, 25 bp, SARS Virus
tccatgttgtgacccccattatgaa

SEQ ID NO: 111196 - DNA, 25 bp, SARS Virus
ccatgttgtgatccccattatgaat

SEQ ID NO: 111197 - DNA, 25 bp, SARS Virus
catgttgtgatccccattatgaata

SEQ ID NO: 111198 - DNA, 25 bp, SARS Virus
atgttgtgatccccattatgaatat

SEQ ID NO: 111199 - DNA, 25 bp, SARS Virus
tgttgtgatccccattatgaatatc

SEQ ID NO: 111200 - DNA, 25 bp, SARS Virus
gttgtgatcccccttatgaatatcg

SEQ ID NO: 111201 - DNA, 25 bp, SARS Virus
ttgtgatccccactatgaatatcgt

SEQ ID NO: 111202 - DNA, 25 bp, SARS Virus
tgtgatccccatcatgaatatcgtg

SEQ ID NO: 111203 - DNA, 25 bp, SARS Virus
gtgatccccattctgaatatcgtga

SEQ ID NO: 111204 - DNA, 25 bp, SARS Virus
tgatccccattacgaatatcgtgac

SEQ ID NO: 111205 - DNA, 25 bp, SARS Virus
gatccccattatcaatatcgtgacg

SEQ ID NO: 111206 - DNA, 25 bp, SARS Virus
atccccattatgcatatcgtgacga

SEQ ID NO: 111207 - DNA, 25 bp, SARS Virus
tccccattatgactatcgtgacgaa

SEQ ID NO: 111208 - DNA, 25 bp, SARS Virus
ccccattatgaacatcgtgacgaac

SEQ ID NO: 111209 - DNA, 25 bp, SARS Virus
cccattatgaatctcgtgacgaacc

SEQ ID NO: 111210 - DNA, 25 bp, SARS Virus
ccattatgaataccgtgacgaaccg

SEQ ID NO: 111211 - DNA, 25 bp, SARS Virus
cattatgaatatcgtgacgaaccga

SEQ ID NO: 111212 - DNA, 25 bp, SARS Virus
attatgaatatcctgacgaaccgaa

SEQ ID NO: 111213 - DNA, 25 bp, SARS Virus
ttatgaatatcgcgacgaaccgaaa

SEQ ID NO: 111214 - DNA, 25 bp, SARS Virus
tatgaatatcgtcacgaaccgaaac

SEQ ID NO: 111215 - DNA, 25 bp, SARS Virus
atgaatatcgtgccgaaccgaaaca

SEQ ID NO: 111216 - DNA, 25 bp, SARS Virus
tgaatatcgtgacgaaccgaaacac

SEQ ID NO: 111217 - DNA, 25 bp, SARS Virus
gaatatcgtgaccaaccgaaacacg

SEQ ID NO: 111218 - DNA, 25 bp, SARS Virus
aatatcgtgacgcaccgaaacacga

SEQ ID NO: 111219 - DNA, 25 bp, SARS Virus
atatcgtgacgacccgaaacacgag

SEQ ID NO: 111220 - DNA, 25 bp, SARS Virus
tatcgtgacgaaccgaaacacgaga

SEQ ID NO: 111221 - DNA, 25 bp, SARS Virus
atcgtgacgaaccgaaacacgagat

SEQ ID NO: 111222 - DNA, 25 bp, SARS Virus
tcgtgacgaacccaaacacgagatc

SEQ ID NO: 111223 - DNA, 25 bp, SARS Virus
cgtgacgaaccgcaacacgagatcc

SEQ ID NO: 111224 - DNA, 25 bp, SARS Virus
gtgacgaaccgacacacgagatcct

SEQ ID NO: 111225 - DNA, 25 bp, SARS Virus
tgacgaaccgaaccacgagatcctt

SEQ ID NO: 111226 - DNA, 25 bp, SARS Virus
gacgaaccgaaacacgagatccttt

SEQ ID NO: 111227 - DNA, 25 bp, SARS Virus
acgaaccgaaacccgagatcctttc

SEQ ID NO: 111228 - DNA, 25 bp, SARS Virus
cgaaccgaaacacgagatcctttcc

SEQ ID NO: 111229 - DNA, 25 bp, SARS Virus
gaaccgaaacaccagatcctttcca

SEQ ID NO: 111230 - DNA, 25 bp, SARS Virus
aaccgaaacacgcgatcctttccaa

SEQ ID NO: 111231 - DNA, 25 bp, SARS Virus
accgaaacacgacatcctttccaaa

SEQ ID NO: 111232 - DNA, 25 bp, SARS Virus
ccgaaacacgagctcctttccaaaa

SEQ ID NO: 111233 - DNA, 25 bp, SARS Virus
cgaaacacgagaccctttccaaaat

SEQ ID NO: 111234 - DNA, 25 bp, SARS Virus
gaaacacgagatcctttccaaaatg

SEQ ID NO: 111235 - DNA, 25 bp, SARS Virus
aaacacgagatcctttccaaaatgg

SEQ ID NO: 111236 - DNA, 25 bp, SARS Virus
aacacgagatcccttccaaaatgga

SEQ ID NO: 111237 - DNA, 25 bp, SARS Virus
acacgagatcctctccaaaatggaa

SEQ ID NO: 111238 - DNA, 25 bp, SARS Virus
cacgagatccttcccaaaatggaaa

SEQ ID NO: 111239 - DNA, 25 bp, SARS Virus
acgagatcctttccaaaatggaaaa

SEQ ID NO: 111240 - DNA, 25 bp, SARS Virus
cgagatcctttccaaaatggaaaag

SEQ ID NO: 111241 - DNA, 25 bp, SARS Virus
gagatcctttcccaaatggaaaagt

SEQ ID NO: 111242 - DNA, 25 bp, SARS Virus
agatcctttccacaatggaaaagta

SEQ ID NO: 111243 - DNA, 25 bp, SARS Virus
gatcctttccaacatggaaaagtat

SEQ ID NO: 111244 - DNA, 25 bp, SARS Virus
atcctttccaaactggaaaagtatc

SEQ ID NO: 111245 - DNA, 25 bp, SARS Virus
tcctttccaaaacggaaaagtatct

SEQ ID NO: 111246 - DNA, 25 bp, SARS Virus
cctttccaaaatcgaaaagtatcta

SEQ ID NO: 111247 - DNA, 25 bp, SARS Virus
ctttccaaaatgcaaaagtatctac

SEQ ID NO: 111248 - DNA, 25 bp, SARS Virus
tttccaaaatggcaaagtatctacc

SEQ ID NO: 111249 - DNA, 25 bp, SARS Virus
ttccaaaatggacaagtatctaccg

SEQ ID NO: 111250 - DNA, 25 bp, SARS Virus
tccaaaatggaacagtatctaccgt

SEQ ID NO: 111251 - DNA, 25 bp, SARS Virus
ccaaaatggaaacgtatctaccgtg

SEQ ID NO: 111252 - DNA, 25 bp, SARS Virus
caaaatggaaaactatctaccgtgt

SEQ ID NO: 111253 - DNA, 25 bp, SARS Virus
aaaatggaaaagcatctaccgtgtg

SEQ ID NO: 111254 - DNA, 25 bp, SARS Virus
aaatggaaaagtctctaccgtgtga

SEQ ID NO: 111255 - DNA, 25 bp, SARS Virus
aatggaaaagtacctaccgtgtgat

SEQ ID NO: 111256 - DNA, 25 bp, SARS Virus
atggaaaagtatctaccgtgtgata

SEQ ID NO: 111257 - DNA, 25 bp, SARS Virus
tggaaaagtatccaccgtgtgatac

SEQ ID NO: 111258 - DNA, 25 bp, SARS Virus
ggaaaagtatctcccgtgtgatacc

SEQ ID NO: 111259 - DNA, 25 bp, SARS Virus
gaaaagtatctaccgtgtgatacca

SEQ ID NO: 111260 - DNA, 25 bp, SARS Virus
aaaagtatctaccgtgtgataccaa

SEQ ID NO: 111261 - DNA, 25 bp, SARS Virus
aaagtatctaccctgtgataccaag

SEQ ID NO: 111262 - DNA, 25 bp, SARS Virus
aagtatctaccgcgtgataccaagt

SEQ ID NO: 111263 - DNA, 25 bp, SARS Virus
agtatctaccgtctgataccaagtt

SEQ ID NO: 111264 - DNA, 25 bp, SARS Virus
gtatctaccgtgcgataccaagttt

SEQ ID NO: 111265 - DNA, 25 bp, SARS Virus
tatctaccgtgtcataccaagtttg

SEQ ID NO: 111266 - DNA, 25 bp, SARS Virus
atctaccgtgtgctaccaagtttgt

SEQ ID NO: 111267 - DNA, 25 bp, SARS Virus
tctaccgtgtgacaccaagtttgta

SEQ ID NO: 111268 - DNA, 25 bp, SARS Virus
ctaccgtgtgatcccaagtttgtac

SEQ ID NO: 111269 - DNA, 25 bp, SARS Virus
taccgtgtgataccaagtttgtacg

SEQ ID NO: 111270 - DNA, 25 bp, SARS Virus
accgtgtgataccaagtttgtacgt

SEQ ID NO: 111271 - DNA, 25 bp, SARS Virus
ccgtgtgatacccagtttgtacgtg

SEQ ID NO: 111272 - DNA, 25 bp, SARS Virus
cgtgtgataccacgtttgtacgtgt

SEQ ID NO: 111273 - DNA, 25 bp, SARS Virus
gtgtgataccaactttgtacgtgtg

SEQ ID NO: 111274 - DNA, 25 bp, SARS Virus
tgtgataccaagcttgtacgtgtgg

SEQ ID NO: 111275 - DNA, 25 bp, SARS Virus
gtgataccaagtctgtacgtgtgga

SEQ ID NO: 111276 - DNA, 25 bp, SARS Virus
tgataccaagttcgtacgtgtggat

SEQ ID NO: 111277 - DNA, 25 bp, SARS Virus
gataccaagtttctacgtgtggatt

SEQ ID NO: 111278 - DNA, 25 bp, SARS Virus
ataccaagtttgcacgtgtggatta

SEQ ID NO: 111279 - DNA, 25 bp, SARS Virus
taccaagtttgtccgtgtggattac

SEQ ID NO: 111280 - DNA, 25 bp, SARS Virus
accaagtttgtacgtgtggattaca

SEQ ID NO: 111281 - DNA, 25 bp, SARS Virus
ccaagtttgtacctgtggattacaa

SEQ ID NO: 111282 - DNA, 25 bp, SARS Virus
caagtttgtacgcgtggattacaat

SEQ ID NO: 111283 - DNA, 25 bp, SARS Virus
aagtttgtacgtctggattacaatg

SEQ ID NO: 111284 - DNA, 25 bp, SARS Virus
agtttgtacgtgcggattacaatga

SEQ ID NO: 111285 - DNA, 25 bp, SARS Virus
gtttgtacgtgtcgattacaatgat

SEQ ID NO: 111286 - DNA, 25 bp, SARS Virus
tttgtacgtgtgcattacaatgata

SEQ ID NO: 111287 - DNA, 25 bp, SARS Virus
ttgtacgtgtggcttacaatgatag

SEQ ID NO: 111288 - DNA, 25 bp, SARS Virus
tgtacgtgtggactacaatgatagt

SEQ ID NO: 111289 - DNA, 25 bp, SARS Virus
gtacgtgtggatcacaatgatagtt

SEQ ID NO: 111290 - DNA, 25 bp, SARS Virus
tacgtgtggattccaatgatagttg

SEQ ID NO: 111291 - DNA, 25 bp, SARS Virus
acgtgtggattacaatgatagttga

SEQ ID NO: 111292 - DNA, 25 bp, SARS Virus
cgtgtggattaccatgatagttgac

SEQ ID NO: 111293 - DNA, 25 bp, SARS Virus
gtgtggattacactgatagttgaca

SEQ ID NO: 111294 - DNA, 25 bp, SARS Virus
tgtggattacaacgatagttgacag

SEQ ID NO: 111295 - DNA, 25 bp, SARS Virus
gtggattacaatcatagttgacagt

SEQ ID NO: 111296 - DNA, 25 bp, SARS Virus
tggattacaatgctagttgacagtt

SEQ ID NO: 111297 - DNA, 25 bp, SARS Virus
ggattacaatgacagttgacagttc

SEQ ID NO: 111298 - DNA, 25 bp, SARS Virus
gattacaatgatcgttgacagttct

SEQ ID NO: 111299 - DNA, 25 bp, SARS Virus
attacaatgatacttgacagttcta

SEQ ID NO: 111300 - DNA, 25 bp, SARS Virus
ttacaatgatagctgacagttctag

SEQ ID NO: 111301 - DNA, 25 bp, SARS Virus
tacaatgatagtcgacagttctagg

SEQ ID NO: 111302 - DNA, 25 bp, SARS Virus
acaatgatagttcacagttctaggt

SEQ ID NO: 111303 - DNA, 25 bp, SARS Virus
caatgatagttgccagttctaggtc

SEQ ID NO: 111304 - DNA, 25 bp, SARS Virus
aatgatagttgacagttctaggtcg

SEQ ID NO: 111305 - DNA, 25 bp, SARS Virus
atgatagttgaccgttctaggtcga

SEQ ID NO: 111306 - DNA, 25 bp, SARS Virus
tgatagttgacacttctaggtcgac

SEQ ID NO: 111307 - DNA, 25 bp, SARS Virus
gatagttgacagctctaggtcgacc

SEQ ID NO: 111308 - DNA, 25 bp, SARS Virus
atagttgacagtcctaggtcgacca

SEQ ID NO: 111309 - DNA, 25 bp, SARS Virus
tagttgacagttctaggtcgaccac

SEQ ID NO: 111310 - DNA, 25 bp, SARS Virus
agttgacagttccaggtcgaccacc

SEQ ID NO: 111311 - DNA, 25 bp, SARS Virus
gttgacagttctcggtcgaccacca

SEQ ID NO: 111312 - DNA, 25 bp, SARS Virus
ttgacagttctacgtcgaccaccac

SEQ ID NO: 111313 - DNA, 25 bp, SARS Virus
tgacagttctagctcgaccaccacg

SEQ ID NO: 111314 - DNA, 25 bp, SARS Virus
gacagttctaggccgaccaccacgc

SEQ ID NO: 111315 - DNA, 25 bp, SARS Virus
acagttctaggtcgaccaccacgcg

SEQ ID NO: 111316 - DNA, 25 bp, SARS Virus
cagttctaggtccaccaccacgcga

SEQ ID NO: 111317 - DNA, 25 bp, SARS Virus
agttctaggtcgcccaccacgcgaa

SEQ ID NO: 111318 - DNA, 25 bp, SARS Virus
gttctaggtcgaccaccacgcgaat

SEQ ID NO: 111319 - DNA, 25 bp, SARS Virus
ttctaggtcgaccaccacgcgaata

SEQ ID NO: 111320 - DNA, 25 bp, SARS Virus
tctaggtcgacccccacgcgaatat

SEQ ID NO: 111321 - DNA, 25 bp, SARS Virus
ctaggtcgaccaccacgcgaatatc

SEQ ID NO: 111322 - DNA, 25 bp, SARS Virus
taggtcgaccaccacgcgaatatcg

SEQ ID NO: 111323 - DNA, 25 bp, SARS Virus
aggtcgaccaccccgcgaatatcga

SEQ ID NO: 111324 - DNA, 25 bp, SARS Virus
ggtcgaccaccacgcgaatatcgat

SEQ ID NO: 111325 - DNA, 25 bp, SARS Virus
gtcgaccaccacccgaatatcgatc

SEQ ID NO: 111326 - DNA, 25 bp, SARS Virus
tcgaccaccacgcgaatatcgatcc

SEQ ID NO: 111327 - DNA, 25 bp, SARS Virus
cgaccaccacgccaatatcgatcca

SEQ ID NO: 111328 - DNA, 25 bp, SARS Virus
gaccaccacgcgcatatcgatccac

SEQ ID NO: 111329 - DNA, 25 bp, SARS Virus
accaccacgcgactatcgatccaca

SEQ ID NO: 111330 - DNA, 25 bp, SARS Virus
ccaccacgcgaacatcgatccacaa

SEQ ID NO: 111331 - DNA, 25 bp, SARS Virus
caccacgcgaatctcgatccacaac

SEQ ID NO: 111332 - DNA, 25 bp, SARS Virus
accacgcgaataccgatccacaacc

SEQ ID NO: 111333 - DNA, 25 bp, SARS Virus
ccacgcgaatatcgatccacaacca

SEQ ID NO: 111334 - DNA, 25 bp, SARS Virus
cacgcgaatatccatccacaaccat

SEQ ID NO: 111335 - DNA, 25 bp, SARS Virus
acgcgaatatcgctccacaaccatg

SEQ ID NO: 111336 - DNA, 25 bp, SARS Virus
cgcgaatatcgacccacaaccatgg

SEQ ID NO: 111337 - DNA, 25 bp, SARS Virus
gcgaatatcgatccacaaccatgga

SEQ ID NO: 111338 - DNA, 25 bp, SARS Virus
cgaatatcgatccacaaccatggaa

SEQ ID NO: 111339 - DNA, 25 bp, SARS Virus
gaatatcgatccccaaccatggaag

SEQ ID NO: 111340 - DNA, 25 bp, SARS Virus
aatatcgatccacaaccatggaagt

SEQ ID NO: 111341 - DNA, 25 bp, SARS Virus
atatcgatccaccaccatggaagta

SEQ ID NO: 111342 - DNA, 25 bp, SARS Virus
tatcgatccacacccatggaagtac

SEQ ID NO: 111343 - DNA, 25 bp, SARS Virus
atcgatccacaaccatggaagtact

SEQ ID NO: 111344 - DNA, 25 bp, SARS Virus
tcgatccacaaccatggaagtactt

SEQ ID NO: 111345 - DNA, 25 bp, SARS Virus
cgatccacaaccctggaagtacttc

SEQ ID NO: 111346 - DNA, 25 bp, SARS Virus
gatccacaaccacggaagtacttcc

SEQ ID NO: 111347 - DNA, 25 bp, SARS Virus
atccacaaccatcgaagtacttcca

SEQ ID NO: 111348 - DNA, 25 bp, SARS Virus
tccacaaccatgcaagtacttccag

SEQ ID NO: 111349 - DNA, 25 bp, SARS Virus
ccacaaccatggcagtacttccagt

SEQ ID NO: 111350 - DNA, 25 bp, SARS Virus
cacaaccatggacgtacttccagtg

SEQ ID NO: 111351 - DNA, 25 bp, SARS Virus
acaaccatggaactacttccagtgg

SEQ ID NO: 111352 - DNA, 25 bp, SARS Virus
caaccatggaagcacttccagtggt

SEQ ID NO: 111353 - DNA, 25 bp, SARS Virus
aaccatggaagtccttccagtggtt

SEQ ID NO: 111354 - DNA, 25 bp, SARS Virus
accatggaagtacttccagtggttt

SEQ ID NO: 111355 - DNA, 25 bp, SARS Virus
ccatggaagtacctccagtggtttg

SEQ ID NO: 111356 - DNA, 25 bp, SARS Virus
catggaagtactcccagtggtttga

SEQ ID NO: 111357 - DNA, 25 bp, SARS Virus
atggaagtacttccagtggtttgac

SEQ ID NO: 111358 - DNA, 25 bp, SARS Virus
tggaagtacttccagtggtttgacg

SEQ ID NO: 111359 - DNA, 25 bp, SARS Virus
ggaagtacttcccgtggtttgacga

SEQ ID NO: 111360 - DNA, 25 bp, SARS Virus
gaagtacttccactggtttgacgac

SEQ ID NO: 111361 - DNA, 25 bp, SARS Virus
aagtacttccagcggtttgacgacg

SEQ ID NO: 111362 - DNA, 25 bp, SARS Virus
agtacttccagtcgtttgacgacgt

SEQ ID NO: 111363 - DNA, 25 bp, SARS Virus
gtacttccagtgctttgacgacgta

SEQ ID NO: 111364 - DNA, 25 bp, SARS Virus
tacttccagtggcttgacgacgtaa

SEQ ID NO: 111365 - DNA, 25 bp, SARS Virus
acttccagtggtctgacgacgtaaa

SEQ ID NO: 111366 - DNA, 25 bp, SARS Virus
cttccagtggttcgacgacgtaaat

SEQ ID NO: 111367 - DNA, 25 bp, SARS Virus
ttccagtggtttcacgacgtaaatc

SEQ ID NO: 111368 - DNA, 25 bp, SARS Virus
tccagtggtttgccgacgtaaatct

SEQ ID NO: 111369 - DNA, 25 bp, SARS Virus
ccagtggtttgacgacgtaaatctc

SEQ ID NO: 111370 - DNA, 25 bp, SARS Virus
cagtggtttgaccacgtaaatctct

SEQ ID NO: 111371 - DNA, 25 bp, SARS Virus
agtggtttgacgccgtaaatctctg

SEQ ID NO: 111372 - DNA, 25 bp, SARS Virus
gtggtttgacgacgtaaatctctgc

SEQ ID NO: 111373 - DNA, 25 bp, SARS Virus
tggtttgacgacctaaatctctgca

SEQ ID NO: 111374 - DNA, 25 bp, SARS Virus
ggtttgacgacgcaaatctctgcat

SEQ ID NO: 111375 - DNA, 25 bp, SARS Virus
gtttgacgacgtcaatctctgcatg

SEQ ID NO: 111376 - DNA, 25 bp, SARS Virus
tttgacgacgtacatctctgcatga

SEQ ID NO: 111377 - DNA, 25 bp, SARS Virus
ttgacgacgtaactctctgcatgaa

SEQ ID NO: 111378 - DNA, 25 bp, SARS Virus
tgacgacgtaaacctctgcatgaac

SEQ ID NO: 111379 - DNA, 25 bp, SARS Virus
gacgacgtaaatctctgcatgaaca

SEQ ID NO: 111380 - DNA, 25 bp, SARS Virus
acgacgtaaatccctgcatgaacaa

SEQ ID NO: 111381 - DNA, 25 bp, SARS Virus
cgacgtaaatctctgcatgaacaac

SEQ ID NO: 111382 - DNA, 25 bp, SARS Virus
gacgtaaatctccgcatgaacaaca

SEQ ID NO: 111383 - DNA, 25 bp, SARS Virus
acgtaaatctctccatgaacaacaa

SEQ ID NO: 111384 - DNA, 25 bp, SARS Virus
cgtaaatctctgcatgaacaacaaa

SEQ ID NO: 111385 - DNA, 25 bp, SARS Virus
gtaaatctctgcctgaacaacaaaa

SEQ ID NO: 111386 - DNA, 25 bp, SARS Virus
taaatctctgcacgaacaacaaaat

SEQ ID NO: 111387 - DNA, 25 bp, SARS Virus
aaatctctgcatcaacaacaaaatt

SEQ ID NO: 111388 - DNA, 25 bp, SARS Virus
aatctctgcatgcacaacaaaattt

SEQ ID NO: 111389 - DNA, 25 bp, SARS Virus
atctctgcatgaccaacaaaattta

SEQ ID NO: 111390 - DNA, 25 bp, SARS Virus
tctctgcatgaacaacaaaatttat

SEQ ID NO: 111391 - DNA, 25 bp, SARS Virus
ctctgcatgaaccacaaaatttatt

SEQ ID NO: 111392 - DNA, 25 bp, SARS Virus
tctgcatgaacaccaaaatttattt

SEQ ID NO: 111393 - DNA, 25 bp, SARS Virus
atcataaaaattgtgaaacgaagtg

SEQ ID NO: 111394 - DNA, 25 bp, SARS Virus
tcataaaaattaggaaacgaagtgg

SEQ ID NO: 111395 - DNA, 25 bp, SARS Virus
cataaaaattatgaaacgaagtggt

SEQ ID NO: 111396 - DNA, 25 bp, SARS Virus
ataaaaattatggaacgaagtggta

SEQ ID NO: 111397 - DNA, 25 bp, SARS Virus
taaaaattatgagacgaagtggtaa

SEQ ID NO: 111398 - DNA, 25 bp, SARS Virus
aaaaattatgaagcgaagtggtaat

SEQ ID NO: 111399 - DNA, 25 bp, SARS Virus
aaaattatgaaaggaagtggtaatt

SEQ ID NO: 111400 - DNA, 25 bp, SARS Virus
aaattatgaaacgaagtggtaattc

SEQ ID NO: 111401 - DNA, 25 bp, SARS Virus
aattatgaaacggagtggtaattct

SEQ ID NO: 111402 - DNA, 25 bp, SARS Virus
attatgaaacgaggtggtaattctc

SEQ ID NO: 111403 - DNA, 25 bp, SARS Virus
ttatgaaacgaagtggtaattctct

SEQ ID NO: 111404 - DNA, 25 bp, SARS Virus
tatgaaacgaaggggtaattctctt

SEQ ID NO: 111405 - DNA, 25 bp, SARS Virus
atgaaacgaagtggtaattctcttt

SEQ ID NO: 111406 - DNA, 25 bp, SARS Virus
tgaaacgaagtggtaattctctttc

SEQ ID NO: 111407 - DNA, 25 bp, SARS Virus
gaaacgaagtgggaattctctttct

SEQ ID NO: 111408 - DNA, 25 bp, SARS Virus
aaacgaagtggtgattctctttctg

SEQ ID NO: 111409 - DNA, 25 bp, SARS Virus
aacgaagtggtagttctctttctgt

SEQ ID NO: 111410 - DNA, 25 bp, SARS Virus
acgaagtggtaagtctctttctgtc

SEQ ID NO: 111411 - DNA, 25 bp, SARS Virus
cgaagtggtaatgctctttctgtct

SEQ ID NO: 111412 - DNA, 25 bp, SARS Virus
gaagtggtaattgtctttctgtctt

SEQ ID NO: 111413 - DNA, 25 bp, SARS Virus
aagtggtaattcgctttctgtctta

SEQ ID NO: 111414 - DNA, 25 bp, SARS Virus
agtggtaattctgtttctgtcttac

SEQ ID NO: 111415 - DNA, 25 bp, SARS Virus
gtggtaattctcgttctgtcttact

SEQ ID NO: 111416 - DNA, 25 bp, SARS Virus
tggtaattctctgtctgtcttactt

SEQ ID NO: 111417 - DNA, 25 bp, SARS Virus
ggtaattctcttgctgtcttactta

SEQ ID NO: 111418 - DNA, 25 bp, SARS Virus
gtaattctctttgtgtcttacttac

SEQ ID NO: 111419 - DNA, 25 bp, SARS Virus
taattctctttcggtcttacttact

SEQ ID NO: 111420 - DNA, 25 bp, SARS Virus
aattctctttctgtcttacttactc

SEQ ID NO: 111421 - DNA, 25 bp, SARS Virus
attctctttctggcttacttactcg

SEQ ID NO: 111422 - DNA, 25 bp, SARS Virus
ttctctttctgtgttacttactcga

SEQ ID NO: 111423 - DNA, 25 bp, SARS Virus
tctctttctgtcgtacttactcgag

SEQ ID NO: 111424 - DNA, 25 bp, SARS Virus
ctctttctgtctgacttactcgagt

SEQ ID NO: 111425 - DNA, 25 bp, SARS Virus
tctttctgtcttgcttactcgagtg

SEQ ID NO: 111426 - DNA, 25 bp, SARS Virus
ctttctgtcttagttactcgagtga

SEQ ID NO: 111427 - DNA, 25 bp, SARS Virus
tttctgtcttacgtactcgagtgaa

SEQ ID NO: 111428 - DNA, 25 bp, SARS Virus
ttctgtcttactgactcgagtgaaa

SEQ ID NO: 111429 - DNA, 25 bp, SARS Virus
tctgtcttacttgctcgagtgaaat

SEQ ID NO: 111430 - DNA, 25 bp, SARS Virus
ctgtcttacttagtcgagtgaaatt

SEQ ID NO: 111431 - DNA, 25 bp, SARS Virus
tgtcttacttacgcgagtgaaatta

SEQ ID NO: 111432 - DNA, 25 bp, SARS Virus
gtcttacttactggagtgaaattaa

SEQ ID NO: 111433 - DNA, 25 bp, SARS Virus
tcttacttactcgagtgaaattaac

SEQ ID NO: 111434 - DNA, 25 bp, SARS Virus
cttacttactcgggtgaaattaact

SEQ ID NO: 111435 - DNA, 25 bp, SARS Virus
ttacttactcgagtgaaattaactg

SEQ ID NO: 111436 - DNA, 25 bp, SARS Virus
tacttactcgagggaaattaactga

SEQ ID NO: 111437 - DNA, 25 bp, SARS Virus
acttactcgagtgaaattaactgaa

SEQ ID NO: 111438 - DNA, 25 bp, SARS Virus
cttactcgagtggaattaactgaag

SEQ ID NO: 111439 - DNA, 25 bp, SARS Virus
ttactcgagtgagattaactgaaga

SEQ ID NO: 111440 - DNA, 25 bp, SARS Virus
tactcgagtgaagttaactgaagat

SEQ ID NO: 111441 - DNA, 25 bp, SARS Virus
actcgagtgaaagtaactgaagata

SEQ ID NO: 111442 - DNA, 25 bp, SARS Virus
ctcgagtgaaatgaactgaagataa

SEQ ID NO: 111443 - DNA, 25 bp, SARS Virus
tcgagtgaaattgactgaagataaa

SEQ ID NO: 111444 - DNA, 25 bp, SARS Virus
cgagtgaaattagctgaagataaac

SEQ ID NO: 111445 - DNA, 25 bp, SARS Virus
gagtgaaattaagtgaagataaaca

SEQ ID NO: 111446 - DNA, 25 bp, SARS Virus
agtgaaattaacggaagataaacac

SEQ ID NO: 111447 - DNA, 25 bp, SARS Virus
gtgaaattaactgaagataaacacg

SEQ ID NO: 111448 - DNA, 25 bp, SARS Virus
tgaaattaactggagataaacacga

SEQ ID NO: 111449 - DNA, 25 bp, SARS Virus
gaaattaactgaggataaacacgaa

SEQ ID NO: 111450 - DNA, 25 bp, SARS Virus
aaattaactgaagataaacacgaaa

SEQ ID NO: 111451 - DNA, 25 bp, SARS Virus
aattaactgaaggtaaacacgaaaa

SEQ ID NO: 111452 - DNA, 25 bp, SARS Virus
attaactgaagagaaacacgaaaaa

SEQ ID NO: 111453 - DNA, 25 bp, SARS Virus
ttaactgaagatgaacacgaaaaat

SEQ ID NO: 111454 - DNA, 25 bp, SARS Virus
taactgaagatagacacgaaaaatc

SEQ ID NO: 111455 - DNA, 25 bp, SARS Virus
aactgaagataagcacgaaaaatcg

SEQ ID NO: 111456 - DNA, 25 bp, SARS Virus
actgaagataaagacgaaaaatcgg

SEQ ID NO: 111457 - DNA, 25 bp, SARS Virus
ctgaagataaacgcgaaaaatcgga

SEQ ID NO: 111458 - DNA, 25 bp, SARS Virus
tgaagataaacaggaaaaatcggaa

SEQ ID NO: 111459 - DNA, 25 bp, SARS Virus
gaagataaacacgaaaaatcggaaa

SEQ ID NO: 111460 - DNA, 25 bp, SARS Virus
aagataaacacggaaaatcggaaag

SEQ ID NO: 111461 - DNA, 25 bp, SARS Virus
agataaacacgagaaatcggaaaga

SEQ ID NO: 111462 - DNA, 25 bp, SARS Virus
gataaacacgaagaatcggaaagac

SEQ ID NO: 111463 - DNA, 25 bp, SARS Virus
ataaacacgaaagatcggaaagacg

SEQ ID NO: 111464 - DNA, 25 bp, SARS Virus
taaacacgaaaagtcggaaagacga

SEQ ID NO: 111465 - DNA, 25 bp, SARS Virus
aaacacgaaaaagcggaaagacgat

SEQ ID NO: 111466 - DNA, 25 bp, SARS Virus
aacacgaaaaatgggaaagacgata

SEQ ID NO: 111467 - DNA, 25 bp, SARS Virus
acacgaaaaatcggaaagacgataa

SEQ ID NO: 111468 - DNA, 25 bp, SARS Virus
cacgaaaaatcggaaagacgataag

SEQ ID NO: 111469 - DNA, 25 bp, SARS Virus
acgaaaaatcgggaagacgataagg

SEQ ID NO: 111470 - DNA, 25 bp, SARS Virus
cgaaaaatcggagagacgataagga

SEQ ID NO: 111471 - DNA, 25 bp, SARS Virus
gaaaaatcggaaggacgataaggaa

SEQ ID NO: 111472 - DNA, 25 bp, SARS Virus
aaaaatcggaaagacgataaggaac

SEQ ID NO: 111473 - DNA, 25 bp, SARS Virus
aaaatcggaaaggcgataaggaaca

SEQ ID NO: 111474 - DNA, 25 bp, SARS Virus
aaatcggaaagaggataaggaacaa

SEQ ID NO: 111475 - DNA, 25 bp, SARS Virus
aatcggaaagacgataaggaacaaa

SEQ ID NO: 111476 - DNA, 25 bp, SARS Virus
atcggaaagacggtaaggaacaaaa

SEQ ID NO: 111477 - DNA, 25 bp, SARS Virus
tcggaaagacgagaaggaacaaaat

SEQ ID NO: 111478 - DNA, 25 bp, SARS Virus
cggaaagacgatgaggaacaaaatt

SEQ ID NO: 111479 - DNA, 25 bp, SARS Virus
ggaaagacgatagggaacaaaatta

SEQ ID NO: 111480 - DNA, 25 bp, SARS Virus
gaaagacgataaggaacaaaattat

SEQ ID NO: 111481 - DNA, 25 bp, SARS Virus
aaagacgataaggaacaaaattatt

SEQ ID NO: 111482 - DNA, 25 bp, SARS Virus
aagacgataagggacaaaattatta

SEQ ID NO: 111483 - DNA, 25 bp, SARS Virus
agacgataaggagcaaaattattac

SEQ ID NO: 111484 - DNA, 25 bp, SARS Virus
gacgataaggaagaaaattattacg

SEQ ID NO: 111485 - DNA, 25 bp, SARS Virus
acgataaggaacgaaattattacga

SEQ ID NO: 111486 - DNA, 25 bp, SARS Virus
cgataaggaacagaattattacgaa

SEQ ID NO: 111487 - DNA, 25 bp, SARS Virus
gataaggaacaagattattacgaat

SEQ ID NO: 111488 - DNA, 25 bp, SARS Virus
ataaggaacaaagttattacgaata

SEQ ID NO: 111489 - DNA, 25 bp, SARS Virus
taaggaacaaaagtattacgaataa

SEQ ID NO: 111490 - DNA, 25 bp, SARS Virus
aaggaacaaaatgattacgaataat

SEQ ID NO: 111491 - DNA, 25 bp, SARS Virus
aggaacaaaattgttacgaataata

SEQ ID NO: 111492 - DNA, 25 bp, SARS Virus
ggaacaaaattagtacgaataatat

SEQ ID NO: 111493 - DNA, 25 bp, SARS Virus
gaacaaaattatgacgaataatata

SEQ ID NO: 111494 - DNA, 25 bp, SARS Virus
aacaaaattattgcgaataatataa

SEQ ID NO: 111495 - DNA, 25 bp, SARS Virus
acaaaattattaggaataatataaa

SEQ ID NO: 111496 - DNA, 25 bp, SARS Virus
caaaattattacgaataatataaaa

SEQ ID NO: 111497 - DNA, 25 bp, SARS Virus
aaaattattacggataatataaaac

SEQ ID NO: 111498 - DNA, 25 bp, SARS Virus
aaattattacgagtaatataaaacc

SEQ ID NO: 111499 - DNA, 25 bp, SARS Virus
aattattacgaagaatataaaacca

SEQ ID NO: 111500 - DNA, 25 bp, SARS Virus
attattacgaatgatataaaaccaa

SEQ ID NO: 111501 - DNA, 25 bp, SARS Virus
ttattacgaatagtataaaaccaaa

SEQ ID NO: 111502 - DNA, 25 bp, SARS Virus
tattacgaataagataaaaccaaaa

SEQ ID NO: 111503 - DNA, 25 bp, SARS Virus
attacgaataatgtaaaaccaaaag

SEQ ID NO: 111504 - DNA, 25 bp, SARS Virus
ttacgaataatagaaaaccaaaagt

SEQ ID NO: 111505 - DNA, 25 bp, SARS Virus
tacgaataatatgaaaccaaaagtg

SEQ ID NO: 111506 - DNA, 25 bp, SARS Virus
acgaataatatagaaccaaaagtga

SEQ ID NO: 111507 - DNA, 25 bp, SARS Virus
cgaataatataagaccaaaagtgag

SEQ ID NO: 111508 - DNA, 25 bp, SARS Virus
gaataatataaagccaaaagtgagc

SEQ ID NO: 111509 - DNA, 25 bp, SARS Virus
aataatataaaagcaaaagtgagct

SEQ ID NO: 111510 - DNA, 25 bp, SARS Virus
ataatataaaacgaaaagtgagctt

SEQ ID NO: 111511 - DNA, 25 bp, SARS Virus
taatataaaaccgaaagtgagcttt

SEQ ID NO: 111512 - DNA, 25 bp, SARS Virus
aatataaaaccagaagtgagcttta

SEQ ID NO: 111513 - DNA, 25 bp, SARS Virus
atataaaaccaagagtgagctttag

SEQ ID NO: 111514 - DNA, 25 bp, SARS Virus
tataaaaccaaaggtgagctttagg

SEQ ID NO: 111515 - DNA, 25 bp, SARS Virus
ataaaaccaaaagtgagctttaggt

SEQ ID NO: 111516 - DNA, 25 bp, SARS Virus
taaaaccaaaagggagctttaggtc

SEQ ID NO: 111517 - DNA, 25 bp, SARS Virus
aaaaccaaaagtgagctttaggtcc

SEQ ID NO: 111518 - DNA, 25 bp, SARS Virus
aaaccaaaagtgggctttaggtcct

SEQ ID NO: 111519 - DNA, 25 bp, SARS Virus
aaccaaaagtgagctttaggtccta

SEQ ID NO: 111520 - DNA, 25 bp, SARS Virus
accaaaagtgaggtttaggtcctag

SEQ ID NO: 111521 - DNA, 25 bp, SARS Virus
ccaaaagtgagcgttaggtcctaga

SEQ ID NO: 111522 - DNA, 25 bp, SARS Virus
caaaagtgagctgtaggtcctagat

SEQ ID NO: 111523 - DNA, 25 bp, SARS Virus
aaaagtgagcttgaggtcctagatc

SEQ ID NO: 111524 - DNA, 25 bp, SARS Virus
aaagtgagctttgggtcctagatct

SEQ ID NO: 111525 - DNA, 25 bp, SARS Virus
aagtgagctttaggtcctagatctt

SEQ ID NO: 111526 - DNA, 25 bp, SARS Virus
agtgagctttaggtcctagatcttc

SEQ ID NO: 111527 - DNA, 25 bp, SARS Virus
gtgagctttagggcctagatcttct

SEQ ID NO: 111528 - DNA, 25 bp, SARS Virus
tgagctttaggtgctagatcttctt

SEQ ID NO: 111529 - DNA, 25 bp, SARS Virus
gagctttaggtcgtagatcttcttg

SEQ ID NO: 111530 - DNA, 25 bp, SARS Virus
agctttaggtccgagatcttcttgg

SEQ ID NO: 111531 - DNA, 25 bp, SARS Virus
gctttaggtcctggatcttcttgga

SEQ ID NO: 111532 - DNA, 25 bp, SARS Virus
ctttaggtcctagatcttcttggaa

SEQ ID NO: 111533 - DNA, 25 bp, SARS Virus
tttaggtcctaggtcttcttggaac

SEQ ID NO: 111534 - DNA, 25 bp, SARS Virus
ttaggtcctagagcttcttggaaca

SEQ ID NO: 111535 - DNA, 25 bp, SARS Virus
taggtcctagatgttcttggaacat

SEQ ID NO: 111536 - DNA, 25 bp, SARS Virus
aggtcctagatcgtcttggaacatg

SEQ ID NO: 111537 - DNA, 25 bp, SARS Virus
ggtcctagatctgcttggaacatgg

SEQ ID NO: 111538 - DNA, 25 bp, SARS Virus
gtcctagatcttgttggaacatggt

SEQ ID NO: 111539 - DNA, 25 bp, SARS Virus
tcctagatcttcgtggaacatggtt

SEQ ID NO: 111540 - DNA, 25 bp, SARS Virus
cctagatcttctgggaacatggttt

SEQ ID NO: 111541 - DNA, 25 bp, SARS Virus
ctagatcttcttggaacatggtttc

SEQ ID NO: 111542 - DNA, 25 bp, SARS Virus
tagatcttcttggaacatggtttca

SEQ ID NO: 111543 - DNA, 25 bp, SARS Virus
agatcttcttgggacatggtttcag

SEQ ID NO: 111544 - DNA, 25 bp, SARS Virus
gatcttcttggagcatggtttcaga

SEQ ID NO: 111545 - DNA, 25 bp, SARS Virus
atcttcttggaagatggtttcagat

SEQ ID NO: 111546 - DNA, 25 bp, SARS Virus
tcttcttggaacgtggtttcagatt

SEQ ID NO: 111547 - DNA, 25 bp, SARS Virus
cttcttggaacagggtttcagattt

SEQ ID NO: 111548 - DNA, 25 bp, SARS Virus
ttcttggaacatggtttcagatttg

SEQ ID NO: 111549 - DNA, 25 bp, SARS Virus
tcttggaacatggtttcagatttgc

SEQ ID NO: 111550 - DNA, 25 bp, SARS Virus
cttggaacatgggttcagatttgct

SEQ ID NO: 111551 - DNA, 25 bp, SARS Virus
ttggaacatggtgtcagatttgctt

SEQ ID NO: 111552 - DNA, 25 bp, SARS Virus
tggaacatggttgcagatttgcttg

SEQ ID NO: 111553 - DNA, 25 bp, SARS Virus
ggaacatggtttgagatttgcttgt

SEQ ID NO: 111554 - DNA, 25 bp, SARS Virus
gaacatggtttcggatttgcttgta

SEQ ID NO: 111555 - DNA, 25 bp, SARS Virus
aacatggtttcagatttgcttgtac

SEQ ID NO: 111556 - DNA, 25 bp, SARS Virus
acatggtttcaggtttgcttgtact

SEQ ID NO: 111557 - DNA, 25 bp, SARS Virus
catggtttcagagttgcttgtactt

SEQ ID NO: 111558 - DNA, 25 bp, SARS Virus
atggtttcagatgtgcttgtacttt

SEQ ID NO: 111559 - DNA, 25 bp, SARS Virus
tggtttcagattggcttgtactttg

SEQ ID NO: 111560 - DNA, 25 bp, SARS Virus
ggtttcagatttgcttgtactttga

SEQ ID NO: 111561 - DNA, 25 bp, SARS Virus
gtttcagatttggttgtactttgaa

SEQ ID NO: 111562 - DNA, 25 bp, SARS Virus
tttcagatttgcgtgtactttgaag

SEQ ID NO: 111563 - DNA, 25 bp, SARS Virus
ttcagatttgctggtactttgaaga

SEQ ID NO: 111564 - DNA, 25 bp, SARS Virus
tcagatttgcttgtactttgaagag

SEQ ID NO: 111565 - DNA, 25 bp, SARS Virus
cagatttgcttggactttgaagagt

SEQ ID NO: 111566 - DNA, 25 bp, SARS Virus
agatttgcttgtgctttgaagagta

SEQ ID NO: 111567 - DNA, 25 bp, SARS Virus
gatttgcttgtagtttgaagagtaa

SEQ ID NO: 111568 - DNA, 25 bp, SARS Virus
atttgcttgtacgttgaagagtaac

SEQ ID NO: 111569 - DNA, 25 bp, SARS Virus
tttgcttgtactgtgaagagtaaca

SEQ ID NO: 111570 - DNA, 25 bp, SARS Virus
ttgcttgtacttggaagagtaacaa

SEQ ID NO: 111571 - DNA, 25 bp, SARS Virus
tgcttgtactttgaagagtaacaaa

SEQ ID NO: 111572 - DNA, 25 bp, SARS Virus
gcttgtactttggagagtaacaaaa

SEQ ID NO: 111573 - DNA, 25 bp, SARS Virus
cttgtactttgaggagtaacaaaac

SEQ ID NO: 111574 - DNA, 25 bp, SARS Virus
ttgtactttgaagagtaacaaaact

SEQ ID NO: 111575 - DNA, 25 bp, SARS Virus
tgtactttgaagggtaacaaaactg

SEQ ID NO: 111576 - DNA, 25 bp, SARS Virus
gtactttgaagagtaacaaaactga

SEQ ID NO: 111577 - DNA, 25 bp, SARS Virus
tactttgaagaggaacaaaactgaa

SEQ ID NO: 111578 - DNA, 25 bp, SARS Virus
actttgaagagtgacaaaactgaac

SEQ ID NO: 111579 - DNA, 25 bp, SARS Virus
ctttgaagagtagcaaaactgaaca

SEQ ID NO: 111580 - DNA, 25 bp, SARS Virus
tttgaagagtaagaaaactgaacat

SEQ ID NO: 111581 - DNA, 25 bp, SARS Virus
ttgaagagtaacgaaactgaacata

SEQ ID NO: 111582 - DNA, 25 bp, SARS Virus
tgaagagtaacagaactgaacataa

SEQ ID NO: 111583 - DNA, 25 bp, SARS Virus
gaagagtaacaagactgaacataaa

SEQ ID NO: 111584 - DNA, 25 bp, SARS Virus
aagagtaacaaagctgaacataaag

SEQ ID NO: 111585 - DNA, 25 bp, SARS Virus
agagtaacaaaagtgaacataaaga

SEQ ID NO: 111586 - DNA, 25 bp, SARS Virus
gagtaacaaaacggaacataaagag

SEQ ID NO: 111587 - DNA, 25 bp, SARS Virus
agtaacaaaactgaacataaagaga

SEQ ID NO: 111588 - DNA, 25 bp, SARS Virus
gtaacaaaactggacataaagagat

SEQ ID NO: 111589 - DNA, 25 bp, SARS Virus
taacaaaactgagcataaagagata

SEQ ID NO: 111590 - DNA, 25 bp, SARS Virus
aacaaaactgaagataaagagatac

SEQ ID NO: 111591 - DNA, 25 bp, SARS Virus
acaaaactgaacgtaaagagatacg

SEQ ID NO: 111592 - DNA, 25 bp, SARS Virus
caaaactgaacagaaagagatacgt

SEQ ID NO: 111593 - DNA, 25 bp, SARS Virus
aaaactgaacatgaagagatacgtc

SEQ ID NO: 111594 - DNA, 25 bp, SARS Virus
aaactgaacatagagagatacgtca

SEQ ID NO: 111595 - DNA, 25 bp, SARS Virus
aactgaacataaggagatacgtcaa

SEQ ID NO: 111596 - DNA, 25 bp, SARS Virus
actgaacataaagagatacgtcaac

SEQ ID NO: 111597 - DNA, 25 bp, SARS Virus
ctgaacataaagggatacgtcaacg

SEQ ID NO: 111598 - DNA, 25 bp, SARS Virus
tgaacataaagagatacgtcaacgt

SEQ ID NO: 111599 - DNA, 25 bp, SARS Virus
gaacataaagaggtacgtcaacgta

SEQ ID NO: 111600 - DNA, 25 bp, SARS Virus
aacataaagagagacgtcaacgtat

SEQ ID NO: 111601 - DNA, 25 bp, SARS Virus
acataaagagatgcgtcaacgtata

SEQ ID NO: 111602 - DNA, 25 bp, SARS Virus
cataaagagataggtcaacgtatac

SEQ ID NO: 111603 - DNA, 25 bp, SARS Virus
ataaagagatacgtcaacgtatacg

SEQ ID NO: 111604 - DNA, 25 bp, SARS Virus
taaagagatacggcaacgtatacgt

SEQ ID NO: 111605 - DNA, 25 bp, SARS Virus
aaagagatacgtgaacgtatacgtg

SEQ ID NO: 111606 - DNA, 25 bp, SARS Virus
aagagatacgtcgacgtatacgtga

SEQ ID NO: 111607 - DNA, 25 bp, SARS Virus
agagatacgtcagcgtatacgtgac

SEQ ID NO: 111608 - DNA, 25 bp, SARS Virus
gagatacgtcaaggtatacgtgaca

SEQ ID NO: 111609 - DNA, 25 bp, SARS Virus
agatacgtcaacgtatacgtgacat

SEQ ID NO: 111610 - DNA, 25 bp, SARS Virus
gatacgtcaacggatacgtgacatc

SEQ ID NO: 111611 - DNA, 25 bp, SARS Virus
atacgtcaacgtgtacgtgacatca

SEQ ID NO: 111612 - DNA, 25 bp, SARS Virus
tacgtcaacgtagacgtgacatcat

SEQ ID NO: 111613 - DNA, 25 bp, SARS Virus
acgtcaacgtatgcgtgacatcatg

SEQ ID NO: 111614 - DNA, 25 bp, SARS Virus
cgtcaacgtataggtgacatcatgt

SEQ ID NO: 111615 - DNA, 25 bp, SARS Virus
gtcaacgtatacgtgacatcatgtc

SEQ ID NO: 111616 - DNA, 25 bp, SARS Virus
tcaacgtatacgggacatcatgtcg

SEQ ID NO: 111617 - DNA, 25 bp, SARS Virus
caacgtatacgtgacatcatgtcgc

SEQ ID NO: 111618 - DNA, 25 bp, SARS Virus
aacgtatacgtggcatcatgtcgcg

SEQ ID NO: 111619 - DNA, 25 bp, SARS Virus
acgtatacgtgagatcatgtcgcga

SEQ ID NO: 111620 - DNA, 25 bp, SARS Virus
cgtatacgtgacgtcatgtcgcgac

SEQ ID NO: 111621 - DNA, 25 bp, SARS Virus
gtatacgtgacagcatgtcgcgaca

SEQ ID NO: 111622 - DNA, 25 bp, SARS Virus
tatacgtgacatgatgtcgcgacac

SEQ ID NO: 111623 - DNA, 25 bp, SARS Virus
atacgtgacatcgtgtcgcgacacg

SEQ ID NO: 111624 - DNA, 25 bp, SARS Virus
tacgtgacatcaggtcgcgacacgt

SEQ ID NO: 111625 - DNA, 25 bp, SARS Virus
acgtgacatcatgtcgcgacacgta

SEQ ID NO: 111626 - DNA, 25 bp, SARS Virus
cgtgacatcatggcgcgacacgtag

SEQ ID NO: 111627 - DNA, 25 bp, SARS Virus
gtgacatcatgtggcgacacgtaga

SEQ ID NO: 111628 - DNA, 25 bp, SARS Virus
tgacatcatgtcgcgacacgtagat

SEQ ID NO: 111629 - DNA, 25 bp, SARS Virus
gacatcatgtcgggacacgtagatt

SEQ ID NO: 111630 - DNA, 25 bp, SARS Virus
acatcatgtcgcgacacgtagatta

SEQ ID NO: 111631 - DNA, 25 bp, SARS Virus
catcatgtcgcggcacgtagattat

SEQ ID NO: 111632 - DNA, 25 bp, SARS Virus
atcatgtcgcgagacgtagattatt

SEQ ID NO: 111633 - DNA, 25 bp, SARS Virus
tcatgtcgcgacgcgtagattattt

SEQ ID NO: 111634 - DNA, 25 bp, SARS Virus
catgtcgcgacaggtagattatttg

SEQ ID NO: 111635 - DNA, 25 bp, SARS Virus
atgtcgcgacacgtagattatttgg

SEQ ID NO: 111636 - DNA, 25 bp, SARS Virus
tgtcgcgacacggagattatttgga

SEQ ID NO: 111637 - DNA, 25 bp, SARS Virus
gtcgcgacacgtggattatttggag

SEQ ID NO: 111638 - DNA, 25 bp, SARS Virus
tcgcgacacgtagattatttggagt

SEQ ID NO: 111639 - DNA, 25 bp, SARS Virus
cgcgacacgtaggttatttggagta

SEQ ID NO: 111640 - DNA, 25 bp, SARS Virus
gcgacacgtagagtatttggagtac

SEQ ID NO: 111641 - DNA, 25 bp, SARS Virus
cgacacgtagatgatttggagtaca

SEQ ID NO: 111642 - DNA, 25 bp, SARS Virus
gacacgtagattgtttggagtacac

SEQ ID NO: 111643 - DNA, 25 bp, SARS Virus
acacgtagattagttggagtacacg

SEQ ID NO: 111644 - DNA, 25 bp, SARS Virus
cacgtagattatgtggagtacacga

SEQ ID NO: 111645 - DNA, 25 bp, SARS Virus
acgtagattattgggagtacacgaa

SEQ ID NO: 111646 - DNA, 25 bp, SARS Virus
cgtagattatttggagtacacgaac

SEQ ID NO: 111647 - DNA, 25 bp, SARS Virus
gtagattatttggagtacacgaact

SEQ ID NO: 111648 - DNA, 25 bp, SARS Virus
tagattatttggggtacacgaactt

SEQ ID NO: 111649 - DNA, 25 bp, SARS Virus
agattatttggagtacacgaacttc

SEQ ID NO: 111650 - DNA, 25 bp, SARS Virus
gattatttggaggacacgaacttct

SEQ ID NO: 111651 - DNA, 25 bp, SARS Virus
attatttggagtgcacgaacttcta

SEQ ID NO: 111652 - DNA, 25 bp, SARS Virus
ttatttggagtagacgaacttctag

SEQ ID NO: 111653 - DNA, 25 bp, SARS Virus
tatttggagtacgcgaacttctagg

SEQ ID NO: 111654 - DNA, 25 bp, SARS Virus
atttggagtacaggaacttctagga

SEQ ID NO: 111655 - DNA, 25 bp, SARS Virus
tttggagtacacgaacttctaggaa

SEQ ID NO: 111656 - DNA, 25 bp, SARS Virus
ttggagtacacggacttctaggaac

SEQ ID NO: 111657 - DNA, 25 bp, SARS Virus
tggagtacacgagcttctaggaaca

SEQ ID NO: 111658 - DNA, 25 bp, SARS Virus
ggagtacacgaagttctaggaacat

SEQ ID NO: 111659 - DNA, 25 bp, SARS Virus
gagtacacgaacgtctaggaacatt

SEQ ID NO: 111660 - DNA, 25 bp, SARS Virus
agtacacgaactgctaggaacattc

SEQ ID NO: 111661 - DNA, 25 bp, SARS Virus
gtacacgaacttgtaggaacattcc

SEQ ID NO: 111662 - DNA, 25 bp, SARS Virus
tacacgaacttcgaggaacattcca

SEQ ID NO: 111663 - DNA, 25 bp, SARS Virus
acacgaacttctgggaacattccat

SEQ ID NO: 111664 - DNA, 25 bp, SARS Virus
cacgaacttctaggaacattccatg

SEQ ID NO: 111665 - DNA, 25 bp, SARS Virus
acgaacttctaggaacattccatgt

SEQ ID NO: 111666 - DNA, 25 bp, SARS Virus
cgaacttctagggacattccatgtt

SEQ ID NO: 111667 - DNA, 25 bp, SARS Virus
gaacttctaggagcattccatgttg

SEQ ID NO: 111668 - DNA, 25 bp, SARS Virus
aacttctaggaagattccatgttgt

SEQ ID NO: 111669 - DNA, 25 bp, SARS Virus
acttctaggaacgttccatgttgtg

SEQ ID NO: 111670 - DNA, 25 bp, SARS Virus
cttctaggaacagtccatgttgtga

SEQ ID NO: 111671 - DNA, 25 bp, SARS Virus
ttctaggaacatgccatgttgtgat

SEQ ID NO: 111672 - DNA, 25 bp, SARS Virus
tctaggaacattgcatgttgtgatc

SEQ ID NO: 111673 - DNA, 25 bp, SARS Virus
ctaggaacattcgatgttgtgatcc

SEQ ID NO: 111674 - DNA, 25 bp, SARS Virus
taggaacattccgtgttgtgatccc

SEQ ID NO: 111675 - DNA, 25 bp, SARS Virus
aggaacattccaggttgtgatcccc

SEQ ID NO: 111676 - DNA, 25 bp, SARS Virus
ggaacattccatgttgtgatcccca

SEQ ID NO: 111677 - DNA, 25 bp, SARS Virus
gaacattccatggtgtgatccccat

SEQ ID NO: 111678 - DNA, 25 bp, SARS Virus
aacattccatgtggtgatccccatt

SEQ ID NO: 111679 - DNA, 25 bp, SARS Virus
acattccatgttgtgatccccatta

SEQ ID NO: 111680 - DNA, 25 bp, SARS Virus
cattccatgttgggatccccattat

SEQ ID NO: 111681 - DNA, 25 bp, SARS Virus
attccatgttgtgatccccattatg

SEQ ID NO: 111682 - DNA, 25 bp, SARS Virus
ttccatgttgtggtccccattatga

SEQ ID NO: 111683 - DNA, 25 bp, SARS Virus
tccatgttgtgagccccattatgaa

SEQ ID NO: 111684 - DNA, 25 bp, SARS Virus
ccatgttgtgatgcccattatgaat

SEQ ID NO: 111685 - DNA, 25 bp, SARS Virus
catgttgtgatcgccattatgaata

SEQ ID NO: 111686 - DNA, 25 bp, SARS Virus
atgttgtgatccgcattatgaatat

SEQ ID NO: 111687 - DNA, 25 bp, SARS Virus
tgttgtgatcccgattatgaatatc

SEQ ID NO: 111688 - DNA, 25 bp, SARS Virus
gttgtgatccccgttatgaatatcg

SEQ ID NO: 111689 - DNA, 25 bp, SARS Virus
ttgtgatccccagtatgaatatcgt

SEQ ID NO: 111690 - DNA, 25 bp, SARS Virus
tgtgatccccatgatgaatatcgtg

SEQ ID NO: 111691 - DNA, 25 bp, SARS Virus
gtgatccccattgtgaatatcgtga

SEQ ID NO: 111692 - DNA, 25 bp, SARS Virus
tgatccccattaggaatatcgtgac

SEQ ID NO: 111693 - DNA, 25 bp, SARS Virus
gatccccattatgaatatcgtgacg

SEQ ID NO: 111694 - DNA, 25 bp, SARS Virus
atccccattatggatatcgtgacga

SEQ ID NO: 111695 - DNA, 25 bp, SARS Virus
tccccattatgagtatcgtgacgaa

SEQ ID NO: 111696 - DNA, 25 bp, SARS Virus
ccccattatgaagatcgtgacgaac

SEQ ID NO: 111697 - DNA, 25 bp, SARS Virus
cccattatgaatgtcgtgacgaacc

SEQ ID NO: 111698 - DNA, 25 bp, SARS Virus
ccattatgaatagcgtgacgaaccg

SEQ ID NO: 111699 - DNA, 25 bp, SARS Virus
cattatgaatatggtgacgaaccga

SEQ ID NO: 111700 - DNA, 25 bp, SARS Virus
attatgaatatcgtgacgaaccgaa

SEQ ID NO: 111701 - DNA, 25 bp, SARS Virus
ttatgaatatcgggacgaaccgaaa

SEQ ID NO: 111702 - DNA, 25 bp, SARS Virus
tatgaatatcgtgacgaaccgaaac

SEQ ID NO: 111703 - DNA, 25 bp, SARS Virus
atgaatatcgtggcgaaccgaaaca

SEQ ID NO: 111704 - DNA, 25 bp, SARS Virus
tgaatatcgtgaggaaccgaaacac

SEQ ID NO: 111705 - DNA, 25 bp, SARS Virus
gaatatcgtgacgaaccgaaacacg

SEQ ID NO: 111706 - DNA, 25 bp, SARS Virus
aatatcgtgacggaccgaaacacga

SEQ ID NO: 111707 - DNA, 25 bp, SARS Virus
atatcgtgacgagccgaaacacgag

SEQ ID NO: 111708 - DNA, 25 bp, SARS Virus
tatcgtgacgaagcgaaacacgaga

SEQ ID NO: 111709 - DNA, 25 bp, SARS Virus
atcgtgacgaacggaaacacgagat

SEQ ID NO: 111710 - DNA, 25 bp, SARS Virus
tcgtgacgaaccgaaacacgagatc

SEQ ID NO: 111711 - DNA, 25 bp, SARS Virus
cgtgacgaaccggaacacgagatcc

SEQ ID NO: 111712 - DNA, 25 bp, SARS Virus
gtgacgaaccgagacacgagatcct

SEQ ID NO: 111713 - DNA, 25 bp, SARS Virus
tgacgaaccgaagcacgagatcctt

SEQ ID NO: 111714 - DNA, 25 bp, SARS Virus
gacgaaccgaaagacgagatccttt

SEQ ID NO: 111715 - DNA, 25 bp, SARS Virus
acgaaccgaaacgcgagatcctttc

SEQ ID NO: 111716 - DNA, 25 bp, SARS Virus
cgaaccgaaacaggagatcctttcc

SEQ ID NO: 111717 - DNA, 25 bp, SARS Virus
gaaccgaaacacgagatcctttcca

SEQ ID NO: 111718 - DNA, 25 bp, SARS Virus
aaccgaaacacgggatcctttccaa

SEQ ID NO: 111719 - DNA, 25 bp, SARS Virus
accgaaacacgagatcctttccaaa

SEQ ID NO: 111720 - DNA, 25 bp, SARS Virus
ccgaaacacgaggtcctttccaaaa

SEQ ID NO: 111721 - DNA, 25 bp, SARS Virus
cgaaacacgagagcctttccaaaat

SEQ ID NO: 111722 - DNA, 25 bp, SARS Virus
gaaacacgagatgctttccaaaatg

SEQ ID NO: 111723 - DNA, 25 bp, SARS Virus
aaacacgagatcgtttccaaaatgg

SEQ ID NO: 111724 - DNA, 25 bp, SARS Virus
aacacgagatccgttccaaaatgga

SEQ ID NO: 111725 - DNA, 25 bp, SARS Virus
acacgagatcctgtccaaaatggaa

SEQ ID NO: 111726 - DNA, 25 bp, SARS Virus
cacgagatccttgccaaaatggaaa

SEQ ID NO: 111727 - DNA, 25 bp, SARS Virus
acgagatcctttgcaaaatggaaaa

SEQ ID NO: 111728 - DNA, 25 bp, SARS Virus
cgagatcctttcgaaaatggaaaag

SEQ ID NO: 111729 - DNA, 25 bp, SARS Virus
gagatcctttccgaaatggaaaagt

SEQ ID NO: 111730 - DNA, 25 bp, SARS Virus
agatcctttccagaatggaaaagta

SEQ ID NO: 111731 - DNA, 25 bp, SARS Virus
gatcctttccaagatggaaaagtat

SEQ ID NO: 111732 - DNA, 25 bp, SARS Virus
atcctttccaaagtggaaaagtatc

SEQ ID NO: 111733 - DNA, 25 bp, SARS Virus
tcctttccaaaagggaaaagtatct

SEQ ID NO: 111734 - DNA, 25 bp, SARS Virus
cctttccaaaatggaaaagtatcta

SEQ ID NO: 111735 - DNA, 25 bp, SARS Virus
ctttccaaaatggaaaagtatctac

SEQ ID NO: 111736 - DNA, 25 bp, SARS Virus
tttccaaaatgggaaagtatctacc

SEQ ID NO: 111737 - DNA, 25 bp, SARS Virus
ttccaaaatggagaagtatctaccg

SEQ ID NO: 111738 - DNA, 25 bp, SARS Virus
tccaaaatggaagagtatctaccgt

SEQ ID NO: 111739 - DNA, 25 bp, SARS Virus
ccaaaatggaaaggtatctaccgtg

SEQ ID NO: 111740 - DNA, 25 bp, SARS Virus
caaaatggaaaagtatctaccgtgt

SEQ ID NO: 111741 - DNA, 25 bp, SARS Virus
aaaatggaaaaggatctaccgtgtg

SEQ ID NO: 111742 - DNA, 25 bp, SARS Virus
aaatggaaaagtgtctaccgtgtga

SEQ ID NO: 111743 - DNA, 25 bp, SARS Virus
aatggaaaagtagctaccgtgtgat

SEQ ID NO: 111744 - DNA, 25 bp, SARS Virus
atggaaaagtatgtaccgtgtgata

SEQ ID NO: 111745 - DNA, 25 bp, SARS Virus
tggaaaagtatcgaccgtgtgatac

SEQ ID NO: 111746 - DNA, 25 bp, SARS Virus
ggaaaagtatctgccgtgtgatacc

SEQ ID NO: 111747 - DNA, 25 bp, SARS Virus
gaaaagtatctagcgtgtgatacca

SEQ ID NO: 111748 - DNA, 25 bp, SARS Virus
aaaagtatctacggtgtgataccaa

SEQ ID NO: 111749 - DNA, 25 bp, SARS Virus
aaagtatctaccgtgtgataccaag

SEQ ID NO: 111750 - DNA, 25 bp, SARS Virus
aagtatctaccgggtgataccaagt

SEQ ID NO: 111751 - DNA, 25 bp, SARS Virus
agtatctaccgtgtgataccaagtt

SEQ ID NO: 111752 - DNA, 25 bp, SARS Virus
gtatctaccgtgggataccaagttt

SEQ ID NO: 111753 - DNA, 25 bp, SARS Virus
tatctaccgtgtgataccaagtttg

SEQ ID NO: 111754 - DNA, 25 bp, SARS Virus
atctaccgtgtggtaccaagtttgt

SEQ ID NO: 111755 - DNA, 25 bp, SARS Virus
tctaccgtgtgagaccaagtttgta

SEQ ID NO: 111756 - DNA, 25 bp, SARS Virus
ctaccgtgtgatgccaagtttgtac

SEQ ID NO: 111757 - DNA, 25 bp, SARS Virus
taccgtgtgatagcaagtttgtacg

SEQ ID NO: 111758 - DNA, 25 bp, SARS Virus
accgtgtgatacgaagtttgtacgt

SEQ ID NO: 111759 - DNA, 25 bp, SARS Virus
ccgtgtgataccgagtttgtacgtg

SEQ ID NO: 111760 - DNA, 25 bp, SARS Virus
cgtgtgataccaggtttgtacgtgt

SEQ ID NO: 111761 - DNA, 25 bp, SARS Virus
gtgtgataccaagtttgtacgtgtg

SEQ ID NO: 111762 - DNA, 25 bp, SARS Virus
tgtgataccaaggttgtacgtgtgg

SEQ ID NO: 111763 - DNA, 25 bp, SARS Virus
gtgataccaagtgtgtacgtgtgga

SEQ ID NO: 111764 - DNA, 25 bp, SARS Virus
tgataccaagttggtacgtgtggat

SEQ ID NO: 111765 - DNA, 25 bp, SARS Virus
gataccaagtttgtacgtgtggatt

SEQ ID NO: 111766 - DNA, 25 bp, SARS Virus
ataccaagtttggacgtgtggatta

SEQ ID NO: 111767 - DNA, 25 bp, SARS Virus
taccaagtttgtgcgtgtggattac

SEQ ID NO: 111768 - DNA, 25 bp, SARS Virus
accaagtttgtaggtgtggattaca

SEQ ID NO: 111769 - DNA, 25 bp, SARS Virus
ccaagtttgtacgtgtggattacaa

SEQ ID NO: 111770 - DNA, 25 bp, SARS Virus
caagtttgtacgggtggattacaat

SEQ ID NO: 111771 - DNA, 25 bp, SARS Virus
aagtttgtacgtgtggattacaatg

SEQ ID NO: 111772 - DNA, 25 bp, SARS Virus
agtttgtacgtggggattacaatga

SEQ ID NO: 111773 - DNA, 25 bp, SARS Virus
gtttgtacgtgtggattacaatgat

SEQ ID NO: 111774 - DNA, 25 bp, SARS Virus
tttgtacgtgtggattacaatgata

SEQ ID NO: 111775 - DNA, 25 bp, SARS Virus
ttgtacgtgtgggttacaatgatag

SEQ ID NO: 111776 - DNA, 25 bp, SARS Virus
tgtacgtgtggagtacaatgatagt

SEQ ID NO: 111777 - DNA, 25 bp, SARS Virus
gtacgtgtggatgacaatgatagtt

SEQ ID NO: 111778 - DNA, 25 bp, SARS Virus
tacgtgtggattgcaatgatagttg

SEQ ID NO: 111779 - DNA, 25 bp, SARS Virus
acgtgtggattagaatgatagttga

SEQ ID NO: 111780 - DNA, 25 bp, SARS Virus
cgtgtggattacgatgatagttgac

SEQ ID NO: 111781 - DNA, 25 bp, SARS Virus
gtgtggattacagtgatagttgaca

SEQ ID NO: 111782 - DNA, 25 bp, SARS Virus
tgtggattacaaggatagttgacag

SEQ ID NO: 111783 - DNA, 25 bp, SARS Virus
gtggattacaatgatagttgacagt

SEQ ID NO: 111784 - DNA, 25 bp, SARS Virus
tggattacaatggtagttgacagtt

SEQ ID NO: 111785 - DNA, 25 bp, SARS Virus
ggattacaatgagagttgacagttc

SEQ ID NO: 111786 - DNA, 25 bp, SARS Virus
gattacaatgatggttgacagttct

SEQ ID NO: 111787 - DNA, 25 bp, SARS Virus
attacaatgatagttgacagttcta

SEQ ID NO: 111788 - DNA, 25 bp, SARS Virus
ttacaatgataggtgacagttctag

SEQ ID NO: 111789 - DNA, 25 bp, SARS Virus
tacaatgatagtggacagttctagg

SEQ ID NO: 111790 - DNA, 25 bp, SARS Virus
acaatgatagttgacagttctaggt

SEQ ID NO: 111791 - DNA, 25 bp, SARS Virus
caatgatagttggcagttctaggtc

SEQ ID NO: 111792 - DNA, 25 bp, SARS Virus
aatgatagttgagagttctaggtcg

SEQ ID NO: 111793 - DNA, 25 bp, SARS Virus
atgatagttgacggttctaggtcga

SEQ ID NO: 111794 - DNA, 25 bp, SARS Virus
tgatagttgacagttctaggtcgac

SEQ ID NO: 111795 - DNA, 25 bp, SARS Virus
gatagttgacaggtctaggtcgacc

SEQ ID NO: 111796 - DNA, 25 bp, SARS Virus
atagttgacagtgctaggtcgacca

SEQ ID NO: 111797 - DNA, 25 bp, SARS Virus
tagttgacagttgtaggtcgaccac

SEQ ID NO: 111798 - DNA, 25 bp, SARS Virus
agttgacagttcgaggtcgaccacc

SEQ ID NO: 111799 - DNA, 25 bp, SARS Virus
gttgacagttctgggtcgaccacca

SEQ ID NO: 111800 - DNA, 25 bp, SARS Virus
ttgacagttctaggtcgaccaccac

SEQ ID NO: 111801 - DNA, 25 bp, SARS Virus
tgacagttctaggtcgaccaccacg

SEQ ID NO: 111802 - DNA, 25 bp, SARS Virus
gacagttctagggcgaccaccacgc

SEQ ID NO: 111803 - DNA, 25 bp, SARS Virus
acagttctaggtggaccaccacgcg

SEQ ID NO: 111804 - DNA, 25 bp, SARS Virus
cagttctaggtcgaccaccacgcga

SEQ ID NO: 111805 - DNA, 25 bp, SARS Virus
agttctaggtcggccaccacgcgaa

SEQ ID NO: 111806 - DNA, 25 bp, SARS Virus
gttctaggtcgagcaccacgcgaat

SEQ ID NO: 111807 - DNA, 25 bp, SARS Virus
ttctaggtcgacgaccacgcgaata

SEQ ID NO: 111808 - DNA, 25 bp, SARS Virus
tctaggtcgaccgccacgcgaatat

SEQ ID NO: 111809 - DNA, 25 bp, SARS Virus
ctaggtcgaccagcacgcgaatatc

SEQ ID NO: 111810 - DNA, 25 bp, SARS Virus
taggtcgaccacgacgcgaatatcg

SEQ ID NO: 111811 - DNA, 25 bp, SARS Virus
aggtcgaccaccgcgcgaatatcga

SEQ ID NO: 111812 - DNA, 25 bp, SARS Virus
ggtcgaccaccaggcgaatatcgat

SEQ ID NO: 111813 - DNA, 25 bp, SARS Virus
gtcgaccaccacgcgaatatcgatc

SEQ ID NO: 111814 - DNA, 25 bp, SARS Virus
tcgaccaccacgggaatatcgatcc

SEQ ID NO: 111815 - DNA, 25 bp, SARS Virus
cgaccaccacgcgaatatcgatcca

SEQ ID NO: 111816 - DNA, 25 bp, SARS Virus
gaccaccacgcggatatcgatccac

SEQ ID NO: 111817 - DNA, 25 bp, SARS Virus
accaccacgcgagtatcgatccaca

SEQ ID NO: 111818 - DNA, 25 bp, SARS Virus
ccaccacgcgaagatcgatccacaa

SEQ ID NO: 111819 - DNA, 25 bp, SARS Virus
caccacgcgaatgtcgatccacaac

SEQ ID NO: 111820 - DNA, 25 bp, SARS Virus
accacgcgaatagcgatccacaacc

SEQ ID NO: 111821 - DNA, 25 bp, SARS Virus
ccacgcgaatatggatccacaacca

SEQ ID NO: 111822 - DNA, 25 bp, SARS Virus
cacgcgaatatcgatccacaaccat

SEQ ID NO: 111823 - DNA, 25 bp, SARS Virus
acgcgaatatcggtccacaaccatg

SEQ ID NO: 111824 - DNA, 25 bp, SARS Virus
cgcgaatatcgagccacaaccatgg

SEQ ID NO: 111825 - DNA, 25 bp, SARS Virus
gcgaatatcgatgcacaaccatgga

SEQ ID NO: 111826 - DNA, 25 bp, SARS Virus
cgaatatcgatcgacaaccatggaa

SEQ ID NO: 111827 - DNA, 25 bp, SARS Virus
gaatatcgatccgcaaccatggaag

SEQ ID NO: 111828 - DNA, 25 bp, SARS Virus
aatatcgatccagaaccatggaagt

SEQ ID NO: 111829 - DNA, 25 bp, SARS Virus
atatcgatccacgaccatggaagta

SEQ ID NO: 111830 - DNA, 25 bp, SARS Virus
tatcgatccacagccatggaagtac

SEQ ID NO: 111831 - DNA, 25 bp, SARS Virus
atcgatccacaagcatggaagtact

SEQ ID NO: 111832 - DNA, 25 bp, SARS Virus
tcgatccacaacgatggaagtactt

SEQ ID NO: 111833 - DNA, 25 bp, SARS Virus
cgatccacaaccgtggaagtacttc

SEQ ID NO: 111834 - DNA, 25 bp, SARS Virus
gatccacaaccagggaagtacttcc

SEQ ID NO: 111835 - DNA, 25 bp, SARS Virus
atccacaaccatggaagtacttcca

SEQ ID NO: 111836 - DNA, 25 bp, SARS Virus
tccacaaccatggaagtacttccag

SEQ ID NO: 111837 - DNA, 25 bp, SARS Virus
ccacaaccatgggagtacttccagt

SEQ ID NO: 111838 - DNA, 25 bp, SARS Virus
cacaaccatggaggtacttccagtg

SEQ ID NO: 111839 - DNA, 25 bp, SARS Virus
acaaccatggaagtacttccagtgg

SEQ ID NO: 111840 - DNA, 25 bp, SARS Virus
caaccatggaaggacttccagtggt

SEQ ID NO: 111841 - DNA, 25 bp, SARS Virus
aaccatggaagtgcttccagtggtt

SEQ ID NO: 111842 - DNA, 25 bp, SARS Virus
accatggaagtagttccagtggttt

SEQ ID NO: 111843 - DNA, 25 bp, SARS Virus
ccatggaagtacgtccagtggtttg

SEQ ID NO: 111844 - DNA, 25 bp, SARS Virus
catggaagtactgccagtggtttga

SEQ ID NO: 111845 - DNA, 25 bp, SARS Virus
atggaagtacttgcagtggtttgac

SEQ ID NO: 111846 - DNA, 25 bp, SARS Virus
tggaagtacttcgagtggtttgacg

SEQ ID NO: 111847 - DNA, 25 bp, SARS Virus
ggaagtacttccggtggtttgacga

SEQ ID NO: 111848 - DNA, 25 bp, SARS Virus
gaagtacttccagtggtttgacgac

SEQ ID NO: 111849 - DNA, 25 bp, SARS Virus
aagtacttccaggggtttgacgacg

SEQ ID NO: 111850 - DNA, 25 bp, SARS Virus
agtacttccagtggtttgacgacgt

SEQ ID NO: 111851 - DNA, 25 bp, SARS Virus
gtacttccagtggtttgacgacgta

SEQ ID NO: 111852 - DNA, 25 bp, SARS Virus
tacttccagtgggttgacgacgtaa

SEQ ID NO: 111853 - DNA, 25 bp, SARS Virus
acttccagtggtgtgacgacgtaaa

SEQ ID NO: 111854 - DNA, 25 bp, SARS Virus
cttccagtggttggacgacgtaaat

SEQ ID NO: 111855 - DNA, 25 bp, SARS Virus
ttccagtggtttgacgacgtaaatc

SEQ ID NO: 111856 - DNA, 25 bp, SARS Virus
tccagtggtttggcgacgtaaatct

SEQ ID NO: 111857 - DNA, 25 bp, SARS Virus
ccagtggtttgaggacgtaaatctc

SEQ ID NO: 111858 - DNA, 25 bp, SARS Virus
cagtggtttgacgacgtaaatctct

SEQ ID NO: 111859 - DNA, 25 bp, SARS Virus
agtggtttgacggcgtaaatctctg

SEQ ID NO: 111860 - DNA, 25 bp, SARS Virus
gtggtttgacgaggtaaatctctgc

SEQ ID NO: 111861 - DNA, 25 bp, SARS Virus
tggtttgacgacgtaaatctctgca

SEQ ID NO: 111862 - DNA, 25 bp, SARS Virus
ggtttgacgacggaaatctctgcat

SEQ ID NO: 111863 - DNA, 25 bp, SARS Virus
gtttgacgacgtgaatctctgcatg

SEQ ID NO: 111864 - DNA, 25 bp, SARS Virus
tttgacgacgtagatctctgcatga

SEQ ID NO: 111865 - DNA, 25 bp, SARS Virus
ttgacgacgtaagtctctgcatgaa

SEQ ID NO: 111866 - DNA, 25 bp, SARS Virus
tgacgacgtaaagctctgcatgaac

SEQ ID NO: 111867 - DNA, 25 bp, SARS Virus
gacgacgtaaatgtctgcatgaaca

SEQ ID NO: 111868 - DNA, 25 bp, SARS Virus
acgacgtaaatcgctgcatgaacaa

SEQ ID NO: 111869 - DNA, 25 bp, SARS Virus
cgacgtaaatctgtgcatgaacaac

SEQ ID NO: 111870 - DNA, 25 bp, SARS Virus
gacgtaaatctcggcatgaacaaca

SEQ ID NO: 111871 - DNA, 25 bp, SARS Virus
acgtaaatctctgcatgaacaacaa

SEQ ID NO: 111872 - DNA, 25 bp, SARS Virus
cgtaaatctctggatgaacaacaaa

SEQ ID NO: 111873 - DNA, 25 bp, SARS Virus
gtaaatctctgcgtgaacaacaaaa

SEQ ID NO: 111874 - DNA, 25 bp, SARS Virus
taaatctctgcaggaacaacaaaat

SEQ ID NO: 111875 - DNA, 25 bp, SARS Virus
aaatctctgcatgaacaacaaaatt

SEQ ID NO: 111876 - DNA, 25 bp, SARS Virus
aatctctgcatggacaacaaaattt

SEQ ID NO: 111877 - DNA, 25 bp, SARS Virus
atctctgcatgagcaacaaaattta

SEQ ID NO: 111878 - DNA, 25 bp, SARS Virus
tctctgcatgaagaacaaaatttat

SEQ ID NO: 111879 - DNA, 25 bp, SARS Virus
ctctgcatgaacgacaaaatttatt

SEQ ID NO: 111880 - DNA, 25 bp, SARS Virus
tctgcatgaacagcaaaatttattt

SEQ ID NO: 111881 - DNA, 25 bp, SARS Virus
atcataaaaattttgaaacgaagtg

SEQ ID NO: 111882 - DNA, 25 bp, SARS Virus
tcataaaaattatgaaacgaagtgg

SEQ ID NO: 111883 - DNA, 25 bp, SARS Virus
cataaaaattattaaacgaagtggt

SEQ ID NO: 111884 - DNA, 25 bp, SARS Virus
ataaaaattatgtaacgaagtggta

SEQ ID NO: 111885 - DNA, 25 bp, SARS Virus
taaaaattatgatacgaagtggtaa

SEQ ID NO: 111886 - DNA, 25 bp, SARS Virus
aaaaattatgaatcgaagtggtaat

SEQ ID NO: 111887 - DNA, 25 bp, SARS Virus
aaaattatgaaatgaagtggtaatt

SEQ ID NO: 111888 - DNA, 25 bp, SARS Virus
aaattatgaaactaagtggtaattc

SEQ ID NO: 111889 - DNA, 25 bp, SARS Virus
aattatgaaacgtagtggtaattct

SEQ ID NO: 111890 - DNA, 25 bp, SARS Virus
attatgaaacgatgtggtaattctc

SEQ ID NO: 111891 - DNA, 25 bp, SARS Virus
ttatgaaacgaattggtaattctct

SEQ ID NO: 111892 - DNA, 25 bp, SARS Virus
tatgaaacgaagtggtaattctctt

SEQ ID NO: 111893 - DNA, 25 bp, SARS Virus
atgaaacgaagttgtaattctcttt

SEQ ID NO: 111894 - DNA, 25 bp, SARS Virus
tgaaacgaagtgttaattctctttc

SEQ ID NO: 111895 - DNA, 25 bp, SARS Virus
gaaacgaagtggtaattctctttct

SEQ ID NO: 111896 - DNA, 25 bp, SARS Virus
aaacgaagtggttattctctttctg

SEQ ID NO: 111897 - DNA, 25 bp, SARS Virus
aacgaagtggtatttctctttctgt

SEQ ID NO: 111898 - DNA, 25 bp, SARS Virus
acgaagtggtaattctctttctgtc

SEQ ID NO: 111899 - DNA, 25 bp, SARS Virus
cgaagtggtaattctctttctgtct

SEQ ID NO: 111900 - DNA, 25 bp, SARS Virus
gaagtggtaattttctttctgtctt

SEQ ID NO: 111901 - DNA, 25 bp, SARS Virus
aagtggtaattctctttctgtctta

SEQ ID NO: 111902 - DNA, 25 bp, SARS Virus
agtggtaattctttttctgtcttac

SEQ ID NO: 111903 - DNA, 25 bp, SARS Virus
gtggtaattctctttctgtcttact

SEQ ID NO: 111904 - DNA, 25 bp, SARS Virus
tggtaattctctttctgtcttactt

SEQ ID NO: 111905 - DNA, 25 bp, SARS Virus
ggtaattctctttctgtcttactta

SEQ ID NO: 111906 - DNA, 25 bp, SARS Virus
gtaattctctttttgtcttacttac

SEQ ID NO: 111907 - DNA, 25 bp, SARS Virus
taattctctttctgtcttacttact

SEQ ID NO: 111908 - DNA, 25 bp, SARS Virus
aattctctttctttcttacttactc

SEQ ID NO: 111909 - DNA, 25 bp, SARS Virus
attctctttctgtcttacttactcg

SEQ ID NO: 111910 - DNA, 25 bp, SARS Virus
ttctctttctgttttacttactcga

SEQ ID NO: 111911 - DNA, 25 bp, SARS Virus
tctctttctgtcttacttactcgag

SEQ ID NO: 111912 - DNA, 25 bp, SARS Virus
ctctttctgtcttacttactcgagt

SEQ ID NO: 111913 - DNA, 25 bp, SARS Virus
tctttctgtctttcttactcgagtg

SEQ ID NO: 111914 - DNA, 25 bp, SARS Virus
ctttctgtcttatttactcgagtga

SEQ ID NO: 111915 - DNA, 25 bp, SARS Virus
tttctgtcttacttactcgagtgaa

SEQ ID NO: 111916 - DNA, 25 bp, SARS Virus
ttctgtcttacttactcgagtgaaa

SEQ ID NO: 111917 - DNA, 25 bp, SARS Virus
tctgtcttactttctcgagtgaaat

SEQ ID NO: 111918 - DNA, 25 bp, SARS Virus
ctgtcttacttattcgagtgaaatt

SEQ ID NO: 111919 - DNA, 25 bp, SARS Virus
tgtcttacttactcgagtgaaatta

SEQ ID NO: 111920 - DNA, 25 bp, SARS Virus
gtcttacttacttgagtgaaattaa

SEQ ID NO: 111921 - DNA, 25 bp, SARS Virus
tcttacttactctagtgaaattaac

SEQ ID NO: 111922 - DNA, 25 bp, SARS Virus
cttacttactcgtgtgaaattaact

SEQ ID NO: 111923 - DNA, 25 bp, SARS Virus
ttacttactcgattgaaattaactg

SEQ ID NO: 111924 - DNA, 25 bp, SARS Virus
tacttactcgagtgaaattaactga

SEQ ID NO: 111925 - DNA, 25 bp, SARS Virus
acttactcgagttaaattaactgaa

SEQ ID NO: 111926 - DNA, 25 bp, SARS Virus
cttactcgagtgtaattaactgaag

SEQ ID NO: 111927 - DNA, 25 bp, SARS Virus
ttactcgagtgatattaactgaaga

SEQ ID NO: 111928 - DNA, 25 bp, SARS Virus
tactcgagtgaatttaactgaagat

SEQ ID NO: 111929 - DNA, 25 bp, SARS Virus
actcgagtgaaattaactgaagata

SEQ ID NO: 111930 - DNA, 25 bp, SARS Virus
ctcgagtgaaattaactgaagataa

SEQ ID NO: 111931 - DNA, 25 bp, SARS Virus
tcgagtgaaatttactgaagataaa

SEQ ID NO: 111932 - DNA, 25 bp, SARS Virus
cgagtgaaattatctgaagataaac

SEQ ID NO: 111933 - DNA, 25 bp, SARS Virus
gagtgaaattaattgaagataaaca

SEQ ID NO: 111934 - DNA, 25 bp, SARS Virus
agtgaaattaactgaagataaacac

SEQ ID NO: 111935 - DNA, 25 bp, SARS Virus
gtgaaattaacttaagataaacacg

SEQ ID NO: 111936 - DNA, 25 bp, SARS Virus
tgaaattaactgtagataaacacga

SEQ ID NO: 111937 - DNA, 25 bp, SARS Virus
gaaattaactgatgataaacacgaa

SEQ ID NO: 111938 - DNA, 25 bp, SARS Virus
aaattaactgaatataaacacgaaa

SEQ ID NO: 111939 - DNA, 25 bp, SARS Virus
aattaactgaagttaaacacgaaaa

SEQ ID NO: 111940 - DNA, 25 bp, SARS Virus
attaactgaagataaacacgaaaaa

SEQ ID NO: 111941 - DNA, 25 bp, SARS Virus
ttaactgaagattaacacgaaaaat

SEQ ID NO: 111942 - DNA, 25 bp, SARS Virus
taactgaagatatacacgaaaaatc

SEQ ID NO: 111943 - DNA, 25 bp, SARS Virus
aactgaagataatcacgaaaaatcg

SEQ ID NO: 111944 - DNA, 25 bp, SARS Virus
actgaagataaatacgaaaaatcgg

SEQ ID NO: 111945 - DNA, 25 bp, SARS Virus
ctgaagataaactcgaaaaatcgga

SEQ ID NO: 111946 - DNA, 25 bp, SARS Virus
tgaagataaacatgaaaaatcggaa

SEQ ID NO: 111947 - DNA, 25 bp, SARS Virus
gaagataaacactaaaaatcggaaa

SEQ ID NO: 111948 - DNA, 25 bp, SARS Virus
aagataaacacgtaaaatcggaaag

SEQ ID NO: 111949 - DNA, 25 bp, SARS Virus
agataaacacgataaatcggaaaga

SEQ ID NO: 111950 - DNA, 25 bp, SARS Virus
gataaacacgaataatcggaaagac

SEQ ID NO: 111951 - DNA, 25 bp, SARS Virus
ataaacacgaaatatcggaaagacg

SEQ ID NO: 111952 - DNA, 25 bp, SARS Virus
taaacacgaaaattcggaaagacga

SEQ ID NO: 111953 - DNA, 25 bp, SARS Virus
aaacacgaaaaatcggaaagacgat

SEQ ID NO: 111954 - DNA, 25 bp, SARS Virus
aacacgaaaaattggaaagacgata

SEQ ID NO: 111955 - DNA, 25 bp, SARS Virus
acacgaaaaatctgaaagacgataa

SEQ ID NO: 111956 - DNA, 25 bp, SARS Virus
cacgaaaaatcgtaaagacgataag

SEQ ID NO: 111957 - DNA, 25 bp, SARS Virus
acgaaaaatcggtaagacgataagg

SEQ ID NO: 111958 - DNA, 25 bp, SARS Virus
cgaaaaatcggatagacgataagga

SEQ ID NO: 111959 - DNA, 25 bp, SARS Virus
gaaaaatcggaatgacgataaggaa

SEQ ID NO: 111960 - DNA, 25 bp, SARS Virus
aaaaatcggaaatacgataaggaac

SEQ ID NO: 111961 - DNA, 25 bp, SARS Virus
aaaatcggaaagtcgataaggaaca

SEQ ID NO: 111962 - DNA, 25 bp, SARS Virus
aaatcggaaagatgataaggaacaa

SEQ ID NO: 111963 - DNA, 25 bp, SARS Virus
aatcggaaagactataaggaacaaa

SEQ ID NO: 111964 - DNA, 25 bp, SARS Virus
atcggaaagacgttaaggaacaaaa

SEQ ID NO: 111965 - DNA, 25 bp, SARS Virus
tcggaaagacgataaggaacaaaat

SEQ ID NO: 111966 - DNA, 25 bp, SARS Virus
cggaaagacgattaggaacaaaatt

SEQ ID NO: 111967 - DNA, 25 bp, SARS Virus
ggaaagacgatatggaacaaaatta

SEQ ID NO: 111968 - DNA, 25 bp, SARS Virus
gaaagacgataatgaacaaaattat

SEQ ID NO: 111969 - DNA, 25 bp, SARS Virus
aaagacgataagtaacaaaattatt

SEQ ID NO: 111970 - DNA, 25 bp, SARS Virus
aagacgataaggtacaaaattatta

SEQ ID NO: 111971 - DNA, 25 bp, SARS Virus
agacgataaggatcaaaattattac

SEQ ID NO: 111972 - DNA, 25 bp, SARS Virus
gacgataaggaataaaattattacg

SEQ ID NO: 111973 - DNA, 25 bp, SARS Virus
acgataaggaactaaattattacga

SEQ ID NO: 111974 - DNA, 25 bp, SARS Virus
cgataaggaacataattattacgaa

SEQ ID NO: 111975 - DNA, 25 bp, SARS Virus
gataaggaacaatattattacgaat

SEQ ID NO: 111976 - DNA, 25 bp, SARS Virus
ataaggaacaaatttattacgaata

SEQ ID NO: 111977 - DNA, 25 bp, SARS Virus
taaggaacaaaattattacgaataa

SEQ ID NO: 111978 - DNA, 25 bp, SARS Virus
aaggaacaaaattattacgaataat

SEQ ID NO: 111979 - DNA, 25 bp, SARS Virus
aggaacaaaatttttacgaataata

SEQ ID NO: 111980 - DNA, 25 bp, SARS Virus
ggaacaaaattattacgaataatat

SEQ ID NO: 111981 - DNA, 25 bp, SARS Virus
gaacaaaattattacgaataatata

SEQ ID NO: 111982 - DNA, 25 bp, SARS Virus
aacaaaattatttcgaataatataa

SEQ ID NO: 111983 - DNA, 25 bp, SARS Virus
acaaaattattatgaataatataaa

SEQ ID NO: 111984 - DNA, 25 bp, SARS Virus
caaaattattactaataatataaaa

SEQ ID NO: 111985 - DNA, 25 bp, SARS Virus
aaaattattacgtataatataaaac

SEQ ID NO: 111986 - DNA, 25 bp, SARS Virus
aaattattacgattaatataaaacc

SEQ ID NO: 111987 - DNA, 25 bp, SARS Virus
aattattacgaataatataaaacca

SEQ ID NO: 111988 - DNA, 25 bp, SARS Virus
attattacgaattatataaaaccaa

SEQ ID NO: 111989 - DNA, 25 bp, SARS Virus
ttattacgaatattataaaaccaaa

SEQ ID NO: 111990 - DNA, 25 bp, SARS Virus
tattacgaataatataaaaccaaaa

SEQ ID NO: 111991 - DNA, 25 bp, SARS Virus
attacgaataatttaaaaccaaaag

SEQ ID NO: 111992 - DNA, 25 bp, SARS Virus
ttacgaataatataaaaccaaaagt

SEQ ID NO: 111993 - DNA, 25 bp, SARS Virus
tacgaataatattaaaccaaaagtg

SEQ ID NO: 111994 - DNA, 25 bp, SARS Virus
acgaataatatataaccaaaagtga

SEQ ID NO: 111995 - DNA, 25 bp, SARS Virus
cgaataatataataccaaaagtgag

SEQ ID NO: 111996 - DNA, 25 bp, SARS Virus
gaataatataaatccaaaagtgagc

SEQ ID NO: 111997 - DNA, 25 bp, SARS Virus
aataatataaaatcaaaagtgagct

SEQ ID NO: 111998 - DNA, 25 bp, SARS Virus
ataatataaaactaaaagtgagctt

SEQ ID NO: 111999 - DNA, 25 bp, SARS Virus
taatataaaacctaaagtgagcttt

SEQ ID NO: 112000 - DNA, 25 bp, SARS Virus
aatataaaaccataagtgagcttta

SEQ ID NO: 112001 - DNA, 25 bp, SARS Virus
atataaaaccaatagtgagctttag

SEQ ID NO: 112002 - DNA, 25 bp, SARS Virus
tataaaaccaaatgtgagctttagg

SEQ ID NO: 112003 - DNA, 25 bp, SARS Virus
ataaaaccaaaattgagctttaggt

SEQ ID NO: 112004 - DNA, 25 bp, SARS Virus
taaaaccaaaagtgagctttaggtc

SEQ ID NO: 112005 - DNA, 25 bp, SARS Virus
aaaaccaaaagttagctttaggtcc

SEQ ID NO: 112006 - DNA, 25 bp, SARS Virus
aaaccaaaagtgtgctttaggtcct

SEQ ID NO: 112007 - DNA, 25 bp, SARS Virus
aaccaaaagtgatctttaggtccta

SEQ ID NO: 112008 - DNA, 25 bp, SARS Virus
accaaaagtgagttttaggtcctag

SEQ ID NO: 112009 - DNA, 25 bp, SARS Virus
ccaaaagtgagctttaggtcctaga

SEQ ID NO: 112010 - DNA, 25 bp, SARS Virus
caaaagtgagctttaggtcctagat

SEQ ID NO: 112011 - DNA, 25 bp, SARS Virus
aaaagtgagctttaggtcctagatc

SEQ ID NO: 112012 - DNA, 25 bp, SARS Virus
aaagtgagcttttggtcctagatct

SEQ ID NO: 112013 - DNA, 25 bp, SARS Virus
aagtgagctttatgtcctagatctt

SEQ ID NO: 112014 - DNA, 25 bp, SARS Virus
agtgagctttagttcctagatcttc

SEQ ID NO: 112015 - DNA, 25 bp, SARS Virus
gtgagctttaggtcctagatcttct

SEQ ID NO: 112016 - DNA, 25 bp, SARS Virus
tgagctttaggttctagatcttctt

SEQ ID NO: 112017 - DNA, 25 bp, SARS Virus
gagctttaggtcttagatcttcttg

SEQ ID NO: 112018 - DNA, 25 bp, SARS Virus
agctttaggtcctagatcttcttgg

SEQ ID NO: 112019 - DNA, 25 bp, SARS Virus
gctttaggtccttgatcttcttgga

SEQ ID NO: 112020 - DNA, 25 bp, SARS Virus
ctttaggtcctatatcttcttggaa

SEQ ID NO: 112021 - DNA, 25 bp, SARS Virus
tttaggtcctagttcttcttggaac

SEQ ID NO: 112022 - DNA, 25 bp, SARS Virus
ttaggtcctagatcttcttggaaca

SEQ ID NO: 112023 - DNA, 25 bp, SARS Virus
taggtcctagattttcttggaacat

SEQ ID NO: 112024 - DNA, 25 bp, SARS Virus
aggtcctagatcttcttggaacatg

SEQ ID NO: 112025 - DNA, 25 bp, SARS Virus
ggtcctagatcttcttggaacatgg

SEQ ID NO: 112026 - DNA, 25 bp, SARS Virus
gtcctagatctttttggaacatggt

SEQ ID NO: 112027 - DNA, 25 bp, SARS Virus
tcctagatcttcttggaacatggtt

SEQ ID NO: 112028 - DNA, 25 bp, SARS Virus
cctagatcttcttggaacatggttt

SEQ ID NO: 112029 - DNA, 25 bp, SARS Virus
ctagatcttctttgaacatggtttc

SEQ ID NO: 112030 - DNA, 25 bp, SARS Virus
tagatcttcttgtaacatggtttca

SEQ ID NO: 112031 - DNA, 25 bp, SARS Virus
agatcttcttggtacatggtttcag

SEQ ID NO: 112032 - DNA, 25 bp, SARS Virus
gatcttcttggatcatggtttcaga

SEQ ID NO: 112033 - DNA, 25 bp, SARS Virus
atcttcttggaatatggtttcagat

SEQ ID NO: 112034 - DNA, 25 bp, SARS Virus
tcttcttggaacttggtttcagatt

SEQ ID NO: 112035 - DNA, 25 bp, SARS Virus
cttcttggaacatggtttcagattt

SEQ ID NO: 112036 - DNA, 25 bp, SARS Virus
ttcttggaacattgtttcagatttg

SEQ ID NO: 112037 - DNA, 25 bp, SARS Virus
tcttggaacatgttttcagatttgc

SEQ ID NO: 112038 - DNA, 25 bp, SARS Virus
cttggaacatggtttcagatttgct

SEQ ID NO: 112039 - DNA, 25 bp, SARS Virus
ttggaacatggtttcagatttgctt

SEQ ID NO: 112040 - DNA, 25 bp, SARS Virus
tggaacatggtttcagatttgcttg

SEQ ID NO: 112041 - DNA, 25 bp, SARS Virus
ggaacatggttttagatttgcttgt

SEQ ID NO: 112042 - DNA, 25 bp, SARS Virus
gaacatggtttctgatttgcttgta

SEQ ID NO: 112043 - DNA, 25 bp, SARS Virus
aacatggtttcatatttgcttgtac

SEQ ID NO: 112044 - DNA, 25 bp, SARS Virus
acatggtttcagttttgcttgtact

SEQ ID NO: 112045 - DNA, 25 bp, SARS Virus
catggtttcagatttgcttgtactt

SEQ ID NO: 112046 - DNA, 25 bp, SARS Virus
atggtttcagatttgcttgtacttt

SEQ ID NO: 112047 - DNA, 25 bp, SARS Virus
tggtttcagatttgcttgtactttg

SEQ ID NO: 112048 - DNA, 25 bp, SARS Virus
ggtttcagattttcttgtactttga

SEQ ID NO: 112049 - DNA, 25 bp, SARS Virus
gtttcagatttgtttgtactttgaa

SEQ ID NO: 112050 - DNA, 25 bp, SARS Virus
tttcagatttgcttgtactttgaag

SEQ ID NO: 112051 - DNA, 25 bp, SARS Virus
ttcagatttgcttgtactttgaaga

SEQ ID NO: 112052 - DNA, 25 bp, SARS Virus
tcagatttgcttttactttgaagag

SEQ ID NO: 112053 - DNA, 25 bp, SARS Virus
cagatttgcttgtactttgaagagt

SEQ ID NO: 112054 - DNA, 25 bp, SARS Virus
agatttgcttgttctttgaagagta

SEQ ID NO: 112055 - DNA, 25 bp, SARS Virus
gatttgcttgtattttgaagagtaa

SEQ ID NO: 112056 - DNA, 25 bp, SARS Virus
atttgcttgtactttgaagagtaac

SEQ ID NO: 112057 - DNA, 25 bp, SARS Virus
tttgcttgtactttgaagagtaaca

SEQ ID NO: 112058 - DNA, 25 bp, SARS Virus
ttgcttgtactttgaagagtaacaa

SEQ ID NO: 112059 - DNA, 25 bp, SARS Virus
tgcttgtacttttaagagtaacaaa

SEQ ID NO: 112060 - DNA, 25 bp, SARS Virus
gcttgtactttgtagagtaacaaaa

SEQ ID NO: 112061 - DNA, 25 bp, SARS Virus
cttgtactttgatgagtaacaaaac

SEQ ID NO: 112062 - DNA, 25 bp, SARS Virus
ttgtactttgaatagtaacaaaact

SEQ ID NO: 112063 - DNA, 25 bp, SARS Virus
tgtactttgaagtgtaacaaaactg

SEQ ID NO: 112064 - DNA, 25 bp, SARS Virus
gtactttgaagattaacaaaactga

SEQ ID NO: 112065 - DNA, 25 bp, SARS Virus
tactttgaagagtaacaaaactgaa

SEQ ID NO: 112066 - DNA, 25 bp, SARS Virus
actttgaagagttacaaaactgaac

SEQ ID NO: 112067 - DNA, 25 bp, SARS Virus
ctttgaagagtatcaaaactgaaca

SEQ ID NO: 112068 - DNA, 25 bp, SARS Virus
tttgaagagtaataaaactgaacat

SEQ ID NO: 112069 - DNA, 25 bp, SARS Virus
ttgaagagtaactaaactgaacata

SEQ ID NO: 112070 - DNA, 25 bp, SARS Virus
tgaagagtaacataactgaacataa

SEQ ID NO: 112071 - DNA, 25 bp, SARS Virus
gaagagtaacaatactgaacataaa

SEQ ID NO: 112072 - DNA, 25 bp, SARS Virus
aagagtaacaaatctgaacataaag

SEQ ID NO: 112073 - DNA, 25 bp, SARS Virus
agagtaacaaaattgaacataaaga

SEQ ID NO: 112074 - DNA, 25 bp, SARS Virus
gagtaacaaaactgaacataaagag

SEQ ID NO: 112075 - DNA, 25 bp, SARS Virus
agtaacaaaacttaacataaagaga

SEQ ID NO: 112076 - DNA, 25 bp, SARS Virus
gtaacaaaactgtacataaagagat

SEQ ID NO: 112077 - DNA, 25 bp, SARS Virus
taacaaaactgatcataaagagata

SEQ ID NO: 112078 - DNA, 25 bp, SARS Virus
aacaaaactgaatataaagagatac

SEQ ID NO: 112079 - DNA, 25 bp, SARS Virus
acaaaactgaacttaaagagatacg

SEQ ID NO: 112080 - DNA, 25 bp, SARS Virus
caaaactgaacataaagagatacgt

SEQ ID NO: 112081 - DNA, 25 bp, SARS Virus
aaaactgaacattaagagatacgtc

SEQ ID NO: 112082 - DNA, 25 bp, SARS Virus
aaactgaacatatagagatacgtca

SEQ ID NO: 112083 - DNA, 25 bp, SARS Virus
aactgaacataatgagatacgtcaa

SEQ ID NO: 112084 - DNA, 25 bp, SARS Virus
actgaacataaatagatacgtcaac

SEQ ID NO: 112085 - DNA, 25 bp, SARS Virus
ctgaacataaagtgatacgtcaacg

SEQ ID NO: 112086 - DNA, 25 bp, SARS Virus
tgaacataaagatatacgtcaacgt

SEQ ID NO: 112087 - DNA, 25 bp, SARS Virus
gaacataaagagttacgtcaacgta

SEQ ID NO: 112088 - DNA, 25 bp, SARS Virus
aacataaagagatacgtcaacgtat

SEQ ID NO: 112089 - DNA, 25 bp, SARS Virus
acataaagagattcgtcaacgtata

SEQ ID NO: 112090 - DNA, 25 bp, SARS Virus
cataaagagatatgtcaacgtatac

SEQ ID NO: 112091 - DNA, 25 bp, SARS Virus
ataaagagatacttcaacgtatacg

SEQ ID NO: 112092 - DNA, 25 bp, SARS Virus
taaagagatacgtcaacgtatacgt

SEQ ID NO: 112093 - DNA, 25 bp, SARS Virus
aaagagatacgttaacgtatacgtg

SEQ ID NO: 112094 - DNA, 25 bp, SARS Virus
aagagatacgtctacgtatacgtga

SEQ ID NO: 112095 - DNA, 25 bp, SARS Virus
agagatacgtcatcgtatacgtgac

SEQ ID NO: 112096 - DNA, 25 bp, SARS Virus
gagatacgtcaatgtatacgtgaca

SEQ ID NO: 112097 - DNA, 25 bp, SARS Virus
agatacgtcaacttatacgtgacat

SEQ ID NO: 112098 - DNA, 25 bp, SARS Virus
gatacgtcaacgtatacgtgacatc

SEQ ID NO: 112099 - DNA, 25 bp, SARS Virus
atacgtcaacgtttacgtgacatca

SEQ ID NO: 112100 - DNA, 25 bp, SARS Virus
tacgtcaacgtatacgtgacatcat

SEQ ID NO: 112101 - DNA, 25 bp, SARS Virus
acgtcaacgtattcgtgacatcatg

SEQ ID NO: 112102 - DNA, 25 bp, SARS Virus
cgtcaacgtatatgtgacatcatgt

SEQ ID NO: 112103 - DNA, 25 bp, SARS Virus
gtcaacgtatacttgacatcatgtc

SEQ ID NO: 112104 - DNA, 25 bp, SARS Virus
tcaacgtatacgtgacatcatgtcg

SEQ ID NO: 112105 - DNA, 25 bp, SARS Virus
caacgtatacgttacatcatgtcgc

SEQ ID NO: 112106 - DNA, 25 bp, SARS Virus
aacgtatacgtgtcatcatgtcgcg

SEQ ID NO: 112107 - DNA, 25 bp, SARS Virus
acgtatacgtgatatcatgtcgcga

SEQ ID NO: 112108 - DNA, 25 bp, SARS Virus
cgtatacgtgacttcatgtcgcgac

SEQ ID NO: 112109 - DNA, 25 bp, SARS Virus
gtatacgtgacatcatgtcgcgaca

SEQ ID NO: 112110 - DNA, 25 bp, SARS Virus
tatacgtgacattatgtcgcgacac

SEQ ID NO: 112111 - DNA, 25 bp, SARS Virus
atacgtgacatcttgtcgcgacacg

SEQ ID NO: 112112 - DNA, 25 bp, SARS Virus
tacgtgacatcatgtcgcgacacgt

SEQ ID NO: 112113 - DNA, 25 bp, SARS Virus
acgtgacatcatttcgcgacacgta

SEQ ID NO: 112114 - DNA, 25 bp, SARS Virus
cgtgacatcatgtcgcgacacgtag

SEQ ID NO: 112115 - DNA, 25 bp, SARS Virus
gtgacatcatgttgcgacacgtaga

SEQ ID NO: 112116 - DNA, 25 bp, SARS Virus
tgacatcatgtctcgacacgtagat

SEQ ID NO: 112117 - DNA, 25 bp, SARS Virus
gacatcatgtcgtgacacgtagatt

SEQ ID NO: 112118 - DNA, 25 bp, SARS Virus
acatcatgtcgctacacgtagatta

SEQ ID NO: 112119 - DNA, 25 bp, SARS Virus
catcatgtcgcgtcacgtagattat

SEQ ID NO: 112120 - DNA, 25 bp, SARS Virus
atcatgtcgcgatacgtagattatt

SEQ ID NO: 112121 - DNA, 25 bp, SARS Virus
tcatgtcgcgactcgtagattattt

SEQ ID NO: 112122 - DNA, 25 bp, SARS Virus
catgtcgcgacatgtagattatttg

SEQ ID NO: 112123 - DNA, 25 bp, SARS Virus
atgtcgcgacacttagattatttgg

SEQ ID NO: 112124 - DNA, 25 bp, SARS Virus
tgtcgcgacacgtagattatttgga

SEQ ID NO: 112125 - DNA, 25 bp, SARS Virus
gtcgcgacacgttgattatttggag

SEQ ID NO: 112126 - DNA, 25 bp, SARS Virus
tcgcgacacgtatattatttggagt

SEQ ID NO: 112127 - DNA, 25 bp, SARS Virus
cgcgacacgtagtttatttggagta

SEQ ID NO: 112128 - DNA, 25 bp, SARS Virus
gcgacacgtagattatttggagtac

SEQ ID NO: 112129 - DNA, 25 bp, SARS Virus
cgacacgtagattatttggagtaca

SEQ ID NO: 112130 - DNA, 25 bp, SARS Virus
gacacgtagattttttggagtacac

SEQ ID NO: 112131 - DNA, 25 bp, SARS Virus
acacgtagattatttggagtacacg

SEQ ID NO: 112132 - DNA, 25 bp, SARS Virus
cacgtagattatttggagtacacga

SEQ ID NO: 112133 - DNA, 25 bp, SARS Virus
acgtagattatttggagtacacgaa

SEQ ID NO: 112134 - DNA, 25 bp, SARS Virus
cgtagattattttgagtacacgaac

SEQ ID NO: 112135 - DNA, 25 bp, SARS Virus
gtagattatttgtagtacacgaact

SEQ ID NO: 112136 - DNA, 25 bp, SARS Virus
tagattatttggtgtacacgaactt

SEQ ID NO: 112137 - DNA, 25 bp, SARS Virus
agattatttggattacacgaacttc

SEQ ID NO: 112138 - DNA, 25 bp, SARS Virus
gattatttggagtacacgaacttct

SEQ ID NO: 112139 - DNA, 25 bp, SARS Virus
attatttggagttcacgaacttcta

SEQ ID NO: 112140 - DNA, 25 bp, SARS Virus
ttatttggagtatacgaacttctag

SEQ ID NO: 112141 - DNA, 25 bp, SARS Virus
tatttggagtactcgaacttctagg

SEQ ID NO: 112142 - DNA, 25 bp, SARS Virus
atttggagtacatgaacttctagga

SEQ ID NO: 112143 - DNA, 25 bp, SARS Virus
tttggagtacactaacttctaggaa

SEQ ID NO: 112144 - DNA, 25 bp, SARS Virus
ttggagtacacgtacttctaggaac

SEQ ID NO: 112145 - DNA, 25 bp, SARS Virus
tggagtacacgatcttctaggaaca

SEQ ID NO: 112146 - DNA, 25 bp, SARS Virus
ggagtacacgaatttctaggaacat

SEQ ID NO: 112147 - DNA, 25 bp, SARS Virus
gagtacacgaacttctaggaacatt

SEQ ID NO: 112148 - DNA, 25 bp, SARS Virus
agtacacgaacttctaggaacattc

SEQ ID NO: 112149 - DNA, 25 bp, SARS Virus
gtacacgaacttttaggaacattcc

SEQ ID NO: 112150 - DNA, 25 bp, SARS Virus
tacacgaacttctaggaacattcca

SEQ ID NO: 112151 - DNA, 25 bp, SARS Virus
acacgaacttcttggaacattccat

SEQ ID NO: 112152 - DNA, 25 bp, SARS Virus
cacgaacttctatgaacattccatg

SEQ ID NO: 112153 - DNA, 25 bp, SARS Virus
acgaacttctagtaacattccatgt

SEQ ID NO: 112154 - DNA, 25 bp, SARS Virus
cgaacttctaggtacattccatgtt

SEQ ID NO: 112155 - DNA, 25 bp, SARS Virus
gaacttctaggatcattccatgttg

SEQ ID NO: 112156 - DNA, 25 bp, SARS Virus
aacttctaggaatattccatgttgt

SEQ ID NO: 112157 - DNA, 25 bp, SARS Virus
acttctaggaactttccatgttgtg

SEQ ID NO: 112158 - DNA, 25 bp, SARS Virus
cttctaggaacattccatgttgtga

SEQ ID NO: 112159 - DNA, 25 bp, SARS Virus
ttctaggaacattccatgttgtgat

SEQ ID NO: 112160 - DNA, 25 bp, SARS Virus
tctaggaacatttcatgttgtgatc

SEQ ID NO: 112161 - DNA, 25 bp, SARS Virus
ctaggaacattctatgttgtgatcc

SEQ ID NO: 112162 - DNA, 25 bp, SARS Virus
taggaacattccttgttgtgatccc

SEQ ID NO: 112163 - DNA, 25 bp, SARS Virus
aggaacattccatgttgtgatcccc

SEQ ID NO: 112164 - DNA, 25 bp, SARS Virus
ggaacattccattttgtgatcccca

SEQ ID NO: 112165 - DNA, 25 bp, SARS Virus
gaacattccatgttgtgatccccat

SEQ ID NO: 112166 - DNA, 25 bp, SARS Virus
aacattccatgttgtgatccccatt

SEQ ID NO: 112167 - DNA, 25 bp, SARS Virus
acattccatgttttgatccccatta

SEQ ID NO: 112168 - DNA, 25 bp, SARS Virus
cattccatgttgtgatccccattat

SEQ ID NO: 112169 - DNA, 25 bp, SARS Virus
attccatgttgttatccccattatg

SEQ ID NO: 112170 - DNA, 25 bp, SARS Virus
ttccatgttgtgttccccattatga

SEQ ID NO: 112171 - DNA, 25 bp, SARS Virus
tccatgttgtgatccccattatgaa

SEQ ID NO: 112172 - DNA, 25 bp, SARS Virus
ccatgttgtgattcccattatgaat

SEQ ID NO: 112173 - DNA, 25 bp, SARS Virus
catgttgtgatctccattatgaata

SEQ ID NO: 112174 - DNA, 25 bp, SARS Virus
atgttgtgatcctcattatgaatat

SEQ ID NO: 112175 - DNA, 25 bp, SARS Virus
tgttgtgatccctattatgaatatc

SEQ ID NO: 112176 - DNA, 25 bp, SARS Virus
gttgtgatcccctttatgaatatcg

SEQ ID NO: 112177 - DNA, 25 bp, SARS Virus
ttgtgatccccattatgaatatcgt

SEQ ID NO: 112178 - DNA, 25 bp, SARS Virus
tgtgatccccattatgaatatcgtg

SEQ ID NO: 112179 - DNA, 25 bp, SARS Virus
gtgatccccattttgaatatcgtga

SEQ ID NO: 112180 - DNA, 25 bp, SARS Virus
tgatccccattatgaatatcgtgac

SEQ ID NO: 112181 - DNA, 25 bp, SARS Virus
gatccccattattaatatcgtgacg

SEQ ID NO: 112182 - DNA, 25 bp, SARS Virus
atccccattatgtatatcgtgacga

SEQ ID NO: 112183 - DNA, 25 bp, SARS Virus
tccccattatgattatcgtgacgaa

SEQ ID NO: 112184 - DNA, 25 bp, SARS Virus
ccccattatgaatatcgtgacgaac

SEQ ID NO: 112185 - DNA, 25 bp, SARS Virus
cccattatgaatttcgtgacgaacc

SEQ ID NO: 112186 - DNA, 25 bp, SARS Virus
ccattatgaatatcgtgacgaaccg

SEQ ID NO: 112187 - DNA, 25 bp, SARS Virus
cattatgaatattgtgacgaaccga

SEQ ID NO: 112188 - DNA, 25 bp, SARS Virus
attatgaatatcttgacgaaccgaa

SEQ ID NO: 112189 - DNA, 25 bp, SARS Virus
ttatgaatatcgtgacgaaccgaaa

SEQ ID NO: 112190 - DNA, 25 bp, SARS Virus
tatgaatatcgttacgaaccgaaac

SEQ ID NO: 112191 - DNA, 25 bp, SARS Virus
atgaatatcgtgtcgaaccgaaaca

SEQ ID NO: 112192 - DNA, 25 bp, SARS Virus
tgaatatcgtgatgaaccgaaacac

SEQ ID NO: 112193 - DNA, 25 bp, SARS Virus
gaatatcgtgactaaccgaaacacg

SEQ ID NO: 112194 - DNA, 25 bp, SARS Virus
aatatcgtgacgtaccgaaacacga

SEQ ID NO: 112195 - DNA, 25 bp, SARS Virus
atatcgtgacgatccgaaacacgag

SEQ ID NO: 112196 - DNA, 25 bp, SARS Virus
tatcgtgacgaatcgaaacacgaga

SEQ ID NO: 112197 - DNA, 25 bp, SARS Virus
atcgtgacgaactgaaacacgagat

SEQ ID NO: 112198 - DNA, 25 bp, SARS Virus
tcgtgacgaacctaaacacgagatc

SEQ ID NO: 112199 - DNA, 25 bp, SARS Virus
cgtgacgaaccgtaacacgagatcc

SEQ ID NO: 112200 - DNA, 25 bp, SARS Virus
gtgacgaaccgatacacgagatcct

SEQ ID NO: 112201 - DNA, 25 bp, SARS Virus
tgacgaaccgaatcacgagatcctt

SEQ ID NO: 112202 - DNA, 25 bp, SARS Virus
gacgaaccgaaatacgagatccttt

SEQ ID NO: 112203 - DNA, 25 bp, SARS Virus
acgaaccgaaactcgagatcctttc

SEQ ID NO: 112204 - DNA, 25 bp, SARS Virus
cgaaccgaaacatgagatcctttcc

SEQ ID NO: 112205 - DNA, 25 bp, SARS Virus
gaaccgaaacactagatcctttcca

SEQ ID NO: 112206 - DNA, 25 bp, SARS Virus
aaccgaaacacgtgatcctttccaa

SEQ ID NO: 112207 - DNA, 25 bp, SARS Virus
accgaaacacgatatcctttccaaa

SEQ ID NO: 112208 - DNA, 25 bp, SARS Virus
ccgaaacacgagttcctttccaaaa

SEQ ID NO: 112209 - DNA, 25 bp, SARS Virus
cgaaacacgagatcctttccaaaat

SEQ ID NO: 112210 - DNA, 25 bp, SARS Virus
gaaacacgagattctttccaaaatg

SEQ ID NO: 112211 - DNA, 25 bp, SARS Virus
aaacacgagatcttttccaaaatgg

SEQ ID NO: 112212 - DNA, 25 bp, SARS Virus
aacacgagatcctttccaaaatgga

SEQ ID NO: 112213 - DNA, 25 bp, SARS Virus
acacgagatcctttccaaaatggaa

SEQ ID NO: 112214 - DNA, 25 bp, SARS Virus
cacgagatcctttccaaaatggaaa

SEQ ID NO: 112215 - DNA, 25 bp, SARS Virus
acgagatccttttcaaaatggaaaa

SEQ ID NO: 112216 - DNA, 25 bp, SARS Virus
cgagatcctttctaaaatggaaaag

SEQ ID NO: 112217 - DNA, 25 bp, SARS Virus
gagatcctttcctaaatggaaaagt

SEQ ID NO: 112218 - DNA, 25 bp, SARS Virus
agatcctttccataatggaaaagta

SEQ ID NO: 112219 - DNA, 25 bp, SARS Virus
gatcctttccaatatggaaaagtat

SEQ ID NO: 112220 - DNA, 25 bp, SARS Virus
atcctttccaaattggaaaagtatc

SEQ ID NO: 112221 - DNA, 25 bp, SARS Virus
tcctttccaaaatggaaaagtatct

SEQ ID NO: 112222 - DNA, 25 bp, SARS Virus
cctttccaaaattgaaaagtatcta

SEQ ID NO: 112223 - DNA, 25 bp, SARS Virus
ctttccaaaatgtaaaagtatctac

SEQ ID NO: 112224 - DNA, 25 bp, SARS Virus
tttccaaaatggtaaagtatctacc

SEQ ID NO: 112225 - DNA, 25 bp, SARS Virus
ttccaaaatggataagtatctaccg

SEQ ID NO: 112226 - DNA, 25 bp, SARS Virus
tccaaaatggaatagtatctaccgt

SEQ ID NO: 112227 - DNA, 25 bp, SARS Virus
ccaaaatggaaatgtatctaccgtg

SEQ ID NO: 112228 - DNA, 25 bp, SARS Virus
caaaatggaaaattatctaccgtgt

SEQ ID NO: 112229 - DNA, 25 bp, SARS Virus
aaaatggaaaagtatctaccgtgtg

SEQ ID NO: 112230 - DNA, 25 bp, SARS Virus
aaatggaaaagtttctaccgtgtga

SEQ ID NO: 112231 - DNA, 25 bp, SARS Virus
aatggaaaagtatctaccgtgtgat

SEQ ID NO: 112232 - DNA, 25 bp, SARS Virus
atggaaaagtatttaccgtgtgata

SEQ ID NO: 112233 - DNA, 25 bp, SARS Virus
tggaaaagtatctaccgtgtgatac

SEQ ID NO: 112234 - DNA, 25 bp, SARS Virus
ggaaaagtatcttccgtgtgatacc

SEQ ID NO: 112235 - DNA, 25 bp, SARS Virus
gaaaagtatctatcgtgtgatacca

SEQ ID NO: 112236 - DNA, 25 bp, SARS Virus
aaaagtatctactgtgtgataccaa

SEQ ID NO: 112237 - DNA, 25 bp, SARS Virus
aaagtatctaccttgtgataccaag

SEQ ID NO: 112238 - DNA, 25 bp, SARS Virus
aagtatctaccgtgtgataccaagt

SEQ ID NO: 112239 - DNA, 25 bp, SARS Virus
agtatctaccgtttgataccaagtt

SEQ ID NO: 112240 - DNA, 25 bp, SARS Virus
gtatctaccgtgtgataccaagttt

SEQ ID NO: 112241 - DNA, 25 bp, SARS Virus
tatctaccgtgttataccaagtttg

SEQ ID NO: 112242 - DNA, 25 bp, SARS Virus
atctaccgtgtgttaccaagtttgt

SEQ ID NO: 112243 - DNA, 25 bp, SARS Virus
tctaccgtgtgataccaagtttgta

SEQ ID NO: 112244 - DNA, 25 bp, SARS Virus
ctaccgtgtgattccaagtttgtac

SEQ ID NO: 112245 - DNA, 25 bp, SARS Virus
taccgtgtgatatcaagtttgtacg

SEQ ID NO: 112246 - DNA, 25 bp, SARS Virus
accgtgtgatactaagtttgtacgt

SEQ ID NO: 112247 - DNA, 25 bp, SARS Virus
ccgtgtgatacctagtttgtacgtg

SEQ ID NO: 112248 - DNA, 25 bp, SARS Virus
cgtgtgataccatgtttgtacgtgt

SEQ ID NO: 112249 - DNA, 25 bp, SARS Virus
gtgtgataccaattttgtacgtgtg

SEQ ID NO: 112250 - DNA, 25 bp, SARS Virus
tgtgataccaagtttgtacgtgtgg

SEQ ID NO: 112251 - DNA, 25 bp, SARS Virus
gtgataccaagtttgtacgtgtgga

SEQ ID NO: 112252 - DNA, 25 bp, SARS Virus
tgataccaagtttgtacgtgtggat

SEQ ID NO: 112253 - DNA, 25 bp, SARS Virus
gataccaagtttttacgtgtggatt

SEQ ID NO: 112254 - DNA, 25 bp, SARS Virus
ataccaagtttgtacgtgtggatta

SEQ ID NO: 112255 - DNA, 25 bp, SARS Virus
taccaagtttgttcgtgtggattac

SEQ ID NO: 112256 - DNA, 25 bp, SARS Virus
accaagtttgtatgtgtggattaca

SEQ ID NO: 112257 - DNA, 25 bp, SARS Virus
ccaagtttgtacttgtggattacaa

SEQ ID NO: 112258 - DNA, 25 bp, SARS Virus
caagtttgtacgtgtggattacaat

SEQ ID NO: 112259 - DNA, 25 bp, SARS Virus
aagtttgtacgtttggattacaatg

SEQ ID NO: 112260 - DNA, 25 bp, SARS Virus
agtttgtacgtgtggattacaatga

SEQ ID NO: 112261 - DNA, 25 bp, SARS Virus
gtttgtacgtgttgattacaatgat

SEQ ID NO: 112262 - DNA, 25 bp, SARS Virus
tttgtacgtgtgtattacaatgata

SEQ ID NO: 112263 - DNA, 25 bp, SARS Virus
ttgtacgtgtggtttacaatgatag

SEQ ID NO: 112264 - DNA, 25 bp, SARS Virus
tgtacgtgtggattacaatgatagt

SEQ ID NO: 112265 - DNA, 25 bp, SARS Virus
gtacgtgtggattacaatgatagtt

SEQ ID NO: 112266 - DNA, 25 bp, SARS Virus
tacgtgtggatttcaatgatagttg

SEQ ID NO: 112267 - DNA, 25 bp, SARS Virus
acgtgtggattataatgatagttga

SEQ ID NO: 112268 - DNA, 25 bp, SARS Virus
cgtgtggattactatgatagttgac

SEQ ID NO: 112269 - DNA, 25 bp, SARS Virus
gtgtggattacattgatagttgaca

SEQ ID NO: 112270 - DNA, 25 bp, SARS Virus
tgtggattacaatgatagttgacag

SEQ ID NO: 112271 - DNA, 25 bp, SARS Virus
gtggattacaattatagttgacagt

SEQ ID NO: 112272 - DNA, 25 bp, SARS Virus
tggattacaatgttagttgacagtt

SEQ ID NO: 112273 - DNA, 25 bp, SARS Virus
ggattacaatgatagttgacagttc

SEQ ID NO: 112274 - DNA, 25 bp, SARS Virus
gattacaatgattgttgacagttct

SEQ ID NO: 112275 - DNA, 25 bp, SARS Virus
attacaatgatatttgacagttcta

SEQ ID NO: 112276 - DNA, 25 bp, SARS Virus
ttacaatgatagttgacagttctag

SEQ ID NO: 112277 - DNA, 25 bp, SARS Virus
tacaatgatagttgacagttctagg

SEQ ID NO: 112278 - DNA, 25 bp, SARS Virus
acaatgatagtttacagttctaggt

SEQ ID NO: 112279 - DNA, 25 bp, SARS Virus
caatgatagttgtcagttctaggtc

SEQ ID NO: 112280 - DNA, 25 bp, SARS Virus
aatgatagttgatagttctaggtcg

SEQ ID NO: 112281 - DNA, 25 bp, SARS Virus
atgatagttgactgttctaggtcga

SEQ ID NO: 112282 - DNA, 25 bp, SARS Virus
tgatagttgacatttctaggtcgac

SEQ ID NO: 112283 - DNA, 25 bp, SARS Virus
gatagttgacagttctaggtcgacc

SEQ ID NO: 112284 - DNA, 25 bp, SARS Virus
atagttgacagttctaggtcgacca

SEQ ID NO: 112285 - DNA, 25 bp, SARS Virus
tagttgacagttttaggtcgaccac

SEQ ID NO: 112286 - DNA, 25 bp, SARS Virus
agttgacagttctaggtcgaccacc

SEQ ID NO: 112287 - DNA, 25 bp, SARS Virus
gttgacagttcttggtcgaccacca

SEQ ID NO: 112288 - DNA, 25 bp, SARS Virus
ttgacagttctatgtcgaccaccac

SEQ ID NO: 112289 - DNA, 25 bp, SARS Virus
tgacagttctagttcgaccaccacg

SEQ ID NO: 112290 - DNA, 25 bp, SARS Virus
gacagttctaggtcgaccaccacgc

SEQ ID NO: 112291 - DNA, 25 bp, SARS Virus
acagttctaggttgaccaccacgcg

SEQ ID NO: 112292 - DNA, 25 bp, SARS Virus
cagttctaggtctaccaccacgcga

SEQ ID NO: 112293 - DNA, 25 bp, SARS Virus
agttctaggtcgtccaccacgcgaa

SEQ ID NO: 112294 - DNA, 25 bp, SARS Virus
gttctaggtcgatcaccacgcgaat

SEQ ID NO: 112295 - DNA, 25 bp, SARS Virus
ttctaggtcgactaccacgcgaata

SEQ ID NO: 112296 - DNA, 25 bp, SARS Virus
tctaggtcgacctccacgcgaatat

SEQ ID NO: 112297 - DNA, 25 bp, SARS Virus
ctaggtcgaccatcacgcgaatatc

SEQ ID NO: 112298 - DNA, 25 bp, SARS Virus
taggtcgaccactacgcgaatatcg

SEQ ID NO: 112299 - DNA, 25 bp, SARS Virus
aggtcgaccacctcgcgaatatcga

SEQ ID NO: 112300 - DNA, 25 bp, SARS Virus
ggtcgaccaccatgcgaatatcgat

SEQ ID NO: 112301 - DNA, 25 bp, SARS Virus
gtcgaccaccactcgaatatcgatc

SEQ ID NO: 112302 - DNA, 25 bp, SARS Virus
tcgaccaccacgtgaatatcgatcc

SEQ ID NO: 112303 - DNA, 25 bp, SARS Virus
cgaccaccacgctaatatcgatcca

SEQ ID NO: 112304 - DNA, 25 bp, SARS Virus
gaccaccacgcgtatatcgatccac

SEQ ID NO: 112305 - DNA, 25 bp, SARS Virus
accaccacgcgattatcgatccaca

SEQ ID NO: 112306 - DNA, 25 bp, SARS Virus
ccaccacgcgaatatcgatccacaa

SEQ ID NO: 112307 - DNA, 25 bp, SARS Virus
caccacgcgaatttcgatccacaac

SEQ ID NO: 112308 - DNA, 25 bp, SARS Virus
accacgcgaatatcgatccacaacc

SEQ ID NO: 112309 - DNA, 25 bp, SARS Virus
ccacgcgaatattgatccacaacca

SEQ ID NO: 112310 - DNA, 25 bp, SARS Virus
cacgcgaatatctatccacaaccat

SEQ ID NO: 112311 - DNA, 25 bp, SARS Virus
acgcgaatatcgttccacaaccatg

SEQ ID NO: 112312 - DNA, 25 bp, SARS Virus
cgcgaatatcgatccacaaccatgg

SEQ ID NO: 112313 - DNA, 25 bp, SARS Virus
gcgaatatcgattcacaaccatgga

SEQ ID NO: 112314 - DNA, 25 bp, SARS Virus
cgaatatcgatctacaaccatggaa

SEQ ID NO: 112315 - DNA, 25 bp, SARS Virus
gaatatcgatcctcaaccatggaag

SEQ ID NO: 112316 - DNA, 25 bp, SARS Virus
aatatcgatccataaccatggaagt

SEQ ID NO: 112317 - DNA, 25 bp, SARS Virus
atatcgatccactaccatggaagta

SEQ ID NO: 112318 - DNA, 25 bp, SARS Virus
tatcgatccacatccatggaagtac

SEQ ID NO: 112319 - DNA, 25 bp, SARS Virus
atcgatccacaatcatggaagtact

SEQ ID NO: 112320 - DNA, 25 bp, SARS Virus
tcgatccacaactatggaagtactt

SEQ ID NO: 112321 - DNA, 25 bp, SARS Virus
cgatccacaaccttggaagtacttc

SEQ ID NO: 112322 - DNA, 25 bp, SARS Virus
gatccacaaccatggaagtacttcc

SEQ ID NO: 112323 - DNA, 25 bp, SARS Virus
atccacaaccattgaagtacttcca

SEQ ID NO: 112324 - DNA, 25 bp, SARS Virus
tccacaaccatgtaagtacttccag

SEQ ID NO: 112325 - DNA, 25 bp, SARS Virus
ccacaaccatggtagtacttccagt

SEQ ID NO: 112326 - DNA, 25 bp, SARS Virus
cacaaccatggatgtacttccagtg

SEQ ID NO: 112327 - DNA, 25 bp, SARS Virus
acaaccatggaattacttccagtgg

SEQ ID NO: 112328 - DNA, 25 bp, SARS Virus
caaccatggaagtacttccagtggt

SEQ ID NO: 112329 - DNA, 25 bp, SARS Virus
aaccatggaagttcttccagtggtt

SEQ ID NO: 112330 - DNA, 25 bp, SARS Virus
accatggaagtatttccagtggttt

SEQ ID NO: 112331 - DNA, 25 bp, SARS Virus
ccatggaagtacttccagtggtttg

SEQ ID NO: 112332 - DNA, 25 bp, SARS Virus
catggaagtacttccagtggtttga

SEQ ID NO: 112333 - DNA, 25 bp, SARS Virus
atggaagtactttcagtggtttgac

SEQ ID NO: 112334 - DNA, 25 bp, SARS Virus
tggaagtacttctagtggtttgacg

SEQ ID NO: 112335 - DNA, 25 bp, SARS Virus
ggaagtacttcctgtggtttgacga

SEQ ID NO: 112336 - DNA, 25 bp, SARS Virus
gaagtacttccattggtttgacgac

SEQ ID NO: 112337 - DNA, 25 bp, SARS Virus
aagtacttccagtggtttgacgacg

SEQ ID NO: 112338 - DNA, 25 bp, SARS Virus
agtacttccagttgtttgacgacgt

SEQ ID NO: 112339 - DNA, 25 bp, SARS Virus
gtacttccagtgttttgacgacgta

SEQ ID NO: 112340 - DNA, 25 bp, SARS Virus
tacttccagtggtttgacgacgtaa

SEQ ID NO: 112341 - DNA, 25 bp, SARS Virus
acttccagtggtttgacgacgtaaa

SEQ ID NO: 112342 - DNA, 25 bp, SARS Virus
cttccagtggtttgacgacgtaaat

SEQ ID NO: 112343 - DNA, 25 bp, SARS Virus
ttccagtggttttacgacgtaaatc

SEQ ID NO: 112344 - DNA, 25 bp, SARS Virus
tccagtggtttgtcgacgtaaatct

SEQ ID NO: 112345 - DNA, 25 bp, SARS Virus
ccagtggtttgatgacgtaaatctc

SEQ ID NO: 112346 - DNA, 25 bp, SARS Virus
cagtggtttgactacgtaaatctct

SEQ ID NO: 112347 - DNA, 25 bp, SARS Virus
agtggtttgacgtcgtaaatctctg

SEQ ID NO: 112348 - DNA, 25 bp, SARS Virus
gtggtttgacgatgtaaatctctgc

SEQ ID NO: 112349 - DNA, 25 bp, SARS Virus
tggtttgacgacttaaatctctgca

SEQ ID NO: 112350 - DNA, 25 bp, SARS Virus
ggtttgacgacgtaaatctctgcat

SEQ ID NO: 112351 - DNA, 25 bp, SARS Virus
gtttgacgacgttaatctctgcatg

SEQ ID NO: 112352 - DNA, 25 bp, SARS Virus
tttgacgacgtatatctctgcatga

SEQ ID NO: 112353 - DNA, 25 bp, SARS Virus
ttgacgacgtaattctctgcatgaa

SEQ ID NO: 112354 - DNA, 25 bp, SARS Virus
tgacgacgtaaatctctgcatgaac

SEQ ID NO: 112355 - DNA, 25 bp, SARS Virus
gacgacgtaaatttctgcatgaaca

SEQ ID NO: 112356 - DNA, 25 bp, SARS Virus
acgacgtaaatctctgcatgaacaa

SEQ ID NO: 112357 - DNA, 25 bp, SARS Virus
cgacgtaaatctttgcatgaacaac

SEQ ID NO: 112358 - DNA, 25 bp, SARS Virus
gacgtaaatctctgcatgaacaaca

SEQ ID NO: 112359 - DNA, 25 bp, SARS Virus
acgtaaatctcttcatgaacaacaa

SEQ ID NO: 112360 - DNA, 25 bp, SARS Virus
cgtaaatctctgtatgaacaacaaa

SEQ ID NO: 112361 - DNA, 25 bp, SARS Virus
gtaaatctctgcttgaacaacaaaa

SEQ ID NO: 112362 - DNA, 25 bp, SARS Virus
taaatctctgcatgaacaacaaaat

SEQ ID NO: 112363 - DNA, 25 bp, SARS Virus
aaatctctgcattaacaacaaaatt

SEQ ID NO: 112364 - DNA, 25 bp, SARS Virus
aatctctgcatgtacaacaaaattt

SEQ ID NO: 112365 - DNA, 25 bp, SARS Virus
atctctgcatgatcaacaaaattta

SEQ ID NO: 112366 - DNA, 25 bp, SARS Virus
tctctgcatgaataacaaaatttat

SEQ ID NO: 112367 - DNA, 25 bp, SARS Virus
ctctgcatgaactacaaaatttatt

SEQ ID NO: 112368 - DNA, 25 bp, SARS Virus
tctgcatgaacatcaaaatttattt

SEQ ID NO: 112369 - DNA, 25 bp, SARS Virus
ctgcatgaacaaaaaaatttatttg

SEQ ID NO: 112370 - DNA, 25 bp, SARS Virus
tgcatgaacaacaaaatttatttgc

SEQ ID NO: 112371 - DNA, 25 bp, SARS Virus
gcatgaacaacaaaatttatttgct

SEQ ID NO: 112372 - DNA, 25 bp, SARS Virus
catgaacaacaaaatttatttgctt

SEQ ID NO: 112373 - DNA, 25 bp, SARS Virus
atgaacaacaaaatttatttgcttg

SEQ ID NO: 112374 - DNA, 25 bp, SARS Virus
tgaacaacaaaaattatttgcttgt

SEQ ID NO: 112375 - DNA, 25 bp, SARS Virus
gaacaacaaaatatatttgcttgtt

SEQ ID NO: 112376 - DNA, 25 bp, SARS Virus
aacaacaaaattaatttgcttgttt

SEQ ID NO: 112377 - DNA, 25 bp, SARS Virus
acaacaaaatttatttgcttgttta

SEQ ID NO: 112378 - DNA, 25 bp, SARS Virus
caacaaaatttaattgcttgtttaa

SEQ ID NO: 112379 - DNA, 25 bp, SARS Virus
aacaaaatttatatgcttgtttaat

SEQ ID NO: 112380 - DNA, 25 bp, SARS Virus
acaaaatttattagcttgtttaatt

SEQ ID NO: 112381 - DNA, 25 bp, SARS Virus
caaaatttatttacttgtttaattt

SEQ ID NO: 112382 - DNA, 25 bp, SARS Virus
aaaatttatttgattgtttaatttt

SEQ ID NO: 112383 - DNA, 25 bp, SARS Virus
aaatttatttgcatgtttaatttta

SEQ ID NO: 112384 - DNA, 25 bp, SARS Virus
aatttatttgctagtttaattttac

SEQ ID NO: 112385 - DNA, 25 bp, SARS Virus
atttatttgcttatttaattttaca

SEQ ID NO: 112386 - DNA, 25 bp, SARS Virus
tttatttgcttgattaattttacag

SEQ ID NO: 112387 - DNA, 25 bp, SARS Virus
ttatttgcttgtataattttacaga

SEQ ID NO: 112388 - DNA, 25 bp, SARS Virus
tatttgcttgttaaattttacagac

SEQ ID NO: 112389 - DNA, 25 bp, SARS Virus
atttgcttgtttaattttacagact

SEQ ID NO: 112390 - DNA, 25 bp, SARS Virus
tttgcttgtttaattttacagacta

SEQ ID NO: 112391 - DNA, 25 bp, SARS Virus
ttgcttgtttaaatttacagactat

SEQ ID NO: 112392 - DNA, 25 bp, SARS Virus
tgcttgtttaatattacagactatt

SEQ ID NO: 112393 - DNA, 25 bp, SARS Virus
gcttgtttaattatacagactatta

SEQ ID NO: 112394 - DNA, 25 bp, SARS Virus
cttgtttaatttaacagactattac

SEQ ID NO: 112395 - DNA, 25 bp, SARS Virus
ttgtttaattttacagactattacc

SEQ ID NO: 112396 - DNA, 25 bp, SARS Virus
tgtttaattttaaagactattacct

SEQ ID NO: 112397 - DNA, 25 bp, SARS Virus
gtttaattttacagactattacctg

SEQ ID NO: 112398 - DNA, 25 bp, SARS Virus
tttaattttacaaactattacctgg

SEQ ID NO: 112399 - DNA, 25 bp, SARS Virus
ttaattttacagactattacctggg

SEQ ID NO: 112400 - DNA, 25 bp, SARS Virus
taattttacagaatattacctgggg

SEQ ID NO: 112401 - DNA, 25 bp, SARS Virus
aattttacagacaattacctggggt

SEQ ID NO: 112402 - DNA, 25 bp, SARS Virus
attttacagactattacctggggtt

SEQ ID NO: 112403 - DNA, 25 bp, SARS Virus
ttttacagactaatacctggggtta

SEQ ID NO: 112404 - DNA, 25 bp, SARS Virus
tttacagactataacctggggttag

SEQ ID NO: 112405 - DNA, 25 bp, SARS Virus
ttacagactattacctggggttagt

SEQ ID NO: 112406 - DNA, 25 bp, SARS Virus
tacagactattaactggggttagtt

SEQ ID NO: 112407 - DNA, 25 bp, SARS Virus
acagactattacatggggttagttt

SEQ ID NO: 112408 - DNA, 25 bp, SARS Virus
cagactattaccaggggttagtttg

SEQ ID NO: 112409 - DNA, 25 bp, SARS Virus
agactattacctagggttagtttgg

SEQ ID NO: 112410 - DNA, 25 bp, SARS Virus
gactattacctgaggttagtttggt

SEQ ID NO: 112411 - DNA, 25 bp, SARS Virus
actattacctggagttagtttggtt

SEQ ID NO: 112412 - DNA, 25 bp, SARS Virus
ctattacctgggattagtttggttg

SEQ ID NO: 112413 - DNA, 25 bp, SARS Virus
tattacctggggatagtttggttgc

SEQ ID NO: 112414 - DNA, 25 bp, SARS Virus
attacctggggtaagtttggttgca

SEQ ID NO: 112415 - DNA, 25 bp, SARS Virus
ttacctggggttagtttggttgcat

SEQ ID NO: 112416 - DNA, 25 bp, SARS Virus
tacctggggttaatttggttgcatc

SEQ ID NO: 112417 - DNA, 25 bp, SARS Virus
acctggggttagattggttgcatca

SEQ ID NO: 112418 - DNA, 25 bp, SARS Virus
cctggggttagtatggttgcatcac

SEQ ID NO: 112419 - DNA, 25 bp, SARS Virus
ctggggttagttaggttgcatcacg

SEQ ID NO: 112420 - DNA, 25 bp, SARS Virus
tggggttagtttagttgcatcacgg

SEQ ID NO: 112421 - DNA, 25 bp, SARS Virus
ggggttagtttgattgcatcacggg

SEQ ID NO: 112422 - DNA, 25 bp, SARS Virus
gggttagtttggatgcatcacgggg

SEQ ID NO: 112423 - DNA, 25 bp, SARS Virus
ggttagtttggtagcatcacggggg

SEQ ID NO: 112424 - DNA, 25 bp, SARS Virus
gttagtttggttacatcacgggggg

SEQ ID NO: 112425 - DNA, 25 bp, SARS Virus
ttagtttggttgaatcacggggggc

SEQ ID NO: 112426 - DNA, 25 bp, SARS Virus
tagtttggttgcatcacggggggcg

SEQ ID NO: 112427 - DNA, 25 bp, SARS Virus
agtttggttgcaacacggggggcgt

SEQ ID NO: 112428 - DNA, 25 bp, SARS Virus
gtttggttgcataacggggggcgta

SEQ ID NO: 112429 - DNA, 25 bp, SARS Virus
tttggttgcatcacggggggcgtaa

SEQ ID NO: 112430 - DNA, 25 bp, SARS Virus
ttggttgcatcaaggggggcgtaat

SEQ ID NO: 112431 - DNA, 25 bp, SARS Virus
tggttgcatcacagggggcgtaatg

SEQ ID NO: 112432 - DNA, 25 bp, SARS Virus
ggttgcatcacgaggggcgtaatgt

SEQ ID NO: 112433 - DNA, 25 bp, SARS Virus
gttgcatcacggagggcgtaatgta

SEQ ID NO: 112434 - DNA, 25 bp, SARS Virus
ttgcatcacgggaggcgtaatgtaa

SEQ ID NO: 112435 - DNA, 25 bp, SARS Virus
tgcatcacggggagcgtaatgtaaa

SEQ ID NO: 112436 - DNA, 25 bp, SARS Virus
gcatcacgggggacgtaatgtaaac

SEQ ID NO: 112437 - DNA, 25 bp, SARS Virus
catcacggggggagtaatgtaaacc

SEQ ID NO: 112438 - DNA, 25 bp, SARS Virus
atcacggggggcataatgtaaacca

SEQ ID NO: 112439 - DNA, 25 bp, SARS Virus
tcacggggggcgaaatgtaaaccac

SEQ ID NO: 112440 - DNA, 25 bp, SARS Virus
cacggggggcgtaatgtaaaccacc

SEQ ID NO: 112441 - DNA, 25 bp, SARS Virus
acggggggcgtaatgtaaaccacct

SEQ ID NO: 112442 - DNA, 25 bp, SARS Virus
cggggggcgtaaagtaaaccacctg

SEQ ID NO: 112443 - DNA, 25 bp, SARS Virus
ggggggcgtaatataaaccacctgg

SEQ ID NO: 112444 - DNA, 25 bp, SARS Virus
gggggcgtaatgaaaaccacctggg

SEQ ID NO: 112445 - DNA, 25 bp, SARS Virus
ggggcgtaatgtaaaccacctgggt

SEQ ID NO: 112446 - DNA, 25 bp, SARS Virus
gggcgtaatgtaaaccacctgggtg

SEQ ID NO: 112447 - DNA, 25 bp, SARS Virus
ggcgtaatgtaaaccacctgggtgt

SEQ ID NO: 112448 - DNA, 25 bp, SARS Virus
gcgtaatgtaaaacacctgggtgtc

SEQ ID NO: 112449 - DNA, 25 bp, SARS Virus
cgtaatgtaaacaacctgggtgtct

SEQ ID NO: 112450 - DNA, 25 bp, SARS Virus
gtaatgtaaaccacctgggtgtcta

SEQ ID NO: 112451 - DNA, 25 bp, SARS Virus
taatgtaaaccaactgggtgtctaa

SEQ ID NO: 112452 - DNA, 25 bp, SARS Virus
aatgtaaaccacatgggtgtctaag

SEQ ID NO: 112453 - DNA, 25 bp, SARS Virus
atgtaaaccaccagggtgtctaagt

SEQ ID NO: 112454 - DNA, 25 bp, SARS Virus
tgtaaaccacctaggtgtctaagtt

SEQ ID NO: 112455 - DNA, 25 bp, SARS Virus
gtaaaccacctgagtgtctaagttg

SEQ ID NO: 112456 - DNA, 25 bp, SARS Virus
taaaccacctggatgtctaagttga

SEQ ID NO: 112457 - DNA, 25 bp, SARS Virus
aaaccacctgggagtctaagttgac

SEQ ID NO: 112458 - DNA, 25 bp, SARS Virus
aaccacctgggtatctaagttgact

SEQ ID NO: 112459 - DNA, 25 bp, SARS Virus
accacctgggtgactaagttgactg

SEQ ID NO: 112460 - DNA, 25 bp, SARS Virus
ccacctgggtgtataagttgactgt

SEQ ID NO: 112461 - DNA, 25 bp, SARS Virus
cacctgggtgtcaaagttgactgtt

SEQ ID NO: 112462 - DNA, 25 bp, SARS Virus
acctgggtgtctaagttgactgtta

SEQ ID NO: 112463 - DNA, 25 bp, SARS Virus
cctgggtgtctaagttgactgttat

SEQ ID NO: 112464 - DNA, 25 bp, SARS Virus
ctgggtgtctaaattgactgttatt

SEQ ID NO: 112465 - DNA, 25 bp, SARS Virus
tgggtgtctaagatgactgttattg

SEQ ID NO: 112466 - DNA, 25 bp, SARS Virus
gggtgtctaagtagactgttattgg

SEQ ID NO: 112467 - DNA, 25 bp, SARS Virus
ggtgtctaagttaactgttattggt

SEQ ID NO: 112468 - DNA, 25 bp, SARS Virus
gtgtctaagttgactgttattggtc

SEQ ID NO: 112469 - DNA, 25 bp, SARS Virus
tgtctaagttgaatgttattggtct

SEQ ID NO: 112470 - DNA, 25 bp, SARS Virus
gtctaagttgacagttattggtctt

SEQ ID NO: 112471 - DNA, 25 bp, SARS Virus
tctaagttgactattattggtctta

SEQ ID NO: 112472 - DNA, 25 bp, SARS Virus
ctaagttgactgatattggtcttac

SEQ ID NO: 112473 - DNA, 25 bp, SARS Virus
taagttgactgtaattggtcttacc

SEQ ID NO: 112474 - DNA, 25 bp, SARS Virus
aagttgactgttattggtcttacct

SEQ ID NO: 112475 - DNA, 25 bp, SARS Virus
agttgactgttaatggtcttacctc

SEQ ID NO: 112476 - DNA, 25 bp, SARS Virus
gttgactgttataggtcttacctcc

SEQ ID NO: 112477 - DNA, 25 bp, SARS Virus
ttgactgttattagtcttacctcct

SEQ ID NO: 112478 - DNA, 25 bp, SARS Virus
tgactgttattgatcttacctcctg

SEQ ID NO: 112479 - DNA, 25 bp, SARS Virus
gactgttattggacttacctcctgc

SEQ ID NO: 112480 - DNA, 25 bp, SARS Virus
actgttattggtattacctcctgcg

SEQ ID NO: 112481 - DNA, 25 bp, SARS Virus
ctgttattggtcatacctcctgcgt

SEQ ID NO: 112482 - DNA, 25 bp, SARS Virus
tgttattggtctaacctcctgcgtt

SEQ ID NO: 112483 - DNA, 25 bp, SARS Virus
gttattggtcttacctcctgcgtta

SEQ ID NO: 112484 - DNA, 25 bp, SARS Virus
ttattggtcttaactcctgcgttac

SEQ ID NO: 112485 - DNA, 25 bp, SARS Virus
tattggtcttacatcctgcgttacc

SEQ ID NO: 112486 - DNA, 25 bp, SARS Virus
attggtcttaccacctgcgttaccc

SEQ ID NO: 112487 - DNA, 25 bp, SARS Virus
ttggtcttacctactgcgttacccc

SEQ ID NO: 112488 - DNA, 25 bp, SARS Virus
tggtcttacctcatgcgttaccccg

SEQ ID NO: 112489 - DNA, 25 bp, SARS Virus
ggtcttacctccagcgttaccccgt

SEQ ID NO: 112490 - DNA, 25 bp, SARS Virus
gtcttacctcctacgttaccccgtt

SEQ ID NO: 112491 - DNA, 25 bp, SARS Virus
tcttacctcctgagttaccccgttc

SEQ ID NO: 112492 - DNA, 25 bp, SARS Virus
cttacctcctgcattaccccgttcc

SEQ ID NO: 112493 - DNA, 25 bp, SARS Virus
ttacctcctgcgataccccgttccg

SEQ ID NO: 112494 - DNA, 25 bp, SARS Virus
tacctcctgcgtaaccccgttccgg

SEQ ID NO: 112495 - DNA, 25 bp, SARS Virus
acctcctgcgttaccccgttccggt

SEQ ID NO: 112496 - DNA, 25 bp, SARS Virus
cctcctgcgttaacccgttccggtt

SEQ ID NO: 112497 - DNA, 25 bp, SARS Virus
ctcctgcgttacaccgttccggttt

SEQ ID NO: 112498 - DNA, 25 bp, SARS Virus
tcctgcgttaccacgttccggtttt

SEQ ID NO: 112499 - DNA, 25 bp, SARS Virus
cctgcgttacccagttccggttttg

SEQ ID NO: 112500 - DNA, 25 bp, SARS Virus
ctgcgttaccccattccggttttgt

SEQ ID NO: 112501 - DNA, 25 bp, SARS Virus
tgcgttaccccgatccggttttgtc

SEQ ID NO: 112502 - DNA, 25 bp, SARS Virus
gcgttaccccgtaccggttttgtcg

SEQ ID NO: 112503 - DNA, 25 bp, SARS Virus
cgttaccccgttacggttttgtcgc

SEQ ID NO: 112504 - DNA, 25 bp, SARS Virus
gttaccccgttcaggttttgtcgcg

SEQ ID NO: 112505 - DNA, 25 bp, SARS Virus
ttaccccgttccagttttgtcgcgg

SEQ ID NO: 112506 - DNA, 25 bp, SARS Virus
taccccgttccgattttgtcgcggc

SEQ ID NO: 112507 - DNA, 25 bp, SARS Virus
accccgttccggatttgtcgcggct

SEQ ID NO: 112508 - DNA, 25 bp, SARS Virus
ccccgttccggtattgtcgcggctg

SEQ ID NO: 112509 - DNA, 25 bp, SARS Virus
cccgttccggttatgtcgcggctgg

SEQ ID NO: 112510 - DNA, 25 bp, SARS Virus
ccgttccggtttagtcgcggctggg

SEQ ID NO: 112511 - DNA, 25 bp, SARS Virus
cgttccggttttatcgcggctgggg

SEQ ID NO: 112512 - DNA, 25 bp, SARS Virus
gttccggttttgacgcggctggggt

SEQ ID NO: 112513 - DNA, 25 bp, SARS Virus
ttccggttttgtagcggctggggtt

SEQ ID NO: 112514 - DNA, 25 bp, SARS Virus
tccggttttgtcacggctggggttc

SEQ ID NO: 112515 - DNA, 25 bp, SARS Virus
ccggttttgtcgaggctggggttcc

SEQ ID NO: 112516 - DNA, 25 bp, SARS Virus
cggttttgtcgcagctggggttcca

SEQ ID NO: 112517 - DNA, 25 bp, SARS Virus
ggttttgtcgcgactggggttccaa

SEQ ID NO: 112518 - DNA, 25 bp, SARS Virus
gttttgtcgcggatggggttccaaa

SEQ ID NO: 112519 - DNA, 25 bp, SARS Virus
ttttgtcgcggcaggggttccaaat

SEQ ID NO: 112520 - DNA, 25 bp, SARS Virus
tttgtcgcggctagggttccaaatg

SEQ ID NO: 112521 - DNA, 25 bp, SARS Virus
ttgtcgcggctgaggttccaaatgg

SEQ ID NO: 112522 - DNA, 25 bp, SARS Virus
tgtcgcggctggagttccaaatggg

SEQ ID NO: 112523 - DNA, 25 bp, SARS Virus
gtcgcggctgggattccaaatgggt

SEQ ID NO: 112524 - DNA, 25 bp, SARS Virus
tcgcggctggggatccaaatgggtt

SEQ ID NO: 112525 - DNA, 25 bp, SARS Virus
cgcggctggggtaccaaatgggtta

SEQ ID NO: 112526 - DNA, 25 bp, SARS Virus
gcggctggggttacaaatgggttat

SEQ ID NO: 112527 - DNA, 25 bp, SARS Virus
cggctggggttcaaaatgggttatt

SEQ ID NO: 112528 - DNA, 25 bp, SARS Virus
ggctggggttccaaatgggttatta

SEQ ID NO: 112529 - DNA, 25 bp, SARS Virus
gctggggttccaaatgggttattat

SEQ ID NO: 112530 - DNA, 25 bp, SARS Virus
ctggggttccaaatgggttattatg

SEQ ID NO: 112531 - DNA, 25 bp, SARS Virus
tggggttccaaaagggttattatga

SEQ ID NO: 112532 - DNA, 25 bp, SARS Virus
ggggttccaaataggttattatgac

SEQ ID NO: 112533 - DNA, 25 bp, SARS Virus
gggttccaaatgagttattatgacg

SEQ ID NO: 112534 - DNA, 25 bp, SARS Virus
ggttccaaatggattattatgacgc

SEQ ID NO: 112535 - DNA, 25 bp, SARS Virus
gttccaaatgggatattatgacgca

SEQ ID NO: 112536 - DNA, 25 bp, SARS Virus
ttccaaatgggtaattatgacgcag

SEQ ID NO: 112537 - DNA, 25 bp, SARS Virus
tccaaatgggttattatgacgcaga

SEQ ID NO: 112538 - DNA, 25 bp, SARS Virus
ccaaatgggttaatatgacgcagaa

SEQ ID NO: 112539 - DNA, 25 bp, SARS Virus
caaatgggttataatgacgcagaac

SEQ ID NO: 112540 - DNA, 25 bp, SARS Virus
aaatgggttattatgacgcagaacc

SEQ ID NO: 112541 - DNA, 25 bp, SARS Virus
aatgggttattaagacgcagaacca

SEQ ID NO: 112542 - DNA, 25 bp, SARS Virus
atgggttattataacgcagaaccaa

SEQ ID NO: 112543 - DNA, 25 bp, SARS Virus
tgggttattatgacgcagaaccaag

SEQ ID NO: 112544 - DNA, 25 bp, SARS Virus
gggttattatgaagcagaaccaagt

SEQ ID NO: 112545 - DNA, 25 bp, SARS Virus
ggttattatgacacagaaccaagtg

SEQ ID NO: 112546 - DNA, 25 bp, SARS Virus
gttattatgacgaagaaccaagtgt

SEQ ID NO: 112547 - DNA, 25 bp, SARS Virus
ttattatgacgcagaaccaagtgtc

SEQ ID NO: 112548 - DNA, 25 bp, SARS Virus
tattatgacgcaaaaccaagtgtcg

SEQ ID NO: 112549 - DNA, 25 bp, SARS Virus
attatgacgcagaaccaagtgtcga

SEQ ID NO: 112550 - DNA, 25 bp, SARS Virus
ttatgacgcagaaccaagtgtcgag

SEQ ID NO: 112551 - DNA, 25 bp, SARS Virus
tatgacgcagaaacaagtgtcgaga

SEQ ID NO: 112552 - DNA, 25 bp, SARS Virus
atgacgcagaacaaagtgtcgagag

SEQ ID NO: 112553 - DNA, 25 bp, SARS Virus
tgacgcagaaccaagtgtcgagagt

SEQ ID NO: 112554 - DNA, 25 bp, SARS Virus
gacgcagaaccaagtgtcgagagtg

SEQ ID NO: 112555 - DNA, 25 bp, SARS Virus
acgcagaaccaaatgtcgagagtga

SEQ ID NO: 112556 - DNA, 25 bp, SARS Virus
cgcagaaccaagagtcgagagtgag

SEQ ID NO: 112557 - DNA, 25 bp, SARS Virus
gcagaaccaagtatcgagagtgagt

SEQ ID NO: 112558 - DNA, 25 bp, SARS Virus
cagaaccaagtgacgagagtgagtc

SEQ ID NO: 112559 - DNA, 25 bp, SARS Virus
agaaccaagtgtagagagtgagtcg

SEQ ID NO: 112560 - DNA, 25 bp, SARS Virus
gaaccaagtgtcaagagtgagtcgt

SEQ ID NO: 112561 - DNA, 25 bp, SARS Virus
aaccaagtgtcgagagtgagtcgta

SEQ ID NO: 112562 - DNA, 25 bp, SARS Virus
accaagtgtcgaaagtgagtcgtac

SEQ ID NO: 112563 - DNA, 25 bp, SARS Virus
ccaagtgtcgagagtgagtcgtacc

SEQ ID NO: 112564 - DNA, 25 bp, SARS Virus
caagtgtcgagaatgagtcgtaccg

SEQ ID NO: 112565 - DNA, 25 bp, SARS Virus
aagtgtcgagagagagtcgtaccgt

SEQ ID NO: 112566 - DNA, 25 bp, SARS Virus
agtgtcgagagtaagtcgtaccgtt

SEQ ID NO: 112567 - DNA, 25 bp, SARS Virus
gtgtcgagagtgagtcgtaccgttc

SEQ ID NO: 112568 - DNA, 25 bp, SARS Virus
tgtcgagagtgaatcgtaccgttcc

SEQ ID NO: 112569 - DNA, 25 bp, SARS Virus
gtcgagagtgagacgtaccgttcct

SEQ ID NO: 112570 - DNA, 25 bp, SARS Virus
tcgagagtgagtagtaccgttcctc

SEQ ID NO: 112571 - DNA, 25 bp, SARS Virus
cgagagtgagtcataccgttcctcc

SEQ ID NO: 112572 - DNA, 25 bp, SARS Virus
gagagtgagtcgaaccgttcctcct

SEQ ID NO: 112573 - DNA, 25 bp, SARS Virus
agagtgagtcgtaccgttcctcctt

SEQ ID NO: 112574 - DNA, 25 bp, SARS Virus
gagtgagtcgtaacgttcctccttg

SEQ ID NO: 112575 - DNA, 25 bp, SARS Virus
agtgagtcgtacagttcctccttga

SEQ ID NO: 112576 - DNA, 25 bp, SARS Virus
gtgagtcgtaccattcctccttgaa

SEQ ID NO: 112577 - DNA, 25 bp, SARS Virus
tgagtcgtaccgatcctccttgaat

SEQ ID NO: 112578 - DNA, 25 bp, SARS Virus
gagtcgtaccgtacctccttgaatc

SEQ ID NO: 112579 - DNA, 25 bp, SARS Virus
agtcgtaccgttactccttgaatct

SEQ ID NO: 112580 - DNA, 25 bp, SARS Virus
gtcgtaccgttcatccttgaatcta

SEQ ID NO: 112581 - DNA, 25 bp, SARS Virus
tcgtaccgttccaccttgaatctaa

SEQ ID NO: 112582 - DNA, 25 bp, SARS Virus
cgtaccgttcctacttgaatctaag

SEQ ID NO: 112583 - DNA, 25 bp, SARS Virus
gtaccgttcctcattgaatctaagg

SEQ ID NO: 112584 - DNA, 25 bp, SARS Virus
taccgttcctccatgaatctaaggg

SEQ ID NO: 112585 - DNA, 25 bp, SARS Virus
accgttcctcctagaatctaaggga

SEQ ID NO: 112586 - DNA, 25 bp, SARS Virus
ccgttcctccttaaatctaagggag

SEQ ID NO: 112587 - DNA, 25 bp, SARS Virus
cgttcctccttgaatctaagggagc

SEQ ID NO: 112588 - DNA, 25 bp, SARS Virus
gttcctccttgaatctaagggagct

SEQ ID NO: 112589 - DNA, 25 bp, SARS Virus
ttcctccttgaaactaagggagctc

SEQ ID NO: 112590 - DNA, 25 bp, SARS Virus
tcctccttgaatataagggagctcc

SEQ ID NO: 112591 - DNA, 25 bp, SARS Virus
cctccttgaatcaaagggagctccg

SEQ ID NO: 112592 - DNA, 25 bp, SARS Virus
ctccttgaatctaagggagctccgg

SEQ ID NO: 112593 - DNA, 25 bp, SARS Virus
tccttgaatctaagggagctccggt

SEQ ID NO: 112594 - DNA, 25 bp, SARS Virus
ccttgaatctaaaggagctccggtc

SEQ ID NO: 112595 - DNA, 25 bp, SARS Virus
cttgaatctaagagagctccggtcc

SEQ ID NO: 112596 - DNA, 25 bp, SARS Virus
ttgaatctaaggaagctccggtccc

SEQ ID NO: 112597 - DNA, 25 bp, SARS Virus
tgaatctaagggagctccggtcccg

SEQ ID NO: 112598 - DNA, 25 bp, SARS Virus
gaatctaagggaactccggtcccgc

SEQ ID NO: 112599 - DNA, 25 bp, SARS Virus
aatctaagggagatccggtcccgca

SEQ ID NO: 112600 - DNA, 25 bp, SARS Virus
atctaagggagcaccggtcccgcaa

SEQ ID NO: 112601 - DNA, 25 bp, SARS Virus
tctaagggagctacggtcccgcaag

SEQ ID NO: 112602 - DNA, 25 bp, SARS Virus
ctaagggagctcaggtcccgcaagg

SEQ ID NO: 112603 - DNA, 25 bp, SARS Virus
taagggagctccagtcccgcaaggt

SEQ ID NO: 112604 - DNA, 25 bp, SARS Virus
aagggagctccgatcccgcaaggtt

SEQ ID NO: 112605 - DNA, 25 bp, SARS Virus
agggagctccggacccgcaaggtta

SEQ ID NO: 112606 - DNA, 25 bp, SARS Virus
gggagctccggtaccgcaaggttag

SEQ ID NO: 112607 - DNA, 25 bp, SARS Virus
ggagctccggtcacgcaaggttagt

SEQ ID NO: 112608 - DNA, 25 bp, SARS Virus
gagctccggtccagcaaggttagtt

SEQ ID NO: 112609 - DNA, 25 bp, SARS Virus
agctccggtcccacaaggttagttg

SEQ ID NO: 112610 - DNA, 25 bp, SARS Virus
gctccggtcccgaaaggttagttgt

SEQ ID NO: 112611 - DNA, 25 bp, SARS Virus
ctccggtcccgcaaggttagttgtg

SEQ ID NO: 112612 - DNA, 25 bp, SARS Virus
tccggtcccgcaaggttagttgtgg

SEQ ID NO: 112613 - DNA, 25 bp, SARS Virus
ccggtcccgcaaagttagttgtggt

SEQ ID NO: 112614 - DNA, 25 bp, SARS Virus
cggtcccgcaagattagttgtggtt

SEQ ID NO: 112615 - DNA, 25 bp, SARS Virus
ggtcccgcaaggatagttgtggtta

SEQ ID NO: 112616 - DNA, 25 bp, SARS Virus
gtcccgcaaggtaagttgtggttat

SEQ ID NO: 112617 - DNA, 25 bp, SARS Virus
tcccgcaaggttagttgtggttatc

SEQ ID NO: 112618 - DNA, 25 bp, SARS Virus
cccgcaaggttaattgtggttatca

SEQ ID NO: 112619 - DNA, 25 bp, SARS Virus
ccgcaaggttagatgtggttatcac

SEQ ID NO: 112620 - DNA, 25 bp, SARS Virus
cgcaaggttagtagtggttatcacc

SEQ ID NO: 112621 - DNA, 25 bp, SARS Virus
gcaaggttagttatggttatcacca

SEQ ID NO: 112622 - DNA, 25 bp, SARS Virus
caaggttagttgaggttatcaccag

SEQ ID NO: 112623 - DNA, 25 bp, SARS Virus
aaggttagttgtagttatcaccagg

SEQ ID NO: 112624 - DNA, 25 bp, SARS Virus
aggttagttgtgattatcaccaggt

SEQ ID NO: 112625 - DNA, 25 bp, SARS Virus
ggttagttgtggatatcaccaggtc

SEQ ID NO: 112626 - DNA, 25 bp, SARS Virus
gttagttgtggtaatcaccaggtct

SEQ ID NO: 112627 - DNA, 25 bp, SARS Virus
ttagttgtggttatcaccaggtcta

SEQ ID NO: 112628 - DNA, 25 bp, SARS Virus
tagttgtggttaacaccaggtctac

SEQ ID NO: 112629 - DNA, 25 bp, SARS Virus
agttgtggttataaccaggtctact

SEQ ID NO: 112630 - DNA, 25 bp, SARS Virus
gttgtggttatcaccaggtctactg

SEQ ID NO: 112631 - DNA, 25 bp, SARS Virus
ttgtggttatcaacaggtctactgg

SEQ ID NO: 112632 - DNA, 25 bp, SARS Virus
tgtggttatcacaaggtctactggt

SEQ ID NO: 112633 - DNA, 25 bp, SARS Virus
gtggttatcaccaggtctactggtt

SEQ ID NO: 112634 - DNA, 25 bp, SARS Virus
tggttatcaccaagtctactggttt

SEQ ID NO: 112635 - DNA, 25 bp, SARS Virus
ggttatcaccagatctactggttta

SEQ ID NO: 112636 - DNA, 25 bp, SARS Virus
gttatcaccaggactactggtttaa

SEQ ID NO: 112637 - DNA, 25 bp, SARS Virus
ttatcaccaggtatactggtttaac

SEQ ID NO: 112638 - DNA, 25 bp, SARS Virus
tatcaccaggtcaactggtttaacc

SEQ ID NO: 112639 - DNA, 25 bp, SARS Virus
atcaccaggtctactggtttaaccg

SEQ ID NO: 112640 - DNA, 25 bp, SARS Virus
tcaccaggtctaatggtttaaccga

SEQ ID NO: 112641 - DNA, 25 bp, SARS Virus
caccaggtctacaggtttaaccgat

SEQ ID NO: 112642 - DNA, 25 bp, SARS Virus
accaggtctactagtttaaccgatg

SEQ ID NO: 112643 - DNA, 25 bp, SARS Virus
ccaggtctactgatttaaccgatga

SEQ ID NO: 112644 - DNA, 25 bp, SARS Virus
caggtctactggattaaccgatgat

SEQ ID NO: 112645 - DNA, 25 bp, SARS Virus
aggtctactggtataaccgatgatg

SEQ ID NO: 112646 - DNA, 25 bp, SARS Virus
ggtctactggttaaaccgatgatgg

SEQ ID NO: 112647 - DNA, 25 bp, SARS Virus
gtctactggtttaaccgatgatggc

SEQ ID NO: 112648 - DNA, 25 bp, SARS Virus
tctactggtttaaccgatgatggct

SEQ ID NO: 112649 - DNA, 25 bp, SARS Virus
ctactggtttaaacgatgatggctt

SEQ ID NO: 112650 - DNA, 25 bp, SARS Virus
tactggtttaacagatgatggcttc

SEQ ID NO: 112651 - DNA, 25 bp, SARS Virus
actggtttaaccaatgatggcttct

SEQ ID NO: 112652 - DNA, 25 bp, SARS Virus
ctggtttaaccgatgatggcttctc

SEQ ID NO: 112653 - DNA, 25 bp, SARS Virus
tggtttaaccgaagatggcttctcg

SEQ ID NO: 112654 - DNA, 25 bp, SARS Virus
ggtttaaccgataatggcttctcga

SEQ ID NO: 112655 - DNA, 25 bp, SARS Virus
gtttaaccgatgatggcttctcgat

SEQ ID NO: 112656 - DNA, 25 bp, SARS Virus
tttaaccgatgaaggcttctcgatg

SEQ ID NO: 112657 - DNA, 25 bp, SARS Virus
ttaaccgatgatagcttctcgatgg

SEQ ID NO: 112658 - DNA, 25 bp, SARS Virus
taaccgatgatgacttctcgatggg

SEQ ID NO: 112659 - DNA, 25 bp, SARS Virus
aaccgatgatggattctcgatgggc

SEQ ID NO: 112660 - DNA, 25 bp, SARS Virus
accgatgatggcatctcgatgggct

SEQ ID NO: 112661 - DNA, 25 bp, SARS Virus
ccgatgatggctactcgatgggctg

SEQ ID NO: 112662 - DNA, 25 bp, SARS Virus
cgatgatggcttatcgatgggctgc

SEQ ID NO: 112663 - DNA, 25 bp, SARS Virus
gatgatggcttcacgatgggctgct

SEQ ID NO: 112664 - DNA, 25 bp, SARS Virus
atgatggcttctagatgggctgctc

SEQ ID NO: 112665 - DNA, 25 bp, SARS Virus
tgatggcttctcaatgggctgctca

SEQ ID NO: 112666 - DNA, 25 bp, SARS Virus
gatggcttctcgatgggctgctcaa

SEQ ID NO: 112667 - DNA, 25 bp, SARS Virus
atggcttctcgaagggctgctcaag

SEQ ID NO: 112668 - DNA, 25 bp, SARS Virus
tggcttctcgataggctgctcaagc

SEQ ID NO: 112669 - DNA, 25 bp, SARS Virus
ggcttctcgatgagctgctcaagca

SEQ ID NO: 112670 - DNA, 25 bp, SARS Virus
gcttctcgatggactgctcaagcac

SEQ ID NO: 112671 - DNA, 25 bp, SARS Virus
cttctcgatgggatgctcaagcacc

SEQ ID NO: 112672 - DNA, 25 bp, SARS Virus
ttctcgatgggcagctcaagcacca

SEQ ID NO: 112673 - DNA, 25 bp, SARS Virus
tctcgatgggctactcaagcaccac

SEQ ID NO: 112674 - DNA, 25 bp, SARS Virus
ctcgatgggctgatcaagcaccacc

SEQ ID NO: 112675 - DNA, 25 bp, SARS Virus
tcgatgggctgcacaagcaccacca

SEQ ID NO: 112676 - DNA, 25 bp, SARS Virus
cgatgggctgctaaagcaccaccac

SEQ ID NO: 112677 - DNA, 25 bp, SARS Virus
gatgggctgctcaagcaccaccact

SEQ ID NO: 112678 - DNA, 25 bp, SARS Virus
atgggctgctcaagcaccaccactg

SEQ ID NO: 112679 - DNA, 25 bp, SARS Virus
tgggctgctcaaacaccaccactgc

SEQ ID NO: 112680 - DNA, 25 bp, SARS Virus
gggctgctcaagaaccaccactgcc

SEQ ID NO: 112681 - DNA, 25 bp, SARS Virus
ggctgctcaagcaccaccactgccg

SEQ ID NO: 112682 - DNA, 25 bp, SARS Virus
gctgctcaagcaacaccactgccgt

SEQ ID NO: 112683 - DNA, 25 bp, SARS Virus
ctgctcaagcacaaccactgccgtt

SEQ ID NO: 112684 - DNA, 25 bp, SARS Virus
tgctcaagcaccaccactgccgttt

SEQ ID NO: 112685 - DNA, 25 bp, SARS Virus
gctcaagcaccaacactgccgtttt

SEQ ID NO: 112686 - DNA, 25 bp, SARS Virus
ctcaagcaccacaactgccgtttta

SEQ ID NO: 112687 - DNA, 25 bp, SARS Virus
tcaagcaccaccactgccgttttac

SEQ ID NO: 112688 - DNA, 25 bp, SARS Virus
caagcaccaccaatgccgttttact

SEQ ID NO: 112689 - DNA, 25 bp, SARS Virus
aagcaccaccacagccgttttactt

SEQ ID NO: 112690 - DNA, 25 bp, SARS Virus
agcaccaccactaccgttttacttt

SEQ ID NO: 112691 - DNA, 25 bp, SARS Virus
gcaccaccactgacgttttactttc

SEQ ID NO: 112692 - DNA, 25 bp, SARS Virus
caccaccactgcagttttactttct

SEQ ID NO: 112693 - DNA, 25 bp, SARS Virus
accaccactgccattttactttctc

SEQ ID NO: 112694 - DNA, 25 bp, SARS Virus
ccaccactgccgatttactttctcg

SEQ ID NO: 112695 - DNA, 25 bp, SARS Virus
caccactgccgtattactttctcga

SEQ ID NO: 112696 - DNA, 25 bp, SARS Virus
accactgccgttatactttctcgag

SEQ ID NO: 112697 - DNA, 25 bp, SARS Virus
ccactgccgtttaactttctcgagt

SEQ ID NO: 112698 - DNA, 25 bp, SARS Virus
cactgccgttttactttctcgagtc

SEQ ID NO: 112699 - DNA, 25 bp, SARS Virus
actgccgttttaatttctcgagtcg

SEQ ID NO: 112700 - DNA, 25 bp, SARS Virus
ctgccgttttacattctcgagtcgg

SEQ ID NO: 112701 - DNA, 25 bp, SARS Virus
tgccgttttactatctcgagtcggg

SEQ ID NO: 112702 - DNA, 25 bp, SARS Virus
gccgttttacttactcgagtcgggg

SEQ ID NO: 112703 - DNA, 25 bp, SARS Virus
ccgttttactttatcgagtcggggt

SEQ ID NO: 112704 - DNA, 25 bp, SARS Virus
cgttttactttcacgagtcggggtc

SEQ ID NO: 112705 - DNA, 25 bp, SARS Virus
gttttactttctagagtcggggtct

SEQ ID NO: 112706 - DNA, 25 bp, SARS Virus
ttttactttctcaagtcggggtcta

SEQ ID NO: 112707 - DNA, 25 bp, SARS Virus
tttactttctcgagtcggggtctac

SEQ ID NO: 112708 - DNA, 25 bp, SARS Virus
ttactttctcgaatcggggtctacc

SEQ ID NO: 112709 - DNA, 25 bp, SARS Virus
tactttctcgagacggggtctacca

SEQ ID NO: 112710 - DNA, 25 bp, SARS Virus
actttctcgagtaggggtctaccat

SEQ ID NO: 112711 - DNA, 25 bp, SARS Virus
ctttctcgagtcagggtctaccatg

SEQ ID NO: 112712 - DNA, 25 bp, SARS Virus
tttctcgagtcgaggtctaccatga

SEQ ID NO: 112713 - DNA, 25 bp, SARS Virus
ttctcgagtcggagtctaccatgaa

SEQ ID NO: 112714 - DNA, 25 bp, SARS Virus
tctcgagtcgggatctaccatgaag

SEQ ID NO: 112715 - DNA, 25 bp, SARS Virus
ctcgagtcggggactaccatgaaga

SEQ ID NO: 112716 - DNA, 25 bp, SARS Virus
tcgagtcggggtataccatgaagat

SEQ ID NO: 112717 - DNA, 25 bp, SARS Virus
cgagtcggggtcaaccatgaagata

SEQ ID NO: 112718 - DNA, 25 bp, SARS Virus
gagtcggggtctaccatgaagataa

SEQ ID NO: 112719 - DNA, 25 bp, SARS Virus
agtcggggtctaacatgaagataat

SEQ ID NO: 112720 - DNA, 25 bp, SARS Virus
gtcggggtctacaatgaagataatg

SEQ ID NO: 112721 - DNA, 25 bp, SARS Virus
tcggggtctaccatgaagataatgg

SEQ ID NO: 112722 - DNA, 25 bp, SARS Virus
cggggtctaccaagaagataatgga

SEQ ID NO: 112723 - DNA, 25 bp, SARS Virus
ggggtctaccataaagataatggat

SEQ ID NO: 112724 - DNA, 25 bp, SARS Virus
gggtctaccatgaagataatggatc

SEQ ID NO: 112725 - DNA, 25 bp, SARS Virus
ggtctaccatgaagataatggatcc

SEQ ID NO: 112726 - DNA, 25 bp, SARS Virus
gtctaccatgaaaataatggatcct

SEQ ID NO: 112727 - DNA, 25 bp, SARS Virus
tctaccatgaagataatggatcctt

SEQ ID NO: 112728 - DNA, 25 bp, SARS Virus
ctaccatgaagaaaatggatccttg

SEQ ID NO: 112729 - DNA, 25 bp, SARS Virus
taccatgaagataatggatccttga

SEQ ID NO: 112730 - DNA, 25 bp, SARS Virus
accatgaagataatggatccttgac

SEQ ID NO: 112731 - DNA, 25 bp, SARS Virus
ccatgaagataaaggatccttgacc

SEQ ID NO: 112732 - DNA, 25 bp, SARS Virus
catgaagataatagatccttgaccg

SEQ ID NO: 112733 - DNA, 25 bp, SARS Virus
atgaagataatgaatccttgaccgg

SEQ ID NO: 112734 - DNA, 25 bp, SARS Virus
tgaagataatggatccttgaccggg

SEQ ID NO: 112735 - DNA, 25 bp, SARS Virus
gaagataatggaaccttgaccgggt

SEQ ID NO: 112736 - DNA, 25 bp, SARS Virus
aagataatggatacttgaccgggtc

SEQ ID NO: 112737 - DNA, 25 bp, SARS Virus
agataatggatcattgaccgggtct

SEQ ID NO: 112738 - DNA, 25 bp, SARS Virus
gataatggatccatgaccgggtctt

SEQ ID NO: 112739 - DNA, 25 bp, SARS Virus
ataatggatcctagaccgggtcttc

SEQ ID NO: 112740 - DNA, 25 bp, SARS Virus
taatggatccttaaccgggtcttcg

SEQ ID NO: 112741 - DNA, 25 bp, SARS Virus
aatggatccttgaccgggtcttcga

SEQ ID NO: 112742 - DNA, 25 bp, SARS Virus
atggatccttgaacgggtcttcgaa

SEQ ID NO: 112743 - DNA, 25 bp, SARS Virus
tggatccttgacagggtcttcgaag

SEQ ID NO: 112744 - DNA, 25 bp, SARS Virus
ggatccttgaccaggtcttcgaagt

SEQ ID NO: 112745 - DNA, 25 bp, SARS Virus
gatccttgaccgagtcttcgaagtg

SEQ ID NO: 112746 - DNA, 25 bp, SARS Virus
atccttgaccggatcttcgaagtga

SEQ ID NO: 112747 - DNA, 25 bp, SARS Virus
tccttgaccgggacttcgaagtgaa

SEQ ID NO: 112748 - DNA, 25 bp, SARS Virus
ccttgaccgggtattcgaagtgaag

SEQ ID NO: 112749 - DNA, 25 bp, SARS Virus
cttgaccgggtcatcgaagtgaagg

SEQ ID NO: 112750 - DNA, 25 bp, SARS Virus
ttgaccgggtctacgaagtgaaggg

SEQ ID NO: 112751 - DNA, 25 bp, SARS Virus
tgaccgggtcttagaagtgaaggga

SEQ ID NO: 112752 - DNA, 25 bp, SARS Virus
gaccgggtcttcaaagtgaagggat

SEQ ID NO: 112753 - DNA, 25 bp, SARS Virus
accgggtcttcgaagtgaagggatg

SEQ ID NO: 112754 - DNA, 25 bp, SARS Virus
ccgggtcttcgaagtgaagggatgc

SEQ ID NO: 112755 - DNA, 25 bp, SARS Virus
cgggtcttcgaaatgaagggatgcc

SEQ ID NO: 112756 - DNA, 25 bp, SARS Virus
gggtcttcgaagagaagggatgccg

SEQ ID NO: 112757 - DNA, 25 bp, SARS Virus
ggtcttcgaagtaaagggatgccgc

SEQ ID NO: 112758 - DNA, 25 bp, SARS Virus
gtcttcgaagtgaagggatgccgcg

SEQ ID NO: 112759 - DNA, 25 bp, SARS Virus
tcttcgaagtgaagggatgccgcga

SEQ ID NO: 112760 - DNA, 25 bp, SARS Virus
cttcgaagtgaaaggatgccgcgat

SEQ ID NO: 112761 - DNA, 25 bp, SARS Virus
ttcgaagtgaagagatgccgcgatt

SEQ ID NO: 112762 - DNA, 25 bp, SARS Virus
tcgaagtgaaggaatgccgcgattg

SEQ ID NO: 112763 - DNA, 25 bp, SARS Virus
cgaagtgaagggatgccgcgattgt

SEQ ID NO: 112764 - DNA, 25 bp, SARS Virus
gaagtgaagggaagccgcgattgtt

SEQ ID NO: 112765 - DNA, 25 bp, SARS Virus
aagtgaagggataccgcgattgttt

SEQ ID NO: 112766 - DNA, 25 bp, SARS Virus
agtgaagggatgacgcgattgtttc

SEQ ID NO: 112767 - DNA, 25 bp, SARS Virus
gtgaagggatgcagcgattgtttct

SEQ ID NO: 112768 - DNA, 25 bp, SARS Virus
tgaagggatgccacgattgtttctt

SEQ ID NO: 112769 - DNA, 25 bp, SARS Virus
gaagggatgccgagattgtttcttc

SEQ ID NO: 112770 - DNA, 25 bp, SARS Virus
aagggatgccgcaattgtttcttcc

SEQ ID NO: 112771 - DNA, 25 bp, SARS Virus
agggatgccgcgattgtttcttccg

SEQ ID NO: 112772 - DNA, 25 bp, SARS Virus
gggatgccgcgaatgtttcttccgt

SEQ ID NO: 112773 - DNA, 25 bp, SARS Virus
ggatgccgcgatagtttcttccgta

SEQ ID NO: 112774 - DNA, 25 bp, SARS Virus
gatgccgcgattatttcttccgtag

SEQ ID NO: 112775 - DNA, 25 bp, SARS Virus
atgccgcgattgattcttccgtagc

SEQ ID NO: 112776 - DNA, 25 bp, SARS Virus
tgccgcgattgtatcttccgtagca

SEQ ID NO: 112777 - DNA, 25 bp, SARS Virus
gccgcgattgttacttccgtagcat

SEQ ID NO: 112778 - DNA, 25 bp, SARS Virus
ccgcgattgtttattccgtagcata

SEQ ID NO: 112779 - DNA, 25 bp, SARS Virus
cgcgattgtttcatccgtagcatac

SEQ ID NO: 112780 - DNA, 25 bp, SARS Virus
gcgattgtttctaccgtagcatacc

SEQ ID NO: 112781 - DNA, 25 bp, SARS Virus
cgattgtttcttacgtagcataccc

SEQ ID NO: 112782 - DNA, 25 bp, SARS Virus
gattgtttcttcagtagcataccca

SEQ ID NO: 112783 - DNA, 25 bp, SARS Virus
attgtttcttccatagcatacccaa

SEQ ID NO: 112784 - DNA, 25 bp, SARS Virus
ttgtttcttccgaagcatacccaac

SEQ ID NO: 112785 - DNA, 25 bp, SARS Virus
tgtttcttccgtagcatacccaacg

SEQ ID NO: 112786 - DNA, 25 bp, SARS Virus
gtttcttccgtaacatacccaacgt

SEQ ID NO: 112787 - DNA, 25 bp, SARS Virus
tttcttccgtagaatacccaacgtt

SEQ ID NO: 112788 - DNA, 25 bp, SARS Virus
ttcttccgtagcatacccaacgttg

SEQ ID NO: 112789 - DNA, 25 bp, SARS Virus
tcttccgtagcaaacccaacgttga

SEQ ID NO: 112790 - DNA, 25 bp, SARS Virus
cttccgtagcatacccaacgttgac

SEQ ID NO: 112791 - DNA, 25 bp, SARS Virus
ttccgtagcataaccaacgttgact

SEQ ID NO: 112792 - DNA, 25 bp, SARS Virus
tccgtagcatacacaacgttgactc

SEQ ID NO: 112793 - DNA, 25 bp, SARS Virus
ccgtagcataccaaacgttgactcc

SEQ ID NO: 112794 - DNA, 25 bp, SARS Virus
cgtagcatacccaacgttgactccc

SEQ ID NO: 112795 - DNA, 25 bp, SARS Virus
gtagcatacccaacgttgactccct

SEQ ID NO: 112796 - DNA, 25 bp, SARS Virus
tagcatacccaaagttgactccctc

SEQ ID NO: 112797 - DNA, 25 bp, SARS Virus
agcatacccaacattgactccctcg

SEQ ID NO: 112798 - DNA, 25 bp, SARS Virus
gcatacccaacgatgactccctcgg

SEQ ID NO: 112799 - DNA, 25 bp, SARS Virus
catacccaacgtagactccctcgga

SEQ ID NO: 112800 - DNA, 25 bp, SARS Virus
atacccaacgttaactccctcggaa

SEQ ID NO: 112801 - DNA, 25 bp, SARS Virus
tacccaacgttgactccctcggaac

SEQ ID NO: 112802 - DNA, 25 bp, SARS Virus
acccaacgttgaatccctcggaact

SEQ ID NO: 112803 - DNA, 25 bp, SARS Virus
cccaacgttgacaccctcggaactt

SEQ ID NO: 112804 - DNA, 25 bp, SARS Virus
ccaacgttgactacctcggaactta

SEQ ID NO: 112805 - DNA, 25 bp, SARS Virus
caacgttgactcactcggaacttat

SEQ ID NO: 112806 - DNA, 25 bp, SARS Virus
aacgttgactccatcggaacttatg

SEQ ID NO: 112807 - DNA, 25 bp, SARS Virus
acgttgactcccacggaacttatgt

SEQ ID NO: 112808 - DNA, 25 bp, SARS Virus
cgttgactccctaggaacttatgtg

SEQ ID NO: 112809 - DNA, 25 bp, SARS Virus
gttgactccctcagaacttatgtgg

SEQ ID NO: 112810 - DNA, 25 bp, SARS Virus
ttgactccctcgaaacttatgtggg

SEQ ID NO: 112811 - DNA, 25 bp, SARS Virus
tgactccctcggaacttatgtgggt

SEQ ID NO: 112812 - DNA, 25 bp, SARS Virus
gactccctcggaacttatgtgggtt

SEQ ID NO: 112813 - DNA, 25 bp, SARS Virus
actccctcggaaattatgtgggttt

SEQ ID NO: 112814 - DNA, 25 bp, SARS Virus
ctccctcggaacatatgtgggtttc

SEQ ID NO: 112815 - DNA, 25 bp, SARS Virus
tccctcggaactaatgtgggtttct

SEQ ID NO: 112816 - DNA, 25 bp, SARS Virus
ccctcggaacttatgtgggtttctg

SEQ ID NO: 112817 - DNA, 25 bp, SARS Virus
cctcggaacttaagtgggtttctgg

SEQ ID NO: 112818 - DNA, 25 bp, SARS Virus
ctcggaacttatatgggtttctggt

SEQ ID NO: 112819 - DNA, 25 bp, SARS Virus
tcggaacttatgagggtttctggtg

SEQ ID NO: 112820 - DNA, 25 bp, SARS Virus
cggaacttatgtaggtttctggtgt

SEQ ID NO: 112821 - DNA, 25 bp, SARS Virus
ggaacttatgtgagtttctggtgta

SEQ ID NO: 112822 - DNA, 25 bp, SARS Virus
gaacttatgtggatttctggtgtaa

SEQ ID NO: 112823 - DNA, 25 bp, SARS Virus
aacttatgtgggattctggtgtaac

SEQ ID NO: 112824 - DNA, 25 bp, SARS Virus
acttatgtgggtatctggtgtaacc

SEQ ID NO: 112825 - DNA, 25 bp, SARS Virus
cttatgtgggttactggtgtaaccg

SEQ ID NO: 112826 - DNA, 25 bp, SARS Virus
ttatgtgggtttatggtgtaaccgt

SEQ ID NO: 112827 - DNA, 25 bp, SARS Virus
tatgtgggtttcaggtgtaaccgtg

SEQ ID NO: 112828 - DNA, 25 bp, SARS Virus
atgtgggtttctagtgtaaccgtgg

SEQ ID NO: 112829 - DNA, 25 bp, SARS Virus
tgtgggtttctgatgtaaccgtggg

SEQ ID NO: 112830 - DNA, 25 bp, SARS Virus
gtgggtttctggagtaaccgtgggc

SEQ ID NO: 112831 - DNA, 25 bp, SARS Virus
tgggtttctggtataaccgtgggcg

SEQ ID NO: 112832 - DNA, 25 bp, SARS Virus
gggtttctggtgaaaccgtgggcgt

SEQ ID NO: 112833 - DNA, 25 bp, SARS Virus
ggtttctggtgtaaccgtgggcgtt

SEQ ID NO: 112834 - DNA, 25 bp, SARS Virus
gtttctggtgtaaccgtgggcgtta

SEQ ID NO: 112835 - DNA, 25 bp, SARS Virus
tttctggtgtaaacgtgggcgttag

SEQ ID NO: 112836 - DNA, 25 bp, SARS Virus
ttctggtgtaacagtgggcgttagg

SEQ ID NO: 112837 - DNA, 25 bp, SARS Virus
tctggtgtaaccatgggcgttagga

SEQ ID NO: 112838 - DNA, 25 bp, SARS Virus
ctggtgtaaccgagggcgttaggat

SEQ ID NO: 112839 - DNA, 25 bp, SARS Virus
tggtgtaaccgtaggcgttaggatt

SEQ ID NO: 112840 - DNA, 25 bp, SARS Virus
ggtgtaaccgtgagcgttaggatta

SEQ ID NO: 112841 - DNA, 25 bp, SARS Virus
gtgtaaccgtggacgttaggattat

SEQ ID NO: 112842 - DNA, 25 bp, SARS Virus
tgtaaccgtgggagttaggattatt

SEQ ID NO: 112843 - DNA, 25 bp, SARS Virus
gtaaccgtgggcattaggattattg

SEQ ID NO: 112844 - DNA, 25 bp, SARS Virus
taaccgtgggcgataggattattgt

SEQ ID NO: 112845 - DNA, 25 bp, SARS Virus
aaccgtgggcgtaaggattattgtt

SEQ ID NO: 112846 - DNA, 25 bp, SARS Virus
accgtgggcgttaggattattgtta

SEQ ID NO: 112847 - DNA, 25 bp, SARS Virus
ccgtgggcgttaagattattgttac

SEQ ID NO: 112848 - DNA, 25 bp, SARS Virus
cgtgggcgttagaattattgttacg

SEQ ID NO: 112849 - DNA, 25 bp, SARS Virus
gtgggcgttaggattattgttacga

SEQ ID NO: 112850 - DNA, 25 bp, SARS Virus
tgggcgttaggaatattgttacgac

SEQ ID NO: 112851 - DNA, 25 bp, SARS Virus
gggcgttaggataattgttacgacg

SEQ ID NO: 112852 - DNA, 25 bp, SARS Virus
ggcgttaggattattgttacgacgg

SEQ ID NO: 112853 - DNA, 25 bp, SARS Virus
gcgttaggattaatgttacgacggt

SEQ ID NO: 112854 - DNA, 25 bp, SARS Virus
cgttaggattatagttacgacggtg

SEQ ID NO: 112855 - DNA, 25 bp, SARS Virus
gttaggattattattacgacggtgg

SEQ ID NO: 112856 - DNA, 25 bp, SARS Virus
ttaggattattgatacgacggtggc

SEQ ID NO: 112857 - DNA, 25 bp, SARS Virus
ctgcatgaacaacaaaatttatttg

SEQ ID NO: 112858 - DNA, 25 bp, SARS Virus
tgcatgaacaaccaaatttatttgc

SEQ ID NO: 112859 - DNA, 25 bp, SARS Virus
gcatgaacaacacaatttatttgct

SEQ ID NO: 112860 - DNA, 25 bp, SARS Virus
catgaacaacaacatttatttgctt

SEQ ID NO: 112861 - DNA, 25 bp, SARS Virus
atgaacaacaaactttatttgcttg

SEQ ID NO: 112862 - DNA, 25 bp, SARS Virus
tgaacaacaaaacttatttgcttgt

SEQ ID NO: 112863 - DNA, 25 bp, SARS Virus
gaacaacaaaatctatttgcttgtt

SEQ ID NO: 112864 - DNA, 25 bp, SARS Virus
aacaacaaaattcatttgcttgttt

SEQ ID NO: 112865 - DNA, 25 bp, SARS Virus
acaacaaaatttctttgcttgttta

SEQ ID NO: 112866 - DNA, 25 bp, SARS Virus
caacaaaatttacttgcttgtttaa

SEQ ID NO: 112867 - DNA, 25 bp, SARS Virus
aacaaaatttatctgcttgtttaat

SEQ ID NO: 112868 - DNA, 25 bp, SARS Virus
acaaaatttattcgcttgtttaatt

SEQ ID NO: 112869 - DNA, 25 bp, SARS Virus
caaaatttatttccttgtttaattt

SEQ ID NO: 112870 - DNA, 25 bp, SARS Virus
aaaatttatttgcttgtttaatttt

SEQ ID NO: 112871 - DNA, 25 bp, SARS Virus
aaatttatttgcctgtttaatttta

SEQ ID NO: 112872 - DNA, 25 bp, SARS Virus
aatttatttgctcgtttaattttac

SEQ ID NO: 112873 - DNA, 25 bp, SARS Virus
atttatttgcttctttaattttaca

SEQ ID NO: 112874 - DNA, 25 bp, SARS Virus
tttatttgcttgcttaattttacag

SEQ ID NO: 112875 - DNA, 25 bp, SARS Virus
ttatttgcttgtctaattttacaga

SEQ ID NO: 112876 - DNA, 25 bp, SARS Virus
tatttgcttgttcaattttacagac

SEQ ID NO: 112877 - DNA, 25 bp, SARS Virus
atttgcttgtttcattttacagact

SEQ ID NO: 112878 - DNA, 25 bp, SARS Virus
tttgcttgtttacttttacagacta

SEQ ID NO: 112879 - DNA, 25 bp, SARS Virus
ttgcttgtttaactttacagactat

SEQ ID NO: 112880 - DNA, 25 bp, SARS Virus
tgcttgtttaatcttacagactatt

SEQ ID NO: 112881 - DNA, 25 bp, SARS Virus
gcttgtttaattctacagactatta

SEQ ID NO: 112882 - DNA, 25 bp, SARS Virus
cttgtttaatttcacagactattac

SEQ ID NO: 112883 - DNA, 25 bp, SARS Virus
ttgtttaattttccagactattacc

SEQ ID NO: 112884 - DNA, 25 bp, SARS Virus
tgtttaattttacagactattacct

SEQ ID NO: 112885 - DNA, 25 bp, SARS Virus
gtttaattttaccgactattacctg

SEQ ID NO: 112886 - DNA, 25 bp, SARS Virus
tttaattttacacactattacctgg

SEQ ID NO: 112887 - DNA, 25 bp, SARS Virus
ttaattttacagcctattacctggg

SEQ ID NO: 112888 - DNA, 25 bp, SARS Virus
taattttacagactattacctgggg

SEQ ID NO: 112889 - DNA, 25 bp, SARS Virus
aattttacagaccattacctggggt

SEQ ID NO: 112890 - DNA, 25 bp, SARS Virus
attttacagactcttacctggggtt

SEQ ID NO: 112891 - DNA, 25 bp, SARS Virus
ttttacagactactacctggggtta

SEQ ID NO: 112892 - DNA, 25 bp, SARS Virus
tttacagactatcacctggggttag

SEQ ID NO: 112893 - DNA, 25 bp, SARS Virus
ttacagactattccctggggttagt

SEQ ID NO: 112894 - DNA, 25 bp, SARS Virus
tacagactattacctggggttagtt

SEQ ID NO: 112895 - DNA, 25 bp, SARS Virus
acagactattacctggggttagttt

SEQ ID NO: 112896 - DNA, 25 bp, SARS Virus
cagactattacccggggttagtttg

SEQ ID NO: 112897 - DNA, 25 bp, SARS Virus
agactattacctcgggttagtttgg

SEQ ID NO: 112898 - DNA, 25 bp, SARS Virus
gactattacctgcggttagtttggt

SEQ ID NO: 112899 - DNA, 25 bp, SARS Virus
actattacctggcgttagtttggtt

SEQ ID NO: 112900 - DNA, 25 bp, SARS Virus
ctattacctgggcttagtttggttg

SEQ ID NO: 112901 - DNA, 25 bp, SARS Virus
tattacctggggctagtttggttgc

SEQ ID NO: 112902 - DNA, 25 bp, SARS Virus
attacctggggtcagtttggttgca

SEQ ID NO: 112903 - DNA, 25 bp, SARS Virus
ttacctggggttcgtttggttgcat

SEQ ID NO: 112904 - DNA, 25 bp, SARS Virus
tacctggggttactttggttgcatc

SEQ ID NO: 112905 - DNA, 25 bp, SARS Virus
acctggggttagcttggttgcatca

SEQ ID NO: 112906 - DNA, 25 bp, SARS Virus
cctggggttagtctggttgcatcac

SEQ ID NO: 112907 - DNA, 25 bp, SARS Virus
ctggggttagttcggttgcatcacg

SEQ ID NO: 112908 - DNA, 25 bp, SARS Virus
tggggttagtttcgttgcatcacgg

SEQ ID NO: 112909 - DNA, 25 bp, SARS Virus
ggggttagtttgcttgcatcacggg

SEQ ID NO: 112910 - DNA, 25 bp, SARS Virus
gggttagtttggctgcatcacgggg

SEQ ID NO: 112911 - DNA, 25 bp, SARS Virus
ggttagtttggtcgcatcacggggg

SEQ ID NO: 112912 - DNA, 25 bp, SARS Virus
gttagtttggttccatcacgggggg

SEQ ID NO: 112913 - DNA, 25 bp, SARS Virus
ttagtttggttgcatcacggggggc

SEQ ID NO: 112914 - DNA, 25 bp, SARS Virus
tagtttggttgcctcacggggggcg

SEQ ID NO: 112915 - DNA, 25 bp, SARS Virus
agtttggttgcaccacggggggcgt

SEQ ID NO: 112916 - DNA, 25 bp, SARS Virus
gtttggttgcatcacggggggcgta

SEQ ID NO: 112917 - DNA, 25 bp, SARS Virus
tttggttgcatcccggggggcgtaa

SEQ ID NO: 112918 - DNA, 25 bp, SARS Virus
ttggttgcatcacggggggcgtaat

SEQ ID NO: 112919 - DNA, 25 bp, SARS Virus
tggttgcatcaccgggggcgtaatg

SEQ ID NO: 112920 - DNA, 25 bp, SARS Virus
ggttgcatcacgcggggcgtaatgt

SEQ ID NO: 112921 - DNA, 25 bp, SARS Virus
gttgcatcacggcgggcgtaatgta

SEQ ID NO: 112922 - DNA, 25 bp, SARS Virus
ttgcatcacgggcggcgtaatgtaa

SEQ ID NO: 112923 - DNA, 25 bp, SARS Virus
tgcatcacggggcgcgtaatgtaaa

SEQ ID NO: 112924 - DNA, 25 bp, SARS Virus
gcatcacgggggccgtaatgtaaac

SEQ ID NO: 112925 - DNA, 25 bp, SARS Virus
catcacggggggcgtaatgtaaacc

SEQ ID NO: 112926 - DNA, 25 bp, SARS Virus
atcacggggggcctaatgtaaacca

SEQ ID NO: 112927 - DNA, 25 bp, SARS Virus
tcacggggggcgcaatgtaaaccac

SEQ ID NO: 112928 - DNA, 25 bp, SARS Virus
cacggggggcgtcatgtaaaccacc

SEQ ID NO: 112929 - DNA, 25 bp, SARS Virus
acggggggcgtactgtaaaccacct

SEQ ID NO: 112930 - DNA, 25 bp, SARS Virus
cggggggcgtaacgtaaaccacctg

SEQ ID NO: 112931 - DNA, 25 bp, SARS Virus
ggggggcgtaatctaaaccacctgg

SEQ ID NO: 112932 - DNA, 25 bp, SARS Virus
gggggcgtaatgcaaaccacctggg

SEQ ID NO: 112933 - DNA, 25 bp, SARS Virus
ggggcgtaatgtcaaccacctgggt

SEQ ID NO: 112934 - DNA, 25 bp, SARS Virus
gggcgtaatgtacaccacctgggtg

SEQ ID NO: 112935 - DNA, 25 bp, SARS Virus
ggcgtaatgtaacccacctgggtgt

SEQ ID NO: 112936 - DNA, 25 bp, SARS Virus
gcgtaatgtaaaccacctgggtgtc

SEQ ID NO: 112937 - DNA, 25 bp, SARS Virus
cgtaatgtaaaccacctgggtgtct

SEQ ID NO: 112938 - DNA, 25 bp, SARS Virus
gtaatgtaaaccccctgggtgtcta

SEQ ID NO: 112939 - DNA, 25 bp, SARS Virus
taatgtaaaccacctgggtgtctaa

SEQ ID NO: 112940 - DNA, 25 bp, SARS Virus
aatgtaaaccacctgggtgtctaag

SEQ ID NO: 112941 - DNA, 25 bp, SARS Virus
atgtaaaccacccgggtgtctaagt

SEQ ID NO: 112942 - DNA, 25 bp, SARS Virus
tgtaaaccacctcggtgtctaagtt

SEQ ID NO: 112943 - DNA, 25 bp, SARS Virus
gtaaaccacctgcgtgtctaagttg

SEQ ID NO: 112944 - DNA, 25 bp, SARS Virus
taaaccacctggctgtctaagttga

SEQ ID NO: 112945 - DNA, 25 bp, SARS Virus
aaaccacctgggcgtctaagttgac

SEQ ID NO: 112946 - DNA, 25 bp, SARS Virus
aaccacctgggtctctaagttgact

SEQ ID NO: 112947 - DNA, 25 bp, SARS Virus
accacctgggtgcctaagttgactg

SEQ ID NO: 112948 - DNA, 25 bp, SARS Virus
ccacctgggtgtctaagttgactgt

SEQ ID NO: 112949 - DNA, 25 bp, SARS Virus
cacctgggtgtccaagttgactgtt

SEQ ID NO: 112950 - DNA, 25 bp, SARS Virus
acctgggtgtctcagttgactgtta

SEQ ID NO: 112951 - DNA, 25 bp, SARS Virus
cctgggtgtctacgttgactgttat

SEQ ID NO: 112952 - DNA, 25 bp, SARS Virus
ctgggtgtctaacttgactgttatt

SEQ ID NO: 112953 - DNA, 25 bp, SARS Virus
tgggtgtctaagctgactgttattg

SEQ ID NO: 112954 - DNA, 25 bp, SARS Virus
gggtgtctaagtcgactgttattgg

SEQ ID NO: 112955 - DNA, 25 bp, SARS Virus
ggtgtctaagttcactgttattggt

SEQ ID NO: 112956 - DNA, 25 bp, SARS Virus
gtgtctaagttgcctgttattggtc

SEQ ID NO: 112957 - DNA, 25 bp, SARS Virus
tgtctaagttgactgttattggtct

SEQ ID NO: 112958 - DNA, 25 bp, SARS Virus
gtctaagttgaccgttattggtctt

SEQ ID NO: 112959 - DNA, 25 bp, SARS Virus
tctaagttgactcttattggtctta

SEQ ID NO: 112960 - DNA, 25 bp, SARS Virus
ctaagttgactgctattggtcttac

SEQ ID NO: 112961 - DNA, 25 bp, SARS Virus
taagttgactgtcattggtcttacc

SEQ ID NO: 112962 - DNA, 25 bp, SARS Virus
aagttgactgttcttggtcttacct

SEQ ID NO: 112963 - DNA, 25 bp, SARS Virus
agttgactgttactggtcttacctc

SEQ ID NO: 112964 - DNA, 25 bp, SARS Virus
gttgactgttatcggtcttacctcc

SEQ ID NO: 112965 - DNA, 25 bp, SARS Virus
ttgactgttattcgtcttacctcct

SEQ ID NO: 112966 - DNA, 25 bp, SARS Virus
tgactgttattgctcttacctcctg

SEQ ID NO: 112967 - DNA, 25 bp, SARS Virus
gactgttattggccttacctcctgc

SEQ ID NO: 112968 - DNA, 25 bp, SARS Virus
actgttattggtcttacctcctgcg

SEQ ID NO: 112969 - DNA, 25 bp, SARS Virus
ctgttattggtcctacctcctgcgt

SEQ ID NO: 112970 - DNA, 25 bp, SARS Virus
tgttattggtctcacctcctgcgtt

SEQ ID NO: 112971 - DNA, 25 bp, SARS Virus
gttattggtcttccctcctgcgtta

SEQ ID NO: 112972 - DNA, 25 bp, SARS Virus
ttattggtcttacctcctgcgttac

SEQ ID NO: 112973 - DNA, 25 bp, SARS Virus
tattggtcttacctcctgcgttacc

SEQ ID NO: 112974 - DNA, 25 bp, SARS Virus
attggtcttaccccctgcgttaccc

SEQ ID NO: 112975 - DNA, 25 bp, SARS Virus
ttggtcttacctcctgcgttacccc

SEQ ID NO: 112976 - DNA, 25 bp, SARS Virus
tggtcttacctcctgcgttaccccg

SEQ ID NO: 112977 - DNA, 25 bp, SARS Virus
ggtcttacctcccgcgttaccccgt

SEQ ID NO: 112978 - DNA, 25 bp, SARS Virus
gtcttacctcctccgttaccccgtt

SEQ ID NO: 112979 - DNA, 25 bp, SARS Virus
tcttacctcctgcgttaccccgttc

SEQ ID NO: 112980 - DNA, 25 bp, SARS Virus
cttacctcctgccttaccccgttcc

SEQ ID NO: 112981 - DNA, 25 bp, SARS Virus
ttacctcctgcgctaccccgttccg

SEQ ID NO: 112982 - DNA, 25 bp, SARS Virus
tacctcctgcgtcaccccgttccgg

SEQ ID NO: 112983 - DNA, 25 bp, SARS Virus
acctcctgcgttcccccgttccggt

SEQ ID NO: 112984 - DNA, 25 bp, SARS Virus
cctcctgcgttaccccgttccggtt

SEQ ID NO: 112985 - DNA, 25 bp, SARS Virus
ctcctgcgttaccccgttccggttt

SEQ ID NO: 112986 - DNA, 25 bp, SARS Virus
tcctgcgttaccccgttccggtttt

SEQ ID NO: 112987 - DNA, 25 bp, SARS Virus
cctgcgttaccccgttccggttttg

SEQ ID NO: 112988 - DNA, 25 bp, SARS Virus
ctgcgttacccccttccggttttgt

SEQ ID NO: 112989 - DNA, 25 bp, SARS Virus
tgcgttaccccgctccggttttgtc

SEQ ID NO: 112990 - DNA, 25 bp, SARS Virus
gcgttaccccgtcccggttttgtcg

SEQ ID NO: 112991 - DNA, 25 bp, SARS Virus
cgttaccccgttccggttttgtcgc

SEQ ID NO: 112992 - DNA, 25 bp, SARS Virus
gttaccccgttccggttttgtcgcg

SEQ ID NO: 112993 - DNA, 25 bp, SARS Virus
ttaccccgttcccgttttgtcgcgg

SEQ ID NO: 112994 - DNA, 25 bp, SARS Virus
taccccgttccgcttttgtcgcggc

SEQ ID NO: 112995 - DNA, 25 bp, SARS Virus
accccgttccggctttgtcgcggct

SEQ ID NO: 112996 - DNA, 25 bp, SARS Virus
ccccgttccggtcttgtcgcggctg

SEQ ID NO: 112997 - DNA, 25 bp, SARS Virus
cccgttccggttctgtcgcggctgg

SEQ ID NO: 112998 - DNA, 25 bp, SARS Virus
ccgttccggtttcgtcgcggctggg

SEQ ID NO: 112999 - DNA, 25 bp, SARS Virus
cgttccggttttctcgcggctgggg

SEQ ID NO: 113000 - DNA, 25 bp, SARS Virus
gttccggttttgccgcggctggggt

SEQ ID NO: 113001 - DNA, 25 bp, SARS Virus
ttccggttttgtcgcggctggggtt

SEQ ID NO: 113002 - DNA, 25 bp, SARS Virus
tccggttttgtcccggctggggttc

SEQ ID NO: 113003 - DNA, 25 bp, SARS Virus
ccggttttgtcgcggctggggttcc

SEQ ID NO: 113004 - DNA, 25 bp, SARS Virus
cggttttgtcgccgctggggttcca

SEQ ID NO: 113005 - DNA, 25 bp, SARS Virus
ggttttgtcgcgcctggggttccaa

SEQ ID NO: 113006 - DNA, 25 bp, SARS Virus
gttttgtcgcggctggggttccaaa

SEQ ID NO: 113007 - DNA, 25 bp, SARS Virus
ttttgtcgcggccggggttccaaat

SEQ ID NO: 113008 - DNA, 25 bp, SARS Virus
tttgtcgcggctcgggttccaaatg

SEQ ID NO: 113009 - DNA, 25 bp, SARS Virus
ttgtcgcggctgcggttccaaatgg

SEQ ID NO: 113010 - DNA, 25 bp, SARS Virus
tgtcgcggctggcgttccaaatggg

SEQ ID NO: 113011 - DNA, 25 bp, SARS Virus
gtcgcggctgggcttccaaatgggt

SEQ ID NO: 113012 - DNA, 25 bp, SARS Virus
tcgcggctggggctccaaatgggtt

SEQ ID NO: 113013 - DNA, 25 bp, SARS Virus
cgcggctggggtcccaaatgggtta

SEQ ID NO: 113014 - DNA, 25 bp, SARS Virus
gcggctggggttccaaatgggttat

SEQ ID NO: 113015 - DNA, 25 bp, SARS Virus
cggctggggttccaaatgggttatt

SEQ ID NO: 113016 - DNA, 25 bp, SARS Virus
ggctggggttcccaatgggttatta

SEQ ID NO: 113017 - DNA, 25 bp, SARS Virus
gctggggttccacatgggttattat

SEQ ID NO: 113018 - DNA, 25 bp, SARS Virus
ctggggttccaactgggttattatg

SEQ ID NO: 113019 - DNA, 25 bp, SARS Virus
tggggttccaaacgggttattatga

SEQ ID NO: 113020 - DNA, 25 bp, SARS Virus
ggggttccaaatcggttattatgac

SEQ ID NO: 113021 - DNA, 25 bp, SARS Virus
gggttccaaatgcgttattatgacg

SEQ ID NO: 113022 - DNA, 25 bp, SARS Virus
ggttccaaatggcttattatgacgc

SEQ ID NO: 113023 - DNA, 25 bp, SARS Virus
gttccaaatgggctattatgacgca

SEQ ID NO: 113024 - DNA, 25 bp, SARS Virus
ttccaaatgggtcattatgacgcag

SEQ ID NO: 113025 - DNA, 25 bp, SARS Virus
tccaaatgggttcttatgacgcaga

SEQ ID NO: 113026 - DNA, 25 bp, SARS Virus
ccaaatgggttactatgacgcagaa

SEQ ID NO: 113027 - DNA, 25 bp, SARS Virus
caaatgggttatcatgacgcagaac

SEQ ID NO: 113028 - DNA, 25 bp, SARS Virus
aaatgggttattctgacgcagaacc

SEQ ID NO: 113029 - DNA, 25 bp, SARS Virus
aatgggttattacgacgcagaacca

SEQ ID NO: 113030 - DNA, 25 bp, SARS Virus
atgggttattatcacgcagaaccaa

SEQ ID NO: 113031 - DNA, 25 bp, SARS Virus
tgggttattatgccgcagaaccaag

SEQ ID NO: 113032 - DNA, 25 bp, SARS Virus
gggttattatgacgcagaaccaagt

SEQ ID NO: 113033 - DNA, 25 bp, SARS Virus
ggttattatgacccagaaccaagtg

SEQ ID NO: 113034 - DNA, 25 bp, SARS Virus
gttattatgacgcagaaccaagtgt

SEQ ID NO: 113035 - DNA, 25 bp, SARS Virus
ttattatgacgccgaaccaagtgtc

SEQ ID NO: 113036 - DNA, 25 bp, SARS Virus
tattatgacgcacaaccaagtgtcg

SEQ ID NO: 113037 - DNA, 25 bp, SARS Virus
attatgacgcagcaccaagtgtcga

SEQ ID NO: 113038 - DNA, 25 bp, SARS Virus
ttatgacgcagacccaagtgtcgag

SEQ ID NO: 113039 - DNA, 25 bp, SARS Virus
tatgacgcagaaccaagtgtcgaga

SEQ ID NO: 113040 - DNA, 25 bp, SARS Virus
atgacgcagaaccaagtgtcgagag

SEQ ID NO: 113041 - DNA, 25 bp, SARS Virus
tgacgcagaacccagtgtcgagagt

SEQ ID NO: 113042 - DNA, 25 bp, SARS Virus
gacgcagaaccacgtgtcgagagtg

SEQ ID NO: 113043 - DNA, 25 bp, SARS Virus
acgcagaaccaactgtcgagagtga

SEQ ID NO: 113044 - DNA, 25 bp, SARS Virus
cgcagaaccaagcgtcgagagtgag

SEQ ID NO: 113045 - DNA, 25 bp, SARS Virus
gcagaaccaagtctcgagagtgagt

SEQ ID NO: 113046 - DNA, 25 bp, SARS Virus
cagaaccaagtgccgagagtgagtc

SEQ ID NO: 113047 - DNA, 25 bp, SARS Virus
agaaccaagtgtcgagagtgagtcg

SEQ ID NO: 113048 - DNA, 25 bp, SARS Virus
gaaccaagtgtccagagtgagtcgt

SEQ ID NO: 113049 - DNA, 25 bp, SARS Virus
aaccaagtgtcgcgagtgagtcgta

SEQ ID NO: 113050 - DNA, 25 bp, SARS Virus
accaagtgtcgacagtgagtcgtac

SEQ ID NO: 113051 - DNA, 25 bp, SARS Virus
ccaagtgtcgagcgtgagtcgtacc

SEQ ID NO: 113052 - DNA, 25 bp, SARS Virus
caagtgtcgagactgagtcgtaccg

SEQ ID NO: 113053 - DNA, 25 bp, SARS Virus
aagtgtcgagagcgagtcgtaccgt

SEQ ID NO: 113054 - DNA, 25 bp, SARS Virus
agtgtcgagagtcagtcgtaccgtt

SEQ ID NO: 113055 - DNA, 25 bp, SARS Virus
gtgtcgagagtgcgtcgtaccgttc

SEQ ID NO: 113056 - DNA, 25 bp, SARS Virus
tgtcgagagtgactcgtaccgttcc

SEQ ID NO: 113057 - DNA, 25 bp, SARS Virus
gtcgagagtgagccgtaccgttcct

SEQ ID NO: 113058 - DNA, 25 bp, SARS Virus
tcgagagtgagtcgtaccgttcctc

SEQ ID NO: 113059 - DNA, 25 bp, SARS Virus
cgagagtgagtcctaccgttcctcc

SEQ ID NO: 113060 - DNA, 25 bp, SARS Virus
gagagtgagtcgcaccgttcctcct

SEQ ID NO: 113061 - DNA, 25 bp, SARS Virus
agagtgagtcgtcccgttcctcctt

SEQ ID NO: 113062 - DNA, 25 bp, SARS Virus
gagtgagtcgtaccgttcctccttg

SEQ ID NO: 113063 - DNA, 25 bp, SARS Virus
agtgagtcgtaccgttcctccttga

SEQ ID NO: 113064 - DNA, 25 bp, SARS Virus
gtgagtcgtacccttcctccttgaa

SEQ ID NO: 113065 - DNA, 25 bp, SARS Virus
tgagtcgtaccgctcctccttgaat

SEQ ID NO: 113066 - DNA, 25 bp, SARS Virus
gagtcgtaccgtccctccttgaatc

SEQ ID NO: 113067 - DNA, 25 bp, SARS Virus
agtcgtaccgttcctccttgaatct

SEQ ID NO: 113068 - DNA, 25 bp, SARS Virus
gtcgtaccgttcctccttgaatcta

SEQ ID NO: 113069 - DNA, 25 bp, SARS Virus
tcgtaccgttcccccttgaatctaa

SEQ ID NO: 113070 - DNA, 25 bp, SARS Virus
cgtaccgttcctccttgaatctaag

SEQ ID NO: 113071 - DNA, 25 bp, SARS Virus
gtaccgttcctccttgaatctaagg

SEQ ID NO: 113072 - DNA, 25 bp, SARS Virus
taccgttcctccctgaatctaaggg

SEQ ID NO: 113073 - DNA, 25 bp, SARS Virus
accgttcctcctcgaatctaaggga

SEQ ID NO: 113074 - DNA, 25 bp, SARS Virus
ccgttcctccttcaatctaagggag

SEQ ID NO: 113075 - DNA, 25 bp, SARS Virus
cgttcctccttgcatctaagggagc

SEQ ID NO: 113076 - DNA, 25 bp, SARS Virus
gttcctccttgactctaagggagct

SEQ ID NO: 113077 - DNA, 25 bp, SARS Virus
ttcctccttgaacctaagggagctc

SEQ ID NO: 113078 - DNA, 25 bp, SARS Virus
tcctccttgaatctaagggagctcc

SEQ ID NO: 113079 - DNA, 25 bp, SARS Virus
cctccttgaatccaagggagctccg

SEQ ID NO: 113080 - DNA, 25 bp, SARS Virus
ctccttgaatctcagggagctccgg

SEQ ID NO: 113081 - DNA, 25 bp, SARS Virus
tccttgaatctacgggagctccggt

SEQ ID NO: 113082 - DNA, 25 bp, SARS Virus
ccttgaatctaacggagctccggtc

SEQ ID NO: 113083 - DNA, 25 bp, SARS Virus
cttgaatctaagcgagctccggtcc

SEQ ID NO: 113084 - DNA, 25 bp, SARS Virus
ttgaatctaaggcagctccggtccc

SEQ ID NO: 113085 - DNA, 25 bp, SARS Virus
tgaatctaagggcgctccggtcccg

SEQ ID NO: 113086 - DNA, 25 bp, SARS Virus
gaatctaagggacctccggtcccgc

SEQ ID NO: 113087 - DNA, 25 bp, SARS Virus
aatctaagggagctccggtcccgca

SEQ ID NO: 113088 - DNA, 25 bp, SARS Virus
atctaagggagccccggtcccgcaa

SEQ ID NO: 113089 - DNA, 25 bp, SARS Virus
tctaagggagctccggtcccgcaag

SEQ ID NO: 113090 - DNA, 25 bp, SARS Virus
ctaagggagctccggtcccgcaagg

SEQ ID NO: 113091 - DNA, 25 bp, SARS Virus
taagggagctcccgtcccgcaaggt

SEQ ID NO: 113092 - DNA, 25 bp, SARS Virus
aagggagctccgctcccgcaaggtt

SEQ ID NO: 113093 - DNA, 25 bp, SARS Virus
agggagctccggccccgcaaggtta

SEQ ID NO: 113094 - DNA, 25 bp, SARS Virus
gggagctccggtcccgcaaggttag

SEQ ID NO: 113095 - DNA, 25 bp, SARS Virus
ggagctccggtcccgcaaggttagt

SEQ ID NO: 113096 - DNA, 25 bp, SARS Virus
gagctccggtcccgcaaggttagtt

SEQ ID NO: 113097 - DNA, 25 bp, SARS Virus
agctccggtcccccaaggttagttg

SEQ ID NO: 113098 - DNA, 25 bp, SARS Virus
gctccggtcccgcaaggttagttgt

SEQ ID NO: 113099 - DNA, 25 bp, SARS Virus
ctccggtcccgccaggttagttgtg

SEQ ID NO: 113100 - DNA, 25 bp, SARS Virus
tccggtcccgcacggttagttgtgg

SEQ ID NO: 113101 - DNA, 25 bp, SARS Virus
ccggtcccgcaacgttagttgtggt

SEQ ID NO: 113102 - DNA, 25 bp, SARS Virus
cggtcccgcaagcttagttgtggtt

SEQ ID NO: 113103 - DNA, 25 bp, SARS Virus
ggtcccgcaaggctagttgtggtta

SEQ ID NO: 113104 - DNA, 25 bp, SARS Virus
gtcccgcaaggtcagttgtggttat

SEQ ID NO: 113105 - DNA, 25 bp, SARS Virus
tcccgcaaggttcgttgtggttatc

SEQ ID NO: 113106 - DNA, 25 bp, SARS Virus
cccgcaaggttacttgtggttatca

SEQ ID NO: 113107 - DNA, 25 bp, SARS Virus
ccgcaaggttagctgtggttatcac

SEQ ID NO: 113108 - DNA, 25 bp, SARS Virus
cgcaaggttagtcgtggttatcacc

SEQ ID NO: 113109 - DNA, 25 bp, SARS Virus
gcaaggttagttctggttatcacca

SEQ ID NO: 113110 - DNA, 25 bp, SARS Virus
caaggttagttgcggttatcaccag

SEQ ID NO: 113111 - DNA, 25 bp, SARS Virus
aaggttagttgtcgttatcaccagg

SEQ ID NO: 113112 - DNA, 25 bp, SARS Virus
aggttagttgtgcttatcaccaggt

SEQ ID NO: 113113 - DNA, 25 bp, SARS Virus
ggttagttgtggctatcaccaggtc

SEQ ID NO: 113114 - DNA, 25 bp, SARS Virus
gttagttgtggtcatcaccaggtct

SEQ ID NO: 113115 - DNA, 25 bp, SARS Virus
ttagttgtggttctcaccaggtcta

SEQ ID NO: 113116 - DNA, 25 bp, SARS Virus
tagttgtggttaccaccaggtctac

SEQ ID NO: 113117 - DNA, 25 bp, SARS Virus
agttgtggttatcaccaggtctact

SEQ ID NO: 113118 - DNA, 25 bp, SARS Virus
gttgtggttatccccaggtctactg

SEQ ID NO: 113119 - DNA, 25 bp, SARS Virus
ttgtggttatcaccaggtctactgg

SEQ ID NO: 113120 - DNA, 25 bp, SARS Virus
tgtggttatcaccaggtctactggt

SEQ ID NO: 113121 - DNA, 25 bp, SARS Virus
gtggttatcacccggtctactggtt

SEQ ID NO: 113122 - DNA, 25 bp, SARS Virus
tggttatcaccacgtctactggttt

SEQ ID NO: 113123 - DNA, 25 bp, SARS Virus
ggttatcaccagctctactggttta

SEQ ID NO: 113124 - DNA, 25 bp, SARS Virus
gttatcaccaggcctactggtttaa

SEQ ID NO: 113125 - DNA, 25 bp, SARS Virus
ttatcaccaggtctactggtttaac

SEQ ID NO: 113126 - DNA, 25 bp, SARS Virus
tatcaccaggtccactggtttaacc

SEQ ID NO: 113127 - DNA, 25 bp, SARS Virus
atcaccaggtctcctggtttaaccg

SEQ ID NO: 113128 - DNA, 25 bp, SARS Virus
tcaccaggtctactggtttaaccga

SEQ ID NO: 113129 - DNA, 25 bp, SARS Virus
caccaggtctaccggtttaaccgat

SEQ ID NO: 113130 - DNA, 25 bp, SARS Virus
accaggtctactcgtttaaccgatg

SEQ ID NO: 113131 - DNA, 25 bp, SARS Virus
ccaggtctactgctttaaccgatga

SEQ ID NO: 113132 - DNA, 25 bp, SARS Virus
caggtctactggcttaaccgatgat

SEQ ID NO: 113133 - DNA, 25 bp, SARS Virus
aggtctactggtctaaccgatgatg

SEQ ID NO: 113134 - DNA, 25 bp, SARS Virus
ggtctactggttcaaccgatgatgg

SEQ ID NO: 113135 - DNA, 25 bp, SARS Virus
gtctactggtttcaccgatgatggc

SEQ ID NO: 113136 - DNA, 25 bp, SARS Virus
tctactggtttacccgatgatggct

SEQ ID NO: 113137 - DNA, 25 bp, SARS Virus
ctactggtttaaccgatgatggctt

SEQ ID NO: 113138 - DNA, 25 bp, SARS Virus
tactggtttaaccgatgatggcttc

SEQ ID NO: 113139 - DNA, 25 bp, SARS Virus
actggtttaacccatgatggcttct

SEQ ID NO: 113140 - DNA, 25 bp, SARS Virus
ctggtttaaccgctgatggcttctc

SEQ ID NO: 113141 - DNA, 25 bp, SARS Virus
tggtttaaccgacgatggcttctcg

SEQ ID NO: 113142 - DNA, 25 bp, SARS Virus
ggtttaaccgatcatggcttctcga

SEQ ID NO: 113143 - DNA, 25 bp, SARS Virus
gtttaaccgatgctggcttctcgat

SEQ ID NO: 113144 - DNA, 25 bp, SARS Virus
tttaaccgatgacggcttctcgatg

SEQ ID NO: 113145 - DNA, 25 bp, SARS Virus
ttaaccgatgatcgcttctcgatgg

SEQ ID NO: 113146 - DNA, 25 bp, SARS Virus
taaccgatgatgccttctcgatggg

SEQ ID NO: 113147 - DNA, 25 bp, SARS Virus
aaccgatgatggcttctcgatgggc

SEQ ID NO: 113148 - DNA, 25 bp, SARS Virus
accgatgatggcctctcgatgggct

SEQ ID NO: 113149 - DNA, 25 bp, SARS Virus
ccgatgatggctcctcgatgggctg

SEQ ID NO: 113150 - DNA, 25 bp, SARS Virus
cgatgatggcttctcgatgggctgc

SEQ ID NO: 113151 - DNA, 25 bp, SARS Virus
gatgatggcttcccgatgggctgct

SEQ ID NO: 113152 - DNA, 25 bp, SARS Virus
atgatggcttctcgatgggctgctc

SEQ ID NO: 113153 - DNA, 25 bp, SARS Virus
tgatggcttctccatgggctgctca

SEQ ID NO: 113154 - DNA, 25 bp, SARS Virus
gatggcttctcgctgggctgctcaa

SEQ ID NO: 113155 - DNA, 25 bp, SARS Virus
atggcttctcgacgggctgctcaag

SEQ ID NO: 113156 - DNA, 25 bp, SARS Virus
tggcttctcgatcggctgctcaagc

SEQ ID NO: 113157 - DNA, 25 bp, SARS Virus
ggcttctcgatgcgctgctcaagca

SEQ ID NO: 113158 - DNA, 25 bp, SARS Virus
gcttctcgatggcctgctcaagcac

SEQ ID NO: 113159 - DNA, 25 bp, SARS Virus
cttctcgatgggctgctcaagcacc

SEQ ID NO: 113160 - DNA, 25 bp, SARS Virus
ttctcgatgggccgctcaagcacca

SEQ ID NO: 113161 - DNA, 25 bp, SARS Virus
tctcgatgggctcctcaagcaccac

SEQ ID NO: 113162 - DNA, 25 bp, SARS Virus
ctcgatgggctgctcaagcaccacc

SEQ ID NO: 113163 - DNA, 25 bp, SARS Virus
tcgatgggctgcccaagcaccacca

SEQ ID NO: 113164 - DNA, 25 bp, SARS Virus
cgatgggctgctcaagcaccaccac

SEQ ID NO: 113165 - DNA, 25 bp, SARS Virus
gatgggctgctccagcaccaccact

SEQ ID NO: 113166 - DNA, 25 bp, SARS Virus
atgggctgctcacgcaccaccactg

SEQ ID NO: 113167 - DNA, 25 bp, SARS Virus
tgggctgctcaaccaccaccactgc

SEQ ID NO: 113168 - DNA, 25 bp, SARS Virus
gggctgctcaagcaccaccactgcc

SEQ ID NO: 113169 - DNA, 25 bp, SARS Virus
ggctgctcaagccccaccactgccg

SEQ ID NO: 113170 - DNA, 25 bp, SARS Virus
gctgctcaagcaccaccactgccgt

SEQ ID NO: 113171 - DNA, 25 bp, SARS Virus
ctgctcaagcaccaccactgccgtt

SEQ ID NO: 113172 - DNA, 25 bp, SARS Virus
tgctcaagcacccccactgccgttt

SEQ ID NO: 113173 - DNA, 25 bp, SARS Virus
gctcaagcaccaccactgccgtttt

SEQ ID NO: 113174 - DNA, 25 bp, SARS Virus
ctcaagcaccaccactgccgtttta

SEQ ID NO: 113175 - DNA, 25 bp, SARS Virus
tcaagcaccacccctgccgttttac

SEQ ID NO: 113176 - DNA, 25 bp, SARS Virus
caagcaccaccactgccgttttact

SEQ ID NO: 113177 - DNA, 25 bp, SARS Virus
aagcaccaccaccgccgttttactt

SEQ ID NO: 113178 - DNA, 25 bp, SARS Virus
agcaccaccactcccgttttacttt

SEQ ID NO: 113179 - DNA, 25 bp, SARS Virus
gcaccaccactgccgttttactttc

SEQ ID NO: 113180 - DNA, 25 bp, SARS Virus
caccaccactgccgttttactttct

SEQ ID NO: 113181 - DNA, 25 bp, SARS Virus
accaccactgcccttttactttctc

SEQ ID NO: 113182 - DNA, 25 bp, SARS Virus
ccaccactgccgctttactttctcg

SEQ ID NO: 113183 - DNA, 25 bp, SARS Virus
caccactgccgtcttactttctcga

SEQ ID NO: 113184 - DNA, 25 bp, SARS Virus
accactgccgttctactttctcgag

SEQ ID NO: 113185 - DNA, 25 bp, SARS Virus
ccactgccgtttcactttctcgagt

SEQ ID NO: 113186 - DNA, 25 bp, SARS Virus
cactgccgttttcctttctcgagtc

SEQ ID NO: 113187 - DNA, 25 bp, SARS Virus
actgccgttttactttctcgagtcg

SEQ ID NO: 113188 - DNA, 25 bp, SARS Virus
ctgccgttttaccttctcgagtcgg

SEQ ID NO: 113189 - DNA, 25 bp, SARS Virus
tgccgttttactctctcgagtcggg

SEQ ID NO: 113190 - DNA, 25 bp, SARS Virus
gccgttttacttcctcgagtcgggg

SEQ ID NO: 113191 - DNA, 25 bp, SARS Virus
ccgttttactttctcgagtcggggt

SEQ ID NO: 113192 - DNA, 25 bp, SARS Virus
cgttttactttcccgagtcggggtc

SEQ ID NO: 113193 - DNA, 25 bp, SARS Virus
gttttactttctcgagtcggggtct

SEQ ID NO: 113194 - DNA, 25 bp, SARS Virus
ttttactttctccagtcggggtcta

SEQ ID NO: 113195 - DNA, 25 bp, SARS Virus
tttactttctcgcgtcggggtctac

SEQ ID NO: 113196 - DNA, 25 bp, SARS Virus
ttactttctcgactcggggtctacc

SEQ ID NO: 113197 - DNA, 25 bp, SARS Virus
tactttctcgagccggggtctacca

SEQ ID NO: 113198 - DNA, 25 bp, SARS Virus
actttctcgagtcggggtctaccat

SEQ ID NO: 113199 - DNA, 25 bp, SARS Virus
ctttctcgagtccgggtctaccatg

SEQ ID NO: 113200 - DNA, 25 bp, SARS Virus
tttctcgagtcgcggtctaccatga

SEQ ID NO: 113201 - DNA, 25 bp, SARS Virus
ttctcgagtcggcgtctaccatgaa

SEQ ID NO: 113202 - DNA, 25 bp, SARS Virus
tctcgagtcgggctctaccatgaag

SEQ ID NO: 113203 - DNA, 25 bp, SARS Virus
ctcgagtcggggcctaccatgaaga

SEQ ID NO: 113204 - DNA, 25 bp, SARS Virus
tcgagtcggggtctaccatgaagat

SEQ ID NO: 113205 - DNA, 25 bp, SARS Virus
cgagtcggggtccaccatgaagata

SEQ ID NO: 113206 - DNA, 25 bp, SARS Virus
gagtcggggtctcccatgaagataa

SEQ ID NO: 113207 - DNA, 25 bp, SARS Virus
agtcggggtctaccatgaagataat

SEQ ID NO: 113208 - DNA, 25 bp, SARS Virus
gtcggggtctaccatgaagataatg

SEQ ID NO: 113209 - DNA, 25 bp, SARS Virus
tcggggtctaccctgaagataatgg

SEQ ID NO: 113210 - DNA, 25 bp, SARS Virus
cggggtctaccacgaagataatgga

SEQ ID NO: 113211 - DNA, 25 bp, SARS Virus
ggggtctaccatcaagataatggat

SEQ ID NO: 113212 - DNA, 25 bp, SARS Virus
gggtctaccatgcagataatggatc

SEQ ID NO: 113213 - DNA, 25 bp, SARS Virus
ggtctaccatgacgataatggatcc

SEQ ID NO: 113214 - DNA, 25 bp, SARS Virus
gtctaccatgaacataatggatcct

SEQ ID NO: 113215 - DNA, 25 bp, SARS Virus
tctaccatgaagctaatggatcctt

SEQ ID NO: 113216 - DNA, 25 bp, SARS Virus
ctaccatgaagacaatggatccttg

SEQ ID NO: 113217 - DNA, 25 bp, SARS Virus
taccatgaagatcatggatccttga

SEQ ID NO: 113218 - DNA, 25 bp, SARS Virus
accatgaagatactggatccttgac

SEQ ID NO: 113219 - DNA, 25 bp, SARS Virus
ccatgaagataacggatccttgacc

SEQ ID NO: 113220 - DNA, 25 bp, SARS Virus
catgaagataatcgatccttgaccg

SEQ ID NO: 113221 - DNA, 25 bp, SARS Virus
atgaagataatgcatccttgaccgg

SEQ ID NO: 113222 - DNA, 25 bp, SARS Virus
tgaagataatggctccttgaccggg

SEQ ID NO: 113223 - DNA, 25 bp, SARS Virus
gaagataatggacccttgaccgggt

SEQ ID NO: 113224 - DNA, 25 bp, SARS Virus
aagataatggatccttgaccgggtc

SEQ ID NO: 113225 - DNA, 25 bp, SARS Virus
agataatggatccttgaccgggtct

SEQ ID NO: 113226 - DNA, 25 bp, SARS Virus
gataatggatccctgaccgggtctt

SEQ ID NO: 113227 - DNA, 25 bp, SARS Virus
ataatggatcctcgaccgggtcttc

SEQ ID NO: 113228 - DNA, 25 bp, SARS Virus
taatggatccttcaccgggtcttcg

SEQ ID NO: 113229 - DNA, 25 bp, SARS Virus
aatggatccttgcccgggtcttcga

SEQ ID NO: 113230 - DNA, 25 bp, SARS Virus
atggatccttgaccgggtcttcgaa

SEQ ID NO: 113231 - DNA, 25 bp, SARS Virus
tggatccttgaccgggtcttcgaag

SEQ ID NO: 113232 - DNA, 25 bp, SARS Virus
ggatccttgacccggtcttcgaagt

SEQ ID NO: 113233 - DNA, 25 bp, SARS Virus
gatccttgaccgcgtcttcgaagtg

SEQ ID NO: 113234 - DNA, 25 bp, SARS Virus
atccttgaccggctcttcgaagtga

SEQ ID NO: 113235 - DNA, 25 bp, SARS Virus
tccttgaccgggccttcgaagtgaa

SEQ ID NO: 113236 - DNA, 25 bp, SARS Virus
ccttgaccgggtcttcgaagtgaag

SEQ ID NO: 113237 - DNA, 25 bp, SARS Virus
cttgaccgggtcctcgaagtgaagg

SEQ ID NO: 113238 - DNA, 25 bp, SARS Virus
ttgaccgggtctccgaagtgaaggg

SEQ ID NO: 113239 - DNA, 25 bp, SARS Virus
tgaccgggtcttcgaagtgaaggga

SEQ ID NO: 113240 - DNA, 25 bp, SARS Virus
gaccgggtcttccaagtgaagggat

SEQ ID NO: 113241 - DNA, 25 bp, SARS Virus
accgggtcttcgcagtgaagggatg

SEQ ID NO: 113242 - DNA, 25 bp, SARS Virus
ccgggtcttcgacgtgaagggatgc

SEQ ID NO: 113243 - DNA, 25 bp, SARS Virus
cgggtcttcgaactgaagggatgcc

SEQ ID NO: 113244 - DNA, 25 bp, SARS Virus
gggtcttcgaagcgaagggatgccg

SEQ ID NO: 113245 - DNA, 25 bp, SARS Virus
ggtcttcgaagtcaagggatgccgc

SEQ ID NO: 113246 - DNA, 25 bp, SARS Virus
gtcttcgaagtgcagggatgccgcg

SEQ ID NO: 113247 - DNA, 25 bp, SARS Virus
tcttcgaagtgacgggatgccgcga

SEQ ID NO: 113248 - DNA, 25 bp, SARS Virus
cttcgaagtgaacggatgccgcgat

SEQ ID NO: 113249 - DNA, 25 bp, SARS Virus
ttcgaagtgaagcgatgccgcgatt

SEQ ID NO: 113250 - DNA, 25 bp, SARS Virus
tcgaagtgaaggcatgccgcgattg

SEQ ID NO: 113251 - DNA, 25 bp, SARS Virus
cgaagtgaagggctgccgcgattgt

SEQ ID NO: 113252 - DNA, 25 bp, SARS Virus
gaagtgaagggacgccgcgattgtt

SEQ ID NO: 113253 - DNA, 25 bp, SARS Virus
aagtgaagggatcccgcgattgttt

SEQ ID NO: 113254 - DNA, 25 bp, SARS Virus
agtgaagggatgccgcgattgtttc

SEQ ID NO: 113255 - DNA, 25 bp, SARS Virus
gtgaagggatgccgcgattgtttct

SEQ ID NO: 113256 - DNA, 25 bp, SARS Virus
tgaagggatgccccgattgtttctt

SEQ ID NO: 113257 - DNA, 25 bp, SARS Virus
gaagggatgccgcgattgtttcttc

SEQ ID NO: 113258 - DNA, 25 bp, SARS Virus
aagggatgccgccattgtttcttcc

SEQ ID NO: 113259 - DNA, 25 bp, SARS Virus
agggatgccgcgcttgtttcttccg

SEQ ID NO: 113260 - DNA, 25 bp, SARS Virus
gggatgccgcgactgtttcttccgt

SEQ ID NO: 113261 - DNA, 25 bp, SARS Virus
ggatgccgcgatcgtttcttccgta

SEQ ID NO: 113262 - DNA, 25 bp, SARS Virus
gatgccgcgattctttcttccgtag

SEQ ID NO: 113263 - DNA, 25 bp, SARS Virus
atgccgcgattgcttcttccgtagc

SEQ ID NO: 113264 - DNA, 25 bp, SARS Virus
tgccgcgattgtctcttccgtagca

SEQ ID NO: 113265 - DNA, 25 bp, SARS Virus
gccgcgattgttccttccgtagcat

SEQ ID NO: 113266 - DNA, 25 bp, SARS Virus
ccgcgattgtttcttccgtagcata

SEQ ID NO: 113267 - DNA, 25 bp, SARS Virus
cgcgattgtttcctccgtagcatac

SEQ ID NO: 113268 - DNA, 25 bp, SARS Virus
gcgattgtttctcccgtagcatacc

SEQ ID NO: 113269 - DNA, 25 bp, SARS Virus
cgattgtttcttccgtagcataccc

SEQ ID NO: 113270 - DNA, 25 bp, SARS Virus
gattgtttcttccgtagcataccca

SEQ ID NO: 113271 - DNA, 25 bp, SARS Virus
attgtttcttccctagcatacccaa

SEQ ID NO: 113272 - DNA, 25 bp, SARS Virus
ttgtttcttccgcagcatacccaac

SEQ ID NO: 113273 - DNA, 25 bp, SARS Virus
tgtttcttccgtcgcatacccaacg

SEQ ID NO: 113274 - DNA, 25 bp, SARS Virus
gtttcttccgtaccatacccaacgt

SEQ ID NO: 113275 - DNA, 25 bp, SARS Virus
tttcttccgtagcatacccaacgtt

SEQ ID NO: 113276 - DNA, 25 bp, SARS Virus
ttcttccgtagcctacccaacgttg

SEQ ID NO: 113277 - DNA, 25 bp, SARS Virus
tcttccgtagcacacccaacgttga

SEQ ID NO: 113278 - DNA, 25 bp, SARS Virus
cttccgtagcatccccaacgttgac

SEQ ID NO: 113279 - DNA, 25 bp, SARS Virus
ttccgtagcatacccaacgttgact

SEQ ID NO: 113280 - DNA, 25 bp, SARS Virus
tccgtagcatacccaacgttgactc

SEQ ID NO: 113281 - DNA, 25 bp, SARS Virus
ccgtagcatacccaacgttgactcc

SEQ ID NO: 113282 - DNA, 25 bp, SARS Virus
cgtagcataccccacgttgactccc

SEQ ID NO: 113283 - DNA, 25 bp, SARS Virus
gtagcatacccaccgttgactccct

SEQ ID NO: 113284 - DNA, 25 bp, SARS Virus
tagcatacccaacgttgactccctc

SEQ ID NO: 113285 - DNA, 25 bp, SARS Virus
agcatacccaaccttgactccctcg

SEQ ID NO: 113286 - DNA, 25 bp, SARS Virus
gcatacccaacgctgactccctcgg

SEQ ID NO: 113287 - DNA, 25 bp, SARS Virus
catacccaacgtcgactccctcgga

SEQ ID NO: 113288 - DNA, 25 bp, SARS Virus
atacccaacgttcactccctcggaa

SEQ ID NO: 113289 - DNA, 25 bp, SARS Virus
tacccaacgttgcctccctcggaac

SEQ ID NO: 113290 - DNA, 25 bp, SARS Virus
acccaacgttgactccctcggaact

SEQ ID NO: 113291 - DNA, 25 bp, SARS Virus
cccaacgttgaccccctcggaactt

SEQ ID NO: 113292 - DNA, 25 bp, SARS Virus
ccaacgttgactccctcggaactta

SEQ ID NO: 113293 - DNA, 25 bp, SARS Virus
caacgttgactccctcggaacttat

SEQ ID NO: 113294 - DNA, 25 bp, SARS Virus
aacgttgactccctcggaacttatg

SEQ ID NO: 113295 - DNA, 25 bp, SARS Virus
acgttgactcccccggaacttatgt

SEQ ID NO: 113296 - DNA, 25 bp, SARS Virus
cgttgactccctcggaacttatgtg

SEQ ID NO: 113297 - DNA, 25 bp, SARS Virus
gttgactccctccgaacttatgtgg

SEQ ID NO: 113298 - DNA, 25 bp, SARS Virus
ttgactccctcgcaacttatgtggg

SEQ ID NO: 113299 - DNA, 25 bp, SARS Virus
tgactccctcggcacttatgtgggt

SEQ ID NO: 113300 - DNA, 25 bp, SARS Virus
gactccctcggaccttatgtgggtt

SEQ ID NO: 113301 - DNA, 25 bp, SARS Virus
actccctcggaacttatgtgggttt

SEQ ID NO: 113302 - DNA, 25 bp, SARS Virus
ctccctcggaacctatgtgggtttc

SEQ ID NO: 113303 - DNA, 25 bp, SARS Virus
tccctcggaactcatgtgggtttct

SEQ ID NO: 113304 - DNA, 25 bp, SARS Virus
ccctcggaacttctgtgggtttctg

SEQ ID NO: 113305 - DNA, 25 bp, SARS Virus
cctcggaacttacgtgggtttctgg

SEQ ID NO: 113306 - DNA, 25 bp, SARS Virus
ctcggaacttatctgggtttctggt

SEQ ID NO: 113307 - DNA, 25 bp, SARS Virus
tcggaacttatgcgggtttctggtg

SEQ ID NO: 113308 - DNA, 25 bp, SARS Virus
cggaacttatgtcggtttctggtgt

SEQ ID NO: 113309 - DNA, 25 bp, SARS Virus
ggaacttatgtgcgtttctggtgta

SEQ ID NO: 113310 - DNA, 25 bp, SARS Virus
gaacttatgtggctttctggtgtaa

SEQ ID NO: 113311 - DNA, 25 bp, SARS Virus
aacttatgtgggcttctggtgtaac

SEQ ID NO: 113312 - DNA, 25 bp, SARS Virus
acttatgtgggtctctggtgtaacc

SEQ ID NO: 113313 - DNA, 25 bp, SARS Virus
cttatgtgggttcctggtgtaaccg

SEQ ID NO: 113314 - DNA, 25 bp, SARS Virus
ttatgtgggtttctggtgtaaccgt

SEQ ID NO: 113315 - DNA, 25 bp, SARS Virus
tatgtgggtttccggtgtaaccgtg

SEQ ID NO: 113316 - DNA, 25 bp, SARS Virus
atgtgggtttctcgtgtaaccgtgg

SEQ ID NO: 113317 - DNA, 25 bp, SARS Virus
tgtgggtttctgctgtaaccgtggg

SEQ ID NO: 113318 - DNA, 25 bp, SARS Virus
gtgggtttctggcgtaaccgtgggc

SEQ ID NO: 113319 - DNA, 25 bp, SARS Virus
tgggtttctggtctaaccgtgggcg

SEQ ID NO: 113320 - DNA, 25 bp, SARS Virus
gggtttctggtgcaaccgtgggcgt

SEQ ID NO: 113321 - DNA, 25 bp, SARS Virus
ggtttctggtgtcaccgtgggcgtt

SEQ ID NO: 113322 - DNA, 25 bp, SARS Virus
gtttctggtgtacccgtgggcgtta

SEQ ID NO: 113323 - DNA, 25 bp, SARS Virus
tttctggtgtaaccgtgggcgttag

SEQ ID NO: 113324 - DNA, 25 bp, SARS Virus
ttctggtgtaaccgtgggcgttagg

SEQ ID NO: 113325 - DNA, 25 bp, SARS Virus
tctggtgtaaccctgggcgttagga

SEQ ID NO: 113326 - DNA, 25 bp, SARS Virus
ctggtgtaaccgcgggcgttaggat

SEQ ID NO: 113327 - DNA, 25 bp, SARS Virus
tggtgtaaccgtcggcgttaggatt

SEQ ID NO: 113328 - DNA, 25 bp, SARS Virus
ggtgtaaccgtgcgcgttaggatta

SEQ ID NO: 113329 - DNA, 25 bp, SARS Virus
gtgtaaccgtggccgttaggattat

SEQ ID NO: 113330 - DNA, 25 bp, SARS Virus
tgtaaccgtgggcgttaggattatt

SEQ ID NO: 113331 - DNA, 25 bp, SARS Virus
gtaaccgtgggccttaggattattg

SEQ ID NO: 113332 - DNA, 25 bp, SARS Virus
taaccgtgggcgctaggattattgt

SEQ ID NO: 113333 - DNA, 25 bp, SARS Virus
aaccgtgggcgtcaggattattgtt

SEQ ID NO: 113334 - DNA, 25 bp, SARS Virus
accgtgggcgttcggattattgtta

SEQ ID NO: 113335 - DNA, 25 bp, SARS Virus
ccgtgggcgttacgattattgttac

SEQ ID NO: 113336 - DNA, 25 bp, SARS Virus
cgtgggcgttagcattattgttacg

SEQ ID NO: 113337 - DNA, 25 bp, SARS Virus
gtgggcgttaggcttattgttacga

SEQ ID NO: 113338 - DNA, 25 bp, SARS Virus
tgggcgttaggactattgttacgac

SEQ ID NO: 113339 - DNA, 25 bp, SARS Virus
gggcgttaggatcattgttacgacg

SEQ ID NO: 113340 - DNA, 25 bp, SARS Virus
ggcgttaggattcttgttacgacgg

SEQ ID NO: 113341 - DNA, 25 bp, SARS Virus
gcgttaggattactgttacgacggt

SEQ ID NO: 113342 - DNA, 25 bp, SARS Virus
cgttaggattatcgttacgacggtg

SEQ ID NO: 113343 - DNA, 25 bp, SARS Virus
gttaggattattcttacgacggtgg

SEQ ID NO: 113344 - DNA, 25 bp, SARS Virus
ttaggattattgctacgacggtggc

SEQ ID NO: 113345 - DNA, 25 bp, SARS Virus
ctgcatgaacaagaaaatttatttg

SEQ ID NO: 113346 - DNA, 25 bp, SARS Virus
tgcatgaacaacgaaatttatttgc

SEQ ID NO: 113347 - DNA, 25 bp, SARS Virus
gcatgaacaacagaatttatttgct

SEQ ID NO: 113348 - DNA, 25 bp, SARS Virus
catgaacaacaagatttatttgctt

SEQ ID NO: 113349 - DNA, 25 bp, SARS Virus
atgaacaacaaagtttatttgcttg

SEQ ID NO: 113350 - DNA, 25 bp, SARS Virus
tgaacaacaaaagttatttgcttgt

SEQ ID NO: 113351 - DNA, 25 bp, SARS Virus
gaacaacaaaatgtatttgcttgtt

SEQ ID NO: 113352 - DNA, 25 bp, SARS Virus
aacaacaaaattgatttgcttgttt

SEQ ID NO: 113353 - DNA, 25 bp, SARS Virus
acaacaaaatttgtttgcttgttta

SEQ ID NO: 113354 - DNA, 25 bp, SARS Virus
caacaaaatttagttgcttgtttaa

SEQ ID NO: 113355 - DNA, 25 bp, SARS Virus
aacaaaatttatgtgcttgtttaat

SEQ ID NO: 113356 - DNA, 25 bp, SARS Virus
acaaaatttattggcttgtttaatt

SEQ ID NO: 113357 - DNA, 25 bp, SARS Virus
caaaatttatttgcttgtttaattt

SEQ ID NO: 113358 - DNA, 25 bp, SARS Virus
aaaatttatttggttgtttaatttt

SEQ ID NO: 113359 - DNA, 25 bp, SARS Virus
aaatttatttgcgtgtttaatttta

SEQ ID NO: 113360 - DNA, 25 bp, SARS Virus
aatttatttgctggtttaattttac

SEQ ID NO: 113361 - DNA, 25 bp, SARS Virus
atttatttgcttgtttaattttaca

SEQ ID NO: 113362 - DNA, 25 bp, SARS Virus
tttatttgcttggttaattttacag

SEQ ID NO: 113363 - DNA, 25 bp, SARS Virus
ttatttgcttgtgtaattttacaga

SEQ ID NO: 113364 - DNA, 25 bp, SARS Virus
tatttgcttgttgaattttacagac

SEQ ID NO: 113365 - DNA, 25 bp, SARS Virus
atttgcttgtttgattttacagact

SEQ ID NO: 113366 - DNA, 25 bp, SARS Virus
tttgcttgtttagttttacagacta

SEQ ID NO: 113367 - DNA, 25 bp, SARS Virus
ttgcttgtttaagtttacagactat

SEQ ID NO: 113368 - DNA, 25 bp, SARS Virus
tgcttgtttaatgttacagactatt

SEQ ID NO: 113369 - DNA, 25 bp, SARS Virus
gcttgtttaattgtacagactatta

SEQ ID NO: 113370 - DNA, 25 bp, SARS Virus
cttgtttaatttgacagactattac

SEQ ID NO: 113371 - DNA, 25 bp, SARS Virus
ttgtttaattttgcagactattacc

SEQ ID NO: 113372 - DNA, 25 bp, SARS Virus
tgtttaattttagagactattacct

SEQ ID NO: 113373 - DNA, 25 bp, SARS Virus
gtttaattttacggactattacctg

SEQ ID NO: 113374 - DNA, 25 bp, SARS Virus
tttaattttacagactattacctgg

SEQ ID NO: 113375 - DNA, 25 bp, SARS Virus
ttaattttacaggctattacctggg

SEQ ID NO: 113376 - DNA, 25 bp, SARS Virus
taattttacagagtattacctgggg

SEQ ID NO: 113377 - DNA, 25 bp, SARS Virus
aattttacagacgattacctggggt

SEQ ID NO: 113378 - DNA, 25 bp, SARS Virus
attttacagactgttacctggggtt

SEQ ID NO: 113379 - DNA, 25 bp, SARS Virus
ttttacagactagtacctggggtta

SEQ ID NO: 113380 - DNA, 25 bp, SARS Virus
tttacagactatgacctggggttag

SEQ ID NO: 113381 - DNA, 25 bp, SARS Virus
ttacagactattgcctggggttagt

SEQ ID NO: 113382 - DNA, 25 bp, SARS Virus
tacagactattagctggggttagtt

SEQ ID NO: 113383 - DNA, 25 bp, SARS Virus
acagactattacgtggggttagttt

SEQ ID NO: 113384 - DNA, 25 bp, SARS Virus
cagactattaccgggggttagtttg

SEQ ID NO: 113385 - DNA, 25 bp, SARS Virus
agactattacctggggttagtttgg

SEQ ID NO: 113386 - DNA, 25 bp, SARS Virus
gactattacctggggttagtttggt

SEQ ID NO: 113387 - DNA, 25 bp, SARS Virus
actattacctggggttagtttggtt

SEQ ID NO: 113388 - DNA, 25 bp, SARS Virus
ctattacctggggttagtttggttg

SEQ ID NO: 113389 - DNA, 25 bp, SARS Virus
tattacctgggggtagtttggttgc

SEQ ID NO: 113390 - DNA, 25 bp, SARS Virus
attacctggggtgagtttggttgca

SEQ ID NO: 113391 - DNA, 25 bp, SARS Virus
ttacctggggttggtttggttgcat

SEQ ID NO: 113392 - DNA, 25 bp, SARS Virus
tacctggggttagtttggttgcatc

SEQ ID NO: 113393 - DNA, 25 bp, SARS Virus
acctggggttaggttggttgcatca

SEQ ID NO: 113394 - DNA, 25 bp, SARS Virus
cctggggttagtgtggttgcatcac

SEQ ID NO: 113395 - DNA, 25 bp, SARS Virus
ctggggttagttgggttgcatcacg

SEQ ID NO: 113396 - DNA, 25 bp, SARS Virus
tggggttagtttggttgcatcacgg

SEQ ID NO: 113397 - DNA, 25 bp, SARS Virus
ggggttagtttggttgcatcacggg

SEQ ID NO: 113398 - DNA, 25 bp, SARS Virus
gggttagtttgggtgcatcacgggg

SEQ ID NO: 113399 - DNA, 25 bp, SARS Virus
ggttagtttggtggcatcacggggg

SEQ ID NO: 113400 - DNA, 25 bp, SARS Virus
gttagtttggttgcatcacgggggg

SEQ ID NO: 113401 - DNA, 25 bp, SARS Virus
ttagtttggttggatcacggggggc

SEQ ID NO: 113402 - DNA, 25 bp, SARS Virus
tagtttggttgcgtcacggggggcg

SEQ ID NO: 113403 - DNA, 25 bp, SARS Virus
agtttggttgcagcacggggggcgt

SEQ ID NO: 113404 - DNA, 25 bp, SARS Virus
gtttggttgcatgacggggggcgta

SEQ ID NO: 113405 - DNA, 25 bp, SARS Virus
tttggttgcatcgcggggggcgtaa

SEQ ID NO: 113406 - DNA, 25 bp, SARS Virus
ttggttgcatcagggggggcgtaat

SEQ ID NO: 113407 - DNA, 25 bp, SARS Virus
tggttgcatcacggggggcgtaatg

SEQ ID NO: 113408 - DNA, 25 bp, SARS Virus
ggttgcatcacggggggcgtaatgt

SEQ ID NO: 113409 - DNA, 25 bp, SARS Virus
gttgcatcacggggggcgtaatgta

SEQ ID NO: 113410 - DNA, 25 bp, SARS Virus
ttgcatcacggggggcgtaatgtaa

SEQ ID NO: 113411 - DNA, 25 bp, SARS Virus
tgcatcacggggggcgtaatgtaaa

SEQ ID NO: 113412 - DNA, 25 bp, SARS Virus
gcatcacggggggcgtaatgtaaac

SEQ ID NO: 113413 - DNA, 25 bp, SARS Virus
catcacggggggggtaatgtaaacc

SEQ ID NO: 113414 - DNA, 25 bp, SARS Virus
atcacggggggcgtaatgtaaacca

SEQ ID NO: 113415 - DNA, 25 bp, SARS Virus
tcacggggggcggaatgtaaaccac

SEQ ID NO: 113416 - DNA, 25 bp, SARS Virus
cacggggggcgtgatgtaaaccacc

SEQ ID NO: 113417 - DNA, 25 bp, SARS Virus
acggggggcgtagtgtaaaccacct

SEQ ID NO: 113418 - DNA, 25 bp, SARS Virus
cggggggcgtaaggtaaaccacctg

SEQ ID NO: 113419 - DNA, 25 bp, SARS Virus
ggggggcgtaatgtaaaccacctgg

SEQ ID NO: 113420 - DNA, 25 bp, SARS Virus
gggggcgtaatggaaaccacctggg

SEQ ID NO: 113421 - DNA, 25 bp, SARS Virus
ggggcgtaatgtgaaccacctgggt

SEQ ID NO: 113422 - DNA, 25 bp, SARS Virus
gggcgtaatgtagaccacctgggtg

SEQ ID NO: 113423 - DNA, 25 bp, SARS Virus
ggcgtaatgtaagccacctgggtgt

SEQ ID NO: 113424 - DNA, 25 bp, SARS Virus
gcgtaatgtaaagcacctgggtgtc

SEQ ID NO: 113425 - DNA, 25 bp, SARS Virus
cgtaatgtaaacgacctgggtgtct

SEQ ID NO: 113426 - DNA, 25 bp, SARS Virus
gtaatgtaaaccgcctgggtgtcta

SEQ ID NO: 113427 - DNA, 25 bp, SARS Virus
taatgtaaaccagctgggtgtctaa

SEQ ID NO: 113428 - DNA, 25 bp, SARS Virus
aatgtaaaccacgtgggtgtctaag

SEQ ID NO: 113429 - DNA, 25 bp, SARS Virus
atgtaaaccaccggggtgtctaagt

SEQ ID NO: 113430 - DNA, 25 bp, SARS Virus
tgtaaaccacctgggtgtctaagtt

SEQ ID NO: 113431 - DNA, 25 bp, SARS Virus
gtaaaccacctgggtgtctaagttg

SEQ ID NO: 113432 - DNA, 25 bp, SARS Virus
taaaccacctgggtgtctaagttga

SEQ ID NO: 113433 - DNA, 25 bp, SARS Virus
aaaccacctgggggtctaagttgac

SEQ ID NO: 113434 - DNA, 25 bp, SARS Virus
aaccacctgggtgtctaagttgact

SEQ ID NO: 113435 - DNA, 25 bp, SARS Virus
accacctgggtggctaagttgactg

SEQ ID NO: 113436 - DNA, 25 bp, SARS Virus
ccacctgggtgtgtaagttgactgt

SEQ ID NO: 113437 - DNA, 25 bp, SARS Virus
cacctgggtgtcgaagttgactgtt

SEQ ID NO: 113438 - DNA, 25 bp, SARS Virus
acctgggtgtctgagttgactgtta

SEQ ID NO: 113439 - DNA, 25 bp, SARS Virus
cctgggtgtctaggttgactgttat

SEQ ID NO: 113440 - DNA, 25 bp, SARS Virus
ctgggtgtctaagttgactgttatt

SEQ ID NO: 113441 - DNA, 25 bp, SARS Virus
tgggtgtctaaggtgactgttattg

SEQ ID NO: 113442 - DNA, 25 bp, SARS Virus
gggtgtctaagtggactgttattgg

SEQ ID NO: 113443 - DNA, 25 bp, SARS Virus
ggtgtctaagttgactgttattggt

SEQ ID NO: 113444 - DNA, 25 bp, SARS Virus
gtgtctaagttggctgttattggtc

SEQ ID NO: 113445 - DNA, 25 bp, SARS Virus
tgtctaagttgagtgttattggtct

SEQ ID NO: 113446 - DNA, 25 bp, SARS Virus
gtctaagttgacggttattggtctt

SEQ ID NO: 113447 - DNA, 25 bp, SARS Virus
tctaagttgactgttattggtctta

SEQ ID NO: 113448 - DNA, 25 bp, SARS Virus
ctaagttgactggtattggtcttac

SEQ ID NO: 113449 - DNA, 25 bp, SARS Virus
taagttgactgtgattggtcttacc

SEQ ID NO: 113450 - DNA, 25 bp, SARS Virus
aagttgactgttgttggtcttacct

SEQ ID NO: 113451 - DNA, 25 bp, SARS Virus
agttgactgttagtggtcttacctc

SEQ ID NO: 113452 - DNA, 25 bp, SARS Virus
gttgactgttatgggtcttacctcc

SEQ ID NO: 113453 - DNA, 25 bp, SARS Virus
ttgactgttattggtcttacctcct

SEQ ID NO: 113454 - DNA, 25 bp, SARS Virus
tgactgttattggtcttacctcctg

SEQ ID NO: 113455 - DNA, 25 bp, SARS Virus
gactgttattgggcttacctcctgc

SEQ ID NO: 113456 - DNA, 25 bp, SARS Virus
actgttattggtgttacctcctgcg

SEQ ID NO: 113457 - DNA, 25 bp, SARS Virus
ctgttattggtcgtacctcctgcgt

SEQ ID NO: 113458 - DNA, 25 bp, SARS Virus
tgttattggtctgacctcctgcgtt

SEQ ID NO: 113459 - DNA, 25 bp, SARS Virus
gttattggtcttgcctcctgcgtta

SEQ ID NO: 113460 - DNA, 25 bp, SARS Virus
ttattggtcttagctcctgcgttac

SEQ ID NO: 113461 - DNA, 25 bp, SARS Virus
tattggtcttacgtcctgcgttacc

SEQ ID NO: 113462 - DNA, 25 bp, SARS Virus
attggtcttaccgcctgcgttaccc

SEQ ID NO: 113463 - DNA, 25 bp, SARS Virus
ttggtcttacctgctgcgttacccc

SEQ ID NO: 113464 - DNA, 25 bp, SARS Virus
tggtcttacctcgtgcgttaccccg

SEQ ID NO: 113465 - DNA, 25 bp, SARS Virus
ggtcttacctccggcgttaccccgt

SEQ ID NO: 113466 - DNA, 25 bp, SARS Virus
gtcttacctcctgcgttaccccgtt

SEQ ID NO: 113467 - DNA, 25 bp, SARS Virus
tcttacctcctgggttaccccgttc

SEQ ID NO: 113468 - DNA, 25 bp, SARS Virus
cttacctcctgcgttaccccgttcc

SEQ ID NO: 113469 - DNA, 25 bp, SARS Virus
ttacctcctgcggtaccccgttccg

SEQ ID NO: 113470 - DNA, 25 bp, SARS Virus
tacctcctgcgtgaccccgttccgg

SEQ ID NO: 113471 - DNA, 25 bp, SARS Virus
acctcctgcgttgccccgttccggt

SEQ ID NO: 113472 - DNA, 25 bp, SARS Virus
cctcctgcgttagcccgttccggtt

SEQ ID NO: 113473 - DNA, 25 bp, SARS Virus
ctcctgcgttacgccgttccggttt

SEQ ID NO: 113474 - DNA, 25 bp, SARS Virus
tcctgcgttaccgcgttccggtttt

SEQ ID NO: 113475 - DNA, 25 bp, SARS Virus
cctgcgttacccggttccggttttg

SEQ ID NO: 113476 - DNA, 25 bp, SARS Virus
ctgcgttaccccgttccggttttgt

SEQ ID NO: 113477 - DNA, 25 bp, SARS Virus
tgcgttaccccggtccggttttgtc

SEQ ID NO: 113478 - DNA, 25 bp, SARS Virus
gcgttaccccgtgccggttttgtcg

SEQ ID NO: 113479 - DNA, 25 bp, SARS Virus
cgttaccccgttgcggttttgtcgc

SEQ ID NO: 113480 - DNA, 25 bp, SARS Virus
gttaccccgttcgggttttgtcgcg

SEQ ID NO: 113481 - DNA, 25 bp, SARS Virus
ttaccccgttccggttttgtcgcgg

SEQ ID NO: 113482 - DNA, 25 bp, SARS Virus
taccccgttccggttttgtcgcggc

SEQ ID NO: 113483 - DNA, 25 bp, SARS Virus
accccgttccgggtttgtcgcggct

SEQ ID NO: 113484 - DNA, 25 bp, SARS Virus
ccccgttccggtgttgtcgcggctg

SEQ ID NO: 113485 - DNA, 25 bp, SARS Virus
cccgttccggttgtgtcgcggctgg

SEQ ID NO: 113486 - DNA, 25 bp, SARS Virus
ccgttccggtttggtcgcggctggg

SEQ ID NO: 113487 - DNA, 25 bp, SARS Virus
cgttccggttttgtcgcggctgggg

SEQ ID NO: 113488 - DNA, 25 bp, SARS Virus
gttccggttttggcgcggctggggt

SEQ ID NO: 113489 - DNA, 25 bp, SARS Virus
ttccggttttgtggcggctggggtt

SEQ ID NO: 113490 - DNA, 25 bp, SARS Virus
tccggttttgtcgcggctggggttc

SEQ ID NO: 113491 - DNA, 25 bp, SARS Virus
ccggttttgtcggggctggggttcc

SEQ ID NO: 113492 - DNA, 25 bp, SARS Virus
cggttttgtcgcggctggggttcca

SEQ ID NO: 113493 - DNA, 25 bp, SARS Virus
ggttttgtcgcggctggggttccaa

SEQ ID NO: 113494 - DNA, 25 bp, SARS Virus
gttttgtcgcgggtggggttccaaa

SEQ ID NO: 113495 - DNA, 25 bp, SARS Virus
ttttgtcgcggcgggggttccaaat

SEQ ID NO: 113496 - DNA, 25 bp, SARS Virus
tttgtcgcggctggggttccaaatg

SEQ ID NO: 113497 - DNA, 25 bp, SARS Virus
ttgtcgcggctggggttccaaatgg

SEQ ID NO: 113498 - DNA, 25 bp, SARS Virus
tgtcgcggctggggttccaaatggg

SEQ ID NO: 113499 - DNA, 25 bp, SARS Virus
gtcgcggctggggttccaaatgggt

SEQ ID NO: 113500 - DNA, 25 bp, SARS Virus
tcgcggctgggggtccaaatgggtt

SEQ ID NO: 113501 - DNA, 25 bp, SARS Virus
cgcggctggggtgccaaatgggtta

SEQ ID NO: 113502 - DNA, 25 bp, SARS Virus
gcggctggggttgcaaatgggttat

SEQ ID NO: 113503 - DNA, 25 bp, SARS Virus
cggctggggttcgaaatgggttatt

SEQ ID NO: 113504 - DNA, 25 bp, SARS Virus
ggctggggttccgaatgggttatta

SEQ ID NO: 113505 - DNA, 25 bp, SARS Virus
gctggggttccagatgggttattat

SEQ ID NO: 113506 - DNA, 25 bp, SARS Virus
ctggggttccaagtgggttattatg

SEQ ID NO: 113507 - DNA, 25 bp, SARS Virus
tggggttccaaaggggttattatga

SEQ ID NO: 113508 - DNA, 25 bp, SARS Virus
ggggttccaaatgggttattatgac

SEQ ID NO: 113509 - DNA, 25 bp, SARS Virus
gggttccaaatgggttattatgacg

SEQ ID NO: 113510 - DNA, 25 bp, SARS Virus
ggttccaaatgggttattatgacgc

SEQ ID NO: 113511 - DNA, 25 bp, SARS Virus
gttccaaatggggtattatgacgca

SEQ ID NO: 113512 - DNA, 25 bp, SARS Virus
ttccaaatgggtgattatgacgcag

SEQ ID NO: 113513 - DNA, 25 bp, SARS Virus
tccaaatgggttgttatgacgcaga

SEQ ID NO: 113514 - DNA, 25 bp, SARS Virus
ccaaatgggttagtatgacgcagaa

SEQ ID NO: 113515 - DNA, 25 bp, SARS Virus
caaatgggttatgatgacgcagaac

SEQ ID NO: 113516 - DNA, 25 bp, SARS Virus
aaatgggttattgtgacgcagaacc

SEQ ID NO: 113517 - DNA, 25 bp, SARS Virus
aatgggttattaggacgcagaacca

SEQ ID NO: 113518 - DNA, 25 bp, SARS Virus
atgggttattatgacgcagaaccaa

SEQ ID NO: 113519 - DNA, 25 bp, SARS Virus
tgggttattatggcgcagaaccaag

SEQ ID NO: 113520 - DNA, 25 bp, SARS Virus
gggttattatgaggcagaaccaagt

SEQ ID NO: 113521 - DNA, 25 bp, SARS Virus
ggttattatgacgcagaaccaagtg

SEQ ID NO: 113522 - DNA, 25 bp, SARS Virus
gttattatgacggagaaccaagtgt

SEQ ID NO: 113523 - DNA, 25 bp, SARS Virus
ttattatgacgcggaaccaagtgtc

SEQ ID NO: 113524 - DNA, 25 bp, SARS Virus
tattatgacgcagaaccaagtgtcg

SEQ ID NO: 113525 - DNA, 25 bp, SARS Virus
attatgacgcaggaccaagtgtcga

SEQ ID NO: 113526 - DNA, 25 bp, SARS Virus
ttatgacgcagagccaagtgtcgag

SEQ ID NO: 113527 - DNA, 25 bp, SARS Virus
tatgacgcagaagcaagtgtcgaga

SEQ ID NO: 113528 - DNA, 25 bp, SARS Virus
atgacgcagaacgaagtgtcgagag

SEQ ID NO: 113529 - DNA, 25 bp, SARS Virus
tgacgcagaaccgagtgtcgagagt

SEQ ID NO: 113530 - DNA, 25 bp, SARS Virus
gacgcagaaccaggtgtcgagagtg

SEQ ID NO: 113531 - DNA, 25 bp, SARS Virus
acgcagaaccaagtgtcgagagtga

SEQ ID NO: 113532 - DNA, 25 bp, SARS Virus
cgcagaaccaagggtcgagagtgag

SEQ ID NO: 113533 - DNA, 25 bp, SARS Virus
gcagaaccaagtgtcgagagtgagt

SEQ ID NO: 113534 - DNA, 25 bp, SARS Virus
cagaaccaagtggcgagagtgagtc

SEQ ID NO: 113535 - DNA, 25 bp, SARS Virus
agaaccaagtgtggagagtgagtcg

SEQ ID NO: 113536 - DNA, 25 bp, SARS Virus
gaaccaagtgtcgagagtgagtcgt

SEQ ID NO: 113537 - DNA, 25 bp, SARS Virus
aaccaagtgtcgggagtgagtcgta

SEQ ID NO: 113538 - DNA, 25 bp, SARS Virus
accaagtgtcgagagtgagtcgtac

SEQ ID NO: 113539 - DNA, 25 bp, SARS Virus
ccaagtgtcgagggtgagtcgtacc

SEQ ID NO: 113540 - DNA, 25 bp, SARS Virus
caagtgtcgagagtgagtcgtaccg

SEQ ID NO: 113541 - DNA, 25 bp, SARS Virus
aagtgtcgagagggagtcgtaccgt

SEQ ID NO: 113542 - DNA, 25 bp, SARS Virus
agtgtcgagagtgagtcgtaccgtt

SEQ ID NO: 113543 - DNA, 25 bp, SARS Virus
gtgtcgagagtgggtcgtaccgttc

SEQ ID NO: 113544 - DNA, 25 bp, SARS Virus
tgtcgagagtgagtcgtaccgttcc

SEQ ID NO: 113545 - DNA, 25 bp, SARS Virus
gtcgagagtgaggcgtaccgttcct

SEQ ID NO: 113546 - DNA, 25 bp, SARS Virus
tcgagagtgagtggtaccgttcctc

SEQ ID NO: 113547 - DNA, 25 bp, SARS Virus
cgagagtgagtcgtaccgttcctcc

SEQ ID NO: 113548 - DNA, 25 bp, SARS Virus
gagagtgagtcggaccgttcctcct

SEQ ID NO: 113549 - DNA, 25 bp, SARS Virus
agagtgagtcgtgccgttcctcctt

SEQ ID NO: 113550 - DNA, 25 bp, SARS Virus
gagtgagtcgtagcgttcctccttg

SEQ ID NO: 113551 - DNA, 25 bp, SARS Virus
agtgagtcgtacggttcctccttga

SEQ ID NO: 113552 - DNA, 25 bp, SARS Virus
gtgagtcgtaccgttcctccttgaa

SEQ ID NO: 113553 - DNA, 25 bp, SARS Virus
tgagtcgtaccggtcctccttgaat

SEQ ID NO: 113554 - DNA, 25 bp, SARS Virus
gagtcgtaccgtgcctccttgaatc

SEQ ID NO: 113555 - DNA, 25 bp, SARS Virus
agtcgtaccgttgctccttgaatct

SEQ ID NO: 113556 - DNA, 25 bp, SARS Virus
gtcgtaccgttcgtccttgaatcta

SEQ ID NO: 113557 - DNA, 25 bp, SARS Virus
tcgtaccgttccgccttgaatctaa

SEQ ID NO: 113558 - DNA, 25 bp, SARS Virus
cgtaccgttcctgcttgaatctaag

SEQ ID NO: 113559 - DNA, 25 bp, SARS Virus
gtaccgttcctcgttgaatctaagg

SEQ ID NO: 113560 - DNA, 25 bp, SARS Virus
taccgttcctccgtgaatctaaggg

SEQ ID NO: 113561 - DNA, 25 bp, SARS Virus
accgttcctcctggaatctaaggga

SEQ ID NO: 113562 - DNA, 25 bp, SARS Virus
ccgttcctccttgaatctaagggag

SEQ ID NO: 113563 - DNA, 25 bp, SARS Virus
cgttcctccttggatctaagggagc

SEQ ID NO: 113564 - DNA, 25 bp, SARS Virus
gttcctccttgagtctaagggagct

SEQ ID NO: 113565 - DNA, 25 bp, SARS Virus
ttcctccttgaagctaagggagctc

SEQ ID NO: 113566 - DNA, 25 bp, SARS Virus
tcctccttgaatgtaagggagctcc

SEQ ID NO: 113567 - DNA, 25 bp, SARS Virus
cctccttgaatcgaagggagctccg

SEQ ID NO: 113568 - DNA, 25 bp, SARS Virus
ctccttgaatctgagggagctccgg

SEQ ID NO: 113569 - DNA, 25 bp, SARS Virus
tccttgaatctaggggagctccggt

SEQ ID NO: 113570 - DNA, 25 bp, SARS Virus
ccttgaatctaagggagctccggtc

SEQ ID NO: 113571 - DNA, 25 bp, SARS Virus
cttgaatctaagggagctccggtcc

SEQ ID NO: 113572 - DNA, 25 bp, SARS Virus
ttgaatctaagggagctccggtccc

SEQ ID NO: 113573 - DNA, 25 bp, SARS Virus
tgaatctaagggggctccggtcccg

SEQ ID NO: 113574 - DNA, 25 bp, SARS Virus
gaatctaagggagctccggtcccgc

SEQ ID NO: 113575 - DNA, 25 bp, SARS Virus
aatctaagggaggtccggtcccgca

SEQ ID NO: 113576 - DNA, 25 bp, SARS Virus
atctaagggagcgccggtcccgcaa

SEQ ID NO: 113577 - DNA, 25 bp, SARS Virus
tctaagggagctgcggtcccgcaag

SEQ ID NO: 113578 - DNA, 25 bp, SARS Virus
ctaagggagctcgggtcccgcaagg

SEQ ID NO: 113579 - DNA, 25 bp, SARS Virus
taagggagctccggtcccgcaaggt

SEQ ID NO: 113580 - DNA, 25 bp, SARS Virus
aagggagctccggtcccgcaaggtt

SEQ ID NO: 113581 - DNA, 25 bp, SARS Virus
agggagctccgggcccgcaaggtta

SEQ ID NO: 113582 - DNA, 25 bp, SARS Virus
gggagctccggtgccgcaaggttag

SEQ ID NO: 113583 - DNA, 25 bp, SARS Virus
ggagctccggtcgcgcaaggttagt

SEQ ID NO: 113584 - DNA, 25 bp, SARS Virus
gagctccggtccggcaaggttagtt

SEQ ID NO: 113585 - DNA, 25 bp, SARS Virus
agctccggtcccgcaaggttagttg

SEQ ID NO: 113586 - DNA, 25 bp, SARS Virus
gctccggtcccggaaggttagttgt

SEQ ID NO: 113587 - DNA, 25 bp, SARS Virus
ctccggtcccgcgaggttagttgtg

SEQ ID NO: 113588 - DNA, 25 bp, SARS Virus
tccggtcccgcagggttagttgtgg

SEQ ID NO: 113589 - DNA, 25 bp, SARS Virus
ccggtcccgcaaggttagttgtggt

SEQ ID NO: 113590 - DNA, 25 bp, SARS Virus
cggtcccgcaaggttagttgtggtt

SEQ ID NO: 113591 - DNA, 25 bp, SARS Virus
ggtcccgcaagggtagttgtggtta

SEQ ID NO: 113592 - DNA, 25 bp, SARS Virus
gtcccgcaaggtgagttgtggttat

SEQ ID NO: 113593 - DNA, 25 bp, SARS Virus
tcccgcaaggttggttgtggttatc

SEQ ID NO: 113594 - DNA, 25 bp, SARS Virus
cccgcaaggttagttgtggttatca

SEQ ID NO: 113595 - DNA, 25 bp, SARS Virus
ccgcaaggttaggtgtggttatcac

SEQ ID NO: 113596 - DNA, 25 bp, SARS Virus
cgcaaggttagtggtggttatcacc

SEQ ID NO: 113597 - DNA, 25 bp, SARS Virus
gcaaggttagttgtggttatcacca

SEQ ID NO: 113598 - DNA, 25 bp, SARS Virus
caaggttagttggggttatcaccag

SEQ ID NO: 113599 - DNA, 25 bp, SARS Virus
aaggttagttgtggttatcaccagg

SEQ ID NO: 113600 - DNA, 25 bp, SARS Virus
aggttagttgtggttatcaccaggt

SEQ ID NO: 113601 - DNA, 25 bp, SARS Virus
ggttagttgtgggtatcaccaggtc

SEQ ID NO: 113602 - DNA, 25 bp, SARS Virus
gttagttgtggtgatcaccaggtct

SEQ ID NO: 113603 - DNA, 25 bp, SARS Virus
ttagttgtggttgtcaccaggtcta

SEQ ID NO: 113604 - DNA, 25 bp, SARS Virus
tagttgtggttagcaccaggtctac

SEQ ID NO: 113605 - DNA, 25 bp, SARS Virus
agttgtggttatgaccaggtctact

SEQ ID NO: 113606 - DNA, 25 bp, SARS Virus
gttgtggttatcgccaggtctactg

SEQ ID NO: 113607 - DNA, 25 bp, SARS Virus
ttgtggttatcagcaggtctactgg

SEQ ID NO: 113608 - DNA, 25 bp, SARS Virus
tgtggttatcacgaggtctactggt

SEQ ID NO: 113609 - DNA, 25 bp, SARS Virus
gtggttatcaccgggtctactggtt

SEQ ID NO: 113610 - DNA, 25 bp, SARS Virus
tggttatcaccaggtctactggttt

SEQ ID NO: 113611 - DNA, 25 bp, SARS Virus
ggttatcaccaggtctactggttta

SEQ ID NO: 113612 - DNA, 25 bp, SARS Virus
gttatcaccagggctactggtttaa

SEQ ID NO: 113613 - DNA, 25 bp, SARS Virus
ttatcaccaggtgtactggtttaac

SEQ ID NO: 113614 - DNA, 25 bp, SARS Virus
tatcaccaggtcgactggtttaacc

SEQ ID NO: 113615 - DNA, 25 bp, SARS Virus
atcaccaggtctgctggtttaaccg

SEQ ID NO: 113616 - DNA, 25 bp, SARS Virus
tcaccaggtctagtggtttaaccga

SEQ ID NO: 113617 - DNA, 25 bp, SARS Virus
caccaggtctacgggtttaaccgat

SEQ ID NO: 113618 - DNA, 25 bp, SARS Virus
accaggtctactggtttaaccgatg

SEQ ID NO: 113619 - DNA, 25 bp, SARS Virus
ccaggtctactggtttaaccgatga

SEQ ID NO: 113620 - DNA, 25 bp, SARS Virus
caggtctactgggttaaccgatgat

SEQ ID NO: 113621 - DNA, 25 bp, SARS Virus
aggtctactggtgtaaccgatgatg

SEQ ID NO: 113622 - DNA, 25 bp, SARS Virus
ggtctactggttgaaccgatgatgg

SEQ ID NO: 113623 - DNA, 25 bp, SARS Virus
gtctactggtttgaccgatgatggc

SEQ ID NO: 113624 - DNA, 25 bp, SARS Virus
tctactggtttagccgatgatggct

SEQ ID NO: 113625 - DNA, 25 bp, SARS Virus
ctactggtttaagcgatgatggctt

SEQ ID NO: 113626 - DNA, 25 bp, SARS Virus
tactggtttaacggatgatggcttc

SEQ ID NO: 113627 - DNA, 25 bp, SARS Virus
actggtttaaccgatgatggcttct

SEQ ID NO: 113628 - DNA, 25 bp, SARS Virus
ctggtttaaccggtgatggcttctc

SEQ ID NO: 113629 - DNA, 25 bp, SARS Virus
tggtttaaccgaggatggcttctcg

SEQ ID NO: 113630 - DNA, 25 bp, SARS Virus
ggtttaaccgatgatggcttctcga

SEQ ID NO: 113631 - DNA, 25 bp, SARS Virus
gtttaaccgatggtggcttctcgat

SEQ ID NO: 113632 - DNA, 25 bp, SARS Virus
tttaaccgatgagggcttctcgatg

SEQ ID NO: 113633 - DNA, 25 bp, SARS Virus
ttaaccgatgatggcttctcgatgg

SEQ ID NO: 113634 - DNA, 25 bp, SARS Virus
taaccgatgatggcttctcgatggg

SEQ ID NO: 113635 - DNA, 25 bp, SARS Virus
aaccgatgatgggttctcgatgggc

SEQ ID NO: 113636 - DNA, 25 bp, SARS Virus
accgatgatggcgtctcgatgggct

SEQ ID NO: 113637 - DNA, 25 bp, SARS Virus
ccgatgatggctgctcgatgggctg

SEQ ID NO: 113638 - DNA, 25 bp, SARS Virus
cgatgatggcttgtcgatgggctgc

SEQ ID NO: 113639 - DNA, 25 bp, SARS Virus
gatgatggcttcgcgatgggctgct

SEQ ID NO: 113640 - DNA, 25 bp, SARS Virus
atgatggcttctggatgggctgctc

SEQ ID NO: 113641 - DNA, 25 bp, SARS Virus
tgatggcttctcgatgggctgctca

SEQ ID NO: 113642 - DNA, 25 bp, SARS Virus
gatggcttctcggtgggctgctcaa

SEQ ID NO: 113643 - DNA, 25 bp, SARS Virus
atggcttctcgaggggctgctcaag

SEQ ID NO: 113644 - DNA, 25 bp, SARS Virus
tggcttctcgatgggctgctcaagc

SEQ ID NO: 113645 - DNA, 25 bp, SARS Virus
ggcttctcgatgggctgctcaagca

SEQ ID NO: 113646 - DNA, 25 bp, SARS Virus
gcttctcgatgggctgctcaagcac

SEQ ID NO: 113647 - DNA, 25 bp, SARS Virus
cttctcgatggggtgctcaagcacc

SEQ ID NO: 113648 - DNA, 25 bp, SARS Virus
ttctcgatgggcggctcaagcacca

SEQ ID NO: 113649 - DNA, 25 bp, SARS Virus
tctcgatgggctgctcaagcaccac

SEQ ID NO: 113650 - DNA, 25 bp, SARS Virus
ctcgatgggctggtcaagcaccacc

SEQ ID NO: 113651 - DNA, 25 bp, SARS Virus
tcgatgggctgcgcaagcaccacca

SEQ ID NO: 113652 - DNA, 25 bp, SARS Virus
cgatgggctgctgaagcaccaccac

SEQ ID NO: 113653 - DNA, 25 bp, SARS Virus
gatgggctgctcgagcaccaccact

SEQ ID NO: 113654 - DNA, 25 bp, SARS Virus
atgggctgctcaggcaccaccactg

SEQ ID NO: 113655 - DNA, 25 bp, SARS Virus
tgggctgctcaagcaccaccactgc

SEQ ID NO: 113656 - DNA, 25 bp, SARS Virus
gggctgctcaaggaccaccactgcc

SEQ ID NO: 113657 - DNA, 25 bp, SARS Virus
ggctgctcaagcgccaccactgccg

SEQ ID NO: 113658 - DNA, 25 bp, SARS Virus
gctgctcaagcagcaccactgccgt

SEQ ID NO: 113659 - DNA, 25 bp, SARS Virus
ctgctcaagcacgaccactgccgtt

SEQ ID NO: 113660 - DNA, 25 bp, SARS Virus
tgctcaagcaccgccactgccgttt

SEQ ID NO: 113661 - DNA, 25 bp, SARS Virus
gctcaagcaccagcactgccgtttt

SEQ ID NO: 113662 - DNA, 25 bp, SARS Virus
ctcaagcaccacgactgccgtttta

SEQ ID NO: 113663 - DNA, 25 bp, SARS Virus
tcaagcaccaccgctgccgttttac

SEQ ID NO: 113664 - DNA, 25 bp, SARS Virus
caagcaccaccagtgccgttttact

SEQ ID NO: 113665 - DNA, 25 bp, SARS Virus
aagcaccaccacggccgttttactt

SEQ ID NO: 113666 - DNA, 25 bp, SARS Virus
agcaccaccactgccgttttacttt

SEQ ID NO: 113667 - DNA, 25 bp, SARS Virus
gcaccaccactggcgttttactttc

SEQ ID NO: 113668 - DNA, 25 bp, SARS Virus
caccaccactgcggttttactttct

SEQ ID NO: 113669 - DNA, 25 bp, SARS Virus
accaccactgccgttttactttctc

SEQ ID NO: 113670 - DNA, 25 bp, SARS Virus
ccaccactgccggtttactttctcg

SEQ ID NO: 113671 - DNA, 25 bp, SARS Virus
caccactgccgtgttactttctcga

SEQ ID NO: 113672 - DNA, 25 bp, SARS Virus
accactgccgttgtactttctcgag

SEQ ID NO: 113673 - DNA, 25 bp, SARS Virus
ccactgccgtttgactttctcgagt

SEQ ID NO: 113674 - DNA, 25 bp, SARS Virus
cactgccgttttgctttctcgagtc

SEQ ID NO: 113675 - DNA, 25 bp, SARS Virus
actgccgttttagtttctcgagtcg

SEQ ID NO: 113676 - DNA, 25 bp, SARS Virus
ctgccgttttacgttctcgagtcgg

SEQ ID NO: 113677 - DNA, 25 bp, SARS Virus
tgccgttttactgtctcgagtcggg

SEQ ID NO: 113678 - DNA, 25 bp, SARS Virus
gccgttttacttgctcgagtcgggg

SEQ ID NO: 113679 - DNA, 25 bp, SARS Virus
ccgttttactttgtcgagtcggggt

SEQ ID NO: 113680 - DNA, 25 bp, SARS Virus
cgttttactttcgcgagtcggggtc

SEQ ID NO: 113681 - DNA, 25 bp, SARS Virus
gttttactttctggagtcggggtct

SEQ ID NO: 113682 - DNA, 25 bp, SARS Virus
ttttactttctcgagtcggggtcta

SEQ ID NO: 113683 - DNA, 25 bp, SARS Virus
tttactttctcgggtcggggtctac

SEQ ID NO: 113684 - DNA, 25 bp, SARS Virus
ttactttctcgagtcggggtctacc

SEQ ID NO: 113685 - DNA, 25 bp, SARS Virus
tactttctcgaggcggggtctacca

SEQ ID NO: 113686 - DNA, 25 bp, SARS Virus
actttctcgagtgggggtctaccat

SEQ ID NO: 113687 - DNA, 25 bp, SARS Virus
ctttctcgagtcggggtctaccatg

SEQ ID NO: 113688 - DNA, 25 bp, SARS Virus
tttctcgagtcggggtctaccatga

SEQ ID NO: 113689 - DNA, 25 bp, SARS Virus
ttctcgagtcggggtctaccatgaa

SEQ ID NO: 113690 - DNA, 25 bp, SARS Virus
tctcgagtcggggtctaccatgaag

SEQ ID NO: 113691 - DNA, 25 bp, SARS Virus
ctcgagtcgggggctaccatgaaga

SEQ ID NO: 113692 - DNA, 25 bp, SARS Virus
tcgagtcggggtgtaccatgaagat

SEQ ID NO: 113693 - DNA, 25 bp, SARS Virus
cgagtcggggtcgaccatgaagata

SEQ ID NO: 113694 - DNA, 25 bp, SARS Virus
gagtcggggtctgccatgaagataa

SEQ ID NO: 113695 - DNA, 25 bp, SARS Virus
agtcggggtctagcatgaagataat

SEQ ID NO: 113696 - DNA, 25 bp, SARS Virus
gtcggggtctacgatgaagataatg

SEQ ID NO: 113697 - DNA, 25 bp, SARS Virus
tcggggtctaccgtgaagataatgg

SEQ ID NO: 113698 - DNA, 25 bp, SARS Virus
cggggtctaccaggaagataatgga

SEQ ID NO: 113699 - DNA, 25 bp, SARS Virus
ggggtctaccatgaagataatggat

SEQ ID NO: 113700 - DNA, 25 bp, SARS Virus
gggtctaccatggagataatggatc

SEQ ID NO: 113701 - DNA, 25 bp, SARS Virus
ggtctaccatgaggataatggatcc

SEQ ID NO: 113702 - DNA, 25 bp, SARS Virus
gtctaccatgaagataatggatcct

SEQ ID NO: 113703 - DNA, 25 bp, SARS Virus
tctaccatgaaggtaatggatcctt

SEQ ID NO: 113704 - DNA, 25 bp, SARS Virus
ctaccatgaagagaatggatccttg

SEQ ID NO: 113705 - DNA, 25 bp, SARS Virus
taccatgaagatgatggatccttga

SEQ ID NO: 113706 - DNA, 25 bp, SARS Virus
accatgaagatagtggatccttgac

SEQ ID NO: 113707 - DNA, 25 bp, SARS Virus
ccatgaagataagggatccttgacc

SEQ ID NO: 113708 - DNA, 25 bp, SARS Virus
catgaagataatggatccttgaccg

SEQ ID NO: 113709 - DNA, 25 bp, SARS Virus
atgaagataatggatccttgaccgg

SEQ ID NO: 113710 - DNA, 25 bp, SARS Virus
tgaagataatgggtccttgaccggg

SEQ ID NO: 113711 - DNA, 25 bp, SARS Virus
gaagataatggagccttgaccgggt

SEQ ID NO: 113712 - DNA, 25 bp, SARS Virus
aagataatggatgcttgaccgggtc

SEQ ID NO: 113713 - DNA, 25 bp, SARS Virus
agataatggatcgttgaccgggtct

SEQ ID NO: 113714 - DNA, 25 bp, SARS Virus
gataatggatccgtgaccgggtctt

SEQ ID NO: 113715 - DNA, 25 bp, SARS Virus
ataatggatcctggaccgggtcttc

SEQ ID NO: 113716 - DNA, 25 bp, SARS Virus
taatggatccttgaccgggtcttcg

SEQ ID NO: 113717 - DNA, 25 bp, SARS Virus
aatggatccttggccgggtcttcga

SEQ ID NO: 113718 - DNA, 25 bp, SARS Virus
atggatccttgagcgggtcttcgaa

SEQ ID NO: 113719 - DNA, 25 bp, SARS Virus
tggatccttgacggggtcttcgaag

SEQ ID NO: 113720 - DNA, 25 bp, SARS Virus
ggatccttgaccgggtcttcgaagt

SEQ ID NO: 113721 - DNA, 25 bp, SARS Virus
gatccttgaccgggtcttcgaagtg

SEQ ID NO: 113722 - DNA, 25 bp, SARS Virus
atccttgaccgggtcttcgaagtga

SEQ ID NO: 113723 - DNA, 25 bp, SARS Virus
tccttgaccggggcttcgaagtgaa

SEQ ID NO: 113724 - DNA, 25 bp, SARS Virus
ccttgaccgggtgttcgaagtgaag

SEQ ID NO: 113725 - DNA, 25 bp, SARS Virus
cttgaccgggtcgtcgaagtgaagg

SEQ ID NO: 113726 - DNA, 25 bp, SARS Virus
ttgaccgggtctgcgaagtgaaggg

SEQ ID NO: 113727 - DNA, 25 bp, SARS Virus
tgaccgggtcttggaagtgaaggga

SEQ ID NO: 113728 - DNA, 25 bp, SARS Virus
gaccgggtcttcgaagtgaagggat

SEQ ID NO: 113729 - DNA, 25 bp, SARS Virus
accgggtcttcggagtgaagggatg

SEQ ID NO: 113730 - DNA, 25 bp, SARS Virus
ccgggtcttcgaggtgaagggatgc

SEQ ID NO: 113731 - DNA, 25 bp, SARS Virus
cgggtcttcgaagtgaagggatgcc

SEQ ID NO: 113732 - DNA, 25 bp, SARS Virus
gggtcttcgaagggaagggatgccg

SEQ ID NO: 113733 - DNA, 25 bp, SARS Virus
ggtcttcgaagtgaagggatgccgc

SEQ ID NO: 113734 - DNA, 25 bp, SARS Virus
gtcttcgaagtggagggatgccgcg

SEQ ID NO: 113735 - DNA, 25 bp, SARS Virus
tcttcgaagtgaggggatgccgcga

SEQ ID NO: 113736 - DNA, 25 bp, SARS Virus
cttcgaagtgaagggatgccgcgat

SEQ ID NO: 113737 - DNA, 25 bp, SARS Virus
ttcgaagtgaagggatgccgcgatt

SEQ ID NO: 113738 - DNA, 25 bp, SARS Virus
tcgaagtgaagggatgccgcgattg

SEQ ID NO: 113739 - DNA, 25 bp, SARS Virus
cgaagtgaaggggtgccgcgattgt

SEQ ID NO: 113740 - DNA, 25 bp, SARS Virus
gaagtgaagggaggccgcgattgtt

SEQ ID NO: 113741 - DNA, 25 bp, SARS Virus
aagtgaagggatgccgcgattgttt

SEQ ID NO: 113742 - DNA, 25 bp, SARS Virus
agtgaagggatggcgcgattgtttc

SEQ ID NO: 113743 - DNA, 25 bp, SARS Virus
gtgaagggatgcggcgattgtttct

SEQ ID NO: 113744 - DNA, 25 bp, SARS Virus
tgaagggatgccgcgattgtttctt

SEQ ID NO: 113745 - DNA, 25 bp, SARS Virus
gaagggatgccgggattgtttcttc

SEQ ID NO: 113746 - DNA, 25 bp, SARS Virus
aagggatgccgcgattgtttcttcc

SEQ ID NO: 113747 - DNA, 25 bp, SARS Virus
agggatgccgcggttgtttcttccg

SEQ ID NO: 113748 - DNA, 25 bp, SARS Virus
gggatgccgcgagtgtttcttccgt

SEQ ID NO: 113749 - DNA, 25 bp, SARS Virus
ggatgccgcgatggtttcttccgta

SEQ ID NO: 113750 - DNA, 25 bp, SARS Virus
gatgccgcgattgtttcttccgtag

SEQ ID NO: 113751 - DNA, 25 bp, SARS Virus
atgccgcgattggttcttccgtagc

SEQ ID NO: 113752 - DNA, 25 bp, SARS Virus
tgccgcgattgtgtcttccgtagca

SEQ ID NO: 113753 - DNA, 25 bp, SARS Virus
gccgcgattgttgcttccgtagcat

SEQ ID NO: 113754 - DNA, 25 bp, SARS Virus
ccgcgattgtttgttccgtagcata

SEQ ID NO: 113755 - DNA, 25 bp, SARS Virus
cgcgattgtttcgtccgtagcatac

SEQ ID NO: 113756 - DNA, 25 bp, SARS Virus
gcgattgtttctgccgtagcatacc

SEQ ID NO: 113757 - DNA, 25 bp, SARS Virus
cgattgtttcttgcgtagcataccc

SEQ ID NO: 113758 - DNA, 25 bp, SARS Virus
gattgtttcttcggtagcataccca

SEQ ID NO: 113759 - DNA, 25 bp, SARS Virus
attgtttcttccgtagcatacccaa

SEQ ID NO: 113760 - DNA, 25 bp, SARS Virus
ttgtttcttccggagcatacccaac

SEQ ID NO: 113761 - DNA, 25 bp, SARS Virus
tgtttcttccgtggcatacccaacg

SEQ ID NO: 113762 - DNA, 25 bp, SARS Virus
gtttcttccgtagcatacccaacgt

SEQ ID NO: 113763 - DNA, 25 bp, SARS Virus
tttcttccgtaggatacccaacgtt

SEQ ID NO: 113764 - DNA, 25 bp, SARS Virus
ttcttccgtagcgtacccaacgttg

SEQ ID NO: 113765 - DNA, 25 bp, SARS Virus
tcttccgtagcagacccaacgttga

SEQ ID NO: 113766 - DNA, 25 bp, SARS Virus
cttccgtagcatgcccaacgttgac

SEQ ID NO: 113767 - DNA, 25 bp, SARS Virus
ttccgtagcatagccaacgttgact

SEQ ID NO: 113768 - DNA, 25 bp, SARS Virus
tccgtagcatacgcaacgttgactc

SEQ ID NO: 113769 - DNA, 25 bp, SARS Virus
ccgtagcataccgaacgttgactcc

SEQ ID NO: 113770 - DNA, 25 bp, SARS Virus
cgtagcatacccgacgttgactccc

SEQ ID NO: 113771 - DNA, 25 bp, SARS Virus
gtagcatacccagcgttgactccct

SEQ ID NO: 113772 - DNA, 25 bp, SARS Virus
tagcatacccaaggttgactccctc

SEQ ID NO: 113773 - DNA, 25 bp, SARS Virus
agcatacccaacgttgactccctcg

SEQ ID NO: 113774 - DNA, 25 bp, SARS Virus
gcatacccaacggtgactccctcgg

SEQ ID NO: 113775 - DNA, 25 bp, SARS Virus
catacccaacgtggactccctcgga

SEQ ID NO: 113776 - DNA, 25 bp, SARS Virus
atacccaacgttgactccctcggaa

SEQ ID NO: 113777 - DNA, 25 bp, SARS Virus
tacccaacgttggctccctcggaac

SEQ ID NO: 113778 - DNA, 25 bp, SARS Virus
acccaacgttgagtccctcggaact

SEQ ID NO: 113779 - DNA, 25 bp, SARS Virus
cccaacgttgacgccctcggaactt

SEQ ID NO: 113780 - DNA, 25 bp, SARS Virus
ccaacgttgactgcctcggaactta

SEQ ID NO: 113781 - DNA, 25 bp, SARS Virus
caacgttgactcgctcggaacttat

SEQ ID NO: 113782 - DNA, 25 bp, SARS Virus
aacgttgactccgtcggaacttatg

SEQ ID NO: 113783 - DNA, 25 bp, SARS Virus
acgttgactcccgcggaacttatgt

SEQ ID NO: 113784 - DNA, 25 bp, SARS Virus
cgttgactccctgggaacttatgtg

SEQ ID NO: 113785 - DNA, 25 bp, SARS Virus
gttgactccctcggaacttatgtgg

SEQ ID NO: 113786 - DNA, 25 bp, SARS Virus
ttgactccctcggaacttatgtggg

SEQ ID NO: 113787 - DNA, 25 bp, SARS Virus
tgactccctcgggacttatgtgggt

SEQ ID NO: 113788 - DNA, 25 bp, SARS Virus
gactccctcggagcttatgtgggtt

SEQ ID NO: 113789 - DNA, 25 bp, SARS Virus
actccctcggaagttatgtgggttt

SEQ ID NO: 113790 - DNA, 25 bp, SARS Virus
ctccctcggaacgtatgtgggtttc

SEQ ID NO: 113791 - DNA, 25 bp, SARS Virus
tccctcggaactgatgtgggtttct

SEQ ID NO: 113792 - DNA, 25 bp, SARS Virus
ccctcggaacttgtgtgggtttctg

SEQ ID NO: 113793 - DNA, 25 bp, SARS Virus
cctcggaacttaggtgggtttctgg

SEQ ID NO: 113794 - DNA, 25 bp, SARS Virus
ctcggaacttatgtgggtttctggt

SEQ ID NO: 113795 - DNA, 25 bp, SARS Virus
tcggaacttatgggggtttctggtg

SEQ ID NO: 113796 - DNA, 25 bp, SARS Virus
cggaacttatgtgggtttctggtgt

SEQ ID NO: 113797 - DNA, 25 bp, SARS Virus
ggaacttatgtgggtttctggtgta

SEQ ID NO: 113798 - DNA, 25 bp, SARS Virus
gaacttatgtgggtttctggtgtaa

SEQ ID NO: 113799 - DNA, 25 bp, SARS Virus
aacttatgtggggttctggtgtaac

SEQ ID NO: 113800 - DNA, 25 bp, SARS Virus
acttatgtgggtgtctggtgtaacc

SEQ ID NO: 113801 - DNA, 25 bp, SARS Virus
cttatgtgggttgctggtgtaaccg

SEQ ID NO: 113802 - DNA, 25 bp, SARS Virus
ttatgtgggtttgtggtgtaaccgt

SEQ ID NO: 113803 - DNA, 25 bp, SARS Virus
tatgtgggtttcgggtgtaaccgtg

SEQ ID NO: 113804 - DNA, 25 bp, SARS Virus
atgtgggtttctggtgtaaccgtgg

SEQ ID NO: 113805 - DNA, 25 bp, SARS Virus
tgtgggtttctggtgtaaccgtggg

SEQ ID NO: 113806 - DNA, 25 bp, SARS Virus
gtgggtttctggggtaaccgtgggc

SEQ ID NO: 113807 - DNA, 25 bp, SARS Virus
tgggtttctggtgtaaccgtgggcg

SEQ ID NO: 113808 - DNA, 25 bp, SARS Virus
gggtttctggtggaaccgtgggcgt

SEQ ID NO: 113809 - DNA, 25 bp, SARS Virus
ggtttctggtgtgaccgtgggcgtt

SEQ ID NO: 113810 - DNA, 25 bp, SARS Virus
gtttctggtgtagccgtgggcgtta

SEQ ID NO: 113811 - DNA, 25 bp, SARS Virus
tttctggtgtaagcgtgggcgttag

SEQ ID NO: 113812 - DNA, 25 bp, SARS Virus
ttctggtgtaacggtgggcgttagg

SEQ ID NO: 113813 - DNA, 25 bp, SARS Virus
tctggtgtaaccgtgggcgttagga

SEQ ID NO: 113814 - DNA, 25 bp, SARS Virus
ctggtgtaaccgggggcgttaggat

SEQ ID NO: 113815 - DNA, 25 bp, SARS Virus
tggtgtaaccgtgggcgttaggatt

SEQ ID NO: 113816 - DNA, 25 bp, SARS Virus
ggtgtaaccgtgggcgttaggatta

SEQ ID NO: 113817 - DNA, 25 bp, SARS Virus
gtgtaaccgtgggcgttaggattat

SEQ ID NO: 113818 - DNA, 25 bp, SARS Virus
tgtaaccgtgggggttaggattatt

SEQ ID NO: 113819 - DNA, 25 bp, SARS Virus
gtaaccgtgggcgttaggattattg

SEQ ID NO: 113820 - DNA, 25 bp, SARS Virus
taaccgtgggcggtaggattattgt

SEQ ID NO: 113821 - DNA, 25 bp, SARS Virus
aaccgtgggcgtgaggattattgtt

SEQ ID NO: 113822 - DNA, 25 bp, SARS Virus
accgtgggcgttgggattattgtta

SEQ ID NO: 113823 - DNA, 25 bp, SARS Virus
ccgtgggcgttaggattattgttac

SEQ ID NO: 113824 - DNA, 25 bp, SARS Virus
cgtgggcgttaggattattgttacg

SEQ ID NO: 113825 - DNA, 25 bp, SARS Virus
gtgggcgttagggttattgttacga

SEQ ID NO: 113826 - DNA, 25 bp, SARS Virus
tgggcgttaggagtattgttacgac

SEQ ID NO: 113827 - DNA, 25 bp, SARS Virus
gggcgttaggatgattgttacgacg

SEQ ID NO: 113828 - DNA, 25 bp, SARS Virus
ggcgttaggattgttgttacgacgg

SEQ ID NO: 113829 - DNA, 25 bp, SARS Virus
gcgttaggattagtgttacgacggt

SEQ ID NO: 113830 - DNA, 25 bp, SARS Virus
cgttaggattatggttacgacggtg

SEQ ID NO: 113831 - DNA, 25 bp, SARS Virus
gttaggattattgttacgacggtgg

SEQ ID NO: 113832 - DNA, 25 bp, SARS Virus
ttaggattattggtacgacggtggc

SEQ ID NO: 113833 - DNA, 25 bp, SARS Virus
ctgcatgaacaataaaatttatttg

SEQ ID NO: 113834 - DNA, 25 bp, SARS Virus
tgcatgaacaactaaatttatttgc

SEQ ID NO: 113835 - DNA, 25 bp, SARS Virus
gcatgaacaacataatttatttgct

SEQ ID NO: 113836 - DNA, 25 bp, SARS Virus
catgaacaacaatatttatttgctt

SEQ ID NO: 113837 - DNA, 25 bp, SARS Virus
atgaacaacaaattttatttgcttg

SEQ ID NO: 113838 - DNA, 25 bp, SARS Virus
tgaacaacaaaatttatttgcttgt

SEQ ID NO: 113839 - DNA, 25 bp, SARS Virus
gaacaacaaaatttatttgcttgtt

SEQ ID NO: 113840 - DNA, 25 bp, SARS Virus
aacaacaaaatttatttgcttgttt

SEQ ID NO: 113841 - DNA, 25 bp, SARS Virus
acaacaaaatttttttgcttgttta

SEQ ID NO: 113842 - DNA, 25 bp, SARS Virus
caacaaaatttatttgcttgtttaa

SEQ ID NO: 113843 - DNA, 25 bp, SARS Virus
aacaaaatttatttgcttgtttaat

SEQ ID NO: 113844 - DNA, 25 bp, SARS Virus
acaaaatttatttgcttgtttaatt

SEQ ID NO: 113845 - DNA, 25 bp, SARS Virus
caaaatttattttcttgtttaattt

SEQ ID NO: 113846 - DNA, 25 bp, SARS Virus
aaaatttatttgtttgtttaatttt

SEQ ID NO: 113847 - DNA, 25 bp, SARS Virus
aaatttatttgcttgtttaatttta

SEQ ID NO: 113848 - DNA, 25 bp, SARS Virus
aatttatttgcttgtttaattttac

SEQ ID NO: 113849 - DNA, 25 bp, SARS Virus
atttatttgcttttttaattttaca

SEQ ID NO: 113850 - DNA, 25 bp, SARS Virus
tttatttgcttgtttaattttacag

SEQ ID NO: 113851 - DNA, 25 bp, SARS Virus
ttatttgcttgtttaattttacaga

SEQ ID NO: 113852 - DNA, 25 bp, SARS Virus
tatttgcttgtttaattttacagac

SEQ ID NO: 113853 - DNA, 25 bp, SARS Virus
atttgcttgttttattttacagact

SEQ ID NO: 113854 - DNA, 25 bp, SARS Virus
tttgcttgtttatttttacagacta

SEQ ID NO: 113855 - DNA, 25 bp, SARS Virus
ttgcttgtttaattttacagactat

SEQ ID NO: 113856 - DNA, 25 bp, SARS Virus
tgcttgtttaattttacagactatt

SEQ ID NO: 113857 - DNA, 25 bp, SARS Virus
gcttgtttaattttacagactatta

SEQ ID NO: 113858 - DNA, 25 bp, SARS Virus
cttgtttaattttacagactattac

SEQ ID NO: 113859 - DNA, 25 bp, SARS Virus
ttgtttaatttttcagactattacc

SEQ ID NO: 113860 - DNA, 25 bp, SARS Virus
tgtttaattttatagactattacct

SEQ ID NO: 113861 - DNA, 25 bp, SARS Virus
gtttaattttactgactattacctg

SEQ ID NO: 113862 - DNA, 25 bp, SARS Virus
tttaattttacatactattacctgg

SEQ ID NO: 113863 - DNA, 25 bp, SARS Virus
ttaattttacagtctattacctggg

SEQ ID NO: 113864 - DNA, 25 bp, SARS Virus
taattttacagattattacctgggg

SEQ ID NO: 113865 - DNA, 25 bp, SARS Virus
aattttacagactattacctggggt

SEQ ID NO: 113866 - DNA, 25 bp, SARS Virus
attttacagacttttacctggggtt

SEQ ID NO: 113867 - DNA, 25 bp, SARS Virus
ttttacagactattacctggggtta

SEQ ID NO: 113868 - DNA, 25 bp, SARS Virus
tttacagactattacctggggttag

SEQ ID NO: 113869 - DNA, 25 bp, SARS Virus
ttacagactatttcctggggttagt

SEQ ID NO: 113870 - DNA, 25 bp, SARS Virus
tacagactattatctggggttagtt

SEQ ID NO: 113871 - DNA, 25 bp, SARS Virus
acagactattacttggggttagttt

SEQ ID NO: 113872 - DNA, 25 bp, SARS Virus
cagactattacctggggttagtttg

SEQ ID NO: 113873 - DNA, 25 bp, SARS Virus
agactattaccttgggttagtttgg

SEQ ID NO: 113874 - DNA, 25 bp, SARS Virus
gactattacctgtggttagtttggt

SEQ ID NO: 113875 - DNA, 25 bp, SARS Virus
actattacctggtgttagtttggtt

SEQ ID NO: 113876 - DNA, 25 bp, SARS Virus
ctattacctgggtttagtttggttg

SEQ ID NO: 113877 - DNA, 25 bp, SARS Virus
tattacctggggttagtttggttgc

SEQ ID NO: 113878 - DNA, 25 bp, SARS Virus
attacctggggttagtttggttgca

SEQ ID NO: 113879 - DNA, 25 bp, SARS Virus
ttacctggggtttgtttggttgcat

SEQ ID NO: 113880 - DNA, 25 bp, SARS Virus
tacctggggttattttggttgcatc

SEQ ID NO: 113881 - DNA, 25 bp, SARS Virus
acctggggttagtttggttgcatca

SEQ ID NO: 113882 - DNA, 25 bp, SARS Virus
cctggggttagtttggttgcatcac

SEQ ID NO: 113883 - DNA, 25 bp, SARS Virus
ctggggttagtttggttgcatcacg

SEQ ID NO: 113884 - DNA, 25 bp, SARS Virus
tggggttagttttgttgcatcacgg

SEQ ID NO: 113885 - DNA, 25 bp, SARS Virus
ggggttagtttgtttgcatcacggg

SEQ ID NO: 113886 - DNA, 25 bp, SARS Virus
gggttagtttggttgcatcacgggg

SEQ ID NO: 113887 - DNA, 25 bp, SARS Virus
ggttagtttggttgcatcacggggg

SEQ ID NO: 113888 - DNA, 25 bp, SARS Virus
gttagtttggtttcatcacgggggg

SEQ ID NO: 113889 - DNA, 25 bp, SARS Virus
ttagtttggttgtatcacggggggc

SEQ ID NO: 113890 - DNA, 25 bp, SARS Virus
tagtttggttgcttcacggggggcg

SEQ ID NO: 113891 - DNA, 25 bp, SARS Virus
agtttggttgcatcacggggggcgt

SEQ ID NO: 113892 - DNA, 25 bp, SARS Virus
gtttggttgcattacggggggcgta

SEQ ID NO: 113893 - DNA, 25 bp, SARS Virus
tttggttgcatctcggggggcgtaa

SEQ ID NO: 113894 - DNA, 25 bp, SARS Virus
ttggttgcatcatggggggcgtaat

SEQ ID NO: 113895 - DNA, 25 bp, SARS Virus
tggttgcatcactgggggcgtaatg

SEQ ID NO: 113896 - DNA, 25 bp, SARS Virus
ggttgcatcacgtggggcgtaatgt

SEQ ID NO: 113897 - DNA, 25 bp, SARS Virus
gttgcatcacggtgggcgtaatgta

SEQ ID NO: 113898 - DNA, 25 bp, SARS Virus
ttgcatcacgggtggcgtaatgtaa

SEQ ID NO: 113899 - DNA, 25 bp, SARS Virus
tgcatcacggggtgcgtaatgtaaa

SEQ ID NO: 113900 - DNA, 25 bp, SARS Virus
gcatcacgggggtcgtaatgtaaac

SEQ ID NO: 113901 - DNA, 25 bp, SARS Virus
catcacggggggtgtaatgtaaacc

SEQ ID NO: 113902 - DNA, 25 bp, SARS Virus
atcacggggggcttaatgtaaacca

SEQ ID NO: 113903 - DNA, 25 bp, SARS Virus
tcacggggggcgtaatgtaaaccac

SEQ ID NO: 113904 - DNA, 25 bp, SARS Virus
cacggggggcgttatgtaaaccacc

SEQ ID NO: 113905 - DNA, 25 bp, SARS Virus
acggggggcgtattgtaaaccacct

SEQ ID NO: 113906 - DNA, 25 bp, SARS Virus
cggggggcgtaatgtaaaccacctg

SEQ ID NO: 113907 - DNA, 25 bp, SARS Virus
ggggggcgtaatttaaaccacctgg

SEQ ID NO: 113908 - DNA, 25 bp, SARS Virus
gggggcgtaatgtaaaccacctggg

SEQ ID NO: 113909 - DNA, 25 bp, SARS Virus
ggggcgtaatgttaaccacctgggt

SEQ ID NO: 113910 - DNA, 25 bp, SARS Virus
gggcgtaatgtataccacctgggtg

SEQ ID NO: 113911 - DNA, 25 bp, SARS Virus
ggcgtaatgtaatccacctgggtgt

SEQ ID NO: 113912 - DNA, 25 bp, SARS Virus
gcgtaatgtaaatcacctgggtgtc

SEQ ID NO: 113913 - DNA, 25 bp, SARS Virus
cgtaatgtaaactacctgggtgtct

SEQ ID NO: 113914 - DNA, 25 bp, SARS Virus
gtaatgtaaacctcctgggtgtcta

SEQ ID NO: 113915 - DNA, 25 bp, SARS Virus
taatgtaaaccatctgggtgtctaa

SEQ ID NO: 113916 - DNA, 25 bp, SARS Virus
aatgtaaaccacttgggtgtctaag

SEQ ID NO: 113917 - DNA, 25 bp, SARS Virus
atgtaaaccacctgggtgtctaagt

SEQ ID NO: 113918 - DNA, 25 bp, SARS Virus
tgtaaaccaccttggtgtctaagtt

SEQ ID NO: 113919 - DNA, 25 bp, SARS Virus
gtaaaccacctgtgtgtctaagttg

SEQ ID NO: 113920 - DNA, 25 bp, SARS Virus
taaaccacctggttgtctaagttga

SEQ ID NO: 113921 - DNA, 25 bp, SARS Virus
aaaccacctgggtgtctaagttgac

SEQ ID NO: 113922 - DNA, 25 bp, SARS Virus
aaccacctgggtttctaagttgact

SEQ ID NO: 113923 - DNA, 25 bp, SARS Virus
accacctgggtgtctaagttgactg

SEQ ID NO: 113924 - DNA, 25 bp, SARS Virus
ccacctgggtgtttaagttgactgt

SEQ ID NO: 113925 - DNA, 25 bp, SARS Virus
cacctgggtgtctaagttgactgtt

SEQ ID NO: 113926 - DNA, 25 bp, SARS Virus
acctgggtgtcttagttgactgtta

SEQ ID NO: 113927 - DNA, 25 bp, SARS Virus
cctgggtgtctatgttgactgttat

SEQ ID NO: 113928 - DNA, 25 bp, SARS Virus
ctgggtgtctaatttgactgttatt

SEQ ID NO: 113929 - DNA, 25 bp, SARS Virus
tgggtgtctaagttgactgttattg

SEQ ID NO: 113930 - DNA, 25 bp, SARS Virus
gggtgtctaagttgactgttattgg

SEQ ID NO: 113931 - DNA, 25 bp, SARS Virus
ggtgtctaagtttactgttattggt

SEQ ID NO: 113932 - DNA, 25 bp, SARS Virus
gtgtctaagttgtctgttattggtc

SEQ ID NO: 113933 - DNA, 25 bp, SARS Virus
tgtctaagttgattgttattggtct

SEQ ID NO: 113934 - DNA, 25 bp, SARS Virus
gtctaagttgactgttattggtctt

SEQ ID NO: 113935 - DNA, 25 bp, SARS Virus
tctaagttgacttttattggtctta

SEQ ID NO: 113936 - DNA, 25 bp, SARS Virus
ctaagttgactgttattggtcttac

SEQ ID NO: 113937 - DNA, 25 bp, SARS Virus
taagttgactgttattggtcttacc

SEQ ID NO: 113938 - DNA, 25 bp, SARS Virus
aagttgactgtttttggtcttacct

SEQ ID NO: 113939 - DNA, 25 bp, SARS Virus
agttgactgttattggtcttacctc

SEQ ID NO: 113940 - DNA, 25 bp, SARS Virus
gttgactgttattggtcttacctcc

SEQ ID NO: 113941 - DNA, 25 bp, SARS Virus
ttgactgttatttgtcttacctcct

SEQ ID NO: 113942 - DNA, 25 bp, SARS Virus
tgactgttattgttcttacctcctg

SEQ ID NO: 113943 - DNA, 25 bp, SARS Virus
gactgttattggtcttacctcctgc

SEQ ID NO: 113944 - DNA, 25 bp, SARS Virus
actgttattggttttacctcctgcg

SEQ ID NO: 113945 - DNA, 25 bp, SARS Virus
ctgttattggtcttacctcctgcgt

SEQ ID NO: 113946 - DNA, 25 bp, SARS Virus
tgttattggtcttacctcctgcgtt

SEQ ID NO: 113947 - DNA, 25 bp, SARS Virus
gttattggtctttcctcctgcgtta

SEQ ID NO: 113948 - DNA, 25 bp, SARS Virus
ttattggtcttatctcctgcgttac

SEQ ID NO: 113949 - DNA, 25 bp, SARS Virus
tattggtcttacttcctgcgttacc

SEQ ID NO: 113950 - DNA, 25 bp, SARS Virus
attggtcttacctcctgcgttaccc

SEQ ID NO: 113951 - DNA, 25 bp, SARS Virus
ttggtcttaccttctgcgttacccc

SEQ ID NO: 113952 - DNA, 25 bp, SARS Virus
tggtcttacctcttgcgttaccccg

SEQ ID NO: 113953 - DNA, 25 bp, SARS Virus
ggtcttacctcctgcgttaccccgt

SEQ ID NO: 113954 - DNA, 25 bp, SARS Virus
gtcttacctccttcgttaccccgtt

SEQ ID NO: 113955 - DNA, 25 bp, SARS Virus
tcttacctcctgtgttaccccgttc

SEQ ID NO: 113956 - DNA, 25 bp, SARS Virus
cttacctcctgctttaccccgttcc

SEQ ID NO: 113957 - DNA, 25 bp, SARS Virus
ttacctcctgcgttaccccgttccg

SEQ ID NO: 113958 - DNA, 25 bp, SARS Virus
tacctcctgcgttaccccgttccgg

SEQ ID NO: 113959 - DNA, 25 bp, SARS Virus
acctcctgcgtttccccgttccggt

SEQ ID NO: 113960 - DNA, 25 bp, SARS Virus
cctcctgcgttatcccgttccggtt

SEQ ID NO: 113961 - DNA, 25 bp, SARS Virus
ctcctgcgttactccgttccggttt

SEQ ID NO: 113962 - DNA, 25 bp, SARS Virus
tcctgcgttacctcgttccggtttt

SEQ ID NO: 113963 - DNA, 25 bp, SARS Virus
cctgcgttaccctgttccggttttg

SEQ ID NO: 113964 - DNA, 25 bp, SARS Virus
ctgcgttacccctttccggttttgt

SEQ ID NO: 113965 - DNA, 25 bp, SARS Virus
tgcgttaccccgttccggttttgtc

SEQ ID NO: 113966 - DNA, 25 bp, SARS Virus
gcgttaccccgttccggttttgtcg

SEQ ID NO: 113967 - DNA, 25 bp, SARS Virus
cgttaccccgtttcggttttgtcgc

SEQ ID NO: 113968 - DNA, 25 bp, SARS Virus
gttaccccgttctggttttgtcgcg

SEQ ID NO: 113969 - DNA, 25 bp, SARS Virus
ttaccccgttcctgttttgtcgcgg

SEQ ID NO: 113970 - DNA, 25 bp, SARS Virus
taccccgttccgtttttgtcgcggc

SEQ ID NO: 113971 - DNA, 25 bp, SARS Virus
accccgttccggttttgtcgcggct

SEQ ID NO: 113972 - DNA, 25 bp, SARS Virus
ccccgttccggttttgtcgcggctg

SEQ ID NO: 113973 - DNA, 25 bp, SARS Virus
cccgttccggttttgtcgcggctgg

SEQ ID NO: 113974 - DNA, 25 bp, SARS Virus
ccgttccggttttgtcgcggctggg

SEQ ID NO: 113975 - DNA, 25 bp, SARS Virus
cgttccggttttttcgcggctgggg

SEQ ID NO: 113976 - DNA, 25 bp, SARS Virus
gttccggttttgtcgcggctggggt

SEQ ID NO: 113977 - DNA, 25 bp, SARS Virus
ttccggttttgttgcggctggggtt

SEQ ID NO: 113978 - DNA, 25 bp, SARS Virus
tccggttttgtctcggctggggttc

SEQ ID NO: 113979 - DNA, 25 bp, SARS Virus
ccggttttgtcgtggctggggttcc

SEQ ID NO: 113980 - DNA, 25 bp, SARS Virus
cggttttgtcgctgctggggttcca

SEQ ID NO: 113981 - DNA, 25 bp, SARS Virus
ggttttgtcgcgtctggggttccaa

SEQ ID NO: 113982 - DNA, 25 bp, SARS Virus
gttttgtcgcggttggggttccaaa

SEQ ID NO: 113983 - DNA, 25 bp, SARS Virus
ttttgtcgcggctggggttccaaat

SEQ ID NO: 113984 - DNA, 25 bp, SARS Virus
tttgtcgcggcttgggttccaaatg

SEQ ID NO: 113985 - DNA, 25 bp, SARS Virus
ttgtcgcggctgtggttccaaatgg

SEQ ID NO: 113986 - DNA, 25 bp, SARS Virus
tgtcgcggctggtgttccaaatggg

SEQ ID NO: 113987 - DNA, 25 bp, SARS Virus
gtcgcggctgggtttccaaatgggt

SEQ ID NO: 113988 - DNA, 25 bp, SARS Virus
tcgcggctggggttccaaatgggtt

SEQ ID NO: 113989 - DNA, 25 bp, SARS Virus
cgcggctggggttccaaatgggtta

SEQ ID NO: 113990 - DNA, 25 bp, SARS Virus
gcggctggggtttcaaatgggttat

SEQ ID NO: 113991 - DNA, 25 bp, SARS Virus
cggctggggttctaaatgggttatt

SEQ ID NO: 113992 - DNA, 25 bp, SARS Virus
ggctggggttcctaatgggttatta

SEQ ID NO: 113993 - DNA, 25 bp, SARS Virus
gctggggttccatatgggttattat

SEQ ID NO: 113994 - DNA, 25 bp, SARS Virus
ctggggttccaattgggttattatg

SEQ ID NO: 113995 - DNA, 25 bp, SARS Virus
tggggttccaaatgggttattatga

SEQ ID NO: 113996 - DNA, 25 bp, SARS Virus
ggggttccaaattggttattatgac

SEQ ID NO: 113997 - DNA, 25 bp, SARS Virus
gggttccaaatgtgttattatgacg

SEQ ID NO: 113998 - DNA, 25 bp, SARS Virus
ggttccaaatggtttattatgacgc

SEQ ID NO: 113999 - DNA, 25 bp, SARS Virus
gttccaaatgggttattatgacgca

SEQ ID NO: 114000 - DNA, 25 bp, SARS Virus
ttccaaatgggttattatgacgcag

SEQ ID NO: 114001 - DNA, 25 bp, SARS Virus
tccaaatgggtttttatgacgcaga

SEQ ID NO: 114002 - DNA, 25 bp, SARS Virus
ccaaatgggttattatgacgcagaa

SEQ ID NO: 114003 - DNA, 25 bp, SARS Virus
caaatgggttattatgacgcagaac

SEQ ID NO: 114004 - DNA, 25 bp, SARS Virus
aaatgggttattttgacgcagaacc

SEQ ID NO: 114005 - DNA, 25 bp, SARS Virus
aatgggttattatgacgcagaacca

SEQ ID NO: 114006 - DNA, 25 bp, SARS Virus
atgggttattattacgcagaaccaa

SEQ ID NO: 114007 - DNA, 25 bp, SARS Virus
tgggttattatgtcgcagaaccaag

SEQ ID NO: 114008 - DNA, 25 bp, SARS Virus
gggttattatgatgcagaaccaagt

SEQ ID NO: 114009 - DNA, 25 bp, SARS Virus
ggttattatgactcagaaccaagtg

SEQ ID NO: 114010 - DNA, 25 bp, SARS Virus
gttattatgacgtagaaccaagtgt

SEQ ID NO: 114011 - DNA, 25 bp, SARS Virus
ttattatgacgctgaaccaagtgtc

SEQ ID NO: 114012 - DNA, 25 bp, SARS Virus
tattatgacgcataaccaagtgtcg

SEQ ID NO: 114013 - DNA, 25 bp, SARS Virus
attatgacgcagtaccaagtgtcga

SEQ ID NO: 114014 - DNA, 25 bp, SARS Virus
ttatgacgcagatccaagtgtcgag

SEQ ID NO: 114015 - DNA, 25 bp, SARS Virus
tatgacgcagaatcaagtgtcgaga

SEQ ID NO: 114016 - DNA, 25 bp, SARS Virus
atgacgcagaactaagtgtcgagag

SEQ ID NO: 114017 - DNA, 25 bp, SARS Virus
tgacgcagaacctagtgtcgagagt

SEQ ID NO: 114018 - DNA, 25 bp, SARS Virus
gacgcagaaccatgtgtcgagagtg

SEQ ID NO: 114019 - DNA, 25 bp, SARS Virus
acgcagaaccaattgtcgagagtga

SEQ ID NO: 114020 - DNA, 25 bp, SARS Virus
cgcagaaccaagtgtcgagagtgag

SEQ ID NO: 114021 - DNA, 25 bp, SARS Virus
gcagaaccaagtttcgagagtgagt

SEQ ID NO: 114022 - DNA, 25 bp, SARS Virus
cagaaccaagtgtcgagagtgagtc

SEQ ID NO: 114023 - DNA, 25 bp, SARS Virus
agaaccaagtgttgagagtgagtcg

SEQ ID NO: 114024 - DNA, 25 bp, SARS Virus
gaaccaagtgtctagagtgagtcgt

SEQ ID NO: 114025 - DNA, 25 bp, SARS Virus
aaccaagtgtcgtgagtgagtcgta

SEQ ID NO: 114026 - DNA, 25 bp, SARS Virus
accaagtgtcgatagtgagtcgtac

SEQ ID NO: 114027 - DNA, 25 bp, SARS Virus
ccaagtgtcgagtgtgagtcgtacc

SEQ ID NO: 114028 - DNA, 25 bp, SARS Virus
caagtgtcgagattgagtcgtaccg

SEQ ID NO: 114029 - DNA, 25 bp, SARS Virus
aagtgtcgagagtgagtcgtaccgt

SEQ ID NO: 114030 - DNA, 25 bp, SARS Virus
agtgtcgagagttagtcgtaccgtt

SEQ ID NO: 114031 - DNA, 25 bp, SARS Virus
gtgtcgagagtgtgtcgtaccgttc

SEQ ID NO: 114032 - DNA, 25 bp, SARS Virus
tgtcgagagtgattcgtaccgttcc

SEQ ID NO: 114033 - DNA, 25 bp, SARS Virus
gtcgagagtgagtcgtaccgttcct

SEQ ID NO: 114034 - DNA, 25 bp, SARS Virus
tcgagagtgagttgtaccgttcctc

SEQ ID NO: 114035 - DNA, 25 bp, SARS Virus
cgagagtgagtcttaccgttcctcc

SEQ ID NO: 114036 - DNA, 25 bp, SARS Virus
gagagtgagtcgtaccgttcctcct

SEQ ID NO: 114037 - DNA, 25 bp, SARS Virus
agagtgagtcgttccgttcctcctt

SEQ ID NO: 114038 - DNA, 25 bp, SARS Virus
gagtgagtcgtatcgttcctccttg

SEQ ID NO: 114039 - DNA, 25 bp, SARS Virus
agtgagtcgtactgttcctccttga

SEQ ID NO: 114040 - DNA, 25 bp, SARS Virus
gtgagtcgtacctttcctccttgaa

SEQ ID NO: 114041 - DNA, 25 bp, SARS Virus
tgagtcgtaccgttcctccttgaat

SEQ ID NO: 114042 - DNA, 25 bp, SARS Virus
gagtcgtaccgttcctccttgaatc

SEQ ID NO: 114043 - DNA, 25 bp, SARS Virus
agtcgtaccgtttctccttgaatct

SEQ ID NO: 114044 - DNA, 25 bp, SARS Virus
gtcgtaccgttcttccttgaatcta

SEQ ID NO: 114045 - DNA, 25 bp, SARS Virus
tcgtaccgttcctccttgaatctaa

SEQ ID NO: 114046 - DNA, 25 bp, SARS Virus
cgtaccgttccttcttgaatctaag

SEQ ID NO: 114047 - DNA, 25 bp, SARS Virus
gtaccgttcctctttgaatctaagg

SEQ ID NO: 114048 - DNA, 25 bp, SARS Virus
taccgttcctccttgaatctaaggg

SEQ ID NO: 114049 - DNA, 25 bp, SARS Virus
accgttcctccttgaatctaaggga

SEQ ID NO: 114050 - DNA, 25 bp, SARS Virus
ccgttcctcctttaatctaagggag

SEQ ID NO: 114051 - DNA, 25 bp, SARS Virus
cgttcctccttgtatctaagggagc

SEQ ID NO: 114052 - DNA, 25 bp, SARS Virus
gttcctccttgattctaagggagct

SEQ ID NO: 114053 - DNA, 25 bp, SARS Virus
ttcctccttgaatctaagggagctc

SEQ ID NO: 114054 - DNA, 25 bp, SARS Virus
tcctccttgaatttaagggagctcc

SEQ ID NO: 114055 - DNA, 25 bp, SARS Virus
cctccttgaatctaagggagctccg

SEQ ID NO: 114056 - DNA, 25 bp, SARS Virus
ctccttgaatcttagggagctccgg

SEQ ID NO: 114057 - DNA, 25 bp, SARS Virus
tccttgaatctatgggagctccggt

SEQ ID NO: 114058 - DNA, 25 bp, SARS Virus
ccttgaatctaatggagctccggtc

SEQ ID NO: 114059 - DNA, 25 bp, SARS Virus
cttgaatctaagtgagctccggtcc

SEQ ID NO: 114060 - DNA, 25 bp, SARS Virus
ttgaatctaaggtagctccggtccc

SEQ ID NO: 114061 - DNA, 25 bp, SARS Virus
tgaatctaagggtgctccggtcccg

SEQ ID NO: 114062 - DNA, 25 bp, SARS Virus
gaatctaagggatctccggtcccgc

SEQ ID NO: 114063 - DNA, 25 bp, SARS Virus
aatctaagggagttccggtcccgca

SEQ ID NO: 114064 - DNA, 25 bp, SARS Virus
atctaagggagctccggtcccgcaa

SEQ ID NO: 114065 - DNA, 25 bp, SARS Virus
tctaagggagcttcggtcccgcaag

SEQ ID NO: 114066 - DNA, 25 bp, SARS Virus
ctaagggagctctggtcccgcaagg

SEQ ID NO: 114067 - DNA, 25 bp, SARS Virus
taagggagctcctgtcccgcaaggt

SEQ ID NO: 114068 - DNA, 25 bp, SARS Virus
aagggagctccgttcccgcaaggtt

SEQ ID NO: 114069 - DNA, 25 bp, SARS Virus
agggagctccggtcccgcaaggtta

SEQ ID NO: 114070 - DNA, 25 bp, SARS Virus
gggagctccggttccgcaaggttag

SEQ ID NO: 114071 - DNA, 25 bp, SARS Virus
ggagctccggtctcgcaaggttagt

SEQ ID NO: 114072 - DNA, 25 bp, SARS Virus
gagctccggtcctgcaaggttagtt

SEQ ID NO: 114073 - DNA, 25 bp, SARS Virus
agctccggtccctcaaggttagttg

SEQ ID NO: 114074 - DNA, 25 bp, SARS Virus
gctccggtcccgtaaggttagttgt

SEQ ID NO: 114075 - DNA, 25 bp, SARS Virus
ctccggtcccgctaggttagttgtg

SEQ ID NO: 114076 - DNA, 25 bp, SARS Virus
tccggtcccgcatggttagttgtgg

SEQ ID NO: 114077 - DNA, 25 bp, SARS Virus
ccggtcccgcaatgttagttgtggt

SEQ ID NO: 114078 - DNA, 25 bp, SARS Virus
cggtcccgcaagtttagttgtggtt

SEQ ID NO: 114079 - DNA, 25 bp, SARS Virus
ggtcccgcaaggttagttgtggtta

SEQ ID NO: 114080 - DNA, 25 bp, SARS Virus
gtcccgcaaggttagttgtggttat

SEQ ID NO: 114081 - DNA, 25 bp, SARS Virus
tcccgcaaggtttgttgtggttatc

SEQ ID NO: 114082 - DNA, 25 bp, SARS Virus
cccgcaaggttatttgtggttatca

SEQ ID NO: 114083 - DNA, 25 bp, SARS Virus
ccgcaaggttagttgtggttatcac

SEQ ID NO: 114084 - DNA, 25 bp, SARS Virus
cgcaaggttagttgtggttatcacc

SEQ ID NO: 114085 - DNA, 25 bp, SARS Virus
gcaaggttagttttggttatcacca

SEQ ID NO: 114086 - DNA, 25 bp, SARS Virus
caaggttagttgtggttatcaccag

SEQ ID NO: 114087 - DNA, 25 bp, SARS Virus
aaggttagttgttgttatcaccagg

SEQ ID NO: 114088 - DNA, 25 bp, SARS Virus
aggttagttgtgtttatcaccaggt

SEQ ID NO: 114089 - DNA, 25 bp, SARS Virus
ggttagttgtggttatcaccaggtc

SEQ ID NO: 114090 - DNA, 25 bp, SARS Virus
gttagttgtggttatcaccaggtct

SEQ ID NO: 114091 - DNA, 25 bp, SARS Virus
ttagttgtggttttcaccaggtcta

SEQ ID NO: 114092 - DNA, 25 bp, SARS Virus
tagttgtggttatcaccaggtctac

SEQ ID NO: 114093 - DNA, 25 bp, SARS Virus
agttgtggttattaccaggtctact

SEQ ID NO: 114094 - DNA, 25 bp, SARS Virus
gttgtggttatctccaggtctactg

SEQ ID NO: 114095 - DNA, 25 bp, SARS Virus
ttgtggttatcatcaggtctactgg

SEQ ID NO: 114096 - DNA, 25 bp, SARS Virus
tgtggttatcactaggtctactggt

SEQ ID NO: 114097 - DNA, 25 bp, SARS Virus
gtggttatcacctggtctactggtt

SEQ ID NO: 114098 - DNA, 25 bp, SARS Virus
tggttatcaccatgtctactggttt

SEQ ID NO: 114099 - DNA, 25 bp, SARS Virus
ggttatcaccagttctactggttta

SEQ ID NO: 114100 - DNA, 25 bp, SARS Virus
gttatcaccaggtctactggtttaa

SEQ ID NO: 114101 - DNA, 25 bp, SARS Virus
ttatcaccaggtttactggtttaac

SEQ ID NO: 114102 - DNA, 25 bp, SARS Virus
tatcaccaggtctactggtttaacc

SEQ ID NO: 114103 - DNA, 25 bp, SARS Virus
atcaccaggtcttctggtttaaccg

SEQ ID NO: 114104 - DNA, 25 bp, SARS Virus
tcaccaggtctattggtttaaccga

SEQ ID NO: 114105 - DNA, 25 bp, SARS Virus
caccaggtctactggtttaaccgat

SEQ ID NO: 114106 - DNA, 25 bp, SARS Virus
accaggtctacttgtttaaccgatg

SEQ ID NO: 114107 - DNA, 25 bp, SARS Virus
ccaggtctactgttttaaccgatga

SEQ ID NO: 114108 - DNA, 25 bp, SARS Virus
caggtctactggtttaaccgatgat

SEQ ID NO: 114109 - DNA, 25 bp, SARS Virus
aggtctactggtttaaccgatgatg

SEQ ID NO: 114110 - DNA, 25 bp, SARS Virus
ggtctactggtttaaccgatgatgg

SEQ ID NO: 114111 - DNA, 25 bp, SARS Virus
gtctactggttttaccgatgatggc

SEQ ID NO: 114112 - DNA, 25 bp, SARS Virus
tctactggtttatccgatgatggct

SEQ ID NO: 114113 - DNA, 25 bp, SARS Virus
ctactggtttaatcgatgatggctt

SEQ ID NO: 114114 - DNA, 25 bp, SARS Virus
tactggtttaactgatgatggcttc

SEQ ID NO: 114115 - DNA, 25 bp, SARS Virus
actggtttaacctatgatggcttct

SEQ ID NO: 114116 - DNA, 25 bp, SARS Virus
ctggtttaaccgttgatggcttctc

SEQ ID NO: 114117 - DNA, 25 bp, SARS Virus
tggtttaaccgatgatggcttctcg

SEQ ID NO: 114118 - DNA, 25 bp, SARS Virus
ggtttaaccgattatggcttctcga

SEQ ID NO: 114119 - DNA, 25 bp, SARS Virus
gtttaaccgatgttggcttctcgat

SEQ ID NO: 114120 - DNA, 25 bp, SARS Virus
tttaaccgatgatggcttctcgatg

SEQ ID NO: 114121 - DNA, 25 bp, SARS Virus
ttaaccgatgattgcttctcgatgg

SEQ ID NO: 114122 - DNA, 25 bp, SARS Virus
taaccgatgatgtcttctcgatggg

SEQ ID NO: 114123 - DNA, 25 bp, SARS Virus
aaccgatgatggtttctcgatgggc

SEQ ID NO: 114124 - DNA, 25 bp, SARS Virus
accgatgatggcttctcgatgggct

SEQ ID NO: 114125 - DNA, 25 bp, SARS Virus
ccgatgatggcttctcgatgggctg

SEQ ID NO: 114126 - DNA, 25 bp, SARS Virus
cgatgatggcttttcgatgggctgc

SEQ ID NO: 114127 - DNA, 25 bp, SARS Virus
gatgatggcttctcgatgggctgct

SEQ ID NO: 114128 - DNA, 25 bp, SARS Virus
atgatggcttcttgatgggctgctc

SEQ ID NO: 114129 - DNA, 25 bp, SARS Virus
tgatggcttctctatgggctgctca

SEQ ID NO: 114130 - DNA, 25 bp, SARS Virus
gatggcttctcgttgggctgctcaa

SEQ ID NO: 114131 - DNA, 25 bp, SARS Virus
atggcttctcgatgggctgctcaag

SEQ ID NO: 114132 - DNA, 25 bp, SARS Virus
tggcttctcgattggctgctcaagc

SEQ ID NO: 114133 - DNA, 25 bp, SARS Virus
ggcttctcgatgtgctgctcaagca

SEQ ID NO: 114134 - DNA, 25 bp, SARS Virus
gcttctcgatggtctgctcaagcac

SEQ ID NO: 114135 - DNA, 25 bp, SARS Virus
cttctcgatgggttgctcaagcacc

SEQ ID NO: 114136 - DNA, 25 bp, SARS Virus
ttctcgatgggctgctcaagcacca

SEQ ID NO: 114137 - DNA, 25 bp, SARS Virus
tctcgatgggcttctcaagcaccac

SEQ ID NO: 114138 - DNA, 25 bp, SARS Virus
ctcgatgggctgttcaagcaccacc

SEQ ID NO: 114139 - DNA, 25 bp, SARS Virus
tcgatgggctgctcaagcaccacca

SEQ ID NO: 114140 - DNA, 25 bp, SARS Virus
cgatgggctgcttaagcaccaccac

SEQ ID NO: 114141 - DNA, 25 bp, SARS Virus
gatgggctgctctagcaccaccact

SEQ ID NO: 114142 - DNA, 25 bp, SARS Virus
atgggctgctcatgcaccaccactg

SEQ ID NO: 114143 - DNA, 25 bp, SARS Virus
tgggctgctcaatcaccaccactgc

SEQ ID NO: 114144 - DNA, 25 bp, SARS Virus
gggctgctcaagtaccaccactgcc

SEQ ID NO: 114145 - DNA, 25 bp, SARS Virus
ggctgctcaagctccaccactgccg

SEQ ID NO: 114146 - DNA, 25 bp, SARS Virus
gctgctcaagcatcaccactgccgt

SEQ ID NO: 114147 - DNA, 25 bp, SARS Virus
ctgctcaagcactaccactgccgtt

SEQ ID NO: 114148 - DNA, 25 bp, SARS Virus
tgctcaagcacctccactgccgttt

SEQ ID NO: 114149 - DNA, 25 bp, SARS Virus
gctcaagcaccatcactgccgtttt

SEQ ID NO: 114150 - DNA, 25 bp, SARS Virus
ctcaagcaccactactgccgtttta

SEQ ID NO: 114151 - DNA, 25 bp, SARS Virus
tcaagcaccacctctgccgttttac

SEQ ID NO: 114152 - DNA, 25 bp, SARS Virus
caagcaccaccattgccgttttact

SEQ ID NO: 114153 - DNA, 25 bp, SARS Virus
aagcaccaccactgccgttttactt

SEQ ID NO: 114154 - DNA, 25 bp, SARS Virus
agcaccaccacttccgttttacttt

SEQ ID NO: 114155 - DNA, 25 bp, SARS Virus
gcaccaccactgtcgttttactttc

SEQ ID NO: 114156 - DNA, 25 bp, SARS Virus
caccaccactgctgttttactttct

SEQ ID NO: 114157 - DNA, 25 bp, SARS Virus
accaccactgcctttttactttctc

SEQ ID NO: 114158 - DNA, 25 bp, SARS Virus
ccaccactgccgttttactttctcg

SEQ ID NO: 114159 - DNA, 25 bp, SARS Virus
caccactgccgttttactttctcga

SEQ ID NO: 114160 - DNA, 25 bp, SARS Virus
accactgccgttttactttctcgag

SEQ ID NO: 114161 - DNA, 25 bp, SARS Virus
ccactgccgttttactttctcgagt

SEQ ID NO: 114162 - DNA, 25 bp, SARS Virus
cactgccgtttttctttctcgagtc

SEQ ID NO: 114163 - DNA, 25 bp, SARS Virus
actgccgttttattttctcgagtcg

SEQ ID NO: 114164 - DNA, 25 bp, SARS Virus
ctgccgttttactttctcgagtcgg

SEQ ID NO: 114165 - DNA, 25 bp, SARS Virus
tgccgttttactttctcgagtcggg

SEQ ID NO: 114166 - DNA, 25 bp, SARS Virus
gccgttttactttctcgagtcgggg

SEQ ID NO: 114167 - DNA, 25 bp, SARS Virus
ccgttttactttttcgagtcggggt

SEQ ID NO: 114168 - DNA, 25 bp, SARS Virus
cgttttactttctcgagtcggggtc

SEQ ID NO: 114169 - DNA, 25 bp, SARS Virus
gttttactttcttgagtcggggtct

SEQ ID NO: 114170 - DNA, 25 bp, SARS Virus
ttttactttctctagtcggggtcta

SEQ ID NO: 114171 - DNA, 25 bp, SARS Virus
tttactttctcgtgtcggggtctac

SEQ ID NO: 114172 - DNA, 25 bp, SARS Virus
ttactttctcgattcggggtctacc

SEQ ID NO: 114173 - DNA, 25 bp, SARS Virus
tactttctcgagtcggggtctacca

SEQ ID NO: 114174 - DNA, 25 bp, SARS Virus
actttctcgagttggggtctaccat

SEQ ID NO: 114175 - DNA, 25 bp, SARS Virus
ctttctcgagtctgggtctaccatg

SEQ ID NO: 114176 - DNA, 25 bp, SARS Virus
tttctcgagtcgtggtctaccatga

SEQ ID NO: 114177 - DNA, 25 bp, SARS Virus
ttctcgagtcggtgtctaccatgaa

SEQ ID NO: 114178 - DNA, 25 bp, SARS Virus
tctcgagtcgggttctaccatgaag

SEQ ID NO: 114179 - DNA, 25 bp, SARS Virus
ctcgagtcggggtctaccatgaaga

SEQ ID NO: 114180 - DNA, 25 bp, SARS Virus
tcgagtcggggtttaccatgaagat

SEQ ID NO: 114181 - DNA, 25 bp, SARS Virus
cgagtcggggtctaccatgaagata

SEQ ID NO: 114182 - DNA, 25 bp, SARS Virus
gagtcggggtcttccatgaagataa

SEQ ID NO: 114183 - DNA, 25 bp, SARS Virus
agtcggggtctatcatgaagataat

SEQ ID NO: 114184 - DNA, 25 bp, SARS Virus
gtcggggtctactatgaagataatg

SEQ ID NO: 114185 - DNA, 25 bp, SARS Virus
tcggggtctaccttgaagataatgg

SEQ ID NO: 114186 - DNA, 25 bp, SARS Virus
cggggtctaccatgaagataatgga

SEQ ID NO: 114187 - DNA, 25 bp, SARS Virus
ggggtctaccattaagataatggat

SEQ ID NO: 114188 - DNA, 25 bp, SARS Virus
gggtctaccatgtagataatggatc

SEQ ID NO: 114189 - DNA, 25 bp, SARS Virus
ggtctaccatgatgataatggatcc

SEQ ID NO: 114190 - DNA, 25 bp, SARS Virus
gtctaccatgaatataatggatcct

SEQ ID NO: 114191 - DNA, 25 bp, SARS Virus
tctaccatgaagttaatggatcctt

SEQ ID NO: 114192 - DNA, 25 bp, SARS Virus
ctaccatgaagataatggatccttg

SEQ ID NO: 114193 - DNA, 25 bp, SARS Virus
taccatgaagattatggatccttga

SEQ ID NO: 114194 - DNA, 25 bp, SARS Virus
accatgaagatattggatccttgac

SEQ ID NO: 114195 - DNA, 25 bp, SARS Virus
ccatgaagataatggatccttgacc

SEQ ID NO: 114196 - DNA, 25 bp, SARS Virus
catgaagataattgatccttgaccg

SEQ ID NO: 114197 - DNA, 25 bp, SARS Virus
atgaagataatgtatccttgaccgg

SEQ ID NO: 114198 - DNA, 25 bp, SARS Virus
tgaagataatggttccttgaccggg

SEQ ID NO: 114199 - DNA, 25 bp, SARS Virus
gaagataatggatccttgaccgggt

SEQ ID NO: 114200 - DNA, 25 bp, SARS Virus
aagataatggattcttgaccgggtc

SEQ ID NO: 114201 - DNA, 25 bp, SARS Virus
agataatggatctttgaccgggtct

SEQ ID NO: 114202 - DNA, 25 bp, SARS Virus
gataatggatccttgaccgggtctt

SEQ ID NO: 114203 - DNA, 25 bp, SARS Virus
ataatggatccttgaccgggtcttc

SEQ ID NO: 114204 - DNA, 25 bp, SARS Virus
taatggatcctttaccgggtcttcg

SEQ ID NO: 114205 - DNA, 25 bp, SARS Virus
aatggatccttgtccgggtcttcga

SEQ ID NO: 114206 - DNA, 25 bp, SARS Virus
atggatccttgatcgggtcttcgaa

SEQ ID NO: 114207 - DNA, 25 bp, SARS Virus
tggatccttgactgggtcttcgaag

SEQ ID NO: 114208 - DNA, 25 bp, SARS Virus
ggatccttgacctggtcttcgaagt

SEQ ID NO: 114209 - DNA, 25 bp, SARS Virus
gatccttgaccgtgtcttcgaagtg

SEQ ID NO: 114210 - DNA, 25 bp, SARS Virus
atccttgaccggttcttcgaagtga

SEQ ID NO: 114211 - DNA, 25 bp, SARS Virus
tccttgaccgggtcttcgaagtgaa

SEQ ID NO: 114212 - DNA, 25 bp, SARS Virus
ccttgaccgggttttcgaagtgaag

SEQ ID NO: 114213 - DNA, 25 bp, SARS Virus
cttgaccgggtcttcgaagtgaagg

SEQ ID NO: 114214 - DNA, 25 bp, SARS Virus
ttgaccgggtcttcgaagtgaaggg

SEQ ID NO: 114215 - DNA, 25 bp, SARS Virus
tgaccgggtctttgaagtgaaggga

SEQ ID NO: 114216 - DNA, 25 bp, SARS Virus
gaccgggtcttctaagtgaagggat

SEQ ID NO: 114217 - DNA, 25 bp, SARS Virus
accgggtcttcgtagtgaagggatg

SEQ ID NO: 114218 - DNA, 25 bp, SARS Virus
ccgggtcttcgatgtgaagggatgc

SEQ ID NO: 114219 - DNA, 25 bp, SARS Virus
cgggtcttcgaattgaagggatgcc

SEQ ID NO: 114220 - DNA, 25 bp, SARS Virus
gggtcttcgaagtgaagggatgccg

SEQ ID NO: 114221 - DNA, 25 bp, SARS Virus
ggtcttcgaagttaagggatgccgc

SEQ ID NO: 114222 - DNA, 25 bp, SARS Virus
gtcttcgaagtgtagggatgccgcg

SEQ ID NO: 114223 - DNA, 25 bp, SARS Virus
tcttcgaagtgatgggatgccgcga

SEQ ID NO: 114224 - DNA, 25 bp, SARS Virus
cttcgaagtgaatggatgccgcgat

SEQ ID NO: 114225 - DNA, 25 bp, SARS Virus
ttcgaagtgaagtgatgccgcgatt

SEQ ID NO: 114226 - DNA, 25 bp, SARS Virus
tcgaagtgaaggtatgccgcgattg

SEQ ID NO: 114227 - DNA, 25 bp, SARS Virus
cgaagtgaagggttgccgcgattgt

SEQ ID NO: 114228 - DNA, 25 bp, SARS Virus
gaagtgaagggatgccgcgattgtt

SEQ ID NO: 114229 - DNA, 25 bp, SARS Virus
aagtgaagggattccgcgattgttt

SEQ ID NO: 114230 - DNA, 25 bp, SARS Virus
agtgaagggatgtcgcgattgtttc

SEQ ID NO: 114231 - DNA, 25 bp, SARS Virus
gtgaagggatgctgcgattgtttct

SEQ ID NO: 114232 - DNA, 25 bp, SARS Virus
tgaagggatgcctcgattgtttctt

SEQ ID NO: 114233 - DNA, 25 bp, SARS Virus
gaagggatgccgtgattgtttcttc

SEQ ID NO: 114234 - DNA, 25 bp, SARS Virus
aagggatgccgctattgtttcttcc

SEQ ID NO: 114235 - DNA, 25 bp, SARS Virus
agggatgccgcgtttgtttcttccg

SEQ ID NO: 114236 - DNA, 25 bp, SARS Virus
gggatgccgcgattgtttcttccgt

SEQ ID NO: 114237 - DNA, 25 bp, SARS Virus
ggatgccgcgattgtttcttccgta

SEQ ID NO: 114238 - DNA, 25 bp, SARS Virus
gatgccgcgattttttcttccgtag

SEQ ID NO: 114239 - DNA, 25 bp, SARS Virus
atgccgcgattgtttcttccgtagc

SEQ ID NO: 114240 - DNA, 25 bp, SARS Virus
tgccgcgattgtttcttccgtagca

SEQ ID NO: 114241 - DNA, 25 bp, SARS Virus
gccgcgattgtttcttccgtagcat

SEQ ID NO: 114242 - DNA, 25 bp, SARS Virus
ccgcgattgttttttccgtagcata

SEQ ID NO: 114243 - DNA, 25 bp, SARS Virus
cgcgattgtttcttccgtagcatac

SEQ ID NO: 114244 - DNA, 25 bp, SARS Virus
gcgattgtttcttccgtagcatacc

SEQ ID NO: 114245 - DNA, 25 bp, SARS Virus
cgattgtttctttcgtagcataccc

SEQ ID NO: 114246 - DNA, 25 bp, SARS Virus
gattgtttcttctgtagcataccca

SEQ ID NO: 114247 - DNA, 25 bp, SARS Virus
attgtttcttccttagcatacccaa

SEQ ID NO: 114248 - DNA, 25 bp, SARS Virus
ttgtttcttccgtagcatacccaac

SEQ ID NO: 114249 - DNA, 25 bp, SARS Virus
tgtttcttccgttgcatacccaacg

SEQ ID NO: 114250 - DNA, 25 bp, SARS Virus
gtttcttccgtatcatacccaacgt

SEQ ID NO: 114251 - DNA, 25 bp, SARS Virus
tttcttccgtagtatacccaacgtt

SEQ ID NO: 114252 - DNA, 25 bp, SARS Virus
ttcttccgtagcttacccaacgttg

SEQ ID NO: 114253 - DNA, 25 bp, SARS Virus
tcttccgtagcatacccaacgttga

SEQ ID NO: 114254 - DNA, 25 bp, SARS Virus
cttccgtagcattcccaacgttgac

SEQ ID NO: 114255 - DNA, 25 bp, SARS Virus
ttccgtagcatatccaacgttgact

SEQ ID NO: 114256 - DNA, 25 bp, SARS Virus
tccgtagcatactcaacgttgactc

SEQ ID NO: 114257 - DNA, 25 bp, SARS Virus
ccgtagcatacctaacgttgactcc

SEQ ID NO: 114258 - DNA, 25 bp, SARS Virus
cgtagcataccctacgttgactccc

SEQ ID NO: 114259 - DNA, 25 bp, SARS Virus
gtagcatacccatcgttgactccct

SEQ ID NO: 114260 - DNA, 25 bp, SARS Virus
tagcatacccaatgttgactccctc

SEQ ID NO: 114261 - DNA, 25 bp, SARS Virus
agcatacccaactttgactccctcg

SEQ ID NO: 114262 - DNA, 25 bp, SARS Virus
gcatacccaacgttgactccctcgg

SEQ ID NO: 114263 - DNA, 25 bp, SARS Virus
catacccaacgttgactccctcgga

SEQ ID NO: 114264 - DNA, 25 bp, SARS Virus
atacccaacgtttactccctcggaa

SEQ ID NO: 114265 - DNA, 25 bp, SARS Virus
tacccaacgttgtctccctcggaac

SEQ ID NO: 114266 - DNA, 25 bp, SARS Virus
acccaacgttgattccctcggaact

SEQ ID NO: 114267 - DNA, 25 bp, SARS Virus
cccaacgttgactccctcggaactt

SEQ ID NO: 114268 - DNA, 25 bp, SARS Virus
ccaacgttgacttcctcggaactta

SEQ ID NO: 114269 - DNA, 25 bp, SARS Virus
caacgttgactctctcggaacttat

SEQ ID NO: 114270 - DNA, 25 bp, SARS Virus
aacgttgactccttcggaacttatg

SEQ ID NO: 114271 - DNA, 25 bp, SARS Virus
acgttgactccctcggaacttatgt

SEQ ID NO: 114272 - DNA, 25 bp, SARS Virus
cgttgactcccttggaacttatgtg

SEQ ID NO: 114273 - DNA, 25 bp, SARS Virus
gttgactccctctgaacttatgtgg

SEQ ID NO: 114274 - DNA, 25 bp, SARS Virus
ttgactccctcgtaacttatgtggg

SEQ ID NO: 114275 - DNA, 25 bp, SARS Virus
tgactccctcggtacttatgtgggt

SEQ ID NO: 114276 - DNA, 25 bp, SARS Virus
gactccctcggatcttatgtgggtt

SEQ ID NO: 114277 - DNA, 25 bp, SARS Virus
actccctcggaatttatgtgggttt

SEQ ID NO: 114278 - DNA, 25 bp, SARS Virus
ctccctcggaacttatgtgggtttc

SEQ ID NO: 114279 - DNA, 25 bp, SARS Virus
tccctcggaacttatgtgggtttct

SEQ ID NO: 114280 - DNA, 25 bp, SARS Virus
ccctcggaacttttgtgggtttctg

SEQ ID NO: 114281 - DNA, 25 bp, SARS Virus
cctcggaacttatgtgggtttctgg

SEQ ID NO: 114282 - DNA, 25 bp, SARS Virus
ctcggaacttatttgggtttctggt

SEQ ID NO: 114283 - DNA, 25 bp, SARS Virus
tcggaacttatgtgggtttctggtg

SEQ ID NO: 114284 - DNA, 25 bp, SARS Virus
cggaacttatgttggtttctggtgt

SEQ ID NO: 114285 - DNA, 25 bp, SARS Virus
ggaacttatgtgtgtttctggtgta

SEQ ID NO: 114286 - DNA, 25 bp, SARS Virus
gaacttatgtggttttctggtgtaa

SEQ ID NO: 114287 - DNA, 25 bp, SARS Virus
aacttatgtgggtttctggtgtaac

SEQ ID NO: 114288 - DNA, 25 bp, SARS Virus
acttatgtgggtttctggtgtaacc

SEQ ID NO: 114289 - DNA, 25 bp, SARS Virus
cttatgtgggtttctggtgtaaccg

SEQ ID NO: 114290 - DNA, 25 bp, SARS Virus
ttatgtgggtttttggtgtaaccgt

SEQ ID NO: 114291 - DNA, 25 bp, SARS Virus
tatgtgggtttctggtgtaaccgtg

SEQ ID NO: 114292 - DNA, 25 bp, SARS Virus
atgtgggtttcttgtgtaaccgtgg

SEQ ID NO: 114293 - DNA, 25 bp, SARS Virus
tgtgggtttctgttgtaaccgtggg

SEQ ID NO: 114294 - DNA, 25 bp, SARS Virus
gtgggtttctggtgtaaccgtgggc

SEQ ID NO: 114295 - DNA, 25 bp, SARS Virus
tgggtttctggtttaaccgtgggcg

SEQ ID NO: 114296 - DNA, 25 bp, SARS Virus
gggtttctggtgtaaccgtgggcgt

SEQ ID NO: 114297 - DNA, 25 bp, SARS Virus
ggtttctggtgttaccgtgggcgtt

SEQ ID NO: 114298 - DNA, 25 bp, SARS Virus
gtttctggtgtatccgtgggcgtta

SEQ ID NO: 114299 - DNA, 25 bp, SARS Virus
tttctggtgtaatcgtgggcgttag

SEQ ID NO: 114300 - DNA, 25 bp, SARS Virus
ttctggtgtaactgtgggcgttagg

SEQ ID NO: 114301 - DNA, 25 bp, SARS Virus
tctggtgtaaccttgggcgttagga

SEQ ID NO: 114302 - DNA, 25 bp, SARS Virus
ctggtgtaaccgtgggcgttaggat

SEQ ID NO: 114303 - DNA, 25 bp, SARS Virus
tggtgtaaccgttggcgttaggatt

SEQ ID NO: 114304 - DNA, 25 bp, SARS Virus
ggtgtaaccgtgtgcgttaggatta

SEQ ID NO: 114305 - DNA, 25 bp, SARS Virus
gtgtaaccgtggtcgttaggattat

SEQ ID NO: 114306 - DNA, 25 bp, SARS Virus
tgtaaccgtgggtgttaggattatt

SEQ ID NO: 114307 - DNA, 25 bp, SARS Virus
gtaaccgtgggctttaggattattg

SEQ ID NO: 114308 - DNA, 25 bp, SARS Virus
taaccgtgggcgttaggattattgt

SEQ ID NO: 114309 - DNA, 25 bp, SARS Virus
aaccgtgggcgttaggattattgtt

SEQ ID NO: 114310 - DNA, 25 bp, SARS Virus
accgtgggcgtttggattattgtta

SEQ ID NO: 114311 - DNA, 25 bp, SARS Virus
ccgtgggcgttatgattattgttac

SEQ ID NO: 114312 - DNA, 25 bp, SARS Virus
cgtgggcgttagtattattgttacg

SEQ ID NO: 114313 - DNA, 25 bp, SARS Virus
gtgggcgttaggtttattgttacga

SEQ ID NO: 114314 - DNA, 25 bp, SARS Virus
tgggcgttaggattattgttacgac

SEQ ID NO: 114315 - DNA, 25 bp, SARS Virus
gggcgttaggattattgttacgacg

SEQ ID NO: 114316 - DNA, 25 bp, SARS Virus
ggcgttaggatttttgttacgacgg

SEQ ID NO: 114317 - DNA, 25 bp, SARS Virus
gcgttaggattattgttacgacggt

SEQ ID NO: 114318 - DNA, 25 bp, SARS Virus
cgttaggattattgttacgacggtg

SEQ ID NO: 114319 - DNA, 25 bp, SARS Virus
gttaggattatttttacgacggtgg

SEQ ID NO: 114320 - DNA, 25 bp, SARS Virus
ttaggattattgttacgacggtggc

SEQ ID NO: 114321 - DNA, 25 bp, SARS Virus
taggattattgtaacgacggtggca

SEQ ID NO: 114322 - DNA, 25 bp, SARS Virus
aggattattgttacgacggtggcac

SEQ ID NO: 114323 - DNA, 25 bp, SARS Virus
ggattattgttaagacggtggcacg

SEQ ID NO: 114324 - DNA, 25 bp, SARS Virus
gattattgttacaacggtggcacga

SEQ ID NO: 114325 - DNA, 25 bp, SARS Virus
attattgttacgacggtggcacgat

SEQ ID NO: 114326 - DNA, 25 bp, SARS Virus
ttattgttacgaaggtggcacgatg

SEQ ID NO: 114327 - DNA, 25 bp, SARS Virus
tattgttacgacagtggcacgatgt

SEQ ID NO: 114328 - DNA, 25 bp, SARS Virus
attgttacgacgatggcacgatgtt

SEQ ID NO: 114329 - DNA, 25 bp, SARS Virus
ttgttacgacggaggcacgatgttg

SEQ ID NO: 114330 - DNA, 25 bp, SARS Virus
tgttacgacggtagcacgatgttga

SEQ ID NO: 114331 - DNA, 25 bp, SARS Virus
gttacgacggtgacacgatgttgaa

SEQ ID NO: 114332 - DNA, 25 bp, SARS Virus
ttacgacggtggaacgatgttgaag

SEQ ID NO: 114333 - DNA, 25 bp, SARS Virus
tacgacggtggcacgatgttgaagg

SEQ ID NO: 114334 - DNA, 25 bp, SARS Virus
acgacggtggcaagatgttgaagga

SEQ ID NO: 114335 - DNA, 25 bp, SARS Virus
cgacggtggcacaatgttgaaggag

SEQ ID NO: 114336 - DNA, 25 bp, SARS Virus
gacggtggcacgatgttgaaggagt

SEQ ID NO: 114337 - DNA, 25 bp, SARS Virus
acggtggcacgaagttgaaggagtt

SEQ ID NO: 114338 - DNA, 25 bp, SARS Virus
cggtggcacgatattgaaggagttc

SEQ ID NO: 114339 - DNA, 25 bp, SARS Virus
ggtggcacgatgatgaaggagttcc

SEQ ID NO: 114340 - DNA, 25 bp, SARS Virus
gtggcacgatgtagaaggagttcct

SEQ ID NO: 114341 - DNA, 25 bp, SARS Virus
tggcacgatgttaaaggagttcctt

SEQ ID NO: 114342 - DNA, 25 bp, SARS Virus
ggcacgatgttgaaggagttccttg

SEQ ID NO: 114343 - DNA, 25 bp, SARS Virus
gcacgatgttgaaggagttccttgt

SEQ ID NO: 114344 - DNA, 25 bp, SARS Virus
cacgatgttgaaagagttccttgtt

SEQ ID NO: 114345 - DNA, 25 bp, SARS Virus
acgatgttgaagaagttccttgttg

SEQ ID NO: 114346 - DNA, 25 bp, SARS Virus
cgatgttgaaggagttccttgttgt

SEQ ID NO: 114347 - DNA, 25 bp, SARS Virus
gatgttgaaggaattccttgttgta

SEQ ID NO: 114348 - DNA, 25 bp, SARS Virus
atgttgaaggagatccttgttgtaa

SEQ ID NO: 114349 - DNA, 25 bp, SARS Virus
tgttgaaggagtaccttgttgtaac

SEQ ID NO: 114350 - DNA, 25 bp, SARS Virus
gttgaaggagttacttgttgtaacg

SEQ ID NO: 114351 - DNA, 25 bp, SARS Virus
ttgaaggagttcattgttgtaacgg

SEQ ID NO: 114352 - DNA, 25 bp, SARS Virus
tgaaggagttccatgttgtaacggt

SEQ ID NO: 114353 - DNA, 25 bp, SARS Virus
gaaggagttcctagttgtaacggtt

SEQ ID NO: 114354 - DNA, 25 bp, SARS Virus
aaggagttccttattgtaacggttt

SEQ ID NO: 114355 - DNA, 25 bp, SARS Virus
aggagttccttgatgtaacggtttt

SEQ ID NO: 114356 - DNA, 25 bp, SARS Virus
ggagttccttgtagtaacggttttc

SEQ ID NO: 114357 - DNA, 25 bp, SARS Virus
gagttccttgttataacggttttcc

SEQ ID NO: 114358 - DNA, 25 bp, SARS Virus
agttccttgttgaaacggttttccg

SEQ ID NO: 114359 - DNA, 25 bp, SARS Virus
gttccttgttgtaacggttttccga

SEQ ID NO: 114360 - DNA, 25 bp, SARS Virus
ttccttgttgtaacggttttccgaa

SEQ ID NO: 114361 - DNA, 25 bp, SARS Virus
tccttgttgtaaaggttttccgaag

SEQ ID NO: 114362 - DNA, 25 bp, SARS Virus
ccttgttgtaacagttttccgaaga

SEQ ID NO: 114363 - DNA, 25 bp, SARS Virus
cttgttgtaacgattttccgaagat

SEQ ID NO: 114364 - DNA, 25 bp, SARS Virus
ttgttgtaacggatttccgaagatg

SEQ ID NO: 114365 - DNA, 25 bp, SARS Virus
tgttgtaacggtattccgaagatgc

SEQ ID NO: 114366 - DNA, 25 bp, SARS Virus
gttgtaacggttatccgaagatgcg

SEQ ID NO: 114367 - DNA, 25 bp, SARS Virus
ttgtaacggtttaccgaagatgcgt

SEQ ID NO: 114368 - DNA, 25 bp, SARS Virus
tgtaacggttttacgaagatgcgtc

SEQ ID NO: 114369 - DNA, 25 bp, SARS Virus
gtaacggttttcagaagatgcgtct

SEQ ID NO: 114370 - DNA, 25 bp, SARS Virus
taacggttttccaaagatgcgtctc

SEQ ID NO: 114371 - DNA, 25 bp, SARS Virus
aacggttttccgaagatgcgtctcc

SEQ ID NO: 114372 - DNA, 25 bp, SARS Virus
acggttttccgaagatgcgtctccc

SEQ ID NO: 114373 - DNA, 25 bp, SARS Virus
cggttttccgaaaatgcgtctccct

SEQ ID NO: 114374 - DNA, 25 bp, SARS Virus
ggttttccgaagatgcgtctccctt

SEQ ID NO: 114375 - DNA, 25 bp, SARS Virus
gttttccgaagaagcgtctcccttc

SEQ ID NO: 114376 - DNA, 25 bp, SARS Virus
ttttccgaagatacgtctcccttcg

SEQ ID NO: 114377 - DNA, 25 bp, SARS Virus
tttccgaagatgagtctcccttcgt

SEQ ID NO: 114378 - DNA, 25 bp, SARS Virus
ttccgaagatgcatctcccttcgtc

SEQ ID NO: 114379 - DNA, 25 bp, SARS Virus
tccgaagatgcgactcccttcgtct

SEQ ID NO: 114380 - DNA, 25 bp, SARS Virus
ccgaagatgcgtatcccttcgtctc

SEQ ID NO: 114381 - DNA, 25 bp, SARS Virus
cgaagatgcgtcacccttcgtctcc

SEQ ID NO: 114382 - DNA, 25 bp, SARS Virus
gaagatgcgtctaccttcgtctccg

SEQ ID NO: 114383 - DNA, 25 bp, SARS Virus
aagatgcgtctcacttcgtctccgc

SEQ ID NO: 114384 - DNA, 25 bp, SARS Virus
agatgcgtctccattcgtctccgcc

SEQ ID NO: 114385 - DNA, 25 bp, SARS Virus
gatgcgtctcccatcgtctccgccg

SEQ ID NO: 114386 - DNA, 25 bp, SARS Virus
atgcgtctccctacgtctccgccgt

SEQ ID NO: 114387 - DNA, 25 bp, SARS Virus
tgcgtctcccttagtctccgccgtc

SEQ ID NO: 114388 - DNA, 25 bp, SARS Virus
gcgtctcccttcatctccgccgtca

SEQ ID NO: 114389 - DNA, 25 bp, SARS Virus
cgtctcccttcgactccgccgtcag

SEQ ID NO: 114390 - DNA, 25 bp, SARS Virus
gtctcccttcgtatccgccgtcagt

SEQ ID NO: 114391 - DNA, 25 bp, SARS Virus
tctcccttcgtcaccgccgtcagtt

SEQ ID NO: 114392 - DNA, 25 bp, SARS Virus
ctcccttcgtctacgccgtcagttc

SEQ ID NO: 114393 - DNA, 25 bp, SARS Virus
tcccttcgtctcagccgtcagttcg

SEQ ID NO: 114394 - DNA, 25 bp, SARS Virus
cccttcgtctccaccgtcagttcgg

SEQ ID NO: 114395 - DNA, 25 bp, SARS Virus
ccttcgtctccgacgtcagttcgga

SEQ ID NO: 114396 - DNA, 25 bp, SARS Virus
cttcgtctccgcagtcagttcggag

SEQ ID NO: 114397 - DNA, 25 bp, SARS Virus
ttcgtctccgccatcagttcggaga

SEQ ID NO: 114398 - DNA, 25 bp, SARS Virus
tcgtctccgccgacagttcggagaa

SEQ ID NO: 114399 - DNA, 25 bp, SARS Virus
cgtctccgccgtaagttcggagaag

SEQ ID NO: 114400 - DNA, 25 bp, SARS Virus
gtctccgccgtcagttcggagaaga

SEQ ID NO: 114401 - DNA, 25 bp, SARS Virus
tctccgccgtcaattcggagaagag

SEQ ID NO: 114402 - DNA, 25 bp, SARS Virus
ctccgccgtcagatcggagaagagc

SEQ ID NO: 114403 - DNA, 25 bp, SARS Virus
tccgccgtcagtacggagaagagcg

SEQ ID NO: 114404 - DNA, 25 bp, SARS Virus
ccgccgtcagttaggagaagagcga

SEQ ID NO: 114405 - DNA, 25 bp, SARS Virus
cgccgtcagttcagagaagagcgag

SEQ ID NO: 114406 - DNA, 25 bp, SARS Virus
gccgtcagttcgaagaagagcgagg

SEQ ID NO: 114407 - DNA, 25 bp, SARS Virus
ccgtcagttcggagaagagcgagga

SEQ ID NO: 114408 - DNA, 25 bp, SARS Virus
cgtcagttcggaaaagagcgaggag

SEQ ID NO: 114409 - DNA, 25 bp, SARS Virus
gtcagttcggagaagagcgaggagt

SEQ ID NO: 114410 - DNA, 25 bp, SARS Virus
tcagttcggagaagagcgaggagta

SEQ ID NO: 114411 - DNA, 25 bp, SARS Virus
cagttcggagaaaagcgaggagtag

SEQ ID NO: 114412 - DNA, 25 bp, SARS Virus
agttcggagaagagcgaggagtagt

SEQ ID NO: 114413 - DNA, 25 bp, SARS Virus
gttcggagaagaacgaggagtagtg

SEQ ID NO: 114414 - DNA, 25 bp, SARS Virus
ttcggagaagagagaggagtagtgc

SEQ ID NO: 114415 - DNA, 25 bp, SARS Virus
tcggagaagagcaaggagtagtgca

SEQ ID NO: 114416 - DNA, 25 bp, SARS Virus
cggagaagagcgaggagtagtgcat

SEQ ID NO: 114417 - DNA, 25 bp, SARS Virus
ggagaagagcgaagagtagtgcatc

SEQ ID NO: 114418 - DNA, 25 bp, SARS Virus
gagaagagcgagaagtagtgcatca

SEQ ID NO: 114419 - DNA, 25 bp, SARS Virus
agaagagcgaggagtagtgcatcag

SEQ ID NO: 114420 - DNA, 25 bp, SARS Virus
gaagagcgaggaatagtgcatcagc

SEQ ID NO: 114421 - DNA, 25 bp, SARS Virus
aagagcgaggagaagtgcatcagcg

SEQ ID NO: 114422 - DNA, 25 bp, SARS Virus
agagcgaggagtagtgcatcagcgc

SEQ ID NO: 114423 - DNA, 25 bp, SARS Virus
gagcgaggagtaatgcatcagcgcc

SEQ ID NO: 114424 - DNA, 25 bp, SARS Virus
agcgaggagtagagcatcagcgcca

SEQ ID NO: 114425 - DNA, 25 bp, SARS Virus
gcgaggagtagtacatcagcgccat

SEQ ID NO: 114426 - DNA, 25 bp, SARS Virus
cgaggagtagtgaatcagcgccatt

SEQ ID NO: 114427 - DNA, 25 bp, SARS Virus
gaggagtagtgcatcagcgccatta

SEQ ID NO: 114428 - DNA, 25 bp, SARS Virus
aggagtagtgcaacagcgccattaa

SEQ ID NO: 114429 - DNA, 25 bp, SARS Virus
ggagtagtgcataagcgccattaag

SEQ ID NO: 114430 - DNA, 25 bp, SARS Virus
gagtagtgcatcagcgccattaagt

SEQ ID NO: 114431 - DNA, 25 bp, SARS Virus
agtagtgcatcaacgccattaagtt

SEQ ID NO: 114432 - DNA, 25 bp, SARS Virus
gtagtgcatcagagccattaagttc

SEQ ID NO: 114433 - DNA, 25 bp, SARS Virus
tagtgcatcagcaccattaagttct

SEQ ID NO: 114434 - DNA, 25 bp, SARS Virus
agtgcatcagcgacattaagttctt

SEQ ID NO: 114435 - DNA, 25 bp, SARS Virus
gtgcatcagcgcaattaagttcttt

SEQ ID NO: 114436 - DNA, 25 bp, SARS Virus
tgcatcagcgccattaagttcttta

SEQ ID NO: 114437 - DNA, 25 bp, SARS Virus
gcatcagcgccaataagttctttaa

SEQ ID NO: 114438 - DNA, 25 bp, SARS Virus
catcagcgccataaagttctttaag

SEQ ID NO: 114439 - DNA, 25 bp, SARS Virus
atcagcgccattaagttctttaagt

SEQ ID NO: 114440 - DNA, 25 bp, SARS Virus
tcagcgccattaagttctttaagtt

SEQ ID NO: 114441 - DNA, 25 bp, SARS Virus
cagcgccattaaattctttaagttg

SEQ ID NO: 114442 - DNA, 25 bp, SARS Virus
agcgccattaagatctttaagttga

SEQ ID NO: 114443 - DNA, 25 bp, SARS Virus
gcgccattaagtactttaagttgag

SEQ ID NO: 114444 - DNA, 25 bp, SARS Virus
cgccattaagttatttaagttgagg

SEQ ID NO: 114445 - DNA, 25 bp, SARS Virus
gccattaagttcattaagttgagga

SEQ ID NO: 114446 - DNA, 25 bp, SARS Virus
ccattaagttctataagttgaggac

SEQ ID NO: 114447 - DNA, 25 bp, SARS Virus
cattaagttcttaaagttgaggacc

SEQ ID NO: 114448 - DNA, 25 bp, SARS Virus
attaagttctttaagttgaggaccg

SEQ ID NO: 114449 - DNA, 25 bp, SARS Virus
ttaagttctttaagttgaggaccgt

SEQ ID NO: 114450 - DNA, 25 bp, SARS Virus
taagttctttaaattgaggaccgtc

SEQ ID NO: 114451 - DNA, 25 bp, SARS Virus
aagttctttaagatgaggaccgtcg

SEQ ID NO: 114452 - DNA, 25 bp, SARS Virus
agttctttaagtagaggaccgtcgt

SEQ ID NO: 114453 - DNA, 25 bp, SARS Virus
gttctttaagttaaggaccgtcgtc

SEQ ID NO: 114454 - DNA, 25 bp, SARS Virus
ttctttaagttgaggaccgtcgtca

SEQ ID NO: 114455 - DNA, 25 bp, SARS Virus
tctttaagttgaagaccgtcgtcat

SEQ ID NO: 114456 - DNA, 25 bp, SARS Virus
ctttaagttgagaaccgtcgtcatc

SEQ ID NO: 114457 - DNA, 25 bp, SARS Virus
tttaagttgaggaccgtcgtcatcc

SEQ ID NO: 114458 - DNA, 25 bp, SARS Virus
ttaagttgaggaacgtcgtcatccc

SEQ ID NO: 114459 - DNA, 25 bp, SARS Virus
taagttgaggacagtcgtcatcccc

SEQ ID NO: 114460 - DNA, 25 bp, SARS Virus
aagttgaggaccatcgtcatcccct

SEQ ID NO: 114461 - DNA, 25 bp, SARS Virus
agttgaggaccgacgtcatcccctt

SEQ ID NO: 114462 - DNA, 25 bp, SARS Virus
gttgaggaccgtagtcatccccttt

SEQ ID NO: 114463 - DNA, 25 bp, SARS Virus
ttgaggaccgtcatcatccccttta

SEQ ID NO: 114464 - DNA, 25 bp, SARS Virus
tgaggaccgtcgacatcccctttaa

SEQ ID NO: 114465 - DNA, 25 bp, SARS Virus
gaggaccgtcgtaatcccctttaag

SEQ ID NO: 114466 - DNA, 25 bp, SARS Virus
aggaccgtcgtcatcccctttaaga

SEQ ID NO: 114467 - DNA, 25 bp, SARS Virus
ggaccgtcgtcaacccctttaagag

SEQ ID NO: 114468 - DNA, 25 bp, SARS Virus
gaccgtcgtcataccctttaagagg

SEQ ID NO: 114469 - DNA, 25 bp, SARS Virus
accgtcgtcatcacctttaagagga

SEQ ID NO: 114470 - DNA, 25 bp, SARS Virus
ccgtcgtcatccactttaagaggac

SEQ ID NO: 114471 - DNA, 25 bp, SARS Virus
cgtcgtcatcccatttaagaggacg

SEQ ID NO: 114472 - DNA, 25 bp, SARS Virus
gtcgtcatccccattaagaggacga

SEQ ID NO: 114473 - DNA, 25 bp, SARS Virus
tcgtcatcccctataagaggacgag

SEQ ID NO: 114474 - DNA, 25 bp, SARS Virus
cgtcatccccttaaagaggacgagc

SEQ ID NO: 114475 - DNA, 25 bp, SARS Virus
gtcatcccctttaagaggacgagct

SEQ ID NO: 114476 - DNA, 25 bp, SARS Virus
tcatcccctttaagaggacgagctt

SEQ ID NO: 114477 - DNA, 25 bp, SARS Virus
catcccctttaaaaggacgagctta

SEQ ID NO: 114478 - DNA, 25 bp, SARS Virus
atcccctttaagaggacgagcttac

SEQ ID NO: 114479 - DNA, 25 bp, SARS Virus
tcccctttaagaagacgagcttacc

SEQ ID NO: 114480 - DNA, 25 bp, SARS Virus
cccctttaagagaacgagcttaccg

SEQ ID NO: 114481 - DNA, 25 bp, SARS Virus
ccctttaagaggacgagcttaccga

SEQ ID NO: 114482 - DNA, 25 bp, SARS Virus
cctttaagaggaagagcttaccgat

SEQ ID NO: 114483 - DNA, 25 bp, SARS Virus
ctttaagaggacaagcttaccgatc

SEQ ID NO: 114484 - DNA, 25 bp, SARS Virus
tttaagaggacgagcttaccgatcg

SEQ ID NO: 114485 - DNA, 25 bp, SARS Virus
ttaagaggacgaacttaccgatcgc

SEQ ID NO: 114486 - DNA, 25 bp, SARS Virus
taagaggacgagattaccgatcgcc

SEQ ID NO: 114487 - DNA, 25 bp, SARS Virus
aagaggacgagcataccgatcgcct

SEQ ID NO: 114488 - DNA, 25 bp, SARS Virus
agaggacgagctaaccgatcgcctc

SEQ ID NO: 114489 - DNA, 25 bp, SARS Virus
gaggacgagcttaccgatcgcctcc

SEQ ID NO: 114490 - DNA, 25 bp, SARS Virus
aggacgagcttaacgatcgcctcca

SEQ ID NO: 114491 - DNA, 25 bp, SARS Virus
ggacgagcttacagatcgcctccac

SEQ ID NO: 114492 - DNA, 25 bp, SARS Virus
gacgagcttaccaatcgcctccacc

SEQ ID NO: 114493 - DNA, 25 bp, SARS Virus
acgagcttaccgatcgcctccacca

SEQ ID NO: 114494 - DNA, 25 bp, SARS Virus
cgagcttaccgaacgcctccaccac

SEQ ID NO: 114495 - DNA, 25 bp, SARS Virus
gagcttaccgatagcctccaccact

SEQ ID NO: 114496 - DNA, 25 bp, SARS Virus
agcttaccgatcacctccaccactt

SEQ ID NO: 114497 - DNA, 25 bp, SARS Virus
gcttaccgatcgactccaccacttt

SEQ ID NO: 114498 - DNA, 25 bp, SARS Virus
cttaccgatcgcatccaccactttg

SEQ ID NO: 114499 - DNA, 25 bp, SARS Virus
ttaccgatcgccaccaccactttga

SEQ ID NO: 114500 - DNA, 25 bp, SARS Virus
taccgatcgcctacaccactttgac

SEQ ID NO: 114501 - DNA, 25 bp, SARS Virus
accgatcgcctcaaccactttgacg

SEQ ID NO: 114502 - DNA, 25 bp, SARS Virus
ccgatcgcctccaccactttgacgg

SEQ ID NO: 114503 - DNA, 25 bp, SARS Virus
cgatcgcctccaacactttgacggg

SEQ ID NO: 114504 - DNA, 25 bp, SARS Virus
gatcgcctccacaactttgacggga

SEQ ID NO: 114505 - DNA, 25 bp, SARS Virus
atcgcctccaccactttgacgggag

SEQ ID NO: 114506 - DNA, 25 bp, SARS Virus
tcgcctccaccaatttgacgggagc

SEQ ID NO: 114507 - DNA, 25 bp, SARS Virus
cgcctccaccacattgacgggagcg

SEQ ID NO: 114508 - DNA, 25 bp, SARS Virus
gcctccaccactatgacgggagcgc

SEQ ID NO: 114509 - DNA, 25 bp, SARS Virus
cctccaccacttagacgggagcgcg

SEQ ID NO: 114510 - DNA, 25 bp, SARS Virus
ctccaccactttaacgggagcgcga

SEQ ID NO: 114511 - DNA, 25 bp, SARS Virus
tccaccactttgacgggagcgcgat

SEQ ID NO: 114512 - DNA, 25 bp, SARS Virus
ccaccactttgaagggagcgcgata

SEQ ID NO: 114513 - DNA, 25 bp, SARS Virus
caccactttgacaggagcgcgataa

SEQ ID NO: 114514 - DNA, 25 bp, SARS Virus
accactttgacgagagcgcgataac

SEQ ID NO: 114515 - DNA, 25 bp, SARS Virus
ccactttgacggaagcgcgataacg

SEQ ID NO: 114516 - DNA, 25 bp, SARS Virus
cactttgacgggagcgcgataacga

SEQ ID NO: 114517 - DNA, 25 bp, SARS Virus
actttgacgggaacgcgataacgac

SEQ ID NO: 114518 - DNA, 25 bp, SARS Virus
ctttgacgggagagcgataacgacg

SEQ ID NO: 114519 - DNA, 25 bp, SARS Virus
tttgacgggagcacgataacgacga

SEQ ID NO: 114520 - DNA, 25 bp, SARS Virus
ttgacgggagcgagataacgacgat

SEQ ID NO: 114521 - DNA, 25 bp, SARS Virus
tgacgggagcgcaataacgacgatc

SEQ ID NO: 114522 - DNA, 25 bp, SARS Virus
gacgggagcgcgataacgacgatct

SEQ ID NO: 114523 - DNA, 25 bp, SARS Virus
acgggagcgcgaaaacgacgatctg

SEQ ID NO: 114524 - DNA, 25 bp, SARS Virus
cgggagcgcgataacgacgatctgt

SEQ ID NO: 114525 - DNA, 25 bp, SARS Virus
gggagcgcgataacgacgatctgtc

SEQ ID NO: 114526 - DNA, 25 bp, SARS Virus
ggagcgcgataaagacgatctgtct

SEQ ID NO: 114527 - DNA, 25 bp, SARS Virus
gagcgcgataacaacgatctgtcta

SEQ ID NO: 114528 - DNA, 25 bp, SARS Virus
agcgcgataacgacgatctgtctaa

SEQ ID NO: 114529 - DNA, 25 bp, SARS Virus
gcgcgataacgaagatctgtctaac

SEQ ID NO: 114530 - DNA, 25 bp, SARS Virus
cgcgataacgacaatctgtctaact

SEQ ID NO: 114531 - DNA, 25 bp, SARS Virus
gcgataacgacgatctgtctaactt

SEQ ID NO: 114532 - DNA, 25 bp, SARS Virus
cgataacgacgaactgtctaacttg

SEQ ID NO: 114533 - DNA, 25 bp, SARS Virus
gataacgacgatatgtctaacttgg

SEQ ID NO: 114534 - DNA, 25 bp, SARS Virus
ataacgacgatcagtctaacttggt

SEQ ID NO: 114535 - DNA, 25 bp, SARS Virus
taacgacgatctatctaacttggtc

SEQ ID NO: 114536 - DNA, 25 bp, SARS Virus
aacgacgatctgactaacttggtcg

SEQ ID NO: 114537 - DNA, 25 bp, SARS Virus
acgacgatctgtataacttggtcga

SEQ ID NO: 114538 - DNA, 25 bp, SARS Virus
cgacgatctgtcaaacttggtcgaa

SEQ ID NO: 114539 - DNA, 25 bp, SARS Virus
gacgatctgtctaacttggtcgaac

SEQ ID NO: 114540 - DNA, 25 bp, SARS Virus
acgatctgtctaacttggtcgaact

SEQ ID NO: 114541 - DNA, 25 bp, SARS Virus
cgatctgtctaaattggtcgaactc

SEQ ID NO: 114542 - DNA, 25 bp, SARS Virus
gatctgtctaacatggtcgaactct

SEQ ID NO: 114543 - DNA, 25 bp, SARS Virus
atctgtctaactaggtcgaactctc

SEQ ID NO: 114544 - DNA, 25 bp, SARS Virus
tctgtctaacttagtcgaactctcg

SEQ ID NO: 114545 - DNA, 25 bp, SARS Virus
ctgtctaacttgatcgaactctcgt

SEQ ID NO: 114546 - DNA, 25 bp, SARS Virus
tgtctaacttggacgaactctcgtt

SEQ ID NO: 114547 - DNA, 25 bp, SARS Virus
gtctaacttggtagaactctcgttt

SEQ ID NO: 114548 - DNA, 25 bp, SARS Virus
tctaacttggtcaaactctcgtttc

SEQ ID NO: 114549 - DNA, 25 bp, SARS Virus
ctaacttggtcgaactctcgtttca

SEQ ID NO: 114550 - DNA, 25 bp, SARS Virus
taacttggtcgaactctcgtttcaa

SEQ ID NO: 114551 - DNA, 25 bp, SARS Virus
aacttggtcgaaatctcgtttcaaa

SEQ ID NO: 114552 - DNA, 25 bp, SARS Virus
acttggtcgaacactcgtttcaaag

SEQ ID NO: 114553 - DNA, 25 bp, SARS Virus
cttggtcgaactatcgtttcaaaga

SEQ ID NO: 114554 - DNA, 25 bp, SARS Virus
ttggtcgaactcacgtttcaaagac

SEQ ID NO: 114555 - DNA, 25 bp, SARS Virus
tggtcgaactctagtttcaaagacc

SEQ ID NO: 114556 - DNA, 25 bp, SARS Virus
ggtcgaactctcatttcaaagacca

SEQ ID NO: 114557 - DNA, 25 bp, SARS Virus
gtcgaactctcgattcaaagaccat

SEQ ID NO: 114558 - DNA, 25 bp, SARS Virus
tcgaactctcgtatcaaagaccatt

SEQ ID NO: 114559 - DNA, 25 bp, SARS Virus
cgaactctcgttacaaagaccattt

SEQ ID NO: 114560 - DNA, 25 bp, SARS Virus
gaactctcgtttaaaagaccatttc

SEQ ID NO: 114561 - DNA, 25 bp, SARS Virus
aactctcgtttcaaagaccatttcc

SEQ ID NO: 114562 - DNA, 25 bp, SARS Virus
actctcgtttcaaagaccatttccg

SEQ ID NO: 114563 - DNA, 25 bp, SARS Virus
ctctcgtttcaaagaccatttccgg

SEQ ID NO: 114564 - DNA, 25 bp, SARS Virus
tctcgtttcaaaaaccatttccggt

SEQ ID NO: 114565 - DNA, 25 bp, SARS Virus
ctcgtttcaaagaccatttccggtt

SEQ ID NO: 114566 - DNA, 25 bp, SARS Virus
tcgtttcaaagaacatttccggttg

SEQ ID NO: 114567 - DNA, 25 bp, SARS Virus
cgtttcaaagacaatttccggttgt

SEQ ID NO: 114568 - DNA, 25 bp, SARS Virus
gtttcaaagaccatttccggttgtt

SEQ ID NO: 114569 - DNA, 25 bp, SARS Virus
tttcaaagaccaattccggttgttg

SEQ ID NO: 114570 - DNA, 25 bp, SARS Virus
ttcaaagaccatatccggttgttgt

SEQ ID NO: 114571 - DNA, 25 bp, SARS Virus
tcaaagaccattaccggttgttgtt

SEQ ID NO: 114572 - DNA, 25 bp, SARS Virus
caaagaccatttacggttgttgttg

SEQ ID NO: 114573 - DNA, 25 bp, SARS Virus
aaagaccatttcaggttgttgttgt

SEQ ID NO: 114574 - DNA, 25 bp, SARS Virus
aagaccatttccagttgttgttgtt

SEQ ID NO: 114575 - DNA, 25 bp, SARS Virus
agaccatttccgattgttgttgttc

SEQ ID NO: 114576 - DNA, 25 bp, SARS Virus
gaccatttccggatgttgttgttcc

SEQ ID NO: 114577 - DNA, 25 bp, SARS Virus
accatttccggtagttgttgttccg

SEQ ID NO: 114578 - DNA, 25 bp, SARS Virus
ccatttccggttattgttgttccgg

SEQ ID NO: 114579 - DNA, 25 bp, SARS Virus
catttccggttgatgttgttccggt

SEQ ID NO: 114580 - DNA, 25 bp, SARS Virus
atttccggttgtagttgttccggtt

SEQ ID NO: 114581 - DNA, 25 bp, SARS Virus
tttccggttgttattgttccggttt

SEQ ID NO: 114582 - DNA, 25 bp, SARS Virus
ttccggttgttgatgttccggtttg

SEQ ID NO: 114583 - DNA, 25 bp, SARS Virus
tccggttgttgtagttccggtttga

SEQ ID NO: 114584 - DNA, 25 bp, SARS Virus
ccggttgttgttattccggtttgac

SEQ ID NO: 114585 - DNA, 25 bp, SARS Virus
cggttgttgttgatccggtttgaca

SEQ ID NO: 114586 - DNA, 25 bp, SARS Virus
ggttgttgttgtaccggtttgacag

SEQ ID NO: 114587 - DNA, 25 bp, SARS Virus
gttgttgttgttacggtttgacagt

SEQ ID NO: 114588 - DNA, 25 bp, SARS Virus
ttgttgttgttcaggtttgacagtg

SEQ ID NO: 114589 - DNA, 25 bp, SARS Virus
tgttgttgttccagtttgacagtga

SEQ ID NO: 114590 - DNA, 25 bp, SARS Virus
gttgttgttccgatttgacagtgat

SEQ ID NO: 114591 - DNA, 25 bp, SARS Virus
ttgttgttccggattgacagtgatt

SEQ ID NO: 114592 - DNA, 25 bp, SARS Virus
tgttgttccggtatgacagtgattc

SEQ ID NO: 114593 - DNA, 25 bp, SARS Virus
gttgttccggttagacagtgattct

SEQ ID NO: 114594 - DNA, 25 bp, SARS Virus
ttgttccggtttaacagtgattctt

SEQ ID NO: 114595 - DNA, 25 bp, SARS Virus
tgttccggtttgacagtgattcttt

SEQ ID NO: 114596 - DNA, 25 bp, SARS Virus
gttccggtttgaaagtgattcttta

SEQ ID NO: 114597 - DNA, 25 bp, SARS Virus
ttccggtttgacagtgattctttag

SEQ ID NO: 114598 - DNA, 25 bp, SARS Virus
tccggtttgacaatgattctttaga

SEQ ID NO: 114599 - DNA, 25 bp, SARS Virus
ccggtttgacagagattctttagac

SEQ ID NO: 114600 - DNA, 25 bp, SARS Virus
cggtttgacagtaattctttagacg

SEQ ID NO: 114601 - DNA, 25 bp, SARS Virus
ggtttgacagtgattctttagacga

SEQ ID NO: 114602 - DNA, 25 bp, SARS Virus
gtttgacagtgaatctttagacgac

SEQ ID NO: 114603 - DNA, 25 bp, SARS Virus
tttgacagtgatactttagacgacg

SEQ ID NO: 114604 - DNA, 25 bp, SARS Virus
ttgacagtgattatttagacgacga

SEQ ID NO: 114605 - DNA, 25 bp, SARS Virus
tgacagtgattcattagacgacgac

SEQ ID NO: 114606 - DNA, 25 bp, SARS Virus
gacagtgattctatagacgacgact

SEQ ID NO: 114607 - DNA, 25 bp, SARS Virus
acagtgattcttaagacgacgactc

SEQ ID NO: 114608 - DNA, 25 bp, SARS Virus
cagtgattctttagacgacgactcc

SEQ ID NO: 114609 - DNA, 25 bp, SARS Virus
agtgattctttaaacgacgactccg

SEQ ID NO: 114610 - DNA, 25 bp, SARS Virus
gtgattctttagacgacgactccgt

SEQ ID NO: 114611 - DNA, 25 bp, SARS Virus
tgattctttagaagacgactccgta

SEQ ID NO: 114612 - DNA, 25 bp, SARS Virus
gattctttagacaacgactccgtag

SEQ ID NO: 114613 - DNA, 25 bp, SARS Virus
attctttagacgacgactccgtaga

SEQ ID NO: 114614 - DNA, 25 bp, SARS Virus
ttctttagacgaagactccgtagat

SEQ ID NO: 114615 - DNA, 25 bp, SARS Virus
tctttagacgacaactccgtagatt

SEQ ID NO: 114616 - DNA, 25 bp, SARS Virus
ctttagacgacgactccgtagattt

SEQ ID NO: 114617 - DNA, 25 bp, SARS Virus
tttagacgacgaatccgtagatttt

SEQ ID NO: 114618 - DNA, 25 bp, SARS Virus
ttagacgacgacaccgtagattttt

SEQ ID NO: 114619 - DNA, 25 bp, SARS Virus
tagacgacgactacgtagatttttc

SEQ ID NO: 114620 - DNA, 25 bp, SARS Virus
agacgacgactcagtagatttttcg

SEQ ID NO: 114621 - DNA, 25 bp, SARS Virus
gacgacgactccatagatttttcgg

SEQ ID NO: 114622 - DNA, 25 bp, SARS Virus
acgacgactccgaagatttttcgga

SEQ ID NO: 114623 - DNA, 25 bp, SARS Virus
cgacgactccgtagatttttcggag

SEQ ID NO: 114624 - DNA, 25 bp, SARS Virus
gacgactccgtaaatttttcggagc

SEQ ID NO: 114625 - DNA, 25 bp, SARS Virus
acgactccgtagatttttcggagcg

SEQ ID NO: 114626 - DNA, 25 bp, SARS Virus
cgactccgtagaattttcggagcgg

SEQ ID NO: 114627 - DNA, 25 bp, SARS Virus
gactccgtagatatttcggagcggt

SEQ ID NO: 114628 - DNA, 25 bp, SARS Virus
actccgtagattattcggagcggtt

SEQ ID NO: 114629 - DNA, 25 bp, SARS Virus
ctccgtagatttatcggagcggttt

SEQ ID NO: 114630 - DNA, 25 bp, SARS Virus
tccgtagattttacggagcggtttt

SEQ ID NO: 114631 - DNA, 25 bp, SARS Virus
ccgtagatttttaggagcggttttt

SEQ ID NO: 114632 - DNA, 25 bp, SARS Virus
cgtagatttttcagagcggtttttg

SEQ ID NO: 114633 - DNA, 25 bp, SARS Virus
gtagatttttcgaagcggtttttgc

SEQ ID NO: 114634 - DNA, 25 bp, SARS Virus
tagatttttcggagcggtttttgca

SEQ ID NO: 114635 - DNA, 25 bp, SARS Virus
agatttttcggaacggtttttgcat

SEQ ID NO: 114636 - DNA, 25 bp, SARS Virus
gatttttcggagaggtttttgcatg

SEQ ID NO: 114637 - DNA, 25 bp, SARS Virus
atttttcggagcagtttttgcatga

SEQ ID NO: 114638 - DNA, 25 bp, SARS Virus
tttttcggagcgatttttgcatgac

SEQ ID NO: 114639 - DNA, 25 bp, SARS Virus
ttttcggagcggattttgcatgacg

SEQ ID NO: 114640 - DNA, 25 bp, SARS Virus
tttcggagcggtatttgcatgacgg

SEQ ID NO: 114641 - DNA, 25 bp, SARS Virus
ttcggagcggttattgcatgacggt

SEQ ID NO: 114642 - DNA, 25 bp, SARS Virus
tcggagcggtttatgcatgacggtg

SEQ ID NO: 114643 - DNA, 25 bp, SARS Virus
cggagcggttttagcatgacggtgt

SEQ ID NO: 114644 - DNA, 25 bp, SARS Virus
ggagcggtttttacatgacggtgtt

SEQ ID NO: 114645 - DNA, 25 bp, SARS Virus
gagcggtttttgaatgacggtgttt

SEQ ID NO: 114646 - DNA, 25 bp, SARS Virus
agcggtttttgcatgacggtgtttt

SEQ ID NO: 114647 - DNA, 25 bp, SARS Virus
gcggtttttgcaagacggtgttttg

SEQ ID NO: 114648 - DNA, 25 bp, SARS Virus
cggtttttgcataacggtgttttgt

SEQ ID NO: 114649 - DNA, 25 bp, SARS Virus
ggtttttgcatgacggtgttttgtc

SEQ ID NO: 114650 - DNA, 25 bp, SARS Virus
gtttttgcatgaaggtgttttgtca

SEQ ID NO: 114651 - DNA, 25 bp, SARS Virus
tttttgcatgacagtgttttgtcat

SEQ ID NO: 114652 - DNA, 25 bp, SARS Virus
ttttgcatgacgatgttttgtcatg

SEQ ID NO: 114653 - DNA, 25 bp, SARS Virus
tttgcatgacggagttttgtcatgt

SEQ ID NO: 114654 - DNA, 25 bp, SARS Virus
ttgcatgacggtattttgtcatgtt

SEQ ID NO: 114655 - DNA, 25 bp, SARS Virus
tgcatgacggtgatttgtcatgttg

SEQ ID NO: 114656 - DNA, 25 bp, SARS Virus
gcatgacggtgtattgtcatgttgc

SEQ ID NO: 114657 - DNA, 25 bp, SARS Virus
catgacggtgttatgtcatgttgca

SEQ ID NO: 114658 - DNA, 25 bp, SARS Virus
atgacggtgtttagtcatgttgcag

SEQ ID NO: 114659 - DNA, 25 bp, SARS Virus
tgacggtgttttatcatgttgcagt

SEQ ID NO: 114660 - DNA, 25 bp, SARS Virus
gacggtgttttgacatgttgcagtg

SEQ ID NO: 114661 - DNA, 25 bp, SARS Virus
acggtgttttgtaatgttgcagtga

SEQ ID NO: 114662 - DNA, 25 bp, SARS Virus
cggtgttttgtcatgttgcagtgag

SEQ ID NO: 114663 - DNA, 25 bp, SARS Virus
ggtgttttgtcaagttgcagtgagt

SEQ ID NO: 114664 - DNA, 25 bp, SARS Virus
gtgttttgtcatattgcagtgagtt

SEQ ID NO: 114665 - DNA, 25 bp, SARS Virus
tgttttgtcatgatgcagtgagttc

SEQ ID NO: 114666 - DNA, 25 bp, SARS Virus
gttttgtcatgtagcagtgagttcg

SEQ ID NO: 114667 - DNA, 25 bp, SARS Virus
ttttgtcatgttacagtgagttcgt

SEQ ID NO: 114668 - DNA, 25 bp, SARS Virus
tttgtcatgttgaagtgagttcgta

SEQ ID NO: 114669 - DNA, 25 bp, SARS Virus
ttgtcatgttgcagtgagttcgtaa

SEQ ID NO: 114670 - DNA, 25 bp, SARS Virus
tgtcatgttgcaatgagttcgtaaa

SEQ ID NO: 114671 - DNA, 25 bp, SARS Virus
gtcatgttgcagagagttcgtaaac

SEQ ID NO: 114672 - DNA, 25 bp, SARS Virus
tcatgttgcagtaagttcgtaaacc

SEQ ID NO: 114673 - DNA, 25 bp, SARS Virus
catgttgcagtgagttcgtaaaccc

SEQ ID NO: 114674 - DNA, 25 bp, SARS Virus
atgttgcagtgaattcgtaaaccct

SEQ ID NO: 114675 - DNA, 25 bp, SARS Virus
tgttgcagtgagatcgtaaaccctc

SEQ ID NO: 114676 - DNA, 25 bp, SARS Virus
gttgcagtgagtacgtaaaccctct

SEQ ID NO: 114677 - DNA, 25 bp, SARS Virus
ttgcagtgagttagtaaaccctctg

SEQ ID NO: 114678 - DNA, 25 bp, SARS Virus
tgcagtgagttcataaaccctctgc

SEQ ID NO: 114679 - DNA, 25 bp, SARS Virus
gcagtgagttcgaaaaccctctgca

SEQ ID NO: 114680 - DNA, 25 bp, SARS Virus
cagtgagttcgtaaaccctctgcac

SEQ ID NO: 114681 - DNA, 25 bp, SARS Virus
agtgagttcgtaaaccctctgcacc

SEQ ID NO: 114682 - DNA, 25 bp, SARS Virus
gtgagttcgtaaaccctctgcacca

SEQ ID NO: 114683 - DNA, 25 bp, SARS Virus
tgagttcgtaaaacctctgcaccag

SEQ ID NO: 114684 - DNA, 25 bp, SARS Virus
gagttcgtaaacactctgcaccagg

SEQ ID NO: 114685 - DNA, 25 bp, SARS Virus
agttcgtaaaccatctgcaccaggt

SEQ ID NO: 114686 - DNA, 25 bp, SARS Virus
gttcgtaaacccactgcaccaggtc

SEQ ID NO: 114687 - DNA, 25 bp, SARS Virus
ttcgtaaaccctatgcaccaggtct

SEQ ID NO: 114688 - DNA, 25 bp, SARS Virus
tcgtaaaccctcagcaccaggtctt

SEQ ID NO: 114689 - DNA, 25 bp, SARS Virus
cgtaaaccctctacaccaggtcttg

SEQ ID NO: 114690 - DNA, 25 bp, SARS Virus
gtaaaccctctgaaccaggtcttgt

SEQ ID NO: 114691 - DNA, 25 bp, SARS Virus
taaaccctctgcaccaggtcttgtt

SEQ ID NO: 114692 - DNA, 25 bp, SARS Virus
aaaccctctgcaacaggtcttgttt

SEQ ID NO: 114693 - DNA, 25 bp, SARS Virus
aaccctctgcacaaggtcttgtttg

SEQ ID NO: 114694 - DNA, 25 bp, SARS Virus
accctctgcaccaggtcttgtttgg

SEQ ID NO: 114695 - DNA, 25 bp, SARS Virus
ccctctgcaccaagtcttgtttggg

SEQ ID NO: 114696 - DNA, 25 bp, SARS Virus
cctctgcaccagatcttgtttgggt

SEQ ID NO: 114697 - DNA, 25 bp, SARS Virus
ctctgcaccaggacttgtttgggtt

SEQ ID NO: 114698 - DNA, 25 bp, SARS Virus
tctgcaccaggtattgtttgggttc

SEQ ID NO: 114699 - DNA, 25 bp, SARS Virus
ctgcaccaggtcatgtttgggttcc

SEQ ID NO: 114700 - DNA, 25 bp, SARS Virus
tgcaccaggtctagtttgggttcct

SEQ ID NO: 114701 - DNA, 25 bp, SARS Virus
gcaccaggtcttatttgggttcctt

SEQ ID NO: 114702 - DNA, 25 bp, SARS Virus
caccaggtcttgattgggttccttt

SEQ ID NO: 114703 - DNA, 25 bp, SARS Virus
accaggtcttgtatgggttccttta

SEQ ID NO: 114704 - DNA, 25 bp, SARS Virus
ccaggtcttgttagggttcctttaa

SEQ ID NO: 114705 - DNA, 25 bp, SARS Virus
caggtcttgtttaggttcctttaaa

SEQ ID NO: 114706 - DNA, 25 bp, SARS Virus
aggtcttgtttgagttcctttaaag

SEQ ID NO: 114707 - DNA, 25 bp, SARS Virus
ggtcttgtttggattcctttaaagc

SEQ ID NO: 114708 - DNA, 25 bp, SARS Virus
gtcttgtttgggatcctttaaagcc

SEQ ID NO: 114709 - DNA, 25 bp, SARS Virus
tcttgtttgggtacctttaaagccc

SEQ ID NO: 114710 - DNA, 25 bp, SARS Virus
cttgtttgggttactttaaagcccc

SEQ ID NO: 114711 - DNA, 25 bp, SARS Virus
ttgtttgggttcatttaaagcccct

SEQ ID NO: 114712 - DNA, 25 bp, SARS Virus
tgtttgggttccattaaagcccctg

SEQ ID NO: 114713 - DNA, 25 bp, SARS Virus
gtttgggttcctataaagcccctgg

SEQ ID NO: 114714 - DNA, 25 bp, SARS Virus
tttgggttccttaaaagcccctggt

SEQ ID NO: 114715 - DNA, 25 bp, SARS Virus
ttgggttcctttaaagcccctggtt

SEQ ID NO: 114716 - DNA, 25 bp, SARS Virus
tgggttcctttaaagcccctggttc

SEQ ID NO: 114717 - DNA, 25 bp, SARS Virus
gggttcctttaaagcccctggttct

SEQ ID NO: 114718 - DNA, 25 bp, SARS Virus
ggttcctttaaaacccctggttctg

SEQ ID NO: 114719 - DNA, 25 bp, SARS Virus
gttcctttaaagaccctggttctgg

SEQ ID NO: 114720 - DNA, 25 bp, SARS Virus
ttcctttaaagcacctggttctgga

SEQ ID NO: 114721 - DNA, 25 bp, SARS Virus
tcctttaaagccactggttctggat

SEQ ID NO: 114722 - DNA, 25 bp, SARS Virus
cctttaaagcccatggttctggatt

SEQ ID NO: 114723 - DNA, 25 bp, SARS Virus
ctttaaagccccaggttctggatta

SEQ ID NO: 114724 - DNA, 25 bp, SARS Virus
tttaaagcccctagttctggattag

SEQ ID NO: 114725 - DNA, 25 bp, SARS Virus
ttaaagcccctgattctggattagt

SEQ ID NO: 114726 - DNA, 25 bp, SARS Virus
taaagcccctggatctggattagtc

SEQ ID NO: 114727 - DNA, 25 bp, SARS Virus
aaagcccctggtactggattagtct

SEQ ID NO: 114728 - DNA, 25 bp, SARS Virus
aagcccctggttatggattagtctg

SEQ ID NO: 114729 - DNA, 25 bp, SARS Virus
agcccctggttcaggattagtctgt

SEQ ID NO: 114730 - DNA, 25 bp, SARS Virus
gcccctggttctagattagtctgtt

SEQ ID NO: 114731 - DNA, 25 bp, SARS Virus
cccctggttctgaattagtctgttc

SEQ ID NO: 114732 - DNA, 25 bp, SARS Virus
ccctggttctggattagtctgttcc

SEQ ID NO: 114733 - DNA, 25 bp, SARS Virus
cctggttctggaatagtctgttcct

SEQ ID NO: 114734 - DNA, 25 bp, SARS Virus
ctggttctggataagtctgttcctt

SEQ ID NO: 114735 - DNA, 25 bp, SARS Virus
tggttctggattagtctgttccttg

SEQ ID NO: 114736 - DNA, 25 bp, SARS Virus
ggttctggattaatctgttccttga

SEQ ID NO: 114737 - DNA, 25 bp, SARS Virus
gttctggattagactgttccttgac

SEQ ID NO: 114738 - DNA, 25 bp, SARS Virus
ttctggattagtatgttccttgact

SEQ ID NO: 114739 - DNA, 25 bp, SARS Virus
tctggattagtcagttccttgacta

SEQ ID NO: 114740 - DNA, 25 bp, SARS Virus
ctggattagtctattccttgactaa

SEQ ID NO: 114741 - DNA, 25 bp, SARS Virus
tggattagtctgatccttgactaat

SEQ ID NO: 114742 - DNA, 25 bp, SARS Virus
ggattagtctgtaccttgactaatg

SEQ ID NO: 114743 - DNA, 25 bp, SARS Virus
gattagtctgttacttgactaatgt

SEQ ID NO: 114744 - DNA, 25 bp, SARS Virus
attagtctgttcattgactaatgtt

SEQ ID NO: 114745 - DNA, 25 bp, SARS Virus
ttagtctgttccatgactaatgttt

SEQ ID NO: 114746 - DNA, 25 bp, SARS Virus
tagtctgttcctagactaatgtttg

SEQ ID NO: 114747 - DNA, 25 bp, SARS Virus
agtctgttccttaactaatgtttgt

SEQ ID NO: 114748 - DNA, 25 bp, SARS Virus
gtctgttccttgactaatgtttgta

SEQ ID NO: 114749 - DNA, 25 bp, SARS Virus
tctgttccttgaataatgtttgtaa

SEQ ID NO: 114750 - DNA, 25 bp, SARS Virus
ctgttccttgacaaatgtttgtaac

SEQ ID NO: 114751 - DNA, 25 bp, SARS Virus
tgttccttgactaatgtttgtaacc

SEQ ID NO: 114752 - DNA, 25 bp, SARS Virus
gttccttgactaatgtttgtaaccg

SEQ ID NO: 114753 - DNA, 25 bp, SARS Virus
ttccttgactaaagtttgtaaccgg

SEQ ID NO: 114754 - DNA, 25 bp, SARS Virus
tccttgactaatatttgtaaccggc

SEQ ID NO: 114755 - DNA, 25 bp, SARS Virus
ccttgactaatgattgtaaccggcg

SEQ ID NO: 114756 - DNA, 25 bp, SARS Virus
cttgactaatgtatgtaaccggcgt

SEQ ID NO: 114757 - DNA, 25 bp, SARS Virus
ttgactaatgttagtaaccggcgtt

SEQ ID NO: 114758 - DNA, 25 bp, SARS Virus
tgactaatgtttataaccggcgttt

SEQ ID NO: 114759 - DNA, 25 bp, SARS Virus
gactaatgtttgaaaccggcgttta

SEQ ID NO: 114760 - DNA, 25 bp, SARS Virus
actaatgtttgtaaccggcgtttaa

SEQ ID NO: 114761 - DNA, 25 bp, SARS Virus
ctaatgtttgtaaccggcgtttaac

SEQ ID NO: 114762 - DNA, 25 bp, SARS Virus
taatgtttgtaaacggcgtttaacg

SEQ ID NO: 114763 - DNA, 25 bp, SARS Virus
aatgtttgtaacaggcgtttaacgt

SEQ ID NO: 114764 - DNA, 25 bp, SARS Virus
atgtttgtaaccagcgtttaacgtg

SEQ ID NO: 114765 - DNA, 25 bp, SARS Virus
tgtttgtaaccgacgtttaacgtgt

SEQ ID NO: 114766 - DNA, 25 bp, SARS Virus
gtttgtaaccggagtttaacgtgtt

SEQ ID NO: 114767 - DNA, 25 bp, SARS Virus
tttgtaaccggcatttaacgtgtta

SEQ ID NO: 114768 - DNA, 25 bp, SARS Virus
ttgtaaccggcgattaacgtgttaa

SEQ ID NO: 114769 - DNA, 25 bp, SARS Virus
tgtaaccggcgtataacgtgttaaa

SEQ ID NO: 114770 - DNA, 25 bp, SARS Virus
gtaaccggcgttaaacgtgttaaac

SEQ ID NO: 114771 - DNA, 25 bp, SARS Virus
taaccggcgtttaacgtgttaaacg

SEQ ID NO: 114772 - DNA, 25 bp, SARS Virus
aaccggcgtttaacgtgttaaacga

SEQ ID NO: 114773 - DNA, 25 bp, SARS Virus
accggcgtttaaagtgttaaacgag

SEQ ID NO: 114774 - DNA, 25 bp, SARS Virus
ccggcgtttaacatgttaaacgagg

SEQ ID NO: 114775 - DNA, 25 bp, SARS Virus
cggcgtttaacgagttaaacgaggt

SEQ ID NO: 114776 - DNA, 25 bp, SARS Virus
ggcgtttaacgtattaaacgaggtt

SEQ ID NO: 114777 - DNA, 25 bp, SARS Virus
gcgtttaacgtgataaacgaggttc

SEQ ID NO: 114778 - DNA, 25 bp, SARS Virus
cgtttaacgtgtaaaacgaggttca

SEQ ID NO: 114779 - DNA, 25 bp, SARS Virus
gtttaacgtgttaaacgaggttcac

SEQ ID NO: 114780 - DNA, 25 bp, SARS Virus
tttaacgtgttaaacgaggttcacg

SEQ ID NO: 114781 - DNA, 25 bp, SARS Virus
ttaacgtgttaaacgaggttcacgg

SEQ ID NO: 114782 - DNA, 25 bp, SARS Virus
taacgtgttaaaagaggttcacgga

SEQ ID NO: 114783 - DNA, 25 bp, SARS Virus
aacgtgttaaacaaggttcacggag

SEQ ID NO: 114784 - DNA, 25 bp, SARS Virus
acgtgttaaacgaggttcacggaga

SEQ ID NO: 114785 - DNA, 25 bp, SARS Virus
cgtgttaaacgaagttcacggagac

SEQ ID NO: 114786 - DNA, 25 bp, SARS Virus
gtgttaaacgagattcacggagacg

SEQ ID NO: 114787 - DNA, 25 bp, SARS Virus
tgttaaacgaggatcacggagacgt

SEQ ID NO: 114788 - DNA, 25 bp, SARS Virus
gttaaacgaggtacacggagacgta

SEQ ID NO: 114789 - DNA, 25 bp, SARS Virus
ttaaacgaggttaacggagacgtaa

SEQ ID NO: 114790 - DNA, 25 bp, SARS Virus
taaacgaggttcacggagacgtaag

SEQ ID NO: 114791 - DNA, 25 bp, SARS Virus
aaacgaggttcaaggagacgtaaga

SEQ ID NO: 114792 - DNA, 25 bp, SARS Virus
aacgaggttcacagagacgtaagaa

SEQ ID NO: 114793 - DNA, 25 bp, SARS Virus
acgaggttcacgaagacgtaagaaa

SEQ ID NO: 114794 - DNA, 25 bp, SARS Virus
cgaggttcacggagacgtaagaaac

SEQ ID NO: 114795 - DNA, 25 bp, SARS Virus
gaggttcacggaaacgtaagaaacc

SEQ ID NO: 114796 - DNA, 25 bp, SARS Virus
aggttcacggagacgtaagaaacct

SEQ ID NO: 114797 - DNA, 25 bp, SARS Virus
ggttcacggagaagtaagaaacctt

SEQ ID NO: 114798 - DNA, 25 bp, SARS Virus
gttcacggagacataagaaacctta

SEQ ID NO: 114799 - DNA, 25 bp, SARS Virus
ttcacggagacgaaagaaaccttac

SEQ ID NO: 114800 - DNA, 25 bp, SARS Virus
tcacggagacgtaagaaaccttaca

SEQ ID NO: 114801 - DNA, 25 bp, SARS Virus
cacggagacgtaagaaaccttacag

SEQ ID NO: 114802 - DNA, 25 bp, SARS Virus
acggagacgtaaaaaaccttacagt

SEQ ID NO: 114803 - DNA, 25 bp, SARS Virus
cggagacgtaagaaaccttacagtg

SEQ ID NO: 114804 - DNA, 25 bp, SARS Virus
ggagacgtaagaaaccttacagtgc

SEQ ID NO: 114805 - DNA, 25 bp, SARS Virus
gagacgtaagaaaccttacagtgcg

SEQ ID NO: 114806 - DNA, 25 bp, SARS Virus
agacgtaagaaaacttacagtgcgt

SEQ ID NO: 114807 - DNA, 25 bp, SARS Virus
gacgtaagaaacattacagtgcgta

SEQ ID NO: 114808 - DNA, 25 bp, SARS Virus
acgtaagaaaccatacagtgcgtaa

SEQ ID NO: 114809 - DNA, 25 bp, SARS Virus
taggattattgtcacgacggtggca

SEQ ID NO: 114810 - DNA, 25 bp, SARS Virus
aggattattgttccgacggtggcac

SEQ ID NO: 114811 - DNA, 25 bp, SARS Virus
ggattattgttacgacggtggcacg

SEQ ID NO: 114812 - DNA, 25 bp, SARS Virus
gattattgttaccacggtggcacga

SEQ ID NO: 114813 - DNA, 25 bp, SARS Virus
attattgttacgccggtggcacgat

SEQ ID NO: 114814 - DNA, 25 bp, SARS Virus
ttattgttacgacggtggcacgatg

SEQ ID NO: 114815 - DNA, 25 bp, SARS Virus
tattgttacgaccgtggcacgatgt

SEQ ID NO: 114816 - DNA, 25 bp, SARS Virus
attgttacgacgctggcacgatgtt

SEQ ID NO: 114817 - DNA, 25 bp, SARS Virus
ttgttacgacggcggcacgatgttg

SEQ ID NO: 114818 - DNA, 25 bp, SARS Virus
tgttacgacggtcgcacgatgttga

SEQ ID NO: 114819 - DNA, 25 bp, SARS Virus
gttacgacggtgccacgatgttgaa

SEQ ID NO: 114820 - DNA, 25 bp, SARS Virus
ttacgacggtggcacgatgttgaag

SEQ ID NO: 114821 - DNA, 25 bp, SARS Virus
tacgacggtggcccgatgttgaagg

SEQ ID NO: 114822 - DNA, 25 bp, SARS Virus
acgacggtggcacgatgttgaagga

SEQ ID NO: 114823 - DNA, 25 bp, SARS Virus
cgacggtggcaccatgttgaaggag

SEQ ID NO: 114824 - DNA, 25 bp, SARS Virus
gacggtggcacgctgttgaaggagt

SEQ ID NO: 114825 - DNA, 25 bp, SARS Virus
acggtggcacgacgttgaaggagtt

SEQ ID NO: 114826 - DNA, 25 bp, SARS Virus
cggtggcacgatcttgaaggagttc

SEQ ID NO: 114827 - DNA, 25 bp, SARS Virus
ggtggcacgatgctgaaggagttcc

SEQ ID NO: 114828 - DNA, 25 bp, SARS Virus
gtggcacgatgtcgaaggagttcct

SEQ ID NO: 114829 - DNA, 25 bp, SARS Virus
tggcacgatgttcaaggagttcctt

SEQ ID NO: 114830 - DNA, 25 bp, SARS Virus
ggcacgatgttgcaggagttccttg

SEQ ID NO: 114831 - DNA, 25 bp, SARS Virus
gcacgatgttgacggagttccttgt

SEQ ID NO: 114832 - DNA, 25 bp, SARS Virus
cacgatgttgaacgagttccttgtt

SEQ ID NO: 114833 - DNA, 25 bp, SARS Virus
acgatgttgaagcagttccttgttg

SEQ ID NO: 114834 - DNA, 25 bp, SARS Virus
cgatgttgaaggcgttccttgttgt

SEQ ID NO: 114835 - DNA, 25 bp, SARS Virus
gatgttgaaggacttccttgttgta

SEQ ID NO: 114836 - DNA, 25 bp, SARS Virus
atgttgaaggagctccttgttgtaa

SEQ ID NO: 114837 - DNA, 25 bp, SARS Virus
tgttgaaggagtcccttgttgtaac

SEQ ID NO: 114838 - DNA, 25 bp, SARS Virus
gttgaaggagttccttgttgtaacg

SEQ ID NO: 114839 - DNA, 25 bp, SARS Virus
ttgaaggagttccttgttgtaacgg

SEQ ID NO: 114840 - DNA, 25 bp, SARS Virus
tgaaggagttccctgttgtaacggt

SEQ ID NO: 114841 - DNA, 25 bp, SARS Virus
gaaggagttcctcgttgtaacggtt

SEQ ID NO: 114842 - DNA, 25 bp, SARS Virus
aaggagttccttcttgtaacggttt

SEQ ID NO: 114843 - DNA, 25 bp, SARS Virus
aggagttccttgctgtaacggtttt

SEQ ID NO: 114844 - DNA, 25 bp, SARS Virus
ggagttccttgtcgtaacggttttc

SEQ ID NO: 114845 - DNA, 25 bp, SARS Virus
gagttccttgttctaacggttttcc

SEQ ID NO: 114846 - DNA, 25 bp, SARS Virus
agttccttgttgcaacggttttccg

SEQ ID NO: 114847 - DNA, 25 bp, SARS Virus
gttccttgttgtcacggttttccga

SEQ ID NO: 114848 - DNA, 25 bp, SARS Virus
ttccttgttgtaccggttttccgaa

SEQ ID NO: 114849 - DNA, 25 bp, SARS Virus
tccttgttgtaacggttttccgaag

SEQ ID NO: 114850 - DNA, 25 bp, SARS Virus
ccttgttgtaaccgttttccgaaga

SEQ ID NO: 114851 - DNA, 25 bp, SARS Virus
cttgttgtaacgcttttccgaagat

SEQ ID NO: 114852 - DNA, 25 bp, SARS Virus
ttgttgtaacggctttccgaagatg

SEQ ID NO: 114853 - DNA, 25 bp, SARS Virus
tgttgtaacggtcttccgaagatgc

SEQ ID NO: 114854 - DNA, 25 bp, SARS Virus
gttgtaacggttctccgaagatgcg

SEQ ID NO: 114855 - DNA, 25 bp, SARS Virus
ttgtaacggtttcccgaagatgcgt

SEQ ID NO: 114856 - DNA, 25 bp, SARS Virus
tgtaacggttttccgaagatgcgtc

SEQ ID NO: 114857 - DNA, 25 bp, SARS Virus
gtaacggttttccgaagatgcgtct

SEQ ID NO: 114858 - DNA, 25 bp, SARS Virus
taacggttttcccaagatgcgtctc

SEQ ID NO: 114859 - DNA, 25 bp, SARS Virus
aacggttttccgcagatgcgtctcc

SEQ ID NO: 114860 - DNA, 25 bp, SARS Virus
acggttttccgacgatgcgtctccc

SEQ ID NO: 114861 - DNA, 25 bp, SARS Virus
cggttttccgaacatgcgtctccct

SEQ ID NO: 114862 - DNA, 25 bp, SARS Virus
ggttttccgaagctgcgtctccctt

SEQ ID NO: 114863 - DNA, 25 bp, SARS Virus
gttttccgaagacgcgtctcccttc

SEQ ID NO: 114864 - DNA, 25 bp, SARS Virus
ttttccgaagatccgtctcccttcg

SEQ ID NO: 114865 - DNA, 25 bp, SARS Virus
tttccgaagatgcgtctcccttcgt

SEQ ID NO: 114866 - DNA, 25 bp, SARS Virus
ttccgaagatgcctctcccttcgtc

SEQ ID NO: 114867 - DNA, 25 bp, SARS Virus
tccgaagatgcgcctcccttcgtct

SEQ ID NO: 114868 - DNA, 25 bp, SARS Virus
ccgaagatgcgtctcccttcgtctc

SEQ ID NO: 114869 - DNA, 25 bp, SARS Virus
cgaagatgcgtcccccttcgtctcc

SEQ ID NO: 114870 - DNA, 25 bp, SARS Virus
gaagatgcgtctcccttcgtctccg

SEQ ID NO: 114871 - DNA, 25 bp, SARS Virus
aagatgcgtctcccttcgtctccgc

SEQ ID NO: 114872 - DNA, 25 bp, SARS Virus
agatgcgtctcccttcgtctccgcc

SEQ ID NO: 114873 - DNA, 25 bp, SARS Virus
gatgcgtctcccctcgtctccgccg

SEQ ID NO: 114874 - DNA, 25 bp, SARS Virus
atgcgtctccctccgtctccgccgt

SEQ ID NO: 114875 - DNA, 25 bp, SARS Virus
tgcgtctcccttcgtctccgccgtc

SEQ ID NO: 114876 - DNA, 25 bp, SARS Virus
gcgtctcccttcctctccgccgtca

SEQ ID NO: 114877 - DNA, 25 bp, SARS Virus
cgtctcccttcgcctccgccgtcag

SEQ ID NO: 114878 - DNA, 25 bp, SARS Virus
gtctcccttcgtctccgccgtcagt

SEQ ID NO: 114879 - DNA, 25 bp, SARS Virus
tctcccttcgtccccgccgtcagtt

SEQ ID NO: 114880 - DNA, 25 bp, SARS Virus
ctcccttcgtctccgccgtcagttc

SEQ ID NO: 114881 - DNA, 25 bp, SARS Virus
tcccttcgtctccgccgtcagttcg

SEQ ID NO: 114882 - DNA, 25 bp, SARS Virus
cccttcgtctcccccgtcagttcgg

SEQ ID NO: 114883 - DNA, 25 bp, SARS Virus
ccttcgtctccgccgtcagttcgga

SEQ ID NO: 114884 - DNA, 25 bp, SARS Virus
cttcgtctccgccgtcagttcggag

SEQ ID NO: 114885 - DNA, 25 bp, SARS Virus
ttcgtctccgccctcagttcggaga

SEQ ID NO: 114886 - DNA, 25 bp, SARS Virus
tcgtctccgccgccagttcggagaa

SEQ ID NO: 114887 - DNA, 25 bp, SARS Virus
cgtctccgccgtcagttcggagaag

SEQ ID NO: 114888 - DNA, 25 bp, SARS Virus
gtctccgccgtccgttcggagaaga

SEQ ID NO: 114889 - DNA, 25 bp, SARS Virus
tctccgccgtcacttcggagaagag

SEQ ID NO: 114890 - DNA, 25 bp, SARS Virus
ctccgccgtcagctcggagaagagc

SEQ ID NO: 114891 - DNA, 25 bp, SARS Virus
tccgccgtcagtccggagaagagcg

SEQ ID NO: 114892 - DNA, 25 bp, SARS Virus
ccgccgtcagttcggagaagagcga

SEQ ID NO: 114893 - DNA, 25 bp, SARS Virus
cgccgtcagttccgagaagagcgag

SEQ ID NO: 114894 - DNA, 25 bp, SARS Virus
gccgtcagttcgcagaagagcgagg

SEQ ID NO: 114895 - DNA, 25 bp, SARS Virus
ccgtcagttcggcgaagagcgagga

SEQ ID NO: 114896 - DNA, 25 bp, SARS Virus
cgtcagttcggacaagagcgaggag

SEQ ID NO: 114897 - DNA, 25 bp, SARS Virus
gtcagttcggagcagagcgaggagt

SEQ ID NO: 114898 - DNA, 25 bp, SARS Virus
tcagttcggagacgagcgaggagta

SEQ ID NO: 114899 - DNA, 25 bp, SARS Virus
cagttcggagaacagcgaggagtag

SEQ ID NO: 114900 - DNA, 25 bp, SARS Virus
agttcggagaagcgcgaggagtagt

SEQ ID NO: 114901 - DNA, 25 bp, SARS Virus
gttcggagaagaccgaggagtagtg

SEQ ID NO: 114902 - DNA, 25 bp, SARS Virus
ttcggagaagagcgaggagtagtgc

SEQ ID NO: 114903 - DNA, 25 bp, SARS Virus
tcggagaagagccaggagtagtgca

SEQ ID NO: 114904 - DNA, 25 bp, SARS Virus
cggagaagagcgcggagtagtgcat

SEQ ID NO: 114905 - DNA, 25 bp, SARS Virus
ggagaagagcgacgagtagtgcatc

SEQ ID NO: 114906 - DNA, 25 bp, SARS Virus
gagaagagcgagcagtagtgcatca

SEQ ID NO: 114907 - DNA, 25 bp, SARS Virus
agaagagcgaggcgtagtgcatcag

SEQ ID NO: 114908 - DNA, 25 bp, SARS Virus
gaagagcgaggactagtgcatcagc

SEQ ID NO: 114909 - DNA, 25 bp, SARS Virus
aagagcgaggagcagtgcatcagcg

SEQ ID NO: 114910 - DNA, 25 bp, SARS Virus
agagcgaggagtcgtgcatcagcgc

SEQ ID NO: 114911 - DNA, 25 bp, SARS Virus
gagcgaggagtactgcatcagcgcc

SEQ ID NO: 114912 - DNA, 25 bp, SARS Virus
agcgaggagtagcgcatcagcgcca

SEQ ID NO: 114913 - DNA, 25 bp, SARS Virus
gcgaggagtagtccatcagcgccat

SEQ ID NO: 114914 - DNA, 25 bp, SARS Virus
cgaggagtagtgcatcagcgccatt

SEQ ID NO: 114915 - DNA, 25 bp, SARS Virus
gaggagtagtgcctcagcgccatta

SEQ ID NO: 114916 - DNA, 25 bp, SARS Virus
aggagtagtgcaccagcgccattaa

SEQ ID NO: 114917 - DNA, 25 bp, SARS Virus
ggagtagtgcatcagcgccattaag

SEQ ID NO: 114918 - DNA, 25 bp, SARS Virus
gagtagtgcatccgcgccattaagt

SEQ ID NO: 114919 - DNA, 25 bp, SARS Virus
agtagtgcatcaccgccattaagtt

SEQ ID NO: 114920 - DNA, 25 bp, SARS Virus
gtagtgcatcagcgccattaagttc

SEQ ID NO: 114921 - DNA, 25 bp, SARS Virus
tagtgcatcagccccattaagttct

SEQ ID NO: 114922 - DNA, 25 bp, SARS Virus
agtgcatcagcgccattaagttctt

SEQ ID NO: 114923 - DNA, 25 bp, SARS Virus
gtgcatcagcgccattaagttcttt

SEQ ID NO: 114924 - DNA, 25 bp, SARS Virus
tgcatcagcgcccttaagttcttta

SEQ ID NO: 114925 - DNA, 25 bp, SARS Virus
gcatcagcgccactaagttctttaa

SEQ ID NO: 114926 - DNA, 25 bp, SARS Virus
catcagcgccatcaagttctttaag

SEQ ID NO: 114927 - DNA, 25 bp, SARS Virus
atcagcgccattcagttctttaagt

SEQ ID NO: 114928 - DNA, 25 bp, SARS Virus
tcagcgccattacgttctttaagtt

SEQ ID NO: 114929 - DNA, 25 bp, SARS Virus
cagcgccattaacttctttaagttg

SEQ ID NO: 114930 - DNA, 25 bp, SARS Virus
agcgccattaagctctttaagttga

SEQ ID NO: 114931 - DNA, 25 bp, SARS Virus
gcgccattaagtcctttaagttgag

SEQ ID NO: 114932 - DNA, 25 bp, SARS Virus
cgccattaagttctttaagttgagg

SEQ ID NO: 114933 - DNA, 25 bp, SARS Virus
gccattaagttccttaagttgagga

SEQ ID NO: 114934 - DNA, 25 bp, SARS Virus
ccattaagttctctaagttgaggac

SEQ ID NO: 114935 - DNA, 25 bp, SARS Virus
cattaagttcttcaagttgaggacc

SEQ ID NO: 114936 - DNA, 25 bp, SARS Virus
attaagttctttcagttgaggaccg

SEQ ID NO: 114937 - DNA, 25 bp, SARS Virus
ttaagttctttacgttgaggaccgt

SEQ ID NO: 114938 - DNA, 25 bp, SARS Virus
taagttctttaacttgaggaccgtc

SEQ ID NO: 114939 - DNA, 25 bp, SARS Virus
aagttctttaagctgaggaccgtcg

SEQ ID NO: 114940 - DNA, 25 bp, SARS Virus
agttctttaagtcgaggaccgtcgt

SEQ ID NO: 114941 - DNA, 25 bp, SARS Virus
gttctttaagttcaggaccgtcgtc

SEQ ID NO: 114942 - DNA, 25 bp, SARS Virus
ttctttaagttgcggaccgtcgtca

SEQ ID NO: 114943 - DNA, 25 bp, SARS Virus
tctttaagttgacgaccgtcgtcat

SEQ ID NO: 114944 - DNA, 25 bp, SARS Virus
ctttaagttgagcaccgtcgtcatc

SEQ ID NO: 114945 - DNA, 25 bp, SARS Virus
tttaagttgaggcccgtcgtcatcc

SEQ ID NO: 114946 - DNA, 25 bp, SARS Virus
ttaagttgaggaccgtcgtcatccc

SEQ ID NO: 114947 - DNA, 25 bp, SARS Virus
taagttgaggaccgtcgtcatcccc

SEQ ID NO: 114948 - DNA, 25 bp, SARS Virus
aagttgaggaccctcgtcatcccct

SEQ ID NO: 114949 - DNA, 25 bp, SARS Virus
agttgaggaccgccgtcatcccctt

SEQ ID NO: 114950 - DNA, 25 bp, SARS Virus
gttgaggaccgtcgtcatccccttt

SEQ ID NO: 114951 - DNA, 25 bp, SARS Virus
ttgaggaccgtcctcatccccttta

SEQ ID NO: 114952 - DNA, 25 bp, SARS Virus
tgaggaccgtcgccatcccctttaa

SEQ ID NO: 114953 - DNA, 25 bp, SARS Virus
gaggaccgtcgtcatcccctttaag

SEQ ID NO: 114954 - DNA, 25 bp, SARS Virus
aggaccgtcgtcctcccctttaaga

SEQ ID NO: 114955 - DNA, 25 bp, SARS Virus
ggaccgtcgtcaccccctttaagag

SEQ ID NO: 114956 - DNA, 25 bp, SARS Virus
gaccgtcgtcatcccctttaagagg

SEQ ID NO: 114957 - DNA, 25 bp, SARS Virus
accgtcgtcatcccctttaagagga

SEQ ID NO: 114958 - DNA, 25 bp, SARS Virus
ccgtcgtcatcccctttaagaggac

SEQ ID NO: 114959 - DNA, 25 bp, SARS Virus
cgtcgtcatcccctttaagaggacg

SEQ ID NO: 114960 - DNA, 25 bp, SARS Virus
gtcgtcatcccccttaagaggacga

SEQ ID NO: 114961 - DNA, 25 bp, SARS Virus
tcgtcatcccctctaagaggacgag

SEQ ID NO: 114962 - DNA, 25 bp, SARS Virus
cgtcatccccttcaagaggacgagc

SEQ ID NO: 114963 - DNA, 25 bp, SARS Virus
gtcatcccctttcagaggacgagct

SEQ ID NO: 114964 - DNA, 25 bp, SARS Virus
tcatcccctttacgaggacgagctt

SEQ ID NO: 114965 - DNA, 25 bp, SARS Virus
catcccctttaacaggacgagctta

SEQ ID NO: 114966 - DNA, 25 bp, SARS Virus
atcccctttaagcggacgagcttac

SEQ ID NO: 114967 - DNA, 25 bp, SARS Virus
tcccctttaagacgacgagcttacc

SEQ ID NO: 114968 - DNA, 25 bp, SARS Virus
cccctttaagagcacgagcttaccg

SEQ ID NO: 114969 - DNA, 25 bp, SARS Virus
ccctttaagaggccgagcttaccga

SEQ ID NO: 114970 - DNA, 25 bp, SARS Virus
cctttaagaggacgagcttaccgat

SEQ ID NO: 114971 - DNA, 25 bp, SARS Virus
ctttaagaggaccagcttaccgatc

SEQ ID NO: 114972 - DNA, 25 bp, SARS Virus
tttaagaggacgcgcttaccgatcg

SEQ ID NO: 114973 - DNA, 25 bp, SARS Virus
ttaagaggacgaccttaccgatcgc

SEQ ID NO: 114974 - DNA, 25 bp, SARS Virus
taagaggacgagcttaccgatcgcc

SEQ ID NO: 114975 - DNA, 25 bp, SARS Virus
aagaggacgagcctaccgatcgcct

SEQ ID NO: 114976 - DNA, 25 bp, SARS Virus
agaggacgagctcaccgatcgcctc

SEQ ID NO: 114977 - DNA, 25 bp, SARS Virus
gaggacgagcttcccgatcgcctcc

SEQ ID NO: 114978 - DNA, 25 bp, SARS Virus
aggacgagcttaccgatcgcctcca

SEQ ID NO: 114979 - DNA, 25 bp, SARS Virus
ggacgagcttaccgatcgcctccac

SEQ ID NO: 114980 - DNA, 25 bp, SARS Virus
gacgagcttacccatcgcctccacc

SEQ ID NO: 114981 - DNA, 25 bp, SARS Virus
acgagcttaccgctcgcctccacca

SEQ ID NO: 114982 - DNA, 25 bp, SARS Virus
cgagcttaccgaccgcctccaccac

SEQ ID NO: 114983 - DNA, 25 bp, SARS Virus
gagcttaccgatcgcctccaccact

SEQ ID NO: 114984 - DNA, 25 bp, SARS Virus
agcttaccgatcccctccaccactt

SEQ ID NO: 114985 - DNA, 25 bp, SARS Virus
gcttaccgatcgcctccaccacttt

SEQ ID NO: 114986 - DNA, 25 bp, SARS Virus
cttaccgatcgcctccaccactttg

SEQ ID NO: 114987 - DNA, 25 bp, SARS Virus
ttaccgatcgcccccaccactttga

SEQ ID NO: 114988 - DNA, 25 bp, SARS Virus
taccgatcgcctccaccactttgac

SEQ ID NO: 114989 - DNA, 25 bp, SARS Virus
accgatcgcctccaccactttgacg

SEQ ID NO: 114990 - DNA, 25 bp, SARS Virus
ccgatcgcctcccccactttgacgg

SEQ ID NO: 114991 - DNA, 25 bp, SARS Virus
cgatcgcctccaccactttgacggg

SEQ ID NO: 114992 - DNA, 25 bp, SARS Virus
gatcgcctccaccactttgacggga

SEQ ID NO: 114993 - DNA, 25 bp, SARS Virus
atcgcctccacccctttgacgggag

SEQ ID NO: 114994 - DNA, 25 bp, SARS Virus
tcgcctccaccactttgacgggagc

SEQ ID NO: 114995 - DNA, 25 bp, SARS Virus
cgcctccaccaccttgacgggagcg

SEQ ID NO: 114996 - DNA, 25 bp, SARS Virus
gcctccaccactctgacgggagcgc

SEQ ID NO: 114997 - DNA, 25 bp, SARS Virus
cctccaccacttcgacgggagcgcg

SEQ ID NO: 114998 - DNA, 25 bp, SARS Virus
ctccaccactttcacgggagcgcga

SEQ ID NO: 114999 - DNA, 25 bp, SARS Virus
tccaccactttgccgggagcgcgat

SEQ ID NO: 115000 - DNA, 25 bp, SARS Virus
ccaccactttgacgggagcgcgata

SEQ ID NO: 115001 - DNA, 25 bp, SARS Virus
caccactttgaccggagcgcgataa

SEQ ID NO: 115002 - DNA, 25 bp, SARS Virus
accactttgacgcgagcgcgataac

SEQ ID NO: 115003 - DNA, 25 bp, SARS Virus
ccactttgacggcagcgcgataacg

SEQ ID NO: 115004 - DNA, 25 bp, SARS Virus
cactttgacgggcgcgcgataacga

SEQ ID NO: 115005 - DNA, 25 bp, SARS Virus
actttgacgggaccgcgataacgac

SEQ ID NO: 115006 - DNA, 25 bp, SARS Virus
ctttgacgggagcgcgataacgacg

SEQ ID NO: 115007 - DNA, 25 bp, SARS Virus
tttgacgggagcccgataacgacga

SEQ ID NO: 115008 - DNA, 25 bp, SARS Virus
ttgacgggagcgcgataacgacgat

SEQ ID NO: 115009 - DNA, 25 bp, SARS Virus
tgacgggagcgccataacgacgatc

SEQ ID NO: 115010 - DNA, 25 bp, SARS Virus
gacgggagcgcgctaacgacgatct

SEQ ID NO: 115011 - DNA, 25 bp, SARS Virus
acgggagcgcgacaacgacgatctg

SEQ ID NO: 115012 - DNA, 25 bp, SARS Virus
cgggagcgcgatcacgacgatctgt

SEQ ID NO: 115013 - DNA, 25 bp, SARS Virus
gggagcgcgataccgacgatctgtc

SEQ ID NO: 115014 - DNA, 25 bp, SARS Virus
ggagcgcgataacgacgatctgtct

SEQ ID NO: 115015 - DNA, 25 bp, SARS Virus
gagcgcgataaccacgatctgtcta

SEQ ID NO: 115016 - DNA, 25 bp, SARS Virus
agcgcgataacgccgatctgtctaa

SEQ ID NO: 115017 - DNA, 25 bp, SARS Virus
gcgcgataacgacgatctgtctaac

SEQ ID NO: 115018 - DNA, 25 bp, SARS Virus
cgcgataacgaccatctgtctaact

SEQ ID NO: 115019 - DNA, 25 bp, SARS Virus
gcgataacgacgctctgtctaactt

SEQ ID NO: 115020 - DNA, 25 bp, SARS Virus
cgataacgacgacctgtctaacttg

SEQ ID NO: 115021 - DNA, 25 bp, SARS Virus
gataacgacgatctgtctaacttgg

SEQ ID NO: 115022 - DNA, 25 bp, SARS Virus
ataacgacgatccgtctaacttggt

SEQ ID NO: 115023 - DNA, 25 bp, SARS Virus
taacgacgatctctctaacttggtc

SEQ ID NO: 115024 - DNA, 25 bp, SARS Virus
aacgacgatctgcctaacttggtcg

SEQ ID NO: 115025 - DNA, 25 bp, SARS Virus
acgacgatctgtctaacttggtcga

SEQ ID NO: 115026 - DNA, 25 bp, SARS Virus
cgacgatctgtccaacttggtcgaa

SEQ ID NO: 115027 - DNA, 25 bp, SARS Virus
gacgatctgtctcacttggtcgaac

SEQ ID NO: 115028 - DNA, 25 bp, SARS Virus
acgatctgtctaccttggtcgaact

SEQ ID NO: 115029 - DNA, 25 bp, SARS Virus
cgatctgtctaacttggtcgaactc

SEQ ID NO: 115030 - DNA, 25 bp, SARS Virus
gatctgtctaacctggtcgaactct

SEQ ID NO: 115031 - DNA, 25 bp, SARS Virus
atctgtctaactcggtcgaactctc

SEQ ID NO: 115032 - DNA, 25 bp, SARS Virus
tctgtctaacttcgtcgaactctcg

SEQ ID NO: 115033 - DNA, 25 bp, SARS Virus
ctgtctaacttgctcgaactctcgt

SEQ ID NO: 115034 - DNA, 25 bp, SARS Virus
tgtctaacttggccgaactctcgtt

SEQ ID NO: 115035 - DNA, 25 bp, SARS Virus
gtctaacttggtcgaactctcgttt

SEQ ID NO: 115036 - DNA, 25 bp, SARS Virus
tctaacttggtccaactctcgtttc

SEQ ID NO: 115037 - DNA, 25 bp, SARS Virus
ctaacttggtcgcactctcgtttca

SEQ ID NO: 115038 - DNA, 25 bp, SARS Virus
taacttggtcgacctctcgtttcaa

SEQ ID NO: 115039 - DNA, 25 bp, SARS Virus
aacttggtcgaactctcgtttcaaa

SEQ ID NO: 115040 - DNA, 25 bp, SARS Virus
acttggtcgaaccctcgtttcaaag

SEQ ID NO: 115041 - DNA, 25 bp, SARS Virus
cttggtcgaactctcgtttcaaaga

SEQ ID NO: 115042 - DNA, 25 bp, SARS Virus
ttggtcgaactcccgtttcaaagac

SEQ ID NO: 115043 - DNA, 25 bp, SARS Virus
tggtcgaactctcgtttcaaagacc

SEQ ID NO: 115044 - DNA, 25 bp, SARS Virus
ggtcgaactctcctttcaaagacca

SEQ ID NO: 115045 - DNA, 25 bp, SARS Virus
gtcgaactctcgcttcaaagaccat

SEQ ID NO: 115046 - DNA, 25 bp, SARS Virus
tcgaactctcgtctcaaagaccatt

SEQ ID NO: 115047 - DNA, 25 bp, SARS Virus
cgaactctcgttccaaagaccattt

SEQ ID NO: 115048 - DNA, 25 bp, SARS Virus
gaactctcgtttcaaagaccatttc

SEQ ID NO: 115049 - DNA, 25 bp, SARS Virus
aactctcgtttccaagaccatttcc

SEQ ID NO: 115050 - DNA, 25 bp, SARS Virus
actctcgtttcacagaccatttccg

SEQ ID NO: 115051 - DNA, 25 bp, SARS Virus
ctctcgtttcaacgaccatttccgg

SEQ ID NO: 115052 - DNA, 25 bp, SARS Virus
tctcgtttcaaacaccatttccggt

SEQ ID NO: 115053 - DNA, 25 bp, SARS Virus
ctcgtttcaaagcccatttccggtt

SEQ ID NO: 115054 - DNA, 25 bp, SARS Virus
tcgtttcaaagaccatttccggttg

SEQ ID NO: 115055 - DNA, 25 bp, SARS Virus
cgtttcaaagaccatttccggttgt

SEQ ID NO: 115056 - DNA, 25 bp, SARS Virus
gtttcaaagaccctttccggttgtt

SEQ ID NO: 115057 - DNA, 25 bp, SARS Virus
tttcaaagaccacttccggttgttg

SEQ ID NO: 115058 - DNA, 25 bp, SARS Virus
ttcaaagaccatctccggttgttgt

SEQ ID NO: 115059 - DNA, 25 bp, SARS Virus
tcaaagaccattcccggttgttgtt

SEQ ID NO: 115060 - DNA, 25 bp, SARS Virus
caaagaccatttccggttgttgttg

SEQ ID NO: 115061 - DNA, 25 bp, SARS Virus
aaagaccatttccggttgttgttgt

SEQ ID NO: 115062 - DNA, 25 bp, SARS Virus
aagaccatttcccgttgttgttgtt

SEQ ID NO: 115063 - DNA, 25 bp, SARS Virus
agaccatttccgcttgttgttgttc

SEQ ID NO: 115064 - DNA, 25 bp, SARS Virus
gaccatttccggctgttgttgttcc

SEQ ID NO: 115065 - DNA, 25 bp, SARS Virus
accatttccggtcgttgttgttccg

SEQ ID NO: 115066 - DNA, 25 bp, SARS Virus
ccatttccggttcttgttgttccgg

SEQ ID NO: 115067 - DNA, 25 bp, SARS Virus
catttccggttgctgttgttccggt

SEQ ID NO: 115068 - DNA, 25 bp, SARS Virus
atttccggttgtcgttgttccggtt

SEQ ID NO: 115069 - DNA, 25 bp, SARS Virus
tttccggttgttcttgttccggttt

SEQ ID NO: 115070 - DNA, 25 bp, SARS Virus
ttccggttgttgctgttccggtttg

SEQ ID NO: 115071 - DNA, 25 bp, SARS Virus
tccggttgttgtcgttccggtttga

SEQ ID NO: 115072 - DNA, 25 bp, SARS Virus
ccggttgttgttcttccggtttgac

SEQ ID NO: 115073 - DNA, 25 bp, SARS Virus
cggttgttgttgctccggtttgaca

SEQ ID NO: 115074 - DNA, 25 bp, SARS Virus
ggttgttgttgtcccggtttgacag

SEQ ID NO: 115075 - DNA, 25 bp, SARS Virus
gttgttgttgttccggtttgacagt

SEQ ID NO: 115076 - DNA, 25 bp, SARS Virus
ttgttgttgttccggtttgacagtg

SEQ ID NO: 115077 - DNA, 25 bp, SARS Virus
tgttgttgttcccgtttgacagtga

SEQ ID NO: 115078 - DNA, 25 bp, SARS Virus
gttgttgttccgctttgacagtgat

SEQ ID NO: 115079 - DNA, 25 bp, SARS Virus
ttgttgttccggcttgacagtgatt

SEQ ID NO: 115080 - DNA, 25 bp, SARS Virus
tgttgttccggtctgacagtgattc

SEQ ID NO: 115081 - DNA, 25 bp, SARS Virus
gttgttccggttcgacagtgattct

SEQ ID NO: 115082 - DNA, 25 bp, SARS Virus
ttgttccggtttcacagtgattctt

SEQ ID NO: 115083 - DNA, 25 bp, SARS Virus
tgttccggtttgccagtgattcttt

SEQ ID NO: 115084 - DNA, 25 bp, SARS Virus
gttccggtttgacagtgattcttta

SEQ ID NO: 115085 - DNA, 25 bp, SARS Virus
ttccggtttgaccgtgattctttag

SEQ ID NO: 115086 - DNA, 25 bp, SARS Virus
tccggtttgacactgattctttaga

SEQ ID NO: 115087 - DNA, 25 bp, SARS Virus
ccggtttgacagcgattctttagac

SEQ ID NO: 115088 - DNA, 25 bp, SARS Virus
cggtttgacagtcattctttagacg

SEQ ID NO: 115089 - DNA, 25 bp, SARS Virus
ggtttgacagtgcttctttagacga

SEQ ID NO: 115090 - DNA, 25 bp, SARS Virus
gtttgacagtgactctttagacgac

SEQ ID NO: 115091 - DNA, 25 bp, SARS Virus
tttgacagtgatcctttagacgacg

SEQ ID NO: 115092 - DNA, 25 bp, SARS Virus
ttgacagtgattctttagacgacga

SEQ ID NO: 115093 - DNA, 25 bp, SARS Virus
tgacagtgattccttagacgacgac

SEQ ID NO: 115094 - DNA, 25 bp, SARS Virus
gacagtgattctctagacgacgact

SEQ ID NO: 115095 - DNA, 25 bp, SARS Virus
acagtgattcttcagacgacgactc

SEQ ID NO: 115096 - DNA, 25 bp, SARS Virus
cagtgattctttcgacgacgactcc

SEQ ID NO: 115097 - DNA, 25 bp, SARS Virus
agtgattctttacacgacgactccg

SEQ ID NO: 115098 - DNA, 25 bp, SARS Virus
gtgattctttagccgacgactccgt

SEQ ID NO: 115099 - DNA, 25 bp, SARS Virus
tgattctttagacgacgactccgta

SEQ ID NO: 115100 - DNA, 25 bp, SARS Virus
gattctttagaccacgactccgtag

SEQ ID NO: 115101 - DNA, 25 bp, SARS Virus
attctttagacgccgactccgtaga

SEQ ID NO: 115102 - DNA, 25 bp, SARS Virus
ttctttagacgacgactccgtagat

SEQ ID NO: 115103 - DNA, 25 bp, SARS Virus
tctttagacgaccactccgtagatt

SEQ ID NO: 115104 - DNA, 25 bp, SARS Virus
ctttagacgacgcctccgtagattt

SEQ ID NO: 115105 - DNA, 25 bp, SARS Virus
tttagacgacgactccgtagatttt

SEQ ID NO: 115106 - DNA, 25 bp, SARS Virus
ttagacgacgaccccgtagattttt

SEQ ID NO: 115107 - DNA, 25 bp, SARS Virus
tagacgacgactccgtagatttttc

SEQ ID NO: 115108 - DNA, 25 bp, SARS Virus
agacgacgactccgtagatttttcg

SEQ ID NO: 115109 - DNA, 25 bp, SARS Virus
gacgacgactccctagatttttcgg

SEQ ID NO: 115110 - DNA, 25 bp, SARS Virus
acgacgactccgcagatttttcgga

SEQ ID NO: 115111 - DNA, 25 bp, SARS Virus
cgacgactccgtcgatttttcggag

SEQ ID NO: 115112 - DNA, 25 bp, SARS Virus
gacgactccgtacatttttcggagc

SEQ ID NO: 115113 - DNA, 25 bp, SARS Virus
acgactccgtagctttttcggagcg

SEQ ID NO: 115114 - DNA, 25 bp, SARS Virus
cgactccgtagacttttcggagcgg

SEQ ID NO: 115115 - DNA, 25 bp, SARS Virus
gactccgtagatctttcggagcggt

SEQ ID NO: 115116 - DNA, 25 bp, SARS Virus
actccgtagattcttcggagcggtt

SEQ ID NO: 115117 - DNA, 25 bp, SARS Virus
ctccgtagatttctcggagcggttt

SEQ ID NO: 115118 - DNA, 25 bp, SARS Virus
tccgtagattttccggagcggtttt

SEQ ID NO: 115119 - DNA, 25 bp, SARS Virus
ccgtagatttttcggagcggttttt

SEQ ID NO: 115120 - DNA, 25 bp, SARS Virus
cgtagatttttccgagcggtttttg

SEQ ID NO: 115121 - DNA, 25 bp, SARS Virus
gtagatttttcgcagcggtttttgc

SEQ ID NO: 115122 - DNA, 25 bp, SARS Virus
tagatttttcggcgcggtttttgca

SEQ ID NO: 115123 - DNA, 25 bp, SARS Virus
agatttttcggaccggtttttgcat

SEQ ID NO: 115124 - DNA, 25 bp, SARS Virus
gatttttcggagcggtttttgcatg

SEQ ID NO: 115125 - DNA, 25 bp, SARS Virus
atttttcggagccgtttttgcatga

SEQ ID NO: 115126 - DNA, 25 bp, SARS Virus
tttttcggagcgctttttgcatgac

SEQ ID NO: 115127 - DNA, 25 bp, SARS Virus
ttttcggagcggcttttgcatgacg

SEQ ID NO: 115128 - DNA, 25 bp, SARS Virus
tttcggagcggtctttgcatgacgg

SEQ ID NO: 115129 - DNA, 25 bp, SARS Virus
ttcggagcggttcttgcatgacggt

SEQ ID NO: 115130 - DNA, 25 bp, SARS Virus
tcggagcggtttctgcatgacggtg

SEQ ID NO: 115131 - DNA, 25 bp, SARS Virus
cggagcggttttcgcatgacggtgt

SEQ ID NO: 115132 - DNA, 25 bp, SARS Virus
ggagcggtttttccatgacggtgtt

SEQ ID NO: 115133 - DNA, 25 bp, SARS Virus
gagcggtttttgcatgacggtgttt

SEQ ID NO: 115134 - DNA, 25 bp, SARS Virus
agcggtttttgcctgacggtgtttt

SEQ ID NO: 115135 - DNA, 25 bp, SARS Virus
gcggtttttgcacgacggtgttttg

SEQ ID NO: 115136 - DNA, 25 bp, SARS Virus
cggtttttgcatcacggtgttttgt

SEQ ID NO: 115137 - DNA, 25 bp, SARS Virus
ggtttttgcatgccggtgttttgtc

SEQ ID NO: 115138 - DNA, 25 bp, SARS Virus
gtttttgcatgacggtgttttgtca

SEQ ID NO: 115139 - DNA, 25 bp, SARS Virus
tttttgcatgaccgtgttttgtcat

SEQ ID NO: 115140 - DNA, 25 bp, SARS Virus
ttttgcatgacgctgttttgtcatg

SEQ ID NO: 115141 - DNA, 25 bp, SARS Virus
tttgcatgacggcgttttgtcatgt

SEQ ID NO: 115142 - DNA, 25 bp, SARS Virus
ttgcatgacggtcttttgtcatgtt

SEQ ID NO: 115143 - DNA, 25 bp, SARS Virus
tgcatgacggtgctttgtcatgttg

SEQ ID NO: 115144 - DNA, 25 bp, SARS Virus
gcatgacggtgtcttgtcatgttgc

SEQ ID NO: 115145 - DNA, 25 bp, SARS Virus
catgacggtgttctgtcatgttgca

SEQ ID NO: 115146 - DNA, 25 bp, SARS Virus
atgacggtgtttcgtcatgttgcag

SEQ ID NO: 115147 - DNA, 25 bp, SARS Virus
tgacggtgttttctcatgttgcagt

SEQ ID NO: 115148 - DNA, 25 bp, SARS Virus
gacggtgttttgccatgttgcagtg

SEQ ID NO: 115149 - DNA, 25 bp, SARS Virus
acggtgttttgtcatgttgcagtga

SEQ ID NO: 115150 - DNA, 25 bp, SARS Virus
cggtgttttgtcctgttgcagtgag

SEQ ID NO: 115151 - DNA, 25 bp, SARS Virus
ggtgttttgtcacgttgcagtgagt

SEQ ID NO: 115152 - DNA, 25 bp, SARS Virus
gtgttttgtcatcttgcagtgagtt

SEQ ID NO: 115153 - DNA, 25 bp, SARS Virus
tgttttgtcatgctgcagtgagttc

SEQ ID NO: 115154 - DNA, 25 bp, SARS Virus
gttttgtcatgtcgcagtgagttcg

SEQ ID NO: 115155 - DNA, 25 bp, SARS Virus
ttttgtcatgttccagtgagttcgt

SEQ ID NO: 115156 - DNA, 25 bp, SARS Virus
tttgtcatgttgcagtgagttcgta

SEQ ID NO: 115157 - DNA, 25 bp, SARS Virus
ttgtcatgttgccgtgagttcgtaa

SEQ ID NO: 115158 - DNA, 25 bp, SARS Virus
tgtcatgttgcactgagttcgtaaa

SEQ ID NO: 115159 - DNA, 25 bp, SARS Virus
gtcatgttgcagcgagttcgtaaac

SEQ ID NO: 115160 - DNA, 25 bp, SARS Virus
tcatgttgcagtcagttcgtaaacc

SEQ ID NO: 115161 - DNA, 25 bp, SARS Virus
catgttgcagtgcgttcgtaaaccc

SEQ ID NO: 115162 - DNA, 25 bp, SARS Virus
atgttgcagtgacttcgtaaaccct

SEQ ID NO: 115163 - DNA, 25 bp, SARS Virus
tgttgcagtgagctcgtaaaccctc

SEQ ID NO: 115164 - DNA, 25 bp, SARS Virus
gttgcagtgagtccgtaaaccctct

SEQ ID NO: 115165 - DNA, 25 bp, SARS Virus
ttgcagtgagttcgtaaaccctctg

SEQ ID NO: 115166 - DNA, 25 bp, SARS Virus
tgcagtgagttcctaaaccctctgc

SEQ ID NO: 115167 - DNA, 25 bp, SARS Virus
gcagtgagttcgcaaaccctctgca

SEQ ID NO: 115168 - DNA, 25 bp, SARS Virus
cagtgagttcgtcaaccctctgcac

SEQ ID NO: 115169 - DNA, 25 bp, SARS Virus
agtgagttcgtacaccctctgcacc

SEQ ID NO: 115170 - DNA, 25 bp, SARS Virus
gtgagttcgtaacccctctgcacca

SEQ ID NO: 115171 - DNA, 25 bp, SARS Virus
tgagttcgtaaaccctctgcaccag

SEQ ID NO: 115172 - DNA, 25 bp, SARS Virus
gagttcgtaaaccctctgcaccagg

SEQ ID NO: 115173 - DNA, 25 bp, SARS Virus
agttcgtaaaccctctgcaccaggt

SEQ ID NO: 115174 - DNA, 25 bp, SARS Virus
gttcgtaaaccccctgcaccaggtc

SEQ ID NO: 115175 - DNA, 25 bp, SARS Virus
ttcgtaaaccctctgcaccaggtct

SEQ ID NO: 115176 - DNA, 25 bp, SARS Virus
tcgtaaaccctccgcaccaggtctt

SEQ ID NO: 115177 - DNA, 25 bp, SARS Virus
cgtaaaccctctccaccaggtcttg

SEQ ID NO: 115178 - DNA, 25 bp, SARS Virus
gtaaaccctctgcaccaggtcttgt

SEQ ID NO: 115179 - DNA, 25 bp, SARS Virus
taaaccctctgccccaggtcttgtt

SEQ ID NO: 115180 - DNA, 25 bp, SARS Virus
aaaccctctgcaccaggtcttgttt

SEQ ID NO: 115181 - DNA, 25 bp, SARS Virus
aaccctctgcaccaggtcttgtttg

SEQ ID NO: 115182 - DNA, 25 bp, SARS Virus
accctctgcacccggtcttgtttgg

SEQ ID NO: 115183 - DNA, 25 bp, SARS Virus
ccctctgcaccacgtcttgtttggg

SEQ ID NO: 115184 - DNA, 25 bp, SARS Virus
cctctgcaccagctcttgtttgggt

SEQ ID NO: 115185 - DNA, 25 bp, SARS Virus
ctctgcaccaggccttgtttgggtt

SEQ ID NO: 115186 - DNA, 25 bp, SARS Virus
tctgcaccaggtcttgtttgggttc

SEQ ID NO: 115187 - DNA, 25 bp, SARS Virus
ctgcaccaggtcctgtttgggttcc

SEQ ID NO: 115188 - DNA, 25 bp, SARS Virus
tgcaccaggtctcgtttgggttcct

SEQ ID NO: 115189 - DNA, 25 bp, SARS Virus
gcaccaggtcttctttgggttcctt

SEQ ID NO: 115190 - DNA, 25 bp, SARS Virus
caccaggtcttgcttgggttccttt

SEQ ID NO: 115191 - DNA, 25 bp, SARS Virus
accaggtcttgtctgggttccttta

SEQ ID NO: 115192 - DNA, 25 bp, SARS Virus
ccaggtcttgttcgggttcctttaa

SEQ ID NO: 115193 - DNA, 25 bp, SARS Virus
caggtcttgtttcggttcctttaaa

SEQ ID NO: 115194 - DNA, 25 bp, SARS Virus
aggtcttgtttgcgttcctttaaag

SEQ ID NO: 115195 - DNA, 25 bp, SARS Virus
ggtcttgtttggcttcctttaaagc

SEQ ID NO: 115196 - DNA, 25 bp, SARS Virus
gtcttgtttgggctcctttaaagcc

SEQ ID NO: 115197 - DNA, 25 bp, SARS Virus
tcttgtttgggtccctttaaagccc

SEQ ID NO: 115198 - DNA, 25 bp, SARS Virus
cttgtttgggttcctttaaagcccc

SEQ ID NO: 115199 - DNA, 25 bp, SARS Virus
ttgtttgggttcctttaaagcccct

SEQ ID NO: 115200 - DNA, 25 bp, SARS Virus
tgtttgggttcccttaaagcccctg

SEQ ID NO: 115201 - DNA, 25 bp, SARS Virus
gtttgggttcctctaaagcccctgg

SEQ ID NO: 115202 - DNA, 25 bp, SARS Virus
tttgggttccttcaaagcccctggt

SEQ ID NO: 115203 - DNA, 25 bp, SARS Virus
ttgggttcctttcaagcccctggtt

SEQ ID NO: 115204 - DNA, 25 bp, SARS Virus
tgggttcctttacagcccctggttc

SEQ ID NO: 115205 - DNA, 25 bp, SARS Virus
gggttcctttaacgcccctggttct

SEQ ID NO: 115206 - DNA, 25 bp, SARS Virus
ggttcctttaaaccccctggttctg

SEQ ID NO: 115207 - DNA, 25 bp, SARS Virus
gttcctttaaagcccctggttctgg

SEQ ID NO: 115208 - DNA, 25 bp, SARS Virus
ttcctttaaagcccctggttctgga

SEQ ID NO: 115209 - DNA, 25 bp, SARS Virus
tcctttaaagcccctggttctggat

SEQ ID NO: 115210 - DNA, 25 bp, SARS Virus
cctttaaagcccctggttctggatt

SEQ ID NO: 115211 - DNA, 25 bp, SARS Virus
ctttaaagcccccggttctggatta

SEQ ID NO: 115212 - DNA, 25 bp, SARS Virus
tttaaagcccctcgttctggattag

SEQ ID NO: 115213 - DNA, 25 bp, SARS Virus
ttaaagcccctgcttctggattagt

SEQ ID NO: 115214 - DNA, 25 bp, SARS Virus
taaagcccctggctctggattagtc

SEQ ID NO: 115215 - DNA, 25 bp, SARS Virus
aaagcccctggtcctggattagtct

SEQ ID NO: 115216 - DNA, 25 bp, SARS Virus
aagcccctggttctggattagtctg

SEQ ID NO: 115217 - DNA, 25 bp, SARS Virus
agcccctggttccggattagtctgt

SEQ ID NO: 115218 - DNA, 25 bp, SARS Virus
gcccctggttctcgattagtctgtt

SEQ ID NO: 115219 - DNA, 25 bp, SARS Virus
cccctggttctgcattagtctgttc

SEQ ID NO: 115220 - DNA, 25 bp, SARS Virus
ccctggttctggcttagtctgttcc

SEQ ID NO: 115221 - DNA, 25 bp, SARS Virus
cctggttctggactagtctgttcct

SEQ ID NO: 115222 - DNA, 25 bp, SARS Virus
ctggttctggatcagtctgttcctt

SEQ ID NO: 115223 - DNA, 25 bp, SARS Virus
tggttctggattcgtctgttccttg

SEQ ID NO: 115224 - DNA, 25 bp, SARS Virus
ggttctggattactctgttccttga

SEQ ID NO: 115225 - DNA, 25 bp, SARS Virus
gttctggattagcctgttccttgac

SEQ ID NO: 115226 - DNA, 25 bp, SARS Virus
ttctggattagtctgttccttgact

SEQ ID NO: 115227 - DNA, 25 bp, SARS Virus
tctggattagtccgttccttgacta

SEQ ID NO: 115228 - DNA, 25 bp, SARS Virus
ctggattagtctcttccttgactaa

SEQ ID NO: 115229 - DNA, 25 bp, SARS Virus
tggattagtctgctccttgactaat

SEQ ID NO: 115230 - DNA, 25 bp, SARS Virus
ggattagtctgtcccttgactaatg

SEQ ID NO: 115231 - DNA, 25 bp, SARS Virus
gattagtctgttccttgactaatgt

SEQ ID NO: 115232 - DNA, 25 bp, SARS Virus
attagtctgttccttgactaatgtt

SEQ ID NO: 115233 - DNA, 25 bp, SARS Virus
ttagtctgttccctgactaatgttt

SEQ ID NO: 115234 - DNA, 25 bp, SARS Virus
tagtctgttcctcgactaatgtttg

SEQ ID NO: 115235 - DNA, 25 bp, SARS Virus
agtctgttccttcactaatgtttgt

SEQ ID NO: 115236 - DNA, 25 bp, SARS Virus
gtctgttccttgcctaatgtttgta

SEQ ID NO: 115237 - DNA, 25 bp, SARS Virus
tctgttccttgactaatgtttgtaa

SEQ ID NO: 115238 - DNA, 25 bp, SARS Virus
ctgttccttgaccaatgtttgtaac

SEQ ID NO: 115239 - DNA, 25 bp, SARS Virus
tgttccttgactcatgtttgtaacc

SEQ ID NO: 115240 - DNA, 25 bp, SARS Virus
gttccttgactactgtttgtaaccg

SEQ ID NO: 115241 - DNA, 25 bp, SARS Virus
ttccttgactaacgtttgtaaccgg

SEQ ID NO: 115242 - DNA, 25 bp, SARS Virus
tccttgactaatctttgtaaccggc

SEQ ID NO: 115243 - DNA, 25 bp, SARS Virus
ccttgactaatgcttgtaaccggcg

SEQ ID NO: 115244 - DNA, 25 bp, SARS Virus
cttgactaatgtctgtaaccggcgt

SEQ ID NO: 115245 - DNA, 25 bp, SARS Virus
ttgactaatgttcgtaaccggcgtt

SEQ ID NO: 115246 - DNA, 25 bp, SARS Virus
tgactaatgtttctaaccggcgttt

SEQ ID NO: 115247 - DNA, 25 bp, SARS Virus
gactaatgtttgcaaccggcgttta

SEQ ID NO: 115248 - DNA, 25 bp, SARS Virus
actaatgtttgtcaccggcgtttaa

SEQ ID NO: 115249 - DNA, 25 bp, SARS Virus
ctaatgtttgtacccggcgtttaac

SEQ ID NO: 115250 - DNA, 25 bp, SARS Virus
taatgtttgtaaccggcgtttaacg

SEQ ID NO: 115251 - DNA, 25 bp, SARS Virus
aatgtttgtaaccggcgtttaacgt

SEQ ID NO: 115252 - DNA, 25 bp, SARS Virus
atgtttgtaacccgcgtttaacgtg

SEQ ID NO: 115253 - DNA, 25 bp, SARS Virus
tgtttgtaaccgccgtttaacgtgt

SEQ ID NO: 115254 - DNA, 25 bp, SARS Virus
gtttgtaaccggcgtttaacgtgtt

SEQ ID NO: 115255 - DNA, 25 bp, SARS Virus
tttgtaaccggcctttaacgtgtta

SEQ ID NO: 115256 - DNA, 25 bp, SARS Virus
ttgtaaccggcgcttaacgtgttaa

SEQ ID NO: 115257 - DNA, 25 bp, SARS Virus
tgtaaccggcgtctaacgtgttaaa

SEQ ID NO: 115258 - DNA, 25 bp, SARS Virus
gtaaccggcgttcaacgtgttaaac

SEQ ID NO: 115259 - DNA, 25 bp, SARS Virus
taaccggcgtttcacgtgttaaacg

SEQ ID NO: 115260 - DNA, 25 bp, SARS Virus
aaccggcgtttaccgtgttaaacga

SEQ ID NO: 115261 - DNA, 25 bp, SARS Virus
accggcgtttaacgtgttaaacgag

SEQ ID NO: 115262 - DNA, 25 bp, SARS Virus
ccggcgtttaacctgttaaacgagg

SEQ ID NO: 115263 - DNA, 25 bp, SARS Virus
cggcgtttaacgcgttaaacgaggt

SEQ ID NO: 115264 - DNA, 25 bp, SARS Virus
ggcgtttaacgtcttaaacgaggtt

SEQ ID NO: 115265 - DNA, 25 bp, SARS Virus
gcgtttaacgtgctaaacgaggttc

SEQ ID NO: 115266 - DNA, 25 bp, SARS Virus
cgtttaacgtgtcaaacgaggttca

SEQ ID NO: 115267 - DNA, 25 bp, SARS Virus
gtttaacgtgttcaacgaggttcac

SEQ ID NO: 115268 - DNA, 25 bp, SARS Virus
tttaacgtgttacacgaggttcacg

SEQ ID NO: 115269 - DNA, 25 bp, SARS Virus
ttaacgtgttaaccgaggttcacgg

SEQ ID NO: 115270 - DNA, 25 bp, SARS Virus
taacgtgttaaacgaggttcacgga

SEQ ID NO: 115271 - DNA, 25 bp, SARS Virus
aacgtgttaaaccaggttcacggag

SEQ ID NO: 115272 - DNA, 25 bp, SARS Virus
acgtgttaaacgcggttcacggaga

SEQ ID NO: 115273 - DNA, 25 bp, SARS Virus
cgtgttaaacgacgttcacggagac

SEQ ID NO: 115274 - DNA, 25 bp, SARS Virus
gtgttaaacgagcttcacggagacg

SEQ ID NO: 115275 - DNA, 25 bp, SARS Virus
tgttaaacgaggctcacggagacgt

SEQ ID NO: 115276 - DNA, 25 bp, SARS Virus
gttaaacgaggtccacggagacgta

SEQ ID NO: 115277 - DNA, 25 bp, SARS Virus
ttaaacgaggttcacggagacgtaa

SEQ ID NO: 115278 - DNA, 25 bp, SARS Virus
taaacgaggttcccggagacgtaag

SEQ ID NO: 115279 - DNA, 25 bp, SARS Virus
aaacgaggttcacggagacgtaaga

SEQ ID NO: 115280 - DNA, 25 bp, SARS Virus
aacgaggttcaccgagacgtaagaa

SEQ ID NO: 115281 - DNA, 25 bp, SARS Virus
acgaggttcacgcagacgtaagaaa

SEQ ID NO: 115282 - DNA, 25 bp, SARS Virus
cgaggttcacggcgacgtaagaaac

SEQ ID NO: 115283 - DNA, 25 bp, SARS Virus
gaggttcacggacacgtaagaaacc

SEQ ID NO: 115284 - DNA, 25 bp, SARS Virus
aggttcacggagccgtaagaaacct

SEQ ID NO: 115285 - DNA, 25 bp, SARS Virus
ggttcacggagacgtaagaaacctt

SEQ ID NO: 115286 - DNA, 25 bp, SARS Virus
gttcacggagacctaagaaacctta

SEQ ID NO: 115287 - DNA, 25 bp, SARS Virus
ttcacggagacgcaagaaaccttac

SEQ ID NO: 115288 - DNA, 25 bp, SARS Virus
tcacggagacgtcagaaaccttaca

SEQ ID NO: 115289 - DNA, 25 bp, SARS Virus
cacggagacgtacgaaaccttacag

SEQ ID NO: 115290 - DNA, 25 bp, SARS Virus
acggagacgtaacaaaccttacagt

SEQ ID NO: 115291 - DNA, 25 bp, SARS Virus
cggagacgtaagcaaccttacagtg

SEQ ID NO: 115292 - DNA, 25 bp, SARS Virus
ggagacgtaagacaccttacagtgc

SEQ ID NO: 115293 - DNA, 25 bp, SARS Virus
gagacgtaagaacccttacagtgcg

SEQ ID NO: 115294 - DNA, 25 bp, SARS Virus
agacgtaagaaaccttacagtgcgt

SEQ ID NO: 115295 - DNA, 25 bp, SARS Virus
gacgtaagaaaccttacagtgcgta

SEQ ID NO: 115296 - DNA, 25 bp, SARS Virus
acgtaagaaaccctacagtgcgtaa

SEQ ID NO: 115297 - DNA, 25 bp, SARS Virus
taggattattgtgacgacggtggca

SEQ ID NO: 115298 - DNA, 25 bp, SARS Virus
aggattattgttgcgacggtggcac

SEQ ID NO: 115299 - DNA, 25 bp, SARS Virus
ggattattgttaggacggtggcacg

SEQ ID NO: 115300 - DNA, 25 bp, SARS Virus
gattattgttacgacggtggcacga

SEQ ID NO: 115301 - DNA, 25 bp, SARS Virus
attattgttacggcggtggcacgat

SEQ ID NO: 115302 - DNA, 25 bp, SARS Virus
ttattgttacgagggtggcacgatg

SEQ ID NO: 115303 - DNA, 25 bp, SARS Virus
tattgttacgacggtggcacgatgt

SEQ ID NO: 115304 - DNA, 25 bp, SARS Virus
attgttacgacggtggcacgatgtt

SEQ ID NO: 115305 - DNA, 25 bp, SARS Virus
ttgttacgacgggggcacgatgttg

SEQ ID NO: 115306 - DNA, 25 bp, SARS Virus
tgttacgacggtggcacgatgttga

SEQ ID NO: 115307 - DNA, 25 bp, SARS Virus
gttacgacggtggcacgatgttgaa

SEQ ID NO: 115308 - DNA, 25 bp, SARS Virus
ttacgacggtgggacgatgttgaag

SEQ ID NO: 115309 - DNA, 25 bp, SARS Virus
tacgacggtggcgcgatgttgaagg

SEQ ID NO: 115310 - DNA, 25 bp, SARS Virus
acgacggtggcaggatgttgaagga

SEQ ID NO: 115311 - DNA, 25 bp, SARS Virus
cgacggtggcacgatgttgaaggag

SEQ ID NO: 115312 - DNA, 25 bp, SARS Virus
gacggtggcacggtgttgaaggagt

SEQ ID NO: 115313 - DNA, 25 bp, SARS Virus
acggtggcacgaggttgaaggagtt

SEQ ID NO: 115314 - DNA, 25 bp, SARS Virus
cggtggcacgatgttgaaggagttc

SEQ ID NO: 115315 - DNA, 25 bp, SARS Virus
ggtggcacgatggtgaaggagttcc

SEQ ID NO: 115316 - DNA, 25 bp, SARS Virus
gtggcacgatgtggaaggagttcct

SEQ ID NO: 115317 - DNA, 25 bp, SARS Virus
tggcacgatgttgaaggagttcctt

SEQ ID NO: 115318 - DNA, 25 bp, SARS Virus
ggcacgatgttggaggagttccttg

SEQ ID NO: 115319 - DNA, 25 bp, SARS Virus
gcacgatgttgagggagttccttgt

SEQ ID NO: 115320 - DNA, 25 bp, SARS Virus
cacgatgttgaaggagttccttgtt

SEQ ID NO: 115321 - DNA, 25 bp, SARS Virus
acgatgttgaaggagttccttgttg

SEQ ID NO: 115322 - DNA, 25 bp, SARS Virus
cgatgttgaaggggttccttgttgt

SEQ ID NO: 115323 - DNA, 25 bp, SARS Virus
gatgttgaaggagttccttgttgta

SEQ ID NO: 115324 - DNA, 25 bp, SARS Virus
atgttgaaggaggtccttgttgtaa

SEQ ID NO: 115325 - DNA, 25 bp, SARS Virus
tgttgaaggagtgccttgttgtaac

SEQ ID NO: 115326 - DNA, 25 bp, SARS Virus
gttgaaggagttgcttgttgtaacg

SEQ ID NO: 115327 - DNA, 25 bp, SARS Virus
ttgaaggagttcgttgttgtaacgg

SEQ ID NO: 115328 - DNA, 25 bp, SARS Virus
tgaaggagttccgtgttgtaacggt

SEQ ID NO: 115329 - DNA, 25 bp, SARS Virus
gaaggagttcctggttgtaacggtt

SEQ ID NO: 115330 - DNA, 25 bp, SARS Virus
aaggagttccttgttgtaacggttt

SEQ ID NO: 115331 - DNA, 25 bp, SARS Virus
aggagttccttggtgtaacggtttt

SEQ ID NO: 115332 - DNA, 25 bp, SARS Virus
ggagttccttgtggtaacggttttc

SEQ ID NO: 115333 - DNA, 25 bp, SARS Virus
gagttccttgttgtaacggttttcc

SEQ ID NO: 115334 - DNA, 25 bp, SARS Virus
agttccttgttggaacggttttccg

SEQ ID NO: 115335 - DNA, 25 bp, SARS Virus
gttccttgttgtgacggttttccga

SEQ ID NO: 115336 - DNA, 25 bp, SARS Virus
ttccttgttgtagcggttttccgaa

SEQ ID NO: 115337 - DNA, 25 bp, SARS Virus
tccttgttgtaagggttttccgaag

SEQ ID NO: 115338 - DNA, 25 bp, SARS Virus
ccttgttgtaacggttttccgaaga

SEQ ID NO: 115339 - DNA, 25 bp, SARS Virus
cttgttgtaacggttttccgaagat

SEQ ID NO: 115340 - DNA, 25 bp, SARS Virus
ttgttgtaacgggtttccgaagatg

SEQ ID NO: 115341 - DNA, 25 bp, SARS Virus
tgttgtaacggtgttccgaagatgc

SEQ ID NO: 115342 - DNA, 25 bp, SARS Virus
gttgtaacggttgtccgaagatgcg

SEQ ID NO: 115343 - DNA, 25 bp, SARS Virus
ttgtaacggtttgccgaagatgcgt

SEQ ID NO: 115344 - DNA, 25 bp, SARS Virus
tgtaacggttttgcgaagatgcgtc

SEQ ID NO: 115345 - DNA, 25 bp, SARS Virus
gtaacggttttcggaagatgcgtct

SEQ ID NO: 115346 - DNA, 25 bp, SARS Virus
taacggttttccgaagatgcgtctc

SEQ ID NO: 115347 - DNA, 25 bp, SARS Virus
aacggttttccggagatgcgtctcc

SEQ ID NO: 115348 - DNA, 25 bp, SARS Virus
acggttttccgaggatgcgtctccc

SEQ ID NO: 115349 - DNA, 25 bp, SARS Virus
cggttttccgaagatgcgtctccct

SEQ ID NO: 115350 - DNA, 25 bp, SARS Virus
ggttttccgaaggtgcgtctccctt

SEQ ID NO: 115351 - DNA, 25 bp, SARS Virus
gttttccgaagaggcgtctcccttc

SEQ ID NO: 115352 - DNA, 25 bp, SARS Virus
ttttccgaagatgcgtctcccttcg

SEQ ID NO: 115353 - DNA, 25 bp, SARS Virus
tttccgaagatgggtctcccttcgt

SEQ ID NO: 115354 - DNA, 25 bp, SARS Virus
ttccgaagatgcgtctcccttcgtc

SEQ ID NO: 115355 - DNA, 25 bp, SARS Virus
tccgaagatgcggctcccttcgtct

SEQ ID NO: 115356 - DNA, 25 bp, SARS Virus
ccgaagatgcgtgtcccttcgtctc

SEQ ID NO: 115357 - DNA, 25 bp, SARS Virus
cgaagatgcgtcgcccttcgtctcc

SEQ ID NO: 115358 - DNA, 25 bp, SARS Virus
gaagatgcgtctgccttcgtctccg

SEQ ID NO: 115359 - DNA, 25 bp, SARS Virus
aagatgcgtctcgcttcgtctccgc

SEQ ID NO: 115360 - DNA, 25 bp, SARS Virus
agatgcgtctccgttcgtctccgcc

SEQ ID NO: 115361 - DNA, 25 bp, SARS Virus
gatgcgtctcccgtcgtctccgccg

SEQ ID NO: 115362 - DNA, 25 bp, SARS Virus
atgcgtctccctgcgtctccgccgt

SEQ ID NO: 115363 - DNA, 25 bp, SARS Virus
tgcgtctcccttggtctccgccgtc

SEQ ID NO: 115364 - DNA, 25 bp, SARS Virus
gcgtctcccttcgtctccgccgtca

SEQ ID NO: 115365 - DNA, 25 bp, SARS Virus
cgtctcccttcggctccgccgtcag

SEQ ID NO: 115366 - DNA, 25 bp, SARS Virus
gtctcccttcgtgtccgccgtcagt

SEQ ID NO: 115367 - DNA, 25 bp, SARS Virus
tctcccttcgtcgccgccgtcagtt

SEQ ID NO: 115368 - DNA, 25 bp, SARS Virus
ctcccttcgtctgcgccgtcagttc

SEQ ID NO: 115369 - DNA, 25 bp, SARS Virus
tcccttcgtctcggccgtcagttcg

SEQ ID NO: 115370 - DNA, 25 bp, SARS Virus
cccttcgtctccgccgtcagttcgg

SEQ ID NO: 115371 - DNA, 25 bp, SARS Virus
ccttcgtctccggcgtcagttcgga

SEQ ID NO: 115372 - DNA, 25 bp, SARS Virus
cttcgtctccgcggtcagttcggag

SEQ ID NO: 115373 - DNA, 25 bp, SARS Virus
ttcgtctccgccgtcagttcggaga

SEQ ID NO: 115374 - DNA, 25 bp, SARS Virus
tcgtctccgccggcagttcggagaa

SEQ ID NO: 115375 - DNA, 25 bp, SARS Virus
cgtctccgccgtgagttcggagaag

SEQ ID NO: 115376 - DNA, 25 bp, SARS Virus
gtctccgccgtcggttcggagaaga

SEQ ID NO: 115377 - DNA, 25 bp, SARS Virus
tctccgccgtcagttcggagaagag

SEQ ID NO: 115378 - DNA, 25 bp, SARS Virus
ctccgccgtcaggtcggagaagagc

SEQ ID NO: 115379 - DNA, 25 bp, SARS Virus
tccgccgtcagtgcggagaagagcg

SEQ ID NO: 115380 - DNA, 25 bp, SARS Virus
ccgccgtcagttgggagaagagcga

SEQ ID NO: 115381 - DNA, 25 bp, SARS Virus
cgccgtcagttcggagaagagcgag

SEQ ID NO: 115382 - DNA, 25 bp, SARS Virus
gccgtcagttcggagaagagcgagg

SEQ ID NO: 115383 - DNA, 25 bp, SARS Virus
ccgtcagttcggggaagagcgagga

SEQ ID NO: 115384 - DNA, 25 bp, SARS Virus
cgtcagttcggagaagagcgaggag

SEQ ID NO: 115385 - DNA, 25 bp, SARS Virus
gtcagttcggaggagagcgaggagt

SEQ ID NO: 115386 - DNA, 25 bp, SARS Virus
tcagttcggagaggagcgaggagta

SEQ ID NO: 115387 - DNA, 25 bp, SARS Virus
cagttcggagaagagcgaggagtag

SEQ ID NO: 115388 - DNA, 25 bp, SARS Virus
agttcggagaagggcgaggagtagt

SEQ ID NO: 115389 - DNA, 25 bp, SARS Virus
gttcggagaagagcgaggagtagtg

SEQ ID NO: 115390 - DNA, 25 bp, SARS Virus
ttcggagaagagggaggagtagtgc

SEQ ID NO: 115391 - DNA, 25 bp, SARS Virus
tcggagaagagcgaggagtagtgca

SEQ ID NO: 115392 - DNA, 25 bp, SARS Virus
cggagaagagcggggagtagtgcat

SEQ ID NO: 115393 - DNA, 25 bp, SARS Virus
ggagaagagcgaggagtagtgcatc

SEQ ID NO: 115394 - DNA, 25 bp, SARS Virus
gagaagagcgaggagtagtgcatca

SEQ ID NO: 115395 - DNA, 25 bp, SARS Virus
agaagagcgaggggtagtgcatcag

SEQ ID NO: 115396 - DNA, 25 bp, SARS Virus
gaagagcgaggagtagtgcatcagc

SEQ ID NO: 115397 - DNA, 25 bp, SARS Virus
aagagcgaggaggagtgcatcagcg

SEQ ID NO: 115398 - DNA, 25 bp, SARS Virus
agagcgaggagtggtgcatcagcgc

SEQ ID NO: 115399 - DNA, 25 bp, SARS Virus
gagcgaggagtagtgcatcagcgcc

SEQ ID NO: 115400 - DNA, 25 bp, SARS Virus
agcgaggagtagggcatcagcgcca

SEQ ID NO: 115401 - DNA, 25 bp, SARS Virus
gcgaggagtagtgcatcagcgccat

SEQ ID NO: 115402 - DNA, 25 bp, SARS Virus
cgaggagtagtggatcagcgccatt

SEQ ID NO: 115403 - DNA, 25 bp, SARS Virus
gaggagtagtgcgtcagcgccatta

SEQ ID NO: 115404 - DNA, 25 bp, SARS Virus
aggagtagtgcagcagcgccattaa

SEQ ID NO: 115405 - DNA, 25 bp, SARS Virus
ggagtagtgcatgagcgccattaag

SEQ ID NO: 115406 - DNA, 25 bp, SARS Virus
gagtagtgcatcggcgccattaagt

SEQ ID NO: 115407 - DNA, 25 bp, SARS Virus
agtagtgcatcagcgccattaagtt

SEQ ID NO: 115408 - DNA, 25 bp, SARS Virus
gtagtgcatcagggccattaagttc

SEQ ID NO: 115409 - DNA, 25 bp, SARS Virus
tagtgcatcagcgccattaagttct

SEQ ID NO: 115410 - DNA, 25 bp, SARS Virus
agtgcatcagcggcattaagttctt

SEQ ID NO: 115411 - DNA, 25 bp, SARS Virus
gtgcatcagcgcgattaagttcttt

SEQ ID NO: 115412 - DNA, 25 bp, SARS Virus
tgcatcagcgccgttaagttcttta

SEQ ID NO: 115413 - DNA, 25 bp, SARS Virus
gcatcagcgccagtaagttctttaa

SEQ ID NO: 115414 - DNA, 25 bp, SARS Virus
catcagcgccatgaagttctttaag

SEQ ID NO: 115415 - DNA, 25 bp, SARS Virus
atcagcgccattgagttctttaagt

SEQ ID NO: 115416 - DNA, 25 bp, SARS Virus
tcagcgccattaggttctttaagtt

SEQ ID NO: 115417 - DNA, 25 bp, SARS Virus
cagcgccattaagttctttaagttg

SEQ ID NO: 115418 - DNA, 25 bp, SARS Virus
agcgccattaaggtctttaagttga

SEQ ID NO: 115419 - DNA, 25 bp, SARS Virus
gcgccattaagtgctttaagttgag

SEQ ID NO: 115420 - DNA, 25 bp, SARS Virus
cgccattaagttgtttaagttgagg

SEQ ID NO: 115421 - DNA, 25 bp, SARS Virus
gccattaagttcgttaagttgagga

SEQ ID NO: 115422 - DNA, 25 bp, SARS Virus
ccattaagttctgtaagttgaggac

SEQ ID NO: 115423 - DNA, 25 bp, SARS Virus
cattaagttcttgaagttgaggacc

SEQ ID NO: 115424 - DNA, 25 bp, SARS Virus
attaagttctttgagttgaggaccg

SEQ ID NO: 115425 - DNA, 25 bp, SARS Virus
ttaagttctttaggttgaggaccgt

SEQ ID NO: 115426 - DNA, 25 bp, SARS Virus
taagttctttaagttgaggaccgtc

SEQ ID NO: 115427 - DNA, 25 bp, SARS Virus
aagttctttaaggtgaggaccgtcg

SEQ ID NO: 115428 - DNA, 25 bp, SARS Virus
agttctttaagtggaggaccgtcgt

SEQ ID NO: 115429 - DNA, 25 bp, SARS Virus
gttctttaagttgaggaccgtcgtc

SEQ ID NO: 115430 - DNA, 25 bp, SARS Virus
ttctttaagttggggaccgtcgtca

SEQ ID NO: 115431 - DNA, 25 bp, SARS Virus
tctttaagttgaggaccgtcgtcat

SEQ ID NO: 115432 - DNA, 25 bp, SARS Virus
ctttaagttgaggaccgtcgtcatc

SEQ ID NO: 115433 - DNA, 25 bp, SARS Virus
tttaagttgagggccgtcgtcatcc

SEQ ID NO: 115434 - DNA, 25 bp, SARS Virus
ttaagttgaggagcgtcgtcatccc

SEQ ID NO: 115435 - DNA, 25 bp, SARS Virus
taagttgaggacggtcgtcatcccc

SEQ ID NO: 115436 - DNA, 25 bp, SARS Virus
aagttgaggaccgtcgtcatcccct

SEQ ID NO: 115437 - DNA, 25 bp, SARS Virus
agttgaggaccggcgtcatcccctt

SEQ ID NO: 115438 - DNA, 25 bp, SARS Virus
gttgaggaccgtggtcatccccttt

SEQ ID NO: 115439 - DNA, 25 bp, SARS Virus
ttgaggaccgtcgtcatccccttta

SEQ ID NO: 115440 - DNA, 25 bp, SARS Virus
tgaggaccgtcggcatcccctttaa

SEQ ID NO: 115441 - DNA, 25 bp, SARS Virus
gaggaccgtcgtgatcccctttaag

SEQ ID NO: 115442 - DNA, 25 bp, SARS Virus
aggaccgtcgtcgtcccctttaaga

SEQ ID NO: 115443 - DNA, 25 bp, SARS Virus
ggaccgtcgtcagcccctttaagag

SEQ ID NO: 115444 - DNA, 25 bp, SARS Virus
gaccgtcgtcatgccctttaagagg

SEQ ID NO: 115445 - DNA, 25 bp, SARS Virus
accgtcgtcatcgcctttaagagga

SEQ ID NO: 115446 - DNA, 25 bp, SARS Virus
ccgtcgtcatccgctttaagaggac

SEQ ID NO: 115447 - DNA, 25 bp, SARS Virus
cgtcgtcatcccgtttaagaggacg

SEQ ID NO: 115448 - DNA, 25 bp, SARS Virus
gtcgtcatccccgttaagaggacga

SEQ ID NO: 115449 - DNA, 25 bp, SARS Virus
tcgtcatcccctgtaagaggacgag

SEQ ID NO: 115450 - DNA, 25 bp, SARS Virus
cgtcatccccttgaagaggacgagc

SEQ ID NO: 115451 - DNA, 25 bp, SARS Virus
gtcatcccctttgagaggacgagct

SEQ ID NO: 115452 - DNA, 25 bp, SARS Virus
tcatcccctttaggaggacgagctt

SEQ ID NO: 115453 - DNA, 25 bp, SARS Virus
catcccctttaagaggacgagctta

SEQ ID NO: 115454 - DNA, 25 bp, SARS Virus
atcccctttaaggggacgagcttac

SEQ ID NO: 115455 - DNA, 25 bp, SARS Virus
tcccctttaagaggacgagcttacc

SEQ ID NO: 115456 - DNA, 25 bp, SARS Virus
cccctttaagaggacgagcttaccg

SEQ ID NO: 115457 - DNA, 25 bp, SARS Virus
ccctttaagagggcgagcttaccga

SEQ ID NO: 115458 - DNA, 25 bp, SARS Virus
cctttaagaggaggagcttaccgat

SEQ ID NO: 115459 - DNA, 25 bp, SARS Virus
ctttaagaggacgagcttaccgatc

SEQ ID NO: 115460 - DNA, 25 bp, SARS Virus
tttaagaggacgggcttaccgatcg

SEQ ID NO: 115461 - DNA, 25 bp, SARS Virus
ttaagaggacgagcttaccgatcgc

SEQ ID NO: 115462 - DNA, 25 bp, SARS Virus
taagaggacgaggttaccgatcgcc

SEQ ID NO: 115463 - DNA, 25 bp, SARS Virus
aagaggacgagcgtaccgatcgcct

SEQ ID NO: 115464 - DNA, 25 bp, SARS Virus
agaggacgagctgaccgatcgcctc

SEQ ID NO: 115465 - DNA, 25 bp, SARS Virus
gaggacgagcttgccgatcgcctcc

SEQ ID NO: 115466 - DNA, 25 bp, SARS Virus
aggacgagcttagcgatcgcctcca

SEQ ID NO: 115467 - DNA, 25 bp, SARS Virus
ggacgagcttacggatcgcctccac

SEQ ID NO: 115468 - DNA, 25 bp, SARS Virus
gacgagcttaccgatcgcctccacc

SEQ ID NO: 115469 - DNA, 25 bp, SARS Virus
acgagcttaccggtcgcctccacca

SEQ ID NO: 115470 - DNA, 25 bp, SARS Virus
cgagcttaccgagcgcctccaccac

SEQ ID NO: 115471 - DNA, 25 bp, SARS Virus
gagcttaccgatggcctccaccact

SEQ ID NO: 115472 - DNA, 25 bp, SARS Virus
agcttaccgatcgcctccaccactt

SEQ ID NO: 115473 - DNA, 25 bp, SARS Virus
gcttaccgatcggctccaccacttt

SEQ ID NO: 115474 - DNA, 25 bp, SARS Virus
cttaccgatcgcgtccaccactttg

SEQ ID NO: 115475 - DNA, 25 bp, SARS Virus
ttaccgatcgccgccaccactttga

SEQ ID NO: 115476 - DNA, 25 bp, SARS Virus
taccgatcgcctgcaccactttgac

SEQ ID NO: 115477 - DNA, 25 bp, SARS Virus
accgatcgcctcgaccactttgacg

SEQ ID NO: 115478 - DNA, 25 bp, SARS Virus
ccgatcgcctccgccactttgacgg

SEQ ID NO: 115479 - DNA, 25 bp, SARS Virus
cgatcgcctccagcactttgacggg

SEQ ID NO: 115480 - DNA, 25 bp, SARS Virus
gatcgcctccacgactttgacggga

SEQ ID NO: 115481 - DNA, 25 bp, SARS Virus
atcgcctccaccgctttgacgggag

SEQ ID NO: 115482 - DNA, 25 bp, SARS Virus
tcgcctccaccagtttgacgggagc

SEQ ID NO: 115483 - DNA, 25 bp, SARS Virus
cgcctccaccacgttgacgggagcg

SEQ ID NO: 115484 - DNA, 25 bp, SARS Virus
gcctccaccactgtgacgggagcgc

SEQ ID NO: 115485 - DNA, 25 bp, SARS Virus
cctccaccacttggacgggagcgcg

SEQ ID NO: 115486 - DNA, 25 bp, SARS Virus
ctccaccactttgacgggagcgcga

SEQ ID NO: 115487 - DNA, 25 bp, SARS Virus
tccaccactttggcgggagcgcgat

SEQ ID NO: 115488 - DNA, 25 bp, SARS Virus
ccaccactttgaggggagcgcgata

SEQ ID NO: 115489 - DNA, 25 bp, SARS Virus
caccactttgacgggagcgcgataa

SEQ ID NO: 115490 - DNA, 25 bp, SARS Virus
accactttgacgggagcgcgataac

SEQ ID NO: 115491 - DNA, 25 bp, SARS Virus
ccactttgacgggagcgcgataacg

SEQ ID NO: 115492 - DNA, 25 bp, SARS Virus
cactttgacgggggcgcgataacga

SEQ ID NO: 115493 - DNA, 25 bp, SARS Virus
actttgacgggagcgcgataacgac

SEQ ID NO: 115494 - DNA, 25 bp, SARS Virus
ctttgacgggagggcgataacgacg

SEQ ID NO: 115495 - DNA, 25 bp, SARS Virus
tttgacgggagcgcgataacgacga

SEQ ID NO: 115496 - DNA, 25 bp, SARS Virus
ttgacgggagcgggataacgacgat

SEQ ID NO: 115497 - DNA, 25 bp, SARS Virus
tgacgggagcgcgataacgacgatc

SEQ ID NO: 115498 - DNA, 25 bp, SARS Virus
gacgggagcgcggtaacgacgatct

SEQ ID NO: 115499 - DNA, 25 bp, SARS Virus
acgggagcgcgagaacgacgatctg

SEQ ID NO: 115500 - DNA, 25 bp, SARS Virus
cgggagcgcgatgacgacgatctgt

SEQ ID NO: 115501 - DNA, 25 bp, SARS Virus
gggagcgcgatagcgacgatctgtc

SEQ ID NO: 115502 - DNA, 25 bp, SARS Virus
ggagcgcgataaggacgatctgtct

SEQ ID NO: 115503 - DNA, 25 bp, SARS Virus
gagcgcgataacgacgatctgtcta

SEQ ID NO: 115504 - DNA, 25 bp, SARS Virus
agcgcgataacggcgatctgtctaa

SEQ ID NO: 115505 - DNA, 25 bp, SARS Virus
gcgcgataacgaggatctgtctaac

SEQ ID NO: 115506 - DNA, 25 bp, SARS Virus
cgcgataacgacgatctgtctaact

SEQ ID NO: 115507 - DNA, 25 bp, SARS Virus
gcgataacgacggtctgtctaactt

SEQ ID NO: 115508 - DNA, 25 bp, SARS Virus
cgataacgacgagctgtctaacttg

SEQ ID NO: 115509 - DNA, 25 bp, SARS Virus
gataacgacgatgtgtctaacttgg

SEQ ID NO: 115510 - DNA, 25 bp, SARS Virus
ataacgacgatcggtctaacttggt

SEQ ID NO: 115511 - DNA, 25 bp, SARS Virus
taacgacgatctgtctaacttggtc

SEQ ID NO: 115512 - DNA, 25 bp, SARS Virus
aacgacgatctggctaacttggtcg

SEQ ID NO: 115513 - DNA, 25 bp, SARS Virus
acgacgatctgtgtaacttggtcga

SEQ ID NO: 115514 - DNA, 25 bp, SARS Virus
cgacgatctgtcgaacttggtcgaa

SEQ ID NO: 115515 - DNA, 25 bp, SARS Virus
gacgatctgtctgacttggtcgaac

SEQ ID NO: 115516 - DNA, 25 bp, SARS Virus
acgatctgtctagcttggtcgaact

SEQ ID NO: 115517 - DNA, 25 bp, SARS Virus
cgatctgtctaagttggtcgaactc

SEQ ID NO: 115518 - DNA, 25 bp, SARS Virus
gatctgtctaacgtggtcgaactct

SEQ ID NO: 115519 - DNA, 25 bp, SARS Virus
atctgtctaactgggtcgaactctc

SEQ ID NO: 115520 - DNA, 25 bp, SARS Virus
tctgtctaacttggtcgaactctcg

SEQ ID NO: 115521 - DNA, 25 bp, SARS Virus
ctgtctaacttggtcgaactctcgt

SEQ ID NO: 115522 - DNA, 25 bp, SARS Virus
tgtctaacttgggcgaactctcgtt

SEQ ID NO: 115523 - DNA, 25 bp, SARS Virus
gtctaacttggtggaactctcgttt

SEQ ID NO: 115524 - DNA, 25 bp, SARS Virus
tctaacttggtcgaactctcgtttc

SEQ ID NO: 115525 - DNA, 25 bp, SARS Virus
ctaacttggtcggactctcgtttca

SEQ ID NO: 115526 - DNA, 25 bp, SARS Virus
taacttggtcgagctctcgtttcaa

SEQ ID NO: 115527 - DNA, 25 bp, SARS Virus
aacttggtcgaagtctcgtttcaaa

SEQ ID NO: 115528 - DNA, 25 bp, SARS Virus
acttggtcgaacgctcgtttcaaag

SEQ ID NO: 115529 - DNA, 25 bp, SARS Virus
cttggtcgaactgtcgtttcaaaga

SEQ ID NO: 115530 - DNA, 25 bp, SARS Virus
ttggtcgaactcgcgtttcaaagac

SEQ ID NO: 115531 - DNA, 25 bp, SARS Virus
tggtcgaactctggtttcaaagacc

SEQ ID NO: 115532 - DNA, 25 bp, SARS Virus
ggtcgaactctcgtttcaaagacca

SEQ ID NO: 115533 - DNA, 25 bp, SARS Virus
gtcgaactctcggttcaaagaccat

SEQ ID NO: 115534 - DNA, 25 bp, SARS Virus
tcgaactctcgtgtcaaagaccatt

SEQ ID NO: 115535 - DNA, 25 bp, SARS Virus
cgaactctcgttgcaaagaccattt

SEQ ID NO: 115536 - DNA, 25 bp, SARS Virus
gaactctcgtttgaaagaccatttc

SEQ ID NO: 115537 - DNA, 25 bp, SARS Virus
aactctcgtttcgaagaccatttcc

SEQ ID NO: 115538 - DNA, 25 bp, SARS Virus
actctcgtttcagagaccatttccg

SEQ ID NO: 115539 - DNA, 25 bp, SARS Virus
ctctcgtttcaaggaccatttccgg

SEQ ID NO: 115540 - DNA, 25 bp, SARS Virus
tctcgtttcaaagaccatttccggt

SEQ ID NO: 115541 - DNA, 25 bp, SARS Virus
ctcgtttcaaaggccatttccggtt

SEQ ID NO: 115542 - DNA, 25 bp, SARS Virus
tcgtttcaaagagcatttccggttg

SEQ ID NO: 115543 - DNA, 25 bp, SARS Virus
cgtttcaaagacgatttccggttgt

SEQ ID NO: 115544 - DNA, 25 bp, SARS Virus
gtttcaaagaccgtttccggttgtt

SEQ ID NO: 115545 - DNA, 25 bp, SARS Virus
tttcaaagaccagttccggttgttg

SEQ ID NO: 115546 - DNA, 25 bp, SARS Virus
ttcaaagaccatgtccggttgttgt

SEQ ID NO: 115547 - DNA, 25 bp, SARS Virus
tcaaagaccattgccggttgttgtt

SEQ ID NO: 115548 - DNA, 25 bp, SARS Virus
caaagaccatttgcggttgttgttg

SEQ ID NO: 115549 - DNA, 25 bp, SARS Virus
aaagaccatttcgggttgttgttgt

SEQ ID NO: 115550 - DNA, 25 bp, SARS Virus
aagaccatttccggttgttgttgtt

SEQ ID NO: 115551 - DNA, 25 bp, SARS Virus
agaccatttccggttgttgttgttc

SEQ ID NO: 115552 - DNA, 25 bp, SARS Virus
gaccatttccgggtgttgttgttcc

SEQ ID NO: 115553 - DNA, 25 bp, SARS Virus
accatttccggtggttgttgttccg

SEQ ID NO: 115554 - DNA, 25 bp, SARS Virus
ccatttccggttgttgttgttccgg

SEQ ID NO: 115555 - DNA, 25 bp, SARS Virus
catttccggttggtgttgttccggt

SEQ ID NO: 115556 - DNA, 25 bp, SARS Virus
atttccggttgtggttgttccggtt

SEQ ID NO: 115557 - DNA, 25 bp, SARS Virus
tttccggttgttgttgttccggttt

SEQ ID NO: 115558 - DNA, 25 bp, SARS Virus
ttccggttgttggtgttccggtttg

SEQ ID NO: 115559 - DNA, 25 bp, SARS Virus
tccggttgttgtggttccggtttga

SEQ ID NO: 115560 - DNA, 25 bp, SARS Virus
ccggttgttgttgttccggtttgac

SEQ ID NO: 115561 - DNA, 25 bp, SARS Virus
cggttgttgttggtccggtttgaca

SEQ ID NO: 115562 - DNA, 25 bp, SARS Virus
ggttgttgttgtgccggtttgacag

SEQ ID NO: 115563 - DNA, 25 bp, SARS Virus
gttgttgttgttgcggtttgacagt

SEQ ID NO: 115564 - DNA, 25 bp, SARS Virus
ttgttgttgttcgggtttgacagtg

SEQ ID NO: 115565 - DNA, 25 bp, SARS Virus
tgttgttgttccggtttgacagtga

SEQ ID NO: 115566 - DNA, 25 bp, SARS Virus
gttgttgttccggtttgacagtgat

SEQ ID NO: 115567 - DNA, 25 bp, SARS Virus
ttgttgttccgggttgacagtgatt

SEQ ID NO: 115568 - DNA, 25 bp, SARS Virus
tgttgttccggtgtgacagtgattc

SEQ ID NO: 115569 - DNA, 25 bp, SARS Virus
gttgttccggttggacagtgattct

SEQ ID NO: 115570 - DNA, 25 bp, SARS Virus
ttgttccggtttgacagtgattctt

SEQ ID NO: 115571 - DNA, 25 bp, SARS Virus
tgttccggtttggcagtgattcttt

SEQ ID NO: 115572 - DNA, 25 bp, SARS Virus
gttccggtttgagagtgattcttta

SEQ ID NO: 115573 - DNA, 25 bp, SARS Virus
ttccggtttgacggtgattctttag

SEQ ID NO: 115574 - DNA, 25 bp, SARS Virus
tccggtttgacagtgattctttaga

SEQ ID NO: 115575 - DNA, 25 bp, SARS Virus
ccggtttgacagggattctttagac

SEQ ID NO: 115576 - DNA, 25 bp, SARS Virus
cggtttgacagtgattctttagacg

SEQ ID NO: 115577 - DNA, 25 bp, SARS Virus
ggtttgacagtggttctttagacga

SEQ ID NO: 115578 - DNA, 25 bp, SARS Virus
gtttgacagtgagtctttagacgac

SEQ ID NO: 115579 - DNA, 25 bp, SARS Virus
tttgacagtgatgctttagacgacg

SEQ ID NO: 115580 - DNA, 25 bp, SARS Virus
ttgacagtgattgtttagacgacga

SEQ ID NO: 115581 - DNA, 25 bp, SARS Virus
tgacagtgattcgttagacgacgac

SEQ ID NO: 115582 - DNA, 25 bp, SARS Virus
gacagtgattctgtagacgacgact

SEQ ID NO: 115583 - DNA, 25 bp, SARS Virus
acagtgattcttgagacgacgactc

SEQ ID NO: 115584 - DNA, 25 bp, SARS Virus
cagtgattctttggacgacgactcc

SEQ ID NO: 115585 - DNA, 25 bp, SARS Virus
agtgattctttagacgacgactccg

SEQ ID NO: 115586 - DNA, 25 bp, SARS Virus
gtgattctttaggcgacgactccgt

SEQ ID NO: 115587 - DNA, 25 bp, SARS Virus
tgattctttagaggacgactccgta

SEQ ID NO: 115588 - DNA, 25 bp, SARS Virus
gattctttagacgacgactccgtag

SEQ ID NO: 115589 - DNA, 25 bp, SARS Virus
attctttagacggcgactccgtaga

SEQ ID NO: 115590 - DNA, 25 bp, SARS Virus
ttctttagacgaggactccgtagat

SEQ ID NO: 115591 - DNA, 25 bp, SARS Virus
tctttagacgacgactccgtagatt

SEQ ID NO: 115592 - DNA, 25 bp, SARS Virus
ctttagacgacggctccgtagattt

SEQ ID NO: 115593 - DNA, 25 bp, SARS Virus
tttagacgacgagtccgtagatttt

SEQ ID NO: 115594 - DNA, 25 bp, SARS Virus
ttagacgacgacgccgtagattttt

SEQ ID NO: 115595 - DNA, 25 bp, SARS Virus
tagacgacgactgcgtagatttttc

SEQ ID NO: 115596 - DNA, 25 bp, SARS Virus
agacgacgactcggtagatttttcg

SEQ ID NO: 115597 - DNA, 25 bp, SARS Virus
gacgacgactccgtagatttttcgg

SEQ ID NO: 115598 - DNA, 25 bp, SARS Virus
acgacgactccggagatttttcgga

SEQ ID NO: 115599 - DNA, 25 bp, SARS Virus
cgacgactccgtggatttttcggag

SEQ ID NO: 115600 - DNA, 25 bp, SARS Virus
gacgactccgtagatttttcggagc

SEQ ID NO: 115601 - DNA, 25 bp, SARS Virus
acgactccgtaggtttttcggagcg

SEQ ID NO: 115602 - DNA, 25 bp, SARS Virus
cgactccgtagagttttcggagcgg

SEQ ID NO: 115603 - DNA, 25 bp, SARS Virus
gactccgtagatgtttcggagcggt

SEQ ID NO: 115604 - DNA, 25 bp, SARS Virus
actccgtagattgttcggagcggtt

SEQ ID NO: 115605 - DNA, 25 bp, SARS Virus
ctccgtagatttgtcggagcggttt

SEQ ID NO: 115606 - DNA, 25 bp, SARS Virus
tccgtagattttgcggagcggtttt

SEQ ID NO: 115607 - DNA, 25 bp, SARS Virus
ccgtagatttttgggagcggttttt

SEQ ID NO: 115608 - DNA, 25 bp, SARS Virus
cgtagatttttcggagcggtttttg

SEQ ID NO: 115609 - DNA, 25 bp, SARS Virus
gtagatttttcggagcggtttttgc

SEQ ID NO: 115610 - DNA, 25 bp, SARS Virus
tagatttttcggggcggtttttgca

SEQ ID NO: 115611 - DNA, 25 bp, SARS Virus
agatttttcggagcggtttttgcat

SEQ ID NO: 115612 - DNA, 25 bp, SARS Virus
gatttttcggaggggtttttgcatg

SEQ ID NO: 115613 - DNA, 25 bp, SARS Virus
atttttcggagcggtttttgcatga

SEQ ID NO: 115614 - DNA, 25 bp, SARS Virus
tttttcggagcggtttttgcatgac

SEQ ID NO: 115615 - DNA, 25 bp, SARS Virus
ttttcggagcgggttttgcatgacg

SEQ ID NO: 115616 - DNA, 25 bp, SARS Virus
tttcggagcggtgtttgcatgacgg

SEQ ID NO: 115617 - DNA, 25 bp, SARS Virus
ttcggagcggttgttgcatgacggt

SEQ ID NO: 115618 - DNA, 25 bp, SARS Virus
tcggagcggtttgtgcatgacggtg

SEQ ID NO: 115619 - DNA, 25 bp, SARS Virus
cggagcggttttggcatgacggtgt

SEQ ID NO: 115620 - DNA, 25 bp, SARS Virus
ggagcggtttttgcatgacggtgtt

SEQ ID NO: 115621 - DNA, 25 bp, SARS Virus
gagcggtttttggatgacggtgttt

SEQ ID NO: 115622 - DNA, 25 bp, SARS Virus
agcggtttttgcgtgacggtgtttt

SEQ ID NO: 115623 - DNA, 25 bp, SARS Virus
gcggtttttgcaggacggtgttttg

SEQ ID NO: 115624 - DNA, 25 bp, SARS Virus
cggtttttgcatgacggtgttttgt

SEQ ID NO: 115625 - DNA, 25 bp, SARS Virus
ggtttttgcatggcggtgttttgtc

SEQ ID NO: 115626 - DNA, 25 bp, SARS Virus
gtttttgcatgagggtgttttgtca

SEQ ID NO: 115627 - DNA, 25 bp, SARS Virus
tttttgcatgacggtgttttgtcat

SEQ ID NO: 115628 - DNA, 25 bp, SARS Virus
ttttgcatgacggtgttttgtcatg

SEQ ID NO: 115629 - DNA, 25 bp, SARS Virus
tttgcatgacggggttttgtcatgt

SEQ ID NO: 115630 - DNA, 25 bp, SARS Virus
ttgcatgacggtgttttgtcatgtt

SEQ ID NO: 115631 - DNA, 25 bp, SARS Virus
tgcatgacggtggtttgtcatgttg

SEQ ID NO: 115632 - DNA, 25 bp, SARS Virus
gcatgacggtgtgttgtcatgttgc

SEQ ID NO: 115633 - DNA, 25 bp, SARS Virus
catgacggtgttgtgtcatgttgca

SEQ ID NO: 115634 - DNA, 25 bp, SARS Virus
atgacggtgtttggtcatgttgcag

SEQ ID NO: 115635 - DNA, 25 bp, SARS Virus
tgacggtgttttgtcatgttgcagt

SEQ ID NO: 115636 - DNA, 25 bp, SARS Virus
gacggtgttttggcatgttgcagtg

SEQ ID NO: 115637 - DNA, 25 bp, SARS Virus
acggtgttttgtgatgttgcagtga

SEQ ID NO: 115638 - DNA, 25 bp, SARS Virus
cggtgttttgtcgtgttgcagtgag

SEQ ID NO: 115639 - DNA, 25 bp, SARS Virus
ggtgttttgtcaggttgcagtgagt

SEQ ID NO: 115640 - DNA, 25 bp, SARS Virus
gtgttttgtcatgttgcagtgagtt

SEQ ID NO: 115641 - DNA, 25 bp, SARS Virus
tgttttgtcatggtgcagtgagttc

SEQ ID NO: 115642 - DNA, 25 bp, SARS Virus
gttttgtcatgtggcagtgagttcg

SEQ ID NO: 115643 - DNA, 25 bp, SARS Virus
ttttgtcatgttgcagtgagttcgt

SEQ ID NO: 115644 - DNA, 25 bp, SARS Virus
tttgtcatgttggagtgagttcgta

SEQ ID NO: 115645 - DNA, 25 bp, SARS Virus
ttgtcatgttgcggtgagttcgtaa

SEQ ID NO: 115646 - DNA, 25 bp, SARS Virus
tgtcatgttgcagtgagttcgtaaa

SEQ ID NO: 115647 - DNA, 25 bp, SARS Virus
gtcatgttgcagggagttcgtaaac

SEQ ID NO: 115648 - DNA, 25 bp, SARS Virus
tcatgttgcagtgagttcgtaaacc

SEQ ID NO: 115649 - DNA, 25 bp, SARS Virus
catgttgcagtgggttcgtaaaccc

SEQ ID NO: 115650 - DNA, 25 bp, SARS Virus
atgttgcagtgagttcgtaaaccct

SEQ ID NO: 115651 - DNA, 25 bp, SARS Virus
tgttgcagtgaggtcgtaaaccctc

SEQ ID NO: 115652 - DNA, 25 bp, SARS Virus
gttgcagtgagtgcgtaaaccctct

SEQ ID NO: 115653 - DNA, 25 bp, SARS Virus
ttgcagtgagttggtaaaccctctg

SEQ ID NO: 115654 - DNA, 25 bp, SARS Virus
tgcagtgagttcgtaaaccctctgc

SEQ ID NO: 115655 - DNA, 25 bp, SARS Virus
gcagtgagttcggaaaccctctgca

SEQ ID NO: 115656 - DNA, 25 bp, SARS Virus
cagtgagttcgtgaaccctctgcac

SEQ ID NO: 115657 - DNA, 25 bp, SARS Virus
agtgagttcgtagaccctctgcacc

SEQ ID NO: 115658 - DNA, 25 bp, SARS Virus
gtgagttcgtaagccctctgcacca

SEQ ID NO: 115659 - DNA, 25 bp, SARS Virus
tgagttcgtaaagcctctgcaccag

SEQ ID NO: 115660 - DNA, 25 bp, SARS Virus
gagttcgtaaacgctctgcaccagg

SEQ ID NO: 115661 - DNA, 25 bp, SARS Virus
agttcgtaaaccgtctgcaccaggt

SEQ ID NO: 115662 - DNA, 25 bp, SARS Virus
gttcgtaaacccgctgcaccaggtc

SEQ ID NO: 115663 - DNA, 25 bp, SARS Virus
ttcgtaaaccctgtgcaccaggtct

SEQ ID NO: 115664 - DNA, 25 bp, SARS Virus
tcgtaaaccctcggcaccaggtctt

SEQ ID NO: 115665 - DNA, 25 bp, SARS Virus
cgtaaaccctctgcaccaggtcttg

SEQ ID NO: 115666 - DNA, 25 bp, SARS Virus
gtaaaccctctggaccaggtcttgt

SEQ ID NO: 115667 - DNA, 25 bp, SARS Virus
taaaccctctgcgccaggtcttgtt

SEQ ID NO: 115668 - DNA, 25 bp, SARS Virus
aaaccctctgcagcaggtcttgttt

SEQ ID NO: 115669 - DNA, 25 bp, SARS Virus
aaccctctgcacgaggtcttgtttg

SEQ ID NO: 115670 - DNA, 25 bp, SARS Virus
accctctgcaccgggtcttgtttgg

SEQ ID NO: 115671 - DNA, 25 bp, SARS Virus
ccctctgcaccaggtcttgtttggg

SEQ ID NO: 115672 - DNA, 25 bp, SARS Virus
cctctgcaccaggtcttgtttgggt

SEQ ID NO: 115673 - DNA, 25 bp, SARS Virus
ctctgcaccagggcttgtttgggtt

SEQ ID NO: 115674 - DNA, 25 bp, SARS Virus
tctgcaccaggtgttgtttgggttc

SEQ ID NO: 115675 - DNA, 25 bp, SARS Virus
ctgcaccaggtcgtgtttgggttcc

SEQ ID NO: 115676 - DNA, 25 bp, SARS Virus
tgcaccaggtctggtttgggttcct

SEQ ID NO: 115677 - DNA, 25 bp, SARS Virus
gcaccaggtcttgtttgggttcctt

SEQ ID NO: 115678 - DNA, 25 bp, SARS Virus
caccaggtcttggttgggttccttt

SEQ ID NO: 115679 - DNA, 25 bp, SARS Virus
accaggtcttgtgtgggttccttta

SEQ ID NO: 115680 - DNA, 25 bp, SARS Virus
ccaggtcttgttggggttcctttaa

SEQ ID NO: 115681 - DNA, 25 bp, SARS Virus
caggtcttgtttgggttcctttaaa

SEQ ID NO: 115682 - DNA, 25 bp, SARS Virus
aggtcttgtttgggttcctttaaag

SEQ ID NO: 115683 - DNA, 25 bp, SARS Virus
ggtcttgtttgggttcctttaaagc

SEQ ID NO: 115684 - DNA, 25 bp, SARS Virus
gtcttgtttggggtcctttaaagcc

SEQ ID NO: 115685 - DNA, 25 bp, SARS Virus
tcttgtttgggtgcctttaaagccc

SEQ ID NO: 115686 - DNA, 25 bp, SARS Virus
cttgtttgggttgctttaaagcccc

SEQ ID NO: 115687 - DNA, 25 bp, SARS Virus
ttgtttgggttcgtttaaagcccct

SEQ ID NO: 115688 - DNA, 25 bp, SARS Virus
tgtttgggttccgttaaagcccctg

SEQ ID NO: 115689 - DNA, 25 bp, SARS Virus
gtttgggttcctgtaaagcccctgg

SEQ ID NO: 115690 - DNA, 25 bp, SARS Virus
tttgggttccttgaaagcccctggt

SEQ ID NO: 115691 - DNA, 25 bp, SARS Virus
ttgggttcctttgaagcccctggtt

SEQ ID NO: 115692 - DNA, 25 bp, SARS Virus
tgggttcctttagagcccctggttc

SEQ ID NO: 115693 - DNA, 25 bp, SARS Virus
gggttcctttaaggcccctggttct

SEQ ID NO: 115694 - DNA, 25 bp, SARS Virus
ggttcctttaaagcccctggttctg

SEQ ID NO: 115695 - DNA, 25 bp, SARS Virus
gttcctttaaaggccctggttctgg

SEQ ID NO: 115696 - DNA, 25 bp, SARS Virus
ttcctttaaagcgcctggttctgga

SEQ ID NO: 115697 - DNA, 25 bp, SARS Virus
tcctttaaagccgctggttctggat

SEQ ID NO: 115698 - DNA, 25 bp, SARS Virus
cctttaaagcccgtggttctggatt

SEQ ID NO: 115699 - DNA, 25 bp, SARS Virus
ctttaaagccccgggttctggatta

SEQ ID NO: 115700 - DNA, 25 bp, SARS Virus
tttaaagcccctggttctggattag

SEQ ID NO: 115701 - DNA, 25 bp, SARS Virus
ttaaagcccctggttctggattagt

SEQ ID NO: 115702 - DNA, 25 bp, SARS Virus
taaagcccctgggtctggattagtc

SEQ ID NO: 115703 - DNA, 25 bp, SARS Virus
aaagcccctggtgctggattagtct

SEQ ID NO: 115704 - DNA, 25 bp, SARS Virus
aagcccctggttgtggattagtctg

SEQ ID NO: 115705 - DNA, 25 bp, SARS Virus
agcccctggttcgggattagtctgt

SEQ ID NO: 115706 - DNA, 25 bp, SARS Virus
gcccctggttctggattagtctgtt

SEQ ID NO: 115707 - DNA, 25 bp, SARS Virus
cccctggttctggattagtctgttc

SEQ ID NO: 115708 - DNA, 25 bp, SARS Virus
ccctggttctgggttagtctgttcc

SEQ ID NO: 115709 - DNA, 25 bp, SARS Virus
cctggttctggagtagtctgttcct

SEQ ID NO: 115710 - DNA, 25 bp, SARS Virus
ctggttctggatgagtctgttcctt

SEQ ID NO: 115711 - DNA, 25 bp, SARS Virus
tggttctggattggtctgttccttg

SEQ ID NO: 115712 - DNA, 25 bp, SARS Virus
ggttctggattagtctgttccttga

SEQ ID NO: 115713 - DNA, 25 bp, SARS Virus
gttctggattaggctgttccttgac

SEQ ID NO: 115714 - DNA, 25 bp, SARS Virus
ttctggattagtgtgttccttgact

SEQ ID NO: 115715 - DNA, 25 bp, SARS Virus
tctggattagtcggttccttgacta

SEQ ID NO: 115716 - DNA, 25 bp, SARS Virus
ctggattagtctgttccttgactaa

SEQ ID NO: 115717 - DNA, 25 bp, SARS Virus
tggattagtctggtccttgactaat

SEQ ID NO: 115718 - DNA, 25 bp, SARS Virus
ggattagtctgtgccttgactaatg

SEQ ID NO: 115719 - DNA, 25 bp, SARS Virus
gattagtctgttgcttgactaatgt

SEQ ID NO: 115720 - DNA, 25 bp, SARS Virus
attagtctgttcgttgactaatgtt

SEQ ID NO: 115721 - DNA, 25 bp, SARS Virus
ttagtctgttccgtgactaatgttt

SEQ ID NO: 115722 - DNA, 25 bp, SARS Virus
tagtctgttcctggactaatgtttg

SEQ ID NO: 115723 - DNA, 25 bp, SARS Virus
agtctgttccttgactaatgtttgt

SEQ ID NO: 115724 - DNA, 25 bp, SARS Virus
gtctgttccttggctaatgtttgta

SEQ ID NO: 115725 - DNA, 25 bp, SARS Virus
tctgttccttgagtaatgtttgtaa

SEQ ID NO: 115726 - DNA, 25 bp, SARS Virus
ctgttccttgacgaatgtttgtaac

SEQ ID NO: 115727 - DNA, 25 bp, SARS Virus
tgttccttgactgatgtttgtaacc

SEQ ID NO: 115728 - DNA, 25 bp, SARS Virus
gttccttgactagtgtttgtaaccg

SEQ ID NO: 115729 - DNA, 25 bp, SARS Virus
ttccttgactaaggtttgtaaccgg

SEQ ID NO: 115730 - DNA, 25 bp, SARS Virus
tccttgactaatgtttgtaaccggc

SEQ ID NO: 115731 - DNA, 25 bp, SARS Virus
ccttgactaatggttgtaaccggcg

SEQ ID NO: 115732 - DNA, 25 bp, SARS Virus
cttgactaatgtgtgtaaccggcgt

SEQ ID NO: 115733 - DNA, 25 bp, SARS Virus
ttgactaatgttggtaaccggcgtt

SEQ ID NO: 115734 - DNA, 25 bp, SARS Virus
tgactaatgtttgtaaccggcgttt

SEQ ID NO: 115735 - DNA, 25 bp, SARS Virus
gactaatgtttggaaccggcgttta

SEQ ID NO: 115736 - DNA, 25 bp, SARS Virus
actaatgtttgtgaccggcgtttaa

SEQ ID NO: 115737 - DNA, 25 bp, SARS Virus
ctaatgtttgtagccggcgtttaac

SEQ ID NO: 115738 - DNA, 25 bp, SARS Virus
taatgtttgtaagcggcgtttaacg

SEQ ID NO: 115739 - DNA, 25 bp, SARS Virus
aatgtttgtaacgggcgtttaacgt

SEQ ID NO: 115740 - DNA, 25 bp, SARS Virus
atgtttgtaaccggcgtttaacgtg

SEQ ID NO: 115741 - DNA, 25 bp, SARS Virus
tgtttgtaaccggcgtttaacgtgt

SEQ ID NO: 115742 - DNA, 25 bp, SARS Virus
gtttgtaaccggggtttaacgtgtt

SEQ ID NO: 115743 - DNA, 25 bp, SARS Virus
tttgtaaccggcgtttaacgtgtta

SEQ ID NO: 115744 - DNA, 25 bp, SARS Virus
ttgtaaccggcggttaacgtgttaa

SEQ ID NO: 115745 - DNA, 25 bp, SARS Virus
tgtaaccggcgtgtaacgtgttaaa

SEQ ID NO: 115746 - DNA, 25 bp, SARS Virus
gtaaccggcgttgaacgtgttaaac

SEQ ID NO: 115747 - DNA, 25 bp, SARS Virus
taaccggcgtttgacgtgttaaacg

SEQ ID NO: 115748 - DNA, 25 bp, SARS Virus
aaccggcgtttagcgtgttaaacga

SEQ ID NO: 115749 - DNA, 25 bp, SARS Virus
accggcgtttaaggtgttaaacgag

SEQ ID NO: 115750 - DNA, 25 bp, SARS Virus
ccggcgtttaacgtgttaaacgagg

SEQ ID NO: 115751 - DNA, 25 bp, SARS Virus
cggcgtttaacgggttaaacgaggt

SEQ ID NO: 115752 - DNA, 25 bp, SARS Virus
ggcgtttaacgtgttaaacgaggtt

SEQ ID NO: 115753 - DNA, 25 bp, SARS Virus
gcgtttaacgtggtaaacgaggttc

SEQ ID NO: 115754 - DNA, 25 bp, SARS Virus
cgtttaacgtgtgaaacgaggttca

SEQ ID NO: 115755 - DNA, 25 bp, SARS Virus
gtttaacgtgttgaacgaggttcac

SEQ ID NO: 115756 - DNA, 25 bp, SARS Virus
tttaacgtgttagacgaggttcacg

SEQ ID NO: 115757 - DNA, 25 bp, SARS Virus
ttaacgtgttaagcgaggttcacgg

SEQ ID NO: 115758 - DNA, 25 bp, SARS Virus
taacgtgttaaaggaggttcacgga

SEQ ID NO: 115759 - DNA, 25 bp, SARS Virus
aacgtgttaaacgaggttcacggag

SEQ ID NO: 115760 - DNA, 25 bp, SARS Virus
acgtgttaaacggggttcacggaga

SEQ ID NO: 115761 - DNA, 25 bp, SARS Virus
cgtgttaaacgaggttcacggagac

SEQ ID NO: 115762 - DNA, 25 bp, SARS Virus
gtgttaaacgaggttcacggagacg

SEQ ID NO: 115763 - DNA, 25 bp, SARS Virus
tgttaaacgagggtcacggagacgt

SEQ ID NO: 115764 - DNA, 25 bp, SARS Virus
gttaaacgaggtgcacggagacgta

SEQ ID NO: 115765 - DNA, 25 bp, SARS Virus
ttaaacgaggttgacggagacgtaa

SEQ ID NO: 115766 - DNA, 25 bp, SARS Virus
taaacgaggttcgcggagacgtaag

SEQ ID NO: 115767 - DNA, 25 bp, SARS Virus
aaacgaggttcagggagacgtaaga

SEQ ID NO: 115768 - DNA, 25 bp, SARS Virus
aacgaggttcacggagacgtaagaa

SEQ ID NO: 115769 - DNA, 25 bp, SARS Virus
acgaggttcacggagacgtaagaaa

SEQ ID NO: 115770 - DNA, 25 bp, SARS Virus
cgaggttcacggggacgtaagaaac

SEQ ID NO: 115771 - DNA, 25 bp, SARS Virus
gaggttcacggagacgtaagaaacc

SEQ ID NO: 115772 - DNA, 25 bp, SARS Virus
aggttcacggaggcgtaagaaacct

SEQ ID NO: 115773 - DNA, 25 bp, SARS Virus
ggttcacggagaggtaagaaacctt

SEQ ID NO: 115774 - DNA, 25 bp, SARS Virus
gttcacggagacgtaagaaacctta

SEQ ID NO: 115775 - DNA, 25 bp, SARS Virus
ttcacggagacggaagaaaccttac

SEQ ID NO: 115776 - DNA, 25 bp, SARS Virus
tcacggagacgtgagaaaccttaca

SEQ ID NO: 115777 - DNA, 25 bp, SARS Virus
cacggagacgtaggaaaccttacag

SEQ ID NO: 115778 - DNA, 25 bp, SARS Virus
acggagacgtaagaaaccttacagt

SEQ ID NO: 115779 - DNA, 25 bp, SARS Virus
cggagacgtaaggaaccttacagtg

SEQ ID NO: 115780 - DNA, 25 bp, SARS Virus
ggagacgtaagagaccttacagtgc

SEQ ID NO: 115781 - DNA, 25 bp, SARS Virus
gagacgtaagaagccttacagtgcg

SEQ ID NO: 115782 - DNA, 25 bp, SARS Virus
agacgtaagaaagcttacagtgcgt

SEQ ID NO: 115783 - DNA, 25 bp, SARS Virus
gacgtaagaaacgttacagtgcgta

SEQ ID NO: 115784 - DNA, 25 bp, SARS Virus
acgtaagaaaccgtacagtgcgtaa

SEQ ID NO: 115785 - DNA, 25 bp, SARS Virus
taggattattgttacgacggtggca

SEQ ID NO: 115786 - DNA, 25 bp, SARS Virus
aggattattgtttcgacggtggcac

SEQ ID NO: 115787 - DNA, 25 bp, SARS Virus
ggattattgttatgacggtggcacg

SEQ ID NO: 115788 - DNA, 25 bp, SARS Virus
gattattgttactacggtggcacga

SEQ ID NO: 115789 - DNA, 25 bp, SARS Virus
attattgttacgtcggtggcacgat

SEQ ID NO: 115790 - DNA, 25 bp, SARS Virus
ttattgttacgatggtggcacgatg

SEQ ID NO: 115791 - DNA, 25 bp, SARS Virus
tattgttacgactgtggcacgatgt

SEQ ID NO: 115792 - DNA, 25 bp, SARS Virus
attgttacgacgttggcacgatgtt

SEQ ID NO: 115793 - DNA, 25 bp, SARS Virus
ttgttacgacggtggcacgatgttg

SEQ ID NO: 115794 - DNA, 25 bp, SARS Virus
tgttacgacggttgcacgatgttga

SEQ ID NO: 115795 - DNA, 25 bp, SARS Virus
gttacgacggtgtcacgatgttgaa

SEQ ID NO: 115796 - DNA, 25 bp, SARS Virus
ttacgacggtggtacgatgttgaag

SEQ ID NO: 115797 - DNA, 25 bp, SARS Virus
tacgacggtggctcgatgttgaagg

SEQ ID NO: 115798 - DNA, 25 bp, SARS Virus
acgacggtggcatgatgttgaagga

SEQ ID NO: 115799 - DNA, 25 bp, SARS Virus
cgacggtggcactatgttgaaggag

SEQ ID NO: 115800 - DNA, 25 bp, SARS Virus
gacggtggcacgttgttgaaggagt

SEQ ID NO: 115801 - DNA, 25 bp, SARS Virus
acggtggcacgatgttgaaggagtt

SEQ ID NO: 115802 - DNA, 25 bp, SARS Virus
cggtggcacgattttgaaggagttc

SEQ ID NO: 115803 - DNA, 25 bp, SARS Virus
ggtggcacgatgttgaaggagttcc

SEQ ID NO: 115804 - DNA, 25 bp, SARS Virus
gtggcacgatgttgaaggagttcct

SEQ ID NO: 115805 - DNA, 25 bp, SARS Virus
tggcacgatgtttaaggagttcctt

SEQ ID NO: 115806 - DNA, 25 bp, SARS Virus
ggcacgatgttgtaggagttccttg

SEQ ID NO: 115807 - DNA, 25 bp, SARS Virus
gcacgatgttgatggagttccttgt

SEQ ID NO: 115808 - DNA, 25 bp, SARS Virus
cacgatgttgaatgagttccttgtt

SEQ ID NO: 115809 - DNA, 25 bp, SARS Virus
acgatgttgaagtagttccttgttg

SEQ ID NO: 115810 - DNA, 25 bp, SARS Virus
cgatgttgaaggtgttccttgttgt

SEQ ID NO: 115811 - DNA, 25 bp, SARS Virus
gatgttgaaggatttccttgttgta

SEQ ID NO: 115812 - DNA, 25 bp, SARS Virus
atgttgaaggagttccttgttgtaa

SEQ ID NO: 115813 - DNA, 25 bp, SARS Virus
tgttgaaggagttccttgttgtaac

SEQ ID NO: 115814 - DNA, 25 bp, SARS Virus
gttgaaggagtttcttgttgtaacg

SEQ ID NO: 115815 - DNA, 25 bp, SARS Virus
ttgaaggagttctttgttgtaacgg

SEQ ID NO: 115816 - DNA, 25 bp, SARS Virus
tgaaggagttccttgttgtaacggt

SEQ ID NO: 115817 - DNA, 25 bp, SARS Virus
gaaggagttccttgttgtaacggtt

SEQ ID NO: 115818 - DNA, 25 bp, SARS Virus
aaggagttcctttttgtaacggttt

SEQ ID NO: 115819 - DNA, 25 bp, SARS Virus
aggagttccttgttgtaacggtttt

SEQ ID NO: 115820 - DNA, 25 bp, SARS Virus
ggagttccttgttgtaacggttttc

SEQ ID NO: 115821 - DNA, 25 bp, SARS Virus
gagttccttgttttaacggttttcc

SEQ ID NO: 115822 - DNA, 25 bp, SARS Virus
agttccttgttgtaacggttttccg

SEQ ID NO: 115823 - DNA, 25 bp, SARS Virus
gttccttgttgttacggttttccga

SEQ ID NO: 115824 - DNA, 25 bp, SARS Virus
ttccttgttgtatcggttttccgaa

SEQ ID NO: 115825 - DNA, 25 bp, SARS Virus
tccttgttgtaatggttttccgaag

SEQ ID NO: 115826 - DNA, 25 bp, SARS Virus
ccttgttgtaactgttttccgaaga

SEQ ID NO: 115827 - DNA, 25 bp, SARS Virus
cttgttgtaacgtttttccgaagat

SEQ ID NO: 115828 - DNA, 25 bp, SARS Virus
ttgttgtaacggttttccgaagatg

SEQ ID NO: 115829 - DNA, 25 bp, SARS Virus
tgttgtaacggttttccgaagatgc

SEQ ID NO: 115830 - DNA, 25 bp, SARS Virus
gttgtaacggttttccgaagatgcg

SEQ ID NO: 115831 - DNA, 25 bp, SARS Virus
ttgtaacggttttccgaagatgcgt

SEQ ID NO: 115832 - DNA, 25 bp, SARS Virus
tgtaacggtttttcgaagatgcgtc

SEQ ID NO: 115833 - DNA, 25 bp, SARS Virus
gtaacggttttctgaagatgcgtct

SEQ ID NO: 115834 - DNA, 25 bp, SARS Virus
taacggttttcctaagatgcgtctc

SEQ ID NO: 115835 - DNA, 25 bp, SARS Virus
aacggttttccgtagatgcgtctcc

SEQ ID NO: 115836 - DNA, 25 bp, SARS Virus
acggttttccgatgatgcgtctccc

SEQ ID NO: 115837 - DNA, 25 bp, SARS Virus
cggttttccgaatatgcgtctccct

SEQ ID NO: 115838 - DNA, 25 bp, SARS Virus
ggttttccgaagttgcgtctccctt

SEQ ID NO: 115839 - DNA, 25 bp, SARS Virus
gttttccgaagatgcgtctcccttc

SEQ ID NO: 115840 - DNA, 25 bp, SARS Virus
ttttccgaagattcgtctcccttcg

SEQ ID NO: 115841 - DNA, 25 bp, SARS Virus
tttccgaagatgtgtctcccttcgt

SEQ ID NO: 115842 - DNA, 25 bp, SARS Virus
ttccgaagatgcttctcccttcgtc

SEQ ID NO: 115843 - DNA, 25 bp, SARS Virus
tccgaagatgcgtctcccttcgtct

SEQ ID NO: 115844 - DNA, 25 bp, SARS Virus
ccgaagatgcgtttcccttcgtctc

SEQ ID NO: 115845 - DNA, 25 bp, SARS Virus
cgaagatgcgtctcccttcgtctcc

SEQ ID NO: 115846 - DNA, 25 bp, SARS Virus
gaagatgcgtcttccttcgtctccg

SEQ ID NO: 115847 - DNA, 25 bp, SARS Virus
aagatgcgtctctcttcgtctccgc

SEQ ID NO: 115848 - DNA, 25 bp, SARS Virus
agatgcgtctcctttcgtctccgcc

SEQ ID NO: 115849 - DNA, 25 bp, SARS Virus
gatgcgtctcccttcgtctccgccg

SEQ ID NO: 115850 - DNA, 25 bp, SARS Virus
atgcgtctcccttcgtctccgccgt

SEQ ID NO: 115851 - DNA, 25 bp, SARS Virus
tgcgtctccctttgtctccgccgtc

SEQ ID NO: 115852 - DNA, 25 bp, SARS Virus
gcgtctcccttcttctccgccgtca

SEQ ID NO: 115853 - DNA, 25 bp, SARS Virus
cgtctcccttcgtctccgccgtcag

SEQ ID NO: 115854 - DNA, 25 bp, SARS Virus
gtctcccttcgtttccgccgtcagt

SEQ ID NO: 115855 - DNA, 25 bp, SARS Virus
tctcccttcgtctccgccgtcagtt

SEQ ID NO: 115856 - DNA, 25 bp, SARS Virus
ctcccttcgtcttcgccgtcagttc

SEQ ID NO: 115857 - DNA, 25 bp, SARS Virus
tcccttcgtctctgccgtcagttcg

SEQ ID NO: 115858 - DNA, 25 bp, SARS Virus
cccttcgtctcctccgtcagttcgg

SEQ ID NO: 115859 - DNA, 25 bp, SARS Virus
ccttcgtctccgtcgtcagttcgga

SEQ ID NO: 115860 - DNA, 25 bp, SARS Virus
cttcgtctccgctgtcagttcggag

SEQ ID NO: 115861 - DNA, 25 bp, SARS Virus
ttcgtctccgccttcagttcggaga

SEQ ID NO: 115862 - DNA, 25 bp, SARS Virus
tcgtctccgccgtcagttcggagaa

SEQ ID NO: 115863 - DNA, 25 bp, SARS Virus
cgtctccgccgttagttcggagaag

SEQ ID NO: 115864 - DNA, 25 bp, SARS Virus
gtctccgccgtctgttcggagaaga

SEQ ID NO: 115865 - DNA, 25 bp, SARS Virus
tctccgccgtcatttcggagaagag

SEQ ID NO: 115866 - DNA, 25 bp, SARS Virus
ctccgccgtcagttcggagaagagc

SEQ ID NO: 115867 - DNA, 25 bp, SARS Virus
tccgccgtcagttcggagaagagcg

SEQ ID NO: 115868 - DNA, 25 bp, SARS Virus
ccgccgtcagtttggagaagagcga

SEQ ID NO: 115869 - DNA, 25 bp, SARS Virus
cgccgtcagttctgagaagagcgag

SEQ ID NO: 115870 - DNA, 25 bp, SARS Virus
gccgtcagttcgtagaagagcgagg

SEQ ID NO: 115871 - DNA, 25 bp, SARS Virus
ccgtcagttcggtgaagagcgagga

SEQ ID NO: 115872 - DNA, 25 bp, SARS Virus
cgtcagttcggataagagcgaggag

SEQ ID NO: 115873 - DNA, 25 bp, SARS Virus
gtcagttcggagtagagcgaggagt

SEQ ID NO: 115874 - DNA, 25 bp, SARS Virus
tcagttcggagatgagcgaggagta

SEQ ID NO: 115875 - DNA, 25 bp, SARS Virus
cagttcggagaatagcgaggagtag

SEQ ID NO: 115876 - DNA, 25 bp, SARS Virus
agttcggagaagtgcgaggagtagt

SEQ ID NO: 115877 - DNA, 25 bp, SARS Virus
gttcggagaagatcgaggagtagtg

SEQ ID NO: 115878 - DNA, 25 bp, SARS Virus
ttcggagaagagtgaggagtagtgc

SEQ ID NO: 115879 - DNA, 25 bp, SARS Virus
tcggagaagagctaggagtagtgca

SEQ ID NO: 115880 - DNA, 25 bp, SARS Virus
cggagaagagcgtggagtagtgcat

SEQ ID NO: 115881 - DNA, 25 bp, SARS Virus
ggagaagagcgatgagtagtgcatc

SEQ ID NO: 115882 - DNA, 25 bp, SARS Virus
gagaagagcgagtagtagtgcatca

SEQ ID NO: 115883 - DNA, 25 bp, SARS Virus
agaagagcgaggtgtagtgcatcag

SEQ ID NO: 115884 - DNA, 25 bp, SARS Virus
gaagagcgaggattagtgcatcagc

SEQ ID NO: 115885 - DNA, 25 bp, SARS Virus
aagagcgaggagtagtgcatcagcg

SEQ ID NO: 115886 - DNA, 25 bp, SARS Virus
agagcgaggagttgtgcatcagcgc

SEQ ID NO: 115887 - DNA, 25 bp, SARS Virus
gagcgaggagtattgcatcagcgcc

SEQ ID NO: 115888 - DNA, 25 bp, SARS Virus
agcgaggagtagtgcatcagcgcca

SEQ ID NO: 115889 - DNA, 25 bp, SARS Virus
gcgaggagtagttcatcagcgccat

SEQ ID NO: 115890 - DNA, 25 bp, SARS Virus
cgaggagtagtgtatcagcgccatt

SEQ ID NO: 115891 - DNA, 25 bp, SARS Virus
gaggagtagtgcttcagcgccatta

SEQ ID NO: 115892 - DNA, 25 bp, SARS Virus
aggagtagtgcatcagcgccattaa

SEQ ID NO: 115893 - DNA, 25 bp, SARS Virus
ggagtagtgcattagcgccattaag

SEQ ID NO: 115894 - DNA, 25 bp, SARS Virus
gagtagtgcatctgcgccattaagt

SEQ ID NO: 115895 - DNA, 25 bp, SARS Virus
agtagtgcatcatcgccattaagtt

SEQ ID NO: 115896 - DNA, 25 bp, SARS Virus
gtagtgcatcagtgccattaagttc

SEQ ID NO: 115897 - DNA, 25 bp, SARS Virus
tagtgcatcagctccattaagttct

SEQ ID NO: 115898 - DNA, 25 bp, SARS Virus
agtgcatcagcgtcattaagttctt

SEQ ID NO: 115899 - DNA, 25 bp, SARS Virus
gtgcatcagcgctattaagttcttt

SEQ ID NO: 115900 - DNA, 25 bp, SARS Virus
tgcatcagcgcctttaagttcttta

SEQ ID NO: 115901 - DNA, 25 bp, SARS Virus
gcatcagcgccattaagttctttaa

SEQ ID NO: 115902 - DNA, 25 bp, SARS Virus
catcagcgccattaagttctttaag

SEQ ID NO: 115903 - DNA, 25 bp, SARS Virus
atcagcgccatttagttctttaagt

SEQ ID NO: 115904 - DNA, 25 bp, SARS Virus
tcagcgccattatgttctttaagtt

SEQ ID NO: 115905 - DNA, 25 bp, SARS Virus
cagcgccattaatttctttaagttg

SEQ ID NO: 115906 - DNA, 25 bp, SARS Virus
agcgccattaagttctttaagttga

SEQ ID NO: 115907 - DNA, 25 bp, SARS Virus
gcgccattaagttctttaagttgag

SEQ ID NO: 115908 - DNA, 25 bp, SARS Virus
cgccattaagttttttaagttgagg

SEQ ID NO: 115909 - DNA, 25 bp, SARS Virus
gccattaagttctttaagttgagga

SEQ ID NO: 115910 - DNA, 25 bp, SARS Virus
ccattaagttctttaagttgaggac

SEQ ID NO: 115911 - DNA, 25 bp, SARS Virus
cattaagttctttaagttgaggacc

SEQ ID NO: 115912 - DNA, 25 bp, SARS Virus
attaagttcttttagttgaggaccg

SEQ ID NO: 115913 - DNA, 25 bp, SARS Virus
ttaagttctttatgttgaggaccgt

SEQ ID NO: 115914 - DNA, 25 bp, SARS Virus
taagttctttaatttgaggaccgtc

SEQ ID NO: 115915 - DNA, 25 bp, SARS Virus
aagttctttaagttgaggaccgtcg

SEQ ID NO: 115916 - DNA, 25 bp, SARS Virus
agttctttaagttgaggaccgtcgt

SEQ ID NO: 115917 - DNA, 25 bp, SARS Virus
gttctttaagtttaggaccgtcgtc

SEQ ID NO: 115918 - DNA, 25 bp, SARS Virus
ttctttaagttgtggaccgtcgtca

SEQ ID NO: 115919 - DNA, 25 bp, SARS Virus
tctttaagttgatgaccgtcgtcat

SEQ ID NO: 115920 - DNA, 25 bp, SARS Virus
ctttaagttgagtaccgtcgtcatc

SEQ ID NO: 115921 - DNA, 25 bp, SARS Virus
tttaagttgaggtccgtcgtcatcc

SEQ ID NO: 115922 - DNA, 25 bp, SARS Virus
ttaagttgaggatcgtcgtcatccc

SEQ ID NO: 115923 - DNA, 25 bp, SARS Virus
taagttgaggactgtcgtcatcccc

SEQ ID NO: 115924 - DNA, 25 bp, SARS Virus
aagttgaggaccttcgtcatcccct

SEQ ID NO: 115925 - DNA, 25 bp, SARS Virus
agttgaggaccgtcgtcatcccctt

SEQ ID NO: 115926 - DNA, 25 bp, SARS Virus
gttgaggaccgttgtcatccccttt

SEQ ID NO: 115927 - DNA, 25 bp, SARS Virus
ttgaggaccgtcttcatccccttta

SEQ ID NO: 115928 - DNA, 25 bp, SARS Virus
tgaggaccgtcgtcatcccctttaa

SEQ ID NO: 115929 - DNA, 25 bp, SARS Virus
gaggaccgtcgttatcccctttaag

SEQ ID NO: 115930 - DNA, 25 bp, SARS Virus
aggaccgtcgtcttcccctttaaga

SEQ ID NO: 115931 - DNA, 25 bp, SARS Virus
ggaccgtcgtcatcccctttaagag

SEQ ID NO: 115932 - DNA, 25 bp, SARS Virus
gaccgtcgtcattccctttaagagg

SEQ ID NO: 115933 - DNA, 25 bp, SARS Virus
accgtcgtcatctcctttaagagga

SEQ ID NO: 115934 - DNA, 25 bp, SARS Virus
ccgtcgtcatcctctttaagaggac

SEQ ID NO: 115935 - DNA, 25 bp, SARS Virus
cgtcgtcatcccttttaagaggacg

SEQ ID NO: 115936 - DNA, 25 bp, SARS Virus
gtcgtcatcccctttaagaggacga

SEQ ID NO: 115937 - DNA, 25 bp, SARS Virus
tcgtcatcccctttaagaggacgag

SEQ ID NO: 115938 - DNA, 25 bp, SARS Virus
cgtcatcccctttaagaggacgagc

SEQ ID NO: 115939 - DNA, 25 bp, SARS Virus
gtcatccccttttagaggacgagct

SEQ ID NO: 115940 - DNA, 25 bp, SARS Virus
tcatcccctttatgaggacgagctt

SEQ ID NO: 115941 - DNA, 25 bp, SARS Virus
catcccctttaataggacgagctta

SEQ ID NO: 115942 - DNA, 25 bp, SARS Virus
atcccctttaagtggacgagcttac

SEQ ID NO: 115943 - DNA, 25 bp, SARS Virus
tcccctttaagatgacgagcttacc

SEQ ID NO: 115944 - DNA, 25 bp, SARS Virus
cccctttaagagtacgagcttaccg

SEQ ID NO: 115945 - DNA, 25 bp, SARS Virus
ccctttaagaggtcgagcttaccga

SEQ ID NO: 115946 - DNA, 25 bp, SARS Virus
cctttaagaggatgagcttaccgat

SEQ ID NO: 115947 - DNA, 25 bp, SARS Virus
ctttaagaggactagcttaccgatc

SEQ ID NO: 115948 - DNA, 25 bp, SARS Virus
tttaagaggacgtgcttaccgatcg

SEQ ID NO: 115949 - DNA, 25 bp, SARS Virus
ttaagaggacgatcttaccgatcgc

SEQ ID NO: 115950 - DNA, 25 bp, SARS Virus
taagaggacgagtttaccgatcgcc

SEQ ID NO: 115951 - DNA, 25 bp, SARS Virus
aagaggacgagcttaccgatcgcct

SEQ ID NO: 115952 - DNA, 25 bp, SARS Virus
agaggacgagcttaccgatcgcctc

SEQ ID NO: 115953 - DNA, 25 bp, SARS Virus
gaggacgagctttccgatcgcctcc

SEQ ID NO: 115954 - DNA, 25 bp, SARS Virus
aggacgagcttatcgatcgcctcca

SEQ ID NO: 115955 - DNA, 25 bp, SARS Virus
ggacgagcttactgatcgcctccac

SEQ ID NO: 115956 - DNA, 25 bp, SARS Virus
gacgagcttacctatcgcctccacc

SEQ ID NO: 115957 - DNA, 25 bp, SARS Virus
acgagcttaccgttcgcctccacca

SEQ ID NO: 115958 - DNA, 25 bp, SARS Virus
cgagcttaccgatcgcctccaccac

SEQ ID NO: 115959 - DNA, 25 bp, SARS Virus
gagcttaccgattgcctccaccact

SEQ ID NO: 115960 - DNA, 25 bp, SARS Virus
agcttaccgatctcctccaccactt

SEQ ID NO: 115961 - DNA, 25 bp, SARS Virus
gcttaccgatcgtctccaccacttt

SEQ ID NO: 115962 - DNA, 25 bp, SARS Virus
cttaccgatcgcttccaccactttg

SEQ ID NO: 115963 - DNA, 25 bp, SARS Virus
ttaccgatcgcctccaccactttga

SEQ ID NO: 115964 - DNA, 25 bp, SARS Virus
taccgatcgccttcaccactttgac

SEQ ID NO: 115965 - DNA, 25 bp, SARS Virus
accgatcgcctctaccactttgacg

SEQ ID NO: 115966 - DNA, 25 bp, SARS Virus
ccgatcgcctcctccactttgacgg

SEQ ID NO: 115967 - DNA, 25 bp, SARS Virus
cgatcgcctccatcactttgacggg

SEQ ID NO: 115968 - DNA, 25 bp, SARS Virus
gatcgcctccactactttgacggga

SEQ ID NO: 115969 - DNA, 25 bp, SARS Virus
atcgcctccacctctttgacgggag

SEQ ID NO: 115970 - DNA, 25 bp, SARS Virus
tcgcctccaccattttgacgggagc

SEQ ID NO: 115971 - DNA, 25 bp, SARS Virus
cgcctccaccactttgacgggagcg

SEQ ID NO: 115972 - DNA, 25 bp, SARS Virus
gcctccaccactttgacgggagcgc

SEQ ID NO: 115973 - DNA, 25 bp, SARS Virus
cctccaccactttgacgggagcgcg

SEQ ID NO: 115974 - DNA, 25 bp, SARS Virus
ctccaccacttttacgggagcgcga

SEQ ID NO: 115975 - DNA, 25 bp, SARS Virus
tccaccactttgtcgggagcgcgat

SEQ ID NO: 115976 - DNA, 25 bp, SARS Virus
ccaccactttgatgggagcgcgata

SEQ ID NO: 115977 - DNA, 25 bp, SARS Virus
caccactttgactggagcgcgataa

SEQ ID NO: 115978 - DNA, 25 bp, SARS Virus
accactttgacgtgagcgcgataac

SEQ ID NO: 115979 - DNA, 25 bp, SARS Virus
ccactttgacggtagcgcgataacg

SEQ ID NO: 115980 - DNA, 25 bp, SARS Virus
cactttgacgggtgcgcgataacga

SEQ ID NO: 115981 - DNA, 25 bp, SARS Virus
actttgacgggatcgcgataacgac

SEQ ID NO: 115982 - DNA, 25 bp, SARS Virus
ctttgacgggagtgcgataacgacg

SEQ ID NO: 115983 - DNA, 25 bp, SARS Virus
tttgacgggagctcgataacgacga

SEQ ID NO: 115984 - DNA, 25 bp, SARS Virus
ttgacgggagcgtgataacgacgat

SEQ ID NO: 115985 - DNA, 25 bp, SARS Virus
tgacgggagcgctataacgacgatc

SEQ ID NO: 115986 - DNA, 25 bp, SARS Virus
gacgggagcgcgttaacgacgatct

SEQ ID NO: 115987 - DNA, 25 bp, SARS Virus
acgggagcgcgataacgacgatctg

SEQ ID NO: 115988 - DNA, 25 bp, SARS Virus
cgggagcgcgattacgacgatctgt

SEQ ID NO: 115989 - DNA, 25 bp, SARS Virus
gggagcgcgatatcgacgatctgtc

SEQ ID NO: 115990 - DNA, 25 bp, SARS Virus
ggagcgcgataatgacgatctgtct

SEQ ID NO: 115991 - DNA, 25 bp, SARS Virus
gagcgcgataactacgatctgtcta

SEQ ID NO: 115992 - DNA, 25 bp, SARS Virus
agcgcgataacgtcgatctgtctaa

SEQ ID NO: 115993 - DNA, 25 bp, SARS Virus
gcgcgataacgatgatctgtctaac

SEQ ID NO: 115994 - DNA, 25 bp, SARS Virus
cgcgataacgactatctgtctaact

SEQ ID NO: 115995 - DNA, 25 bp, SARS Virus
gcgataacgacgttctgtctaactt

SEQ ID NO: 115996 - DNA, 25 bp, SARS Virus
cgataacgacgatctgtctaacttg

SEQ ID NO: 115997 - DNA, 25 bp, SARS Virus
gataacgacgatttgtctaacttgg

SEQ ID NO: 115998 - DNA, 25 bp, SARS Virus
ataacgacgatctgtctaacttggt

SEQ ID NO: 115999 - DNA, 25 bp, SARS Virus
taacgacgatctttctaacttggtc

SEQ ID NO: 116000 - DNA, 25 bp, SARS Virus
aacgacgatctgtctaacttggtcg

SEQ ID NO: 116001 - DNA, 25 bp, SARS Virus
acgacgatctgtttaacttggtcga

SEQ ID NO: 116002 - DNA, 25 bp, SARS Virus
cgacgatctgtctaacttggtcgaa

SEQ ID NO: 116003 - DNA, 25 bp, SARS Virus
gacgatctgtcttacttggtcgaac

SEQ ID NO: 116004 - DNA, 25 bp, SARS Virus
acgatctgtctatcttggtcgaact

SEQ ID NO: 116005 - DNA, 25 bp, SARS Virus
cgatctgtctaatttggtcgaactc

SEQ ID NO: 116006 - DNA, 25 bp, SARS Virus
gatctgtctaacttggtcgaactct

SEQ ID NO: 116007 - DNA, 25 bp, SARS Virus
atctgtctaacttggtcgaactctc

SEQ ID NO: 116008 - DNA, 25 bp, SARS Virus
tctgtctaactttgtcgaactctcg

SEQ ID NO: 116009 - DNA, 25 bp, SARS Virus
ctgtctaacttgttcgaactctcgt

SEQ ID NO: 116010 - DNA, 25 bp, SARS Virus
tgtctaacttggtcgaactctcgtt

SEQ ID NO: 116011 - DNA, 25 bp, SARS Virus
gtctaacttggttgaactctcgttt

SEQ ID NO: 116012 - DNA, 25 bp, SARS Virus
tctaacttggtctaactctcgtttc

SEQ ID NO: 116013 - DNA, 25 bp, SARS Virus
ctaacttggtcgtactctcgtttca

SEQ ID NO: 116014 - DNA, 25 bp, SARS Virus
taacttggtcgatctctcgtttcaa

SEQ ID NO: 116015 - DNA, 25 bp, SARS Virus
aacttggtcgaattctcgtttcaaa

SEQ ID NO: 116016 - DNA, 25 bp, SARS Virus
acttggtcgaactctcgtttcaaag

SEQ ID NO: 116017 - DNA, 25 bp, SARS Virus
cttggtcgaactttcgtttcaaaga

SEQ ID NO: 116018 - DNA, 25 bp, SARS Virus
ttggtcgaactctcgtttcaaagac

SEQ ID NO: 116019 - DNA, 25 bp, SARS Virus
tggtcgaactcttgtttcaaagacc

SEQ ID NO: 116020 - DNA, 25 bp, SARS Virus
ggtcgaactctcttttcaaagacca

SEQ ID NO: 116021 - DNA, 25 bp, SARS Virus
gtcgaactctcgtttcaaagaccat

SEQ ID NO: 116022 - DNA, 25 bp, SARS Virus
tcgaactctcgtttcaaagaccatt

SEQ ID NO: 116023 - DNA, 25 bp, SARS Virus
cgaactctcgtttcaaagaccattt

SEQ ID NO: 116024 - DNA, 25 bp, SARS Virus
gaactctcgttttaaagaccatttc

SEQ ID NO: 116025 - DNA, 25 bp, SARS Virus
aactctcgtttctaagaccatttcc

SEQ ID NO: 116026 - DNA, 25 bp, SARS Virus
actctcgtttcatagaccatttccg

SEQ ID NO: 116027 - DNA, 25 bp, SARS Virus
ctctcgtttcaatgaccatttccgg

SEQ ID NO: 116028 - DNA, 25 bp, SARS Virus
tctcgtttcaaataccatttccggt

SEQ ID NO: 116029 - DNA, 25 bp, SARS Virus
ctcgtttcaaagtccatttccggtt

SEQ ID NO: 116030 - DNA, 25 bp, SARS Virus
tcgtttcaaagatcatttccggttg

SEQ ID NO: 116031 - DNA, 25 bp, SARS Virus
cgtttcaaagactatttccggttgt

SEQ ID NO: 116032 - DNA, 25 bp, SARS Virus
gtttcaaagaccttttccggttgtt

SEQ ID NO: 116033 - DNA, 25 bp, SARS Virus
tttcaaagaccatttccggttgttg

SEQ ID NO: 116034 - DNA, 25 bp, SARS Virus
ttcaaagaccatttccggttgttgt

SEQ ID NO: 116035 - DNA, 25 bp, SARS Virus
tcaaagaccatttccggttgttgtt

SEQ ID NO: 116036 - DNA, 25 bp, SARS Virus
caaagaccattttcggttgttgttg

SEQ ID NO: 116037 - DNA, 25 bp, SARS Virus
aaagaccatttctggttgttgttgt

SEQ ID NO: 116038 - DNA, 25 bp, SARS Virus
aagaccatttcctgttgttgttgtt

SEQ ID NO: 116039 - DNA, 25 bp, SARS Virus
agaccatttccgtttgttgttgttc

SEQ ID NO: 116040 - DNA, 25 bp, SARS Virus
gaccatttccggttgttgttgttcc

SEQ ID NO: 116041 - DNA, 25 bp, SARS Virus
accatttccggttgttgttgttccg

SEQ ID NO: 116042 - DNA, 25 bp, SARS Virus
ccatttccggtttttgttgttccgg

SEQ ID NO: 116043 - DNA, 25 bp, SARS Virus
catttccggttgttgttgttccggt

SEQ ID NO: 116044 - DNA, 25 bp, SARS Virus
atttccggttgttgttgttccggtt

SEQ ID NO: 116045 - DNA, 25 bp, SARS Virus
tttccggttgtttttgttccggttt

SEQ ID NO: 116046 - DNA, 25 bp, SARS Virus
ttccggttgttgttgttccggtttg

SEQ ID NO: 116047 - DNA, 25 bp, SARS Virus
tccggttgttgttgttccggtttga

SEQ ID NO: 116048 - DNA, 25 bp, SARS Virus
ccggttgttgtttttccggtttgac

SEQ ID NO: 116049 - DNA, 25 bp, SARS Virus
cggttgttgttgttccggtttgaca

SEQ ID NO: 116050 - DNA, 25 bp, SARS Virus
ggttgttgttgttccggtttgacag

SEQ ID NO: 116051 - DNA, 25 bp, SARS Virus
gttgttgttgtttcggtttgacagt

SEQ ID NO: 116052 - DNA, 25 bp, SARS Virus
ttgttgttgttctggtttgacagtg

SEQ ID NO: 116053 - DNA, 25 bp, SARS Virus
tgttgttgttcctgtttgacagtga

SEQ ID NO: 116054 - DNA, 25 bp, SARS Virus
gttgttgttccgttttgacagtgat

SEQ ID NO: 116055 - DNA, 25 bp, SARS Virus
ttgttgttccggtttgacagtgatt

SEQ ID NO: 116056 - DNA, 25 bp, SARS Virus
tgttgttccggtttgacagtgattc

SEQ ID NO: 116057 - DNA, 25 bp, SARS Virus
gttgttccggtttgacagtgattct

SEQ ID NO: 116058 - DNA, 25 bp, SARS Virus
ttgttccggttttacagtgattctt

SEQ ID NO: 116059 - DNA, 25 bp, SARS Virus
tgttccggtttgtcagtgattcttt

SEQ ID NO: 116060 - DNA, 25 bp, SARS Virus
gttccggtttgatagtgattcttta

SEQ ID NO: 116061 - DNA, 25 bp, SARS Virus
ttccggtttgactgtgattctttag

SEQ ID NO: 116062 - DNA, 25 bp, SARS Virus
tccggtttgacattgattctttaga

SEQ ID NO: 116063 - DNA, 25 bp, SARS Virus
ccggtttgacagtgattctttagac

SEQ ID NO: 116064 - DNA, 25 bp, SARS Virus
cggtttgacagttattctttagacg

SEQ ID NO: 116065 - DNA, 25 bp, SARS Virus
ggtttgacagtgtttctttagacga

SEQ ID NO: 116066 - DNA, 25 bp, SARS Virus
gtttgacagtgattctttagacgac

SEQ ID NO: 116067 - DNA, 25 bp, SARS Virus
tttgacagtgattctttagacgacg

SEQ ID NO: 116068 - DNA, 25 bp, SARS Virus
ttgacagtgattttttagacgacga

SEQ ID NO: 116069 - DNA, 25 bp, SARS Virus
tgacagtgattctttagacgacgac

SEQ ID NO: 116070 - DNA, 25 bp, SARS Virus
gacagtgattctttagacgacgact

SEQ ID NO: 116071 - DNA, 25 bp, SARS Virus
acagtgattctttagacgacgactc

SEQ ID NO: 116072 - DNA, 25 bp, SARS Virus
cagtgattcttttgacgacgactcc

SEQ ID NO: 116073 - DNA, 25 bp, SARS Virus
agtgattctttatacgacgactccg

SEQ ID NO: 116074 - DNA, 25 bp, SARS Virus
gtgattctttagtcgacgactccgt

SEQ ID NO: 116075 - DNA, 25 bp, SARS Virus
tgattctttagatgacgactccgta

SEQ ID NO: 116076 - DNA, 25 bp, SARS Virus
gattctttagactacgactccgtag

SEQ ID NO: 116077 - DNA, 25 bp, SARS Virus
attctttagacgtcgactccgtaga

SEQ ID NO: 116078 - DNA, 25 bp, SARS Virus
ttctttagacgatgactccgtagat

SEQ ID NO: 116079 - DNA, 25 bp, SARS Virus
tctttagacgactactccgtagatt

SEQ ID NO: 116080 - DNA, 25 bp, SARS Virus
ctttagacgacgtctccgtagattt

SEQ ID NO: 116081 - DNA, 25 bp, SARS Virus
tttagacgacgattccgtagatttt

SEQ ID NO: 116082 - DNA, 25 bp, SARS Virus
ttagacgacgactccgtagattttt

SEQ ID NO: 116083 - DNA, 25 bp, SARS Virus
tagacgacgacttcgtagatttttc

SEQ ID NO: 116084 - DNA, 25 bp, SARS Virus
agacgacgactctgtagatttttcg

SEQ ID NO: 116085 - DNA, 25 bp, SARS Virus
gacgacgactccttagatttttcgg

SEQ ID NO: 116086 - DNA, 25 bp, SARS Virus
acgacgactccgtagatttttcgga

SEQ ID NO: 116087 - DNA, 25 bp, SARS Virus
cgacgactccgttgatttttcggag

SEQ ID NO: 116088 - DNA, 25 bp, SARS Virus
gacgactccgtatatttttcggagc

SEQ ID NO: 116089 - DNA, 25 bp, SARS Virus
acgactccgtagttttttcggagcg

SEQ ID NO: 116090 - DNA, 25 bp, SARS Virus
cgactccgtagatttttcggagcgg

SEQ ID NO: 116091 - DNA, 25 bp, SARS Virus
gactccgtagatttttcggagcggt

SEQ ID NO: 116092 - DNA, 25 bp, SARS Virus
actccgtagatttttcggagcggtt

SEQ ID NO: 116093 - DNA, 25 bp, SARS Virus
ctccgtagatttttcggagcggttt

SEQ ID NO: 116094 - DNA, 25 bp, SARS Virus
tccgtagatttttcggagcggtttt

SEQ ID NO: 116095 - DNA, 25 bp, SARS Virus
ccgtagattttttggagcggttttt

SEQ ID NO: 116096 - DNA, 25 bp, SARS Virus
cgtagatttttctgagcggtttttg

SEQ ID NO: 116097 - DNA, 25 bp, SARS Virus
gtagatttttcgtagcggtttttgc

SEQ ID NO: 116098 - DNA, 25 bp, SARS Virus
tagatttttcggtgcggtttttgca

SEQ ID NO: 116099 - DNA, 25 bp, SARS Virus
agatttttcggatcggtttttgcat

SEQ ID NO: 116100 - DNA, 25 bp, SARS Virus
gatttttcggagtggtttttgcatg

SEQ ID NO: 116101 - DNA, 25 bp, SARS Virus
atttttcggagctgtttttgcatga

SEQ ID NO: 116102 - DNA, 25 bp, SARS Virus
tttttcggagcgttttttgcatgac

SEQ ID NO: 116103 - DNA, 25 bp, SARS Virus
ttttcggagcggtttttgcatgacg

SEQ ID NO: 116104 - DNA, 25 bp, SARS Virus
tttcggagcggtttttgcatgacgg

SEQ ID NO: 116105 - DNA, 25 bp, SARS Virus
ttcggagcggtttttgcatgacggt

SEQ ID NO: 116106 - DNA, 25 bp, SARS Virus
tcggagcggtttttgcatgacggtg

SEQ ID NO: 116107 - DNA, 25 bp, SARS Virus
cggagcggtttttgcatgacggtgt

SEQ ID NO: 116108 - DNA, 25 bp, SARS Virus
ggagcggttttttcatgacggtgtt

SEQ ID NO: 116109 - DNA, 25 bp, SARS Virus
gagcggtttttgtatgacggtgttt

SEQ ID NO: 116110 - DNA, 25 bp, SARS Virus
agcggtttttgcttgacggtgtttt

SEQ ID NO: 116111 - DNA, 25 bp, SARS Virus
gcggtttttgcatgacggtgttttg

SEQ ID NO: 116112 - DNA, 25 bp, SARS Virus
cggtttttgcattacggtgttttgt

SEQ ID NO: 116113 - DNA, 25 bp, SARS Virus
ggtttttgcatgtcggtgttttgtc

SEQ ID NO: 116114 - DNA, 25 bp, SARS Virus
gtttttgcatgatggtgttttgtca

SEQ ID NO: 116115 - DNA, 25 bp, SARS Virus
tttttgcatgactgtgttttgtcat

SEQ ID NO: 116116 - DNA, 25 bp, SARS Virus
ttttgcatgacgttgttttgtcatg

SEQ ID NO: 116117 - DNA, 25 bp, SARS Virus
tttgcatgacggtgttttgtcatgt

SEQ ID NO: 116118 - DNA, 25 bp, SARS Virus
ttgcatgacggttttttgtcatgtt

SEQ ID NO: 116119 - DNA, 25 bp, SARS Virus
tgcatgacggtgttttgtcatgttg

SEQ ID NO: 116120 - DNA, 25 bp, SARS Virus
gcatgacggtgttttgtcatgttgc

SEQ ID NO: 116121 - DNA, 25 bp, SARS Virus
catgacggtgttttgtcatgttgca

SEQ ID NO: 116122 - DNA, 25 bp, SARS Virus
atgacggtgttttgtcatgttgcag

SEQ ID NO: 116123 - DNA, 25 bp, SARS Virus
tgacggtgttttttcatgttgcagt

SEQ ID NO: 116124 - DNA, 25 bp, SARS Virus
gacggtgttttgtcatgttgcagtg

SEQ ID NO: 116125 - DNA, 25 bp, SARS Virus
acggtgttttgttatgttgcagtga

SEQ ID NO: 116126 - DNA, 25 bp, SARS Virus
cggtgttttgtcttgttgcagtgag

SEQ ID NO: 116127 - DNA, 25 bp, SARS Virus
ggtgttttgtcatgttgcagtgagt

SEQ ID NO: 116128 - DNA, 25 bp, SARS Virus
gtgttttgtcattttgcagtgagtt

SEQ ID NO: 116129 - DNA, 25 bp, SARS Virus
tgttttgtcatgttgcagtgagttc

SEQ ID NO: 116130 - DNA, 25 bp, SARS Virus
gttttgtcatgttgcagtgagttcg

SEQ ID NO: 116131 - DNA, 25 bp, SARS Virus
ttttgtcatgtttcagtgagttcgt

SEQ ID NO: 116132 - DNA, 25 bp, SARS Virus
tttgtcatgttgtagtgagttcgta

SEQ ID NO: 116133 - DNA, 25 bp, SARS Virus
ttgtcatgttgctgtgagttcgtaa

SEQ ID NO: 116134 - DNA, 25 bp, SARS Virus
tgtcatgttgcattgagttcgtaaa

SEQ ID NO: 116135 - DNA, 25 bp, SARS Virus
gtcatgttgcagtgagttcgtaaac

SEQ ID NO: 116136 - DNA, 25 bp, SARS Virus
tcatgttgcagttagttcgtaaacc

SEQ ID NO: 116137 - DNA, 25 bp, SARS Virus
catgttgcagtgtgttcgtaaaccc

SEQ ID NO: 116138 - DNA, 25 bp, SARS Virus
atgttgcagtgatttcgtaaaccct

SEQ ID NO: 116139 - DNA, 25 bp, SARS Virus
tgttgcagtgagttcgtaaaccctc

SEQ ID NO: 116140 - DNA, 25 bp, SARS Virus
gttgcagtgagttcgtaaaccctct

SEQ ID NO: 116141 - DNA, 25 bp, SARS Virus
ttgcagtgagtttgtaaaccctctg

SEQ ID NO: 116142 - DNA, 25 bp, SARS Virus
tgcagtgagttcttaaaccctctgc

SEQ ID NO: 116143 - DNA, 25 bp, SARS Virus
gcagtgagttcgtaaaccctctgca

SEQ ID NO: 116144 - DNA, 25 bp, SARS Virus
cagtgagttcgttaaccctctgcac

SEQ ID NO: 116145 - DNA, 25 bp, SARS Virus
agtgagttcgtataccctctgcacc

SEQ ID NO: 116146 - DNA, 25 bp, SARS Virus
gtgagttcgtaatccctctgcacca

SEQ ID NO: 116147 - DNA, 25 bp, SARS Virus
tgagttcgtaaatcctctgcaccag

SEQ ID NO: 116148 - DNA, 25 bp, SARS Virus
gagttcgtaaactctctgcaccagg

SEQ ID NO: 116149 - DNA, 25 bp, SARS Virus
agttcgtaaaccttctgcaccaggt

SEQ ID NO: 116150 - DNA, 25 bp, SARS Virus
gttcgtaaaccctctgcaccaggtc

SEQ ID NO: 116151 - DNA, 25 bp, SARS Virus
ttcgtaaaccctttgcaccaggtct

SEQ ID NO: 116152 - DNA, 25 bp, SARS Virus
tcgtaaaccctctgcaccaggtctt

SEQ ID NO: 116153 - DNA, 25 bp, SARS Virus
cgtaaaccctcttcaccaggtcttg

SEQ ID NO: 116154 - DNA, 25 bp, SARS Virus
gtaaaccctctgtaccaggtcttgt

SEQ ID NO: 116155 - DNA, 25 bp, SARS Virus
taaaccctctgctccaggtcttgtt

SEQ ID NO: 116156 - DNA, 25 bp, SARS Virus
aaaccctctgcatcaggtcttgttt

SEQ ID NO: 116157 - DNA, 25 bp, SARS Virus
aaccctctgcactaggtcttgtttg

SEQ ID NO: 116158 - DNA, 25 bp, SARS Virus
accctctgcacctggtcttgtttgg

SEQ ID NO: 116159 - DNA, 25 bp, SARS Virus
ccctctgcaccatgtcttgtttggg

SEQ ID NO: 116160 - DNA, 25 bp, SARS Virus
cctctgcaccagttcttgtttgggt

SEQ ID NO: 116161 - DNA, 25 bp, SARS Virus
ctctgcaccaggtcttgtttgggtt

SEQ ID NO: 116162 - DNA, 25 bp, SARS Virus
tctgcaccaggttttgtttgggttc

SEQ ID NO: 116163 - DNA, 25 bp, SARS Virus
ctgcaccaggtcttgtttgggttcc

SEQ ID NO: 116164 - DNA, 25 bp, SARS Virus
tgcaccaggtcttgtttgggttcct

SEQ ID NO: 116165 - DNA, 25 bp, SARS Virus
gcaccaggtcttttttgggttcctt

SEQ ID NO: 116166 - DNA, 25 bp, SARS Virus
caccaggtcttgtttgggttccttt

SEQ ID NO: 116167 - DNA, 25 bp, SARS Virus
accaggtcttgtttgggttccttta

SEQ ID NO: 116168 - DNA, 25 bp, SARS Virus
ccaggtcttgtttgggttcctttaa

SEQ ID NO: 116169 - DNA, 25 bp, SARS Virus
caggtcttgttttggttcctttaaa

SEQ ID NO: 116170 - DNA, 25 bp, SARS Virus
aggtcttgtttgtgttcctttaaag

SEQ ID NO: 116171 - DNA, 25 bp, SARS Virus
ggtcttgtttggtttcctttaaagc

SEQ ID NO: 116172 - DNA, 25 bp, SARS Virus
gtcttgtttgggttcctttaaagcc

SEQ ID NO: 116173 - DNA, 25 bp, SARS Virus
tcttgtttgggttcctttaaagccc

SEQ ID NO: 116174 - DNA, 25 bp, SARS Virus
cttgtttgggtttctttaaagcccc

SEQ ID NO: 116175 - DNA, 25 bp, SARS Virus
ttgtttgggttcttttaaagcccct

SEQ ID NO: 116176 - DNA, 25 bp, SARS Virus
tgtttgggttcctttaaagcccctg

SEQ ID NO: 116177 - DNA, 25 bp, SARS Virus
gtttgggttcctttaaagcccctgg

SEQ ID NO: 116178 - DNA, 25 bp, SARS Virus
tttgggttcctttaaagcccctggt

SEQ ID NO: 116179 - DNA, 25 bp, SARS Virus
ttgggttccttttaagcccctggtt

SEQ ID NO: 116180 - DNA, 25 bp, SARS Virus
tgggttcctttatagcccctggttc

SEQ ID NO: 116181 - DNA, 25 bp, SARS Virus
gggttcctttaatgcccctggttct

SEQ ID NO: 116182 - DNA, 25 bp, SARS Virus
ggttcctttaaatcccctggttctg

SEQ ID NO: 116183 - DNA, 25 bp, SARS Virus
gttcctttaaagtccctggttctgg

SEQ ID NO: 116184 - DNA, 25 bp, SARS Virus
ttcctttaaagctcctggttctgga

SEQ ID NO: 116185 - DNA, 25 bp, SARS Virus
tcctttaaagcctctggttctggat

SEQ ID NO: 116186 - DNA, 25 bp, SARS Virus
cctttaaagcccttggttctggatt

SEQ ID NO: 116187 - DNA, 25 bp, SARS Virus
ctttaaagcccctggttctggatta

SEQ ID NO: 116188 - DNA, 25 bp, SARS Virus
tttaaagccccttgttctggattag

SEQ ID NO: 116189 - DNA, 25 bp, SARS Virus
ttaaagcccctgtttctggattagt

SEQ ID NO: 116190 - DNA, 25 bp, SARS Virus
taaagcccctggttctggattagtc

SEQ ID NO: 116191 - DNA, 25 bp, SARS Virus
aaagcccctggttctggattagtct

SEQ ID NO: 116192 - DNA, 25 bp, SARS Virus
aagcccctggttttggattagtctg

SEQ ID NO: 116193 - DNA, 25 bp, SARS Virus
agcccctggttctggattagtctgt

SEQ ID NO: 116194 - DNA, 25 bp, SARS Virus
gcccctggttcttgattagtctgtt

SEQ ID NO: 116195 - DNA, 25 bp, SARS Virus
cccctggttctgtattagtctgttc

SEQ ID NO: 116196 - DNA, 25 bp, SARS Virus
ccctggttctggtttagtctgttcc

SEQ ID NO: 116197 - DNA, 25 bp, SARS Virus
cctggttctggattagtctgttcct

SEQ ID NO: 116198 - DNA, 25 bp, SARS Virus
ctggttctggattagtctgttcctt

SEQ ID NO: 116199 - DNA, 25 bp, SARS Virus
tggttctggatttgtctgttccttg

SEQ ID NO: 116200 - DNA, 25 bp, SARS Virus
ggttctggattattctgttccttga

SEQ ID NO: 116201 - DNA, 25 bp, SARS Virus
gttctggattagtctgttccttgac

SEQ ID NO: 116202 - DNA, 25 bp, SARS Virus
ttctggattagtttgttccttgact

SEQ ID NO: 116203 - DNA, 25 bp, SARS Virus
tctggattagtctgttccttgacta

SEQ ID NO: 116204 - DNA, 25 bp, SARS Virus
ctggattagtcttttccttgactaa

SEQ ID NO: 116205 - DNA, 25 bp, SARS Virus
tggattagtctgttccttgactaat

SEQ ID NO: 116206 - DNA, 25 bp, SARS Virus
ggattagtctgttccttgactaatg

SEQ ID NO: 116207 - DNA, 25 bp, SARS Virus
gattagtctgtttcttgactaatgt

SEQ ID NO: 116208 - DNA, 25 bp, SARS Virus
attagtctgttctttgactaatgtt

SEQ ID NO: 116209 - DNA, 25 bp, SARS Virus
ttagtctgttccttgactaatgttt

SEQ ID NO: 116210 - DNA, 25 bp, SARS Virus
tagtctgttccttgactaatgtttg

SEQ ID NO: 116211 - DNA, 25 bp, SARS Virus
agtctgttcctttactaatgtttgt

SEQ ID NO: 116212 - DNA, 25 bp, SARS Virus
gtctgttccttgtctaatgtttgta

SEQ ID NO: 116213 - DNA, 25 bp, SARS Virus
tctgttccttgattaatgtttgtaa

SEQ ID NO: 116214 - DNA, 25 bp, SARS Virus
ctgttccttgactaatgtttgtaac

SEQ ID NO: 116215 - DNA, 25 bp, SARS Virus
tgttccttgacttatgtttgtaacc

SEQ ID NO: 116216 - DNA, 25 bp, SARS Virus
gttccttgactattgtttgtaaccg

SEQ ID NO: 116217 - DNA, 25 bp, SARS Virus
ttccttgactaatgtttgtaaccgg

SEQ ID NO: 116218 - DNA, 25 bp, SARS Virus
tccttgactaatttttgtaaccggc

SEQ ID NO: 116219 - DNA, 25 bp, SARS Virus
ccttgactaatgtttgtaaccggcg

SEQ ID NO: 116220 - DNA, 25 bp, SARS Virus
cttgactaatgtttgtaaccggcgt

SEQ ID NO: 116221 - DNA, 25 bp, SARS Virus
ttgactaatgtttgtaaccggcgtt

SEQ ID NO: 116222 - DNA, 25 bp, SARS Virus
tgactaatgtttttaaccggcgttt

SEQ ID NO: 116223 - DNA, 25 bp, SARS Virus
gactaatgtttgtaaccggcgttta

SEQ ID NO: 116224 - DNA, 25 bp, SARS Virus
actaatgtttgttaccggcgtttaa

SEQ ID NO: 116225 - DNA, 25 bp, SARS Virus
ctaatgtttgtatccggcgtttaac

SEQ ID NO: 116226 - DNA, 25 bp, SARS Virus
taatgtttgtaatcggcgtttaacg

SEQ ID NO: 116227 - DNA, 25 bp, SARS Virus
aatgtttgtaactggcgtttaacgt

SEQ ID NO: 116228 - DNA, 25 bp, SARS Virus
atgtttgtaacctgcgtttaacgtg

SEQ ID NO: 116229 - DNA, 25 bp, SARS Virus
tgtttgtaaccgtcgtttaacgtgt

SEQ ID NO: 116230 - DNA, 25 bp, SARS Virus
gtttgtaaccggtgtttaacgtgtt

SEQ ID NO: 116231 - DNA, 25 bp, SARS Virus
tttgtaaccggcttttaacgtgtta

SEQ ID NO: 116232 - DNA, 25 bp, SARS Virus
ttgtaaccggcgtttaacgtgttaa

SEQ ID NO: 116233 - DNA, 25 bp, SARS Virus
tgtaaccggcgtttaacgtgttaaa

SEQ ID NO: 116234 - DNA, 25 bp, SARS Virus
gtaaccggcgtttaacgtgttaaac

SEQ ID NO: 116235 - DNA, 25 bp, SARS Virus
taaccggcgttttacgtgttaaacg

SEQ ID NO: 116236 - DNA, 25 bp, SARS Virus
aaccggcgtttatcgtgttaaacga

SEQ ID NO: 116237 - DNA, 25 bp, SARS Virus
accggcgtttaatgtgttaaacgag

SEQ ID NO: 116238 - DNA, 25 bp, SARS Virus
ccggcgtttaacttgttaaacgagg

SEQ ID NO: 116239 - DNA, 25 bp, SARS Virus
cggcgtttaacgtgttaaacgaggt

SEQ ID NO: 116240 - DNA, 25 bp, SARS Virus
ggcgtttaacgttttaaacgaggtt

SEQ ID NO: 116241 - DNA, 25 bp, SARS Virus
gcgtttaacgtgttaaacgaggttc

SEQ ID NO: 116242 - DNA, 25 bp, SARS Virus
cgtttaacgtgttaaacgaggttca

SEQ ID NO: 116243 - DNA, 25 bp, SARS Virus
gtttaacgtgtttaacgaggttcac

SEQ ID NO: 116244 - DNA, 25 bp, SARS Virus
tttaacgtgttatacgaggttcacg

SEQ ID NO: 116245 - DNA, 25 bp, SARS Virus
ttaacgtgttaatcgaggttcacgg

SEQ ID NO: 116246 - DNA, 25 bp, SARS Virus
taacgtgttaaatgaggttcacgga

SEQ ID NO: 116247 - DNA, 25 bp, SARS Virus
aacgtgttaaactaggttcacggag

SEQ ID NO: 116248 - DNA, 25 bp, SARS Virus
acgtgttaaacgtggttcacggaga

SEQ ID NO: 116249 - DNA, 25 bp, SARS Virus
cgtgttaaacgatgttcacggagac

SEQ ID NO: 116250 - DNA, 25 bp, SARS Virus
gtgttaaacgagtttcacggagacg

SEQ ID NO: 116251 - DNA, 25 bp, SARS Virus
tgttaaacgaggttcacggagacgt

SEQ ID NO: 116252 - DNA, 25 bp, SARS Virus
gttaaacgaggttcacggagacgta

SEQ ID NO: 116253 - DNA, 25 bp, SARS Virus
ttaaacgaggtttacggagacgtaa

SEQ ID NO: 116254 - DNA, 25 bp, SARS Virus
taaacgaggttctcggagacgtaag

SEQ ID NO: 116255 - DNA, 25 bp, SARS Virus
aaacgaggttcatggagacgtaaga

SEQ ID NO: 116256 - DNA, 25 bp, SARS Virus
aacgaggttcactgagacgtaagaa

SEQ ID NO: 116257 - DNA, 25 bp, SARS Virus
acgaggttcacgtagacgtaagaaa

SEQ ID NO: 116258 - DNA, 25 bp, SARS Virus
cgaggttcacggtgacgtaagaaac

SEQ ID NO: 116259 - DNA, 25 bp, SARS Virus
gaggttcacggatacgtaagaaacc

SEQ ID NO: 116260 - DNA, 25 bp, SARS Virus
aggttcacggagtcgtaagaaacct

SEQ ID NO: 116261 - DNA, 25 bp, SARS Virus
ggttcacggagatgtaagaaacctt

SEQ ID NO: 116262 - DNA, 25 bp, SARS Virus
gttcacggagacttaagaaacctta

SEQ ID NO: 116263 - DNA, 25 bp, SARS Virus
ttcacggagacgtaagaaaccttac

SEQ ID NO: 116264 - DNA, 25 bp, SARS Virus
tcacggagacgttagaaaccttaca

SEQ ID NO: 116265 - DNA, 25 bp, SARS Virus
cacggagacgtatgaaaccttacag

SEQ ID NO: 116266 - DNA, 25 bp, SARS Virus
acggagacgtaataaaccttacagt

SEQ ID NO: 116267 - DNA, 25 bp, SARS Virus
cggagacgtaagtaaccttacagtg

SEQ ID NO: 116268 - DNA, 25 bp, SARS Virus
ggagacgtaagataccttacagtgc

SEQ ID NO: 116269 - DNA, 25 bp, SARS Virus
gagacgtaagaatccttacagtgcg

SEQ ID NO: 116270 - DNA, 25 bp, SARS Virus
agacgtaagaaatcttacagtgcgt

SEQ ID NO: 116271 - DNA, 25 bp, SARS Virus
gacgtaagaaactttacagtgcgta

SEQ ID NO: 116272 - DNA, 25 bp, SARS Virus
acgtaagaaaccttacagtgcgtaa

SEQ ID NO: 116273 - DNA, 25 bp, SARS Virus
cgtaagaaacctaacagtgcgtaac

SEQ ID NO: 116274 - DNA, 25 bp, SARS Virus
gtaagaaaccttacagtgcgtaacc

SEQ ID NO: 116275 - DNA, 25 bp, SARS Virus
taagaaaccttaaagtgcgtaaccg

SEQ ID NO: 116276 - DNA, 25 bp, SARS Virus
aagaaaccttacagtgcgtaaccgt

SEQ ID NO: 116277 - DNA, 25 bp, SARS Virus
agaaaccttacaatgcgtaaccgta

SEQ ID NO: 116278 - DNA, 25 bp, SARS Virus
gaaaccttacagagcgtaaccgtac

SEQ ID NO: 116279 - DNA, 25 bp, SARS Virus
aaaccttacagtacgtaaccgtacc

SEQ ID NO: 116280 - DNA, 25 bp, SARS Virus
aaccttacagtgagtaaccgtacct

SEQ ID NO: 116281 - DNA, 25 bp, SARS Virus
accttacagtgcataaccgtacctt

SEQ ID NO: 116282 - DNA, 25 bp, SARS Virus
ccttacagtgcgaaaccgtaccttc

SEQ ID NO: 116283 - DNA, 25 bp, SARS Virus
cttacagtgcgtaaccgtaccttca

SEQ ID NO: 116284 - DNA, 25 bp, SARS Virus
ttacagtgcgtaaccgtaccttcag

SEQ ID NO: 116285 - DNA, 25 bp, SARS Virus
tacagtgcgtaaacgtaccttcagt

SEQ ID NO: 116286 - DNA, 25 bp, SARS Virus
acagtgcgtaacagtaccttcagtg

SEQ ID NO: 116287 - DNA, 25 bp, SARS Virus
cagtgcgtaaccataccttcagtgt

SEQ ID NO: 116288 - DNA, 25 bp, SARS Virus
agtgcgtaaccgaaccttcagtgtg

SEQ ID NO: 116289 - DNA, 25 bp, SARS Virus
gtgcgtaaccgtaccttcagtgtgg

SEQ ID NO: 116290 - DNA, 25 bp, SARS Virus
tgcgtaaccgtaacttcagtgtgga

SEQ ID NO: 116291 - DNA, 25 bp, SARS Virus
gcgtaaccgtacattcagtgtggaa

SEQ ID NO: 116292 - DNA, 25 bp, SARS Virus
cgtaaccgtaccatcagtgtggaag

SEQ ID NO: 116293 - DNA, 25 bp, SARS Virus
gtaaccgtacctacagtgtggaagc

SEQ ID NO: 116294 - DNA, 25 bp, SARS Virus
taaccgtaccttaagtgtggaagcc

SEQ ID NO: 116295 - DNA, 25 bp, SARS Virus
aaccgtaccttcagtgtggaagccc

SEQ ID NO: 116296 - DNA, 25 bp, SARS Virus
accgtaccttcaatgtggaagccct

SEQ ID NO: 116297 - DNA, 25 bp, SARS Virus
ccgtaccttcagagtggaagccctt

SEQ ID NO: 116298 - DNA, 25 bp, SARS Virus
cgtaccttcagtatggaagcccttg

SEQ ID NO: 116299 - DNA, 25 bp, SARS Virus
gtaccttcagtgaggaagcccttgt

SEQ ID NO: 116300 - DNA, 25 bp, SARS Virus
taccttcagtgtagaagcccttgta

SEQ ID NO: 116301 - DNA, 25 bp, SARS Virus
accttcagtgtgaaagcccttgtac

SEQ ID NO: 116302 - DNA, 25 bp, SARS Virus
ccttcagtgtggaagcccttgtacc

SEQ ID NO: 116303 - DNA, 25 bp, SARS Virus
cttcagtgtggaagcccttgtaccg

SEQ ID NO: 116304 - DNA, 25 bp, SARS Virus
ttcagtgtggaaacccttgtaccga

SEQ ID NO: 116305 - DNA, 25 bp, SARS Virus
tcagtgtggaagaccttgtaccgac

SEQ ID NO: 116306 - DNA, 25 bp, SARS Virus
cagtgtggaagcacttgtaccgact

SEQ ID NO: 116307 - DNA, 25 bp, SARS Virus
agtgtggaagccattgtaccgactg

SEQ ID NO: 116308 - DNA, 25 bp, SARS Virus
gtgtggaagcccatgtaccgactga

SEQ ID NO: 116309 - DNA, 25 bp, SARS Virus
tgtggaagccctagtaccgactgaa

SEQ ID NO: 116310 - DNA, 25 bp, SARS Virus
gtggaagcccttataccgactgaat

SEQ ID NO: 116311 - DNA, 25 bp, SARS Virus
tggaagcccttgaaccgactgaata

SEQ ID NO: 116312 - DNA, 25 bp, SARS Virus
ggaagcccttgtaccgactgaatag

SEQ ID NO: 116313 - DNA, 25 bp, SARS Virus
gaagcccttgtaacgactgaatagt

SEQ ID NO: 116314 - DNA, 25 bp, SARS Virus
aagcccttgtacagactgaatagta

SEQ ID NO: 116315 - DNA, 25 bp, SARS Virus
agcccttgtaccaactgaatagtac

SEQ ID NO: 116316 - DNA, 25 bp, SARS Virus
gcccttgtaccgactgaatagtacc

SEQ ID NO: 116317 - DNA, 25 bp, SARS Virus
cccttgtaccgaatgaatagtacct

SEQ ID NO: 116318 - DNA, 25 bp, SARS Virus
ccttgtaccgacagaatagtacctc

SEQ ID NO: 116319 - DNA, 25 bp, SARS Virus
cttgtaccgactaaatagtacctcg

SEQ ID NO: 116320 - DNA, 25 bp, SARS Virus
ttgtaccgactgaatagtacctcgg

SEQ ID NO: 116321 - DNA, 25 bp, SARS Virus
tgtaccgactgaatagtacctcggt

SEQ ID NO: 116322 - DNA, 25 bp, SARS Virus
gtaccgactgaaaagtacctcggta

SEQ ID NO: 116323 - DNA, 25 bp, SARS Virus
taccgactgaatagtacctcggtaa

SEQ ID NO: 116324 - DNA, 25 bp, SARS Virus
accgactgaataatacctcggtaat

SEQ ID NO: 116325 - DNA, 25 bp, SARS Virus
ccgactgaatagaacctcggtaatt

SEQ ID NO: 116326 - DNA, 25 bp, SARS Virus
cgactgaatagtacctcggtaattt

SEQ ID NO: 116327 - DNA, 25 bp, SARS Virus
gactgaatagtaactcggtaattta

SEQ ID NO: 116328 - DNA, 25 bp, SARS Virus
actgaatagtacatcggtaatttaa

SEQ ID NO: 116329 - DNA, 25 bp, SARS Virus
ctgaatagtaccacggtaatttaac

SEQ ID NO: 116330 - DNA, 25 bp, SARS Virus
tgaatagtacctaggtaatttaacc

SEQ ID NO: 116331 - DNA, 25 bp, SARS Virus
gaatagtacctcagtaatttaacct

SEQ ID NO: 116332 - DNA, 25 bp, SARS Virus
aatagtacctcgataatttaaccta

SEQ ID NO: 116333 - DNA, 25 bp, SARS Virus
atagtacctcggaaatttaacctac

SEQ ID NO: 116334 - DNA, 25 bp, SARS Virus
tagtacctcggtaatttaacctact

SEQ ID NO: 116335 - DNA, 25 bp, SARS Virus
agtacctcggtaatttaacctactg

SEQ ID NO: 116336 - DNA, 25 bp, SARS Virus
gtacctcggtaaattaacctactgt

SEQ ID NO: 116337 - DNA, 25 bp, SARS Virus
tacctcggtaatataacctactgtt

SEQ ID NO: 116338 - DNA, 25 bp, SARS Virus
acctcggtaattaaacctactgttt

SEQ ID NO: 116339 - DNA, 25 bp, SARS Virus
cctcggtaatttaacctactgtttc

SEQ ID NO: 116340 - DNA, 25 bp, SARS Virus
ctcggtaatttaacctactgtttct

SEQ ID NO: 116341 - DNA, 25 bp, SARS Virus
tcggtaatttaaactactgtttcta

SEQ ID NO: 116342 - DNA, 25 bp, SARS Virus
cggtaatttaacatactgtttctag

SEQ ID NO: 116343 - DNA, 25 bp, SARS Virus
ggtaatttaaccaactgtttctagg

SEQ ID NO: 116344 - DNA, 25 bp, SARS Virus
gtaatttaacctactgtttctaggt

SEQ ID NO: 116345 - DNA, 25 bp, SARS Virus
taatttaacctaatgtttctaggtg

SEQ ID NO: 116346 - DNA, 25 bp, SARS Virus
aatttaacctacagtttctaggtgt

SEQ ID NO: 116347 - DNA, 25 bp, SARS Virus
atttaacctactatttctaggtgtt

SEQ ID NO: 116348 - DNA, 25 bp, SARS Virus
tttaacctactgattctaggtgtta

SEQ ID NO: 116349 - DNA, 25 bp, SARS Virus
ttaacctactgtatctaggtgttaa

SEQ ID NO: 116350 - DNA, 25 bp, SARS Virus
taacctactgttactaggtgttaag

SEQ ID NO: 116351 - DNA, 25 bp, SARS Virus
aacctactgtttataggtgttaagt

SEQ ID NO: 116352 - DNA, 25 bp, SARS Virus
acctactgtttcaaggtgttaagtt

SEQ ID NO: 116353 - DNA, 25 bp, SARS Virus
cctactgtttctaggtgttaagttt

SEQ ID NO: 116354 - DNA, 25 bp, SARS Virus
ctactgtttctaagtgttaagtttc

SEQ ID NO: 116355 - DNA, 25 bp, SARS Virus
tactgtttctagatgttaagtttct

SEQ ID NO: 116356 - DNA, 25 bp, SARS Virus
actgtttctaggagttaagtttctg

SEQ ID NO: 116357 - DNA, 25 bp, SARS Virus
ctgtttctaggtattaagtttctgt

SEQ ID NO: 116358 - DNA, 25 bp, SARS Virus
tgtttctaggtgataagtttctgtt

SEQ ID NO: 116359 - DNA, 25 bp, SARS Virus
gtttctaggtgtaaagtttctgttg

SEQ ID NO: 116360 - DNA, 25 bp, SARS Virus
tttctaggtgttaagtttctgttgc

SEQ ID NO: 116361 - DNA, 25 bp, SARS Virus
ttctaggtgttaagtttctgttgca

SEQ ID NO: 116362 - DNA, 25 bp, SARS Virus
tctaggtgttaaatttctgttgcag

SEQ ID NO: 116363 - DNA, 25 bp, SARS Virus
ctaggtgttaagattctgttgcagt

SEQ ID NO: 116364 - DNA, 25 bp, SARS Virus
taggtgttaagtatctgttgcagta

SEQ ID NO: 116365 - DNA, 25 bp, SARS Virus
aggtgttaagttactgttgcagtat

SEQ ID NO: 116366 - DNA, 25 bp, SARS Virus
ggtgttaagtttatgttgcagtatg

SEQ ID NO: 116367 - DNA, 25 bp, SARS Virus
gtgttaagtttcagttgcagtatga

SEQ ID NO: 116368 - DNA, 25 bp, SARS Virus
tgttaagtttctattgcagtatgac

SEQ ID NO: 116369 - DNA, 25 bp, SARS Virus
gttaagtttctgatgcagtatgacg

SEQ ID NO: 116370 - DNA, 25 bp, SARS Virus
ttaagtttctgtagcagtatgacga

SEQ ID NO: 116371 - DNA, 25 bp, SARS Virus
taagtttctgttacagtatgacgac

SEQ ID NO: 116372 - DNA, 25 bp, SARS Virus
aagtttctgttgaagtatgacgact

SEQ ID NO: 116373 - DNA, 25 bp, SARS Virus
agtttctgttgcagtatgacgactt

SEQ ID NO: 116374 - DNA, 25 bp, SARS Virus
gtttctgttgcaatatgacgacttg

SEQ ID NO: 116375 - DNA, 25 bp, SARS Virus
tttctgttgcagaatgacgacttgt

SEQ ID NO: 116376 - DNA, 25 bp, SARS Virus
ttctgttgcagtatgacgacttgtt

SEQ ID NO: 116377 - DNA, 25 bp, SARS Virus
tctgttgcagtaagacgacttgttc

SEQ ID NO: 116378 - DNA, 25 bp, SARS Virus
ctgttgcagtataacgacttgttcg

SEQ ID NO: 116379 - DNA, 25 bp, SARS Virus
tgttgcagtatgacgacttgttcgt

SEQ ID NO: 116380 - DNA, 25 bp, SARS Virus
gttgcagtatgaagacttgttcgtg

SEQ ID NO: 116381 - DNA, 25 bp, SARS Virus
ttgcagtatgacaacttgttcgtgt

SEQ ID NO: 116382 - DNA, 25 bp, SARS Virus
tgcagtatgacgacttgttcgtgta

SEQ ID NO: 116383 - DNA, 25 bp, SARS Virus
gcagtatgacgaattgttcgtgtaa

SEQ ID NO: 116384 - DNA, 25 bp, SARS Virus
cagtatgacgacatgttcgtgtaac

SEQ ID NO: 116385 - DNA, 25 bp, SARS Virus
agtatgacgactagttcgtgtaact

SEQ ID NO: 116386 - DNA, 25 bp, SARS Virus
gtatgacgacttattcgtgtaactg

SEQ ID NO: 116387 - DNA, 25 bp, SARS Virus
tatgacgacttgatcgtgtaactgc

SEQ ID NO: 116388 - DNA, 25 bp, SARS Virus
atgacgacttgtacgtgtaactgcg

SEQ ID NO: 116389 - DNA, 25 bp, SARS Virus
tgacgacttgttagtgtaactgcgt

SEQ ID NO: 116390 - DNA, 25 bp, SARS Virus
gacgacttgttcatgtaactgcgta

SEQ ID NO: 116391 - DNA, 25 bp, SARS Virus
acgacttgttcgagtaactgcgtat

SEQ ID NO: 116392 - DNA, 25 bp, SARS Virus
cgacttgttcgtataactgcgtatg

SEQ ID NO: 116393 - DNA, 25 bp, SARS Virus
gacttgttcgtgaaactgcgtatgt

SEQ ID NO: 116394 - DNA, 25 bp, SARS Virus
acttgttcgtgtaactgcgtatgtt

SEQ ID NO: 116395 - DNA, 25 bp, SARS Virus
cttgttcgtgtaactgcgtatgttt

SEQ ID NO: 116396 - DNA, 25 bp, SARS Virus
ttgttcgtgtaaatgcgtatgtttt

SEQ ID NO: 116397 - DNA, 25 bp, SARS Virus
tgttcgtgtaacagcgtatgttttg

SEQ ID NO: 116398 - DNA, 25 bp, SARS Virus
gttcgtgtaactacgtatgttttgt

SEQ ID NO: 116399 - DNA, 25 bp, SARS Virus
ttcgtgtaactgagtatgttttgta

SEQ ID NO: 116400 - DNA, 25 bp, SARS Virus
tcgtgtaactgcatatgttttgtaa

SEQ ID NO: 116401 - DNA, 25 bp, SARS Virus
cgtgtaactgcgaatgttttgtaag

SEQ ID NO: 116402 - DNA, 25 bp, SARS Virus
gtgtaactgcgtatgttttgtaagg

SEQ ID NO: 116403 - DNA, 25 bp, SARS Virus
tgtaactgcgtaagttttgtaaggg

SEQ ID NO: 116404 - DNA, 25 bp, SARS Virus
gtaactgcgtatattttgtaagggt

SEQ ID NO: 116405 - DNA, 25 bp, SARS Virus
taactgcgtatgatttgtaagggtg

SEQ ID NO: 116406 - DNA, 25 bp, SARS Virus
aactgcgtatgtattgtaagggtgg

SEQ ID NO: 116407 - DNA, 25 bp, SARS Virus
actgcgtatgttatgtaagggtggt

SEQ ID NO: 116408 - DNA, 25 bp, SARS Virus
ctgcgtatgtttagtaagggtggtt

SEQ ID NO: 116409 - DNA, 25 bp, SARS Virus
tgcgtatgttttataagggtggttg

SEQ ID NO: 116410 - DNA, 25 bp, SARS Virus
gcgtatgttttgaaagggtggttgt

SEQ ID NO: 116411 - DNA, 25 bp, SARS Virus
cgtatgttttgtaagggtggttgtc

SEQ ID NO: 116412 - DNA, 25 bp, SARS Virus
gtatgttttgtaagggtggttgtct

SEQ ID NO: 116413 - DNA, 25 bp, SARS Virus
tatgttttgtaaaggtggttgtctc

SEQ ID NO: 116414 - DNA, 25 bp, SARS Virus
atgttttgtaagagtggttgtctcg

SEQ ID NO: 116415 - DNA, 25 bp, SARS Virus
tgttttgtaaggatggttgtctcgg

SEQ ID NO: 116416 - DNA, 25 bp, SARS Virus
gttttgtaagggaggttgtctcgga

SEQ ID NO: 116417 - DNA, 25 bp, SARS Virus
ttttgtaagggtagttgtctcggat

SEQ ID NO: 116418 - DNA, 25 bp, SARS Virus
tttgtaagggtgattgtctcggatt

SEQ ID NO: 116419 - DNA, 25 bp, SARS Virus
ttgtaagggtggatgtctcggattt

SEQ ID NO: 116420 - DNA, 25 bp, SARS Virus
tgtaagggtggtagtctcggatttt

SEQ ID NO: 116421 - DNA, 25 bp, SARS Virus
gtaagggtggttatctcggattttt

SEQ ID NO: 116422 - DNA, 25 bp, SARS Virus
taagggtggttgactcggatttttc

SEQ ID NO: 116423 - DNA, 25 bp, SARS Virus
aagggtggttgtatcggatttttcc

SEQ ID NO: 116424 - DNA, 25 bp, SARS Virus
agggtggttgtcacggatttttcct

SEQ ID NO: 116425 - DNA, 25 bp, SARS Virus
gggtggttgtctaggatttttcctg

SEQ ID NO: 116426 - DNA, 25 bp, SARS Virus
ggtggttgtctcagatttttcctgt

SEQ ID NO: 116427 - DNA, 25 bp, SARS Virus
gtggttgtctcgaatttttcctgtt

SEQ ID NO: 116428 - DNA, 25 bp, SARS Virus
tggttgtctcggatttttcctgttt

SEQ ID NO: 116429 - DNA, 25 bp, SARS Virus
ggttgtctcggaattttcctgtttt

SEQ ID NO: 116430 - DNA, 25 bp, SARS Virus
gttgtctcggatatttcctgttttt

SEQ ID NO: 116431 - DNA, 25 bp, SARS Virus
ttgtctcggattattcctgtttttc

SEQ ID NO: 116432 - DNA, 25 bp, SARS Virus
tgtctcggatttatcctgtttttct

SEQ ID NO: 116433 - DNA, 25 bp, SARS Virus
gtctcggattttacctgtttttctt

SEQ ID NO: 116434 - DNA, 25 bp, SARS Virus
tctcggatttttactgtttttcttt

SEQ ID NO: 116435 - DNA, 25 bp, SARS Virus
ctcggatttttcatgtttttctttt

SEQ ID NO: 116436 - DNA, 25 bp, SARS Virus
tcggatttttccagtttttcttttt

SEQ ID NO: 116437 - DNA, 25 bp, SARS Virus
cggatttttcctatttttctttttc

SEQ ID NO: 116438 - DNA, 25 bp, SARS Virus
ggatttttcctgattttctttttct

SEQ ID NO: 116439 - DNA, 25 bp, SARS Virus
gatttttcctgtatttctttttctg

SEQ ID NO: 116440 - DNA, 25 bp, SARS Virus
atttttcctgttattctttttctga

SEQ ID NO: 116441 - DNA, 25 bp, SARS Virus
tttttcctgtttatctttttctgac

SEQ ID NO: 116442 - DNA, 25 bp, SARS Virus
ttttcctgttttactttttctgact

SEQ ID NO: 116443 - DNA, 25 bp, SARS Virus
tttcctgtttttatttttctgacta

SEQ ID NO: 116444 - DNA, 25 bp, SARS Virus
ttcctgtttttcattttctgactac

SEQ ID NO: 116445 - DNA, 25 bp, SARS Virus
tcctgtttttctatttctgactact

SEQ ID NO: 116446 - DNA, 25 bp, SARS Virus
cctgtttttcttattctgactactt

SEQ ID NO: 116447 - DNA, 25 bp, SARS Virus
ctgtttttctttatctgactacttc

SEQ ID NO: 116448 - DNA, 25 bp, SARS Virus
tgtttttcttttactgactacttcg

SEQ ID NO: 116449 - DNA, 25 bp, SARS Virus
gtttttctttttatgactacttcga

SEQ ID NO: 116450 - DNA, 25 bp, SARS Virus
tttttctttttcagactacttcgag

SEQ ID NO: 116451 - DNA, 25 bp, SARS Virus
ttttctttttctaactacttcgagt

SEQ ID NO: 116452 - DNA, 25 bp, SARS Virus
tttctttttctgactacttcgagtc

SEQ ID NO: 116453 - DNA, 25 bp, SARS Virus
ttctttttctgaatacttcgagtcg

SEQ ID NO: 116454 - DNA, 25 bp, SARS Virus
tctttttctgacaacttcgagtcgg

SEQ ID NO: 116455 - DNA, 25 bp, SARS Virus
ctttttctgactacttcgagtcgga

SEQ ID NO: 116456 - DNA, 25 bp, SARS Virus
tttttctgactaattcgagtcggaa

SEQ ID NO: 116457 - DNA, 25 bp, SARS Virus
ttttctgactacatcgagtcggaaa

SEQ ID NO: 116458 - DNA, 25 bp, SARS Virus
tttctgactactacgagtcggaaac

SEQ ID NO: 116459 - DNA, 25 bp, SARS Virus
ttctgactacttagagtcggaaacg

SEQ ID NO: 116460 - DNA, 25 bp, SARS Virus
tctgactacttcaagtcggaaacgg

SEQ ID NO: 116461 - DNA, 25 bp, SARS Virus
ctgactacttcgagtcggaaacggc

SEQ ID NO: 116462 - DNA, 25 bp, SARS Virus
tgactacttcgaatcggaaacggcg

SEQ ID NO: 116463 - DNA, 25 bp, SARS Virus
gactacttcgagacggaaacggcgt

SEQ ID NO: 116464 - DNA, 25 bp, SARS Virus
actacttcgagtaggaaacggcgtc

SEQ ID NO: 116465 - DNA, 25 bp, SARS Virus
ctacttcgagtcagaaacggcgtct

SEQ ID NO: 116466 - DNA, 25 bp, SARS Virus
tacttcgagtcgaaaacggcgtctc

SEQ ID NO: 116467 - DNA, 25 bp, SARS Virus
acttcgagtcggaaacggcgtctct

SEQ ID NO: 116468 - DNA, 25 bp, SARS Virus
cttcgagtcggaaacggcgtctctg

SEQ ID NO: 116469 - DNA, 25 bp, SARS Virus
ttcgagtcggaaacggcgtctctgt

SEQ ID NO: 116470 - DNA, 25 bp, SARS Virus
tcgagtcggaaaaggcgtctctgtt

SEQ ID NO: 116471 - DNA, 25 bp, SARS Virus
cgagtcggaaacagcgtctctgttt

SEQ ID NO: 116472 - DNA, 25 bp, SARS Virus
gagtcggaaacgacgtctctgtttt

SEQ ID NO: 116473 - DNA, 25 bp, SARS Virus
agtcggaaacggagtctctgttttc

SEQ ID NO: 116474 - DNA, 25 bp, SARS Virus
gtcggaaacggcatctctgttttct

SEQ ID NO: 116475 - DNA, 25 bp, SARS Virus
tcggaaacggcgactctgttttctt

SEQ ID NO: 116476 - DNA, 25 bp, SARS Virus
cggaaacggcgtatctgttttcttc

SEQ ID NO: 116477 - DNA, 25 bp, SARS Virus
ggaaacggcgtcactgttttcttcg

SEQ ID NO: 116478 - DNA, 25 bp, SARS Virus
gaaacggcgtctatgttttcttcgt

SEQ ID NO: 116479 - DNA, 25 bp, SARS Virus
aaacggcgtctcagttttcttcgtc

SEQ ID NO: 116480 - DNA, 25 bp, SARS Virus
aacggcgtctctattttcttcgtcg

SEQ ID NO: 116481 - DNA, 25 bp, SARS Virus
acggcgtctctgatttcttcgtcgg

SEQ ID NO: 116482 - DNA, 25 bp, SARS Virus
cggcgtctctgtattcttcgtcggg

SEQ ID NO: 116483 - DNA, 25 bp, SARS Virus
ggcgtctctgttatcttcgtcgggt

SEQ ID NO: 116484 - DNA, 25 bp, SARS Virus
gcgtctctgtttacttcgtcgggtg

SEQ ID NO: 116485 - DNA, 25 bp, SARS Virus
cgtctctgttttattcgtcgggtga

SEQ ID NO: 116486 - DNA, 25 bp, SARS Virus
gtctctgttttcatcgtcgggtgac

SEQ ID NO: 116487 - DNA, 25 bp, SARS Virus
tctctgttttctacgtcgggtgaca

SEQ ID NO: 116488 - DNA, 25 bp, SARS Virus
ctctgttttcttagtcgggtgacac

SEQ ID NO: 116489 - DNA, 25 bp, SARS Virus
tctgttttcttcatcgggtgacact

SEQ ID NO: 116490 - DNA, 25 bp, SARS Virus
ctgttttcttcgacgggtgacactg

SEQ ID NO: 116491 - DNA, 25 bp, SARS Virus
tgttttcttcgtagggtgacactga

SEQ ID NO: 116492 - DNA, 25 bp, SARS Virus
gttttcttcgtcaggtgacactgag

SEQ ID NO: 116493 - DNA, 25 bp, SARS Virus
ttttcttcgtcgagtgacactgaga

SEQ ID NO: 116494 - DNA, 25 bp, SARS Virus
tttcttcgtcggatgacactgagaa

SEQ ID NO: 116495 - DNA, 25 bp, SARS Virus
ttcttcgtcgggagacactgagaag

SEQ ID NO: 116496 - DNA, 25 bp, SARS Virus
tcttcgtcgggtaacactgagaaga

SEQ ID NO: 116497 - DNA, 25 bp, SARS Virus
cttcgtcgggtgacactgagaagaa

SEQ ID NO: 116498 - DNA, 25 bp, SARS Virus
ttcgtcgggtgaaactgagaagaag

SEQ ID NO: 116499 - DNA, 25 bp, SARS Virus
tcgtcgggtgacactgagaagaagg

SEQ ID NO: 116500 - DNA, 25 bp, SARS Virus
cgtcgggtgacaatgagaagaagga

SEQ ID NO: 116501 - DNA, 25 bp, SARS Virus
gtcgggtgacacagagaagaaggac

SEQ ID NO: 116502 - DNA, 25 bp, SARS Virus
tcgggtgacactaagaagaaggacg

SEQ ID NO: 116503 - DNA, 25 bp, SARS Virus
cgggtgacactgagaagaaggacgc

SEQ ID NO: 116504 - DNA, 25 bp, SARS Virus
gggtgacactgaaaagaaggacgcc

SEQ ID NO: 116505 - DNA, 25 bp, SARS Virus
ggtgacactgagaagaaggacgccg

SEQ ID NO: 116506 - DNA, 25 bp, SARS Virus
gtgacactgagaagaaggacgccga

SEQ ID NO: 116507 - DNA, 25 bp, SARS Virus
tgacactgagaaaaaggacgccgac

SEQ ID NO: 116508 - DNA, 25 bp, SARS Virus
gacactgagaagaaggacgccgact

SEQ ID NO: 116509 - DNA, 25 bp, SARS Virus
acactgagaagaaggacgccgactg

SEQ ID NO: 116510 - DNA, 25 bp, SARS Virus
cactgagaagaaagacgccgactgt

SEQ ID NO: 116511 - DNA, 25 bp, SARS Virus
actgagaagaagaacgccgactgta

SEQ ID NO: 116512 - DNA, 25 bp, SARS Virus
ctgagaagaaggacgccgactgtac

SEQ ID NO: 116513 - DNA, 25 bp, SARS Virus
tgagaagaaggaagccgactgtacc

SEQ ID NO: 116514 - DNA, 25 bp, SARS Virus
gagaagaaggacaccgactgtacct

SEQ ID NO: 116515 - DNA, 25 bp, SARS Virus
agaagaaggacgacgactgtaccta

SEQ ID NO: 116516 - DNA, 25 bp, SARS Virus
gaagaaggacgcagactgtacctac

SEQ ID NO: 116517 - DNA, 25 bp, SARS Virus
aagaaggacgccaactgtacctact

SEQ ID NO: 116518 - DNA, 25 bp, SARS Virus
agaaggacgccgactgtacctacta

SEQ ID NO: 116519 - DNA, 25 bp, SARS Virus
gaaggacgccgaatgtacctactaa

SEQ ID NO: 116520 - DNA, 25 bp, SARS Virus
aaggacgccgacagtacctactaaa

SEQ ID NO: 116521 - DNA, 25 bp, SARS Virus
aggacgccgactatacctactaaag

SEQ ID NO: 116522 - DNA, 25 bp, SARS Virus
ggacgccgactgaacctactaaaga

SEQ ID NO: 116523 - DNA, 25 bp, SARS Virus
gacgccgactgtacctactaaagag

SEQ ID NO: 116524 - DNA, 25 bp, SARS Virus
acgccgactgtaactactaaagagg

SEQ ID NO: 116525 - DNA, 25 bp, SARS Virus
cgccgactgtacatactaaagaggt

SEQ ID NO: 116526 - DNA, 25 bp, SARS Virus
gccgactgtaccaactaaagaggtc

SEQ ID NO: 116527 - DNA, 25 bp, SARS Virus
ccgactgtacctactaaagaggtct

SEQ ID NO: 116528 - DNA, 25 bp, SARS Virus
cgactgtacctaataaagaggtctg

SEQ ID NO: 116529 - DNA, 25 bp, SARS Virus
gactgtacctacaaaagaggtctgt

SEQ ID NO: 116530 - DNA, 25 bp, SARS Virus
actgtacctactaaagaggtctgtt

SEQ ID NO: 116531 - DNA, 25 bp, SARS Virus
ctgtacctactaaagaggtctgttg

SEQ ID NO: 116532 - DNA, 25 bp, SARS Virus
tgtacctactaaagaggtctgttga

SEQ ID NO: 116533 - DNA, 25 bp, SARS Virus
gtacctactaaaaaggtctgttgaa

SEQ ID NO: 116534 - DNA, 25 bp, SARS Virus
tacctactaaagaggtctgttgaag

SEQ ID NO: 116535 - DNA, 25 bp, SARS Virus
acctactaaagaagtctgttgaagt

SEQ ID NO: 116536 - DNA, 25 bp, SARS Virus
cctactaaagagatctgttgaagtt

SEQ ID NO: 116537 - DNA, 25 bp, SARS Virus
ctactaaagaggactgttgaagttt

SEQ ID NO: 116538 - DNA, 25 bp, SARS Virus
tactaaagaggtatgttgaagtttt

SEQ ID NO: 116539 - DNA, 25 bp, SARS Virus
actaaagaggtcagttgaagtttta

SEQ ID NO: 116540 - DNA, 25 bp, SARS Virus
ctaaagaggtctattgaagttttaa

SEQ ID NO: 116541 - DNA, 25 bp, SARS Virus
taaagaggtctgatgaagttttaag

SEQ ID NO: 116542 - DNA, 25 bp, SARS Virus
aaagaggtctgtagaagttttaagg

SEQ ID NO: 116543 - DNA, 25 bp, SARS Virus
aagaggtctgttaaagttttaaggt

SEQ ID NO: 116544 - DNA, 25 bp, SARS Virus
agaggtctgttgaagttttaaggta

SEQ ID NO: 116545 - DNA, 25 bp, SARS Virus
gaggtctgttgaagttttaaggtac

SEQ ID NO: 116546 - DNA, 25 bp, SARS Virus
aggtctgttgaaattttaaggtact

SEQ ID NO: 116547 - DNA, 25 bp, SARS Virus
ggtctgttgaagatttaaggtactc

SEQ ID NO: 116548 - DNA, 25 bp, SARS Virus
gtctgttgaagtattaaggtactca

SEQ ID NO: 116549 - DNA, 25 bp, SARS Virus
tctgttgaagttataaggtactcac

SEQ ID NO: 116550 - DNA, 25 bp, SARS Virus
ctgttgaagtttaaaggtactcacc

SEQ ID NO: 116551 - DNA, 25 bp, SARS Virus
tgttgaagttttaaggtactcacct

SEQ ID NO: 116552 - DNA, 25 bp, SARS Virus
gttgaagttttaaggtactcacctc

SEQ ID NO: 116553 - DNA, 25 bp, SARS Virus
ttgaagttttaaagtactcacctcg

SEQ ID NO: 116554 - DNA, 25 bp, SARS Virus
tgaagttttaagatactcacctcga

SEQ ID NO: 116555 - DNA, 25 bp, SARS Virus
gaagttttaaggaactcacctcgaa

SEQ ID NO: 116556 - DNA, 25 bp, SARS Virus
aagttttaaggtactcacctcgaag

SEQ ID NO: 116557 - DNA, 25 bp, SARS Virus
agttttaaggtaatcacctcgaaga

SEQ ID NO: 116558 - DNA, 25 bp, SARS Virus
gttttaaggtacacacctcgaagac

SEQ ID NO: 116559 - DNA, 25 bp, SARS Virus
ttttaaggtactaacctcgaagacg

SEQ ID NO: 116560 - DNA, 25 bp, SARS Virus
tttaaggtactcacctcgaagacga

SEQ ID NO: 116561 - DNA, 25 bp, SARS Virus
ttaaggtactcaactcgaagacgac

SEQ ID NO: 116562 - DNA, 25 bp, SARS Virus
taaggtactcacatcgaagacgact

SEQ ID NO: 116563 - DNA, 25 bp, SARS Virus
aaggtactcaccacgaagacgacta

SEQ ID NO: 116564 - DNA, 25 bp, SARS Virus
aggtactcacctagaagacgactaa

SEQ ID NO: 116565 - DNA, 25 bp, SARS Virus
ggtactcacctcaaagacgactaag

SEQ ID NO: 116566 - DNA, 25 bp, SARS Virus
gtactcacctcgaagacgactaagt

SEQ ID NO: 116567 - DNA, 25 bp, SARS Virus
tactcacctcgaagacgactaagtt

SEQ ID NO: 116568 - DNA, 25 bp, SARS Virus
actcacctcgaaaacgactaagttg

SEQ ID NO: 116569 - DNA, 25 bp, SARS Virus
ctcacctcgaagacgactaagttga

SEQ ID NO: 116570 - DNA, 25 bp, SARS Virus
tcacctcgaagaagactaagttgag

SEQ ID NO: 116571 - DNA, 25 bp, SARS Virus
cacctcgaagacaactaagttgagt

SEQ ID NO: 116572 - DNA, 25 bp, SARS Virus
acctcgaagacgactaagttgagtc

SEQ ID NO: 116573 - DNA, 25 bp, SARS Virus
cctcgaagacgaataagttgagtcc

SEQ ID NO: 116574 - DNA, 25 bp, SARS Virus
ctcgaagacgacaaagttgagtccg

SEQ ID NO: 116575 - DNA, 25 bp, SARS Virus
tcgaagacgactaagttgagtccgt

SEQ ID NO: 116576 - DNA, 25 bp, SARS Virus
cgaagacgactaagttgagtccgta

SEQ ID NO: 116577 - DNA, 25 bp, SARS Virus
gaagacgactaaattgagtccgtat

SEQ ID NO: 116578 - DNA, 25 bp, SARS Virus
aagacgactaagatgagtccgtatt

SEQ ID NO: 116579 - DNA, 25 bp, SARS Virus
agacgactaagtagagtccgtattt

SEQ ID NO: 116580 - DNA, 25 bp, SARS Virus
gacgactaagttaagtccgtatttg

SEQ ID NO: 116581 - DNA, 25 bp, SARS Virus
acgactaagttgagtccgtatttgt

SEQ ID NO: 116582 - DNA, 25 bp, SARS Virus
cgactaagttgaatccgtatttgtg

SEQ ID NO: 116583 - DNA, 25 bp, SARS Virus
gactaagttgagaccgtatttgtga

SEQ ID NO: 116584 - DNA, 25 bp, SARS Virus
actaagttgagtacgtatttgtgag

SEQ ID NO: 116585 - DNA, 25 bp, SARS Virus
ctaagttgagtcagtatttgtgagt

SEQ ID NO: 116586 - DNA, 25 bp, SARS Virus
taagttgagtccatatttgtgagta

SEQ ID NO: 116587 - DNA, 25 bp, SARS Virus
aagttgagtccgaatttgtgagtac

SEQ ID NO: 116588 - DNA, 25 bp, SARS Virus
agttgagtccgtatttgtgagtact

SEQ ID NO: 116589 - DNA, 25 bp, SARS Virus
gttgagtccgtaattgtgagtacta

SEQ ID NO: 116590 - DNA, 25 bp, SARS Virus
ttgagtccgtatatgtgagtactac

SEQ ID NO: 116591 - DNA, 25 bp, SARS Virus
tgagtccgtattagtgagtactact

SEQ ID NO: 116592 - DNA, 25 bp, SARS Virus
gagtccgtatttatgagtactactg

SEQ ID NO: 116593 - DNA, 25 bp, SARS Virus
agtccgtatttgagagtactactgg

SEQ ID NO: 116594 - DNA, 25 bp, SARS Virus
gtccgtatttgtaagtactactggt

SEQ ID NO: 116595 - DNA, 25 bp, SARS Virus
tccgtatttgtgagtactactggtg

SEQ ID NO: 116596 - DNA, 25 bp, SARS Virus
ccgtatttgtgaatactactggtgt

SEQ ID NO: 116597 - DNA, 25 bp, SARS Virus
cgtatttgtgagaactactggtgtg

SEQ ID NO: 116598 - DNA, 25 bp, SARS Virus
gtatttgtgagtactactggtgtgt

SEQ ID NO: 116599 - DNA, 25 bp, SARS Virus
tatttgtgagtaatactggtgtgtt

SEQ ID NO: 116600 - DNA, 25 bp, SARS Virus
atttgtgagtacaactggtgtgttc

SEQ ID NO: 116601 - DNA, 25 bp, SARS Virus
tttgtgagtactactggtgtgttcc

SEQ ID NO: 116602 - DNA, 25 bp, SARS Virus
ttgtgagtactaatggtgtgttccg

SEQ ID NO: 116603 - DNA, 25 bp, SARS Virus
tgtgagtactacaggtgtgttccgt

SEQ ID NO: 116604 - DNA, 25 bp, SARS Virus
gtgagtactactagtgtgttccgtc

SEQ ID NO: 116605 - DNA, 25 bp, SARS Virus
tgagtactactgatgtgttccgtct

SEQ ID NO: 116606 - DNA, 25 bp, SARS Virus
gagtactactggagtgttccgtcta

SEQ ID NO: 116607 - DNA, 25 bp, SARS Virus
agtactactggtatgttccgtctac

SEQ ID NO: 116608 - DNA, 25 bp, SARS Virus
gtactactggtgagttccgtctacc

SEQ ID NO: 116609 - DNA, 25 bp, SARS Virus
tactactggtgtattccgtctaccc

SEQ ID NO: 116610 - DNA, 25 bp, SARS Virus
actactggtgtgatccgtctacccg

SEQ ID NO: 116611 - DNA, 25 bp, SARS Virus
ctactggtgtgtaccgtctacccga

SEQ ID NO: 116612 - DNA, 25 bp, SARS Virus
tactggtgtgttacgtctacccgat

SEQ ID NO: 116613 - DNA, 25 bp, SARS Virus
actggtgtgttcagtctacccgata

SEQ ID NO: 116614 - DNA, 25 bp, SARS Virus
ctggtgtgttccatctacccgatac

SEQ ID NO: 116615 - DNA, 25 bp, SARS Virus
tggtgtgttccgactacccgataca

SEQ ID NO: 116616 - DNA, 25 bp, SARS Virus
ggtgtgttccgtatacccgatacat

SEQ ID NO: 116617 - DNA, 25 bp, SARS Virus
gtgtgttccgtcaacccgatacatt

SEQ ID NO: 116618 - DNA, 25 bp, SARS Virus
tgtgttccgtctacccgatacattt

SEQ ID NO: 116619 - DNA, 25 bp, SARS Virus
gtgttccgtctaaccgatacatttg

SEQ ID NO: 116620 - DNA, 25 bp, SARS Virus
tgttccgtctacacgatacatttgc

SEQ ID NO: 116621 - DNA, 25 bp, SARS Virus
gttccgtctaccagatacatttgca

SEQ ID NO: 116622 - DNA, 25 bp, SARS Virus
ttccgtctacccaatacatttgcaa

SEQ ID NO: 116623 - DNA, 25 bp, SARS Virus
tccgtctacccgatacatttgcaaa

SEQ ID NO: 116624 - DNA, 25 bp, SARS Virus
ccgtctacccgaaacatttgcaaaa

SEQ ID NO: 116625 - DNA, 25 bp, SARS Virus
cgtctacccgatacatttgcaaaag

SEQ ID NO: 116626 - DNA, 25 bp, SARS Virus
gtctacccgataaatttgcaaaagc

SEQ ID NO: 116627 - DNA, 25 bp, SARS Virus
tctacccgatacatttgcaaaagcg

SEQ ID NO: 116628 - DNA, 25 bp, SARS Virus
ctacccgatacaattgcaaaagcgt

SEQ ID NO: 116629 - DNA, 25 bp, SARS Virus
tacccgatacatatgcaaaagcgtt

SEQ ID NO: 116630 - DNA, 25 bp, SARS Virus
acccgatacattagcaaaagcgtta

SEQ ID NO: 116631 - DNA, 25 bp, SARS Virus
cccgatacatttacaaaagcgttaa

SEQ ID NO: 116632 - DNA, 25 bp, SARS Virus
ccgatacatttgaaaaagcgttaag

SEQ ID NO: 116633 - DNA, 25 bp, SARS Virus
cgatacatttgcaaaagcgttaagg

SEQ ID NO: 116634 - DNA, 25 bp, SARS Virus
gatacatttgcaaaagcgttaaggc

SEQ ID NO: 116635 - DNA, 25 bp, SARS Virus
atacatttgcaaaagcgttaaggca

SEQ ID NO: 116636 - DNA, 25 bp, SARS Virus
tacatttgcaaaagcgttaaggcaa

SEQ ID NO: 116637 - DNA, 25 bp, SARS Virus
acatttgcaaaaacgttaaggcaaa

SEQ ID NO: 116638 - DNA, 25 bp, SARS Virus
catttgcaaaagagttaaggcaaat

SEQ ID NO: 116639 - DNA, 25 bp, SARS Virus
atttgcaaaagcattaaggcaaatg

SEQ ID NO: 116640 - DNA, 25 bp, SARS Virus
tttgcaaaagcgataaggcaaatgc

SEQ ID NO: 116641 - DNA, 25 bp, SARS Virus
ttgcaaaagcgtaaaggcaaatgct

SEQ ID NO: 116642 - DNA, 25 bp, SARS Virus
tgcaaaagcgttaaggcaaatgcta

SEQ ID NO: 116643 - DNA, 25 bp, SARS Virus
gcaaaagcgttaaggcaaatgctat

SEQ ID NO: 116644 - DNA, 25 bp, SARS Virus
caaaagcgttaaagcaaatgctatg

SEQ ID NO: 116645 - DNA, 25 bp, SARS Virus
aaaagcgttaagacaaatgctatgt

SEQ ID NO: 116646 - DNA, 25 bp, SARS Virus
aaagcgttaaggaaaatgctatgta

SEQ ID NO: 116647 - DNA, 25 bp, SARS Virus
aagcgttaaggcaaatgctatgtat

SEQ ID NO: 116648 - DNA, 25 bp, SARS Virus
agcgttaaggcaaatgctatgtatc

SEQ ID NO: 116649 - DNA, 25 bp, SARS Virus
gcgttaaggcaaatgctatgtatca

SEQ ID NO: 116650 - DNA, 25 bp, SARS Virus
cgttaaggcaaaagctatgtatcag

SEQ ID NO: 116651 - DNA, 25 bp, SARS Virus
gttaaggcaaatactatgtatcaga

SEQ ID NO: 116652 - DNA, 25 bp, SARS Virus
ttaaggcaaatgatatgtatcagat

SEQ ID NO: 116653 - DNA, 25 bp, SARS Virus
taaggcaaatgcaatgtatcagatg

SEQ ID NO: 116654 - DNA, 25 bp, SARS Virus
aaggcaaatgctatgtatcagatga

SEQ ID NO: 116655 - DNA, 25 bp, SARS Virus
aggcaaatgctaagtatcagatgag

SEQ ID NO: 116656 - DNA, 25 bp, SARS Virus
ggcaaatgctatatatcagatgaga

SEQ ID NO: 116657 - DNA, 25 bp, SARS Virus
gcaaatgctatgaatcagatgagaa

SEQ ID NO: 116658 - DNA, 25 bp, SARS Virus
caaatgctatgtatcagatgagaac

SEQ ID NO: 116659 - DNA, 25 bp, SARS Virus
aaatgctatgtaacagatgagaaca

SEQ ID NO: 116660 - DNA, 25 bp, SARS Virus
aatgctatgtataagatgagaacac

SEQ ID NO: 116661 - DNA, 25 bp, SARS Virus
atgctatgtatcagatgagaacacg

SEQ ID NO: 116662 - DNA, 25 bp, SARS Virus
tgctatgtatcaaatgagaacacgt

SEQ ID NO: 116663 - DNA, 25 bp, SARS Virus
gctatgtatcagatgagaacacgtc

SEQ ID NO: 116664 - DNA, 25 bp, SARS Virus
ctatgtatcagaagagaacacgtct

SEQ ID NO: 116665 - DNA, 25 bp, SARS Virus
tatgtatcagataagaacacgtctt

SEQ ID NO: 116666 - DNA, 25 bp, SARS Virus
atgtatcagatgagaacacgtctta

SEQ ID NO: 116667 - DNA, 25 bp, SARS Virus
tgtatcagatgaaaacacgtcttac

SEQ ID NO: 116668 - DNA, 25 bp, SARS Virus
gtatcagatgagaacacgtcttact

SEQ ID NO: 116669 - DNA, 25 bp, SARS Virus
tatcagatgagaacacgtcttactt

SEQ ID NO: 116670 - DNA, 25 bp, SARS Virus
atcagatgagaaaacgtcttactta

SEQ ID NO: 116671 - DNA, 25 bp, SARS Virus
tcagatgagaacacgtcttacttaa

SEQ ID NO: 116672 - DNA, 25 bp, SARS Virus
cagatgagaacaagtcttacttaag

SEQ ID NO: 116673 - DNA, 25 bp, SARS Virus
agatgagaacacatcttacttaaga

SEQ ID NO: 116674 - DNA, 25 bp, SARS Virus
gatgagaacacgacttacttaagag

SEQ ID NO: 116675 - DNA, 25 bp, SARS Virus
atgagaacacgtattacttaagagc

SEQ ID NO: 116676 - DNA, 25 bp, SARS Virus
tgagaacacgtcatacttaagagca

SEQ ID NO: 116677 - DNA, 25 bp, SARS Virus
gagaacacgtctaacttaagagcat

SEQ ID NO: 116678 - DNA, 25 bp, SARS Virus
agaacacgtcttacttaagagcatt

SEQ ID NO: 116679 - DNA, 25 bp, SARS Virus
gaacacgtcttaattaagagcattg

SEQ ID NO: 116680 - DNA, 25 bp, SARS Virus
aacacgtcttacataagagcattga

SEQ ID NO: 116681 - DNA, 25 bp, SARS Virus
acacgtcttactaaagagcattgat

SEQ ID NO: 116682 - DNA, 25 bp, SARS Virus
cacgtcttacttaagagcattgatt

SEQ ID NO: 116683 - DNA, 25 bp, SARS Virus
acgtcttacttaagagcattgattt

SEQ ID NO: 116684 - DNA, 25 bp, SARS Virus
cgtcttacttaaaagcattgatttg

SEQ ID NO: 116685 - DNA, 25 bp, SARS Virus
gtcttacttaagagcattgatttgt

SEQ ID NO: 116686 - DNA, 25 bp, SARS Virus
tcttacttaagaacattgatttgtc

SEQ ID NO: 116687 - DNA, 25 bp, SARS Virus
cttacttaagagaattgatttgtcg

SEQ ID NO: 116688 - DNA, 25 bp, SARS Virus
ttacttaagagcattgatttgtcgt

SEQ ID NO: 116689 - DNA, 25 bp, SARS Virus
tacttaagagcaatgatttgtcgtg

SEQ ID NO: 116690 - DNA, 25 bp, SARS Virus
acttaagagcatagatttgtcgtgt

SEQ ID NO: 116691 - DNA, 25 bp, SARS Virus
cttaagagcattaatttgtcgtgtt

SEQ ID NO: 116692 - DNA, 25 bp, SARS Virus
ttaagagcattgatttgtcgtgttc

SEQ ID NO: 116693 - DNA, 25 bp, SARS Virus
taagagcattgaattgtcgtgttca

SEQ ID NO: 116694 - DNA, 25 bp, SARS Virus
aagagcattgatatgtcgtgttcat

SEQ ID NO: 116695 - DNA, 25 bp, SARS Virus
agagcattgattagtcgtgttcatc

SEQ ID NO: 116696 - DNA, 25 bp, SARS Virus
gagcattgatttatcgtgttcatcc

SEQ ID NO: 116697 - DNA, 25 bp, SARS Virus
agcattgatttgacgtgttcatcca

SEQ ID NO: 116698 - DNA, 25 bp, SARS Virus
gcattgatttgtagtgttcatccaa

SEQ ID NO: 116699 - DNA, 25 bp, SARS Virus
cattgatttgtcatgttcatccaaa

SEQ ID NO: 116700 - DNA, 25 bp, SARS Virus
attgatttgtcgagttcatccaaat

SEQ ID NO: 116701 - DNA, 25 bp, SARS Virus
ttgatttgtcgtattcatccaaatc

SEQ ID NO: 116702 - DNA, 25 bp, SARS Virus
tgatttgtcgtgatcatccaaatca

SEQ ID NO: 116703 - DNA, 25 bp, SARS Virus
gatttgtcgtgtacatccaaatcaa

SEQ ID NO: 116704 - DNA, 25 bp, SARS Virus
atttgtcgtgttaatccaaatcaat

SEQ ID NO: 116705 - DNA, 25 bp, SARS Virus
tttgtcgtgttcatccaaatcaatt

SEQ ID NO: 116706 - DNA, 25 bp, SARS Virus
ttgtcgtgttcaaccaaatcaattg

SEQ ID NO: 116707 - DNA, 25 bp, SARS Virus
tgtcgtgttcatacaaatcaattga

SEQ ID NO: 116708 - DNA, 25 bp, SARS Virus
gtcgtgttcatcaaaatcaattgaa

SEQ ID NO: 116709 - DNA, 25 bp, SARS Virus
tcgtgttcatccaaatcaattgaaa

SEQ ID NO: 116710 - DNA, 25 bp, SARS Virus
cgtgttcatccaaatcaattgaaat

SEQ ID NO: 116711 - DNA, 25 bp, SARS Virus
gtgttcatccaaatcaattgaaatt

SEQ ID NO: 116712 - DNA, 25 bp, SARS Virus
tgttcatccaaaacaattgaaatta

SEQ ID NO: 116713 - DNA, 25 bp, SARS Virus
gttcatccaaataaattgaaattag

SEQ ID NO: 116714 - DNA, 25 bp, SARS Virus
ttcatccaaatcaattgaaattaga

SEQ ID NO: 116715 - DNA, 25 bp, SARS Virus
tcatccaaatcaattgaaattagag

SEQ ID NO: 116716 - DNA, 25 bp, SARS Virus
catccaaatcaaatgaaattagagt

SEQ ID NO: 116717 - DNA, 25 bp, SARS Virus
atccaaatcaatagaaattagagtg

SEQ ID NO: 116718 - DNA, 25 bp, SARS Virus
tccaaatcaattaaaattagagtgt

SEQ ID NO: 116719 - DNA, 25 bp, SARS Virus
ccaaatcaattgaaattagagtgta

SEQ ID NO: 116720 - DNA, 25 bp, SARS Virus
caaatcaattgaaattagagtgtat

SEQ ID NO: 116721 - DNA, 25 bp, SARS Virus
aaatcaattgaaattagagtgtatc

SEQ ID NO: 116722 - DNA, 25 bp, SARS Virus
aatcaattgaaaatagagtgtatcg

SEQ ID NO: 116723 - DNA, 25 bp, SARS Virus
atcaattgaaataagagtgtatcgt

SEQ ID NO: 116724 - DNA, 25 bp, SARS Virus
tcaattgaaattagagtgtatcgtt

SEQ ID NO: 116725 - DNA, 25 bp, SARS Virus
caattgaaattaaagtgtatcgtta

SEQ ID NO: 116726 - DNA, 25 bp, SARS Virus
aattgaaattagagtgtatcgttag

SEQ ID NO: 116727 - DNA, 25 bp, SARS Virus
attgaaattagaatgtatcgttaga

SEQ ID NO: 116728 - DNA, 25 bp, SARS Virus
ttgaaattagagagtatcgttagaa

SEQ ID NO: 116729 - DNA, 25 bp, SARS Virus
tgaaattagagtatatcgttagaaa

SEQ ID NO: 116730 - DNA, 25 bp, SARS Virus
gaaattagagtgaatcgttagaaat

SEQ ID NO: 116731 - DNA, 25 bp, SARS Virus
aaattagagtgtatcgttagaaatt

SEQ ID NO: 116732 - DNA, 25 bp, SARS Virus
aattagagtgtaacgttagaaatta

SEQ ID NO: 116733 - DNA, 25 bp, SARS Virus
attagagtgtatagttagaaattag

SEQ ID NO: 116734 - DNA, 25 bp, SARS Virus
ttagagtgtatcattagaaattagt

SEQ ID NO: 116735 - DNA, 25 bp, SARS Virus
tagagtgtatcgatagaaattagtt

SEQ ID NO: 116736 - DNA, 25 bp, SARS Virus
agagtgtatcgtaagaaattagtta

SEQ ID NO: 116737 - DNA, 25 bp, SARS Virus
gagtgtatcgttagaaattagttac

SEQ ID NO: 116738 - DNA, 25 bp, SARS Virus
agtgtatcgttaaaaattagttaca

SEQ ID NO: 116739 - DNA, 25 bp, SARS Virus
gtgtatcgttagaaattagttacac

SEQ ID NO: 116740 - DNA, 25 bp, SARS Virus
tgtatcgttagaaattagttacaca

SEQ ID NO: 116741 - DNA, 25 bp, SARS Virus
gtatcgttagaaattagttacacat

SEQ ID NO: 116742 - DNA, 25 bp, SARS Virus
tatcgttagaaaatagttacacatt

SEQ ID NO: 116743 - DNA, 25 bp, SARS Virus
atcgttagaaataagttacacattg

SEQ ID NO: 116744 - DNA, 25 bp, SARS Virus
tcgttagaaattagttacacattgt

SEQ ID NO: 116745 - DNA, 25 bp, SARS Virus
cgttagaaattaattacacattgta

SEQ ID NO: 116746 - DNA, 25 bp, SARS Virus
gttagaaattagatacacattgtaa

SEQ ID NO: 116747 - DNA, 25 bp, SARS Virus
ttagaaattagtaacacattgtaat

SEQ ID NO: 116748 - DNA, 25 bp, SARS Virus
tagaaattagttacacattgtaatc

SEQ ID NO: 116749 - DNA, 25 bp, SARS Virus
agaaattagttaaacattgtaatcc

SEQ ID NO: 116750 - DNA, 25 bp, SARS Virus
gaaattagttacacattgtaatccc

SEQ ID NO: 116751 - DNA, 25 bp, SARS Virus
aaattagttacaaattgtaatccct

SEQ ID NO: 116752 - DNA, 25 bp, SARS Virus
aattagttacacattgtaatccctc

SEQ ID NO: 116753 - DNA, 25 bp, SARS Virus
attagttacacaatgtaatccctcc

SEQ ID NO: 116754 - DNA, 25 bp, SARS Virus
ttagttacacatagtaatccctcct

SEQ ID NO: 116755 - DNA, 25 bp, SARS Virus
tagttacacattataatccctcctg

SEQ ID NO: 116756 - DNA, 25 bp, SARS Virus
agttacacattgaaatccctcctga

SEQ ID NO: 116757 - DNA, 25 bp, SARS Virus
gttacacattgtaatccctcctgaa

SEQ ID NO: 116758 - DNA, 25 bp, SARS Virus
ttacacattgtaatccctcctgaac

SEQ ID NO: 116759 - DNA, 25 bp, SARS Virus
tacacattgtaaaccctcctgaact

SEQ ID NO: 116760 - DNA, 25 bp, SARS Virus
acacattgtaatacctcctgaactt

SEQ ID NO: 116761 - DNA, 25 bp, SARS Virus
cgtaagaaacctcacagtgcgtaac

SEQ ID NO: 116762 - DNA, 25 bp, SARS Virus
gtaagaaaccttccagtgcgtaacc

SEQ ID NO: 116763 - DNA, 25 bp, SARS Virus
taagaaaccttacagtgcgtaaccg

SEQ ID NO: 116764 - DNA, 25 bp, SARS Virus
aagaaaccttaccgtgcgtaaccgt

SEQ ID NO: 116765 - DNA, 25 bp, SARS Virus
agaaaccttacactgcgtaaccgta

SEQ ID NO: 116766 - DNA, 25 bp, SARS Virus
gaaaccttacagcgcgtaaccgtac

SEQ ID NO: 116767 - DNA, 25 bp, SARS Virus
aaaccttacagtccgtaaccgtacc

SEQ ID NO: 116768 - DNA, 25 bp, SARS Virus
aaccttacagtgcgtaaccgtacct

SEQ ID NO: 116769 - DNA, 25 bp, SARS Virus
accttacagtgcctaaccgtacctt

SEQ ID NO: 116770 - DNA, 25 bp, SARS Virus
ccttacagtgcgcaaccgtaccttc

SEQ ID NO: 116771 - DNA, 25 bp, SARS Virus
cttacagtgcgtcaccgtaccttca

SEQ ID NO: 116772 - DNA, 25 bp, SARS Virus
ttacagtgcgtacccgtaccttcag

SEQ ID NO: 116773 - DNA, 25 bp, SARS Virus
tacagtgcgtaaccgtaccttcagt

SEQ ID NO: 116774 - DNA, 25 bp, SARS Virus
acagtgcgtaaccgtaccttcagtg

SEQ ID NO: 116775 - DNA, 25 bp, SARS Virus
cagtgcgtaaccctaccttcagtgt

SEQ ID NO: 116776 - DNA, 25 bp, SARS Virus
agtgcgtaaccgcaccttcagtgtg

SEQ ID NO: 116777 - DNA, 25 bp, SARS Virus
gtgcgtaaccgtcccttcagtgtgg

SEQ ID NO: 116778 - DNA, 25 bp, SARS Virus
tgcgtaaccgtaccttcagtgtgga

SEQ ID NO: 116779 - DNA, 25 bp, SARS Virus
gcgtaaccgtaccttcagtgtggaa

SEQ ID NO: 116780 - DNA, 25 bp, SARS Virus
cgtaaccgtaccctcagtgtggaag

SEQ ID NO: 116781 - DNA, 25 bp, SARS Virus
gtaaccgtacctccagtgtggaagc

SEQ ID NO: 116782 - DNA, 25 bp, SARS Virus
taaccgtaccttcagtgtggaagcc

SEQ ID NO: 116783 - DNA, 25 bp, SARS Virus
aaccgtaccttccgtgtggaagccc

SEQ ID NO: 116784 - DNA, 25 bp, SARS Virus
accgtaccttcactgtggaagccct

SEQ ID NO: 116785 - DNA, 25 bp, SARS Virus
ccgtaccttcagcgtggaagccctt

SEQ ID NO: 116786 - DNA, 25 bp, SARS Virus
cgtaccttcagtctggaagcccttg

SEQ ID NO: 116787 - DNA, 25 bp, SARS Virus
gtaccttcagtgcggaagcccttgt

SEQ ID NO: 116788 - DNA, 25 bp, SARS Virus
taccttcagtgtcgaagcccttgta

SEQ ID NO: 116789 - DNA, 25 bp, SARS Virus
accttcagtgtgcaagcccttgtac

SEQ ID NO: 116790 - DNA, 25 bp, SARS Virus
ccttcagtgtggcagcccttgtacc

SEQ ID NO: 116791 - DNA, 25 bp, SARS Virus
cttcagtgtggacgcccttgtaccg

SEQ ID NO: 116792 - DNA, 25 bp, SARS Virus
ttcagtgtggaaccccttgtaccga

SEQ ID NO: 116793 - DNA, 25 bp, SARS Virus
tcagtgtggaagcccttgtaccgac

SEQ ID NO: 116794 - DNA, 25 bp, SARS Virus
cagtgtggaagcccttgtaccgact

SEQ ID NO: 116795 - DNA, 25 bp, SARS Virus
agtgtggaagcccttgtaccgactg

SEQ ID NO: 116796 - DNA, 25 bp, SARS Virus
gtgtggaagcccctgtaccgactga

SEQ ID NO: 116797 - DNA, 25 bp, SARS Virus
tgtggaagccctcgtaccgactgaa

SEQ ID NO: 116798 - DNA, 25 bp, SARS Virus
gtggaagcccttctaccgactgaat

SEQ ID NO: 116799 - DNA, 25 bp, SARS Virus
tggaagcccttgcaccgactgaata

SEQ ID NO: 116800 - DNA, 25 bp, SARS Virus
ggaagcccttgtcccgactgaatag

SEQ ID NO: 116801 - DNA, 25 bp, SARS Virus
gaagcccttgtaccgactgaatagt

SEQ ID NO: 116802 - DNA, 25 bp, SARS Virus
aagcccttgtaccgactgaatagta

SEQ ID NO: 116803 - DNA, 25 bp, SARS Virus
agcccttgtacccactgaatagtac

SEQ ID NO: 116804 - DNA, 25 bp, SARS Virus
gcccttgtaccgcctgaatagtacc

SEQ ID NO: 116805 - DNA, 25 bp, SARS Virus
cccttgtaccgactgaatagtacct

SEQ ID NO: 116806 - DNA, 25 bp, SARS Virus
ccttgtaccgaccgaatagtacctc

SEQ ID NO: 116807 - DNA, 25 bp, SARS Virus
cttgtaccgactcaatagtacctcg

SEQ ID NO: 116808 - DNA, 25 bp, SARS Virus
ttgtaccgactgcatagtacctcgg

SEQ ID NO: 116809 - DNA, 25 bp, SARS Virus
tgtaccgactgactagtacctcggt

SEQ ID NO: 116810 - DNA, 25 bp, SARS Virus
gtaccgactgaacagtacctcggta

SEQ ID NO: 116811 - DNA, 25 bp, SARS Virus
taccgactgaatcgtacctcggtaa

SEQ ID NO: 116812 - DNA, 25 bp, SARS Virus
accgactgaatactacctcggtaat

SEQ ID NO: 116813 - DNA, 25 bp, SARS Virus
ccgactgaatagcacctcggtaatt

SEQ ID NO: 116814 - DNA, 25 bp, SARS Virus
cgactgaatagtccctcggtaattt

SEQ ID NO: 116815 - DNA, 25 bp, SARS Virus
gactgaatagtacctcggtaattta

SEQ ID NO: 116816 - DNA, 25 bp, SARS Virus
actgaatagtacctcggtaatttaa

SEQ ID NO: 116817 - DNA, 25 bp, SARS Virus
ctgaatagtaccccggtaatttaac

SEQ ID NO: 116818 - DNA, 25 bp, SARS Virus
tgaatagtacctcggtaatttaacc

SEQ ID NO: 116819 - DNA, 25 bp, SARS Virus
gaatagtacctccgtaatttaacct

SEQ ID NO: 116820 - DNA, 25 bp, SARS Virus
aatagtacctcgctaatttaaccta

SEQ ID NO: 116821 - DNA, 25 bp, SARS Virus
atagtacctcggcaatttaacctac

SEQ ID NO: 116822 - DNA, 25 bp, SARS Virus
tagtacctcggtcatttaacctact

SEQ ID NO: 116823 - DNA, 25 bp, SARS Virus
agtacctcggtactttaacctactg

SEQ ID NO: 116824 - DNA, 25 bp, SARS Virus
gtacctcggtaacttaacctactgt

SEQ ID NO: 116825 - DNA, 25 bp, SARS Virus
tacctcggtaatctaacctactgtt

SEQ ID NO: 116826 - DNA, 25 bp, SARS Virus
acctcggtaattcaacctactgttt

SEQ ID NO: 116827 - DNA, 25 bp, SARS Virus
cctcggtaatttcacctactgtttc

SEQ ID NO: 116828 - DNA, 25 bp, SARS Virus
ctcggtaatttaccctactgtttct

SEQ ID NO: 116829 - DNA, 25 bp, SARS Virus
tcggtaatttaacctactgtttcta

SEQ ID NO: 116830 - DNA, 25 bp, SARS Virus
cggtaatttaacctactgtttctag

SEQ ID NO: 116831 - DNA, 25 bp, SARS Virus
ggtaatttaacccactgtttctagg

SEQ ID NO: 116832 - DNA, 25 bp, SARS Virus
gtaatttaacctcctgtttctaggt

SEQ ID NO: 116833 - DNA, 25 bp, SARS Virus
taatttaacctactgtttctaggtg

SEQ ID NO: 116834 - DNA, 25 bp, SARS Virus
aatttaacctaccgtttctaggtgt

SEQ ID NO: 116835 - DNA, 25 bp, SARS Virus
atttaacctactctttctaggtgtt

SEQ ID NO: 116836 - DNA, 25 bp, SARS Virus
tttaacctactgcttctaggtgtta

SEQ ID NO: 116837 - DNA, 25 bp, SARS Virus
ttaacctactgtctctaggtgttaa

SEQ ID NO: 116838 - DNA, 25 bp, SARS Virus
taacctactgttcctaggtgttaag

SEQ ID NO: 116839 - DNA, 25 bp, SARS Virus
aacctactgtttctaggtgttaagt

SEQ ID NO: 116840 - DNA, 25 bp, SARS Virus
acctactgtttccaggtgttaagtt

SEQ ID NO: 116841 - DNA, 25 bp, SARS Virus
cctactgtttctcggtgttaagttt

SEQ ID NO: 116842 - DNA, 25 bp, SARS Virus
ctactgtttctacgtgttaagtttc

SEQ ID NO: 116843 - DNA, 25 bp, SARS Virus
tactgtttctagctgttaagtttct

SEQ ID NO: 116844 - DNA, 25 bp, SARS Virus
actgtttctaggcgttaagtttctg

SEQ ID NO: 116845 - DNA, 25 bp, SARS Virus
ctgtttctaggtcttaagtttctgt

SEQ ID NO: 116846 - DNA, 25 bp, SARS Virus
tgtttctaggtgctaagtttctgtt

SEQ ID NO: 116847 - DNA, 25 bp, SARS Virus
gtttctaggtgtcaagtttctgttg

SEQ ID NO: 116848 - DNA, 25 bp, SARS Virus
tttctaggtgttcagtttctgttgc

SEQ ID NO: 116849 - DNA, 25 bp, SARS Virus
ttctaggtgttacgtttctgttgca

SEQ ID NO: 116850 - DNA, 25 bp, SARS Virus
tctaggtgttaactttctgttgcag

SEQ ID NO: 116851 - DNA, 25 bp, SARS Virus
ctaggtgttaagcttctgttgcagt

SEQ ID NO: 116852 - DNA, 25 bp, SARS Virus
taggtgttaagtctctgttgcagta

SEQ ID NO: 116853 - DNA, 25 bp, SARS Virus
aggtgttaagttcctgttgcagtat

SEQ ID NO: 116854 - DNA, 25 bp, SARS Virus
ggtgttaagtttctgttgcagtatg

SEQ ID NO: 116855 - DNA, 25 bp, SARS Virus
gtgttaagtttccgttgcagtatga

SEQ ID NO: 116856 - DNA, 25 bp, SARS Virus
tgttaagtttctcttgcagtatgac

SEQ ID NO: 116857 - DNA, 25 bp, SARS Virus
gttaagtttctgctgcagtatgacg

SEQ ID NO: 116858 - DNA, 25 bp, SARS Virus
ttaagtttctgtcgcagtatgacga

SEQ ID NO: 116859 - DNA, 25 bp, SARS Virus
taagtttctgttccagtatgacgac

SEQ ID NO: 116860 - DNA, 25 bp, SARS Virus
aagtttctgttgcagtatgacgact

SEQ ID NO: 116861 - DNA, 25 bp, SARS Virus
agtttctgttgccgtatgacgactt

SEQ ID NO: 116862 - DNA, 25 bp, SARS Virus
gtttctgttgcactatgacgacttg

SEQ ID NO: 116863 - DNA, 25 bp, SARS Virus
tttctgttgcagcatgacgacttgt

SEQ ID NO: 116864 - DNA, 25 bp, SARS Virus
ttctgttgcagtctgacgacttgtt

SEQ ID NO: 116865 - DNA, 25 bp, SARS Virus
tctgttgcagtacgacgacttgttc

SEQ ID NO: 116866 - DNA, 25 bp, SARS Virus
ctgttgcagtatcacgacttgttcg

SEQ ID NO: 116867 - DNA, 25 bp, SARS Virus
tgttgcagtatgccgacttgttcgt

SEQ ID NO: 116868 - DNA, 25 bp, SARS Virus
gttgcagtatgacgacttgttcgtg

SEQ ID NO: 116869 - DNA, 25 bp, SARS Virus
ttgcagtatgaccacttgttcgtgt

SEQ ID NO: 116870 - DNA, 25 bp, SARS Virus
tgcagtatgacgccttgttcgtgta

SEQ ID NO: 116871 - DNA, 25 bp, SARS Virus
gcagtatgacgacttgttcgtgtaa

SEQ ID NO: 116872 - DNA, 25 bp, SARS Virus
cagtatgacgacctgttcgtgtaac

SEQ ID NO: 116873 - DNA, 25 bp, SARS Virus
agtatgacgactcgttcgtgtaact

SEQ ID NO: 116874 - DNA, 25 bp, SARS Virus
gtatgacgacttcttcgtgtaactg

SEQ ID NO: 116875 - DNA, 25 bp, SARS Virus
tatgacgacttgctcgtgtaactgc

SEQ ID NO: 116876 - DNA, 25 bp, SARS Virus
atgacgacttgtccgtgtaactgcg

SEQ ID NO: 116877 - DNA, 25 bp, SARS Virus
tgacgacttgttcgtgtaactgcgt

SEQ ID NO: 116878 - DNA, 25 bp, SARS Virus
gacgacttgttcctgtaactgcgta

SEQ ID NO: 116879 - DNA, 25 bp, SARS Virus
acgacttgttcgcgtaactgcgtat

SEQ ID NO: 116880 - DNA, 25 bp, SARS Virus
cgacttgttcgtctaactgcgtatg

SEQ ID NO: 116881 - DNA, 25 bp, SARS Virus
gacttgttcgtgcaactgcgtatgt

SEQ ID NO: 116882 - DNA, 25 bp, SARS Virus
acttgttcgtgtcactgcgtatgtt

SEQ ID NO: 116883 - DNA, 25 bp, SARS Virus
cttgttcgtgtacctgcgtatgttt

SEQ ID NO: 116884 - DNA, 25 bp, SARS Virus
ttgttcgtgtaactgcgtatgtttt

SEQ ID NO: 116885 - DNA, 25 bp, SARS Virus
tgttcgtgtaaccgcgtatgttttg

SEQ ID NO: 116886 - DNA, 25 bp, SARS Virus
gttcgtgtaactccgtatgttttgt

SEQ ID NO: 116887 - DNA, 25 bp, SARS Virus
ttcgtgtaactgcgtatgttttgta

SEQ ID NO: 116888 - DNA, 25 bp, SARS Virus
tcgtgtaactgcctatgttttgtaa

SEQ ID NO: 116889 - DNA, 25 bp, SARS Virus
cgtgtaactgcgcatgttttgtaag

SEQ ID NO: 116890 - DNA, 25 bp, SARS Virus
gtgtaactgcgtctgttttgtaagg

SEQ ID NO: 116891 - DNA, 25 bp, SARS Virus
tgtaactgcgtacgttttgtaaggg

SEQ ID NO: 116892 - DNA, 25 bp, SARS Virus
gtaactgcgtatcttttgtaagggt

SEQ ID NO: 116893 - DNA, 25 bp, SARS Virus
taactgcgtatgctttgtaagggtg

SEQ ID NO: 116894 - DNA, 25 bp, SARS Virus
aactgcgtatgtcttgtaagggtgg

SEQ ID NO: 116895 - DNA, 25 bp, SARS Virus
actgcgtatgttctgtaagggtggt

SEQ ID NO: 116896 - DNA, 25 bp, SARS Virus
ctgcgtatgtttcgtaagggtggtt

SEQ ID NO: 116897 - DNA, 25 bp, SARS Virus
tgcgtatgttttctaagggtggttg

SEQ ID NO: 116898 - DNA, 25 bp, SARS Virus
gcgtatgttttgcaagggtggttgt

SEQ ID NO: 116899 - DNA, 25 bp, SARS Virus
cgtatgttttgtcagggtggttgtc

SEQ ID NO: 116900 - DNA, 25 bp, SARS Virus
gtatgttttgtacgggtggttgtct

SEQ ID NO: 116901 - DNA, 25 bp, SARS Virus
tatgttttgtaacggtggttgtctc

SEQ ID NO: 116902 - DNA, 25 bp, SARS Virus
atgttttgtaagcgtggttgtctcg

SEQ ID NO: 116903 - DNA, 25 bp, SARS Virus
tgttttgtaaggctggttgtctcgg

SEQ ID NO: 116904 - DNA, 25 bp, SARS Virus
gttttgtaagggcggttgtctcgga

SEQ ID NO: 116905 - DNA, 25 bp, SARS Virus
ttttgtaagggtcgttgtctcggat

SEQ ID NO: 116906 - DNA, 25 bp, SARS Virus
tttgtaagggtgcttgtctcggatt

SEQ ID NO: 116907 - DNA, 25 bp, SARS Virus
ttgtaagggtggctgtctcggattt

SEQ ID NO: 116908 - DNA, 25 bp, SARS Virus
tgtaagggtggtcgtctcggatttt

SEQ ID NO: 116909 - DNA, 25 bp, SARS Virus
gtaagggtggttctctcggattttt

SEQ ID NO: 116910 - DNA, 25 bp, SARS Virus
taagggtggttgcctcggatttttc

SEQ ID NO: 116911 - DNA, 25 bp, SARS Virus
aagggtggttgtctcggatttttcc

SEQ ID NO: 116912 - DNA, 25 bp, SARS Virus
agggtggttgtcccggatttttcct

SEQ ID NO: 116913 - DNA, 25 bp, SARS Virus
gggtggttgtctcggatttttcctg

SEQ ID NO: 116914 - DNA, 25 bp, SARS Virus
ggtggttgtctccgatttttcctgt

SEQ ID NO: 116915 - DNA, 25 bp, SARS Virus
gtggttgtctcgcatttttcctgtt

SEQ ID NO: 116916 - DNA, 25 bp, SARS Virus
tggttgtctcggctttttcctgttt

SEQ ID NO: 116917 - DNA, 25 bp, SARS Virus
ggttgtctcggacttttcctgtttt

SEQ ID NO: 116918 - DNA, 25 bp, SARS Virus
gttgtctcggatctttcctgttttt

SEQ ID NO: 116919 - DNA, 25 bp, SARS Virus
ttgtctcggattcttcctgtttttc

SEQ ID NO: 116920 - DNA, 25 bp, SARS Virus
tgtctcggatttctcctgtttttct

SEQ ID NO: 116921 - DNA, 25 bp, SARS Virus
gtctcggattttccctgtttttctt

SEQ ID NO: 116922 - DNA, 25 bp, SARS Virus
tctcggatttttcctgtttttcttt

SEQ ID NO: 116923 - DNA, 25 bp, SARS Virus
ctcggatttttcctgtttttctttt

SEQ ID NO: 116924 - DNA, 25 bp, SARS Virus
tcggatttttcccgtttttcttttt

SEQ ID NO: 116925 - DNA, 25 bp, SARS Virus
cggatttttcctctttttctttttc

SEQ ID NO: 116926 - DNA, 25 bp, SARS Virus
ggatttttcctgcttttctttttct

SEQ ID NO: 116927 - DNA, 25 bp, SARS Virus
gatttttcctgtctttctttttctg

SEQ ID NO: 116928 - DNA, 25 bp, SARS Virus
atttttcctgttcttctttttctga

SEQ ID NO: 116929 - DNA, 25 bp, SARS Virus
tttttcctgtttctctttttctgac

SEQ ID NO: 116930 - DNA, 25 bp, SARS Virus
ttttcctgttttcctttttctgact

SEQ ID NO: 116931 - DNA, 25 bp, SARS Virus
tttcctgtttttctttttctgacta

SEQ ID NO: 116932 - DNA, 25 bp, SARS Virus
ttcctgtttttccttttctgactac

SEQ ID NO: 116933 - DNA, 25 bp, SARS Virus
tcctgtttttctctttctgactact

SEQ ID NO: 116934 - DNA, 25 bp, SARS Virus
cctgtttttcttcttctgactactt

SEQ ID NO: 116935 - DNA, 25 bp, SARS Virus
ctgtttttctttctctgactacttc

SEQ ID NO: 116936 - DNA, 25 bp, SARS Virus
tgtttttcttttcctgactacttcg

SEQ ID NO: 116937 - DNA, 25 bp, SARS Virus
gtttttctttttctgactacttcga

SEQ ID NO: 116938 - DNA, 25 bp, SARS Virus
tttttctttttccgactacttcgag

SEQ ID NO: 116939 - DNA, 25 bp, SARS Virus
ttttctttttctcactacttcgagt

SEQ ID NO: 116940 - DNA, 25 bp, SARS Virus
tttctttttctgcctacttcgagtc

SEQ ID NO: 116941 - DNA, 25 bp, SARS Virus
ttctttttctgactacttcgagtcg

SEQ ID NO: 116942 - DNA, 25 bp, SARS Virus
tctttttctgaccacttcgagtcgg

SEQ ID NO: 116943 - DNA, 25 bp, SARS Virus
ctttttctgactccttcgagtcgga

SEQ ID NO: 116944 - DNA, 25 bp, SARS Virus
tttttctgactacttcgagtcggaa

SEQ ID NO: 116945 - DNA, 25 bp, SARS Virus
ttttctgactacctcgagtcggaaa

SEQ ID NO: 116946 - DNA, 25 bp, SARS Virus
tttctgactactccgagtcggaaac

SEQ ID NO: 116947 - DNA, 25 bp, SARS Virus
ttctgactacttcgagtcggaaacg

SEQ ID NO: 116948 - DNA, 25 bp, SARS Virus
tctgactacttccagtcggaaacgg

SEQ ID NO: 116949 - DNA, 25 bp, SARS Virus
ctgactacttcgcgtcggaaacggc

SEQ ID NO: 116950 - DNA, 25 bp, SARS Virus
tgactacttcgactcggaaacggcg

SEQ ID NO: 116951 - DNA, 25 bp, SARS Virus
gactacttcgagccggaaacggcgt

SEQ ID NO: 116952 - DNA, 25 bp, SARS Virus
actacttcgagtcggaaacggcgtc

SEQ ID NO: 116953 - DNA, 25 bp, SARS Virus
ctacttcgagtccgaaacggcgtct

SEQ ID NO: 116954 - DNA, 25 bp, SARS Virus
tacttcgagtcgcaaacggcgtctc

SEQ ID NO: 116955 - DNA, 25 bp, SARS Virus
acttcgagtcggcaacggcgtctct

SEQ ID NO: 116956 - DNA, 25 bp, SARS Virus
cttcgagtcggacacggcgtctctg

SEQ ID NO: 116957 - DNA, 25 bp, SARS Virus
ttcgagtcggaaccggcgtctctgt

SEQ ID NO: 116958 - DNA, 25 bp, SARS Virus
tcgagtcggaaacggcgtctctgtt

SEQ ID NO: 116959 - DNA, 25 bp, SARS Virus
cgagtcggaaaccgcgtctctgttt

SEQ ID NO: 116960 - DNA, 25 bp, SARS Virus
gagtcggaaacgccgtctctgtttt

SEQ ID NO: 116961 - DNA, 25 bp, SARS Virus
agtcggaaacggcgtctctgttttc

SEQ ID NO: 116962 - DNA, 25 bp, SARS Virus
gtcggaaacggcctctctgttttct

SEQ ID NO: 116963 - DNA, 25 bp, SARS Virus
tcggaaacggcgcctctgttttctt

SEQ ID NO: 116964 - DNA, 25 bp, SARS Virus
cggaaacggcgtctctgttttcttc

SEQ ID NO: 116965 - DNA, 25 bp, SARS Virus
ggaaacggcgtccctgttttcttcg

SEQ ID NO: 116966 - DNA, 25 bp, SARS Virus
gaaacggcgtctctgttttcttcgt

SEQ ID NO: 116967 - DNA, 25 bp, SARS Virus
aaacggcgtctccgttttcttcgtc

SEQ ID NO: 116968 - DNA, 25 bp, SARS Virus
aacggcgtctctcttttcttcgtcg

SEQ ID NO: 116969 - DNA, 25 bp, SARS Virus
acggcgtctctgctttcttcgtcgg

SEQ ID NO: 116970 - DNA, 25 bp, SARS Virus
cggcgtctctgtcttcttcgtcggg

SEQ ID NO: 116971 - DNA, 25 bp, SARS Virus
ggcgtctctgttctcttcgtcgggt

SEQ ID NO: 116972 - DNA, 25 bp, SARS Virus
gcgtctctgtttccttcgtcgggtg

SEQ ID NO: 116973 - DNA, 25 bp, SARS Virus
cgtctctgttttcttcgtcgggtga

SEQ ID NO: 116974 - DNA, 25 bp, SARS Virus
gtctctgttttcctcgtcgggtgac

SEQ ID NO: 116975 - DNA, 25 bp, SARS Virus
tctctgttttctccgtcgggtgaca

SEQ ID NO: 116976 - DNA, 25 bp, SARS Virus
ctctgttttcttcgtcgggtgacac

SEQ ID NO: 116977 - DNA, 25 bp, SARS Virus
tctgttttcttcctcgggtgacact

SEQ ID NO: 116978 - DNA, 25 bp, SARS Virus
ctgttttcttcgccgggtgacactg

SEQ ID NO: 116979 - DNA, 25 bp, SARS Virus
tgttttcttcgtcgggtgacactga

SEQ ID NO: 116980 - DNA, 25 bp, SARS Virus
gttttcttcgtccggtgacactgag

SEQ ID NO: 116981 - DNA, 25 bp, SARS Virus
ttttcttcgtcgcgtgacactgaga

SEQ ID NO: 116982 - DNA, 25 bp, SARS Virus
tttcttcgtcggctgacactgagaa

SEQ ID NO: 116983 - DNA, 25 bp, SARS Virus
ttcttcgtcgggcgacactgagaag

SEQ ID NO: 116984 - DNA, 25 bp, SARS Virus
tcttcgtcgggtcacactgagaaga

SEQ ID NO: 116985 - DNA, 25 bp, SARS Virus
cttcgtcgggtgccactgagaagaa

SEQ ID NO: 116986 - DNA, 25 bp, SARS Virus
ttcgtcgggtgacactgagaagaag

SEQ ID NO: 116987 - DNA, 25 bp, SARS Virus
tcgtcgggtgaccctgagaagaagg

SEQ ID NO: 116988 - DNA, 25 bp, SARS Virus
cgtcgggtgacactgagaagaagga

SEQ ID NO: 116989 - DNA, 25 bp, SARS Virus
gtcgggtgacaccgagaagaaggac

SEQ ID NO: 116990 - DNA, 25 bp, SARS Virus
tcgggtgacactcagaagaaggacg

SEQ ID NO: 116991 - DNA, 25 bp, SARS Virus
cgggtgacactgcgaagaaggacgc

SEQ ID NO: 116992 - DNA, 25 bp, SARS Virus
gggtgacactgacaagaaggacgcc

SEQ ID NO: 116993 - DNA, 25 bp, SARS Virus
ggtgacactgagcagaaggacgccg

SEQ ID NO: 116994 - DNA, 25 bp, SARS Virus
gtgacactgagacgaaggacgccga

SEQ ID NO: 116995 - DNA, 25 bp, SARS Virus
tgacactgagaacaaggacgccgac

SEQ ID NO: 116996 - DNA, 25 bp, SARS Virus
gacactgagaagcaggacgccgact

SEQ ID NO: 116997 - DNA, 25 bp, SARS Virus
acactgagaagacggacgccgactg

SEQ ID NO: 116998 - DNA, 25 bp, SARS Virus
cactgagaagaacgacgccgactgt

SEQ ID NO: 116999 - DNA, 25 bp, SARS Virus
actgagaagaagcacgccgactgta

SEQ ID NO: 117000 - DNA, 25 bp, SARS Virus
ctgagaagaaggccgccgactgtac

SEQ ID NO: 117001 - DNA, 25 bp, SARS Virus
tgagaagaaggacgccgactgtacc

SEQ ID NO: 117002 - DNA, 25 bp, SARS Virus
gagaagaaggaccccgactgtacct

SEQ ID NO: 117003 - DNA, 25 bp, SARS Virus
agaagaaggacgccgactgtaccta

SEQ ID NO: 117004 - DNA, 25 bp, SARS Virus
gaagaaggacgccgactgtacctac

SEQ ID NO: 117005 - DNA, 25 bp, SARS Virus
aagaaggacgcccactgtacctact

SEQ ID NO: 117006 - DNA, 25 bp, SARS Virus
agaaggacgccgcctgtacctacta

SEQ ID NO: 117007 - DNA, 25 bp, SARS Virus
gaaggacgccgactgtacctactaa

SEQ ID NO: 117008 - DNA, 25 bp, SARS Virus
aaggacgccgaccgtacctactaaa

SEQ ID NO: 117009 - DNA, 25 bp, SARS Virus
aggacgccgactctacctactaaag

SEQ ID NO: 117010 - DNA, 25 bp, SARS Virus
ggacgccgactgcacctactaaaga

SEQ ID NO: 117011 - DNA, 25 bp, SARS Virus
gacgccgactgtccctactaaagag

SEQ ID NO: 117012 - DNA, 25 bp, SARS Virus
acgccgactgtacctactaaagagg

SEQ ID NO: 117013 - DNA, 25 bp, SARS Virus
cgccgactgtacctactaaagaggt

SEQ ID NO: 117014 - DNA, 25 bp, SARS Virus
gccgactgtacccactaaagaggtc

SEQ ID NO: 117015 - DNA, 25 bp, SARS Virus
ccgactgtacctcctaaagaggtct

SEQ ID NO: 117016 - DNA, 25 bp, SARS Virus
cgactgtacctactaaagaggtctg

SEQ ID NO: 117017 - DNA, 25 bp, SARS Virus
gactgtacctaccaaagaggtctgt

SEQ ID NO: 117018 - DNA, 25 bp, SARS Virus
actgtacctactcaagaggtctgtt

SEQ ID NO: 117019 - DNA, 25 bp, SARS Virus
ctgtacctactacagaggtctgttg

SEQ ID NO: 117020 - DNA, 25 bp, SARS Virus
tgtacctactaacgaggtctgttga

SEQ ID NO: 117021 - DNA, 25 bp, SARS Virus
gtacctactaaacaggtctgttgaa

SEQ ID NO: 117022 - DNA, 25 bp, SARS Virus
tacctactaaagcggtctgttgaag

SEQ ID NO: 117023 - DNA, 25 bp, SARS Virus
acctactaaagacgtctgttgaagt

SEQ ID NO: 117024 - DNA, 25 bp, SARS Virus
cctactaaagagctctgttgaagtt

SEQ ID NO: 117025 - DNA, 25 bp, SARS Virus
ctactaaagaggcctgttgaagttt

SEQ ID NO: 117026 - DNA, 25 bp, SARS Virus
tactaaagaggtctgttgaagtttt

SEQ ID NO: 117027 - DNA, 25 bp, SARS Virus
actaaagaggtccgttgaagtttta

SEQ ID NO: 117028 - DNA, 25 bp, SARS Virus
ctaaagaggtctcttgaagttttaa

SEQ ID NO: 117029 - DNA, 25 bp, SARS Virus
taaagaggtctgctgaagttttaag

SEQ ID NO: 117030 - DNA, 25 bp, SARS Virus
aaagaggtctgtcgaagttttaagg

SEQ ID NO: 117031 - DNA, 25 bp, SARS Virus
aagaggtctgttcaagttttaaggt

SEQ ID NO: 117032 - DNA, 25 bp, SARS Virus
agaggtctgttgcagttttaaggta

SEQ ID NO: 117033 - DNA, 25 bp, SARS Virus
gaggtctgttgacgttttaaggtac

SEQ ID NO: 117034 - DNA, 25 bp, SARS Virus
aggtctgttgaacttttaaggtact

SEQ ID NO: 117035 - DNA, 25 bp, SARS Virus
ggtctgttgaagctttaaggtactc

SEQ ID NO: 117036 - DNA, 25 bp, SARS Virus
gtctgttgaagtcttaaggtactca

SEQ ID NO: 117037 - DNA, 25 bp, SARS Virus
tctgttgaagttctaaggtactcac

SEQ ID NO: 117038 - DNA, 25 bp, SARS Virus
ctgttgaagtttcaaggtactcacc

SEQ ID NO: 117039 - DNA, 25 bp, SARS Virus
tgttgaagttttcaggtactcacct

SEQ ID NO: 117040 - DNA, 25 bp, SARS Virus
gttgaagttttacggtactcacctc

SEQ ID NO: 117041 - DNA, 25 bp, SARS Virus
ttgaagttttaacgtactcacctcg

SEQ ID NO: 117042 - DNA, 25 bp, SARS Virus
tgaagttttaagctactcacctcga

SEQ ID NO: 117043 - DNA, 25 bp, SARS Virus
gaagttttaaggcactcacctcgaa

SEQ ID NO: 117044 - DNA, 25 bp, SARS Virus
aagttttaaggtcctcacctcgaag

SEQ ID NO: 117045 - DNA, 25 bp, SARS Virus
agttttaaggtactcacctcgaaga

SEQ ID NO: 117046 - DNA, 25 bp, SARS Virus
gttttaaggtacccacctcgaagac

SEQ ID NO: 117047 - DNA, 25 bp, SARS Virus
ttttaaggtactcacctcgaagacg

SEQ ID NO: 117048 - DNA, 25 bp, SARS Virus
tttaaggtactcccctcgaagacga

SEQ ID NO: 117049 - DNA, 25 bp, SARS Virus
ttaaggtactcacctcgaagacgac

SEQ ID NO: 117050 - DNA, 25 bp, SARS Virus
taaggtactcacctcgaagacgact

SEQ ID NO: 117051 - DNA, 25 bp, SARS Virus
aaggtactcaccccgaagacgacta

SEQ ID NO: 117052 - DNA, 25 bp, SARS Virus
aggtactcacctcgaagacgactaa

SEQ ID NO: 117053 - DNA, 25 bp, SARS Virus
ggtactcacctccaagacgactaag

SEQ ID NO: 117054 - DNA, 25 bp, SARS Virus
gtactcacctcgcagacgactaagt

SEQ ID NO: 117055 - DNA, 25 bp, SARS Virus
tactcacctcgacgacgactaagtt

SEQ ID NO: 117056 - DNA, 25 bp, SARS Virus
actcacctcgaacacgactaagttg

SEQ ID NO: 117057 - DNA, 25 bp, SARS Virus
ctcacctcgaagccgactaagttga

SEQ ID NO: 117058 - DNA, 25 bp, SARS Virus
tcacctcgaagacgactaagttgag

SEQ ID NO: 117059 - DNA, 25 bp, SARS Virus
cacctcgaagaccactaagttgagt

SEQ ID NO: 117060 - DNA, 25 bp, SARS Virus
acctcgaagacgcctaagttgagtc

SEQ ID NO: 117061 - DNA, 25 bp, SARS Virus
cctcgaagacgactaagttgagtcc

SEQ ID NO: 117062 - DNA, 25 bp, SARS Virus
ctcgaagacgaccaagttgagtccg

SEQ ID NO: 117063 - DNA, 25 bp, SARS Virus
tcgaagacgactcagttgagtccgt

SEQ ID NO: 117064 - DNA, 25 bp, SARS Virus
cgaagacgactacgttgagtccgta

SEQ ID NO: 117065 - DNA, 25 bp, SARS Virus
gaagacgactaacttgagtccgtat

SEQ ID NO: 117066 - DNA, 25 bp, SARS Virus
aagacgactaagctgagtccgtatt

SEQ ID NO: 117067 - DNA, 25 bp, SARS Virus
agacgactaagtcgagtccgtattt

SEQ ID NO: 117068 - DNA, 25 bp, SARS Virus
gacgactaagttcagtccgtatttg

SEQ ID NO: 117069 - DNA, 25 bp, SARS Virus
acgactaagttgcgtccgtatttgt

SEQ ID NO: 117070 - DNA, 25 bp, SARS Virus
cgactaagttgactccgtatttgtg

SEQ ID NO: 117071 - DNA, 25 bp, SARS Virus
gactaagttgagcccgtatttgtga

SEQ ID NO: 117072 - DNA, 25 bp, SARS Virus
actaagttgagtccgtatttgtgag

SEQ ID NO: 117073 - DNA, 25 bp, SARS Virus
ctaagttgagtccgtatttgtgagt

SEQ ID NO: 117074 - DNA, 25 bp, SARS Virus
taagttgagtccctatttgtgagta

SEQ ID NO: 117075 - DNA, 25 bp, SARS Virus
aagttgagtccgcatttgtgagtac

SEQ ID NO: 117076 - DNA, 25 bp, SARS Virus
agttgagtccgtctttgtgagtact

SEQ ID NO: 117077 - DNA, 25 bp, SARS Virus
gttgagtccgtacttgtgagtacta

SEQ ID NO: 117078 - DNA, 25 bp, SARS Virus
ttgagtccgtatctgtgagtactac

SEQ ID NO: 117079 - DNA, 25 bp, SARS Virus
tgagtccgtattcgtgagtactact

SEQ ID NO: 117080 - DNA, 25 bp, SARS Virus
gagtccgtatttctgagtactactg

SEQ ID NO: 117081 - DNA, 25 bp, SARS Virus
agtccgtatttgcgagtactactgg

SEQ ID NO: 117082 - DNA, 25 bp, SARS Virus
gtccgtatttgtcagtactactggt

SEQ ID NO: 117083 - DNA, 25 bp, SARS Virus
tccgtatttgtgcgtactactggtg

SEQ ID NO: 117084 - DNA, 25 bp, SARS Virus
ccgtatttgtgactactactggtgt

SEQ ID NO: 117085 - DNA, 25 bp, SARS Virus
cgtatttgtgagcactactggtgtg

SEQ ID NO: 117086 - DNA, 25 bp, SARS Virus
gtatttgtgagtcctactggtgtgt

SEQ ID NO: 117087 - DNA, 25 bp, SARS Virus
tatttgtgagtactactggtgtgtt

SEQ ID NO: 117088 - DNA, 25 bp, SARS Virus
atttgtgagtaccactggtgtgttc

SEQ ID NO: 117089 - DNA, 25 bp, SARS Virus
tttgtgagtactcctggtgtgttcc

SEQ ID NO: 117090 - DNA, 25 bp, SARS Virus
ttgtgagtactactggtgtgttccg

SEQ ID NO: 117091 - DNA, 25 bp, SARS Virus
tgtgagtactaccggtgtgttccgt

SEQ ID NO: 117092 - DNA, 25 bp, SARS Virus
gtgagtactactcgtgtgttccgtc

SEQ ID NO: 117093 - DNA, 25 bp, SARS Virus
tgagtactactgctgtgttccgtct

SEQ ID NO: 117094 - DNA, 25 bp, SARS Virus
gagtactactggcgtgttccgtcta

SEQ ID NO: 117095 - DNA, 25 bp, SARS Virus
agtactactggtctgttccgtctac

SEQ ID NO: 117096 - DNA, 25 bp, SARS Virus
gtactactggtgcgttccgtctacc

SEQ ID NO: 117097 - DNA, 25 bp, SARS Virus
tactactggtgtcttccgtctaccc

SEQ ID NO: 117098 - DNA, 25 bp, SARS Virus
actactggtgtgctccgtctacccg

SEQ ID NO: 117099 - DNA, 25 bp, SARS Virus
ctactggtgtgtcccgtctacccga

SEQ ID NO: 117100 - DNA, 25 bp, SARS Virus
tactggtgtgttccgtctacccgat

SEQ ID NO: 117101 - DNA, 25 bp, SARS Virus
actggtgtgttccgtctacccgata

SEQ ID NO: 117102 - DNA, 25 bp, SARS Virus
ctggtgtgttccctctacccgatac

SEQ ID NO: 117103 - DNA, 25 bp, SARS Virus
tggtgtgttccgcctacccgataca

SEQ ID NO: 117104 - DNA, 25 bp, SARS Virus
ggtgtgttccgtctacccgatacat

SEQ ID NO: 117105 - DNA, 25 bp, SARS Virus
gtgtgttccgtccacccgatacatt

SEQ ID NO: 117106 - DNA, 25 bp, SARS Virus
tgtgttccgtctccccgatacattt

SEQ ID NO: 117107 - DNA, 25 bp, SARS Virus
gtgttccgtctacccgatacatttg

SEQ ID NO: 117108 - DNA, 25 bp, SARS Virus
tgttccgtctacccgatacatttgc

SEQ ID NO: 117109 - DNA, 25 bp, SARS Virus
gttccgtctacccgatacatttgca

SEQ ID NO: 117110 - DNA, 25 bp, SARS Virus
ttccgtctaccccatacatttgcaa

SEQ ID NO: 117111 - DNA, 25 bp, SARS Virus
tccgtctacccgctacatttgcaaa

SEQ ID NO: 117112 - DNA, 25 bp, SARS Virus
ccgtctacccgacacatttgcaaaa

SEQ ID NO: 117113 - DNA, 25 bp, SARS Virus
cgtctacccgatccatttgcaaaag

SEQ ID NO: 117114 - DNA, 25 bp, SARS Virus
gtctacccgatacatttgcaaaagc

SEQ ID NO: 117115 - DNA, 25 bp, SARS Virus
tctacccgatacctttgcaaaagcg

SEQ ID NO: 117116 - DNA, 25 bp, SARS Virus
ctacccgatacacttgcaaaagcgt

SEQ ID NO: 117117 - DNA, 25 bp, SARS Virus
tacccgatacatctgcaaaagcgtt

SEQ ID NO: 117118 - DNA, 25 bp, SARS Virus
acccgatacattcgcaaaagcgtta

SEQ ID NO: 117119 - DNA, 25 bp, SARS Virus
cccgatacatttccaaaagcgttaa

SEQ ID NO: 117120 - DNA, 25 bp, SARS Virus
ccgatacatttgcaaaagcgttaag

SEQ ID NO: 117121 - DNA, 25 bp, SARS Virus
cgatacatttgccaaagcgttaagg

SEQ ID NO: 117122 - DNA, 25 bp, SARS Virus
gatacatttgcacaagcgttaaggc

SEQ ID NO: 117123 - DNA, 25 bp, SARS Virus
atacatttgcaacagcgttaaggca

SEQ ID NO: 117124 - DNA, 25 bp, SARS Virus
tacatttgcaaacgcgttaaggcaa

SEQ ID NO: 117125 - DNA, 25 bp, SARS Virus
acatttgcaaaaccgttaaggcaaa

SEQ ID NO: 117126 - DNA, 25 bp, SARS Virus
catttgcaaaagcgttaaggcaaat

SEQ ID NO: 117127 - DNA, 25 bp, SARS Virus
atttgcaaaagccttaaggcaaatg

SEQ ID NO: 117128 - DNA, 25 bp, SARS Virus
tttgcaaaagcgctaaggcaaatgc

SEQ ID NO: 117129 - DNA, 25 bp, SARS Virus
ttgcaaaagcgtcaaggcaaatgct

SEQ ID NO: 117130 - DNA, 25 bp, SARS Virus
tgcaaaagcgttcaggcaaatgcta

SEQ ID NO: 117131 - DNA, 25 bp, SARS Virus
gcaaaagcgttacggcaaatgctat

SEQ ID NO: 117132 - DNA, 25 bp, SARS Virus
caaaagcgttaacgcaaatgctatg

SEQ ID NO: 117133 - DNA, 25 bp, SARS Virus
aaaagcgttaagccaaatgctatgt

SEQ ID NO: 117134 - DNA, 25 bp, SARS Virus
aaagcgttaaggcaaatgctatgta

SEQ ID NO: 117135 - DNA, 25 bp, SARS Virus
aagcgttaaggccaatgctatgtat

SEQ ID NO: 117136 - DNA, 25 bp, SARS Virus
agcgttaaggcacatgctatgtatc

SEQ ID NO: 117137 - DNA, 25 bp, SARS Virus
gcgttaaggcaactgctatgtatca

SEQ ID NO: 117138 - DNA, 25 bp, SARS Virus
cgttaaggcaaacgctatgtatcag

SEQ ID NO: 117139 - DNA, 25 bp, SARS Virus
gttaaggcaaatcctatgtatcaga

SEQ ID NO: 117140 - DNA, 25 bp, SARS Virus
ttaaggcaaatgctatgtatcagat

SEQ ID NO: 117141 - DNA, 25 bp, SARS Virus
taaggcaaatgccatgtatcagatg

SEQ ID NO: 117142 - DNA, 25 bp, SARS Virus
aaggcaaatgctctgtatcagatga

SEQ ID NO: 117143 - DNA, 25 bp, SARS Virus
aggcaaatgctacgtatcagatgag

SEQ ID NO: 117144 - DNA, 25 bp, SARS Virus
ggcaaatgctatctatcagatgaga

SEQ ID NO: 117145 - DNA, 25 bp, SARS Virus
gcaaatgctatgcatcagatgagaa

SEQ ID NO: 117146 - DNA, 25 bp, SARS Virus
caaatgctatgtctcagatgagaac

SEQ ID NO: 117147 - DNA, 25 bp, SARS Virus
aaatgctatgtaccagatgagaaca

SEQ ID NO: 117148 - DNA, 25 bp, SARS Virus
aatgctatgtatcagatgagaacac

SEQ ID NO: 117149 - DNA, 25 bp, SARS Virus
atgctatgtatccgatgagaacacg

SEQ ID NO: 117150 - DNA, 25 bp, SARS Virus
tgctatgtatcacatgagaacacgt

SEQ ID NO: 117151 - DNA, 25 bp, SARS Virus
gctatgtatcagctgagaacacgtc

SEQ ID NO: 117152 - DNA, 25 bp, SARS Virus
ctatgtatcagacgagaacacgtct

SEQ ID NO: 117153 - DNA, 25 bp, SARS Virus
tatgtatcagatcagaacacgtctt

SEQ ID NO: 117154 - DNA, 25 bp, SARS Virus
atgtatcagatgcgaacacgtctta

SEQ ID NO: 117155 - DNA, 25 bp, SARS Virus
tgtatcagatgacaacacgtcttac

SEQ ID NO: 117156 - DNA, 25 bp, SARS Virus
gtatcagatgagcacacgtcttact

SEQ ID NO: 117157 - DNA, 25 bp, SARS Virus
tatcagatgagaccacgtcttactt

SEQ ID NO: 117158 - DNA, 25 bp, SARS Virus
atcagatgagaacacgtcttactta

SEQ ID NO: 117159 - DNA, 25 bp, SARS Virus
tcagatgagaacccgtcttacttaa

SEQ ID NO: 117160 - DNA, 25 bp, SARS Virus
cagatgagaacacgtcttacttaag

SEQ ID NO: 117161 - DNA, 25 bp, SARS Virus
agatgagaacacctcttacttaaga

SEQ ID NO: 117162 - DNA, 25 bp, SARS Virus
gatgagaacacgccttacttaagag

SEQ ID NO: 117163 - DNA, 25 bp, SARS Virus
atgagaacacgtcttacttaagagc

SEQ ID NO: 117164 - DNA, 25 bp, SARS Virus
tgagaacacgtcctacttaagagca

SEQ ID NO: 117165 - DNA, 25 bp, SARS Virus
gagaacacgtctcacttaagagcat

SEQ ID NO: 117166 - DNA, 25 bp, SARS Virus
agaacacgtcttccttaagagcatt

SEQ ID NO: 117167 - DNA, 25 bp, SARS Virus
gaacacgtcttacttaagagcattg

SEQ ID NO: 117168 - DNA, 25 bp, SARS Virus
aacacgtcttacctaagagcattga

SEQ ID NO: 117169 - DNA, 25 bp, SARS Virus
acacgtcttactcaagagcattgat

SEQ ID NO: 117170 - DNA, 25 bp, SARS Virus
cacgtcttacttcagagcattgatt

SEQ ID NO: 117171 - DNA, 25 bp, SARS Virus
acgtcttacttacgagcattgattt

SEQ ID NO: 117172 - DNA, 25 bp, SARS Virus
cgtcttacttaacagcattgatttg

SEQ ID NO: 117173 - DNA, 25 bp, SARS Virus
gtcttacttaagcgcattgatttgt

SEQ ID NO: 117174 - DNA, 25 bp, SARS Virus
tcttacttaagaccattgatttgtc

SEQ ID NO: 117175 - DNA, 25 bp, SARS Virus
cttacttaagagcattgatttgtcg

SEQ ID NO: 117176 - DNA, 25 bp, SARS Virus
ttacttaagagccttgatttgtcgt

SEQ ID NO: 117177 - DNA, 25 bp, SARS Virus
tacttaagagcactgatttgtcgtg

SEQ ID NO: 117178 - DNA, 25 bp, SARS Virus
acttaagagcatcgatttgtcgtgt

SEQ ID NO: 117179 - DNA, 25 bp, SARS Virus
cttaagagcattcatttgtcgtgtt

SEQ ID NO: 117180 - DNA, 25 bp, SARS Virus
ttaagagcattgctttgtcgtgttc

SEQ ID NO: 117181 - DNA, 25 bp, SARS Virus
taagagcattgacttgtcgtgttca

SEQ ID NO: 117182 - DNA, 25 bp, SARS Virus
aagagcattgatctgtcgtgttcat

SEQ ID NO: 117183 - DNA, 25 bp, SARS Virus
agagcattgattcgtcgtgttcatc

SEQ ID NO: 117184 - DNA, 25 bp, SARS Virus
gagcattgatttctcgtgttcatcc

SEQ ID NO: 117185 - DNA, 25 bp, SARS Virus
agcattgatttgccgtgttcatcca

SEQ ID NO: 117186 - DNA, 25 bp, SARS Virus
gcattgatttgtcgtgttcatccaa

SEQ ID NO: 117187 - DNA, 25 bp, SARS Virus
cattgatttgtcctgttcatccaaa

SEQ ID NO: 117188 - DNA, 25 bp, SARS Virus
attgatttgtcgcgttcatccaaat

SEQ ID NO: 117189 - DNA, 25 bp, SARS Virus
ttgatttgtcgtcttcatccaaatc

SEQ ID NO: 117190 - DNA, 25 bp, SARS Virus
tgatttgtcgtgctcatccaaatca

SEQ ID NO: 117191 - DNA, 25 bp, SARS Virus
gatttgtcgtgtccatccaaatcaa

SEQ ID NO: 117192 - DNA, 25 bp, SARS Virus
atttgtcgtgttcatccaaatcaat

SEQ ID NO: 117193 - DNA, 25 bp, SARS Virus
tttgtcgtgttcctccaaatcaatt

SEQ ID NO: 117194 - DNA, 25 bp, SARS Virus
ttgtcgtgttcacccaaatcaattg

SEQ ID NO: 117195 - DNA, 25 bp, SARS Virus
tgtcgtgttcatccaaatcaattga

SEQ ID NO: 117196 - DNA, 25 bp, SARS Virus
gtcgtgttcatccaaatcaattgaa

SEQ ID NO: 117197 - DNA, 25 bp, SARS Virus
tcgtgttcatcccaatcaattgaaa

SEQ ID NO: 117198 - DNA, 25 bp, SARS Virus
cgtgttcatccacatcaattgaaat

SEQ ID NO: 117199 - DNA, 25 bp, SARS Virus
gtgttcatccaactcaattgaaatt

SEQ ID NO: 117200 - DNA, 25 bp, SARS Virus
tgttcatccaaaccaattgaaatta

SEQ ID NO: 117201 - DNA, 25 bp, SARS Virus
gttcatccaaatcaattgaaattag

SEQ ID NO: 117202 - DNA, 25 bp, SARS Virus
ttcatccaaatccattgaaattaga

SEQ ID NO: 117203 - DNA, 25 bp, SARS Virus
tcatccaaatcacttgaaattagag

SEQ ID NO: 117204 - DNA, 25 bp, SARS Virus
catccaaatcaactgaaattagagt

SEQ ID NO: 117205 - DNA, 25 bp, SARS Virus
atccaaatcaatcgaaattagagtg

SEQ ID NO: 117206 - DNA, 25 bp, SARS Virus
tccaaatcaattcaaattagagtgt

SEQ ID NO: 117207 - DNA, 25 bp, SARS Virus
ccaaatcaattgcaattagagtgta

SEQ ID NO: 117208 - DNA, 25 bp, SARS Virus
caaatcaattgacattagagtgtat

SEQ ID NO: 117209 - DNA, 25 bp, SARS Virus
aaatcaattgaacttagagtgtatc

SEQ ID NO: 117210 - DNA, 25 bp, SARS Virus
aatcaattgaaactagagtgtatcg

SEQ ID NO: 117211 - DNA, 25 bp, SARS Virus
atcaattgaaatcagagtgtatcgt

SEQ ID NO: 117212 - DNA, 25 bp, SARS Virus
tcaattgaaattcgagtgtatcgtt

SEQ ID NO: 117213 - DNA, 25 bp, SARS Virus
caattgaaattacagtgtatcgtta

SEQ ID NO: 117214 - DNA, 25 bp, SARS Virus
aattgaaattagcgtgtatcgttag

SEQ ID NO: 117215 - DNA, 25 bp, SARS Virus
attgaaattagactgtatcgttaga

SEQ ID NO: 117216 - DNA, 25 bp, SARS Virus
ttgaaattagagcgtatcgttagaa

SEQ ID NO: 117217 - DNA, 25 bp, SARS Virus
tgaaattagagtctatcgttagaaa

SEQ ID NO: 117218 - DNA, 25 bp, SARS Virus
gaaattagagtgcatcgttagaaat

SEQ ID NO: 117219 - DNA, 25 bp, SARS Virus
aaattagagtgtctcgttagaaatt

SEQ ID NO: 117220 - DNA, 25 bp, SARS Virus
aattagagtgtaccgttagaaatta

SEQ ID NO: 117221 - DNA, 25 bp, SARS Virus
attagagtgtatcgttagaaattag

SEQ ID NO: 117222 - DNA, 25 bp, SARS Virus
ttagagtgtatccttagaaattagt

SEQ ID NO: 117223 - DNA, 25 bp, SARS Virus
tagagtgtatcgctagaaattagtt

SEQ ID NO: 117224 - DNA, 25 bp, SARS Virus
agagtgtatcgtcagaaattagtta

SEQ ID NO: 117225 - DNA, 25 bp, SARS Virus
gagtgtatcgttcgaaattagttac

SEQ ID NO: 117226 - DNA, 25 bp, SARS Virus
agtgtatcgttacaaattagttaca

SEQ ID NO: 117227 - DNA, 25 bp, SARS Virus
gtgtatcgttagcaattagttacac

SEQ ID NO: 117228 - DNA, 25 bp, SARS Virus
tgtatcgttagacattagttacaca

SEQ ID NO: 117229 - DNA, 25 bp, SARS Virus
gtatcgttagaacttagttacacat

SEQ ID NO: 117230 - DNA, 25 bp, SARS Virus
tatcgttagaaactagttacacatt

SEQ ID NO: 117231 - DNA, 25 bp, SARS Virus
atcgttagaaatcagttacacattg

SEQ ID NO: 117232 - DNA, 25 bp, SARS Virus
tcgttagaaattcgttacacattgt

SEQ ID NO: 117233 - DNA, 25 bp, SARS Virus
cgttagaaattacttacacattgta

SEQ ID NO: 117234 - DNA, 25 bp, SARS Virus
gttagaaattagctacacattgtaa

SEQ ID NO: 117235 - DNA, 25 bp, SARS Virus
ttagaaattagtcacacattgtaat

SEQ ID NO: 117236 - DNA, 25 bp, SARS Virus
tagaaattagttccacattgtaatc

SEQ ID NO: 117237 - DNA, 25 bp, SARS Virus
agaaattagttacacattgtaatcc

SEQ ID NO: 117238 - DNA, 25 bp, SARS Virus
gaaattagttacccattgtaatccc

SEQ ID NO: 117239 - DNA, 25 bp, SARS Virus
aaattagttacacattgtaatccct

SEQ ID NO: 117240 - DNA, 25 bp, SARS Virus
aattagttacaccttgtaatccctc

SEQ ID NO: 117241 - DNA, 25 bp, SARS Virus
attagttacacactgtaatccctcc

SEQ ID NO: 117242 - DNA, 25 bp, SARS Virus
ttagttacacatcgtaatccctcct

SEQ ID NO: 117243 - DNA, 25 bp, SARS Virus
tagttacacattctaatccctcctg

SEQ ID NO: 117244 - DNA, 25 bp, SARS Virus
agttacacattgcaatccctcctga

SEQ ID NO: 117245 - DNA, 25 bp, SARS Virus
gttacacattgtcatccctcctgaa

SEQ ID NO: 117246 - DNA, 25 bp, SARS Virus
ttacacattgtactccctcctgaac

SEQ ID NO: 117247 - DNA, 25 bp, SARS Virus
tacacattgtaacccctcctgaact

SEQ ID NO: 117248 - DNA, 25 bp, SARS Virus
acacattgtaatccctcctgaactt

SEQ ID NO: 117249 - DNA, 25 bp, SARS Virus
cgtaagaaacctgacagtgcgtaac

SEQ ID NO: 117250 - DNA, 25 bp, SARS Virus
gtaagaaaccttgcagtgcgtaacc

SEQ ID NO: 117251 - DNA, 25 bp, SARS Virus
taagaaaccttagagtgcgtaaccg

SEQ ID NO: 117252 - DNA, 25 bp, SARS Virus
aagaaaccttacggtgcgtaaccgt

SEQ ID NO: 117253 - DNA, 25 bp, SARS Virus
agaaaccttacagtgcgtaaccgta

SEQ ID NO: 117254 - DNA, 25 bp, SARS Virus
gaaaccttacagggcgtaaccgtac

SEQ ID NO: 117255 - DNA, 25 bp, SARS Virus
aaaccttacagtgcgtaaccgtacc

SEQ ID NO: 117256 - DNA, 25 bp, SARS Virus
aaccttacagtgggtaaccgtacct

SEQ ID NO: 117257 - DNA, 25 bp, SARS Virus
accttacagtgcgtaaccgtacctt

SEQ ID NO: 117258 - DNA, 25 bp, SARS Virus
ccttacagtgcggaaccgtaccttc

SEQ ID NO: 117259 - DNA, 25 bp, SARS Virus
cttacagtgcgtgaccgtaccttca

SEQ ID NO: 117260 - DNA, 25 bp, SARS Virus
ttacagtgcgtagccgtaccttcag

SEQ ID NO: 117261 - DNA, 25 bp, SARS Virus
tacagtgcgtaagcgtaccttcagt

SEQ ID NO: 117262 - DNA, 25 bp, SARS Virus
acagtgcgtaacggtaccttcagtg

SEQ ID NO: 117263 - DNA, 25 bp, SARS Virus
cagtgcgtaaccgtaccttcagtgt

SEQ ID NO: 117264 - DNA, 25 bp, SARS Virus
agtgcgtaaccggaccttcagtgtg

SEQ ID NO: 117265 - DNA, 25 bp, SARS Virus
gtgcgtaaccgtgccttcagtgtgg

SEQ ID NO: 117266 - DNA, 25 bp, SARS Virus
tgcgtaaccgtagcttcagtgtgga

SEQ ID NO: 117267 - DNA, 25 bp, SARS Virus
gcgtaaccgtacgttcagtgtggaa

SEQ ID NO: 117268 - DNA, 25 bp, SARS Virus
cgtaaccgtaccgtcagtgtggaag

SEQ ID NO: 117269 - DNA, 25 bp, SARS Virus
gtaaccgtacctgcagtgtggaagc

SEQ ID NO: 117270 - DNA, 25 bp, SARS Virus
taaccgtaccttgagtgtggaagcc

SEQ ID NO: 117271 - DNA, 25 bp, SARS Virus
aaccgtaccttcggtgtggaagccc

SEQ ID NO: 117272 - DNA, 25 bp, SARS Virus
accgtaccttcagtgtggaagccct

SEQ ID NO: 117273 - DNA, 25 bp, SARS Virus
ccgtaccttcagggtggaagccctt

SEQ ID NO: 117274 - DNA, 25 bp, SARS Virus
cgtaccttcagtgtggaagcccttg

SEQ ID NO: 117275 - DNA, 25 bp, SARS Virus
gtaccttcagtggggaagcccttgt

SEQ ID NO: 117276 - DNA, 25 bp, SARS Virus
taccttcagtgtggaagcccttgta

SEQ ID NO: 117277 - DNA, 25 bp, SARS Virus
accttcagtgtggaagcccttgtac

SEQ ID NO: 117278 - DNA, 25 bp, SARS Virus
ccttcagtgtgggagcccttgtacc

SEQ ID NO: 117279 - DNA, 25 bp, SARS Virus
cttcagtgtggaggcccttgtaccg

SEQ ID NO: 117280 - DNA, 25 bp, SARS Virus
ttcagtgtggaagcccttgtaccga

SEQ ID NO: 117281 - DNA, 25 bp, SARS Virus
tcagtgtggaaggccttgtaccgac

SEQ ID NO: 117282 - DNA, 25 bp, SARS Virus
cagtgtggaagcgcttgtaccgact

SEQ ID NO: 117283 - DNA, 25 bp, SARS Virus
agtgtggaagccgttgtaccgactg

SEQ ID NO: 117284 - DNA, 25 bp, SARS Virus
gtgtggaagcccgtgtaccgactga

SEQ ID NO: 117285 - DNA, 25 bp, SARS Virus
tgtggaagccctggtaccgactgaa

SEQ ID NO: 117286 - DNA, 25 bp, SARS Virus
gtggaagcccttgtaccgactgaat

SEQ ID NO: 117287 - DNA, 25 bp, SARS Virus
tggaagcccttggaccgactgaata

SEQ ID NO: 117288 - DNA, 25 bp, SARS Virus
ggaagcccttgtgccgactgaatag

SEQ ID NO: 117289 - DNA, 25 bp, SARS Virus
gaagcccttgtagcgactgaatagt

SEQ ID NO: 117290 - DNA, 25 bp, SARS Virus
aagcccttgtacggactgaatagta

SEQ ID NO: 117291 - DNA, 25 bp, SARS Virus
agcccttgtaccgactgaatagtac

SEQ ID NO: 117292 - DNA, 25 bp, SARS Virus
gcccttgtaccggctgaatagtacc

SEQ ID NO: 117293 - DNA, 25 bp, SARS Virus
cccttgtaccgagtgaatagtacct

SEQ ID NO: 117294 - DNA, 25 bp, SARS Virus
ccttgtaccgacggaatagtacctc

SEQ ID NO: 117295 - DNA, 25 bp, SARS Virus
cttgtaccgactgaatagtacctcg

SEQ ID NO: 117296 - DNA, 25 bp, SARS Virus
ttgtaccgactggatagtacctcgg

SEQ ID NO: 117297 - DNA, 25 bp, SARS Virus
tgtaccgactgagtagtacctcggt

SEQ ID NO: 117298 - DNA, 25 bp, SARS Virus
gtaccgactgaagagtacctcggta

SEQ ID NO: 117299 - DNA, 25 bp, SARS Virus
taccgactgaatggtacctcggtaa

SEQ ID NO: 117300 - DNA, 25 bp, SARS Virus
accgactgaatagtacctcggtaat

SEQ ID NO: 117301 - DNA, 25 bp, SARS Virus
ccgactgaataggacctcggtaatt

SEQ ID NO: 117302 - DNA, 25 bp, SARS Virus
cgactgaatagtgcctcggtaattt

SEQ ID NO: 117303 - DNA, 25 bp, SARS Virus
gactgaatagtagctcggtaattta

SEQ ID NO: 117304 - DNA, 25 bp, SARS Virus
actgaatagtacgtcggtaatttaa

SEQ ID NO: 117305 - DNA, 25 bp, SARS Virus
ctgaatagtaccgcggtaatttaac

SEQ ID NO: 117306 - DNA, 25 bp, SARS Virus
tgaatagtacctgggtaatttaacc

SEQ ID NO: 117307 - DNA, 25 bp, SARS Virus
gaatagtacctcggtaatttaacct

SEQ ID NO: 117308 - DNA, 25 bp, SARS Virus
aatagtacctcggtaatttaaccta

SEQ ID NO: 117309 - DNA, 25 bp, SARS Virus
atagtacctcgggaatttaacctac

SEQ ID NO: 117310 - DNA, 25 bp, SARS Virus
tagtacctcggtgatttaacctact

SEQ ID NO: 117311 - DNA, 25 bp, SARS Virus
agtacctcggtagtttaacctactg

SEQ ID NO: 117312 - DNA, 25 bp, SARS Virus
gtacctcggtaagttaacctactgt

SEQ ID NO: 117313 - DNA, 25 bp, SARS Virus
tacctcggtaatgtaacctactgtt

SEQ ID NO: 117314 - DNA, 25 bp, SARS Virus
acctcggtaattgaacctactgttt

SEQ ID NO: 117315 - DNA, 25 bp, SARS Virus
cctcggtaatttgacctactgtttc

SEQ ID NO: 117316 - DNA, 25 bp, SARS Virus
ctcggtaatttagcctactgtttct

SEQ ID NO: 117317 - DNA, 25 bp, SARS Virus
tcggtaatttaagctactgtttcta

SEQ ID NO: 117318 - DNA, 25 bp, SARS Virus
cggtaatttaacgtactgtttctag

SEQ ID NO: 117319 - DNA, 25 bp, SARS Virus
ggtaatttaaccgactgtttctagg

SEQ ID NO: 117320 - DNA, 25 bp, SARS Virus
gtaatttaacctgctgtttctaggt

SEQ ID NO: 117321 - DNA, 25 bp, SARS Virus
taatttaacctagtgtttctaggtg

SEQ ID NO: 117322 - DNA, 25 bp, SARS Virus
aatttaacctacggtttctaggtgt

SEQ ID NO: 117323 - DNA, 25 bp, SARS Virus
atttaacctactgtttctaggtgtt

SEQ ID NO: 117324 - DNA, 25 bp, SARS Virus
tttaacctactggttctaggtgtta

SEQ ID NO: 117325 - DNA, 25 bp, SARS Virus
ttaacctactgtgtctaggtgttaa

SEQ ID NO: 117326 - DNA, 25 bp, SARS Virus
taacctactgttgctaggtgttaag

SEQ ID NO: 117327 - DNA, 25 bp, SARS Virus
aacctactgtttgtaggtgttaagt

SEQ ID NO: 117328 - DNA, 25 bp, SARS Virus
acctactgtttcgaggtgttaagtt

SEQ ID NO: 117329 - DNA, 25 bp, SARS Virus
cctactgtttctgggtgttaagttt

SEQ ID NO: 117330 - DNA, 25 bp, SARS Virus
ctactgtttctaggtgttaagtttc

SEQ ID NO: 117331 - DNA, 25 bp, SARS Virus
tactgtttctaggtgttaagtttct

SEQ ID NO: 117332 - DNA, 25 bp, SARS Virus
actgtttctaggggttaagtttctg

SEQ ID NO: 117333 - DNA, 25 bp, SARS Virus
ctgtttctaggtgttaagtttctgt

SEQ ID NO: 117334 - DNA, 25 bp, SARS Virus
tgtttctaggtggtaagtttctgtt

SEQ ID NO: 117335 - DNA, 25 bp, SARS Virus
gtttctaggtgtgaagtttctgttg

SEQ ID NO: 117336 - DNA, 25 bp, SARS Virus
tttctaggtgttgagtttctgttgc

SEQ ID NO: 117337 - DNA, 25 bp, SARS Virus
ttctaggtgttaggtttctgttgca

SEQ ID NO: 117338 - DNA, 25 bp, SARS Virus
tctaggtgttaagtttctgttgcag

SEQ ID NO: 117339 - DNA, 25 bp, SARS Virus
ctaggtgttaaggttctgttgcagt

SEQ ID NO: 117340 - DNA, 25 bp, SARS Virus
taggtgttaagtgtctgttgcagta

SEQ ID NO: 117341 - DNA, 25 bp, SARS Virus
aggtgttaagttgctgttgcagtat

SEQ ID NO: 117342 - DNA, 25 bp, SARS Virus
ggtgttaagtttgtgttgcagtatg

SEQ ID NO: 117343 - DNA, 25 bp, SARS Virus
gtgttaagtttcggttgcagtatga

SEQ ID NO: 117344 - DNA, 25 bp, SARS Virus
tgttaagtttctgttgcagtatgac

SEQ ID NO: 117345 - DNA, 25 bp, SARS Virus
gttaagtttctggtgcagtatgacg

SEQ ID NO: 117346 - DNA, 25 bp, SARS Virus
ttaagtttctgtggcagtatgacga

SEQ ID NO: 117347 - DNA, 25 bp, SARS Virus
taagtttctgttgcagtatgacgac

SEQ ID NO: 117348 - DNA, 25 bp, SARS Virus
aagtttctgttggagtatgacgact

SEQ ID NO: 117349 - DNA, 25 bp, SARS Virus
agtttctgttgcggtatgacgactt

SEQ ID NO: 117350 - DNA, 25 bp, SARS Virus
gtttctgttgcagtatgacgacttg

SEQ ID NO: 117351 - DNA, 25 bp, SARS Virus
tttctgttgcaggatgacgacttgt

SEQ ID NO: 117352 - DNA, 25 bp, SARS Virus
ttctgttgcagtgtgacgacttgtt

SEQ ID NO: 117353 - DNA, 25 bp, SARS Virus
tctgttgcagtaggacgacttgttc

SEQ ID NO: 117354 - DNA, 25 bp, SARS Virus
ctgttgcagtatgacgacttgttcg

SEQ ID NO: 117355 - DNA, 25 bp, SARS Virus
tgttgcagtatggcgacttgttcgt

SEQ ID NO: 117356 - DNA, 25 bp, SARS Virus
gttgcagtatgaggacttgttcgtg

SEQ ID NO: 117357 - DNA, 25 bp, SARS Virus
ttgcagtatgacgacttgttcgtgt

SEQ ID NO: 117358 - DNA, 25 bp, SARS Virus
tgcagtatgacggcttgttcgtgta

SEQ ID NO: 117359 - DNA, 25 bp, SARS Virus
gcagtatgacgagttgttcgtgtaa

SEQ ID NO: 117360 - DNA, 25 bp, SARS Virus
cagtatgacgacgtgttcgtgtaac

SEQ ID NO: 117361 - DNA, 25 bp, SARS Virus
agtatgacgactggttcgtgtaact

SEQ ID NO: 117362 - DNA, 25 bp, SARS Virus
gtatgacgacttgttcgtgtaactg

SEQ ID NO: 117363 - DNA, 25 bp, SARS Virus
tatgacgacttggtcgtgtaactgc

SEQ ID NO: 117364 - DNA, 25 bp, SARS Virus
atgacgacttgtgcgtgtaactgcg

SEQ ID NO: 117365 - DNA, 25 bp, SARS Virus
tgacgacttgttggtgtaactgcgt

SEQ ID NO: 117366 - DNA, 25 bp, SARS Virus
gacgacttgttcgtgtaactgcgta

SEQ ID NO: 117367 - DNA, 25 bp, SARS Virus
acgacttgttcgggtaactgcgtat

SEQ ID NO: 117368 - DNA, 25 bp, SARS Virus
cgacttgttcgtgtaactgcgtatg

SEQ ID NO: 117369 - DNA, 25 bp, SARS Virus
gacttgttcgtggaactgcgtatgt

SEQ ID NO: 117370 - DNA, 25 bp, SARS Virus
acttgttcgtgtgactgcgtatgtt

SEQ ID NO: 117371 - DNA, 25 bp, SARS Virus
cttgttcgtgtagctgcgtatgttt

SEQ ID NO: 117372 - DNA, 25 bp, SARS Virus
ttgttcgtgtaagtgcgtatgtttt

SEQ ID NO: 117373 - DNA, 25 bp, SARS Virus
tgttcgtgtaacggcgtatgttttg

SEQ ID NO: 117374 - DNA, 25 bp, SARS Virus
gttcgtgtaactgcgtatgttttgt

SEQ ID NO: 117375 - DNA, 25 bp, SARS Virus
ttcgtgtaactgggtatgttttgta

SEQ ID NO: 117376 - DNA, 25 bp, SARS Virus
tcgtgtaactgcgtatgttttgtaa

SEQ ID NO: 117377 - DNA, 25 bp, SARS Virus
cgtgtaactgcggatgttttgtaag

SEQ ID NO: 117378 - DNA, 25 bp, SARS Virus
gtgtaactgcgtgtgttttgtaagg

SEQ ID NO: 117379 - DNA, 25 bp, SARS Virus
tgtaactgcgtaggttttgtaaggg

SEQ ID NO: 117380 - DNA, 25 bp, SARS Virus
gtaactgcgtatgttttgtaagggt

SEQ ID NO: 117381 - DNA, 25 bp, SARS Virus
taactgcgtatggtttgtaagggtg

SEQ ID NO: 117382 - DNA, 25 bp, SARS Virus
aactgcgtatgtgttgtaagggtgg

SEQ ID NO: 117383 - DNA, 25 bp, SARS Virus
actgcgtatgttgtgtaagggtggt

SEQ ID NO: 117384 - DNA, 25 bp, SARS Virus
ctgcgtatgtttggtaagggtggtt

SEQ ID NO: 117385 - DNA, 25 bp, SARS Virus
tgcgtatgttttgtaagggtggttg

SEQ ID NO: 117386 - DNA, 25 bp, SARS Virus
gcgtatgttttggaagggtggttgt

SEQ ID NO: 117387 - DNA, 25 bp, SARS Virus
cgtatgttttgtgagggtggttgtc

SEQ ID NO: 117388 - DNA, 25 bp, SARS Virus
gtatgttttgtaggggtggttgtct

SEQ ID NO: 117389 - DNA, 25 bp, SARS Virus
tatgttttgtaagggtggttgtctc

SEQ ID NO: 117390 - DNA, 25 bp, SARS Virus
atgttttgtaagggtggttgtctcg

SEQ ID NO: 117391 - DNA, 25 bp, SARS Virus
tgttttgtaagggtggttgtctcgg

SEQ ID NO: 117392 - DNA, 25 bp, SARS Virus
gttttgtaaggggggttgtctcgga

SEQ ID NO: 117393 - DNA, 25 bp, SARS Virus
ttttgtaagggtggttgtctcggat

SEQ ID NO: 117394 - DNA, 25 bp, SARS Virus
tttgtaagggtggttgtctcggatt

SEQ ID NO: 117395 - DNA, 25 bp, SARS Virus
ttgtaagggtgggtgtctcggattt

SEQ ID NO: 117396 - DNA, 25 bp, SARS Virus
tgtaagggtggtggtctcggatttt

SEQ ID NO: 117397 - DNA, 25 bp, SARS Virus
gtaagggtggttgtctcggattttt

SEQ ID NO: 117398 - DNA, 25 bp, SARS Virus
taagggtggttggctcggatttttc

SEQ ID NO: 117399 - DNA, 25 bp, SARS Virus
aagggtggttgtgtcggatttttcc

SEQ ID NO: 117400 - DNA, 25 bp, SARS Virus
agggtggttgtcgcggatttttcct

SEQ ID NO: 117401 - DNA, 25 bp, SARS Virus
gggtggttgtctgggatttttcctg

SEQ ID NO: 117402 - DNA, 25 bp, SARS Virus
ggtggttgtctcggatttttcctgt

SEQ ID NO: 117403 - DNA, 25 bp, SARS Virus
gtggttgtctcggatttttcctgtt

SEQ ID NO: 117404 - DNA, 25 bp, SARS Virus
tggttgtctcgggtttttcctgttt

SEQ ID NO: 117405 - DNA, 25 bp, SARS Virus
ggttgtctcggagttttcctgtttt

SEQ ID NO: 117406 - DNA, 25 bp, SARS Virus
gttgtctcggatgtttcctgttttt

SEQ ID NO: 117407 - DNA, 25 bp, SARS Virus
ttgtctcggattgttcctgtttttc

SEQ ID NO: 117408 - DNA, 25 bp, SARS Virus
tgtctcggatttgtcctgtttttct

SEQ ID NO: 117409 - DNA, 25 bp, SARS Virus
gtctcggattttgcctgtttttctt

SEQ ID NO: 117410 - DNA, 25 bp, SARS Virus
tctcggatttttgctgtttttcttt

SEQ ID NO: 117411 - DNA, 25 bp, SARS Virus
ctcggatttttcgtgtttttctttt

SEQ ID NO: 117412 - DNA, 25 bp, SARS Virus
tcggatttttccggtttttcttttt

SEQ ID NO: 117413 - DNA, 25 bp, SARS Virus
cggatttttcctgtttttctttttc

SEQ ID NO: 117414 - DNA, 25 bp, SARS Virus
ggatttttcctggttttctttttct

SEQ ID NO: 117415 - DNA, 25 bp, SARS Virus
gatttttcctgtgtttctttttctg

SEQ ID NO: 117416 - DNA, 25 bp, SARS Virus
atttttcctgttgttctttttctga

SEQ ID NO: 117417 - DNA, 25 bp, SARS Virus
tttttcctgtttgtctttttctgac

SEQ ID NO: 117418 - DNA, 25 bp, SARS Virus
ttttcctgttttgctttttctgact

SEQ ID NO: 117419 - DNA, 25 bp, SARS Virus
tttcctgtttttgtttttctgacta

SEQ ID NO: 117420 - DNA, 25 bp, SARS Virus
ttcctgtttttcgttttctgactac

SEQ ID NO: 117421 - DNA, 25 bp, SARS Virus
tcctgtttttctgtttctgactact

SEQ ID NO: 117422 - DNA, 25 bp, SARS Virus
cctgtttttcttgttctgactactt

SEQ ID NO: 117423 - DNA, 25 bp, SARS Virus
ctgtttttctttgtctgactacttc

SEQ ID NO: 117424 - DNA, 25 bp, SARS Virus
tgtttttcttttgctgactacttcg

SEQ ID NO: 117425 - DNA, 25 bp, SARS Virus
gtttttctttttgtgactacttcga

SEQ ID NO: 117426 - DNA, 25 bp, SARS Virus
tttttctttttcggactacttcgag

SEQ ID NO: 117427 - DNA, 25 bp, SARS Virus
ttttctttttctgactacttcgagt

SEQ ID NO: 117428 - DNA, 25 bp, SARS Virus
tttctttttctggctacttcgagtc

SEQ ID NO: 117429 - DNA, 25 bp, SARS Virus
ttctttttctgagtacttcgagtcg

SEQ ID NO: 117430 - DNA, 25 bp, SARS Virus
tctttttctgacgacttcgagtcgg

SEQ ID NO: 117431 - DNA, 25 bp, SARS Virus
ctttttctgactgcttcgagtcgga

SEQ ID NO: 117432 - DNA, 25 bp, SARS Virus
tttttctgactagttcgagtcggaa

SEQ ID NO: 117433 - DNA, 25 bp, SARS Virus
ttttctgactacgtcgagtcggaaa

SEQ ID NO: 117434 - DNA, 25 bp, SARS Virus
tttctgactactgcgagtcggaaac

SEQ ID NO: 117435 - DNA, 25 bp, SARS Virus
ttctgactacttggagtcggaaacg

SEQ ID NO: 117436 - DNA, 25 bp, SARS Virus
tctgactacttcgagtcggaaacgg

SEQ ID NO: 117437 - DNA, 25 bp, SARS Virus
ctgactacttcgggtcggaaacggc

SEQ ID NO: 117438 - DNA, 25 bp, SARS Virus
tgactacttcgagtcggaaacggcg

SEQ ID NO: 117439 - DNA, 25 bp, SARS Virus
gactacttcgaggcggaaacggcgt

SEQ ID NO: 117440 - DNA, 25 bp, SARS Virus
actacttcgagtgggaaacggcgtc

SEQ ID NO: 117441 - DNA, 25 bp, SARS Virus
ctacttcgagtcggaaacggcgtct

SEQ ID NO: 117442 - DNA, 25 bp, SARS Virus
tacttcgagtcggaaacggcgtctc

SEQ ID NO: 117443 - DNA, 25 bp, SARS Virus
acttcgagtcgggaacggcgtctct

SEQ ID NO: 117444 - DNA, 25 bp, SARS Virus
cttcgagtcggagacggcgtctctg

SEQ ID NO: 117445 - DNA, 25 bp, SARS Virus
ttcgagtcggaagcggcgtctctgt

SEQ ID NO: 117446 - DNA, 25 bp, SARS Virus
tcgagtcggaaagggcgtctctgtt

SEQ ID NO: 117447 - DNA, 25 bp, SARS Virus
cgagtcggaaacggcgtctctgttt

SEQ ID NO: 117448 - DNA, 25 bp, SARS Virus
gagtcggaaacggcgtctctgtttt

SEQ ID NO: 117449 - DNA, 25 bp, SARS Virus
agtcggaaacggggtctctgttttc

SEQ ID NO: 117450 - DNA, 25 bp, SARS Virus
gtcggaaacggcgtctctgttttct

SEQ ID NO: 117451 - DNA, 25 bp, SARS Virus
tcggaaacggcggctctgttttctt

SEQ ID NO: 117452 - DNA, 25 bp, SARS Virus
cggaaacggcgtgtctgttttcttc

SEQ ID NO: 117453 - DNA, 25 bp, SARS Virus
ggaaacggcgtcgctgttttcttcg

SEQ ID NO: 117454 - DNA, 25 bp, SARS Virus
gaaacggcgtctgtgttttcttcgt

SEQ ID NO: 117455 - DNA, 25 bp, SARS Virus
aaacggcgtctcggttttcttcgtc

SEQ ID NO: 117456 - DNA, 25 bp, SARS Virus
aacggcgtctctgttttcttcgtcg

SEQ ID NO: 117457 - DNA, 25 bp, SARS Virus
acggcgtctctggtttcttcgtcgg

SEQ ID NO: 117458 - DNA, 25 bp, SARS Virus
cggcgtctctgtgttcttcgtcggg

SEQ ID NO: 117459 - DNA, 25 bp, SARS Virus
ggcgtctctgttgtcttcgtcgggt

SEQ ID NO: 117460 - DNA, 25 bp, SARS Virus
gcgtctctgtttgcttcgtcgggtg

SEQ ID NO: 117461 - DNA, 25 bp, SARS Virus
cgtctctgttttgttcgtcgggtga

SEQ ID NO: 117462 - DNA, 25 bp, SARS Virus
gtctctgttttcgtcgtcgggtgac

SEQ ID NO: 117463 - DNA, 25 bp, SARS Virus
tctctgttttctgcgtcgggtgaca

SEQ ID NO: 117464 - DNA, 25 bp, SARS Virus
ctctgttttcttggtcgggtgacac

SEQ ID NO: 117465 - DNA, 25 bp, SARS Virus
tctgttttcttcgtcgggtgacact

SEQ ID NO: 117466 - DNA, 25 bp, SARS Virus
ctgttttcttcggcgggtgacactg

SEQ ID NO: 117467 - DNA, 25 bp, SARS Virus
tgttttcttcgtggggtgacactga

SEQ ID NO: 117468 - DNA, 25 bp, SARS Virus
gttttcttcgtcgggtgacactgag

SEQ ID NO: 117469 - DNA, 25 bp, SARS Virus
ttttcttcgtcgggtgacactgaga

SEQ ID NO: 117470 - DNA, 25 bp, SARS Virus
tttcttcgtcgggtgacactgagaa

SEQ ID NO: 117471 - DNA, 25 bp, SARS Virus
ttcttcgtcgggggacactgagaag

SEQ ID NO: 117472 - DNA, 25 bp, SARS Virus
tcttcgtcgggtgacactgagaaga

SEQ ID NO: 117473 - DNA, 25 bp, SARS Virus
cttcgtcgggtggcactgagaagaa

SEQ ID NO: 117474 - DNA, 25 bp, SARS Virus
ttcgtcgggtgagactgagaagaag

SEQ ID NO: 117475 - DNA, 25 bp, SARS Virus
tcgtcgggtgacgctgagaagaagg

SEQ ID NO: 117476 - DNA, 25 bp, SARS Virus
cgtcgggtgacagtgagaagaagga

SEQ ID NO: 117477 - DNA, 25 bp, SARS Virus
gtcgggtgacacggagaagaaggac

SEQ ID NO: 117478 - DNA, 25 bp, SARS Virus
tcgggtgacactgagaagaaggacg

SEQ ID NO: 117479 - DNA, 25 bp, SARS Virus
cgggtgacactgggaagaaggacgc

SEQ ID NO: 117480 - DNA, 25 bp, SARS Virus
gggtgacactgagaagaaggacgcc

SEQ ID NO: 117481 - DNA, 25 bp, SARS Virus
ggtgacactgaggagaaggacgccg

SEQ ID NO: 117482 - DNA, 25 bp, SARS Virus
gtgacactgagaggaaggacgccga

SEQ ID NO: 117483 - DNA, 25 bp, SARS Virus
tgacactgagaagaaggacgccgac

SEQ ID NO: 117484 - DNA, 25 bp, SARS Virus
gacactgagaaggaggacgccgact

SEQ ID NO: 117485 - DNA, 25 bp, SARS Virus
acactgagaagagggacgccgactg

SEQ ID NO: 117486 - DNA, 25 bp, SARS Virus
cactgagaagaaggacgccgactgt

SEQ ID NO: 117487 - DNA, 25 bp, SARS Virus
actgagaagaaggacgccgactgta

SEQ ID NO: 117488 - DNA, 25 bp, SARS Virus
ctgagaagaagggcgccgactgtac

SEQ ID NO: 117489 - DNA, 25 bp, SARS Virus
tgagaagaaggaggccgactgtacc

SEQ ID NO: 117490 - DNA, 25 bp, SARS Virus
gagaagaaggacgccgactgtacct

SEQ ID NO: 117491 - DNA, 25 bp, SARS Virus
agaagaaggacggcgactgtaccta

SEQ ID NO: 117492 - DNA, 25 bp, SARS Virus
gaagaaggacgcggactgtacctac

SEQ ID NO: 117493 - DNA, 25 bp, SARS Virus
aagaaggacgccgactgtacctact

SEQ ID NO: 117494 - DNA, 25 bp, SARS Virus
agaaggacgccggctgtacctacta

SEQ ID NO: 117495 - DNA, 25 bp, SARS Virus
gaaggacgccgagtgtacctactaa

SEQ ID NO: 117496 - DNA, 25 bp, SARS Virus
aaggacgccgacggtacctactaaa

SEQ ID NO: 117497 - DNA, 25 bp, SARS Virus
aggacgccgactgtacctactaaag

SEQ ID NO: 117498 - DNA, 25 bp, SARS Virus
ggacgccgactggacctactaaaga

SEQ ID NO: 117499 - DNA, 25 bp, SARS Virus
gacgccgactgtgcctactaaagag

SEQ ID NO: 117500 - DNA, 25 bp, SARS Virus
acgccgactgtagctactaaagagg

SEQ ID NO: 117501 - DNA, 25 bp, SARS Virus
cgccgactgtacgtactaaagaggt

SEQ ID NO: 117502 - DNA, 25 bp, SARS Virus
gccgactgtaccgactaaagaggtc

SEQ ID NO: 117503 - DNA, 25 bp, SARS Virus
ccgactgtacctgctaaagaggtct

SEQ ID NO: 117504 - DNA, 25 bp, SARS Virus
cgactgtacctagtaaagaggtctg

SEQ ID NO: 117505 - DNA, 25 bp, SARS Virus
gactgtacctacgaaagaggtctgt

SEQ ID NO: 117506 - DNA, 25 bp, SARS Virus
actgtacctactgaagaggtctgtt

SEQ ID NO: 117507 - DNA, 25 bp, SARS Virus
ctgtacctactagagaggtctgttg

SEQ ID NO: 117508 - DNA, 25 bp, SARS Virus
tgtacctactaaggaggtctgttga

SEQ ID NO: 117509 - DNA, 25 bp, SARS Virus
gtacctactaaagaggtctgttgaa

SEQ ID NO: 117510 - DNA, 25 bp, SARS Virus
tacctactaaaggggtctgttgaag

SEQ ID NO: 117511 - DNA, 25 bp, SARS Virus
acctactaaagaggtctgttgaagt

SEQ ID NO: 117512 - DNA, 25 bp, SARS Virus
cctactaaagaggtctgttgaagtt

SEQ ID NO: 117513 - DNA, 25 bp, SARS Virus
ctactaaagagggctgttgaagttt

SEQ ID NO: 117514 - DNA, 25 bp, SARS Virus
tactaaagaggtgtgttgaagtttt

SEQ ID NO: 117515 - DNA, 25 bp, SARS Virus
actaaagaggtcggttgaagtttta

SEQ ID NO: 117516 - DNA, 25 bp, SARS Virus
ctaaagaggtctgttgaagttttaa

SEQ ID NO: 117517 - DNA, 25 bp, SARS Virus
taaagaggtctggtgaagttttaag

SEQ ID NO: 117518 - DNA, 25 bp, SARS Virus
aaagaggtctgtggaagttttaagg

SEQ ID NO: 117519 - DNA, 25 bp, SARS Virus
aagaggtctgttgaagttttaaggt

SEQ ID NO: 117520 - DNA, 25 bp, SARS Virus
agaggtctgttggagttttaaggta

SEQ ID NO: 117521 - DNA, 25 bp, SARS Virus
gaggtctgttgaggttttaaggtac

SEQ ID NO: 117522 - DNA, 25 bp, SARS Virus
aggtctgttgaagttttaaggtact

SEQ ID NO: 117523 - DNA, 25 bp, SARS Virus
ggtctgttgaaggtttaaggtactc

SEQ ID NO: 117524 - DNA, 25 bp, SARS Virus
gtctgttgaagtgttaaggtactca

SEQ ID NO: 117525 - DNA, 25 bp, SARS Virus
tctgttgaagttgtaaggtactcac

SEQ ID NO: 117526 - DNA, 25 bp, SARS Virus
ctgttgaagtttgaaggtactcacc

SEQ ID NO: 117527 - DNA, 25 bp, SARS Virus
tgttgaagttttgaggtactcacct

SEQ ID NO: 117528 - DNA, 25 bp, SARS Virus
gttgaagttttagggtactcacctc

SEQ ID NO: 117529 - DNA, 25 bp, SARS Virus
ttgaagttttaaggtactcacctcg

SEQ ID NO: 117530 - DNA, 25 bp, SARS Virus
tgaagttttaaggtactcacctcga

SEQ ID NO: 117531 - DNA, 25 bp, SARS Virus
gaagttttaagggactcacctcgaa

SEQ ID NO: 117532 - DNA, 25 bp, SARS Virus
aagttttaaggtgctcacctcgaag

SEQ ID NO: 117533 - DNA, 25 bp, SARS Virus
agttttaaggtagtcacctcgaaga

SEQ ID NO: 117534 - DNA, 25 bp, SARS Virus
gttttaaggtacgcacctcgaagac

SEQ ID NO: 117535 - DNA, 25 bp, SARS Virus
ttttaaggtactgacctcgaagacg

SEQ ID NO: 117536 - DNA, 25 bp, SARS Virus
tttaaggtactcgcctcgaagacga

SEQ ID NO: 117537 - DNA, 25 bp, SARS Virus
ttaaggtactcagctcgaagacgac

SEQ ID NO: 117538 - DNA, 25 bp, SARS Virus
taaggtactcacgtcgaagacgact

SEQ ID NO: 117539 - DNA, 25 bp, SARS Virus
aaggtactcaccgcgaagacgacta

SEQ ID NO: 117540 - DNA, 25 bp, SARS Virus
aggtactcacctggaagacgactaa

SEQ ID NO: 117541 - DNA, 25 bp, SARS Virus
ggtactcacctcgaagacgactaag

SEQ ID NO: 117542 - DNA, 25 bp, SARS Virus
gtactcacctcggagacgactaagt

SEQ ID NO: 117543 - DNA, 25 bp, SARS Virus
tactcacctcgaggacgactaagtt

SEQ ID NO: 117544 - DNA, 25 bp, SARS Virus
actcacctcgaagacgactaagttg

SEQ ID NO: 117545 - DNA, 25 bp, SARS Virus
ctcacctcgaaggcgactaagttga

SEQ ID NO: 117546 - DNA, 25 bp, SARS Virus
tcacctcgaagaggactaagttgag

SEQ ID NO: 117547 - DNA, 25 bp, SARS Virus
cacctcgaagacgactaagttgagt

SEQ ID NO: 117548 - DNA, 25 bp, SARS Virus
acctcgaagacggctaagttgagtc

SEQ ID NO: 117549 - DNA, 25 bp, SARS Virus
cctcgaagacgagtaagttgagtcc

SEQ ID NO: 117550 - DNA, 25 bp, SARS Virus
ctcgaagacgacgaagttgagtccg

SEQ ID NO: 117551 - DNA, 25 bp, SARS Virus
tcgaagacgactgagttgagtccgt

SEQ ID NO: 117552 - DNA, 25 bp, SARS Virus
cgaagacgactaggttgagtccgta

SEQ ID NO: 117553 - DNA, 25 bp, SARS Virus
gaagacgactaagttgagtccgtat

SEQ ID NO: 117554 - DNA, 25 bp, SARS Virus
aagacgactaaggtgagtccgtatt

SEQ ID NO: 117555 - DNA, 25 bp, SARS Virus
agacgactaagtggagtccgtattt

SEQ ID NO: 117556 - DNA, 25 bp, SARS Virus
gacgactaagttgagtccgtatttg

SEQ ID NO: 117557 - DNA, 25 bp, SARS Virus
acgactaagttgggtccgtatttgt

SEQ ID NO: 117558 - DNA, 25 bp, SARS Virus
cgactaagttgagtccgtatttgtg

SEQ ID NO: 117559 - DNA, 25 bp, SARS Virus
gactaagttgaggccgtatttgtga

SEQ ID NO: 117560 - DNA, 25 bp, SARS Virus
actaagttgagtgcgtatttgtgag

SEQ ID NO: 117561 - DNA, 25 bp, SARS Virus
ctaagttgagtcggtatttgtgagt

SEQ ID NO: 117562 - DNA, 25 bp, SARS Virus
taagttgagtccgtatttgtgagta

SEQ ID NO: 117563 - DNA, 25 bp, SARS Virus
aagttgagtccggatttgtgagtac

SEQ ID NO: 117564 - DNA, 25 bp, SARS Virus
agttgagtccgtgtttgtgagtact

SEQ ID NO: 117565 - DNA, 25 bp, SARS Virus
gttgagtccgtagttgtgagtacta

SEQ ID NO: 117566 - DNA, 25 bp, SARS Virus
ttgagtccgtatgtgtgagtactac

SEQ ID NO: 117567 - DNA, 25 bp, SARS Virus
tgagtccgtattggtgagtactact

SEQ ID NO: 117568 - DNA, 25 bp, SARS Virus
gagtccgtatttgtgagtactactg

SEQ ID NO: 117569 - DNA, 25 bp, SARS Virus
agtccgtatttgggagtactactgg

SEQ ID NO: 117570 - DNA, 25 bp, SARS Virus
gtccgtatttgtgagtactactggt

SEQ ID NO: 117571 - DNA, 25 bp, SARS Virus
tccgtatttgtgggtactactggtg

SEQ ID NO: 117572 - DNA, 25 bp, SARS Virus
ccgtatttgtgagtactactggtgt

SEQ ID NO: 117573 - DNA, 25 bp, SARS Virus
cgtatttgtgaggactactggtgtg

SEQ ID NO: 117574 - DNA, 25 bp, SARS Virus
gtatttgtgagtgctactggtgtgt

SEQ ID NO: 117575 - DNA, 25 bp, SARS Virus
tatttgtgagtagtactggtgtgtt

SEQ ID NO: 117576 - DNA, 25 bp, SARS Virus
atttgtgagtacgactggtgtgttc

SEQ ID NO: 117577 - DNA, 25 bp, SARS Virus
tttgtgagtactgctggtgtgttcc

SEQ ID NO: 117578 - DNA, 25 bp, SARS Virus
ttgtgagtactagtggtgtgttccg

SEQ ID NO: 117579 - DNA, 25 bp, SARS Virus
tgtgagtactacgggtgtgttccgt

SEQ ID NO: 117580 - DNA, 25 bp, SARS Virus
gtgagtactactggtgtgttccgtc

SEQ ID NO: 117581 - DNA, 25 bp, SARS Virus
tgagtactactggtgtgttccgtct

SEQ ID NO: 117582 - DNA, 25 bp, SARS Virus
gagtactactggggtgttccgtcta

SEQ ID NO: 117583 - DNA, 25 bp, SARS Virus
agtactactggtgtgttccgtctac

SEQ ID NO: 117584 - DNA, 25 bp, SARS Virus
gtactactggtgggttccgtctacc

SEQ ID NO: 117585 - DNA, 25 bp, SARS Virus
tactactggtgtgttccgtctaccc

SEQ ID NO: 117586 - DNA, 25 bp, SARS Virus
actactggtgtggtccgtctacccg

SEQ ID NO: 117587 - DNA, 25 bp, SARS Virus
ctactggtgtgtgccgtctacccga

SEQ ID NO: 117588 - DNA, 25 bp, SARS Virus
tactggtgtgttgcgtctacccgat

SEQ ID NO: 117589 - DNA, 25 bp, SARS Virus
actggtgtgttcggtctacccgata

SEQ ID NO: 117590 - DNA, 25 bp, SARS Virus
ctggtgtgttccgtctacccgatac

SEQ ID NO: 117591 - DNA, 25 bp, SARS Virus
tggtgtgttccggctacccgataca

SEQ ID NO: 117592 - DNA, 25 bp, SARS Virus
ggtgtgttccgtgtacccgatacat

SEQ ID NO: 117593 - DNA, 25 bp, SARS Virus
gtgtgttccgtcgacccgatacatt

SEQ ID NO: 117594 - DNA, 25 bp, SARS Virus
tgtgttccgtctgcccgatacattt

SEQ ID NO: 117595 - DNA, 25 bp, SARS Virus
gtgttccgtctagccgatacatttg

SEQ ID NO: 117596 - DNA, 25 bp, SARS Virus
tgttccgtctacgcgatacatttgc

SEQ ID NO: 117597 - DNA, 25 bp, SARS Virus
gttccgtctaccggatacatttgca

SEQ ID NO: 117598 - DNA, 25 bp, SARS Virus
ttccgtctacccgatacatttgcaa

SEQ ID NO: 117599 - DNA, 25 bp, SARS Virus
tccgtctacccggtacatttgcaaa

SEQ ID NO: 117600 - DNA, 25 bp, SARS Virus
ccgtctacccgagacatttgcaaaa

SEQ ID NO: 117601 - DNA, 25 bp, SARS Virus
cgtctacccgatgcatttgcaaaag

SEQ ID NO: 117602 - DNA, 25 bp, SARS Virus
gtctacccgatagatttgcaaaagc

SEQ ID NO: 117603 - DNA, 25 bp, SARS Virus
tctacccgatacgtttgcaaaagcg

SEQ ID NO: 117604 - DNA, 25 bp, SARS Virus
ctacccgatacagttgcaaaagcgt

SEQ ID NO: 117605 - DNA, 25 bp, SARS Virus
tacccgatacatgtgcaaaagcgtt

SEQ ID NO: 117606 - DNA, 25 bp, SARS Virus
acccgatacattggcaaaagcgtta

SEQ ID NO: 117607 - DNA, 25 bp, SARS Virus
cccgatacatttgcaaaagcgttaa

SEQ ID NO: 117608 - DNA, 25 bp, SARS Virus
ccgatacatttggaaaagcgttaag

SEQ ID NO: 117609 - DNA, 25 bp, SARS Virus
cgatacatttgcgaaagcgttaagg

SEQ ID NO: 117610 - DNA, 25 bp, SARS Virus
gatacatttgcagaagcgttaaggc

SEQ ID NO: 117611 - DNA, 25 bp, SARS Virus
atacatttgcaagagcgttaaggca

SEQ ID NO: 117612 - DNA, 25 bp, SARS Virus
tacatttgcaaaggcgttaaggcaa

SEQ ID NO: 117613 - DNA, 25 bp, SARS Virus
acatttgcaaaagcgttaaggcaaa

SEQ ID NO: 117614 - DNA, 25 bp, SARS Virus
catttgcaaaagggttaaggcaaat

SEQ ID NO: 117615 - DNA, 25 bp, SARS Virus
atttgcaaaagcgttaaggcaaatg

SEQ ID NO: 117616 - DNA, 25 bp, SARS Virus
tttgcaaaagcggtaaggcaaatgc

SEQ ID NO: 117617 - DNA, 25 bp, SARS Virus
ttgcaaaagcgtgaaggcaaatgct

SEQ ID NO: 117618 - DNA, 25 bp, SARS Virus
tgcaaaagcgttgaggcaaatgcta

SEQ ID NO: 117619 - DNA, 25 bp, SARS Virus
gcaaaagcgttagggcaaatgctat

SEQ ID NO: 117620 - DNA, 25 bp, SARS Virus
caaaagcgttaaggcaaatgctatg

SEQ ID NO: 117621 - DNA, 25 bp, SARS Virus
aaaagcgttaaggcaaatgctatgt

SEQ ID NO: 117622 - DNA, 25 bp, SARS Virus
aaagcgttaagggaaatgctatgta

SEQ ID NO: 117623 - DNA, 25 bp, SARS Virus
aagcgttaaggcgaatgctatgtat

SEQ ID NO: 117624 - DNA, 25 bp, SARS Virus
agcgttaaggcagatgctatgtatc

SEQ ID NO: 117625 - DNA, 25 bp, SARS Virus
gcgttaaggcaagtgctatgtatca

SEQ ID NO: 117626 - DNA, 25 bp, SARS Virus
cgttaaggcaaaggctatgtatcag

SEQ ID NO: 117627 - DNA, 25 bp, SARS Virus
gttaaggcaaatgctatgtatcaga

SEQ ID NO: 117628 - DNA, 25 bp, SARS Virus
ttaaggcaaatggtatgtatcagat

SEQ ID NO: 117629 - DNA, 25 bp, SARS Virus
taaggcaaatgcgatgtatcagatg

SEQ ID NO: 117630 - DNA, 25 bp, SARS Virus
aaggcaaatgctgtgtatcagatga

SEQ ID NO: 117631 - DNA, 25 bp, SARS Virus
aggcaaatgctaggtatcagatgag

SEQ ID NO: 117632 - DNA, 25 bp, SARS Virus
ggcaaatgctatgtatcagatgaga

SEQ ID NO: 117633 - DNA, 25 bp, SARS Virus
gcaaatgctatggatcagatgagaa

SEQ ID NO: 117634 - DNA, 25 bp, SARS Virus
caaatgctatgtgtcagatgagaac

SEQ ID NO: 117635 - DNA, 25 bp, SARS Virus
aaatgctatgtagcagatgagaaca

SEQ ID NO: 117636 - DNA, 25 bp, SARS Virus
aatgctatgtatgagatgagaacac

SEQ ID NO: 117637 - DNA, 25 bp, SARS Virus
atgctatgtatcggatgagaacacg

SEQ ID NO: 117638 - DNA, 25 bp, SARS Virus
tgctatgtatcagatgagaacacgt

SEQ ID NO: 117639 - DNA, 25 bp, SARS Virus
gctatgtatcaggtgagaacacgtc

SEQ ID NO: 117640 - DNA, 25 bp, SARS Virus
ctatgtatcagaggagaacacgtct

SEQ ID NO: 117641 - DNA, 25 bp, SARS Virus
tatgtatcagatgagaacacgtctt

SEQ ID NO: 117642 - DNA, 25 bp, SARS Virus
atgtatcagatgggaacacgtctta

SEQ ID NO: 117643 - DNA, 25 bp, SARS Virus
tgtatcagatgagaacacgtcttac

SEQ ID NO: 117644 - DNA, 25 bp, SARS Virus
gtatcagatgaggacacgtcttact

SEQ ID NO: 117645 - DNA, 25 bp, SARS Virus
tatcagatgagagcacgtcttactt

SEQ ID NO: 117646 - DNA, 25 bp, SARS Virus
atcagatgagaagacgtcttactta

SEQ ID NO: 117647 - DNA, 25 bp, SARS Virus
tcagatgagaacgcgtcttacttaa

SEQ ID NO: 117648 - DNA, 25 bp, SARS Virus
cagatgagaacaggtcttacttaag

SEQ ID NO: 117649 - DNA, 25 bp, SARS Virus
agatgagaacacgtcttacttaaga

SEQ ID NO: 117650 - DNA, 25 bp, SARS Virus
gatgagaacacggcttacttaagag

SEQ ID NO: 117651 - DNA, 25 bp, SARS Virus
atgagaacacgtgttacttaagagc

SEQ ID NO: 117652 - DNA, 25 bp, SARS Virus
tgagaacacgtcgtacttaagagca

SEQ ID NO: 117653 - DNA, 25 bp, SARS Virus
gagaacacgtctgacttaagagcat

SEQ ID NO: 117654 - DNA, 25 bp, SARS Virus
agaacacgtcttgcttaagagcatt

SEQ ID NO: 117655 - DNA, 25 bp, SARS Virus
gaacacgtcttagttaagagcattg

SEQ ID NO: 117656 - DNA, 25 bp, SARS Virus
aacacgtcttacgtaagagcattga

SEQ ID NO: 117657 - DNA, 25 bp, SARS Virus
acacgtcttactgaagagcattgat

SEQ ID NO: 117658 - DNA, 25 bp, SARS Virus
cacgtcttacttgagagcattgatt

SEQ ID NO: 117659 - DNA, 25 bp, SARS Virus
acgtcttacttaggagcattgattt

SEQ ID NO: 117660 - DNA, 25 bp, SARS Virus
cgtcttacttaagagcattgatttg

SEQ ID NO: 117661 - DNA, 25 bp, SARS Virus
gtcttacttaagggcattgatttgt

SEQ ID NO: 117662 - DNA, 25 bp, SARS Virus
tcttacttaagagcattgatttgtc

SEQ ID NO: 117663 - DNA, 25 bp, SARS Virus
cttacttaagaggattgatttgtcg

SEQ ID NO: 117664 - DNA, 25 bp, SARS Virus
ttacttaagagcgttgatttgtcgt

SEQ ID NO: 117665 - DNA, 25 bp, SARS Virus
tacttaagagcagtgatttgtcgtg

SEQ ID NO: 117666 - DNA, 25 bp, SARS Virus
acttaagagcatggatttgtcgtgt

SEQ ID NO: 117667 - DNA, 25 bp, SARS Virus
cttaagagcattgatttgtcgtgtt

SEQ ID NO: 117668 - DNA, 25 bp, SARS Virus
ttaagagcattggtttgtcgtgttc

SEQ ID NO: 117669 - DNA, 25 bp, SARS Virus
taagagcattgagttgtcgtgttca

SEQ ID NO: 117670 - DNA, 25 bp, SARS Virus
aagagcattgatgtgtcgtgttcat

SEQ ID NO: 117671 - DNA, 25 bp, SARS Virus
agagcattgattggtcgtgttcatc

SEQ ID NO: 117672 - DNA, 25 bp, SARS Virus
gagcattgatttgtcgtgttcatcc

SEQ ID NO: 117673 - DNA, 25 bp, SARS Virus
agcattgatttggcgtgttcatcca

SEQ ID NO: 117674 - DNA, 25 bp, SARS Virus
gcattgatttgtggtgttcatccaa

SEQ ID NO: 117675 - DNA, 25 bp, SARS Virus
cattgatttgtcgtgttcatccaaa

SEQ ID NO: 117676 - DNA, 25 bp, SARS Virus
attgatttgtcgggttcatccaaat

SEQ ID NO: 117677 - DNA, 25 bp, SARS Virus
ttgatttgtcgtgttcatccaaatc

SEQ ID NO: 117678 - DNA, 25 bp, SARS Virus
tgatttgtcgtggtcatccaaatca

SEQ ID NO: 117679 - DNA, 25 bp, SARS Virus
gatttgtcgtgtgcatccaaatcaa

SEQ ID NO: 117680 - DNA, 25 bp, SARS Virus
atttgtcgtgttgatccaaatcaat

SEQ ID NO: 117681 - DNA, 25 bp, SARS Virus
tttgtcgtgttcgtccaaatcaatt

SEQ ID NO: 117682 - DNA, 25 bp, SARS Virus
ttgtcgtgttcagccaaatcaattg

SEQ ID NO: 117683 - DNA, 25 bp, SARS Virus
tgtcgtgttcatgcaaatcaattga

SEQ ID NO: 117684 - DNA, 25 bp, SARS Virus
gtcgtgttcatcgaaatcaattgaa

SEQ ID NO: 117685 - DNA, 25 bp, SARS Virus
tcgtgttcatccgaatcaattgaaa

SEQ ID NO: 117686 - DNA, 25 bp, SARS Virus
cgtgttcatccagatcaattgaaat

SEQ ID NO: 117687 - DNA, 25 bp, SARS Virus
gtgttcatccaagtcaattgaaatt

SEQ ID NO: 117688 - DNA, 25 bp, SARS Virus
tgttcatccaaagcaattgaaatta

SEQ ID NO: 117689 - DNA, 25 bp, SARS Virus
gttcatccaaatgaattgaaattag

SEQ ID NO: 117690 - DNA, 25 bp, SARS Virus
ttcatccaaatcgattgaaattaga

SEQ ID NO: 117691 - DNA, 25 bp, SARS Virus
tcatccaaatcagttgaaattagag

SEQ ID NO: 117692 - DNA, 25 bp, SARS Virus
catccaaatcaagtgaaattagagt

SEQ ID NO: 117693 - DNA, 25 bp, SARS Virus
atccaaatcaatggaaattagagtg

SEQ ID NO: 117694 - DNA, 25 bp, SARS Virus
tccaaatcaattgaaattagagtgt

SEQ ID NO: 117695 - DNA, 25 bp, SARS Virus
ccaaatcaattggaattagagtgta

SEQ ID NO: 117696 - DNA, 25 bp, SARS Virus
caaatcaattgagattagagtgtat

SEQ ID NO: 117697 - DNA, 25 bp, SARS Virus
aaatcaattgaagttagagtgtatc

SEQ ID NO: 117698 - DNA, 25 bp, SARS Virus
aatcaattgaaagtagagtgtatcg

SEQ ID NO: 117699 - DNA, 25 bp, SARS Virus
atcaattgaaatgagagtgtatcgt

SEQ ID NO: 117700 - DNA, 25 bp, SARS Virus
tcaattgaaattggagtgtatcgtt

SEQ ID NO: 117701 - DNA, 25 bp, SARS Virus
caattgaaattagagtgtatcgtta

SEQ ID NO: 117702 - DNA, 25 bp, SARS Virus
aattgaaattagggtgtatcgttag

SEQ ID NO: 117703 - DNA, 25 bp, SARS Virus
attgaaattagagtgtatcgttaga

SEQ ID NO: 117704 - DNA, 25 bp, SARS Virus
ttgaaattagagggtatcgttagaa

SEQ ID NO: 117705 - DNA, 25 bp, SARS Virus
tgaaattagagtgtatcgttagaaa

SEQ ID NO: 117706 - DNA, 25 bp, SARS Virus
gaaattagagtggatcgttagaaat

SEQ ID NO: 117707 - DNA, 25 bp, SARS Virus
aaattagagtgtgtcgttagaaatt

SEQ ID NO: 117708 - DNA, 25 bp, SARS Virus
aattagagtgtagcgttagaaatta

SEQ ID NO: 117709 - DNA, 25 bp, SARS Virus
attagagtgtatggttagaaattag

SEQ ID NO: 117710 - DNA, 25 bp, SARS Virus
ttagagtgtatcgttagaaattagt

SEQ ID NO: 117711 - DNA, 25 bp, SARS Virus
tagagtgtatcggtagaaattagtt

SEQ ID NO: 117712 - DNA, 25 bp, SARS Virus
agagtgtatcgtgagaaattagtta

SEQ ID NO: 117713 - DNA, 25 bp, SARS Virus
gagtgtatcgttggaaattagttac

SEQ ID NO: 117714 - DNA, 25 bp, SARS Virus
agtgtatcgttagaaattagttaca

SEQ ID NO: 117715 - DNA, 25 bp, SARS Virus
gtgtatcgttaggaattagttacac

SEQ ID NO: 117716 - DNA, 25 bp, SARS Virus
tgtatcgttagagattagttacaca

SEQ ID NO: 117717 - DNA, 25 bp, SARS Virus
gtatcgttagaagttagttacacat

SEQ ID NO: 117718 - DNA, 25 bp, SARS Virus
tatcgttagaaagtagttacacatt

SEQ ID NO: 117719 - DNA, 25 bp, SARS Virus
atcgttagaaatgagttacacattg

SEQ ID NO: 117720 - DNA, 25 bp, SARS Virus
tcgttagaaattggttacacattgt

SEQ ID NO: 117721 - DNA, 25 bp, SARS Virus
cgttagaaattagttacacattgta

SEQ ID NO: 117722 - DNA, 25 bp, SARS Virus
gttagaaattaggtacacattgtaa

SEQ ID NO: 117723 - DNA, 25 bp, SARS Virus
ttagaaattagtgacacattgtaat

SEQ ID NO: 117724 - DNA, 25 bp, SARS Virus
tagaaattagttgcacattgtaatc

SEQ ID NO: 117725 - DNA, 25 bp, SARS Virus
agaaattagttagacattgtaatcc

SEQ ID NO: 117726 - DNA, 25 bp, SARS Virus
gaaattagttacgcattgtaatccc

SEQ ID NO: 117727 - DNA, 25 bp, SARS Virus
aaattagttacagattgtaatccct

SEQ ID NO: 117728 - DNA, 25 bp, SARS Virus
aattagttacacgttgtaatccctc

SEQ ID NO: 117729 - DNA, 25 bp, SARS Virus
attagttacacagtgtaatccctcc

SEQ ID NO: 117730 - DNA, 25 bp, SARS Virus
ttagttacacatggtaatccctcct

SEQ ID NO: 117731 - DNA, 25 bp, SARS Virus
tagttacacattgtaatccctcctg

SEQ ID NO: 117732 - DNA, 25 bp, SARS Virus
agttacacattggaatccctcctga

SEQ ID NO: 117733 - DNA, 25 bp, SARS Virus
gttacacattgtgatccctcctgaa

SEQ ID NO: 117734 - DNA, 25 bp, SARS Virus
ttacacattgtagtccctcctgaac

SEQ ID NO: 117735 - DNA, 25 bp, SARS Virus
tacacattgtaagccctcctgaact

SEQ ID NO: 117736 - DNA, 25 bp, SARS Virus
acacattgtaatgcctcctgaactt

SEQ ID NO: 117737 - DNA, 25 bp, SARS Virus
cgtaagaaaccttacagtgcgtaac

SEQ ID NO: 117738 - DNA, 25 bp, SARS Virus
gtaagaaacctttcagtgcgtaacc

SEQ ID NO: 117739 - DNA, 25 bp, SARS Virus
taagaaaccttatagtgcgtaaccg

SEQ ID NO: 117740 - DNA, 25 bp, SARS Virus
aagaaaccttactgtgcgtaaccgt

SEQ ID NO: 117741 - DNA, 25 bp, SARS Virus
agaaaccttacattgcgtaaccgta

SEQ ID NO: 117742 - DNA, 25 bp, SARS Virus
gaaaccttacagtgcgtaaccgtac

SEQ ID NO: 117743 - DNA, 25 bp, SARS Virus
aaaccttacagttcgtaaccgtacc

SEQ ID NO: 117744 - DNA, 25 bp, SARS Virus
aaccttacagtgtgtaaccgtacct

SEQ ID NO: 117745 - DNA, 25 bp, SARS Virus
accttacagtgcttaaccgtacctt

SEQ ID NO: 117746 - DNA, 25 bp, SARS Virus
ccttacagtgcgtaaccgtaccttc

SEQ ID NO: 117747 - DNA, 25 bp, SARS Virus
cttacagtgcgttaccgtaccttca

SEQ ID NO: 117748 - DNA, 25 bp, SARS Virus
ttacagtgcgtatccgtaccttcag

SEQ ID NO: 117749 - DNA, 25 bp, SARS Virus
tacagtgcgtaatcgtaccttcagt

SEQ ID NO: 117750 - DNA, 25 bp, SARS Virus
acagtgcgtaactgtaccttcagtg

SEQ ID NO: 117751 - DNA, 25 bp, SARS Virus
cagtgcgtaaccttaccttcagtgt

SEQ ID NO: 117752 - DNA, 25 bp, SARS Virus
agtgcgtaaccgtaccttcagtgtg

SEQ ID NO: 117753 - DNA, 25 bp, SARS Virus
gtgcgtaaccgttccttcagtgtgg

SEQ ID NO: 117754 - DNA, 25 bp, SARS Virus
tgcgtaaccgtatcttcagtgtgga

SEQ ID NO: 117755 - DNA, 25 bp, SARS Virus
gcgtaaccgtactttcagtgtggaa

SEQ ID NO: 117756 - DNA, 25 bp, SARS Virus
cgtaaccgtaccttcagtgtggaag

SEQ ID NO: 117757 - DNA, 25 bp, SARS Virus
gtaaccgtaccttcagtgtggaagc

SEQ ID NO: 117758 - DNA, 25 bp, SARS Virus
taaccgtacctttagtgtggaagcc

SEQ ID NO: 117759 - DNA, 25 bp, SARS Virus
aaccgtaccttctgtgtggaagccc

SEQ ID NO: 117760 - DNA, 25 bp, SARS Virus
accgtaccttcattgtggaagccct

SEQ ID NO: 117761 - DNA, 25 bp, SARS Virus
ccgtaccttcagtgtggaagccctt

SEQ ID NO: 117762 - DNA, 25 bp, SARS Virus
cgtaccttcagtttggaagcccttg

SEQ ID NO: 117763 - DNA, 25 bp, SARS Virus
gtaccttcagtgtggaagcccttgt

SEQ ID NO: 117764 - DNA, 25 bp, SARS Virus
taccttcagtgttgaagcccttgta

SEQ ID NO: 117765 - DNA, 25 bp, SARS Virus
accttcagtgtgtaagcccttgtac

SEQ ID NO: 117766 - DNA, 25 bp, SARS Virus
ccttcagtgtggtagcccttgtacc

SEQ ID NO: 117767 - DNA, 25 bp, SARS Virus
cttcagtgtggatgcccttgtaccg

SEQ ID NO: 117768 - DNA, 25 bp, SARS Virus
ttcagtgtggaatcccttgtaccga

SEQ ID NO: 117769 - DNA, 25 bp, SARS Virus
tcagtgtggaagtccttgtaccgac

SEQ ID NO: 117770 - DNA, 25 bp, SARS Virus
cagtgtggaagctcttgtaccgact

SEQ ID NO: 117771 - DNA, 25 bp, SARS Virus
agtgtggaagcctttgtaccgactg

SEQ ID NO: 117772 - DNA, 25 bp, SARS Virus
gtgtggaagcccttgtaccgactga

SEQ ID NO: 117773 - DNA, 25 bp, SARS Virus
tgtggaagcccttgtaccgactgaa

SEQ ID NO: 117774 - DNA, 25 bp, SARS Virus
gtggaagcccttttaccgactgaat

SEQ ID NO: 117775 - DNA, 25 bp, SARS Virus
tggaagcccttgtaccgactgaata

SEQ ID NO: 117776 - DNA, 25 bp, SARS Virus
ggaagcccttgttccgactgaatag

SEQ ID NO: 117777 - DNA, 25 bp, SARS Virus
gaagcccttgtatcgactgaatagt

SEQ ID NO: 117778 - DNA, 25 bp, SARS Virus
aagcccttgtactgactgaatagta

SEQ ID NO: 117779 - DNA, 25 bp, SARS Virus
agcccttgtacctactgaatagtac

SEQ ID NO: 117780 - DNA, 25 bp, SARS Virus
gcccttgtaccgtctgaatagtacc

SEQ ID NO: 117781 - DNA, 25 bp, SARS Virus
cccttgtaccgattgaatagtacct

SEQ ID NO: 117782 - DNA, 25 bp, SARS Virus
ccttgtaccgactgaatagtacctc

SEQ ID NO: 117783 - DNA, 25 bp, SARS Virus
cttgtaccgacttaatagtacctcg

SEQ ID NO: 117784 - DNA, 25 bp, SARS Virus
ttgtaccgactgtatagtacctcgg

SEQ ID NO: 117785 - DNA, 25 bp, SARS Virus
tgtaccgactgattagtacctcggt

SEQ ID NO: 117786 - DNA, 25 bp, SARS Virus
gtaccgactgaatagtacctcggta

SEQ ID NO: 117787 - DNA, 25 bp, SARS Virus
taccgactgaattgtacctcggtaa

SEQ ID NO: 117788 - DNA, 25 bp, SARS Virus
accgactgaatattacctcggtaat

SEQ ID NO: 117789 - DNA, 25 bp, SARS Virus
ccgactgaatagtacctcggtaatt

SEQ ID NO: 117790 - DNA, 25 bp, SARS Virus
cgactgaatagttcctcggtaattt

SEQ ID NO: 117791 - DNA, 25 bp, SARS Virus
gactgaatagtatctcggtaattta

SEQ ID NO: 117792 - DNA, 25 bp, SARS Virus
actgaatagtacttcggtaatttaa

SEQ ID NO: 117793 - DNA, 25 bp, SARS Virus
ctgaatagtacctcggtaatttaac

SEQ ID NO: 117794 - DNA, 25 bp, SARS Virus
tgaatagtaccttggtaatttaacc

SEQ ID NO: 117795 - DNA, 25 bp, SARS Virus
gaatagtacctctgtaatttaacct

SEQ ID NO: 117796 - DNA, 25 bp, SARS Virus
aatagtacctcgttaatttaaccta

SEQ ID NO: 117797 - DNA, 25 bp, SARS Virus
atagtacctcggtaatttaacctac

SEQ ID NO: 117798 - DNA, 25 bp, SARS Virus
tagtacctcggttatttaacctact

SEQ ID NO: 117799 - DNA, 25 bp, SARS Virus
agtacctcggtattttaacctactg

SEQ ID NO: 117800 - DNA, 25 bp, SARS Virus
gtacctcggtaatttaacctactgt

SEQ ID NO: 117801 - DNA, 25 bp, SARS Virus
tacctcggtaatttaacctactgtt

SEQ ID NO: 117802 - DNA, 25 bp, SARS Virus
acctcggtaatttaacctactgttt

SEQ ID NO: 117803 - DNA, 25 bp, SARS Virus
cctcggtaattttacctactgtttc

SEQ ID NO: 117804 - DNA, 25 bp, SARS Virus
ctcggtaatttatcctactgtttct

SEQ ID NO: 117805 - DNA, 25 bp, SARS Virus
tcggtaatttaatctactgtttcta

SEQ ID NO: 117806 - DNA, 25 bp, SARS Virus
cggtaatttaacttactgtttctag

SEQ ID NO: 117807 - DNA, 25 bp, SARS Virus
ggtaatttaacctactgtttctagg

SEQ ID NO: 117808 - DNA, 25 bp, SARS Virus
gtaatttaaccttctgtttctaggt

SEQ ID NO: 117809 - DNA, 25 bp, SARS Virus
taatttaacctattgtttctaggtg

SEQ ID NO: 117810 - DNA, 25 bp, SARS Virus
aatttaacctactgtttctaggtgt

SEQ ID NO: 117811 - DNA, 25 bp, SARS Virus
atttaacctactttttctaggtgtt

SEQ ID NO: 117812 - DNA, 25 bp, SARS Virus
tttaacctactgtttctaggtgtta

SEQ ID NO: 117813 - DNA, 25 bp, SARS Virus
ttaacctactgtttctaggtgttaa

SEQ ID NO: 117814 - DNA, 25 bp, SARS Virus
taacctactgtttctaggtgttaag

SEQ ID NO: 117815 - DNA, 25 bp, SARS Virus
aacctactgtttttaggtgttaagt

SEQ ID NO: 117816 - DNA, 25 bp, SARS Virus
acctactgtttctaggtgttaagtt

SEQ ID NO: 117817 - DNA, 25 bp, SARS Virus
cctactgtttcttggtgttaagttt

SEQ ID NO: 117818 - DNA, 25 bp, SARS Virus
ctactgtttctatgtgttaagtttc

SEQ ID NO: 117819 - DNA, 25 bp, SARS Virus
tactgtttctagttgttaagtttct

SEQ ID NO: 117820 - DNA, 25 bp, SARS Virus
actgtttctaggtgttaagtttctg

SEQ ID NO: 117821 - DNA, 25 bp, SARS Virus
ctgtttctaggttttaagtttctgt

SEQ ID NO: 117822 - DNA, 25 bp, SARS Virus
tgtttctaggtgttaagtttctgtt

SEQ ID NO: 117823 - DNA, 25 bp, SARS Virus
gtttctaggtgttaagtttctgttg

SEQ ID NO: 117824 - DNA, 25 bp, SARS Virus
tttctaggtgtttagtttctgttgc

SEQ ID NO: 117825 - DNA, 25 bp, SARS Virus
ttctaggtgttatgtttctgttgca

SEQ ID NO: 117826 - DNA, 25 bp, SARS Virus
tctaggtgttaattttctgttgcag

SEQ ID NO: 117827 - DNA, 25 bp, SARS Virus
ctaggtgttaagtttctgttgcagt

SEQ ID NO: 117828 - DNA, 25 bp, SARS Virus
taggtgttaagtttctgttgcagta

SEQ ID NO: 117829 - DNA, 25 bp, SARS Virus
aggtgttaagtttctgttgcagtat

SEQ ID NO: 117830 - DNA, 25 bp, SARS Virus
ggtgttaagtttttgttgcagtatg

SEQ ID NO: 117831 - DNA, 25 bp, SARS Virus
gtgttaagtttctgttgcagtatga

SEQ ID NO: 117832 - DNA, 25 bp, SARS Virus
tgttaagtttcttttgcagtatgac

SEQ ID NO: 117833 - DNA, 25 bp, SARS Virus
gttaagtttctgttgcagtatgacg

SEQ ID NO: 117834 - DNA, 25 bp, SARS Virus
ttaagtttctgttgcagtatgacga

SEQ ID NO: 117835 - DNA, 25 bp, SARS Virus
taagtttctgtttcagtatgacgac

SEQ ID NO: 117836 - DNA, 25 bp, SARS Virus
aagtttctgttgtagtatgacgact

SEQ ID NO: 117837 - DNA, 25 bp, SARS Virus
agtttctgttgctgtatgacgactt

SEQ ID NO: 117838 - DNA, 25 bp, SARS Virus
gtttctgttgcattatgacgacttg

SEQ ID NO: 117839 - DNA, 25 bp, SARS Virus
tttctgttgcagtatgacgacttgt

SEQ ID NO: 117840 - DNA, 25 bp, SARS Virus
ttctgttgcagtttgacgacttgtt

SEQ ID NO: 117841 - DNA, 25 bp, SARS Virus
tctgttgcagtatgacgacttgttc

SEQ ID NO: 117842 - DNA, 25 bp, SARS Virus
ctgttgcagtattacgacttgttcg

SEQ ID NO: 117843 - DNA, 25 bp, SARS Virus
tgttgcagtatgtcgacttgttcgt

SEQ ID NO: 117844 - DNA, 25 bp, SARS Virus
gttgcagtatgatgacttgttcgtg

SEQ ID NO: 117845 - DNA, 25 bp, SARS Virus
ttgcagtatgactacttgttcgtgt

SEQ ID NO: 117846 - DNA, 25 bp, SARS Virus
tgcagtatgacgtcttgttcgtgta

SEQ ID NO: 117847 - DNA, 25 bp, SARS Virus
gcagtatgacgatttgttcgtgtaa

SEQ ID NO: 117848 - DNA, 25 bp, SARS Virus
cagtatgacgacttgttcgtgtaac

SEQ ID NO: 117849 - DNA, 25 bp, SARS Virus
agtatgacgacttgttcgtgtaact

SEQ ID NO: 117850 - DNA, 25 bp, SARS Virus
gtatgacgactttttcgtgtaactg

SEQ ID NO: 117851 - DNA, 25 bp, SARS Virus
tatgacgacttgttcgtgtaactgc

SEQ ID NO: 117852 - DNA, 25 bp, SARS Virus
atgacgacttgttcgtgtaactgcg

SEQ ID NO: 117853 - DNA, 25 bp, SARS Virus
tgacgacttgtttgtgtaactgcgt

SEQ ID NO: 117854 - DNA, 25 bp, SARS Virus
gacgacttgttcttgtaactgcgta

SEQ ID NO: 117855 - DNA, 25 bp, SARS Virus
acgacttgttcgtgtaactgcgtat

SEQ ID NO: 117856 - DNA, 25 bp, SARS Virus
cgacttgttcgtttaactgcgtatg

SEQ ID NO: 117857 - DNA, 25 bp, SARS Virus
gacttgttcgtgtaactgcgtatgt

SEQ ID NO: 117858 - DNA, 25 bp, SARS Virus
acttgttcgtgttactgcgtatgtt

SEQ ID NO: 117859 - DNA, 25 bp, SARS Virus
cttgttcgtgtatctgcgtatgttt

SEQ ID NO: 117860 - DNA, 25 bp, SARS Virus
ttgttcgtgtaattgcgtatgtttt

SEQ ID NO: 117861 - DNA, 25 bp, SARS Virus
tgttcgtgtaactgcgtatgttttg

SEQ ID NO: 117862 - DNA, 25 bp, SARS Virus
gttcgtgtaacttcgtatgttttgt

SEQ ID NO: 117863 - DNA, 25 bp, SARS Virus
ttcgtgtaactgtgtatgttttgta

SEQ ID NO: 117864 - DNA, 25 bp, SARS Virus
tcgtgtaactgcttatgttttgtaa

SEQ ID NO: 117865 - DNA, 25 bp, SARS Virus
cgtgtaactgcgtatgttttgtaag

SEQ ID NO: 117866 - DNA, 25 bp, SARS Virus
gtgtaactgcgtttgttttgtaagg

SEQ ID NO: 117867 - DNA, 25 bp, SARS Virus
tgtaactgcgtatgttttgtaaggg

SEQ ID NO: 117868 - DNA, 25 bp, SARS Virus
gtaactgcgtattttttgtaagggt

SEQ ID NO: 117869 - DNA, 25 bp, SARS Virus
taactgcgtatgttttgtaagggtg

SEQ ID NO: 117870 - DNA, 25 bp, SARS Virus
aactgcgtatgttttgtaagggtgg

SEQ ID NO: 117871 - DNA, 25 bp, SARS Virus
actgcgtatgttttgtaagggtggt

SEQ ID NO: 117872 - DNA, 25 bp, SARS Virus
ctgcgtatgttttgtaagggtggtt

SEQ ID NO: 117873 - DNA, 25 bp, SARS Virus
tgcgtatgttttttaagggtggttg

SEQ ID NO: 117874 - DNA, 25 bp, SARS Virus
gcgtatgttttgtaagggtggttgt

SEQ ID NO: 117875 - DNA, 25 bp, SARS Virus
cgtatgttttgttagggtggttgtc

SEQ ID NO: 117876 - DNA, 25 bp, SARS Virus
gtatgttttgtatgggtggttgtct

SEQ ID NO: 117877 - DNA, 25 bp, SARS Virus
tatgttttgtaatggtggttgtctc

SEQ ID NO: 117878 - DNA, 25 bp, SARS Virus
atgttttgtaagtgtggttgtctcg

SEQ ID NO: 117879 - DNA, 25 bp, SARS Virus
tgttttgtaaggttggttgtctcgg

SEQ ID NO: 117880 - DNA, 25 bp, SARS Virus
gttttgtaagggtggttgtctcgga

SEQ ID NO: 117881 - DNA, 25 bp, SARS Virus
ttttgtaagggttgttgtctcggat

SEQ ID NO: 117882 - DNA, 25 bp, SARS Virus
tttgtaagggtgtttgtctcggatt

SEQ ID NO: 117883 - DNA, 25 bp, SARS Virus
ttgtaagggtggttgtctcggattt

SEQ ID NO: 117884 - DNA, 25 bp, SARS Virus
tgtaagggtggttgtctcggatttt

SEQ ID NO: 117885 - DNA, 25 bp, SARS Virus
gtaagggtggttttctcggattttt

SEQ ID NO: 117886 - DNA, 25 bp, SARS Virus
taagggtggttgtctcggatttttc

SEQ ID NO: 117887 - DNA, 25 bp, SARS Virus
aagggtggttgtttcggatttttcc

SEQ ID NO: 117888 - DNA, 25 bp, SARS Virus
agggtggttgtctcggatttttcct

SEQ ID NO: 117889 - DNA, 25 bp, SARS Virus
gggtggttgtcttggatttttcctg

SEQ ID NO: 117890 - DNA, 25 bp, SARS Virus
ggtggttgtctctgatttttcctgt

SEQ ID NO: 117891 - DNA, 25 bp, SARS Virus
gtggttgtctcgtatttttcctgtt

SEQ ID NO: 117892 - DNA, 25 bp, SARS Virus
tggttgtctcggttttttcctgttt

SEQ ID NO: 117893 - DNA, 25 bp, SARS Virus
ggttgtctcggatttttcctgtttt

SEQ ID NO: 117894 - DNA, 25 bp, SARS Virus
gttgtctcggatttttcctgttttt

SEQ ID NO: 117895 - DNA, 25 bp, SARS Virus
ttgtctcggatttttcctgtttttc

SEQ ID NO: 117896 - DNA, 25 bp, SARS Virus
tgtctcggatttttcctgtttttct

SEQ ID NO: 117897 - DNA, 25 bp, SARS Virus
gtctcggatttttcctgtttttctt

SEQ ID NO: 117898 - DNA, 25 bp, SARS Virus
tctcggattttttctgtttttcttt

SEQ ID NO: 117899 - DNA, 25 bp, SARS Virus
ctcggatttttcttgtttttctttt

SEQ ID NO: 117900 - DNA, 25 bp, SARS Virus
tcggatttttcctgtttttcttttt

SEQ ID NO: 117901 - DNA, 25 bp, SARS Virus
cggatttttcctttttttctttttc

SEQ ID NO: 117902 - DNA, 25 bp, SARS Virus
ggatttttcctgtttttctttttct

SEQ ID NO: 117903 - DNA, 25 bp, SARS Virus
gatttttcctgtttttctttttctg

SEQ ID NO: 117904 - DNA, 25 bp, SARS Virus
atttttcctgtttttctttttctga

SEQ ID NO: 117905 - DNA, 25 bp, SARS Virus
tttttcctgtttttctttttctgac

SEQ ID NO: 117906 - DNA, 25 bp, SARS Virus
ttttcctgtttttctttttctgact

SEQ ID NO: 117907 - DNA, 25 bp, SARS Virus
tttcctgtttttttttttctgacta

SEQ ID NO: 117908 - DNA, 25 bp, SARS Virus
ttcctgtttttctttttctgactac

SEQ ID NO: 117909 - DNA, 25 bp, SARS Virus
tcctgtttttctttttctgactact

SEQ ID NO: 117910 - DNA, 25 bp, SARS Virus
cctgtttttctttttctgactactt

SEQ ID NO: 117911 - DNA, 25 bp, SARS Virus
ctgtttttctttttctgactacttc

SEQ ID NO: 117912 - DNA, 25 bp, SARS Virus
tgtttttctttttctgactacttcg

SEQ ID NO: 117913 - DNA, 25 bp, SARS Virus
gtttttctttttttgactacttcga

SEQ ID NO: 117914 - DNA, 25 bp, SARS Virus
tttttctttttctgactacttcgag

SEQ ID NO: 117915 - DNA, 25 bp, SARS Virus
ttttctttttcttactacttcgagt

SEQ ID NO: 117916 - DNA, 25 bp, SARS Virus
tttctttttctgtctacttcgagtc

SEQ ID NO: 117917 - DNA, 25 bp, SARS Virus
ttctttttctgattacttcgagtcg

SEQ ID NO: 117918 - DNA, 25 bp, SARS Virus
tctttttctgactacttcgagtcgg

SEQ ID NO: 117919 - DNA, 25 bp, SARS Virus
ctttttctgacttcttcgagtcgga

SEQ ID NO: 117920 - DNA, 25 bp, SARS Virus
tttttctgactatttcgagtcggaa

SEQ ID NO: 117921 - DNA, 25 bp, SARS Virus
ttttctgactacttcgagtcggaaa

SEQ ID NO: 117922 - DNA, 25 bp, SARS Virus
tttctgactacttcgagtcggaaac

SEQ ID NO: 117923 - DNA, 25 bp, SARS Virus
ttctgactactttgagtcggaaacg

SEQ ID NO: 117924 - DNA, 25 bp, SARS Virus
tctgactacttctagtcggaaacgg

SEQ ID NO: 117925 - DNA, 25 bp, SARS Virus
ctgactacttcgtgtcggaaacggc

SEQ ID NO: 117926 - DNA, 25 bp, SARS Virus
tgactacttcgattcggaaacggcg

SEQ ID NO: 117927 - DNA, 25 bp, SARS Virus
gactacttcgagtcggaaacggcgt

SEQ ID NO: 117928 - DNA, 25 bp, SARS Virus
actacttcgagttggaaacggcgtc

SEQ ID NO: 117929 - DNA, 25 bp, SARS Virus
ctacttcgagtctgaaacggcgtct

SEQ ID NO: 117930 - DNA, 25 bp, SARS Virus
tacttcgagtcgtaaacggcgtctc

SEQ ID NO: 117931 - DNA, 25 bp, SARS Virus
acttcgagtcggtaacggcgtctct

SEQ ID NO: 117932 - DNA, 25 bp, SARS Virus
cttcgagtcggatacggcgtctctg

SEQ ID NO: 117933 - DNA, 25 bp, SARS Virus
ttcgagtcggaatcggcgtctctgt

SEQ ID NO: 117934 - DNA, 25 bp, SARS Virus
tcgagtcggaaatggcgtctctgtt

SEQ ID NO: 117935 - DNA, 25 bp, SARS Virus
cgagtcggaaactgcgtctctgttt

SEQ ID NO: 117936 - DNA, 25 bp, SARS Virus
gagtcggaaacgtcgtctctgtttt

SEQ ID NO: 117937 - DNA, 25 bp, SARS Virus
agtcggaaacggtgtctctgttttc

SEQ ID NO: 117938 - DNA, 25 bp, SARS Virus
gtcggaaacggcttctctgttttct

SEQ ID NO: 117939 - DNA, 25 bp, SARS Virus
tcggaaacggcgtctctgttttctt

SEQ ID NO: 117940 - DNA, 25 bp, SARS Virus
cggaaacggcgtttctgttttcttc

SEQ ID NO: 117941 - DNA, 25 bp, SARS Virus
ggaaacggcgtctctgttttcttcg

SEQ ID NO: 117942 - DNA, 25 bp, SARS Virus
gaaacggcgtctttgttttcttcgt

SEQ ID NO: 117943 - DNA, 25 bp, SARS Virus
aaacggcgtctctgttttcttcgtc

SEQ ID NO: 117944 - DNA, 25 bp, SARS Virus
aacggcgtctcttttttcttcgtcg

SEQ ID NO: 117945 - DNA, 25 bp, SARS Virus
acggcgtctctgttttcttcgtcgg

SEQ ID NO: 117946 - DNA, 25 bp, SARS Virus
cggcgtctctgttttcttcgtcggg

SEQ ID NO: 117947 - DNA, 25 bp, SARS Virus
ggcgtctctgttttcttcgtcgggt

SEQ ID NO: 117948 - DNA, 25 bp, SARS Virus
gcgtctctgttttcttcgtcgggtg

SEQ ID NO: 117949 - DNA, 25 bp, SARS Virus
cgtctctgtttttttcgtcgggtga

SEQ ID NO: 117950 - DNA, 25 bp, SARS Virus
gtctctgttttcttcgtcgggtgac

SEQ ID NO: 117951 - DNA, 25 bp, SARS Virus
tctctgttttcttcgtcgggtgaca

SEQ ID NO: 117952 - DNA, 25 bp, SARS Virus
ctctgttttctttgtcgggtgacac

SEQ ID NO: 117953 - DNA, 25 bp, SARS Virus
tctgttttcttcttcgggtgacact

SEQ ID NO: 117954 - DNA, 25 bp, SARS Virus
ctgttttcttcgtcgggtgacactg

SEQ ID NO: 117955 - DNA, 25 bp, SARS Virus
tgttttcttcgttgggtgacactga

SEQ ID NO: 117956 - DNA, 25 bp, SARS Virus
gttttcttcgtctggtgacactgag

SEQ ID NO: 117957 - DNA, 25 bp, SARS Virus
ttttcttcgtcgtgtgacactgaga

SEQ ID NO: 117958 - DNA, 25 bp, SARS Virus
tttcttcgtcggttgacactgagaa

SEQ ID NO: 117959 - DNA, 25 bp, SARS Virus
ttcttcgtcgggtgacactgagaag

SEQ ID NO: 117960 - DNA, 25 bp, SARS Virus
tcttcgtcgggttacactgagaaga

SEQ ID NO: 117961 - DNA, 25 bp, SARS Virus
cttcgtcgggtgtcactgagaagaa

SEQ ID NO: 117962 - DNA, 25 bp, SARS Virus
ttcgtcgggtgatactgagaagaag

SEQ ID NO: 117963 - DNA, 25 bp, SARS Virus
tcgtcgggtgactctgagaagaagg

SEQ ID NO: 117964 - DNA, 25 bp, SARS Virus
cgtcgggtgacattgagaagaagga

SEQ ID NO: 117965 - DNA, 25 bp, SARS Virus
gtcgggtgacactgagaagaaggac

SEQ ID NO: 117966 - DNA, 25 bp, SARS Virus
tcgggtgacacttagaagaaggacg

SEQ ID NO: 117967 - DNA, 25 bp, SARS Virus
cgggtgacactgtgaagaaggacgc

SEQ ID NO: 117968 - DNA, 25 bp, SARS Virus
gggtgacactgataagaaggacgcc

SEQ ID NO: 117969 - DNA, 25 bp, SARS Virus
ggtgacactgagtagaaggacgccg

SEQ ID NO: 117970 - DNA, 25 bp, SARS Virus
gtgacactgagatgaaggacgccga

SEQ ID NO: 117971 - DNA, 25 bp, SARS Virus
tgacactgagaataaggacgccgac

SEQ ID NO: 117972 - DNA, 25 bp, SARS Virus
gacactgagaagtaggacgccgact

SEQ ID NO: 117973 - DNA, 25 bp, SARS Virus
acactgagaagatggacgccgactg

SEQ ID NO: 117974 - DNA, 25 bp, SARS Virus
cactgagaagaatgacgccgactgt

SEQ ID NO: 117975 - DNA, 25 bp, SARS Virus
actgagaagaagtacgccgactgta

SEQ ID NO: 117976 - DNA, 25 bp, SARS Virus
ctgagaagaaggtcgccgactgtac

SEQ ID NO: 117977 - DNA, 25 bp, SARS Virus
tgagaagaaggatgccgactgtacc

SEQ ID NO: 117978 - DNA, 25 bp, SARS Virus
gagaagaaggactccgactgtacct

SEQ ID NO: 117979 - DNA, 25 bp, SARS Virus
agaagaaggacgtcgactgtaccta

SEQ ID NO: 117980 - DNA, 25 bp, SARS Virus
gaagaaggacgctgactgtacctac

SEQ ID NO: 117981 - DNA, 25 bp, SARS Virus
aagaaggacgcctactgtacctact

SEQ ID NO: 117982 - DNA, 25 bp, SARS Virus
agaaggacgccgtctgtacctacta

SEQ ID NO: 117983 - DNA, 25 bp, SARS Virus
gaaggacgccgattgtacctactaa

SEQ ID NO: 117984 - DNA, 25 bp, SARS Virus
aaggacgccgactgtacctactaaa

SEQ ID NO: 117985 - DNA, 25 bp, SARS Virus
aggacgccgactttacctactaaag

SEQ ID NO: 117986 - DNA, 25 bp, SARS Virus
ggacgccgactgtacctactaaaga

SEQ ID NO: 117987 - DNA, 25 bp, SARS Virus
gacgccgactgttcctactaaagag

SEQ ID NO: 117988 - DNA, 25 bp, SARS Virus
acgccgactgtatctactaaagagg

SEQ ID NO: 117989 - DNA, 25 bp, SARS Virus
cgccgactgtacttactaaagaggt

SEQ ID NO: 117990 - DNA, 25 bp, SARS Virus
gccgactgtacctactaaagaggtc

SEQ ID NO: 117991 - DNA, 25 bp, SARS Virus
ccgactgtaccttctaaagaggtct

SEQ ID NO: 117992 - DNA, 25 bp, SARS Virus
cgactgtacctattaaagaggtctg

SEQ ID NO: 117993 - DNA, 25 bp, SARS Virus
gactgtacctactaaagaggtctgt

SEQ ID NO: 117994 - DNA, 25 bp, SARS Virus
actgtacctacttaagaggtctgtt

SEQ ID NO: 117995 - DNA, 25 bp, SARS Virus
ctgtacctactatagaggtctgttg

SEQ ID NO: 117996 - DNA, 25 bp, SARS Virus
tgtacctactaatgaggtctgttga

SEQ ID NO: 117997 - DNA, 25 bp, SARS Virus
gtacctactaaataggtctgttgaa

SEQ ID NO: 117998 - DNA, 25 bp, SARS Virus
tacctactaaagtggtctgttgaag

SEQ ID NO: 117999 - DNA, 25 bp, SARS Virus
acctactaaagatgtctgttgaagt

SEQ ID NO: 118000 - DNA, 25 bp, SARS Virus
cctactaaagagttctgttgaagtt

SEQ ID NO: 118001 - DNA, 25 bp, SARS Virus
ctactaaagaggtctgttgaagttt

SEQ ID NO: 118002 - DNA, 25 bp, SARS Virus
tactaaagaggtttgttgaagtttt

SEQ ID NO: 118003 - DNA, 25 bp, SARS Virus
actaaagaggtctgttgaagtttta

SEQ ID NO: 118004 - DNA, 25 bp, SARS Virus
ctaaagaggtcttttgaagttttaa

SEQ ID NO: 118005 - DNA, 25 bp, SARS Virus
taaagaggtctgttgaagttttaag

SEQ ID NO: 118006 - DNA, 25 bp, SARS Virus
aaagaggtctgttgaagttttaagg

SEQ ID NO: 118007 - DNA, 25 bp, SARS Virus
aagaggtctgtttaagttttaaggt

SEQ ID NO: 118008 - DNA, 25 bp, SARS Virus
agaggtctgttgtagttttaaggta

SEQ ID NO: 118009 - DNA, 25 bp, SARS Virus
gaggtctgttgatgttttaaggtac

SEQ ID NO: 118010 - DNA, 25 bp, SARS Virus
aggtctgttgaatttttaaggtact

SEQ ID NO: 118011 - DNA, 25 bp, SARS Virus
ggtctgttgaagttttaaggtactc

SEQ ID NO: 118012 - DNA, 25 bp, SARS Virus
gtctgttgaagttttaaggtactca

SEQ ID NO: 118013 - DNA, 25 bp, SARS Virus
tctgttgaagttttaaggtactcac

SEQ ID NO: 118014 - DNA, 25 bp, SARS Virus
ctgttgaagttttaaggtactcacc

SEQ ID NO: 118015 - DNA, 25 bp, SARS Virus
tgttgaagtttttaggtactcacct

SEQ ID NO: 118016 - DNA, 25 bp, SARS Virus
gttgaagttttatggtactcacctc

SEQ ID NO: 118017 - DNA, 25 bp, SARS Virus
ttgaagttttaatgtactcacctcg

SEQ ID NO: 118018 - DNA, 25 bp, SARS Virus
tgaagttttaagttactcacctcga

SEQ ID NO: 118019 - DNA, 25 bp, SARS Virus
gaagttttaaggtactcacctcgaa

SEQ ID NO: 118020 - DNA, 25 bp, SARS Virus
aagttttaaggttctcacctcgaag

SEQ ID NO: 118021 - DNA, 25 bp, SARS Virus
agttttaaggtattcacctcgaaga

SEQ ID NO: 118022 - DNA, 25 bp, SARS Virus
gttttaaggtactcacctcgaagac

SEQ ID NO: 118023 - DNA, 25 bp, SARS Virus
ttttaaggtacttacctcgaagacg

SEQ ID NO: 118024 - DNA, 25 bp, SARS Virus
tttaaggtactctcctcgaagacga

SEQ ID NO: 118025 - DNA, 25 bp, SARS Virus
ttaaggtactcatctcgaagacgac

SEQ ID NO: 118026 - DNA, 25 bp, SARS Virus
taaggtactcacttcgaagacgact

SEQ ID NO: 118027 - DNA, 25 bp, SARS Virus
aaggtactcacctcgaagacgacta

SEQ ID NO: 118028 - DNA, 25 bp, SARS Virus
aggtactcaccttgaagacgactaa

SEQ ID NO: 118029 - DNA, 25 bp, SARS Virus
ggtactcacctctaagacgactaag

SEQ ID NO: 118030 - DNA, 25 bp, SARS Virus
gtactcacctcgtagacgactaagt

SEQ ID NO: 118031 - DNA, 25 bp, SARS Virus
tactcacctcgatgacgactaagtt

SEQ ID NO: 118032 - DNA, 25 bp, SARS Virus
actcacctcgaatacgactaagttg

SEQ ID NO: 118033 - DNA, 25 bp, SARS Virus
ctcacctcgaagtcgactaagttga

SEQ ID NO: 118034 - DNA, 25 bp, SARS Virus
tcacctcgaagatgactaagttgag

SEQ ID NO: 118035 - DNA, 25 bp, SARS Virus
cacctcgaagactactaagttgagt

SEQ ID NO: 118036 - DNA, 25 bp, SARS Virus
acctcgaagacgtctaagttgagtc

SEQ ID NO: 118037 - DNA, 25 bp, SARS Virus
cctcgaagacgattaagttgagtcc

SEQ ID NO: 118038 - DNA, 25 bp, SARS Virus
ctcgaagacgactaagttgagtccg

SEQ ID NO: 118039 - DNA, 25 bp, SARS Virus
tcgaagacgacttagttgagtccgt

SEQ ID NO: 118040 - DNA, 25 bp, SARS Virus
cgaagacgactatgttgagtccgta

SEQ ID NO: 118041 - DNA, 25 bp, SARS Virus
gaagacgactaatttgagtccgtat

SEQ ID NO: 118042 - DNA, 25 bp, SARS Virus
aagacgactaagttgagtccgtatt

SEQ ID NO: 118043 - DNA, 25 bp, SARS Virus
agacgactaagttgagtccgtattt

SEQ ID NO: 118044 - DNA, 25 bp, SARS Virus
gacgactaagtttagtccgtatttg

SEQ ID NO: 118045 - DNA, 25 bp, SARS Virus
acgactaagttgtgtccgtatttgt

SEQ ID NO: 118046 - DNA, 25 bp, SARS Virus
cgactaagttgattccgtatttgtg

SEQ ID NO: 118047 - DNA, 25 bp, SARS Virus
gactaagttgagtccgtatttgtga

SEQ ID NO: 118048 - DNA, 25 bp, SARS Virus
actaagttgagttcgtatttgtgag

SEQ ID NO: 118049 - DNA, 25 bp, SARS Virus
ctaagttgagtctgtatttgtgagt

SEQ ID NO: 118050 - DNA, 25 bp, SARS Virus
taagttgagtccttatttgtgagta

SEQ ID NO: 118051 - DNA, 25 bp, SARS Virus
aagttgagtccgtatttgtgagtac

SEQ ID NO: 118052 - DNA, 25 bp, SARS Virus
agttgagtccgtttttgtgagtact

SEQ ID NO: 118053 - DNA, 25 bp, SARS Virus
gttgagtccgtatttgtgagtacta

SEQ ID NO: 118054 - DNA, 25 bp, SARS Virus
ttgagtccgtatttgtgagtactac

SEQ ID NO: 118055 - DNA, 25 bp, SARS Virus
tgagtccgtatttgtgagtactact

SEQ ID NO: 118056 - DNA, 25 bp, SARS Virus
gagtccgtatttttgagtactactg

SEQ ID NO: 118057 - DNA, 25 bp, SARS Virus
agtccgtatttgtgagtactactgg

SEQ ID NO: 118058 - DNA, 25 bp, SARS Virus
gtccgtatttgttagtactactggt

SEQ ID NO: 118059 - DNA, 25 bp, SARS Virus
tccgtatttgtgtgtactactggtg

SEQ ID NO: 118060 - DNA, 25 bp, SARS Virus
ccgtatttgtgattactactggtgt

SEQ ID NO: 118061 - DNA, 25 bp, SARS Virus
cgtatttgtgagtactactggtgtg

SEQ ID NO: 118062 - DNA, 25 bp, SARS Virus
gtatttgtgagttctactggtgtgt

SEQ ID NO: 118063 - DNA, 25 bp, SARS Virus
tatttgtgagtattactggtgtgtt

SEQ ID NO: 118064 - DNA, 25 bp, SARS Virus
atttgtgagtactactggtgtgttc

SEQ ID NO: 118065 - DNA, 25 bp, SARS Virus
tttgtgagtacttctggtgtgttcc

SEQ ID NO: 118066 - DNA, 25 bp, SARS Virus
ttgtgagtactattggtgtgttccg

SEQ ID NO: 118067 - DNA, 25 bp, SARS Virus
tgtgagtactactggtgtgttccgt

SEQ ID NO: 118068 - DNA, 25 bp, SARS Virus
gtgagtactacttgtgtgttccgtc

SEQ ID NO: 118069 - DNA, 25 bp, SARS Virus
tgagtactactgttgtgttccgtct

SEQ ID NO: 118070 - DNA, 25 bp, SARS Virus
gagtactactggtgtgttccgtcta

SEQ ID NO: 118071 - DNA, 25 bp, SARS Virus
agtactactggtttgttccgtctac

SEQ ID NO: 118072 - DNA, 25 bp, SARS Virus
gtactactggtgtgttccgtctacc

SEQ ID NO: 118073 - DNA, 25 bp, SARS Virus
tactactggtgttttccgtctaccc

SEQ ID NO: 118074 - DNA, 25 bp, SARS Virus
actactggtgtgttccgtctacccg

SEQ ID NO: 118075 - DNA, 25 bp, SARS Virus
ctactggtgtgttccgtctacccga

SEQ ID NO: 118076 - DNA, 25 bp, SARS Virus
tactggtgtgtttcgtctacccgat

SEQ ID NO: 118077 - DNA, 25 bp, SARS Virus
actggtgtgttctgtctacccgata

SEQ ID NO: 118078 - DNA, 25 bp, SARS Virus
ctggtgtgttccttctacccgatac

SEQ ID NO: 118079 - DNA, 25 bp, SARS Virus
tggtgtgttccgtctacccgataca

SEQ ID NO: 118080 - DNA, 25 bp, SARS Virus
ggtgtgttccgtttacccgatacat

SEQ ID NO: 118081 - DNA, 25 bp, SARS Virus
gtgtgttccgtctacccgatacatt

SEQ ID NO: 118082 - DNA, 25 bp, SARS Virus
tgtgttccgtcttcccgatacattt

SEQ ID NO: 118083 - DNA, 25 bp, SARS Virus
gtgttccgtctatccgatacatttg

SEQ ID NO: 118084 - DNA, 25 bp, SARS Virus
tgttccgtctactcgatacatttgc

SEQ ID NO: 118085 - DNA, 25 bp, SARS Virus
gttccgtctacctgatacatttgca

SEQ ID NO: 118086 - DNA, 25 bp, SARS Virus
ttccgtctaccctatacatttgcaa

SEQ ID NO: 118087 - DNA, 25 bp, SARS Virus
tccgtctacccgttacatttgcaaa

SEQ ID NO: 118088 - DNA, 25 bp, SARS Virus
ccgtctacccgatacatttgcaaaa

SEQ ID NO: 118089 - DNA, 25 bp, SARS Virus
cgtctacccgattcatttgcaaaag

SEQ ID NO: 118090 - DNA, 25 bp, SARS Virus
gtctacccgatatatttgcaaaagc

SEQ ID NO: 118091 - DNA, 25 bp, SARS Virus
tctacccgatacttttgcaaaagcg

SEQ ID NO: 118092 - DNA, 25 bp, SARS Virus
ctacccgatacatttgcaaaagcgt

SEQ ID NO: 118093 - DNA, 25 bp, SARS Virus
tacccgatacatttgcaaaagcgtt

SEQ ID NO: 118094 - DNA, 25 bp, SARS Virus
acccgatacatttgcaaaagcgtta

SEQ ID NO: 118095 - DNA, 25 bp, SARS Virus
cccgatacattttcaaaagcgttaa

SEQ ID NO: 118096 - DNA, 25 bp, SARS Virus
ccgatacatttgtaaaagcgttaag

SEQ ID NO: 118097 - DNA, 25 bp, SARS Virus
cgatacatttgctaaagcgttaagg

SEQ ID NO: 118098 - DNA, 25 bp, SARS Virus
gatacatttgcataagcgttaaggc

SEQ ID NO: 118099 - DNA, 25 bp, SARS Virus
atacatttgcaatagcgttaaggca

SEQ ID NO: 118100 - DNA, 25 bp, SARS Virus
tacatttgcaaatgcgttaaggcaa

SEQ ID NO: 118101 - DNA, 25 bp, SARS Virus
acatttgcaaaatcgttaaggcaaa

SEQ ID NO: 118102 - DNA, 25 bp, SARS Virus
catttgcaaaagtgttaaggcaaat

SEQ ID NO: 118103 - DNA, 25 bp, SARS Virus
atttgcaaaagctttaaggcaaatg

SEQ ID NO: 118104 - DNA, 25 bp, SARS Virus
tttgcaaaagcgttaaggcaaatgc

SEQ ID NO: 118105 - DNA, 25 bp, SARS Virus
ttgcaaaagcgttaaggcaaatgct

SEQ ID NO: 118106 - DNA, 25 bp, SARS Virus
tgcaaaagcgtttaggcaaatgcta

SEQ ID NO: 118107 - DNA, 25 bp, SARS Virus
gcaaaagcgttatggcaaatgctat

SEQ ID NO: 118108 - DNA, 25 bp, SARS Virus
caaaagcgttaatgcaaatgctatg

SEQ ID NO: 118109 - DNA, 25 bp, SARS Virus
aaaagcgttaagtcaaatgctatgt

SEQ ID NO: 118110 - DNA, 25 bp, SARS Virus
aaagcgttaaggtaaatgctatgta

SEQ ID NO: 118111 - DNA, 25 bp, SARS Virus
aagcgttaaggctaatgctatgtat

SEQ ID NO: 118112 - DNA, 25 bp, SARS Virus
agcgttaaggcatatgctatgtatc

SEQ ID NO: 118113 - DNA, 25 bp, SARS Virus
gcgttaaggcaattgctatgtatca

SEQ ID NO: 118114 - DNA, 25 bp, SARS Virus
cgttaaggcaaatgctatgtatcag

SEQ ID NO: 118115 - DNA, 25 bp, SARS Virus
gttaaggcaaattctatgtatcaga

SEQ ID NO: 118116 - DNA, 25 bp, SARS Virus
ttaaggcaaatgttatgtatcagat

SEQ ID NO: 118117 - DNA, 25 bp, SARS Virus
taaggcaaatgctatgtatcagatg

SEQ ID NO: 118118 - DNA, 25 bp, SARS Virus
aaggcaaatgctttgtatcagatga

SEQ ID NO: 118119 - DNA, 25 bp, SARS Virus
aggcaaatgctatgtatcagatgag

SEQ ID NO: 118120 - DNA, 25 bp, SARS Virus
ggcaaatgctatttatcagatgaga

SEQ ID NO: 118121 - DNA, 25 bp, SARS Virus
gcaaatgctatgtatcagatgagaa

SEQ ID NO: 118122 - DNA, 25 bp, SARS Virus
caaatgctatgtttcagatgagaac

SEQ ID NO: 118123 - DNA, 25 bp, SARS Virus
aaatgctatgtatcagatgagaaca

SEQ ID NO: 118124 - DNA, 25 bp, SARS Virus
aatgctatgtattagatgagaacac

SEQ ID NO: 118125 - DNA, 25 bp, SARS Virus
atgctatgtatctgatgagaacacg

SEQ ID NO: 118126 - DNA, 25 bp, SARS Virus
tgctatgtatcatatgagaacacgt

SEQ ID NO: 118127 - DNA, 25 bp, SARS Virus
gctatgtatcagttgagaacacgtc

SEQ ID NO: 118128 - DNA, 25 bp, SARS Virus
ctatgtatcagatgagaacacgtct

SEQ ID NO: 118129 - DNA, 25 bp, SARS Virus
tatgtatcagattagaacacgtctt

SEQ ID NO: 118130 - DNA, 25 bp, SARS Virus
atgtatcagatgtgaacacgtctta

SEQ ID NO: 118131 - DNA, 25 bp, SARS Virus
tgtatcagatgataacacgtcttac

SEQ ID NO: 118132 - DNA, 25 bp, SARS Virus
gtatcagatgagtacacgtcttact

SEQ ID NO: 118133 - DNA, 25 bp, SARS Virus
tatcagatgagatcacgtcttactt

SEQ ID NO: 118134 - DNA, 25 bp, SARS Virus
atcagatgagaatacgtcttactta

SEQ ID NO: 118135 - DNA, 25 bp, SARS Virus
tcagatgagaactcgtcttacttaa

SEQ ID NO: 118136 - DNA, 25 bp, SARS Virus
cagatgagaacatgtcttacttaag

SEQ ID NO: 118137 - DNA, 25 bp, SARS Virus
agatgagaacacttcttacttaaga

SEQ ID NO: 118138 - DNA, 25 bp, SARS Virus
gatgagaacacgtcttacttaagag

SEQ ID NO: 118139 - DNA, 25 bp, SARS Virus
atgagaacacgttttacttaagagc

SEQ ID NO: 118140 - DNA, 25 bp, SARS Virus
tgagaacacgtcttacttaagagca

SEQ ID NO: 118141 - DNA, 25 bp, SARS Virus
gagaacacgtcttacttaagagcat

SEQ ID NO: 118142 - DNA, 25 bp, SARS Virus
agaacacgtctttcttaagagcatt

SEQ ID NO: 118143 - DNA, 25 bp, SARS Virus
gaacacgtcttatttaagagcattg

SEQ ID NO: 118144 - DNA, 25 bp, SARS Virus
aacacgtcttacttaagagcattga

SEQ ID NO: 118145 - DNA, 25 bp, SARS Virus
acacgtcttacttaagagcattgat

SEQ ID NO: 118146 - DNA, 25 bp, SARS Virus
cacgtcttactttagagcattgatt

SEQ ID NO: 118147 - DNA, 25 bp, SARS Virus
acgtcttacttatgagcattgattt

SEQ ID NO: 118148 - DNA, 25 bp, SARS Virus
cgtcttacttaatagcattgatttg

SEQ ID NO: 118149 - DNA, 25 bp, SARS Virus
gtcttacttaagtgcattgatttgt

SEQ ID NO: 118150 - DNA, 25 bp, SARS Virus
tcttacttaagatcattgatttgtc

SEQ ID NO: 118151 - DNA, 25 bp, SARS Virus
cttacttaagagtattgatttgtcg

SEQ ID NO: 118152 - DNA, 25 bp, SARS Virus
ttacttaagagctttgatttgtcgt

SEQ ID NO: 118153 - DNA, 25 bp, SARS Virus
tacttaagagcattgatttgtcgtg

SEQ ID NO: 118154 - DNA, 25 bp, SARS Virus
acttaagagcattgatttgtcgtgt

SEQ ID NO: 118155 - DNA, 25 bp, SARS Virus
cttaagagcatttatttgtcgtgtt

SEQ ID NO: 118156 - DNA, 25 bp, SARS Virus
ttaagagcattgttttgtcgtgttc

SEQ ID NO: 118157 - DNA, 25 bp, SARS Virus
taagagcattgatttgtcgtgttca

SEQ ID NO: 118158 - DNA, 25 bp, SARS Virus
aagagcattgatttgtcgtgttcat

SEQ ID NO: 118159 - DNA, 25 bp, SARS Virus
agagcattgatttgtcgtgttcatc

SEQ ID NO: 118160 - DNA, 25 bp, SARS Virus
gagcattgatttttcgtgttcatcc

SEQ ID NO: 118161 - DNA, 25 bp, SARS Virus
agcattgatttgtcgtgttcatcca

SEQ ID NO: 118162 - DNA, 25 bp, SARS Virus
gcattgatttgttgtgttcatccaa

SEQ ID NO: 118163 - DNA, 25 bp, SARS Virus
cattgatttgtcttgttcatccaaa

SEQ ID NO: 118164 - DNA, 25 bp, SARS Virus
attgatttgtcgtgttcatccaaat

SEQ ID NO: 118165 - DNA, 25 bp, SARS Virus
ttgatttgtcgttttcatccaaatc

SEQ ID NO: 118166 - DNA, 25 bp, SARS Virus
tgatttgtcgtgttcatccaaatca

SEQ ID NO: 118167 - DNA, 25 bp, SARS Virus
gatttgtcgtgttcatccaaatcaa

SEQ ID NO: 118168 - DNA, 25 bp, SARS Virus
atttgtcgtgtttatccaaatcaat

SEQ ID NO: 118169 - DNA, 25 bp, SARS Virus
tttgtcgtgttcttccaaatcaatt

SEQ ID NO: 118170 - DNA, 25 bp, SARS Virus
ttgtcgtgttcatccaaatcaattg

SEQ ID NO: 118171 - DNA, 25 bp, SARS Virus
tgtcgtgttcattcaaatcaattga

SEQ ID NO: 118172 - DNA, 25 bp, SARS Virus
gtcgtgttcatctaaatcaattgaa

SEQ ID NO: 118173 - DNA, 25 bp, SARS Virus
tcgtgttcatcctaatcaattgaaa

SEQ ID NO: 118174 - DNA, 25 bp, SARS Virus
cgtgttcatccatatcaattgaaat

SEQ ID NO: 118175 - DNA, 25 bp, SARS Virus
gtgttcatccaattcaattgaaatt

SEQ ID NO: 118176 - DNA, 25 bp, SARS Virus
tgttcatccaaatcaattgaaatta

SEQ ID NO: 118177 - DNA, 25 bp, SARS Virus
gttcatccaaattaattgaaattag

SEQ ID NO: 118178 - DNA, 25 bp, SARS Virus
ttcatccaaatctattgaaattaga

SEQ ID NO: 118179 - DNA, 25 bp, SARS Virus
tcatccaaatcatttgaaattagag

SEQ ID NO: 118180 - DNA, 25 bp, SARS Virus
catccaaatcaattgaaattagagt

SEQ ID NO: 118181 - DNA, 25 bp, SARS Virus
atccaaatcaattgaaattagagtg

SEQ ID NO: 118182 - DNA, 25 bp, SARS Virus
tccaaatcaatttaaattagagtgt

SEQ ID NO: 118183 - DNA, 25 bp, SARS Virus
ccaaatcaattgtaattagagtgta

SEQ ID NO: 118184 - DNA, 25 bp, SARS Virus
caaatcaattgatattagagtgtat

SEQ ID NO: 118185 - DNA, 25 bp, SARS Virus
aaatcaattgaatttagagtgtatc

SEQ ID NO: 118186 - DNA, 25 bp, SARS Virus
aatcaattgaaattagagtgtatcg

SEQ ID NO: 118187 - DNA, 25 bp, SARS Virus
atcaattgaaattagagtgtatcgt

SEQ ID NO: 118188 - DNA, 25 bp, SARS Virus
tcaattgaaatttgagtgtatcgtt

SEQ ID NO: 118189 - DNA, 25 bp, SARS Virus
caattgaaattatagtgtatcgtta

SEQ ID NO: 118190 - DNA, 25 bp, SARS Virus
aattgaaattagtgtgtatcgttag

SEQ ID NO: 118191 - DNA, 25 bp, SARS Virus
attgaaattagattgtatcgttaga

SEQ ID NO: 118192 - DNA, 25 bp, SARS Virus
ttgaaattagagtgtatcgttagaa

SEQ ID NO: 118193 - DNA, 25 bp, SARS Virus
tgaaattagagtttatcgttagaaa

SEQ ID NO: 118194 - DNA, 25 bp, SARS Virus
gaaattagagtgtatcgttagaaat

SEQ ID NO: 118195 - DNA, 25 bp, SARS Virus
aaattagagtgtttcgttagaaatt

SEQ ID NO: 118196 - DNA, 25 bp, SARS Virus
aattagagtgtatcgttagaaatta

SEQ ID NO: 118197 - DNA, 25 bp, SARS Virus
attagagtgtattgttagaaattag

SEQ ID NO: 118198 - DNA, 25 bp, SARS Virus
ttagagtgtatctttagaaattagt

SEQ ID NO: 118199 - DNA, 25 bp, SARS Virus
tagagtgtatcgttagaaattagtt

SEQ ID NO: 118200 - DNA, 25 bp, SARS Virus
agagtgtatcgttagaaattagtta

SEQ ID NO: 118201 - DNA, 25 bp, SARS Virus
gagtgtatcgtttgaaattagttac

SEQ ID NO: 118202 - DNA, 25 bp, SARS Virus
agtgtatcgttataaattagttaca

SEQ ID NO: 118203 - DNA, 25 bp, SARS Virus
gtgtatcgttagtaattagttacac

SEQ ID NO: 118204 - DNA, 25 bp, SARS Virus
tgtatcgttagatattagttacaca

SEQ ID NO: 118205 - DNA, 25 bp, SARS Virus
gtatcgttagaatttagttacacat

SEQ ID NO: 118206 - DNA, 25 bp, SARS Virus
tatcgttagaaattagttacacatt

SEQ ID NO: 118207 - DNA, 25 bp, SARS Virus
atcgttagaaattagttacacattg

SEQ ID NO: 118208 - DNA, 25 bp, SARS Virus
tcgttagaaatttgttacacattgt

SEQ ID NO: 118209 - DNA, 25 bp, SARS Virus
cgttagaaattatttacacattgta

SEQ ID NO: 118210 - DNA, 25 bp, SARS Virus
gttagaaattagttacacattgtaa

SEQ ID NO: 118211 - DNA, 25 bp, SARS Virus
ttagaaattagttacacattgtaat

SEQ ID NO: 118212 - DNA, 25 bp, SARS Virus
tagaaattagtttcacattgtaatc

SEQ ID NO: 118213 - DNA, 25 bp, SARS Virus
agaaattagttatacattgtaatcc

SEQ ID NO: 118214 - DNA, 25 bp, SARS Virus
gaaattagttactcattgtaatccc

SEQ ID NO: 118215 - DNA, 25 bp, SARS Virus
aaattagttacatattgtaatccct

SEQ ID NO: 118216 - DNA, 25 bp, SARS Virus
aattagttacactttgtaatccctc

SEQ ID NO: 118217 - DNA, 25 bp, SARS Virus
attagttacacattgtaatccctcc

SEQ ID NO: 118218 - DNA, 25 bp, SARS Virus
ttagttacacattgtaatccctcct

SEQ ID NO: 118219 - DNA, 25 bp, SARS Virus
tagttacacattttaatccctcctg

SEQ ID NO: 118220 - DNA, 25 bp, SARS Virus
agttacacattgtaatccctcctga

SEQ ID NO: 118221 - DNA, 25 bp, SARS Virus
gttacacattgttatccctcctgaa

SEQ ID NO: 118222 - DNA, 25 bp, SARS Virus
ttacacattgtattccctcctgaac

SEQ ID NO: 118223 - DNA, 25 bp, SARS Virus
tacacattgtaatccctcctgaact

SEQ ID NO: 118224 - DNA, 25 bp, SARS Virus
acacattgtaattcctcctgaactt

SEQ ID NO: 118225 - DNA, 25 bp, SARS Virus
cacattgtaatcactcctgaacttt

SEQ ID NO: 118226 - DNA, 25 bp, SARS Virus
acattgtaatccatcctgaactttc

SEQ ID NO: 118227 - DNA, 25 bp, SARS Virus
cattgtaatcccacctgaactttct

SEQ ID NO: 118228 - DNA, 25 bp, SARS Virus
attgtaatccctactgaactttctc

SEQ ID NO: 118229 - DNA, 25 bp, SARS Virus
ttgtaatccctcatgaactttctcg

SEQ ID NO: 118230 - DNA, 25 bp, SARS Virus
tgtaatccctccagaactttctcgg

SEQ ID NO: 118231 - DNA, 25 bp, SARS Virus
gtaatccctcctaaactttctcggt

SEQ ID NO: 118232 - DNA, 25 bp, SARS Virus
taatccctcctgaactttctcggtg

SEQ ID NO: 118233 - DNA, 25 bp, SARS Virus
aatccctcctgaactttctcggtgg

SEQ ID NO: 118234 - DNA, 25 bp, SARS Virus
atccctcctgaaatttctcggtggt

SEQ ID NO: 118235 - DNA, 25 bp, SARS Virus
tccctcctgaacattctcggtggtg

SEQ ID NO: 118236 - DNA, 25 bp, SARS Virus
ccctcctgaactatctcggtggtgt

SEQ ID NO: 118237 - DNA, 25 bp, SARS Virus
cctcctgaacttactcggtggtgta

SEQ ID NO: 118238 - DNA, 25 bp, SARS Virus
ctcctgaactttatcggtggtgtaa

SEQ ID NO: 118239 - DNA, 25 bp, SARS Virus
tcctgaactttcacggtggtgtaaa

SEQ ID NO: 118240 - DNA, 25 bp, SARS Virus
cctgaactttctaggtggtgtaaaa

SEQ ID NO: 118241 - DNA, 25 bp, SARS Virus
ctgaactttctcagtggtgtaaaag

SEQ ID NO: 118242 - DNA, 25 bp, SARS Virus
tgaactttctcgatggtgtaaaagt

SEQ ID NO: 118243 - DNA, 25 bp, SARS Virus
gaactttctcggaggtgtaaaagta

SEQ ID NO: 118244 - DNA, 25 bp, SARS Virus
aactttctcggtagtgtaaaagtag

SEQ ID NO: 118245 - DNA, 25 bp, SARS Virus
actttctcggtgatgtaaaagtagc

SEQ ID NO: 118246 - DNA, 25 bp, SARS Virus
ctttctcggtggagtaaaagtagct

SEQ ID NO: 118247 - DNA, 25 bp, SARS Virus
tttctcggtggtataaaagtagctc

SEQ ID NO: 118248 - DNA, 25 bp, SARS Virus
ttctcggtggtgaaaaagtagctcc

SEQ ID NO: 118249 - DNA, 25 bp, SARS Virus
tctcggtggtgtaaaagtagctccg

SEQ ID NO: 118250 - DNA, 25 bp, SARS Virus
ctcggtggtgtaaaagtagctccgg

SEQ ID NO: 118251 - DNA, 25 bp, SARS Virus
tcggtggtgtaaaagtagctccggt

SEQ ID NO: 118252 - DNA, 25 bp, SARS Virus
cggtggtgtaaaagtagctccggtg

SEQ ID NO: 118253 - DNA, 25 bp, SARS Virus
ggtggtgtaaaaatagctccggtgc

SEQ ID NO: 118254 - DNA, 25 bp, SARS Virus
gtggtgtaaaagaagctccggtgcg

SEQ ID NO: 118255 - DNA, 25 bp, SARS Virus
tggtgtaaaagtagctccggtgcgc

SEQ ID NO: 118256 - DNA, 25 bp, SARS Virus
ggtgtaaaagtaactccggtgcgcc

SEQ ID NO: 118257 - DNA, 25 bp, SARS Virus
gtgtaaaagtagatccggtgcgcct

SEQ ID NO: 118258 - DNA, 25 bp, SARS Virus
tgtaaaagtagcaccggtgcgcctc

SEQ ID NO: 118259 - DNA, 25 bp, SARS Virus
gtaaaagtagctacggtgcgcctca

SEQ ID NO: 118260 - DNA, 25 bp, SARS Virus
taaaagtagctcaggtgcgcctcat

SEQ ID NO: 118261 - DNA, 25 bp, SARS Virus
aaaagtagctccagtgcgcctcatg

SEQ ID NO: 118262 - DNA, 25 bp, SARS Virus
aaagtagctccgatgcgcctcatgc

SEQ ID NO: 118263 - DNA, 25 bp, SARS Virus
aagtagctccggagcgcctcatgct

SEQ ID NO: 118264 - DNA, 25 bp, SARS Virus
agtagctccggtacgcctcatgcta

SEQ ID NO: 118265 - DNA, 25 bp, SARS Virus
gtagctccggtgagcctcatgctag

SEQ ID NO: 118266 - DNA, 25 bp, SARS Virus
tagctccggtgcacctcatgctagc

SEQ ID NO: 118267 - DNA, 25 bp, SARS Virus
agctccggtgcgactcatgctagct

SEQ ID NO: 118268 - DNA, 25 bp, SARS Virus
gctccggtgcgcatcatgctagctc

SEQ ID NO: 118269 - DNA, 25 bp, SARS Virus
ctccggtgcgccacatgctagctcc

SEQ ID NO: 118270 - DNA, 25 bp, SARS Virus
tccggtgcgcctaatgctagctccc

SEQ ID NO: 118271 - DNA, 25 bp, SARS Virus
ccggtgcgcctcatgctagctccca

SEQ ID NO: 118272 - DNA, 25 bp, SARS Virus
cggtgcgcctcaagctagctcccat

SEQ ID NO: 118273 - DNA, 25 bp, SARS Virus
ggtgcgcctcatactagctcccatg

SEQ ID NO: 118274 - DNA, 25 bp, SARS Virus
gtgcgcctcatgatagctcccatgt

SEQ ID NO: 118275 - DNA, 25 bp, SARS Virus
tgcgcctcatgcaagctcccatgtc

SEQ ID NO: 118276 - DNA, 25 bp, SARS Virus
gcgcctcatgctagctcccatgtca

SEQ ID NO: 118277 - DNA, 25 bp, SARS Virus
cgcctcatgctaactcccatgtcac

SEQ ID NO: 118278 - DNA, 25 bp, SARS Virus
gcctcatgctagatcccatgtcact

SEQ ID NO: 118279 - DNA, 25 bp, SARS Virus
cctcatgctagcacccatgtcactt

SEQ ID NO: 118280 - DNA, 25 bp, SARS Virus
ctcatgctagctaccatgtcactta

SEQ ID NO: 118281 - DNA, 25 bp, SARS Virus
tcatgctagctcacatgtcacttat

SEQ ID NO: 118282 - DNA, 25 bp, SARS Virus
catgctagctccaatgtcacttatt

SEQ ID NO: 118283 - DNA, 25 bp, SARS Virus
atgctagctcccatgtcacttatta

SEQ ID NO: 118284 - DNA, 25 bp, SARS Virus
tgctagctcccaagtcacttattac

SEQ ID NO: 118285 - DNA, 25 bp, SARS Virus
gctagctcccatatcacttattacg

SEQ ID NO: 118286 - DNA, 25 bp, SARS Virus
ctagctcccatgacacttattacga

SEQ ID NO: 118287 - DNA, 25 bp, SARS Virus
tagctcccatgtaacttattacgat

SEQ ID NO: 118288 - DNA, 25 bp, SARS Virus
agctcccatgtcacttattacgatc

SEQ ID NO: 118289 - DNA, 25 bp, SARS Virus
gctcccatgtcaattattacgatcc

SEQ ID NO: 118290 - DNA, 25 bp, SARS Virus
ctcccatgtcacatattacgatccc

SEQ ID NO: 118291 - DNA, 25 bp, SARS Virus
tcccatgtcactaattacgatccct

SEQ ID NO: 118292 - DNA, 25 bp, SARS Virus
cccatgtcacttattacgatccctc

SEQ ID NO: 118293 - DNA, 25 bp, SARS Virus
ccatgtcacttaatacgatccctct

SEQ ID NO: 118294 - DNA, 25 bp, SARS Virus
catgtcacttataacgatccctctc

SEQ ID NO: 118295 - DNA, 25 bp, SARS Virus
atgtcacttattacgatccctctcg

SEQ ID NO: 118296 - DNA, 25 bp, SARS Virus
tgtcacttattaagatccctctcga

SEQ ID NO: 118297 - DNA, 25 bp, SARS Virus
gtcacttattacaatccctctcgac

SEQ ID NO: 118298 - DNA, 25 bp, SARS Virus
tcacttattacgatccctctcgacg

SEQ ID NO: 118299 - DNA, 25 bp, SARS Virus
cacttattacgaaccctctcgacgg

SEQ ID NO: 118300 - DNA, 25 bp, SARS Virus
acttattacgatacctctcgacgga

SEQ ID NO: 118301 - DNA, 25 bp, SARS Virus
cttattacgatcactctcgacggat

SEQ ID NO: 118302 - DNA, 25 bp, SARS Virus
ttattacgatccatctcgacggata

SEQ ID NO: 118303 - DNA, 25 bp, SARS Virus
tattacgatcccactcgacggatat

SEQ ID NO: 118304 - DNA, 25 bp, SARS Virus
attacgatccctatcgacggatata

SEQ ID NO: 118305 - DNA, 25 bp, SARS Virus
ttacgatccctcacgacggatatac

SEQ ID NO: 118306 - DNA, 25 bp, SARS Virus
tacgatccctctagacggatatacc

SEQ ID NO: 118307 - DNA, 25 bp, SARS Virus
acgatccctctcaacggatatacct

SEQ ID NO: 118308 - DNA, 25 bp, SARS Virus
cgatccctctcgacggatatacctt

SEQ ID NO: 118309 - DNA, 25 bp, SARS Virus
gatccctctcgaaggatataccttc

SEQ ID NO: 118310 - DNA, 25 bp, SARS Virus
atccctctcgacagatataccttct

SEQ ID NO: 118311 - DNA, 25 bp, SARS Virus
tccctctcgacgaatataccttctc

SEQ ID NO: 118312 - DNA, 25 bp, SARS Virus
ccctctcgacggatataccttctcg

SEQ ID NO: 118313 - DNA, 25 bp, SARS Virus
cctctcgacggaaataccttctcgg

SEQ ID NO: 118314 - DNA, 25 bp, SARS Virus
ctctcgacggatataccttctcggg

SEQ ID NO: 118315 - DNA, 25 bp, SARS Virus
tctcgacggataaaccttctcggga

SEQ ID NO: 118316 - DNA, 25 bp, SARS Virus
ctcgacggatataccttctcgggat

SEQ ID NO: 118317 - DNA, 25 bp, SARS Virus
tcgacggatataacttctcgggatt

SEQ ID NO: 118318 - DNA, 25 bp, SARS Virus
cgacggatatacattctcgggatta

SEQ ID NO: 118319 - DNA, 25 bp, SARS Virus
gacggatataccatctcgggattac

SEQ ID NO: 118320 - DNA, 25 bp, SARS Virus
acggatatacctactcgggattaca

SEQ ID NO: 118321 - DNA, 25 bp, SARS Virus
cggatataccttatcgggattacac

SEQ ID NO: 118322 - DNA, 25 bp, SARS Virus
ggatataccttcacgggattacaca

SEQ ID NO: 118323 - DNA, 25 bp, SARS Virus
gatataccttctagggattacacat

SEQ ID NO: 118324 - DNA, 25 bp, SARS Virus
atataccttctcaggattacacatt

SEQ ID NO: 118325 - DNA, 25 bp, SARS Virus
tataccttctcgagattacacattt

SEQ ID NO: 118326 - DNA, 25 bp, SARS Virus
ataccttctcggaattacacatttt

SEQ ID NO: 118327 - DNA, 25 bp, SARS Virus
taccttctcgggattacacatttta

SEQ ID NO: 118328 - DNA, 25 bp, SARS Virus
accttctcgggaatacacattttaa

SEQ ID NO: 118329 - DNA, 25 bp, SARS Virus
ccttctcgggataacacattttaat

SEQ ID NO: 118330 - DNA, 25 bp, SARS Virus
cttctcgggattacacattttaatt

SEQ ID NO: 118331 - DNA, 25 bp, SARS Virus
ttctcgggattaaacattttaatta

SEQ ID NO: 118332 - DNA, 25 bp, SARS Virus
tctcgggattacacattttaattaa

SEQ ID NO: 118333 - DNA, 25 bp, SARS Virus
ctcgggattacaaattttaattaaa

SEQ ID NO: 118334 - DNA, 25 bp, SARS Virus
tcgggattacacattttaattaaaa

SEQ ID NO: 118335 - DNA, 25 bp, SARS Virus
cgggattacacaatttaattaaaat

SEQ ID NO: 118336 - DNA, 25 bp, SARS Virus
gggattacacatattaattaaaatc

SEQ ID NO: 118337 - DNA, 25 bp, SARS Virus
ggattacacattataattaaaatca

SEQ ID NO: 118338 - DNA, 25 bp, SARS Virus
gattacacatttaaattaaaatcat

SEQ ID NO: 118339 - DNA, 25 bp, SARS Virus
attacacattttaattaaaatcatc

SEQ ID NO: 118340 - DNA, 25 bp, SARS Virus
ttacacattttaattaaaatcatca

SEQ ID NO: 118341 - DNA, 25 bp, SARS Virus
tacacattttaaataaaatcatcac

SEQ ID NO: 118342 - DNA, 25 bp, SARS Virus
acacattttaataaaaatcatcacg

SEQ ID NO: 118343 - DNA, 25 bp, SARS Virus
cacattttaattaaaatcatcacga

SEQ ID NO: 118344 - DNA, 25 bp, SARS Virus
acattttaattaaaatcatcacgat

SEQ ID NO: 118345 - DNA, 25 bp, SARS Virus
cattttaattaaaatcatcacgata

SEQ ID NO: 118346 - DNA, 25 bp, SARS Virus
attttaattaaaatcatcacgatag

SEQ ID NO: 118347 - DNA, 25 bp, SARS Virus
ttttaattaaaaacatcacgatagg

SEQ ID NO: 118348 - DNA, 25 bp, SARS Virus
tttaattaaaataatcacgataggg

SEQ ID NO: 118349 - DNA, 25 bp, SARS Virus
ttaattaaaatcatcacgatagggg

SEQ ID NO: 118350 - DNA, 25 bp, SARS Virus
taattaaaatcaacacgataggggt

SEQ ID NO: 118351 - DNA, 25 bp, SARS Virus
aattaaaatcataacgataggggta

SEQ ID NO: 118352 - DNA, 25 bp, SARS Virus
attaaaatcatcacgataggggtac

SEQ ID NO: 118353 - DNA, 25 bp, SARS Virus
ttaaaatcatcaagataggggtaca

SEQ ID NO: 118354 - DNA, 25 bp, SARS Virus
taaaatcatcacaataggggtacac

SEQ ID NO: 118355 - DNA, 25 bp, SARS Virus
aaaatcatcacgataggggtacact

SEQ ID NO: 118356 - DNA, 25 bp, SARS Virus
aaatcatcacgaaaggggtacacta

SEQ ID NO: 118357 - DNA, 25 bp, SARS Virus
aatcatcacgataggggtacactaa

SEQ ID NO: 118358 - DNA, 25 bp, SARS Virus
atcatcacgataagggtacactaaa

SEQ ID NO: 118359 - DNA, 25 bp, SARS Virus
tcatcacgatagaggtacactaaaa

SEQ ID NO: 118360 - DNA, 25 bp, SARS Virus
catcacgataggagtacactaaaat

SEQ ID NO: 118361 - DNA, 25 bp, SARS Virus
atcacgatagggatacactaaaatt

SEQ ID NO: 118362 - DNA, 25 bp, SARS Virus
tcacgataggggaacactaaaatta

SEQ ID NO: 118363 - DNA, 25 bp, SARS Virus
cacgataggggtacactaaaattat

SEQ ID NO: 118364 - DNA, 25 bp, SARS Virus
acgataggggtaaactaaaattatc

SEQ ID NO: 118365 - DNA, 25 bp, SARS Virus
cgataggggtacactaaaattatcg

SEQ ID NO: 118366 - DNA, 25 bp, SARS Virus
gataggggtacaataaaattatcga

SEQ ID NO: 118367 - DNA, 25 bp, SARS Virus
ataggggtacacaaaaattatcgaa

SEQ ID NO: 118368 - DNA, 25 bp, SARS Virus
taggggtacactaaaattatcgaag

SEQ ID NO: 118369 - DNA, 25 bp, SARS Virus
aggggtacactaaaattatcgaaga

SEQ ID NO: 118370 - DNA, 25 bp, SARS Virus
ggggtacactaaaattatcgaagaa

SEQ ID NO: 118371 - DNA, 25 bp, SARS Virus
gggtacactaaaattatcgaagaat

SEQ ID NO: 118372 - DNA, 25 bp, SARS Virus
ggtacactaaaaatatcgaagaatc

SEQ ID NO: 118373 - DNA, 25 bp, SARS Virus
gtacactaaaataatcgaagaatcc

SEQ ID NO: 118374 - DNA, 25 bp, SARS Virus
tacactaaaattatcgaagaatcct

SEQ ID NO: 118375 - DNA, 25 bp, SARS Virus
acactaaaattaacgaagaatcctc

SEQ ID NO: 118376 - DNA, 25 bp, SARS Virus
cactaaaattatagaagaatcctct

SEQ ID NO: 118377 - DNA, 25 bp, SARS Virus
actaaaattatcaaagaatcctctt

SEQ ID NO: 118378 - DNA, 25 bp, SARS Virus
ctaaaattatcgaagaatcctctta

SEQ ID NO: 118379 - DNA, 25 bp, SARS Virus
taaaattatcgaagaatcctcttac

SEQ ID NO: 118380 - DNA, 25 bp, SARS Virus
aaaattatcgaaaaatcctcttact

SEQ ID NO: 118381 - DNA, 25 bp, SARS Virus
aaattatcgaagaatcctcttactg

SEQ ID NO: 118382 - DNA, 25 bp, SARS Virus
aattatcgaagaatcctcttactgt

SEQ ID NO: 118383 - DNA, 25 bp, SARS Virus
attatcgaagaaacctcttactgtt

SEQ ID NO: 118384 - DNA, 25 bp, SARS Virus
ttatcgaagaatactcttactgttt

SEQ ID NO: 118385 - DNA, 25 bp, SARS Virus
tatcgaagaatcatcttactgtttt

SEQ ID NO: 118386 - DNA, 25 bp, SARS Virus
atcgaagaatccacttactgttttt

SEQ ID NO: 118387 - DNA, 25 bp, SARS Virus
tcgaagaatcctattactgtttttt

SEQ ID NO: 118388 - DNA, 25 bp, SARS Virus
cgaagaatcctcatactgttttttt

SEQ ID NO: 118389 - DNA, 25 bp, SARS Virus
gaagaatcctctaactgtttttttt

SEQ ID NO: 118390 - DNA, 25 bp, SARS Virus
aagaatcctcttactgttttttttt

SEQ ID NO: 118391 - DNA, 25 bp, SARS Virus
agaatcctcttaatgtttttttttt

SEQ ID NO: 118392 - DNA, 25 bp, SARS Virus
gaatcctcttacagttttttttttt

SEQ ID NO: 118393 - DNA, 25 bp, SARS Virus
aaaaaaaaaaacagtaagaggattc

SEQ ID NO: 118394 - DNA, 25 bp, SARS Virus
aaaaaaaaaacaataagaggattct

SEQ ID NO: 118395 - DNA, 25 bp, SARS Virus
aaaaaaaaacagaaagaggattctt

SEQ ID NO: 118396 - DNA, 25 bp, SARS Virus
aaaaaaaacagtaagaggattcttc

SEQ ID NO: 118397 - DNA, 25 bp, SARS Virus
aaaaaaacagtaagaggattcttcg

SEQ ID NO: 118398 - DNA, 25 bp, SARS Virus
aaaaaacagtaaaaggattcttcga

SEQ ID NO: 118399 - DNA, 25 bp, SARS Virus
aaaaacagtaagaggattcttcgat

SEQ ID NO: 118400 - DNA, 25 bp, SARS Virus
aaaacagtaagaagattcttcgata

SEQ ID NO: 118401 - DNA, 25 bp, SARS Virus
aaacagtaagagaattcttcgataa

SEQ ID NO: 118402 - DNA, 25 bp, SARS Virus
aacagtaagaggattcttcgataat

SEQ ID NO: 118403 - DNA, 25 bp, SARS Virus
acagtaagaggaatcttcgataatt

SEQ ID NO: 118404 - DNA, 25 bp, SARS Virus
cagtaagaggatacttcgataattt

SEQ ID NO: 118405 - DNA, 25 bp, SARS Virus
agtaagaggattattcgataatttt

SEQ ID NO: 118406 - DNA, 25 bp, SARS Virus
gtaagaggattcatcgataatttta

SEQ ID NO: 118407 - DNA, 25 bp, SARS Virus
taagaggattctacgataattttag

SEQ ID NO: 118408 - DNA, 25 bp, SARS Virus
aagaggattcttagataattttagt

SEQ ID NO: 118409 - DNA, 25 bp, SARS Virus
agaggattcttcaataattttagtg

SEQ ID NO: 118410 - DNA, 25 bp, SARS Virus
gaggattcttcgataattttagtgt

SEQ ID NO: 118411 - DNA, 25 bp, SARS Virus
aggattcttcgaaaattttagtgta

SEQ ID NO: 118412 - DNA, 25 bp, SARS Virus
ggattcttcgataattttagtgtac

SEQ ID NO: 118413 - DNA, 25 bp, SARS Virus
gattcttcgataattttagtgtacc

SEQ ID NO: 118414 - DNA, 25 bp, SARS Virus
attcttcgataaatttagtgtaccc

SEQ ID NO: 118415 - DNA, 25 bp, SARS Virus
ttcttcgataatattagtgtacccc

SEQ ID NO: 118416 - DNA, 25 bp, SARS Virus
tcttcgataattatagtgtacccct

SEQ ID NO: 118417 - DNA, 25 bp, SARS Virus
cttcgataatttaagtgtaccccta

SEQ ID NO: 118418 - DNA, 25 bp, SARS Virus
ttcgataattttagtgtacccctat

SEQ ID NO: 118419 - DNA, 25 bp, SARS Virus
tcgataattttaatgtacccctatc

SEQ ID NO: 118420 - DNA, 25 bp, SARS Virus
cgataattttagagtacccctatcg

SEQ ID NO: 118421 - DNA, 25 bp, SARS Virus
gataattttagtatacccctatcgt

SEQ ID NO: 118422 - DNA, 25 bp, SARS Virus
ataattttagtgaacccctatcgtg

SEQ ID NO: 118423 - DNA, 25 bp, SARS Virus
taattttagtgtacccctatcgtga

SEQ ID NO: 118424 - DNA, 25 bp, SARS Virus
aattttagtgtaaccctatcgtgat

SEQ ID NO: 118425 - DNA, 25 bp, SARS Virus
attttagtgtacacctatcgtgatg

SEQ ID NO: 118426 - DNA, 25 bp, SARS Virus
ttttagtgtaccactatcgtgatga

SEQ ID NO: 118427 - DNA, 25 bp, SARS Virus
tttagtgtacccatatcgtgatgat

SEQ ID NO: 118428 - DNA, 25 bp, SARS Virus
ttagtgtaccccaatcgtgatgatt

SEQ ID NO: 118429 - DNA, 25 bp, SARS Virus
tagtgtacccctatcgtgatgattt

SEQ ID NO: 118430 - DNA, 25 bp, SARS Virus
agtgtacccctaacgtgatgatttt

SEQ ID NO: 118431 - DNA, 25 bp, SARS Virus
gtgtacccctatagtgatgatttta

SEQ ID NO: 118432 - DNA, 25 bp, SARS Virus
tgtacccctatcatgatgattttaa

SEQ ID NO: 118433 - DNA, 25 bp, SARS Virus
gtacccctatcgagatgattttaat

SEQ ID NO: 118434 - DNA, 25 bp, SARS Virus
tacccctatcgtaatgattttaatt

SEQ ID NO: 118435 - DNA, 25 bp, SARS Virus
acccctatcgtgatgattttaatta

SEQ ID NO: 118436 - DNA, 25 bp, SARS Virus
cccctatcgtgaagattttaattaa

SEQ ID NO: 118437 - DNA, 25 bp, SARS Virus
ccctatcgtgataattttaattaaa

SEQ ID NO: 118438 - DNA, 25 bp, SARS Virus
cctatcgtgatgattttaattaaaa

SEQ ID NO: 118439 - DNA, 25 bp, SARS Virus
ctatcgtgatgaatttaattaaaat

SEQ ID NO: 118440 - DNA, 25 bp, SARS Virus
tatcgtgatgatattaattaaaatg

SEQ ID NO: 118441 - DNA, 25 bp, SARS Virus
atcgtgatgattataattaaaatgt

SEQ ID NO: 118442 - DNA, 25 bp, SARS Virus
tcgtgatgatttaaattaaaatgtg

SEQ ID NO: 118443 - DNA, 25 bp, SARS Virus
cgtgatgattttaattaaaatgtgt

SEQ ID NO: 118444 - DNA, 25 bp, SARS Virus
gtgatgattttaattaaaatgtgta

SEQ ID NO: 118445 - DNA, 25 bp, SARS Virus
tgatgattttaaataaaatgtgtaa

SEQ ID NO: 118446 - DNA, 25 bp, SARS Virus
gatgattttaataaaaatgtgtaat

SEQ ID NO: 118447 - DNA, 25 bp, SARS Virus
atgattttaattaaaatgtgtaatc

SEQ ID NO: 118448 - DNA, 25 bp, SARS Virus
tgattttaattaaaatgtgtaatcc

SEQ ID NO: 118449 - DNA, 25 bp, SARS Virus
gattttaattaaaatgtgtaatccc

SEQ ID NO: 118450 - DNA, 25 bp, SARS Virus
attttaattaaaatgtgtaatcccg

SEQ ID NO: 118451 - DNA, 25 bp, SARS Virus
ttttaattaaaaagtgtaatcccga

SEQ ID NO: 118452 - DNA, 25 bp, SARS Virus
tttaattaaaatatgtaatcccgag

SEQ ID NO: 118453 - DNA, 25 bp, SARS Virus
ttaattaaaatgagtaatcccgaga

SEQ ID NO: 118454 - DNA, 25 bp, SARS Virus
taattaaaatgtataatcccgagaa

SEQ ID NO: 118455 - DNA, 25 bp, SARS Virus
aattaaaatgtgaaatcccgagaag

SEQ ID NO: 118456 - DNA, 25 bp, SARS Virus
attaaaatgtgtaatcccgagaagg

SEQ ID NO: 118457 - DNA, 25 bp, SARS Virus
ttaaaatgtgtaatcccgagaaggt

SEQ ID NO: 118458 - DNA, 25 bp, SARS Virus
taaaatgtgtaaacccgagaaggta

SEQ ID NO: 118459 - DNA, 25 bp, SARS Virus
aaaatgtgtaataccgagaaggtat

SEQ ID NO: 118460 - DNA, 25 bp, SARS Virus
aaatgtgtaatcacgagaaggtata

SEQ ID NO: 118461 - DNA, 25 bp, SARS Virus
aatgtgtaatccagagaaggtatat

SEQ ID NO: 118462 - DNA, 25 bp, SARS Virus
atgtgtaatcccaagaaggtatatc

SEQ ID NO: 118463 - DNA, 25 bp, SARS Virus
tgtgtaatcccgagaaggtatatcc

SEQ ID NO: 118464 - DNA, 25 bp, SARS Virus
gtgtaatcccgaaaaggtatatccg

SEQ ID NO: 118465 - DNA, 25 bp, SARS Virus
tgtaatcccgagaaggtatatccgt

SEQ ID NO: 118466 - DNA, 25 bp, SARS Virus
gtaatcccgagaaggtatatccgtc

SEQ ID NO: 118467 - DNA, 25 bp, SARS Virus
taatcccgagaaagtatatccgtcg

SEQ ID NO: 118468 - DNA, 25 bp, SARS Virus
aatcccgagaagatatatccgtcga

SEQ ID NO: 118469 - DNA, 25 bp, SARS Virus
atcccgagaaggaatatccgtcgag

SEQ ID NO: 118470 - DNA, 25 bp, SARS Virus
tcccgagaaggtatatccgtcgaga

SEQ ID NO: 118471 - DNA, 25 bp, SARS Virus
cccgagaaggtaaatccgtcgagag

SEQ ID NO: 118472 - DNA, 25 bp, SARS Virus
ccgagaaggtatatccgtcgagagg

SEQ ID NO: 118473 - DNA, 25 bp, SARS Virus
cgagaaggtataaccgtcgagaggg

SEQ ID NO: 118474 - DNA, 25 bp, SARS Virus
gagaaggtatatacgtcgagaggga

SEQ ID NO: 118475 - DNA, 25 bp, SARS Virus
agaaggtatatcagtcgagagggat

SEQ ID NO: 118476 - DNA, 25 bp, SARS Virus
gaaggtatatccatcgagagggatc

SEQ ID NO: 118477 - DNA, 25 bp, SARS Virus
aaggtatatccgacgagagggatcg

SEQ ID NO: 118478 - DNA, 25 bp, SARS Virus
aggtatatccgtagagagggatcgt

SEQ ID NO: 118479 - DNA, 25 bp, SARS Virus
ggtatatccgtcaagagggatcgta

SEQ ID NO: 118480 - DNA, 25 bp, SARS Virus
gtatatccgtcgagagggatcgtaa

SEQ ID NO: 118481 - DNA, 25 bp, SARS Virus
tatatccgtcgaaagggatcgtaat

SEQ ID NO: 118482 - DNA, 25 bp, SARS Virus
atatccgtcgagagggatcgtaata

SEQ ID NO: 118483 - DNA, 25 bp, SARS Virus
tatccgtcgagaaggatcgtaataa

SEQ ID NO: 118484 - DNA, 25 bp, SARS Virus
atccgtcgagagagatcgtaataag

SEQ ID NO: 118485 - DNA, 25 bp, SARS Virus
tccgtcgagaggaatcgtaataagt

SEQ ID NO: 118486 - DNA, 25 bp, SARS Virus
ccgtcgagagggatcgtaataagtg

SEQ ID NO: 118487 - DNA, 25 bp, SARS Virus
cgtcgagagggaacgtaataagtga

SEQ ID NO: 118488 - DNA, 25 bp, SARS Virus
gtcgagagggatagtaataagtgac

SEQ ID NO: 118489 - DNA, 25 bp, SARS Virus
tcgagagggatcataataagtgaca

SEQ ID NO: 118490 - DNA, 25 bp, SARS Virus
cgagagggatcgaaataagtgacat

SEQ ID NO: 118491 - DNA, 25 bp, SARS Virus
gagagggatcgtaataagtgacatg

SEQ ID NO: 118492 - DNA, 25 bp, SARS Virus
agagggatcgtaataagtgacatgg

SEQ ID NO: 118493 - DNA, 25 bp, SARS Virus
gagggatcgtaaaaagtgacatggg

SEQ ID NO: 118494 - DNA, 25 bp, SARS Virus
agggatcgtaataagtgacatggga

SEQ ID NO: 118495 - DNA, 25 bp, SARS Virus
gggatcgtaataagtgacatgggag

SEQ ID NO: 118496 - DNA, 25 bp, SARS Virus
ggatcgtaataaatgacatgggagc

SEQ ID NO: 118497 - DNA, 25 bp, SARS Virus
gatcgtaataagagacatgggagct

SEQ ID NO: 118498 - DNA, 25 bp, SARS Virus
atcgtaataagtaacatgggagcta

SEQ ID NO: 118499 - DNA, 25 bp, SARS Virus
tcgtaataagtgacatgggagctag

SEQ ID NO: 118500 - DNA, 25 bp, SARS Virus
cgtaataagtgaaatgggagctagc

SEQ ID NO: 118501 - DNA, 25 bp, SARS Virus
gtaataagtgacatgggagctagca

SEQ ID NO: 118502 - DNA, 25 bp, SARS Virus
taataagtgacaagggagctagcat

SEQ ID NO: 118503 - DNA, 25 bp, SARS Virus
aataagtgacataggagctagcatg

SEQ ID NO: 118504 - DNA, 25 bp, SARS Virus
ataagtgacatgagagctagcatga

SEQ ID NO: 118505 - DNA, 25 bp, SARS Virus
taagtgacatggaagctagcatgag

SEQ ID NO: 118506 - DNA, 25 bp, SARS Virus
aagtgacatgggagctagcatgagg

SEQ ID NO: 118507 - DNA, 25 bp, SARS Virus
agtgacatgggaactagcatgaggc

SEQ ID NO: 118508 - DNA, 25 bp, SARS Virus
gtgacatgggagatagcatgaggcg

SEQ ID NO: 118509 - DNA, 25 bp, SARS Virus
tgacatgggagcaagcatgaggcgc

SEQ ID NO: 118510 - DNA, 25 bp, SARS Virus
gacatgggagctagcatgaggcgca

SEQ ID NO: 118511 - DNA, 25 bp, SARS Virus
acatgggagctaacatgaggcgcac

SEQ ID NO: 118512 - DNA, 25 bp, SARS Virus
catgggagctagaatgaggcgcacc

SEQ ID NO: 118513 - DNA, 25 bp, SARS Virus
atgggagctagcatgaggcgcaccg

SEQ ID NO: 118514 - DNA, 25 bp, SARS Virus
tgggagctagcaagaggcgcaccgg

SEQ ID NO: 118515 - DNA, 25 bp, SARS Virus
gggagctagcataaggcgcaccgga

SEQ ID NO: 118516 - DNA, 25 bp, SARS Virus
ggagctagcatgaggcgcaccggag

SEQ ID NO: 118517 - DNA, 25 bp, SARS Virus
gagctagcatgaagcgcaccggagc

SEQ ID NO: 118518 - DNA, 25 bp, SARS Virus
agctagcatgagacgcaccggagct

SEQ ID NO: 118519 - DNA, 25 bp, SARS Virus
gctagcatgaggagcaccggagcta

SEQ ID NO: 118520 - DNA, 25 bp, SARS Virus
ctagcatgaggcacaccggagctac

SEQ ID NO: 118521 - DNA, 25 bp, SARS Virus
tagcatgaggcgaaccggagctact

SEQ ID NO: 118522 - DNA, 25 bp, SARS Virus
agcatgaggcgcaccggagctactt

SEQ ID NO: 118523 - DNA, 25 bp, SARS Virus
gcatgaggcgcaacggagctacttt

SEQ ID NO: 118524 - DNA, 25 bp, SARS Virus
catgaggcgcacaggagctactttt

SEQ ID NO: 118525 - DNA, 25 bp, SARS Virus
atgaggcgcaccagagctactttta

SEQ ID NO: 118526 - DNA, 25 bp, SARS Virus
tgaggcgcaccgaagctacttttac

SEQ ID NO: 118527 - DNA, 25 bp, SARS Virus
gaggcgcaccggagctacttttaca

SEQ ID NO: 118528 - DNA, 25 bp, SARS Virus
aggcgcaccggaactacttttacac

SEQ ID NO: 118529 - DNA, 25 bp, SARS Virus
ggcgcaccggagatacttttacacc

SEQ ID NO: 118530 - DNA, 25 bp, SARS Virus
gcgcaccggagcaacttttacacca

SEQ ID NO: 118531 - DNA, 25 bp, SARS Virus
cgcaccggagctacttttacaccac

SEQ ID NO: 118532 - DNA, 25 bp, SARS Virus
gcaccggagctaattttacaccacc

SEQ ID NO: 118533 - DNA, 25 bp, SARS Virus
caccggagctacatttacaccaccg

SEQ ID NO: 118534 - DNA, 25 bp, SARS Virus
accggagctactattacaccaccga

SEQ ID NO: 118535 - DNA, 25 bp, SARS Virus
ccggagctacttatacaccaccgag

SEQ ID NO: 118536 - DNA, 25 bp, SARS Virus
cggagctactttaacaccaccgaga

SEQ ID NO: 118537 - DNA, 25 bp, SARS Virus
ggagctacttttacaccaccgagaa

SEQ ID NO: 118538 - DNA, 25 bp, SARS Virus
gagctacttttaaaccaccgagaaa

SEQ ID NO: 118539 - DNA, 25 bp, SARS Virus
agctacttttacaccaccgagaaag

SEQ ID NO: 118540 - DNA, 25 bp, SARS Virus
gctacttttacaacaccgagaaagt

SEQ ID NO: 118541 - DNA, 25 bp, SARS Virus
ctacttttacacaaccgagaaagtt

SEQ ID NO: 118542 - DNA, 25 bp, SARS Virus
tacttttacaccaccgagaaagttc

SEQ ID NO: 118543 - DNA, 25 bp, SARS Virus
acttttacaccaacgagaaagttca

SEQ ID NO: 118544 - DNA, 25 bp, SARS Virus
cttttacaccacagagaaagttcag

SEQ ID NO: 118545 - DNA, 25 bp, SARS Virus
ttttacaccaccaagaaagttcagg

SEQ ID NO: 118546 - DNA, 25 bp, SARS Virus
tttacaccaccgagaaagttcagga

SEQ ID NO: 118547 - DNA, 25 bp, SARS Virus
ttacaccaccgaaaaagttcaggag

SEQ ID NO: 118548 - DNA, 25 bp, SARS Virus
tacaccaccgagaaagttcaggagg

SEQ ID NO: 118549 - DNA, 25 bp, SARS Virus
acaccaccgagaaagttcaggaggg

SEQ ID NO: 118550 - DNA, 25 bp, SARS Virus
caccaccgagaaagttcaggaggga

SEQ ID NO: 118551 - DNA, 25 bp, SARS Virus
accaccgagaaaattcaggagggat

SEQ ID NO: 118552 - DNA, 25 bp, SARS Virus
ccaccgagaaagatcaggagggatt

SEQ ID NO: 118553 - DNA, 25 bp, SARS Virus
caccgagaaagtacaggagggatta

SEQ ID NO: 118554 - DNA, 25 bp, SARS Virus
accgagaaagttaaggagggattac

SEQ ID NO: 118555 - DNA, 25 bp, SARS Virus
ccgagaaagttcaggagggattaca

SEQ ID NO: 118556 - DNA, 25 bp, SARS Virus
cgagaaagttcaagagggattacaa

SEQ ID NO: 118557 - DNA, 25 bp, SARS Virus
gagaaagttcagaagggattacaat

SEQ ID NO: 118558 - DNA, 25 bp, SARS Virus
agaaagttcaggagggattacaatg

SEQ ID NO: 118559 - DNA, 25 bp, SARS Virus
gaaagttcaggaaggattacaatgt

SEQ ID NO: 118560 - DNA, 25 bp, SARS Virus
aaagttcaggagagattacaatgtg

SEQ ID NO: 118561 - DNA, 25 bp, SARS Virus
aagttcaggaggaattacaatgtgt

SEQ ID NO: 118562 - DNA, 25 bp, SARS Virus
agttcaggagggattacaatgtgta

SEQ ID NO: 118563 - DNA, 25 bp, SARS Virus
gttcaggagggaatacaatgtgtaa

SEQ ID NO: 118564 - DNA, 25 bp, SARS Virus
ttcaggagggataacaatgtgtaac

SEQ ID NO: 118565 - DNA, 25 bp, SARS Virus
tcaggagggattacaatgtgtaact

SEQ ID NO: 118566 - DNA, 25 bp, SARS Virus
caggagggattaaaatgtgtaacta

SEQ ID NO: 118567 - DNA, 25 bp, SARS Virus
aggagggattacaatgtgtaactaa

SEQ ID NO: 118568 - DNA, 25 bp, SARS Virus
ggagggattacaatgtgtaactaat

SEQ ID NO: 118569 - DNA, 25 bp, SARS Virus
gagggattacaaagtgtaactaatt

SEQ ID NO: 118570 - DNA, 25 bp, SARS Virus
agggattacaatatgtaactaattt

SEQ ID NO: 118571 - DNA, 25 bp, SARS Virus
gggattacaatgagtaactaatttc

SEQ ID NO: 118572 - DNA, 25 bp, SARS Virus
ggattacaatgtataactaatttct

SEQ ID NO: 118573 - DNA, 25 bp, SARS Virus
gattacaatgtgaaactaatttcta

SEQ ID NO: 118574 - DNA, 25 bp, SARS Virus
attacaatgtgtaactaatttctaa

SEQ ID NO: 118575 - DNA, 25 bp, SARS Virus
ttacaatgtgtaactaatttctaac

SEQ ID NO: 118576 - DNA, 25 bp, SARS Virus
tacaatgtgtaaataatttctaacg

SEQ ID NO: 118577 - DNA, 25 bp, SARS Virus
acaatgtgtaacaaatttctaacga

SEQ ID NO: 118578 - DNA, 25 bp, SARS Virus
caatgtgtaactaatttctaacgat

SEQ ID NO: 118579 - DNA, 25 bp, SARS Virus
aatgtgtaactaatttctaacgata

SEQ ID NO: 118580 - DNA, 25 bp, SARS Virus
atgtgtaactaaattctaacgatac

SEQ ID NO: 118581 - DNA, 25 bp, SARS Virus
tgtgtaactaatatctaacgataca

SEQ ID NO: 118582 - DNA, 25 bp, SARS Virus
gtgtaactaattactaacgatacac

SEQ ID NO: 118583 - DNA, 25 bp, SARS Virus
tgtaactaatttataacgatacact

SEQ ID NO: 118584 - DNA, 25 bp, SARS Virus
gtaactaatttcaaacgatacactc

SEQ ID NO: 118585 - DNA, 25 bp, SARS Virus
taactaatttctaacgatacactct

SEQ ID NO: 118586 - DNA, 25 bp, SARS Virus
aactaatttctaacgatacactcta

SEQ ID NO: 118587 - DNA, 25 bp, SARS Virus
actaatttctaaagatacactctaa

SEQ ID NO: 118588 - DNA, 25 bp, SARS Virus
ctaatttctaacaatacactctaat

SEQ ID NO: 118589 - DNA, 25 bp, SARS Virus
taatttctaacgatacactctaatt

SEQ ID NO: 118590 - DNA, 25 bp, SARS Virus
aatttctaacgaaacactctaattt

SEQ ID NO: 118591 - DNA, 25 bp, SARS Virus
atttctaacgatacactctaatttc

SEQ ID NO: 118592 - DNA, 25 bp, SARS Virus
tttctaacgataaactctaatttca

SEQ ID NO: 118593 - DNA, 25 bp, SARS Virus
ttctaacgatacactctaatttcaa

SEQ ID NO: 118594 - DNA, 25 bp, SARS Virus
tctaacgatacaatctaatttcaat

SEQ ID NO: 118595 - DNA, 25 bp, SARS Virus
ctaacgatacacactaatttcaatt

SEQ ID NO: 118596 - DNA, 25 bp, SARS Virus
taacgatacactataatttcaattg

SEQ ID NO: 118597 - DNA, 25 bp, SARS Virus
aacgatacactcaaatttcaattga

SEQ ID NO: 118598 - DNA, 25 bp, SARS Virus
acgatacactctaatttcaattgat

SEQ ID NO: 118599 - DNA, 25 bp, SARS Virus
cgatacactctaatttcaattgatt

SEQ ID NO: 118600 - DNA, 25 bp, SARS Virus
gatacactctaaattcaattgattt

SEQ ID NO: 118601 - DNA, 25 bp, SARS Virus
atacactctaatatcaattgatttg

SEQ ID NO: 118602 - DNA, 25 bp, SARS Virus
tacactctaattacaattgatttgg

SEQ ID NO: 118603 - DNA, 25 bp, SARS Virus
acactctaatttaaattgatttgga

SEQ ID NO: 118604 - DNA, 25 bp, SARS Virus
cactctaatttcaattgatttggat

SEQ ID NO: 118605 - DNA, 25 bp, SARS Virus
actctaatttcaattgatttggatg

SEQ ID NO: 118606 - DNA, 25 bp, SARS Virus
ctctaatttcaaatgatttggatga

SEQ ID NO: 118607 - DNA, 25 bp, SARS Virus
tctaatttcaatagatttggatgaa

SEQ ID NO: 118608 - DNA, 25 bp, SARS Virus
ctaatttcaattaatttggatgaac

SEQ ID NO: 118609 - DNA, 25 bp, SARS Virus
taatttcaattgatttggatgaaca

SEQ ID NO: 118610 - DNA, 25 bp, SARS Virus
aatttcaattgaattggatgaacac

SEQ ID NO: 118611 - DNA, 25 bp, SARS Virus
atttcaattgatatggatgaacacg

SEQ ID NO: 118612 - DNA, 25 bp, SARS Virus
tttcaattgattaggatgaacacga

SEQ ID NO: 118613 - DNA, 25 bp, SARS Virus
ttcaattgatttagatgaacacgac

SEQ ID NO: 118614 - DNA, 25 bp, SARS Virus
tcaattgatttgaatgaacacgaca

SEQ ID NO: 118615 - DNA, 25 bp, SARS Virus
caattgatttggatgaacacgacaa

SEQ ID NO: 118616 - DNA, 25 bp, SARS Virus
aattgatttggaagaacacgacaaa

SEQ ID NO: 118617 - DNA, 25 bp, SARS Virus
attgatttggataaacacgacaaat

SEQ ID NO: 118618 - DNA, 25 bp, SARS Virus
ttgatttggatgaacacgacaaatc

SEQ ID NO: 118619 - DNA, 25 bp, SARS Virus
tgatttggatgaacacgacaaatca

SEQ ID NO: 118620 - DNA, 25 bp, SARS Virus
gatttggatgaaaacgacaaatcaa

SEQ ID NO: 118621 - DNA, 25 bp, SARS Virus
atttggatgaacacgacaaatcaat

SEQ ID NO: 118622 - DNA, 25 bp, SARS Virus
tttggatgaacaagacaaatcaatg

SEQ ID NO: 118623 - DNA, 25 bp, SARS Virus
ttggatgaacacaacaaatcaatgc

SEQ ID NO: 118624 - DNA, 25 bp, SARS Virus
tggatgaacacgacaaatcaatgct

SEQ ID NO: 118625 - DNA, 25 bp, SARS Virus
ggatgaacacgaaaaatcaatgctc

SEQ ID NO: 118626 - DNA, 25 bp, SARS Virus
gatgaacacgacaaatcaatgctct

SEQ ID NO: 118627 - DNA, 25 bp, SARS Virus
atgaacacgacaaatcaatgctctt

SEQ ID NO: 118628 - DNA, 25 bp, SARS Virus
tgaacacgacaaatcaatgctctta

SEQ ID NO: 118629 - DNA, 25 bp, SARS Virus
gaacacgacaaaacaatgctcttaa

SEQ ID NO: 118630 - DNA, 25 bp, SARS Virus
aacacgacaaataaatgctcttaag

SEQ ID NO: 118631 - DNA, 25 bp, SARS Virus
acacgacaaatcaatgctcttaagt

SEQ ID NO: 118632 - DNA, 25 bp, SARS Virus
cacgacaaatcaatgctcttaagta

SEQ ID NO: 118633 - DNA, 25 bp, SARS Virus
acgacaaatcaaagctcttaagtaa

SEQ ID NO: 118634 - DNA, 25 bp, SARS Virus
cgacaaatcaatactcttaagtaag

SEQ ID NO: 118635 - DNA, 25 bp, SARS Virus
gacaaatcaatgatcttaagtaaga

SEQ ID NO: 118636 - DNA, 25 bp, SARS Virus
acaaatcaatgcacttaagtaagac

SEQ ID NO: 118637 - DNA, 25 bp, SARS Virus
caaatcaatgctattaagtaagacg

SEQ ID NO: 118638 - DNA, 25 bp, SARS Virus
aaatcaatgctcataagtaagacgt

SEQ ID NO: 118639 - DNA, 25 bp, SARS Virus
aatcaatgctctaaagtaagacgtg

SEQ ID NO: 118640 - DNA, 25 bp, SARS Virus
atcaatgctcttaagtaagacgtgt

SEQ ID NO: 118641 - DNA, 25 bp, SARS Virus
tcaatgctcttaagtaagacgtgtt

SEQ ID NO: 118642 - DNA, 25 bp, SARS Virus
caatgctcttaaataagacgtgttc

SEQ ID NO: 118643 - DNA, 25 bp, SARS Virus
aatgctcttaagaaagacgtgttct

SEQ ID NO: 118644 - DNA, 25 bp, SARS Virus
atgctcttaagtaagacgtgttctc

SEQ ID NO: 118645 - DNA, 25 bp, SARS Virus
tgctcttaagtaagacgtgttctca

SEQ ID NO: 118646 - DNA, 25 bp, SARS Virus
gctcttaagtaaaacgtgttctcat

SEQ ID NO: 118647 - DNA, 25 bp, SARS Virus
ctcttaagtaagacgtgttctcatc

SEQ ID NO: 118648 - DNA, 25 bp, SARS Virus
tcttaagtaagaagtgttctcatct

SEQ ID NO: 118649 - DNA, 25 bp, SARS Virus
cttaagtaagacatgttctcatctg

SEQ ID NO: 118650 - DNA, 25 bp, SARS Virus
ttaagtaagacgagttctcatctga

SEQ ID NO: 118651 - DNA, 25 bp, SARS Virus
taagtaagacgtattctcatctgat

SEQ ID NO: 118652 - DNA, 25 bp, SARS Virus
aagtaagacgtgatctcatctgata

SEQ ID NO: 118653 - DNA, 25 bp, SARS Virus
agtaagacgtgtactcatctgatac

SEQ ID NO: 118654 - DNA, 25 bp, SARS Virus
gtaagacgtgttatcatctgataca

SEQ ID NO: 118655 - DNA, 25 bp, SARS Virus
taagacgtgttcacatctgatacat

SEQ ID NO: 118656 - DNA, 25 bp, SARS Virus
aagacgtgttctaatctgatacata

SEQ ID NO: 118657 - DNA, 25 bp, SARS Virus
agacgtgttctcatctgatacatag

SEQ ID NO: 118658 - DNA, 25 bp, SARS Virus
gacgtgttctcaactgatacatagc

SEQ ID NO: 118659 - DNA, 25 bp, SARS Virus
acgtgttctcatatgatacatagca

SEQ ID NO: 118660 - DNA, 25 bp, SARS Virus
cgtgttctcatcagatacatagcat

SEQ ID NO: 118661 - DNA, 25 bp, SARS Virus
gtgttctcatctaatacatagcatt

SEQ ID NO: 118662 - DNA, 25 bp, SARS Virus
tgttctcatctgatacatagcattt

SEQ ID NO: 118663 - DNA, 25 bp, SARS Virus
gttctcatctgaaacatagcatttg

SEQ ID NO: 118664 - DNA, 25 bp, SARS Virus
ttctcatctgatacatagcatttgc

SEQ ID NO: 118665 - DNA, 25 bp, SARS Virus
tctcatctgataaatagcatttgcc

SEQ ID NO: 118666 - DNA, 25 bp, SARS Virus
ctcatctgatacatagcatttgcct

SEQ ID NO: 118667 - DNA, 25 bp, SARS Virus
tcatctgatacaaagcatttgcctt

SEQ ID NO: 118668 - DNA, 25 bp, SARS Virus
catctgatacatagcatttgcctta

SEQ ID NO: 118669 - DNA, 25 bp, SARS Virus
atctgatacataacatttgccttaa

SEQ ID NO: 118670 - DNA, 25 bp, SARS Virus
tctgatacatagaatttgccttaac

SEQ ID NO: 118671 - DNA, 25 bp, SARS Virus
ctgatacatagcatttgccttaacg

SEQ ID NO: 118672 - DNA, 25 bp, SARS Virus
tgatacatagcaattgccttaacgc

SEQ ID NO: 118673 - DNA, 25 bp, SARS Virus
gatacatagcatatgccttaacgct

SEQ ID NO: 118674 - DNA, 25 bp, SARS Virus
atacatagcattagccttaacgctt

SEQ ID NO: 118675 - DNA, 25 bp, SARS Virus
tacatagcatttaccttaacgcttt

SEQ ID NO: 118676 - DNA, 25 bp, SARS Virus
acatagcatttgacttaacgctttt

SEQ ID NO: 118677 - DNA, 25 bp, SARS Virus
catagcatttgcattaacgcttttg

SEQ ID NO: 118678 - DNA, 25 bp, SARS Virus
atagcatttgccataacgcttttgc

SEQ ID NO: 118679 - DNA, 25 bp, SARS Virus
tagcatttgcctaaacgcttttgca

SEQ ID NO: 118680 - DNA, 25 bp, SARS Virus
agcatttgccttaacgcttttgcaa

SEQ ID NO: 118681 - DNA, 25 bp, SARS Virus
gcatttgccttaacgcttttgcaaa

SEQ ID NO: 118682 - DNA, 25 bp, SARS Virus
catttgccttaaagcttttgcaaat

SEQ ID NO: 118683 - DNA, 25 bp, SARS Virus
atttgccttaacacttttgcaaatg

SEQ ID NO: 118684 - DNA, 25 bp, SARS Virus
tttgccttaacgattttgcaaatgt

SEQ ID NO: 118685 - DNA, 25 bp, SARS Virus
ttgccttaacgcatttgcaaatgta

SEQ ID NO: 118686 - DNA, 25 bp, SARS Virus
tgccttaacgctattgcaaatgtat

SEQ ID NO: 118687 - DNA, 25 bp, SARS Virus
gccttaacgcttatgcaaatgtatc

SEQ ID NO: 118688 - DNA, 25 bp, SARS Virus
ccttaacgctttagcaaatgtatcg

SEQ ID NO: 118689 - DNA, 25 bp, SARS Virus
cacattgtaatccctcctgaacttt

SEQ ID NO: 118690 - DNA, 25 bp, SARS Virus
acattgtaatccctcctgaactttc

SEQ ID NO: 118691 - DNA, 25 bp, SARS Virus
cattgtaatcccccctgaactttct

SEQ ID NO: 118692 - DNA, 25 bp, SARS Virus
attgtaatccctcctgaactttctc

SEQ ID NO: 118693 - DNA, 25 bp, SARS Virus
ttgtaatccctcctgaactttctcg

SEQ ID NO: 118694 - DNA, 25 bp, SARS Virus
tgtaatccctcccgaactttctcgg

SEQ ID NO: 118695 - DNA, 25 bp, SARS Virus
gtaatccctcctcaactttctcggt

SEQ ID NO: 118696 - DNA, 25 bp, SARS Virus
taatccctcctgcactttctcggtg

SEQ ID NO: 118697 - DNA, 25 bp, SARS Virus
aatccctcctgacctttctcggtgg

SEQ ID NO: 118698 - DNA, 25 bp, SARS Virus
atccctcctgaactttctcggtggt

SEQ ID NO: 118699 - DNA, 25 bp, SARS Virus
tccctcctgaaccttctcggtggtg

SEQ ID NO: 118700 - DNA, 25 bp, SARS Virus
ccctcctgaactctctcggtggtgt

SEQ ID NO: 118701 - DNA, 25 bp, SARS Virus
cctcctgaacttcctcggtggtgta

SEQ ID NO: 118702 - DNA, 25 bp, SARS Virus
ctcctgaactttctcggtggtgtaa

SEQ ID NO: 118703 - DNA, 25 bp, SARS Virus
tcctgaactttcccggtggtgtaaa

SEQ ID NO: 118704 - DNA, 25 bp, SARS Virus
cctgaactttctcggtggtgtaaaa

SEQ ID NO: 118705 - DNA, 25 bp, SARS Virus
ctgaactttctccgtggtgtaaaag

SEQ ID NO: 118706 - DNA, 25 bp, SARS Virus
tgaactttctcgctggtgtaaaagt

SEQ ID NO: 118707 - DNA, 25 bp, SARS Virus
gaactttctcggcggtgtaaaagta

SEQ ID NO: 118708 - DNA, 25 bp, SARS Virus
aactttctcggtcgtgtaaaagtag

SEQ ID NO: 118709 - DNA, 25 bp, SARS Virus
actttctcggtgctgtaaaagtagc

SEQ ID NO: 118710 - DNA, 25 bp, SARS Virus
ctttctcggtggcgtaaaagtagct

SEQ ID NO: 118711 - DNA, 25 bp, SARS Virus
tttctcggtggtctaaaagtagctc

SEQ ID NO: 118712 - DNA, 25 bp, SARS Virus
ttctcggtggtgcaaaagtagctcc

SEQ ID NO: 118713 - DNA, 25 bp, SARS Virus
tctcggtggtgtcaaagtagctccg

SEQ ID NO: 118714 - DNA, 25 bp, SARS Virus
ctcggtggtgtacaagtagctccgg

SEQ ID NO: 118715 - DNA, 25 bp, SARS Virus
tcggtggtgtaacagtagctccggt

SEQ ID NO: 118716 - DNA, 25 bp, SARS Virus
cggtggtgtaaacgtagctccggtg

SEQ ID NO: 118717 - DNA, 25 bp, SARS Virus
ggtggtgtaaaactagctccggtgc

SEQ ID NO: 118718 - DNA, 25 bp, SARS Virus
gtggtgtaaaagcagctccggtgcg

SEQ ID NO: 118719 - DNA, 25 bp, SARS Virus
tggtgtaaaagtcgctccggtgcgc

SEQ ID NO: 118720 - DNA, 25 bp, SARS Virus
ggtgtaaaagtacctccggtgcgcc

SEQ ID NO: 118721 - DNA, 25 bp, SARS Virus
gtgtaaaagtagctccggtgcgcct

SEQ ID NO: 118722 - DNA, 25 bp, SARS Virus
tgtaaaagtagccccggtgcgcctc

SEQ ID NO: 118723 - DNA, 25 bp, SARS Virus
gtaaaagtagctccggtgcgcctca

SEQ ID NO: 118724 - DNA, 25 bp, SARS Virus
taaaagtagctccggtgcgcctcat

SEQ ID NO: 118725 - DNA, 25 bp, SARS Virus
aaaagtagctcccgtgcgcctcatg

SEQ ID NO: 118726 - DNA, 25 bp, SARS Virus
aaagtagctccgctgcgcctcatgc

SEQ ID NO: 118727 - DNA, 25 bp, SARS Virus
aagtagctccggcgcgcctcatgct

SEQ ID NO: 118728 - DNA, 25 bp, SARS Virus
agtagctccggtccgcctcatgcta

SEQ ID NO: 118729 - DNA, 25 bp, SARS Virus
gtagctccggtgcgcctcatgctag

SEQ ID NO: 118730 - DNA, 25 bp, SARS Virus
tagctccggtgcccctcatgctagc

SEQ ID NO: 118731 - DNA, 25 bp, SARS Virus
agctccggtgcgcctcatgctagct

SEQ ID NO: 118732 - DNA, 25 bp, SARS Virus
gctccggtgcgcctcatgctagctc

SEQ ID NO: 118733 - DNA, 25 bp, SARS Virus
ctccggtgcgccccatgctagctcc

SEQ ID NO: 118734 - DNA, 25 bp, SARS Virus
tccggtgcgcctcatgctagctccc

SEQ ID NO: 118735 - DNA, 25 bp, SARS Virus
ccggtgcgcctcctgctagctccca

SEQ ID NO: 118736 - DNA, 25 bp, SARS Virus
cggtgcgcctcacgctagctcccat

SEQ ID NO: 118737 - DNA, 25 bp, SARS Virus
ggtgcgcctcatcctagctcccatg

SEQ ID NO: 118738 - DNA, 25 bp, SARS Virus
gtgcgcctcatgctagctcccatgt

SEQ ID NO: 118739 - DNA, 25 bp, SARS Virus
tgcgcctcatgccagctcccatgtc

SEQ ID NO: 118740 - DNA, 25 bp, SARS Virus
gcgcctcatgctcgctcccatgtca

SEQ ID NO: 118741 - DNA, 25 bp, SARS Virus
cgcctcatgctacctcccatgtcac

SEQ ID NO: 118742 - DNA, 25 bp, SARS Virus
gcctcatgctagctcccatgtcact

SEQ ID NO: 118743 - DNA, 25 bp, SARS Virus
cctcatgctagcccccatgtcactt

SEQ ID NO: 118744 - DNA, 25 bp, SARS Virus
ctcatgctagctcccatgtcactta

SEQ ID NO: 118745 - DNA, 25 bp, SARS Virus
tcatgctagctcccatgtcacttat

SEQ ID NO: 118746 - DNA, 25 bp, SARS Virus
catgctagctcccatgtcacttatt

SEQ ID NO: 118747 - DNA, 25 bp, SARS Virus
atgctagctcccctgtcacttatta

SEQ ID NO: 118748 - DNA, 25 bp, SARS Virus
tgctagctcccacgtcacttattac

SEQ ID NO: 118749 - DNA, 25 bp, SARS Virus
gctagctcccatctcacttattacg

SEQ ID NO: 118750 - DNA, 25 bp, SARS Virus
ctagctcccatgccacttattacga

SEQ ID NO: 118751 - DNA, 25 bp, SARS Virus
tagctcccatgtcacttattacgat

SEQ ID NO: 118752 - DNA, 25 bp, SARS Virus
agctcccatgtcccttattacgatc

SEQ ID NO: 118753 - DNA, 25 bp, SARS Virus
gctcccatgtcacttattacgatcc

SEQ ID NO: 118754 - DNA, 25 bp, SARS Virus
ctcccatgtcacctattacgatccc

SEQ ID NO: 118755 - DNA, 25 bp, SARS Virus
tcccatgtcactcattacgatccct

SEQ ID NO: 118756 - DNA, 25 bp, SARS Virus
cccatgtcacttcttacgatccctc

SEQ ID NO: 118757 - DNA, 25 bp, SARS Virus
ccatgtcacttactacgatccctct

SEQ ID NO: 118758 - DNA, 25 bp, SARS Virus
catgtcacttatcacgatccctctc

SEQ ID NO: 118759 - DNA, 25 bp, SARS Virus
atgtcacttattccgatccctctcg

SEQ ID NO: 118760 - DNA, 25 bp, SARS Virus
tgtcacttattacgatccctctcga

SEQ ID NO: 118761 - DNA, 25 bp, SARS Virus
gtcacttattaccatccctctcgac

SEQ ID NO: 118762 - DNA, 25 bp, SARS Virus
tcacttattacgctccctctcgacg

SEQ ID NO: 118763 - DNA, 25 bp, SARS Virus
cacttattacgacccctctcgacgg

SEQ ID NO: 118764 - DNA, 25 bp, SARS Virus
acttattacgatccctctcgacgga

SEQ ID NO: 118765 - DNA, 25 bp, SARS Virus
cttattacgatccctctcgacggat

SEQ ID NO: 118766 - DNA, 25 bp, SARS Virus
ttattacgatccctctcgacggata

SEQ ID NO: 118767 - DNA, 25 bp, SARS Virus
tattacgatccccctcgacggatat

SEQ ID NO: 118768 - DNA, 25 bp, SARS Virus
attacgatccctctcgacggatata

SEQ ID NO: 118769 - DNA, 25 bp, SARS Virus
ttacgatccctcccgacggatatac

SEQ ID NO: 118770 - DNA, 25 bp, SARS Virus
tacgatccctctcgacggatatacc

SEQ ID NO: 118771 - DNA, 25 bp, SARS Virus
acgatccctctccacggatatacct

SEQ ID NO: 118772 - DNA, 25 bp, SARS Virus
cgatccctctcgccggatatacctt

SEQ ID NO: 118773 - DNA, 25 bp, SARS Virus
gatccctctcgacggatataccttc

SEQ ID NO: 118774 - DNA, 25 bp, SARS Virus
atccctctcgaccgatataccttct

SEQ ID NO: 118775 - DNA, 25 bp, SARS Virus
tccctctcgacgcatataccttctc

SEQ ID NO: 118776 - DNA, 25 bp, SARS Virus
ccctctcgacggctataccttctcg

SEQ ID NO: 118777 - DNA, 25 bp, SARS Virus
cctctcgacggacataccttctcgg

SEQ ID NO: 118778 - DNA, 25 bp, SARS Virus
ctctcgacggatctaccttctcggg

SEQ ID NO: 118779 - DNA, 25 bp, SARS Virus
tctcgacggatacaccttctcggga

SEQ ID NO: 118780 - DNA, 25 bp, SARS Virus
ctcgacggatatcccttctcgggat

SEQ ID NO: 118781 - DNA, 25 bp, SARS Virus
tcgacggatataccttctcgggatt

SEQ ID NO: 118782 - DNA, 25 bp, SARS Virus
cgacggatataccttctcgggatta

SEQ ID NO: 118783 - DNA, 25 bp, SARS Virus
gacggatataccctctcgggattac

SEQ ID NO: 118784 - DNA, 25 bp, SARS Virus
acggatatacctcctcgggattaca

SEQ ID NO: 118785 - DNA, 25 bp, SARS Virus
cggatataccttctcgggattacac

SEQ ID NO: 118786 - DNA, 25 bp, SARS Virus
ggatataccttcccgggattacaca

SEQ ID NO: 118787 - DNA, 25 bp, SARS Virus
gatataccttctcgggattacacat

SEQ ID NO: 118788 - DNA, 25 bp, SARS Virus
atataccttctccggattacacatt

SEQ ID NO: 118789 - DNA, 25 bp, SARS Virus
tataccttctcgcgattacacattt

SEQ ID NO: 118790 - DNA, 25 bp, SARS Virus
ataccttctcggcattacacatttt

SEQ ID NO: 118791 - DNA, 25 bp, SARS Virus
taccttctcgggcttacacatttta

SEQ ID NO: 118792 - DNA, 25 bp, SARS Virus
accttctcgggactacacattttaa

SEQ ID NO: 118793 - DNA, 25 bp, SARS Virus
ccttctcgggatcacacattttaat

SEQ ID NO: 118794 - DNA, 25 bp, SARS Virus
cttctcgggattccacattttaatt

SEQ ID NO: 118795 - DNA, 25 bp, SARS Virus
ttctcgggattacacattttaatta

SEQ ID NO: 118796 - DNA, 25 bp, SARS Virus
tctcgggattacccattttaattaa

SEQ ID NO: 118797 - DNA, 25 bp, SARS Virus
ctcgggattacacattttaattaaa

SEQ ID NO: 118798 - DNA, 25 bp, SARS Virus
tcgggattacaccttttaattaaaa

SEQ ID NO: 118799 - DNA, 25 bp, SARS Virus
cgggattacacactttaattaaaat

SEQ ID NO: 118800 - DNA, 25 bp, SARS Virus
gggattacacatcttaattaaaatc

SEQ ID NO: 118801 - DNA, 25 bp, SARS Virus
ggattacacattctaattaaaatca

SEQ ID NO: 118802 - DNA, 25 bp, SARS Virus
gattacacatttcaattaaaatcat

SEQ ID NO: 118803 - DNA, 25 bp, SARS Virus
attacacattttcattaaaatcatc

SEQ ID NO: 118804 - DNA, 25 bp, SARS Virus
ttacacattttacttaaaatcatca

SEQ ID NO: 118805 - DNA, 25 bp, SARS Virus
tacacattttaactaaaatcatcac

SEQ ID NO: 118806 - DNA, 25 bp, SARS Virus
acacattttaatcaaaatcatcacg

SEQ ID NO: 118807 - DNA, 25 bp, SARS Virus
cacattttaattcaaatcatcacga

SEQ ID NO: 118808 - DNA, 25 bp, SARS Virus
acattttaattacaatcatcacgat

SEQ ID NO: 118809 - DNA, 25 bp, SARS Virus
cattttaattaacatcatcacgata

SEQ ID NO: 118810 - DNA, 25 bp, SARS Virus
attttaattaaactcatcacgatag

SEQ ID NO: 118811 - DNA, 25 bp, SARS Virus
ttttaattaaaaccatcacgatagg

SEQ ID NO: 118812 - DNA, 25 bp, SARS Virus
tttaattaaaatcatcacgataggg

SEQ ID NO: 118813 - DNA, 25 bp, SARS Virus
ttaattaaaatcctcacgatagggg

SEQ ID NO: 118814 - DNA, 25 bp, SARS Virus
taattaaaatcaccacgataggggt

SEQ ID NO: 118815 - DNA, 25 bp, SARS Virus
aattaaaatcatcacgataggggta

SEQ ID NO: 118816 - DNA, 25 bp, SARS Virus
attaaaatcatcccgataggggtac

SEQ ID NO: 118817 - DNA, 25 bp, SARS Virus
ttaaaatcatcacgataggggtaca

SEQ ID NO: 118818 - DNA, 25 bp, SARS Virus
taaaatcatcaccataggggtacac

SEQ ID NO: 118819 - DNA, 25 bp, SARS Virus
aaaatcatcacgctaggggtacact

SEQ ID NO: 118820 - DNA, 25 bp, SARS Virus
aaatcatcacgacaggggtacacta

SEQ ID NO: 118821 - DNA, 25 bp, SARS Virus
aatcatcacgatcggggtacactaa

SEQ ID NO: 118822 - DNA, 25 bp, SARS Virus
atcatcacgatacgggtacactaaa

SEQ ID NO: 118823 - DNA, 25 bp, SARS Virus
tcatcacgatagcggtacactaaaa

SEQ ID NO: 118824 - DNA, 25 bp, SARS Virus
catcacgataggcgtacactaaaat

SEQ ID NO: 118825 - DNA, 25 bp, SARS Virus
atcacgatagggctacactaaaatt

SEQ ID NO: 118826 - DNA, 25 bp, SARS Virus
tcacgataggggcacactaaaatta

SEQ ID NO: 118827 - DNA, 25 bp, SARS Virus
cacgataggggtccactaaaattat

SEQ ID NO: 118828 - DNA, 25 bp, SARS Virus
acgataggggtacactaaaattatc

SEQ ID NO: 118829 - DNA, 25 bp, SARS Virus
cgataggggtaccctaaaattatcg

SEQ ID NO: 118830 - DNA, 25 bp, SARS Virus
gataggggtacactaaaattatcga

SEQ ID NO: 118831 - DNA, 25 bp, SARS Virus
ataggggtacaccaaaattatcgaa

SEQ ID NO: 118832 - DNA, 25 bp, SARS Virus
taggggtacactcaaattatcgaag

SEQ ID NO: 118833 - DNA, 25 bp, SARS Virus
aggggtacactacaattatcgaaga

SEQ ID NO: 118834 - DNA, 25 bp, SARS Virus
ggggtacactaacattatcgaagaa

SEQ ID NO: 118835 - DNA, 25 bp, SARS Virus
gggtacactaaacttatcgaagaat

SEQ ID NO: 118836 - DNA, 25 bp, SARS Virus
ggtacactaaaactatcgaagaatc

SEQ ID NO: 118837 - DNA, 25 bp, SARS Virus
gtacactaaaatcatcgaagaatcc

SEQ ID NO: 118838 - DNA, 25 bp, SARS Virus
tacactaaaattctcgaagaatcct

SEQ ID NO: 118839 - DNA, 25 bp, SARS Virus
acactaaaattaccgaagaatcctc

SEQ ID NO: 118840 - DNA, 25 bp, SARS Virus
cactaaaattatcgaagaatcctct

SEQ ID NO: 118841 - DNA, 25 bp, SARS Virus
actaaaattatccaagaatcctctt

SEQ ID NO: 118842 - DNA, 25 bp, SARS Virus
ctaaaattatcgcagaatcctctta

SEQ ID NO: 118843 - DNA, 25 bp, SARS Virus
taaaattatcgacgaatcctcttac

SEQ ID NO: 118844 - DNA, 25 bp, SARS Virus
aaaattatcgaacaatcctcttact

SEQ ID NO: 118845 - DNA, 25 bp, SARS Virus
aaattatcgaagcatcctcttactg

SEQ ID NO: 118846 - DNA, 25 bp, SARS Virus
aattatcgaagactcctcttactgt

SEQ ID NO: 118847 - DNA, 25 bp, SARS Virus
attatcgaagaaccctcttactgtt

SEQ ID NO: 118848 - DNA, 25 bp, SARS Virus
ttatcgaagaatcctcttactgttt

SEQ ID NO: 118849 - DNA, 25 bp, SARS Virus
tatcgaagaatcctcttactgtttt

SEQ ID NO: 118850 - DNA, 25 bp, SARS Virus
atcgaagaatccccttactgttttt

SEQ ID NO: 118851 - DNA, 25 bp, SARS Virus
tcgaagaatcctcttactgtttttt

SEQ ID NO: 118852 - DNA, 25 bp, SARS Virus
cgaagaatcctcctactgttttttt

SEQ ID NO: 118853 - DNA, 25 bp, SARS Virus
gaagaatcctctcactgtttttttt

SEQ ID NO: 118854 - DNA, 25 bp, SARS Virus
aagaatcctcttcctgttttttttt

SEQ ID NO: 118855 - DNA, 25 bp, SARS Virus
agaatcctcttactgtttttttttt

SEQ ID NO: 118856 - DNA, 25 bp, SARS Virus
gaatcctcttaccgttttttttttt

SEQ ID NO: 118857 - DNA, 25 bp, SARS Virus
aaaaaaaaaaaccgtaagaggattc

SEQ ID NO: 118858 - DNA, 25 bp, SARS Virus
aaaaaaaaaacactaagaggattct

SEQ ID NO: 118859 - DNA, 25 bp, SARS Virus
aaaaaaaaacagcaagaggattctt

SEQ ID NO: 118860 - DNA, 25 bp, SARS Virus
aaaaaaaacagtcagaggattcttc

SEQ ID NO: 118861 - DNA, 25 bp, SARS Virus
aaaaaaacagtacgaggattcttcg

SEQ ID NO: 118862 - DNA, 25 bp, SARS Virus
aaaaaacagtaacaggattcttcga

SEQ ID NO: 118863 - DNA, 25 bp, SARS Virus
aaaaacagtaagcggattcttcgat

SEQ ID NO: 118864 - DNA, 25 bp, SARS Virus
aaaacagtaagacgattcttcgata

SEQ ID NO: 118865 - DNA, 25 bp, SARS Virus
aaacagtaagagcattcttcgataa

SEQ ID NO: 118866 - DNA, 25 bp, SARS Virus
aacagtaagaggcttcttcgataat

SEQ ID NO: 118867 - DNA, 25 bp, SARS Virus
acagtaagaggactcttcgataatt

SEQ ID NO: 118868 - DNA, 25 bp, SARS Virus
cagtaagaggatccttcgataattt

SEQ ID NO: 118869 - DNA, 25 bp, SARS Virus
agtaagaggattcttcgataatttt

SEQ ID NO: 118870 - DNA, 25 bp, SARS Virus
gtaagaggattcctcgataatttta

SEQ ID NO: 118871 - DNA, 25 bp, SARS Virus
taagaggattctccgataattttag

SEQ ID NO: 118872 - DNA, 25 bp, SARS Virus
aagaggattcttcgataattttagt

SEQ ID NO: 118873 - DNA, 25 bp, SARS Virus
agaggattcttccataattttagtg

SEQ ID NO: 118874 - DNA, 25 bp, SARS Virus
gaggattcttcgctaattttagtgt

SEQ ID NO: 118875 - DNA, 25 bp, SARS Virus
aggattcttcgacaattttagtgta

SEQ ID NO: 118876 - DNA, 25 bp, SARS Virus
ggattcttcgatcattttagtgtac

SEQ ID NO: 118877 - DNA, 25 bp, SARS Virus
gattcttcgatacttttagtgtacc

SEQ ID NO: 118878 - DNA, 25 bp, SARS Virus
attcttcgataactttagtgtaccc

SEQ ID NO: 118879 - DNA, 25 bp, SARS Virus
ttcttcgataatcttagtgtacccc

SEQ ID NO: 118880 - DNA, 25 bp, SARS Virus
tcttcgataattctagtgtacccct

SEQ ID NO: 118881 - DNA, 25 bp, SARS Virus
cttcgataatttcagtgtaccccta

SEQ ID NO: 118882 - DNA, 25 bp, SARS Virus
ttcgataattttcgtgtacccctat

SEQ ID NO: 118883 - DNA, 25 bp, SARS Virus
tcgataattttactgtacccctatc

SEQ ID NO: 118884 - DNA, 25 bp, SARS Virus
cgataattttagcgtacccctatcg

SEQ ID NO: 118885 - DNA, 25 bp, SARS Virus
gataattttagtctacccctatcgt

SEQ ID NO: 118886 - DNA, 25 bp, SARS Virus
ataattttagtgcacccctatcgtg

SEQ ID NO: 118887 - DNA, 25 bp, SARS Virus
taattttagtgtccccctatcgtga

SEQ ID NO: 118888 - DNA, 25 bp, SARS Virus
aattttagtgtacccctatcgtgat

SEQ ID NO: 118889 - DNA, 25 bp, SARS Virus
attttagtgtacccctatcgtgatg

SEQ ID NO: 118890 - DNA, 25 bp, SARS Virus
ttttagtgtacccctatcgtgatga

SEQ ID NO: 118891 - DNA, 25 bp, SARS Virus
tttagtgtacccctatcgtgatgat

SEQ ID NO: 118892 - DNA, 25 bp, SARS Virus
ttagtgtacccccatcgtgatgatt

SEQ ID NO: 118893 - DNA, 25 bp, SARS Virus
tagtgtacccctctcgtgatgattt

SEQ ID NO: 118894 - DNA, 25 bp, SARS Virus
agtgtacccctaccgtgatgatttt

SEQ ID NO: 118895 - DNA, 25 bp, SARS Virus
gtgtacccctatcgtgatgatttta

SEQ ID NO: 118896 - DNA, 25 bp, SARS Virus
tgtacccctatcctgatgattttaa

SEQ ID NO: 118897 - DNA, 25 bp, SARS Virus
gtacccctatcgcgatgattttaat

SEQ ID NO: 118898 - DNA, 25 bp, SARS Virus
tacccctatcgtcatgattttaatt

SEQ ID NO: 118899 - DNA, 25 bp, SARS Virus
acccctatcgtgctgattttaatta

SEQ ID NO: 118900 - DNA, 25 bp, SARS Virus
cccctatcgtgacgattttaattaa

SEQ ID NO: 118901 - DNA, 25 bp, SARS Virus
ccctatcgtgatcattttaattaaa

SEQ ID NO: 118902 - DNA, 25 bp, SARS Virus
cctatcgtgatgcttttaattaaaa

SEQ ID NO: 118903 - DNA, 25 bp, SARS Virus
ctatcgtgatgactttaattaaaat

SEQ ID NO: 118904 - DNA, 25 bp, SARS Virus
tatcgtgatgatcttaattaaaatg

SEQ ID NO: 118905 - DNA, 25 bp, SARS Virus
atcgtgatgattctaattaaaatgt

SEQ ID NO: 118906 - DNA, 25 bp, SARS Virus
tcgtgatgatttcaattaaaatgtg

SEQ ID NO: 118907 - DNA, 25 bp, SARS Virus
cgtgatgattttcattaaaatgtgt

SEQ ID NO: 118908 - DNA, 25 bp, SARS Virus
gtgatgattttacttaaaatgtgta

SEQ ID NO: 118909 - DNA, 25 bp, SARS Virus
tgatgattttaactaaaatgtgtaa

SEQ ID NO: 118910 - DNA, 25 bp, SARS Virus
gatgattttaatcaaaatgtgtaat

SEQ ID NO: 118911 - DNA, 25 bp, SARS Virus
atgattttaattcaaatgtgtaatc

SEQ ID NO: 118912 - DNA, 25 bp, SARS Virus
tgattttaattacaatgtgtaatcc

SEQ ID NO: 118913 - DNA, 25 bp, SARS Virus
gattttaattaacatgtgtaatccc

SEQ ID NO: 118914 - DNA, 25 bp, SARS Virus
attttaattaaactgtgtaatcccg

SEQ ID NO: 118915 - DNA, 25 bp, SARS Virus
ttttaattaaaacgtgtaatcccga

SEQ ID NO: 118916 - DNA, 25 bp, SARS Virus
tttaattaaaatctgtaatcccgag

SEQ ID NO: 118917 - DNA, 25 bp, SARS Virus
ttaattaaaatgcgtaatcccgaga

SEQ ID NO: 118918 - DNA, 25 bp, SARS Virus
taattaaaatgtctaatcccgagaa

SEQ ID NO: 118919 - DNA, 25 bp, SARS Virus
aattaaaatgtgcaatcccgagaag

SEQ ID NO: 118920 - DNA, 25 bp, SARS Virus
attaaaatgtgtcatcccgagaagg

SEQ ID NO: 118921 - DNA, 25 bp, SARS Virus
ttaaaatgtgtactcccgagaaggt

SEQ ID NO: 118922 - DNA, 25 bp, SARS Virus
taaaatgtgtaaccccgagaaggta

SEQ ID NO: 118923 - DNA, 25 bp, SARS Virus
aaaatgtgtaatcccgagaaggtat

SEQ ID NO: 118924 - DNA, 25 bp, SARS Virus
aaatgtgtaatcccgagaaggtata

SEQ ID NO: 118925 - DNA, 25 bp, SARS Virus
aatgtgtaatcccgagaaggtatat

SEQ ID NO: 118926 - DNA, 25 bp, SARS Virus
atgtgtaatccccagaaggtatatc

SEQ ID NO: 118927 - DNA, 25 bp, SARS Virus
tgtgtaatcccgcgaaggtatatcc

SEQ ID NO: 118928 - DNA, 25 bp, SARS Virus
gtgtaatcccgacaaggtatatccg

SEQ ID NO: 118929 - DNA, 25 bp, SARS Virus
tgtaatcccgagcaggtatatccgt

SEQ ID NO: 118930 - DNA, 25 bp, SARS Virus
gtaatcccgagacggtatatccgtc

SEQ ID NO: 118931 - DNA, 25 bp, SARS Virus
taatcccgagaacgtatatccgtcg

SEQ ID NO: 118932 - DNA, 25 bp, SARS Virus
aatcccgagaagctatatccgtcga

SEQ ID NO: 118933 - DNA, 25 bp, SARS Virus
atcccgagaaggcatatccgtcgag

SEQ ID NO: 118934 - DNA, 25 bp, SARS Virus
tcccgagaaggtctatccgtcgaga

SEQ ID NO: 118935 - DNA, 25 bp, SARS Virus
cccgagaaggtacatccgtcgagag

SEQ ID NO: 118936 - DNA, 25 bp, SARS Virus
ccgagaaggtatctccgtcgagagg

SEQ ID NO: 118937 - DNA, 25 bp, SARS Virus
cgagaaggtatacccgtcgagaggg

SEQ ID NO: 118938 - DNA, 25 bp, SARS Virus
gagaaggtatatccgtcgagaggga

SEQ ID NO: 118939 - DNA, 25 bp, SARS Virus
agaaggtatatccgtcgagagggat

SEQ ID NO: 118940 - DNA, 25 bp, SARS Virus
gaaggtatatccctcgagagggatc

SEQ ID NO: 118941 - DNA, 25 bp, SARS Virus
aaggtatatccgccgagagggatcg

SEQ ID NO: 118942 - DNA, 25 bp, SARS Virus
aggtatatccgtcgagagggatcgt

SEQ ID NO: 118943 - DNA, 25 bp, SARS Virus
ggtatatccgtccagagggatcgta

SEQ ID NO: 118944 - DNA, 25 bp, SARS Virus
gtatatccgtcgcgagggatcgtaa

SEQ ID NO: 118945 - DNA, 25 bp, SARS Virus
tatatccgtcgacagggatcgtaat

SEQ ID NO: 118946 - DNA, 25 bp, SARS Virus
atatccgtcgagcgggatcgtaata

SEQ ID NO: 118947 - DNA, 25 bp, SARS Virus
tatccgtcgagacggatcgtaataa

SEQ ID NO: 118948 - DNA, 25 bp, SARS Virus
atccgtcgagagcgatcgtaataag

SEQ ID NO: 118949 - DNA, 25 bp, SARS Virus
tccgtcgagaggcatcgtaataagt

SEQ ID NO: 118950 - DNA, 25 bp, SARS Virus
ccgtcgagagggctcgtaataagtg

SEQ ID NO: 118951 - DNA, 25 bp, SARS Virus
cgtcgagagggaccgtaataagtga

SEQ ID NO: 118952 - DNA, 25 bp, SARS Virus
gtcgagagggatcgtaataagtgac

SEQ ID NO: 118953 - DNA, 25 bp, SARS Virus
tcgagagggatcctaataagtgaca

SEQ ID NO: 118954 - DNA, 25 bp, SARS Virus
cgagagggatcgcaataagtgacat

SEQ ID NO: 118955 - DNA, 25 bp, SARS Virus
gagagggatcgtcataagtgacatg

SEQ ID NO: 118956 - DNA, 25 bp, SARS Virus
agagggatcgtactaagtgacatgg

SEQ ID NO: 118957 - DNA, 25 bp, SARS Virus
gagggatcgtaacaagtgacatggg

SEQ ID NO: 118958 - DNA, 25 bp, SARS Virus
agggatcgtaatcagtgacatggga

SEQ ID NO: 118959 - DNA, 25 bp, SARS Virus
gggatcgtaatacgtgacatgggag

SEQ ID NO: 118960 - DNA, 25 bp, SARS Virus
ggatcgtaataactgacatgggagc

SEQ ID NO: 118961 - DNA, 25 bp, SARS Virus
gatcgtaataagcgacatgggagct

SEQ ID NO: 118962 - DNA, 25 bp, SARS Virus
atcgtaataagtcacatgggagcta

SEQ ID NO: 118963 - DNA, 25 bp, SARS Virus
tcgtaataagtgccatgggagctag

SEQ ID NO: 118964 - DNA, 25 bp, SARS Virus
cgtaataagtgacatgggagctagc

SEQ ID NO: 118965 - DNA, 25 bp, SARS Virus
gtaataagtgacctgggagctagca

SEQ ID NO: 118966 - DNA, 25 bp, SARS Virus
taataagtgacacgggagctagcat

SEQ ID NO: 118967 - DNA, 25 bp, SARS Virus
aataagtgacatcggagctagcatg

SEQ ID NO: 118968 - DNA, 25 bp, SARS Virus
ataagtgacatgcgagctagcatga

SEQ ID NO: 118969 - DNA, 25 bp, SARS Virus
taagtgacatggcagctagcatgag

SEQ ID NO: 118970 - DNA, 25 bp, SARS Virus
aagtgacatgggcgctagcatgagg

SEQ ID NO: 118971 - DNA, 25 bp, SARS Virus
agtgacatgggacctagcatgaggc

SEQ ID NO: 118972 - DNA, 25 bp, SARS Virus
gtgacatgggagctagcatgaggcg

SEQ ID NO: 118973 - DNA, 25 bp, SARS Virus
tgacatgggagccagcatgaggcgc

SEQ ID NO: 118974 - DNA, 25 bp, SARS Virus
gacatgggagctcgcatgaggcgca

SEQ ID NO: 118975 - DNA, 25 bp, SARS Virus
acatgggagctaccatgaggcgcac

SEQ ID NO: 118976 - DNA, 25 bp, SARS Virus
catgggagctagcatgaggcgcacc

SEQ ID NO: 118977 - DNA, 25 bp, SARS Virus
atgggagctagcctgaggcgcaccg

SEQ ID NO: 118978 - DNA, 25 bp, SARS Virus
tgggagctagcacgaggcgcaccgg

SEQ ID NO: 118979 - DNA, 25 bp, SARS Virus
gggagctagcatcaggcgcaccgga

SEQ ID NO: 118980 - DNA, 25 bp, SARS Virus
ggagctagcatgcggcgcaccggag

SEQ ID NO: 118981 - DNA, 25 bp, SARS Virus
gagctagcatgacgcgcaccggagc

SEQ ID NO: 118982 - DNA, 25 bp, SARS Virus
agctagcatgagccgcaccggagct

SEQ ID NO: 118983 - DNA, 25 bp, SARS Virus
gctagcatgaggcgcaccggagcta

SEQ ID NO: 118984 - DNA, 25 bp, SARS Virus
ctagcatgaggcccaccggagctac

SEQ ID NO: 118985 - DNA, 25 bp, SARS Virus
tagcatgaggcgcaccggagctact

SEQ ID NO: 118986 - DNA, 25 bp, SARS Virus
agcatgaggcgccccggagctactt

SEQ ID NO: 118987 - DNA, 25 bp, SARS Virus
gcatgaggcgcaccggagctacttt

SEQ ID NO: 118988 - DNA, 25 bp, SARS Virus
catgaggcgcaccggagctactttt

SEQ ID NO: 118989 - DNA, 25 bp, SARS Virus
atgaggcgcacccgagctactttta

SEQ ID NO: 118990 - DNA, 25 bp, SARS Virus
tgaggcgcaccgcagctacttttac

SEQ ID NO: 118991 - DNA, 25 bp, SARS Virus
gaggcgcaccggcgctacttttaca

SEQ ID NO: 118992 - DNA, 25 bp, SARS Virus
aggcgcaccggacctacttttacac

SEQ ID NO: 118993 - DNA, 25 bp, SARS Virus
ggcgcaccggagctacttttacacc

SEQ ID NO: 118994 - DNA, 25 bp, SARS Virus
gcgcaccggagccacttttacacca

SEQ ID NO: 118995 - DNA, 25 bp, SARS Virus
cgcaccggagctccttttacaccac

SEQ ID NO: 118996 - DNA, 25 bp, SARS Virus
gcaccggagctacttttacaccacc

SEQ ID NO: 118997 - DNA, 25 bp, SARS Virus
caccggagctacctttacaccaccg

SEQ ID NO: 118998 - DNA, 25 bp, SARS Virus
accggagctactcttacaccaccga

SEQ ID NO: 118999 - DNA, 25 bp, SARS Virus
ccggagctacttctacaccaccgag

SEQ ID NO: 119000 - DNA, 25 bp, SARS Virus
cggagctactttcacaccaccgaga

SEQ ID NO: 119001 - DNA, 25 bp, SARS Virus
ggagctacttttccaccaccgagaa

SEQ ID NO: 119002 - DNA, 25 bp, SARS Virus
gagctacttttacaccaccgagaaa

SEQ ID NO: 119003 - DNA, 25 bp, SARS Virus
agctacttttaccccaccgagaaag

SEQ ID NO: 119004 - DNA, 25 bp, SARS Virus
gctacttttacaccaccgagaaagt

SEQ ID NO: 119005 - DNA, 25 bp, SARS Virus
ctacttttacaccaccgagaaagtt

SEQ ID NO: 119006 - DNA, 25 bp, SARS Virus
tacttttacacccccgagaaagttc

SEQ ID NO: 119007 - DNA, 25 bp, SARS Virus
acttttacaccaccgagaaagttca

SEQ ID NO: 119008 - DNA, 25 bp, SARS Virus
cttttacaccaccgagaaagttcag

SEQ ID NO: 119009 - DNA, 25 bp, SARS Virus
ttttacaccacccagaaagttcagg

SEQ ID NO: 119010 - DNA, 25 bp, SARS Virus
tttacaccaccgcgaaagttcagga

SEQ ID NO: 119011 - DNA, 25 bp, SARS Virus
ttacaccaccgacaaagttcaggag

SEQ ID NO: 119012 - DNA, 25 bp, SARS Virus
tacaccaccgagcaagttcaggagg

SEQ ID NO: 119013 - DNA, 25 bp, SARS Virus
acaccaccgagacagttcaggaggg

SEQ ID NO: 119014 - DNA, 25 bp, SARS Virus
caccaccgagaacgttcaggaggga

SEQ ID NO: 119015 - DNA, 25 bp, SARS Virus
accaccgagaaacttcaggagggat

SEQ ID NO: 119016 - DNA, 25 bp, SARS Virus
ccaccgagaaagctcaggagggatt

SEQ ID NO: 119017 - DNA, 25 bp, SARS Virus
caccgagaaagtccaggagggatta

SEQ ID NO: 119018 - DNA, 25 bp, SARS Virus
accgagaaagttcaggagggattac

SEQ ID NO: 119019 - DNA, 25 bp, SARS Virus
ccgagaaagttccggagggattaca

SEQ ID NO: 119020 - DNA, 25 bp, SARS Virus
cgagaaagttcacgagggattacaa

SEQ ID NO: 119021 - DNA, 25 bp, SARS Virus
gagaaagttcagcagggattacaat

SEQ ID NO: 119022 - DNA, 25 bp, SARS Virus
agaaagttcaggcgggattacaatg

SEQ ID NO: 119023 - DNA, 25 bp, SARS Virus
gaaagttcaggacggattacaatgt

SEQ ID NO: 119024 - DNA, 25 bp, SARS Virus
aaagttcaggagcgattacaatgtg

SEQ ID NO: 119025 - DNA, 25 bp, SARS Virus
aagttcaggaggcattacaatgtgt

SEQ ID NO: 119026 - DNA, 25 bp, SARS Virus
agttcaggagggcttacaatgtgta

SEQ ID NO: 119027 - DNA, 25 bp, SARS Virus
gttcaggagggactacaatgtgtaa

SEQ ID NO: 119028 - DNA, 25 bp, SARS Virus
ttcaggagggatcacaatgtgtaac

SEQ ID NO: 119029 - DNA, 25 bp, SARS Virus
tcaggagggattccaatgtgtaact

SEQ ID NO: 119030 - DNA, 25 bp, SARS Virus
caggagggattacaatgtgtaacta

SEQ ID NO: 119031 - DNA, 25 bp, SARS Virus
aggagggattaccatgtgtaactaa

SEQ ID NO: 119032 - DNA, 25 bp, SARS Virus
ggagggattacactgtgtaactaat

SEQ ID NO: 119033 - DNA, 25 bp, SARS Virus
gagggattacaacgtgtaactaatt

SEQ ID NO: 119034 - DNA, 25 bp, SARS Virus
agggattacaatctgtaactaattt

SEQ ID NO: 119035 - DNA, 25 bp, SARS Virus
gggattacaatgcgtaactaatttc

SEQ ID NO: 119036 - DNA, 25 bp, SARS Virus
ggattacaatgtctaactaatttct

SEQ ID NO: 119037 - DNA, 25 bp, SARS Virus
gattacaatgtgcaactaatttcta

SEQ ID NO: 119038 - DNA, 25 bp, SARS Virus
attacaatgtgtcactaatttctaa

SEQ ID NO: 119039 - DNA, 25 bp, SARS Virus
ttacaatgtgtacctaatttctaac

SEQ ID NO: 119040 - DNA, 25 bp, SARS Virus
tacaatgtgtaactaatttctaacg

SEQ ID NO: 119041 - DNA, 25 bp, SARS Virus
acaatgtgtaaccaatttctaacga

SEQ ID NO: 119042 - DNA, 25 bp, SARS Virus
caatgtgtaactcatttctaacgat

SEQ ID NO: 119043 - DNA, 25 bp, SARS Virus
aatgtgtaactactttctaacgata

SEQ ID NO: 119044 - DNA, 25 bp, SARS Virus
atgtgtaactaacttctaacgatac

SEQ ID NO: 119045 - DNA, 25 bp, SARS Virus
tgtgtaactaatctctaacgataca

SEQ ID NO: 119046 - DNA, 25 bp, SARS Virus
gtgtaactaattcctaacgatacac

SEQ ID NO: 119047 - DNA, 25 bp, SARS Virus
tgtaactaatttctaacgatacact

SEQ ID NO: 119048 - DNA, 25 bp, SARS Virus
gtaactaatttccaacgatacactc

SEQ ID NO: 119049 - DNA, 25 bp, SARS Virus
taactaatttctcacgatacactct

SEQ ID NO: 119050 - DNA, 25 bp, SARS Virus
aactaatttctaccgatacactcta

SEQ ID NO: 119051 - DNA, 25 bp, SARS Virus
actaatttctaacgatacactctaa

SEQ ID NO: 119052 - DNA, 25 bp, SARS Virus
ctaatttctaaccatacactctaat

SEQ ID NO: 119053 - DNA, 25 bp, SARS Virus
taatttctaacgctacactctaatt

SEQ ID NO: 119054 - DNA, 25 bp, SARS Virus
aatttctaacgacacactctaattt

SEQ ID NO: 119055 - DNA, 25 bp, SARS Virus
atttctaacgatccactctaatttc

SEQ ID NO: 119056 - DNA, 25 bp, SARS Virus
tttctaacgatacactctaatttca

SEQ ID NO: 119057 - DNA, 25 bp, SARS Virus
ttctaacgataccctctaatttcaa

SEQ ID NO: 119058 - DNA, 25 bp, SARS Virus
tctaacgatacactctaatttcaat

SEQ ID NO: 119059 - DNA, 25 bp, SARS Virus
ctaacgatacaccctaatttcaatt

SEQ ID NO: 119060 - DNA, 25 bp, SARS Virus
taacgatacactctaatttcaattg

SEQ ID NO: 119061 - DNA, 25 bp, SARS Virus
aacgatacactccaatttcaattga

SEQ ID NO: 119062 - DNA, 25 bp, SARS Virus
acgatacactctcatttcaattgat

SEQ ID NO: 119063 - DNA, 25 bp, SARS Virus
cgatacactctactttcaattgatt

SEQ ID NO: 119064 - DNA, 25 bp, SARS Virus
gatacactctaacttcaattgattt

SEQ ID NO: 119065 - DNA, 25 bp, SARS Virus
atacactctaatctcaattgatttg

SEQ ID NO: 119066 - DNA, 25 bp, SARS Virus
tacactctaattccaattgatttgg

SEQ ID NO: 119067 - DNA, 25 bp, SARS Virus
acactctaatttcaattgatttgga

SEQ ID NO: 119068 - DNA, 25 bp, SARS Virus
cactctaatttccattgatttggat

SEQ ID NO: 119069 - DNA, 25 bp, SARS Virus
actctaatttcacttgatttggatg

SEQ ID NO: 119070 - DNA, 25 bp, SARS Virus
ctctaatttcaactgatttggatga

SEQ ID NO: 119071 - DNA, 25 bp, SARS Virus
tctaatttcaatcgatttggatgaa

SEQ ID NO: 119072 - DNA, 25 bp, SARS Virus
ctaatttcaattcatttggatgaac

SEQ ID NO: 119073 - DNA, 25 bp, SARS Virus
taatttcaattgctttggatgaaca

SEQ ID NO: 119074 - DNA, 25 bp, SARS Virus
aatttcaattgacttggatgaacac

SEQ ID NO: 119075 - DNA, 25 bp, SARS Virus
atttcaattgatctggatgaacacg

SEQ ID NO: 119076 - DNA, 25 bp, SARS Virus
tttcaattgattcggatgaacacga

SEQ ID NO: 119077 - DNA, 25 bp, SARS Virus
ttcaattgatttcgatgaacacgac

SEQ ID NO: 119078 - DNA, 25 bp, SARS Virus
tcaattgatttgcatgaacacgaca

SEQ ID NO: 119079 - DNA, 25 bp, SARS Virus
caattgatttggctgaacacgacaa

SEQ ID NO: 119080 - DNA, 25 bp, SARS Virus
aattgatttggacgaacacgacaaa

SEQ ID NO: 119081 - DNA, 25 bp, SARS Virus
attgatttggatcaacacgacaaat

SEQ ID NO: 119082 - DNA, 25 bp, SARS Virus
ttgatttggatgcacacgacaaatc

SEQ ID NO: 119083 - DNA, 25 bp, SARS Virus
tgatttggatgaccacgacaaatca

SEQ ID NO: 119084 - DNA, 25 bp, SARS Virus
gatttggatgaacacgacaaatcaa

SEQ ID NO: 119085 - DNA, 25 bp, SARS Virus
atttggatgaacccgacaaatcaat

SEQ ID NO: 119086 - DNA, 25 bp, SARS Virus
tttggatgaacacgacaaatcaatg

SEQ ID NO: 119087 - DNA, 25 bp, SARS Virus
ttggatgaacaccacaaatcaatgc

SEQ ID NO: 119088 - DNA, 25 bp, SARS Virus
tggatgaacacgccaaatcaatgct

SEQ ID NO: 119089 - DNA, 25 bp, SARS Virus
ggatgaacacgacaaatcaatgctc

SEQ ID NO: 119090 - DNA, 25 bp, SARS Virus
gatgaacacgaccaatcaatgctct

SEQ ID NO: 119091 - DNA, 25 bp, SARS Virus
atgaacacgacacatcaatgctctt

SEQ ID NO: 119092 - DNA, 25 bp, SARS Virus
tgaacacgacaactcaatgctctta

SEQ ID NO: 119093 - DNA, 25 bp, SARS Virus
gaacacgacaaaccaatgctcttaa

SEQ ID NO: 119094 - DNA, 25 bp, SARS Virus
aacacgacaaatcaatgctcttaag

SEQ ID NO: 119095 - DNA, 25 bp, SARS Virus
acacgacaaatccatgctcttaagt

SEQ ID NO: 119096 - DNA, 25 bp, SARS Virus
cacgacaaatcactgctcttaagta

SEQ ID NO: 119097 - DNA, 25 bp, SARS Virus
acgacaaatcaacgctcttaagtaa

SEQ ID NO: 119098 - DNA, 25 bp, SARS Virus
cgacaaatcaatcctcttaagtaag

SEQ ID NO: 119099 - DNA, 25 bp, SARS Virus
gacaaatcaatgctcttaagtaaga

SEQ ID NO: 119100 - DNA, 25 bp, SARS Virus
acaaatcaatgcccttaagtaagac

SEQ ID NO: 119101 - DNA, 25 bp, SARS Virus
caaatcaatgctcttaagtaagacg

SEQ ID NO: 119102 - DNA, 25 bp, SARS Virus
aaatcaatgctcctaagtaagacgt

SEQ ID NO: 119103 - DNA, 25 bp, SARS Virus
aatcaatgctctcaagtaagacgtg

SEQ ID NO: 119104 - DNA, 25 bp, SARS Virus
atcaatgctcttcagtaagacgtgt

SEQ ID NO: 119105 - DNA, 25 bp, SARS Virus
tcaatgctcttacgtaagacgtgtt

SEQ ID NO: 119106 - DNA, 25 bp, SARS Virus
caatgctcttaactaagacgtgttc

SEQ ID NO: 119107 - DNA, 25 bp, SARS Virus
aatgctcttaagcaagacgtgttct

SEQ ID NO: 119108 - DNA, 25 bp, SARS Virus
atgctcttaagtcagacgtgttctc

SEQ ID NO: 119109 - DNA, 25 bp, SARS Virus
tgctcttaagtacgacgtgttctca

SEQ ID NO: 119110 - DNA, 25 bp, SARS Virus
gctcttaagtaacacgtgttctcat

SEQ ID NO: 119111 - DNA, 25 bp, SARS Virus
ctcttaagtaagccgtgttctcatc

SEQ ID NO: 119112 - DNA, 25 bp, SARS Virus
tcttaagtaagacgtgttctcatct

SEQ ID NO: 119113 - DNA, 25 bp, SARS Virus
cttaagtaagacctgttctcatctg

SEQ ID NO: 119114 - DNA, 25 bp, SARS Virus
ttaagtaagacgcgttctcatctga

SEQ ID NO: 119115 - DNA, 25 bp, SARS Virus
taagtaagacgtcttctcatctgat

SEQ ID NO: 119116 - DNA, 25 bp, SARS Virus
aagtaagacgtgctctcatctgata

SEQ ID NO: 119117 - DNA, 25 bp, SARS Virus
agtaagacgtgtcctcatctgatac

SEQ ID NO: 119118 - DNA, 25 bp, SARS Virus
gtaagacgtgttctcatctgataca

SEQ ID NO: 119119 - DNA, 25 bp, SARS Virus
taagacgtgttcccatctgatacat

SEQ ID NO: 119120 - DNA, 25 bp, SARS Virus
aagacgtgttctcatctgatacata

SEQ ID NO: 119121 - DNA, 25 bp, SARS Virus
agacgtgttctcctctgatacatag

SEQ ID NO: 119122 - DNA, 25 bp, SARS Virus
gacgtgttctcacctgatacatagc

SEQ ID NO: 119123 - DNA, 25 bp, SARS Virus
acgtgttctcatctgatacatagca

SEQ ID NO: 119124 - DNA, 25 bp, SARS Virus
cgtgttctcatccgatacatagcat

SEQ ID NO: 119125 - DNA, 25 bp, SARS Virus
gtgttctcatctcatacatagcatt

SEQ ID NO: 119126 - DNA, 25 bp, SARS Virus
tgttctcatctgctacatagcattt

SEQ ID NO: 119127 - DNA, 25 bp, SARS Virus
gttctcatctgacacatagcatttg

SEQ ID NO: 119128 - DNA, 25 bp, SARS Virus
ttctcatctgatccatagcatttgc

SEQ ID NO: 119129 - DNA, 25 bp, SARS Virus
tctcatctgatacatagcatttgcc

SEQ ID NO: 119130 - DNA, 25 bp, SARS Virus
ctcatctgatacctagcatttgcct

SEQ ID NO: 119131 - DNA, 25 bp, SARS Virus
tcatctgatacacagcatttgcctt

SEQ ID NO: 119132 - DNA, 25 bp, SARS Virus
catctgatacatcgcatttgcctta

SEQ ID NO: 119133 - DNA, 25 bp, SARS Virus
atctgatacataccatttgccttaa

SEQ ID NO: 119134 - DNA, 25 bp, SARS Virus
tctgatacatagcatttgccttaac

SEQ ID NO: 119135 - DNA, 25 bp, SARS Virus
ctgatacatagcctttgccttaacg

SEQ ID NO: 119136 - DNA, 25 bp, SARS Virus
tgatacatagcacttgccttaacgc

SEQ ID NO: 119137 - DNA, 25 bp, SARS Virus
gatacatagcatctgccttaacgct

SEQ ID NO: 119138 - DNA, 25 bp, SARS Virus
atacatagcattcgccttaacgctt

SEQ ID NO: 119139 - DNA, 25 bp, SARS Virus
tacatagcatttcccttaacgcttt

SEQ ID NO: 119140 - DNA, 25 bp, SARS Virus
acatagcatttgccttaacgctttt

SEQ ID NO: 119141 - DNA, 25 bp, SARS Virus
catagcatttgccttaacgcttttg

SEQ ID NO: 119142 - DNA, 25 bp, SARS Virus
atagcatttgccctaacgcttttgc

SEQ ID NO: 119143 - DNA, 25 bp, SARS Virus
tagcatttgcctcaacgcttttgca

SEQ ID NO: 119144 - DNA, 25 bp, SARS Virus
agcatttgccttcacgcttttgcaa

SEQ ID NO: 119145 - DNA, 25 bp, SARS Virus
gcatttgccttaccgcttttgcaaa

SEQ ID NO: 119146 - DNA, 25 bp, SARS Virus
catttgccttaacgcttttgcaaat

SEQ ID NO: 119147 - DNA, 25 bp, SARS Virus
atttgccttaacccttttgcaaatg

SEQ ID NO: 119148 - DNA, 25 bp, SARS Virus
tttgccttaacgcttttgcaaatgt

SEQ ID NO: 119149 - DNA, 25 bp, SARS Virus
ttgccttaacgcctttgcaaatgta

SEQ ID NO: 119150 - DNA, 25 bp, SARS Virus
tgccttaacgctcttgcaaatgtat

SEQ ID NO: 119151 - DNA, 25 bp, SARS Virus
gccttaacgcttctgcaaatgtatc

SEQ ID NO: 119152 - DNA, 25 bp, SARS Virus
ccttaacgctttcgcaaatgtatcg

SEQ ID NO: 119153 - DNA, 25 bp, SARS Virus
cacattgtaatcgctcctgaacttt

SEQ ID NO: 119154 - DNA, 25 bp, SARS Virus
acattgtaatccgtcctgaactttc

SEQ ID NO: 119155 - DNA, 25 bp, SARS Virus
cattgtaatcccgcctgaactttct

SEQ ID NO: 119156 - DNA, 25 bp, SARS Virus
attgtaatccctgctgaactttctc

SEQ ID NO: 119157 - DNA, 25 bp, SARS Virus
ttgtaatccctcgtgaactttctcg

SEQ ID NO: 119158 - DNA, 25 bp, SARS Virus
tgtaatccctccggaactttctcgg

SEQ ID NO: 119159 - DNA, 25 bp, SARS Virus
gtaatccctcctgaactttctcggt

SEQ ID NO: 119160 - DNA, 25 bp, SARS Virus
taatccctcctggactttctcggtg

SEQ ID NO: 119161 - DNA, 25 bp, SARS Virus
aatccctcctgagctttctcggtgg

SEQ ID NO: 119162 - DNA, 25 bp, SARS Virus
atccctcctgaagtttctcggtggt

SEQ ID NO: 119163 - DNA, 25 bp, SARS Virus
tccctcctgaacgttctcggtggtg

SEQ ID NO: 119164 - DNA, 25 bp, SARS Virus
ccctcctgaactgtctcggtggtgt

SEQ ID NO: 119165 - DNA, 25 bp, SARS Virus
cctcctgaacttgctcggtggtgta

SEQ ID NO: 119166 - DNA, 25 bp, SARS Virus
ctcctgaactttgtcggtggtgtaa

SEQ ID NO: 119167 - DNA, 25 bp, SARS Virus
tcctgaactttcgcggtggtgtaaa

SEQ ID NO: 119168 - DNA, 25 bp, SARS Virus
cctgaactttctgggtggtgtaaaa

SEQ ID NO: 119169 - DNA, 25 bp, SARS Virus
ctgaactttctcggtggtgtaaaag

SEQ ID NO: 119170 - DNA, 25 bp, SARS Virus
tgaactttctcggtggtgtaaaagt

SEQ ID NO: 119171 - DNA, 25 bp, SARS Virus
gaactttctcgggggtgtaaaagta

SEQ ID NO: 119172 - DNA, 25 bp, SARS Virus
aactttctcggtggtgtaaaagtag

SEQ ID NO: 119173 - DNA, 25 bp, SARS Virus
actttctcggtggtgtaaaagtagc

SEQ ID NO: 119174 - DNA, 25 bp, SARS Virus
ctttctcggtggggtaaaagtagct

SEQ ID NO: 119175 - DNA, 25 bp, SARS Virus
tttctcggtggtgtaaaagtagctc

SEQ ID NO: 119176 - DNA, 25 bp, SARS Virus
ttctcggtggtggaaaagtagctcc

SEQ ID NO: 119177 - DNA, 25 bp, SARS Virus
tctcggtggtgtgaaagtagctccg

SEQ ID NO: 119178 - DNA, 25 bp, SARS Virus
ctcggtggtgtagaagtagctccgg

SEQ ID NO: 119179 - DNA, 25 bp, SARS Virus
tcggtggtgtaagagtagctccggt

SEQ ID NO: 119180 - DNA, 25 bp, SARS Virus
cggtggtgtaaaggtagctccggtg

SEQ ID NO: 119181 - DNA, 25 bp, SARS Virus
ggtggtgtaaaagtagctccggtgc

SEQ ID NO: 119182 - DNA, 25 bp, SARS Virus
gtggtgtaaaaggagctccggtgcg

SEQ ID NO: 119183 - DNA, 25 bp, SARS Virus
tggtgtaaaagtggctccggtgcgc

SEQ ID NO: 119184 - DNA, 25 bp, SARS Virus
ggtgtaaaagtagctccggtgcgcc

SEQ ID NO: 119185 - DNA, 25 bp, SARS Virus
gtgtaaaagtaggtccggtgcgcct

SEQ ID NO: 119186 - DNA, 25 bp, SARS Virus
tgtaaaagtagcgccggtgcgcctc

SEQ ID NO: 119187 - DNA, 25 bp, SARS Virus
gtaaaagtagctgcggtgcgcctca

SEQ ID NO: 119188 - DNA, 25 bp, SARS Virus
taaaagtagctcgggtgcgcctcat

SEQ ID NO: 119189 - DNA, 25 bp, SARS Virus
aaaagtagctccggtgcgcctcatg

SEQ ID NO: 119190 - DNA, 25 bp, SARS Virus
aaagtagctccggtgcgcctcatgc

SEQ ID NO: 119191 - DNA, 25 bp, SARS Virus
aagtagctccggggcgcctcatgct

SEQ ID NO: 119192 - DNA, 25 bp, SARS Virus
agtagctccggtgcgcctcatgcta

SEQ ID NO: 119193 - DNA, 25 bp, SARS Virus
gtagctccggtgggcctcatgctag

SEQ ID NO: 119194 - DNA, 25 bp, SARS Virus
tagctccggtgcgcctcatgctagc

SEQ ID NO: 119195 - DNA, 25 bp, SARS Virus
agctccggtgcggctcatgctagct

SEQ ID NO: 119196 - DNA, 25 bp, SARS Virus
gctccggtgcgcgtcatgctagctc

SEQ ID NO: 119197 - DNA, 25 bp, SARS Virus
ctccggtgcgccgcatgctagctcc

SEQ ID NO: 119198 - DNA, 25 bp, SARS Virus
tccggtgcgcctgatgctagctccc

SEQ ID NO: 119199 - DNA, 25 bp, SARS Virus
ccggtgcgcctcgtgctagctccca

SEQ ID NO: 119200 - DNA, 25 bp, SARS Virus
cggtgcgcctcaggctagctcccat

SEQ ID NO: 119201 - DNA, 25 bp, SARS Virus
ggtgcgcctcatgctagctcccatg

SEQ ID NO: 119202 - DNA, 25 bp, SARS Virus
gtgcgcctcatggtagctcccatgt

SEQ ID NO: 119203 - DNA, 25 bp, SARS Virus
tgcgcctcatgcgagctcccatgtc

SEQ ID NO: 119204 - DNA, 25 bp, SARS Virus
gcgcctcatgctggctcccatgtca

SEQ ID NO: 119205 - DNA, 25 bp, SARS Virus
cgcctcatgctagctcccatgtcac

SEQ ID NO: 119206 - DNA, 25 bp, SARS Virus
gcctcatgctaggtcccatgtcact

SEQ ID NO: 119207 - DNA, 25 bp, SARS Virus
cctcatgctagcgcccatgtcactt

SEQ ID NO: 119208 - DNA, 25 bp, SARS Virus
ctcatgctagctgccatgtcactta

SEQ ID NO: 119209 - DNA, 25 bp, SARS Virus
tcatgctagctcgcatgtcacttat

SEQ ID NO: 119210 - DNA, 25 bp, SARS Virus
catgctagctccgatgtcacttatt

SEQ ID NO: 119211 - DNA, 25 bp, SARS Virus
atgctagctcccgtgtcacttatta

SEQ ID NO: 119212 - DNA, 25 bp, SARS Virus
tgctagctcccaggtcacttattac

SEQ ID NO: 119213 - DNA, 25 bp, SARS Virus
gctagctcccatgtcacttattacg

SEQ ID NO: 119214 - DNA, 25 bp, SARS Virus
ctagctcccatggcacttattacga

SEQ ID NO: 119215 - DNA, 25 bp, SARS Virus
tagctcccatgtgacttattacgat

SEQ ID NO: 119216 - DNA, 25 bp, SARS Virus
agctcccatgtcgcttattacgatc

SEQ ID NO: 119217 - DNA, 25 bp, SARS Virus
gctcccatgtcagttattacgatcc

SEQ ID NO: 119218 - DNA, 25 bp, SARS Virus
ctcccatgtcacgtattacgatccc

SEQ ID NO: 119219 - DNA, 25 bp, SARS Virus
tcccatgtcactgattacgatccct

SEQ ID NO: 119220 - DNA, 25 bp, SARS Virus
cccatgtcacttgttacgatccctc

SEQ ID NO: 119221 - DNA, 25 bp, SARS Virus
ccatgtcacttagtacgatccctct

SEQ ID NO: 119222 - DNA, 25 bp, SARS Virus
catgtcacttatgacgatccctctc

SEQ ID NO: 119223 - DNA, 25 bp, SARS Virus
atgtcacttattgcgatccctctcg

SEQ ID NO: 119224 - DNA, 25 bp, SARS Virus
tgtcacttattaggatccctctcga

SEQ ID NO: 119225 - DNA, 25 bp, SARS Virus
gtcacttattacgatccctctcgac

SEQ ID NO: 119226 - DNA, 25 bp, SARS Virus
tcacttattacggtccctctcgacg

SEQ ID NO: 119227 - DNA, 25 bp, SARS Virus
cacttattacgagccctctcgacgg

SEQ ID NO: 119228 - DNA, 25 bp, SARS Virus
acttattacgatgcctctcgacgga

SEQ ID NO: 119229 - DNA, 25 bp, SARS Virus
cttattacgatcgctctcgacggat

SEQ ID NO: 119230 - DNA, 25 bp, SARS Virus
ttattacgatccgtctcgacggata

SEQ ID NO: 119231 - DNA, 25 bp, SARS Virus
tattacgatcccgctcgacggatat

SEQ ID NO: 119232 - DNA, 25 bp, SARS Virus
attacgatccctgtcgacggatata

SEQ ID NO: 119233 - DNA, 25 bp, SARS Virus
ttacgatccctcgcgacggatatac

SEQ ID NO: 119234 - DNA, 25 bp, SARS Virus
tacgatccctctggacggatatacc

SEQ ID NO: 119235 - DNA, 25 bp, SARS Virus
acgatccctctcgacggatatacct

SEQ ID NO: 119236 - DNA, 25 bp, SARS Virus
cgatccctctcggcggatatacctt

SEQ ID NO: 119237 - DNA, 25 bp, SARS Virus
gatccctctcgagggatataccttc

SEQ ID NO: 119238 - DNA, 25 bp, SARS Virus
atccctctcgacggatataccttct

SEQ ID NO: 119239 - DNA, 25 bp, SARS Virus
tccctctcgacggatataccttctc

SEQ ID NO: 119240 - DNA, 25 bp, SARS Virus
ccctctcgacgggtataccttctcg

SEQ ID NO: 119241 - DNA, 25 bp, SARS Virus
cctctcgacggagataccttctcgg

SEQ ID NO: 119242 - DNA, 25 bp, SARS Virus
ctctcgacggatgtaccttctcggg

SEQ ID NO: 119243 - DNA, 25 bp, SARS Virus
tctcgacggatagaccttctcggga

SEQ ID NO: 119244 - DNA, 25 bp, SARS Virus
ctcgacggatatgccttctcgggat

SEQ ID NO: 119245 - DNA, 25 bp, SARS Virus
tcgacggatatagcttctcgggatt

SEQ ID NO: 119246 - DNA, 25 bp, SARS Virus
cgacggatatacgttctcgggatta

SEQ ID NO: 119247 - DNA, 25 bp, SARS Virus
gacggatataccgtctcgggattac

SEQ ID NO: 119248 - DNA, 25 bp, SARS Virus
acggatatacctgctcgggattaca

SEQ ID NO: 119249 - DNA, 25 bp, SARS Virus
cggatataccttgtcgggattacac

SEQ ID NO: 119250 - DNA, 25 bp, SARS Virus
ggatataccttcgcgggattacaca

SEQ ID NO: 119251 - DNA, 25 bp, SARS Virus
gatataccttctggggattacacat

SEQ ID NO: 119252 - DNA, 25 bp, SARS Virus
atataccttctcgggattacacatt

SEQ ID NO: 119253 - DNA, 25 bp, SARS Virus
tataccttctcgggattacacattt

SEQ ID NO: 119254 - DNA, 25 bp, SARS Virus
ataccttctcgggattacacatttt

SEQ ID NO: 119255 - DNA, 25 bp, SARS Virus
taccttctcggggttacacatttta

SEQ ID NO: 119256 - DNA, 25 bp, SARS Virus
accttctcgggagtacacattttaa

SEQ ID NO: 119257 - DNA, 25 bp, SARS Virus
ccttctcgggatgacacattttaat

SEQ ID NO: 119258 - DNA, 25 bp, SARS Virus
cttctcgggattgcacattttaatt

SEQ ID NO: 119259 - DNA, 25 bp, SARS Virus
ttctcgggattagacattttaatta

SEQ ID NO: 119260 - DNA, 25 bp, SARS Virus
tctcgggattacgcattttaattaa

SEQ ID NO: 119261 - DNA, 25 bp, SARS Virus
ctcgggattacagattttaattaaa

SEQ ID NO: 119262 - DNA, 25 bp, SARS Virus
tcgggattacacgttttaattaaaa

SEQ ID NO: 119263 - DNA, 25 bp, SARS Virus
cgggattacacagtttaattaaaat

SEQ ID NO: 119264 - DNA, 25 bp, SARS Virus
gggattacacatgttaattaaaatc

SEQ ID NO: 119265 - DNA, 25 bp, SARS Virus
ggattacacattgtaattaaaatca

SEQ ID NO: 119266 - DNA, 25 bp, SARS Virus
gattacacatttgaattaaaatcat

SEQ ID NO: 119267 - DNA, 25 bp, SARS Virus
attacacattttgattaaaatcatc

SEQ ID NO: 119268 - DNA, 25 bp, SARS Virus
ttacacattttagttaaaatcatca

SEQ ID NO: 119269 - DNA, 25 bp, SARS Virus
tacacattttaagtaaaatcatcac

SEQ ID NO: 119270 - DNA, 25 bp, SARS Virus
acacattttaatgaaaatcatcacg

SEQ ID NO: 119271 - DNA, 25 bp, SARS Virus
cacattttaattgaaatcatcacga

SEQ ID NO: 119272 - DNA, 25 bp, SARS Virus
acattttaattagaatcatcacgat

SEQ ID NO: 119273 - DNA, 25 bp, SARS Virus
cattttaattaagatcatcacgata

SEQ ID NO: 119274 - DNA, 25 bp, SARS Virus
attttaattaaagtcatcacgatag

SEQ ID NO: 119275 - DNA, 25 bp, SARS Virus
ttttaattaaaagcatcacgatagg

SEQ ID NO: 119276 - DNA, 25 bp, SARS Virus
tttaattaaaatgatcacgataggg

SEQ ID NO: 119277 - DNA, 25 bp, SARS Virus
ttaattaaaatcgtcacgatagggg

SEQ ID NO: 119278 - DNA, 25 bp, SARS Virus
taattaaaatcagcacgataggggt

SEQ ID NO: 119279 - DNA, 25 bp, SARS Virus
aattaaaatcatgacgataggggta

SEQ ID NO: 119280 - DNA, 25 bp, SARS Virus
attaaaatcatcgcgataggggtac

SEQ ID NO: 119281 - DNA, 25 bp, SARS Virus
ttaaaatcatcaggataggggtaca

SEQ ID NO: 119282 - DNA, 25 bp, SARS Virus
taaaatcatcacgataggggtacac

SEQ ID NO: 119283 - DNA, 25 bp, SARS Virus
aaaatcatcacggtaggggtacact

SEQ ID NO: 119284 - DNA, 25 bp, SARS Virus
aaatcatcacgagaggggtacacta

SEQ ID NO: 119285 - DNA, 25 bp, SARS Virus
aatcatcacgatgggggtacactaa

SEQ ID NO: 119286 - DNA, 25 bp, SARS Virus
atcatcacgataggggtacactaaa

SEQ ID NO: 119287 - DNA, 25 bp, SARS Virus
tcatcacgataggggtacactaaaa

SEQ ID NO: 119288 - DNA, 25 bp, SARS Virus
catcacgataggggtacactaaaat

SEQ ID NO: 119289 - DNA, 25 bp, SARS Virus
atcacgataggggtacactaaaatt

SEQ ID NO: 119290 - DNA, 25 bp, SARS Virus
tcacgatagggggacactaaaatta

SEQ ID NO: 119291 - DNA, 25 bp, SARS Virus
cacgataggggtgcactaaaattat

SEQ ID NO: 119292 - DNA, 25 bp, SARS Virus
acgataggggtagactaaaattatc

SEQ ID NO: 119293 - DNA, 25 bp, SARS Virus
cgataggggtacgctaaaattatcg

SEQ ID NO: 119294 - DNA, 25 bp, SARS Virus
gataggggtacagtaaaattatcga

SEQ ID NO: 119295 - DNA, 25 bp, SARS Virus
ataggggtacacgaaaattatcgaa

SEQ ID NO: 119296 - DNA, 25 bp, SARS Virus
taggggtacactgaaattatcgaag

SEQ ID NO: 119297 - DNA, 25 bp, SARS Virus
aggggtacactagaattatcgaaga

SEQ ID NO: 119298 - DNA, 25 bp, SARS Virus
ggggtacactaagattatcgaagaa

SEQ ID NO: 119299 - DNA, 25 bp, SARS Virus
gggtacactaaagttatcgaagaat

SEQ ID NO: 119300 - DNA, 25 bp, SARS Virus
ggtacactaaaagtatcgaagaatc

SEQ ID NO: 119301 - DNA, 25 bp, SARS Virus
gtacactaaaatgatcgaagaatcc

SEQ ID NO: 119302 - DNA, 25 bp, SARS Virus
tacactaaaattgtcgaagaatcct

SEQ ID NO: 119303 - DNA, 25 bp, SARS Virus
acactaaaattagcgaagaatcctc

SEQ ID NO: 119304 - DNA, 25 bp, SARS Virus
cactaaaattatggaagaatcctct

SEQ ID NO: 119305 - DNA, 25 bp, SARS Virus
actaaaattatcgaagaatcctctt

SEQ ID NO: 119306 - DNA, 25 bp, SARS Virus
ctaaaattatcggagaatcctctta

SEQ ID NO: 119307 - DNA, 25 bp, SARS Virus
taaaattatcgaggaatcctcttac

SEQ ID NO: 119308 - DNA, 25 bp, SARS Virus
aaaattatcgaagaatcctcttact

SEQ ID NO: 119309 - DNA, 25 bp, SARS Virus
aaattatcgaaggatcctcttactg

SEQ ID NO: 119310 - DNA, 25 bp, SARS Virus
aattatcgaagagtcctcttactgt

SEQ ID NO: 119311 - DNA, 25 bp, SARS Virus
attatcgaagaagcctcttactgtt

SEQ ID NO: 119312 - DNA, 25 bp, SARS Virus
ttatcgaagaatgctcttactgttt

SEQ ID NO: 119313 - DNA, 25 bp, SARS Virus
tatcgaagaatcgtcttactgtttt

SEQ ID NO: 119314 - DNA, 25 bp, SARS Virus
atcgaagaatccgcttactgttttt

SEQ ID NO: 119315 - DNA, 25 bp, SARS Virus
tcgaagaatcctgttactgtttttt

SEQ ID NO: 119316 - DNA, 25 bp, SARS Virus
cgaagaatcctcgtactgttttttt

SEQ ID NO: 119317 - DNA, 25 bp, SARS Virus
gaagaatcctctgactgtttttttt

SEQ ID NO: 119318 - DNA, 25 bp, SARS Virus
aagaatcctcttgctgttttttttt

SEQ ID NO: 119319 - DNA, 25 bp, SARS Virus
agaatcctcttagtgtttttttttt

SEQ ID NO: 119320 - DNA, 25 bp, SARS Virus
gaatcctcttacggttttttttttt

SEQ ID NO: 119321 - DNA, 25 bp, SARS Virus
aaaaaaaaaaacggtaagaggattc

SEQ ID NO: 119322 - DNA, 25 bp, SARS Virus
aaaaaaaaaacagtaagaggattct

SEQ ID NO: 119323 - DNA, 25 bp, SARS Virus
aaaaaaaaacaggaagaggattctt

SEQ ID NO: 119324 - DNA, 25 bp, SARS Virus
aaaaaaaacagtgagaggattcttc

SEQ ID NO: 119325 - DNA, 25 bp, SARS Virus
aaaaaaacagtaggaggattcttcg

SEQ ID NO: 119326 - DNA, 25 bp, SARS Virus
aaaaaacagtaagaggattcttcga

SEQ ID NO: 119327 - DNA, 25 bp, SARS Virus
aaaaacagtaaggggattcttcgat

SEQ ID NO: 119328 - DNA, 25 bp, SARS Virus
aaaacagtaagaggattcttcgata

SEQ ID NO: 119329 - DNA, 25 bp, SARS Virus
aaacagtaagaggattcttcgataa

SEQ ID NO: 119330 - DNA, 25 bp, SARS Virus
aacagtaagagggttcttcgataat

SEQ ID NO: 119331 - DNA, 25 bp, SARS Virus
acagtaagaggagtcttcgataatt

SEQ ID NO: 119332 - DNA, 25 bp, SARS Virus
cagtaagaggatgcttcgataattt

SEQ ID NO: 119333 - DNA, 25 bp, SARS Virus
agtaagaggattgttcgataatttt

SEQ ID NO: 119334 - DNA, 25 bp, SARS Virus
gtaagaggattcgtcgataatttta

SEQ ID NO: 119335 - DNA, 25 bp, SARS Virus
taagaggattctgcgataattttag

SEQ ID NO: 119336 - DNA, 25 bp, SARS Virus
aagaggattcttggataattttagt

SEQ ID NO: 119337 - DNA, 25 bp, SARS Virus
agaggattcttcgataattttagtg

SEQ ID NO: 119338 - DNA, 25 bp, SARS Virus
gaggattcttcggtaattttagtgt

SEQ ID NO: 119339 - DNA, 25 bp, SARS Virus
aggattcttcgagaattttagtgta

SEQ ID NO: 119340 - DNA, 25 bp, SARS Virus
ggattcttcgatgattttagtgtac

SEQ ID NO: 119341 - DNA, 25 bp, SARS Virus
gattcttcgatagttttagtgtacc

SEQ ID NO: 119342 - DNA, 25 bp, SARS Virus
attcttcgataagtttagtgtaccc

SEQ ID NO: 119343 - DNA, 25 bp, SARS Virus
ttcttcgataatgttagtgtacccc

SEQ ID NO: 119344 - DNA, 25 bp, SARS Virus
tcttcgataattgtagtgtacccct

SEQ ID NO: 119345 - DNA, 25 bp, SARS Virus
cttcgataatttgagtgtaccccta

SEQ ID NO: 119346 - DNA, 25 bp, SARS Virus
ttcgataattttggtgtacccctat

SEQ ID NO: 119347 - DNA, 25 bp, SARS Virus
tcgataattttagtgtacccctatc

SEQ ID NO: 119348 - DNA, 25 bp, SARS Virus
cgataattttagggtacccctatcg

SEQ ID NO: 119349 - DNA, 25 bp, SARS Virus
gataattttagtgtacccctatcgt

SEQ ID NO: 119350 - DNA, 25 bp, SARS Virus
ataattttagtggacccctatcgtg

SEQ ID NO: 119351 - DNA, 25 bp, SARS Virus
taattttagtgtgcccctatcgtga

SEQ ID NO: 119352 - DNA, 25 bp, SARS Virus
aattttagtgtagccctatcgtgat

SEQ ID NO: 119353 - DNA, 25 bp, SARS Virus
attttagtgtacgcctatcgtgatg

SEQ ID NO: 119354 - DNA, 25 bp, SARS Virus
ttttagtgtaccgctatcgtgatga

SEQ ID NO: 119355 - DNA, 25 bp, SARS Virus
tttagtgtacccgtatcgtgatgat

SEQ ID NO: 119356 - DNA, 25 bp, SARS Virus
ttagtgtaccccgatcgtgatgatt

SEQ ID NO: 119357 - DNA, 25 bp, SARS Virus
tagtgtacccctgtcgtgatgattt

SEQ ID NO: 119358 - DNA, 25 bp, SARS Virus
agtgtacccctagcgtgatgatttt

SEQ ID NO: 119359 - DNA, 25 bp, SARS Virus
gtgtacccctatggtgatgatttta

SEQ ID NO: 119360 - DNA, 25 bp, SARS Virus
tgtacccctatcgtgatgattttaa

SEQ ID NO: 119361 - DNA, 25 bp, SARS Virus
gtacccctatcgggatgattttaat

SEQ ID NO: 119362 - DNA, 25 bp, SARS Virus
tacccctatcgtgatgattttaatt

SEQ ID NO: 119363 - DNA, 25 bp, SARS Virus
acccctatcgtggtgattttaatta

SEQ ID NO: 119364 - DNA, 25 bp, SARS Virus
cccctatcgtgaggattttaattaa

SEQ ID NO: 119365 - DNA, 25 bp, SARS Virus
ccctatcgtgatgattttaattaaa

SEQ ID NO: 119366 - DNA, 25 bp, SARS Virus
cctatcgtgatggttttaattaaaa

SEQ ID NO: 119367 - DNA, 25 bp, SARS Virus
ctatcgtgatgagtttaattaaaat

SEQ ID NO: 119368 - DNA, 25 bp, SARS Virus
tatcgtgatgatgttaattaaaatg

SEQ ID NO: 119369 - DNA, 25 bp, SARS Virus
atcgtgatgattgtaattaaaatgt

SEQ ID NO: 119370 - DNA, 25 bp, SARS Virus
tcgtgatgatttgaattaaaatgtg

SEQ ID NO: 119371 - DNA, 25 bp, SARS Virus
cgtgatgattttgattaaaatgtgt

SEQ ID NO: 119372 - DNA, 25 bp, SARS Virus
gtgatgattttagttaaaatgtgta

SEQ ID NO: 119373 - DNA, 25 bp, SARS Virus
tgatgattttaagtaaaatgtgtaa

SEQ ID NO: 119374 - DNA, 25 bp, SARS Virus
gatgattttaatgaaaatgtgtaat

SEQ ID NO: 119375 - DNA, 25 bp, SARS Virus
atgattttaattgaaatgtgtaatc

SEQ ID NO: 119376 - DNA, 25 bp, SARS Virus
tgattttaattagaatgtgtaatcc

SEQ ID NO: 119377 - DNA, 25 bp, SARS Virus
gattttaattaagatgtgtaatccc

SEQ ID NO: 119378 - DNA, 25 bp, SARS Virus
attttaattaaagtgtgtaatcccg

SEQ ID NO: 119379 - DNA, 25 bp, SARS Virus
ttttaattaaaaggtgtaatcccga

SEQ ID NO: 119380 - DNA, 25 bp, SARS Virus
tttaattaaaatgtgtaatcccgag

SEQ ID NO: 119381 - DNA, 25 bp, SARS Virus
ttaattaaaatgggtaatcccgaga

SEQ ID NO: 119382 - DNA, 25 bp, SARS Virus
taattaaaatgtgtaatcccgagaa

SEQ ID NO: 119383 - DNA, 25 bp, SARS Virus
aattaaaatgtggaatcccgagaag

SEQ ID NO: 119384 - DNA, 25 bp, SARS Virus
attaaaatgtgtgatcccgagaagg

SEQ ID NO: 119385 - DNA, 25 bp, SARS Virus
ttaaaatgtgtagtcccgagaaggt

SEQ ID NO: 119386 - DNA, 25 bp, SARS Virus
taaaatgtgtaagcccgagaaggta

SEQ ID NO: 119387 - DNA, 25 bp, SARS Virus
aaaatgtgtaatgccgagaaggtat

SEQ ID NO: 119388 - DNA, 25 bp, SARS Virus
aaatgtgtaatcgcgagaaggtata

SEQ ID NO: 119389 - DNA, 25 bp, SARS Virus
aatgtgtaatccggagaaggtatat

SEQ ID NO: 119390 - DNA, 25 bp, SARS Virus
atgtgtaatcccgagaaggtatatc

SEQ ID NO: 119391 - DNA, 25 bp, SARS Virus
tgtgtaatcccgggaaggtatatcc

SEQ ID NO: 119392 - DNA, 25 bp, SARS Virus
gtgtaatcccgagaaggtatatccg

SEQ ID NO: 119393 - DNA, 25 bp, SARS Virus
tgtaatcccgaggaggtatatccgt

SEQ ID NO: 119394 - DNA, 25 bp, SARS Virus
gtaatcccgagagggtatatccgtc

SEQ ID NO: 119395 - DNA, 25 bp, SARS Virus
taatcccgagaaggtatatccgtcg

SEQ ID NO: 119396 - DNA, 25 bp, SARS Virus
aatcccgagaaggtatatccgtcga

SEQ ID NO: 119397 - DNA, 25 bp, SARS Virus
atcccgagaagggatatccgtcgag

SEQ ID NO: 119398 - DNA, 25 bp, SARS Virus
tcccgagaaggtgtatccgtcgaga

SEQ ID NO: 119399 - DNA, 25 bp, SARS Virus
cccgagaaggtagatccgtcgagag

SEQ ID NO: 119400 - DNA, 25 bp, SARS Virus
ccgagaaggtatgtccgtcgagagg

SEQ ID NO: 119401 - DNA, 25 bp, SARS Virus
cgagaaggtatagccgtcgagaggg
